United States Patent Application Publication US 2019/0290729 A1 - sequence listing, part 6

SEQ ID NO: 74321 - protein, 27 aa, Artificial Sequence
  Cyclic GFR-binding peptide
  MOD_RES (26)..(26): Xaa is C or S
SSLSILFFVGRTPKVLKVYPMVVKSXK

SEQ ID NO: 74322 - protein, 33 aa, Artificial Sequence
  Cyclic GFR-binding peptide
  MOD_RES (32)..(32): Xaa is C or S
VPTELSSLSMLFFDENEKVVLKVYPDMVVEGXG

SEQ ID NO: 74323 - protein, 29 aa, Artificial Sequence
  Cyclic GFR-binding peptide
  MOD_RES (2)..(3): Xaa is C or S
TXXVPTRLSSLSILFFDSANNVVLKVYPD

SEQ ID NO: 74324 - protein, 25 aa, Artificial Sequence
  Cyclic GFR-binding peptide
SSLSILFFIGKTPKILKVYPMIVKS

SEQ ID NO: 74325 - protein, 33 aa, Artificial Sequence
  Cyclic GFR-binding peptide
  MOD_RES (4)..(5): Xaa is C or S
SKAXXVPTKLSSLSILFFDKGVVTYLKVYPGMA

SEQ ID NO: 74326 - protein, 34 aa, Artificial Sequence
  Cyclic GFR-binding peptide
  MOD_RES (7)..(7): Xaa is C or S
HVTKPTXAPTKLSSLSVLFFDDSSNVILKVYPNM

SEQ ID NO: 74327 - protein, 37 aa, Artificial Sequence
  Cyclic GFR-binding peptide
  MOD_RES (5)..(5): Xaa is C or S
SSVKXQPSRVHHSSLSVLFFEYVRKKPKLLKVYPRLE

SEQ ID NO: 74328 - protein, 38 aa, Artificial Sequence; identical to SEQ ID NO: 25610
  Cyclic GFR-binding peptide
  MOD_RES (5)..(6): Xaa is C or S

SEQ ID NO: 74329 - protein, 33 aa, Artificial Sequence; identical to SEQ ID NO: 25609
  Cyclic GFR-binding peptide

SEQ ID NO: 74330 - protein, 38 aa, Artificial Sequence; identical to SEQ ID NO: 25611
  Cyclic GFR-binding peptide
  MOD_RES (6)..(7)..(38): Xaa is C or S

SEQ ID NO: 74331 - protein, 28 aa, Artificial Sequence
  Cyclic GFR-binding peptide
SSLSMLFFRIKPHQGQHLKVYPFLQHNK

SEQ ID NO: 74332 - protein, 26 aa, Artificial Sequence
  Cyclic GFR-binding peptide
VPTELSSLSMLFFDEYDKVVLKVYPE

SEQ ID NO: 74333 - protein, 26 aa, Artificial Sequence
  Cyclic GFR-binding peptide
TPTKMSSLSMLFFNDKQQIILKVYPG

SEQ ID NO: 74334 - protein, 35 aa, Artificial Sequence
  Cyclic GFR-binding peptide
  MOD_RES (5)..(6): Xaa is C or S
IPKAXXVPTELSSLSMLFFDENEKVVLKVYPDMVV

SEQ ID NO: 74335 - protein, 37 aa, Artificial Sequence; identical to SEQ ID NO: 25615
  Cyclic GFR-binding peptide
  MOD_RES (3)..(4)..(35)..(37): Xaa is C or S

SEQ ID NO: 74336 - protein, 32 aa, Artificial Sequence
  Cyclic GFR-binding peptide
  MOD_RES (4)..(5): Xaa is C or S
PKAXXAPTKLSSLSVLFFDSSNNVILKVYPNM

SEQ ID NO: 74337 - protein, 21 aa, Artificial Sequence
  Cyclic GFR-binding peptide
LSSLSILFFVGRKPKVLKVYP

SEQ ID NO: 74338 - protein, 23 aa, Artificial Sequence
  Cyclic GFR-binding peptide
LSSLSVLFFDSSNNVILKVYPNM

SEQ ID NO: 74339 - protein, 39 aa, Artificial Sequence; identical to SEQ ID NO: 25618
  Cyclic GFR-binding peptide
  MOD_RES (3)..(4)..(36)..(38): Xaa is C or S

SEQ ID NO: 74340 - protein, 26 aa, Artificial Sequence
  Cyclic GFR-binding peptide
  MOD_RES (1)..(1): Xaa is C or S
XAPTKLSSLSVLFFDSSNNVILKVYP

SEQ ID NO: 74341 - protein, 23 aa, Artificial Sequence
  Cyclic GFR-binding peptide
QLSSLSVLFFDDSSNVILKVYPN

SEQ ID NO: 74342 - protein, 39 aa, Artificial Sequence; identical to SEQ ID NO: 25620
  Cyclic GFR-binding peptide
  MOD_RES (6)..(7)..(38): Xaa is C or S

SEQ ID NO: 74343 - protein, 31 aa, Artificial Sequence
  Cyclic GFR-binding peptide
  MOD_RES (28)..(30): Xaa is C or S
LSSLSILFFDAANNVVLKVYPDMVVEAXGXR

SEQ ID NO: 74344 - protein, 40 aa, Artificial Sequence
  Cyclic GFR-binding peptide
  MOD_RES (6)..(7)..(39): Xaa is C or S
TVPKPXXAPTQLSSLSVLFFDDSSNVILKVYPNMVVRAXG

SEQ ID NO: 74345 - protein, 30 aa, Artificial Sequence
  Cyclic GFR-binding peptide
  MOD_RES (28)..(30): Xaa is C or S
LSSLSILFFDSANNVVLKVYPDMVVESXGX

SEQ ID NO: 74346 - protein, 25 aa, Artificial Sequence
  Cyclic GFR-binding peptide
LSSLSILFFDSANNVVLKVYPDMVV

SEQ ID NO: 74347 - protein, 31 aa, Artificial Sequence
  Cyclic GFR-binding peptide
PSRVHHSSLSVLFFEYVRKKPKLLKVYPRLE

SEQ ID NO: 74348 - protein, 33 aa, Artificial Sequence
  Cyclic GFR-binding peptide
  MOD_RES (1)..(1): Xaa is C or S
XQPSRVHHSSLSVLFFEYVRKKPKLLKVYPRLE

SEQ ID NO: 74349 - protein, 23 aa, Artificial Sequence
  Cyclic GFR-binding peptide
SSLSILFFIGKTPKILKVYPMIV

SEQ ID NO: 74350 - protein, 25 aa, Artificial Sequence
  Cyclic GFR-binding peptide
VPQDLSSLSILFFVGRTPKVLKVYP

SEQ ID NO: 74351 - protein, 29 aa, Artificial Sequence
  Cyclic GFR-binding peptide
APTKLSSLSVLFFDSSNNVILKVYPNMVV

SEQ ID NO: 74352 - protein, 35 aa, Artificial Sequence; identical to SEQ ID NO: 25624
  Cyclic GFR-binding peptide
  MOD_RES (1)..(33)..(35): Xaa is C or S

SEQ ID NO: 74353 - protein, 32 aa, Artificial Sequence; identical to SEQ ID NO: 25625
  Cyclic GFR-binding peptide

SEQ ID NO: 74354 - protein, 29 aa, Artificial Sequence
  Cyclic GFR-binding peptide
TELSSLSMLFFDENEKVVLKVYPDMVVEG

SEQ ID NO: 74355 - protein, 23 aa, Artificial Sequence
  Cyclic GFR-binding peptide
LSSLSILFFDAANNVVLKVYPDM

SEQ ID NO: 74356 - protein, 27 aa, Artificial Sequence
  Cyclic GFR-binding peptide
  MOD_RES (27)..(27): Xaa is C or S
SSLSILFFDKGVVTYLKVYPGMAVSEX

SEQ ID NO: 74357 - protein, 24 aa, Artificial Sequence
  Cyclic GFR-binding peptide
LSSLSILFFVGRTPKVLKVYPMVV

SEQ ID NO: 74358 - protein, 37 aa, Artificial Sequence; identical to SEQ ID NO: 25626
  Cyclic GFR-binding peptide
  MOD_RES (5)..(5): Xaa is C or S

SEQ ID NO: 74359 - protein, 30 aa, Artificial Sequence
  Cyclic GFR-binding peptide
  MOD_RES (28)..(30): Xaa is C or S
ALSSLSILFFVGRKPKVLKVYPMIVRSXKX

SEQ ID NO: 74360 - protein, 41 aa, Artificial Sequence; identical to SEQ ID NO: 25627
  Cyclic GFR-binding peptide
  MOD_RES (7)..(39)..(41): Xaa is C or S

SEQ ID NO: 74361 - protein, 34 aa, Artificial Sequence
  Cyclic GFR-binding peptide
  MOD_RES (4)..(5): Xaa is C or S
GKAXXVPTKLSSLSVLFFDDMGVPTLKVYPEGMS

SEQ ID NO: 74362 - protein, 28 aa, Artificial Sequence
  Cyclic GFR-binding peptide
PTELSSLSMLFFDEYDKVVLKVYPEMVV

SEQ ID NO: 74363 - protein, 41 aa, Artificial Sequence; identical to SEQ ID NO: 25628
  Cyclic GFR-binding peptide
  MOD_RES (6)..(7)..(39)..(41): Xaa is C or S

SEQ ID NO: 74364 - protein, 28 aa, Artificial Sequence
  Cyclic GFR-binding peptide
  MOD_RES (1)..(2): Xaa is C or S
XXVPTRLSSLSILFFDSANNVVLKVYPD

SEQ ID NO: 74365 - protein, 36 aa, Artificial Sequence; identical to SEQ ID NO: 25630
  Cyclic GFR-binding peptide
  MOD_RES (2)..(3)..(35): Xaa is C or S

SEQ ID NO: 74366 - protein, 34 aa, Artificial Sequence; identical to SEQ ID NO: 25634
  Cyclic GFR-binding peptide
  MOD_RES (3)..(4): Xaa is C or S

SEQ ID NO: 74367 - protein, 31 aa, Artificial Sequence
  Cyclic GFR-binding peptide
  MOD_RES (2)..(3): Xaa is C or S
PXXAPTQLSSLSVLFFDDSSNVILKVYPNMV

SEQ ID NO: 74368 - protein, 30 aa, Artificial Sequence
  Cyclic GFR-binding peptide
  MOD_RES (30)..(30): Xaa is C or S
SQDLSSLSILFFIGKTPKILKVYPMIVKSX

SEQ ID NO: 74369 - protein, 37 aa, Artificial Sequence
  Cyclic GFR-binding peptide
  MOD_RES (6)..(7): Xaa is C or S
KIPKAXXVPTELSSLSMLFFDENEKVVLKVYPDMVVE

SEQ ID NO: 74370 - protein, 30 aa, Artificial Sequence
  Cyclic GFR-binding peptide
  MOD_RES (2)..(3): Xaa is C or S
PXXAPTKLSSLSVLFFDDSSNVILKVYPNM

SEQ ID NO: 74371 - protein, 36 aa, Artificial Sequence; identical to SEQ ID NO: 25638
  Cyclic GFR-binding peptide
  MOD_RES (2)..(3)..(35): Xaa is C or S

SEQ ID NO: 74372 - protein, 32 aa, Artificial Sequence
  Cyclic GFR-binding peptide
  MOD_RES (5)..(6): Xaa is C or S
SAGPXXTPTKMSSLSMLFFNDKQQIILKVYPG

SEQ ID NO: 74373 - protein, 41 aa, Artificial Sequence; identical to SEQ ID NO: 25639
  Cyclic GFR-binding peptide
  MOD_RES (5)..(39)..(41): Xaa is C or S

SEQ ID NO: 74374 - protein, 35 aa, Artificial Sequence
  Cyclic GFR-binding peptide
  MOD_RES (5)..(6): Xaa is C or S
VPKPXXAPTQLSSLSVLFFDDSSNVILKVYPNMVV

SEQ ID NO: 74375 - protein, 22 aa, Artificial Sequence
  Cyclic GFR-binding peptide
LSSLSILFFVGRTPKVLKVYPM

SEQ ID NO: 74376 - protein, 27 aa, Artificial Sequence
  Cyclic GFR-binding peptide
TKLSSLSVLFFDDMGVPTLKVYPEGMS

SEQ ID NO: 74377 - protein, 23 aa, Artificial Sequence
  Cyclic GFR-binding peptide
TELSSLSMLFFDEYDKVVLKVYP

SEQ ID NO: 74378 - protein, 27 aa, Artificial Sequence
  Cyclic GFR-binding peptide
  MOD_RES (1)..(1): Xaa is C or S
XVPTRLSSLSILFFDSANNVVLKVYPD

SEQ ID NO: 74379 - protein, 24 aa, Artificial Sequence
  Cyclic GFR-binding peptide
ARLSSLSILFFDAANNVVLKVYPD

SEQ ID NO: 74380 - protein, 27 aa, Artificial Sequence
  Cyclic GFR-binding peptide
PTELSSLSMLFFDENEKVVLKVYPDMV

SEQ ID NO: 74381 - protein, 28 aa, Artificial Sequence
  Cyclic GFR-binding peptide
  MOD_RES (28)..(28): Xaa is C or S
DLSSLSILFFVGRTPKVLKVYPMVVKSX

SEQ ID NO: 74382 - protein, 33 aa, Artificial Sequence; identical to SEQ ID NO: 25644
  Cyclic GFR-binding peptide
  MOD_RES (1)..(2)..(33): Xaa is C or S

SEQ ID NO: 74383 - protein, 33 aa, Artificial Sequence
  Cyclic GFR-binding peptide
  MOD_RES (32)..(32): Xaa is C or S
TEESSLSMLFFRIKPHQGQHLKVYPFLQHNKXE

SEQ ID NO: 74384 - protein, 42 aa, Artificial Sequence; identical to SEQ ID NO: 25645
  Cyclic GFR-binding peptide
  MOD_RES (6)..(7)..(39)..(41): Xaa is C or S

SEQ ID NO: 74385 - protein, 40 aa, Artificial Sequence; identical to SEQ ID NO: 25646
  Cyclic GFR-binding peptide
  MOD_RES (7)..(39): Xaa is C or S

SEQ ID NO: 74386 - protein, 34 aa, Artificial Sequence
  Cyclic GFR-binding peptide
  MOD_RES (2)..(3): Xaa is C or S
AXXVPTKLSSLSVLFFDDMGVPTLKVYPEGMSVA

SEQ ID NO: 74387 - protein, 34 aa, Artificial Sequence
  Cyclic GFR-binding peptide
  MOD_RES (4)..(5): Xaa is C or S
AAPXXVPQALSSLSILFFVGRKPKVLKVYPMIVR

SEQ ID NO: 74388 - protein, 36 aa, Artificial Sequence; identical to SEQ ID NO: 25648
  Cyclic GFR-binding peptide
  MOD_RES (1)..(2)..(34)..(36): Xaa is C or S

SEQ ID NO: 74389 - protein, 38 aa, Artificial Sequence; identical to SEQ ID NO: 25649
  Cyclic GFR-binding peptide
  MOD_RES (5)..(6)..(38): Xaa is C or S

SEQ ID NO: 74390 - protein, 29 aa, Artificial Sequence
  Cyclic GFR-binding peptide
  MOD_RES (29)..(29): Xaa is C or S
QLSSLSVLFFDDSSNVILKVYPNMVVRAX

SEQ ID NO: 74391 - protein, 26 aa, Artificial Sequence
  Cyclic GFR-binding peptide
PTKLSSLSVLFFDSSNNVILKVYPNM

SEQ ID NO: 74392 - protein, 28 aa, Artificial Sequence
  Cyclic GFR-binding peptide
  MOD_RES (2)..(3): Xaa is C or S
PXXAPTQLSSLSVLFFDDSSNVILKVYP

SEQ ID NO: 74393 - protein, 26 aa, Artificial Sequence
  Cyclic GFR-binding peptide
LSSLSILFFDAANNVVLKVYPDMVVE

SEQ ID NO: 74394 - protein, 40 aa, Artificial Sequence; identical to SEQ ID NO: 25651
  Cyclic GFR-binding peptide
  MOD_RES (6)..(7)..(39): Xaa is C or S

SEQ ID NO: 74395 - protein, 38 aa, Artificial Sequence
  Cyclic GFR-binding peptide
  MOD_RES (5)..(5): Xaa is C or S
SSVKXQPSRVHHSSLSVLFFEYVRKKPKLLKVYPRLEE

SEQ ID NO: 74396 - protein, 41 aa, Artificial Sequence; identical to SEQ ID NO: 25653
  Cyclic GFR-binding peptide
  MOD_RES (2)..(39)..(41): Xaa is C or S

SEQ ID NO: 74397 - protein, 23 aa, Artificial Sequence
  Cyclic GFR-binding peptide
KMSSLSMLFFNDKQQIILKVYPG

SEQ ID NO: 74398 - protein, 40 aa, Artificial Sequence; identical to SEQ ID NO: 25654
  Cyclic GFR-binding peptide
  MOD_RES (6)..(7)..(39): Xaa is C or S

SEQ ID NO: 74399 - protein, 33 aa, Artificial Sequence
  Cyclic GFR-binding peptide
  MOD_RES (4)..(4): Xaa is C or S
KPTXAPTKLSSLSVLFFDDSSNVILKVYPNMVV

SEQ ID NO: 74400 - protein, 35 aa, Artificial Sequence
  Cyclic GFR-binding peptide
  MOD_RES (6)..(7): Xaa is C or S
AAPASXXVPARLSSLSILFFDAANNVVLKVYPDMV

SEQ ID NO: 74401 - protein, 29 aa, Artificial Sequence
  Cyclic GFR-binding peptide
  MOD_RES (29)..(29): Xaa is C or S
ELSSLSMLFFDEYDKVVLKVYPEMVVEGX

SEQ ID NO: 74402 - protein, 26 aa, Artificial Sequence
  Cyclic GFR-binding peptide
KLSSLSVLFFDSSNNVILKVYPNMVV

SEQ ID NO: 74403 - protein, 29 aa, Artificial Sequence
  Cyclic GFR-binding peptide
VPARLSSLSILFFDAANNVVLKVYPDMVV

SEQ ID NO: 74404 - protein, 33 aa, Artificial Sequence
  Cyclic GFR-binding peptide
  MOD_RES (30)..(32): Xaa is C or S
TELSSLSMLFFDENEKVVLKVYPDMVVEGXGXR

SEQ ID NO: 74405 - protein, 31 aa, Artificial Sequence
  Cyclic GFR-binding peptide
  MOD_RES (28)..(30): Xaa is C or S
LSSLSVLFFDDSSNVILKVYPNMVVRSXGXH

SEQ ID NO: 74406 - protein, 41 aa, Artificial Sequence; identical to SEQ ID NO: 25657
  Cyclic GFR-binding peptide
  MOD_RES (5)..(5): Xaa is C or S

SEQ ID NO: 74407 - protein, 31 aa, Artificial Sequence
  Cyclic GFR-binding peptide
  MOD_RES (5)..(5): Xaa is C or S
TKPTXAPTKLSSLSVLFFDDSSNVILKVYPN

SEQ ID NO: 74408 - protein, 44 aa, Artificial Sequence; identical to SEQ ID NO: 25660
  Cyclic GFR-binding peptide
  MOD_RES (4)..(41)..(43): Xaa is C or S

SEQ ID NO: 74409 - protein, 42 aa, Artificial Sequence; identical to SEQ ID NO: 25662
  Cyclic GFR-binding peptide
  MOD_RES (6)..(7)..(39)..(41): Xaa is C or S

SEQ ID NO: 74410 - protein, 34 aa, Artificial Sequence
  Cyclic GFR-binding peptide
  MOD_RES (4)..(5): Xaa is C or S
PPTXXVPTRLSSLSILFFDSANNVVLKVYPDMVV

SEQ ID NO: 74411 - protein, 26 aa, Artificial Sequence
  Cyclic GFR-binding peptide
KLSSLSVLFFDDMGVPTLKVYPEGMS

SEQ ID NO: 74412 - protein, 40 aa, Artificial Sequence; identical to SEQ ID NO: 25664
  Cyclic GFR-binding peptide
  MOD_RES (6)..(7)..(39): Xaa is C or S

SEQ ID NO: 74413 - protein, 28 aa, Artificial Sequence
  Cyclic GFR-binding peptide
  MOD_RES (1)..(1): Xaa is C or S
XTPTKMSSLSMLFFNDKQQIILKVYPGM

SEQ ID NO: 74414 - protein, 40 aa, Artificial Sequence; identical to SEQ ID NO: 25665
  Cyclic GFR-binding peptide
  MOD_RES (5)..(6)..(37)..(39): Xaa is C or S

SEQ ID NO: 74415 - protein, 37 aa, Artificial Sequence; identical to SEQ ID NO: 25666
  Cyclic GFR-binding peptide
  MOD_RES (1)..(2)..(34)..(36): Xaa is C or S

SEQ ID NO: 74416 - protein, 34 aa, Artificial Sequence
  Cyclic GFR-binding peptide
  MOD_RES (3)..(4): Xaa is C or S
KAXXVPTKLSSLSVLFFDDMGVPTLKVYPEGMSV

SEQ ID NO: 74417 - protein, 31 aa, Artificial Sequence
  Cyclic GFR-binding peptide
  MOD_RES (1)..(2): Xaa is C or S
XXVSQDLSSLSILFFIGKTPKILKVYPMIVK

SEQ ID NO: 74418 - protein, 29 aa, Artificial Sequence
  Cyclic GFR-binding peptide
PARLSSLSILFFDAANNVVLKVYPDMVVE

SEQ ID NO: 74419 - protein, 27 aa, Artificial Sequence
  Cyclic GFR-binding peptide
  MOD_RES (2)..(2): Xaa is C or S
TXAPTKLSSLSVLFFDDSSNVILKVYP

SEQ ID NO: 74420 - protein, 37 aa, Artificial Sequence; identical to SEQ ID NO: 25667
  Cyclic GFR-binding peptide
  MOD_RES (2)..(2): Xaa is C or S

SEQ ID NO: 74421 - protein, 24 aa, Artificial Sequence
  Cyclic GFR-binding peptide
QDLSSLSILFFIGKTPKILKVYPM

SEQ ID NO: 74422 - protein, 34 aa, Artificial Sequence; identical to SEQ ID NO: 25672
  Cyclic GFR-binding peptide
  MOD_RES (2)..(3): Xaa is C or S

SEQ ID NO: 74423 - protein, 30 aa, Artificial Sequence
  Cyclic GFR-binding peptide
  MOD_RES (29)..(29): Xaa is C or S
QLSSLSVLFFDDSSNVILKVYPNMVVRAXG

SEQ ID NO: 74424 - protein, 27 aa, Artificial Sequence
  Cyclic GFR-binding peptide
RLSSLSILFFDSANNVVLKVYPDMVVE

SEQ ID NO: 74425 - protein, 33 aa, Artificial Sequence
  Cyclic GFR-binding peptide
  MOD_RES (5)..(6): Xaa is C or S
TPPTXXVPTRLSSLSILFFDSANNVVLKVYPDM

SEQ ID NO: 74426 - protein, 37 aa, Artificial Sequence; identical to SEQ ID NO: 25674
  Cyclic GFR-binding peptide
  MOD_RES (2)..(3)..(35)..(37): Xaa is C or S

SEQ ID NO: 74427 - protein, 35 aa, Artificial Sequence; identical to SEQ ID NO: 25675
  Cyclic GFR-binding peptide

SEQ ID NO: 74428 - protein, 42 aa, Artificial Sequence; identical to SEQ ID NO: 25676
  Cyclic GFR-binding peptide
  MOD_RES (6)..(7)..(39)..(41): Xaa is C or S

SEQ ID NO: 74429 - protein, 27 aa, Artificial Sequence
  Cyclic GFR-binding peptide
APVKTSSLSMLFFDNGRVLLLKVYPMI

SEQ ID NO: 74430 - protein, 32 aa, Artificial Sequence
  Cyclic GFR-binding peptide
  MOD_RES (6)..(7): Xaa is C or S
AVPKAXXAPTKLSSLSVLFFDSSNNVILKVYP

SEQ ID NO: 74431 - protein, 21 aa, Artificial Sequence
  Cyclic GFR-binding peptide
SSLSILFFIGKTPKILKVYPM

SEQ ID NO: 74432 - protein, 24 aa, Artificial Sequence
  Cyclic GFR-binding peptide
ESSLSMLFFRIKPHQGQHLKVYPF

SEQ ID NO: 74433 - protein, 37 aa, Artificial Sequence; identical to SEQ ID NO: 25681
  Cyclic GFR-binding peptide
  MOD_RES (5)..(6): Xaa is C or S

SEQ ID NO: 74434 - protein, 34 aa, Artificial Sequence
  Cyclic GFR-binding peptide
  MOD_RES (32)..(34): Xaa is C or S
HHSSLSVLFFEYVRKKPKLLKVYPRLEEHLEXAX

SEQ ID NO: 74435 - protein, 25 aa, Artificial Sequence
  Cyclic GFR-binding peptide
VPTKLSSLSILFFDKGVVTYLKVYP

SEQ ID NO: 74436 - protein, 32 aa, Artificial Sequence
  Cyclic GFR-binding peptide
  MOD_RES (6)..(7): Xaa is C or S
ASASPXXVSQDLSSLSILFFIGKTPKILKVYP

SEQ ID NO: 74437 - protein, 29 aa, Artificial Sequence
  Cyclic GFR-binding peptide
  MOD_RES (29)..(29): Xaa is C or S
ELSSLSMLFFDENEKVVLKVYPDMVVEGX

SEQ ID NO: 74438 - protein, 34 aa, Artificial Sequence
  Cyclic GFR-binding peptide
  MOD_RES (5)..(6): Xaa is C or S
SASPXXVPQDLSSLSILFFVGRTPKVLKVYPMVV

SEQ ID NO: 74439 - protein, 24 aa, Artificial Sequence
  Cyclic GFR-binding peptide
KLSSLSILFFDKGVVTYLKVYPGM

SEQ ID NO: 74440 - protein, 32 aa, Artificial Sequence
  Cyclic GFR-binding peptide
  MOD_RES (2)..(3): Xaa is C or S
AXXVPTKLSSLSVLFFDDMGVPTLKVYPEGMS

SEQ ID NO: 74441 - protein, 32 aa, Artificial Sequence
  Cyclic GFR-binding peptide
  MOD_RES (3)..(3): Xaa is C or S
VKXQPSRVHHSSLSVLFFEYVRKKPKLLKVYP

SEQ ID NO: 74442 - protein, 23 aa, Artificial Sequence
  Cyclic GFR-binding peptide
SSLSMLFFNDKQQIILKVYPGMV

SEQ ID NO: 74443 - protein, 39 aa, Artificial Sequence; identical to SEQ ID NO: 25684
  Cyclic GFR-binding peptide
  MOD_RES (4)..(5)..(38): Xaa is C or S

SEQ ID NO: 74444 - protein, 26 aa, Artificial Sequence
  Cyclic GFR-binding peptide
VKTSSLSMLFFDNGRVLLLKVYPMIV

SEQ ID NO: 74445 - protein, 32 aa, Artificial Sequence
  Cyclic GFR-binding peptide
  MOD_RES (2)..(3): Xaa is C or S
PXXVPQALSSLSILFFVGRKPKVLKVYPMIVR

SEQ ID NO: 74446 - protein, 26 aa, Artificial Sequence
  Cyclic GFR-binding peptide
SQDLSSLSILFFIGKTPKILKVYPMI

SEQ ID NO: 74447 - protein, 24 aa, Artificial Sequence
  Cyclic GFR-binding peptide
QALSSLSILFFVGRKPKVLKVYPM

SEQ ID NO: 74448 - protein, 37 aa, Artificial Sequence; identical to SEQ ID NO: 25687
  Cyclic GFR-binding peptide
  MOD_RES (1)..(2)..(35)..(37): Xaa is C or S

SEQ ID NO: 74449 - protein, 28 aa, Artificial Sequence
  Cyclic GFR-binding peptide
  MOD_RES (2)..(3): Xaa is C or S
SXXVPARLSSLSILFFDAANNVVLKVYP

SEQ ID NO: 74450 - protein, 32 aa, Artificial Sequence; identical to SEQ ID NO: 25690
  Cyclic GFR-binding peptide
  MOD_RES (1)..(2): Xaa is C or S

SEQ ID NO: 74451 - protein, 33 aa, Artificial Sequence
  Cyclic GFR-binding peptide
  MOD_RES (30)..(32): Xaa is C or S
TKLSSLSILFFDKGVVTYLKVYPGMAVSEXGXR

SEQ ID NO: 74452 - protein, 36 aa, Artificial Sequence; identical to SEQ ID NO: 25692
  Cyclic GFR-binding peptide
  MOD_RES (5)..(6): Xaa is C or S

SEQ ID NO: 74453 - protein, 38 aa, Artificial Sequence; identical to SEQ ID NO: 25695
  Cyclic GFR-binding peptide
  MOD_RES (6)..(7): Xaa is C or S

SEQ ID NO: 74454 - protein, 23 aa, Artificial Sequence
  Cyclic GFR-binding peptide
LSSLSILFFVGRTPKVLKVYPMV

SEQ ID NO: 74455 - protein, 27 aa, Artificial Sequence
  Cyclic GFR-binding peptide
EESSLSMLFFRIKPHQGQHLKVYPFLQ

SEQ ID NO: 74456 - protein, 26 aa, Artificial Sequence
  Cyclic GFR-binding peptide
  MOD_RES (26)..(26): Xaa is C or S
SSLSILFFIGKTPKILKVYPMIVKSX

SEQ ID NO: 74457 - protein, 40 aa, Artificial Sequence; identical to SEQ ID NO: 25699
  Cyclic GFR-binding peptide
  MOD_RES (4)..(5)..(37)..(39): Xaa is C or S

SEQ ID NO: 74458 - protein, 32 aa, Artificial Sequence
  Cyclic GFR-binding peptide
  MOD_RES (29)..(31): Xaa is C or S
QLSSLSVLFFDDSSNVILKVYPNMVVRAXGXH

SEQ ID NO: 74459 - protein, 35 aa, Artificial Sequence; identical to SEQ ID NO: 25701
  Cyclic GFR-binding peptide
  MOD_RES (2)..(3)..(35): Xaa is C or S

SEQ ID NO: 74460 - protein, 25 aa, Artificial Sequence
  Cyclic GFR-binding peptide
EESSLSMLFFRIKPHQGQHLKVYPF

SEQ ID NO: 74461 - protein, 38 aa, Artificial Sequence; identical to SEQ ID NO: 25703
  Cyclic GFR-binding peptide
  MOD_RES (6)..(6): Xaa is C or S

SEQ ID NO: 74462 - protein, 40 aa, Artificial Sequence; identical to SEQ ID NO: 25705
  Cyclic GFR-binding peptide
  MOD_RES (5)..(6)..(38)..(40): Xaa is C or S

SEQ ID NO: 74463 - protein, 36 aa, Artificial Sequence; identical to SEQ ID NO: 25706
  Cyclic GFR-binding peptide
  MOD_RES (5)..(6): Xaa is C or S

SEQ ID NO: 74464 - protein, 36 aa, Artificial Sequence
  Cyclic GFR-binding peptide
  MOD_RES (6)..(7): Xaa is C or S
AAPASXXVPARLSSLSILFFDAANNVVLKVYPDMVV

SEQ ID NO: 74465 - protein, 25 aa, Artificial Sequence
  Cyclic GFR-binding peptide
VPQALSSLSILFFVGRKPKVLKVYP

SEQ ID NO: 74466 - protein, 32 aa, Artificial Sequence
  Cyclic GFR-binding peptide
  MOD_RES (2)..(3): Xaa is C or S
TXXVPTRLSSLSILFFDSANNVVLKVYPDMVV

SEQ ID NO: 74467 - protein, 32 aa, Artificial Sequence
  Cyclic GFR-binding peptide
  MOD_RES (30)..(32): Xaa is C or S
PQALSSLSILFFVGRKPKVLKVYPMIVRSXKX

SEQ ID NO: 74468 - protein, 31 aa, Artificial Sequence; identical to SEQ ID NO: 25707
  Cyclic GFR-binding peptide
  MOD_RES (1)..(1): Xaa is C or S

SEQ ID NO: 74469 - protein, 37 aa, Artificial Sequence; identical to SEQ ID NO: 25708
  Cyclic GFR-binding peptide
  MOD_RES (3)..(4)..(36): Xaa is C or S

SEQ ID NO: 74470 - protein, 29 aa, Artificial Sequence
  Cyclic GFR-binding peptide
  MOD_RES (28)..(28): Xaa is C or S
DLSSLSILFFIGKTPKILKVYPMIVKSXK

SEQ ID NO: 74471 - protein, 29 aa, Artificial Sequence
  Cyclic GFR-binding peptide
  MOD_RES (1)..(2): Xaa is C or S
XXVPTKLSSLSVLFFDDMGVPTLKVYPEG

SEQ ID NO: 74472 - protein, 30 aa, Artificial Sequence
  Cyclic GFR-binding peptide
  MOD_RES (30)..(30): Xaa is C or S
SSLSVLFFEYVRKKPKLLKVYPRLEEHLEX

SEQ ID NO: 74473 - protein, 35 aa, Artificial Sequence; identical to SEQ ID NO: 25710
  Cyclic GFR-binding peptide
  MOD_RES (3)..(4): Xaa is C or S

SEQ ID NO: 74474 - protein, 39 aa, Artificial Sequence; identical to SEQ ID NO: 25709
  Cyclic GFR-binding peptide
  MOD_RES (4)..(5)..(37)..(39): Xaa is C or S

SEQ ID NO: 74475 - protein, 32 aa, Artificial Sequence
  Cyclic GFR-binding peptide
  MOD_RES (4)..(5): Xaa is C or S
PKAXXVPTELSSLSMLFFDEYDKVVLKVYPEM

SEQ ID NO: 74476 - protein, 35 aa, Artificial Sequence
  Cyclic GFR-binding peptide
  MOD_RES (5)..(6): Xaa is C or S
VPSTXXAPVKTSSLSMLFFDNGRVLLLKVYPMIVE

SEQ ID NO: 74477 - protein, 20 aa, Artificial Sequence
  Cyclic GFR-binding peptide
SSLSILFFDAANNVVLKVYP

SEQ ID NO: 74478 - protein, 42 aa, Artificial Sequence; identical to SEQ ID NO: 25711
  Cyclic GFR-binding peptide
  MOD_RES (6)..(7)..(40)..(42): Xaa is C or S

SEQ ID NO: 74479 - protein, 31 aa, Artificial Sequence
  Cyclic GFR-binding peptide
  MOD_RES (4)..(5): Xaa is C or S
SKAXXVPTKLSSLSILFFDKGVVTYLKVYPG

SEQ ID NO: 74480 - protein, 28 aa, Artificial Sequence
  Cyclic GFR-binding peptide
  MOD_RES (1)..(1): Xaa is C or S
XAPTKLSSLSVLFFDSSNNVILKVYPNM

SEQ ID NO: 74481 - protein, 31 aa, Artificial Sequence
  Cyclic GFR-binding peptide
  MOD_RES (5)..(6): Xaa is C or S
VPKAXXAPTKLSSLSVLFFDSSNNVILKVYP

SEQ ID NO: 74482 - protein, 33 aa, Artificial Sequence
  Cyclic GFR-binding peptide
  MOD_RES (6)..(7): Xaa is C or S
HVPKPXXAPTKLSSLSVLFFDDSSNVILKVYPN

SEQ ID NO: 74483 - protein, 35 aa, Artificial Sequence; identical to SEQ ID NO: 25713
  Cyclic GFR-binding peptide
  MOD_RES (1)..(2)..(34): Xaa is C or S

SEQ ID NO: 74484 - protein, 32 aa, Artificial Sequence
  Cyclic GFR-binding peptide
RVHHSSLSVLFFEYVRKKPKLLKVYPRLEEHL

SEQ ID NO: 74485 - protein, 38 aa, Artificial Sequence; identical to SEQ ID NO: 25715
  Cyclic GFR-binding peptide
  MOD_RES (6)..(7): Xaa is C or S

SEQ ID NO: 74486 - protein, 33 aa, Artificial Sequence; identical to SEQ ID NO: 25717
  Cyclic GFR-binding peptide
  MOD_RES (2)..(3): Xaa is C or S

SEQ ID NO: 74487 - protein, 36 aa, Artificial Sequence; identical to SEQ ID NO: 25719
  Cyclic GFR-binding peptide
  MOD_RES (1)..(33)..(35): Xaa is C or S

SEQ ID NO: 74488 - protein, 30 aa, Artificial Sequence
  Cyclic GFR-binding peptide
  MOD_RES (29)..(29): Xaa is C or S
ELSSLSMLFFDEYDKVVLKVYPEMVVEGXG

SEQ ID NO: 74489 - protein, 39 aa, Artificial Sequence; identical to SEQ ID NO: 25721
  Cyclic GFR-binding peptide
  MOD_RES (6)..(7)..(39): Xaa is C or S

SEQ ID NO: 74490 - protein, 37 aa, Artificial Sequence; identical to SEQ ID NO: 25722
  Cyclic GFR-binding peptide
  MOD_RES (3)..(4)..(36): Xaa is C or S

SEQ ID NO: 74491 - protein, 29 aa, Artificial Sequence
  Cyclic GFR-binding peptide
  MOD_RES (28)..(28): Xaa is C or S
LSSLSVLFFDSSNNVILKVYPNMVVKAXG

SEQ ID NO: 74492 - protein, 29 aa, Artificial Sequence
  Cyclic GFR-binding peptide
PTKLSSLSILFFDKGVVTYLKVYPGMAVS

SEQ ID NO: 74493 - protein, 20 aa, Artificial Sequence
  Cyclic GFR-binding peptide
SSLSILFFVGRTPKVLKVYP

SEQ ID NO: 74494 - protein, 30 aa, Artificial Sequence; identical to SEQ ID NO: 759
  Cyclic GFR-binding peptide

SEQ ID NO: 74495 - protein, 31 aa, Artificial Sequence
  Cyclic GFR-binding peptide
  MOD_RES (31)..(31): Xaa is C or S
PTKLSSLSVLFFDDSSNVILKVYPNMVVRSX

SEQ ID NO: 74496 - protein, 21 aa, Artificial Sequence
  Cyclic GFR-binding peptide
SSLSMLFFDEYDKVVLKVYPE

SEQ ID NO: 74497 - protein, 36 aa, Artificial Sequence; identical to SEQ ID NO: 25725
  Cyclic GFR-binding peptide
  MOD_RES (1)..(33)..(35): Xaa is C or S

SEQ ID NO: 74498 - protein, 34 aa, Artificial Sequence
  Cyclic GFR-binding peptide
  MOD_RES (33)..(33): Xaa is C or S
PTEESSLSMLFFRIKPHQGQHLKVYPFLQHNKXE

SEQ ID NO: 74499 - protein, 29 aa, Artificial Sequence
  Cyclic GFR-binding peptide
  MOD_RES (3)..(4): Xaa is C or S
KAXXVPTELSSLSMLFFDEYDKVVLKVYP

SEQ ID NO: 74500 - protein, 34 aa, Artificial Sequence
  Cyclic GFR-binding peptide
  MOD_RES (6)..(7): Xaa is C or S
YVPKPXXAPTKLSSLSVLFFDDSSNVILKVYPNM

SEQ ID NO: 74501 - protein, 35 aa, Artificial Sequence
  Cyclic GFR-binding peptide
  MOD_RES (5)..(5): Xaa is C or S
SSVKXQPSRVHHSSLSVLFFEYVRKKPKLLKVYPR

SEQ ID NO: 74502 - protein, 31 aa, Artificial Sequence
  Cyclic GFR-binding peptide
  MOD_RES (2)..(3): Xaa is C or S
AXXAPTKLSSLSVLFFDSSNNVILKVYPNMV

SEQ ID NO: 74503 - protein, 32 aa, Artificial Sequence
  Cyclic GFR-binding peptide
  MOD_RES (5)..(6): Xaa is C or S
VGKAXXVPTKLSSLSVLFFDDMGVPTLKVYPE

SEQ ID NO: 74504 - protein, 27 aa, Artificial Sequence
  Cyclic GFR-binding peptide
SSLSMLFFRIKPHQGQHLKVYPFLQHN

SEQ ID NO: 74505 - protein, 33 aa, Artificial Sequence
  Cyclic GFR-binding peptide
  MOD_RES (30)..(32): Xaa is C or S
PVKTSSLSMLFFDNGRVLLLKVYPMIVEEXGXL

SEQ ID NO: 74506 - protein, 31 aa, Artificial Sequence
  Cyclic GFR-binding peptide
  MOD_RES (30)..(30): Xaa is C or S
ESSLSMLFFRIKPHQGQHLKVYPFLQHNKXE

SEQ ID NO: 74507 - protein, 35 aa, Artificial Sequence
  Cyclic GFR-binding peptide
  MOD_RES (6)..(7): Xaa is C or S
SIPKAXXVPTELSSLSMLFFDEYDKVVLKVYPEMV

SEQ ID NO: 74508 - protein, 26 aa, Artificial Sequence
  Cyclic GFR-binding peptide
TKMSSLSMLFFNDKQQIILKVYPGMV

SEQ ID NO: 74509 - protein, 28 aa, Artificial Sequence
  Cyclic GFR-binding peptide
KLSSLSVLFFDDMGVPTLKVYPEGMSVA

SEQ ID NO: 74510 - protein, 30 aa, Artificial Sequence
  Cyclic GFR-binding peptide
  MOD_RES (1)..(2): Xaa is C or S
XXVPTKLSSLSILFFDKGVVTYLKVYPGMA

SEQ ID NO: 74511 - protein, 41 aa, Artificial Sequence; identical to SEQ ID NO: 25729
  Cyclic GFR-binding peptide
  MOD_RES (4)..(38)..(40): Xaa is C or S

SEQ ID NO: 74512 - protein, 32 aa, Artificial Sequence
  Cyclic GFR-binding peptide
  MOD_RES (29)..(31): Xaa is C or S
VKTSSLSMLFFDNGRVLLLKVYPMIVEEXGXL

SEQ ID NO: 74513 - protein, 25 aa, Artificial Sequence
  Cyclic GFR-binding peptide
LSSLSMLFFDENEKVVLKVYPDMVV

SEQ ID NO: 74514 - protein, 27 aa, Artificial Sequence
  Cyclic GFR-binding peptide
TPTKMSSLSMLFFNDKQQIILKVYPGM

SEQ ID NO: 74515 - protein, 38 aa, Artificial Sequence; identical to SEQ ID NO: 25730
  Cyclic GFR-binding peptide
  MOD_RES (3)..(4)..(36)..(38): Xaa is C or S

SEQ ID NO: 74516 - protein, 37 aa, Artificial Sequence; identical to SEQ ID NO: 25731
  Cyclic GFR-binding peptide
  MOD_RES (5)..(6): Xaa is C or S

SEQ ID NO: 74517 - protein, 22 aa, Artificial Sequence
  Cyclic GFR-binding peptide
KLSSLSILFFDKGVVTYLKVYP

SEQ ID NO: 74518 - protein, 31 aa, Artificial Sequence
  Cyclic GFR-binding peptide
  MOD_RES (30)..(30): Xaa is C or S
TKLSSLSVLFFDSSNNVILKVYPNMVVKAXG

SEQ ID NO: 74519 - protein, 29 aa, Artificial Sequence
  Cyclic GFR-binding peptide
VPTEESSLSMLFFRIKPHQGQHLKVYPFL

SEQ ID NO: 74520 - protein, 41 aa, Artificial Sequence; identical to SEQ ID NO: 25732
  Cyclic GFR-binding peptide
  MOD_RES (6)..(7)..(39)..(41): Xaa is C or S

SEQ ID NO: 74521 - protein, 37 aa, Artificial Sequence
  Cyclic GFR-binding peptide
  MOD_RES (5)..(6): Xaa is C or S
IPKAXXVPTELSSLSMLFFDENEKVVLKVYPDMVVEG

SEQ ID NO: 74522 - protein, 26 aa, Artificial Sequence
  Cyclic GFR-binding peptide
EESSLSMLFFRIKPHQGQHLKVYPFL

SEQ ID NO: 74523 - protein, 33 aa, Artificial Sequence
  Cyclic GFR-binding peptide
  MOD_RES (5)..(6): Xaa is C or S
SASPXXVPQDLSSLSILFFVGRTPKVLKVYPMV

SEQ ID NO: 74524 - protein, 44 aa, Artificial Sequence; identical to SEQ ID NO: 25734
  Cyclic GFR-binding peptide
  MOD_RES (7)..(41)..(43): Xaa is C or S

SEQ ID NO: 74525 - protein, 32 aa, Artificial Sequence
  Cyclic GFR-binding peptide
  MOD_RES (6)..(7): Xaa is C or S
RVPSTXXAPVKTSSLSMLFFDNGRVLLLKVYP

SEQ ID NO: 74526 - protein, 23 aa, Artificial Sequence
  Cyclic GFR-binding peptide
TKLSSLSVLFFDDMGVPTLKVYP

SEQ ID NO: 74527 - protein, 33 aa, Artificial Sequence
  Cyclic GFR-binding peptide
  MOD_RES (6)..(7): Xaa is C or S
KVGKAXXVPTKLSSLSVLFFDDMGVPTLKVYPE

SEQ ID NO: 74528 - protein, 29 aa, Artificial Sequence
  Cyclic GFR-binding peptide
  MOD_RES (1)..(1): Xaa is C or S
XVPARLSSLSILFFDAANNVVLKVYPDMV

SEQ ID NO: 74529 - protein, 27 aa, Artificial Sequence
  Cyclic GFR-binding peptide
  MOD_RES (1)..(2): Xaa is C or S
XXVPTRLSSLSILFFDSANNVVLKVYP

SEQ ID NO: 74530 - protein, 28 aa, Artificial Sequence
  Cyclic GFR-binding peptide
VPARLSSLSILFFDAANNVVLKVYPDMV

SEQ ID NO: 74531 - protein, 23 aa, Artificial Sequence
  Cyclic GFR-binding peptide
MSSLSMLFFNDKQQIILKVYPGM

SEQ ID NO: 74532 - protein, 27 aa, Artificial Sequence
  Cyclic GFR-binding peptide
PARLSSLSILFFDAANNVVLKVYPDMV

SEQ ID NO: 74533 - protein, 28 aa, Artificial Sequence
  Cyclic GFR-binding peptide
  MOD_RES (28)..(28): Xaa is C or S
LSSLSVLFFDDSSNVILKVYPNMVVRSX

SEQ ID NO: 74534 - protein, 30 aa, Artificial Sequence
  Cyclic GFR-binding peptide
  MOD_RES (28)..(30): Xaa is C or S
LSSLSILFFDKGVVTYLKVYPGMAVSEXGX

SEQ ID NO: 74535 - protein, 20 aa, Artificial Sequence
  Cyclic GFR-binding peptide
SSLSILFFDAANNVVLKVYP

SEQ ID NO: 74536 - protein, 31 aa, Artificial Sequence
  Cyclic GFR-binding peptide
  MOD_RES (28)..(30): Xaa is C or S
LSSLSMLFFDENEKVVLKVYPDMVVEGXGXR

SEQ ID NO: 74537 - protein, 28 aa, Artificial Sequence
  Cyclic GFR-binding peptide
  MOD_RES (1)..(2): Xaa is C or S
XXVPTELSSLSMLFFDENEKVVLKVYPD

SEQ ID NO: 74538 - protein, 28 aa, Artificial Sequence
  Cyclic GFR-binding peptide
  MOD_RES (28)..(28): Xaa is C or S
LSSLSMLFFDENEKVVLKVYPDMVVEGX

SEQ ID NO: 74539 - protein, 35 aa, Artificial Sequence; identical to SEQ ID NO: 25739
  Cyclic GFR-binding peptide
  MOD_RES (1)..(2)..(34): Xaa is C or S

SEQ ID NO: 74540 - protein, 29 aa, Artificial Sequence
  Cyclic GFR-binding peptide
TKLSSLSILFFDKGVVTYLKVYPGMAVSE

SEQ ID NO: 74541 - protein, 26 aa, Artificial Sequence
  Cyclic GFR-binding peptide
VSQDLSSLSILFFIGKTPKILKVYPM

SEQ ID NO: 74542 - protein, 36 aa, Artificial Sequence
  Cyclic GFR-binding peptide
  MOD_RES (6)..(7): Xaa is C or S
STPPTXXVPTRLSSLSILFFDSANNVVLKVYPDMVV

SEQ ID NO: 74543 - protein, 37 aa, Artificial Sequence; identical to SEQ ID NO: 25740
  Cyclic GFR-binding peptide
  MOD_RES (4)..(5)..(36): Xaa is C or S

SEQ ID NO: 74544 - protein, 34 aa, Artificial Sequence
  Cyclic GFR-binding peptide
  MOD_RES (31)..(33): Xaa is C or S
PTKLSSLSILFFDKGVVTYLKVYPGMAVSEXGXR

SEQ ID NO: 74545 - protein, 28 aa, Artificial Sequence
  Cyclic GFR-binding peptide
  MOD_RES (27)..(27): Xaa is C or S
SSLSILFFDAANNVVLKVYPDMVVEAXG

SEQ ID NO: 74546 - protein, 36 aa, Artificial Sequence
  Cyclic GFR-binding peptide
  MOD_RES (6)..(7): Xaa is C or S
HVPKPXXAPTKLSSLSVLFFDDSSNVILKVYPNMVV

SEQ ID NO: 74547 - protein, 27 aa, Artificial Sequence
  Cyclic GFR-binding peptide
  MOD_RES (1)..(1): Xaa is C or S
XVPTELSSLSMLFFDEYDKVVLKVYPE

SEQ ID NO: 74548 - protein, 36 aa, Artificial Sequence
  Cyclic GFR-binding peptide
  MOD_RES (6)..(7): Xaa is C or S
AVPKAXXAPTKLSSLSVLFFDSSNNVILKVYPNMVV

SEQ ID NO: 74549 - protein, 25 aa, Artificial Sequence
  Cyclic GFR-binding peptide
SSLSVLFFEYVRKKPKLLKVYPRLE

SEQ ID NO: 74550 - protein, 38 aa, Artificial Sequence
  Cyclic GFR-binding peptide
  MOD_RES (2)..(3)..(35)..(37): Xaa is C or S
AXXVPTELSSLSMLFFDENEKVVLKVYPDMVVEGXGXR

SEQ ID NO: 74551 - protein, 24 aa, Artificial Sequence
  Cyclic GFR-binding peptide
PVKTSSLSMLFFDNGRVLLLKVYP

SEQ ID NO: 74552 - protein, 30 aa, Artificial Sequence
  Cyclic GFR-binding peptide
  MOD_RES (29)..(29): Xaa is C or S
QALSSLSILFFVGRKPKVLKVYPMIVRSXK

SEQ ID NO: 74553 - protein, 33 aa, Artificial Sequence
  Cyclic GFR-binding peptide
  MOD_RES (3)..(4): Xaa is C or S
SPXXVPQDLSSLSILFFVGRTPKVLKVYPMVVK

SEQ ID NO: 74554 - protein, 23 aa, Artificial Sequence
  Cyclic GFR-binding peptide
LSSLSILFFIGKTPKILKVYPMI

SEQ ID NO: 74555 - protein, 33 aa, Artificial Sequence
  Cyclic GFR-binding peptide
  MOD_RES (3)..(4): Xaa is C or S
PTXXVPTRLSSLSILFFDSANNVVLKVYPDMVV

SEQ ID NO: 74556 - protein, 24 aa, Artificial Sequence
  Cyclic GFR-binding peptide
ELSSLSMLFFDENEKVVLKVYPDM

SEQ ID NO: 74557 - protein, 35 aa, Artificial Sequence
  Cyclic GFR-binding peptide
  MOD_RES (5)..(6): Xaa is C or S
IPKAXXVPTELSSLSMLFFDEYDKVVLKVYPEMVV

SEQ ID NO: 74558 - protein, 29 aa, Artificial Sequence
  Cyclic GFR-binding peptide
PTRLSSLSILFFDSANNVVLKVYPDMVVE

SEQ ID NO: 74559 - protein, 28 aa, Artificial Sequence
  Cyclic GFR-binding peptide
VPTELSSLSMLFFDENEKVVLKVYPDMV

SEQ ID NO: 74560 - protein, 25 aa, Artificial Sequence
  Cyclic GFR-binding peptide
KLSSLSILFFDKGVVTYLKVYPGMA

SEQ ID NO: 74561 - protein, 33 aa, Artificial Sequence; identical to SEQ ID NO: 25742
  Cyclic GFR-binding peptide
  MOD_RES (1)..(1): Xaa is C or S

SEQ ID NO: 74562 - protein, 39 aa, Artificial Sequence; identical to SEQ ID NO: 25744
  Cyclic GFR-binding peptide
  MOD_RES (1)..(38): Xaa is C or S

SEQ ID NO: 74563 - protein, 35 aa, Artificial Sequence; identical to SEQ ID NO: 25745
  Cyclic GFR-binding peptide
  MOD_RES (3)..(4): Xaa is C or S

SEQ ID NO: 74564 - protein, 26 aa, Artificial Sequence
  Cyclic GFR-binding peptide
LSSLSVLFFDDMGVPTLKVYPEGMSV

SEQ ID NO: 74565 - protein, 35 aa, Artificial Sequence; identical to SEQ ID NO: 25747
  Cyclic GFR-binding peptide
  MOD_RES (2)..(3)..(35): Xaa is C or S

SEQ ID NO: 74566 - protein, 28 aa, Artificial Sequence
  Cyclic GFR-binding peptide
QDLSSLSILFFIGKTPKILKVYPMIVKS

SEQ ID NO: 74567 - protein, 25 aa, Artificial Sequence
  Cyclic GFR-binding peptide
DLSSLSILFFVGRTPKVLKVYPMVV

SEQ ID NO: 74568 - protein, 32 aa, Artificial Sequence; identical to SEQ ID NO: 25749
  Cyclic GFR-binding peptide
  MOD_RES (1)..(32): Xaa is C or S

SEQ ID NO: 74569 - protein, 32 aa, Artificial Sequence
  Cyclic GFR-binding peptide
  MOD_RES (30)..(32): Xaa is C or S
TKMSSLSMLFFNDKQQIILKVYPGMVVDRXGX

SEQ ID NO: 74570 - protein, 32 aa, Artificial Sequence
  Cyclic GFR-binding peptide
  MOD_RES (5)..(6): Xaa is C or S
ASKAXXVPTKLSSLSILFFDKGVVTYLKVYPG

SEQ ID NO: 74571 - protein, 37 aa, Artificial Sequence; identical to SEQ ID NO: 25750
  Cyclic GFR-binding peptide
  MOD_RES (34)..(36): Xaa is C or S

SEQ ID NO: 74572 - protein, 31 aa, Artificial Sequence
  Cyclic GFR-binding peptide
  MOD_RES (28)..(30): Xaa is C or S
LSSLSILFFDSANNVVLKVYPDMVVESXGXR

SEQ ID NO: 74573 - protein, 31 aa, Artificial Sequence; identical to SEQ ID NO: 25751
  Cyclic GFR-binding peptide
  MOD_RES (31)..(31): Xaa is C or S

SEQ ID NO: 74574 - protein, 27 aa, Artificial Sequence
  Cyclic GFR-binding peptide
DLSSLSILFFVGRTPKVLKVYPMVVKS

SEQ ID NO: 74575 - protein, 30 aa, Artificial Sequence
  Cyclic GFR-binding peptide
  MOD_RES (29)..(29): Xaa is C or S
LSSLSVLFFDDMGVPTLKVYPEGMSVAEXG

SEQ ID NO: 74576 - protein, 33 aa, Artificial Sequence
  Cyclic GFR-binding peptide
  MOD_RES (30)..(32): Xaa is C or S
TRLSSLSILFFDSANNVVLKVYPDMVVESXGXR

SEQ ID NO: 74577 - protein, 33 aa, Artificial Sequence; identical to SEQ ID NO: 25753
  Cyclic GFR-binding peptide
  MOD_RES (1)..(2)..(33): Xaa is C or S

SEQ ID NO: 74578 - protein, 29 aa, Artificial Sequence
  Cyclic GFR-binding peptide
PTEESSLSMLFFRIKPHQGQHLKVYPFLQ

SEQ ID NO: 74579 - protein, 37 aa, Artificial Sequence; identical to SEQ ID NO: 25754
  Cyclic GFR-binding peptide
  MOD_RES (2)..(3)..(34)..(36): Xaa is C or S

SEQ ID NO: 74580 - protein, 35 aa, Artificial Sequence; identical to SEQ ID NO: 25756
  Cyclic GFR-binding peptide
  MOD_RES (3)..(4): Xaa is C or S

SEQ ID NO: 74581 - protein, 24 aa, Artificial Sequence
  Cyclic GFR-binding peptide
SSLSMLFFDNGRVLLLKVYPMIVE

SEQ ID NO: 74582 - protein, 38 aa, Artificial Sequence; identical to SEQ ID NO: 25757
  Cyclic GFR-binding peptide
  MOD_RES (6)..(7): Xaa is C or S

SEQ ID NO: 74583 - protein, 33 aa, Artificial Sequence
  Cyclic GFR-binding peptide
  MOD_RES (31)..(33): Xaa is C or S
PTKMSSLSMLFFNDKQQIILKVYPGMVVDRXGX

SEQ ID NO: 74584 - protein, 36 aa, Artificial Sequence
  Cyclic GFR-binding peptide
  MOD_RES (34)..(36): Xaa is C or S
RVHHSSLSVLFFEYVRKKPKLLKVYPRLEEHLEXAX

SEQ ID NO: 74585 - protein, 23 aa, Artificial Sequence
  Cyclic GFR-binding peptide
SSLSVLFFDDMGVPTLKVYPEGM

SEQ ID NO: 74586 - protein, 33 aa, Artificial Sequence
  Cyclic GFR-binding peptide
  MOD_RES (5)..(6): Xaa is C or S
SASPXXVSQDLSSLSILFFIGKTPKILKVYPMI

SEQ ID NO: 74587 - protein, 42 aa, Artificial Sequence; identical to SEQ ID NO: 25759
  Cyclic GFR-binding peptide
  MOD_RES (6)..(7)..(39)..(41): Xaa is C or S

SEQ ID NO: 74588 - protein, 31 aa, Artificial Sequence
  Cyclic GFR-binding peptide
  MOD_RES (1)..(1): Xaa is C or S
XVPTKLSSLSVLFFDDMGVPTLKVYPEGMSV

SEQ ID NO: 74589 - protein, 28 aa, Artificial Sequence
  Cyclic GFR-binding peptide
  MOD_RES (3)..(3): Xaa is C or S
PTXAPTKLSSLSVLFFDDSSNVILKVYP

SEQ ID NO: 74590 - protein, 35 aa, Artificial Sequence; identical to SEQ ID NO: 25760
  Cyclic GFR-binding peptide
  MOD_RES (3)..(3): Xaa is C or S

SEQ ID NO: 74591 - protein, 34 aa, Artificial Sequence
  Cyclic GFR-binding peptide
  MOD_RES (5)..(6): Xaa is C or S
APASXXVPARLSSLSILFFDAANNVVLKVYPDMV

SEQ ID NO: 74592 - protein, 40 aa, Artificial Sequence; identical to SEQ ID NO: 25761
  Cyclic GFR-binding peptide
  MOD_RES (4)..(5)..(37)..(39): Xaa is C or S

SEQ ID NO: 74593 - protein, 34 aa, Artificial Sequence
  Cyclic GFR-binding peptide
  MOD_RES (5)..(6): Xaa is C or S
SAAPXXVPQALSSLSILFFVGRKPKVLKVYPMIV

SEQ ID NO: 74594 - protein, 27 aa, Artificial Sequence
  Cyclic GFR-binding peptide
  MOD_RES (1)..(2): Xaa is C or S
XXAPTKLSSLSVLFFDDSSNVILKVYP

SEQ ID NO: 74595 - protein, 22 aa, Artificial Sequence
  Cyclic GFR-binding peptide
KLSSLSVLFFDDSSNVILKVYP

SEQ ID NO: 74596 - protein, 34 aa, Artificial Sequence
  Cyclic GFR-binding peptide
  MOD_RES (6)..(7): Xaa is C or S
KVGKAXXVPTKLSSLSVLFFDDMGVPTLKVYPEG

SEQ ID NO: 74597 - protein, 32 aa, Artificial Sequence
  Cyclic GFR-binding peptide
  MOD_RES (1)..(2): Xaa is C or S
XXVPTKLSSLSVLFFDDMGVPTLKVYPEGMSV

SEQ ID NO: 74598 - protein, 28 aa, Artificial Sequence
  Cyclic GFR-binding peptide
  MOD_RES (28)..(28): Xaa is C or S
LSSLSMLFFDEYDKVVLKVYPEMVVEGX

SEQ ID NO: 74599 - protein, 23 aa, Artificial Sequence
  Cyclic GFR-binding peptide
DLSSLSILFFIGKTPKILKVYPM

SEQ ID NO: 74600 - protein, 24 aa, Artificial Sequence
  Cyclic GFR-binding peptide
KMSSLSMLFFNDKQQIILKVYPGM

SEQ ID NO: 74601 - protein, 33 aa, Artificial Sequence
  Cyclic GFR-binding peptide
  MOD_RES (6)..(7): Xaa is C or S
ASASPXXVPQDLSSLSILFFVGRTPKVLKVYPM

SEQ ID NO: 74602 - protein, 31 aa, Artificial Sequence
  Cyclic GFR-binding peptide
  MOD_RES (29)..(31): Xaa is C or S
QLSSLSVLFFDDSSNVILKVYPNMVVRAXGX

SEQ ID NO: 74603 - protein, 30 aa, Artificial Sequence
  Cyclic GFR-binding peptide
  MOD_RES (3)..(3): Xaa is C or S
PTXAPTKLSSLSVLFFDDSSNVILKVYPNM

SEQ ID NO: 74604 - protein, 25 aa, Artificial Sequence
  Cyclic GFR-binding peptide
TPTKMSSLSMLFFNDKQQIILKVYP

SEQ ID NO: 74605 - protein, 34 aa, Artificial Sequence; identical to SEQ ID NO: 25765
  Cyclic GFR-binding peptide
  MOD_RES (2)..(3)..(34): Xaa is C or S

SEQ ID NO: 74606 - protein, 32 aa, Artificial Sequence
  Cyclic GFR-binding peptide
VHHSSLSVLFFEYVRKKPKLLKVYPRLEEHLE

SEQ ID NO: 74607 - protein, 30 aa, Artificial Sequence
  Cyclic GFR-binding peptide
PSRVHHSSLSVLFFEYVRKKPKLLKVYPRL

SEQ ID NO: 74608 - protein, 35 aa, Artificial Sequence; identical to SEQ ID NO: 25767
  Cyclic GFR-binding peptide
  MOD_RES (3)..(4): Xaa is C or S

SEQ ID NO: 74609 - protein, 33 aa, Artificial Sequence
  Cyclic GFR-binding peptide
  MOD_RES (3)..(4): Xaa is C or S
KAXXVPTKLSSLSVLFFDDMGVPTLKVYPEGMS

SEQ ID NO: 74610 - protein, 32 aa, Artificial Sequence
  Cyclic GFR-binding peptide
  MOD_RES (6)..(7): Xaa is C or S
HVPKPXXAPTKLSSLSVLFFDDSSNVILKVYP

SEQ ID NO: 74611 - protein, 31 aa, Artificial Sequence
  Cyclic GFR-binding peptide
  MOD_RES (1)..(2): Xaa is C or S
XXVPTKLSSLSVLFFDDMGVPTLKVYPEGMS

SEQ ID NO: 74612 - protein, 27 aa, Artificial Sequence
  Cyclic GFR-binding peptide
  MOD_RES (1)..(1): Xaa is C or S
XTPTKMSSLSMLFFNDKQQIILKVYPG

SEQ ID NO: 74613 - protein, 29 aa, Artificial Sequence
  Cyclic GFR-binding peptide
  MOD_RES (1)..(2): Xaa is C or S
XXAPTKLSSLSVLFFDSSNNVILKVYPNM

SEQ ID NO: 74614 - protein, 40 aa, Artificial Sequence; identical to SEQ ID NO: 25770
  Cyclic GFR-binding peptide
  MOD_RES (4)..(38)..(40): Xaa is C or S

SEQ ID NO: 74615 - protein, 41 aa, Artificial Sequence; identical to SEQ ID NO: 25771
  Cyclic GFR-binding peptide
  MOD_RES (2)..(39): Xaa is C or S

SEQ ID NO: 74616 - protein, 32 aa, Artificial Sequence
  Cyclic GFR-binding peptide
ELHEELRNSLQELKPKKRVYEYYVVPLPEHHV

SEQ ID NO: 74617 - protein, 34 aa, Artificial Sequence
  Cyclic GFR-binding peptide
  MOD_RES (1)..(3): Xaa is C or S
XAXELHEELRNSLQELKPKKRVYEYYLVTLPEHH

SEQ ID NO: 74618 - protein, 27 aa, Artificial Sequence
  Cyclic GFR-binding peptide
  MOD_RES (26)..(27): Xaa is C or S
VTAKKVKPKRGVIKRIQVPRLAQPVXX

SEQ ID NO: 74619 - protein, 23 aa, Artificial Sequence
  Cyclic GFR-binding peptide
TNSLQEFIPKKRVIEYYLVTLPE

SEQ ID NO: 74620 - protein, 35 aa, Artificial Sequence
  Cyclic GFR-binding peptide
  MOD_RES (2)..(4): Xaa is C or S
AXAXELHEELRNSLQELKPKKRVYEYYLVTLPEHH

SEQ ID NO: 74621 - protein, 31 aa, Artificial Sequence
  Cyclic GFR-binding peptide
  MOD_RES (2)..(4): Xaa is C or S
SXKXSRVIMVTAKKVKPKRGVIKRIQVPRLA

SEQ ID NO: 74622 - protein, 28 aa, Artificial Sequence
  Cyclic GFR-binding peptide
  MOD_RES (1)..(1): Xaa is C or S
XGEVVMDSMEGIVVKENEDMIQMTINSL

SEQ ID NO: 74623 - protein, 28 aa, Artificial Sequence
  Cyclic GFR-binding peptide
NSLQELKPKKRVYEYYVVPLPEHHVRSP

SEQ ID NO: 74624 - protein, 40 aa, Artificial Sequence; identical to SEQ ID NO: 25784
  Cyclic GFR-binding peptide
  MOD_RES (2)..(34)..(35): Xaa is C or S

SEQ ID NO: 74625 - protein, 32 aa, Artificial Sequence
  Cyclic GFR-binding peptide
  MOD_RES (2)..(4): Xaa is C or S
HXGXSRVVMNVQVEKIVNSSDDVKAVKVSRLK

SEQ ID NO: 74626 - protein, 28 aa, Artificial Sequence
  Cyclic GFR-binding peptide
VMNSMEGIIVNSSDDMIQVTINSLKTPA

SEQ ID NO: 74627 - protein, 30 aa, Artificial Sequence
  Cyclic GFR-binding peptide
HDELTNSLQEFIPKKRVIEYYLVTLPELQV

SEQ ID NO: 74628 - protein, 27 aa, Artificial Sequence
  Cyclic GFR-binding peptide
  MOD_RES (27)..(27): Xaa is C or S
DSMEGIVVKENEDMIQMTINSLETPVX

SEQ ID NO: 74629 - protein, 35 aa, Artificial Sequence; identical to SEQ ID NO: 25791
  Cyclic GFR-binding peptide
  MOD_RES (2)..(4): Xaa is C or S

SEQ ID NO: 74630 - protein, 27 aa, Artificial Sequence
  Cyclic GFR-binding peptide
VVMNVQVEKIVNSSDDVKAVKVSRLKT

SEQ ID NO: 74631 - protein, 30 aa, Artificial Sequence; identical to SEQ ID NO: 25792
  Cyclic GFR-binding peptide

SEQ ID NO: 74632 - protein, 40 aa, Artificial Sequence; identical to SEQ ID NO: 25795
  Cyclic GFR-binding peptide
  MOD_RES (1)..(3)..(35): Xaa is C or S

SEQ ID NO: 74633 - protein, 25 aa, Artificial Sequence
  Cyclic GFR-binding peptide
VMNVQVEKIVNSSDDVKAVKVSRLQ

SEQ ID NO: 74634 - protein, 26 aa, Artificial Sequence
  Cyclic GFR-binding peptide
VIMVQVEKIKPTKGIVKAIKVSRLDQ

SEQ ID NO: 74635 - protein, 22 aa, Artificial Sequence
  Cyclic GFR-binding peptide
ESMEGIVVKDYEDMIQMTINSL

SEQ ID NO: 74636 - protein, 32 aa, Artificial Sequence
  Cyclic GFR-binding peptide
  MOD_RES (29)..(30): Xaa is C or S
VVMSMEGIVKPTRGVMIQITINSLDQPVXXPS

SEQ ID NO: 74637 - protein, 30 aa, Artificial Sequence
  Cyclic GFR-binding peptide
  MOD_RES (2)..(4): Xaa is C or S
RXGXGEVVMDVQVEKVVKENEDVKAMKVSR

SEQ ID NO: 74638 - protein, 30 aa, Artificial Sequence
  Cyclic GFR-binding peptide
  MOD_RES (30)..(30): Xaa is C or S
VVMNVTAKKIVNSSDDIKRVQVPRLKTPAX

SEQ ID NO: 74639 - protein, 36 aa, Artificial Sequence; identical to SEQ ID NO: 25808
  Cyclic GFR-binding peptide
  MOD_RES (2)..(34)..(35): Xaa is C or S

SEQ ID NO: 74640 - protein, 32 aa, Artificial Sequence; identical to SEQ ID NO: 25809
  Cyclic GFR-binding peptide
  MOD_RES (1)..(1): Xaa is C or S

SEQ ID NO: 74641 - protein, 29 aa, Artificial Sequence
  Cyclic GFR-binding peptide
  MOD_RES (26)..(27): Xaa is C or S
VQVEKVKPTRGVVKAIKVSRLDQPVXXPS

SEQ ID NO: 74642 - protein, 33 aa, Artificial Sequence; identical to SEQ ID NO: 25814
  Cyclic GFR-binding peptide
  MOD_RES (2)..(2): Xaa is C or S

SEQ ID NO: 74643 - protein, 35 aa, Artificial Sequence
  Cyclic GFR-binding peptide
  MOD_RES (1)..(3): Xaa is C or S
XKXALHDELTNSLQEFIPKKRVIEYYLVTLPELQV

SEQ ID NO: 74644 - protein, 41 aa, Artificial Sequence; identical to SEQ ID NO: 25819
  Cyclic GFR-binding peptide
  MOD_RES (37)..(37): Xaa is C or S

SEQ ID NO: 74645 - protein, 30 aa, Artificial Sequence
  Cyclic GFR-binding peptide
QLFNSLQEHQGQHPKIRYYVMPLPEEETPV

SEQ ID NO: 74646 - protein, 28 aa, Artificial Sequence
  Cyclic GFR-binding peptide
KVIMSMEGIIKPTKGIMIQITINSLDQS

SEQ ID NO: 74647 - protein, 25 aa, Artificial Sequence
  Cyclic GFR-binding peptide
MVQVEKVKPTRGVVKAIKVSRLDQP

SEQ ID NO: 74648 - protein, 38 aa, Artificial Sequence; identical to SEQ ID NO: 25825
  Cyclic GFR-binding peptide
  MOD_RES (1)..(3)..(34)..(35): Xaa is C or S

SEQ ID NO: 74649 - protein, 37 aa, Artificial Sequence; identical to SEQ ID NO: 25827
  Cyclic GFR-binding peptide
  MOD_RES (32)..(32): Xaa is C or S

SEQ ID NO: 74650 - protein, 34 aa, Artificial Sequence
  Cyclic GFR-binding peptide
  MOD_RES (30)..(30): Xaa is C or S
LFNSLQEHQGQHPKIRYYLMTLPEEETPVXELGE

SEQ ID NO: 74651 - protein, 23 aa, Artificial Sequence
  Cyclic GFR-binding peptide
VQVEKVKPKRGVVKAIKVSRLAQ

SEQ ID NO: 74652 - protein, 35 aa, Artificial Sequence
  Cyclic GFR-binding peptide
  MOD_RES (30)..(30): Xaa is C or S
VVMNVQVEKIVNSSDDVKAVKVSRLKTPAXTPKTV

SEQ ID NO: 74653 - protein, 35 aa, Artificial Sequence
  Cyclic GFR-binding peptide
  MOD_RES (30)..(31): Xaa is C or S
VVMNVTAKKIVNSSDDIKRVQVPRLKTPAXXPKPV

SEQ ID NO: 74654 - protein, 39 aa, Artificial Sequence; identical to SEQ ID NO: 25834
  Cyclic GFR-binding peptide
  MOD_RES (1)..(3)..(35)..(36): Xaa is C or S

SEQ ID NO: 74655 - protein, 24 aa, Artificial Sequence
  Cyclic GFR-binding peptide
LRNSLQELKPKKRVYEYYVVPLPE

SEQ ID NO: 74656 - protein, 24 aa, Artificial Sequence
  Cyclic GFR-binding peptide
ESMEGIVVKDYEDMIQMTINSLET

SEQ ID NO: 74657 - protein, 29 aa, Artificial Sequence
  Cyclic GFR-binding peptide
RVVMNVQVEKIVNSSDDVKAVKVSRLKTP

SEQ ID NO: 74658 - protein, 24 aa, Artificial Sequence
  Cyclic GFR-binding peptide
KVVMSMEGIVKPTRGVMIQITINS

SEQ ID NO: 74659 - protein, 28 aa, Artificial Sequence
  Cyclic GFR-binding peptide
  MOD_RES (27)..(28): Xaa is C or S
MVTAKKVKPKRGVIKRIQVPRLAQPVXX

SEQ ID NO: 74660 - protein, 29 aa, Artificial Sequence
  Cyclic GFR-binding peptide
  MOD_RES (29)..(29): Xaa is C or S
FNSLQEHQGQHPKIRYYVMPLPEEETPVX

SEQ ID NO: 74661 - protein, 34 aa, Artificial Sequence; identical to SEQ ID NO: 25839
  Cyclic GFR-binding peptide
  MOD_RES (31)..(31): Xaa is C or S

SEQ ID NO: 74662 - protein, 30 aa, Artificial Sequence
  Cyclic GFR-binding peptide
  MOD_RES (26)..(27): Xaa is C or S
VQVEKIVNSSDDVKAVKVSRLKTPAXXPKP

SEQ ID NO: 74663 - protein, 40 aa, Artificial Sequence; identical to SEQ ID NO: 25841
  Cyclic GFR-binding peptide
  MOD_RES (1)..(3)..(34)..(35): Xaa is C or S

SEQ ID NO: 74664 - protein, 30 aa, Artificial Sequence
  Cyclic GFR-binding peptide
KNHQLFNSLQEHQGQHPKIRYYLMTLPEEE

SEQ ID NO: 74665 - protein, 39 aa, Artificial Sequence; identical to SEQ ID NO: 25846
  Cyclic GFR-binding peptide
  MOD_RES (2)..(4)..(35)..(36): Xaa is C or S

SEQ ID NO: 74666 - protein, 35 aa, Artificial Sequence; identical to SEQ ID NO: 25848
  Cyclic GFR-binding peptide
  MOD_RES (31)..(32): Xaa is C or S

SEQ ID NO: 74667 - protein, 31 aa, Artificial Sequence
  Cyclic GFR-binding peptide
ELRNSLQELKPKKRVYEYYVVPLPEHHVRSP

SEQ ID NO: 74668 - protein, 25 aa, Artificial Sequence
  Cyclic GFR-binding peptide
VVMNVQVEKIVNSSDDVKAVKVSRL

SEQ ID NO: 74669 - protein, 23 aa, Artificial Sequence
  Cyclic GFR-binding peptide
MSMEGIVKPTRGVMIQITINSLD

SEQ ID NO: 74670 - protein, 23 aa, Artificial Sequence
  Cyclic GFR-binding peptide
NVQVEKIVNSSDDVKAVKVSRLQ

SEQ ID NO: 74671 - protein, 33 aa, Artificial Sequence
  Cyclic GFR-binding peptide
  MOD_RES (29)..(29): Xaa is C or S
FNSLQEHQGQHPKIRYYVMPLPEEETPVXELGE

SEQ ID NO: 74672 - protein, 36 aa, Artificial Sequence; identical to SEQ ID NO: 25855
  Cyclic GFR-binding peptide
  MOD_RES (2)..(2): Xaa is C or S

SEQ ID NO: 74673 - protein, 31 aa, Artificial Sequence
  Cyclic GFR-binding peptide
  MOD_RES (26)..(27): Xaa is C or S
VTAKKVKPKRGVIKRIQVPRLAQPVXXPAAS

SEQ ID NO: 74674 - protein, 35 aa, Artificial Sequence; identical to SEQ ID NO: 25857
  Cyclic GFR-binding peptide
  MOD_RES (1)..(33)..(34): Xaa is C or S

SEQ ID NO: 74675 - protein, 35 aa, Artificial Sequence
  Cyclic GFR-binding peptide
  MOD_RES (32)..(32): Xaa is C or S
LTNSLQEFIPKKRVIEYYLVTLPELQVQTPRXQVN

SEQ ID NO: 74676 - protein, 27 aa, Artificial Sequence
  Cyclic GFR-binding peptide
ELTNSLQEFIPKKRVIEYYVVPLPELQ

SEQ ID NO: 74677 - protein, 29 aa, Artificial Sequence
  Cyclic GFR-binding peptide
  MOD_RES (1)..(1): Xaa is C or S
XSRVIMSMEGIVKPKRGVMIQITINSLAQ

SEQ ID NO: 74678 - protein, 25 aa, Artificial Sequence
  Cyclic GFR-binding peptide
RVVMNVTAKKIVNSSDDIKRVQVPR

SEQ ID NO: 74679 - protein, 28 aa, Artificial Sequence
  Cyclic GFR-binding peptide
RVVMNVQVEKIVNSSDDVKAVKVSRLKT

SEQ ID NO: 74680 - protein, 34 aa, Artificial Sequence; identical to SEQ ID NO: 25867
  Cyclic GFR-binding peptide
  MOD_RES (1)..(3)..(34): Xaa is C or S

SEQ ID NO: 74681 - protein, 34 aa, Artificial Sequence
  Cyclic GFR-binding peptide
  MOD_RES (30)..(31): Xaa is C or S
VVMNVQVEKIVNSSDDVKAVKVSRLKTPAXXPKP

SEQ ID NO: 74682 - protein, 31 aa, Artificial Sequence
  Cyclic GFR-binding peptide
HDELTNSLQEFIPKKRVIEYYLVTLPELQVQ

SEQ ID NO: 74683 - protein, 34 aa, Artificial Sequence
  Cyclic GFR-binding peptide
  MOD_RES (28)..(28): Xaa is C or S
NSLQEHQGQHPKIRYYVMPLPEEETPVXELGEDN

SEQ ID NO: 74684 - protein, 31 aa, Artificial Sequence
  Cyclic GFR-binding peptide
  MOD_RES (26)..(27): Xaa is C or S
VTAKKIVNSSDDIKRVQVPRLKTPAXXPKPV

SEQ ID NO: 74685 - protein, 32 aa, Artificial Sequence
  Cyclic GFR-binding peptide
  MOD_RES (29)..(30): Xaa is C or S
VMNVQVEKIVNSSDDVKAVKVSRLQTPAXXPK

SEQ ID NO: 74686 - protein, 29 aa, Artificial Sequence
  Cyclic GFR-binding peptide
GEVVMEVQVEKVVKDYEDVKAMKVSRLET

SEQ ID NO: 74687 - protein, 40 aa, Artificial Sequence; identical to SEQ ID NO: 25872
  Cyclic GFR-binding peptide
  MOD_RES (1)..(3)..(34)..(35): Xaa is C or S

SEQ ID NO: 74688 - protein, 31 aa, Artificial Sequence
  Cyclic GFR-binding peptide
  MOD_RES (2)..(2): Xaa is C or S
GXARVVMNSMEGIIVNSSDDMIQVTINSLQT

SEQ ID NO: 74689 - protein, 31 aa, Artificial Sequence
  Cyclic GFR-binding peptide
  MOD_RES (2)..(4): Xaa is C or S
SXKXSKVVMSMEGIVKPTRGVMIQITINSLD

SEQ ID NO: 74690 - protein, 32 aa, Artificial Sequence
  Cyclic GFR-binding peptide
KNHQLFNSLQEHQGQHPKIRYYLMTLPEEETP

SEQ ID NO: 74691 - protein, 31 aa, Artificial Sequence
  Cyclic GFR-binding peptide
  MOD_RES (1)..(1): Xaa is C or S
XALHDELTNSLQEFIPKKRVIEYYVVPLPEL

SEQ ID NO: 74692 - protein, 35 aa, Artificial Sequence; identical to SEQ ID NO: 25885
  Cyclic GFR-binding peptide
  MOD_RES (1)..(32)..(33): Xaa is C or S

SEQ ID NO: 74693 - protein, 32 aa, Artificial Sequence
  Cyclic GFR-binding peptide
  MOD_RES (27)..(27): Xaa is C or S
NVQVEKIVNSSDDVKAVKVSRLKTPAXTPKTV

SEQ ID NO: 74694 - protein, 28 aa, Artificial Sequence
  Cyclic GFR-binding peptide
  MOD_RES (2)..(2): Xaa is C or S
GXSRVVMNVQVEKIVNSSDDVKAVKVSR

SEQ ID NO: 74695 - protein, 30 aa, Artificial Sequence
  Cyclic GFR-binding peptide
  MOD_RES (29)..(30): Xaa is C or S
VVMVTAKKVKPTRGVIKRIQVPRLDQPVXX

SEQ ID NO: 74696 - protein, 38 aa, Artificial Sequence; identical to SEQ ID NO: 25888
  Cyclic GFR-binding peptide
  MOD_RES (1)..(38): Xaa is C or S

SEQ ID NO: 74697 - protein, 28 aa, Artificial Sequence
  Cyclic GFR-binding peptide
  MOD_RES (26)..(27): Xaa is C or S
VQVEKVVKENEDVKAMKVSRLETPVXXA

SEQ ID NO: 74698 - protein, 31 aa, Artificial Sequence
  Cyclic GFR-binding peptide
  MOD_RES (29)..(30): Xaa is C or S
VMNVQVEKIVNSSDDVKAVKVSRLKTPAXXP

SEQ ID NO: 74699 - protein, 39 aa, Artificial Sequence; identical to SEQ ID NO: 25890
  Cyclic GFR-binding peptide
  MOD_RES (1)..(3)..(34)..(35): Xaa is C or S

SEQ ID NO: 74700 - protein, 33 aa, Artificial Sequence
  Cyclic GFR-binding peptide
  MOD_RES (28)..(29): Xaa is C or S
IMVQVEKIKPTKGIVKAIKVSRLDQSVXXPSAS

SEQ ID NO: 74701 - protein, 34 aa, Artificial Sequence; identical to SEQ ID NO: 25892
  Cyclic GFR-binding peptide
  MOD_RES (31)..(31): Xaa is C or S

SEQ ID NO: 74702 - protein, 25 aa, Artificial Sequence
  Cyclic GFR-binding peptide
ESMEGIVVKDYEDMIQMTINSLETP

SEQ ID NO: 74703 - protein, 38 aa, Artificial Sequence; identical to SEQ ID NO: 25894
  Cyclic GFR-binding peptide
  MOD_RES (1)..(3)..(35)..(36): Xaa is C or S

SEQ ID NO: 74704 - protein, 34 aa, Artificial Sequence
  Cyclic GFR-binding peptide
  MOD_RES (2)..(2): Xaa is C or S
KXALHDELTNSLQEFIPKKRVIEYYLVTLPELQV

SEQ ID NO: 74705 - protein, 26 aa, Artificial Sequence
  Cyclic GFR-binding peptide
NSLQEHQGQHPKIRYYVMPLPEEETP

SEQ ID NO: 74706 - protein, 33 aa, Artificial Sequence; identical to SEQ ID NO: 25900
  Cyclic GFR-binding peptide

SEQ ID NO: 74707 - protein, 28 aa, Artificial Sequence
  Cyclic GFR-binding peptide
SRVIMVTAKKVKPKRGVIKRIQVPRLAQ

SEQ ID NO: 74708 - protein, 27 aa, Artificial Sequence
  Cyclic GFR-binding peptide
VVMEVTAKKVVKDYEDIKRMQVPRLET

SEQ ID NO: 74709 - protein, 22 aa, Artificial Sequence
  Cyclic GFR-binding peptide
MSMEGIVKPTRGVMIQITINSL

SEQ ID NO: 74710 - protein, 28 aa, Artificial Sequence
  Cyclic GFR-binding peptide
RVVMNSMEGIIVNSSDDMIQVTINSLKT

SEQ ID NO: 74711 - protein, 35 aa, Artificial Sequence; identical to SEQ ID NO: 25904
  Cyclic GFR-binding peptide
  MOD_RES (31)..(32): Xaa is C or S

SEQ ID NO: 74712 - protein, 26 aa, Artificial Sequence
  Cyclic GFR-binding peptide
VVMEVQVEKVVKDYEDVKAMKVSRLE

SEQ ID NO: 74713 - protein, 27 aa, Artificial Sequence
  Cyclic GFR-binding peptide
MNVTAKKIVNSSDDIKRVQVPRLKTPA

SEQ ID NO: 74714 - protein, 34 aa, Artificial Sequence; identical to SEQ ID NO: 25910
  Cyclic GFR-binding peptide
  MOD_RES (1)..(3): Xaa is C or S

SEQ ID NO: 74715 - protein, 28 aa, Artificial Sequence
  Cyclic GFR-binding peptide
DELTNSLQEFIPKKRVIEYYVVPLPELQ

SEQ ID NO: 74716 - protein, 27 aa, Artificial Sequence
  Cyclic GFR-binding peptide
  MOD_RES (26)..(26): Xaa is C or S
VTAKKIVNSSDDIKRVQVPRLKTPAXT

SEQ ID NO: 74717 - protein, 32 aa, Artificial Sequence
  Cyclic GFR-binding peptide
  MOD_RES (29)..(30): Xaa is C or S
VMDSMEGIVVKENEDMIQMTINSLETPVXXAK

SEQ ID NO: 74718 - protein, 31 aa, Artificial Sequence; identical to SEQ ID NO: 25912
  Cyclic GFR-binding peptide
  MOD_RES (1)..(1): Xaa is C or S

SEQ ID NO: 74719 - protein, 37 aa, Artificial Sequence; identical to SEQ ID NO: 25913
  Cyclic GFR-binding peptide
  MOD_RES (2)..(4)..(36)..(37): Xaa is C or S

SEQ ID NO: 74720 - protein, 20 aa, Artificial Sequence
  Cyclic GFR-binding peptide
VTAKKIVNSSDDIKRVQVPR

SEQ ID NO: 74721 - protein, 29 aa, Artificial Sequence
  Cyclic GFR-binding peptide
RNSLQELKPKKRVYEYYVVPLPEHHVRSP

SEQ ID NO: 74722 - protein, 34 aa, Artificial Sequence; identical to SEQ ID NO: 25919
  Cyclic GFR-binding peptide
  MOD_RES (31)..(32): Xaa is C or S

SEQ ID NO: 74723 - protein, 25 aa, Artificial Sequence
  Cyclic GFR-binding peptide
MEVTAKKVVKDYEDIKRMQVPRLET

SEQ ID NO: 74724 - protein, 29 aa, Artificial Sequence
  Cyclic GFR-binding peptide
  MOD_RES (26)..(27): Xaa is C or S
VTAKKIKPTKGIIKRIQVPRLDQSVXXPS

SEQ ID NO: 74725 - protein, 38 aa, Artificial Sequence; identical to SEQ ID NO: 25929
  Cyclic GFR-binding peptide
  MOD_RES (1)..(33)..(34): Xaa is C or S

SEQ ID NO: 74726 - protein, 40 aa, Artificial Sequence; identical to SEQ ID NO: 25930
  Cyclic GFR-binding peptide
  MOD_RES (1)..(3)..(35)..(36): Xaa is C or S

SEQ ID NO: 74727 - protein, 32 aa, Artificial Sequence
  Cyclic GFR-binding peptide
  MOD_RES (28)..(29): Xaa is C or S
MNVQVEKIVNSSDDVKAVKVSRLQTPAXXPKP

SEQ ID NO: 74728 - protein, 33 aa, Artificial Sequence; identical to SEQ ID NO: 25933
  Cyclic GFR-binding peptide
  MOD_RES (31)..(32): Xaa is C or S

SEQ ID NO: 74729 - protein, 35 aa, Artificial Sequence; identical to SEQ ID NO: 25936
  Cyclic GFR-binding peptide
  MOD_RES (32)..(33): Xaa is C or S

SEQ ID NO: 74730 - protein, 33 aa, Artificial Sequence
  Cyclic GFR-binding peptide
  MOD_RES (28)..(29): Xaa is C or S
IMVTAKKVKPKRGVIKRIQVPRLAQPVXXPAAS

SEQ ID NO: 74731 - protein, 27 aa, Artificial Sequence
  Cyclic GFR-binding peptide
  MOD_RES (26)..(27): Xaa is C or S
SMEGIIVNSSDDMIQVTINSLKTPAXX

SEQ ID NO: 74732 - protein, 35 aa, Artificial Sequence; identical to SEQ ID NO: 25938
  Cyclic GFR-binding peptide
  MOD_RES (2)..(33)..(34): Xaa is C or S

SEQ ID NO: 74733 - protein, 30 aa, Artificial Sequence
  Cyclic GFR-binding peptide
  MOD_RES (29)..(30): Xaa is C or S
VMNVTAKKIVNSSDDIKRVQVPRLKTPAXX

SEQ ID NO: 74734 - protein, 24 aa, Artificial Sequence
  Cyclic GFR-binding peptide
MNVTAKKIVNSSDDIKRVQVPRLK

SEQ ID NO: 74735 - protein, 30 aa, Artificial Sequence; identical to SEQ ID NO: 25942
  Cyclic GFR-binding peptide

SEQ ID NO: 74736 - protein, 30 aa, Artificial Sequence
  Cyclic GFR-binding peptide
  MOD_RES (1)..(3): Xaa is C or S
XGXGEVVMESMEGIVVKDYEDMIQMTINSL

SEQ ID NO: 74737 - protein, 34 aa, Artificial Sequence
  Cyclic GFR-binding peptide
  MOD_RES (2)..(4): Xaa is C or S
RXGXGEVVMEVQVEKVVKDYEDVKAMKVSRLETP

SEQ ID NO: 74738 - protein, 32 aa, Artificial Sequence
  Cyclic GFR-binding peptide
  MOD_RES (27)..(28): Xaa is C or S
MSMEGIIKPTKGIMIQITINSLDQSVXXPSAS

SEQ ID NO: 74739 - protein, 27 aa, Artificial Sequence
  Cyclic GFR-binding peptide
HEELRNSLQELKPKKRVYEYYLVTLPE

SEQ ID NO: 74740 - protein, 35 aa, Artificial Sequence
  Cyclic GFR-binding peptide
  MOD_RES (30)..(31): Xaa is C or S
VVMNSMEGIIVNSSDDMIQVTINSLQTPAXXPKPV

SEQ ID NO: 74741 - protein, 25 aa, Artificial Sequence
  Cyclic GFR-binding peptide
VVMESMEGIVVKDYEDMIQMTINSL

SEQ ID NO: 74742 - protein, 34 aa, Artificial Sequence; identical to SEQ ID NO: 25947
  Cyclic GFR-binding peptide
  MOD_RES (1)..(3)..(34): Xaa is C or S

SEQ ID NO: 74743 - protein, 24 aa, Artificial Sequence
  Cyclic GFR-binding peptide
MVQVEKVKPTRGVVKAIKVSRLDQ

SEQ ID NO: 74744 - protein, 32 aa, Artificial Sequence
  Cyclic GFR-binding peptide
  MOD_RES (29)..(30): Xaa is C or S
VMNSMEGIIVNSSDDMIQVTINSLQTPAXXPK

SEQ ID NO: 74745 - protein, 27 aa, Artificial Sequence
  Cyclic GFR-binding peptide
  MOD_RES (26)..(27): Xaa is C or S
VTAKKIVNSSDDIKRVQVPRLKTPAXX

SEQ ID NO: 74746 - protein, 31 aa, Artificial Sequence
  Cyclic GFR-binding peptide
LHEELRNSLQELKPKKRVYEYYVVPLPEHHV

SEQ ID NO: 74747 - protein, 37 aa, Artificial Sequence; identical to SEQ ID NO: 25955
  Cyclic GFR-binding peptide
  MOD_RES (2)..(33)..(34): Xaa is C or S

SEQ ID NO: 74748 - protein, 32 aa, Artificial Sequence
  Cyclic GFR-binding peptide
  MOD_RES (29)..(29): Xaa is C or S
VMNVTAKKIVNSSDDIKRVQVPRLKTPAXTPK

SEQ ID NO: 74749 - protein, 35 aa, Artificial Sequence; identical to SEQ ID NO: 25961
  Cyclic GFR-binding peptide
  MOD_RES (1)..(1): Xaa is C or S

SEQ ID NO: 74750 - protein, 39 aa, Artificial Sequence; identical to SEQ ID NO: 25962
  Cyclic GFR-binding peptide
  MOD_RES (2)..(34)..(35): Xaa is C or S

SEQ ID NO: 74751 - protein, 24 aa, Artificial Sequence
  Cyclic GFR-binding peptide
VTAKKIVNSSDDIKRVQVPRLKTP

SEQ ID NO: 74752 - protein, 30 aa, Artificial Sequence
  Cyclic GFR-binding peptide
  MOD_RES (26)..(27): Xaa is C or S
SMEGIVKPTRGVMIQITINSLDQPVXXPSA

SEQ ID NO: 74753 - protein, 40 aa, Artificial Sequence; identical to SEQ ID NO: 25964
  Cyclic GFR-binding peptide
  MOD_RES (2)..(4): Xaa is C or S

SEQ ID NO: 74754 - protein, 33 aa, Artificial Sequence; identical to SEQ ID NO: 25965
  Cyclic GFR-binding peptide
  MOD_RES (32)..(33): Xaa is C or S

SEQ ID NO: 74755 - protein, 34 aa, Artificial Sequence; identical to SEQ ID NO: 25967
  Cyclic GFR-binding peptide
  MOD_RES (1)..(32)..(33): Xaa is C or S

SEQ ID NO: 74756 - protein, 29 aa, Artificial Sequence
  Cyclic GFR-binding peptide
  MOD_RES (1)..(3): Xaa is C or S
XGXGEVVMDVQVEKVVKENEDVKAMKVSR

SEQ ID NO: 74757 - protein, 29 aa, Artificial Sequence
  Cyclic GFR-binding peptide
  MOD_RES (1)..(3): Xaa is C or S
XKXSKVVMSMEGIVKPTRGVMIQITINSL

SEQ ID NO: 74758 - protein, 26 aa, Artificial Sequence
  Cyclic GFR-binding peptide
  MOD_RES (26)..(26): Xaa is C or S
SMEGIIKPTKGIMIQITINSLDQSVX

SEQ ID NO: 74759 - protein, 31 aa, Artificial Sequence
  Cyclic GFR-binding peptide
  MOD_RES (26)..(26): Xaa is C or S
VQVEKIVNSSDDVKAVKVSRLKTPAXTPKTV

SEQ ID NO: 74760 - protein, 23 aa, Artificial Sequence
  Cyclic GFR-binding peptide
VMDVTAKKVVKENEDIKRMQVPR

SEQ ID NO: 74761 - protein, 29 aa, Artificial Sequence
  Cyclic GFR-binding peptide
  MOD_RES (28)..(29): Xaa is C or S
VMVTAKKVKPTRGVIKRIQVPRLDQPVXX

SEQ ID NO: 74762 - protein, 28 aa, Artificial Sequence
  Cyclic GFR-binding peptide
TNSLQEFIPKKRVIEYYLVTLPELQVQT

SEQ ID NO: 74763 - protein, 30 aa, Artificial Sequence
  Cyclic GFR-binding peptide
  MOD_RES (28)..(29): Xaa is C or S
MDVQVEKVVKENEDVKAMKVSRLETPVXXA

SEQ ID NO: 74764 - protein, 28 aa, Artificial Sequence
  Cyclic GFR-binding peptide
  MOD_RES (26)..(26): Xaa is C or S
VTAKKIVNSSDDIKRVQVPRLKTPAXTP

SEQ ID NO: 74765 - protein, 30 aa, Artificial Sequence
  Cyclic GFR-binding peptide
  MOD_RES (27)..(28): Xaa is C or S
NSMEGIIVNSSDDMIQVTINSLQTPAXXPK

SEQ ID NO: 74766 - protein, 34 aa, Artificial Sequence
  Cyclic GFR-binding peptide
  MOD_RES (30)..(31): Xaa is C or S
KVVMSMEGIVKPTRGVMIQITINSLDQPVXXPSA

SEQ ID NO: 74767 - protein, 35 aa, Artificial Sequence
  Cyclic GFR-binding peptide
  MOD_RES (30)..(30): Xaa is C or S
LFNSLQEHQGQHPKIRYYVMPLPEEETPVXELGED

SEQ ID NO: 74768 - protein, 42 aa, Artificial Sequence; identical to SEQ ID NO: 25980
  Cyclic GFR-binding peptide
  MOD_RES (2)..(4)..(36): Xaa is C or S

SEQ ID NO: 74769 - protein, 33 aa, Artificial Sequence
  Cyclic GFR-binding peptide
  MOD_RES (28)..(29): Xaa is C or S
MDSMEGIVVKENEDMIQMTINSLETPVXXAKPI

SEQ ID NO: 74770 - protein, 33 aa, Artificial Sequence
  Cyclic GFR-binding peptide
  MOD_RES (28)..(29): Xaa is C or S
MDVQVEKVVKENEDVKAMKVSRLETPVXXAKPI

SEQ ID NO: 74771 - protein, 28 aa, Artificial Sequence
  Cyclic GFR-binding peptide
VVMNVTAKKIVNSSDDIKRVQVPRLQTP

SEQ ID NO: 74772 - protein, 34 aa, Artificial Sequence
  Cyclic GFR-binding peptide
  MOD_RES (30)..(31): Xaa is C or S
KVIMVTAKKIKPTKGIIKRIQVPRLDQSVXXPSA

SEQ ID NO: 74773 - protein, 40 aa, Artificial Sequence; identical to SEQ ID NO: 25984
  Cyclic GFR-binding peptide
  MOD_RES (37)..(37): Xaa is C or S

SEQ ID NO: 74774 - protein, 20 aa, Artificial Sequence
  Cyclic GFR-binding peptide
SMEGIIVNSSDDMIQVTINS

SEQ ID NO: 74775 - protein, 33 aa, Artificial Sequence
  Cyclic GFR-binding peptide
  MOD_RES (27)..(28): Xaa is C or S
EVQVEKVVKDYEDVKAMKVSRLETPVXXAKPIS

SEQ ID NO: 74776 - protein, 33 aa, Artificial Sequence; identical to SEQ ID NO: 25985
  Cyclic GFR-binding peptide
  MOD_RES (1)..(32)..(33): Xaa is C or S

SEQ ID NO: 74777 - protein, 27 aa, Artificial Sequence
  Cyclic GFR-binding peptide
SKVIMVQVEKIKPTKGIVKAIKVSRLD

SEQ ID NO: 74778 - protein, 38 aa, Artificial Sequence; identical to SEQ ID NO: 25986
  Cyclic GFR-binding peptide
  MOD_RES (2)..(4)..(35)..(36): Xaa is C or S

SEQ ID NO: 74779 - protein, 29 aa, Artificial Sequence
  Cyclic GFR-binding peptide
SRVIMVTAKKVKPKRGVIKRIQVPRLAQP

SEQ ID NO: 74780 - protein, 28 aa, Artificial Sequence
  Cyclic GFR-binding peptide
  MOD_RES (28)..(28): Xaa is C or S
IMVTAKKIKPTKGIIKRIQVPRLDQSVX

SEQ ID NO: 74781 - protein, 39 aa, Artificial Sequence; identical to SEQ ID NO: 25990
  Cyclic GFR-binding peptide
  MOD_RES (1)..(3)..(37): Xaa is C or S

SEQ ID NO: 74782 - protein, 32 aa, Artificial Sequence
  Cyclic GFR-binding peptide
  MOD_RES (29)..(30): Xaa is C or S
VVMVQVEKVKPTRGVVKAIKVSRLDQPVXXPS

SEQ ID NO: 74783 - protein, 33 aa, Artificial Sequence
  Cyclic GFR-binding peptide
  MOD_RES (32)..(32): Xaa is C or S
HQLFNSLQEHQGQHPKIRYYLMTLPEEETPVXE

SEQ ID NO: 74784 - protein, 32 aa, Artificial Sequence
  Cyclic GFR-binding peptide
  MOD_RES (2)..(2): Xaa is C or S
AXELHEELRNSLQELKPKKRVYEYYVVPLPEH

SEQ ID NO: 74785 - protein, 27 aa, Artificial Sequence
  Cyclic GFR-binding peptide
NSLQELKPKKRVYEYYLVTLPEHHVRS

SEQ ID NO: 74786 - protein, 31 aa, Artificial Sequence
  Cyclic GFR-binding peptide
  MOD_RES (28)..(29): Xaa is C or S
MDVTAKKVVKENEDIKRMQVPRLETPVXXAK

SEQ ID NO: 74787 - protein, 29 aa, Artificial Sequence
  Cyclic GFR-binding peptide
TNSLQEFIPKKRVIEYYLVTLPELQVQTP

SEQ ID NO: 74788 - protein, 30 aa, Artificial Sequence
  Cyclic GFR-binding peptide
  MOD_RES (2)..(2): Xaa is C or S
KXSKVVMSMEGIVKPTRGVMIQITINSLDQ

SEQ ID NO: 74789 - protein, 37 aa, Artificial Sequence; identical to SEQ ID NO: 25995
  Cyclic GFR-binding peptide
  MOD_RES (34)..(34): Xaa is C or S

SEQ ID NO: 74790 - protein, 31 aa, Artificial Sequence
  Cyclic GFR-binding peptide
  MOD_RES (30)..(31): Xaa is C or S
VVMDVTAKKVVKENEDIKRMQVPRLETPVXX

SEQ ID NO: 74791 - protein, 26 aa, Artificial Sequence
  Cyclic GFR-binding peptide
DSMEGIVVKENEDMIQMTINSLETPV

SEQ ID NO: 74792 - protein, 32 aa, Artificial Sequence; identical to SEQ ID NO: 25998
  Cyclic GFR-binding peptide
  MOD_RES (1)..(1): Xaa is C or S

SEQ ID NO: 74793 - protein, 38 aa, Artificial Sequence; identical to SEQ ID NO: 25999
  Cyclic GFR-binding peptide
  MOD_RES (32)..(33): Xaa is C or S

SEQ ID NO: 74794 - protein, 21 aa, Artificial Sequence
  Cyclic GFR-binding peptide
NSMEGIIVNSSDDMIQVTINS

SEQ ID NO: 74795 - protein, 40 aa, Artificial Sequence; identical to SEQ ID NO: 26002
  Cyclic GFR-binding peptide
  MOD_RES (2)..(34): Xaa is C or S

SEQ ID NO: 74796 - protein, 36 aa, Artificial Sequence; identical to SEQ ID NO: 26003
  Cyclic GFR-binding peptide
  MOD_RES (1)..(3)..(35)..(36): Xaa is C or S

SEQ ID NO: 74797 - protein, 31 aa, Artificial Sequence
  Cyclic GFR-binding peptide
  MOD_RES (1)..(3): Xaa is C or S
XGXGEVVMESMEGIVVKDYEDMIQMTINSLE

SEQ ID NO: 74798 - protein, 34 aa, Artificial Sequence
  Cyclic GFR-binding peptide
  MOD_RES (1)..(3): Xaa is C or S
XAXELHEELRNSLQELKPKKRVYEYYVVPLPEHH

SEQ ID NO: 74799 - protein, 38 aa, Artificial Sequence; identical to SEQ ID NO: 26004
  Cyclic GFR-binding peptide
  MOD_RES (32)..(33): Xaa is C or S

SEQ ID NO: 74800 - protein, 28 aa, Artificial Sequence
  Cyclic GFR-binding peptide
  MOD_RES (2)..(2): Xaa is C or S
KXSRVIMVQVEKVKPKRGVVKAIKVSRL

SEQ ID NO: 74801 - protein, 36 aa, Artificial Sequence; identical to SEQ ID NO: 26007
  Cyclic GFR-binding peptide
  MOD_RES (2)..(34)..(35): Xaa is C or S

SEQ ID NO: 74802 - protein, 26 aa, Artificial Sequence
  Cyclic GFR-binding peptide
MNVTAKKIVNSSDDIKRVQVPRLQTP

SEQ ID NO: 74803 - protein, 30 aa, Artificial Sequence
  Cyclic GFR-binding peptide
  MOD_RES (28)..(29): Xaa is C or S
IMVTAKKIKPTKGIIKRIQVPRLDQSVXXP

SEQ ID NO: 74804 - protein, 24 aa, Artificial Sequence
  Cyclic GFR-binding peptide
LFNSLQEHQGQHPKIRYYVMPLPE

SEQ ID NO: 74805 - protein, 30 aa, Artificial Sequence
  Cyclic GFR-binding peptide
  MOD_RES (2)..(4): Xaa is C or S
HXGXSRVVMNVQVEKIVNSSDDVKAVKVSR

SEQ ID NO: 74806 - protein, 34 aa, Artificial Sequence
  Cyclic GFR-binding peptide
  MOD_RES (2)..(2): Xaa is C or S
EXKNHQLFNSLQEHQGQHPKIRYYVMPLPEEETP

SEQ ID NO: 74807 - protein, 36 aa, Artificial Sequence; identical to SEQ ID NO: 26017
  Cyclic GFR-binding peptide
  MOD_RES (1)..(32)..(33): Xaa is C or S

SEQ ID NO: 74808 - protein, 29 aa, Artificial Sequence
  Cyclic GFR-binding peptide
  MOD_RES (29)..(29): Xaa is C or S
VMNVTAKKIVNSSDDIKRVQVPRLQTPAX

SEQ ID NO: 74809 - protein, 33 aa, Artificial Sequence; identical to SEQ ID NO: 26020
  Cyclic GFR-binding peptide
  MOD_RES (1)..(32)..(33): Xaa is C or S

SEQ ID NO: 74810 - protein, 33 aa, Artificial Sequence
  Cyclic GFR-binding peptide
  MOD_RES (29)..(30): Xaa is C or S
VIMSMEGIIKPTKGIMIQITINSLDQSVXXPSA

SEQ ID NO: 74811 - protein, 29 aa, Artificial Sequence
  Cyclic GFR-binding peptide
  MOD_RES (2)..(2): Xaa is C or S
KXSKVVMSMEGIVKPTRGVMIQITINSLD

SEQ ID NO: 74812 - protein, 33 aa, Artificial Sequence; identical to SEQ ID NO: 26022
  Cyclic GFR-binding peptide
  MOD_RES (31)..(32): Xaa is C or S

SEQ ID NO: 74813 - protein, 41 aa, Artificial Sequence; identical to SEQ ID NO: 26024
  Cyclic GFR-binding peptide
  MOD_RES (1)..(3)..(35)..(36): Xaa is C or S

SEQ ID NO: 74814 - protein, 36 aa, Artificial Sequence; identical to SEQ ID NO: 26027
  Cyclic GFR-binding peptide
  MOD_RES (1)..(32)..(33): Xaa is C or S

SEQ ID NO: 74815 - protein, 32 aa, Artificial Sequence
  Cyclic GFR-binding peptide
  MOD_RES (27)..(28): Xaa is C or S
MSMEGIVKPTRGVMIQITINSLDQPVXXPSAS

SEQ ID NO: 74816 - protein, 33 aa, Artificial Sequence; identical to SEQ ID NO: 26029
  Cyclic GFR-binding peptide
  MOD_RES (2)..(2): Xaa is C or S

SEQ ID NO: 74817 - protein, 29 aa, Artificial Sequence
  Cyclic GFR-binding peptide
  MOD_RES (2)..(2): Xaa is C or S
GXGEVVMDSMEGIVVKENEDMIQMTINSL

SEQ ID NO: 74818 - protein, 27 aa, Artificial Sequence
  Cyclic GFR-binding peptide
  MOD_RES (1)..(1): Xaa is C or S
XSKVVMVQVEKVKPTRGVVKAIKVSRL

SEQ ID NO: 74819 - protein, 28 aa, Artificial Sequence
  Cyclic GFR-binding peptide
RNSLQELKPKKRVYEYYVVPLPEHHVRS

SEQ ID NO: 74820 - protein, 26 aa, Artificial Sequence
  Cyclic GFR-binding peptide
EVVMDVTAKKVVKENEDIKRMQVPRL

SEQ ID NO: 74821 - protein, 40 aa, Artificial Sequence; identical to SEQ ID NO: 26034
  Cyclic GFR-binding peptide
  MOD_RES (1)..(35): Xaa is C or S

SEQ ID NO: 74822 - protein, 34 aa, Artificial Sequence
  Cyclic GFR-binding peptide
  MOD_RES (28)..(29): Xaa is C or S
MEVQVEKVVKDYEDVKAMKVSRLETPVXXAKPIS

SEQ ID NO: 74823 - protein, 21 aa, Artificial Sequence
  Cyclic GFR-binding peptide
VQVEKVKPKRGVVKAIKVSRL

SEQ ID NO: 74824 - protein, 41 aa, Artificial Sequence; identical to SEQ ID NO: 26037
  Cyclic GFR-binding peptide
  MOD_RES (2)..(4)..(36)..(37): Xaa is C or S

SEQ ID NO: 74825 - protein, 27 aa, Artificial Sequence
  Cyclic GFR-binding peptide
GEVVMESMEGIVVKDYEDMIQMTINSL

SEQ ID NO: 74826 - protein, 31 aa, Artificial Sequence; identical to SEQ ID NO: 26038
  Cyclic GFR-binding peptide
  MOD_RES (1)..(1): Xaa is C or S

SEQ ID NO: 74827 - protein, 36 aa, Artificial Sequence; identical to SEQ ID NO: 26043
  Cyclic GFR-binding peptide
  MOD_RES (2)..(33)..(34): Xaa is C or S

SEQ ID NO: 74828 - protein, 30 aa, Artificial Sequence
  Cyclic GFR-binding peptide
  MOD_RES (29)..(30): Xaa is C or S
VIMVQVEKIKPTKGIVKAIKVSRLDQSVXX

SEQ ID NO: 74829 - protein, 34 aa, Artificial Sequence
  Cyclic GFR-binding peptide
  MOD_RES (32)..(32): Xaa is C or S
LRNSLQELKPKKRVYEYYVVPLPEHHVRSPQXKV

SEQ ID NO: 74830 - protein, 34 aa, Artificial Sequence; identical to SEQ ID NO: 26050
  Cyclic GFR-binding peptide
  MOD_RES (32)..(33): Xaa is C or S

SEQ ID NO: 74831 - protein, 21 aa, Artificial Sequence
  Cyclic GFR-binding peptide
MVTAKKVKPTRGVIKRIQVPR

SEQ ID NO: 74832 - protein, 31 aa, Artificial Sequence
  Cyclic GFR-binding peptide
  MOD_RES (2)..(4): Xaa is C or S
HXGXARVVMNVQVEKIVNSSDDVKAVKVSRL

SEQ ID NO: 74833 - protein, 31 aa, Artificial Sequence
  Cyclic GFR-binding peptide
  MOD_RES (26)..(27): Xaa is C or S
SMEGIIVNSSDDMIQVTINSLKTPAXXPKPV

SEQ ID NO: 74834 - protein, 29 aa, Artificial Sequence
  Cyclic GFR-binding peptide
  MOD_RES (2)..(4): Xaa is C or S
SXKXSKVIMVQVEKIKPTKGIVKAIKVSR

SEQ ID NO: 74835 - protein, 32 aa, Artificial Sequence
  Cyclic GFR-binding peptide
  MOD_RES (1)..(3): Xaa is C or S
XGXARVVMNSMEGIIVNSSDDMIQVTINSLQT

SEQ ID NO: 74836 - protein, 34 aa, Artificial Sequence
  Cyclic GFR-binding peptide
  MOD_RES (1)..(1): Xaa is C or S
XELHEELRNSLQELKPKKRVYEYYVVPLPEHHVR

SEQ ID NO: 74837 - protein, 28 aa, Artificial Sequence
  Cyclic GFR-binding peptide
VMNVQVEKIVNSSDDVKAVKVSRLKTPA

SEQ ID NO: 74838 - protein, 32 aa, Artificial Sequence
  Cyclic GFR-binding peptide
EELRNSLQELKPKKRVYEYYLVTLPEHHVRSP

SEQ ID NO: 74839 - protein, 30 aa, Artificial Sequence
  Cyclic GFR-binding peptide
  MOD_RES (28)..(29): Xaa is C or S
IMVQVEKIKPTKGIVKAIKVSRLDQSVXXP

SEQ ID NO: 74840 - protein, 32 aa, Artificial Sequence
  Cyclic GFR-binding peptide
  MOD_RES (30)..(31): Xaa is C or S
RVIMVQVEKVKPKRGVVKAIKVSRLAQPVXXP

SEQ ID NO: 74841 - protein, 30 aa, Artificial Sequence
  Cyclic GFR-binding peptide
  MOD_RES (30)..(30): Xaa is C or S
VVMEVQVEKVVKDYEDVKAMKVSRLETPVX

SEQ ID NO: 74842 - protein, 30 aa, Artificial Sequence
  Cyclic GFR-binding peptide
  MOD_RES (1)..(3): Xaa is C or S
XKXSRVIMSMEGIVKPKRGVMIQITINSLA

SEQ ID NO: 74843 - protein, 34 aa, Artificial Sequence; identical to SEQ ID NO: 26055
  Cyclic GFR-binding peptide
  MOD_RES (2)..(34): Xaa is C or S

SEQ ID NO: 74844 - protein, 23 aa, Artificial Sequence
  Cyclic GFR-binding peptide
MEVQVEKVVKDYEDVKAMKVSRL

SEQ ID NO: 74845 - protein, 40 aa, Artificial Sequence; identical to SEQ ID NO: 26057
  Cyclic GFR-binding peptide
  MOD_RES (36)..(36): Xaa is C or S

SEQ ID NO: 74846 - protein, 37 aa, Artificial Sequence
  Cyclic GFR-binding peptide
  MOD_RES (34)..(34): Xaa is C or S
DELTNSLQEFIPKKRVIEYYLVTLPELQVQTPRXQVN

SEQ ID NO: 74847 - protein, 35 aa, Artificial Sequence; identical to SEQ ID NO: 26060
  Cyclic GFR-binding peptide
  MOD_RES (1)..(3)..(34)..(35): Xaa is C or S

SEQ ID NO: 74848 - protein, 33 aa, Artificial Sequence
  Cyclic GFR-binding peptide
  MOD_RES (1)..(3): Xaa is C or S
XEXKNHQLFNSLQEHQGQHPKIRYYVMPLPEEE

SEQ ID NO: 74849 - protein, 32 aa, Artificial Sequence; identical to SEQ ID NO: 26069
  Cyclic GFR-binding peptide
  MOD_RES (1)..(1): Xaa is C or S

SEQ ID NO: 74850 - protein, 36 aa, Artificial Sequence; identical to SEQ ID NO: 26068
  Cyclic GFR-binding peptide
  MOD_RES (1)..(33)..(34): Xaa is C or S

SEQ ID NO: 74851 - protein, 33 aa, Artificial Sequence
  Cyclic GFR-binding peptide
  MOD_RES (29)..(30): Xaa is C or S
VIMVQVEKIKPTKGIVKAIKVSRLDQSVXXPSA

SEQ ID NO: 74852 - protein, 35 aa, Artificial Sequence; identical to SEQ ID NO: 26070
  Cyclic GFR-binding peptide
  MOD_RES (1)..(3)..(34)..(35): Xaa is C or S

SEQ ID NO: 74853 - protein, 37 aa, Artificial Sequence; identical to SEQ ID NO: 26072
  Cyclic GFR-binding peptide
  MOD_RES (1)..(33)..(34): Xaa is C or S

SEQ ID NO: 74854 - protein, 35 aa, Artificial Sequence; identical to SEQ ID NO: 26073
  Cyclic GFR-binding peptide
  MOD_RES (1)..(32)..(33): Xaa is C or S

SEQ ID NO: 74855 - protein, 36 aa, Artificial Sequence; identical to SEQ ID NO: 26074
  Cyclic GFR-binding peptide
  MOD_RES (2)..(4)..(36): Xaa is C or S

SEQ ID NO: 74856 - protein, 29 aa, Artificial Sequence
  Cyclic GFR-binding peptide
RVVMNSMEGIIVNSSDDMIQVTINSLKTP

SEQ ID NO: 74857 - protein, 23 aa, Artificial Sequence
  Cyclic GFR-binding peptide
IMSMEGIIKPTKGIMIQITINSL

SEQ ID NO: 74858 - protein, 32 aa, Artificial Sequence
  Cyclic GFR-binding peptide
  MOD_RES (2)..(2): Xaa is C or S
GXARVVMNVQVEKIVNSSDDVKAVKVSRLQTP

SEQ ID NO: 74859 - protein, 34 aa, Artificial Sequence
  Cyclic GFR-binding peptide
  MOD_RES (28)..(29): Xaa is C or S
MNVTAKKIVNSSDDIKRVQVPRLQTPAXXPKPVT

SEQ ID NO: 74860 - protein, 35 aa, Artificial Sequence; identical to SEQ ID NO: 26083
  Cyclic GFR-binding peptide
  MOD_RES (32)..(33): Xaa is C or S

SEQ ID NO: 74861 - protein, 25 aa, Artificial Sequence
  Cyclic GFR-binding peptide
MVQVEKIKPTKGIVKAIKVSRLDQS

SEQ ID NO: 74862 - protein, 33 aa, Artificial Sequence
  Cyclic GFR-binding peptide
  MOD_RES (30)..(31): Xaa is C or S
VVMESMEGIVVKDYEDMIQMTINSLETPVXXAK

SEQ ID NO: 74863 - protein, 35 aa, Artificial Sequence; identical to SEQ ID NO: 26086
  Cyclic GFR-binding peptide
  MOD_RES (31)..(32): Xaa is C or S

SEQ ID NO: 74864 - protein, 37 aa, Artificial Sequence; identical to SEQ ID NO: 26088
  Cyclic GFR-binding peptide
  MOD_RES (1)..(33)..(34): Xaa is C or S

SEQ ID NO: 74865 - protein, 33 aa, Artificial Sequence
  Cyclic GFR-binding peptide
  MOD_RES (2)..(4): Xaa is C or S
SXKXSRVIMVTAKKVKPKRGVIKRIQVPRLAQP

SEQ ID NO: 74866 - protein, 38 aa, Artificial Sequence; identical to SEQ ID NO: 26090
  Cyclic GFR-binding peptide
  MOD_RES (2)..(4)..(36)..(37): Xaa is C or S

SEQ ID NO: 74867 - protein, 33 aa, Artificial Sequence
  Cyclic GFR-binding peptide
  MOD_RES (1)..(3): Xaa is C or S
XKXALHDELTNSLQEFIPKKRVIEYYVVPLPEL

SEQ ID NO: 74868 - protein, 30 aa, Artificial Sequence
  Cyclic GFR-binding peptide
  MOD_RES (28)..(28): Xaa is C or S
MNSMEGIIVNSSDDMIQVTINSLKTPAXTP

SEQ ID NO: 74869 - protein, 31 aa, Artificial Sequence
  Cyclic GFR-binding peptide
  MOD_RES (27)..(28): Xaa is C or S
MSMEGIVKPTRGVMIQITINSLDQPVXXPSA

SEQ ID NO: 74870 - protein, 30 aa, Artificial Sequence
  Cyclic GFR-binding peptide
  MOD_RES (30)..(30): Xaa is C or S
KVIMSMEGIIKPTKGIMIQITINSLDQSVX

SEQ ID NO: 74871 - protein, 22 aa, Artificial Sequence
  Cyclic GFR-binding peptide
MNVTAKKIVNSSDDIKRVQVPR

SEQ ID NO: 74872 - protein, 31 aa, Artificial Sequence
  Cyclic GFR-binding peptide
  MOD_RES (2)..(2): Xaa is C or S
KXSRVIMSMEGIVKPKRGVMIQITINSLAQP

SEQ ID NO: 74873 - protein, 27 aa, Artificial Sequence
  Cyclic GFR-binding peptide
  MOD_RES (27)..(27): Xaa is C or S
EVTAKKVVKDYEDIKRMQVPRLETPVX

SEQ ID NO: 74874 - protein, 41 aa, Artificial Sequence; identical to SEQ ID NO: 26096
  Cyclic GFR-binding peptide
  MOD_RES (2)..(39): Xaa is C or S

SEQ ID NO: 74875 - protein, 35 aa, Artificial Sequence; identical to SEQ ID NO: 26097
  Cyclic GFR-binding peptide
  MOD_RES (31)..(31): Xaa is C or S

SEQ ID NO: 74876 - protein, 29 aa, Artificial Sequence
  Cyclic GFR-binding peptide
  MOD_RES (28)..(28): Xaa is C or S
MNVTAKKIVNSSDDIKRVQVPRLKTPAXT

SEQ ID NO: 74877 - protein, 32 aa, Artificial Sequence
  Cyclic GFR-binding peptide
  MOD_RES (26)..(27): Xaa is C or S
SMEGIIVNSSDDMIQVTINSLQTPAXXPKPVT

SEQ ID NO: 74878 - protein, 38 aa, Artificial Sequence; identical to SEQ ID NO: 26102
  Cyclic GFR-binding peptide
  MOD_RES (32)..(32): Xaa is C or S

SEQ ID NO: 74879 - protein, 32 aa, Artificial Sequence
  Cyclic GFR-binding peptide
  MOD_RES (2)..(2): Xaa is C or S
GXSRVVMNVQVEKIVNSSDDVKAVKVSRLKTP

SEQ ID NO: 74880 - protein, 29 aa, Artificial Sequence
  Cyclic GFR-binding peptide
LFNSLQEHQGQHPKIRYYLMTLPEEETPV

SEQ ID NO: 74881 - protein, 27 aa, Artificial Sequence
  Cyclic GFR-binding peptide
MEVTAKKVVKDYEDIKRMQVPRLETPV

SEQ ID NO: 74882 - protein, 38 aa, Artificial Sequence; identical to SEQ ID NO: 26111
  Cyclic GFR-binding peptide
  MOD_RES (36)..(36): Xaa is C or S

SEQ ID NO: 74883 - protein, 36 aa, Artificial Sequence
  Cyclic GFR-binding peptide
  MOD_RES (31)..(31): Xaa is C or S
QLFNSLQEHQGQHPKIRYYLMTLPEEETPVXELGED

SEQ ID NO: 74884 - protein, 33 aa, Artificial Sequence
  Cyclic GFR-binding peptide
  MOD_RES (28)..(29): Xaa is C or S
IMVQVEKVKPKRGVVKAIKVSRLAQPVXXPAAS

SEQ ID NO: 74885 - protein, 31 aa, Artificial Sequence
  Cyclic GFR-binding peptide
  MOD_RES (26)..(27): Xaa is C or S
SMEGIVKPKRGVMIQITINSLAQPVXXPAAS

SEQ ID NO: 74886 - protein, 40 aa, Artificial Sequence; identical to SEQ ID NO: 26114
  Cyclic GFR-binding peptide
  MOD_RES (1)..(3)..(34)..(35): Xaa is C or S

SEQ ID NO: 74887 - protein, 27 aa, Artificial Sequence
  Cyclic GFR-binding peptide
SKVIMSMEGIIKPTKGIMIQITINSLD

SEQ ID NO: 74888 - protein, 35 aa, Artificial Sequence; identical to SEQ ID NO: 26118
  Cyclic GFR-binding peptide
  MOD_RES (2)..(4)..(35): Xaa is C or S

SEQ ID NO: 74889 - protein, 30 aa, Artificial Sequence
  Cyclic GFR-binding peptide
  MOD_RES (27)..(28): Xaa is C or S
MVQVEKVKPTRGVVKAIKVSRLDQPVXXPS

SEQ ID NO: 74890 - protein, 34 aa, Artificial Sequence
  Cyclic GFR-binding peptide
  MOD_RES (28)..(29): Xaa is C or S
IMSMEGIVKPKRGVMIQITINSLAQPVXXPAASA

SEQ ID NO: 74891 - protein, 25 aa, Artificial Sequence
  Cyclic GFR-binding peptide
VMEVQVEKVVKDYEDVKAMKVSRLE

SEQ ID NO: 74892 - protein, 37 aa, Artificial Sequence; identical to SEQ ID NO: 26127
  Cyclic GFR-binding peptide
  MOD_RES (37)..(37): Xaa is C or S

SEQ ID NO: 74893 - protein, 32 aa, Artificial Sequence
  Cyclic GFR-binding peptide
ELTNSLQEFIPKKRVIEYYLVTLPELQVQTPR

SEQ ID NO: 74894 - protein, 35 aa, Artificial Sequence; identical to SEQ ID NO: 26129
  Cyclic GFR-binding peptide
  MOD_RES (31)..(32): Xaa is C or S

SEQ ID NO: 74895 - protein, 27 aa, Artificial Sequence
  Cyclic GFR-binding peptide
  MOD_RES (27)..(27): Xaa is C or S
MSMEGIIKPTKGIMIQITINSLDQSVX

SEQ ID NO: 74896 - protein, 28 aa, Artificial Sequence
  Cyclic GFR-binding peptide
  MOD_RES (1)..(1): Xaa is C or S
XSRVIMVTAKKVKPKRGVIKRIQVPRLA

SEQ ID NO: 74897 - protein, 20 aa, Artificial Sequence
  Cyclic GFR-binding peptide
SMEGIIVNSSDDMIQVTINS

SEQ ID NO: 74898 - protein, 24 aa, Artificial Sequence
  Cyclic GFR-binding peptide
MNVQVEKIVNSSDDVKAVKVSRLK

SEQ ID NO: 74899 - protein, 29 aa, Artificial Sequence
  Cyclic GFR-binding peptide
  MOD_RES (27)..(27): Xaa is C or S
NVTAKKIVNSSDDIKRVQVPRLKTPAXTP

SEQ ID NO: 74900 - protein, 28 aa, Artificial Sequence
  Cyclic GFR-binding peptide
  MOD_RES (1)..(3): Xaa is C or S
XKXSKVVMSMEGIVKPTRGVMIQITINS

SEQ ID NO: 74901 - protein, 28 aa, Artificial Sequence
  Cyclic GFR-binding peptide
  MOD_RES (27)..(28): Xaa is C or S
NVTAKKIVNSSDDIKRVQVPRLKTPAXX

SEQ ID NO: 74902 - protein, 37 aa, Artificial Sequence
  Cyclic GFR-binding peptide
  MOD_RES (2)..(4): Xaa is C or S
AXAXELHEELRNSLQELKPKKRVYEYYLVTLPEHHVR

SEQ ID NO: 74903 - protein, 21 aa, Artificial Sequence
  Cyclic GFR-binding peptide
VQVEKVVKDYEDVKAMKVSRL

SEQ ID NO: 74904 - protein, 25 aa, Artificial Sequence
  Cyclic GFR-binding peptide
KVVMVTAKKVKPTRGVIKRIQVPRL

SEQ ID NO: 74905 - protein, 27 aa, Artificial Sequence
  Cyclic GFR-binding peptide
  MOD_RES (2)..(2): Xaa is C or S
KXSRVIMVTAKKVKPKRGVIKRIQVPR

SEQ ID NO: 74906 - protein, 25 aa, Artificial Sequence
  Cyclic GFR-binding peptide
NVTAKKIVNSSDDIKRVQVPRLKTP

SEQ ID NO: 74907 - protein, 29 aa, Artificial Sequence
  Cyclic GFR-binding peptide
VVMNVQVEKIVNSSDDVKAVKVSRLQTPA

SEQ ID NO: 74908 - protein, 38 aa, Artificial Sequence; identical to SEQ ID NO: 26150
  Cyclic GFR-binding peptide
  MOD_RES (1)..(3): Xaa is C or S

SEQ ID NO: 74909 - protein, 30 aa, Artificial Sequence
  Cyclic GFR-binding peptide
  MOD_RES (2)..(2): Xaa is C or S
GXGEVVMEVTAKKVVKDYEDIKRMQVPRLE

SEQ ID NO: 74910 - protein, 31 aa, Artificial Sequence
  Cyclic GFR-binding peptide
  MOD_RES (27)..(28): Xaa is C or S
MVQVEKIKPTKGIVKAIKVSRLDQSVXXPSA

SEQ ID NO: 74911 - protein, 36 aa, Artificial Sequence
  Cyclic GFR-binding peptide
  MOD_RES (2)..(4): Xaa is C or S
EXKXALHDELTNSLQEFIPKKRVIEYYVVPLPELQV

SEQ ID NO: 74912 - protein, 39 aa, Artificial Sequence; identical to SEQ ID NO: 26157
  Cyclic GFR-binding peptide
  MOD_RES (37)..(37): Xaa is C or S

SEQ ID NO: 74913 - protein, 31 aa, Artificial Sequence
  Cyclic GFR-binding peptide
  MOD_RES (29)..(30): Xaa is C or S
VMNSMEGIIVNSSDDMIQVTINSLKTPAXXP

SEQ ID NO: 74914 - protein, 27 aa, Artificial Sequence
  Cyclic GFR-binding peptide
  MOD_RES (1)..(1): Xaa is C or S
XSRVIMVTAKKVKPKRGVIKRIQVPRL

SEQ ID NO: 74915 - protein, 35 aa, Artificial Sequence; identical to SEQ ID NO: 26162
  Cyclic GFR-binding peptide
  MOD_RES (32)..(33): Xaa is C or S

SEQ ID NO: 74916 - protein, 32 aa, Artificial Sequence
  Cyclic GFR-binding peptide
  MOD_RES (29)..(30): Xaa is C or S
VMDVQVEKVVKENEDVKAMKVSRLETPVXXAK

SEQ ID NO: 74917 - protein, 36 aa, Artificial Sequence; identical to SEQ ID NO: 26163
  Cyclic GFR-binding peptide

SEQ ID NO: 74918 - protein, 29 aa, Artificial Sequence
  Cyclic GFR-binding peptide
  MOD_RES (2)..(2): Xaa is C or S
KXSKVIMSMEGIIKPTKGIMIQITINSLD

SEQ ID NO: 74919 - protein, 33 aa, Artificial Sequence
  Cyclic GFR-binding peptide
DELTNSLQEFIPKKRVIEYYLVTLPELQVQTPR

SEQ ID NO: 74920 - protein, 30 aa, Artificial Sequence
  Cyclic GFR-binding peptide
  MOD_RES (2)..(2): Xaa is C or S
GXSRVVMNVTAKKIVNSSDDIKRVQVPRLK

SEQ ID NO: 74921 - protein, 38 aa, Artificial Sequence; identical to SEQ ID NO: 26171
  Cyclic GFR-binding peptide
  MOD_RES (1)..(3)..(34)..(35): Xaa is C or S

SEQ ID NO: 74922 - protein, 39 aa, Artificial Sequence; identical to SEQ ID NO: 26172
  Cyclic GFR-binding peptide
  MOD_RES (2)..(4)..(36)..(37): Xaa is C or S

SEQ ID NO: 74923 - protein, 27 aa, Artificial Sequence
  Cyclic GFR-binding peptide
  MOD_RES (26)..(27): Xaa is C or S
SMEGIVKPKRGVMIQITINSLAQPVXX

SEQ ID NO: 74924 - protein, 31 aa, Artificial Sequence
  Cyclic GFR-binding peptide
  MOD_RES (1)..(1): Xaa is C or S
XSRVVMNVQVEKIVNSSDDVKAVKVSRLKTP

SEQ ID NO: 74925 - protein, 42 aa, Artificial Sequence; identical to SEQ ID NO: 26173
  Cyclic GFR-binding peptide
  MOD_RES (2)..(4)..(41): Xaa is C or S

SEQ ID NO: 74926 - protein, 34 aa, Artificial Sequence
  Cyclic GFR-binding peptide
  MOD_RES (28)..(29): Xaa is C or S
MDVTAKKVVKENEDIKRMQVPRLETPVXXAKPIK

SEQ ID NO: 74927 - protein, 37 aa, Artificial Sequence; identical to SEQ ID NO: 26177
  Cyclic GFR-binding peptide
  MOD_RES (32)..(32): Xaa is C or S

SEQ ID NO: 74928 - protein, 30 aa, Artificial Sequence
  Cyclic GFR-binding peptide
TNSLQEFIPKKRVIEYYLVTLPELQVQTPR

SEQ ID NO: 74929 - protein, 27 aa, Artificial Sequence
  Cyclic GFR-binding peptide
  MOD_RES (27)..(27): Xaa is C or S
MSMEGIVKPTRGVMIQITINSLDQPVX

SEQ ID NO: 74930 - protein, 33 aa, Artificial Sequence
  Cyclic GFR-binding peptide
  MOD_RES (30)..(31): Xaa is C or S
VVMNSMEGIIVNSSDDMIQVTINSLQTPAXXPK

SEQ ID NO: 74931 - protein, 39 aa, Artificial Sequence; identical to SEQ ID NO: 26179
  Cyclic GFR-binding peptide
  MOD_RES (1)..(33)..(34): Xaa is C or S

SEQ ID NO: 74932 - protein, 26 aa, Artificial Sequence
  Cyclic GFR-binding peptide
MDVTAKKVVKENEDIKRMQVPRLETP

SEQ ID NO: 74933 - protein, 32 aa, Artificial Sequence; identical to SEQ ID NO: 26181
  Cyclic GFR-binding peptide
  MOD_RES (1)..(1): Xaa is C or S

SEQ ID NO: 74934 - protein, 30 aa, Artificial Sequence
  Cyclic GFR-binding peptide
  MOD_RES (27)..(28): Xaa is C or S
ESMEGIVVKDYEDMIQMTINSLETPVXXAK

SEQ ID NO: 74935 - protein, 39 aa, Artificial Sequence; identical to SEQ ID NO: 26183
  Cyclic GFR-binding peptide
  MOD_RES (1)..(33)..(34): Xaa is C or S

SEQ ID NO: 74936 - protein, 39 aa, Artificial Sequence; identical to SEQ ID NO: 26184
  Cyclic GFR-binding peptide
  MOD_RES (33)..(33): Xaa is C or S

SEQ ID NO: 74937 - protein, 33 aa, Artificial Sequence
  Cyclic GFR-binding peptide
  MOD_RES (28)..(29): Xaa is C or S
IMVTAKKIKPTKGIIKRIQVPRLDQSVXXPSAS

SEQ ID NO: 74938 - protein, 34 aa, Artificial Sequence
  Cyclic GFR-binding peptide
  MOD_RES (28)..(29): Xaa is C or S
MESMEGIVVKDYEDMIQMTINSLETPVXXAKPIS

SEQ ID NO: 74939 - protein, 36 aa, Artificial Sequence; identical to SEQ ID NO: 26189
  Cyclic GFR-binding peptide
  MOD_RES (2)..(34)..(35): Xaa is C or S

SEQ ID NO: 74940 - protein, 35 aa, Artificial Sequence
  Cyclic GFR-binding peptide
  MOD_RES (29)..(30): Xaa is C or S
VIMVTAKKIKPTKGIIKRIQVPRLDQSVXXPSASA

SEQ ID NO: 74941 - protein, 33 aa, Artificial Sequence
  Cyclic GFR-binding peptide
  MOD_RES (2)..(4): Xaa is C or S
RXGXGEVVMDVQVEKVVKENEDVKAMKVSRLET

SEQ ID NO: 74942 - protein, 40 aa, Artificial Sequence; identical to SEQ ID NO: 26197
  Cyclic GFR-binding peptide
  MOD_RES (2)..(4)..(35)..(36): Xaa is C or S

SEQ ID NO: 74943 - protein, 34 aa, Artificial Sequence
  Cyclic GFR-binding peptide
  MOD_RES (2)..(2): Xaa is C or S
KXALHDELTNSLQEFIPKKRVIEYYVVPLPELQV

SEQ ID NO: 74944 - protein, 36 aa, Artificial Sequence; identical to SEQ ID NO: 26199
  Cyclic GFR-binding peptide
  MOD_RES (31)..(32): Xaa is C or S

SEQ ID NO: 74945 - protein, 32 aa, Artificial Sequence; identical to SEQ ID NO: 26200
  Cyclic GFR-binding peptide
  MOD_RES (31)..(32): Xaa is C or S

SEQ ID NO: 74946 - protein, 28 aa, Artificial Sequence
  Cyclic GFR-binding peptide
  MOD_RES (1)..(1): Xaa is C or S
XGEVVMESMEGIVVKDYEDMIQMTINSL

SEQ ID NO: 74947 - protein, 25 aa, Artificial Sequence
  Cyclic GFR-binding peptide
EVVMDVQVEKVVKENEDVKAMKVSR

SEQ ID NO: 74948 - protein, 36 aa, Artificial Sequence; identical to SEQ ID NO: 26205
  Cyclic GFR-binding peptide
  MOD_RES (32)..(33): Xaa is C or S

SEQ ID NO: 74949 - protein, 29 aa, Artificial Sequence
  Cyclic GFR-binding peptide
VVMNSMEGIIVNSSDDMIQVTINSLKTPA

SEQ ID NO: 74950 - protein, 32 aa, Artificial Sequence
  Cyclic GFR-binding peptide
  MOD_RES (26)..(27): Xaa is C or S
SMEGIVKPKRGVMIQITINSLAQPVXXPAASA

SEQ ID NO: 74951 - protein, 42 aa, Artificial Sequence; identical to SEQ ID NO: 26210
  Cyclic GFR-binding peptide
  MOD_RES (1)..(38): Xaa is C or S

SEQ ID NO: 74952 - protein, 31 aa, Artificial Sequence
  Cyclic GFR-binding peptide
  MOD_RES (26)..(27): Xaa is C or S
SMEGIVVKENEDMIQMTINSLETPVXXAKPI

SEQ ID NO: 74953 - protein, 27 aa, Artificial Sequence
  Cyclic GFR-binding peptide
HQLFNSLQEHQGQHPKIRYYVMPLPEE

SEQ ID NO: 74954 - protein, 37 aa, Artificial Sequence
  Cyclic GFR-binding peptide
  MOD_RES (32)..(32): Xaa is C or S
HQLFNSLQEHQGQHPKIRYYLMTLPEEETPVXELGED

SEQ ID NO: 74955 - protein, 30 aa, Artificial Sequence
  Cyclic GFR-binding peptide
  MOD_RES (27)..(28): Xaa is C or S
MVQVEKIKPTKGIVKAIKVSRLDQSVXXPS

SEQ ID NO: 74956 - protein, 36 aa, Artificial Sequence
  Cyclic GFR-binding peptide
  MOD_RES (30)..(30): Xaa is C or S
VVMNVTAKKIVNSSDDIKRVQVPRLKTPAXTPKTVH

SEQ ID NO: 74957 - protein, 32 aa, Artificial Sequence
  Cyclic GFR-binding peptide
  MOD_RES (30)..(31): Xaa is C or S
KVVMVQVEKVKPTRGVVKAIKVSRLDQPVXXP

SEQ ID NO: 74958 - protein, 35 aa, Artificial Sequence; identical to SEQ ID NO: 26215
  Cyclic GFR-binding peptide
  MOD_RES (32)..(33): Xaa is C or S

SEQ ID NO: 74959 - protein, 35 aa, Artificial Sequence; identical to SEQ ID NO: 26217
  Cyclic GFR-binding peptide
  MOD_RES (1)..(1): Xaa is C or S

SEQ ID NO: 74960 - protein, 31 aa, Artificial Sequence; identical to SEQ ID NO: 26225
  Cyclic GFR-binding peptide
  MOD_RES (31)..(31): Xaa is C or S

SEQ ID NO: 74961 - protein, 22 aa, Artificial Sequence
  Cyclic GFR-binding peptide
MNVQVEKIVNSSDDVKAVKVSR

SEQ ID NO: 74962 - protein, 39 aa, Artificial Sequence; identical to SEQ ID NO: 26229
  Cyclic GFR-binding peptide
  MOD_RES (2)..(4)..(36)..(37): Xaa is C or S

SEQ ID NO: 74963 - protein, 28 aa, Artificial Sequence
  Cyclic GFR-binding peptide
VMEVTAKKVVKDYEDIKRMQVPRLETPV

SEQ ID NO: 74964 - protein, 31 aa, Artificial Sequence
  Cyclic GFR-binding peptide
  MOD_RES (27)..(28): Xaa is C or S
NVTAKKIVNSSDDIKRVQVPRLKTPAXXPKP

SEQ ID NO: 74965 - protein, 36 aa, Artificial Sequence
  Cyclic GFR-binding peptide
  MOD_RES (32)..(32): Xaa is C or S
HQLFNSLQEHQGQHPKIRYYLMTLPEEETPVXELGE

SEQ ID NO: 74966 - protein, 38 aa, Artificial Sequence; identical to SEQ ID NO: 26233
  Cyclic GFR-binding peptide
  MOD_RES (1)..(33): Xaa is C or S

SEQ ID NO: 74967 - protein, 41 aa, Artificial Sequence; identical to SEQ ID NO: 26234
  Cyclic GFR-binding peptide
  MOD_RES (2)..(4)..(35)..(36): Xaa is C or S

SEQ ID NO: 74968 - protein, 37 aa, Artificial Sequence; identical to SEQ ID NO: 26235
  Cyclic GFR-binding peptide
  MOD_RES (1)..(3)..(35)..(36): Xaa is C or S

SEQ ID NO: 74969 - protein, 33 aa, Artificial Sequence; identical to SEQ ID NO: 26236
  Cyclic GFR-binding peptide
  MOD_RES (1)..(3): Xaa is C or S

SEQ ID NO: 74970 - protein, 35 aa, Artificial Sequence; identical to SEQ ID NO: 26237
  Cyclic GFR-binding peptide
  MOD_RES (35)..(35): Xaa is C or S

SEQ ID NO: 74971 - protein, 34 aa, Artificial Sequence
  Cyclic GFR-binding peptide
  MOD_RES (2)..(4): Xaa is C or S
RXGXGEVVMDVTAKKVVKENEDIKRMQVPRLETP

SEQ ID NO: 74972 - protein, 33 aa, Artificial Sequence
  Cyclic GFR-binding peptide
  MOD_RES (1)..(1): Xaa is C or S
XKNHQLFNSLQEHQGQHPKIRYYLMTLPEEETP

SEQ ID NO: 74973 - protein, 27 aa, Artificial Sequence
  Cyclic GFR-binding peptide
  MOD_RES (1)..(1): Xaa is C or S
XSKVVMSMEGIVKPTRGVMIQITINSL

SEQ ID NO: 74974 - protein, 31 aa, Artificial Sequence; identical to SEQ ID NO: 26244
  Cyclic GFR-binding peptide
  MOD_RES (31)..(31): Xaa is C or S

SEQ ID NO: 74975 - protein, 25 aa, Artificial Sequence
  Cyclic GFR-binding peptide
RVIMVTAKKVKPKRGVIKRIQVPRL

SEQ ID NO: 74976 - protein, 30 aa, Artificial Sequence
  Cyclic GFR-binding peptide
  MOD_RES (2)..(4): Xaa is C or S
RXGXGEVVMDSMEGIVVKENEDMIQMTINS

SEQ ID NO: 74977 - protein, 40 aa, Artificial Sequence; identical to SEQ ID NO: 26252
  Cyclic GFR-binding peptide
  MOD_RES (2)..(34)..(35): Xaa is C or S

SEQ ID NO: 74978 - protein, 22 aa, Artificial Sequence
  Cyclic GFR-binding peptide
NVQVEKIVNSSDDVKAVKVSRL

SEQ ID NO: 74979 - protein, 37 aa, Artificial Sequence; identical to SEQ ID NO: 26254
  Cyclic GFR-binding peptide
  MOD_RES (1)..(33): Xaa is C or S

SEQ ID NO: 74980 - protein, 22 aa, Artificial Sequence
  Cyclic GFR-binding peptide
VQVEKVKPKRGVVKAIKVSRLA

SEQ ID NO: 74981 - protein, 29 aa, Artificial Sequence
  Cyclic GFR-binding peptide
  MOD_RES (28)..(28): Xaa is C or S
MNVQVEKIVNSSDDVKAVKVSRLKTPAXT

SEQ ID NO: 74982 - protein, 27 aa, Artificial Sequence
  Cyclic GFR-binding peptide
RNSLQELKPKKRVYEYYLVTLPEHHVR

SEQ ID NO: 74983 - protein, 32 aa, Artificial Sequence
  Cyclic GFR-binding peptide
  MOD_RES (27)..(27): Xaa is C or S
NSMEGIIVNSSDDMIQVTINSLKTPAXTPKTV

SEQ ID NO: 74984 - protein, 20 aa, Artificial Sequence
  Cyclic GFR-binding peptide
VTAKKVKPKRGVIKRIQVPR

SEQ ID NO: 74985 - protein, 40 aa, Artificial Sequence; identical to SEQ ID NO: 26262
  Cyclic GFR-binding peptide
  MOD_RES (1)..(3)..(40): Xaa is C or S

SEQ ID NO: 74986 - protein, 23 aa, Artificial Sequence
  Cyclic GFR-binding peptide
MESMEGIVVKDYEDMIQMTINSL

SEQ ID NO: 74987 - protein, 37 aa, Artificial Sequence; identical to SEQ ID NO: 26263
  Cyclic GFR-binding peptide
  MOD_RES (31)..(32): Xaa is C or S

SEQ ID NO: 74988 - protein, 33 aa, Artificial Sequence
  Cyclic GFR-binding peptide
  MOD_RES (30)..(31): Xaa is C or S
VVMNVTAKKIVNSSDDIKRVQVPRLKTPAXXPK

SEQ ID NO: 74989 - protein, 26 aa, Artificial Sequence
  Cyclic GFR-binding peptide
SKVIMVQVEKIKPTKGIVKAIKVSRL

SEQ ID NO: 74990 - protein, 26 aa, Artificial Sequence
  Cyclic GFR-binding peptide
VVMDVTAKKVVKENEDIKRMQVPRLE

SEQ ID NO: 74991 - protein, 29 aa, Artificial Sequence
  Cyclic GFR-binding peptide
NSLQELKPKKRVYEYYVVPLPEHHVRSPQ

SEQ ID NO: 74992 - protein, 34 aa, Artificial Sequence
  Cyclic GFR-binding peptide
  MOD_RES (31)..(31): Xaa is C or S
TNSLQEFIPKKRVIEYYVVPLPELQVQTPRXQVN

SEQ ID NO: 74993 - protein, 27 aa, Artificial Sequence
  Cyclic GFR-binding peptide
  MOD_RES (26)..(27): Xaa is C or S
VTAKKIVNSSDDIKRVQVPRLQTPAXX

SEQ ID NO: 74994 - protein, 32 aa, Artificial Sequence
  Cyclic GFR-binding peptide
  MOD_RES (28)..(28): Xaa is C or S
MNVQVEKIVNSSDDVKAVKVSRLKTPAXTPKT

SEQ ID NO: 74995 - protein, 31 aa, Artificial Sequence
  Cyclic GFR-binding peptide
  MOD_RES (29)..(30): Xaa is C or S
VVMVQVEKVKPTRGVVKAIKVSRLDQPVXXP

SEQ ID NO: 74996 - protein, 27 aa, Artificial Sequence
  Cyclic GFR-binding peptide
KVVMVTAKKVKPTRGVIKRIQVPRLDQ

SEQ ID NO: 74997 - protein, 38 aa, Artificial Sequence; identical to SEQ ID NO: 26271
  Cyclic GFR-binding peptide
  MOD_RES (2)..(36): Xaa is C or S

SEQ ID NO: 74998 - protein, 26 aa, Artificial Sequence
  Cyclic GFR-binding peptide
MVQVEKVKPKRGVVKAIKVSRLAQPV

SEQ ID NO: 74999 - protein, 35 aa, Artificial Sequence
  Cyclic GFR-binding peptide
  MOD_RES (1)..(3): Xaa is C or S
XKXALHDELTNSLQEFIPKKRVIEYYVVPLPELQV

SEQ ID NO: 75000 - protein, 39 aa, Artificial Sequence; identical to SEQ ID NO: 26275
  Cyclic GFR-binding peptide
  MOD_RES (1)..(3)..(34)..(35): Xaa is C or S

SEQ ID NO: 75001 - protein, 24 aa, Artificial Sequence
  Cyclic GFR-binding peptide
SMEGIIVNSSDDMIQVTINSLKTP

SEQ ID NO: 75002 - protein, 41 aa, Artificial Sequence; identical to SEQ ID NO: 26276
  Cyclic GFR-binding peptide
  MOD_RES (1)..(3)..(37): Xaa is C or S

SEQ ID NO: 75003 - protein, 35 aa, Artificial Sequence; identical to SEQ ID NO: 26277
  Cyclic GFR-binding peptide
  MOD_RES (32)..(33): Xaa is C or S

SEQ ID NO: 75004 - protein, 36 aa, Artificial Sequence; identical to SEQ ID NO: 26280
  Cyclic GFR-binding peptide
  MOD_RES (2)..(36): Xaa is C or S

SEQ ID NO: 75005 - protein, 25 aa, Artificial Sequence
  Cyclic GFR-binding peptide
VIMVQVEKVKPKRGVVKAIKVSRLA

SEQ ID NO: 75006 - protein, 36 aa, Artificial Sequence
  Cyclic GFR-binding peptide
  MOD_RES (2)..(4): Xaa is C or S
AXAXELHEELRNSLQELKPKKRVYEYYVVPLPEHHV

SEQ ID NO: 75007 - protein, 21 aa, Artificial Sequence
  Cyclic GFR-binding peptide
DSMEGIVVKENEDMIQMTINS

SEQ ID NO: 75008 - protein, 37 aa, Artificial Sequence; identical to SEQ ID NO: 26286
  Cyclic GFR-binding peptide
  MOD_RES (2)..(2): Xaa is C or S

SEQ ID NO: 75009 - protein, 24 aa, Artificial Sequence
  Cyclic GFR-binding peptide
NVTAKKIVNSSDDIKRVQVPRLKT

SEQ ID NO: 75010 - protein, 29 aa, Artificial Sequence
  Cyclic GFR-binding peptide
  MOD_RES (28)..(29): Xaa is C or S
MESMEGIVVKDYEDMIQMTINSLETPVXX

SEQ ID NO: 75011 - protein, 28 aa, Artificial Sequence
  Cyclic GFR-binding peptide
SKVIMVTAKKIKPTKGIIKRIQVPRLDQ

SEQ ID NO: 75012 - protein, 38 aa, Artificial Sequence; identical to SEQ ID NO: 26290
  Cyclic GFR-binding peptide
  MOD_RES (1)..(3)..(35): Xaa is C or S

SEQ ID NO: 75013 - protein, 27 aa, Artificial Sequence
  Cyclic GFR-binding peptide
  MOD_RES (1)..(1): Xaa is C or S
XARVVMNSMEGIIVNSSDDMIQVTINS

SEQ ID NO: 75014 - protein, 24 aa, Artificial Sequence
  Cyclic GFR-binding peptide
EVQVEKVVKDYEDVKAMKVSRLET

SEQ ID NO: 75015 - protein, 26 aa, Artificial Sequence
  Cyclic GFR-binding peptide
KVIMSMEGIIKPTKGIMIQITINSLD

SEQ ID NO: 75016 - protein, 32 aa, Artificial Sequence; identical to SEQ ID NO: 26295
  Cyclic GFR-binding peptide

SEQ ID NO: 75017 - protein, 31 aa, Artificial Sequence
  Cyclic GFR-binding peptide
  MOD_RES (28)..(29): Xaa is C or S
VMSMEGIVKPTRGVMIQITINSLDQPVXXPS

SEQ ID NO: 75018 - protein, 32 aa, Artificial Sequence; identical to SEQ ID NO: 26298
  Cyclic GFR-binding peptide
  MOD_RES (31)..(32): Xaa is C or S

SEQ ID NO: 75019 - protein, 41 aa, Artificial Sequence; identical to SEQ ID NO: 26299
  Cyclic GFR-binding peptide
  MOD_RES (1)..(38): Xaa is C or S

SEQ ID NO: 75020 - protein, 33 aa, Artificial Sequence; identical to SEQ ID NO: 26301
  Cyclic GFR-binding peptide
  MOD_RES (32)..(33): Xaa is C or S

SEQ ID NO: 75021 - protein, 24 aa, Artificial Sequence
  Cyclic GFR-binding peptide
VVMVTAKKVKPTRGVIKRIQVPRL

SEQ ID NO: 75022 - protein, 31 aa, Artificial Sequence
  Cyclic GFR-binding peptide
ELRNSLQELKPKKRVYEYYLVTLPEHHVRSP

SEQ ID NO: 75023 - protein, 26 aa, Artificial Sequence
  Cyclic GFR-binding peptide
FNSLQEHQGQHPKIRYYVMPLPEEET

SEQ ID NO: 75024 - protein, 38 aa, Artificial Sequence; identical to SEQ ID NO: 26305
  Cyclic GFR-binding peptide
  MOD_RES (1)..(32)..(33): Xaa is C or S

SEQ ID NO: 75025 - protein, 23 aa, Artificial Sequence
  Cyclic GFR-binding peptide
VMEVQVEKVVKDYEDVKAMKVSR

SEQ ID NO: 75026 - protein, 35 aa, Artificial Sequence; identical to SEQ ID NO: 26307
  Cyclic GFR-binding peptide
  MOD_RES (2)..(34)..(35): Xaa is C or S

SEQ ID NO: 75027 - protein, 27 aa, Artificial Sequence
  Cyclic GFR-binding peptide
MESMEGIVVKDYEDMIQMTINSLETPV

SEQ ID NO: 75028 - protein, 26 aa, Artificial Sequence
  Cyclic GFR-binding peptide
SRVIMSMEGIVKPKRGVMIQITINSL

SEQ ID NO: 75029 - protein, 32 aa, Artificial Sequence
  Cyclic GFR-binding peptide
  MOD_RES (2)..(4): Xaa is C or S
HXGXARVVMNSMEGIIVNSSDDMIQVTINSLQ

SEQ ID NO: 75030 - protein, 33 aa, Artificial Sequence; identical to SEQ ID NO: 26316
  Cyclic GFR-binding peptide
  MOD_RES (32)..(33): Xaa is C or S

SEQ ID NO: 75031 - protein, 33 aa, Artificial Sequence; identical to SEQ ID NO: 26318
  Cyclic GFR-binding peptide
  MOD_RES (1)..(3): Xaa is C or S

SEQ ID NO: 75032 - protein, 40 aa, Artificial Sequence; identical to SEQ ID NO: 26320
  Cyclic GFR-binding peptide
  MOD_RES (1)..(3)..(34)..(35): Xaa is C or S

SEQ ID NO: 75033 - protein, 26 aa, Artificial Sequence
  Cyclic GFR-binding peptide
MNSMEGIIVNSSDDMIQVTINSLKTP

SEQ ID NO: 75034 - protein, 41 aa, Artificial Sequence; identical to SEQ ID NO: 26321
  Cyclic GFR-binding peptide
  MOD_RES (2)..(4)..(36)..(37): Xaa is C or S

SEQ ID NO: 75035 - protein, 39 aa, Artificial Sequence; identical to SEQ ID NO: 26322
  Cyclic GFR-binding peptide
  MOD_RES (1)..(3): Xaa is C or S

SEQ ID NO: 75036 - protein, 35 aa, Artificial Sequence; identical to SEQ ID NO: 26327
  Cyclic GFR-binding peptide
  MOD_RES (35)..(35): Xaa is C or S

SEQ ID NO: 75037 - protein, 38 aa, Artificial Sequence; identical to SEQ ID NO: 26328
  Cyclic GFR-binding peptide
  MOD_RES (2)..(4)..(36)..(37): Xaa is C or S

SEQ ID NO: 75038 - protein, 28 aa, Artificial Sequence
  Cyclic GFR-binding peptide
  MOD_RES (1)..(3): Xaa is C or S
XKXSRVIMVTAKKVKPKRGVIKRIQVPR

SEQ ID NO: 75039 - protein, 30 aa, Artificial Sequence
  Cyclic GFR-binding peptide
HDELTNSLQEFIPKKRVIEYYVVPLPELQV

SEQ ID NO: 75040 - protein, 22 aa, Artificial Sequence
  Cyclic GFR-binding peptide
EVQVEKVVKDYEDVKAMKVSRL

SEQ ID NO: 75041 - protein, 30 aa, Artificial Sequence
  Cyclic GFR-binding peptide
  MOD_RES (26)..(27): Xaa is C or S
VTAKKVKPTRGVIKRIQVPRLDQPVXXPSA

SEQ ID NO: 75042 - protein, 30 aa, Artificial Sequence
  Cyclic GFR-binding peptide
  MOD_RES (1)..(3): Xaa is C or S
XGXARVVMNVQVEKIVNSSDDVKAVKVSRL

SEQ ID NO: 75043 - protein, 23 aa, Artificial Sequence
  Cyclic GFR-binding peptide
VIMVTAKKIKPTKGIIKRIQVPR

SEQ ID NO: 75044 - protein, 24 aa, Artificial Sequence
  Cyclic GFR-binding peptide
DVQVEKVVKENEDVKAMKVSRLET

SEQ ID NO: 75045 - protein, 27 aa, Artificial Sequence
  Cyclic GFR-binding peptide
VMNSMEGIIVNSSDDMIQVTINSLKTP

SEQ ID NO: 75046 - protein, 22 aa, Artificial Sequence
  Cyclic GFR-binding peptide
MEVQVEKVVKDYEDVKAMKVSR

SEQ ID NO: 75047 - protein, 38 aa, Artificial Sequence; identical to SEQ ID NO: 26345
  Cyclic GFR-binding peptide
  MOD_RES (2)..(33)..(34): Xaa is C or S

SEQ ID NO: 75048 - protein, 22 aa, Artificial Sequence
  Cyclic GFR-binding peptide
DVQVEKVVKENEDVKAMKVSRL

SEQ ID NO: 75049 - protein, 31 aa, Artificial Sequence; identical to SEQ ID NO: 26346
  Cyclic GFR-binding peptide
  MOD_RES (31)..(31): Xaa is C or S

SEQ ID NO: 75050 - protein, 42 aa, Artificial Sequence; identical to SEQ ID NO: 26352
  Cyclic GFR-binding peptide
  MOD_RES (2)..(36): Xaa is C or S

SEQ ID NO: 75051 - protein, 29 aa, Artificial Sequence
  Cyclic GFR-binding peptide
  MOD_RES (28)..(29): Xaa is C or S
MNSMEGIIVNSSDDMIQVTINSLKTPAXX

SEQ ID NO: 75052 - protein, 29 aa, Artificial Sequence
  Cyclic GFR-binding peptide
  MOD_RES (1)..(3): Xaa is C or S
XGXGEVVMESMEGIVVKDYEDMIQMTINS

SEQ ID NO: 75053 - protein, 30 aa, Artificial Sequence
  Cyclic GFR-binding peptide
  MOD_RES (2)..(4): Xaa is C or S
HXGXSRVVMNSMEGIIVNSSDDMIQVTINS

SEQ ID NO: 75054 - protein, 41 aa, Artificial Sequence; identical to SEQ ID NO: 26353
  Cyclic GFR-binding peptide
  MOD_RES (2)..(4)..(35)..(36): Xaa is C or S

SEQ ID NO: 75055 - protein, 38 aa, Artificial Sequence; identical to SEQ ID NO: 26355
  Cyclic GFR-binding peptide
  MOD_RES (2)..(4)..(36)..(37): Xaa is C or S

SEQ ID NO: 75056 - protein, 30 aa, Artificial Sequence
  Cyclic GFR-binding peptide
LHEELRNSLQELKPKKRVYEYYVVPLPEHH

SEQ ID NO: 75057 - protein, 27 aa, Artificial Sequence
  Cyclic GFR-binding peptide
RVIMVQVEKVKPKRGVVKAIKVSRLAQ

SEQ ID NO: 75058 - protein, 40 aa, Artificial Sequence; identical to SEQ ID NO: 26357
  Cyclic GFR-binding peptide
  MOD_RES (2)..(36): Xaa is C or S

SEQ ID NO: 75059 - protein, 30 aa, Artificial Sequence
  Cyclic GFR-binding peptide
  MOD_RES (30)..(30): Xaa is C or S
VVMNSMEGIIVNSSDDMIQVTINSLQTPAX

SEQ ID NO: 75060 - protein, 27 aa, Artificial Sequence
  Cyclic GFR-binding peptide
  MOD_RES (2)..(2): Xaa is C or S
KXSKVIMSMEGIIKPTKGIMIQITINS

SEQ ID NO: 75061 - protein, 32 aa, Artificial Sequence
  Cyclic GFR-binding peptide
  MOD_RES (26)..(27): Xaa is C or S
VTAKKIVNSSDDIKRVQVPRLQTPAXXPKPVT

SEQ ID NO: 75062 - protein, 38 aa, Artificial Sequence; identical to SEQ ID NO: 26363
  Cyclic GFR-binding peptide
  MOD_RES (32)..(33): Xaa is C or S

SEQ ID NO: 75063 - protein, 34 aa, Artificial Sequence
  Cyclic GFR-binding peptide
  MOD_RES (32)..(32): Xaa is C or S
LTNSLQEFIPKKRVIEYYLVTLPELQVQTPRXQV

SEQ ID NO: 75064 - protein, 39 aa, Artificial Sequence; identical to SEQ ID NO: 26368
  Cyclic GFR-binding peptide
  MOD_RES (33)..(33): Xaa is C or S

SEQ ID NO: 75065 - protein, 37 aa, Artificial Sequence; identical to SEQ ID NO: 26369
  Cyclic GFR-binding peptide
  MOD_RES (1)..(3)..(37): Xaa is C or S

SEQ ID NO: 75066 - protein, 31 aa, Artificial Sequence
  Cyclic GFR-binding peptide
  MOD_RES (30)..(31): Xaa is C or S
VVMNVTAKKIVNSSDDIKRVQVPRLKTPAXX

SEQ ID NO: 75067 - protein, 28 aa, Artificial Sequence
  Cyclic GFR-binding peptide
GEVVMDSMEGIVVKENEDMIQMTINSLE

SEQ ID NO: 75068 - protein, 33 aa, Artificial Sequence
  Cyclic GFR-binding peptide
  MOD_RES (2)..(4): Xaa is C or S
RXGXGEVVMDSMEGIVVKENEDMIQMTINSLET

SEQ ID NO: 75069 - protein, 29 aa, Artificial Sequence
  Cyclic GFR-binding peptide
  MOD_RES (1)..(1): Xaa is C or S
XARVVMNVQVEKIVNSSDDVKAVKVSRLQ

SEQ ID NO: 75070 - protein, 40 aa, Artificial Sequence; identical to SEQ ID NO: 26370
  Cyclic GFR-binding peptide
  MOD_RES (2)..(4)..(35)..(36): Xaa is C or S

SEQ ID NO: 75071 - protein, 33 aa, Artificial Sequence; identical to SEQ ID NO: 26371
  Cyclic GFR-binding peptide
  MOD_RES (31)..(32): Xaa is C or S

SEQ ID NO: 75072 - protein, 26 aa, Artificial Sequence
  Cyclic GFR-binding peptide
IMSMEGIVKPKRGVMIQITINSLAQP

SEQ ID NO: 75073 - protein, 28 aa, Artificial Sequence
  Cyclic GFR-binding peptide
LTNSLQEFIPKKRVIEYYVVPLPELQVQ

SEQ ID NO: 75074 - protein, 26 aa, Artificial Sequence
  Cyclic GFR-binding peptide
  MOD_RES (26)..(26): Xaa is C or S
VTAKKIKPTKGIIKRIQVPRLDQSVX

SEQ ID NO: 75075 - protein, 23 aa, Artificial Sequence
  Cyclic GFR-binding peptide
NSMEGIIVNSSDDMIQVTINSLQ

SEQ ID NO: 75076 - protein, 43 aa, Artificial Sequence; identical to SEQ ID NO: 26377
  Cyclic GFR-binding peptide
  MOD_RES (2)..(4)..(38): Xaa is C or S

SEQ ID NO: 75077 - protein, 28 aa, Artificial Sequence
  Cyclic GFR-binding peptide
VVMVQVEKVKPTRGVVKAIKVSRLDQPV

SEQ ID NO: 75078 - protein, 36 aa, Artificial Sequence; identical to SEQ ID NO: 26383
  Cyclic GFR-binding peptide
  MOD_RES (2)..(34)..(35): Xaa is C or S

SEQ ID NO: 75079 - protein, 38 aa, Artificial Sequence; identical to SEQ ID NO: 26388
  Cyclic GFR-binding peptide
  MOD_RES (2)..(4)..(36)..(37): Xaa is C or S

SEQ ID NO: 75080 - protein, 36 aa, Artificial Sequence; identical to SEQ ID NO: 26392
  Cyclic GFR-binding peptide
  MOD_RES (2)..(34)..(35): Xaa is C or S

SEQ ID NO: 75081 - protein, 33 aa, Artificial Sequence; identical to SEQ ID NO: 26393
  Cyclic GFR-binding peptide
  MOD_RES (31)..(32): Xaa is C or S

SEQ ID NO: 75082 - protein, 32 aa, Artificial Sequence; identical to SEQ ID NO: 26394
  Cyclic GFR-binding peptide
  MOD_RES (31)..(32): Xaa is C or S

SEQ ID NO: 75083 - protein, 25 aa, Artificial Sequence
  Cyclic GFR-binding peptide
VTAKKIVNSSDDIKRVQVPRLKTPA

SEQ ID NO: 75084 - protein, 39 aa, Artificial Sequence; identical to SEQ ID NO: 26396
  Cyclic GFR-binding peptide
  MOD_RES (2)..(36): Xaa is C or S

SEQ ID NO: 75085 - protein, 33 aa, Artificial Sequence
  Cyclic GFR-binding peptide
  MOD_RES (1)..(1): Xaa is C or S
XELHEELRNSLQELKPKKRVYEYYVVPLPEHHV

SEQ ID NO: 75086 - protein, 23 aa, Artificial Sequence
  Cyclic GFR-binding peptide
VMESMEGIVVKDYEDMIQMTINS

SEQ ID NO: 75087 - protein, 38 aa, Artificial Sequence; identical to SEQ ID NO: 26400
  Cyclic GFR-binding peptide
  MOD_RES (1)..(33)..(34): Xaa is C or S

SEQ ID NO: 75088 - protein, 32 aa, Artificial Sequence; identical to SEQ ID NO: 26401
  Cyclic GFR-binding peptide
  MOD_RES (1)..(1): Xaa is C or S

SEQ ID NO: 75089 - protein, 31 aa, Artificial Sequence
  Cyclic GFR-binding peptide
  MOD_RES (1)..(3): Xaa is C or S
XGXGEVVMDVQVEKVVKENEDVKAMKVSRLE

SEQ ID NO: 75090 - protein, 32 aa, Artificial Sequence
  Cyclic GFR-binding peptide
ALHDELTNSLQEFIPKKRVIEYYVVPLPELQV

SEQ ID NO: 75091 - protein, 31 aa, Artificial Sequence
  Cyclic GFR-binding peptide
  MOD_RES (27)..(28): Xaa is C or S
MSMEGIVKPKRGVMIQITINSLAQPVXXPAA

SEQ ID NO: 75092 - protein, 30 aa, Artificial Sequence
  Cyclic GFR-binding peptide
  MOD_RES (30)..(30): Xaa is C or S
VVMDVTAKKVVKENEDIKRMQVPRLETPVX

SEQ ID NO: 75093 - protein, 30 aa, Artificial Sequence
  Cyclic GFR-binding peptide
  MOD_RES (27)..(28): Xaa is C or S
MSMEGIVKPKRGVMIQITINSLAQPVXXPA

SEQ ID NO: 75094 - protein, 39 aa, Artificial Sequence; identical to SEQ ID NO: 26407
  Cyclic GFR-binding peptide
  MOD_RES (1)..(33)..(34): Xaa is C or S

SEQ ID NO: 75095 - protein, 33 aa, Artificial Sequence
  Cyclic GFR-binding peptide
  MOD_RES (2)..(2): Xaa is C or S
AXELHEELRNSLQELKPKKRVYEYYLVTLPEHH

SEQ ID NO: 75096 - protein, 29 aa, Artificial Sequence
  Cyclic GFR-binding peptide
  MOD_RES (1)..(1): Xaa is C or S
XSRVIMVQVEKVKPKRGVVKAIKVSRLAQ

SEQ ID NO: 75097 - protein, 27 aa, Artificial Sequence
  Cyclic GFR-binding peptide
GEVVMEVQVEKVVKDYEDVKAMKVSRL

SEQ ID NO: 75098 - protein, 20 aa, Artificial Sequence
  Cyclic GFR-binding peptide
VTAKKVVKENEDIKRMQVPR

SEQ ID NO: 75099 - protein, 39 aa, Artificial Sequence; identical to SEQ ID NO: 26412
  Cyclic GFR-binding peptide
  MOD_RES (1)..(3)..(34)..(35): Xaa is C or S

SEQ ID NO: 75100 - protein, 41 aa, Artificial Sequence
  Cyclic GFR-binding peptide
  MOD_RES (1)..(3)..(35)..(36): Xaa is C or S
XGXARVVMNVQVEKIVNSSDDVKAVKVSRLQTPAXXPKPVT

SEQ ID NO: 75101 - protein, 24 aa, Artificial Sequence
  Cyclic GFR-binding peptide
VIMVQVEKVKPKRGVVKAIKVSRL

SEQ ID NO: 75102 - protein, 26 aa, Artificial Sequence
  Cyclic GFR-binding peptide
RVVMNSMEGIIVNSSDDMIQVTINSL

SEQ ID NO: 75103 - protein, 35 aa, Artificial Sequence
  Cyclic GFR-binding peptide
  MOD_RES (32)..(32): Xaa is C or S
HQLFNSLQEHQGQHPKIRYYLMTLPEEETPVXELG

SEQ ID NO: 75104 - protein, 27 aa, Artificial Sequence
  Cyclic GFR-binding peptide
ELRNSLQELKPKKRVYEYYVVPLPEHH

SEQ ID NO: 75105 - protein, 28 aa, Artificial Sequence
  Cyclic GFR-binding peptide
  MOD_RES (26)..(27): Xaa is C or S
VQVEKIKPTKGIVKAIKVSRLDQSVXXP

SEQ ID NO: 75106 - protein, 24 aa, Artificial Sequence
  Cyclic GFR-binding peptide
VIMSMEGIVKPKRGVMIQITINSL

SEQ ID NO: 75107 - protein, 35 aa, Artificial Sequence; identical to SEQ ID NO: 26417
  Cyclic GFR-binding peptide
  MOD_RES (1)..(3)..(35): Xaa is C or S

SEQ ID NO: 75108 - protein, 25 aa, Artificial Sequence
  Cyclic GFR-binding peptide
VMNSMEGIIVNSSDDMIQVTINSLQ

SEQ ID NO: 75109 - protein, 29 aa, Artificial Sequence
  Cyclic GFR-binding peptide
  MOD_RES (28)..(29): Xaa is C or S
IMVTAKKVKPKRGVIKRIQVPRLAQPVXX

SEQ ID NO: 75110 - protein, 24 aa, Artificial Sequence
  Cyclic GFR-binding peptide
VTAKKVVKDYEDIKRMQVPRLETP

SEQ ID NO: 75111 - protein, 26 aa, Artificial Sequence
  Cyclic GFR-binding peptide
  MOD_RES (26)..(26): Xaa is C or S
VQVEKIVNSSDDVKAVKVSRLKTPAX

SEQ ID NO: 75112 - protein, 26 aa, Artificial Sequence
  Cyclic GFR-binding peptide
MSMEGIIKPTKGIMIQITINSLDQSV

SEQ ID NO: 75113 - protein, 26 aa, Artificial Sequence
  Cyclic GFR-binding peptide
VVMNVTAKKIVNSSDDIKRVQVPRLQ

SEQ ID NO: 75114 - protein, 30 aa, Artificial Sequence
  Cyclic GFR-binding peptide
QLFNSLQEHQGQHPKIRYYLMTLPEEETPV

SEQ ID NO: 75115 - protein, 36 aa, Artificial Sequence; identical to SEQ ID NO: 26422
  Cyclic GFR-binding peptide
  MOD_RES (1)..(3)..(35)..(36): Xaa is C or S

SEQ ID NO: 75116 - protein, 39 aa, Artificial Sequence; identical to SEQ ID NO: 26425
  Cyclic GFR-binding peptide
  MOD_RES (1)..(38): Xaa is C or S

SEQ ID NO: 75117 - protein, 44 aa, Artificial Sequence; identical to SEQ ID NO: 26428
  Cyclic GFR-binding peptide
  MOD_RES (2)..(4)..(41): Xaa is C or S

SEQ ID NO: 75118 - protein, 25 aa, Artificial Sequence
  Cyclic GFR-binding peptide
DVQVEKVVKENEDVKAMKVSRLETP

SEQ ID NO: 75119 - protein, 32 aa, Artificial Sequence; identical to SEQ ID NO: 26430
  Cyclic GFR-binding peptide
  MOD_RES (31)..(31): Xaa is C or S

SEQ ID NO: 75120 - protein, 39 aa, Artificial Sequence; identical to SEQ ID NO: 26431
  Cyclic GFR-binding peptide
  MOD_RES (1)..(3)..(34)..(35): Xaa is C or S

SEQ ID NO: 75121 - protein, 27 aa, Artificial Sequence
  Cyclic GFR-binding peptide
VMDVTAKKVVKENEDIKRMQVPRLETP

SEQ ID NO: 75122 - protein, 31 aa, Artificial Sequence
  Cyclic GFR-binding peptide
  MOD_RES (2)..(2): Xaa is C or S
KXSKVVMVTAKKVKPTRGVIKRIQVPRLDQP

SEQ ID NO: 75123 - protein, 27 aa, Artificial Sequence
  Cyclic GFR-binding peptide
  MOD_RES (27)..(27): Xaa is C or S
MVQVEKVKPKRGVVKAIKVSRLAQPVX

SEQ ID NO: 75124 - protein, 28 aa, Artificial Sequence
  Cyclic GFR-binding peptide
  MOD_RES (28)..(28): Xaa is C or S
MDVQVEKVVKENEDVKAMKVSRLETPVX

SEQ ID NO: 75125 - protein, 30 aa, Artificial Sequence
  Cyclic GFR-binding peptide
  MOD_RES (26)..(27): Xaa is C or S
VQVEKIVNSSDDVKAVKVSRLQTPAXXPKP

SEQ ID NO: 75126 - protein, 37 aa, Artificial Sequence
  Cyclic GFR-binding peptide
  MOD_RES (33)..(33): Xaa is C or S
ELRNSLQELKPKKRVYEYYLVTLPEHHVRSPQXKVSS

SEQ ID NO: 75127 - protein, 33 aa, Artificial Sequence
  Cyclic GFR-binding peptide
  MOD_RES (1)..(3): Xaa is C or S
XGXSRVVMNVTAKKIVNSSDDIKRVQVPRLKTP

SEQ ID NO: 75128 - protein, 37 aa, Artificial Sequence; identical to SEQ ID NO: 26440
  Cyclic GFR-binding peptide
  MOD_RES (1)..(33)..(34): Xaa is C or S

SEQ ID NO: 75129 - protein, 35 aa, Artificial Sequence; identical to SEQ ID NO: 26441
  Cyclic GFR-binding peptide
  MOD_RES (2)..(34)..(35): Xaa is C or S

SEQ ID NO: 75130 - protein, 32 aa, Artificial Sequence
  Cyclic GFR-binding peptide
  MOD_RES (1)..(3): Xaa is C or S
XGXSRVVMNVTAKKIVNSSDDIKRVQVPRLKT

SEQ ID NO: 75131 - protein, 36 aa, Artificial Sequence; identical to SEQ ID NO: 26446
  Cyclic GFR-binding peptide
  MOD_RES (32)..(33): Xaa is C or S

SEQ ID NO: 75132 - protein, 38 aa, Artificial Sequence; identical to SEQ ID NO: 26447
  Cyclic GFR-binding peptide
  MOD_RES (1)..(3): Xaa is C or S

SEQ ID NO: 75133 - protein, 24 aa, Artificial Sequence
  Cyclic GFR-binding peptide
SMEGIVKPKRGVMIQITINSLAQP

SEQ ID NO: 75134 - protein, 30 aa, Artificial Sequence
  Cyclic GFR-binding peptide
  MOD_RES (26)..(27): Xaa is C or S
VQVEKIKPTKGIVKAIKVSRLDQSVXXPSA

SEQ ID NO: 75135 - protein, 30 aa, Artificial Sequence
  Cyclic GFR-binding peptide
  MOD_RES (30)..(30): Xaa is C or S
KVVMVQVEKVKPTRGVVKAIKVSRLDQPVX

SEQ ID NO: 75136 - protein, 30 aa, Artificial Sequence
  Cyclic GFR-binding peptide
  MOD_RES (2)..(4): Xaa is C or S
HXGXARVVMNVTAKKIVNSSDDIKRVQVPR

SEQ ID NO: 75137 - protein, 36 aa, Artificial Sequence
  Cyclic GFR-binding peptide
  MOD_RES (30)..(31): Xaa is C or S
KVIMVTAKKIKPTKGIIKRIQVPRLDQSVXXPSASA

SEQ ID NO: 75138 - protein, 36 aa, Artificial Sequence; identical to SEQ ID NO: 26451
  Cyclic GFR-binding peptide
  MOD_RES (1)..(33)..(34): Xaa is C or S

SEQ ID NO: 75139 - protein, 34 aa, Artificial Sequence; identical to SEQ ID NO: 26457
  Cyclic GFR-binding peptide
  MOD_RES (34)..(34): Xaa is C or S

SEQ ID NO: 75140 - protein, 32 aa, Artificial Sequence; identical to SEQ ID NO: 26458
  Cyclic GFR-binding peptide

SEQ ID NO: 75141 - protein, 30 aa, Artificial Sequence; identical to SEQ ID NO: 26460
  Cyclic GFR-binding peptide

SEQ ID NO: 75142 - protein, 28 aa, Artificial Sequence
  Cyclic GFR-binding peptide
VVMSMEGIVKPTRGVMIQITINSLDQPV

SEQ ID NO: 75143 - protein, 33 aa, Artificial Sequence
  Cyclic GFR-binding peptide
  MOD_RES (31)..(31): Xaa is C or S
TNSLQEFIPKKRVIEYYLVTLPELQVQTPRXQV

SEQ ID NO: 75144 - protein, 38 aa, Artificial Sequence; identical to SEQ ID NO: 26465
  Cyclic GFR-binding peptide
  MOD_RES (1)..(3)..(34)..(35): Xaa is C or S

SEQ ID NO: 75145 - protein, 29 aa, Artificial Sequence
  Cyclic GFR-binding peptide
  MOD_RES (2)..(2): Xaa is C or S
GXSRVVMNVQVEKIVNSSDDVKAVKVSRL

SEQ ID NO: 75146 - protein, 26 aa, Artificial Sequence
  Cyclic GFR-binding peptide
EVVMEVQVEKVVKDYEDVKAMKVSRL

SEQ ID NO: 75147 - protein, 27 aa, Artificial Sequence
  Cyclic GFR-binding peptide
DELTNSLQEFIPKKRVIEYYLVTLPEL

SEQ ID NO: 75148 - protein, 31 aa, Artificial Sequence
  Cyclic GFR-binding peptide
  MOD_RES (30)..(31): Xaa is C or S
VVMNSMEGIIVNSSDDMIQVTINSLQTPAXX

SEQ ID NO: 75149 - protein, 32 aa, Artificial Sequence
  Cyclic GFR-binding peptide
  MOD_RES (27)..(28): Xaa is C or S
MSMEGIVKPKRGVMIQITINSLAQPVXXPAAS

SEQ ID NO: 75150 - protein, 31 aa, Artificial Sequence
  Cyclic GFR-binding peptide
  MOD_RES (1)..(3): Xaa is C or S
XGXGEVVMEVQVEKVVKDYEDVKAMKVSRLE

SEQ ID NO: 75151 - protein, 24 aa, Artificial Sequence
  Cyclic GFR-binding peptide
MNSMEGIIVNSSDDMIQVTINSLK

SEQ ID NO: 75152 - protein, 24 aa, Artificial Sequence
  Cyclic GFR-binding peptide
KVIMVTAKKIKPTKGIIKRIQVPR

SEQ ID NO: 75153 - protein, 30 aa, Artificial Sequence
  Cyclic GFR-binding peptide
  MOD_RES (30)..(30): Xaa is C or S
LFNSLQEHQGQHPKIRYYVMPLPEEETPVX

SEQ ID NO: 75154 - protein, 37 aa, Artificial Sequence; identical to SEQ ID NO: 26468
  Cyclic GFR-binding peptide
  MOD_RES (2)..(2): Xaa is C or S

SEQ ID NO: 75155 - protein, 34 aa, Artificial Sequence; identical to SEQ ID NO: 26470
  Cyclic GFR-binding peptide
  MOD_RES (1)..(33)..(34): Xaa is C or S

SEQ ID NO: 75156 - protein, 31 aa, Artificial Sequence
  Cyclic GFR-binding peptide
  MOD_RES (30)..(30): Xaa is C or S
VVMNVQVEKIVNSSDDVKAVKVSRLKTPAXT

SEQ ID NO: 75157 - protein, 31 aa, Artificial Sequence
  Cyclic GFR-binding peptide
LHDELTNSLQEFIPKKRVIEYYVVPLPELQV

SEQ ID NO: 75158 - protein, 36 aa, Artificial Sequence
  Cyclic GFR-binding peptide
  MOD_RES (30)..(31): Xaa is C or S
VVMESMEGIVVKDYEDMIQMTINSLETPVXXAKPIS

SEQ ID NO: 75159 - protein, 30 aa, Artificial Sequence
  Cyclic GFR-binding peptide
SRVVMNVTAKKIVNSSDDIKRVQVPRLKTP

SEQ ID NO: 75160 - protein, 38 aa, Artificial Sequence; identical to SEQ ID NO: 26481
  Cyclic GFR-binding peptide
  MOD_RES (2)..(2): Xaa is C or S

SEQ ID NO: 75161 - protein, 27 aa, Artificial Sequence
  Cyclic GFR-binding peptide
TNSLQEFIPKKRVIEYYVVPLPELQVQ

SEQ ID NO: 75162 - protein, 35 aa, Artificial Sequence
  Cyclic GFR-binding peptide
  MOD_RES (30)..(31): Xaa is C or S
RVIMSMEGIVKPKRGVMIQITINSLAQPVXXPAAS

SEQ ID NO: 75163 - protein, 40 aa, Artificial Sequence; identical to SEQ ID NO: 26489
  Cyclic GFR-binding peptide
  MOD_RES (2)..(34): Xaa is C or S

SEQ ID NO: 75164 - protein, 32 aa, Artificial Sequence; identical to SEQ ID NO: 26490
  Cyclic GFR-binding peptide
  MOD_RES (31)..(32): Xaa is C or S

SEQ ID NO: 75165 - protein, 39 aa, Artificial Sequence; identical to SEQ ID NO: 26491
  Cyclic GFR-binding peptide
  MOD_RES (2)..(39): Xaa is C or S

SEQ ID NO: 75166 - protein, 31 aa, Artificial Sequence
  Cyclic GFR-binding peptide
  MOD_RES (29)..(29): Xaa is C or S
VMNVTAKKIVNSSDDIKRVQVPRLKTPAXTP

SEQ ID NO: 75167 - protein, 38 aa, Artificial Sequence; identical to SEQ ID NO: 26497
  Cyclic GFR-binding peptide
  MOD_RES (2)..(4)..(35)..(36): Xaa is C or S

SEQ ID NO: 75168 - protein, 33 aa, Artificial Sequence
  Cyclic GFR-binding peptide
  MOD_RES (28)..(29): Xaa is C or S
IMSMEGIVKPKRGVMIQITINSLAQPVXXPAAS

SEQ ID NO: 75169 - protein, 28 aa, Artificial Sequence
  Cyclic GFR-binding peptide
EVVMEVQVEKVVKDYEDVKAMKVSRLET

SEQ ID NO: 75170 - protein, 30 aa, Artificial Sequence
  Cyclic GFR-binding peptide
  MOD_RES (30)..(30): Xaa is C or S
RVIMVQVEKVKPKRGVVKAIKVSRLAQPVX

SEQ ID NO: 75171 - protein, 28 aa, Artificial Sequence
  Cyclic GFR-binding peptide
  MOD_RES (27)..(28): Xaa is C or S
NSMEGIIVNSSDDMIQVTINSLKTPAXX

SEQ ID NO: 75172 - protein, 30 aa, Artificial Sequence
  Cyclic GFR-binding peptide
DELTNSLQEFIPKKRVIEYYVVPLPELQVQ

SEQ ID NO: 75173 - protein, 33 aa, Artificial Sequence
  Cyclic GFR-binding peptide
  MOD_RES (2)..(4): Xaa is C or S
RXGXGEVVMESMEGIVVKDYEDMIQMTINSLET

SEQ ID NO: 75174 - protein, 38 aa, Artificial Sequence; identical to SEQ ID NO: 26500
  Cyclic GFR-binding peptide
  MOD_RES (2)..(34)..(35): Xaa is C or S

SEQ ID NO: 75175 - protein, 28 aa, Artificial Sequence
  Cyclic GFR-binding peptide
KNHQLFNSLQEHQGQHPKIRYYLMTLPE

SEQ ID NO: 75176 - protein, 29 aa, Artificial Sequence
  Cyclic GFR-binding peptide
  MOD_RES (27)..(27): Xaa is C or S
NSMEGIIVNSSDDMIQVTINSLKTPAXTP

SEQ ID NO: 75177 - protein, 29 aa, Artificial Sequence
  Cyclic GFR-binding peptide
  MOD_RES (1)..(3): Xaa is C or S
XGXGEVVMDSMEGIVVKENEDMIQMTINS

SEQ ID NO: 75178 - protein, 26 aa, Artificial Sequence
  Cyclic GFR-binding peptide
VVMVTAKKVKPTRGVIKRIQVPRLDQ

SEQ ID NO: 75179 - protein, 35 aa, Artificial Sequence
  Cyclic GFR-binding peptide
  MOD_RES (31)..(31): Xaa is C or S
RNSLQELKPKKRVYEYYVVPLPEHHVRSPQXKVSS

SEQ ID NO: 75180 - protein, 29 aa, Artificial Sequence
  Cyclic GFR-binding peptide
  MOD_RES (27)..(28): Xaa is C or S
NVTAKKIVNSSDDIKRVQVPRLKTPAXXP

SEQ ID NO: 75181 - protein, 42 aa, Artificial Sequence; identical to SEQ ID NO: 26503
  Cyclic GFR-binding peptide
  MOD_RES (2)..(4)..(36)..(37): Xaa is C or S

SEQ ID NO: 75182 - protein, 43 aa, Artificial Sequence; identical to SEQ ID NO: 26505
  Cyclic GFR-binding peptide
  MOD_RES (2)..(4)..(41): Xaa is C or S

SEQ ID NO: 75183 - protein, 34 aa, Artificial Sequence; identical to SEQ ID NO: 26506
  Cyclic GFR-binding peptide
  MOD_RES (31)..(32): Xaa is C or S

SEQ ID NO: 75184 - protein, 33 aa, Artificial Sequence
  Cyclic GFR-binding peptide
  MOD_RES (27)..(28): Xaa is C or S
NVQVEKIVNSSDDVKAVKVSRLQTPAXXPKPVT

SEQ ID NO: 75185 - protein, 33 aa, Artificial Sequence
  Cyclic GFR-binding peptide
  MOD_RES (27)..(27): Xaa is C or S
NVQVEKIVNSSDDVKAVKVSRLKTPAXTPKTVH

SEQ ID NO: 75186 - protein, 32 aa, Artificial Sequence
  Cyclic GFR-binding peptide
  MOD_RES (2)..(4): Xaa is C or S
HXGXARVVMNVQVEKIVNSSDDVKAVKVSRLQ

SEQ ID NO: 75187 - protein, 28 aa, Artificial Sequence
  Cyclic GFR-binding peptide
  MOD_RES (1)..(1): Xaa is C or S
XSRVVMNVTAKKIVNSSDDIKRVQVPRL

SEQ ID NO: 75188 - protein, 33 aa, Artificial Sequence
  Cyclic GFR-binding peptide
  MOD_RES (28)..(29): Xaa is C or S
MDVTAKKVVKENEDIKRMQVPRLETPVXXAKPI

SEQ ID NO: 75189 - protein, 37 aa, Artificial Sequence; identical to SEQ ID NO: 26510
  Cyclic GFR-binding peptide
  MOD_RES (1)..(33)..(34): Xaa is C or S

SEQ ID NO: 75190 - protein, 34 aa, Artificial Sequence; identical to SEQ ID NO: 26511
  Cyclic GFR-binding peptide
  MOD_RES (32)..(33): Xaa is C or S

SEQ ID NO: 75191 - protein, 31 aa, Artificial Sequence
  Cyclic GFR-binding peptide
  MOD_RES (1)..(3): Xaa is C or S
XGXARVVMNSMEGIIVNSSDDMIQVTINSLQ

SEQ ID NO: 75192 - protein, 32 aa, Artificial Sequence
  Cyclic GFR-binding peptide
ELHEELRNSLQELKPKKRVYEYYLVTLPEHHV

SEQ ID NO: 75193 - protein, 29 aa, Artificial Sequence
  Cyclic GFR-binding peptide
  MOD_RES (1)..(1): Xaa is C or S
XKNHQLFNSLQEHQGQHPKIRYYVMPLPE

SEQ ID NO: 75194 - protein, 33 aa, Artificial Sequence; identical to SEQ ID NO: 26516
  Cyclic GFR-binding peptide
  MOD_RES (33)..(33): Xaa is C or S

SEQ ID NO: 75195 - protein, 32 aa, Artificial Sequence
  Cyclic GFR-binding peptide
  MOD_RES (31)..(31): Xaa is C or S
QLFNSLQEHQGQHPKIRYYVMPLPEEETPVXE

SEQ ID NO: 75196 - protein, 26 aa, Artificial Sequence
  Cyclic GFR-binding peptide
MSMEGIVKPTRGVMIQITINSLDQPV

SEQ ID NO: 75197 - protein, 33 aa, Artificial Sequence; identical to SEQ ID NO: 26518
  Cyclic GFR-binding peptide

SEQ ID NO: 75198 - protein, 26 aa, Artificial Sequence
  Cyclic GFR-binding peptide
  MOD_RES (26)..(26): Xaa is C or S
VQVEKVKPKRGVVKAIKVSRLAQPVX

SEQ ID NO: 75199 - protein, 29 aa, Artificial Sequence
  Cyclic GFR-binding peptide
  MOD_RES (1)..(1): Xaa is C or S
XSKVIMVQVEKIKPTKGIVKAIKVSRLDQ

SEQ ID NO: 75200 - protein, 27 aa, Artificial Sequence
  Cyclic GFR-binding peptide
  MOD_RES (2)..(2): Xaa is C or S
KXSKVVMSMEGIVKPTRGVMIQITINS

SEQ ID NO: 75201 - protein, 39 aa, Artificial Sequence; identical to SEQ ID NO: 26522
  Cyclic GFR-binding peptide
  MOD_RES (1)..(3)..(35)..(36): Xaa is C or S

SEQ ID NO: 75202 - protein, 34 aa, Artificial Sequence; identical to SEQ ID NO: 26524
  Cyclic GFR-binding peptide
  MOD_RES (2)..(33)..(34): Xaa is C or S

SEQ ID NO: 75203 - protein, 30 aa, Artificial Sequence
  Cyclic GFR-binding peptide
  MOD_RES (1)..(1): Xaa is C or S
XSKVIMVTAKKIKPTKGIIKRIQVPRLDQS

SEQ ID NO: 75204 - protein, 31 aa, Artificial Sequence
  Cyclic GFR-binding peptide
  MOD_RES (30)..(31): Xaa is C or S
KVIMSMEGIIKPTKGIMIQITINSLDQSVXX

SEQ ID NO: 75205 - protein, 35 aa, Artificial Sequence; identical to SEQ ID NO: 26525
  Cyclic GFR-binding peptide
  MOD_RES (1)..(32)..(33): Xaa is C or S

SEQ ID NO: 75206 - protein, 37 aa, Artificial Sequence; identical to SEQ ID NO: 26528
  Cyclic GFR-binding peptide
  MOD_RES (1)..(33)..(34): Xaa is C or S

SEQ ID NO: 75207 - protein, 21 aa, Artificial Sequence
  Cyclic GFR-binding peptide
ESMEGIVVKDYEDMIQMTINS

SEQ ID NO: 75208 - protein, 36 aa, Artificial Sequence; identical to SEQ ID NO: 26532
  Cyclic GFR-binding peptide
  MOD_RES (32)..(33): Xaa is C or S

SEQ ID NO: 75209 - protein, 32 aa, Artificial Sequence
  Cyclic GFR-binding peptide
  MOD_RES (30)..(31): Xaa is C or S
KVVMVTAKKVKPTRGVIKRIQVPRLDQPVXXP

SEQ ID NO: 75210 - protein, 44 aa, Artificial Sequence; identical to SEQ ID NO: 26534
  Cyclic GFR-binding peptide
  MOD_RES (2)..(4)..(41): Xaa is C or S

SEQ ID NO: 75211 - protein, 26 aa, Artificial Sequence
  Cyclic GFR-binding peptide
  MOD_RES (26)..(26): Xaa is C or S
SMEGIVVKENEDMIQMTINSLETPVX

SEQ ID NO: 75212 - protein, 30 aa, Artificial Sequence
  Cyclic GFR-binding peptide
  MOD_RES (29)..(30): Xaa is C or S
VMNVQVEKIVNSSDDVKAVKVSRLQTPAXX

SEQ ID NO: 75213 - protein, 27 aa, Artificial Sequence
  Cyclic GFR-binding peptide
  MOD_RES (27)..(27): Xaa is C or S
MVTAKKVKPTRGVIKRIQVPRLDQPVX

SEQ ID NO: 75214 - protein, 32 aa, Artificial Sequence
  Cyclic GFR-binding peptide
ELTNSLQEFIPKKRVIEYYVVPLPELQVQTPR

SEQ ID NO: 75215 - protein, 33 aa, Artificial Sequence
  Cyclic GFR-binding peptide
  MOD_RES (30)..(31): Xaa is C or S
RVIMSMEGIVKPKRGVMIQITINSLAQPVXXPA

SEQ ID NO: 75216 - protein, 39 aa, Artificial Sequence; identical to SEQ ID NO: 26543
  Cyclic GFR-binding peptide
  MOD_RES (36)..(36): Xaa is C or S

SEQ ID NO: 75217 - protein, 36 aa, Artificial Sequence; identical to SEQ ID NO: 26544
  Cyclic GFR-binding peptide
  MOD_RES (2)..(34)..(35): Xaa is C or S

SEQ ID NO: 75218 - protein, 34 aa, Artificial Sequence; identical to SEQ ID NO: 26548
  Cyclic GFR-binding peptide
  MOD_RES (31)..(32): Xaa is C or S

SEQ ID NO: 75219 - protein, 27 aa, Artificial Sequence
  Cyclic GFR-binding peptide
  MOD_RES (1)..(1): Xaa is C or S
XSKVIMSMEGIIKPTKGIMIQITINSL

SEQ ID NO: 75220 - protein, 27 aa, Artificial Sequence
  Cyclic GFR-binding peptide
VMDSMEGIVVKENEDMIQMTINSLETP

SEQ ID NO: 75221 - protein, 32 aa, Artificial Sequence
  Cyclic GFR-binding peptide
  MOD_RES (30)..(31): Xaa is C or S
KVIMSMEGIIKPTKGIMIQITINSLDQSVXXP

SEQ ID NO: 75222 - protein, 28 aa, Artificial Sequence
  Cyclic GFR-binding peptide
  MOD_RES (26)..(27): Xaa is C or S
VTAKKVKPTRGVIKRIQVPRLDQPVXXP

SEQ ID NO: 75223 - protein, 42 aa, Artificial Sequence; identical to SEQ ID NO: 26553
  Cyclic GFR-binding peptide
  MOD_RES (2)..(39): Xaa is C or S

SEQ ID NO: 75224 - protein, 28 aa, Artificial Sequence
  Cyclic GFR-binding peptide
EVVMDVTAKKVVKENEDIKRMQVPRLET

SEQ ID NO: 75225 - protein, 34 aa, Artificial Sequence; identical to SEQ ID NO: 26557
  Cyclic GFR-binding peptide
  MOD_RES (2)..(34): Xaa is C or S

SEQ ID NO: 75226 - protein, 26 aa, Artificial Sequence
  Cyclic GFR-binding peptide
RVIMSMEGIVKPKRGVMIQITINSLA

SEQ ID NO: 75227 - protein, 36 aa, Artificial Sequence
  Cyclic GFR-binding peptide
  MOD_RES (31)..(31): Xaa is C or S
QLFNSLQEHQGQHPKIRYYVMPLPEEETPVXELGED

SEQ ID NO: 75228 - protein, 34 aa, Artificial Sequence; identical to SEQ ID NO: 26565
  Cyclic GFR-binding peptide
  MOD_RES (1)..(3)..(34): Xaa is C or S

SEQ ID NO: 75229 - protein, 29 aa, Artificial Sequence
  Cyclic GFR-binding peptide
SKVIMVTAKKIKPTKGIIKRIQVPRLDQS

SEQ ID NO: 75230 - protein, 30 aa, Artificial Sequence
  Cyclic GFR-binding peptide
  MOD_RES (28)..(28): Xaa is C or S
MNVQVEKIVNSSDDVKAVKVSRLKTPAXTP

SEQ ID NO: 75231 - protein, 40 aa, Artificial Sequence; identical to SEQ ID NO: 26572
  Cyclic GFR-binding peptide
  MOD_RES (1)..(3)..(35)..(36): Xaa is C or S

SEQ ID NO: 75232 - protein, 30 aa, Artificial Sequence
  Cyclic GFR-binding peptide
  MOD_RES (28)..(29): Xaa is C or S
IMSMEGIIKPTKGIMIQITINSLDQSVXXP

SEQ ID NO: 75233 - protein, 22 aa, Artificial Sequence
  Cyclic GFR-binding peptide
VQVEKVVKDYEDVKAMKVSRLE

SEQ ID NO: 75234 - protein, 26 aa, Artificial Sequence
  Cyclic GFR-binding peptide
MSMEGIVKPKRGVMIQITINSLAQPV

SEQ ID NO: 75235 - protein, 34 aa, Artificial Sequence
  Cyclic GFR-binding peptide
  MOD_RES (34)..(34): Xaa is C or S
DELTNSLQEFIPKKRVIEYYVVPLPELQVQTPRX

SEQ ID NO: 75236 - protein, 24 aa, Artificial Sequence
  Cyclic GFR-binding peptide
NSLQEFIPKKRVIEYYLVTLPELQ

SEQ ID NO: 75237 - protein, 35 aa, Artificial Sequence; identical to SEQ ID NO: 26583
  Cyclic GFR-binding peptide
  MOD_RES (1)..(3)..(35): Xaa is C or S

SEQ ID NO: 75238 - protein, 26 aa, Artificial Sequence
  Cyclic GFR-binding peptide
VMDVQVEKVVKENEDVKAMKVSRLET

SEQ ID NO: 75239 - protein, 24 aa, Artificial Sequence
  Cyclic GFR-binding peptide
FNSLQEHQGQHPKIRYYVMPLPEE

SEQ ID NO: 75240 - protein, 35 aa, Artificial Sequence; identical to SEQ ID NO: 26590
  Cyclic GFR-binding peptide
  MOD_RES (2)..(34)..(35): Xaa is C or S

SEQ ID NO: 75241 - protein, 31 aa, Artificial Sequence
  Cyclic GFR-binding peptide
  MOD_RES (2)..(4): Xaa is C or S
RXGXGEVVMDSMEGIVVKENEDMIQMTINSL

SEQ ID NO: 75242 - protein, 32 aa, Artificial Sequence
  Cyclic GFR-binding peptide
  MOD_RES (26)..(27): Xaa is C or S
VQVEKVVKENEDVKAMKVSRLETPVXXAKPIK

SEQ ID NO: 75243 - protein, 35 aa, Artificial Sequence; identical to SEQ ID NO: 26594
  Cyclic GFR-binding peptide
  MOD_RES (1)..(33): Xaa is C or S

SEQ ID NO: 75244 - protein, 25 aa, Artificial Sequence
  Cyclic GFR-binding peptide
VMNVTAKKIVNSSDDIKRVQVPRLK

SEQ ID NO: 75245 - protein, 24 aa, Artificial Sequence
  Cyclic GFR-binding peptide
VVMSMEGIVKPTRGVMIQITINSL

SEQ ID NO: 75246 - protein, 25 aa, Artificial Sequence
  Cyclic GFR-binding peptide
SKVIMVTAKKIKPTKGIIKRIQVPR

SEQ ID NO: 75247 - protein, 30 aa, Artificial Sequence
  Cyclic GFR-binding peptide
  MOD_RES (2)..(2): Xaa is C or S
GXARVVMNVTAKKIVNSSDDIKRVQVPRLQ

SEQ ID NO: 75248 - protein, 22 aa, Artificial Sequence
  Cyclic GFR-binding peptide
MVQVEKVKPTRGVVKAIKVSRL

SEQ ID NO: 75249 - protein, 36 aa, Artificial Sequence
  Cyclic GFR-binding peptide
  MOD_RES (30)..(31): Xaa is C or S
RVIMSMEGIVKPKRGVMIQITINSLAQPVXXPAASA

SEQ ID NO: 75250 - protein, 33 aa, Artificial Sequence
  Cyclic GFR-binding peptide
  MOD_RES (29)..(30): Xaa is C or S
VMNVTAKKIVNSSDDIKRVQVPRLQTPAXXPKP

SEQ ID NO: 75251 - protein, 33 aa, Artificial Sequence; identical to SEQ ID NO: 26602
  Cyclic GFR-binding peptide
  MOD_RES (1)..(33): Xaa is C or S

SEQ ID NO: 75252 - protein, 36 aa, Artificial Sequence; identical to SEQ ID NO: 26607
  Cyclic GFR-binding peptide
  MOD_RES (2)..(34)..(35): Xaa is C or S

SEQ ID NO: 75253 - protein, 22 aa, Artificial Sequence
  Cyclic GFR-binding peptide
VQVEKVKPTRGVVKAIKVSRLD

SEQ ID NO: 75254 - protein, 33 aa, Artificial Sequence
  Cyclic GFR-binding peptide
  MOD_RES (29)..(30): Xaa is C or S
VMNVQVEKIVNSSDDVKAVKVSRLQTPAXXPKP

SEQ ID NO: 75255 - protein, 29 aa, Artificial Sequence
  Cyclic GFR-binding peptide
  MOD_RES (26)..(27): Xaa is C or S
VTAKKIVNSSDDIKRVQVPRLKTPAXXPK

SEQ ID NO: 75256 - protein, 33 aa, Artificial Sequence
  Cyclic GFR-binding peptide
  MOD_RES (32)..(32): Xaa is C or S
LRNSLQELKPKKRVYEYYLVTLPEHHVRSPQXK

SEQ ID NO: 75257 - protein, 34 aa, Artificial Sequence
  Cyclic GFR-binding peptide
  MOD_RES (28)..(29): Xaa is C or S
MEVTAKKVVKDYEDIKRMQVPRLETPVXXAKPIS

SEQ ID NO: 75258 - protein, 37 aa, Artificial Sequence; identical to SEQ ID NO: 26613
  Cyclic GFR-binding peptide
  MOD_RES (2)..(34)..(35): Xaa is C or S

SEQ ID NO: 75259 - protein, 31 aa, Artificial Sequence
  Cyclic GFR-binding peptide
  MOD_RES (1)..(3): Xaa is C or S
XKXSKVVMSMEGIVKPTRGVMIQITINSLDQ

SEQ ID NO: 75260 - protein, 27 aa, Artificial Sequence
  Cyclic GFR-binding peptide
  MOD_RES (26)..(27): Xaa is C or S
VTAKKVVKDYEDIKRMQVPRLETPVXX

SEQ ID NO: 75261 - protein, 31 aa, Artificial Sequence
  Cyclic GFR-binding peptide
  MOD_RES (26)..(27): Xaa is C or S
SMEGIVVKDYEDMIQMTINSLETPVXXAKPI

SEQ ID NO: 75262 - protein, 41 aa, Artificial Sequence; identical to SEQ ID NO: 26617
  Cyclic GFR-binding peptide
  MOD_RES (2)..(4)..(36)..(37): Xaa is C or S

SEQ ID NO: 75263 - protein, 29 aa, Artificial Sequence
  Cyclic GFR-binding peptide
  MOD_RES (2)..(2): Xaa is C or S
KXSKVIMVQVEKIKPTKGIVKAIKVSRLD

SEQ ID NO: 75264 - protein, 27 aa, Artificial Sequence
  Cyclic GFR-binding peptide
  MOD_RES (27)..(27): Xaa is C or S
MVTAKKIKPTKGIIKRIQVPRLDQSVX

SEQ ID NO: 75265 - protein, 34 aa, Artificial Sequence
  Cyclic GFR-binding peptide
  MOD_RES (30)..(31): Xaa is C or S
VVMESMEGIVVKDYEDMIQMTINSLETPVXXAKP

SEQ ID NO: 75266 - protein, 34 aa, Artificial Sequence
  Cyclic GFR-binding peptide
  MOD_RES (33)..(33): Xaa is C or S
ELTNSLQEFIPKKRVIEYYVVPLPELQVQTPRXQ

SEQ ID NO: 75267 - protein, 25 aa, Artificial Sequence
  Cyclic GFR-binding peptide
ELRNSLQELKPKKRVYEYYLVTLPE

SEQ ID NO: 75268 - protein, 32 aa, Artificial Sequence
  Cyclic GFR-binding peptide
  MOD_RES (30)..(31): Xaa is C or S
VVMDVTAKKVVKENEDIKRMQVPRLETPVXXA

SEQ ID NO: 75269 - protein, 31 aa, Artificial Sequence
  Cyclic GFR-binding peptide
  MOD_RES (26)..(27): Xaa is C or S
SMEGIIKPTKGIMIQITINSLDQSVXXPSAS

SEQ ID NO: 75270 - protein, 32 aa, Artificial Sequence; identical to SEQ ID NO: 26628
  Cyclic GFR-binding peptide
  MOD_RES (1)..(1): Xaa is C or S

SEQ ID NO: 75271 - protein, 27 aa, Artificial Sequence
  Cyclic GFR-binding peptide
VMEVQVEKVVKDYEDVKAMKVSRLETP

SEQ ID NO: 75272 - protein, 31 aa, Artificial Sequence
  Cyclic GFR-binding peptide
  MOD_RES (2)..(2): Xaa is C or S
GXSRVVMNSMEGIIVNSSDDMIQVTINSLKT

SEQ ID NO: 75273 - protein, 31 aa, Artificial Sequence
  Cyclic GFR-binding peptide
  MOD_RES (2)..(2): Xaa is C or S
KXSKVIMSMEGIIKPTKGIMIQITINSLDQS

SEQ ID NO: 75274 - protein, 34 aa, Artificial Sequence; identical to SEQ ID NO: 26632
  Cyclic GFR-binding peptide

SEQ ID NO: 75275 - protein, 24 aa, Artificial Sequence
  Cyclic GFR-binding peptide
VVMEVTAKKVVKDYEDIKRMQVPR

SEQ ID NO: 75276 - protein, 30 aa, Artificial Sequence
  Cyclic GFR-binding peptide
  MOD_RES (1)..(3): Xaa is C or S
XGXGEVVMEVQVEKVVKDYEDVKAMKVSRL

SEQ ID NO: 75277 - protein, 32 aa, Artificial Sequence
  Cyclic GFR-binding peptide
  MOD_RES (2)..(4): Xaa is C or S
RXGXGEVVMEVTAKKVVKDYEDIKRMQVPRLE

SEQ ID NO: 75278 - protein, 32 aa, Artificial Sequence
  Cyclic GFR-binding peptide
  MOD_RES (29)..(30): Xaa is C or S
VMNSMEGIIVNSSDDMIQVTINSLKTPAXXPK

SEQ ID NO: 75279 - protein, 29 aa, Artificial Sequence
  Cyclic GFR-binding peptide
  MOD_RES (2)..(2): Xaa is C or S
GXSRVVMNVTAKKIVNSSDDIKRVQVPRL

SEQ ID NO: 75280 - protein, 29 aa, Artificial Sequence
  Cyclic GFR-binding peptide
VVMESMEGIVVKDYEDMIQMTINSLETPV

SEQ ID NO: 75281 - protein, 30 aa, Artificial Sequence
  Cyclic GFR-binding peptide
  MOD_RES (2)..(2): Xaa is C or S
GXSRVVMNVQVEKIVNSSDDVKAVKVSRLK

SEQ ID NO: 75282 - protein, 32 aa, Artificial Sequence
  Cyclic GFR-binding peptide
  MOD_RES (1)..(3): Xaa is C or S
XKXSKVIMVTAKKIKPTKGIIKRIQVPRLDQS

SEQ ID NO: 75283 - protein, 33 aa, Artificial Sequence; identical to SEQ ID NO: 26636
  Cyclic GFR-binding peptide
  MOD_RES (32)..(33): Xaa is C or S

SEQ ID NO: 75284 - protein, 33 aa, Artificial Sequence; identical to SEQ ID NO: 26640
  Cyclic GFR-binding peptide
  MOD_RES (33)..(33): Xaa is C or S

SEQ ID NO: 75285 - protein, 31 aa, Artificial Sequence
  Cyclic GFR-binding peptide
  MOD_RES (30)..(30): Xaa is C or S
LFNSLQEHQGQHPKIRYYVMPLPEEETPVXE

SEQ ID NO: 75286 - protein, 21 aa, Artificial Sequence
  Cyclic GFR-binding peptide
VQVEKIVNSSDDVKAVKVSRL

SEQ ID NO: 75287 - protein, 34 aa, Artificial Sequence; identical to SEQ ID NO: 26642
  Cyclic GFR-binding peptide
  MOD_RES (31)..(32): Xaa is C or S

SEQ ID NO: 75288 - protein, 36 aa, Artificial Sequence; identical to SEQ ID NO: 26641
  Cyclic GFR-binding peptide
  MOD_RES (1)..(32)..(33): Xaa is C or S

SEQ ID NO: 75289 - protein, 40 aa, Artificial Sequence; identical to SEQ ID NO: 26643
  Cyclic GFR-binding peptide
  MOD_RES (36)..(36): Xaa is C or S

SEQ ID NO: 75290 - protein, 30 aa, Artificial Sequence
  Cyclic GFR-binding peptide
  MOD_RES (1)..(1): Xaa is C or S
XSRVVMNSMEGIIVNSSDDMIQVTINSLKT

SEQ ID NO: 75291 - protein, 38 aa, Artificial Sequence; identical to SEQ ID NO: 26650
  Cyclic GFR-binding peptide
  MOD_RES (32)..(33): Xaa is C or S

SEQ ID NO: 75292 - protein, 27 aa, Artificial Sequence
  Cyclic GFR-binding peptide
  MOD_RES (27)..(27): Xaa is C or S
MVQVEKIKPTKGIVKAIKVSRLDQSVX

SEQ ID NO: 75293 - protein, 30 aa, Artificial Sequence
  Cyclic GFR-binding peptide
  MOD_RES (29)..(30): Xaa is C or S
VIMSMEGIIKPTKGIMIQITINSLDQSVXX

SEQ ID NO: 75294 - protein, 33 aa, Artificial Sequence
  Cyclic GFR-binding peptide
  MOD_RES (27)..(28): Xaa is C or S
MVTAKKVKPTRGVIKRIQVPRLDQPVXXPSASA

SEQ ID NO: 75295 - protein, 34 aa, Artificial Sequence
  Cyclic GFR-binding peptide
  MOD_RES (29)..(29): Xaa is C or S
VMNVQVEKIVNSSDDVKAVKVSRLKTPAXTPKTV

SEQ ID NO: 75296 - protein, 34 aa, Artificial Sequence; identical to SEQ ID NO: 26658
  Cyclic GFR-binding peptide
  MOD_RES (1)..(33)..(34): Xaa is C or S

SEQ ID NO: 75297 - protein, 35 aa, Artificial Sequence
  Cyclic GFR-binding peptide
  MOD_RES (2)..(4): Xaa is C or S
EXKXALHDELTNSLQEFIPKKRVIEYYLVTLPELQ

SEQ ID NO: 75298 - protein, 27 aa, Artificial Sequence
  Cyclic GFR-binding peptide
MNVQVEKIVNSSDDVKAVKVSRLKTPA

SEQ ID NO: 75299 - protein, 36 aa, Artificial Sequence
  Cyclic GFR-binding peptide
  MOD_RES (30)..(31): Xaa is C or S
VVMNSMEGIIVNSSDDMIQVTINSLQTPAXXPKPVT

SEQ ID NO: 75300 - protein, 33 aa, Artificial Sequence; identical to SEQ ID NO: 26663
  Cyclic GFR-binding peptide
  MOD_RES (1)..(3): Xaa is C or S

SEQ ID NO: 75301 - protein, 31 aa, Artificial Sequence
  Cyclic GFR-binding peptide
  MOD_RES (28)..(29): Xaa is C or S
VMVQVEKVKPTRGVVKAIKVSRLDQPVXXPS

SEQ ID NO: 75302 - protein, 38 aa, Artificial Sequence; identical to SEQ ID NO: 26666
  Cyclic GFR-binding peptide
  MOD_RES (32)..(32): Xaa is C or S

SEQ ID NO: 75303 - protein, 32 aa, Artificial Sequence
  Cyclic GFR-binding peptide
  MOD_RES (2)..(4): Xaa is C or S
SXKXSKVVMVTAKKVKPTRGVIKRIQVPRLDQ

SEQ ID NO: 75304 - protein, 36 aa, Artificial Sequence; identical to SEQ ID NO: 26671
  Cyclic GFR-binding peptide
  MOD_RES (1)..(3): Xaa is C or S

SEQ ID NO: 75305 - protein, 33 aa, Artificial Sequence
  Cyclic GFR-binding peptide
ALHDELTNSLQEFIPKKRVIEYYLVTLPELQVQ

SEQ ID NO: 75306 - protein, 31 aa, Artificial Sequence
  Cyclic GFR-binding peptide
  MOD_RES (26)..(27): Xaa is C or S
SMEGIIVNSSDDMIQVTINSLQTPAXXPKPV

SEQ ID NO: 75307 - protein, 34 aa, Artificial Sequence
  Cyclic GFR-binding peptide
  MOD_RES (33)..(33): Xaa is C or S
ELRNSLQELKPKKRVYEYYLVTLPEHHVRSPQXK

SEQ ID NO: 75308 - protein, 32 aa, Artificial Sequence; identical to SEQ ID NO: 26677
  Cyclic GFR-binding peptide
  MOD_RES (1)..(32): Xaa is C or S

SEQ ID NO: 75309 - protein, 34 aa, Artificial Sequence; identical to SEQ ID NO: 26678
  Cyclic GFR-binding peptide
  MOD_RES (1)..(33): Xaa is C or S

SEQ ID NO: 75310 - protein, 34 aa, Artificial Sequence
  Cyclic GFR-binding peptide
  MOD_RES (29)..(30): Xaa is C or S
VIMVTAKKIKPTKGIIKRIQVPRLDQSVXXPSAS

SEQ ID NO: 75311 - protein, 28 aa, Artificial Sequence
  Cyclic GFR-binding peptide
LRNSLQELKPKKRVYEYYLVTLPEHHVR

SEQ ID NO: 75312 - protein, 23 aa, Artificial Sequence
  Cyclic GFR-binding peptide
VQVEKIVNSSDDVKAVKVSRLKT

SEQ ID NO: 75313 - protein, 24 aa, Artificial Sequence
  Cyclic GFR-binding peptide
VMEVTAKKVVKDYEDIKRMQVPRL

SEQ ID NO: 75314 - protein, 26 aa, Artificial Sequence
  Cyclic GFR-binding peptide
VVMNSMEGIIVNSSDDMIQVTINSLK

SEQ ID NO: 75315 - protein, 29 aa, Artificial Sequence
  Cyclic GFR-binding peptide
  MOD_RES (28)..(29): Xaa is C or S
MNVTAKKIVNSSDDIKRVQVPRLQTPAXX

SEQ ID NO: 75316 - protein, 40 aa, Artificial Sequence; identical to SEQ ID NO: 26681
  Cyclic GFR-binding peptide
  MOD_RES (2)..(34)..(35): Xaa is C or S

SEQ ID NO: 75317 - protein, 31 aa, Artificial Sequence; identical to SEQ ID NO: 26682
  Cyclic GFR-binding peptide
  MOD_RES (31)..(31): Xaa is C or S

SEQ ID NO: 75318 - protein, 28 aa, Artificial Sequence
  Cyclic GFR-binding peptide
VMESMEGIVVKDYEDMIQMTINSLETPV

SEQ ID NO: 75319 - protein, 28 aa, Artificial Sequence
  Cyclic GFR-binding peptide
  MOD_RES (2)..(2): Xaa is C or S
KXSKVVMVTAKKVKPTRGVIKRIQVPRL

SEQ ID NO: 75320 - protein, 33 aa, Artificial Sequence
  Cyclic GFR-binding peptide
  MOD_RES (1)..(3): Xaa is C or S
XGXGEVVMDVTAKKVVKENEDIKRMQVPRLETP

SEQ ID NO: 75321 - protein, 33 aa, Artificial Sequence
  Cyclic GFR-binding peptide
  MOD_RES (29)..(30): Xaa is C or S
VMNSMEGIIVNSSDDMIQVTINSLQTPAXXPKP

SEQ ID NO: 75322 - protein, 36 aa, Artificial Sequence
  Cyclic GFR-binding peptide
  MOD_RES (30)..(31): Xaa is C or S
VVMNSMEGIIVNSSDDMIQVTINSLKTPAXXPKPVY

SEQ ID NO: 75323 - protein, 27 aa, Artificial Sequence
  Cyclic GFR-binding peptide
  MOD_RES (1)..(1): Xaa is C or S
XGEVVMEVTAKKVVKDYEDIKRMQVPR

SEQ ID NO: 75324 - protein, 28 aa, Artificial Sequence
  Cyclic GFR-binding peptide
VVMDVTAKKVVKENEDIKRMQVPRLETP

SEQ ID NO: 75325 - protein, 37 aa, Artificial Sequence; identical to SEQ ID NO: 26690
  Cyclic GFR-binding peptide
  MOD_RES (2)..(4)..(36)..(37): Xaa is C or S

SEQ ID NO: 75326 - protein, 30 aa, Artificial Sequence
  Cyclic GFR-binding peptide
  MOD_RES (1)..(1): Xaa is C or S
XELHEELRNSLQELKPKKRVYEYYVVPLPE

SEQ ID NO: 75327 - protein, 27 aa, Artificial Sequence
  Cyclic GFR-binding peptide
  MOD_RES (26)..(27): Xaa is C or S
SMEGIIVNSSDDMIQVTINSLQTPAXX

SEQ ID NO: 75328 - protein, 28 aa, Artificial Sequence
  Cyclic GFR-binding peptide
  MOD_RES (2)..(2): Xaa is C or S
GXARVVMNVTAKKIVNSSDDIKRVQVPR

SEQ ID NO: 75329 - protein, 41 aa, Artificial Sequence; identical to SEQ ID NO: 26698
  Cyclic GFR-binding peptide
  MOD_RES (2)..(4)..(36)..(37): Xaa is C or S

SEQ ID NO: 75330 - protein, 24 aa, Artificial Sequence
  Cyclic GFR-binding peptide
SMEGIVVKENEDMIQMTINSLETP

SEQ ID NO: 75331 - protein, 34 aa, Artificial Sequence; identical to SEQ ID NO: 26700
  Cyclic GFR-binding peptide
  MOD_RES (1)..(33): Xaa is C or S

SEQ ID NO: 75332 - protein, 25 aa, Artificial Sequence
  Cyclic GFR-binding peptide
VQVEKIKPTKGIVKAIKVSRLDQSV

SEQ ID NO: 75333 - protein, 33 aa, Artificial Sequence
  Cyclic GFR-binding peptide
  MOD_RES (32)..(32): Xaa is C or S
LTNSLQEFIPKKRVIEYYVVPLPELQVQTPRXQ

SEQ ID NO: 75334 - protein, 25 aa, Artificial Sequence
  Cyclic GFR-binding peptide
VIMSMEGIIKPTKGIMIQITINSLD

SEQ ID NO: 75335 - protein, 21 aa, Artificial Sequence
  Cyclic GFR-binding peptide
VTAKKIKPTKGIIKRIQVPRL

SEQ ID NO: 75336 - protein, 39 aa, Artificial Sequence; identical to SEQ ID NO: 26705
  Cyclic GFR-binding peptide
  MOD_RES (35)..(35): Xaa is C or S

SEQ ID NO: 75337 - protein, 31 aa, Artificial Sequence
  Cyclic GFR-binding peptide
  MOD_RES (29)..(30): Xaa is C or S
VVMSMEGIVKPTRGVMIQITINSLDQPVXXP

SEQ ID NO: 75338 - protein, 27 aa, Artificial Sequence
  Cyclic GFR-binding peptide
VMESMEGIVVKDYEDMIQMTINSLETP

SEQ ID NO: 75339 - protein, 27 aa, Artificial Sequence
  Cyclic GFR-binding peptide
  MOD_RES (27)..(27): Xaa is C or S
NSMEGIIVNSSDDMIQVTINSLQTPAX

SEQ ID NO: 75340 - protein, 29 aa, Artificial Sequence
  Cyclic GFR-binding peptide
  MOD_RES (1)..(1): Xaa is C or S
XARVVMNVTAKKIVNSSDDIKRVQVPRLQ

SEQ ID NO: 75341 - protein, 33 aa, Artificial Sequence
  Cyclic GFR-binding peptide
  MOD_RES (2)..(2): Xaa is C or S
EXKNHQLFNSLQEHQGQHPKIRYYVMPLPEEET

SEQ ID NO: 75342 - protein, 26 aa, Artificial Sequence
  Cyclic GFR-binding peptide
SKVVMVTAKKVKPTRGVIKRIQVPRL

SEQ ID NO: 75343 - protein, 31 aa, Artificial Sequence
  Cyclic GFR-binding peptide
  MOD_RES (30)..(31): Xaa is C or S
VVMNVQVEKIVNSSDDVKAVKVSRLKTPAXX

SEQ ID NO: 75344 - protein, 34 aa, Artificial Sequence; identical to SEQ ID NO: 26712
  Cyclic GFR-binding peptide
  MOD_RES (2)..(33)..(34): Xaa is C or S

SEQ ID NO: 75345 - protein, 27 aa, Artificial Sequence
  Cyclic GFR-binding peptide
MNSMEGIIVNSSDDMIQVTINSLKTPA

SEQ ID NO: 75346 - protein, 29 aa, Artificial Sequence
  Cyclic GFR-binding peptide
  MOD_RES (2)..(2): Xaa is C or S
GXARVVMNSMEGIIVNSSDDMIQVTINSL

SEQ ID NO: 75347 - protein, 32 aa, Artificial Sequence
  Cyclic GFR-binding peptide
  MOD_RES (1)..(3): Xaa is C or S
XEXKNHQLFNSLQEHQGQHPKIRYYVMPLPEE

SEQ ID NO: 75348 - protein, 25 aa, Artificial Sequence
  Cyclic GFR-binding peptide
VIMSMEGIVKPKRGVMIQITINSLA

SEQ ID NO: 75349 - protein, 27 aa, Artificial Sequence
  Cyclic GFR-binding peptide
  MOD_RES (1)..(1): Xaa is C or S
XSRVVMNSMEGIIVNSSDDMIQVTINS

SEQ ID NO: 75350 - protein, 29 aa, Artificial Sequence
  Cyclic GFR-binding peptide
  MOD_RES (1)..(3): Xaa is C or S
XKXSRVIMVQVEKVKPKRGVVKAIKVSRL

SEQ ID NO: 75351 - protein, 37 aa, Artificial Sequence; identical to SEQ ID NO: 26713
  Cyclic GFR-binding peptide
  MOD_RES (31)..(32): Xaa is C or S

SEQ ID NO: 75352 - protein, 34 aa, Artificial Sequence
  Cyclic GFR-binding peptide
  MOD_RES (30)..(30): Xaa is C or S
VVMNSMEGIIVNSSDDMIQVTINSLKTPAXTPKT

SEQ ID NO: 75353 - protein, 40 aa, Artificial Sequence; identical to SEQ ID NO: 26715
  Cyclic GFR-binding peptide
  MOD_RES (2)..(4)..(36)..(37): Xaa is C or S

SEQ ID NO: 75354 - protein, 34 aa, Artificial Sequence
  Cyclic GFR-binding peptide
  MOD_RES (29)..(29): Xaa is C or S
VMNSMEGIIVNSSDDMIQVTINSLKTPAXTPKTV

SEQ ID NO: 75355 - protein, 37 aa, Artificial Sequence; identical to SEQ ID NO: 26718
  Cyclic GFR-binding peptide
  MOD_RES (1)..(3)..(35)..(36): Xaa is C or S

SEQ ID NO: 75356 - protein, 25 aa, Artificial Sequence
  Cyclic GFR-binding peptide
VVMDVQVEKVVKENEDVKAMKVSRL

SEQ ID NO: 75357 - protein, 34 aa, Artificial Sequence
  Cyclic GFR-binding peptide
  MOD_RES (30)..(30): Xaa is C or S
NSLQEFIPKKRVIEYYVVPLPELQVQTPRXQVNR

SEQ ID NO: 75358 - protein, 38 aa, Artificial Sequence; identical to SEQ ID NO: 26725
  Cyclic GFR-binding peptide
  MOD_RES (32)..(33): Xaa is C or S

SEQ ID NO: 75359 - protein, 33 aa, Artificial Sequence; identical to SEQ ID NO: 26726
  Cyclic GFR-binding peptide
  MOD_RES (31)..(31): Xaa is C or S

SEQ ID NO: 75360 - protein, 24 aa, Artificial Sequence
  Cyclic GFR-binding peptide
VVMNSMEGIIVNSSDDMIQVTINS

SEQ ID NO: 75361 - protein, 31 aa, Artificial Sequence
  Cyclic GFR-binding peptide
  MOD_RES (27)..(28): Xaa is C or S
MVTAKKVKPKRGVIKRIQVPRLAQPVXXPAA

SEQ ID NO: 75362 - protein, 33 aa, Artificial Sequence; identical to SEQ ID NO: 26730
  Cyclic GFR-binding peptide
  MOD_RES (2)..(33): Xaa is C or S

SEQ ID NO: 75363 - protein, 40 aa, Artificial Sequence; identical to SEQ ID NO: 26731
  Cyclic GFR-binding peptide
  MOD_RES (2)..(4)..(36)..(37): Xaa is C or S

SEQ ID NO: 75364 - protein, 25 aa, Artificial Sequence
  Cyclic GFR-binding peptide
VIMVTAKKIKPTKGIIKRIQVPRLD

SEQ ID NO: 75365 - protein, 39 aa, Artificial Sequence; identical to SEQ ID NO: 26732
  Cyclic GFR-binding peptide
  MOD_RES (2)..(4)..(35)..(36): Xaa is C or S

SEQ ID NO: 75366 - protein, 39 aa, Artificial Sequence; identical to SEQ ID NO: 26733
  Cyclic GFR-binding peptide
  MOD_RES (1)..(3): Xaa is C or S

SEQ ID NO: 75367 - protein, 27 aa, Artificial Sequence
  Cyclic GFR-binding peptide
  MOD_RES (1)..(1): Xaa is C or S
XGEVVMEVQVEKVVKDYEDVKAMKVSR

SEQ ID NO: 75368 - protein, 43 aa, Artificial Sequence; identical to SEQ ID NO: 26735
  Cyclic GFR-binding peptide
  MOD_RES (2)..(4)..(38): Xaa is C or S

SEQ ID NO: 75369 - protein, 25 aa, Artificial Sequence
  Cyclic GFR-binding peptide
SMEGIIVNSSDDMIQVTINSLKTPA

SEQ ID NO: 75370 - protein, 34 aa, Artificial Sequence
  Cyclic GFR-binding peptide
  MOD_RES (2)..(4): Xaa is C or S
AXAXELHEELRNSLQELKPKKRVYEYYLVTLPEH

SEQ ID NO: 75371 - protein, 27 aa, Artificial Sequence
  Cyclic GFR-binding peptide
SRVIMVQVEKVKPKRGVVKAIKVSRLA

SEQ ID NO: 75372 - protein, 38 aa, Artificial Sequence; identical to SEQ ID NO: 26743
  Cyclic GFR-binding peptide
  MOD_RES (37)..(37): Xaa is C or S

SEQ ID NO: 75373 - protein, 33 aa, Artificial Sequence; identical to SEQ ID NO: 26745
  Cyclic GFR-binding peptide
  MOD_RES (1)..(33): Xaa is C or S

SEQ ID NO: 75374 - protein, 30 aa, Artificial Sequence
  Cyclic GFR-binding peptide
  MOD_RES (27)..(28): Xaa is C or S
NVQVEKIVNSSDDVKAVKVSRLQTPAXXPK

SEQ ID NO: 75375 - protein, 29 aa, Artificial Sequence
  Cyclic GFR-binding peptide
RVIMVTAKKVKPKRGVIKRIQVPRLAQPV

SEQ ID NO: 75376 - protein, 32 aa, Artificial Sequence
  Cyclic GFR-binding peptide
  MOD_RES (28)..(28): Xaa is C or S
MNSMEGIIVNSSDDMIQVTINSLKTPAXTPKT

SEQ ID NO: 75377 - protein, 26 aa, Artificial Sequence
  Cyclic GFR-binding peptide
  MOD_RES (26)..(26): Xaa is C or S
VQVEKVKPTRGVVKAIKVSRLDQPVX

SEQ ID NO: 75378 - protein, 33 aa, Artificial Sequence
  Cyclic GFR-binding peptide
  MOD_RES (28)..(29): Xaa is C or S
IMSMEGIIKPTKGIMIQITINSLDQSVXXPSAS

SEQ ID NO: 75379 - protein, 31 aa, Artificial Sequence
  Cyclic GFR-binding peptide
  MOD_RES (29)..(30): Xaa is C or S
VIMVTAKKVKPKRGVIKRIQVPRLAQPVXXP

SEQ ID NO: 75380 - protein, 35 aa, Artificial Sequence; identical to SEQ ID NO: 26762
  Cyclic GFR-binding peptide
  MOD_RES (32)..(33): Xaa is C or S

SEQ ID NO: 75381 - protein, 41 aa, Artificial Sequence; identical to SEQ ID NO: 26764
  Cyclic GFR-binding peptide
  MOD_RES (1)..(38): Xaa is C or S

SEQ ID NO: 75382 - protein, 38 aa, Artificial Sequence; identical to SEQ ID NO: 26765
  Cyclic GFR-binding peptide
  MOD_RES (1)..(33)..(34): Xaa is C or S

SEQ ID NO: 75383 - protein, 36 aa, Artificial Sequence; identical to SEQ ID NO: 26768
  Cyclic GFR-binding peptide
  MOD_RES (1)..(3): Xaa is C or S

SEQ ID NO: 75384 - protein, 32 aa, Artificial Sequence
  Cyclic GFR-binding peptide
  MOD_RES (32)..(32): Xaa is C or S
HQLFNSLQEHQGQHPKIRYYVMPLPEEETPVX

SEQ ID NO: 75385 - protein, 26 aa, Artificial Sequence
  Cyclic GFR-binding peptide
MVTAKKIKPTKGIIKRIQVPRLDQSV

SEQ ID NO: 75386 - protein, 28 aa, Artificial Sequence
  Cyclic GFR-binding peptide
VMNVQVEKIVNSSDDVKAVKVSRLQTPA

SEQ ID NO: 75387 - protein, 29 aa, Artificial Sequence
  Cyclic GFR-binding peptide
  MOD_RES (29)..(29): Xaa is C or S
VMNVTAKKIVNSSDDIKRVQVPRLKTPAX

SEQ ID NO: 75388 - protein, 40 aa, Artificial Sequence; identical to SEQ ID NO: 26776
  Cyclic GFR-binding peptide
  MOD_RES (2)..(34)..(35): Xaa is C or S

SEQ ID NO: 75389 - protein, 24 aa, Artificial Sequence
  Cyclic GFR-binding peptide
VVMDVTAKKVVKENEDIKRMQVPR

SEQ ID NO: 75390 - protein, 29 aa, Artificial Sequence
  Cyclic GFR-binding peptide
  MOD_RES (28)..(29): Xaa is C or S
MNVTAKKIVNSSDDIKRVQVPRLKTPAXX

SEQ ID NO: 75391 - protein, 28 aa, Artificial Sequence
  Cyclic GFR-binding peptide
  MOD_RES (1)..(3): Xaa is C or S
XKXSRVIMVQVEKVKPKRGVVKAIKVSR

SEQ ID NO: 75392 - protein, 29 aa, Artificial Sequence
  Cyclic GFR-binding peptide
ELHEELRNSLQELKPKKRVYEYYVVPLPE

SEQ ID NO: 75393 - protein, 25 aa, Artificial Sequence
  Cyclic GFR-binding peptide
EVVMEVTAKKVVKDYEDIKRMQVPR

SEQ ID NO: 75394 - protein, 32 aa, Artificial Sequence
  Cyclic GFR-binding peptide
  MOD_RES (30)..(31): Xaa is C or S
VVMDVQVEKVVKENEDVKAMKVSRLETPVXXA

SEQ ID NO: 75395 - protein, 27 aa, Artificial Sequence
  Cyclic GFR-binding peptide
VMVTAKKVKPTRGVIKRIQVPRLDQPV

SEQ ID NO: 75396 - protein, 36 aa, Artificial Sequence
  Cyclic GFR-binding peptide
  MOD_RES (34)..(34): Xaa is C or S
DELTNSLQEFIPKKRVIEYYVVPLPELQVQTPRXQV

SEQ ID NO: 75397 - protein, 31 aa, Artificial Sequence
  Cyclic GFR-binding peptide
  MOD_RES (2)..(2): Xaa is C or S
GXGEVVMEVTAKKVVKDYEDIKRMQVPRLET

SEQ ID NO: 75398 - protein, 30 aa, Artificial Sequence
  Cyclic GFR-binding peptide
  MOD_RES (29)..(30): Xaa is C or S
VMNSMEGIIVNSSDDMIQVTINSLQTPAXX

SEQ ID NO: 75399 - protein, 32 aa, Artificial Sequence; identical to SEQ ID NO: 26789
  Cyclic GFR-binding peptide
  MOD_RES (31)..(32): Xaa is C or S

SEQ ID NO: 75400 - protein, 27 aa, Artificial Sequence
  Cyclic GFR-binding peptide
LFNSLQEHQGQHPKIRYYVMPLPEEET

SEQ ID NO: 75401 - protein, 31 aa, Artificial Sequence; identical to SEQ ID NO: 26791
  Cyclic GFR-binding peptide
  MOD_RES (31)..(31): Xaa is C or S

SEQ ID NO: 75402 - protein, 36 aa, Artificial Sequence; identical to SEQ ID NO: 26792
  Cyclic GFR-binding peptide
  MOD_RES (1)..(33)..(34): Xaa is C or S

SEQ ID NO: 75403 - protein, 25 aa, Artificial Sequence
  Cyclic GFR-binding peptide
VIMVQVEKIKPTKGIVKAIKVSRLD

SEQ ID NO: 75404 - protein, 28 aa, Artificial Sequence
  Cyclic GFR-binding peptide
FNSLQEHQGQHPKIRYYLMTLPEEETPV

SEQ ID NO: 75405 - protein, 24 aa, Artificial Sequence
  Cyclic GFR-binding peptide
DSMEGIVVKENEDMIQMTINSLET

SEQ ID NO: 75406 - protein, 26 aa, Artificial Sequence
  Cyclic GFR-binding peptide
  MOD_RES (26)..(26): Xaa is C or S
VTAKKVVKENEDIKRMQVPRLETPVX

SEQ ID NO: 75407 - protein, 37 aa, Artificial Sequence; identical to SEQ ID NO: 26795
  Cyclic GFR-binding peptide
  MOD_RES (2)..(34)..(35): Xaa is C or S

SEQ ID NO: 75408 - protein, 32 aa, Artificial Sequence
  Cyclic GFR-binding peptide
  MOD_RES (27)..(28): Xaa is C or S
MVTAKKVKPKRGVIKRIQVPRLAQPVXXPAAS

SEQ ID NO: 75409 - protein, 31 aa, Artificial Sequence
  Cyclic GFR-binding peptide
  MOD_RES (26)..(27): Xaa is C or S
VTAKKIKPTKGIIKRIQVPRLDQSVXXPSAS

SEQ ID NO: 75410 - protein, 41 aa, Artificial Sequence; identical to SEQ ID NO: 26798
  Cyclic GFR-binding peptide
  MOD_RES (1)..(3)..(35): Xaa is C or S

SEQ ID NO: 75411 - protein, 33 aa, Artificial Sequence
  Cyclic GFR-binding peptide
  MOD_RES (2)..(4): Xaa is C or S
SXKXSKVVMVQVEKVKPTRGVVKAIKVSRLDQP

SEQ ID NO: 75412 - protein, 37 aa, Artificial Sequence; identical to SEQ ID NO: 26799
  Cyclic GFR-binding peptide
  MOD_RES (1)..(3)..(35)..(36): Xaa is C or S

SEQ ID NO: 75413 - protein, 36 aa, Artificial Sequence; identical to SEQ ID NO: 26801
  Cyclic GFR-binding peptide
  MOD_RES (2)..(33)..(34): Xaa is C or S

SEQ ID NO: 75414 - protein, 31 aa, Artificial Sequence
  Cyclic GFR-binding peptide
  MOD_RES (28)..(29): Xaa is C or S
VMVTAKKVKPTRGVIKRIQVPRLDQPVXXPS

SEQ ID NO: 75415 - protein, 27 aa, Artificial Sequence
  Cyclic GFR-binding peptide
  MOD_RES (27)..(27): Xaa is C or S
MSMEGIVKPKRGVMIQITINSLAQPVX

SEQ ID NO: 75416 - protein, 27 aa, Artificial Sequence
  Cyclic GFR-binding peptide
RVVMNVTAKKIVNSSDDIKRVQVPRLQ

SEQ ID NO: 75417 - protein, 28 aa, Artificial Sequence
  Cyclic GFR-binding peptide
  MOD_RES (27)..(28): Xaa is C or S
MSMEGIVKPKRGVMIQITINSLAQPVXX

SEQ ID NO: 75418 - protein, 29 aa, Artificial Sequence
  Cyclic GFR-binding peptide
  MOD_RES (1)..(3): Xaa is C or S
XKXSRVIMVTAKKVKPKRGVIKRIQVPRL

SEQ ID NO: 75419 - protein, 35 aa, Artificial Sequence; identical to SEQ ID NO: 26810
  Cyclic GFR-binding peptide
  MOD_RES (32)..(33): Xaa is C or S

SEQ ID NO: 75420 - protein, 26 aa, Artificial Sequence
  Cyclic GFR-binding peptide
EELRNSLQELKPKKRVYEYYVVPLPE

SEQ ID NO: 75421 - protein, 37 aa, Artificial Sequence; identical to SEQ ID NO: 26817
  Cyclic GFR-binding peptide
  MOD_RES (31)..(32): Xaa is C or S

SEQ ID NO: 75422 - protein, 26 aa, Artificial Sequence
  Cyclic GFR-binding peptide
VMSMEGIVKPTRGVMIQITINSLDQP

SEQ ID NO: 75423 - protein, 31 aa, Artificial Sequence
  Cyclic GFR-binding peptide
  MOD_RES (28)..(29): Xaa is C or S
MNSMEGIIVNSSDDMIQVTINSLQTPAXXPK

SEQ ID NO: 75424 - protein, 37 aa, Artificial Sequence
  Cyclic GFR-binding peptide
  MOD_RES (33)..(33): Xaa is C or S
ELTNSLQEFIPKKRVIEYYVVPLPELQVQTPRXQVNR

SEQ ID NO: 75425 - protein, 40 aa, Artificial Sequence; identical to SEQ ID NO: 26821
  Cyclic GFR-binding peptide
  MOD_RES (2)..(4): Xaa is C or S

SEQ ID NO: 75426 - protein, 33 aa, Artificial Sequence
  Cyclic GFR-binding peptide
  MOD_RES (31)..(31): Xaa is C or S
QLFNSLQEHQGQHPKIRYYVMPLPEEETPVXEL

SEQ ID NO: 75427 - protein, 40 aa, Artificial Sequence; identical to SEQ ID NO: 26827
  Cyclic GFR-binding peptide
  MOD_RES (2)..(4)..(38): Xaa is C or S

SEQ ID NO: 75428 - protein, 24 aa, Artificial Sequence
  Cyclic GFR-binding peptide
VVMVQVEKVKPTRGVVKAIKVSRL

SEQ ID NO: 75429 - protein, 29 aa, Artificial Sequence
  Cyclic GFR-binding peptide
  MOD_RES (28)..(29): Xaa is C or S
VMSMEGIVKPTRGVMIQITINSLDQPVXX

SEQ ID NO: 75430 - protein, 31 aa, Artificial Sequence; identical to SEQ ID NO: 26830
  Cyclic GFR-binding peptide
  MOD_RES (1)..(1): Xaa is C or S

SEQ ID NO: 75431 - protein, 30 aa, Artificial Sequence; identical to SEQ ID NO: 2195
  Cyclic GFR-binding peptide

SEQ ID NO: 75432 - protein, 26 aa, Artificial Sequence
  Cyclic GFR-binding peptide
MVTAKKVKPTRGVIKRIQVPRLDQPV

SEQ ID NO: 75433 - protein, 30 aa, Artificial Sequence
  Cyclic GFR-binding peptide
  MOD_RES (2)..(2): Xaa is C or S
KXSKVIMSMEGIIKPTKGIMIQITINSLDQ

SEQ ID NO: 75434 - protein, 28 aa, Artificial Sequence
  Cyclic GFR-binding peptide
  MOD_RES (28)..(28): Xaa is C or S
MDSMEGIVVKENEDMIQMTINSLETPVX

SEQ ID NO: 75435 - protein, 39 aa, Artificial Sequence; identical to SEQ ID NO: 26838
  Cyclic GFR-binding peptide
  MOD_RES (1)..(33)..(34): Xaa is C or S

SEQ ID NO: 75436 - protein, 36 aa, Artificial Sequence
  Cyclic GFR-binding peptide
  MOD_RES (30)..(31): Xaa is C or S
KVVMSMEGIVKPTRGVMIQITINSLDQPVXXPSASA

SEQ ID NO: 75437 - protein, 37 aa, Artificial Sequence; identical to SEQ ID NO: 26840
  Cyclic GFR-binding peptide
  MOD_RES (31)..(32): Xaa is C or S

SEQ ID NO: 75438 - protein, 28 aa, Artificial Sequence
  Cyclic GFR-binding peptide
KVVMVQVEKVKPTRGVVKAIKVSRLDQP

SEQ ID NO: 75439 - protein, 29 aa, Artificial Sequence
  Cyclic GFR-binding peptide
  MOD_RES (27)..(28): Xaa is C or S
NVQVEKIVNSSDDVKAVKVSRLQTPAXXP

SEQ ID NO: 75440 - protein, 34 aa, Artificial Sequence
  Cyclic GFR-binding peptide
  MOD_RES (28)..(29): Xaa is C or S
MNSMEGIIVNSSDDMIQVTINSLQTPAXXPKPVT

SEQ ID NO: 75441 - protein, 30 aa, Artificial Sequence
  Cyclic GFR-binding peptide
  MOD_RES (2)..(2): Xaa is C or S
KXSKVVMVQVEKVKPTRGVVKAIKVSRLDQ

SEQ ID NO: 75442 - protein, 28 aa, Artificial Sequence
  Cyclic GFR-binding peptide
HQLFNSLQEHQGQHPKIRYYLMTLPEEE

SEQ ID NO: 75443 - protein, 36 aa, Artificial Sequence; identical to SEQ ID NO: 26850
  Cyclic GFR-binding peptide
  MOD_RES (31)..(31): Xaa is C or S

SEQ ID NO: 75444 - protein, 25 aa, Artificial Sequence
  Cyclic GFR-binding peptide
LFNSLQEHQGQHPKIRYYLMTLPEE

SEQ ID NO: 75445 - protein, 33 aa, Artificial Sequence
  Cyclic GFR-binding peptide
  MOD_RES (29)..(30): Xaa is C or S
VVMVTAKKVKPTRGVIKRIQVPRLDQPVXXPSA

SEQ ID NO: 75446 - protein, 30 aa, Artificial Sequence
  Cyclic GFR-binding peptide
  MOD_RES (1)..(1): Xaa is C or S
XGEVVMEVTAKKVVKDYEDIKRMQVPRLET

SEQ ID NO: 75447 - protein, 36 aa, Artificial Sequence; identical to SEQ ID NO: 26860
  Cyclic GFR-binding peptide
  MOD_RES (1)..(32)..(33): Xaa is C or S

SEQ ID NO: 75448 - protein, 34 aa, Artificial Sequence
  Cyclic GFR-binding peptide
  MOD_RES (1)..(3): Xaa is C or S
XKXALHDELTNSLQEFIPKKRVIEYYLVTLPELQ

SEQ ID NO: 75449 - protein, 36 aa, Artificial Sequence; identical to SEQ ID NO: 26862
  Cyclic GFR-binding peptide
  MOD_RES (2)..(4)..(35)..(36): Xaa is C or S

SEQ ID NO: 75450 - protein, 27 aa, Artificial Sequence
  Cyclic GFR-binding peptide
GEVVMEVTAKKVVKDYEDIKRMQVPRL

SEQ ID NO: 75451 - protein, 29 aa, Artificial Sequence
  Cyclic GFR-binding peptide
LRNSLQELKPKKRVYEYYLVTLPEHHVRS

SEQ ID NO: 75452 - protein, 25 aa, Artificial Sequence
  Cyclic GFR-binding peptide
VMDVTAKKVVKENEDIKRMQVPRLE

SEQ ID NO: 75453 - protein, 35 aa, Artificial Sequence; identical to SEQ ID NO: 26863
  Cyclic GFR-binding peptide
  MOD_RES (2)..(4)..(35): Xaa is C or S

SEQ ID NO: 75454 - protein, 21 aa, Artificial Sequence
  Cyclic GFR-binding peptide
EVTAKKVVKDYEDIKRMQVPR

SEQ ID NO: 75455 - protein, 28 aa, Artificial Sequence
  Cyclic GFR-binding peptide
VMNSMEGIIVNSSDDMIQVTINSLQTPA

SEQ ID NO: 75456 - protein, 33 aa, Artificial Sequence; identical to SEQ ID NO: 26867
  Cyclic GFR-binding peptide

SEQ ID NO: 75457 - protein, 31 aa, Artificial Sequence
  Cyclic GFR-binding peptide
LRNSLQELKPKKRVYEYYVVPLPEHHVRSPQ

SEQ ID NO: 75458 - protein, 29 aa, Artificial Sequence
  Cyclic GFR-binding peptide
  MOD_RES (28)..(29): Xaa is C or S
MNVQVEKIVNSSDDVKAVKVSRLQTPAXX

SEQ ID NO: 75459 - protein, 22 aa, Artificial Sequence
  Cyclic GFR-binding peptide
MEVTAKKVVKDYEDIKRMQVPR

SEQ ID NO: 75460 - protein, 30 aa, Artificial Sequence
  Cyclic GFR-binding peptide
  MOD_RES (27)..(28): Xaa is C or S
EVQVEKVVKDYEDVKAMKVSRLETPVXXAK

SEQ ID NO: 75461 - protein, 42 aa, Artificial Sequence; identical to SEQ ID NO: 26872
  Cyclic GFR-binding peptide
  MOD_RES (2)..(4)..(36)..(37): Xaa is C or S

SEQ ID NO: 75462 - protein, 22 aa, Artificial Sequence
  Cyclic GFR-binding peptide
DSMEGIVVKENEDMIQMTINSL

SEQ ID NO: 75463 - protein, 23 aa, Artificial Sequence
  Cyclic GFR-binding peptide
MEVTAKKVVKDYEDIKRMQVPRL

SEQ ID NO: 75464 - protein, 32 aa, Artificial Sequence; identical to SEQ ID NO: 26874
  Cyclic GFR-binding peptide
  MOD_RES (1)..(1): Xaa is C or S

SEQ ID NO: 75465 - protein, 29 aa, Artificial Sequence
  Cyclic GFR-binding peptide
  MOD_RES (26)..(27): Xaa is C or S
SMEGIIVNSSDDMIQVTINSLKTPAXXPK

SEQ ID NO: 75466 - protein, 27 aa, Artificial Sequence
  Cyclic GFR-binding peptide
ELRNSLQELKPKKRVYEYYLVTLPEHH

SEQ ID NO: 75467 - protein, 32 aa, Artificial Sequence
  Cyclic GFR-binding peptide
  MOD_RES (28)..(29): Xaa is C or S
MNSMEGIIVNSSDDMIQVTINSLQTPAXXPKP

SEQ ID NO: 75468 - protein, 28 aa, Artificial Sequence
  Cyclic GFR-binding peptide
  MOD_RES (2)..(2): Xaa is C or S
GXGEVVMDSMEGIVVKENEDMIQMTINS

SEQ ID NO: 75469 - protein, 38 aa, Artificial Sequence; identical to SEQ ID NO: 26883
  Cyclic GFR-binding peptide
  MOD_RES (32)..(33): Xaa is C or S

SEQ ID NO: 75470 - protein, 31 aa, Artificial Sequence
  Cyclic GFR-binding peptide
  MOD_RES (2)..(2): Xaa is C or S
KXSKVVMVQVEKVKPTRGVVKAIKVSRLDQP

SEQ ID NO: 75471 - protein, 36 aa, Artificial Sequence; identical to SEQ ID NO: 26884
  Cyclic GFR-binding peptide

SEQ ID NO: 75472 - protein, 30 aa, Artificial Sequence
  Cyclic GFR-binding peptide
GEVVMDVQVEKVVKENEDVKAMKVSRLETP

SEQ ID NO: 75473 - protein, 29 aa, Artificial Sequence
  Cyclic GFR-binding peptide
  MOD_RES (29)..(29): Xaa is C or S
VIMVQVEKIKPTKGIVKAIKVSRLDQSVX

SEQ ID NO: 75474 - protein, 39 aa, Artificial Sequence; identical to SEQ ID NO: 26886
  Cyclic GFR-binding peptide
  MOD_RES (1)..(3)..(35)..(36): Xaa is C or S

SEQ ID NO: 75475 - protein, 38 aa, Artificial Sequence; identical to SEQ ID NO: 26888
  Cyclic GFR-binding peptide
  MOD_RES (36)..(36): Xaa is C or S

SEQ ID NO: 75476 - protein, 38 aa, Artificial Sequence; identical to SEQ ID NO: 26890
  Cyclic GFR-binding peptide
  MOD_RES (1)..(3)..(35)..(36): Xaa is C or S

SEQ ID NO: 75477 - protein, 30 aa, Artificial Sequence
  Cyclic GFR-binding peptide
  MOD_RES (1)..(3): Xaa is C or S
XGXSRVVMNVTAKKIVNSSDDIKRVQVPRL

SEQ ID NO: 75478 - protein, 23 aa, Artificial Sequence
  Cyclic GFR-binding peptide
VQVEKIVNSSDDVKAVKVSRLQT

SEQ ID NO: 75479 - protein, 35 aa, Artificial Sequence
  Cyclic GFR-binding peptide
  MOD_RES (29)..(30): Xaa is C or S
VIMVQVEKVKPKRGVVKAIKVSRLAQPVXXPAASA

SEQ ID NO: 75480 - protein, 31 aa, Artificial Sequence
  Cyclic GFR-binding peptide
  MOD_RES (27)..(28): Xaa is C or S
MSMEGIIKPTKGIMIQITINSLDQSVXXPSA

SEQ ID NO: 75481 - protein, 32 aa, Artificial Sequence
  Cyclic GFR-binding peptide
  MOD_RES (28)..(29): Xaa is C or S
MNSMEGIIVNSSDDMIQVTINSLKTPAXXPKP

SEQ ID NO: 75482 - protein, 27 aa, Artificial Sequence
  Cyclic GFR-binding peptide
  MOD_RES (27)..(27): Xaa is C or S
MVQVEKVKPTRGVVKAIKVSRLDQPVX

SEQ ID NO: 75483 - protein, 30 aa, Artificial Sequence
  Cyclic GFR-binding peptide
  MOD_RES (26)..(27): Xaa is C or S
VQVEKVVKDYEDVKAMKVSRLETPVXXAKP

SEQ ID NO: 75484 - protein, 38 aa, Artificial Sequence; identical to SEQ ID NO: 26896
  Cyclic GFR-binding peptide
  MOD_RES (2)..(34)..(35): Xaa is C or S

SEQ ID NO: 75485 - protein, 32 aa, Artificial Sequence
  Cyclic GFR-binding peptide
  MOD_RES (31)..(31): Xaa is C or S
RNSLQELKPKKRVYEYYVVPLPEHHVRSPQXK

SEQ ID NO: 75486 - protein, 33 aa, Artificial Sequence; identical to SEQ ID NO: 26898
  Cyclic GFR-binding peptide
  MOD_RES (31)..(32): Xaa is C or S

SEQ ID NO: 75487 - protein, 22 aa, Artificial Sequence
  Cyclic GFR-binding peptide
NSMEGIIVNSSDDMIQVTINSL

SEQ ID NO: 75488 - protein, 28 aa, Artificial Sequence
  Cyclic GFR-binding peptide
  MOD_RES (26)..(27): Xaa is C or S
SMEGIVKPTRGVMIQITINSLDQPVXXP

SEQ ID NO: 75489 - protein, 37 aa, Artificial Sequence; identical to SEQ ID NO: 26903
  Cyclic GFR-binding peptide
  MOD_RES (2)..(4)..(36): Xaa is C or S

SEQ ID NO: 75490 - protein, 28 aa, Artificial Sequence
  Cyclic GFR-binding peptide
GEVVMDVQVEKVVKENEDVKAMKVSRLE

SEQ ID NO: 75491 - protein, 38 aa, Artificial Sequence; identical to SEQ ID NO: 26904
  Cyclic GFR-binding peptide
  MOD_RES (1)..(33)..(34): Xaa is C or S

SEQ ID NO: 75492 - protein, 39 aa, Artificial Sequence; identical to SEQ ID NO: 26905
  Cyclic GFR-binding peptide
  MOD_RES (2)..(4)..(35)..(36): Xaa is C or S

SEQ ID NO: 75493 - protein, 39 aa, Artificial Sequence; identical to SEQ ID NO: 26907
  Cyclic GFR-binding peptide
  MOD_RES (1)..(3)..(37): Xaa is C or S

SEQ ID NO: 75494 - protein, 31 aa, Artificial Sequence
  Cyclic GFR-binding peptide
  MOD_RES (28)..(28): Xaa is C or S
NSLQEHQGQHPKIRYYVMPLPEEETPVXELG

SEQ ID NO: 75495 - protein, 35 aa, Artificial Sequence; identical to SEQ ID NO: 26910
  Cyclic GFR-binding peptide
  MOD_RES (2)..(34)..(35): Xaa is C or S

SEQ ID NO: 75496 - protein, 32 aa, Artificial Sequence
  Cyclic GFR-binding peptide
  MOD_RES (1)..(3): Xaa is C or S
XKXSRVIMVQVEKVKPKRGVVKAIKVSRLAQP

SEQ ID NO: 75497 - protein, 37 aa, Artificial Sequence; identical to SEQ ID NO: 26913
  Cyclic GFR-binding peptide
  MOD_RES (2)..(4)..(35)..(36): Xaa is C or S

SEQ ID NO: 75498 - protein, 32 aa, Artificial Sequence
  Cyclic GFR-binding peptide
  MOD_RES (1)..(3): Xaa is C or S
XKXSKVIMVQVEKIKPTKGIVKAIKVSRLDQS

SEQ ID NO: 75499 - protein, 27 aa, Artificial Sequence
  Cyclic GFR-binding peptide
VMNSMEGIIVNSSDDMIQVTINSLQTP

SEQ ID NO: 75500 - protein, 31 aa, Artificial Sequence
  Cyclic GFR-binding peptide
  MOD_RES (26)..(27): Xaa is C or S
VQVEKVKPTRGVVKAIKVSRLDQPVXXPSAS

SEQ ID NO: 75501 - protein, 29 aa, Artificial Sequence
  Cyclic GFR-binding peptide
  MOD_RES (28)..(29): Xaa is C or S
MNVQVEKIVNSSDDVKAVKVSRLKTPAXX

SEQ ID NO: 75502 - protein, 23 aa, Artificial Sequence
  Cyclic GFR-binding peptide
EVTAKKVVKDYEDIKRMQVPRLE

SEQ ID NO: 75503 - protein, 31 aa, Artificial Sequence
  Cyclic GFR-binding peptide
LHDELTNSLQEFIPKKRVIEYYLVTLPELQV

SEQ ID NO: 75504 - protein, 37 aa, Artificial Sequence; identical to SEQ ID NO: 26921
  Cyclic GFR-binding peptide
  MOD_RES (35)..(35): Xaa is C or S

SEQ ID NO: 75505 - protein, 27 aa, Artificial Sequence
  Cyclic GFR-binding peptide
ELTNSLQEFIPKKRVIEYYLVTLPELQ

SEQ ID NO: 75506 - protein, 30 aa, Artificial Sequence
  Cyclic GFR-binding peptide
SRVVMNVQVEKIVNSSDDVKAVKVSRLKTP

SEQ ID NO: 75507 - protein, 29 aa, Artificial Sequence
  Cyclic GFR-binding peptide
  MOD_RES (2)..(2): Xaa is C or S
KXSKVVMVQVEKVKPTRGVVKAIKVSRLD

SEQ ID NO: 75508 - protein, 31 aa, Artificial Sequence
  Cyclic GFR-binding peptide
  MOD_RES (31)..(31): Xaa is C or S
QLFNSLQEHQGQHPKIRYYLMTLPEEETPVX

SEQ ID NO: 75509 - protein, 33 aa, Artificial Sequence
  Cyclic GFR-binding peptide
  MOD_RES (1)..(1): Xaa is C or S
XALHDELTNSLQEFIPKKRVIEYYLVTLPELQV

SEQ ID NO: 75510 - protein, 38 aa, Artificial Sequence; identical to SEQ ID NO: 26934
  Cyclic GFR-binding peptide
  MOD_RES (1)..(33)..(34): Xaa is C or S

SEQ ID NO: 75511 - protein, 26 aa, Artificial Sequence
  Cyclic GFR-binding peptide
VIMSMEGIIKPTKGIMIQITINSLDQ

SEQ ID NO: 75512 - protein, 21 aa, Artificial Sequence
  Cyclic GFR-binding peptide
SMEGIVKPTRGVMIQITINSL

SEQ ID NO: 75513 - protein, 32 aa, Artificial Sequence
  Cyclic GFR-binding peptide
  MOD_RES (2)..(2): Xaa is C or S
GXARVVMNVTAKKIVNSSDDIKRVQVPRLQTP

SEQ ID NO: 75514 - protein, 26 aa, Artificial Sequence
  Cyclic GFR-binding peptide
SKVIMSMEGIIKPTKGIMIQITINSL

SEQ ID NO: 75515 - protein, 37 aa, Artificial Sequence; identical to SEQ ID NO: 26940
  Cyclic GFR-binding peptide
  MOD_RES (1)..(1): Xaa is C or S

SEQ ID NO: 75516 - protein, 38 aa, Artificial Sequence; identical to SEQ ID NO: 26942
  Cyclic GFR-binding peptide
  MOD_RES (2)..(4): Xaa is C or S

SEQ ID NO: 75517 - protein, 34 aa, Artificial Sequence
  Cyclic GFR-binding peptide
  MOD_RES (31)..(31): Xaa is C or S
RNSLQELKPKKRVYEYYLVTLPEHHVRSPQXKVS

SEQ ID NO: 75518 - protein, 29 aa, Artificial Sequence
  Cyclic GFR-binding peptide
  MOD_RES (29)..(29): Xaa is C or S
VMNSMEGIIVNSSDDMIQVTINSLQTPAX

SEQ ID NO: 75519 - protein, 28 aa, Artificial Sequence
  Cyclic GFR-binding peptide
SRVVMNVQVEKIVNSSDDVKAVKVSRLK

SEQ ID NO: 75520 - protein, 37 aa, Artificial Sequence; identical to SEQ ID NO: 26953
  Cyclic GFR-binding peptide
  MOD_RES (1)..(3): Xaa is C or S

SEQ ID NO: 75521 - protein, 36 aa, Artificial Sequence; identical to SEQ ID NO: 26954
  Cyclic GFR-binding peptide
  MOD_RES (1)..(33)..(34): Xaa is C or S

SEQ ID NO: 75522 - protein, 29 aa, Artificial Sequence
  Cyclic GFR-binding peptide
HEELRNSLQELKPKKRVYEYYLVTLPEHH

SEQ ID NO: 75523 - protein, 23 aa, Artificial Sequence
  Cyclic GFR-binding peptide
VQVEKVKPTRGVVKAIKVSRLDQ

SEQ ID NO: 75524 - protein, 29 aa, Artificial Sequence
  Cyclic GFR-binding peptide
  MOD_RES (29)..(29): Xaa is C or S
VMDSMEGIVVKENEDMIQMTINSLETPVX

SEQ ID NO: 75525 - protein, 40 aa, Artificial Sequence; identical to SEQ ID NO: 26958
  Cyclic GFR-binding peptide
  MOD_RES (2)..(4)..(36)..(37): Xaa is C or S

SEQ ID NO: 75526 - protein, 29 aa, Artificial Sequence
  Cyclic GFR-binding peptide
GEVVMESMEGIVVKDYEDMIQMTINSLET

SEQ ID NO: 75527 - protein, 32 aa, Artificial Sequence
  Cyclic GFR-binding peptide
  MOD_RES (30)..(31): Xaa is C or S
VVMEVQVEKVVKDYEDVKAMKVSRLETPVXXA

SEQ ID NO: 75528 - protein, 36 aa, Artificial Sequence
  Cyclic GFR-binding peptide
  MOD_RES (33)..(33): Xaa is C or S
ELTNSLQEFIPKKRVIEYYLVTLPELQVQTPRXQVN

SEQ ID NO: 75529 - protein, 32 aa, Artificial Sequence
  Cyclic GFR-binding peptide
  MOD_RES (1)..(3): Xaa is C or S
XGXGEVVMEVQVEKVVKDYEDVKAMKVSRLET

SEQ ID NO: 75530 - protein, 28 aa, Artificial Sequence
  Cyclic GFR-binding peptide
  MOD_RES (28)..(28): Xaa is C or S
MDVTAKKVVKENEDIKRMQVPRLETPVX

SEQ ID NO: 75531 - protein, 26 aa, Artificial Sequence
  Cyclic GFR-binding peptide
EVTAKKVVKDYEDIKRMQVPRLETPV

SEQ ID NO: 75532 - protein, 41 aa, Artificial Sequence
  Cyclic GFR-binding peptide
  MOD_RES (2)..(4)..(36): Xaa is C or S
HXGXSRVVMNVQVEKIVNSSDDVKAVKVSRLKTPAXTPKTV

SEQ ID NO: 75533 - protein, 36 aa, Artificial Sequence
  Cyclic GFR-binding peptide
  MOD_RES (1)..(3): Xaa is C or S
XKXALHDELTNSLQEFIPKKRVIEYYLVTLPELQVQ

SEQ ID NO: 75534 - protein, 20 aa, Artificial Sequence
  Cyclic GFR-binding peptide
VTAKKVVKDYEDIKRMQVPR

SEQ ID NO: 75535 - protein, 37 aa, Artificial Sequence; identical to SEQ ID NO: 26968
  Cyclic GFR-binding peptide
  MOD_RES (31)..(31): Xaa is C or S

SEQ ID NO: 75536 - protein, 37 aa, Artificial Sequence; identical to SEQ ID NO: 26969
  Cyclic GFR-binding peptide
  MOD_RES (1)..(1): Xaa is C or S

SEQ ID NO: 75537 - protein, 32 aa, Artificial Sequence
  Cyclic GFR-binding peptide
  MOD_RES (2)..(2): Xaa is C or S
GXSRVVMNVTAKKIVNSSDDIKRVQVPRLKTP

SEQ ID NO: 75538 - protein, 28 aa, Artificial Sequence
  Cyclic GFR-binding peptide
VMEVQVEKVVKDYEDVKAMKVSRLETPV

SEQ ID NO: 75539 - protein, 26 aa, Artificial Sequence
  Cyclic GFR-binding peptide
EVVMESMEGIVVKDYEDMIQMTINSL

SEQ ID NO: 75540 - protein, 32 aa, Artificial Sequence
  Cyclic GFR-binding peptide
  MOD_RES (1)..(3): Xaa is C or S
XKXSRVIMVTAKKVKPKRGVIKRIQVPRLAQP

SEQ ID NO: 75541 - protein, 27 aa, Artificial Sequence
  Cyclic GFR-binding peptide
  MOD_RES (26)..(27): Xaa is C or S
VTAKKVVKENEDIKRMQVPRLETPVXX

SEQ ID NO: 75542 - protein, 34 aa, Artificial Sequence; identical to SEQ ID NO: 26974
  Cyclic GFR-binding peptide
  MOD_RES (1)..(32)..(33): Xaa is C or S

SEQ ID NO: 75543 - protein, 35 aa, Artificial Sequence
  Cyclic GFR-binding peptide
  MOD_RES (29)..(30): Xaa is C or S
VIMSMEGIVKPKRGVMIQITINSLAQPVXXPAASA

SEQ ID NO: 75544 - protein, 29 aa, Artificial Sequence
  Cyclic GFR-binding peptide
  MOD_RES (26)..(27): Xaa is C or S
VQVEKVVKENEDVKAMKVSRLETPVXXAK

SEQ ID NO: 75545 - protein, 28 aa, Artificial Sequence
  Cyclic GFR-binding peptide
  MOD_RES (26)..(26): Xaa is C or S
SMEGIIVNSSDDMIQVTINSLKTPAXTP

SEQ ID NO: 75546 - protein, 29 aa, Artificial Sequence
  Cyclic GFR-binding peptide
  MOD_RES (29)..(29): Xaa is C or S
VIMSMEGIIKPTKGIMIQITINSLDQSVX

SEQ ID NO: 75547 - protein, 29 aa, Artificial Sequence
  Cyclic GFR-binding peptide
HEELRNSLQELKPKKRVYEYYVVPLPEHH

SEQ ID NO: 75548 - protein, 32 aa, Artificial Sequence
  Cyclic GFR-binding peptide
  MOD_RES (28)..(29): Xaa is C or S
MNVTAKKIVNSSDDIKRVQVPRLQTPAXXPKP

SEQ ID NO: 75549 - protein, 33 aa, Artificial Sequence; identical to SEQ ID NO: 26985
  Cyclic GFR-binding peptide
  MOD_RES (32)..(33): Xaa is C or S

SEQ ID NO: 75550 - protein, 35 aa, Artificial Sequence; identical to SEQ ID NO: 26987
  Cyclic GFR-binding peptide
  MOD_RES (1)..(33)..(34): Xaa is C or S

SEQ ID NO: 75551 - protein, 33 aa, Artificial Sequence
  Cyclic GFR-binding peptide
  MOD_RES (27)..(27): Xaa is C or S
NSMEGIIVNSSDDMIQVTINSLKTPAXTPKTVH

SEQ ID NO: 75552 - protein, 22 aa, Artificial Sequence
  Cyclic GFR-binding peptide
MESMEGIVVKDYEDMIQMTINS

SEQ ID NO: 75553 - protein, 35 aa, Artificial Sequence; identical to SEQ ID NO: 26991
  Cyclic GFR-binding peptide
  MOD_RES (1)..(33)..(34): Xaa is C or S

SEQ ID NO: 75554 - protein, 30 aa, Artificial Sequence
  Cyclic GFR-binding peptide
  MOD_RES (1)..(3): Xaa is C or S
XGXGEVVMDVQVEKVVKENEDVKAMKVSRL

SEQ ID NO: 75555 - protein, 33 aa, Artificial Sequence
  Cyclic GFR-binding peptide
  MOD_RES (2)..(4): Xaa is C or S
SXKXSKVVMSMEGIVKPTRGVMIQITINSLDQP

SEQ ID NO: 75556 - protein, 26 aa, Artificial Sequence
  Cyclic GFR-binding peptide
GEVVMEVTAKKVVKDYEDIKRMQVPR

SEQ ID NO: 75557 - protein, 37 aa, Artificial Sequence; identical to SEQ ID NO: 27000
  Cyclic GFR-binding peptide
  MOD_RES (35)..(35): Xaa is C or S

SEQ ID NO: 75558 - protein, 40 aa, Artificial Sequence; identical to SEQ ID NO: 27005
  Cyclic GFR-binding peptide
  MOD_RES (37)..(37): Xaa is C or S

SEQ ID NO: 75559 - protein, 33 aa, Artificial Sequence
  Cyclic GFR-binding peptide
  MOD_RES (30)..(31): Xaa is C or S
KVVMSMEGIVKPTRGVMIQITINSLDQPVXXPS

SEQ ID NO: 75560 - protein, 28 aa, Artificial Sequence
  Cyclic GFR-binding peptide
VVMEVQVEKVVKDYEDVKAMKVSRLETP

SEQ ID NO: 75561 - protein, 33 aa, Artificial Sequence; identical to SEQ ID NO: 27008
  Cyclic GFR-binding peptide
  MOD_RES (1)..(32)..(33): Xaa is C or S

SEQ ID NO: 75562 - protein, 38 aa, Artificial Sequence; identical to SEQ ID NO: 27009
  Cyclic GFR-binding peptide
  MOD_RES (2)..(34)..(35): Xaa is C or S

SEQ ID NO: 75563 - protein, 32 aa, Artificial Sequence; identical to SEQ ID NO: 27011
  Cyclic GFR-binding peptide
  MOD_RES (2)..(2): Xaa is C or S

SEQ ID NO: 75564 - protein, 33 aa, Artificial Sequence
  Cyclic GFR-binding peptide
  MOD_RES (31)..(31): Xaa is C or S
RNSLQELKPKKRVYEYYLVTLPEHHVRSPQXKV

SEQ ID NO: 75565 - protein, 33 aa, Artificial Sequence; identical to SEQ ID NO: 27014
  Cyclic GFR-binding peptide
  MOD_RES (31)..(32): Xaa is C or S

SEQ ID NO: 75566 - protein, 24 aa, Artificial Sequence
  Cyclic GFR-binding peptide
RNSLQELKPKKRVYEYYLVTLPEH

SEQ ID NO: 75567 - protein, 27 aa, Artificial Sequence
  Cyclic GFR-binding peptide
VMNVTAKKIVNSSDDIKRVQVPRLKTP

SEQ ID NO: 75568 - protein, 30 aa, Artificial Sequence; identical to SEQ ID NO: 2153
  Cyclic GFR-binding peptide

SEQ ID NO: 75569 - protein, 33 aa, Artificial Sequence
  Cyclic GFR-binding peptide
EELRNSLQELKPKKRVYEYYVVPLPEHHVRSPQ

SEQ ID NO: 75570 - protein, 33 aa, Artificial Sequence
  Cyclic GFR-binding peptide
  MOD_RES (29)..(30): Xaa is C or S
VMNVTAKKIVNSSDDIKRVQVPRLKTPAXXPKP

SEQ ID NO: 75571 - protein, 26 aa, Artificial Sequence
  Cyclic GFR-binding peptide
NVTAKKIVNSSDDIKRVQVPRLQTPA

SEQ ID NO: 75572 - protein, 42 aa, Artificial Sequence; identical to SEQ ID NO: 27018
  Cyclic GFR-binding peptide
  MOD_RES (1)..(3)..(40): Xaa is C or S

SEQ ID NO: 75573 - protein, 36 aa, Artificial Sequence; identical to SEQ ID NO: 27020
  Cyclic GFR-binding peptide
  MOD_RES (32)..(33): Xaa is C or S

SEQ ID NO: 75574 - protein, 31 aa, Artificial Sequence
  Cyclic GFR-binding peptide
  MOD_RES (30)..(30): Xaa is C or S
VVMNVTAKKIVNSSDDIKRVQVPRLKTPAXT

SEQ ID NO: 75575 - protein, 40 aa, Artificial Sequence; identical to SEQ ID NO: 27026
  Cyclic GFR-binding peptide
  MOD_RES (34)..(34): Xaa is C or S

SEQ ID NO: 75576 - protein, 33 aa, Artificial Sequence; identical to SEQ ID NO: 27027
  Cyclic GFR-binding peptide
  MOD_RES (2)..(2): Xaa is C or S

SEQ ID NO: 75577 - protein, 21 aa, Artificial Sequence
  Cyclic GFR-binding peptide
EVQVEKVVKDYEDVKAMKVSR

SEQ ID NO: 75578 - protein, 33 aa, Artificial Sequence
  Cyclic GFR-binding peptide
  MOD_RES (1)..(3): Xaa is C or S
XKXALHDELTNSLQEFIPKKRVIEYYLVTLPEL

SEQ ID NO: 75579 - protein, 32 aa, Artificial Sequence
  Cyclic GFR-binding peptide
  MOD_RES (28)..(28): Xaa is C or S
MNVTAKKIVNSSDDIKRVQVPRLKTPAXTPKT

SEQ ID NO: 75580 - protein, 32 aa, Artificial Sequence
  Cyclic GFR-binding peptide
  MOD_RES (26)..(26): Xaa is C or S
VQVEKIVNSSDDVKAVKVSRLKTPAXTPKTVH

SEQ ID NO: 75581 - protein, 31 aa, Artificial Sequence
  Cyclic GFR-binding peptide
  MOD_RES (26)..(27): Xaa is C or S
VTAKKIVNSSDDIKRVQVPRLQTPAXXPKPV

SEQ ID NO: 75582 - protein, 35 aa, Artificial Sequence; identical to SEQ ID NO: 27035
  Cyclic GFR-binding peptide
  MOD_RES (2)..(2): Xaa is C or S

SEQ ID NO: 75583 - protein, 26 aa, Artificial Sequence
  Cyclic GFR-binding peptide
  MOD_RES (1)..(1): Xaa is C or S
XSKVIMVQVEKIKPTKGIVKAIKVSR

SEQ ID NO: 75584 - protein, 24 aa, Artificial Sequence
  Cyclic GFR-binding peptide
LTNSLQEFIPKKRVIEYYLVTLPE

SEQ ID NO: 75585 - protein, 21 aa, Artificial Sequence
  Cyclic GFR-binding peptide
VQVEKVVKENEDVKAMKVSRL

SEQ ID NO: 75586 - protein, 28 aa, Artificial Sequence
  Cyclic GFR-binding peptide
ARVVMNSMEGIIVNSSDDMIQVTINSLQ

SEQ ID NO: 75587 - protein, 28 aa, Artificial Sequence
  Cyclic GFR-binding peptide
  MOD_RES (1)..(1): Xaa is C or S
XSKVVMSMEGIVKPTRGVMIQITINSLD

SEQ ID NO: 75588 - protein, 31 aa, Artificial Sequence
  Cyclic GFR-binding peptide
  MOD_RES (2)..(2): Xaa is C or S
KXALHDELTNSLQEFIPKKRVIEYYLVTLPE

SEQ ID NO: 75589 - protein, 33 aa, Artificial Sequence
  Cyclic GFR-binding peptide
  MOD_RES (29)..(30): Xaa is C or S
VMDVTAKKVVKENEDIKRMQVPRLETPVXXAKP

SEQ ID NO: 75590 - protein, 38 aa, Artificial Sequence; identical to SEQ ID NO: 27037
  Cyclic GFR-binding peptide
  MOD_RES (2)..(34)..(35): Xaa is C or S

SEQ ID NO: 75591 - protein, 34 aa, Artificial Sequence; identical to SEQ ID NO: 27038
  Cyclic GFR-binding peptide

SEQ ID NO: 75592 - protein, 37 aa, Artificial Sequence
  Cyclic GFR-binding peptide
  MOD_RES (2)..(4): Xaa is C or S
AXAXELHEELRNSLQELKPKKRVYEYYVVPLPEHHVR

SEQ ID NO: 75593 - protein, 38 aa, Artificial Sequence
  Cyclic GFR-binding peptide
  MOD_RES (34)..(34): Xaa is C or S
EELRNSLQELKPKKRVYEYYLVTLPEHHVRSPQXKVSS

SEQ ID NO: 75594 - protein, 28 aa, Artificial Sequence
  Cyclic GFR-binding peptide
EELRNSLQELKPKKRVYEYYLVTLPEHH

SEQ ID NO: 75595 - protein, 27 aa, Artificial Sequence
  Cyclic GFR-binding peptide
  MOD_RES (27)..(27): Xaa is C or S
NVTAKKIVNSSDDIKRVQVPRLQTPAX

SEQ ID NO: 75596 - protein, 27 aa, Artificial Sequence
  Cyclic GFR-binding peptide
IMSMEGIIKPTKGIMIQITINSLDQSV

SEQ ID NO: 75597 - protein, 27 aa, Artificial Sequence
  Cyclic GFR-binding peptide
MEVQVEKVVKDYEDVKAMKVSRLETPV

SEQ ID NO: 75598 - protein, 25 aa, Artificial Sequence
  Cyclic GFR-binding peptide
VTAKKVVKDYEDIKRMQVPRLETPV

SEQ ID NO: 75599 - protein, 26 aa, Artificial Sequence
  Cyclic GFR-binding peptide
  MOD_RES (26)..(26): Xaa is C or S
VQVEKIVNSSDDVKAVKVSRLQTPAX

SEQ ID NO: 75600 - protein, 26 aa, Artificial Sequence
  Cyclic GFR-binding peptide
LRNSLQELKPKKRVYEYYLVTLPEHH

SEQ ID NO: 75601 - protein, 38 aa, Artificial Sequence; identical to SEQ ID NO: 27045
  Cyclic GFR-binding peptide
  MOD_RES (1)..(3)..(35)..(36): Xaa is C or S

SEQ ID NO: 75602 - protein, 31 aa, Artificial Sequence
  Cyclic GFR-binding peptide
  MOD_RES (29)..(29): Xaa is C or S
FNSLQEHQGQHPKIRYYLMTLPEEETPVXEL

SEQ ID NO: 75603 - protein, 29 aa, Artificial Sequence
  Cyclic GFR-binding peptide
RVVMNVQVEKIVNSSDDVKAVKVSRLQTP

SEQ ID NO: 75604 - protein, 37 aa, Artificial Sequence; identical to SEQ ID NO: 27050
  Cyclic GFR-binding peptide
  MOD_RES (34)..(34): Xaa is C or S

SEQ ID NO: 75605 - protein, 24 aa, Artificial Sequence
  Cyclic GFR-binding peptide
VTAKKVVKENEDIKRMQVPRLETP

SEQ ID NO: 75606 - protein, 33 aa, Artificial Sequence
  Cyclic GFR-binding peptide
  MOD_RES (2)..(4): Xaa is C or S
RXGXGEVVMEVQVEKVVKDYEDVKAMKVSRLET

SEQ ID NO: 75607 - protein, 30 aa, Artificial Sequence; identical to SEQ ID NO: 27054
  Cyclic GFR-binding peptide

SEQ ID NO: 75608 - protein, 37 aa, Artificial Sequence; identical to SEQ ID NO: 27057
  Cyclic GFR-binding peptide
  MOD_RES (32)..(33): Xaa is C or S

SEQ ID NO: 75609 - protein, 30 aa, Artificial Sequence
  Cyclic GFR-binding peptide
KNHQLFNSLQEHQGQHPKIRYYVMPLPEEE

SEQ ID NO: 75610 - protein, 29 aa, Artificial Sequence
  Cyclic GFR-binding peptide
  MOD_RES (29)..(29): Xaa is C or S
VMDVQVEKVVKENEDVKAMKVSRLETPVX

SEQ ID NO: 75611 - protein, 29 aa, Artificial Sequence
  Cyclic GFR-binding peptide
  MOD_RES (28)..(29): Xaa is C or S
MEVQVEKVVKDYEDVKAMKVSRLETPVXX

SEQ ID NO: 75612 - protein, 38 aa, Artificial Sequence; identical to SEQ ID NO: 27063
  Cyclic GFR-binding peptide
  MOD_RES (1)..(35): Xaa is C or S

SEQ ID NO: 75613 - protein, 32 aa, Artificial Sequence; identical to SEQ ID NO: 27064
  Cyclic GFR-binding peptide
  MOD_RES (31)..(32): Xaa is C or S

SEQ ID NO: 75614 - protein, 38 aa, Artificial Sequence; identical to SEQ ID NO: 27068
  Cyclic GFR-binding peptide
  MOD_RES (1)..(3): Xaa is C or S

SEQ ID NO: 75615 - protein, 33 aa, Artificial Sequence; identical to SEQ ID NO: 27070
  Cyclic GFR-binding peptide
  MOD_RES (1)..(33): Xaa is C or S

SEQ ID NO: 75616 - protein, 22 aa, Artificial Sequence
  Cyclic GFR-binding peptide
NSLQEFIPKKRVIEYYVVPLPE

SEQ ID NO: 75617 - protein, 29 aa, Artificial Sequence
  Cyclic GFR-binding peptide
ELTNSLQEFIPKKRVIEYYLVTLPELQVQ

SEQ ID NO: 75618 - protein, 35 aa, Artificial Sequence; identical to SEQ ID NO: 27073
  Cyclic GFR-binding peptide

SEQ ID NO: 75619 - protein, 28 aa, Artificial Sequence
  Cyclic GFR-binding peptide
VVMEVTAKKVVKDYEDIKRMQVPRLETP

SEQ ID NO: 75620 - protein, 29 aa, Artificial Sequence
  Cyclic GFR-binding peptide
  MOD_RES (29)..(29): Xaa is C or S
VVMVTAKKVKPTRGVIKRIQVPRLDQPVX

SEQ ID NO: 75621 - protein, 38 aa, Artificial Sequence; identical to SEQ ID NO: 27078
  Cyclic GFR-binding peptide
  MOD_RES (2)..(34)..(35): Xaa is C or S

SEQ ID NO: 75622 - protein, 38 aa, Artificial Sequence; identical to SEQ ID NO: 27079
  Cyclic GFR-binding peptide
  MOD_RES (2)..(33)..(34): Xaa is C or S

SEQ ID NO: 75623 - protein, 26 aa, Artificial Sequence
  Cyclic GFR-binding peptide
MVQVEKIKPTKGIVKAIKVSRLDQSV

SEQ ID NO: 75624 - protein, 36 aa, Artificial Sequence; identical to SEQ ID NO: 27082
  Cyclic GFR-binding peptide
  MOD_RES (35)..(35): Xaa is C or S

SEQ ID NO: 75625 - protein, 31 aa, Artificial Sequence
  Cyclic GFR-binding peptide
  MOD_RES (31)..(31): Xaa is C or S
TNSLQEFIPKKRVIEYYLVTLPELQVQTPRX

SEQ ID NO: 75626 - protein, 21 aa, Artificial Sequence
  Cyclic GFR-binding peptide
MSMEGIVKPTRGVMIQITINS

SEQ ID NO: 75627 - protein, 36 aa, Artificial Sequence; identical to SEQ ID NO: 27087
  Cyclic GFR-binding peptide
  MOD_RES (1)..(3)..(35)..(36): Xaa is C or S

SEQ ID NO: 75628 - protein, 20 aa, Artificial Sequence
  Cyclic GFR-binding peptide
SMEGIVKPKRGVMIQITINS

SEQ ID NO: 75629 - protein, 37 aa, Artificial Sequence; identical to SEQ ID NO: 27088
  Cyclic GFR-binding peptide
  MOD_RES (2)..(4)..(36)..(37): Xaa is C or S

SEQ ID NO: 75630 - protein, 25 aa, Artificial Sequence
  Cyclic GFR-binding peptide
ELTNSLQEFIPKKRVIEYYVVPLPE

SEQ ID NO: 75631 - protein, 30 aa, Artificial Sequence
  Cyclic GFR-binding peptide
  MOD_RES (29)..(30): Xaa is C or S
VMEVTAKKVVKDYEDIKRMQVPRLETPVXX

SEQ ID NO: 75632 - protein, 22 aa, Artificial Sequence
  Cyclic GFR-binding peptide
VQVEKIKPTKGIVKAIKVSRLD

SEQ ID NO: 75633 - protein, 35 aa, Artificial Sequence
  Cyclic GFR-binding peptide
  MOD_RES (1)..(3): Xaa is C or S
XAXELHEELRNSLQELKPKKRVYEYYLVTLPEHHV

SEQ ID NO: 75634 - protein, 41 aa, Artificial Sequence; identical to SEQ ID NO: 27096
  Cyclic GFR-binding peptide
  MOD_RES (2)..(4)..(36)..(37): Xaa is C or S

SEQ ID NO: 75635 - protein, 35 aa, Artificial Sequence; identical to SEQ ID NO: 27098
  Cyclic GFR-binding peptide
  MOD_RES (1)..(33): Xaa is C or S

SEQ ID NO: 75636 - protein, 37 aa, Artificial Sequence; identical to SEQ ID NO: 27099
  Cyclic GFR-binding peptide
  MOD_RES (36)..(36): Xaa is C or S

SEQ ID NO: 75637 - protein, 30 aa, Artificial Sequence
  Cyclic GFR-binding peptide
  MOD_RES (2)..(2): Xaa is C or S
KXSKVIMVQVEKIKPTKGIVKAIKVSRLDQ

SEQ ID NO: 75638 - protein, 37 aa, Artificial Sequence; identical to SEQ ID NO: 27101
  Cyclic GFR-binding peptide
  MOD_RES (1)..(3)..(35)..(36): Xaa is C or S

SEQ ID NO: 75639 - protein, 27 aa, Artificial Sequence
  Cyclic GFR-binding peptide
VMNVQVEKIVNSSDDVKAVKVSRLQTP

SEQ ID NO: 75640 - protein, 33 aa, Artificial Sequence
  Cyclic GFR-binding peptide
  MOD_RES (1)..(3): Xaa is C or S
XGXARVVMNVQVEKIVNSSDDVKAVKVSRLQTP

SEQ ID NO: 75641 - protein, 39 aa, Artificial Sequence; identical to SEQ ID NO: 27104
  Cyclic GFR-binding peptide
  MOD_RES (2)..(4)..(36): Xaa is C or S

SEQ ID NO: 75642 - protein, 32 aa, Artificial Sequence; identical to SEQ ID NO: 27108
  Cyclic GFR-binding peptide
  MOD_RES (31)..(31): Xaa is C or S

SEQ ID NO: 75643 - protein, 43 aa, Artificial Sequence; identical to SEQ ID NO: 27109
  Cyclic GFR-binding peptide
  MOD_RES (1)..(3)..(37): Xaa is C or S

SEQ ID NO: 75644 - protein, 24 aa, Artificial Sequence
  Cyclic GFR-binding peptide
NSLQEHQGQHPKIRYYLMTLPEEE

SEQ ID NO: 75645 - protein, 24 aa, Artificial Sequence
  Cyclic GFR-binding peptide
IMSMEGIIKPTKGIMIQITINSLD

SEQ ID NO: 75646 - protein, 39 aa, Artificial Sequence; identical to SEQ ID NO: 27110
  Cyclic GFR-binding peptide
  MOD_RES (2)..(4): Xaa is C or S

SEQ ID NO: 75647 - protein, 31 aa, Artificial Sequence
  Cyclic GFR-binding peptide
  MOD_RES (28)..(29): Xaa is C or S
MDSMEGIVVKENEDMIQMTINSLETPVXXAK

SEQ ID NO: 75648 - protein, 37 aa, Artificial Sequence; identical to SEQ ID NO: 27114
  Cyclic GFR-binding peptide
  MOD_RES (1)..(3)..(35)..(36): Xaa is C or S

SEQ ID NO: 75649 - protein, 31 aa, Artificial Sequence
  Cyclic GFR-binding peptide
  MOD_RES (27)..(28): Xaa is C or S
MVQVEKVKPKRGVVKAIKVSRLAQPVXXPAA

SEQ ID NO: 75650 - protein, 35 aa, Artificial Sequence; identical to SEQ ID NO: 27118
  Cyclic GFR-binding peptide
  MOD_RES (31)..(32): Xaa is C or S

SEQ ID NO: 75651 - protein, 27 aa, Artificial Sequence
  Cyclic GFR-binding peptide
RVVMNVTAKKIVNSSDDIKRVQVPRLK

SEQ ID NO: 75652 - protein, 31 aa, Artificial Sequence; identical to SEQ ID NO: 27120
  Cyclic GFR-binding peptide
  MOD_RES (31)..(31): Xaa is C or S

SEQ ID NO: 75653 - protein, 25 aa, Artificial Sequence
  Cyclic GFR-binding peptide
DSMEGIVVKENEDMIQMTINSLETP

SEQ ID NO: 75654 - protein, 27 aa, Artificial Sequence
  Cyclic GFR-binding peptide
LTNSLQEFIPKKRVIEYYLVTLPELQV

SEQ ID NO: 75655 - protein, 24 aa, Artificial Sequence
  Cyclic GFR-binding peptide
VVMEVQVEKVVKDYEDVKAMKVSR

SEQ ID NO: 75656 - protein, 29 aa, Artificial Sequence
  Cyclic GFR-binding peptide
  MOD_RES (27)..(28): Xaa is C or S
MVTAKKVKPKRGVIKRIQVPRLAQPVXXP

SEQ ID NO: 75657 - protein, 38 aa, Artificial Sequence; identical to SEQ ID NO: 27124
  Cyclic GFR-binding peptide
  MOD_RES (36)..(36): Xaa is C or S

SEQ ID NO: 75658 - protein, 31 aa, Artificial Sequence
  Cyclic GFR-binding peptide
GEVVMDVTAKKVVKENEDIKRMQVPRLETPV

SEQ ID NO: 75659 - protein, 37 aa, Artificial Sequence; identical to SEQ ID NO: 27126
  Cyclic GFR-binding peptide
  MOD_RES (2)..(34)..(35): Xaa is C or S

SEQ ID NO: 75660 - protein, 41 aa, Artificial Sequence; identical to SEQ ID NO: 27127
  Cyclic GFR-binding peptide
  MOD_RES (2)..(4)..(36): Xaa is C or S

SEQ ID NO: 75661 - protein, 33 aa, Artificial Sequence
  Cyclic GFR-binding peptide
  MOD_RES (2)..(4): Xaa is C or S
SXKXSKVIMVTAKKIKPTKGIIKRIQVPRLDQS

SEQ ID NO: 75662 - protein, 35 aa, Artificial Sequence; identical to SEQ ID NO: 27129
  Cyclic GFR-binding peptide
  MOD_RES (2)..(4): Xaa is C or S

SEQ ID NO: 75663 - protein, 26 aa, Artificial Sequence
  Cyclic GFR-binding peptide
RNSLQELKPKKRVYEYYLVTLPEHHV

SEQ ID NO: 75664 - protein, 30 aa, Artificial Sequence; identical to SEQ ID NO: 2213
  Cyclic GFR-binding peptide

SEQ ID NO: 75665 - protein, 36 aa, Artificial Sequence; identical to SEQ ID NO: 27132
  Cyclic GFR-binding peptide
  MOD_RES (1)..(33): Xaa is C or S

SEQ ID NO: 75666 - protein, 22 aa, Artificial Sequence
  Cyclic GFR-binding peptide
VQVEKIVNSSDDVKAVKVSRLQ

SEQ ID NO: 75667 - protein, 27 aa, Artificial Sequence
  Cyclic GFR-binding peptide
VMDVQVEKVVKENEDVKAMKVSRLETP

SEQ ID NO: 75668 - protein, 28 aa, Artificial Sequence
  Cyclic GFR-binding peptide
  MOD_RES (28)..(28): Xaa is C or S
IMSMEGIIKPTKGIMIQITINSLDQSVX

SEQ ID NO: 75669 - protein, 31 aa, Artificial Sequence
  Cyclic GFR-binding peptide
  MOD_RES (27)..(28): Xaa is C or S
EVQVEKVVKDYEDVKAMKVSRLETPVXXAKP

SEQ ID NO: 75670 - protein, 37 aa, Artificial Sequence; identical to SEQ ID NO: 27137
  Cyclic GFR-binding peptide
  MOD_RES (31)..(32): Xaa is C or S

SEQ ID NO: 75671 - protein, 28 aa, Artificial Sequence
  Cyclic GFR-binding peptide
SRVVMNVTAKKIVNSSDDIKRVQVPRLK

SEQ ID NO: 75672 - protein, 26 aa, Artificial Sequence
  Cyclic GFR-binding peptide
  MOD_RES (26)..(26): Xaa is C or S
VQVEKVVKDYEDVKAMKVSRLETPVX

SEQ ID NO: 75673 - protein, 37 aa, Artificial Sequence; identical to SEQ ID NO: 27142
  Cyclic GFR-binding peptide
  MOD_RES (1)..(3)..(37): Xaa is C or S

SEQ ID NO: 75674 - protein, 41 aa, Artificial Sequence; identical to SEQ ID NO: 27144
  Cyclic GFR-binding peptide
  MOD_RES (1)..(3)..(35): Xaa is C or S

SEQ ID NO: 75675 - protein, 36 aa, Artificial Sequence; identical to SEQ ID NO: 27145
  Cyclic GFR-binding peptide
  MOD_RES (31)..(32): Xaa is C or S

SEQ ID NO: 75676 - protein, 26 aa, Artificial Sequence
  Cyclic GFR-binding peptide
VMVQVEKVKPTRGVVKAIKVSRLDQP

SEQ ID NO: 75677 - protein, 28 aa, Artificial Sequence
  Cyclic GFR-binding peptide
ELRNSLQELKPKKRVYEYYLVTLPEHHV

SEQ ID NO: 75678 - protein, 40 aa, Artificial Sequence; identical to SEQ ID NO: 27147
  Cyclic GFR-binding peptide
  MOD_RES (36)..(36): Xaa is C or S

SEQ ID NO: 75679 - protein, 23 aa, Artificial Sequence
  Cyclic GFR-binding peptide
SMEGIVVKENEDMIQMTINSLET

SEQ ID NO: 75680 - protein, 33 aa, Artificial Sequence
  Cyclic GFR-binding peptide
  MOD_RES (30)..(30): Xaa is C or S
NSLQELKPKKRVYEYYVVPLPEHHVRSPQXKVS

SEQ ID NO: 75681 - protein, 37 aa, Artificial Sequence; identical to SEQ ID NO: 27151
  Cyclic GFR-binding peptide
  MOD_RES (1)..(3): Xaa is C or S

SEQ ID NO: 75682 - protein, 34 aa, Artificial Sequence; identical to SEQ ID NO: 27153
  Cyclic GFR-binding peptide
  MOD_RES (32)..(33): Xaa is C or S

SEQ ID NO: 75683 - protein, 32 aa, Artificial Sequence; identical to SEQ ID NO: 27156
  Cyclic GFR-binding peptide
  MOD_RES (32)..(32): Xaa is C or S

SEQ ID NO: 75684 - protein, 34 aa, Artificial Sequence; identical to SEQ ID NO: 27160
  Cyclic GFR-binding peptide
  MOD_RES (32)..(33): Xaa is C or S

SEQ ID NO: 75685 - protein, 28 aa, Artificial Sequence
  Cyclic GFR-binding peptide
LRNSLQELKPKKRVYEYYVVPLPEHHVR

SEQ ID NO: 75686 - protein, 27 aa, Artificial Sequence
  Cyclic GFR-binding peptide
IMVTAKKVKPKRGVIKRIQVPRLAQPV

SEQ ID NO: 75687 - protein, 24 aa, Artificial Sequence
  Cyclic GFR-binding peptide
MESMEGIVVKDYEDMIQMTINSLE

SEQ ID NO: 75688 - protein, 35 aa, Artificial Sequence; identical to SEQ ID NO: 27163
  Cyclic GFR-binding peptide
  MOD_RES (2)..(4)..(35): Xaa is C or S

SEQ ID NO: 75689 - protein, 25 aa, Artificial Sequence
  Cyclic GFR-binding peptide
QLFNSLQEHQGQHPKIRYYLMTLPE

SEQ ID NO: 75690 - protein, 32 aa, Artificial Sequence
  Cyclic GFR-binding peptide
  MOD_RES (26)..(27): Xaa is C or S
VTAKKVKPTRGVIKRIQVPRLDQPVXXPSASA

SEQ ID NO: 75691 - protein, 35 aa, Artificial Sequence
  Cyclic GFR-binding peptide
  MOD_RES (29)..(30): Xaa is C or S
VVMVTAKKVKPTRGVIKRIQVPRLDQPVXXPSASA

SEQ ID NO: 75692 - protein, 36 aa, Artificial Sequence; identical to SEQ ID NO: 27170
  Cyclic GFR-binding peptide
  MOD_RES (1)..(33)..(34): Xaa is C or S

SEQ ID NO: 75693 - protein, 39 aa, Artificial Sequence; identical to SEQ ID NO: 27171
  Cyclic GFR-binding peptide
  MOD_RES (2)..(4)..(35)..(36): Xaa is C or S

SEQ ID NO: 75694 - protein, 29 aa, Artificial Sequence
  Cyclic GFR-binding peptide
  MOD_RES (1)..(1): Xaa is C or S
XGEVVMESMEGIVVKDYEDMIQMTINSLE

SEQ ID NO: 75695 - protein, 36 aa, Artificial Sequence; identical to SEQ ID NO: 27178
  Cyclic GFR-binding peptide
  MOD_RES (2)..(33)..(34): Xaa is C or S

SEQ ID NO: 75696 - protein, 35 aa, Artificial Sequence; identical to SEQ ID NO: 27181
  Cyclic GFR-binding peptide
  MOD_RES (1)..(3)..(35): Xaa is C or S

SEQ ID NO: 75697 - protein, 38 aa, Artificial Sequence; identical to SEQ ID NO: 27183
  Cyclic GFR-binding peptide
  MOD_RES (2)..(34)..(35): Xaa is C or S

SEQ ID NO: 75698 - protein, 37 aa, Artificial Sequence; identical to SEQ ID NO: 27186
  Cyclic GFR-binding peptide
  MOD_RES (32)..(33): Xaa is C or S

SEQ ID NO: 75699 - protein, 39 aa, Artificial Sequence; identical to SEQ ID NO: 27188
  Cyclic GFR-binding peptide
  MOD_RES (1)..(3)..(35): Xaa is C or S

SEQ ID NO: 75700 - protein, 27 aa, Artificial Sequence
  Cyclic GFR-binding peptide
KVIMSMEGIIKPTKGIMIQITINSLDQ

SEQ ID NO: 75701 - protein, 35 aa, Artificial Sequence; identical to SEQ ID NO: 27190
  Cyclic GFR-binding peptide
  MOD_RES (1)..(33)..(34): Xaa is C or S

SEQ ID NO: 75702 - protein, 35 aa, Artificial Sequence; identical to SEQ ID NO: 27192
  Cyclic GFR-binding peptide
  MOD_RES (1)..(1): Xaa is C or S

SEQ ID NO: 75703 - protein, 29 aa, Artificial Sequence
  Cyclic GFR-binding peptide
  MOD_RES (2)..(2): Xaa is C or S
GXARVVMNVQVEKIVNSSDDVKAVKVSRL

SEQ ID NO: 75704 - protein, 28 aa, Artificial Sequence
  Cyclic GFR-binding peptide
VMNVTAKKIVNSSDDIKRVQVPRLKTPA

SEQ ID NO: 75705 - protein, 29 aa, Artificial Sequence
  Cyclic GFR-binding peptide
  MOD_RES (2)..(4): Xaa is C or S
SXKXSRVIMVTAKKVKPKRGVIKRIQVPR

SEQ ID NO: 75706 - protein, 34 aa, Artificial Sequence
  Cyclic GFR-binding peptide
  MOD_RES (30)..(31): Xaa is C or S
VVMDVQVEKVVKENEDVKAMKVSRLETPVXXAKP

SEQ ID NO: 75707 - protein, 37 aa, Artificial Sequence; identical to SEQ ID NO: 27198
  Cyclic GFR-binding peptide
  MOD_RES (1)..(32)..(33): Xaa is C or S

SEQ ID NO: 75708 - protein, 25 aa, Artificial Sequence
  Cyclic GFR-binding peptide
NSMEGIIVNSSDDMIQVTINSLKTP

SEQ ID NO: 75709 - protein, 32 aa, Artificial Sequence; identical to SEQ ID NO: 27201
  Cyclic GFR-binding peptide
  MOD_RES (1)..(32): Xaa is C or S

SEQ ID NO: 75710 - protein, 37 aa, Artificial Sequence; identical to SEQ ID NO: 27202
  Cyclic GFR-binding peptide
  MOD_RES (2)..(4): Xaa is C or S

SEQ ID NO: 75711 - protein, 37 aa, Artificial Sequence; identical to SEQ ID NO: 27204
  Cyclic GFR-binding peptide
  MOD_RES (2)..(4)..(36)..(37): Xaa is C or S

SEQ ID NO: 75712 - protein, 30 aa, Artificial Sequence
  Cyclic GFR-binding peptide
  MOD_RES (2)..(2): Xaa is C or S
GXGEVVMDVQVEKVVKENEDVKAMKVSRLE

SEQ ID NO: 75713 - protein, 42 aa, Artificial Sequence; identical to SEQ ID NO: 27208
  Cyclic GFR-binding peptide
  MOD_RES (1)..(38): Xaa is C or S

SEQ ID NO: 75714 - protein, 26 aa, Artificial Sequence
  Cyclic GFR-binding peptide
  MOD_RES (1)..(1): Xaa is C or S
XSRVIMSMEGIVKPKRGVMIQITINS

SEQ ID NO: 75715 - protein, 29 aa, Artificial Sequence
  Cyclic GFR-binding peptide
  MOD_RES (29)..(29): Xaa is C or S
VMNVQVEKIVNSSDDVKAVKVSRLQTPAX

SEQ ID NO: 75716 - protein, 28 aa, Artificial Sequence
  Cyclic GFR-binding peptide
QLFNSLQEHQGQHPKIRYYLMTLPEEET

SEQ ID NO: 75717 - protein, 33 aa, Artificial Sequence
  Cyclic GFR-binding peptide
  MOD_RES (2)..(4): Xaa is C or S
RXGXGEVVMDVTAKKVVKENEDIKRMQVPRLET

SEQ ID NO: 75718 - protein, 24 aa, Artificial Sequence
  Cyclic GFR-binding peptide
IMVTAKKIKPTKGIIKRIQVPRLD

SEQ ID NO: 75719 - protein, 33 aa, Artificial Sequence
  Cyclic GFR-binding peptide
  MOD_RES (2)..(4): Xaa is C or S
RXEXKNHQLFNSLQEHQGQHPKIRYYVMPLPEE

SEQ ID NO: 75720 - protein, 29 aa, Artificial Sequence
  Cyclic GFR-binding peptide
HDELTNSLQEFIPKKRVIEYYVVPLPELQ

SEQ ID NO: 75721 - protein, 29 aa, Artificial Sequence
  Cyclic GFR-binding peptide
EELRNSLQELKPKKRVYEYYLVTLPEHHV

SEQ ID NO: 75722 - protein, 34 aa, Artificial Sequence
  Cyclic GFR-binding peptide
  MOD_RES (29)..(29): Xaa is C or S
FNSLQEHQGQHPKIRYYLMTLPEEETPVXELGED

SEQ ID NO: 75723 - protein, 37 aa, Artificial Sequence; identical to SEQ ID NO: 27219
  Cyclic GFR-binding peptide
  MOD_RES (2)..(4)..(35)..(36): Xaa is C or S

SEQ ID NO: 75724 - protein, 21 aa, Artificial Sequence
  Cyclic GFR-binding peptide
VTAKKVKPTRGVIKRIQVPRL

SEQ ID NO: 75725 - protein, 33 aa, Artificial Sequence
  Cyclic GFR-binding peptide
  MOD_RES (30)..(30): Xaa is C or S
LFNSLQEHQGQHPKIRYYVMPLPEEETPVXELG

SEQ ID NO: 75726 - protein, 30 aa, Artificial Sequence
  Cyclic GFR-binding peptide
  MOD_RES (28)..(29): Xaa is C or S
MEVTAKKVVKDYEDIKRMQVPRLETPVXXA

SEQ ID NO: 75727 - protein, 32 aa, Artificial Sequence
  Cyclic GFR-binding peptide
  MOD_RES (26)..(27): Xaa is C or S
SMEGIIKPTKGIMIQITINSLDQSVXXPSASA

SEQ ID NO: 75728 - protein, 31 aa, Artificial Sequence; identical to SEQ ID NO: 27224
  Cyclic GFR-binding peptide
  MOD_RES (31)..(31): Xaa is C or S

SEQ ID NO: 75729 - protein, 28 aa, Artificial Sequence
  Cyclic GFR-binding peptide
  MOD_RES (27)..(27): Xaa is C or S
NVTAKKIVNSSDDIKRVQVPRLKTPAXT

SEQ ID NO: 75730 - protein, 37 aa, Artificial Sequence; identical to SEQ ID NO: 27226
  Cyclic GFR-binding peptide
  MOD_RES (1)..(32)..(33): Xaa is C or S

SEQ ID NO: 75731 - protein, 32 aa, Artificial Sequence
  Cyclic GFR-binding peptide
  MOD_RES (26)..(27): Xaa is C or S
VTAKKVVKDYEDIKRMQVPRLETPVXXAKPIS

SEQ ID NO: 75732 - protein, 29 aa, Artificial Sequence
  Cyclic GFR-binding peptide
  MOD_RES (1)..(3): Xaa is C or S
XGXGEVVMEVQVEKVVKDYEDVKAMKVSR

SEQ ID NO: 75733 - protein, 32 aa, Artificial Sequence
  Cyclic GFR-binding peptide
  MOD_RES (28)..(29): Xaa is C or S
IMVTAKKIKPTKGIIKRIQVPRLDQSVXXPSA

SEQ ID NO: 75734 - protein, 36 aa, Artificial Sequence
  Cyclic GFR-binding peptide
  MOD_RES (33)..(33): Xaa is C or S
ELRNSLQELKPKKRVYEYYVVPLPEHHVRSPQXKVS

SEQ ID NO: 75735 - protein, 44 aa, Artificial Sequence; identical to SEQ ID NO: 27235
  Cyclic GFR-binding peptide
  MOD_RES (1)..(3)..(40): Xaa is C or S

SEQ ID NO: 75736 - protein, 29 aa, Artificial Sequence
  Cyclic GFR-binding peptide
  MOD_RES (26)..(27): Xaa is C or S
VTAKKIVNSSDDIKRVQVPRLQTPAXXPK

SEQ ID NO: 75737 - protein, 30 aa, Artificial Sequence
  Cyclic GFR-binding peptide
  MOD_RES (29)..(30): Xaa is C or S
VMDVQVEKVVKENEDVKAMKVSRLETPVXX

SEQ ID NO: 75738 - protein, 39 aa, Artificial Sequence; identical to SEQ ID NO: 27240
  Cyclic GFR-binding peptide
  MOD_RES (2)..(4)..(36)..(37): Xaa is C or S

SEQ ID NO: 75739 - protein, 28 aa, Artificial Sequence
  Cyclic GFR-binding peptide
LHDELTNSLQEFIPKKRVIEYYVVPLPE

SEQ ID NO: 75740 - protein, 30 aa, Artificial Sequence
  Cyclic GFR-binding peptide
  MOD_RES (29)..(30): Xaa is C or S
VVMVQVEKVKPTRGVVKAIKVSRLDQPVXX

SEQ ID NO: 75741 - protein, 28 aa, Artificial Sequence
  Cyclic GFR-binding peptide
KVVMVTAKKVKPTRGVIKRIQVPRLDQP

SEQ ID NO: 75742 - protein, 32 aa, Artificial Sequence; identical to SEQ ID NO: 27246
  Cyclic GFR-binding peptide
  MOD_RES (1)..(32): Xaa is C or S

SEQ ID NO: 75743 - protein, 40 aa, Artificial Sequence; identical to SEQ ID NO: 27245
  Cyclic GFR-binding peptide
  MOD_RES (2)..(39): Xaa is C or S

SEQ ID NO: 75744 - protein, 25 aa, Artificial Sequence
  Cyclic GFR-binding peptide
VTAKKVVKENEDIKRMQVPRLETPV

SEQ ID NO: 75745 - protein, 31 aa, Artificial Sequence
  Cyclic GFR-binding peptide
HQLFNSLQEHQGQHPKIRYYVMPLPEEETPV

SEQ ID NO: 75746 - protein, 30 aa, Artificial Sequence
  Cyclic GFR-binding peptide
LHEELRNSLQELKPKKRVYEYYLVTLPEHH

SEQ ID NO: 75747 - protein, 30 aa, Artificial Sequence
  Cyclic GFR-binding peptide
HQLFNSLQEHQGQHPKIRYYVMPLPEEETP

SEQ ID NO: 75748 - protein, 38 aa, Artificial Sequence; identical to SEQ ID NO: 27251
  Cyclic GFR-binding peptide
  MOD_RES (1)..(32)..(33): Xaa is C or S

SEQ ID NO: 75749 - protein, 31 aa, Artificial Sequence
  Cyclic GFR-binding peptide
  MOD_RES (1)..(1): Xaa is C or S
XALHDELTNSLQEFIPKKRVIEYYLVTLPEL

SEQ ID NO: 75750 - protein, 31 aa, Artificial Sequence
  Cyclic GFR-binding peptide
LHEELRNSLQELKPKKRVYEYYLVTLPEHHV

SEQ ID NO: 75751 - protein, 32 aa, Artificial Sequence
  Cyclic GFR-binding peptide
  MOD_RES (29)..(30): Xaa is C or S
VMNVTAKKIVNSSDDIKRVQVPRLQTPAXXPK

SEQ ID NO: 75752 - protein, 37 aa, Artificial Sequence
  Cyclic GFR-binding peptide
  MOD_RES (34)..(34): Xaa is C or S
EELRNSLQELKPKKRVYEYYVVPLPEHHVRSPQXKVS

SEQ ID NO: 75753 - protein, 36 aa, Artificial Sequence; identical to SEQ ID NO: 27263
  Cyclic GFR-binding peptide
  MOD_RES (2)..(33)..(34): Xaa is C or S

SEQ ID NO: 75754 - protein, 29 aa, Artificial Sequence
  Cyclic GFR-binding peptide
  MOD_RES (1)..(1): Xaa is C or S
XGEVVMDVTAKKVVKENEDIKRMQVPRLE

SEQ ID NO: 75755 - protein, 31 aa, Artificial Sequence
  Cyclic GFR-binding peptide
  MOD_RES (27)..(28): Xaa is C or S
NSMEGIIVNSSDDMIQVTINSLKTPAXXPKP

SEQ ID NO: 75756 - protein, 30 aa, Artificial Sequence
  Cyclic GFR-binding peptide
SRVVMNSMEGIIVNSSDDMIQVTINSLKTP

SEQ ID NO: 75757 - protein, 31 aa, Artificial Sequence; identical to SEQ ID NO: 27270
  Cyclic GFR-binding peptide

SEQ ID NO: 75758 - protein, 30 aa, Artificial Sequence
  Cyclic GFR-binding peptide
  MOD_RES (26)..(27): Xaa is C or S
VQVEKVVKENEDVKAMKVSRLETPVXXAKP

SEQ ID NO: 75759 - protein, 28 aa, Artificial Sequence
  Cyclic GFR-binding peptide
  MOD_RES (1)..(1): Xaa is C or S
XSKVIMSMEGIIKPTKGIMIQITINSLD

SEQ ID NO: 75760 - protein, 32 aa, Artificial Sequence
  Cyclic GFR-binding peptide
  MOD_RES (30)..(31): Xaa is C or S
VVMNVQVEKIVNSSDDVKAVKVSRLQTPAXXP

SEQ ID NO: 75761 - protein, 28 aa, Artificial Sequence
  Cyclic GFR-binding peptide
TNSLQEFIPKKRVIEYYVVPLPELQVQT

SEQ ID NO: 75762 - protein, 32 aa, Artificial Sequence
  Cyclic GFR-binding peptide
  MOD_RES (26)..(27): Xaa is C or S
VQVEKIVNSSDDVKAVKVSRLKTPAXXPKPVY

SEQ ID NO: 75763 - protein, 37 aa, Artificial Sequence; identical to SEQ ID NO: 27279
  Cyclic GFR-binding peptide
  MOD_RES (2)..(4)..(36)..(37): Xaa is C or S

SEQ ID NO: 75764 - protein, 40 aa, Artificial Sequence; identical to SEQ ID NO: 27283
  Cyclic GFR-binding peptide
  MOD_RES (2)..(39): Xaa is C or S

SEQ ID NO: 75765 - protein, 24 aa, Artificial Sequence
  Cyclic GFR-binding peptide
VVMNVTAKKIVNSSDDIKRVQVPR

SEQ ID NO: 75766 - protein, 40 aa, Artificial Sequence; identical to SEQ ID NO: 27285
  Cyclic GFR-binding peptide
  MOD_RES (2)..(34)..(35): Xaa is C or S

SEQ ID NO: 75767 - protein, 38 aa, Artificial Sequence; identical to SEQ ID NO: 27286
  Cyclic GFR-binding peptide
  MOD_RES (2)..(4)..(36)..(37): Xaa is C or S

SEQ ID NO: 75768 - protein, 28 aa, Artificial Sequence
  Cyclic GFR-binding peptide
  MOD_RES (27)..(28): Xaa is C or S
MVTAKKVKPTRGVIKRIQVPRLDQPVXX

SEQ ID NO: 75769 - protein, 26 aa, Artificial Sequence
  Cyclic GFR-binding peptide
SKVVMSMEGIVKPTRGVMIQITINSL

SEQ ID NO: 75770 - protein, 32 aa, Artificial Sequence
  Cyclic GFR-binding peptide
  MOD_RES (28)..(28): Xaa is C or S
NSLQEHQGQHPKIRYYVMPLPEEETPVXELGE

SEQ ID NO: 75771 - protein, 35 aa, Artificial Sequence; identical to SEQ ID NO: 27290
  Cyclic GFR-binding peptide
  MOD_RES (2)..(4)..(35): Xaa is C or S

SEQ ID NO: 75772 - protein, 35 aa, Artificial Sequence
  Cyclic GFR-binding peptide
  MOD_RES (29)..(29): Xaa is C or S
VMNVTAKKIVNSSDDIKRVQVPRLKTPAXTPKTVH

SEQ ID NO: 75773 - protein, 25 aa, Artificial Sequence
  Cyclic GFR-binding peptide
KVIMSMEGIIKPTKGIMIQITINSL

SEQ ID NO: 75774 - protein, 31 aa, Artificial Sequence
  Cyclic GFR-binding peptide
  MOD_RES (28)..(29): Xaa is C or S
MNVQVEKIVNSSDDVKAVKVSRLQTPAXXPK

SEQ ID NO: 75775 - protein, 32 aa, Artificial Sequence
  Cyclic GFR-binding peptide
  MOD_RES (29)..(30): Xaa is C or S
VVMVTAKKVKPTRGVIKRIQVPRLDQPVXXPS

SEQ ID NO: 75776 - protein, 37 aa, Artificial Sequence; identical to SEQ ID NO: 27291
  Cyclic GFR-binding peptide
  MOD_RES (2)..(33)..(34): Xaa is C or S

SEQ ID NO: 75777 - protein, 33 aa, Artificial Sequence
  Cyclic GFR-binding peptide
  MOD_RES (30)..(30): Xaa is C or S
VVMNVQVEKIVNSSDDVKAVKVSRLKTPAXTPK

SEQ ID NO: 75778 - protein, 31 aa, Artificial Sequence
  Cyclic GFR-binding peptide
  MOD_RES (2)..(2): Xaa is C or S
GXGEVVMDVTAKKVVKENEDIKRMQVPRLET

SEQ ID NO: 75779 - protein, 43 aa, Artificial Sequence; identical to SEQ ID NO: 27300
  Cyclic GFR-binding peptide
  MOD_RES (1)..(3)..(40): Xaa is C or S

SEQ ID NO: 75780 - protein, 23 aa, Artificial Sequence
  Cyclic GFR-binding peptide
VMEVTAKKVVKDYEDIKRMQVPR

SEQ ID NO: 75781 - protein, 31 aa, Artificial Sequence
  Cyclic GFR-binding peptide
ELTNSLQEFIPKKRVIEYYVVPLPELQVQTP

SEQ ID NO: 75782 - protein, 38 aa, Artificial Sequence; identical to SEQ ID NO: 27303
  Cyclic GFR-binding peptide
  MOD_RES (1)..(33)..(34): Xaa is C or S

SEQ ID NO: 75783 - protein, 39 aa, Artificial Sequence; identical to SEQ ID NO: 27305
  Cyclic GFR-binding peptide
  MOD_RES (1)..(3)..(35)..(36): Xaa is C or S

SEQ ID NO: 75784 - protein, 31 aa, Artificial Sequence
  Cyclic GFR-binding peptide
  MOD_RES (1)..(1): Xaa is C or S
XARVVMNSMEGIIVNSSDDMIQVTINSLQTP

SEQ ID NO: 75785 - protein, 30 aa, Artificial Sequence
  Cyclic GFR-binding peptide
  MOD_RES (2)..(4): Xaa is C or S
HXGXARVVMNSMEGIIVNSSDDMIQVTINS

SEQ ID NO: 75786 - protein, 26 aa, Artificial Sequence
  Cyclic GFR-binding peptide
MDSMEGIVVKENEDMIQMTINSLETP

SEQ ID NO: 75787 - protein, 31 aa, Artificial Sequence
  Cyclic GFR-binding peptide
  MOD_RES (1)..(1): Xaa is C or S
XGEVVMESMEGIVVKDYEDMIQMTINSLETP

SEQ ID NO: 75788 - protein, 29 aa, Artificial Sequence
  Cyclic GFR-binding peptide
  MOD_RES (1)..(3): Xaa is C or S
XKXSKVIMVTAKKIKPTKGIIKRIQVPRL

SEQ ID NO: 75789 - protein, 32 aa, Artificial Sequence
  Cyclic GFR-binding peptide
  MOD_RES (1)..(3): Xaa is C or S
XGXGEVVMESMEGIVVKDYEDMIQMTINSLET

SEQ ID NO: 75790 - protein, 37 aa, Artificial Sequence; identical to SEQ ID NO: 27310
  Cyclic GFR-binding peptide
  MOD_RES (2)..(34)..(35): Xaa is C or S

SEQ ID NO: 75791 - protein, 39 aa, Artificial Sequence; identical to SEQ ID NO: 27311
  Cyclic GFR-binding peptide
  MOD_RES (1)..(3)..(34)..(35): Xaa is C or S

SEQ ID NO: 75792 - protein, 32 aa, Artificial Sequence
  Cyclic GFR-binding peptide
  MOD_RES (1)..(3): Xaa is C or S
XKXSKVVMVQVEKVKPTRGVVKAIKVSRLDQP

SEQ ID NO: 75793 - protein, 21 aa, Artificial Sequence
  Cyclic GFR-binding peptide
DVTAKKVVKENEDIKRMQVPR

SEQ ID NO: 75794 - protein, 32 aa, Artificial Sequence
  Cyclic GFR-binding peptide
  MOD_RES (28)..(29): Xaa is C or S
IMVTAKKVKPKRGVIKRIQVPRLAQPVXXPAA

SEQ ID NO: 75795 - protein, 30 aa, Artificial Sequence
  Cyclic GFR-binding peptide
ARVVMNVTAKKIVNSSDDIKRVQVPRLQTP

SEQ ID NO: 75796 - protein, 36 aa, Artificial Sequence
  Cyclic GFR-binding peptide
  MOD_RES (30)..(31): Xaa is C or S
VVMNVQVEKIVNSSDDVKAVKVSRLQTPAXXPKPVT

SEQ ID NO: 75797 - protein, 38 aa, Artificial Sequence
  Cyclic GFR-binding peptide
  MOD_RES (32)..(32): Xaa is C or S
HQLFNSLQEHQGQHPKIRYYVMPLPEEETPVXELGEDN

SEQ ID NO: 75798 - protein, 24 aa, Artificial Sequence
  Cyclic GFR-binding peptide
RVIMVQVEKVKPKRGVVKAIKVSR

SEQ ID NO: 75799 - protein, 36 aa, Artificial Sequence; identical to SEQ ID NO: 27316
  Cyclic GFR-binding peptide
  MOD_RES (31)..(31): Xaa is C or S

SEQ ID NO: 75800 - protein, 24 aa, Artificial Sequence
  Cyclic GFR-binding peptide
VIMSMEGIIKPTKGIMIQITINSL

SEQ ID NO: 75801 - protein, 33 aa, Artificial Sequence
  Cyclic GFR-binding peptide
  MOD_RES (27)..(28): Xaa is C or S
DVQVEKVVKENEDVKAMKVSRLETPVXXAKPIK

SEQ ID NO: 75802 - protein, 23 aa, Artificial Sequence
  Cyclic GFR-binding peptide
MSMEGIVKPKRGVMIQITINSLA

SEQ ID NO: 75803 - protein, 31 aa, Artificial Sequence
  Cyclic GFR-binding peptide
  MOD_RES (2)..(2): Xaa is C or S
GXGEVVMEVQVEKVVKDYEDVKAMKVSRLET

SEQ ID NO: 75804 - protein, 36 aa, Artificial Sequence; identical to SEQ ID NO: 27320
  Cyclic GFR-binding peptide
  MOD_RES (31)..(32): Xaa is C or S

SEQ ID NO: 75805 - protein, 28 aa, Artificial Sequence
  Cyclic GFR-binding peptide
EVVMDSMEGIVVKENEDMIQMTINSLET

SEQ ID NO: 75806 - protein, 25 aa, Artificial Sequence
  Cyclic GFR-binding peptide
NVQVEKIVNSSDDVKAVKVSRLQTP

SEQ ID NO: 75807 - protein, 35 aa, Artificial Sequence; identical to SEQ ID NO: 27321
  Cyclic GFR-binding peptide
  MOD_RES (1)..(35): Xaa is C or S

SEQ ID NO: 75808 - protein, 35 aa, Artificial Sequence
  Cyclic GFR-binding peptide
  MOD_RES (29)..(30): Xaa is C or S
VIMVQVEKIKPTKGIVKAIKVSRLDQSVXXPSASA

SEQ ID NO: 75809 - protein, 35 aa, Artificial Sequence
  Cyclic GFR-binding peptide
  MOD_RES (29)..(29): Xaa is C or S
FNSLQEHQGQHPKIRYYLMTLPEEETPVXELGEDN

SEQ ID NO: 75810 - protein, 40 aa, Artificial Sequence; identical to SEQ ID NO: 27323
  Cyclic GFR-binding peptide
  MOD_RES (2)..(4)..(35)..(36): Xaa is C or S

SEQ ID NO: 75811 - protein, 27 aa, Artificial Sequence
  Cyclic GFR-binding peptide
  MOD_RES (1)..(1): Xaa is C or S
XSKVIMVTAKKIKPTKGIIKRIQVPRL

SEQ ID NO: 75812 - protein, 42 aa, Artificial Sequence; identical to SEQ ID NO: 27326
  Cyclic GFR-binding peptide
  MOD_RES (2)..(4)..(41): Xaa is C or S

SEQ ID NO: 75813 - protein, 20 aa, Artificial Sequence
  Cyclic GFR-binding peptide
SMEGIVVKDYEDMIQMTINS

SEQ ID NO: 75814 - protein, 27 aa, Artificial Sequence
  Cyclic GFR-binding peptide
EVVMDVTAKKVVKENEDIKRMQVPRLE

SEQ ID NO: 75815 - protein, 33 aa, Artificial Sequence; identical to SEQ ID NO: 27328
  Cyclic GFR-binding peptide
  MOD_RES (1)..(3): Xaa is C or S

SEQ ID NO: 75816 - protein, 26 aa, Artificial Sequence
  Cyclic GFR-binding peptide
MVQVEKVKPTRGVVKAIKVSRLDQPV

SEQ ID NO: 75817 - protein, 35 aa, Artificial Sequence; identical to SEQ ID NO: 27334
  Cyclic GFR-binding peptide
  MOD_RES (1)..(33): Xaa is C or S

SEQ ID NO: 75818 - protein, 34 aa, Artificial Sequence; identical to SEQ ID NO: 27336
  Cyclic GFR-binding peptide
  MOD_RES (33)..(33): Xaa is C or S

SEQ ID NO: 75819 - protein, 29 aa, Artificial Sequence
  Cyclic GFR-binding peptide
QLFNSLQEHQGQHPKIRYYVMPLPEEETP

SEQ ID NO: 75820 - protein, 34 aa, Artificial Sequence
  Cyclic GFR-binding peptide
  MOD_RES (31)..(31): Xaa is C or S
QLFNSLQEHQGQHPKIRYYLMTLPEEETPVXELG

SEQ ID NO: 75821 - protein, 33 aa, Artificial Sequence
  Cyclic GFR-binding peptide
  MOD_RES (2)..(4): Xaa is C or S
SXKXSKVVMVTAKKVKPTRGVIKRIQVPRLDQP

SEQ ID NO: 75822 - protein, 26 aa, Artificial Sequence
  Cyclic GFR-binding peptide
IMVQVEKIKPTKGIVKAIKVSRLDQS

SEQ ID NO: 75823 - protein, 29 aa, Artificial Sequence
  Cyclic GFR-binding peptide
LHDELTNSLQEFIPKKRVIEYYLVTLPEL

SEQ ID NO: 75824 - protein, 20 aa, Artificial Sequence
  Cyclic GFR-binding peptide
SMEGIVVKDYEDMIQMTINS

SEQ ID NO: 75825 - protein, 30 aa, Artificial Sequence
  Cyclic GFR-binding peptide
ELRNSLQELKPKKRVYEYYLVTLPEHHVRS

SEQ ID NO: 75826 - protein, 33 aa, Artificial Sequence
  Cyclic GFR-binding peptide
  MOD_RES (2)..(4): Xaa is C or S
RXEXKNHQLFNSLQEHQGQHPKIRYYLMTLPEE

SEQ ID NO: 75827 - protein, 32 aa, Artificial Sequence; identical to SEQ ID NO: 27340
  Cyclic GFR-binding peptide
  MOD_RES (32)..(32): Xaa is C or S

SEQ ID NO: 75828 - protein, 32 aa, Artificial Sequence
  Cyclic GFR-binding peptide
  MOD_RES (29)..(30): Xaa is C or S
VMEVQVEKVVKDYEDVKAMKVSRLETPVXXAK

SEQ ID NO: 75829 - protein, 31 aa, Artificial Sequence
  Cyclic GFR-binding peptide
ALHDELTNSLQEFIPKKRVIEYYVVPLPELQ

SEQ ID NO: 75830 - protein, 32 aa, Artificial Sequence
  Cyclic GFR-binding peptide
  MOD_RES (2)..(4): Xaa is C or S
HXGXSRVVMNVTAKKIVNSSDDIKRVQVPRLK

SEQ ID NO: 75831 - protein, 31 aa, Artificial Sequence
  Cyclic GFR-binding peptide
  MOD_RES (2)..(4): Xaa is C or S
HXGXARVVMNVTAKKIVNSSDDIKRVQVPRL

SEQ ID NO: 75832 - protein, 37 aa, Artificial Sequence
  Cyclic GFR-binding peptide
  MOD_RES (34)..(34): Xaa is C or S
EELRNSLQELKPKKRVYEYYLVTLPEHHVRSPQXKVS

SEQ ID NO: 75833 - protein, 30 aa, Artificial Sequence
  Cyclic GFR-binding peptide
ARVVMNVQVEKIVNSSDDVKAVKVSRLQTP

SEQ ID NO: 75834 - protein, 35 aa, Artificial Sequence
  Cyclic GFR-binding peptide
  MOD_RES (30)..(31): Xaa is C or S
KVVMVQVEKVKPTRGVVKAIKVSRLDQPVXXPSAS

SEQ ID NO: 75835 - protein, 31 aa, Artificial Sequence
  Cyclic GFR-binding peptide
  MOD_RES (2)..(2): Xaa is C or S
GXARVVMNVTAKKIVNSSDDIKRVQVPRLQT

SEQ ID NO: 75836 - protein, 29 aa, Artificial Sequence
  Cyclic GFR-binding peptide
SKVVMVQVEKVKPTRGVVKAIKVSRLDQP

SEQ ID NO: 75837 - protein, 32 aa, Artificial Sequence; identical to SEQ ID NO: 27351
  Cyclic GFR-binding peptide
  MOD_RES (31)..(32): Xaa is C or S

SEQ ID NO: 75838 - protein, 39 aa, Artificial Sequence; identical to SEQ ID NO: 27350
  Cyclic GFR-binding peptide
  MOD_RES (2)..(34)..(35): Xaa is C or S

SEQ ID NO: 75839 - protein, 23 aa, Artificial Sequence
  Cyclic GFR-binding peptide
SMEGIIKPTKGIMIQITINSLDQ

SEQ ID NO: 75840 - protein, 29 aa, Artificial Sequence
  Cyclic GFR-binding peptide
VVMDVQVEKVVKENEDVKAMKVSRLETPV

SEQ ID NO: 75841 - protein, 24 aa, Artificial Sequence
  Cyclic GFR-binding peptide
MNVQVEKIVNSSDDVKAVKVSRLQ

SEQ ID NO: 75842 - protein, 37 aa, Artificial Sequence; identical to SEQ ID NO: 27357
  Cyclic GFR-binding peptide
  MOD_RES (31)..(32): Xaa is C or S

SEQ ID NO: 75843 - protein, 35 aa, Artificial Sequence
  Cyclic GFR-binding peptide
  MOD_RES (31)..(31): Xaa is C or S
QLFNSLQEHQGQHPKIRYYLMTLPEEETPVXELGE

SEQ ID NO: 75844 - protein, 32 aa, Artificial Sequence
  Cyclic GFR-binding peptide
  MOD_RES (26)..(27): Xaa is C or S
VQVEKVVKDYEDVKAMKVSRLETPVXXAKPIS

SEQ ID NO: 75845 - protein, 34 aa, Artificial Sequence
  Cyclic GFR-binding peptide
  MOD_RES (2)..(4): Xaa is C or S
HXGXARVVMNVQVEKIVNSSDDVKAVKVSRLQTP

SEQ ID NO: 75846 - protein, 32 aa, Artificial Sequence
  Cyclic GFR-binding peptide
  MOD_RES (28)..(29): Xaa is C or S
VMVTAKKVKPTRGVIKRIQVPRLDQPVXXPSA

SEQ ID NO: 75847 - protein, 37 aa, Artificial Sequence; identical to SEQ ID NO: 27361
  Cyclic GFR-binding peptide
  MOD_RES (31)..(32): Xaa is C or S

SEQ ID NO: 75848 - protein, 32 aa, Artificial Sequence; identical to SEQ ID NO: 27362
  Cyclic GFR-binding peptide
  MOD_RES (1)..(1): Xaa is C or S

SEQ ID NO: 75849 - protein, 32 aa, Artificial Sequence; identical to SEQ ID NO: 27364
  Cyclic GFR-binding peptide
  MOD_RES (1)..(32): Xaa is C or S

SEQ ID NO: 75850 - protein, 29 aa, Artificial Sequence
  Cyclic GFR-binding peptide
  MOD_RES (26)..(27): Xaa is C or S
VQVEKIVNSSDDVKAVKVSRLQTPAXXPK

SEQ ID NO: 75851 - protein, 42 aa, Artificial Sequence; identical to SEQ ID NO: 27365
  Cyclic GFR-binding peptide
  MOD_RES (1)..(3)..(40): Xaa is C or S

SEQ ID NO: 75852 - protein, 24 aa, Artificial Sequence
  Cyclic GFR-binding peptide
VIMVQVEKIKPTKGIVKAIKVSRL

SEQ ID NO: 75853 - protein, 36 aa, Artificial Sequence; identical to SEQ ID NO: 27373
  Cyclic GFR-binding peptide
  MOD_RES (31)..(32): Xaa is C or S

SEQ ID NO: 75854 - protein, 35 aa, Artificial Sequence; identical to SEQ ID NO: 27376
  Cyclic GFR-binding peptide
  MOD_RES (1)..(33)..(34): Xaa is C or S

SEQ ID NO: 75855 - protein, 30 aa, Artificial Sequence
  Cyclic GFR-binding peptide
  MOD_RES (1)..(1): Xaa is C or S
XSKVIMSMEGIIKPTKGIMIQITINSLDQS

SEQ ID NO: 75856 - protein, 34 aa, Artificial Sequence; identical to SEQ ID NO: 27382
  Cyclic GFR-binding peptide
  MOD_RES (31)..(32): Xaa is C or S

SEQ ID NO: 75857 - protein, 23 aa, Artificial Sequence
  Cyclic GFR-binding peptide
VMDSMEGIVVKENEDMIQMTINS

SEQ ID NO: 75858 - protein, 33 aa, Artificial Sequence
  Cyclic GFR-binding peptide
  MOD_RES (2)..(4): Xaa is C or S
HXGXSRVVMNSMEGIIVNSSDDMIQVTINSLKT

SEQ ID NO: 75859 - protein, 36 aa, Artificial Sequence; identical to SEQ ID NO: 27386
  Cyclic GFR-binding peptide
  MOD_RES (31)..(32): Xaa is C or S

SEQ ID NO: 75860 - protein, 33 aa, Artificial Sequence; identical to SEQ ID NO: 27391
  Cyclic GFR-binding peptide
  MOD_RES (2)..(33): Xaa is C or S

SEQ ID NO: 75861 - protein, 31 aa, Artificial Sequence
  Cyclic GFR-binding peptide
  MOD_RES (31)..(31): Xaa is C or S
RNSLQELKPKKRVYEYYVVPLPEHHVRSPQX

SEQ ID NO: 75862 - protein, 35 aa, Artificial Sequence; identical to SEQ ID NO: 27394
  Cyclic GFR-binding peptide
  MOD_RES (1)..(32)..(33): Xaa is C or S

SEQ ID NO: 75863 - protein, 34 aa, Artificial Sequence; identical to SEQ ID NO: 27396
  Cyclic GFR-binding peptide
  MOD_RES (1)..(32)..(33): Xaa is C or S

SEQ ID NO: 75864 - protein, 34 aa, Artificial Sequence; identical to SEQ ID NO: 27397
  Cyclic GFR-binding peptide
  MOD_RES (32)..(33): Xaa is C or S

SEQ ID NO: 75865 - protein, 36 aa, Artificial Sequence; identical to SEQ ID NO: 27398
  Cyclic GFR-binding peptide
  MOD_RES (1)..(3)..(35)..(36): Xaa is C or S

SEQ ID NO: 75866 - protein, 39 aa, Artificial Sequence; identical to SEQ ID NO: 27400
  Cyclic GFR-binding peptide
  MOD_RES (37)..(37): Xaa is C or S

SEQ ID NO: 75867 - protein, 27 aa, Artificial Sequence
  Cyclic GFR-binding peptide
LRNSLQELKPKKRVYEYYLVTLPEHHV

SEQ ID NO: 75868 - protein, 40 aa, Artificial Sequence; identical to SEQ ID NO: 27403
  Cyclic GFR-binding peptide
  MOD_RES (2)..(39): Xaa is C or S

SEQ ID NO: 75869 - protein, 23 aa, Artificial Sequence
  Cyclic GFR-binding peptide
MNSMEGIIVNSSDDMIQVTINSL

SEQ ID NO: 75870 - protein, 32 aa, Artificial Sequence
  Cyclic GFR-binding peptide
  MOD_RES (26)..(27): Xaa is C or S
VTAKKIKPTKGIIKRIQVPRLDQSVXXPSASA

SEQ ID NO: 75871 - protein, 25 aa, Artificial Sequence
  Cyclic GFR-binding peptide
SKVVMSMEGIVKPTRGVMIQITINS

SEQ ID NO: 75872 - protein, 26 aa, Artificial Sequence
  Cyclic GFR-binding peptide
VVMDVQVEKVVKENEDVKAMKVSRLE

SEQ ID NO: 75873 - protein, 26 aa, Artificial Sequence
  Cyclic GFR-binding peptide
  MOD_RES (1)..(1): Xaa is C or S
XSRVIMVQVEKVKPKRGVVKAIKVSR

SEQ ID NO: 75874 - protein, 25 aa, Artificial Sequence
  Cyclic GFR-binding peptide
SKVVMVQVEKVKPTRGVVKAIKVSR

SEQ ID NO: 75875 - protein, 24 aa, Artificial Sequence
  Cyclic GFR-binding peptide
SMEGIIVNSSDDMIQVTINSLQTP

SEQ ID NO: 75876 - protein, 27 aa, Artificial Sequence
  Cyclic GFR-binding peptide
VVMDVTAKKVVKENEDIKRMQVPRLET

SEQ ID NO: 75877 - protein, 37 aa, Artificial Sequence; identical to SEQ ID NO: 27406
  Cyclic GFR-binding peptide
  MOD_RES (32)..(33): Xaa is C or S

SEQ ID NO: 75878 - protein, 28 aa, Artificial Sequence
  Cyclic GFR-binding peptide
  MOD_RES (2)..(2): Xaa is C or S
GXGEVVMEVTAKKVVKDYEDIKRMQVPR

SEQ ID NO: 75879 - protein, 38 aa, Artificial Sequence; identical to SEQ ID NO: 27410
  Cyclic GFR-binding peptide
  MOD_RES (1)..(38): Xaa is C or S

SEQ ID NO: 75880 - protein, 26 aa, Artificial Sequence
  Cyclic GFR-binding peptide
KVVMVQVEKVKPTRGVVKAIKVSRLD

SEQ ID NO: 75881 - protein, 25 aa, Artificial Sequence
  Cyclic GFR-binding peptide
VQVEKVVKDYEDVKAMKVSRLETPV

SEQ ID NO: 75882 - protein, 34 aa, Artificial Sequence
  Cyclic GFR-binding peptide
  MOD_RES (34)..(34): Xaa is C or S
EELRNSLQELKPKKRVYEYYVVPLPEHHVRSPQX

SEQ ID NO: 75883 - protein, 37 aa, Artificial Sequence; identical to SEQ ID NO: 27412
  Cyclic GFR-binding peptide
  MOD_RES (31)..(32): Xaa is C or S

SEQ ID NO: 75884 - protein, 37 aa, Artificial Sequence; identical to SEQ ID NO: 27415
  Cyclic GFR-binding peptide
  MOD_RES (2)..(4)..(35)..(36): Xaa is C or S

SEQ ID NO: 75885 - protein, 34 aa, Artificial Sequence
  Cyclic GFR-binding peptide
  MOD_RES (1)..(1): Xaa is C or S
XELHEELRNSLQELKPKKRVYEYYLVTLPEHHVR

SEQ ID NO: 75886 - protein, 38 aa, Artificial Sequence; identical to SEQ ID NO: 27419
  Cyclic GFR-binding peptide
  MOD_RES (2)..(4)..(38): Xaa is C or S

SEQ ID NO: 75887 - protein, 33 aa, Artificial Sequence; identical to SEQ ID NO: 27421
  Cyclic GFR-binding peptide

SEQ ID NO: 75888 - protein, 20 aa, Artificial Sequence
  Cyclic GFR-binding peptide
SMEGIVVKENEDMIQMTINS

SEQ ID NO: 75889 - protein, 29 aa, Artificial Sequence
  Cyclic GFR-binding peptide
  MOD_RES (2)..(2): Xaa is C or S
GXGEVVMDVTAKKVVKENEDIKRMQVPRL

SEQ ID NO: 75890 - protein, 34 aa, Artificial Sequence; identical to SEQ ID NO: 27426
  Cyclic GFR-binding peptide
  MOD_RES (1)..(3): Xaa is C or S

SEQ ID NO: 75891 - protein, 30 aa, Artificial Sequence
  Cyclic GFR-binding peptide
  MOD_RES (2)..(2): Xaa is C or S
GXARVVMNVQVEKIVNSSDDVKAVKVSRLQ

SEQ ID NO: 75892 - protein, 31 aa, Artificial Sequence
  Cyclic GFR-binding peptide
  MOD_RES (1)..(3): Xaa is C or S
XGXGEVVMDSMEGIVVKENEDMIQMTINSLE

SEQ ID NO: 75893 - protein, 36 aa, Artificial Sequence; identical to SEQ ID NO: 27430
  Cyclic GFR-binding peptide
  MOD_RES (31)..(32): Xaa is C or S

SEQ ID NO: 75894 - protein, 29 aa, Artificial Sequence
  Cyclic GFR-binding peptide
  MOD_RES (1)..(1): Xaa is C or S
XSKVVMVQVEKVKPTRGVVKAIKVSRLDQ

SEQ ID NO: 75895 - protein, 34 aa, Artificial Sequence; identical to SEQ ID NO: 27436
  Cyclic GFR-binding peptide
  MOD_RES (1)..(3): Xaa is C or S

SEQ ID NO: 75896 - protein, 38 aa, Artificial Sequence; identical to SEQ ID NO: 27439
  Cyclic GFR-binding peptide
  MOD_RES (1)..(33): Xaa is C or S

SEQ ID NO: 75897 - protein, 36 aa, Artificial Sequence; identical to SEQ ID NO: 27448
  Cyclic GFR-binding peptide
  MOD_RES (31)..(31): Xaa is C or S

SEQ ID NO: 75898 - protein, 34 aa, Artificial Sequence; identical to SEQ ID NO: 27453
  Cyclic GFR-binding peptide
  MOD_RES (31)..(32): Xaa is C or S

SEQ ID NO: 75899 - protein, 30 aa, Artificial Sequence
  Cyclic GFR-binding peptide
  MOD_RES (27)..(28): Xaa is C or S
MVTAKKVKPKRGVIKRIQVPRLAQPVXXPA

SEQ ID NO: 75900 - protein, 28 aa, Artificial Sequence
  Cyclic GFR-binding peptide
GEVVMEVTAKKVVKDYEDIKRMQVPRLE

SEQ ID NO: 75901 - protein, 40 aa, Artificial Sequence; identical to SEQ ID NO: 27455
  Cyclic GFR-binding peptide
  MOD_RES (1)..(3)..(35)..(36): Xaa is C or S

SEQ ID NO: 75902 - protein, 36 aa, Artificial Sequence; identical to SEQ ID NO: 27458
  Cyclic GFR-binding peptide
  MOD_RES (1)..(3)..(34)..(35): Xaa is C or S

SEQ ID NO: 75903 - protein, 32 aa, Artificial Sequence
  Cyclic GFR-binding peptide
  MOD_RES (29)..(30): Xaa is C or S
VMESMEGIVVKDYEDMIQMTINSLETPVXXAK

SEQ ID NO: 75904 - protein, 33 aa, Artificial Sequence
  Cyclic GFR-binding peptide
  MOD_RES (2)..(4): Xaa is C or S
HXGXARVVMNVTAKKIVNSSDDIKRVQVPRLQT

SEQ ID NO: 75905 - protein, 25 aa, Artificial Sequence
  Cyclic GFR-binding peptide
VMVTAKKVKPTRGVIKRIQVPRLDQ

SEQ ID NO: 75906 - protein, 38 aa, Artificial Sequence; identical to SEQ ID NO: 27467
  Cyclic GFR-binding peptide
  MOD_RES (1)..(32)..(33): Xaa is C or S

SEQ ID NO: 75907 - protein, 36 aa, Artificial Sequence; identical to SEQ ID NO: 27471
  Cyclic GFR-binding peptide
  MOD_RES (1)..(3)..(35)..(36): Xaa is C or S

SEQ ID NO: 75908 - protein, 28 aa, Artificial Sequence
  Cyclic GFR-binding peptide
VVMDSMEGIVVKENEDMIQMTINSLETP

SEQ ID NO: 75909 - protein, 32 aa, Artificial Sequence
  Cyclic GFR-binding peptide
  MOD_RES (28)..(29): Xaa is C or S
MESMEGIVVKDYEDMIQMTINSLETPVXXAKP

SEQ ID NO: 75910 - protein, 33 aa, Artificial Sequence; identical to SEQ ID NO: 27473
  Cyclic GFR-binding peptide
  MOD_RES (31)..(32): Xaa is C or S

SEQ ID NO: 75911 - protein, 34 aa, Artificial Sequence; identical to SEQ ID NO: 27475
  Cyclic GFR-binding peptide
  MOD_RES (32)..(32): Xaa is C or S

SEQ ID NO: 75912 - protein, 23 aa, Artificial Sequence
  Cyclic GFR-binding peptide
VMDVQVEKVVKENEDVKAMKVSR

SEQ ID NO: 75913 - protein, 33 aa, Artificial Sequence
  Cyclic GFR-binding peptide
  MOD_RES (33)..(33): Xaa is C or S
ELRNSLQELKPKKRVYEYYVVPLPEHHVRSPQX

SEQ ID NO: 75914 - protein, 28 aa, Artificial Sequence
  Cyclic GFR-binding peptide
  MOD_RES (26)..(27): Xaa is C or S
VQVEKVKPKRGVVKAIKVSRLAQPVXXP

SEQ ID NO: 75915 - protein, 33 aa, Artificial Sequence; identical to SEQ ID NO: 27480
  Cyclic GFR-binding peptide
  MOD_RES (31)..(31): Xaa is C or S

SEQ ID NO: 75916 - protein, 32 aa, Artificial Sequence
  Cyclic GFR-binding peptide
  MOD_RES (2)..(2): Xaa is C or S
GXGEVVMDSMEGIVVKENEDMIQMTINSLETP

SEQ ID NO: 75917 - protein, 30 aa, Artificial Sequence
  Cyclic GFR-binding peptide
  MOD_RES (2)..(2): Xaa is C or S
GXSRVVMNSMEGIIVNSSDDMIQVTINSLK

SEQ ID NO: 75918 - protein, 28 aa, Artificial Sequence
  Cyclic GFR-binding peptide
  MOD_RES (1)..(1): Xaa is C or S
XARVVMNVTAKKIVNSSDDIKRVQVPRL

SEQ ID NO: 75919 - protein, 28 aa, Artificial Sequence
  Cyclic GFR-binding peptide
HEELRNSLQELKPKKRVYEYYVVPLPEH

SEQ ID NO: 75920 - protein, 32 aa, Artificial Sequence
  Cyclic GFR-binding peptide
  MOD_RES (26)..(27): Xaa is C or S
SMEGIVKPTRGVMIQITINSLDQPVXXPSASA

SEQ ID NO: 75921 - protein, 34 aa, Artificial Sequence
  Cyclic GFR-binding peptide
  MOD_RES (28)..(28): Xaa is C or S
NSLQEHQGQHPKIRYYLMTLPEEETPVXELGEDN

SEQ ID NO: 75922 - protein, 30 aa, Artificial Sequence
  Cyclic GFR-binding peptide
SRVIMVTAKKVKPKRGVIKRIQVPRLAQPV

SEQ ID NO: 75923 - protein, 24 aa, Artificial Sequence
  Cyclic GFR-binding peptide
NSLQEFIPKKRVIEYYVVPLPELQ

SEQ ID NO: 75924 - protein, 30 aa, Artificial Sequence
  Cyclic GFR-binding peptide
  MOD_RES (2)..(2): Xaa is C or S
GXGEVVMESMEGIVVKDYEDMIQMTINSLE

SEQ ID NO: 75925 - protein, 33 aa, Artificial Sequence; identical to SEQ ID NO: 27493
  Cyclic GFR-binding peptide
  MOD_RES (2)..(33): Xaa is C or S

SEQ ID NO: 75926 - protein, 29 aa, Artificial Sequence
  Cyclic GFR-binding peptide
NSLQEFIPKKRVIEYYVVPLPELQVQTPR

SEQ ID NO: 75927 - protein, 34 aa, Artificial Sequence; identical to SEQ ID NO: 27497
  Cyclic GFR-binding peptide
  MOD_RES (32)..(33): Xaa is C or S

SEQ ID NO: 75928 - protein, 34 aa, Artificial Sequence
  Cyclic GFR-binding peptide
  MOD_RES (29)..(30): Xaa is C or S
VMNVQVEKIVNSSDDVKAVKVSRLQTPAXXPKPV

SEQ ID NO: 75929 - protein, 32 aa, Artificial Sequence
  Cyclic GFR-binding peptide
  MOD_RES (26)..(27): Xaa is C or S
SMEGIVVKDYEDMIQMTINSLETPVXXAKPIS

SEQ ID NO: 75930 - protein, 30 aa, Artificial Sequence
  Cyclic GFR-binding peptide
  MOD_RES (29)..(30): Xaa is C or S
VMDSMEGIVVKENEDMIQMTINSLETPVXX

SEQ ID NO: 75931 - protein, 20 aa, Artificial Sequence
  Cyclic GFR-binding peptide
VTAKKIKPTKGIIKRIQVPR

SEQ ID NO: 75932 - protein, 31 aa, Artificial Sequence
  Cyclic GFR-binding peptide
  MOD_RES (29)..(30): Xaa is C or S
VIMSMEGIVKPKRGVMIQITINSLAQPVXXP

SEQ ID NO: 75933 - protein, 38 aa, Artificial Sequence; identical to SEQ ID NO: 27511
  Cyclic GFR-binding peptide
  MOD_RES (37)..(37): Xaa is C or S

SEQ ID NO: 75934 - protein, 39 aa, Artificial Sequence; identical to SEQ ID NO: 27516
  Cyclic GFR-binding peptide
  MOD_RES (2)..(34)..(35): Xaa is C or S

SEQ ID NO: 75935 - protein, 33 aa, Artificial Sequence
  Cyclic GFR-binding peptide
  MOD_RES (1)..(3): Xaa is C or S
XGXARVVMNSMEGIIVNSSDDMIQVTINSLQTP

SEQ ID NO: 75936 - protein, 30 aa, Artificial Sequence
  Cyclic GFR-binding peptide
  MOD_RES (1)..(1): Xaa is C or S
XGEVVMEVQVEKVVKDYEDVKAMKVSRLET

SEQ ID NO: 75937 - protein, 31 aa, Artificial Sequence
  Cyclic GFR-binding peptide
  MOD_RES (2)..(2): Xaa is C or S
KXSRVIMVQVEKVKPKRGVVKAIKVSRLAQP

SEQ ID NO: 75938 - protein, 30 aa, Artificial Sequence
  Cyclic GFR-binding peptide
  MOD_RES (1)..(1): Xaa is C or S
XGEVVMDSMEGIVVKENEDMIQMTINSLET

SEQ ID NO: 75939 - protein, 36 aa, Artificial Sequence; identical to SEQ ID NO: 27525
  Cyclic GFR-binding peptide
  MOD_RES (2)..(4)..(36): Xaa is C or S

SEQ ID NO: 75940 - protein, 30 aa, Artificial Sequence
  Cyclic GFR-binding peptide
  MOD_RES (30)..(30): Xaa is C or S
KVVMSMEGIVKPTRGVMIQITINSLDQPVX

SEQ ID NO: 75941 - protein, 34 aa, Artificial Sequence; identical to SEQ ID NO: 27530
  Cyclic GFR-binding peptide
  MOD_RES (32)..(32): Xaa is C or S

SEQ ID NO: 75942 - protein, 29 aa, Artificial Sequence
  Cyclic GFR-binding peptide
  MOD_RES (1)..(1): Xaa is C or S
XSRVVMNVTAKKIVNSSDDIKRVQVPRLK

SEQ ID NO: 75943 - protein, 30 aa, Artificial Sequence
  Cyclic GFR-binding peptide
  MOD_RES (1)..(3): Xaa is C or S
XGXARVVMNSMEGIIVNSSDDMIQVTINSL

SEQ ID NO: 75944 - protein, 31 aa, Artificial Sequence; identical to SEQ ID NO: 27532
  Cyclic GFR-binding peptide
  MOD_RES (31)..(31): Xaa is C or S

SEQ ID NO: 75945 - protein, 32 aa, Artificial Sequence
  Cyclic GFR-binding peptide
  MOD_RES (30)..(31): Xaa is C or S
VVMESMEGIVVKDYEDMIQMTINSLETPVXXA

SEQ ID NO: 75946 - protein, 31 aa, Artificial Sequence
  Cyclic GFR-binding peptide
  MOD_RES (27)..(27): Xaa is C or S
NVTAKKIVNSSDDIKRVQVPRLKTPAXTPKT

SEQ ID NO: 75947 - protein, 37 aa, Artificial Sequence; identical to SEQ ID NO: 27539
  Cyclic GFR-binding peptide
  MOD_RES (2)..(4)..(36)..(37): Xaa is C or S

SEQ ID NO: 75948 - protein, 29 aa, Artificial Sequence
  Cyclic GFR-binding peptide
SKVVMSMEGIVKPTRGVMIQITINSLDQP

SEQ ID NO: 75949 - protein, 34 aa, Artificial Sequence
  Cyclic GFR-binding peptide
  MOD_RES (30)..(31): Xaa is C or S
VVMNVTAKKIVNSSDDIKRVQVPRLKTPAXXPKP

SEQ ID NO: 75950 - protein, 23 aa, Artificial Sequence
  Cyclic GFR-binding peptide
FNSLQEHQGQHPKIRYYLMTLPE

SEQ ID NO: 75951 - protein, 39 aa, Artificial Sequence; identical to SEQ ID NO: 27544
  Cyclic GFR-binding peptide
  MOD_RES (2)..(33)..(34): Xaa is C or S

SEQ ID NO: 75952 - protein, 28 aa, Artificial Sequence
  Cyclic GFR-binding peptide
EVVMDVQVEKVVKENEDVKAMKVSRLET

SEQ ID NO: 75953 - protein, 25 aa, Artificial Sequence
  Cyclic GFR-binding peptide
IMVQVEKIKPTKGIVKAIKVSRLDQ

SEQ ID NO: 75954 - protein, 38 aa, Artificial Sequence; identical to SEQ ID NO: 27550
  Cyclic GFR-binding peptide
  MOD_RES (2)..(4)..(36)..(37): Xaa is C or S

SEQ ID NO: 75955 - protein, 33 aa, Artificial Sequence
  Cyclic GFR-binding peptide
  MOD_RES (30)..(31): Xaa is C or S
KVIMSMEGIIKPTKGIMIQITINSLDQSVXXPS

SEQ ID NO: 75956 - protein, 31 aa, Artificial Sequence; identical to SEQ ID NO: 27554
  Cyclic GFR-binding peptide
  MOD_RES (1)..(1): Xaa is C or S

SEQ ID NO: 75957 - protein, 31 aa, Artificial Sequence
  Cyclic GFR-binding peptide
DELTNSLQEFIPKKRVIEYYLVTLPELQVQT

SEQ ID NO: 75958 - protein, 41 aa, Artificial Sequence; identical to SEQ ID NO: 27559
  Cyclic GFR-binding peptide
  MOD_RES (2)..(4)..(35)..(36): Xaa is C or S

SEQ ID NO: 75959 - protein, 29 aa, Artificial Sequence
  Cyclic GFR-binding peptide
  MOD_RES (28)..(29): Xaa is C or S
MEVTAKKVVKDYEDIKRMQVPRLETPVXX

SEQ ID NO: 75960 - protein, 36 aa, Artificial Sequence; identical to SEQ ID NO: 27563
  Cyclic GFR-binding peptide
  MOD_RES (1)..(32)..(33): Xaa is C or S

SEQ ID NO: 75961 - protein, 39 aa, Artificial Sequence; identical to SEQ ID NO: 27564
  Cyclic GFR-binding peptide
  MOD_RES (2)..(4)..(35)..(36): Xaa is C or S

SEQ ID NO: 75962 - protein, 32 aa, Artificial Sequence; identical to SEQ ID NO: 27567
  Cyclic GFR-binding peptide
  MOD_RES (32)..(32): Xaa is C or S

SEQ ID NO: 75963 - protein, 33 aa, Artificial Sequence
  Cyclic GFR-binding peptide
  MOD_RES (30)..(31): Xaa is C or S
VVMDVTAKKVVKENEDIKRMQVPRLETPVXXAK

SEQ ID NO: 75964 - protein, 30 aa, Artificial Sequence
  Cyclic GFR-binding peptide
  MOD_RES (28)..(28): Xaa is C or S
MNVTAKKIVNSSDDIKRVQVPRLKTPAXTP

SEQ ID NO: 75965 - protein, 21 aa, Artificial Sequence
  Cyclic GFR-binding peptide
MVQVEKVKPKRGVVKAIKVSR

SEQ ID NO: 75966 - protein, 20 aa, Artificial Sequence
  Cyclic GFR-binding peptide
VQVEKVKPTRGVVKAIKVSR

SEQ ID NO: 75967 - protein, 28 aa, Artificial Sequence
  Cyclic GFR-binding peptide
ELTNSLQEFIPKKRVIEYYVVPLPELQV

SEQ ID NO: 75968 - protein, 34 aa, Artificial Sequence
  Cyclic GFR-binding peptide
  MOD_RES (30)..(31): Xaa is C or S
VVMNVTAKKIVNSSDDIKRVQVPRLQTPAXXPKP

SEQ ID NO: 75969 - protein, 26 aa, Artificial Sequence
  Cyclic GFR-binding peptide
GEVVMDVQVEKVVKENEDVKAMKVSR

SEQ ID NO: 75970 - protein, 29 aa, Artificial Sequence
  Cyclic GFR-binding peptide
  MOD_RES (1)..(1): Xaa is C or S
XSKVVMSMEGIVKPTRGVMIQITINSLDQ

SEQ ID NO: 75971 - protein, 22 aa, Artificial Sequence
  Cyclic GFR-binding peptide
IMSMEGIIKPTKGIMIQITINS

SEQ ID NO: 75972 - protein, 34 aa, Artificial Sequence
  Cyclic GFR-binding peptide
  MOD_RES (29)..(30): Xaa is C or S
VIMSMEGIIKPTKGIMIQITINSLDQSVXXPSAS

SEQ ID NO: 75973 - protein, 34 aa, Artificial Sequence; identical to SEQ ID NO: 27581
  Cyclic GFR-binding peptide
  MOD_RES (2)..(4): Xaa is C or S

SEQ ID NO: 75974 - protein, 27 aa, Artificial Sequence
  Cyclic GFR-binding peptide
EVVMDVQVEKVVKENEDVKAMKVSRLE

SEQ ID NO: 75975 - protein, 35 aa, Artificial Sequence
  Cyclic GFR-binding peptide
  MOD_RES (2)..(2): Xaa is C or S
AXELHEELRNSLQELKPKKRVYEYYLVTLPEHHVR

SEQ ID NO: 75976 - protein, 39 aa, Artificial Sequence; identical to SEQ ID NO: 27586
  Cyclic GFR-binding peptide
  MOD_RES (1)..(38): Xaa is C or S

SEQ ID NO: 75977 - protein, 35 aa, Artificial Sequence
  Cyclic GFR-binding peptide
  MOD_RES (32)..(32): Xaa is C or S
LRNSLQELKPKKRVYEYYVVPLPEHHVRSPQXKVS

SEQ ID NO: 75978 - protein, 38 aa, Artificial Sequence; identical to SEQ ID NO: 27587
  Cyclic GFR-binding peptide
  MOD_RES (2)..(4)..(36): Xaa is C or S

SEQ ID NO: 75979 - protein, 29 aa, Artificial Sequence
  Cyclic GFR-binding peptide
EVVMDVQVEKVVKENEDVKAMKVSRLETP

SEQ ID NO: 75980 - protein, 28 aa, Artificial Sequence
  Cyclic GFR-binding peptide
  MOD_RES (1)..(1): Xaa is C or S
XGEVVMDVQVEKVVKENEDVKAMKVSRL

SEQ ID NO: 75981 - protein, 39 aa, Artificial Sequence; identical to SEQ ID NO: 27591
  Cyclic GFR-binding peptide
  MOD_RES (36)..(36): Xaa is C or S

SEQ ID NO: 75982 - protein, 29 aa, Artificial Sequence
  Cyclic GFR-binding peptide
KVVMSMEGIVKPTRGVMIQITINSLDQPV

SEQ ID NO: 75983 - protein, 36 aa, Artificial Sequence
  Cyclic GFR-binding peptide
  MOD_RES (33)..(33): Xaa is C or S
ELTNSLQEFIPKKRVIEYYVVPLPELQVQTPRXQVN

SEQ ID NO: 75984 - protein, 32 aa, Artificial Sequence
  Cyclic GFR-binding peptide
  MOD_RES (1)..(3): Xaa is C or S
XGXSRVVMNSMEGIIVNSSDDMIQVTINSLKT

SEQ ID NO: 75985 - protein, 33 aa, Artificial Sequence
  Cyclic GFR-binding peptide
  MOD_RES (28)..(28): Xaa is C or S
NSLQEHQGQHPKIRYYLMTLPEEETPVXELGED

SEQ ID NO: 75986 - protein, 20 aa, Artificial Sequence
  Cyclic GFR-binding peptide
VTAKKVVKENEDIKRMQVPR

SEQ ID NO: 75987 - protein, 30 aa, Artificial Sequence
  Cyclic GFR-binding peptide
  MOD_RES (30)..(30): Xaa is C or S
VVMDVQVEKVVKENEDVKAMKVSRLETPVX

SEQ ID NO: 75988 - protein, 35 aa, Artificial Sequence; identical to SEQ ID NO: 27599
  Cyclic GFR-binding peptide
  MOD_RES (31)..(32): Xaa is C or S

SEQ ID NO: 75989 - protein, 24 aa, Artificial Sequence
  Cyclic GFR-binding peptide
VMDSMEGIVVKENEDMIQMTINSL

SEQ ID NO: 75990 - protein, 37 aa, Artificial Sequence; identical to SEQ ID NO: 27601
  Cyclic GFR-binding peptide
  MOD_RES (32)..(33): Xaa is C or S

SEQ ID NO: 75991 - protein, 30 aa, Artificial Sequence
  Cyclic GFR-binding peptide
ALHDELTNSLQEFIPKKRVIEYYVVPLPEL

SEQ ID NO: 75992 - protein, 31 aa, Artificial Sequence
  Cyclic GFR-binding peptide
  MOD_RES (30)..(31): Xaa is C or S
KVVMVQVEKVKPTRGVVKAIKVSRLDQPVXX

SEQ ID NO: 75993 - protein, 33 aa, Artificial Sequence
  Cyclic GFR-binding peptide
  MOD_RES (29)..(30): Xaa is C or S
VVMSMEGIVKPTRGVMIQITINSLDQPVXXPSA

SEQ ID NO: 75994 - protein, 20 aa, Artificial Sequence
  Cyclic GFR-binding peptide
SMEGIVKPTRGVMIQITINS

SEQ ID NO: 75995 - protein, 24 aa, Artificial Sequence
  Cyclic GFR-binding peptide
IMVQVEKIKPTKGIVKAIKVSRLD

SEQ ID NO: 75996 - protein, 36 aa, Artificial Sequence; identical to SEQ ID NO: 27612
  Cyclic GFR-binding peptide
  MOD_RES (1)..(3)..(34)..(35): Xaa is C or S

SEQ ID NO: 75997 - protein, 34 aa, Artificial Sequence
  Cyclic GFR-binding peptide
  MOD_RES (2)..(4): Xaa is C or S
RXGXGEVVMDVQVEKVVKENEDVKAMKVSRLETP

SEQ ID NO: 75998 - protein, 33 aa, Artificial Sequence; identical to SEQ ID NO: 27614
  Cyclic GFR-binding peptide
  MOD_RES (31)..(32): Xaa is C or S

SEQ ID NO: 75999 - protein, 33 aa, Artificial Sequence
  Cyclic GFR-binding peptide
  MOD_RES (29)..(30): Xaa is C or S
VVMVQVEKVKPTRGVVKAIKVSRLDQPVXXPSA

SEQ ID NO: 76000 - protein, 26 aa, Artificial Sequence
  Cyclic GFR-binding peptide
VMVTAKKVKPTRGVIKRIQVPRLDQP

SEQ ID NO: 76001 - protein, 29 aa, Artificial Sequence
  Cyclic GFR-binding peptide
  MOD_RES (26)..(27): Xaa is C or S
VQVEKVVKDYEDVKAMKVSRLETPVXXAK

SEQ ID NO: 76002 - protein, 32 aa, Artificial Sequence
  Cyclic GFR-binding peptide
  MOD_RES (26)..(27): Xaa is C or S
VQVEKIKPTKGIVKAIKVSRLDQSVXXPSASA

SEQ ID NO: 76003 - protein, 32 aa, Artificial Sequence; identical to SEQ ID NO: 27620
  Cyclic GFR-binding peptide
  MOD_RES (31)..(32): Xaa is C or S

SEQ ID NO: 76004 - protein, 23 aa, Artificial Sequence
  Cyclic GFR-binding peptide
VIMVTAKKVKPKRGVIKRIQVPR

SEQ ID NO: 76005 - protein, 26 aa, Artificial Sequence
  Cyclic GFR-binding peptide
KVIMVTAKKIKPTKGIIKRIQVPRLD

SEQ ID NO: 76006 - protein, 25 aa, Artificial Sequence
  Cyclic GFR-binding peptide
FNSLQEHQGQHPKIRYYLMTLPEEE

SEQ ID NO: 76007 - protein, 34 aa, Artificial Sequence; identical to SEQ ID NO: 27627
  Cyclic GFR-binding peptide
  MOD_RES (1)..(1): Xaa is C or S

SEQ ID NO: 76008 - protein, 33 aa, Artificial Sequence
  Cyclic GFR-binding peptide
  MOD_RES (1)..(3): Xaa is C or S
XGXSRVVMNSMEGIIVNSSDDMIQVTINSLKTP

SEQ ID NO: 76009 - protein, 29 aa, Artificial Sequence
  Cyclic GFR-binding peptide
EELRNSLQELKPKKRVYEYYVVPLPEHHV

SEQ ID NO: 76010 - protein, 31 aa, Artificial Sequence
  Cyclic GFR-binding peptide
  MOD_RES (1)..(3): Xaa is C or S
XGXSRVVMNVQVEKIVNSSDDVKAVKVSRLK

SEQ ID NO: 76011 - protein, 34 aa, Artificial Sequence
  Cyclic GFR-binding peptide
  MOD_RES (28)..(28): Xaa is C or S
MNSMEGIIVNSSDDMIQVTINSLKTPAXTPKTVH

SEQ ID NO: 76012 - protein, 29 aa, Artificial Sequence
  Cyclic GFR-binding peptide
  MOD_RES (27)..(28): Xaa is C or S
MVQVEKIKPTKGIVKAIKVSRLDQSVXXP

SEQ ID NO: 76013 - protein, 40 aa, Artificial Sequence; identical to SEQ ID NO: 27631
  Cyclic GFR-binding peptide
  MOD_RES (1)..(3)..(37): Xaa is C or S

SEQ ID NO: 76014 - protein, 32 aa, Artificial Sequence
  Cyclic GFR-binding peptide
  MOD_RES (30)..(30): Xaa is C or S
NSLQEFIPKKRVIEYYVVPLPELQVQTPRXQV

SEQ ID NO: 76015 - protein, 37 aa, Artificial Sequence
  Cyclic GFR-binding peptide
  MOD_RES (31)..(31): Xaa is C or S
QLFNSLQEHQGQHPKIRYYLMTLPEEETPVXELGEDN

SEQ ID NO: 76016 - protein, 23 aa, Artificial Sequence
  Cyclic GFR-binding peptide
IMSMEGIVKPKRGVMIQITINSL

SEQ ID NO: 76017 - protein, 32 aa, Artificial Sequence
  Cyclic GFR-binding peptide
  MOD_RES (29)..(30): Xaa is C or S
VIMSMEGIIKPTKGIMIQITINSLDQSVXXPS

SEQ ID NO: 76018 - protein, 22 aa, Artificial Sequence
  Cyclic GFR-binding peptide
NSLQEFIPKKRVIEYYVVPLPE

SEQ ID NO: 76019 - protein, 37 aa, Artificial Sequence; identical to SEQ ID NO: 27638
  Cyclic GFR-binding peptide
  MOD_RES (36)..(36): Xaa is C or S

SEQ ID NO: 76020 - protein, 32 aa, Artificial Sequence
  Cyclic GFR-binding peptide
  MOD_RES (27)..(28): Xaa is C or S
MVTAKKIKPTKGIIKRIQVPRLDQSVXXPSAS

SEQ ID NO: 76021 - protein, 40 aa, Artificial Sequence; identical to SEQ ID NO: 27640
  Cyclic GFR-binding peptide
  MOD_RES (2)..(34)..(35): Xaa is C or S

SEQ ID NO: 76022 - protein, 34 aa, Artificial Sequence
  Cyclic GFR-binding peptide
  MOD_RES (29)..(30): Xaa is C or S
VMEVTAKKVVKDYEDIKRMQVPRLETPVXXAKPI

SEQ ID NO: 76023 - protein, 36 aa, Artificial Sequence; identical to SEQ ID NO: 27641
  Cyclic GFR-binding peptide
  MOD_RES (31)..(32): Xaa is C or S

SEQ ID NO: 76024 - protein, 26 aa, Artificial Sequence
  Cyclic GFR-binding peptide
IMVTAKKIKPTKGIIKRIQVPRLDQS

SEQ ID NO: 76025 - protein, 29 aa, Artificial Sequence
  Cyclic GFR-binding peptide
  MOD_RES (29)..(29): Xaa is C or S
VIMVTAKKIKPTKGIIKRIQVPRLDQSVX

SEQ ID NO: 76026 - protein, 26 aa, Artificial Sequence
  Cyclic GFR-binding peptide
MVTAKKVKPKRGVIKRIQVPRLAQPV

SEQ ID NO: 76027 - protein, 27 aa, Artificial Sequence
  Cyclic GFR-binding peptide
NHQLFNSLQEHQGQHPKIRYYLMTLPE

SEQ ID NO: 76028 - protein, 34 aa, Artificial Sequence; identical to SEQ ID NO: 27643
  Cyclic GFR-binding peptide
  MOD_RES (1)..(3)..(34): Xaa is C or S

SEQ ID NO: 76029 - protein, 37 aa, Artificial Sequence; identical to SEQ ID NO: 27644
  Cyclic GFR-binding peptide
  MOD_RES (2)..(34)..(35): Xaa is C or S

SEQ ID NO: 76030 - protein, 30 aa, Artificial Sequence
  Cyclic GFR-binding peptide
  MOD_RES (1)..(3): Xaa is C or S
XKXSKVVMVTAKKVKPTRGVIKRIQVPRLD

SEQ ID NO: 76031 - protein, 23 aa, Artificial Sequence
  Cyclic GFR-binding peptide
VTAKKVVKENEDIKRMQVPRLET

SEQ ID NO: 76032 - protein, 30 aa, Artificial Sequence
  Cyclic GFR-binding peptide
  MOD_RES (1)..(1): Xaa is C or S
XSRVIMSMEGIVKPKRGVMIQITINSLAQP

SEQ ID NO: 76033 - protein, 24 aa, Artificial Sequence
  Cyclic GFR-binding peptide
MVTAKKVKPTRGVIKRIQVPRLDQ

SEQ ID NO: 76034 - protein, 20 aa, Artificial Sequence
  Cyclic GFR-binding peptide
VQVEKVKPKRGVVKAIKVSR

SEQ ID NO: 76035 - protein, 38 aa, Artificial Sequence; identical to SEQ ID NO: 27651
  Cyclic GFR-binding peptide
  MOD_RES (2)..(33)..(34): Xaa is C or S

SEQ ID NO: 76036 - protein, 38 aa, Artificial Sequence; identical to SEQ ID NO: 27654
  Cyclic GFR-binding peptide
  MOD_RES (2)..(33)..(34): Xaa is C or S

SEQ ID NO: 76037 - protein, 33 aa, Artificial Sequence
  Cyclic GFR-binding peptide
ALHDELTNSLQEFIPKKRVIEYYVVPLPELQVQ

SEQ ID NO: 76038 - protein, 39 aa, Artificial Sequence; identical to SEQ ID NO: 27657
  Cyclic GFR-binding peptide
  MOD_RES (1)..(3)..(34)..(35): Xaa is C or S

SEQ ID NO: 76039 - protein, 34 aa, Artificial Sequence; identical to SEQ ID NO: 27660
  Cyclic GFR-binding peptide

SEQ ID NO: 76040 - protein, 28 aa, Artificial Sequence
  Cyclic GFR-binding peptide
  MOD_RES (28)..(28): Xaa is C or S
MEVTAKKVVKDYEDIKRMQVPRLETPVX

SEQ ID NO: 76041 - protein, 42 aa, Artificial Sequence; identical to SEQ ID NO: 27661
  Cyclic GFR-binding peptide
  MOD_RES (2)..(4)..(36)..(37): Xaa is C or S

SEQ ID NO: 76042 - protein, 38 aa, Artificial Sequence; identical to SEQ ID NO: 27662
  Cyclic GFR-binding peptide
  MOD_RES (1)..(33)..(34): Xaa is C or S

SEQ ID NO: 76043 - protein, 36 aa, Artificial Sequence; identical to SEQ ID NO: 27664
  Cyclic GFR-binding peptide
  MOD_RES (31)..(32): Xaa is C or S

SEQ ID NO: 76044 - protein, 29 aa, Artificial Sequence
  Cyclic GFR-binding peptide
  MOD_RES (1)..(3): Xaa is C or S
XKXSKVIMSMEGIIKPTKGIMIQITINSL

SEQ ID NO: 76045 - protein, 37 aa, Artificial Sequence; identical to SEQ ID NO: 27666
  Cyclic GFR-binding peptide
  MOD_RES (1)..(32)..(33): Xaa is C or S

SEQ ID NO: 76046 - protein, 36 aa, Artificial Sequence; identical to SEQ ID NO: 27667
  Cyclic GFR-binding peptide
  MOD_RES (2)..(34)..(35): Xaa is C or S

SEQ ID NO: 76047 - protein, 38 aa, Artificial Sequence
  Cyclic GFR-binding peptide
  MOD_RES (34)..(34): Xaa is C or S
DELTNSLQEFIPKKRVIEYYVVPLPELQVQTPRXQVNR

SEQ ID NO: 76048 - protein, 39 aa, Artificial Sequence; identical to SEQ ID NO: 27669
  Cyclic GFR-binding peptide
  MOD_RES (1)..(33)..(34): Xaa is C or S

SEQ ID NO: 76049 - protein, 26 aa, Artificial Sequence
  Cyclic GFR-binding peptide
  MOD_RES (26)..(26): Xaa is C or S
SMEGIVKPKRGVMIQITINSLAQPVX

SEQ ID NO: 76050 - protein, 33 aa, Artificial Sequence
  Cyclic GFR-binding peptide
  MOD_RES (27)..(28): Xaa is C or S
MSMEGIVKPTRGVMIQITINSLDQPVXXPSASA

SEQ ID NO: 76051 - protein, 28 aa, Artificial Sequence
  Cyclic GFR-binding peptide
RVIMSMEGIVKPKRGVMIQITINSLAQP

SEQ ID NO: 76052 - protein, 38 aa, Artificial Sequence; identical to SEQ ID NO: 27673
  Cyclic GFR-binding peptide
  MOD_RES (32)..(33): Xaa is C or S

SEQ ID NO: 76053 - protein, 38 aa, Artificial Sequence; identical to SEQ ID NO: 27674
  Cyclic GFR-binding peptide
  MOD_RES (1)..(3)..(35): Xaa is C or S

SEQ ID NO: 76054 - protein, 33 aa, Artificial Sequence; identical to SEQ ID NO: 27675
  Cyclic GFR-binding peptide
  MOD_RES (2)..(2): Xaa is C or S

SEQ ID NO: 76055 - protein, 29 aa, Artificial Sequence
  Cyclic GFR-binding peptide
NHQLFNSLQEHQGQHPKIRYYVMPLPEEE

SEQ ID NO: 76056 - protein, 37 aa, Artificial Sequence; identical to SEQ ID NO: 27678
  Cyclic GFR-binding peptide
  MOD_RES (2)..(4)..(36)..(37): Xaa is C or S

SEQ ID NO: 76057 - protein, 32 aa, Artificial Sequence
  Cyclic GFR-binding peptide
  MOD_RES (27)..(27): Xaa is C or S
NVTAKKIVNSSDDIKRVQVPRLKTPAXTPKTV

SEQ ID NO: 76058 - protein, 20 aa, Artificial Sequence
  Cyclic GFR-binding peptide
VQVEKVVKENEDVKAMKVSR

SEQ ID NO: 76059 - protein, 25 aa, Artificial Sequence
  Cyclic GFR-binding peptide
SMEGIVVKDYEDMIQMTINSLETPV

SEQ ID NO: 76060 - protein, 24 aa, Artificial Sequence
  Cyclic GFR-binding peptide
VMDVQVEKVVKENEDVKAMKVSRL

SEQ ID NO: 76061 - protein, 28 aa, Artificial Sequence
  Cyclic GFR-binding peptide
  MOD_RES (1)..(3): Xaa is C or S
XKXSKVIMVTAKKIKPTKGIIKRIQVPR

SEQ ID NO: 76062 - protein, 26 aa, Artificial Sequence
  Cyclic GFR-binding peptide
VMDSMEGIVVKENEDMIQMTINSLET

SEQ ID NO: 76063 - protein, 30 aa, Artificial Sequence
  Cyclic GFR-binding peptide
  MOD_RES (1)..(1): Xaa is C or S
XSKVVMVTAKKVKPTRGVIKRIQVPRLDQP

SEQ ID NO: 76064 - protein, 35 aa, Artificial Sequence; identical to SEQ ID NO: 27688
  Cyclic GFR-binding peptide
  MOD_RES (2)..(33)..(34): Xaa is C or S

SEQ ID NO: 76065 - protein, 33 aa, Artificial Sequence
  Cyclic GFR-binding peptide
  MOD_RES (30)..(31): Xaa is C or S
VVMNVTAKKIVNSSDDIKRVQVPRLQTPAXXPK

SEQ ID NO: 76066 - protein, 45 aa, Artificial Sequence; identical to SEQ ID NO: 27691
  Cyclic GFR-binding peptide
  MOD_RES (2)..(4)..(41): Xaa is C or S

SEQ ID NO: 76067 - protein, 30 aa, Artificial Sequence
  Cyclic GFR-binding peptide
  MOD_RES (29)..(30): Xaa is C or S
VIMVQVEKVKPKRGVVKAIKVSRLAQPVXX

SEQ ID NO: 76068 - protein, 24 aa, Artificial Sequence
  Cyclic GFR-binding peptide
IMSMEGIVKPKRGVMIQITINSLA

SEQ ID NO: 76069 - protein, 31 aa, Artificial Sequence; identical to SEQ ID NO: 27692
  Cyclic GFR-binding peptide
  MOD_RES (31)..(31): Xaa is C or S

SEQ ID NO: 76070 - protein, 26 aa, Artificial Sequence
  Cyclic GFR-binding peptide
  MOD_RES (26)..(26): Xaa is C or S
VTAKKVVKDYEDIKRMQVPRLETPVX

SEQ ID NO: 76071 - protein, 35 aa, Artificial Sequence; identical to SEQ ID NO: 27698
  Cyclic GFR-binding peptide

SEQ ID NO: 76072 - protein, 32 aa, Artificial Sequence
  Cyclic GFR-binding peptide
  MOD_RES (29)..(30): Xaa is C or S
VIMVQVEKIKPTKGIVKAIKVSRLDQSVXXPS

SEQ ID NO: 76073 - protein, 24 aa, Artificial Sequence
  Cyclic GFR-binding peptide
MDVTAKKVVKENEDIKRMQVPRLE

SEQ ID NO: 76074 - protein, 38 aa, Artificial Sequence; identical to SEQ ID NO: 27704
  Cyclic GFR-binding peptide
  MOD_RES (32)..(33): Xaa is C or S

SEQ ID NO: 76075 - protein, 27 aa, Artificial Sequence
  Cyclic GFR-binding peptide
MDVQVEKVVKENEDVKAMKVSRLETPV

SEQ ID NO: 76076 - protein, 35 aa, Artificial Sequence; identical to SEQ ID NO: 27706
  Cyclic GFR-binding peptide
  MOD_RES (1)..(33)..(34): Xaa is C or S

SEQ ID NO: 76077 - protein, 41 aa, Artificial Sequence; identical to SEQ ID NO: 27707
  Cyclic GFR-binding peptide
  MOD_RES (1)..(3)..(35): Xaa is C or S

SEQ ID NO: 76078 - protein, 39 aa, Artificial Sequence; identical to SEQ ID NO: 27710
  Cyclic GFR-binding peptide
  MOD_RES (2)..(33)..(34): Xaa is C or S

SEQ ID NO: 76079 - protein, 34 aa, Artificial Sequence; identical to SEQ ID NO: 27713
  Cyclic GFR-binding peptide
  MOD_RES (2)..(34): Xaa is C or S

SEQ ID NO: 76080 - protein, 37 aa, Artificial Sequence; identical to SEQ ID NO: 27714
  Cyclic GFR-binding peptide
  MOD_RES (2)..(4)..(35)..(36): Xaa is C or S

SEQ ID NO: 76081 - protein, 29 aa, Artificial Sequence
  Cyclic GFR-binding peptide
  MOD_RES (2)..(4): Xaa is C or S
SXKXSKVIMSMEGIIKPTKGIMIQITINS

SEQ ID NO: 76082 - protein, 34 aa, Artificial Sequence
  Cyclic GFR-binding peptide
  MOD_RES (34)..(34): Xaa is C or S
DELTNSLQEFIPKKRVIEYYLVTLPELQVQTPRX

SEQ ID NO: 76083 - protein, 29 aa, Artificial Sequence
  Cyclic GFR-binding peptide
LFNSLQEHQGQHPKIRYYVMPLPEEETPV

SEQ ID NO: 76084 - protein, 37 aa, Artificial Sequence; identical to SEQ ID NO: 27717
  Cyclic GFR-binding peptide
  MOD_RES (31)..(32): Xaa is C or S

SEQ ID NO: 76085 - protein, 27 aa, Artificial Sequence
  Cyclic GFR-binding peptide
VVMNSMEGIIVNSSDDMIQVTINSLQT

SEQ ID NO: 76086 - protein, 35 aa, Artificial Sequence; identical to SEQ ID NO: 27720
  Cyclic GFR-binding peptide
  MOD_RES (1)..(3)..(35): Xaa is C or S

SEQ ID NO: 76087 - protein, 33 aa, Artificial Sequence
  Cyclic GFR-binding peptide
ELHEELRNSLQELKPKKRVYEYYLVTLPEHHVR

SEQ ID NO: 76088 - protein, 26 aa, Artificial Sequence
  Cyclic GFR-binding peptide
VIMVTAKKIKPTKGIIKRIQVPRLDQ

SEQ ID NO: 76089 - protein, 35 aa, Artificial Sequence
  Cyclic GFR-binding peptide
  MOD_RES (32)..(32): Xaa is C or S
LRNSLQELKPKKRVYEYYLVTLPEHHVRSPQXKVS

SEQ ID NO: 76090 - protein, 37 aa, Artificial Sequence; identical to SEQ ID NO: 27723
  Cyclic GFR-binding peptide
  MOD_RES (1)..(3): Xaa is C or S

SEQ ID NO: 76091 - protein, 36 aa, Artificial Sequence; identical to SEQ ID NO: 27727
  Cyclic GFR-binding peptide
  MOD_RES (1)..(3)..(34)..(35): Xaa is C or S

SEQ ID NO: 76092 - protein, 34 aa, Artificial Sequence; identical to SEQ ID NO: 27728
  Cyclic GFR-binding peptide
  MOD_RES (1)..(3): Xaa is C or S

SEQ ID NO: 76093 - protein, 28 aa, Artificial Sequence
  Cyclic GFR-binding peptide
  MOD_RES (1)..(1): Xaa is C or S
XSKVIMVQVEKIKPTKGIVKAIKVSRLD

SEQ ID NO: 76094 - protein, 36 aa, Artificial Sequence
  Cyclic GFR-binding peptide
  MOD_RES (30)..(31): Xaa is C or S
VVMDVTAKKVVKENEDIKRMQVPRLETPVXXAKPIK

SEQ ID NO: 76095 - protein, 31 aa, Artificial Sequence
  Cyclic GFR-binding peptide
  MOD_RES (1)..(3): Xaa is C or S
XGXARVVMNVQVEKIVNSSDDVKAVKVSRLQ

SEQ ID NO: 76096 - protein, 35 aa, Artificial Sequence; identical to SEQ ID NO: 27734
  Cyclic GFR-binding peptide
  MOD_RES (1)..(32)..(33): Xaa is C or S

SEQ ID NO: 76097 - protein, 31 aa, Artificial Sequence
  Cyclic GFR-binding peptide
  MOD_RES (28)..(28): Xaa is C or S
MNSMEGIIVNSSDDMIQVTINSLKTPAXTPK

SEQ ID NO: 76098 - protein, 40 aa, Artificial Sequence; identical to SEQ ID NO: 27736
  Cyclic GFR-binding peptide
  MOD_RES (2)..(4)..(36)..(37): Xaa is C or S

SEQ ID NO: 76099 - protein, 33 aa, Artificial Sequence
  Cyclic GFR-binding peptide
  MOD_RES (30)..(31): Xaa is C or S
VVMNVQVEKIVNSSDDVKAVKVSRLKTPAXXPK

SEQ ID NO: 76100 - protein, 25 aa, Artificial Sequence
  Cyclic GFR-binding peptide
NSLQEFIPKKRVIEYYLVTLPELQV

SEQ ID NO: 76101 - protein, 32 aa, Artificial Sequence
  Cyclic GFR-binding peptide
  MOD_RES (30)..(31): Xaa is C or S
VVMNVQVEKIVNSSDDVKAVKVSRLKTPAXXP

SEQ ID NO: 76102 - protein, 30 aa, Artificial Sequence
  Cyclic GFR-binding peptide
  MOD_RES (29)..(29): Xaa is C or S
FNSLQEHQGQHPKIRYYVMPLPEEETPVXE

SEQ ID NO: 76103 - protein, 27 aa, Artificial Sequence
  Cyclic GFR-binding peptide
  MOD_RES (1)..(1): Xaa is C or S
XARVVMNVQVEKIVNSSDDVKAVKVSR

SEQ ID NO: 76104 - protein, 36 aa, Artificial Sequence; identical to SEQ ID NO: 27740
  Cyclic GFR-binding peptide
  MOD_RES (31)..(32): Xaa is C or S

SEQ ID NO: 76105 - protein, 42 aa, Artificial Sequence; identical to SEQ ID NO: 27741
  Cyclic GFR-binding peptide
  MOD_RES (2)..(36): Xaa is C or S

SEQ ID NO: 76106 - protein, 21 aa, Artificial Sequence
  Cyclic GFR-binding peptide
SMEGIIKPTKGIMIQITINSL

SEQ ID NO: 76107 - protein, 29 aa, Artificial Sequence
  Cyclic GFR-binding peptide
  MOD_RES (1)..(3): Xaa is C or S
XKXSKVVMVQVEKVKPTRGVVKAIKVSRL

SEQ ID NO: 76108 - protein, 31 aa, Artificial Sequence
  Cyclic GFR-binding peptide
  MOD_RES (30)..(31): Xaa is C or S
RVIMVQVEKVKPKRGVVKAIKVSRLAQPVXX

SEQ ID NO: 76109 - protein, 35 aa, Artificial Sequence
  Cyclic GFR-binding peptide
  MOD_RES (2)..(2): Xaa is C or S
KXALHDELTNSLQEFIPKKRVIEYYLVTLPELQVQ

SEQ ID NO: 76110 - protein, 29 aa, Artificial Sequence
  Cyclic GFR-binding peptide
  MOD_RES (2)..(2): Xaa is C or S
GXGEVVMEVQVEKVVKDYEDVKAMKVSRL

SEQ ID NO: 76111 - protein, 29 aa, Artificial Sequence
  Cyclic GFR-binding peptide
  MOD_RES (26)..(26): Xaa is C or S
SMEGIIVNSSDDMIQVTINSLKTPAXTPK

SEQ ID NO: 76112 - protein, 29 aa, Artificial Sequence
  Cyclic GFR-binding peptide
ARVVMNSMEGIIVNSSDDMIQVTINSLQT

SEQ ID NO: 76113 - protein, 31 aa, Artificial Sequence
  Cyclic GFR-binding peptide
  MOD_RES (2)..(4): Xaa is C or S
SXKXSKVVMVTAKKVKPTRGVIKRIQVPRLD

SEQ ID NO: 76114 - protein, 29 aa, Artificial Sequence
  Cyclic GFR-binding peptide
  MOD_RES (2)..(4): Xaa is C or S
SXKXSRVIMVQVEKVKPKRGVVKAIKVSR

SEQ ID NO: 76115 - protein, 23 aa, Artificial Sequence
  Cyclic GFR-binding peptide
VQVEKIKPTKGIVKAIKVSRLDQ

SEQ ID NO: 76116 - protein, 28 aa, Artificial Sequence
  Cyclic GFR-binding peptide
  MOD_RES (28)..(28): Xaa is C or S
MNSMEGIIVNSSDDMIQVTINSLQTPAX

SEQ ID NO: 76117 - protein, 29 aa, Artificial Sequence
  Cyclic GFR-binding peptide
RVVMNSMEGIIVNSSDDMIQVTINSLQTP

SEQ ID NO: 76118 - protein, 31 aa, Artificial Sequence
  Cyclic GFR-binding peptide
  MOD_RES (26)..(27): Xaa is C or S
VTAKKVKPTRGVIKRIQVPRLDQPVXXPSAS

SEQ ID NO: 76119 - protein, 20 aa, Artificial Sequence
  Cyclic GFR-binding peptide
VQVEKVVKDYEDVKAMKVSR

SEQ ID NO: 76120 - protein, 36 aa, Artificial Sequence; identical to SEQ ID NO: 27756
  Cyclic GFR-binding peptide
  MOD_RES (1)..(32)..(33): Xaa is C or S

SEQ ID NO: 76121 - protein, 30 aa, Artificial Sequence
  Cyclic GFR-binding peptide
  MOD_RES (1)..(1): Xaa is C or S
XARVVMNVQVEKIVNSSDDVKAVKVSRLQT

SEQ ID NO: 76122 - protein, 31 aa, Artificial Sequence
  Cyclic GFR-binding peptide
  MOD_RES (1)..(1): Xaa is C or S
XSRVVMNSMEGIIVNSSDDMIQVTINSLKTP

SEQ ID NO: 76123 - protein, 27 aa, Artificial Sequence
  Cyclic GFR-binding peptide
EELRNSLQELKPKKRVYEYYVVPLPEH

SEQ ID NO: 76124 - protein, 35 aa, Artificial Sequence
  Cyclic GFR-binding peptide
  MOD_RES (29)..(30): Xaa is C or S
VMEVTAKKVVKDYEDIKRMQVPRLETPVXXAKPIS

SEQ ID NO: 76125 - protein, 31 aa, Artificial Sequence
  Cyclic GFR-binding peptide
  MOD_RES (30)..(30): Xaa is C or S
NSLQEFIPKKRVIEYYVVPLPELQVQTPRXQ

SEQ ID NO: 76126 - protein, 26 aa, Artificial Sequence
  Cyclic GFR-binding peptide
HQLFNSLQEHQGQHPKIRYYLMTLPE

SEQ ID NO: 76127 - protein, 30 aa, Artificial Sequence; identical to SEQ ID NO: 27768
  Cyclic GFR-binding peptide

SEQ ID NO: 76128 - protein, 26 aa, Artificial Sequence
  Cyclic GFR-binding peptide
VIMSMEGIVKPKRGVMIQITINSLAQ

SEQ ID NO: 76129 - protein, 31 aa, Artificial Sequence
  Cyclic GFR-binding peptide
  MOD_RES (29)..(30): Xaa is C or S
VMDSMEGIVVKENEDMIQMTINSLETPVXXA

SEQ ID NO: 76130 - protein, 26 aa, Artificial Sequence
  Cyclic GFR-binding peptide
VIMVQVEKVKPKRGVVKAIKVSRLAQ

SEQ ID NO: 76131 - protein, 42 aa, Artificial Sequence; identical to SEQ ID NO: 27770
  Cyclic GFR-binding peptide
  MOD_RES (1)..(3)..(40): Xaa is C or S

SEQ ID NO: 76132 - protein, 39 aa, Artificial Sequence; identical to SEQ ID NO: 27772
  Cyclic GFR-binding peptide
  MOD_RES (1)..(33)..(34): Xaa is C or S

SEQ ID NO: 76133 - protein, 32 aa, Artificial Sequence
  Cyclic GFR-binding peptide
  MOD_RES (28)..(29): Xaa is C or S
IMVQVEKVKPKRGVVKAIKVSRLAQPVXXPAA

SEQ ID NO: 76134 - protein, 29 aa, Artificial Sequence
  Cyclic GFR-binding peptide
  MOD_RES (26)..(27): Xaa is C or S
SMEGIVKPKRGVMIQITINSLAQPVXXPA

SEQ ID NO: 76135 - protein, 35 aa, Artificial Sequence; identical to SEQ ID NO: 27775
  Cyclic GFR-binding peptide
  MOD_RES (2)..(4): Xaa is C or S

SEQ ID NO: 76136 - protein, 35 aa, Artificial Sequence; identical to SEQ ID NO: 27777
  Cyclic GFR-binding peptide
  MOD_RES (1)..(3)..(34)..(35): Xaa is C or S

SEQ ID NO: 76137 - protein, 28 aa, Artificial Sequence
  Cyclic GFR-binding peptide
  MOD_RES (2)..(2): Xaa is C or S
KXSKVIMVTAKKIKPTKGIIKRIQVPRL

SEQ ID NO: 76138 - protein, 28 aa, Artificial Sequence
  Cyclic GFR-binding peptide
VVMNSMEGIIVNSSDDMIQVTINSLKTP

SEQ ID NO: 76139 - protein, 24 aa, Artificial Sequence
  Cyclic GFR-binding peptide
KVIMVQVEKIKPTKGIVKAIKVSR

SEQ ID NO: 76140 - protein, 39 aa, Artificial Sequence; identical to SEQ ID NO: 27781
  Cyclic GFR-binding peptide
  MOD_RES (2)..(36): Xaa is C or S

SEQ ID NO: 76141 - protein, 22 aa, Artificial Sequence
  Cyclic GFR-binding peptide
NSLQEHQGQHPKIRYYVMPLPE

SEQ ID NO: 76142 - protein, 29 aa, Artificial Sequence
  Cyclic GFR-binding peptide
  MOD_RES (28)..(29): Xaa is C or S
MNSMEGIIVNSSDDMIQVTINSLQTPAXX

SEQ ID NO: 76143 - protein, 29 aa, Artificial Sequence
  Cyclic GFR-binding peptide
  MOD_RES (26)..(27): Xaa is C or S
SMEGIIVNSSDDMIQVTINSLQTPAXXPK

SEQ ID NO: 76144 - protein, 23 aa, Artificial Sequence
  Cyclic GFR-binding peptide
NVTAKKIVNSSDDIKRVQVPRLK

SEQ ID NO: 76145 - protein, 32 aa, Artificial Sequence
  Cyclic GFR-binding peptide
  MOD_RES (1)..(1): Xaa is C or S
XALHDELTNSLQEFIPKKRVIEYYVVPLPELQ

SEQ ID NO: 76146 - protein, 34 aa, Artificial Sequence; identical to SEQ ID NO: 27796
  Cyclic GFR-binding peptide
  MOD_RES (31)..(32): Xaa is C or S

SEQ ID NO: 76147 - protein, 33 aa, Artificial Sequence; identical to SEQ ID NO: 27797
  Cyclic GFR-binding peptide

SEQ ID NO: 76148 - protein, 32 aa, Artificial Sequence
  Cyclic GFR-binding peptide
LHDELTNSLQEFIPKKRVIEYYVVPLPELQVQ

SEQ ID NO: 76149 - protein, 36 aa, Artificial Sequence; identical to SEQ ID NO: 27800
  Cyclic GFR-binding peptide
  MOD_RES (1)..(3)..(34)..(35): Xaa is C or S

SEQ ID NO: 76150 - protein, 26 aa, Artificial Sequence
  Cyclic GFR-binding peptide
VVMNVQVEKIVNSSDDVKAVKVSRLK

SEQ ID NO: 76151 - protein, 23 aa, Artificial Sequence
  Cyclic GFR-binding peptide
VTAKKVKPTRGVIKRIQVPRLDQ

SEQ ID NO: 76152 - protein, 27 aa, Artificial Sequence
  Cyclic GFR-binding peptide
  MOD_RES (2)..(2): Xaa is C or S
KXSKVIMVQVEKIKPTKGIVKAIKVSR

SEQ ID NO: 76153 - protein, 30 aa, Artificial Sequence
  Cyclic GFR-binding peptide
  MOD_RES (27)..(28): Xaa is C or S
MVTAKKVKPTRGVIKRIQVPRLDQPVXXPS

SEQ ID NO: 76154 - protein, 31 aa, Artificial Sequence
  Cyclic GFR-binding peptide
  MOD_RES (27)..(28): Xaa is C or S
MVTAKKVKPTRGVIKRIQVPRLDQPVXXPSA

SEQ ID NO: 76155 - protein, 35 aa, Artificial Sequence; identical to SEQ ID NO: 27813
  Cyclic GFR-binding peptide
  MOD_RES (2)..(34)..(35): Xaa is C or S

SEQ ID NO: 76156 - protein, 25 aa, Artificial Sequence
  Cyclic GFR-binding peptide
ELTNSLQEFIPKKRVIEYYLVTLPE

SEQ ID NO: 76157 - protein, 34 aa, Artificial Sequence
  Cyclic GFR-binding peptide
  MOD_RES (30)..(30): Xaa is C or S
NSLQELKPKKRVYEYYLVTLPEHHVRSPQXKVSS

SEQ ID NO: 76158 - protein, 37 aa, Artificial Sequence; identical to SEQ ID NO: 27817
  Cyclic GFR-binding peptide
  MOD_RES (1)..(35): Xaa is C or S

SEQ ID NO: 76159 - protein, 25 aa, Artificial Sequence
  Cyclic GFR-binding peptide
RVIMSMEGIVKPKRGVMIQITINSL

SEQ ID NO: 76160 - protein, 40 aa, Artificial Sequence; identical to SEQ ID NO: 27820
  Cyclic GFR-binding peptide
  MOD_RES (1)..(3)..(34)..(35): Xaa is C or S

SEQ ID NO: 76161 - protein, 33 aa, Artificial Sequence
  Cyclic GFR-binding peptide
  MOD_RES (31)..(31): Xaa is C or S
QLFNSLQEHQGQHPKIRYYLMTLPEEETPVXEL

SEQ ID NO: 76162 - protein, 39 aa, Artificial Sequence; identical to SEQ ID NO: 27825
  Cyclic GFR-binding peptide
  MOD_RES (1)..(33): Xaa is C or S

SEQ ID NO: 76163 - protein, 32 aa, Artificial Sequence
  Cyclic GFR-binding peptide
LHEELRNSLQELKPKKRVYEYYVVPLPEHHVR

SEQ ID NO: 76164 - protein, 33 aa, Artificial Sequence
  Cyclic GFR-binding peptide
  MOD_RES (29)..(30): Xaa is C or S
VMESMEGIVVKDYEDMIQMTINSLETPVXXAKP

SEQ ID NO: 76165 - protein, 38 aa, Artificial Sequence; identical to SEQ ID NO: 27829
  Cyclic GFR-binding peptide
  MOD_RES (2)..(34)..(35): Xaa is C or S

SEQ ID NO: 76166 - protein, 34 aa, Artificial Sequence
  Cyclic GFR-binding peptide
  MOD_RES (29)..(30): Xaa is C or S
VMEVQVEKVVKDYEDVKAMKVSRLETPVXXAKPI

SEQ ID NO: 76167 - protein, 36 aa, Artificial Sequence; identical to SEQ ID NO: 27831
  Cyclic GFR-binding peptide
  MOD_RES (2)..(34)..(35): Xaa is C or S

SEQ ID NO: 76168 - protein, 34 aa, Artificial Sequence; identical to SEQ ID NO: 27830
  Cyclic GFR-binding peptide
  MOD_RES (32)..(33): Xaa is C or S

SEQ ID NO: 76169 - protein, 31 aa, Artificial Sequence
  Cyclic GFR-binding peptide
  MOD_RES (1)..(3): Xaa is C or S
XEXKNHQLFNSLQEHQGQHPKIRYYVMPLPE

SEQ ID NO: 76170 - protein, 28 aa, Artificial Sequence
  Cyclic GFR-binding peptide
VIMVTAKKVKPKRGVIKRIQVPRLAQPV

SEQ ID NO: 76171 - protein, 29 aa, Artificial Sequence
  Cyclic GFR-binding peptide
  MOD_RES (27)..(28): Xaa is C or S
MSMEGIVKPTRGVMIQITINSLDQPVXXP

SEQ ID NO: 76172 - protein, 32 aa, Artificial Sequence; identical to SEQ ID NO: 27838
  Cyclic GFR-binding peptide
  MOD_RES (32)..(32): Xaa is C or S

SEQ ID NO: 76173 - protein, 29 aa, Artificial Sequence
  Cyclic GFR-binding peptide
  MOD_RES (2)..(4): Xaa is C or S
SXKXSKVVMVTAKKVKPTRGVIKRIQVPR

SEQ ID NO: 76174 - protein, 23 aa, Artificial Sequence
  Cyclic GFR-binding peptide
VIMVQVEKIKPTKGIVKAIKVSR

SEQ ID NO: 76175 - protein, 40 aa, Artificial Sequence; identical to SEQ ID NO: 27845
  Cyclic GFR-binding peptide
  MOD_RES (2)..(36): Xaa is C or S

SEQ ID NO: 76176 - protein, 29 aa, Artificial Sequence
  Cyclic GFR-binding peptide
EVVMDVTAKKVVKENEDIKRMQVPRLETP

SEQ ID NO: 76177 - protein, 34 aa, Artificial Sequence
  Cyclic GFR-binding peptide
  MOD_RES (30)..(31): Xaa is C or S
KVVMVTAKKVKPTRGVIKRIQVPRLDQPVXXPSA

SEQ ID NO: 76178 - protein, 34 aa, Artificial Sequence
  Cyclic GFR-binding peptide
  MOD_RES (28)..(29): Xaa is C or S
VMSMEGIVKPTRGVMIQITINSLDQPVXXPSASA

SEQ ID NO: 76179 - protein, 33 aa, Artificial Sequence; identical to SEQ ID NO: 27849
  Cyclic GFR-binding peptide
  MOD_RES (1)..(33): Xaa is C or S

SEQ ID NO: 76180 - protein, 34 aa, Artificial Sequence; identical to SEQ ID NO: 27851
  Cyclic GFR-binding peptide
  MOD_RES (34)..(34): Xaa is C or S

SEQ ID NO: 76181 - protein, 37 aa, Artificial Sequence; identical to SEQ ID NO: 27857
  Cyclic GFR-binding peptide
  MOD_RES (2)..(2): Xaa is C or S

SEQ ID NO: 76182 - protein, 29 aa, Artificial Sequence
  Cyclic GFR-binding peptide
  MOD_RES (1)..(1): Xaa is C or S
XSKVIMSMEGIIKPTKGIMIQITINSLDQ

SEQ ID NO: 76183 - protein, 41 aa, Artificial Sequence; identical to SEQ ID NO: 27860
  Cyclic GFR-binding peptide
  MOD_RES (37)..(37): Xaa is C or S

SEQ ID NO: 76184 - protein, 26 aa, Artificial Sequence
  Cyclic GFR-binding peptide
MNVQVEKIVNSSDDVKAVKVSRLQTP

SEQ ID NO: 76185 - protein, 39 aa, Artificial Sequence; identical to SEQ ID NO: 27865
  Cyclic GFR-binding peptide
  MOD_RES (1)..(3)..(34)..(35): Xaa is C or S

SEQ ID NO: 76186 - protein, 29 aa, Artificial Sequence
  Cyclic GFR-binding peptide
  MOD_RES (2)..(2): Xaa is C or S
KXSKVIMVTAKKIKPTKGIIKRIQVPRLD

SEQ ID NO: 76187 - protein, 28 aa, Artificial Sequence
  Cyclic GFR-binding peptide
  MOD_RES (1)..(1): Xaa is C or S
XGEVVMEVQVEKVVKDYEDVKAMKVSRL

SEQ ID NO: 76188 - protein, 33 aa, Artificial Sequence; identical to SEQ ID NO: 27867
  Cyclic GFR-binding peptide
  MOD_RES (1)..(3): Xaa is C or S

SEQ ID NO: 76189 - protein, 30 aa, Artificial Sequence
  Cyclic GFR-binding peptide
  MOD_RES (30)..(30): Xaa is C or S
KVIMVTAKKIKPTKGIIKRIQVPRLDQSVX

SEQ ID NO: 76190 - protein, 31 aa, Artificial Sequence
  Cyclic GFR-binding peptide
LTNSLQEFIPKKRVIEYYVVPLPELQVQTPR

SEQ ID NO: 76191 - protein, 27 aa, Artificial Sequence
  Cyclic GFR-binding peptide
RVVMNSMEGIIVNSSDDMIQVTINSLK

SEQ ID NO: 76192 - protein, 33 aa, Artificial Sequence; identical to SEQ ID NO: 27872
  Cyclic GFR-binding peptide
  MOD_RES (2)..(2): Xaa is C or S

SEQ ID NO: 76193 - protein, 31 aa, Artificial Sequence
  Cyclic GFR-binding peptide
  MOD_RES (31)..(31): Xaa is C or S
QLFNSLQEHQGQHPKIRYYVMPLPEEETPVX

SEQ ID NO: 76194 - protein, 38 aa, Artificial Sequence; identical to SEQ ID NO: 27873
  Cyclic GFR-binding peptide
  MOD_RES (2)..(4)..(35)..(36): Xaa is C or S

SEQ ID NO: 76195 - protein, 31 aa, Artificial Sequence
  Cyclic GFR-binding peptide
  MOD_RES (29)..(30): Xaa is C or S
VMDVQVEKVVKENEDVKAMKVSRLETPVXXA

SEQ ID NO: 76196 - protein, 28 aa, Artificial Sequence
  Cyclic GFR-binding peptide
LHEELRNSLQELKPKKRVYEYYVVPLPE

SEQ ID NO: 76197 - protein, 22 aa, Artificial Sequence
  Cyclic GFR-binding peptide
MNSMEGIIVNSSDDMIQVTINS

SEQ ID NO: 76198 - protein, 37 aa, Artificial Sequence; identical to SEQ ID NO: 27877
  Cyclic GFR-binding peptide
  MOD_RES (2)..(4)..(35)..(36): Xaa is C or S

SEQ ID NO: 76199 - protein, 36 aa, Artificial Sequence
  Cyclic GFR-binding peptide
  MOD_RES (2)..(4): Xaa is C or S
RXEXKNHQLFNSLQEHQGQHPKIRYYVMPLPEEETP

SEQ ID NO: 76200 - protein, 34 aa, Artificial Sequence; identical to SEQ ID NO: 27879
  Cyclic GFR-binding peptide
  MOD_RES (31)..(32): Xaa is C or S

SEQ ID NO: 76201 - protein, 36 aa, Artificial Sequence; identical to SEQ ID NO: 27880
  Cyclic GFR-binding peptide
  MOD_RES (2)..(34): Xaa is C or S

SEQ ID NO: 76202 - protein, 26 aa, Artificial Sequence
  Cyclic GFR-binding peptide
GEVVMDVTAKKVVKENEDIKRMQVPR

SEQ ID NO: 76203 - protein, 27 aa, Artificial Sequence
  Cyclic GFR-binding peptide
VVMESMEGIVVKDYEDMIQMTINSLET

SEQ ID NO: 76204 - protein, 41 aa, Artificial Sequence; identical to SEQ ID NO: 27883
  Cyclic GFR-binding peptide
  MOD_RES (2)..(4)..(35)..(36): Xaa is C or S

SEQ ID NO: 76205 - protein, 31 aa, Artificial Sequence
  Cyclic GFR-binding peptide
  MOD_RES (2)..(4): Xaa is C or S
SXKXSKVIMSMEGIIKPTKGIMIQITINSLD

SEQ ID NO: 76206 - protein, 27 aa, Artificial Sequence
  Cyclic GFR-binding peptide
VIMVTAKKIKPTKGIIKRIQVPRLDQS

SEQ ID NO: 76207 - protein, 24 aa, Artificial Sequence
  Cyclic GFR-binding peptide
SMEGIVVKDYEDMIQMTINSLETP

SEQ ID NO: 76208 - protein, 29 aa, Artificial Sequence
  Cyclic GFR-binding peptide
  MOD_RES (28)..(28): Xaa is C or S
MNSMEGIIVNSSDDMIQVTINSLKTPAXT

SEQ ID NO: 76209 - protein, 38 aa, Artificial Sequence; identical to SEQ ID NO: 27885
  Cyclic GFR-binding peptide
  MOD_RES (2)..(36): Xaa is C or S

SEQ ID NO: 76210 - protein, 33 aa, Artificial Sequence
  Cyclic GFR-binding peptide
  MOD_RES (27)..(28): Xaa is C or S
NVTAKKIVNSSDDIKRVQVPRLKTPAXXPKPVY

SEQ ID NO: 76211 - protein, 35 aa, Artificial Sequence; identical to SEQ ID NO: 27892
  Cyclic GFR-binding peptide
  MOD_RES (32)..(33): Xaa is C or S

SEQ ID NO: 76212 - protein, 27 aa, Artificial Sequence
  Cyclic GFR-binding peptide
VVMNSMEGIIVNSSDDMIQVTINSLKT

SEQ ID NO: 76213 - protein, 30 aa, Artificial Sequence
  Cyclic GFR-binding peptide
  MOD_RES (1)..(1): Xaa is C or S
XARVVMNSMEGIIVNSSDDMIQVTINSLQT

SEQ ID NO: 76214 - protein, 30 aa, Artificial Sequence
  Cyclic GFR-binding peptide
LRNSLQELKPKKRVYEYYLVTLPEHHVRSP

SEQ ID NO: 76215 - protein, 33 aa, Artificial Sequence; identical to SEQ ID NO: 27895
  Cyclic GFR-binding peptide
  MOD_RES (31)..(32): Xaa is C or S

SEQ ID NO: 76216 - protein, 34 aa, Artificial Sequence
  Cyclic GFR-binding peptide
  MOD_RES (29)..(29): Xaa is C or S
VMNVTAKKIVNSSDDIKRVQVPRLKTPAXTPKTV

SEQ ID NO: 76217 - protein, 33 aa, Artificial Sequence
  Cyclic GFR-binding peptide
  MOD_RES (27)..(28): Xaa is C or S
MVTAKKIKPTKGIIKRIQVPRLDQSVXXPSASA

SEQ ID NO: 76218 - protein, 31 aa, Artificial Sequence
  Cyclic GFR-binding peptide
KNHQLFNSLQEHQGQHPKIRYYLMTLPEEET

SEQ ID NO: 76219 - protein, 36 aa, Artificial Sequence; identical to SEQ ID NO: 27897
  Cyclic GFR-binding peptide
  MOD_RES (2)..(33)..(34): Xaa is C or S

SEQ ID NO: 76220 - protein, 31 aa, Artificial Sequence
  Cyclic GFR-binding peptide
  MOD_RES (28)..(29): Xaa is C or S
MDVQVEKVVKENEDVKAMKVSRLETPVXXAK

SEQ ID NO: 76221 - protein, 30 aa, Artificial Sequence
  Cyclic GFR-binding peptide
  MOD_RES (1)..(1): Xaa is C or S
XGEVVMDVQVEKVVKENEDVKAMKVSRLET

SEQ ID NO: 76222 - protein, 37 aa, Artificial Sequence; identical to SEQ ID NO: 27900
  Cyclic GFR-binding peptide
  MOD_RES (32)..(32): Xaa is C or S

SEQ ID NO: 76223 - protein, 27 aa, Artificial Sequence
  Cyclic GFR-binding peptide
  MOD_RES (1)..(1): Xaa is C or S
XGEVVMDVTAKKVVKENEDIKRMQVPR

SEQ ID NO: 76224 - protein, 20 aa, Artificial Sequence
  Cyclic GFR-binding peptide
VTAKKIVNSSDDIKRVQVPR

SEQ ID NO: 76225 - protein, 35 aa, Artificial Sequence
  Cyclic GFR-binding peptide
  MOD_RES (30)..(31): Xaa is C or S
VVMEVQVEKVVKDYEDVKAMKVSRLETPVXXAKPI

SEQ ID NO: 76226 - protein, 32 aa, Artificial Sequence
  Cyclic GFR-binding peptide
DELTNSLQEFIPKKRVIEYYVVPLPELQVQTP

SEQ ID NO: 76227 - protein, 31 aa, Artificial Sequence
  Cyclic GFR-binding peptide
  MOD_RES (28)..(29): Xaa is C or S
IMVTAKKVKPKRGVIKRIQVPRLAQPVXXPA

SEQ ID NO: 76228 - protein, 34 aa, Artificial Sequence; identical to SEQ ID NO: 27910
  Cyclic GFR-binding peptide

SEQ ID NO: 76229 - protein, 35 aa, Artificial Sequence
  Cyclic GFR-binding peptide
  MOD_RES (33)..(33): Xaa is C or S
ELTNSLQEFIPKKRVIEYYVVPLPELQVQTPRXQV

SEQ ID NO: 76230 - protein, 25 aa, Artificial Sequence
  Cyclic GFR-binding peptide
VVMNSMEGIIVNSSDDMIQVTINSL

SEQ ID NO: 76231 - protein, 25 aa, Artificial Sequence
  Cyclic GFR-binding peptide
VMESMEGIVVKDYEDMIQMTINSLE

SEQ ID NO: 76232 - protein, 31 aa, Artificial Sequence
  Cyclic GFR-binding peptide
  MOD_RES (2)..(2): Xaa is C or S
AXELHEELRNSLQELKPKKRVYEYYVVPLPE

SEQ ID NO: 76233 - protein, 33 aa, Artificial Sequence; identical to SEQ ID NO: 27920
  Cyclic GFR-binding peptide
  MOD_RES (1)..(32)..(33): Xaa is C or S

SEQ ID NO: 76234 - protein, 26 aa, Artificial Sequence
  Cyclic GFR-binding peptide
VVMNVQVEKIVNSSDDVKAVKVSRLQ

SEQ ID NO: 76235 - protein, 38 aa, Artificial Sequence; identical to SEQ ID NO: 27926
  Cyclic GFR-binding peptide
  MOD_RES (1)..(3)..(35)..(36): Xaa is C or S

SEQ ID NO: 76236 - protein, 29 aa, Artificial Sequence
  Cyclic GFR-binding peptide
  MOD_RES (2)..(2): Xaa is C or S
GXSRVVMNSMEGIIVNSSDDMIQVTINSL

SEQ ID NO: 76237 - protein, 24 aa, Artificial Sequence
  Cyclic GFR-binding peptide
RNSLQELKPKKRVYEYYVVPLPEH

SEQ ID NO: 76238 - protein, 34 aa, Artificial Sequence
  Cyclic GFR-binding peptide
  MOD_RES (28)..(29): Xaa is C or S
MDVQVEKVVKENEDVKAMKVSRLETPVXXAKPIK

SEQ ID NO: 76239 - protein, 31 aa, Artificial Sequence
  Cyclic GFR-binding peptide
  MOD_RES (2)..(2): Xaa is C or S
GXSRVVMNVTAKKIVNSSDDIKRVQVPRLKT

SEQ ID NO: 76240 - protein, 34 aa, Artificial Sequence
  Cyclic GFR-binding peptide
  MOD_RES (28)..(29): Xaa is C or S
MNVQVEKIVNSSDDVKAVKVSRLQTPAXXPKPVT

SEQ ID NO: 76241 - protein, 28 aa, Artificial Sequence
  Cyclic GFR-binding peptide
VIMSMEGIVKPKRGVMIQITINSLAQPV

SEQ ID NO: 76242 - protein, 34 aa, Artificial Sequence
  Cyclic GFR-binding peptide
  MOD_RES (2)..(4): Xaa is C or S
HXGXSRVVMNSMEGIIVNSSDDMIQVTINSLKTP

SEQ ID NO: 76243 - protein, 27 aa, Artificial Sequence
  Cyclic GFR-binding peptide
  MOD_RES (27)..(27): Xaa is C or S
NVQVEKIVNSSDDVKAVKVSRLKTPAX

SEQ ID NO: 76244 - protein, 25 aa, Artificial Sequence
  Cyclic GFR-binding peptide
EVQVEKVVKDYEDVKAMKVSRLETP

SEQ ID NO: 76245 - protein, 42 aa, Artificial Sequence; identical to SEQ ID NO: 27936
  Cyclic GFR-binding peptide
  MOD_RES (2)..(4)..(36)..(37): Xaa is C or S

SEQ ID NO: 76246 - protein, 30 aa, Artificial Sequence; identical to SEQ ID NO: 27940
  Cyclic GFR-binding peptide

SEQ ID NO: 76247 - protein, 37 aa, Artificial Sequence; identical to SEQ ID NO: 27945
  Cyclic GFR-binding peptide
  MOD_RES (1)..(33)..(34): Xaa is C or S

SEQ ID NO: 76248 - protein, 33 aa, Artificial Sequence; identical to SEQ ID NO: 27948
  Cyclic GFR-binding peptide
  MOD_RES (31)..(32): Xaa is C or S

SEQ ID NO: 76249 - protein, 36 aa, Artificial Sequence
  Cyclic GFR-binding peptide
  MOD_RES (30)..(31): Xaa is C or S
KVIMSMEGIIKPTKGIMIQITINSLDQSVXXPSASA

SEQ ID NO: 76250 - protein, 29 aa, Artificial Sequence
  Cyclic GFR-binding peptide
ELRNSLQELKPKKRVYEYYVVPLPEHHVR

SEQ ID NO: 76251 - protein, 23 aa, Artificial Sequence
  Cyclic GFR-binding peptide
NSLQELKPKKRVYEYYLVTLPEH

SEQ ID NO: 76252 - protein, 25 aa, Artificial Sequence
  Cyclic GFR-binding peptide
MSMEGIVKPKRGVMIQITINSLAQP

SEQ ID NO: 76253 - protein, 38 aa, Artificial Sequence; identical to SEQ ID NO: 27956
  Cyclic GFR-binding peptide
  MOD_RES (2)..(2): Xaa is C or S

SEQ ID NO: 76254 - protein, 34 aa, Artificial Sequence
  Cyclic GFR-binding peptide
  MOD_RES (32)..(32): Xaa is C or S
LRNSLQELKPKKRVYEYYLVTLPEHHVRSPQXKV

SEQ ID NO: 76255 - protein, 40 aa, Artificial Sequence; identical to SEQ ID NO: 27959
  Cyclic GFR-binding peptide
  MOD_RES (2)..(4)..(35)..(36): Xaa is C or S

SEQ ID NO: 76256 - protein, 45 aa, Artificial Sequence; identical to SEQ ID NO: 27961
  Cyclic GFR-binding peptide
  MOD_RES (2)..(4)..(41): Xaa is C or S

SEQ ID NO: 76257 - protein, 29 aa, Artificial Sequence
  Cyclic GFR-binding peptide
KVIMVTAKKIKPTKGIIKRIQVPRLDQSV

SEQ ID NO: 76258 - protein, 33 aa, Artificial Sequence
  Cyclic GFR-binding peptide
  MOD_RES (30)..(30): Xaa is C or S
NSLQEFIPKKRVIEYYLVTLPELQVQTPRXQVN

SEQ ID NO: 76259 - protein, 30 aa, Artificial Sequence
  Cyclic GFR-binding peptide
  MOD_RES (1)..(1): Xaa is C or S
XALHDELTNSLQEFIPKKRVIEYYVVPLPE

SEQ ID NO: 76260 - protein, 41 aa, Artificial Sequence; identical to SEQ ID NO: 27965
  Cyclic GFR-binding peptide
  MOD_RES (1)..(3)..(35)..(36): Xaa is C or S

SEQ ID NO: 76261 - protein, 31 aa, Artificial Sequence; identical to SEQ ID NO: 27968
  Cyclic GFR-binding peptide
  MOD_RES (31)..(31): Xaa is C or S

SEQ ID NO: 76262 - protein, 33 aa, Artificial Sequence
  Cyclic GFR-binding peptide
  MOD_RES (28)..(29): Xaa is C or S
MESMEGIVVKDYEDMIQMTINSLETPVXXAKPI

SEQ ID NO: 76263 - protein, 34 aa, Artificial Sequence; identical to SEQ ID NO: 27969
  Cyclic GFR-binding peptide
  MOD_RES (1)..(3): Xaa is C or S

SEQ ID NO: 76264 - protein, 26 aa, Artificial Sequence
  Cyclic GFR-binding peptide
VVMSMEGIVKPTRGVMIQITINSLDQ

SEQ ID NO: 76265 - protein, 32 aa, Artificial Sequence
  Cyclic GFR-binding peptide
  MOD_RES (27)..(28): Xaa is C or S
ESMEGIVVKDYEDMIQMTINSLETPVXXAKPI

SEQ ID NO: 76266 - protein, 31 aa, Artificial Sequence
  Cyclic GFR-binding peptide
  MOD_RES (1)..(3): Xaa is C or S
XKXSKVIMVQVEKIKPTKGIVKAIKVSRLDQ

SEQ ID NO: 76267 - protein, 31 aa, Artificial Sequence
  Cyclic GFR-binding peptide
NHQLFNSLQEHQGQHPKIRYYLMTLPEEETP

SEQ ID NO: 76268 - protein, 35 aa, Artificial Sequence; identical to SEQ ID NO: 27975
  Cyclic GFR-binding peptide
  MOD_RES (33)..(33): Xaa is C or S

SEQ ID NO: 76269 - protein, 33 aa, Artificial Sequence
  Cyclic GFR-binding peptide
  MOD_RES (2)..(4): Xaa is C or S
SXKXSKVIMVQVEKIKPTKGIVKAIKVSRLDQS

SEQ ID NO: 76270 - protein, 36 aa, Artificial Sequence; identical to SEQ ID NO: 27979
  Cyclic GFR-binding peptide
  MOD_RES (1)..(3)..(35): Xaa is C or S

SEQ ID NO: 76271 - protein, 26 aa, Artificial Sequence
  Cyclic GFR-binding peptide
DELTNSLQEFIPKKRVIEYYVVPLPE

SEQ ID NO: 76272 - protein, 26 aa, Artificial Sequence
  Cyclic GFR-binding peptide
LFNSLQEHQGQHPKIRYYVMPLPEEE

SEQ ID NO: 76273 - protein, 30 aa, Artificial Sequence
  Cyclic GFR-binding peptide
  MOD_RES (26)..(27): Xaa is C or S
VTAKKIVNSSDDIKRVQVPRLQTPAXXPKP

SEQ ID NO: 76274 - protein, 42 aa, Artificial Sequence; identical to SEQ ID NO: 27983
  Cyclic GFR-binding peptide
  MOD_RES (2)..(39): Xaa is C or S

SEQ ID NO: 76275 - protein, 27 aa, Artificial Sequence
  Cyclic GFR-binding peptide
NSLQEFIPKKRVIEYYVVPLPELQVQT

SEQ ID NO: 76276 - protein, 25 aa, Artificial Sequence
  Cyclic GFR-binding peptide
SRVIMVTAKKVKPKRGVIKRIQVPR

SEQ ID NO: 76277 - protein, 31 aa, Artificial Sequence
  Cyclic GFR-binding peptide
  MOD_RES (2)..(2): Xaa is C or S
EXKNHQLFNSLQEHQGQHPKIRYYLMTLPEE

SEQ ID NO: 76278 - protein, 37 aa, Artificial Sequence; identical to SEQ ID NO: 27994
  Cyclic GFR-binding peptide
  MOD_RES (2)..(34)..(35): Xaa is C or S

SEQ ID NO: 76279 - protein, 32 aa, Artificial Sequence
  Cyclic GFR-binding peptide
  MOD_RES (27)..(28): Xaa is C or S
MVQVEKIKPTKGIVKAIKVSRLDQSVXXPSAS

SEQ ID NO: 76280 - protein, 24 aa, Artificial Sequence
  Cyclic GFR-binding peptide
VTAKKIVNSSDDIKRVQVPRLQTP

SEQ ID NO: 76281 - protein, 32 aa, Artificial Sequence
  Cyclic GFR-binding peptide
  MOD_RES (2)..(2): Xaa is C or S
KXALHDELTNSLQEFIPKKRVIEYYLVTLPEL

SEQ ID NO: 76282 - protein, 36 aa, Artificial Sequence; identical to SEQ ID NO: 27997
  Cyclic GFR-binding peptide
  MOD_RES (2)..(4)..(35)..(36): Xaa is C or S

SEQ ID NO: 76283 - protein, 32 aa, Artificial Sequence; identical to SEQ ID NO: 27998
  Cyclic GFR-binding peptide
  MOD_RES (31)..(32): Xaa is C or S

SEQ ID NO: 76284 - protein, 29 aa, Artificial Sequence
  Cyclic GFR-binding peptide
  MOD_RES (27)..(28): Xaa is C or S
NVQVEKIVNSSDDVKAVKVSRLKTPAXXP

SEQ ID NO: 76285 - protein, 37 aa, Artificial Sequence; identical to SEQ ID NO: 28009
  Cyclic GFR-binding peptide
  MOD_RES (31)..(31): Xaa is C or S

SEQ ID NO: 76286 - protein, 40 aa, Artificial Sequence; identical to SEQ ID NO: 28010
  Cyclic GFR-binding peptide
  MOD_RES (2)..(4)..(36)..(37): Xaa is C or S

SEQ ID NO: 76287 - protein, 23 aa, Artificial Sequence
  Cyclic GFR-binding peptide
MDVQVEKVVKENEDVKAMKVSRL

SEQ ID NO: 76288 - protein, 31 aa, Artificial Sequence
  Cyclic GFR-binding peptide
  MOD_RES (1)..(1): Xaa is C or S
XARVVMNVQVEKIVNSSDDVKAVKVSRLQTP

SEQ ID NO: 76289 - protein, 34 aa, Artificial Sequence; identical to SEQ ID NO: 28014
  Cyclic GFR-binding peptide
  MOD_RES (31)..(32): Xaa is C or S

SEQ ID NO: 76290 - protein, 22 aa, Artificial Sequence
  Cyclic GFR-binding peptide
NSLQEFIPKKRVIEYYLVTLPE

SEQ ID NO: 76291 - protein, 25 aa, Artificial Sequence
  Cyclic GFR-binding peptide
IMVTAKKIKPTKGIIKRIQVPRLDQ

SEQ ID NO: 76292 - protein, 32 aa, Artificial Sequence
  Cyclic GFR-binding peptide
  MOD_RES (2)..(2): Xaa is C or S
GXSRVVMNSMEGIIVNSSDDMIQVTINSLKTP

SEQ ID NO: 76293 - protein, 40 aa, Artificial Sequence; identical to SEQ ID NO: 28023
  Cyclic GFR-binding peptide
  MOD_RES (1)..(3)..(35)..(36): Xaa is C or S

SEQ ID NO: 76294 - protein, 36 aa, Artificial Sequence; identical to SEQ ID NO: 28029
  Cyclic GFR-binding peptide
  MOD_RES (1)..(1): Xaa is C or S

SEQ ID NO: 76295 - protein, 34 aa, Artificial Sequence; identical to SEQ ID NO: 28030
  Cyclic GFR-binding peptide
  MOD_RES (2)..(33)..(34): Xaa is C or S

SEQ ID NO: 76296 - protein, 24 aa, Artificial Sequence
  Cyclic GFR-binding peptide
NSMEGIIVNSSDDMIQVTINSLQT

SEQ ID NO: 76297 - protein, 29 aa, Artificial Sequence
  Cyclic GFR-binding peptide
  MOD_RES (2)..(2): Xaa is C or S
KXSRVIMVQVEKVKPKRGVVKAIKVSRLA

SEQ ID NO: 76298 - protein, 32 aa, Artificial Sequence; identical to SEQ ID NO: 28034
  Cyclic GFR-binding peptide
  MOD_RES (2)..(2): Xaa is C or S

SEQ ID NO: 76299 - protein, 37 aa, Artificial Sequence; identical to SEQ ID NO: 28036
  Cyclic GFR-binding peptide
  MOD_RES (1)..(3)..(35)..(36): Xaa is C or S

SEQ ID NO: 76300 - protein, 35 aa, Artificial Sequence; identical to SEQ ID NO: 28037
  Cyclic GFR-binding peptide
  MOD_RES (2)..(33)..(34): Xaa is C or S

SEQ ID NO: 76301 - protein, 26 aa, Artificial Sequence
  Cyclic GFR-binding peptide
  MOD_RES (26)..(26): Xaa is C or S
VTAKKVKPKRGVIKRIQVPRLAQPVX

SEQ ID NO: 76302 - protein, 33 aa, Artificial Sequence
  Cyclic GFR-binding peptide
  MOD_RES (29)..(29): Xaa is C or S
VMNVTAKKIVNSSDDIKRVQVPRLKTPAXTPKT

SEQ ID NO: 76303 - protein, 30 aa, Artificial Sequence
  Cyclic GFR-binding peptide
  MOD_RES (28)..(29): Xaa is C or S
MEVQVEKVVKDYEDVKAMKVSRLETPVXXA

SEQ ID NO: 76304 - protein, 26 aa, Artificial Sequence
  Cyclic GFR-binding peptide
MNVQVEKIVNSSDDVKAVKVSRLKTP

SEQ ID NO: 76305 - protein, 30 aa, Artificial Sequence
  Cyclic GFR-binding peptide
  MOD_RES (2)..(2): Xaa is C or S
GXARVVMNSMEGIIVNSSDDMIQVTINSLQ

SEQ ID NO: 76306 - protein, 30 aa, Artificial Sequence
  Cyclic GFR-binding peptide
  MOD_RES (30)..(30): Xaa is C or S
NSLQEFIPKKRVIEYYVVPLPELQVQTPRX

SEQ ID NO: 76307 - protein, 32 aa, Artificial Sequence; identical to SEQ ID NO: 28044
  Cyclic GFR-binding peptide
  MOD_RES (31)..(31): Xaa is C or S

SEQ ID NO: 76308 - protein, 32 aa, Artificial Sequence
  Cyclic GFR-binding peptide
  MOD_RES (30)..(31): Xaa is C or S
VVMNVTAKKIVNSSDDIKRVQVPRLKTPAXXP

SEQ ID NO: 76309 - protein, 36 aa, Artificial Sequence
  Cyclic GFR-binding peptide
  MOD_RES (32)..(32): Xaa is C or S
LRNSLQELKPKKRVYEYYVVPLPEHHVRSPQXKVSS

SEQ ID NO: 76310 - protein, 26 aa, Artificial Sequence
  Cyclic GFR-binding peptide
DELTNSLQEFIPKKRVIEYYLVTLPE

SEQ ID NO: 76311 - protein, 38 aa, Artificial Sequence
  Cyclic GFR-binding peptide
  MOD_RES (1)..(3)..(34)..(35): Xaa is C or S
XKXSKVIMVQVEKIKPTKGIVKAIKVSRLDQSVXXPSA

SEQ ID NO: 76312 - protein, 39 aa, Artificial Sequence; identical to SEQ ID NO: 28053
  Cyclic GFR-binding peptide
  MOD_RES (2)..(34)..(35): Xaa is C or S

SEQ ID NO: 76313 - protein, 33 aa, Artificial Sequence
  Cyclic GFR-binding peptide
  MOD_RES (1)..(3): Xaa is C or S
XGXGEVVMDSMEGIVVKENEDMIQMTINSLETP

SEQ ID NO: 76314 - protein, 24 aa, Artificial Sequence
  Cyclic GFR-binding peptide
NSLQEHQGQHPKIRYYVMPLPEEE

SEQ ID NO: 76315 - protein, 36 aa, Artificial Sequence; identical to SEQ ID NO: 28055
  Cyclic GFR-binding peptide
  MOD_RES (32)..(33): Xaa is C or S

SEQ ID NO: 76316 - protein, 37 aa, Artificial Sequence; identical to SEQ ID NO: 28057
  Cyclic GFR-binding peptide
  MOD_RES (2)..(33)..(34): Xaa is C or S

SEQ ID NO: 76317 - protein, 26 aa, Artificial Sequence
  Cyclic GFR-binding peptide
VVMVQVEKVKPTRGVVKAIKVSRLDQ

SEQ ID NO: 76318 - protein, 26 aa, Artificial Sequence
  Cyclic GFR-binding peptide
VMNVQVEKIVNSSDDVKAVKVSRLKT

SEQ ID NO: 76319 - protein, 39 aa, Artificial Sequence; identical to SEQ ID NO: 28062
  Cyclic GFR-binding peptide
  MOD_RES (2)..(4)..(36)..(37): Xaa is C or S

SEQ ID NO: 76320 - protein, 27 aa, Artificial Sequence
  Cyclic GFR-binding peptide
LRNSLQELKPKKRVYEYYVVPLPEHHV

SEQ ID NO: 76321 - protein, 31 aa, Artificial Sequence
  Cyclic GFR-binding peptide
  MOD_RES (2)..(4): Xaa is C or S
HXGXSRVVMNSMEGIIVNSSDDMIQVTINSL

SEQ ID NO: 76322 - protein, 39 aa, Artificial Sequence; identical to SEQ ID NO: 28063
  Cyclic GFR-binding peptide
  MOD_RES (2)..(39): Xaa is C or S

SEQ ID NO: 76323 - protein, 29 aa, Artificial Sequence
  Cyclic GFR-binding peptide
  MOD_RES (1)..(3): Xaa is C or S
XGXARVVMNVQVEKIVNSSDDVKAVKVSR

SEQ ID NO: 76324 - protein, 30 aa, Artificial Sequence
  Cyclic GFR-binding peptide
  MOD_RES (28)..(29): Xaa is C or S
MNSMEGIIVNSSDDMIQVTINSLQTPAXXP

SEQ ID NO: 76325 - protein, 33 aa, Artificial Sequence
  Cyclic GFR-binding peptide
  MOD_RES (30)..(31): Xaa is C or S
VVMDVQVEKVVKENEDVKAMKVSRLETPVXXAK

SEQ ID NO: 76326 - protein, 27 aa, Artificial Sequence
  Cyclic GFR-binding peptide
  MOD_RES (26)..(26): Xaa is C or S
SMEGIIVNSSDDMIQVTINSLKTPAXT

SEQ ID NO: 76327 - protein, 37 aa, Artificial Sequence; identical to SEQ ID NO: 28074
  Cyclic GFR-binding peptide
  MOD_RES (1)..(3)..(34)..(35): Xaa is C or S

SEQ ID NO: 76328 - protein, 34 aa, Artificial Sequence
  Cyclic GFR-binding peptide
  MOD_RES (29)..(30): Xaa is C or S
VMESMEGIVVKDYEDMIQMTINSLETPVXXAKPI

SEQ ID NO: 76329 - protein, 37 aa, Artificial Sequence; identical to SEQ ID NO: 28075
  Cyclic GFR-binding peptide
  MOD_RES (1)..(33): Xaa is C or S

SEQ ID NO: 76330 - protein, 30 aa, Artificial Sequence; identical to SEQ ID NO: 28078
  Cyclic GFR-binding peptide

SEQ ID NO: 76331 - protein, 21 aa, Artificial Sequence
  Cyclic GFR-binding peptide
MVTAKKVKPKRGVIKRIQVPR

SEQ ID NO: 76332 - protein, 36 aa, Artificial Sequence; identical to SEQ ID NO: 28080
  Cyclic GFR-binding peptide
  MOD_RES (31)..(32): Xaa is C or S

SEQ ID NO: 76333 - protein, 38 aa, Artificial Sequence; identical to SEQ ID NO: 28081
  Cyclic GFR-binding peptide
  MOD_RES (1)..(3)..(34)..(35): Xaa is C or S

SEQ ID NO: 76334 - protein, 41 aa, Artificial Sequence; identical to SEQ ID NO: 28084
  Cyclic GFR-binding peptide
  MOD_RES (1)..(3)..(35)..(36): Xaa is C or S

SEQ ID NO: 76335 - protein, 37 aa, Artificial Sequence; identical to SEQ ID NO: 28091
  Cyclic GFR-binding peptide
  MOD_RES (1)..(35): Xaa is C or S

SEQ ID NO: 76336 - protein, 28 aa, Artificial Sequence
  Cyclic GFR-binding peptide
  MOD_RES (2)..(2): Xaa is C or S
GXGEVVMDVQVEKVVKENEDVKAMKVSR

SEQ ID NO: 76337 - protein, 37 aa, Artificial Sequence; identical to SEQ ID NO: 28092
  Cyclic GFR-binding peptide
  MOD_RES (2)..(4)..(35)..(36): Xaa is C or S

SEQ ID NO: 76338 - protein, 33 aa, Artificial Sequence
  Cyclic GFR-binding peptide
  MOD_RES (27)..(28): Xaa is C or S
MSMEGIVKPKRGVMIQITINSLAQPVXXPAASA

SEQ ID NO: 76339 - protein, 36 aa, Artificial Sequence; identical to SEQ ID NO: 28094
  Cyclic GFR-binding peptide
  MOD_RES (31)..(32): Xaa is C or S

SEQ ID NO: 76340 - protein, 29 aa, Artificial Sequence
  Cyclic GFR-binding peptide
LHEELRNSLQELKPKKRVYEYYLVTLPEH

SEQ ID NO: 76341 - protein, 37 aa, Artificial Sequence; identical to SEQ ID NO: 28098
  Cyclic GFR-binding peptide
  MOD_RES (1)..(33)..(34): Xaa is C or S

SEQ ID NO: 76342 - protein, 30 aa, Artificial Sequence
  Cyclic GFR-binding peptide
  MOD_RES (28)..(29): Xaa is C or S
MNSMEGIIVNSSDDMIQVTINSLKTPAXXP

SEQ ID NO: 76343 - protein, 25 aa, Artificial Sequence
  Cyclic GFR-binding peptide
VTAKKVKPKRGVIKRIQVPRLAQPV

SEQ ID NO: 76344 - protein, 35 aa, Artificial Sequence
  Cyclic GFR-binding peptide
  MOD_RES (29)..(30): Xaa is C or S
VIMSMEGIIKPTKGIMIQITINSLDQSVXXPSASA

SEQ ID NO: 76345 - protein, 33 aa, Artificial Sequence
  Cyclic GFR-binding peptide
  MOD_RES (29)..(30): Xaa is C or S
VMEVQVEKVVKDYEDVKAMKVSRLETPVXXAKP

SEQ ID NO: 76346 - protein, 34 aa, Artificial Sequence; identical to SEQ ID NO: 28104
  Cyclic GFR-binding peptide
  MOD_RES (2)..(4): Xaa is C or S

SEQ ID NO: 76347 - protein, 35 aa, Artificial Sequence
  Cyclic GFR-binding peptide
  MOD_RES (30)..(31): Xaa is C or S
VVMNSMEGIIVNSSDDMIQVTINSLKTPAXXPKPV

SEQ ID NO: 76348 - protein, 33 aa, Artificial Sequence
  Cyclic GFR-binding peptide
  MOD_RES (29)..(29): Xaa is C or S
VMNSMEGIIVNSSDDMIQVTINSLKTPAXTPKT

SEQ ID NO: 76349 - protein, 23 aa, Artificial Sequence
  Cyclic GFR-binding peptide
NVQVEKIVNSSDDVKAVKVSRLK

SEQ ID NO: 76350 - protein, 27 aa, Artificial Sequence
  Cyclic GFR-binding peptide
  MOD_RES (26)..(27): Xaa is C or S
SMEGIVVKDYEDMIQMTINSLETPVXX

SEQ ID NO: 76351 - protein, 41 aa, Artificial Sequence; identical to SEQ ID NO: 28110
  Cyclic GFR-binding peptide
  MOD_RES (1)..(3)..(35)..(36): Xaa is C or S

SEQ ID NO: 76352 - protein, 26 aa, Artificial Sequence
  Cyclic GFR-binding peptide
NVTAKKIVNSSDDIKRVQVPRLKTPA

SEQ ID NO: 76353 - protein, 26 aa, Artificial Sequence
  Cyclic GFR-binding peptide
SRVIMVTAKKVKPKRGVIKRIQVPRL

SEQ ID NO: 76354 - protein, 26 aa, Artificial Sequence
  Cyclic GFR-binding peptide
  MOD_RES (26)..(26): Xaa is C or S
SMEGIVVKDYEDMIQMTINSLETPVX

SEQ ID NO: 76355 - protein, 25 aa, Artificial Sequence
  Cyclic GFR-binding peptide
RNSLQELKPKKRVYEYYLVTLPEHH

SEQ ID NO: 76356 - protein, 41 aa, Artificial Sequence; identical to SEQ ID NO: 28114
  Cyclic GFR-binding peptide
  MOD_RES (2)..(4)..(41): Xaa is C or S

SEQ ID NO: 76357 - protein, 36 aa, Artificial Sequence; identical to SEQ ID NO: 28117
  Cyclic GFR-binding peptide
  MOD_RES (1)..(33)..(34): Xaa is C or S

SEQ ID NO: 76358 - protein, 27 aa, Artificial Sequence
  Cyclic GFR-binding peptide
NSLQEHQGQHPKIRYYLMTLPEEETPV

SEQ ID NO: 76359 - protein, 30 aa, Artificial Sequence
  Cyclic GFR-binding peptide
  MOD_RES (26)..(27): Xaa is C or S
SMEGIVVKENEDMIQMTINSLETPVXXAKP

SEQ ID NO: 76360 - protein, 28 aa, Artificial Sequence
  Cyclic GFR-binding peptide
  MOD_RES (28)..(28): Xaa is C or S
NSLQEHQGQHPKIRYYLMTLPEEETPVX

SEQ ID NO: 76361 - protein, 37 aa, Artificial Sequence; identical to SEQ ID NO: 28118
  Cyclic GFR-binding peptide
  MOD_RES (1)..(33)..(34): Xaa is C or S

SEQ ID NO: 76362 - protein, 37 aa, Artificial Sequence; identical to SEQ ID NO: 28119
  Cyclic GFR-binding peptide
  MOD_RES (1)..(3)..(35)..(36): Xaa is C or S

SEQ ID NO: 76363 - protein, 30 aa, Artificial Sequence
  Cyclic GFR-binding peptide
  MOD_RES (26)..(27): Xaa is C or S
SMEGIVKPKRGVMIQITINSLAQPVXXPAA

SEQ ID NO: 76364 - protein, 33 aa, Artificial Sequence; identical to SEQ ID NO: 28125
  Cyclic GFR-binding peptide
  MOD_RES (2)..(2): Xaa is C or S

SEQ ID NO: 76365 - protein, 34 aa, Artificial Sequence; identical to SEQ ID NO: 28130
  Cyclic GFR-binding peptide

SEQ ID NO: 76366 - protein, 38 aa, Artificial Sequence; identical to SEQ ID NO: 28131
  Cyclic GFR-binding peptide
  MOD_RES (1)..(32)..(33): Xaa is C or S

SEQ ID NO: 76367 - protein, 28 aa, Artificial Sequence
  Cyclic GFR-binding peptide
  MOD_RES (27)..(28): Xaa is C or S
DVTAKKVVKENEDIKRMQVPRLETPVXX

SEQ ID NO: 76368 - protein, 30 aa, Artificial Sequence
  Cyclic GFR-binding peptide
  MOD_RES (27)..(28): Xaa is C or S
DVQVEKVVKENEDVKAMKVSRLETPVXXAK

SEQ ID NO: 76369 - protein, 31 aa, Artificial Sequence
  Cyclic GFR-binding peptide
  MOD_RES (27)..(28): Xaa is C or S
MVQVEKVKPTRGVVKAIKVSRLDQPVXXPSA

SEQ ID NO: 76370 - protein, 28 aa, Artificial Sequence
  Cyclic GFR-binding peptide
FNSLQEHQGQHPKIRYYVMPLPEEETPV

SEQ ID NO: 76371 - protein, 29 aa, Artificial Sequence
  Cyclic GFR-binding peptide
  MOD_RES (26)..(27): Xaa is C or S
VTAKKVVKENEDIKRMQVPRLETPVXXAK

SEQ ID NO: 76372 - protein, 27 aa, Artificial Sequence
  Cyclic GFR-binding peptide
TNSLQEFIPKKRVIEYYLVTLPELQVQ

SEQ ID NO: 76373 - protein, 41 aa, Artificial Sequence; identical to SEQ ID NO: 28136
  Cyclic GFR-binding peptide
  MOD_RES (1)..(3)..(40): Xaa is C or S

SEQ ID NO: 76374 - protein, 20 aa, Artificial Sequence
  Cyclic GFR-binding peptide
VQVEKIKPTKGIVKAIKVSR

SEQ ID NO: 76375 - protein, 33 aa, Artificial Sequence
  Cyclic GFR-binding peptide
  MOD_RES (1)..(3): Xaa is C or S
XEXKNHQLFNSLQEHQGQHPKIRYYLMTLPEEE

SEQ ID NO: 76376 - protein, 37 aa, Artificial Sequence; identical to SEQ ID NO: 28138
  Cyclic GFR-binding peptide
  MOD_RES (1)..(3)..(34)..(35): Xaa is C or S

SEQ ID NO: 76377 - protein, 23 aa, Artificial Sequence
  Cyclic GFR-binding peptide
MVTAKKIKPTKGIIKRIQVPRLD

SEQ ID NO: 76378 - protein, 40 aa, Artificial Sequence; identical to SEQ ID NO: 28144
  Cyclic GFR-binding peptide
  MOD_RES (2)..(4)..(36)..(37): Xaa is C or S

SEQ ID NO: 76379 - protein, 34 aa, Artificial Sequence
  Cyclic GFR-binding peptide
  MOD_RES (2)..(4): Xaa is C or S
RXEXKNHQLFNSLQEHQGQHPKIRYYLMTLPEEE

SEQ ID NO: 76380 - protein, 36 aa, Artificial Sequence; identical to SEQ ID NO: 28148
  Cyclic GFR-binding peptide
  MOD_RES (2)..(4)..(36): Xaa is C or S

SEQ ID NO: 76381 - protein, 30 aa, Artificial Sequence
  Cyclic GFR-binding peptide
GEVVMDVTAKKVVKENEDIKRMQVPRLETP

SEQ ID NO: 76382 - protein, 32 aa, Artificial Sequence; identical to SEQ ID NO: 28150
  Cyclic GFR-binding peptide

SEQ ID NO: 76383 - protein, 29 aa, Artificial Sequence
  Cyclic GFR-binding peptide
  MOD_RES (2)..(4): Xaa is C or S
SXKXSKVVMVQVEKVKPTRGVVKAIKVSR

SEQ ID NO: 76384 - protein, 30 aa, Artificial Sequence
  Cyclic GFR-binding peptide
  MOD_RES (1)..(3): Xaa is C or S
XGXGEVVMEVTAKKVVKDYEDIKRMQVPRL

SEQ ID NO: 76385 - protein, 40 aa, Artificial Sequence; identical to SEQ ID NO: 28155
  Cyclic GFR-binding peptide
  MOD_RES (2)..(4)..(38): Xaa is C or S

SEQ ID NO: 76386 - protein, 26 aa, Artificial Sequence
  Cyclic GFR-binding peptide
ELRNSLQELKPKKRVYEYYLVTLPEH

SEQ ID NO: 76387 - protein, 32 aa, Artificial Sequence
  Cyclic GFR-binding peptide
  MOD_RES (2)..(4): Xaa is C or S
RXGXGEVVMESMEGIVVKDYEDMIQMTINSLE

SEQ ID NO: 76388 - protein, 38 aa, Artificial Sequence; identical to SEQ ID NO: 28161
  Cyclic GFR-binding peptide
  MOD_RES (1)..(3)..(34)..(35): Xaa is C or S

SEQ ID NO: 76389 - protein, 32 aa, Artificial Sequence
  Cyclic GFR-binding peptide
  MOD_RES (2)..(4): Xaa is C or S
SXKXSRVIMVTAKKVKPKRGVIKRIQVPRLAQ

SEQ ID NO: 76390 - protein, 44 aa, Artificial Sequence; identical to SEQ ID NO: 28164
  Cyclic GFR-binding peptide
  MOD_RES (2)..(4)..(38): Xaa is C or S

SEQ ID NO: 76391 - protein, 33 aa, Artificial Sequence; identical to SEQ ID NO: 28166
  Cyclic GFR-binding peptide
  MOD_RES (32)..(32): Xaa is C or S

SEQ ID NO: 76392 - protein, 31 aa, Artificial Sequence
  Cyclic GFR-binding peptide
HQLFNSLQEHQGQHPKIRYYLMTLPEEETPV

SEQ ID NO: 76393 - protein, 30 aa, Artificial Sequence
  Cyclic GFR-binding peptide
  MOD_RES (2)..(4): Xaa is C or S
SXKXSKVVMSMEGIVKPTRGVMIQITINSL

SEQ ID NO: 76394 - protein, 36 aa, Artificial Sequence
  Cyclic GFR-binding peptide
  MOD_RES (1)..(3): Xaa is C or S
XAXELHEELRNSLQELKPKKRVYEYYVVPLPEHHVR

SEQ ID NO: 76395 - protein, 30 aa, Artificial Sequence
  Cyclic GFR-binding peptide
  MOD_RES (26)..(27): Xaa is C or S
SMEGIIVNSSDDMIQVTINSLQTPAXXPKP

SEQ ID NO: 76396 - protein, 21 aa, Artificial Sequence
  Cyclic GFR-binding peptide
MVQVEKIKPTKGIVKAIKVSR

SEQ ID NO: 76397 - protein, 26 aa, Artificial Sequence
  Cyclic GFR-binding peptide
MNVTAKKIVNSSDDIKRVQVPRLKTP

SEQ ID NO: 76398 - protein, 29 aa, Artificial Sequence
  Cyclic GFR-binding peptide
KVIMVQVEKIKPTKGIVKAIKVSRLDQSV

SEQ ID NO: 76399 - protein, 37 aa, Artificial Sequence; identical to SEQ ID NO: 28178
  Cyclic GFR-binding peptide
  MOD_RES (31)..(32): Xaa is C or S

SEQ ID NO: 76400 - protein, 36 aa, Artificial Sequence; identical to SEQ ID NO: 28179
  Cyclic GFR-binding peptide
  MOD_RES (34)..(34): Xaa is C or S

SEQ ID NO: 76401 - protein, 25 aa, Artificial Sequence
  Cyclic GFR-binding peptide
MDSMEGIVVKENEDMIQMTINSLET

SEQ ID NO: 76402 - protein, 27 aa, Artificial Sequence
  Cyclic GFR-binding peptide
QLFNSLQEHQGQHPKIRYYVMPLPEEE

SEQ ID NO: 76403 - protein, 32 aa, Artificial Sequence
  Cyclic GFR-binding peptide
  MOD_RES (30)..(30): Xaa is C or S
VVMNSMEGIIVNSSDDMIQVTINSLKTPAXTP

SEQ ID NO: 76404 - protein, 26 aa, Artificial Sequence
  Cyclic GFR-binding peptide
HQLFNSLQEHQGQHPKIRYYVMPLPE

SEQ ID NO: 76405 - protein, 21 aa, Artificial Sequence
  Cyclic GFR-binding peptide
NVQVEKIVNSSDDVKAVKVSR

SEQ ID NO: 76406 - protein, 21 aa, Artificial Sequence
  Cyclic GFR-binding peptide
VQVEKIKPTKGIVKAIKVSRL

SEQ ID NO: 76407 - protein, 29 aa, Artificial Sequence
  Cyclic GFR-binding peptide
GEVVMEVTAKKVVKDYEDIKRMQVPRLET

SEQ ID NO: 76408 - protein, 33 aa, Artificial Sequence
  Cyclic GFR-binding peptide
  MOD_RES (27)..(28): Xaa is C or S
ESMEGIVVKDYEDMIQMTINSLETPVXXAKPIS

SEQ ID NO: 76409 - protein, 22 aa, Artificial Sequence
  Cyclic GFR-binding peptide
EVTAKKVVKDYEDIKRMQVPRL

SEQ ID NO: 76410 - protein, 25 aa, Artificial Sequence
  Cyclic GFR-binding peptide
ELRNSLQELKPKKRVYEYYVVPLPE

SEQ ID NO: 76411 - protein, 37 aa, Artificial Sequence; identical to SEQ ID NO: 28190
  Cyclic GFR-binding peptide
  MOD_RES (2)..(34)..(35): Xaa is C or S

SEQ ID NO: 76412 - protein, 35 aa, Artificial Sequence; identical to SEQ ID NO: 28191
  Cyclic GFR-binding peptide
  MOD_RES (31)..(32): Xaa is C or S

SEQ ID NO: 76413 - protein, 30 aa, Artificial Sequence
  Cyclic GFR-binding peptide
  MOD_RES (30)..(30): Xaa is C or S
NSLQELKPKKRVYEYYLVTLPEHHVRSPQX

SEQ ID NO: 76414 - protein, 31 aa, Artificial Sequence
  Cyclic GFR-binding peptide
ELHEELRNSLQELKPKKRVYEYYLVTLPEHH

SEQ ID NO: 76415 - protein, 28 aa, Artificial Sequence
  Cyclic GFR-binding peptide
  MOD_RES (26)..(27): Xaa is C or S
SMEGIVVKDYEDMIQMTINSLETPVXXA

SEQ ID NO: 76416 - protein, 33 aa, Artificial Sequence
  Cyclic GFR-binding peptide
  MOD_RES (2)..(4): Xaa is C or S
EXKXALHDELTNSLQEFIPKKRVIEYYVVPLPE

SEQ ID NO: 76417 - protein, 34 aa, Artificial Sequence
  Cyclic GFR-binding peptide
  MOD_RES (29)..(30): Xaa is C or S
VVMVQVEKVKPTRGVVKAIKVSRLDQPVXXPSAS

SEQ ID NO: 76418 - protein, 41 aa, Artificial Sequence; identical to SEQ ID NO: 28207
  Cyclic GFR-binding peptide
  MOD_RES (2)..(4)..(36)..(37): Xaa is C or S

SEQ ID NO: 76419 - protein, 34 aa, Artificial Sequence; identical to SEQ ID NO: 28208
  Cyclic GFR-binding peptide

SEQ ID NO: 76420 - protein, 28 aa, Artificial Sequence
  Cyclic GFR-binding peptide
RNSLQELKPKKRVYEYYLVTLPEHHVRS

SEQ ID NO: 76421 - protein, 30 aa, Artificial Sequence; identical to SEQ ID NO: 28212
  Cyclic GFR-binding peptide

SEQ ID NO: 76422 - protein, 31 aa, Artificial Sequence
  Cyclic GFR-binding peptide
  MOD_RES (1)..(3): Xaa is C or S
XGXARVVMNVTAKKIVNSSDDIKRVQVPRLQ

SEQ ID NO: 76423 - protein, 40 aa, Artificial Sequence; identical to SEQ ID NO: 28214
  Cyclic GFR-binding peptide
  MOD_RES (37)..(37): Xaa is C or S

SEQ ID NO: 76424 - protein, 29 aa, Artificial Sequence
  Cyclic GFR-binding peptide
  MOD_RES (26)..(26): Xaa is C or S
VQVEKIVNSSDDVKAVKVSRLKTPAXTPK

SEQ ID NO: 76425 - protein, 34 aa, Artificial Sequence; identical to SEQ ID NO: 28217
  Cyclic GFR-binding peptide
  MOD_RES (2)..(4): Xaa is C or S

SEQ ID NO: 76426 - protein, 36 aa, Artificial Sequence; identical to SEQ ID NO: 28219
  Cyclic GFR-binding peptide
  MOD_RES (1)..(33)..(34): Xaa is C or S

SEQ ID NO: 76427 - protein, 26 aa, Artificial Sequence
  Cyclic GFR-binding peptide
RVVMNVQVEKIVNSSDDVKAVKVSRL

SEQ ID NO: 76428 - protein, 29 aa, Artificial Sequence
  Cyclic GFR-binding peptide
KNHQLFNSLQEHQGQHPKIRYYLMTLPEE

SEQ ID NO: 76429 - protein, 30 aa, Artificial Sequence
  Cyclic GFR-binding peptide
  MOD_RES (1)..(3): Xaa is C or S
XKXSKVVMSMEGIVKPTRGVMIQITINSLD

SEQ ID NO: 76430 - protein, 30 aa, Artificial Sequence
  Cyclic GFR-binding peptide
  MOD_RES (27)..(28): Xaa is C or S
MSMEGIIKPTKGIMIQITINSLDQSVXXPS

SEQ ID NO: 76431 - protein, 23 aa, Artificial Sequence
  Cyclic GFR-binding peptide
NSLQEHQGQHPKIRYYLMTLPEE

SEQ ID NO: 76432 - protein, 27 aa, Artificial Sequence
  Cyclic GFR-binding peptide
DELTNSLQEFIPKKRVIEYYVVPLPEL

SEQ ID NO: 76433 - protein, 34 aa, Artificial Sequence; identical to SEQ ID NO: 28231
  Cyclic GFR-binding peptide
  MOD_RES (1)..(3)..(34): Xaa is C or S

SEQ ID NO: 76434 - protein, 35 aa, Artificial Sequence
  Cyclic GFR-binding peptide
  MOD_RES (30)..(31): Xaa is C or S
VVMEVTAKKVVKDYEDIKRMQVPRLETPVXXAKPI

SEQ ID NO: 76435 - protein, 23 aa, Artificial Sequence
  Cyclic GFR-binding peptide
DSMEGIVVKENEDMIQMTINSLE

SEQ ID NO: 76436 - protein, 33 aa, Artificial Sequence
  Cyclic GFR-binding peptide
  MOD_RES (29)..(29): Xaa is C or S
VMNVQVEKIVNSSDDVKAVKVSRLKTPAXTPKT

SEQ ID NO: 76437 - protein, 35 aa, Artificial Sequence; identical to SEQ ID NO: 28234
  Cyclic GFR-binding peptide
  MOD_RES (34)..(34): Xaa is C or S

SEQ ID NO: 76438 - protein, 29 aa, Artificial Sequence
  Cyclic GFR-binding peptide
  MOD_RES (2)..(2): Xaa is C or S
KXSRVIMSMEGIVKPKRGVMIQITINSLA

SEQ ID NO: 76439 - protein, 28 aa, Artificial Sequence
  Cyclic GFR-binding peptide
  MOD_RES (28)..(28): Xaa is C or S
IMVQVEKVKPKRGVVKAIKVSRLAQPVX

SEQ ID NO: 76440 - protein, 37 aa, Artificial Sequence; identical to SEQ ID NO: 28240
  Cyclic GFR-binding peptide
  MOD_RES (1)..(3)..(35): Xaa is C or S

SEQ ID NO: 76441 - protein, 25 aa, Artificial Sequence
  Cyclic GFR-binding peptide
LRNSLQELKPKKRVYEYYVVPLPEH

SEQ ID NO: 76442 - protein, 28 aa, Artificial Sequence
  Cyclic GFR-binding peptide
GEVVMEVQVEKVVKDYEDVKAMKVSRLE

SEQ ID NO: 76443 - protein, 24 aa, Artificial Sequence
  Cyclic GFR-binding peptide
VTAKKVKPKRGVIKRIQVPRLAQP

SEQ ID NO: 76444 - protein, 38 aa, Artificial Sequence
  Cyclic GFR-binding peptide
  MOD_RES (34)..(34): Xaa is C or S
DELTNSLQEFIPKKRVIEYYLVTLPELQVQTPRXQVNR

SEQ ID NO: 76445 - protein, 31 aa, Artificial Sequence
  Cyclic GFR-binding peptide
  MOD_RES (30)..(31): Xaa is C or S
VVMEVTAKKVVKDYEDIKRMQVPRLETPVXX

SEQ ID NO: 76446 - protein, 34 aa, Artificial Sequence; identical to SEQ ID NO: 28245
  Cyclic GFR-binding peptide
  MOD_RES (1)..(33)..(34): Xaa is C or S

SEQ ID NO: 76447 - protein, 34 aa, Artificial Sequence; identical to SEQ ID NO: 28246
  Cyclic GFR-binding peptide
  MOD_RES (1)..(3): Xaa is C or S

SEQ ID NO: 76448 - protein, 32 aa, Artificial Sequence
  Cyclic GFR-binding peptide
  MOD_RES (27)..(28): Xaa is C or S
NSMEGIIVNSSDDMIQVTINSLQTPAXXPKPV

SEQ ID NO: 76449 - protein, 30 aa, Artificial Sequence
  Cyclic GFR-binding peptide
LHDELTNSLQEFIPKKRVIEYYLVTLPELQ

SEQ ID NO: 76450 - protein, 31 aa, Artificial Sequence
  Cyclic GFR-binding peptide
  MOD_RES (29)..(30): Xaa is C or S
VMNVTAKKIVNSSDDIKRVQVPRLKTPAXXP

SEQ ID NO: 76451 - protein, 24 aa, Artificial Sequence
  Cyclic GFR-binding peptide
VQVEKVVKDYEDVKAMKVSRLETP

SEQ ID NO: 76452 - protein, 29 aa, Artificial Sequence
  Cyclic GFR-binding peptide
  MOD_RES (26)..(27): Xaa is C or S
VTAKKVKPKRGVIKRIQVPRLAQPVXXPA

SEQ ID NO: 76453 - protein, 29 aa, Artificial Sequence
  Cyclic GFR-binding peptide
  MOD_RES (28)..(29): Xaa is C or S
IMVQVEKVKPKRGVVKAIKVSRLAQPVXX

SEQ ID NO: 76454 - protein, 27 aa, Artificial Sequence
  Cyclic GFR-binding peptide
LFNSLQEHQGQHPKIRYYLMTLPEEET

SEQ ID NO: 76455 - protein, 40 aa, Artificial Sequence; identical to SEQ ID NO: 28250
  Cyclic GFR-binding peptide
  MOD_RES (1)..(3)..(34)..(35): Xaa is C or S

SEQ ID NO: 76456 - protein, 38 aa, Artificial Sequence; identical to SEQ ID NO: 28251
  Cyclic GFR-binding peptide
  MOD_RES (35)..(35): Xaa is C or S

SEQ ID NO: 76457 - protein, 32 aa, Artificial Sequence
  Cyclic GFR-binding peptide
  MOD_RES (2)..(4): Xaa is C or S
SXKXSKVIMVQVEKIKPTKGIVKAIKVSRLDQ

SEQ ID NO: 76458 - protein, 30 aa, Artificial Sequence
  Cyclic GFR-binding peptide
  MOD_RES (27)..(27): Xaa is C or S
NSMEGIIVNSSDDMIQVTINSLKTPAXTPK

SEQ ID NO: 76459 - protein, 25 aa, Artificial Sequence
  Cyclic GFR-binding peptide
LTNSLQEFIPKKRVIEYYVVPLPEL

SEQ ID NO: 76460 - protein, 32 aa, Artificial Sequence
  Cyclic GFR-binding peptide
  MOD_RES (28)..(29): Xaa is C or S
VMVQVEKVKPTRGVVKAIKVSRLDQPVXXPSA

SEQ ID NO: 76461 - protein, 31 aa, Artificial Sequence
  Cyclic GFR-binding peptide
  MOD_RES (1)..(1): Xaa is C or S
XGEVVMDSMEGIVVKENEDMIQMTINSLETP

SEQ ID NO: 76462 - protein, 34 aa, Artificial Sequence
  Cyclic GFR-binding peptide
  MOD_RES (29)..(29): Xaa is C or S
FNSLQEHQGQHPKIRYYVMPLPEEETPVXELGED

SEQ ID NO: 76463 - protein, 35 aa, Artificial Sequence
  Cyclic GFR-binding peptide
  MOD_RES (29)..(29): Xaa is C or S
VMNVQVEKIVNSSDDVKAVKVSRLKTPAXTPKTVH

SEQ ID NO: 76464 - protein, 25 aa, Artificial Sequence
  Cyclic GFR-binding peptide
EVTAKKVVKDYEDIKRMQVPRLETP

SEQ ID NO: 76465 - protein, 38 aa, Artificial Sequence; identical to SEQ ID NO: 28260
  Cyclic GFR-binding peptide
  MOD_RES (1)..(33)..(34): Xaa is C or S

SEQ ID NO: 76466 - protein, 35 aa, Artificial Sequence
  Cyclic GFR-binding peptide
  MOD_RES (30)..(31): Xaa is C or S
VVMDSMEGIVVKENEDMIQMTINSLETPVXXAKPI

SEQ ID NO: 76467 - protein, 37 aa, Artificial Sequence; identical to SEQ ID NO: 28264
  Cyclic GFR-binding peptide
  MOD_RES (32)..(33): Xaa is C or S

SEQ ID NO: 76468 - protein, 34 aa, Artificial Sequence; identical to SEQ ID NO: 28263
  Cyclic GFR-binding peptide
  MOD_RES (2)..(34): Xaa is C or S

SEQ ID NO: 76469 - protein, 34 aa, Artificial Sequence; identical to SEQ ID NO: 28268
  Cyclic GFR-binding peptide
  MOD_RES (2)..(34): Xaa is C or S

SEQ ID NO: 76470 - protein, 25 aa, Artificial Sequence
  Cyclic GFR-binding peptide
SMEGIVKPKRGVMIQITINSLAQPV

SEQ ID NO: 76471 - protein, 39 aa, Artificial Sequence; identical to SEQ ID NO: 28270
  Cyclic GFR-binding peptide
  MOD_RES (37)..(37): Xaa is C or S

SEQ ID NO: 76472 - protein, 34 aa, Artificial Sequence
  Cyclic GFR-binding peptide
  MOD_RES (2)..(4): Xaa is C or S
EXKXALHDELTNSLQEFIPKKRVIEYYVVPLPEL

SEQ ID NO: 76473 - protein, 35 aa, Artificial Sequence; identical to SEQ ID NO: 28273
  Cyclic GFR-binding peptide
  MOD_RES (1)..(32)..(33): Xaa is C or S

SEQ ID NO: 76474 - protein, 32 aa, Artificial Sequence
  Cyclic GFR-binding peptide
  MOD_RES (28)..(29): Xaa is C or S
IMVQVEKIKPTKGIVKAIKVSRLDQSVXXPSA

SEQ ID NO: 76475 - protein, 37 aa, Artificial Sequence; identical to SEQ ID NO: 28275
  Cyclic GFR-binding peptide
  MOD_RES (1)..(3)..(35)..(36): Xaa is C or S

SEQ ID NO: 76476 - protein, 42 aa, Artificial Sequence; identical to SEQ ID NO: 28278
  Cyclic GFR-binding peptide
  MOD_RES (2)..(4)..(36): Xaa is C or S

SEQ ID NO: 76477 - protein, 36 aa, Artificial Sequence; identical to SEQ ID NO: 28279
  Cyclic GFR-binding peptide
  MOD_RES (1)..(3)..(34)..(35): Xaa is C or S

SEQ ID NO: 76478 - protein, 35 aa, Artificial Sequence; identical to SEQ ID NO: 28284
  Cyclic GFR-binding peptide
  MOD_RES (2)..(33)..(34): Xaa is C or S

SEQ ID NO: 76479 - protein, 30 aa, Artificial Sequence; identical to SEQ ID NO: 28285
  Cyclic GFR-binding peptide

SEQ ID NO: 76480 - protein, 39 aa, Artificial Sequence; identical to SEQ ID NO: 28286
  Cyclic GFR-binding peptide
  MOD_RES (2)..(33)..(34): Xaa is C or S

SEQ ID NO: 76481 - protein, 26 aa, Artificial Sequence
  Cyclic GFR-binding peptide
ELTNSLQEFIPKKRVIEYYLVTLPEL

SEQ ID NO: 76482 - protein, 27 aa, Artificial Sequence
  Cyclic GFR-binding peptide
LTNSLQEFIPKKRVIEYYVVPLPELQV

SEQ ID NO: 76483 - protein, 37 aa, Artificial Sequence; identical to SEQ ID NO: 28292
  Cyclic GFR-binding peptide
  MOD_RES (35)..(35): Xaa is C or S

SEQ ID NO: 76484 - protein, 22 aa, Artificial Sequence
  Cyclic GFR-binding peptide
MDVQVEKVVKENEDVKAMKVSR

SEQ ID NO: 76485 - protein, 30 aa, Artificial Sequence
  Cyclic GFR-binding peptide
  MOD_RES (28)..(29): Xaa is C or S
MDSMEGIVVKENEDMIQMTINSLETPVXXA

SEQ ID NO: 76486 - protein, 28 aa, Artificial Sequence
  Cyclic GFR-binding peptide
  MOD_RES (2)..(2): Xaa is C or S
KXSRVIMSMEGIVKPKRGVMIQITINSL

SEQ ID NO: 76487 - protein, 34 aa, Artificial Sequence; identical to SEQ ID NO: 28294
  Cyclic GFR-binding peptide

SEQ ID NO: 76488 - protein, 34 aa, Artificial Sequence; identical to SEQ ID NO: 28295
  Cyclic GFR-binding peptide
  MOD_RES (31)..(32): Xaa is C or S

SEQ ID NO: 76489 - protein, 36 aa, Artificial Sequence; identical to SEQ ID NO: 28300
  Cyclic GFR-binding peptide
  MOD_RES (1)..(33)..(34): Xaa is C or S

SEQ ID NO: 76490 - protein, 34 aa, Artificial Sequence; identical to SEQ ID NO: 28301
  Cyclic GFR-binding peptide
  MOD_RES (1)..(32)..(33): Xaa is C or S

SEQ ID NO: 76491 - protein, 31 aa, Artificial Sequence
  Cyclic GFR-binding peptide
  MOD_RES (2)..(2): Xaa is C or S
KXALHDELTNSLQEFIPKKRVIEYYVVPLPE

SEQ ID NO: 76492 - protein, 30 aa, Artificial Sequence
  Cyclic GFR-binding peptide
  MOD_RES (2)..(4): Xaa is C or S
RXGXGEVVMESMEGIVVKDYEDMIQMTINS

SEQ ID NO: 76493 - protein, 32 aa, Artificial Sequence
  Cyclic GFR-binding peptide
DELTNSLQEFIPKKRVIEYYLVTLPELQVQTP

SEQ ID NO: 76494 - protein, 29 aa, Artificial Sequence
  Cyclic GFR-binding peptide
GEVVMDSMEGIVVKENEDMIQMTINSLET

SEQ ID NO: 76495 - protein, 38 aa, Artificial Sequence; identical to SEQ ID NO: 28311
  Cyclic GFR-binding peptide
  MOD_RES (1)..(3)..(34)..(35): Xaa is C or S

SEQ ID NO: 76496 - protein, 23 aa, Artificial Sequence
  Cyclic GFR-binding peptide
VIMVQVEKVKPKRGVVKAIKVSR

SEQ ID NO: 76497 - protein, 31 aa, Artificial Sequence
  Cyclic GFR-binding peptide
  MOD_RES (29)..(30): Xaa is C or S
VMDVTAKKVVKENEDIKRMQVPRLETPVXXA

SEQ ID NO: 76498 - protein, 36 aa, Artificial Sequence; identical to SEQ ID NO: 28314
  Cyclic GFR-binding peptide
  MOD_RES (1)..(3)..(35)..(36): Xaa is C or S

SEQ ID NO: 76499 - protein, 26 aa, Artificial Sequence
  Cyclic GFR-binding peptide
SRVIMVQVEKVKPKRGVVKAIKVSRL

SEQ ID NO: 76500 - protein, 33 aa, Artificial Sequence; identical to SEQ ID NO: 28315
  Cyclic GFR-binding peptide
  MOD_RES (1)..(33): Xaa is C or S

SEQ ID NO: 76501 - protein, 32 aa, Artificial Sequence
  Cyclic GFR-binding peptide
  MOD_RES (2)..(2): Xaa is C or S
GXARVVMNSMEGIIVNSSDDMIQVTINSLQTP

SEQ ID NO: 76502 - protein, 26 aa, Artificial Sequence
  Cyclic GFR-binding peptide
VMNSMEGIIVNSSDDMIQVTINSLKT

SEQ ID NO: 76503 - protein, 33 aa, Artificial Sequence
  Cyclic GFR-binding peptide
  MOD_RES (27)..(28): Xaa is C or S
DVTAKKVVKENEDIKRMQVPRLETPVXXAKPIK

SEQ ID NO: 76504 - protein, 33 aa, Artificial Sequence
  Cyclic GFR-binding peptide
  MOD_RES (1)..(3): Xaa is C or S
XGXGEVVMEVQVEKVVKDYEDVKAMKVSRLETP

SEQ ID NO: 76505 - protein, 39 aa, Artificial Sequence; identical to SEQ ID NO: 28320
  Cyclic GFR-binding peptide
  MOD_RES (2)..(33)..(34): Xaa is C or S

SEQ ID NO: 76506 - protein, 33 aa, Artificial Sequence
  Cyclic GFR-binding peptide
  MOD_RES (1)..(1): Xaa is C or S
XKNHQLFNSLQEHQGQHPKIRYYVMPLPEEETP

SEQ ID NO: 76507 - protein, 27 aa, Artificial Sequence
  Cyclic GFR-binding peptide
HEELRNSLQELKPKKRVYEYYVVPLPE

SEQ ID NO: 76508 - protein, 31 aa, Artificial Sequence
  Cyclic GFR-binding peptide
  MOD_RES (2)..(4): Xaa is C or S
SXKXSKVVMVQVEKVKPTRGVVKAIKVSRLD

SEQ ID NO: 76509 - protein, 33 aa, Artificial Sequence
  Cyclic GFR-binding peptide
  MOD_RES (2)..(2): Xaa is C or S
EXKNHQLFNSLQEHQGQHPKIRYYLMTLPEEET

SEQ ID NO: 76510 - protein, 36 aa, Artificial Sequence; identical to SEQ ID NO: 28330
  Cyclic GFR-binding peptide
  MOD_RES (2)..(4)..(36): Xaa is C or S

SEQ ID NO: 76511 - protein, 21 aa, Artificial Sequence
  Cyclic GFR-binding peptide
DVQVEKVVKENEDVKAMKVSR

SEQ ID NO: 76512 - protein, 22 aa, Artificial Sequence
  Cyclic GFR-binding peptide
NSLQEFIPKKRVIEYYLVTLPE

SEQ ID NO: 76513 - protein, 32 aa, Artificial Sequence
  Cyclic GFR-binding peptide
  MOD_RES (32)..(32): Xaa is C or S
LRNSLQELKPKKRVYEYYVVPLPEHHVRSPQX

SEQ ID NO: 76514 - protein, 30 aa, Artificial Sequence
  Cyclic GFR-binding peptide
  MOD_RES (29)..(30): Xaa is C or S
VVMSMEGIVKPTRGVMIQITINSLDQPVXX

SEQ ID NO: 76515 - protein, 31 aa, Artificial Sequence
  Cyclic GFR-binding peptide
LRNSLQELKPKKRVYEYYLVTLPEHHVRSPQ

SEQ ID NO: 76516 - protein, 28 aa, Artificial Sequence
  Cyclic GFR-binding peptide
  MOD_RES (27)..(28): Xaa is C or S
DVQVEKVVKENEDVKAMKVSRLETPVXX

SEQ ID NO: 76517 - protein, 33 aa, Artificial Sequence
  Cyclic GFR-binding peptide
  MOD_RES (2)..(4): Xaa is C or S
AXAXELHEELRNSLQELKPKKRVYEYYLVTLPE

SEQ ID NO: 76518 - protein, 40 aa, Artificial Sequence; identical to SEQ ID NO: 28340
  Cyclic GFR-binding peptide
  MOD_RES (1)..(3)..(40): Xaa is C or S

SEQ ID NO: 76519 - protein, 35 aa, Artificial Sequence; identical to SEQ ID NO: 28342
  Cyclic GFR-binding peptide
  MOD_RES (2)..(4): Xaa is C or S

SEQ ID NO: 76520 - protein, 41 aa, Artificial Sequence; identical to SEQ ID NO: 28346
  Cyclic GFR-binding peptide
  MOD_RES (1)..(3)..(35)..(36): Xaa is C or S

SEQ ID NO: 76521 - protein, 28 aa, Artificial Sequence
  Cyclic GFR-binding peptide
VIMVQVEKVKPKRGVVKAIKVSRLAQPV

SEQ ID NO: 76522 - protein, 37 aa, Artificial Sequence; identical to SEQ ID NO: 28348
  Cyclic GFR-binding peptide
  MOD_RES (2)..(4)..(36): Xaa is C or S

SEQ ID NO: 76523 - protein, 35 aa, Artificial Sequence
  Cyclic GFR-binding peptide
  MOD_RES (29)..(30): Xaa is C or S
VMNVQVEKIVNSSDDVKAVKVSRLKTPAXXPKPVY

SEQ ID NO: 76524 - protein, 32 aa, Artificial Sequence
  Cyclic GFR-binding peptide
  MOD_RES (2)..(2): Xaa is C or S
GXGEVVMEVTAKKVVKDYEDIKRMQVPRLETP

SEQ ID NO: 76525 - protein, 35 aa, Artificial Sequence
  Cyclic GFR-binding peptide
  MOD_RES (34)..(34): Xaa is C or S
EELRNSLQELKPKKRVYEYYLVTLPEHHVRSPQXK

SEQ ID NO: 76526 - protein, 31 aa, Artificial Sequence
  Cyclic GFR-binding peptide
  MOD_RES (1)..(3): Xaa is C or S
XEXKNHQLFNSLQEHQGQHPKIRYYLMTLPE

SEQ ID NO: 76527 - protein, 32 aa, Artificial Sequence
  Cyclic GFR-binding peptide
  MOD_RES (2)..(4): Xaa is C or S
SXKXSKVVMSMEGIVKPTRGVMIQITINSLDQ

SEQ ID NO: 76528 - protein, 30 aa, Artificial Sequence
  Cyclic GFR-binding peptide
  MOD_RES (1)..(3): Xaa is C or S
XKXSRVIMVQVEKVKPKRGVVKAIKVSRLA

SEQ ID NO: 76529 - protein, 38 aa, Artificial Sequence; identical to SEQ ID NO: 28356
  Cyclic GFR-binding peptide
  MOD_RES (34)..(34): Xaa is C or S

SEQ ID NO: 76530 - protein, 36 aa, Artificial Sequence; identical to SEQ ID NO: 28358
  Cyclic GFR-binding peptide
  MOD_RES (35)..(35): Xaa is C or S

SEQ ID NO: 76531 - protein, 30 aa, Artificial Sequence
  Cyclic GFR-binding peptide
  MOD_RES (26)..(27): Xaa is C or S
VQVEKVKPKRGVVKAIKVSRLAQPVXXPAA

SEQ ID NO: 76532 - protein, 27 aa, Artificial Sequence
  Cyclic GFR-binding peptide
  MOD_RES (26)..(27): Xaa is C or S
VQVEKVVKDYEDVKAMKVSRLETPVXX

SEQ ID NO: 76533 - protein, 25 aa, Artificial Sequence
  Cyclic GFR-binding peptide
MSMEGIVKPTRGVMIQITINSLDQP

SEQ ID NO: 76534 - protein, 28 aa, Artificial Sequence
  Cyclic GFR-binding peptide
  MOD_RES (1)..(1): Xaa is C or S
XSKVVMVQVEKVKPTRGVVKAIKVSRLD

SEQ ID NO: 76535 - protein, 30 aa, Artificial Sequence
  Cyclic GFR-binding peptide
  MOD_RES (1)..(1): Xaa is C or S
XSKVIMVQVEKIKPTKGIVKAIKVSRLDQS

SEQ ID NO: 76536 - protein, 36 aa, Artificial Sequence; identical to SEQ ID NO: 28362
  Cyclic GFR-binding peptide
  MOD_RES (2)..(2): Xaa is C or S

SEQ ID NO: 76537 - protein, 30 aa, Artificial Sequence; identical to SEQ ID NO: 28365
  Cyclic GFR-binding peptide

SEQ ID NO: 76538 - protein, 29 aa, Artificial Sequence
  Cyclic GFR-binding peptide
NSLQELKPKKRVYEYYLVTLPEHHVRSPQ

SEQ ID NO: 76539 - protein, 39 aa, Artificial Sequence; identical to SEQ ID NO: 28372
  Cyclic GFR-binding peptide
  MOD_RES (2)..(33)..(34): Xaa is C or S

SEQ ID NO: 76540 - protein, 27 aa, Artificial Sequence
  Cyclic GFR-binding peptide
EELRNSLQELKPKKRVYEYYLVTLPEH

SEQ ID NO: 76541 - protein, 31 aa, Artificial Sequence
  Cyclic GFR-binding peptide
  MOD_RES (30)..(31): Xaa is C or S
VVMEVQVEKVVKDYEDVKAMKVSRLETPVXX

SEQ ID NO: 76542 - protein, 28 aa, Artificial Sequence
  Cyclic GFR-binding peptide
DELTNSLQEFIPKKRVIEYYLVTLPELQ

SEQ ID NO: 76543 - protein, 21 aa, Artificial Sequence
  Cyclic GFR-binding peptide
NVTAKKIVNSSDDIKRVQVPR

SEQ ID NO: 76544 - protein, 28 aa, Artificial Sequence
  Cyclic GFR-binding peptide
  MOD_RES (26)..(27): Xaa is C or S
VQVEKVVKDYEDVKAMKVSRLETPVXXA

SEQ ID NO: 76545 - protein, 40 aa, Artificial Sequence; identical to SEQ ID NO: 28379
  Cyclic GFR-binding peptide
  MOD_RES (2)..(4)..(36): Xaa is C or S

SEQ ID NO: 76546 - protein, 27 aa, Artificial Sequence
  Cyclic GFR-binding peptide
GEVVMDVTAKKVVKENEDIKRMQVPRL

SEQ ID NO: 76547 - protein, 40 aa, Artificial Sequence; identical to SEQ ID NO: 28383
  Cyclic GFR-binding peptide
  MOD_RES (1)..(35): Xaa is C or S

SEQ ID NO: 76548 - protein, 31 aa, Artificial Sequence
  Cyclic GFR-binding peptide
  MOD_RES (27)..(28): Xaa is C or S
NVQVEKIVNSSDDVKAVKVSRLQTPAXXPKP

SEQ ID NO: 76549 - protein, 31 aa, Artificial Sequence
  Cyclic GFR-binding peptide
  MOD_RES (26)..(27): Xaa is C or S
VQVEKVKPKRGVVKAIKVSRLAQPVXXPAAS

SEQ ID NO: 76550 - protein, 34 aa, Artificial Sequence
  Cyclic GFR-binding peptide
  MOD_RES (30)..(31): Xaa is C or S
KVVMVQVEKVKPTRGVVKAIKVSRLDQPVXXPSA

SEQ ID NO: 76551 - protein, 23 aa, Artificial Sequence
  Cyclic GFR-binding peptide
NSLQEFIPKKRVIEYYLVTLPEL

SEQ ID NO: 76552 - protein, 37 aa, Artificial Sequence; identical to SEQ ID NO: 28389
  Cyclic GFR-binding peptide
  MOD_RES (2)..(33)..(34): Xaa is C or S

SEQ ID NO: 76553 - protein, 20 aa, Artificial Sequence
  Cyclic GFR-binding peptide
VQVEKIVNSSDDVKAVKVSR

SEQ ID NO: 76554 - protein, 42 aa, Artificial Sequence; identical to SEQ ID NO: 28390
  Cyclic GFR-binding peptide
  MOD_RES (2)..(4)..(36)..(37): Xaa is C or S

SEQ ID NO: 76555 - protein, 35 aa, Artificial Sequence; identical to SEQ ID NO: 28393
  Cyclic GFR-binding peptide
  MOD_RES (31)..(32): Xaa is C or S

SEQ ID NO: 76556 - protein, 26 aa, Artificial Sequence
  Cyclic GFR-binding peptide
VIMVTAKKVKPKRGVIKRIQVPRLAQ

SEQ ID NO: 76557 - protein, 41 aa, Artificial Sequence; identical to SEQ ID NO: 28398
  Cyclic GFR-binding peptide
  MOD_RES (2)..(4)..(36)..(37): Xaa is C or S

SEQ ID NO: 76558 - protein, 33 aa, Artificial Sequence; identical to SEQ ID NO: 28399
  Cyclic GFR-binding peptide
  MOD_RES (32)..(33): Xaa is C or S

SEQ ID NO: 76559 - protein, 30 aa, Artificial Sequence
  Cyclic GFR-binding peptide
NHQLFNSLQEHQGQHPKIRYYVMPLPEEET

SEQ ID NO: 76560 - protein, 35 aa, Artificial Sequence; identical to SEQ ID NO: 28400
  Cyclic GFR-binding peptide
  MOD_RES (2)..(34)..(35): Xaa is C or S

SEQ ID NO: 76561 - protein, 33 aa, Artificial Sequence; identical to SEQ ID NO: 28401
  Cyclic GFR-binding peptide
  MOD_RES (1)..(32)..(33): Xaa is C or S

SEQ ID NO: 76562 - protein, 33 aa, Artificial Sequence
  Cyclic GFR-binding peptide
  MOD_RES (27)..(28): Xaa is C or S
NVQVEKIVNSSDDVKAVKVSRLKTPAXXPKPVY

SEQ ID NO: 76563 - protein, 37 aa, Artificial Sequence; identical to SEQ ID NO: 28404
  Cyclic GFR-binding peptide
  MOD_RES (1)..(1): Xaa is C or S

SEQ ID NO: 76564 - protein, 39 aa, Artificial Sequence; identical to SEQ ID NO: 28405
  Cyclic GFR-binding peptide
  MOD_RES (1)..(3)..(35)..(36): Xaa is C or S

SEQ ID NO: 76565 - protein, 37 aa, Artificial Sequence; identical to SEQ ID NO: 28408
  Cyclic GFR-binding peptide
  MOD_RES (2)..(34): Xaa is C or S

SEQ ID NO: 76566 - protein, 35 aa, Artificial Sequence; identical to SEQ ID NO: 28410
  Cyclic GFR-binding peptide

SEQ ID NO: 76567 - protein, 38 aa, Artificial Sequence; identical to SEQ ID NO: 28411
  Cyclic GFR-binding peptide
  MOD_RES (1)..(3)..(35)..(36): Xaa is C or S

SEQ ID NO: 76568 - protein, 28 aa, Artificial Sequence
  Cyclic GFR-binding peptide
NHQLFNSLQEHQGQHPKIRYYVMPLPEE

SEQ ID NO: 76569 - protein, 25 aa, Artificial Sequence
  Cyclic GFR-binding peptide
MEVQVEKVVKDYEDVKAMKVSRLET

SEQ ID NO: 76570 - protein, 34 aa, Artificial Sequence; identical to SEQ ID NO: 28415
  Cyclic GFR-binding peptide
  MOD_RES (1)..(3): Xaa is C or S

SEQ ID NO: 76571 - protein, 25 aa, Artificial Sequence
  Cyclic GFR-binding peptide
MVTAKKIKPTKGIIKRIQVPRLDQS

SEQ ID NO: 76572 - protein, 29 aa, Artificial Sequence
  Cyclic GFR-binding peptide
  MOD_RES (27)..(28): Xaa is C or S
DSMEGIVVKENEDMIQMTINSLETPVXXA

SEQ ID NO: 76573 - protein, 30 aa, Artificial Sequence
  Cyclic GFR-binding peptide
  MOD_RES (27)..(28): Xaa is C or S
DVTAKKVVKENEDIKRMQVPRLETPVXXAK

SEQ ID NO: 76574 - protein, 38 aa, Artificial Sequence; identical to SEQ ID NO: 28416
  Cyclic GFR-binding peptide
  MOD_RES (1)..(3)..(35)..(36): Xaa is C or S

SEQ ID NO: 76575 - protein, 30 aa, Artificial Sequence
  Cyclic GFR-binding peptide
  MOD_RES (26)..(27): Xaa is C or S
VTAKKVVKENEDIKRMQVPRLETPVXXAKP

SEQ ID NO: 76576 - protein, 31 aa, Artificial Sequence
  Cyclic GFR-binding peptide
  MOD_RES (1)..(3): Xaa is C or S
XGXSRVVMNVTAKKIVNSSDDIKRVQVPRLK

SEQ ID NO: 76577 - protein, 22 aa, Artificial Sequence
  Cyclic GFR-binding peptide
VTAKKVKPTRGVIKRIQVPRLD

SEQ ID NO: 76578 - protein, 35 aa, Artificial Sequence
  Cyclic GFR-binding peptide
  MOD_RES (30)..(31): Xaa is C or S
KVIMSMEGIIKPTKGIMIQITINSLDQSVXXPSAS

SEQ ID NO: 76579 - protein, 30 aa, Artificial Sequence
  Cyclic GFR-binding peptide
  MOD_RES (27)..(28): Xaa is C or S
MVQVEKVKPKRGVVKAIKVSRLAQPVXXPA

SEQ ID NO: 76580 - protein, 34 aa, Artificial Sequence
  Cyclic GFR-binding peptide
  MOD_RES (29)..(30): Xaa is C or S
VVMSMEGIVKPTRGVMIQITINSLDQPVXXPSAS

SEQ ID NO: 76581 - protein, 34 aa, Artificial Sequence
  Cyclic GFR-binding peptide
  MOD_RES (32)..(32): Xaa is C or S
HQLFNSLQEHQGQHPKIRYYVMPLPEEETPVXEL

SEQ ID NO: 76582 - protein, 33 aa, Artificial Sequence
  Cyclic GFR-binding peptide
  MOD_RES (30)..(30): Xaa is C or S
VVMNVTAKKIVNSSDDIKRVQVPRLKTPAXTPK

SEQ ID NO: 76583 - protein, 35 aa, Artificial Sequence; identical to SEQ ID NO: 28425
  Cyclic GFR-binding peptide
  MOD_RES (2)..(34)..(35): Xaa is C or S

SEQ ID NO: 76584 - protein, 42 aa, Artificial Sequence; identical to SEQ ID NO: 28426
  Cyclic GFR-binding peptide
  MOD_RES (2)..(39): Xaa is C or S

SEQ ID NO: 76585 - protein, 24 aa, Artificial Sequence
  Cyclic GFR-binding peptide
VIMVTAKKVKPKRGVIKRIQVPRL

SEQ ID NO: 76586 - protein, 31 aa, Artificial Sequence
  Cyclic GFR-binding peptide
  MOD_RES (26)..(27): Xaa is C or S
VTAKKVVKENEDIKRMQVPRLETPVXXAKPI

SEQ ID NO: 76587 - protein, 23 aa, Artificial Sequence
  Cyclic GFR-binding peptide
VIMSMEGIIKPTKGIMIQITINS

SEQ ID NO: 76588 - protein, 22 aa, Artificial Sequence
  Cyclic GFR-binding peptide
VTAKKVVKDYEDIKRMQVPRLE

SEQ ID NO: 76589 - protein, 34 aa, Artificial Sequence
  Cyclic GFR-binding peptide
  MOD_RES (30)..(31): Xaa is C or S
RVIMVTAKKVKPKRGVIKRIQVPRLAQPVXXPAA

SEQ ID NO: 76590 - protein, 35 aa, Artificial Sequence
  Cyclic GFR-binding peptide
  MOD_RES (29)..(30): Xaa is C or S
VMNSMEGIIVNSSDDMIQVTINSLKTPAXXPKPVY

SEQ ID NO: 76591 - protein, 32 aa, Artificial Sequence
  Cyclic GFR-binding peptide
  MOD_RES (26)..(27): Xaa is C or S
VQVEKVKPTRGVVKAIKVSRLDQPVXXPSASA

SEQ ID NO: 76592 - protein, 30 aa, Artificial Sequence
  Cyclic GFR-binding peptide
  MOD_RES (30)..(30): Xaa is C or S
KVIMVQVEKIKPTKGIVKAIKVSRLDQSVX

SEQ ID NO: 76593 - protein, 33 aa, Artificial Sequence
  Cyclic GFR-binding peptide
  MOD_RES (2)..(4): Xaa is C or S
RXGXGEVVMEVTAKKVVKDYEDIKRMQVPRLET

SEQ ID NO: 76594 - protein, 35 aa, Artificial Sequence; identical to SEQ ID NO: 28441
  Cyclic GFR-binding peptide
  MOD_RES (1)..(3)..(34)..(35): Xaa is C or S

SEQ ID NO: 76595 - protein, 34 aa, Artificial Sequence
  Cyclic GFR-binding peptide
  MOD_RES (28)..(29): Xaa is C or S
IMSMEGIIKPTKGIMIQITINSLDQSVXXPSASA

SEQ ID NO: 76596 - protein, 31 aa, Artificial Sequence; identical to SEQ ID NO: 28449
  Cyclic GFR-binding peptide
  MOD_RES (31)..(31): Xaa is C or S

SEQ ID NO: 76597 - protein, 34 aa, Artificial Sequence; identical to SEQ ID NO: 28452
  Cyclic GFR-binding peptide
  MOD_RES (32)..(32): Xaa is C or S

SEQ ID NO: 76598 - protein, 26 aa, Artificial Sequence
  Cyclic GFR-binding peptide
NVQVEKIVNSSDDVKAVKVSRLKTPA

SEQ ID NO: 76599 - protein, 30 aa, Artificial Sequence
  Cyclic GFR-binding peptide
  MOD_RES (29)..(30): Xaa is C or S
VIMVTAKKVKPKRGVIKRIQVPRLAQPVXX

SEQ ID NO: 76600 - protein, 35 aa, Artificial Sequence; identical to SEQ ID NO: 28460
  Cyclic GFR-binding peptide
  MOD_RES (32)..(33): Xaa is C or S

SEQ ID NO: 76601 - protein, 37 aa, Artificial Sequence; identical to SEQ ID NO: 28461
  Cyclic GFR-binding peptide
  MOD_RES (1)..(32)..(33): Xaa is C or S

SEQ ID NO: 76602 - protein, 23 aa, Artificial Sequence
  Cyclic GFR-binding peptide
MVQVEKIKPTKGIVKAIKVSRLD

SEQ ID NO: 76603 - protein, 39 aa, Artificial Sequence; identical to SEQ ID NO: 28462
  Cyclic GFR-binding peptide
  MOD_RES (1)..(3)..(35)..(36): Xaa is C or S

SEQ ID NO: 76604 - protein, 33 aa, Artificial Sequence; identical to SEQ ID NO: 28463
  Cyclic GFR-binding peptide
  MOD_RES (32)..(33): Xaa is C or S

SEQ ID NO: 76605 - protein, 31 aa, Artificial Sequence
  Cyclic GFR-binding peptide
DELTNSLQEFIPKKRVIEYYVVPLPELQVQT

SEQ ID NO: 76606 - protein, 34 aa, Artificial Sequence; identical to SEQ ID NO: 28465
  Cyclic GFR-binding peptide
  MOD_RES (1)..(32)..(33): Xaa is C or S

SEQ ID NO: 76607 - protein, 23 aa, Artificial Sequence
  Cyclic GFR-binding peptide
VQVEKVVKENEDVKAMKVSRLET

SEQ ID NO: 76608 - protein, 30 aa, Artificial Sequence
  Cyclic GFR-binding peptide
TNSLQEFIPKKRVIEYYVVPLPELQVQTPR

SEQ ID NO: 76609 - protein, 37 aa, Artificial Sequence; identical to SEQ ID NO: 28467
  Cyclic GFR-binding peptide
  MOD_RES (1)..(3)..(34)..(35): Xaa is C or S

SEQ ID NO: 76610 - protein, 29 aa, Artificial Sequence
  Cyclic GFR-binding peptide
LTNSLQEFIPKKRVIEYYLVTLPELQVQT

SEQ ID NO: 76611 - protein, 32 aa, Artificial Sequence
  Cyclic GFR-binding peptide
  MOD_RES (30)..(31): Xaa is C or S
RVIMSMEGIVKPKRGVMIQITINSLAQPVXXP

SEQ ID NO: 76612 - protein, 22 aa, Artificial Sequence
  Cyclic GFR-binding peptide
IMSMEGIVKPKRGVMIQITINS

SEQ ID NO: 76613 - protein, 35 aa, Artificial Sequence; identical to SEQ ID NO: 28471
  Cyclic GFR-binding peptide
  MOD_RES (2)..(2): Xaa is C or S

SEQ ID NO: 76614 - protein, 30 aa, Artificial Sequence
  Cyclic GFR-binding peptide
  MOD_RES (2)..(4): Xaa is C or S
SXKXSKVIMVQVEKIKPTKGIVKAIKVSRL

SEQ ID NO: 76615 - protein, 31 aa, Artificial Sequence
  Cyclic GFR-binding peptide
  MOD_RES (2)..(4): Xaa is C or S
RXGXGEVVMEVTAKKVVKDYEDIKRMQVPRL

SEQ ID NO: 76616 - protein, 27 aa, Artificial Sequence
  Cyclic GFR-binding peptide
IMVQVEKVKPKRGVVKAIKVSRLAQPV

SEQ ID NO: 76617 - protein, 39 aa, Artificial Sequence; identical to SEQ ID NO: 28478
  Cyclic GFR-binding peptide
  MOD_RES (2)..(4)..(36): Xaa is C or S

SEQ ID NO: 76618 - protein, 36 aa, Artificial Sequence; identical to SEQ ID NO: 28483
  Cyclic GFR-binding peptide
  MOD_RES (31)..(32): Xaa is C or S

SEQ ID NO: 76619 - protein, 38 aa, Artificial Sequence; identical to SEQ ID NO: 28482
  Cyclic GFR-binding peptide
  MOD_RES (2)..(34): Xaa is C or S

SEQ ID NO: 76620 - protein, 39 aa, Artificial Sequence; identical to SEQ ID NO: 28486
  Cyclic GFR-binding peptide
  MOD_RES (34)..(34): Xaa is C or S

SEQ ID NO: 76621 - protein, 32 aa, Artificial Sequence; identical to SEQ ID NO: 28488
  Cyclic GFR-binding peptide
  MOD_RES (31)..(32): Xaa is C or S

SEQ ID NO: 76622 - protein, 32 aa, Artificial Sequence
  Cyclic GFR-binding peptide
  MOD_RES (1)..(3): Xaa is C or S
XAXELHEELRNSLQELKPKKRVYEYYLVTLPE

SEQ ID NO: 76623 - protein, 34 aa, Artificial Sequence; identical to SEQ ID NO: 25772
  Cyclic GFR-binding peptide
  MOD_RES (1)..(33)..(34): Xaa is C or S

SEQ ID NO: 76624 - protein, 28 aa, Artificial Sequence
  Cyclic GFR-binding peptide
  MOD_RES (26)..(27): Xaa is C or S
VTAKKVVKDYEDIKRMQVPRLETPVXXA

SEQ ID NO: 76625 - protein, 35 aa, Artificial Sequence; identical to SEQ ID NO: 25773
  Cyclic GFR-binding peptide
  MOD_RES (2)..(34)..(35): Xaa is C or S

SEQ ID NO: 76626 - protein, 39 aa, Artificial Sequence; identical to SEQ ID NO: 25775
  Cyclic GFR-binding peptide
  MOD_RES (1)..(3)..(35)..(36): Xaa is C or S

SEQ ID NO: 76627 - protein, 34 aa, Artificial Sequence; identical to SEQ ID NO: 25776
  Cyclic GFR-binding peptide
  MOD_RES (1)..(3)..(34): Xaa is C or S

SEQ ID NO: 76628 - protein, 30 aa, Artificial Sequence
  Cyclic GFR-binding peptide
  MOD_RES (28)..(29): Xaa is C or S
MNVTAKKIVNSSDDIKRVQVPRLQTPAXXP

SEQ ID NO: 76629 - protein, 38 aa, Artificial Sequence; identical to SEQ ID NO: 25778
  Cyclic GFR-binding peptide
  MOD_RES (2)..(4)..(36): Xaa is C or S

SEQ ID NO: 76630 - protein, 41 aa, Artificial Sequence; identical to SEQ ID NO: 25779
  Cyclic GFR-binding peptide
  MOD_RES (2)..(4)..(38): Xaa is C or S

SEQ ID NO: 76631 - protein, 38 aa, Artificial Sequence; identical to SEQ ID NO: 25782
  Cyclic GFR-binding peptide
  MOD_RES (1)..(3)..(37): Xaa is C or S

SEQ ID NO: 76632 - protein, 36 aa, Artificial Sequence; identical to SEQ ID NO: 25786
  Cyclic GFR-binding peptide
  MOD_RES (2)..(33)..(34): Xaa is C or S

SEQ ID NO: 76633 - protein, 24 aa, Artificial Sequence
  Cyclic GFR-binding peptide
VMVQVEKVKPTRGVVKAIKVSRLD

SEQ ID NO: 76634 - protein, 23 aa, Artificial Sequence
  Cyclic GFR-binding peptide
VVMVTAKKVKPTRGVIKRIQVPR

SEQ ID NO: 76635 - protein, 33 aa, Artificial Sequence; identical to SEQ ID NO: 25796
  Cyclic GFR-binding peptide
  MOD_RES (1)..(32)..(33): Xaa is C or S

SEQ ID NO: 76636 - protein, 39 aa, Artificial Sequence; identical to SEQ ID NO: 25797
  Cyclic GFR-binding peptide
  MOD_RES (2)..(33)..(34): Xaa is C or S

SEQ ID NO: 76637 - protein, 39 aa, Artificial Sequence; identical to SEQ ID NO: 25799
  Cyclic GFR-binding peptide
  MOD_RES (2)..(4)..(36)..(37): Xaa is C or S

SEQ ID NO: 76638 - protein, 27 aa, Artificial Sequence
  Cyclic GFR-binding peptide
NSLQEHQGQHPKIRYYVMPLPEEETPV

SEQ ID NO: 76639 - protein, 25 aa, Artificial Sequence
  Cyclic GFR-binding peptide
EVVMDVTAKKVVKENEDIKRMQVPR

SEQ ID NO: 76640 - protein, 29 aa, Artificial Sequence
  Cyclic GFR-binding peptide
VVMEVQVEKVVKDYEDVKAMKVSRLETPV

SEQ ID NO: 76641 - protein, 31 aa, Artificial Sequence; identical to SEQ ID NO: 25801
  Cyclic GFR-binding peptide
  MOD_RES (31)..(31): Xaa is C or S

SEQ ID NO: 76642 - protein, 33 aa, Artificial Sequence; identical to SEQ ID NO: 25804
  Cyclic GFR-binding peptide
  MOD_RES (1)..(33): Xaa is C or S

SEQ ID NO: 76643 - protein, 35 aa, Artificial Sequence
  Cyclic GFR-binding peptide
  MOD_RES (29)..(29): Xaa is C or S
VMNSMEGIIVNSSDDMIQVTINSLKTPAXTPKTVH

SEQ ID NO: 76644 - protein, 32 aa, Artificial Sequence
  Cyclic GFR-binding peptide
  MOD_RES (1)..(3): Xaa is C or S
XGXSRVVMNVQVEKIVNSSDDVKAVKVSRLKT

SEQ ID NO: 76645 - protein, 31 aa, Artificial Sequence
  Cyclic GFR-binding peptide
  MOD_RES (30)..(31): Xaa is C or S
VVMNSMEGIIVNSSDDMIQVTINSLKTPAXX

SEQ ID NO: 76646 - protein, 36 aa, Artificial Sequence; identical to SEQ ID NO: 25810
  Cyclic GFR-binding peptide
  MOD_RES (32)..(33): Xaa is C or S

SEQ ID NO: 76647 - protein, 31 aa, Artificial Sequence
  Cyclic GFR-binding peptide
  MOD_RES (1)..(3): Xaa is C or S
XKXSKVVMVQVEKVKPTRGVVKAIKVSRLDQ

SEQ ID NO: 76648 - protein, 33 aa, Artificial Sequence
  Cyclic GFR-binding peptide
  MOD_RES (1)..(3): Xaa is C or S
XGXARVVMNVTAKKIVNSSDDIKRVQVPRLQTP

SEQ ID NO: 76649 - protein, 29 aa, Artificial Sequence
  Cyclic GFR-binding peptide
  MOD_RES (29)..(29): Xaa is C or S
VIMVTAKKVKPKRGVIKRIQVPRLAQPVX

SEQ ID NO: 76650 - protein, 33 aa, Artificial Sequence
  Cyclic GFR-binding peptide
DELTNSLQEFIPKKRVIEYYVVPLPELQVQTPR

SEQ ID NO: 76651 - protein, 33 aa, Artificial Sequence; identical to SEQ ID NO: 25818
  Cyclic GFR-binding peptide
  MOD_RES (1)..(3): Xaa is C or S

SEQ ID NO: 76652 - protein, 40 aa, Artificial Sequence; identical to SEQ ID NO: 25822
  Cyclic GFR-binding peptide
  MOD_RES (1)..(3)..(37): Xaa is C or S

SEQ ID NO: 76653 - protein, 29 aa, Artificial Sequence
  Cyclic GFR-binding peptide
KNHQLFNSLQEHQGQHPKIRYYVMPLPEE

SEQ ID NO: 76654 - protein, 35 aa, Artificial Sequence; identical to SEQ ID NO: 25824
  Cyclic GFR-binding peptide
  MOD_RES (1)..(3)..(34)..(35): Xaa is C or S

SEQ ID NO: 76655 - protein, 29 aa, Artificial Sequence
  Cyclic GFR-binding peptide
  MOD_RES (27)..(28): Xaa is C or S
EVTAKKVVKDYEDIKRMQVPRLETPVXXA

SEQ ID NO: 76656 - protein, 22 aa, Artificial Sequence
  Cyclic GFR-binding peptide
VMSMEGIVKPTRGVMIQITINS

SEQ ID NO: 76657 - protein, 21 aa, Artificial Sequence
  Cyclic GFR-binding peptide
VTAKKVKPKRGVIKRIQVPRL

SEQ ID NO: 76658 - protein, 29 aa, Artificial Sequence
  Cyclic GFR-binding peptide
SRVVMNVQVEKIVNSSDDVKAVKVSRLKT

SEQ ID NO: 76659 - protein, 34 aa, Artificial Sequence; identical to SEQ ID NO: 25828
  Cyclic GFR-binding peptide
  MOD_RES (32)..(33): Xaa is C or S

SEQ ID NO: 76660 - protein, 25 aa, Artificial Sequence
  Cyclic GFR-binding peptide
LTNSLQEFIPKKRVIEYYLVTLPEL

SEQ ID NO: 76661 - protein, 37 aa, Artificial Sequence; identical to SEQ ID NO: 25831
  Cyclic GFR-binding peptide
  MOD_RES (2)..(36): Xaa is C or S

SEQ ID NO: 76662 - protein, 31 aa, Artificial Sequence
  Cyclic GFR-binding peptide
  MOD_RES (28)..(29): Xaa is C or S
MEVQVEKVVKDYEDVKAMKVSRLETPVXXAK

SEQ ID NO: 76663 - protein, 35 aa, Artificial Sequence
  Cyclic GFR-binding peptide
  MOD_RES (2)..(4): Xaa is C or S
RXEXKNHQLFNSLQEHQGQHPKIRYYVMPLPEEET

SEQ ID NO: 76664 - protein, 41 aa, Artificial Sequence; identical to SEQ ID NO: 25833
  Cyclic GFR-binding peptide
  MOD_RES (2)..(39): Xaa is C or S

SEQ ID NO: 76665 - protein, 38 aa, Artificial Sequence; identical to SEQ ID NO: 25835
  Cyclic GFR-binding peptide
  MOD_RES (1)..(32)..(33): Xaa is C or S

SEQ ID NO: 76666 - protein, 35 aa, Artificial Sequence
  Cyclic GFR-binding peptide
  MOD_RES (29)..(30): Xaa is C or S
VMNVQVEKIVNSSDDVKAVKVSRLQTPAXXPKPVT

SEQ ID NO: 76667 - protein, 28 aa, Artificial Sequence
  Cyclic GFR-binding peptide
  MOD_RES (26)..(26): Xaa is C or S
VQVEKIVNSSDDVKAVKVSRLKTPAXTP

SEQ ID NO: 76668 - protein, 31 aa, Artificial Sequence
  Cyclic GFR-binding peptide
  MOD_RES (1)..(1): Xaa is C or S
XKNHQLFNSLQEHQGQHPKIRYYVMPLPEEE

SEQ ID NO: 76669 - protein, 24 aa, Artificial Sequence
  Cyclic GFR-binding peptide
VIMVTAKKIKPTKGIIKRIQVPRL

SEQ ID NO: 76670 - protein, 40 aa, Artificial Sequence; identical to SEQ ID NO: 25837
  Cyclic GFR-binding peptide
  MOD_RES (2)..(4)..(36): Xaa is C or S

SEQ ID NO: 76671 - protein, 30 aa, Artificial Sequence
  Cyclic GFR-binding peptide
  MOD_RES (1)..(3): Xaa is C or S
XGXARVVMNVTAKKIVNSSDDIKRVQVPRL

SEQ ID NO: 76672 - protein, 44 aa, Artificial Sequence; identical to SEQ ID NO: 25840
  Cyclic GFR-binding peptide
  MOD_RES (1)..(3)..(40): Xaa is C or S

SEQ ID NO: 76673 - protein, 24 aa, Artificial Sequence
  Cyclic GFR-binding peptide
VQVEKIVNSSDDVKAVKVSRLKTP

SEQ ID NO: 76674 - protein, 40 aa, Artificial Sequence; identical to SEQ ID NO: 25844
  Cyclic GFR-binding peptide
  MOD_RES (2)..(34)..(35): Xaa is C or S

SEQ ID NO: 76675 - protein, 28 aa, Artificial Sequence
  Cyclic GFR-binding peptide
  MOD_RES (28)..(28): Xaa is C or S
VMVTAKKVKPTRGVIKRIQVPRLDQPVX

SEQ ID NO: 76676 - protein, 31 aa, Artificial Sequence
  Cyclic GFR-binding peptide
  MOD_RES (28)..(29): Xaa is C or S
MNVQVEKIVNSSDDVKAVKVSRLKTPAXXPK

SEQ ID NO: 76677 - protein, 37 aa, Artificial Sequence; identical to SEQ ID NO: 25847
  Cyclic GFR-binding peptide
  MOD_RES (2)..(4)..(36): Xaa is C or S

SEQ ID NO: 76678 - protein, 31 aa, Artificial Sequence
  Cyclic GFR-binding peptide
  MOD_RES (30)..(31): Xaa is C or S
VVMNVQVEKIVNSSDDVKAVKVSRLQTPAXX

SEQ ID NO: 76679 - protein, 31 aa, Artificial Sequence
  Cyclic GFR-binding peptide
  MOD_RES (28)..(29): Xaa is C or S
IMSMEGIIKPTKGIMIQITINSLDQSVXXPS

SEQ ID NO: 76680 - protein, 35 aa, Artificial Sequence; identical to SEQ ID NO: 25850
  Cyclic GFR-binding peptide
  MOD_RES (2)..(4)..(35): Xaa is C or S

SEQ ID NO: 76681 - protein, 30 aa, Artificial Sequence
  Cyclic GFR-binding peptide
  MOD_RES (26)..(27): Xaa is C or S
VTAKKIVNSSDDIKRVQVPRLKTPAXXPKP

SEQ ID NO: 76682 - protein, 26 aa, Artificial Sequence
  Cyclic GFR-binding peptide
  MOD_RES (1)..(1): Xaa is C or S
XSKVIMVTAKKIKPTKGIIKRIQVPR

SEQ ID NO: 76683 - protein, 33 aa, Artificial Sequence
  Cyclic GFR-binding peptide
  MOD_RES (32)..(32): Xaa is C or S
LTNSLQEFIPKKRVIEYYLVTLPELQVQTPRXQ

SEQ ID NO: 76684 - protein, 37 aa, Artificial Sequence; identical to SEQ ID NO: 25851
  Cyclic GFR-binding peptide
  MOD_RES (2)..(33)..(34): Xaa is C or S

SEQ ID NO: 76685 - protein, 32 aa, Artificial Sequence; identical to SEQ ID NO: 25853
  Cyclic GFR-binding peptide
  MOD_RES (32)..(32): Xaa is C or S

SEQ ID NO: 76686 - protein, 40 aa, Artificial Sequence; identical to SEQ ID NO: 25854
  Cyclic GFR-binding peptide
  MOD_RES (1)..(3)..(40): Xaa is C or S

SEQ ID NO: 76687 - protein, 28 aa, Artificial Sequence
  Cyclic GFR-binding peptide
NHQLFNSLQEHQGQHPKIRYYLMTLPEE

SEQ ID NO: 76688 - protein, 37 aa, Artificial Sequence; identical to SEQ ID NO: 25856
  Cyclic GFR-binding peptide
  MOD_RES (37)..(37): Xaa is C or S

SEQ ID NO: 76689 - protein, 22 aa, Artificial Sequence
  Cyclic GFR-binding peptide
SMEGIVVKENEDMIQMTINSLE

SEQ ID NO: 76690 - protein, 31 aa, Artificial Sequence; identical to SEQ ID NO: 25860
  Cyclic GFR-binding peptide

SEQ ID NO: 76691 - protein, 32 aa, Artificial Sequence
  Cyclic GFR-binding peptide
  MOD_RES (29)..(30): Xaa is C or S
VMEVTAKKVVKDYEDIKRMQVPRLETPVXXAK

SEQ ID NO: 76692 - protein, 42 aa, Artificial Sequence; identical to SEQ ID NO: 25861
  Cyclic GFR-binding peptide
  MOD_RES (2)..(4)..(38): Xaa is C or S

SEQ ID NO: 76693 - protein, 29 aa, Artificial Sequence
  Cyclic GFR-binding peptide
LRNSLQELKPKKRVYEYYVVPLPEHHVRS

SEQ ID NO: 76694 - protein, 30 aa, Artificial Sequence
  Cyclic GFR-binding peptide
  MOD_RES (28)..(29): Xaa is C or S
IMVTAKKVKPKRGVIKRIQVPRLAQPVXXP

SEQ ID NO: 76695 - protein, 28 aa, Artificial Sequence
  Cyclic GFR-binding peptide
SKVIMVQVEKIKPTKGIVKAIKVSRLDQ

SEQ ID NO: 76696 - protein, 29 aa, Artificial Sequence
  Cyclic GFR-binding peptide
  MOD_RES (1)..(3): Xaa is C or S
XGXSRVVMNSMEGIIVNSSDDMIQVTINS

SEQ ID NO: 76697 - protein, 35 aa, Artificial Sequence
  Cyclic GFR-binding peptide
  MOD_RES (29)..(30): Xaa is C or S
VVMSMEGIVKPTRGVMIQITINSLDQPVXXPSASA

SEQ ID NO: 76698 - protein, 29 aa, Artificial Sequence
  Cyclic GFR-binding peptide
DELTNSLQEFIPKKRVIEYYVVPLPELQV

SEQ ID NO: 76699 - protein, 28 aa, Artificial Sequence
  Cyclic GFR-binding peptide
SKVIMSMEGIIKPTKGIMIQITINSLDQ

SEQ ID NO: 76700 - protein, 26 aa, Artificial Sequence
  Cyclic GFR-binding peptide
  MOD_RES (26)..(26): Xaa is C or S
SMEGIVKPTRGVMIQITINSLDQPVX

SEQ ID NO: 76701 - protein, 31 aa, Artificial Sequence
  Cyclic GFR-binding peptide
  MOD_RES (1)..(3): Xaa is C or S
XGXSRVVMNSMEGIIVNSSDDMIQVTINSLK

SEQ ID NO: 76702 - protein, 26 aa, Artificial Sequence
  Cyclic GFR-binding peptide
ARVVMNVTAKKIVNSSDDIKRVQVPR

SEQ ID NO: 76703 - protein, 40 aa, Artificial Sequence; identical to SEQ ID NO: 25871
  Cyclic GFR-binding peptide
  MOD_RES (2)..(34)..(35): Xaa is C or S

SEQ ID NO: 76704 - protein, 31 aa, Artificial Sequence
  Cyclic GFR-binding peptide
  MOD_RES (27)..(27): Xaa is C or S
NVQVEKIVNSSDDVKAVKVSRLKTPAXTPKT

SEQ ID NO: 76705 - protein, 34 aa, Artificial Sequence; identical to SEQ ID NO: 25874
  Cyclic GFR-binding peptide
  MOD_RES (31)..(32): Xaa is C or S

SEQ ID NO: 76706 - protein, 26 aa, Artificial Sequence
  Cyclic GFR-binding peptide
SRVVMNVTAKKIVNSSDDIKRVQVPR

SEQ ID NO: 76707 - protein, 32 aa, Artificial Sequence; identical to SEQ ID NO: 25879
  Cyclic GFR-binding peptide
  MOD_RES (31)..(32): Xaa is C or S

SEQ ID NO: 76708 - protein, 33 aa, Artificial Sequence
  Cyclic GFR-binding peptide
  MOD_RES (2)..(4): Xaa is C or S
SXKXSRVIMVQVEKVKPKRGVVKAIKVSRLAQP

SEQ ID NO: 76709 - protein, 34 aa, Artificial Sequence; identical to SEQ ID NO: 25882
  Cyclic GFR-binding peptide
  MOD_RES (2)..(33)..(34): Xaa is C or S

SEQ ID NO: 76710 - protein, 25 aa, Artificial Sequence
  Cyclic GFR-binding peptide
EVVMEVQVEKVVKDYEDVKAMKVSR

SEQ ID NO: 76711 - protein, 39 aa, Artificial Sequence; identical to SEQ ID NO: 25893
  Cyclic GFR-binding peptide
  MOD_RES (1)..(35): Xaa is C or S

SEQ ID NO: 76712 - protein, 33 aa, Artificial Sequence
  Cyclic GFR-binding peptide
  MOD_RES (31)..(31): Xaa is C or S
RNSLQELKPKKRVYEYYVVPLPEHHVRSPQXKV

SEQ ID NO: 76713 - protein, 30 aa, Artificial Sequence
  Cyclic GFR-binding peptide
  MOD_RES (29)..(29): Xaa is C or S
VMNVTAKKIVNSSDDIKRVQVPRLKTPAXT

SEQ ID NO: 76714 - protein, 41 aa, Artificial Sequence; identical to SEQ ID NO: 25895
  Cyclic GFR-binding peptide
  MOD_RES (1)..(3)..(40): Xaa is C or S

SEQ ID NO: 76715 - protein, 40 aa, Artificial Sequence; identical to SEQ ID NO: 25896
  Cyclic GFR-binding peptide
  MOD_RES (1)..(3)..(35): Xaa is C or S

SEQ ID NO: 76716 - protein, 31 aa, Artificial Sequence
  Cyclic GFR-binding peptide
  MOD_RES (2)..(2): Xaa is C or S
GXGEVVMDSMEGIVVKENEDMIQMTINSLET

SEQ ID NO: 76717 - protein, 25 aa, Artificial Sequence
  Cyclic GFR-binding peptide
IMSMEGIVKPKRGVMIQITINSLAQ

SEQ ID NO: 76718 - protein, 32 aa, Artificial Sequence; identical to SEQ ID NO: 25906
  Cyclic GFR-binding peptide
  MOD_RES (31)..(32): Xaa is C or S

SEQ ID NO: 76719 - protein, 35 aa, Artificial Sequence; identical to SEQ ID NO: 25907
  Cyclic GFR-binding peptide
  MOD_RES (2)..(4): Xaa is C or S

SEQ ID NO: 76720 - protein, 35 aa, Artificial Sequence
  Cyclic GFR-binding peptide
  MOD_RES (29)..(29): Xaa is C or S
FNSLQEHQGQHPKIRYYVMPLPEEETPVXELGEDN

SEQ ID NO: 76721 - protein, 36 aa, Artificial Sequence
  Cyclic GFR-binding peptide
  MOD_RES (30)..(31): Xaa is C or S
RVIMVQVEKVKPKRGVVKAIKVSRLAQPVXXPAASA

SEQ ID NO: 76722 - protein, 35 aa, Artificial Sequence; identical to SEQ ID NO: 25915
  Cyclic GFR-binding peptide
  MOD_RES (2)..(34): Xaa is C or S

SEQ ID NO: 76723 - protein, 35 aa, Artificial Sequence
  Cyclic GFR-binding peptide
  MOD_RES (30)..(31): Xaa is C or S
RVIMVTAKKVKPKRGVIKRIQVPRLAQPVXXPAAS

SEQ ID NO: 76724 - protein, 27 aa, Artificial Sequence
  Cyclic GFR-binding peptide
VVMDVQVEKVVKENEDVKAMKVSRLET

SEQ ID NO: 76725 - protein, 38 aa, Artificial Sequence; identical to SEQ ID NO: 25926
  Cyclic GFR-binding peptide
  MOD_RES (33)..(33): Xaa is C or S

SEQ ID NO: 76726 - protein, 39 aa, Artificial Sequence; identical to SEQ ID NO: 25928
  Cyclic GFR-binding peptide
  MOD_RES (2)..(4)..(38): Xaa is C or S

SEQ ID NO: 76727 - protein, 22 aa, Artificial Sequence
  Cyclic GFR-binding peptide
VTAKKIVNSSDDIKRVQVPRLQ

SEQ ID NO: 76728 - protein, 32 aa, Artificial Sequence
  Cyclic GFR-binding peptide
  MOD_RES (27)..(28): Xaa is C or S
NVTAKKIVNSSDDIKRVQVPRLKTPAXXPKPV

SEQ ID NO: 76729 - protein, 23 aa, Artificial Sequence
  Cyclic GFR-binding peptide
NSLQEHQGQHPKIRYYVMPLPEE

SEQ ID NO: 76730 - protein, 31 aa, Artificial Sequence
  Cyclic GFR-binding peptide
  MOD_RES (1)..(3): Xaa is C or S
XKXSKVIMSMEGIIKPTKGIMIQITINSLDQ

SEQ ID NO: 76731 - protein, 33 aa, Artificial Sequence
  Cyclic GFR-binding peptide
  MOD_RES (2)..(2): Xaa is C or S
KXALHDELTNSLQEFIPKKRVIEYYLVTLPELQ

SEQ ID NO: 76732 - protein, 29 aa, Artificial Sequence
  Cyclic GFR-binding peptide
GEVVMDVQVEKVVKENEDVKAMKVSRLET

SEQ ID NO: 76733 - protein, 36 aa, Artificial Sequence; identical to SEQ ID NO: 25940
  Cyclic GFR-binding peptide
  MOD_RES (33)..(33): Xaa is C or S

SEQ ID NO: 76734 - protein, 35 aa, Artificial Sequence; identical to SEQ ID NO: 25941
  Cyclic GFR-binding peptide
  MOD_RES (2)..(33)..(34): Xaa is C or S

SEQ ID NO: 76735 - protein, 24 aa, Artificial Sequence
  Cyclic GFR-binding peptide
IMVTAKKVKPKRGVIKRIQVPRLA

SEQ ID NO: 76736 - protein, 28 aa, Artificial Sequence
  Cyclic GFR-binding peptide
  MOD_RES (2)..(2): Xaa is C or S
KXSKVIMVQVEKIKPTKGIVKAIKVSRL

SEQ ID NO: 76737 - protein, 25 aa, Artificial Sequence
  Cyclic GFR-binding peptide
NVTAKKIVNSSDDIKRVQVPRLQTP

SEQ ID NO: 76738 - protein, 33 aa, Artificial Sequence
  Cyclic GFR-binding peptide
  MOD_RES (28)..(29): Xaa is C or S
VMVQVEKVKPTRGVVKAIKVSRLDQPVXXPSAS

SEQ ID NO: 76739 - protein, 31 aa, Artificial Sequence
  Cyclic GFR-binding peptide
  MOD_RES (30)..(31): Xaa is C or S
KVIMVQVEKIKPTKGIVKAIKVSRLDQSVXX

SEQ ID NO: 76740 - protein, 37 aa, Artificial Sequence; identical to SEQ ID NO: 25946
  Cyclic GFR-binding peptide
  MOD_RES (31)..(32): Xaa is C or S

SEQ ID NO: 76741 - protein, 33 aa, Artificial Sequence; identical to SEQ ID NO: 25948
  Cyclic GFR-binding peptide
  MOD_RES (1)..(32)..(33): Xaa is C or S

SEQ ID NO: 76742 - protein, 28 aa, Artificial Sequence
  Cyclic GFR-binding peptide
  MOD_RES (28)..(28): Xaa is C or S
MNSMEGIIVNSSDDMIQVTINSLKTPAX

SEQ ID NO: 76743 - protein, 35 aa, Artificial Sequence
  Cyclic GFR-binding peptide
  MOD_RES (2)..(4): Xaa is C or S
RXEXKNHQLFNSLQEHQGQHPKIRYYLMTLPEEET

SEQ ID NO: 76744 - protein, 40 aa, Artificial Sequence; identical to SEQ ID NO: 25952
  Cyclic GFR-binding peptide
  MOD_RES (1)..(38): Xaa is C or S

SEQ ID NO: 76745 - protein, 31 aa, Artificial Sequence
  Cyclic GFR-binding peptide
  MOD_RES (1)..(1): Xaa is C or S
XGEVVMDVQVEKVVKENEDVKAMKVSRLETP

SEQ ID NO: 76746 - protein, 29 aa, Artificial Sequence
  Cyclic GFR-binding peptide
GEVVMDVTAKKVVKENEDIKRMQVPRLET

SEQ ID NO: 76747 - protein, 24 aa, Artificial Sequence
  Cyclic GFR-binding peptide
VVMESMEGIVVKDYEDMIQMTINS

SEQ ID NO: 76748 - protein, 29 aa, Artificial Sequence
  Cyclic GFR-binding peptide
  MOD_RES (27)..(28): Xaa is C or S
NVTAKKIVNSSDDIKRVQVPRLQTPAXXP

SEQ ID NO: 76749 - protein, 41 aa, Artificial Sequence; identical to SEQ ID NO: 25958
  Cyclic GFR-binding peptide
  MOD_RES (2)..(39): Xaa is C or S

SEQ ID NO: 76750 - protein, 25 aa, Artificial Sequence
  Cyclic GFR-binding peptide
NSLQEFIPKKRVIEYYVVPLPELQV

SEQ ID NO: 76751 - protein, 27 aa, Artificial Sequence
  Cyclic GFR-binding peptide
RVIMSMEGIVKPKRGVMIQITINSLAQ

SEQ ID NO: 76752 - protein, 31 aa, Artificial Sequence; identical to SEQ ID NO: 25971
  Cyclic GFR-binding peptide
  MOD_RES (31)..(31): Xaa is C or S

SEQ ID NO: 76753 - protein, 29 aa, Artificial Sequence
  Cyclic GFR-binding peptide
  MOD_RES (26)..(27): Xaa is C or S
VTAKKVKPTRGVIKRIQVPRLDQPVXXPS

SEQ ID NO: 76754 - protein, 34 aa, Artificial Sequence
  Cyclic GFR-binding peptide
  MOD_RES (30)..(31): Xaa is C or S
VVMEVQVEKVVKDYEDVKAMKVSRLETPVXXAKP

SEQ ID NO: 76755 - protein, 25 aa, Artificial Sequence
  Cyclic GFR-binding peptide
SKVIMSMEGIIKPTKGIMIQITINS

SEQ ID NO: 76756 - protein, 32 aa, Artificial Sequence
  Cyclic GFR-binding peptide
  MOD_RES (30)..(31): Xaa is C or S
KVVMSMEGIVKPTRGVMIQITINSLDQPVXXP

SEQ ID NO: 76757 - protein, 34 aa, Artificial Sequence
  Cyclic GFR-binding peptide
  MOD_RES (30)..(31): Xaa is C or S
RVIMVQVEKVKPKRGVVKAIKVSRLAQPVXXPAA

SEQ ID NO: 76758 - protein, 28 aa, Artificial Sequence
  Cyclic GFR-binding peptide
  MOD_RES (27)..(28): Xaa is C or S
MVQVEKIKPTKGIVKAIKVSRLDQSVXX

SEQ ID NO: 76759 - protein, 35 aa, Artificial Sequence; identical to SEQ ID NO: 25981
  Cyclic GFR-binding peptide
  MOD_RES (35)..(35): Xaa is C or S

SEQ ID NO: 76760 - protein, 26 aa, Artificial Sequence
  Cyclic GFR-binding peptide
RVVMNVTAKKIVNSSDDIKRVQVPRL

SEQ ID NO: 76761 - protein, 22 aa, Artificial Sequence
  Cyclic GFR-binding peptide
SMEGIVVKDYEDMIQMTINSLE

SEQ ID NO: 76762 - protein, 28 aa, Artificial Sequence
  Cyclic GFR-binding peptide
  MOD_RES (26)..(27): Xaa is C or S
SMEGIIVNSSDDMIQVTINSLQTPAXXP

SEQ ID NO: 76763 - protein, 31 aa, Artificial Sequence
  Cyclic GFR-binding peptide
  MOD_RES (2)..(4): Xaa is C or S
SXKXSRVIMVQVEKVKPKRGVVKAIKVSRLA

SEQ ID NO: 76764 - protein, 22 aa, Artificial Sequence
  Cyclic GFR-binding peptide
IMVTAKKVKPKRGVIKRIQVPR

SEQ ID NO: 76765 - protein, 32 aa, Artificial Sequence; identical to SEQ ID NO: 25991
  Cyclic GFR-binding peptide
  MOD_RES (2)..(2): Xaa is C or S

SEQ ID NO: 76766 - protein, 30 aa, Artificial Sequence
  Cyclic GFR-binding peptide
  MOD_RES (1)..(3): Xaa is C or S
XGXSRVVMNVQVEKIVNSSDDVKAVKVSRL

SEQ ID NO: 76767 - protein, 40 aa, Artificial Sequence; identical to SEQ ID NO: 25992
  Cyclic GFR-binding peptide
  MOD_RES (1)..(3)..(40): Xaa is C or S

SEQ ID NO: 76768 - protein, 38 aa, Artificial Sequence; identical to SEQ ID NO: 25993
  Cyclic GFR-binding peptide
  MOD_RES (1)..(33): Xaa is C or S

SEQ ID NO: 76769 - protein, 31 aa, Artificial Sequence
  Cyclic GFR-binding peptide
  MOD_RES (27)..(28): Xaa is C or S
EVTAKKVVKDYEDIKRMQVPRLETPVXXAKP

SEQ ID NO: 76770 - protein, 40 aa, Artificial Sequence; identical to SEQ ID NO: 25996
  Cyclic GFR-binding peptide
  MOD_RES (1)..(3)..(35)..(36): Xaa is C or S

SEQ ID NO: 76771 - protein, 38 aa, Artificial Sequence; identical to SEQ ID NO: 26005
  Cyclic GFR-binding peptide
  MOD_RES (2)..(4)..(36): Xaa is C or S

SEQ ID NO: 76772 - protein, 26 aa, Artificial Sequence
  Cyclic GFR-binding peptide
MEVQVEKVVKDYEDVKAMKVSRLETP

SEQ ID NO: 76773 - protein, 29 aa, Artificial Sequence
  Cyclic GFR-binding peptide
  MOD_RES (1)..(1): Xaa is C or S
XSKVIMVTAKKIKPTKGIIKRIQVPRLDQ

SEQ ID NO: 76774 - protein, 39 aa, Artificial Sequence; identical to SEQ ID NO: 26009
  Cyclic GFR-binding peptide
  MOD_RES (2)..(4)..(35)..(36): Xaa is C or S

SEQ ID NO: 76775 - protein, 36 aa, Artificial Sequence; identical to SEQ ID NO: 26010
  Cyclic GFR-binding peptide
  MOD_RES (2)..(34)..(35): Xaa is C or S

SEQ ID NO: 76776 - protein, 30 aa, Artificial Sequence
  Cyclic GFR-binding peptide
  MOD_RES (1)..(1): Xaa is C or S
XKNHQLFNSLQEHQGQHPKIRYYVMPLPEE

SEQ ID NO: 76777 - protein, 21 aa, Artificial Sequence
  Cyclic GFR-binding peptide
MVTAKKIKPTKGIIKRIQVPR

SEQ ID NO: 76778 - protein, 23 aa, Artificial Sequence
  Cyclic GFR-binding peptide
VIMSMEGIVKPKRGVMIQITINS

SEQ ID NO: 76779 - protein, 29 aa, Artificial Sequence
  Cyclic GFR-binding peptide
  MOD_RES (2)..(4): Xaa is C or S
SXKXSKVIMVTAKKIKPTKGIIKRIQVPR

SEQ ID NO: 76780 - protein, 39 aa, Artificial Sequence; identical to SEQ ID NO: 26013
  Cyclic GFR-binding peptide
  MOD_RES (2)..(34)..(35): Xaa is C or S

SEQ ID NO: 76781 - protein, 36 aa, Artificial Sequence
  Cyclic GFR-binding peptide
  MOD_RES (32)..(32): Xaa is C or S
LRNSLQELKPKKRVYEYYLVTLPEHHVRSPQXKVSS

SEQ ID NO: 76782 - protein, 29 aa, Artificial Sequence
  Cyclic GFR-binding peptide
LHDELTNSLQEFIPKKRVIEYYVVPLPEL

SEQ ID NO: 76783 - protein, 43 aa, Artificial Sequence; identical to SEQ ID NO: 26016
  Cyclic GFR-binding peptide
  MOD_RES (2)..(39): Xaa is C or S

SEQ ID NO: 76784 - protein, 25 aa, Artificial Sequence
  Cyclic GFR-binding peptide
SRVIMSMEGIVKPKRGVMIQITINS

SEQ ID NO: 76785 - protein, 37 aa, Artificial Sequence; identical to SEQ ID NO: 26018
  Cyclic GFR-binding peptide
  MOD_RES (2)..(4)..(36)..(37): Xaa is C or S

SEQ ID NO: 76786 - protein, 34 aa, Artificial Sequence; identical to SEQ ID NO: 26019
  Cyclic GFR-binding peptide
  MOD_RES (31)..(32): Xaa is C or S

SEQ ID NO: 76787 - protein, 35 aa, Artificial Sequence
  Cyclic GFR-binding peptide
  MOD_RES (29)..(30): Xaa is C or S
VVMVQVEKVKPTRGVVKAIKVSRLDQPVXXPSASA

SEQ ID NO: 76788 - protein, 27 aa, Artificial Sequence
  Cyclic GFR-binding peptide
  MOD_RES (1)..(1): Xaa is C or S
XSRVIMSMEGIVKPKRGVMIQITINSL

SEQ ID NO: 76789 - protein, 29 aa, Artificial Sequence
  Cyclic GFR-binding peptide
KVIMSMEGIIKPTKGIMIQITINSLDQSV

SEQ ID NO: 76790 - protein, 45 aa, Artificial Sequence; identical to SEQ ID NO: 26026
  Cyclic GFR-binding peptide
  MOD_RES (2)..(4)..(41): Xaa is C or S

SEQ ID NO: 76791 - protein, 34 aa, Artificial Sequence; identical to SEQ ID NO: 26028
  Cyclic GFR-binding peptide
  MOD_RES (2)..(4): Xaa is C or S

SEQ ID NO: 76792 - protein, 27 aa, Artificial Sequence
  Cyclic GFR-binding peptide
  MOD_RES (2)..(2): Xaa is C or S
KXSRVIMSMEGIVKPKRGVMIQITINS

SEQ ID NO: 76793 - protein, 30 aa, Artificial Sequence
  Cyclic GFR-binding peptide
  MOD_RES (26)..(27): Xaa is C or S
SMEGIIKPTKGIMIQITINSLDQSVXXPSA

SEQ ID NO: 76794 - protein, 39 aa, Artificial Sequence; identical to SEQ ID NO: 26030
  Cyclic GFR-binding peptide
  MOD_RES (2)..(4)..(36)..(37): Xaa is C or S

SEQ ID NO: 76795 - protein, 25 aa, Artificial Sequence
  Cyclic GFR-binding peptide
SRVIMVQVEKVKPKRGVVKAIKVSR

SEQ ID NO: 76796 - protein, 29 aa, Artificial Sequence
  Cyclic GFR-binding peptide
  MOD_RES (26)..(27): Xaa is C or S
VQVEKIKPTKGIVKAIKVSRLDQSVXXPS

SEQ ID NO: 76797 - protein, 36 aa, Artificial Sequence
  Cyclic GFR-binding peptide
  MOD_RES (30)..(31): Xaa is C or S
VVMNVTAKKIVNSSDDIKRVQVPRLKTPAXXPKPVY

SEQ ID NO: 76798 - protein, 31 aa, Artificial Sequence
  Cyclic GFR-binding peptide
  MOD_RES (29)..(29): Xaa is C or S
FNSLQEHQGQHPKIRYYVMPLPEEETPVXEL

SEQ ID NO: 76799 - protein, 22 aa, Artificial Sequence
  Cyclic GFR-binding peptide
SMEGIVKPTRGVMIQITINSLD

SEQ ID NO: 76800 - protein, 22 aa, Artificial Sequence
  Cyclic GFR-binding peptide
MDVTAKKVVKENEDIKRMQVPR

SEQ ID NO: 76801 - protein, 20 aa, Artificial Sequence
  Cyclic GFR-binding peptide
VQVEKIVNSSDDVKAVKVSR

SEQ ID NO: 76802 - protein, 26 aa, Artificial Sequence
  Cyclic GFR-binding peptide
KVIMVQVEKIKPTKGIVKAIKVSRLD

SEQ ID NO: 76803 - protein, 26 aa, Artificial Sequence
  Cyclic GFR-binding peptide
EELRNSLQELKPKKRVYEYYLVTLPE

SEQ ID NO: 76804 - protein, 39 aa, Artificial Sequence; identical to SEQ ID NO: 26040
  Cyclic GFR-binding peptide
  MOD_RES (2)..(4)..(35)..(36): Xaa is C or S

SEQ ID NO: 76805 - protein, 35 aa, Artificial Sequence; identical to SEQ ID NO: 26041
  Cyclic GFR-binding peptide
  MOD_RES (1)..(3)..(35): Xaa is C or S

SEQ ID NO: 76806 - protein, 28 aa, Artificial Sequence
  Cyclic GFR-binding peptide
EVVMEVTAKKVVKDYEDIKRMQVPRLET

SEQ ID NO: 76807 - protein, 37 aa, Artificial Sequence; identical to SEQ ID NO: 26046
  Cyclic GFR-binding peptide
  MOD_RES (1)..(3)..(35)..(36): Xaa is C or S

SEQ ID NO: 76808 - protein, 41 aa, Artificial Sequence; identical to SEQ ID NO: 26047
  Cyclic GFR-binding peptide
  MOD_RES (2)..(4)..(41): Xaa is C or S

SEQ ID NO: 76809 - protein, 33 aa, Artificial Sequence
  Cyclic GFR-binding peptide
  MOD_RES (32)..(32): Xaa is C or S
LRNSLQELKPKKRVYEYYVVPLPEHHVRSPQXK

SEQ ID NO: 76810 - protein, 32 aa, Artificial Sequence; identical to SEQ ID NO: 26052
  Cyclic GFR-binding peptide
  MOD_RES (32)..(32): Xaa is C or S

SEQ ID NO: 76811 - protein, 31 aa, Artificial Sequence
  Cyclic GFR-binding peptide
  MOD_RES (27)..(28): Xaa is C or S
NVTAKKIVNSSDDIKRVQVPRLQTPAXXPKP

SEQ ID NO: 76812 - protein, 36 aa, Artificial Sequence; identical to SEQ ID NO: 26054
  Cyclic GFR-binding peptide
  MOD_RES (2)..(4)..(36): Xaa is C or S

SEQ ID NO: 76813 - protein, 33 aa, Artificial Sequence
  Cyclic GFR-binding peptide
  MOD_RES (30)..(31): Xaa is C or S
RVIMVTAKKVKPKRGVIKRIQVPRLAQPVXXPA

SEQ ID NO: 76814 - protein, 35 aa, Artificial Sequence; identical to SEQ ID NO: 26056
  Cyclic GFR-binding peptide
  MOD_RES (1)..(33)..(34): Xaa is C or S

SEQ ID NO: 76815 - protein, 35 aa, Artificial Sequence; identical to SEQ ID NO: 26058
  Cyclic GFR-binding peptide
  MOD_RES (31)..(32): Xaa is C or S

SEQ ID NO: 76816 - protein, 32 aa, Artificial Sequence
  Cyclic GFR-binding peptide
  MOD_RES (30)..(31): Xaa is C or S
KVIMVTAKKIKPTKGIIKRIQVPRLDQSVXXP

SEQ ID NO: 76817 - protein, 40 aa, Artificial Sequence; identical to SEQ ID NO: 26064
  Cyclic GFR-binding peptide
  MOD_RES (2)..(4)..(35)..(36): Xaa is C or S

SEQ ID NO: 76818 - protein, 32 aa, Artificial Sequence
  Cyclic GFR-binding peptide
  MOD_RES (29)..(30): Xaa is C or S
VIMVQVEKVKPKRGVVKAIKVSRLAQPVXXPA

SEQ ID NO: 76819 - protein, 31 aa, Artificial Sequence
  Cyclic GFR-binding peptide
  MOD_RES (26)..(26): Xaa is C or S
VTAKKIVNSSDDIKRVQVPRLKTPAXTPKTV

SEQ ID NO: 76820 - protein, 27 aa, Artificial Sequence
  Cyclic GFR-binding peptide
  MOD_RES (26)..(27): Xaa is C or S
VQVEKVKPKRGVVKAIKVSRLAQPVXX

SEQ ID NO: 76821 - protein, 30 aa, Artificial Sequence
  Cyclic GFR-binding peptide
  MOD_RES (2)..(4): Xaa is C or S
RXGXGEVVMEVTAKKVVKDYEDIKRMQVPR

SEQ ID NO: 76822 - protein, 38 aa, Artificial Sequence; identical to SEQ ID NO: 26075
  Cyclic GFR-binding peptide
  MOD_RES (2)..(33)..(34): Xaa is C or S

SEQ ID NO: 76823 - protein, 32 aa, Artificial Sequence
  Cyclic GFR-binding peptide
  MOD_RES (28)..(29): Xaa is C or S
MDSMEGIVVKENEDMIQMTINSLETPVXXAKP

SEQ ID NO: 76824 - protein, 35 aa, Artificial Sequence
  Cyclic GFR-binding peptide
  MOD_RES (29)..(30): Xaa is C or S
VMNSMEGIIVNSSDDMIQVTINSLQTPAXXPKPVT

SEQ ID NO: 76825 - protein, 36 aa, Artificial Sequence; identical to SEQ ID NO: 26080
  Cyclic GFR-binding peptide
  MOD_RES (36)..(36): Xaa is C or S

SEQ ID NO: 76826 - protein, 36 aa, Artificial Sequence
  Cyclic GFR-binding peptide
  MOD_RES (30)..(30): Xaa is C or S
VVMNSMEGIIVNSSDDMIQVTINSLKTPAXTPKTVH

SEQ ID NO: 76827 - protein, 23 aa, Artificial Sequence
  Cyclic GFR-binding peptide
NSMEGIIVNSSDDMIQVTINSLK

SEQ ID NO: 76828 - protein, 36 aa, Artificial Sequence
  Cyclic GFR-binding peptide
  MOD_RES (30)..(31): Xaa is C or S
VVMEVTAKKVVKDYEDIKRMQVPRLETPVXXAKPIS

SEQ ID NO: 76829 - protein, 29 aa, Artificial Sequence
  Cyclic GFR-binding peptide
  MOD_RES (29)..(29): Xaa is C or S
VMESMEGIVVKDYEDMIQMTINSLETPVX

SEQ ID NO: 76830 - protein, 35 aa, Artificial Sequence; identical to SEQ ID NO: 26085
  Cyclic GFR-binding peptide
  MOD_RES (31)..(32): Xaa is C or S

SEQ ID NO: 76831 - protein, 29 aa, Artificial Sequence
  Cyclic GFR-binding peptide
  MOD_RES (27)..(28): Xaa is C or S
MVQVEKVKPKRGVVKAIKVSRLAQPVXXP

SEQ ID NO: 76832 - protein, 35 aa, Artificial Sequence
  Cyclic GFR-binding peptide
  MOD_RES (30)..(31): Xaa is C or S
KVIMVQVEKIKPTKGIVKAIKVSRLDQSVXXPSAS

SEQ ID NO: 76833 - protein, 39 aa, Artificial Sequence; identical to SEQ ID NO: 26089
  Cyclic GFR-binding peptide
  MOD_RES (1)..(3)..(35)..(36): Xaa is C or S

SEQ ID NO: 76834 - protein, 32 aa, Artificial Sequence
  Cyclic GFR-binding peptide
ELRNSLQELKPKKRVYEYYVVPLPEHHVRSPQ

SEQ ID NO: 76835 - protein, 33 aa, Artificial Sequence
  Cyclic GFR-binding peptide
  MOD_RES (27)..(28): Xaa is C or S
MVQVEKVKPKRGVVKAIKVSRLAQPVXXPAASA

SEQ ID NO: 76836 - protein, 32 aa, Artificial Sequence
  Cyclic GFR-binding peptide
  MOD_RES (1)..(3): Xaa is C or S
XGXGEVVMEVTAKKVVKDYEDIKRMQVPRLET

SEQ ID NO: 76837 - protein, 32 aa, Artificial Sequence
  Cyclic GFR-binding peptide
  MOD_RES (2)..(4): Xaa is C or S
SXKXSKVIMVTAKKIKPTKGIIKRIQVPRLDQ

SEQ ID NO: 76838 - protein, 33 aa, Artificial Sequence
  Cyclic GFR-binding peptide
  MOD_RES (2)..(4): Xaa is C or S
HXGXARVVMNVQVEKIVNSSDDVKAVKVSRLQT

SEQ ID NO: 76839 - protein, 36 aa, Artificial Sequence; identical to SEQ ID NO: 26095
  Cyclic GFR-binding peptide
  MOD_RES (2)..(2): Xaa is C or S

SEQ ID NO: 76840 - protein, 25 aa, Artificial Sequence
  Cyclic GFR-binding peptide
SKVIMVQVEKIKPTKGIVKAIKVSR

SEQ ID NO: 76841 - protein, 24 aa, Artificial Sequence
  Cyclic GFR-binding peptide
RVIMVTAKKVKPKRGVIKRIQVPR

SEQ ID NO: 76842 - protein, 28 aa, Artificial Sequence
  Cyclic GFR-binding peptide
  MOD_RES (2)..(2): Xaa is C or S
GXGEVVMESMEGIVVKDYEDMIQMTINS

SEQ ID NO: 76843 - protein, 36 aa, Artificial Sequence
  Cyclic GFR-binding peptide
  MOD_RES (30)..(31): Xaa is C or S
VVMNVTAKKIVNSSDDIKRVQVPRLQTPAXXPKPVT

SEQ ID NO: 76844 - protein, 30 aa, Artificial Sequence
  Cyclic GFR-binding peptide
  MOD_RES (28)..(29): Xaa is C or S
VMVQVEKVKPTRGVVKAIKVSRLDQPVXXP

SEQ ID NO: 76845 - protein, 23 aa, Artificial Sequence
  Cyclic GFR-binding peptide
FNSLQEHQGQHPKIRYYVMPLPE

SEQ ID NO: 76846 - protein, 31 aa, Artificial Sequence
  Cyclic GFR-binding peptide
HEELRNSLQELKPKKRVYEYYLVTLPEHHVR

SEQ ID NO: 76847 - protein, 40 aa, Artificial Sequence; identical to SEQ ID NO: 26104
  Cyclic GFR-binding peptide
  MOD_RES (2)..(4)..(36)..(37): Xaa is C or S

SEQ ID NO: 76848 - protein, 29 aa, Artificial Sequence
  Cyclic GFR-binding peptide
  MOD_RES (27)..(28): Xaa is C or S
MVTAKKVKPTRGVIKRIQVPRLDQPVXXP

SEQ ID NO: 76849 - protein, 26 aa, Artificial Sequence
  Cyclic GFR-binding peptide
NSLQEFIPKKRVIEYYLVTLPELQVQ

SEQ ID NO: 76850 - protein, 25 aa, Artificial Sequence
  Cyclic GFR-binding peptide
RVVMNVQVEKIVNSSDDVKAVKVSR

SEQ ID NO: 76851 - protein, 32 aa, Artificial Sequence
  Cyclic GFR-binding peptide
  MOD_RES (26)..(26): Xaa is C or S
VTAKKIVNSSDDIKRVQVPRLKTPAXTPKTVH

SEQ ID NO: 76852 - protein, 33 aa, Artificial Sequence
  Cyclic GFR-binding peptide
  MOD_RES (28)..(29): Xaa is C or S
MNVTAKKIVNSSDDIKRVQVPRLQTPAXXPKPV

SEQ ID NO: 76853 - protein, 24 aa, Artificial Sequence
  Cyclic GFR-binding peptide
NSLQELKPKKRVYEYYVVPLPEHH

SEQ ID NO: 76854 - protein, 29 aa, Artificial Sequence
  Cyclic GFR-binding peptide
VVMDVTAKKVVKENEDIKRMQVPRLETPV

SEQ ID NO: 76855 - protein, 35 aa, Artificial Sequence
  Cyclic GFR-binding peptide
  MOD_RES (31)..(31): Xaa is C or S
RNSLQELKPKKRVYEYYLVTLPEHHVRSPQXKVSS

SEQ ID NO: 76856 - protein, 26 aa, Artificial Sequence
  Cyclic GFR-binding peptide
VMESMEGIVVKDYEDMIQMTINSLET

SEQ ID NO: 76857 - protein, 33 aa, Artificial Sequence
  Cyclic GFR-binding peptide
  MOD_RES (28)..(28): Xaa is C or S
MNVTAKKIVNSSDDIKRVQVPRLKTPAXTPKTV

SEQ ID NO: 76858 - protein, 38 aa, Artificial Sequence; identical to SEQ ID NO: 26117
  Cyclic GFR-binding peptide
  MOD_RES (33)..(33): Xaa is C or S

SEQ ID NO: 76859 - protein, 25 aa, Artificial Sequence
  Cyclic GFR-binding peptide
TNSLQEFIPKKRVIEYYLVTLPELQ

SEQ ID NO: 76860 - protein, 38 aa, Artificial Sequence; identical to SEQ ID NO: 26123
  Cyclic GFR-binding peptide
  MOD_RES (1)..(32)..(33): Xaa is C or S

SEQ ID NO: 76861 - protein, 27 aa, Artificial Sequence
  Cyclic GFR-binding peptide
SRVIMVTAKKVKPKRGVIKRIQVPRLA

SEQ ID NO: 76862 - protein, 33 aa, Artificial Sequence; identical to SEQ ID NO: 26126
  Cyclic GFR-binding peptide
  MOD_RES (32)..(33): Xaa is C or S

SEQ ID NO: 76863 - protein, 20 aa, Artificial Sequence
  Cyclic GFR-binding peptide
VQVEKVKPKRGVVKAIKVSR

SEQ ID NO: 76864 - protein, 22 aa, Artificial Sequence
  Cyclic GFR-binding peptide
NSLQELKPKKRVYEYYLVTLPE

SEQ ID NO: 76865 - protein, 33 aa, Artificial Sequence
  Cyclic GFR-binding peptide
  MOD_RES (30)..(31): Xaa is C or S
KVIMVQVEKIKPTKGIVKAIKVSRLDQSVXXPS

SEQ ID NO: 76866 - protein, 35 aa, Artificial Sequence; identical to SEQ ID NO: 26130
  Cyclic GFR-binding peptide
  MOD_RES (2)..(4): Xaa is C or S

SEQ ID NO: 76867 - protein, 34 aa, Artificial Sequence; identical to SEQ ID NO: 26133
  Cyclic GFR-binding peptide
  MOD_RES (1)..(3): Xaa is C or S

SEQ ID NO: 76868 - protein, 26 aa, Artificial Sequence
  Cyclic GFR-binding peptide
  MOD_RES (1)..(1): Xaa is C or S
XSKVVMVTAKKVKPTRGVIKRIQVPR

SEQ ID NO: 76869 - protein, 29 aa, Artificial Sequence
  Cyclic GFR-binding peptide
  MOD_RES (1)..(3): Xaa is C or S
XGXGEVVMDVTAKKVVKENEDIKRMQVPR

SEQ ID NO: 76870 - protein, 32 aa, Artificial Sequence
  Cyclic GFR-binding peptide
  MOD_RES (1)..(3): Xaa is C or S
XKXSRVIMSMEGIVKPKRGVMIQITINSLAQP

SEQ ID NO: 76871 - protein, 31 aa, Artificial Sequence
  Cyclic GFR-binding peptide
  MOD_RES (28)..(29): Xaa is C or S
MESMEGIVVKDYEDMIQMTINSLETPVXXAK

SEQ ID NO: 76872 - protein, 33 aa, Artificial Sequence
  Cyclic GFR-binding peptide
  MOD_RES (28)..(29): Xaa is C or S
VMSMEGIVKPTRGVMIQITINSLDQPVXXPSAS

SEQ ID NO: 76873 - protein, 32 aa, Artificial Sequence
  Cyclic GFR-binding peptide
  MOD_RES (2)..(2): Xaa is C or S
GXGEVVMDVTAKKVVKENEDIKRMQVPRLETP

SEQ ID NO: 76874 - protein, 24 aa, Artificial Sequence
  Cyclic GFR-binding peptide
VMEVQVEKVVKDYEDVKAMKVSRL

SEQ ID NO: 76875 - protein, 34 aa, Artificial Sequence
  Cyclic GFR-binding peptide
  MOD_RES (32)..(32): Xaa is C or S
LTNSLQEFIPKKRVIEYYVVPLPELQVQTPRXQV

SEQ ID NO: 76876 - protein, 39 aa, Artificial Sequence; identical to SEQ ID NO: 26140
  Cyclic GFR-binding peptide
  MOD_RES (2)..(4)..(35)..(36): Xaa is C or S

SEQ ID NO: 76877 - protein, 33 aa, Artificial Sequence; identical to SEQ ID NO: 26141
  Cyclic GFR-binding peptide
  MOD_RES (32)..(32): Xaa is C or S

SEQ ID NO: 76878 - protein, 31 aa, Artificial Sequence; identical to SEQ ID NO: 26142
  Cyclic GFR-binding peptide
  MOD_RES (31)..(31): Xaa is C or S

SEQ ID NO: 76879 - protein, 32 aa, Artificial Sequence
  Cyclic GFR-binding peptide
ELRNSLQELKPKKRVYEYYLVTLPEHHVRSPQ

SEQ ID NO: 76880 - protein, 35 aa, Artificial Sequence; identical to SEQ ID NO: 26145
  Cyclic GFR-binding peptide
  MOD_RES (35)..(35): Xaa is C or S

SEQ ID NO: 76881 - protein, 34 aa, Artificial Sequence; identical to SEQ ID NO: 26146
  Cyclic GFR-binding peptide
  MOD_RES (31)..(32): Xaa is C or S

SEQ ID NO: 76882 - protein, 35 aa, Artificial Sequence
  Cyclic GFR-binding peptide
  MOD_RES (30)..(31): Xaa is C or S
KVVMVTAKKVKPTRGVIKRIQVPRLDQPVXXPSAS

SEQ ID NO: 76883 - protein, 25 aa, Artificial Sequence
  Cyclic GFR-binding peptide
MNSMEGIIVNSSDDMIQVTINSLKT

SEQ ID NO: 76884 - protein, 26 aa, Artificial Sequence
  Cyclic GFR-binding peptide
VMNVTAKKIVNSSDDIKRVQVPRLKT

SEQ ID NO: 76885 - protein, 29 aa, Artificial Sequence
  Cyclic GFR-binding peptide
  MOD_RES (2)..(4): Xaa is C or S
SXKXSRVIMSMEGIVKPKRGVMIQITINS

SEQ ID NO: 76886 - protein, 36 aa, Artificial Sequence; identical to SEQ ID NO: 26154
  Cyclic GFR-binding peptide
  MOD_RES (2)..(4)..(36): Xaa is C or S

SEQ ID NO: 76887 - protein, 28 aa, Artificial Sequence
  Cyclic GFR-binding peptide
  MOD_RES (27)..(28): Xaa is C or S
MSMEGIIKPTKGIMIQITINSLDQSVXX

SEQ ID NO: 76888 - protein, 39 aa, Artificial Sequence
  Cyclic GFR-binding peptide
  MOD_RES (36)..(36): Xaa is C or S
LHEELRNSLQELKPKKRVYEYYLVTLPEHHVRSPQXKVS

SEQ ID NO: 76889 - protein, 35 aa, Artificial Sequence; identical to SEQ ID NO: 26156
  Cyclic GFR-binding peptide
  MOD_RES (1)..(33)..(34): Xaa is C or S

SEQ ID NO: 76890 - protein, 30 aa, Artificial Sequence
  Cyclic GFR-binding peptide
  MOD_RES (2)..(4): Xaa is C or S
SXKXSRVIMSMEGIVKPKRGVMIQITINSL

SEQ ID NO: 76891 - protein, 40 aa, Artificial Sequence; identical to SEQ ID NO: 26158
  Cyclic GFR-binding peptide
  MOD_RES (2)..(4)..(36)..(37): Xaa is C or S

SEQ ID NO: 76892 - protein, 35 aa, Artificial Sequence; identical to SEQ ID NO: 26161
  Cyclic GFR-binding peptide
  MOD_RES (1)..(3)..(34)..(35): Xaa is C or S

SEQ ID NO: 76893 - protein, 34 aa, Artificial Sequence
  Cyclic GFR-binding peptide
  MOD_RES (2)..(4): Xaa is C or S
HXGXARVVMNVTAKKIVNSSDDIKRVQVPRLQTP

SEQ ID NO: 76894 - protein, 39 aa, Artificial Sequence; identical to SEQ ID NO: 26167
  Cyclic GFR-binding peptide
  MOD_RES (1)..(3): Xaa is C or S

SEQ ID NO: 76895 - protein, 29 aa, Artificial Sequence
  Cyclic GFR-binding peptide
SRVVMNSMEGIIVNSSDDMIQVTINSLKT

SEQ ID NO: 76896 - protein, 27 aa, Artificial Sequence
  Cyclic GFR-binding peptide
  MOD_RES (26)..(27): Xaa is C or S
VQVEKIVNSSDDVKAVKVSRLKTPAXX

SEQ ID NO: 76897 - protein, 35 aa, Artificial Sequence; identical to SEQ ID NO: 26168
  Cyclic GFR-binding peptide
  MOD_RES (1)..(3)..(34)..(35): Xaa is C or S

SEQ ID NO: 76898 - protein, 31 aa, Artificial Sequence
  Cyclic GFR-binding peptide
  MOD_RES (30)..(31): Xaa is C or S
RVIMVTAKKVKPKRGVIKRIQVPRLAQPVXX

SEQ ID NO: 76899 - protein, 35 aa, Artificial Sequence; identical to SEQ ID NO: 26170
  Cyclic GFR-binding peptide
  MOD_RES (1)..(33)..(34): Xaa is C or S

SEQ ID NO: 76900 - protein, 34 aa, Artificial Sequence; identical to SEQ ID NO: 26175
  Cyclic GFR-binding peptide
  MOD_RES (1)..(3)..(34): Xaa is C or S

SEQ ID NO: 76901 - protein, 23 aa, Artificial Sequence
  Cyclic GFR-binding peptide
MDVTAKKVVKENEDIKRMQVPRL

SEQ ID NO: 76902 - protein, 30 aa, Artificial Sequence
  Cyclic GFR-binding peptide
  MOD_RES (1)..(3): Xaa is C or S
XGXGEVVMDVTAKKVVKENEDIKRMQVPRL

SEQ ID NO: 76903 - protein, 28 aa, Artificial Sequence
  Cyclic GFR-binding peptide
  MOD_RES (28)..(28): Xaa is C or S
MESMEGIVVKDYEDMIQMTINSLETPVX

SEQ ID NO: 76904 - protein, 29 aa, Artificial Sequence
  Cyclic GFR-binding peptide
  MOD_RES (1)..(1): Xaa is C or S
XGEVVMEVQVEKVVKDYEDVKAMKVSRLE

SEQ ID NO: 76905 - protein, 28 aa, Artificial Sequence
  Cyclic GFR-binding peptide
VIMVTAKKIKPTKGIIKRIQVPRLDQSV

SEQ ID NO: 76906 - protein, 31 aa, Artificial Sequence; identical to SEQ ID NO: 26187
  Cyclic GFR-binding peptide

SEQ ID NO: 76907 - protein, 36 aa, Artificial Sequence
  Cyclic GFR-binding peptide
  MOD_RES (30)..(31): Xaa is C or S
VVMDVQVEKVVKENEDVKAMKVSRLETPVXXAKPIK

SEQ ID NO: 76908 - protein, 33 aa, Artificial Sequence
  Cyclic GFR-binding peptide
  MOD_RES (30)..(31): Xaa is C or S
VVMNSMEGIIVNSSDDMIQVTINSLKTPAXXPK

SEQ ID NO: 76909 - protein, 22 aa, Artificial Sequence
  Cyclic GFR-binding peptide
SMEGIIVNSSDDMIQVTINSLQ

SEQ ID NO: 76910 - protein, 24 aa, Artificial Sequence
  Cyclic GFR-binding peptide
LFNSLQEHQGQHPKIRYYLMTLPE

SEQ ID NO: 76911 - protein, 28 aa, Artificial Sequence
  Cyclic GFR-binding peptide
  MOD_RES (27)..(28): Xaa is C or S
ESMEGIVVKDYEDMIQMTINSLETPVXX

SEQ ID NO: 76912 - protein, 33 aa, Artificial Sequence
  Cyclic GFR-binding peptide
  MOD_RES (27)..(28): Xaa is C or S
MVQVEKIKPTKGIVKAIKVSRLDQSVXXPSASA

SEQ ID NO: 76913 - protein, 32 aa, Artificial Sequence
  Cyclic GFR-binding peptide
  MOD_RES (27)..(28): Xaa is C or S
DSMEGIVVKENEDMIQMTINSLETPVXXAKPI

SEQ ID NO: 76914 - protein, 24 aa, Artificial Sequence
  Cyclic GFR-binding peptide
MVTAKKVKPKRGVIKRIQVPRLAQ

SEQ ID NO: 76915 - protein, 43 aa, Artificial Sequence; identical to SEQ ID NO: 26202
  Cyclic GFR-binding peptide
  MOD_RES (2)..(39): Xaa is C or S

SEQ ID NO: 76916 - protein, 32 aa, Artificial Sequence
  Cyclic GFR-binding peptide
  MOD_RES (29)..(29): Xaa is C or S
FNSLQEHQGQHPKIRYYVMPLPEEETPVXELG

SEQ ID NO: 76917 - protein, 28 aa, Artificial Sequence
  Cyclic GFR-binding peptide
  MOD_RES (1)..(1): Xaa is C or S
XSRVVMNSMEGIIVNSSDDMIQVTINSL

SEQ ID NO: 76918 - protein, 41 aa, Artificial Sequence; identical to SEQ ID NO: 26204
  Cyclic GFR-binding peptide
  MOD_RES (1)..(3)..(40): Xaa is C or S

SEQ ID NO: 76919 - protein, 26 aa, Artificial Sequence
  Cyclic GFR-binding peptide
QLFNSLQEHQGQHPKIRYYVMPLPEE

SEQ ID NO: 76920 - protein, 36 aa, Artificial Sequence; identical to SEQ ID NO: 26207
  Cyclic GFR-binding peptide
  MOD_RES (1)..(32)..(33): Xaa is C or S

SEQ ID NO: 76921 - protein, 31 aa, Artificial Sequence
  Cyclic GFR-binding peptide
  MOD_RES (30)..(31): Xaa is C or S
VVMDSMEGIVVKENEDMIQMTINSLETPVXX

SEQ ID NO: 76922 - protein, 30 aa, Artificial Sequence
  Cyclic GFR-binding peptide
  MOD_RES (2)..(2): Xaa is C or S
KXSRVIMVQVEKVKPKRGVVKAIKVSRLAQ

SEQ ID NO: 76923 - protein, 28 aa, Artificial Sequence
  Cyclic GFR-binding peptide
  MOD_RES (27)..(27): Xaa is C or S
NVQVEKIVNSSDDVKAVKVSRLKTPAXT

SEQ ID NO: 76924 - protein, 31 aa, Artificial Sequence
  Cyclic GFR-binding peptide
  MOD_RES (1)..(1): Xaa is C or S
XELHEELRNSLQELKPKKRVYEYYLVTLPEH

SEQ ID NO: 76925 - protein, 29 aa, Artificial Sequence
  Cyclic GFR-binding peptide
  MOD_RES (2)..(2): Xaa is C or S
GXGEVVMESMEGIVVKDYEDMIQMTINSL

SEQ ID NO: 76926 - protein, 26 aa, Artificial Sequence
  Cyclic GFR-binding peptide
EVVMEVTAKKVVKDYEDIKRMQVPRL

SEQ ID NO: 76927 - protein, 34 aa, Artificial Sequence; identical to SEQ ID NO: 26212
  Cyclic GFR-binding peptide
  MOD_RES (31)..(32): Xaa is C or S

SEQ ID NO: 76928 - protein, 24 aa, Artificial Sequence
  Cyclic GFR-binding peptide
LRNSLQELKPKKRVYEYYLVTLPE

SEQ ID NO: 76929 - protein, 26 aa, Artificial Sequence
  Cyclic GFR-binding peptide
VVMNVTAKKIVNSSDDIKRVQVPRLK

SEQ ID NO: 76930 - protein, 33 aa, Artificial Sequence; identical to SEQ ID NO: 26216
  Cyclic GFR-binding peptide
  MOD_RES (31)..(32): Xaa is C or S

SEQ ID NO: 76931 - protein, 32 aa, Artificial Sequence
  Cyclic GFR-binding peptide
  MOD_RES (2)..(4): Xaa is C or S
HXGXARVVMNVTAKKIVNSSDDIKRVQVPRLQ

SEQ ID NO: 76932 - protein, 36 aa, Artificial Sequence; identical to SEQ ID NO: 26223
  Cyclic GFR-binding peptide
  MOD_RES (1)..(3)..(35)..(36): Xaa is C or S

SEQ ID NO: 76933 - protein, 32 aa, Artificial Sequence
  Cyclic GFR-binding peptide
LHDELTNSLQEFIPKKRVIEYYLVTLPELQVQ

SEQ ID NO: 76934 - protein, 42 aa, Artificial Sequence; identical to SEQ ID NO: 26224
  Cyclic GFR-binding peptide
  MOD_RES (2)..(4)..(36)..(37): Xaa is C or S

SEQ ID NO: 76935 - protein, 29 aa, Artificial Sequence
  Cyclic GFR-binding peptide
  MOD_RES (27)..(28): Xaa is C or S
MVTAKKIKPTKGIIKRIQVPRLDQSVXXP

SEQ ID NO: 76936 - protein, 33 aa, Artificial Sequence; identical to SEQ ID NO: 26226
  Cyclic GFR-binding peptide
  MOD_RES (1)..(3): Xaa is C or S

SEQ ID NO: 76937 - protein, 37 aa, Artificial Sequence; identical to SEQ ID NO: 26228
  Cyclic GFR-binding peptide
  MOD_RES (31)..(32): Xaa is C or S

SEQ ID NO: 76938 - protein, 25 aa, Artificial Sequence
  Cyclic GFR-binding peptide
VQVEKVKPKRGVVKAIKVSRLAQPV

SEQ ID NO: 76939 - protein, 37 aa, Artificial Sequence; identical to SEQ ID NO: 26230
  Cyclic GFR-binding peptide
  MOD_RES (31)..(32): Xaa is C or S

SEQ ID NO: 76940 - protein, 31 aa, Artificial Sequence; identical to SEQ ID NO: 26231
  Cyclic GFR-binding peptide
  MOD_RES (1)..(1): Xaa is C or S

SEQ ID NO: 76941 - protein, 37 aa, Artificial Sequence; identical to SEQ ID NO: 26232
  Cyclic GFR-binding peptide
  MOD_RES (1)..(32)..(33): Xaa is C or S

SEQ ID NO: 76942 - protein, 31 aa, Artificial Sequence
  Cyclic GFR-binding peptide
  MOD_RES (29)..(30): Xaa is C or S
VMESMEGIVVKDYEDMIQMTINSLETPVXXA

SEQ ID NO: 76943 - protein, 32 aa, Artificial Sequence
  Cyclic GFR-binding peptide
LHEELRNSLQELKPKKRVYEYYLVTLPEHHVR

SEQ ID NO: 76944 - protein, 30 aa, Artificial Sequence
  Cyclic GFR-binding peptide
ELTNSLQEFIPKKRVIEYYLVTLPELQVQT

SEQ ID NO: 76945 - protein, 29 aa, Artificial Sequence
  Cyclic GFR-binding peptide
  MOD_RES (26)..(27): Xaa is C or S
SMEGIVVKENEDMIQMTINSLETPVXXAK

SEQ ID NO: 76946 - protein, 27 aa, Artificial Sequence
  Cyclic GFR-binding peptide
  MOD_RES (2)..(2): Xaa is C or S
KXSKVVMVTAKKVKPTRGVIKRIQVPR

SEQ ID NO: 76947 - protein, 33 aa, Artificial Sequence
  Cyclic GFR-binding peptide
  MOD_RES (30)..(31): Xaa is C or S
VVMNVQVEKIVNSSDDVKAVKVSRLQTPAXXPK

SEQ ID NO: 76948 - protein, 25 aa, Artificial Sequence
  Cyclic GFR-binding peptide
MVTAKKVKPKRGVIKRIQVPRLAQP

SEQ ID NO: 76949 - protein, 31 aa, Artificial Sequence
  Cyclic GFR-binding peptide
  MOD_RES (28)..(28): Xaa is C or S
MNVTAKKIVNSSDDIKRVQVPRLKTPAXTPK

SEQ ID NO: 76950 - protein, 33 aa, Artificial Sequence; identical to SEQ ID NO: 26248
  Cyclic GFR-binding peptide
  MOD_RES (1)..(32)..(33): Xaa is C or S

SEQ ID NO: 76951 - protein, 31 aa, Artificial Sequence
  Cyclic GFR-binding peptide
  MOD_RES (26)..(27): Xaa is C or S
VQVEKIVNSSDDVKAVKVSRLQTPAXXPKPV

SEQ ID NO: 76952 - protein, 32 aa, Artificial Sequence; identical to SEQ ID NO: 26249
  Cyclic GFR-binding peptide
  MOD_RES (2)..(2): Xaa is C or S

SEQ ID NO: 76953 - protein, 29 aa, Artificial Sequence
  Cyclic GFR-binding peptide
  MOD_RES (26)..(27): Xaa is C or S
SMEGIVKPTRGVMIQITINSLDQPVXXPS

SEQ ID NO: 76954 - protein, 39 aa, Artificial Sequence; identical to SEQ ID NO: 26251
  Cyclic GFR-binding peptide
  MOD_RES (37)..(37): Xaa is C or S

SEQ ID NO: 76955 - protein, 37 aa, Artificial Sequence; identical to SEQ ID NO: 26253
  Cyclic GFR-binding peptide
  MOD_RES (1)..(3)..(34)..(35): Xaa is C or S

SEQ ID NO: 76956 - protein, 26 aa, Artificial Sequence
  Cyclic GFR-binding peptide
MESMEGIVVKDYEDMIQMTINSLETP

SEQ ID NO: 76957 - protein, 28 aa, Artificial Sequence
  Cyclic GFR-binding peptide
  MOD_RES (27)..(28): Xaa is C or S
MSMEGIVKPTRGVMIQITINSLDQPVXX

SEQ ID NO: 76958 - protein, 28 aa, Artificial Sequence
  Cyclic GFR-binding peptide
  MOD_RES (27)..(28): Xaa is C or S
NSMEGIIVNSSDDMIQVTINSLQTPAXX

SEQ ID NO: 76959 - protein, 27 aa, Artificial Sequence
  Cyclic GFR-binding peptide
  MOD_RES (27)..(27): Xaa is C or S
NVTAKKIVNSSDDIKRVQVPRLKTPAX

SEQ ID NO: 76960 - protein, 30 aa, Artificial Sequence; identical to SEQ ID NO: 26255
  Cyclic GFR-binding peptide

SEQ ID NO: 76961 - protein, 27 aa, Artificial Sequence
  Cyclic GFR-binding peptide
HDELTNSLQEFIPKKRVIEYYVVPLPE

SEQ ID NO: 76962 - protein, 38 aa, Artificial Sequence; identical to SEQ ID NO: 26256
  Cyclic GFR-binding peptide
  MOD_RES (2)..(4): Xaa is C or S

SEQ ID NO: 76963 - protein, 35 aa, Artificial Sequence
  Cyclic GFR-binding peptide
  MOD_RES (34)..(34): Xaa is C or S
EELRNSLQELKPKKRVYEYYVVPLPEHHVRSPQXK

SEQ ID NO: 76964 - protein, 25 aa, Artificial Sequence
  Cyclic GFR-binding peptide
KVVMSMEGIVKPTRGVMIQITINSL

SEQ ID NO: 76965 - protein, 34 aa, Artificial Sequence; identical to SEQ ID NO: 26259
  Cyclic GFR-binding peptide
  MOD_RES (1)..(33)..(34): Xaa is C or S

SEQ ID NO: 76966 - protein, 30 aa, Artificial Sequence
  Cyclic GFR-binding peptide
  MOD_RES (26)..(27): Xaa is C or S
SMEGIIVNSSDDMIQVTINSLKTPAXXPKP

SEQ ID NO: 76967 - protein, 36 aa, Artificial Sequence; identical to SEQ ID NO: 26264
  Cyclic GFR-binding peptide
  MOD_RES (1)..(1): Xaa is C or S

SEQ ID NO: 76968 - protein, 32 aa, Artificial Sequence; identical to SEQ ID NO: 26265
  Cyclic GFR-binding peptide
  MOD_RES (1)..(32): Xaa is C or S

SEQ ID NO: 76969 - protein, 37 aa, Artificial Sequence; identical to SEQ ID NO: 26267
  Cyclic GFR-binding peptide
  MOD_RES (2)..(34)..(35): Xaa is C or S

SEQ ID NO: 76970 - protein, 30 aa, Artificial Sequence
  Cyclic GFR-binding peptide
  MOD_RES (30)..(30): Xaa is C or S
LFNSLQEHQGQHPKIRYYLMTLPEEETPVX

SEQ ID NO: 76971 - protein, 33 aa, Artificial Sequence
  Cyclic GFR-binding peptide
  MOD_RES (32)..(32): Xaa is C or S
HQLFNSLQEHQGQHPKIRYYVMPLPEEETPVXE

SEQ ID NO: 76972 - protein, 29 aa, Artificial Sequence
  Cyclic GFR-binding peptide
ALHDELTNSLQEFIPKKRVIEYYLVTLPE

SEQ ID NO: 76973 - protein, 24 aa, Artificial Sequence
  Cyclic GFR-binding peptide
VQVEKVVKENEDVKAMKVSRLETP

SEQ ID NO: 76974 - protein, 28 aa, Artificial Sequence
  Cyclic GFR-binding peptide
VVMNSMEGIIVNSSDDMIQVTINSLQTP

SEQ ID NO: 76975 - protein, 35 aa, Artificial Sequence; identical to SEQ ID NO: 26273
  Cyclic GFR-binding peptide

SEQ ID NO: 76976 - protein, 30 aa, Artificial Sequence
  Cyclic GFR-binding peptide
  MOD_RES (1)..(3): Xaa is C or S
XKXSKVIMVTAKKIKPTKGIIKRIQVPRLD

SEQ ID NO: 76977 - protein, 43 aa, Artificial Sequence; identical to SEQ ID NO: 26278
  Cyclic GFR-binding peptide
  MOD_RES (2)..(4)..(41): Xaa is C or S

SEQ ID NO: 76978 - protein, 22 aa, Artificial Sequence
  Cyclic GFR-binding peptide
MSMEGIVKPKRGVMIQITINSL

SEQ ID NO: 76979 - protein, 25 aa, Artificial Sequence
  Cyclic GFR-binding peptide
SMEGIIKPTKGIMIQITINSLDQSV

SEQ ID NO: 76980 - protein, 29 aa, Artificial Sequence
  Cyclic GFR-binding peptide
  MOD_RES (28)..(28): Xaa is C or S
NSLQEHQGQHPKIRYYVMPLPEEETPVXE

SEQ ID NO: 76981 - protein, 36 aa, Artificial Sequence; identical to SEQ ID NO: 26282
  Cyclic GFR-binding peptide
  MOD_RES (33)..(33): Xaa is C or S

SEQ ID NO: 76982 - protein, 39 aa, Artificial Sequence; identical to SEQ ID NO: 26284
  Cyclic GFR-binding peptide
  MOD_RES (2)..(34)..(35): Xaa is C or S

SEQ ID NO: 76983 - protein, 38 aa, Artificial Sequence; identical to SEQ ID NO: 26287
  Cyclic GFR-binding peptide
  MOD_RES (2)..(4)..(35)..(36): Xaa is C or S

SEQ ID NO: 76984 - protein, 30 aa, Artificial Sequence; identical to SEQ ID NO: 2155
  Cyclic GFR-binding peptide

SEQ ID NO: 76985 - protein, 23 aa, Artificial Sequence
  Cyclic GFR-binding peptide
MVTAKKVKPKRGVIKRIQVPRLA

SEQ ID NO: 76986 - protein, 31 aa, Artificial Sequence
  Cyclic GFR-binding peptide
  MOD_RES (29)..(30): Xaa is C or S
VMNVTAKKIVNSSDDIKRVQVPRLQTPAXXP

SEQ ID NO: 76987 - protein, 29 aa, Artificial Sequence
  Cyclic GFR-binding peptide
KVVMVQVEKVKPTRGVVKAIKVSRLDQPV

SEQ ID NO: 76988 - protein, 30 aa, Artificial Sequence
  Cyclic GFR-binding peptide
  MOD_RES (30)..(30): Xaa is C or S
VVMESMEGIVVKDYEDMIQMTINSLETPVX

SEQ ID NO: 76989 - protein, 29 aa, Artificial Sequence
  Cyclic GFR-binding peptide
  MOD_RES (1)..(3): Xaa is C or S
XKXSRVIMSMEGIVKPKRGVMIQITINSL

SEQ ID NO: 76990 - protein, 31 aa, Artificial Sequence
  Cyclic GFR-binding peptide
  MOD_RES (28)..(29): Xaa is C or S
IMVQVEKVKPKRGVVKAIKVSRLAQPVXXPA

SEQ ID NO: 76991 - protein, 33 aa, Artificial Sequence
  Cyclic GFR-binding peptide
  MOD_RES (28)..(29): Xaa is C or S
VMVTAKKVKPTRGVIKRIQVPRLDQPVXXPSAS

SEQ ID NO: 76992 - protein, 36 aa, Artificial Sequence; identical to SEQ ID NO: 26291
  Cyclic GFR-binding peptide
  MOD_RES (2)..(2): Xaa is C or S

SEQ ID NO: 76993 - protein, 38 aa, Artificial Sequence; identical to SEQ ID NO: 26292
  Cyclic GFR-binding peptide
  MOD_RES (1)..(33)..(34): Xaa is C or S

SEQ ID NO: 76994 - protein, 27 aa, Artificial Sequence
  Cyclic GFR-binding peptide
HDELTNSLQEFIPKKRVIEYYLVTLPE

SEQ ID NO: 76995 - protein, 24 aa, Artificial Sequence
  Cyclic GFR-binding peptide
VVMNVQVEKIVNSSDDVKAVKVSR

SEQ ID NO: 76996 - protein, 35 aa, Artificial Sequence; identical to SEQ ID NO: 26300
  Cyclic GFR-binding peptide
  MOD_RES (31)..(32): Xaa is C or S

SEQ ID NO: 76997 - protein, 26 aa, Artificial Sequence
  Cyclic GFR-binding peptide
EVVMDSMEGIVVKENEDMIQMTINSL

SEQ ID NO: 76998 - protein, 41 aa, Artificial Sequence; identical to SEQ ID NO: 26302
  Cyclic GFR-binding peptide
  MOD_RES (2)..(36): Xaa is C or S

SEQ ID NO: 76999 - protein, 29 aa, Artificial Sequence
  Cyclic GFR-binding peptide
  MOD_RES (1)..(1): Xaa is C or S
XSKVVMVTAKKVKPTRGVIKRIQVPRLDQ

SEQ ID NO: 77000 - protein, 34 aa, Artificial Sequence; identical to SEQ ID NO: 26303
  Cyclic GFR-binding peptide
  MOD_RES (2)..(34): Xaa is C or S

SEQ ID NO: 77001 - protein, 24 aa, Artificial Sequence
  Cyclic GFR-binding peptide
KVVMVTAKKVKPTRGVIKRIQVPR

SEQ ID NO: 77002 - protein, 27 aa, Artificial Sequence
  Cyclic GFR-binding peptide
IMSMEGIVKPKRGVMIQITINSLAQPV

SEQ ID NO: 77003 - protein, 34 aa, Artificial Sequence; identical to SEQ ID NO: 26310
  Cyclic GFR-binding peptide
  MOD_RES (2)..(4): Xaa is C or S

SEQ ID NO: 77004 - protein, 29 aa, Artificial Sequence
  Cyclic GFR-binding peptide
  MOD_RES (2)..(2): Xaa is C or S
KXSKVVMVTAKKVKPTRGVIKRIQVPRLD

SEQ ID NO: 77005 - protein, 33 aa, Artificial Sequence; identical to SEQ ID NO: 26314
  Cyclic GFR-binding peptide
  MOD_RES (31)..(32): Xaa is C or S

SEQ ID NO: 77006 - protein, 32 aa, Artificial Sequence
  Cyclic GFR-binding peptide
  MOD_RES (1)..(1): Xaa is C or S
XALHDELTNSLQEFIPKKRVIEYYLVTLPELQ

SEQ ID NO: 77007 - protein, 35 aa, Artificial Sequence; identical to SEQ ID NO: 26315
  Cyclic GFR-binding peptide
  MOD_RES (31)..(32): Xaa is C or S

SEQ ID NO: 77008 - protein, 28 aa, Artificial Sequence
  Cyclic GFR-binding peptide
VVMNVTAKKIVNSSDDIKRVQVPRLKTP

SEQ ID NO: 77009 - protein, 30 aa, Artificial Sequence
  Cyclic GFR-binding peptide
  MOD_RES (2)..(2): Xaa is C or S
KXSRVIMSMEGIVKPKRGVMIQITINSLAQ

SEQ ID NO: 77010 - protein, 32 aa, Artificial Sequence
  Cyclic GFR-binding peptide
  MOD_RES (30)..(31): Xaa is C or S
VVMDSMEGIVVKENEDMIQMTINSLETPVXXA

SEQ ID NO: 77011 - protein, 31 aa, Artificial Sequence
  Cyclic GFR-binding peptide
  MOD_RES (2)..(4): Xaa is C or S
RXGXGEVVMDVTAKKVVKENEDIKRMQVPRL

SEQ ID NO: 77012 - protein, 35 aa, Artificial Sequence; identical to SEQ ID NO: 26325
  Cyclic GFR-binding peptide
  MOD_RES (1)..(3)..(35): Xaa is C or S

SEQ ID NO: 77013 - protein, 30 aa, Artificial Sequence
  Cyclic GFR-binding peptide
  MOD_RES (29)..(30): Xaa is C or S
VMESMEGIVVKDYEDMIQMTINSLETPVXX

SEQ ID NO: 77014 - protein, 26 aa, Artificial Sequence
  Cyclic GFR-binding peptide
RVIMVTAKKVKPKRGVIKRIQVPRLA

SEQ ID NO: 77015 - protein, 38 aa, Artificial Sequence; identical to SEQ ID NO: 26330
  Cyclic GFR-binding peptide
  MOD_RES (2)..(34)..(35): Xaa is C or S

SEQ ID NO: 77016 - protein, 34 aa, Artificial Sequence
  Cyclic GFR-binding peptide
  MOD_RES (28)..(29): Xaa is C or S
MNVTAKKIVNSSDDIKRVQVPRLKTPAXXPKPVY

SEQ ID NO: 77017 - protein, 42 aa, Artificial Sequence; identical to SEQ ID NO: 26331
  Cyclic GFR-binding peptide
  MOD_RES (2)..(4)..(36)..(37): Xaa is C or S

SEQ ID NO: 77018 - protein, 28 aa, Artificial Sequence
  Cyclic GFR-binding peptide
  MOD_RES (28)..(28): Xaa is C or S
IMVTAKKVKPKRGVIKRIQVPRLAQPVX

SEQ ID NO: 77019 - protein, 36 aa, Artificial Sequence; identical to SEQ ID NO: 26333
  Cyclic GFR-binding peptide
  MOD_RES (2)..(4)..(36): Xaa is C or S

SEQ ID NO: 77020 - protein, 37 aa, Artificial Sequence; identical to SEQ ID NO: 26334
  Cyclic GFR-binding peptide
  MOD_RES (1)..(3)..(35)..(36): Xaa is C or S

SEQ ID NO: 77021 - protein, 29 aa, Artificial Sequence
  Cyclic GFR-binding peptide
  MOD_RES (28)..(29): Xaa is C or S
MDVQVEKVVKENEDVKAMKVSRLETPVXX

SEQ ID NO: 77022 - protein, 34 aa, Artificial Sequence
  Cyclic GFR-binding peptide
  MOD_RES (30)..(31): Xaa is C or S
VVMDVTAKKVVKENEDIKRMQVPRLETPVXXAKP

SEQ ID NO: 77023 - protein, 34 aa, Artificial Sequence
  Cyclic GFR-binding peptide
  MOD_RES (32)..(32): Xaa is C or S
HQLFNSLQEHQGQHPKIRYYLMTLPEEETPVXEL

SEQ ID NO: 77024 - protein, 28 aa, Artificial Sequence
  Cyclic GFR-binding peptide
  MOD_RES (28)..(28): Xaa is C or S
VMVQVEKVKPTRGVVKAIKVSRLDQPVX

SEQ ID NO: 77025 - protein, 26 aa, Artificial Sequence
  Cyclic GFR-binding peptide
KVVMVTAKKVKPTRGVIKRIQVPRLD

SEQ ID NO: 77026 - protein, 36 aa, Artificial Sequence; identical to SEQ ID NO: 26338
  Cyclic GFR-binding peptide
  MOD_RES (36)..(36): Xaa is C or S

SEQ ID NO: 77027 - protein, 27 aa, Artificial Sequence
  Cyclic GFR-binding peptide
KVVMSMEGIVKPTRGVMIQITINSLDQ

SEQ ID NO: 77028 - protein, 32 aa, Artificial Sequence
  Cyclic GFR-binding peptide
  MOD_RES (30)..(31): Xaa is C or S
VVMNVTAKKIVNSSDDIKRVQVPRLQTPAXXP

SEQ ID NO: 77029 - protein, 38 aa, Artificial Sequence; identical to SEQ ID NO: 26343
  Cyclic GFR-binding peptide
  MOD_RES (2)..(4): Xaa is C or S

SEQ ID NO: 77030 - protein, 32 aa, Artificial Sequence
  Cyclic GFR-binding peptide
  MOD_RES (2)..(2): Xaa is C or S
GXGEVVMDVQVEKVVKENEDVKAMKVSRLETP

SEQ ID NO: 77031 - protein, 30 aa, Artificial Sequence
  Cyclic GFR-binding peptide
  MOD_RES (28)..(29): Xaa is C or S
IMVQVEKVKPKRGVVKAIKVSRLAQPVXXP

SEQ ID NO: 77032 - protein, 37 aa, Artificial Sequence; identical to SEQ ID NO: 26348
  Cyclic GFR-binding peptide
  MOD_RES (2)..(4)..(36)..(37): Xaa is C or S

SEQ ID NO: 77033 - protein, 32 aa, Artificial Sequence; identical to SEQ ID NO: 26349
  Cyclic GFR-binding peptide
  MOD_RES (32)..(32): Xaa is C or S

SEQ ID NO: 77034 - protein, 34 aa, Artificial Sequence
  Cyclic GFR-binding peptide
  MOD_RES (2)..(4): Xaa is C or S
AXAXELHEELRNSLQELKPKKRVYEYYVVPLPEH

SEQ ID NO: 77035 - protein, 29 aa, Artificial Sequence
  Cyclic GFR-binding peptide
  MOD_RES (1)..(1): Xaa is C or S
XGEVVMDVQVEKVVKENEDVKAMKVSRLE

SEQ ID NO: 77036 - protein, 30 aa, Artificial Sequence
  Cyclic GFR-binding peptide
  MOD_RES (1)..(1): Xaa is C or S
XSRVVMNVTAKKIVNSSDDIKRVQVPRLKT

SEQ ID NO: 77037 - protein, 30 aa, Artificial Sequence
  Cyclic GFR-binding peptide
  MOD_RES (2)..(2): Xaa is C or S
EXKNHQLFNSLQEHQGQHPKIRYYVMPLPE

SEQ ID NO: 77038 - protein, 35 aa, Artificial Sequence; identical to SEQ ID NO: 26354
  Cyclic GFR-binding peptide
  MOD_RES (32)..(32): Xaa is C or S

SEQ ID NO: 77039 - protein, 35 aa, Artificial Sequence; identical to SEQ ID NO: 26356
  Cyclic GFR-binding peptide
  MOD_RES (2)..(4)..(35): Xaa is C or S

SEQ ID NO: 77040 - protein, 32 aa, Artificial Sequence; identical to SEQ ID NO: 26359
  Cyclic GFR-binding peptide
  MOD_RES (1)..(32): Xaa is C or S

SEQ ID NO: 77041 - protein, 30 aa, Artificial Sequence
  Cyclic GFR-binding peptide
  MOD_RES (1)..(3): Xaa is C or S
XKXSKVIMVQVEKIKPTKGIVKAIKVSRLD

SEQ ID NO: 77042 - protein, 29 aa, Artificial Sequence
  Cyclic GFR-binding peptide
VVMNVTAKKIVNSSDDIKRVQVPRLKTPA

SEQ ID NO: 77043 - protein, 24 aa, Artificial Sequence
  Cyclic GFR-binding peptide
MSMEGIIKPTKGIMIQITINSLDQ

SEQ ID NO: 77044 - protein, 31 aa, Artificial Sequence
  Cyclic GFR-binding peptide
  MOD_RES (29)..(30): Xaa is C or S
VMEVQVEKVVKDYEDVKAMKVSRLETPVXXA

SEQ ID NO: 77045 - protein, 23 aa, Artificial Sequence
  Cyclic GFR-binding peptide
VTAKKVKPKRGVIKRIQVPRLAQ

SEQ ID NO: 77046 - protein, 25 aa, Artificial Sequence
  Cyclic GFR-binding peptide
NSLQEHQGQHPKIRYYVMPLPEEET

SEQ ID NO: 77047 - protein, 25 aa, Artificial Sequence
  Cyclic GFR-binding peptide
EVVMESMEGIVVKDYEDMIQMTINS

SEQ ID NO: 77048 - protein, 32 aa, Artificial Sequence; identical to SEQ ID NO: 26376
  Cyclic GFR-binding peptide
  MOD_RES (31)..(32): Xaa is C or S

SEQ ID NO: 77049 - protein, 33 aa, Artificial Sequence; identical to SEQ ID NO: 26378
  Cyclic GFR-binding peptide
  MOD_RES (31)..(31): Xaa is C or S

SEQ ID NO: 77050 - protein, 34 aa, Artificial Sequence
  Cyclic GFR-binding peptide
  MOD_RES (28)..(28): Xaa is C or S
MNVTAKKIVNSSDDIKRVQVPRLKTPAXTPKTVH

SEQ ID NO: 77051 - protein, 35 aa, Artificial Sequence; identical to SEQ ID NO: 26379
  Cyclic GFR-binding peptide
  MOD_RES (31)..(31): Xaa is C or S

SEQ ID NO: 77052 - protein, 32 aa, Artificial Sequence
  Cyclic GFR-binding peptide
  MOD_RES (1)..(3): Xaa is C or S
XKXALHDELTNSLQEFIPKKRVIEYYLVTLPE

SEQ ID NO: 77053 - protein, 31 aa, Artificial Sequence
  Cyclic GFR-binding peptide
HEELRNSLQELKPKKRVYEYYVVPLPEHHVR

SEQ ID NO: 77054 - protein, 34 aa, Artificial Sequence
  Cyclic GFR-binding peptide
  MOD_RES (30)..(31): Xaa is C or S
VVMNVQVEKIVNSSDDVKAVKVSRLQTPAXXPKP

SEQ ID NO: 77055 - protein, 26 aa, Artificial Sequence
  Cyclic GFR-binding peptide
VVMNSMEGIIVNSSDDMIQVTINSLQ

SEQ ID NO: 77056 - protein, 29 aa, Artificial Sequence
  Cyclic GFR-binding peptide
  MOD_RES (29)..(29): Xaa is C or S
VMDVTAKKVVKENEDIKRMQVPRLETPVX

SEQ ID NO: 77057 - protein, 25 aa, Artificial Sequence
  Cyclic GFR-binding peptide
NSLQELKPKKRVYEYYLVTLPEHHV

SEQ ID NO: 77058 - protein, 40 aa, Artificial Sequence; identical to SEQ ID NO: 26390
  Cyclic GFR-binding peptide
  MOD_RES (1)..(3)..(35)..(36): Xaa is C or S

SEQ ID NO: 77059 - protein, 31 aa, Artificial Sequence
  Cyclic GFR-binding peptide
  MOD_RES (30)..(31): Xaa is C or S
KVVMVTAKKVKPTRGVIKRIQVPRLDQPVXX

SEQ ID NO: 77060 - protein, 28 aa, Artificial Sequence
  Cyclic GFR-binding peptide
NSLQEFIPKKRVIEYYLVTLPELQVQTP

SEQ ID NO: 77061 - protein, 36 aa, Artificial Sequence; identical to SEQ ID NO: 26398
  Cyclic GFR-binding peptide
  MOD_RES (32)..(33): Xaa is C or S

SEQ ID NO: 77062 - protein, 33 aa, Artificial Sequence
  Cyclic GFR-binding peptide
  MOD_RES (2)..(4): Xaa is C or S
EXKXALHDELTNSLQEFIPKKRVIEYYLVTLPE

SEQ ID NO: 77063 - protein, 28 aa, Artificial Sequence
  Cyclic GFR-binding peptide
LTNSLQEFIPKKRVIEYYLVTLPELQVQ

SEQ ID NO: 77064 - protein, 27 aa, Artificial Sequence
  Cyclic GFR-binding peptide
GEVVMDVQVEKVVKENEDVKAMKVSRL

SEQ ID NO: 77065 - protein, 27 aa, Artificial Sequence
  Cyclic GFR-binding peptide
RVVMNSMEGIIVNSSDDMIQVTINSLQ

SEQ ID NO: 77066 - protein, 31 aa, Artificial Sequence
  Cyclic GFR-binding peptide
  MOD_RES (2)..(4): Xaa is C or S
HXGXSRVVMNVTAKKIVNSSDDIKRVQVPRL

SEQ ID NO: 77067 - protein, 37 aa, Artificial Sequence; identical to SEQ ID NO: 26403
  Cyclic GFR-binding peptide
  MOD_RES (33)..(33): Xaa is C or S

SEQ ID NO: 77068 - protein, 30 aa, Artificial Sequence
  Cyclic GFR-binding peptide
  MOD_RES (29)..(30): Xaa is C or S
VMEVQVEKVVKDYEDVKAMKVSRLETPVXX

SEQ ID NO: 77069 - protein, 35 aa, Artificial Sequence; identical to SEQ ID NO: 26404
  Cyclic GFR-binding peptide
  MOD_RES (1)..(3)..(35): Xaa is C or S

SEQ ID NO: 77070 - protein, 35 aa, Artificial Sequence; identical to SEQ ID NO: 26405
  Cyclic GFR-binding peptide
  MOD_RES (1)..(32)..(33): Xaa is C or S

SEQ ID NO: 77071 - protein, 30 aa, Artificial Sequence
  Cyclic GFR-binding peptide
DELTNSLQEFIPKKRVIEYYLVTLPELQVQ

SEQ ID NO: 77072 - protein, 22 aa, Artificial Sequence
  Cyclic GFR-binding peptide
MDSMEGIVVKENEDMIQMTINS

SEQ ID NO: 77073 - protein, 43 aa, Artificial Sequence; identical to SEQ ID NO: 26409
  Cyclic GFR-binding peptide
  MOD_RES (2)..(39): Xaa is C or S

SEQ ID NO: 77074 - protein, 22 aa, Artificial Sequence
  Cyclic GFR-binding peptide
VTAKKVVKENEDIKRMQVPRLE

SEQ ID NO: 77075 - protein, 41 aa, Artificial Sequence; identical to SEQ ID NO: 26410
  Cyclic GFR-binding peptide
  MOD_RES (2)..(4)..(38): Xaa is C or S

SEQ ID NO: 77076 - protein, 31 aa, Artificial Sequence
  Cyclic GFR-binding peptide
  MOD_RES (1)..(3): Xaa is C or S
XKXSKVVMVTAKKVKPTRGVIKRIQVPRLDQ

SEQ ID NO: 77077 - protein, 33 aa, Artificial Sequence; identical to SEQ ID NO: 26413
  Cyclic GFR-binding peptide

SEQ ID NO: 77078 - protein, 35 aa, Artificial Sequence
  Cyclic GFR-binding peptide
  MOD_RES (30)..(30): Xaa is C or S
LFNSLQEHQGQHPKIRYYLMTLPEEETPVXELGED

SEQ ID NO: 77079 - protein, 30 aa, Artificial Sequence
  Cyclic GFR-binding peptide
ELHEELRNSLQELKPKKRVYEYYLVTLPEH

SEQ ID NO: 77080 - protein, 39 aa, Artificial Sequence; identical to SEQ ID NO: 26416
  Cyclic GFR-binding peptide
  MOD_RES (2)..(4): Xaa is C or S

SEQ ID NO: 77081 - protein, 32 aa, Artificial Sequence; identical to SEQ ID NO: 26419
  Cyclic GFR-binding peptide
  MOD_RES (32)..(32): Xaa is C or S

SEQ ID NO: 77082 - protein, 35 aa, Artificial Sequence
  Cyclic GFR-binding peptide
  MOD_RES (33)..(33): Xaa is C or S
ELRNSLQELKPKKRVYEYYVVPLPEHHVRSPQXKV

SEQ ID NO: 77083 - protein, 34 aa, Artificial Sequence; identical to SEQ ID NO: 26423
  Cyclic GFR-binding peptide
  MOD_RES (2)..(34): Xaa is C or S

SEQ ID NO: 77084 - protein, 31 aa, Artificial Sequence; identical to SEQ ID NO: 26426
  Cyclic GFR-binding peptide
  MOD_RES (1)..(1): Xaa is C or S

SEQ ID NO: 77085 - protein, 21 aa, Artificial Sequence
  Cyclic GFR-binding peptide
SMEGIIVNSSDDMIQVTINSL

SEQ ID NO: 77086 - protein, 37 aa, Artificial Sequence; identical to SEQ ID NO: 26435
  Cyclic GFR-binding peptide
  MOD_RES (1)..(3)..(34)..(35): Xaa is C or S

SEQ ID NO: 77087 - protein, 40 aa, Artificial Sequence; identical to SEQ ID NO: 26436
  Cyclic GFR-binding peptide
  MOD_RES (2)..(4)..(36)..(37): Xaa is C or S

SEQ ID NO: 77088 - protein, 37 aa, Artificial Sequence; identical to SEQ ID NO: 26438
  Cyclic GFR-binding peptide
  MOD_RES (33)..(33): Xaa is C or S

SEQ ID NO: 77089 - protein, 23 aa, Artificial Sequence
  Cyclic GFR-binding peptide
MSMEGIIKPTKGIMIQITINSLD

SEQ ID NO: 77090 - protein, 26 aa, Artificial Sequence
  Cyclic GFR-binding peptide
VMEVQVEKVVKDYEDVKAMKVSRLET

SEQ ID NO: 77091 - protein, 34 aa, Artificial Sequence; identical to SEQ ID NO: 26443
  Cyclic GFR-binding peptide
  MOD_RES (31)..(31): Xaa is C or S

SEQ ID NO: 77092 - protein, 37 aa, Artificial Sequence; identical to SEQ ID NO: 26445
  Cyclic GFR-binding peptide
  MOD_RES (2)..(4)..(35)..(36): Xaa is C or S

SEQ ID NO: 77093 - protein, 36 aa, Artificial Sequence; identical to SEQ ID NO: 26448
  Cyclic GFR-binding peptide
  MOD_RES (32)..(32): Xaa is C or S

SEQ ID NO: 77094 - protein, 34 aa, Artificial Sequence
  Cyclic GFR-binding peptide
  MOD_RES (30)..(30): Xaa is C or S
VVMNVQVEKIVNSSDDVKAVKVSRLKTPAXTPKT

SEQ ID NO: 77095 - protein, 27 aa, Artificial Sequence
  Cyclic GFR-binding peptide
ARVVMNSMEGIIVNSSDDMIQVTINSL

SEQ ID NO: 77096 - protein, 24 aa, Artificial Sequence
  Cyclic GFR-binding peptide
VQVEKIVNSSDDVKAVKVSRLQTP

SEQ ID NO: 77097 - protein, 28 aa, Artificial Sequence
  Cyclic GFR-binding peptide
HDELTNSLQEFIPKKRVIEYYLVTLPEL

SEQ ID NO: 77098 - protein, 32 aa, Artificial Sequence
  Cyclic GFR-binding peptide
  MOD_RES (28)..(29): Xaa is C or S
IMSMEGIIKPTKGIMIQITINSLDQSVXXPSA

SEQ ID NO: 77099 - protein, 24 aa, Artificial Sequence
  Cyclic GFR-binding peptide
TNSLQEFIPKKRVIEYYLVTLPEL

SEQ ID NO: 77100 - protein, 24 aa, Artificial Sequence
  Cyclic GFR-binding peptide
KVVMVQVEKVKPTRGVVKAIKVSR

SEQ ID NO: 77101 - protein, 27 aa, Artificial Sequence
  Cyclic GFR-binding peptide
SRVVMNSMEGIIVNSSDDMIQVTINSL

SEQ ID NO: 77102 - protein, 29 aa, Artificial Sequence
  Cyclic GFR-binding peptide
  MOD_RES (27)..(28): Xaa is C or S
DVQVEKVVKENEDVKAMKVSRLETPVXXA

SEQ ID NO: 77103 - protein, 20 aa, Artificial Sequence
  Cyclic GFR-binding peptide
VTAKKVKPKRGVIKRIQVPR

SEQ ID NO: 77104 - protein, 31 aa, Artificial Sequence
  Cyclic GFR-binding peptide
  MOD_RES (27)..(28): Xaa is C or S
DVQVEKVVKENEDVKAMKVSRLETPVXXAKP

SEQ ID NO: 77105 - protein, 27 aa, Artificial Sequence
  Cyclic GFR-binding peptide
  MOD_RES (26)..(26): Xaa is C or S
VQVEKIVNSSDDVKAVKVSRLKTPAXT

SEQ ID NO: 77106 - protein, 35 aa, Artificial Sequence; identical to SEQ ID NO: 26464
  Cyclic GFR-binding peptide
  MOD_RES (2)..(33)..(34): Xaa is C or S

SEQ ID NO: 77107 - protein, 29 aa, Artificial Sequence
  Cyclic GFR-binding peptide
VVMNSMEGIIVNSSDDMIQVTINSLQTPA

SEQ ID NO: 77108 - protein, 23 aa, Artificial Sequence
  Cyclic GFR-binding peptide
VMVTAKKVKPTRGVIKRIQVPRL

SEQ ID NO: 77109 - protein, 41 aa, Artificial Sequence; identical to SEQ ID NO: 26466
  Cyclic GFR-binding peptide
  MOD_RES (1)..(3)..(35)..(36): Xaa is C or S

SEQ ID NO: 77110 - protein, 29 aa, Artificial Sequence
  Cyclic GFR-binding peptide
  MOD_RES (29)..(29): Xaa is C or S
VVMVQVEKVKPTRGVVKAIKVSRLDQPVX

SEQ ID NO: 77111 - protein, 28 aa, Artificial Sequence
  Cyclic GFR-binding peptide
  MOD_RES (26)..(27): Xaa is C or S
SMEGIIKPTKGIMIQITINSLDQSVXXP

SEQ ID NO: 77112 - protein, 27 aa, Artificial Sequence
  Cyclic GFR-binding peptide
  MOD_RES (27)..(27): Xaa is C or S
MVTAKKVKPKRGVIKRIQVPRLAQPVX

SEQ ID NO: 77113 - protein, 34 aa, Artificial Sequence
  Cyclic GFR-binding peptide
  MOD_RES (28)..(29): Xaa is C or S
MNSMEGIIVNSSDDMIQVTINSLKTPAXXPKPVY

SEQ ID NO: 77114 - protein, 28 aa, Artificial Sequence
  Cyclic GFR-binding peptide
  MOD_RES (26)..(27): Xaa is C or S
SMEGIVKPKRGVMIQITINSLAQPVXXP

SEQ ID NO: 77115 - protein, 31 aa, Artificial Sequence
  Cyclic GFR-binding peptide
EELRNSLQELKPKKRVYEYYLVTLPEHHVRS

SEQ ID NO: 77116 - protein, 36 aa, Artificial Sequence; identical to SEQ ID NO: 26476
  Cyclic GFR-binding peptide
  MOD_RES (32)..(32): Xaa is C or S

SEQ ID NO: 77117 - protein, 30 aa, Artificial Sequence; identical to SEQ ID NO: 2194
  Cyclic GFR-binding peptide

SEQ ID NO: 77118 - protein, 30 aa, Artificial Sequence
  Cyclic GFR-binding peptide
  MOD_RES (1)..(1): Xaa is C or S
XSKVVMSMEGIVKPTRGVMIQITINSLDQP

SEQ ID NO: 77119 - protein, 22 aa, Artificial Sequence
  Cyclic GFR-binding peptide
IMVQVEKVKPKRGVVKAIKVSR

SEQ ID NO: 77120 - protein, 40 aa, Artificial Sequence; identical to SEQ ID NO: 26478
  Cyclic GFR-binding peptide
  MOD_RES (1)..(3)..(35)..(36): Xaa is C or S

SEQ ID NO: 77121 - protein, 34 aa, Artificial Sequence
  Cyclic GFR-binding peptide
  MOD_RES (29)..(30): Xaa is C or S
VIMVQVEKIKPTKGIVKAIKVSRLDQSVXXPSAS

SEQ ID NO: 77122 - protein, 28 aa, Artificial Sequence
  Cyclic GFR-binding peptide
  MOD_RES (1)..(1): Xaa is C or S
XGEVVMEVTAKKVVKDYEDIKRMQVPRL

SEQ ID NO: 77123 - protein, 38 aa, Artificial Sequence; identical to SEQ ID NO: 26480
  Cyclic GFR-binding peptide
  MOD_RES (1)..(3)..(35)..(36): Xaa is C or S

SEQ ID NO: 77124 - protein, 38 aa, Artificial Sequence; identical to SEQ ID NO: 26482
  Cyclic GFR-binding peptide
  MOD_RES (2)..(34)..(35): Xaa is C or S

SEQ ID NO: 77125 - protein, 39 aa, Artificial Sequence; identical to SEQ ID NO: 26484
  Cyclic GFR-binding peptide
  MOD_RES (2)..(34)..(35): Xaa is C or S

SEQ ID NO: 77126 - protein, 40 aa, Artificial Sequence; identical to SEQ ID NO: 26485
  Cyclic GFR-binding peptide
  MOD_RES (2)..(4)..(35)..(36): Xaa is C or S

SEQ ID NO: 77127 - protein, 34 aa, Artificial Sequence
  Cyclic GFR-binding peptide
  MOD_RES (29)..(30): Xaa is C or S
VMDVTAKKVVKENEDIKRMQVPRLETPVXXAKPI

SEQ ID NO: 77128 - protein, 37 aa, Artificial Sequence
  Cyclic GFR-binding peptide
  MOD_RES (2)..(4): Xaa is C or S
EXKXALHDELTNSLQEFIPKKRVIEYYLVTLPELQVQ

SEQ ID NO: 77129 - protein, 36 aa, Artificial Sequence; identical to SEQ ID NO: 26487
  Cyclic GFR-binding peptide
  MOD_RES (1)..(3)..(35)..(36): Xaa is C or S

SEQ ID NO: 77130 - protein, 27 aa, Artificial Sequence
  Cyclic GFR-binding peptide
HQLFNSLQEHQGQHPKIRYYLMTLPEE

SEQ ID NO: 77131 - protein, 32 aa, Artificial Sequence
  Cyclic GFR-binding peptide
  MOD_RES (26)..(27): Xaa is C or S
VQVEKVKPKRGVVKAIKVSRLAQPVXXPAASA

SEQ ID NO: 77132 - protein, 39 aa, Artificial Sequence; identical to SEQ ID NO: 26492
  Cyclic GFR-binding peptide
  MOD_RES (2)..(4)..(36)..(37): Xaa is C or S

SEQ ID NO: 77133 - protein, 37 aa, Artificial Sequence; identical to SEQ ID NO: 26493
  Cyclic GFR-binding peptide
  MOD_RES (1)..(33)..(34): Xaa is C or S

SEQ ID NO: 77134 - protein, 22 aa, Artificial Sequence
  Cyclic GFR-binding peptide
VTAKKIVNSSDDIKRVQVPRLK

SEQ ID NO: 77135 - protein, 38 aa, Artificial Sequence; identical to SEQ ID NO: 26496
  Cyclic GFR-binding peptide
  MOD_RES (2)..(34): Xaa is C or S

SEQ ID NO: 77136 - protein, 26 aa, Artificial Sequence
  Cyclic GFR-binding peptide
  MOD_RES (26)..(26): Xaa is C or S
VTAKKIVNSSDDIKRVQVPRLKTPAX

SEQ ID NO: 77137 - protein, 32 aa, Artificial Sequence
  Cyclic GFR-binding peptide
  MOD_RES (2)..(2): Xaa is C or S
KXALHDELTNSLQEFIPKKRVIEYYVVPLPEL

SEQ ID NO: 77138 - protein, 32 aa, Artificial Sequence
  Cyclic GFR-binding peptide
  MOD_RES (28)..(29): Xaa is C or S
MDVQVEKVVKENEDVKAMKVSRLETPVXXAKP

SEQ ID NO: 77139 - protein, 27 aa, Artificial Sequence
  Cyclic GFR-binding peptide
VVMNVQVEKIVNSSDDVKAVKVSRLQT

SEQ ID NO: 77140 - protein, 24 aa, Artificial Sequence
  Cyclic GFR-binding peptide
DVTAKKVVKENEDIKRMQVPRLET

SEQ ID NO: 77141 - protein, 34 aa, Artificial Sequence
  Cyclic GFR-binding peptide
  MOD_RES (28)..(28): Xaa is C or S
MNVQVEKIVNSSDDVKAVKVSRLKTPAXTPKTVH

SEQ ID NO: 77142 - protein, 35 aa, Artificial Sequence; identical to SEQ ID NO: 26504
  Cyclic GFR-binding peptide
  MOD_RES (31)..(32): Xaa is C or S

SEQ ID NO: 77143 - protein, 32 aa, Artificial Sequence
  Cyclic GFR-binding peptide
  MOD_RES (1)..(3): Xaa is C or S
XAXELHEELRNSLQELKPKKRVYEYYVVPLPE

SEQ ID NO: 77144 - protein, 35 aa, Artificial Sequence; identical to SEQ ID NO: 26507
  Cyclic GFR-binding peptide
  MOD_RES (1)..(3)..(34)..(35): Xaa is C or S

SEQ ID NO: 77145 - protein, 35 aa, Artificial Sequence
  Cyclic GFR-binding peptide
  MOD_RES (29)..(30): Xaa is C or S
VMESMEGIVVKDYEDMIQMTINSLETPVXXAKPIS

SEQ ID NO: 77146 - protein, 25 aa, Artificial Sequence
  Cyclic GFR-binding peptide
MNVTAKKIVNSSDDIKRVQVPRLQT

SEQ ID NO: 77147 - protein, 29 aa, Artificial Sequence
  Cyclic GFR-binding peptide
  MOD_RES (29)..(29): Xaa is C or S
VMNSMEGIIVNSSDDMIQVTINSLKTPAX

SEQ ID NO: 77148 - protein, 35 aa, Artificial Sequence
  Cyclic GFR-binding peptide
  MOD_RES (33)..(33): Xaa is C or S
ELRNSLQELKPKKRVYEYYLVTLPEHHVRSPQXKV

SEQ ID NO: 77149 - protein, 34 aa, Artificial Sequence
  Cyclic GFR-binding peptide
  MOD_RES (30)..(31): Xaa is C or S
KVIMSMEGIIKPTKGIMIQITINSLDQSVXXPSA

SEQ ID NO: 77150 - protein, 36 aa, Artificial Sequence; identical to SEQ ID NO: 26514
  Cyclic GFR-binding peptide
  MOD_RES (31)..(32): Xaa is C or S

SEQ ID NO: 77151 - protein, 42 aa, Artificial Sequence; identical to SEQ ID NO: 26515
  Cyclic GFR-binding peptide
  MOD_RES (1)..(38): Xaa is C or S

SEQ ID NO: 77152 - protein, 26 aa, Artificial Sequence
  Cyclic GFR-binding peptide
  MOD_RES (26)..(26): Xaa is C or S
VQVEKIKPTKGIVKAIKVSRLDQSVX

SEQ ID NO: 77153 - protein, 35 aa, Artificial Sequence
  Cyclic GFR-binding peptide
  MOD_RES (30)..(30): Xaa is C or S
VVMNSMEGIIVNSSDDMIQVTINSLKTPAXTPKTV

SEQ ID NO: 77154 - protein, 39 aa, Artificial Sequence; identical to SEQ ID NO: 26523
  Cyclic GFR-binding peptide
  MOD_RES (2)..(4): Xaa is C or S

SEQ ID NO: 77155 - protein, 34 aa, Artificial Sequence; identical to SEQ ID NO: 26529
  Cyclic GFR-binding peptide
  MOD_RES (1)..(33)..(34): Xaa is C or S

SEQ ID NO: 77156 - protein, 32 aa, Artificial Sequence; identical to SEQ ID NO: 26530
  Cyclic GFR-binding peptide
  MOD_RES (32)..(32): Xaa is C or S

SEQ ID NO: 77157 - protein, 29 aa, Artificial Sequence
  Cyclic GFR-binding peptide
  MOD_RES (1)..(3): Xaa is C or S
XGXARVVMNVTAKKIVNSSDDIKRVQVPR

SEQ ID NO: 77158 - protein, 37 aa, Artificial Sequence
  Cyclic GFR-binding peptide
  MOD_RES (31)..(31): Xaa is C or S
QLFNSLQEHQGQHPKIRYYVMPLPEEETPVXELGEDN

SEQ ID NO: 77159 - protein, 33 aa, Artificial Sequence; identical to SEQ ID NO: 26535
  Cyclic GFR-binding peptide
  MOD_RES (31)..(32): Xaa is C or S

SEQ ID NO: 77160 - protein, 34 aa, Artificial Sequence; identical to SEQ ID NO: 26537
  Cyclic GFR-binding peptide
  MOD_RES (1)..(33)..(34): Xaa is C or S

SEQ ID NO: 77161 - protein, 33 aa, Artificial Sequence
  Cyclic GFR-binding peptide
  MOD_RES (29)..(30): Xaa is C or S
VMEVTAKKVVKDYEDIKRMQVPRLETPVXXAKP

SEQ ID NO: 77162 - protein, 35 aa, Artificial Sequence; identical to SEQ ID NO: 26540
  Cyclic GFR-binding peptide
  MOD_RES (1)..(3)..(35): Xaa is C or S

SEQ ID NO: 77163 - protein, 27 aa, Artificial Sequence
  Cyclic GFR-binding peptide
FNSLQEHQGQHPKIRYYLMTLPEEETP

SEQ ID NO: 77164 - protein, 31 aa, Artificial Sequence
  Cyclic GFR-binding peptide
  MOD_RES (28)..(28): Xaa is C or S
MNVQVEKIVNSSDDVKAVKVSRLKTPAXTPK

SEQ ID NO: 77165 - protein, 35 aa, Artificial Sequence; identical to SEQ ID NO: 26547
  Cyclic GFR-binding peptide
  MOD_RES (1)..(3)..(34)..(35): Xaa is C or S

SEQ ID NO: 77166 - protein, 26 aa, Artificial Sequence
  Cyclic GFR-binding peptide
VVMESMEGIVVKDYEDMIQMTINSLE

SEQ ID NO: 77167 - protein, 23 aa, Artificial Sequence
  Cyclic GFR-binding peptide
VTAKKIVNSSDDIKRVQVPRLKT

SEQ ID NO: 77168 - protein, 22 aa, Artificial Sequence
  Cyclic GFR-binding peptide
DVTAKKVVKENEDIKRMQVPRL

SEQ ID NO: 77169 - protein, 29 aa, Artificial Sequence
  Cyclic GFR-binding peptide
  MOD_RES (28)..(28): Xaa is C or S
NSLQEHQGQHPKIRYYLMTLPEEETPVXE

SEQ ID NO: 77170 - protein, 36 aa, Artificial Sequence; identical to SEQ ID NO: 26552
  Cyclic GFR-binding peptide
  MOD_RES (1)..(3)..(35)..(36): Xaa is C or S

SEQ ID NO: 77171 - protein, 32 aa, Artificial Sequence
  Cyclic GFR-binding peptide
  MOD_RES (1)..(1): Xaa is C or S
XELHEELRNSLQELKPKKRVYEYYLVTLPEHH

SEQ ID NO: 77172 - protein, 28 aa, Artificial Sequence
  Cyclic GFR-binding peptide
  MOD_RES (27)..(28): Xaa is C or S
EVTAKKVVKDYEDIKRMQVPRLETPVXX

SEQ ID NO: 77173 - protein, 30 aa, Artificial Sequence
  Cyclic GFR-binding peptide
  MOD_RES (27)..(28): Xaa is C or S
NVTAKKIVNSSDDIKRVQVPRLKTPAXXPK

SEQ ID NO: 77174 - protein, 31 aa, Artificial Sequence
  Cyclic GFR-binding peptide
  MOD_RES (2)..(2): Xaa is C or S
EXKNHQLFNSLQEHQGQHPKIRYYVMPLPEE

SEQ ID NO: 77175 - protein, 26 aa, Artificial Sequence
  Cyclic GFR-binding peptide
VMNSMEGIIVNSSDDMIQVTINSLQT

SEQ ID NO: 77176 - protein, 40 aa, Artificial Sequence; identical to SEQ ID NO: 26556
  Cyclic GFR-binding peptide
  MOD_RES (2)..(4)..(36)..(37): Xaa is C or S

SEQ ID NO: 77177 - protein, 37 aa, Artificial Sequence; identical to SEQ ID NO: 26558
  Cyclic GFR-binding peptide
  MOD_RES (1)..(3)..(35): Xaa is C or S

SEQ ID NO: 77178 - protein, 23 aa, Artificial Sequence
  Cyclic GFR-binding peptide
SMEGIVKPTRGVMIQITINSLDQ

SEQ ID NO: 77179 - protein, 41 aa, Artificial Sequence; identical to SEQ ID NO: 26560
  Cyclic GFR-binding peptide
  MOD_RES (1)..(3)..(35)..(36): Xaa is C or S

SEQ ID NO: 77180 - protein, 36 aa, Artificial Sequence; identical to SEQ ID NO: 26561
  Cyclic GFR-binding peptide
  MOD_RES (31)..(32): Xaa is C or S

SEQ ID NO: 77181 - protein, 27 aa, Artificial Sequence
  Cyclic GFR-binding peptide
RVVMNVQVEKIVNSSDDVKAVKVSRLQ

SEQ ID NO: 77182 - protein, 39 aa, Artificial Sequence; identical to SEQ ID NO: 26566
  Cyclic GFR-binding peptide
  MOD_RES (2)..(34)..(35): Xaa is C or S

SEQ ID NO: 77183 - protein, 30 aa, Artificial Sequence
  Cyclic GFR-binding peptide
  MOD_RES (1)..(1): Xaa is C or S
XGEVVMESMEGIVVKDYEDMIQMTINSLET

SEQ ID NO: 77184 - protein, 44 aa, Artificial Sequence; identical to SEQ ID NO: 26569
  Cyclic GFR-binding peptide
  MOD_RES (2)..(4)..(41): Xaa is C or S

SEQ ID NO: 77185 - protein, 33 aa, Artificial Sequence
  Cyclic GFR-binding peptide
  MOD_RES (28)..(29): Xaa is C or S
MNSMEGIIVNSSDDMIQVTINSLKTPAXXPKPV

SEQ ID NO: 77186 - protein, 32 aa, Artificial Sequence
  Cyclic GFR-binding peptide
  MOD_RES (2)..(4): Xaa is C or S
RXGXGEVVMDVQVEKVVKENEDVKAMKVSRLE

SEQ ID NO: 77187 - protein, 35 aa, Artificial Sequence; identical to SEQ ID NO: 26576
  Cyclic GFR-binding peptide
  MOD_RES (2)..(33)..(34): Xaa is C or S

SEQ ID NO: 77188 - protein, 28 aa, Artificial Sequence
  Cyclic GFR-binding peptide
GEVVMESMEGIVVKDYEDMIQMTINSLE

SEQ ID NO: 77189 - protein, 22 aa, Artificial Sequence
  Cyclic GFR-binding peptide
NVTAKKIVNSSDDIKRVQVPRL

SEQ ID NO: 77190 - protein, 39 aa, Artificial Sequence; identical to SEQ ID NO: 26578
  Cyclic GFR-binding peptide
  MOD_RES (1)..(3): Xaa is C or S

SEQ ID NO: 77191 - protein, 27 aa, Artificial Sequence
  Cyclic GFR-binding peptide
MNSMEGIIVNSSDDMIQVTINSLQTPA

SEQ ID NO: 77192 - protein, 24 aa, Artificial Sequence
  Cyclic GFR-binding peptide
VVMDVQVEKVVKENEDVKAMKVSR

SEQ ID NO: 77193 - protein, 25 aa, Artificial Sequence
  Cyclic GFR-binding peptide
NVQVEKIVNSSDDVKAVKVSRLKTP

SEQ ID NO: 77194 - protein, 36 aa, Artificial Sequence; identical to SEQ ID NO: 26580
  Cyclic GFR-binding peptide
  MOD_RES (1)..(33): Xaa is C or S

SEQ ID NO: 77195 - protein, 30 aa, Artificial Sequence
  Cyclic GFR-binding peptide
  MOD_RES (2)..(2): Xaa is C or S
KXSKVIMVTAKKIKPTKGIIKRIQVPRLDQ

SEQ ID NO: 77196 - protein, 41 aa, Artificial Sequence; identical to SEQ ID NO: 26581
  Cyclic GFR-binding peptide
  MOD_RES (2)..(4)..(36)..(37): Xaa is C or S

SEQ ID NO: 77197 - protein, 36 aa, Artificial Sequence
  Cyclic GFR-binding peptide
  MOD_RES (32)..(32): Xaa is C or S
LTNSLQEFIPKKRVIEYYVVPLPELQVQTPRXQVNR

SEQ ID NO: 77198 - protein, 30 aa, Artificial Sequence
  Cyclic GFR-binding peptide
  MOD_RES (1)..(1): Xaa is C or S
XALHDELTNSLQEFIPKKRVIEYYLVTLPE

SEQ ID NO: 77199 - protein, 29 aa, Artificial Sequence
  Cyclic GFR-binding peptide
  MOD_RES (26)..(27): Xaa is C or S
SMEGIVVKDYEDMIQMTINSLETPVXXAK

SEQ ID NO: 77200 - protein, 23 aa, Artificial Sequence
  Cyclic GFR-binding peptide
VMSMEGIVKPTRGVMIQITINSL

SEQ ID NO: 77201 - protein, 32 aa, Artificial Sequence
  Cyclic GFR-binding peptide
  MOD_RES (30)..(30): Xaa is C or S
LFNSLQEHQGQHPKIRYYLMTLPEEETPVXEL

SEQ ID NO: 77202 - protein, 33 aa, Artificial Sequence
  Cyclic GFR-binding peptide
ELHEELRNSLQELKPKKRVYEYYVVPLPEHHVR

SEQ ID NO: 77203 - protein, 27 aa, Artificial Sequence
  Cyclic GFR-binding peptide
QLFNSLQEHQGQHPKIRYYLMTLPEEE

SEQ ID NO: 77204 - protein, 30 aa, Artificial Sequence
  Cyclic GFR-binding peptide
  MOD_RES (30)..(30): Xaa is C or S
NSLQELKPKKRVYEYYVVPLPEHHVRSPQX

SEQ ID NO: 77205 - protein, 30 aa, Artificial Sequence
  Cyclic GFR-binding peptide
  MOD_RES (28)..(29): Xaa is C or S
MNVQVEKIVNSSDDVKAVKVSRLKTPAXXP

SEQ ID NO: 77206 - protein, 32 aa, Artificial Sequence
  Cyclic GFR-binding peptide
  MOD_RES (1)..(3): Xaa is C or S
XGXARVVMNVTAKKIVNSSDDIKRVQVPRLQT

SEQ ID NO: 77207 - protein, 35 aa, Artificial Sequence; identical to SEQ ID NO: 26588
  Cyclic GFR-binding peptide
  MOD_RES (31)..(32): Xaa is C or S

SEQ ID NO: 77208 - protein, 23 aa, Artificial Sequence
  Cyclic GFR-binding peptide
RNSLQELKPKKRVYEYYVVPLPE

SEQ ID NO: 77209 - protein, 25 aa, Artificial Sequence
  Cyclic GFR-binding peptide
VVMEVQVEKVVKDYEDVKAMKVSRL

SEQ ID NO: 77210 - protein, 31 aa, Artificial Sequence
  Cyclic GFR-binding peptide
  MOD_RES (27)..(28): Xaa is C or S
NVQVEKIVNSSDDVKAVKVSRLKTPAXXPKP

SEQ ID NO: 77211 - protein, 39 aa, Artificial Sequence; identical to SEQ ID NO: 26591
  Cyclic GFR-binding peptide
  MOD_RES (2)..(4)..(35)..(36): Xaa is C or S

SEQ ID NO: 77212 - protein, 36 aa, Artificial Sequence; identical to SEQ ID NO: 26597
  Cyclic GFR-binding peptide
  MOD_RES (2)..(34): Xaa is C or S

SEQ ID NO: 77213 - protein, 34 aa, Artificial Sequence
  Cyclic GFR-binding peptide
  MOD_RES (29)..(30): Xaa is C or S
VMNSMEGIIVNSSDDMIQVTINSLQTPAXXPKPV

SEQ ID NO: 77214 - protein, 35 aa, Artificial Sequence
  Cyclic GFR-binding peptide
  MOD_RES (31)..(31): Xaa is C or S
TNSLQEFIPKKRVIEYYLVTLPELQVQTPRXQVNR

SEQ ID NO: 77215 - protein, 30 aa, Artificial Sequence
  Cyclic GFR-binding peptide
  MOD_RES (29)..(30): Xaa is C or S
VIMSMEGIVKPKRGVMIQITINSLAQPVXX

SEQ ID NO: 77216 - protein, 35 aa, Artificial Sequence; identical to SEQ ID NO: 26603
  Cyclic GFR-binding peptide
  MOD_RES (1)..(33)..(34): Xaa is C or S

SEQ ID NO: 77217 - protein, 33 aa, Artificial Sequence
  Cyclic GFR-binding peptide
  MOD_RES (1)..(3): Xaa is C or S
XGXSRVVMNVQVEKIVNSSDDVKAVKVSRLKTP

SEQ ID NO: 77218 - protein, 37 aa, Artificial Sequence; identical to SEQ ID NO: 26605
  Cyclic GFR-binding peptide
  MOD_RES (32)..(33): Xaa is C or S

SEQ ID NO: 77219 - protein, 27 aa, Artificial Sequence
  Cyclic GFR-binding peptide
VIMSMEGIIKPTKGIMIQITINSLDQS

SEQ ID NO: 77220 - protein, 37 aa, Artificial Sequence
  Cyclic GFR-binding peptide
  MOD_RES (2)..(4): Xaa is C or S
EXKXALHDELTNSLQEFIPKKRVIEYYVVPLPELQVQ

SEQ ID NO: 77221 - protein, 36 aa, Artificial Sequence; identical to SEQ ID NO: 26610
  Cyclic GFR-binding peptide

SEQ ID NO: 77222 - protein, 30 aa, Artificial Sequence
  Cyclic GFR-binding peptide
  MOD_RES (27)..(27): Xaa is C or S
NVQVEKIVNSSDDVKAVKVSRLKTPAXTPK

SEQ ID NO: 77223 - protein, 20 aa, Artificial Sequence
  Cyclic GFR-binding peptide
SMEGIVKPTRGVMIQITINS

SEQ ID NO: 77224 - protein, 30 aa, Artificial Sequence
  Cyclic GFR-binding peptide
  MOD_RES (26)..(27): Xaa is C or S
VTAKKVKPKRGVIKRIQVPRLAQPVXXPAA

SEQ ID NO: 77225 - protein, 28 aa, Artificial Sequence
  Cyclic GFR-binding peptide
  MOD_RES (27)..(28): Xaa is C or S
NVTAKKIVNSSDDIKRVQVPRLQTPAXX

SEQ ID NO: 77226 - protein, 33 aa, Artificial Sequence; identical to SEQ ID NO: 26611
  Cyclic GFR-binding peptide
  MOD_RES (1)..(33): Xaa is C or S

SEQ ID NO: 77227 - protein, 36 aa, Artificial Sequence
  Cyclic GFR-binding peptide
  MOD_RES (32)..(32): Xaa is C or S
HQLFNSLQEHQGQHPKIRYYVMPLPEEETPVXELGE

SEQ ID NO: 77228 - protein, 28 aa, Artificial Sequence
  Cyclic GFR-binding peptide
  MOD_RES (1)..(3): Xaa is C or S
XKXSKVVMVTAKKVKPTRGVIKRIQVPR

SEQ ID NO: 77229 - protein, 32 aa, Artificial Sequence
  Cyclic GFR-binding peptide
  MOD_RES (2)..(4): Xaa is C or S
RXEXKNHQLFNSLQEHQGQHPKIRYYLMTLPE

SEQ ID NO: 77230 - protein, 39 aa, Artificial Sequence; identical to SEQ ID NO: 26615
  Cyclic GFR-binding peptide
  MOD_RES (1)..(38): Xaa is C or S

SEQ ID NO: 77231 - protein, 33 aa, Artificial Sequence
  Cyclic GFR-binding peptide
  MOD_RES (2)..(4): Xaa is C or S
HXGXARVVMNSMEGIIVNSSDDMIQVTINSLQT

SEQ ID NO: 77232 - protein, 35 aa, Artificial Sequence
  Cyclic GFR-binding peptide
  MOD_RES (29)..(30): Xaa is C or S
VMNVTAKKIVNSSDDIKRVQVPRLKTPAXXPKPVY

SEQ ID NO: 77233 - protein, 27 aa, Artificial Sequence
  Cyclic GFR-binding peptide
VMEVTAKKVVKDYEDIKRMQVPRLETP

SEQ ID NO: 77234 - protein, 35 aa, Artificial Sequence; identical to SEQ ID NO: 26618
  Cyclic GFR-binding peptide
  MOD_RES (1)..(3)..(35): Xaa is C or S

SEQ ID NO: 77235 - protein, 30 aa, Artificial Sequence
  Cyclic GFR-binding peptide
  MOD_RES (2)..(4): Xaa is C or S
SXKXSKVIMVTAKKIKPTKGIIKRIQVPRL

SEQ ID NO: 77236 - protein, 26 aa, Artificial Sequence
  Cyclic GFR-binding peptide
VMNVTAKKIVNSSDDIKRVQVPRLQT

SEQ ID NO: 77237 - protein, 29 aa, Artificial Sequence
  Cyclic GFR-binding peptide
SRVIMSMEGIVKPKRGVMIQITINSLAQP

SEQ ID NO: 77238 - protein, 38 aa, Artificial Sequence; identical to SEQ ID NO: 26623
  Cyclic GFR-binding peptide
  MOD_RES (2)..(4)..(35)..(36): Xaa is C or S

SEQ ID NO: 77239 - protein, 28 aa, Artificial Sequence
  Cyclic GFR-binding peptide
  MOD_RES (26)..(27): Xaa is C or S
VTAKKIVNSSDDIKRVQVPRLQTPAXXP

SEQ ID NO: 77240 - protein, 34 aa, Artificial Sequence; identical to SEQ ID NO: 26626
  Cyclic GFR-binding peptide
  MOD_RES (1)..(1): Xaa is C or S

SEQ ID NO: 77241 - protein, 32 aa, Artificial Sequence
  Cyclic GFR-binding peptide
  MOD_RES (2)..(4): Xaa is C or S
SXKXSRVIMVQVEKVKPKRGVVKAIKVSRLAQ

SEQ ID NO: 77242 - protein, 33 aa, Artificial Sequence
  Cyclic GFR-binding peptide
EELRNSLQELKPKKRVYEYYLVTLPEHHVRSPQ

SEQ ID NO: 77243 - protein, 39 aa, Artificial Sequence; identical to SEQ ID NO: 26629
  Cyclic GFR-binding peptide
  MOD_RES (1)..(33)..(34): Xaa is C or S

SEQ ID NO: 77244 - protein, 24 aa, Artificial Sequence
  Cyclic GFR-binding peptide
MNSMEGIIVNSSDDMIQVTINSLQ

SEQ ID NO: 77245 - protein, 22 aa, Artificial Sequence
  Cyclic GFR-binding peptide
MVTAKKIKPTKGIIKRIQVPRL

SEQ ID NO: 77246 - protein, 38 aa, Artificial Sequence; identical to SEQ ID NO: 26630
  Cyclic GFR-binding peptide
  MOD_RES (2)..(4)..(36)..(37): Xaa is C or S

SEQ ID NO: 77247 - protein, 31 aa, Artificial Sequence
  Cyclic GFR-binding peptide
  MOD_RES (2)..(4): Xaa is C or S
RXGXGEVVMESMEGIVVKDYEDMIQMTINSL

SEQ ID NO: 77248 - protein, 28 aa, Artificial Sequence
  Cyclic GFR-binding peptide
  MOD_RES (27)..(28): Xaa is C or S
NVQVEKIVNSSDDVKAVKVSRLQTPAXX

SEQ ID NO: 77249 - protein, 26 aa, Artificial Sequence
  Cyclic GFR-binding peptide
LTNSLQEFIPKKRVIEYYLVTLPELQ

SEQ ID NO: 77250 - protein, 27 aa, Artificial Sequence
  Cyclic GFR-binding peptide
  MOD_RES (1)..(1): Xaa is C or S
XSKVVMVTAKKVKPTRGVIKRIQVPRL

SEQ ID NO: 77251 - protein, 25 aa, Artificial Sequence
  Cyclic GFR-binding peptide
MNVTAKKIVNSSDDIKRVQVPRLKT

SEQ ID NO: 77252 - protein, 34 aa, Artificial Sequence
  Cyclic GFR-binding peptide
  MOD_RES (29)..(30): Xaa is C or S
VVMVTAKKVKPTRGVIKRIQVPRLDQPVXXPSAS

SEQ ID NO: 77253 - protein, 32 aa, Artificial Sequence
  Cyclic GFR-binding peptide
  MOD_RES (1)..(3): Xaa is C or S
XKXSKVVMSMEGIVKPTRGVMIQITINSLDQP

SEQ ID NO: 77254 - protein, 29 aa, Artificial Sequence
  Cyclic GFR-binding peptide
  MOD_RES (1)..(3): Xaa is C or S
XKXSKVVMVTAKKVKPTRGVIKRIQVPRL

SEQ ID NO: 77255 - protein, 31 aa, Artificial Sequence
  Cyclic GFR-binding peptide
  MOD_RES (2)..(2): Xaa is C or S
KXSKVVMSMEGIVKPTRGVMIQITINSLDQP

SEQ ID NO: 77256 - protein, 26 aa, Artificial Sequence
  Cyclic GFR-binding peptide
IMSMEGIIKPTKGIMIQITINSLDQS

SEQ ID NO: 77257 - protein, 35 aa, Artificial Sequence; identical to SEQ ID NO: 26639
  Cyclic GFR-binding peptide

SEQ ID NO: 77258 - protein, 37 aa, Artificial Sequence; identical to SEQ ID NO: 26644
  Cyclic GFR-binding peptide
  MOD_RES (1)..(33): Xaa is C or S

SEQ ID NO: 77259 - protein, 33 aa, Artificial Sequence
  Cyclic GFR-binding peptide
  MOD_RES (28)..(29): Xaa is C or S
MNSMEGIIVNSSDDMIQVTINSLQTPAXXPKPV

SEQ ID NO: 77260 - protein, 35 aa, Artificial Sequence; identical to SEQ ID NO: 26645
  Cyclic GFR-binding peptide
  MOD_RES (1)..(35): Xaa is C or S

SEQ ID NO: 77261 - protein, 43 aa, Artificial Sequence; identical to SEQ ID NO: 26649
  Cyclic GFR-binding peptide
  MOD_RES (2)..(4)..(41): Xaa is C or S

SEQ ID NO: 77262 - protein, 30 aa, Artificial Sequence
  Cyclic GFR-binding peptide
  MOD_RES (1)..(1): Xaa is C or S
XSRVIMVTAKKVKPKRGVIKRIQVPRLAQP

SEQ ID NO: 77263 - protein, 34 aa, Artificial Sequence
  Cyclic GFR-binding peptide
  MOD_RES (29)..(30): Xaa is C or S
VMNVTAKKIVNSSDDIKRVQVPRLQTPAXXPKPV

SEQ ID NO: 77264 - protein, 25 aa, Artificial Sequence
  Cyclic GFR-binding peptide
VMVQVEKVKPTRGVVKAIKVSRLDQ

SEQ ID NO: 77265 - protein, 37 aa, Artificial Sequence; identical to SEQ ID NO: 26655
  Cyclic GFR-binding peptide
  MOD_RES (2)..(34)..(35): Xaa is C or S

SEQ ID NO: 77266 - protein, 28 aa, Artificial Sequence
  Cyclic GFR-binding peptide
SRVIMVQVEKVKPKRGVVKAIKVSRLAQ

SEQ ID NO: 77267 - protein, 33 aa, Artificial Sequence
  Cyclic GFR-binding peptide
  MOD_RES (27)..(27): Xaa is C or S
NVTAKKIVNSSDDIKRVQVPRLKTPAXTPKTVH

SEQ ID NO: 77268 - protein, 32 aa, Artificial Sequence
  Cyclic GFR-binding peptide
  MOD_RES (30)..(31): Xaa is C or S
VVMEVTAKKVVKDYEDIKRMQVPRLETPVXXA

SEQ ID NO: 77269 - protein, 37 aa, Artificial Sequence; identical to SEQ ID NO: 26656
  Cyclic GFR-binding peptide
  MOD_RES (36)..(36): Xaa is C or S

SEQ ID NO: 77270 - protein, 32 aa, Artificial Sequence; identical to SEQ ID NO: 26657
  Cyclic GFR-binding peptide

SEQ ID NO: 77271 - protein, 25 aa, Artificial Sequence
  Cyclic GFR-binding peptide
LRNSLQELKPKKRVYEYYLVTLPEH

SEQ ID NO: 77272 - protein, 32 aa, Artificial Sequence; identical to SEQ ID NO: 26662
  Cyclic GFR-binding peptide
  MOD_RES (31)..(32): Xaa is C or S

SEQ ID NO: 77273 - protein, 25 aa, Artificial Sequence
  Cyclic GFR-binding peptide
RVVMNSMEGIIVNSSDDMIQVTINS

SEQ ID NO: 77274 - protein, 38 aa, Artificial Sequence; identical to SEQ ID NO: 26664
  Cyclic GFR-binding peptide
  MOD_RES (32)..(33): Xaa is C or S

SEQ ID NO: 77275 - protein, 31 aa, Artificial Sequence
  Cyclic GFR-binding peptide
  MOD_RES (28)..(29): Xaa is C or S
MEVTAKKVVKDYEDIKRMQVPRLETPVXXAK

SEQ ID NO: 77276 - protein, 28 aa, Artificial Sequence
  Cyclic GFR-binding peptide
  MOD_RES (26)..(27): Xaa is C or S
SMEGIVVKENEDMIQMTINSLETPVXXA

SEQ ID NO: 77277 - protein, 24 aa, Artificial Sequence
  Cyclic GFR-binding peptide
VMVTAKKVKPTRGVIKRIQVPRLD

SEQ ID NO: 77278 - protein, 30 aa, Artificial Sequence
  Cyclic GFR-binding peptide
  MOD_RES (30)..(30): Xaa is C or S
RVIMVTAKKVKPKRGVIKRIQVPRLAQPVX

SEQ ID NO: 77279 - protein, 32 aa, Artificial Sequence
  Cyclic GFR-binding peptide
  MOD_RES (2)..(2): Xaa is C or S
EXKNHQLFNSLQEHQGQHPKIRYYVMPLPEEE

SEQ ID NO: 77280 - protein, 31 aa, Artificial Sequence
  Cyclic GFR-binding peptide
  MOD_RES (28)..(29): Xaa is C or S
MNVTAKKIVNSSDDIKRVQVPRLQTPAXXPK

SEQ ID NO: 77281 - protein, 38 aa, Artificial Sequence; identical to SEQ ID NO: 26668
  Cyclic GFR-binding peptide
  MOD_RES (1)..(3)..(37): Xaa is C or S

SEQ ID NO: 77282 - protein, 29 aa, Artificial Sequence
  Cyclic GFR-binding peptide
  MOD_RES (29)..(29): Xaa is C or S
VMNVQVEKIVNSSDDVKAVKVSRLKTPAX

SEQ ID NO: 77283 - protein, 27 aa, Artificial Sequence
  Cyclic GFR-binding peptide
VIMVQVEKIKPTKGIVKAIKVSRLDQS

SEQ ID NO: 77284 - protein, 38 aa, Artificial Sequence; identical to SEQ ID NO: 26672
  Cyclic GFR-binding peptide
  MOD_RES (2)..(4): Xaa is C or S

SEQ ID NO: 77285 - protein, 31 aa, Artificial Sequence; identical to SEQ ID NO: 26673
  Cyclic GFR-binding peptide
  MOD_RES (1)..(1): Xaa is C or S

SEQ ID NO: 77286 - protein, 41 aa, Artificial Sequence; identical to SEQ ID NO: 26674
  Cyclic GFR-binding peptide
  MOD_RES (2)..(4)..(36)..(37): Xaa is C or S

SEQ ID NO: 77287 - protein, 25 aa, Artificial Sequence
  Cyclic GFR-binding peptide
VVMEVTAKKVVKDYEDIKRMQVPRL

SEQ ID NO: 77288 - protein, 32 aa, Artificial Sequence
  Cyclic GFR-binding peptide
  MOD_RES (2)..(4): Xaa is C or S
RXGXGEVVMDSMEGIVVKENEDMIQMTINSLE

SEQ ID NO: 77289 - protein, 33 aa, Artificial Sequence
  Cyclic GFR-binding peptide
  MOD_RES (28)..(28): Xaa is C or S
MNVQVEKIVNSSDDVKAVKVSRLKTPAXTPKTV

SEQ ID NO: 77290 - protein, 29 aa, Artificial Sequence
  Cyclic GFR-binding peptide
RVIMVQVEKVKPKRGVVKAIKVSRLAQPV

SEQ ID NO: 77291 - protein, 36 aa, Artificial Sequence
  Cyclic GFR-binding peptide
  MOD_RES (34)..(34): Xaa is C or S
EELRNSLQELKPKKRVYEYYVVPLPEHHVRSPQXKV

SEQ ID NO: 77292 - protein, 35 aa, Artificial Sequence; identical to SEQ ID NO: 26679
  Cyclic GFR-binding peptide
  MOD_RES (2)..(4): Xaa is C or S

SEQ ID NO: 77293 - protein, 26 aa, Artificial Sequence
  Cyclic GFR-binding peptide
ARVVMNSMEGIIVNSSDDMIQVTINS

SEQ ID NO: 77294 - protein, 29 aa, Artificial Sequence
  Cyclic GFR-binding peptide
  MOD_RES (1)..(1): Xaa is C or S
XSRVIMVTAKKVKPKRGVIKRIQVPRLAQ

SEQ ID NO: 77295 - protein, 38 aa, Artificial Sequence; identical to SEQ ID NO: 26683
  Cyclic GFR-binding peptide
  MOD_RES (1)..(38): Xaa is C or S

SEQ ID NO: 77296 - protein, 26 aa, Artificial Sequence
  Cyclic GFR-binding peptide
SRVVMNSMEGIIVNSSDDMIQVTINS

SEQ ID NO: 77297 - protein, 31 aa, Artificial Sequence
  Cyclic GFR-binding peptide
  MOD_RES (1)..(3): Xaa is C or S
XGXGEVVMEVTAKKVVKDYEDIKRMQVPRLE

SEQ ID NO: 77298 - protein, 34 aa, Artificial Sequence; identical to SEQ ID NO: 26686
  Cyclic GFR-binding peptide
  MOD_RES (1)..(33): Xaa is C or S

SEQ ID NO: 77299 - protein, 37 aa, Artificial Sequence; identical to SEQ ID NO: 26687
  Cyclic GFR-binding peptide
  MOD_RES (31)..(32): Xaa is C or S

SEQ ID NO: 77300 - protein, 26 aa, Artificial Sequence
  Cyclic GFR-binding peptide
VMDVTAKKVVKENEDIKRMQVPRLET

SEQ ID NO: 77301 - protein, 30 aa, Artificial Sequence
  Cyclic GFR-binding peptide
  MOD_RES (28)..(29): Xaa is C or S
VMSMEGIVKPTRGVMIQITINSLDQPVXXP

SEQ ID NO: 77302 - protein, 28 aa, Artificial Sequence
  Cyclic GFR-binding peptide
  MOD_RES (28)..(28): Xaa is C or S
MNVTAKKIVNSSDDIKRVQVPRLKTPAX

SEQ ID NO: 77303 - protein, 31 aa, Artificial Sequence
  Cyclic GFR-binding peptide
  MOD_RES (29)..(30): Xaa is C or S
VIMVQVEKVKPKRGVVKAIKVSRLAQPVXXP

SEQ ID NO: 77304 - protein, 31 aa, Artificial Sequence
  Cyclic GFR-binding peptide
ALHDELTNSLQEFIPKKRVIEYYLVTLPELQ

SEQ ID NO: 77305 - protein, 31 aa, Artificial Sequence
  Cyclic GFR-binding peptide
  MOD_RES (26)..(27): Xaa is C or S
VQVEKVVKENEDVKAMKVSRLETPVXXAKPI

SEQ ID NO: 77306 - protein, 20 aa, Artificial Sequence
  Cyclic GFR-binding peptide
VTAKKIKPTKGIIKRIQVPR

SEQ ID NO: 77307 - protein, 28 aa, Artificial Sequence
  Cyclic GFR-binding peptide
  MOD_RES (2)..(2): Xaa is C or S
GXSRVVMNSMEGIIVNSSDDMIQVTINS

SEQ ID NO: 77308 - protein, 28 aa, Artificial Sequence
  Cyclic GFR-binding peptide
  MOD_RES (26)..(27): Xaa is C or S
VQVEKVKPTRGVVKAIKVSRLDQPVXXP

SEQ ID NO: 77309 - protein, 40 aa, Artificial Sequence; identical to SEQ ID NO: 26694
  Cyclic GFR-binding peptide
  MOD_RES (2)..(4)..(35)..(36): Xaa is C or S

SEQ ID NO: 77310 - protein, 32 aa, Artificial Sequence
  Cyclic GFR-binding peptide
  MOD_RES (30)..(30): Xaa is C or S
NSLQELKPKKRVYEYYLVTLPEHHVRSPQXKV

SEQ ID NO: 77311 - protein, 35 aa, Artificial Sequence; identical to SEQ ID NO: 26696
  Cyclic GFR-binding peptide
  MOD_RES (2)..(4)..(35): Xaa is C or S

SEQ ID NO: 77312 - protein, 37 aa, Artificial Sequence; identical to SEQ ID NO: 26697
  Cyclic GFR-binding peptide
  MOD_RES (2)..(2): Xaa is C or S

SEQ ID NO: 77313 - protein, 37 aa, Artificial Sequence; identical to SEQ ID NO: 26701
  Cyclic GFR-binding peptide
  MOD_RES (32)..(33): Xaa is C or S

SEQ ID NO: 77314 - protein, 34 aa, Artificial Sequence; identical to SEQ ID NO: 26702
  Cyclic GFR-binding peptide
  MOD_RES (2)..(4): Xaa is C or S

SEQ ID NO: 77315 - protein, 34 aa, Artificial Sequence
  Cyclic GFR-binding peptide
  MOD_RES (31)..(31): Xaa is C or S
TNSLQEFIPKKRVIEYYLVTLPELQVQTPRXQVN

SEQ ID NO: 77316 - protein, 28 aa, Artificial Sequence
  Cyclic GFR-binding peptide
NSLQEFIPKKRVIEYYVVPLPELQVQTP

SEQ ID NO: 77317 - protein, 39 aa, Artificial Sequence; identical to SEQ ID NO: 26707
  Cyclic GFR-binding peptide
  MOD_RES (1)..(33)..(34): Xaa is C or S

SEQ ID NO: 77318 - protein, 31 aa, Artificial Sequence
  Cyclic GFR-binding peptide
  MOD_RES (30)..(30): Xaa is C or S
NSLQELKPKKRVYEYYVVPLPEHHVRSPQXK

SEQ ID NO: 77319 - protein, 39 aa, Artificial Sequence; identical to SEQ ID NO: 26711
  Cyclic GFR-binding peptide
  MOD_RES (2)..(33)..(34): Xaa is C or S

SEQ ID NO: 77320 - protein, 27 aa, Artificial Sequence
  Cyclic GFR-binding peptide
  MOD_RES (1)..(1): Xaa is C or S
XGEVVMESMEGIVVKDYEDMIQMTINS

SEQ ID NO: 77321 - protein, 32 aa, Artificial Sequence
  Cyclic GFR-binding peptide
  MOD_RES (32)..(32): Xaa is C or S
HQLFNSLQEHQGQHPKIRYYLMTLPEEETPVX

SEQ ID NO: 77322 - protein, 29 aa, Artificial Sequence
  Cyclic GFR-binding peptide
  MOD_RES (29)..(29): Xaa is C or S
VMEVQVEKVVKDYEDVKAMKVSRLETPVX

SEQ ID NO: 77323 - protein, 30 aa, Artificial Sequence
  Cyclic GFR-binding peptide
  MOD_RES (30)..(30): Xaa is C or S
VVMNSMEGIIVNSSDDMIQVTINSLKTPAX

SEQ ID NO: 77324 - protein, 25 aa, Artificial Sequence
  Cyclic GFR-binding peptide
FNSLQEHQGQHPKIRYYVMPLPEEE

SEQ ID NO: 77325 - protein, 27 aa, Artificial Sequence
  Cyclic GFR-binding peptide
GEVVMDSMEGIVVKENEDMIQMTINSL

SEQ ID NO: 77326 - protein, 31 aa, Artificial Sequence
  Cyclic GFR-binding peptide
  MOD_RES (1)..(1): Xaa is C or S
XGEVVMEVTAKKVVKDYEDIKRMQVPRLETP

SEQ ID NO: 77327 - protein, 31 aa, Artificial Sequence
  Cyclic GFR-binding peptide
  MOD_RES (28)..(29): Xaa is C or S
MNVTAKKIVNSSDDIKRVQVPRLKTPAXXPK

SEQ ID NO: 77328 - protein, 33 aa, Artificial Sequence
  Cyclic GFR-binding peptide
  MOD_RES (30)..(30): Xaa is C or S
NSLQELKPKKRVYEYYLVTLPEHHVRSPQXKVS

SEQ ID NO: 77329 - protein, 40 aa, Artificial Sequence; identical to SEQ ID NO: 26716
  Cyclic GFR-binding peptide
  MOD_RES (1)..(3)..(35)..(36): Xaa is C or S

SEQ ID NO: 77330 - protein, 40 aa, Artificial Sequence; identical to SEQ ID NO: 26720
  Cyclic GFR-binding peptide
  MOD_RES (34)..(34): Xaa is C or S

SEQ ID NO: 77331 - protein, 30 aa, Artificial Sequence; identical to SEQ ID NO: 26723
  Cyclic GFR-binding peptide

SEQ ID NO: 77332 - protein, 32 aa, Artificial Sequence
  Cyclic GFR-binding peptide
  MOD_RES (1)..(3): Xaa is C or S
XEXKNHQLFNSLQEHQGQHPKIRYYLMTLPEE

SEQ ID NO: 77333 - protein, 38 aa, Artificial Sequence; identical to SEQ ID NO: 26729
  Cyclic GFR-binding peptide
  MOD_RES (1)..(3)..(35)..(36): Xaa is C or S

SEQ ID NO: 77334 - protein, 31 aa, Artificial Sequence
  Cyclic GFR-binding peptide
  MOD_RES (26)..(27): Xaa is C or S
SMEGIVKPTRGVMIQITINSLDQPVXXPSAS

SEQ ID NO: 77335 - protein, 28 aa, Artificial Sequence
  Cyclic GFR-binding peptide
  MOD_RES (28)..(28): Xaa is C or S
MNVTAKKIVNSSDDIKRVQVPRLQTPAX

SEQ ID NO: 77336 - protein, 29 aa, Artificial Sequence
  Cyclic GFR-binding peptide
  MOD_RES (26)..(27): Xaa is C or S
VQVEKVKPKRGVVKAIKVSRLAQPVXXPA

SEQ ID NO: 77337 - protein, 41 aa, Artificial Sequence; identical to SEQ ID NO: 26736
  Cyclic GFR-binding peptide
  MOD_RES (2)..(4)..(35)..(36): Xaa is C or S

SEQ ID NO: 77338 - protein, 36 aa, Artificial Sequence; identical to SEQ ID NO: 26737
  Cyclic GFR-binding peptide
  MOD_RES (2)..(4)..(35)..(36): Xaa is C or S

SEQ ID NO: 77339 - protein, 26 aa, Artificial Sequence
  Cyclic GFR-binding peptide
FNSLQEHQGQHPKIRYYLMTLPEEET

SEQ ID NO: 77340 - protein, 35 aa, Artificial Sequence
  Cyclic GFR-binding peptide
  MOD_RES (34)..(34): Xaa is C or S
DELTNSLQEFIPKKRVIEYYVVPLPELQVQTPRXQ

SEQ ID NO: 77341 - protein, 21 aa, Artificial Sequence
  Cyclic GFR-binding peptide
SMEGIVVKDYEDMIQMTINSL

SEQ ID NO: 77342 - protein, 42 aa, Artificial Sequence; identical to SEQ ID NO: 26746
  Cyclic GFR-binding peptide
  MOD_RES (2)..(39): Xaa is C or S

SEQ ID NO: 77343 - protein, 34 aa, Artificial Sequence
  Cyclic GFR-binding peptide
  MOD_RES (29)..(30): Xaa is C or S
VMNVTAKKIVNSSDDIKRVQVPRLKTPAXXPKPV

SEQ ID NO: 77344 - protein, 27 aa, Artificial Sequence
  Cyclic GFR-binding peptide
  MOD_RES (1)..(1): Xaa is C or S
XSRVVMNVQVEKIVNSSDDVKAVKVSR

SEQ ID NO: 77345 - protein, 33 aa, Artificial Sequence
  Cyclic GFR-binding peptide
  MOD_RES (28)..(29): Xaa is C or S
MEVQVEKVVKDYEDVKAMKVSRLETPVXXAKPI

SEQ ID NO: 77346 - protein, 28 aa, Artificial Sequence
  Cyclic GFR-binding peptide
HEELRNSLQELKPKKRVYEYYLVTLPEH

SEQ ID NO: 77347 - protein, 28 aa, Artificial Sequence
  Cyclic GFR-binding peptide
  MOD_RES (1)..(1): Xaa is C or S
XSRVIMVQVEKVKPKRGVVKAIKVSRLA

SEQ ID NO: 77348 - protein, 31 aa, Artificial Sequence
  Cyclic GFR-binding peptide
  MOD_RES (2)..(2): Xaa is C or S
KXSKVIMVTAKKIKPTKGIIKRIQVPRLDQS

SEQ ID NO: 77349 - protein, 36 aa, Artificial Sequence; identical to SEQ ID NO: 26752
  Cyclic GFR-binding peptide
  MOD_RES (2)..(4)..(36): Xaa is C or S

SEQ ID NO: 77350 - protein, 30 aa, Artificial Sequence
  Cyclic GFR-binding peptide
  MOD_RES (29)..(29): Xaa is C or S
FNSLQEHQGQHPKIRYYLMTLPEEETPVXE

SEQ ID NO: 77351 - protein, 30 aa, Artificial Sequence; identical to SEQ ID NO: 2214
  Cyclic GFR-binding peptide

SEQ ID NO: 77352 - protein, 30 aa, Artificial Sequence
  Cyclic GFR-binding peptide
GEVVMEVTAKKVVKDYEDIKRMQVPRLETP

SEQ ID NO: 77353 - protein, 30 aa, Artificial Sequence
  Cyclic GFR-binding peptide
  MOD_RES (28)..(29): Xaa is C or S
MNVQVEKIVNSSDDVKAVKVSRLQTPAXXP

SEQ ID NO: 77354 - protein, 37 aa, Artificial Sequence
  Cyclic GFR-binding peptide
  MOD_RES (34)..(34): Xaa is C or S
DELTNSLQEFIPKKRVIEYYVVPLPELQVQTPRXQVN

SEQ ID NO: 77355 - protein, 29 aa, Artificial Sequence
  Cyclic GFR-binding peptide
  MOD_RES (27)..(28): Xaa is C or S
MSMEGIVKPKRGVMIQITINSLAQPVXXP

SEQ ID NO: 77356 - protein, 33 aa, Artificial Sequence; identical to SEQ ID NO: 26766
  Cyclic GFR-binding peptide
  MOD_RES (2)..(2): Xaa is C or S

SEQ ID NO: 77357 - protein, 26 aa, Artificial Sequence
  Cyclic GFR-binding peptide
LFNSLQEHQGQHPKIRYYLMTLPEEE

SEQ ID NO: 77358 - protein, 38 aa, Artificial Sequence; identical to SEQ ID NO: 26770
  Cyclic GFR-binding peptide
  MOD_RES (35)..(35): Xaa is C or S

SEQ ID NO: 77359 - protein, 28 aa, Artificial Sequence
  Cyclic GFR-binding peptide
  MOD_RES (1)..(3): Xaa is C or S
XKXSKVIMVQVEKIKPTKGIVKAIKVSR

SEQ ID NO: 77360 - protein, 36 aa, Artificial Sequence; identical to SEQ ID NO: 26771
  Cyclic GFR-binding peptide
  MOD_RES (1)..(3)..(35): Xaa is C or S

SEQ ID NO: 77361 - protein, 37 aa, Artificial Sequence; identical to SEQ ID NO: 26772
  Cyclic GFR-binding peptide
  MOD_RES (1)..(32)..(33): Xaa is C or S

SEQ ID NO: 77362 - protein, 21 aa, Artificial Sequence
  Cyclic GFR-binding peptide
SMEGIVVKENEDMIQMTINSL

SEQ ID NO: 77363 - protein, 33 aa, Artificial Sequence
  Cyclic GFR-binding peptide
  MOD_RES (1)..(3): Xaa is C or S
XGXGEVVMEVTAKKVVKDYEDIKRMQVPRLETP

SEQ ID NO: 77364 - protein, 38 aa, Artificial Sequence; identical to SEQ ID NO: 26775
  Cyclic GFR-binding peptide
  MOD_RES (35)..(35): Xaa is C or S

SEQ ID NO: 77365 - protein, 32 aa, Artificial Sequence
  Cyclic GFR-binding peptide
  MOD_RES (26)..(26): Xaa is C or S
SMEGIIVNSSDDMIQVTINSLKTPAXTPKTVH

SEQ ID NO: 77366 - protein, 31 aa, Artificial Sequence
  Cyclic GFR-binding peptide
  MOD_RES (28)..(29): Xaa is C or S
IMVTAKKIKPTKGIIKRIQVPRLDQSVXXPS

SEQ ID NO: 77367 - protein, 33 aa, Artificial Sequence; identical to SEQ ID NO: 26779
  Cyclic GFR-binding peptide
  MOD_RES (2)..(33): Xaa is C or S

SEQ ID NO: 77368 - protein, 29 aa, Artificial Sequence
  Cyclic GFR-binding peptide
ARVVMNVQVEKIVNSSDDVKAVKVSRLQT

SEQ ID NO: 77369 - protein, 30 aa, Artificial Sequence
  Cyclic GFR-binding peptide
  MOD_RES (29)..(30): Xaa is C or S
VIMVTAKKIKPTKGIIKRIQVPRLDQSVXX

SEQ ID NO: 77370 - protein, 29 aa, Artificial Sequence
  Cyclic GFR-binding peptide
  MOD_RES (26)..(27): Xaa is C or S
VQVEKIVNSSDDVKAVKVSRLKTPAXXPK

SEQ ID NO: 77371 - protein, 38 aa, Artificial Sequence; identical to SEQ ID NO: 26781
  Cyclic GFR-binding peptide
  MOD_RES (2)..(4)..(36)..(37): Xaa is C or S

SEQ ID NO: 77372 - protein, 25 aa, Artificial Sequence
  Cyclic GFR-binding peptide
DVTAKKVVKENEDIKRMQVPRLETP

SEQ ID NO: 77373 - protein, 40 aa, Artificial Sequence; identical to SEQ ID NO: 26784
  Cyclic GFR-binding peptide
  MOD_RES (1)..(3)..(34)..(35): Xaa is C or S

SEQ ID NO: 77374 - protein, 29 aa, Artificial Sequence
  Cyclic GFR-binding peptide
  MOD_RES (26)..(27): Xaa is C or S
VTAKKVVKDYEDIKRMQVPRLETPVXXAK

SEQ ID NO: 77375 - protein, 41 aa, Artificial Sequence; identical to SEQ ID NO: 26787
  Cyclic GFR-binding peptide
  MOD_RES (37)..(37): Xaa is C or S

SEQ ID NO: 77376 - protein, 25 aa, Artificial Sequence
  Cyclic GFR-binding peptide
NSLQEHQGQHPKIRYYLMTLPEEET

SEQ ID NO: 77377 - protein, 33 aa, Artificial Sequence
  Cyclic GFR-binding peptide
  MOD_RES (30)..(31): Xaa is C or S
KVVMVTAKKVKPTRGVIKRIQVPRLDQPVXXPS

SEQ ID NO: 77378 - protein, 32 aa, Artificial Sequence
  Cyclic GFR-binding peptide
  MOD_RES (26)..(27): Xaa is C or S
SMEGIIVNSSDDMIQVTINSLKTPAXXPKPVY

SEQ ID NO: 77379 - protein, 30 aa, Artificial Sequence
  Cyclic GFR-binding peptide
  MOD_RES (27)..(28): Xaa is C or S
NSMEGIIVNSSDDMIQVTINSLKTPAXXPK

SEQ ID NO: 77380 - protein, 34 aa, Artificial Sequence; identical to SEQ ID NO: 26800
  Cyclic GFR-binding peptide
  MOD_RES (1)..(3): Xaa is C or S

SEQ ID NO: 77381 - protein, 29 aa, Artificial Sequence
  Cyclic GFR-binding peptide
SRVVMNVTAKKIVNSSDDIKRVQVPRLKT

SEQ ID NO: 77382 - protein, 26 aa, Artificial Sequence
  Cyclic GFR-binding peptide
EVVMDVQVEKVVKENEDVKAMKVSRL

SEQ ID NO: 77383 - protein, 33 aa, Artificial Sequence
  Cyclic GFR-binding peptide
  MOD_RES (2)..(4): Xaa is C or S
HXGXSRVVMNVQVEKIVNSSDDVKAVKVSRLKT

SEQ ID NO: 77384 - protein, 28 aa, Artificial Sequence
  Cyclic GFR-binding peptide
  MOD_RES (28)..(28): Xaa is C or S
MNVQVEKIVNSSDDVKAVKVSRLKTPAX

SEQ ID NO: 77385 - protein, 39 aa, Artificial Sequence; identical to SEQ ID NO: 26806
  Cyclic GFR-binding peptide
  MOD_RES (2)..(4): Xaa is C or S

SEQ ID NO: 77386 - protein, 28 aa, Artificial Sequence
  Cyclic GFR-binding peptide
VVMDVQVEKVVKENEDVKAMKVSRLETP

SEQ ID NO: 77387 - protein, 28 aa, Artificial Sequence
  Cyclic GFR-binding peptide
  MOD_RES (1)..(3): Xaa is C or S
XKXSKVIMSMEGIIKPTKGIMIQITINS

SEQ ID NO: 77388 - protein, 29 aa, Artificial Sequence
  Cyclic GFR-binding peptide
RNSLQELKPKKRVYEYYLVTLPEHHVRSP

SEQ ID NO: 77389 - protein, 24 aa, Artificial Sequence
  Cyclic GFR-binding peptide
MVQVEKIKPTKGIVKAIKVSRLDQ

SEQ ID NO: 77390 - protein, 34 aa, Artificial Sequence
  Cyclic GFR-binding peptide
  MOD_RES (2)..(4): Xaa is C or S
HXGXSRVVMNVTAKKIVNSSDDIKRVQVPRLKTP

SEQ ID NO: 77391 - protein, 30 aa, Artificial Sequence
  Cyclic GFR-binding peptide
ALHDELTNSLQEFIPKKRVIEYYLVTLPEL

SEQ ID NO: 77392 - protein, 32 aa, Artificial Sequence
  Cyclic GFR-binding peptide
  MOD_RES (1)..(3): Xaa is C or S
XKXALHDELTNSLQEFIPKKRVIEYYVVPLPE

SEQ ID NO: 77393 - protein, 28 aa, Artificial Sequence
  Cyclic GFR-binding peptide
  MOD_RES (2)..(2): Xaa is C or S
KXSKVIMSMEGIIKPTKGIMIQITINSL

SEQ ID NO: 77394 - protein, 29 aa, Artificial Sequence
  Cyclic GFR-binding peptide
  MOD_RES (27)..(28): Xaa is C or S
NSMEGIIVNSSDDMIQVTINSLKTPAXXP

SEQ ID NO: 77395 - protein, 31 aa, Artificial Sequence
  Cyclic GFR-binding peptide
  MOD_RES (2)..(2): Xaa is C or S
KXSKVIMVQVEKIKPTKGIVKAIKVSRLDQS

SEQ ID NO: 77396 - protein, 32 aa, Artificial Sequence
  Cyclic GFR-binding peptide
  MOD_RES (1)..(3): Xaa is C or S
XKXSKVIMSMEGIIKPTKGIMIQITINSLDQS

SEQ ID NO: 77397 - protein, 40 aa, Artificial Sequence; identical to SEQ ID NO: 26820
  Cyclic GFR-binding peptide
  MOD_RES (2)..(4)..(35)..(36): Xaa is C or S

SEQ ID NO: 77398 - protein, 37 aa, Artificial Sequence; identical to SEQ ID NO: 26822
  Cyclic GFR-binding peptide
  MOD_RES (2)..(34): Xaa is C or S

SEQ ID NO: 77399 - protein, 41 aa, Artificial Sequence; identical to SEQ ID NO: 26824
  Cyclic GFR-binding peptide
  MOD_RES (2)..(4)..(35)..(36): Xaa is C or S

SEQ ID NO: 77400 - protein, 30 aa, Artificial Sequence
  Cyclic GFR-binding peptide
HQLFNSLQEHQGQHPKIRYYLMTLPEEETP

SEQ ID NO: 77401 - protein, 30 aa, Artificial Sequence
  Cyclic GFR-binding peptide
  MOD_RES (28)..(28): Xaa is C or S
NSLQEHQGQHPKIRYYVMPLPEEETPVXEL

SEQ ID NO: 77402 - protein, 24 aa, Artificial Sequence
  Cyclic GFR-binding peptide
VMSMEGIVKPTRGVMIQITINSLD

SEQ ID NO: 77403 - protein, 30 aa, Artificial Sequence
  Cyclic GFR-binding peptide
  MOD_RES (1)..(1): Xaa is C or S
XKNHQLFNSLQEHQGQHPKIRYYLMTLPEE

SEQ ID NO: 77404 - protein, 31 aa, Artificial Sequence
  Cyclic GFR-binding peptide
  MOD_RES (30)..(30): Xaa is C or S
NSLQEFIPKKRVIEYYLVTLPELQVQTPRXQ

SEQ ID NO: 77405 - protein, 30 aa, Artificial Sequence; identical to SEQ ID NO: 26832
  Cyclic GFR-binding peptide

SEQ ID NO: 77406 - protein, 27 aa, Artificial Sequence
  Cyclic GFR-binding peptide
ARVVMNVTAKKIVNSSDDIKRVQVPRL

SEQ ID NO: 77407 - protein, 33 aa, Artificial Sequence
  Cyclic GFR-binding peptide
  MOD_RES (31)..(31): Xaa is C or S
TNSLQEFIPKKRVIEYYVVPLPELQVQTPRXQV

SEQ ID NO: 77408 - protein, 30 aa, Artificial Sequence
  Cyclic GFR-binding peptide
  MOD_RES (28)..(29): Xaa is C or S
VMVTAKKVKPTRGVIKRIQVPRLDQPVXXP

SEQ ID NO: 77409 - protein, 24 aa, Artificial Sequence
  Cyclic GFR-binding peptide
VMDVTAKKVVKENEDIKRMQVPRL

SEQ ID NO: 77410 - protein, 33 aa, Artificial Sequence; identical to SEQ ID NO: 26835
  Cyclic GFR-binding peptide
  MOD_RES (32)..(33): Xaa is C or S

SEQ ID NO: 77411 - protein, 33 aa, Artificial Sequence; identical to SEQ ID NO: 26837
  Cyclic GFR-binding peptide
  MOD_RES (1)..(33): Xaa is C or S

SEQ ID NO: 77412 - protein, 38 aa, Artificial Sequence; identical to SEQ ID NO: 26836
  Cyclic GFR-binding peptide
  MOD_RES (1)..(35): Xaa is C or S

SEQ ID NO: 77413 - protein, 42 aa, Artificial Sequence; identical to SEQ ID NO: 26839
  Cyclic GFR-binding peptide
  MOD_RES (2)..(4)..(36)..(37): Xaa is C or S

SEQ ID NO: 77414 - protein, 34 aa, Artificial Sequence; identical to SEQ ID NO: 26842
  Cyclic GFR-binding peptide
  MOD_RES (31)..(32): Xaa is C or S

SEQ ID NO: 77415 - protein, 41 aa, Artificial Sequence; identical to SEQ ID NO: 26843
  Cyclic GFR-binding peptide
  MOD_RES (37)..(37): Xaa is C or S

SEQ ID NO: 77416 - protein, 25 aa, Artificial Sequence
  Cyclic GFR-binding peptide
SMEGIVVKENEDMIQMTINSLETPV

SEQ ID NO: 77417 - protein, 27 aa, Artificial Sequence
  Cyclic GFR-binding peptide
SRVVMNVTAKKIVNSSDDIKRVQVPRL

SEQ ID NO: 77418 - protein, 32 aa, Artificial Sequence; identical to SEQ ID NO: 26845
  Cyclic GFR-binding peptide
  MOD_RES (1)..(1): Xaa is C or S

SEQ ID NO: 77419 - protein, 22 aa, Artificial Sequence
  Cyclic GFR-binding peptide
NSLQEHQGQHPKIRYYLMTLPE

SEQ ID NO: 77420 - protein, 32 aa, Artificial Sequence; identical to SEQ ID NO: 26846
  Cyclic GFR-binding peptide

SEQ ID NO: 77421 - protein, 36 aa, Artificial Sequence; identical to SEQ ID NO: 26847
  Cyclic GFR-binding peptide
  MOD_RES (32)..(33): Xaa is C or S

SEQ ID NO: 77422 - protein, 29 aa, Artificial Sequence
  Cyclic GFR-binding peptide
  MOD_RES (27)..(28): Xaa is C or S
ESMEGIVVKDYEDMIQMTINSLETPVXXA

SEQ ID NO: 77423 - protein, 40 aa, Artificial Sequence; identical to SEQ ID NO: 26851
  Cyclic GFR-binding peptide
  MOD_RES (2)..(4)..(36): Xaa is C or S

SEQ ID NO: 77424 - protein, 39 aa, Artificial Sequence; identical to SEQ ID NO: 26852
  Cyclic GFR-binding peptide
  MOD_RES (1)..(35): Xaa is C or S

SEQ ID NO: 77425 - protein, 26 aa, Artificial Sequence
  Cyclic GFR-binding peptide
MEVTAKKVVKDYEDIKRMQVPRLETP

SEQ ID NO: 77426 - protein, 34 aa, Artificial Sequence; identical to SEQ ID NO: 26854
  Cyclic GFR-binding peptide
  MOD_RES (1)..(32)..(33): Xaa is C or S

SEQ ID NO: 77427 - protein, 42 aa, Artificial Sequence; identical to SEQ ID NO: 26855
  Cyclic GFR-binding peptide
  MOD_RES (2)..(4)..(41): Xaa is C or S

SEQ ID NO: 77428 - protein, 27 aa, Artificial Sequence
  Cyclic GFR-binding peptide
VVMVTAKKVKPTRGVIKRIQVPRLDQP

SEQ ID NO: 77429 - protein, 32 aa, Artificial Sequence
  Cyclic GFR-binding peptide
  MOD_RES (29)..(30): Xaa is C or S
VIMVTAKKIKPTKGIIKRIQVPRLDQSVXXPS

SEQ ID NO: 77430 - protein, 28 aa, Artificial Sequence
  Cyclic GFR-binding peptide
VMDSMEGIVVKENEDMIQMTINSLETPV

SEQ ID NO: 77431 - protein, 32 aa, Artificial Sequence
  Cyclic GFR-binding peptide
  MOD_RES (28)..(29): Xaa is C or S
IMSMEGIVKPKRGVMIQITINSLAQPVXXPAA

SEQ ID NO: 77432 - protein, 38 aa, Artificial Sequence
  Cyclic GFR-binding peptide
  MOD_RES (32)..(32): Xaa is C or S
HQLFNSLQEHQGQHPKIRYYLMTLPEEETPVXELGEDN

SEQ ID NO: 77433 - protein, 20 aa, Artificial Sequence
  Cyclic GFR-binding peptide
VTAKKVKPTRGVIKRIQVPR

SEQ ID NO: 77434 - protein, 27 aa, Artificial Sequence
  Cyclic GFR-binding peptide
MDVTAKKVVKENEDIKRMQVPRLETPV

SEQ ID NO: 77435 - protein, 39 aa, Artificial Sequence; identical to SEQ ID NO: 26864
  Cyclic GFR-binding peptide
  MOD_RES (2)..(4)..(38): Xaa is C or S

SEQ ID NO: 77436 - protein, 20 aa, Artificial Sequence
  Cyclic GFR-binding peptide
VQVEKVKPTRGVVKAIKVSR

SEQ ID NO: 77437 - protein, 30 aa, Artificial Sequence
  Cyclic GFR-binding peptide
  MOD_RES (2)..(2): Xaa is C or S
KXSKVVMVTAKKVKPTRGVIKRIQVPRLDQ

SEQ ID NO: 77438 - protein, 31 aa, Artificial Sequence
  Cyclic GFR-binding peptide
LTNSLQEFIPKKRVIEYYLVTLPELQVQTPR

SEQ ID NO: 77439 - protein, 32 aa, Artificial Sequence
  Cyclic GFR-binding peptide
  MOD_RES (28)..(29): Xaa is C or S
MNVTAKKIVNSSDDIKRVQVPRLKTPAXXPKP

SEQ ID NO: 77440 - protein, 25 aa, Artificial Sequence
  Cyclic GFR-binding peptide
VVMDVTAKKVVKENEDIKRMQVPRL

SEQ ID NO: 77441 - protein, 36 aa, Artificial Sequence
  Cyclic GFR-binding peptide
  MOD_RES (34)..(34): Xaa is C or S
DELTNSLQEFIPKKRVIEYYLVTLPELQVQTPRXQV

SEQ ID NO: 77442 - protein, 31 aa, Artificial Sequence
  Cyclic GFR-binding peptide
  MOD_RES (26)..(26): Xaa is C or S
SMEGIIVNSSDDMIQVTINSLKTPAXTPKTV

SEQ ID NO: 77443 - protein, 24 aa, Artificial Sequence
  Cyclic GFR-binding peptide
MDVQVEKVVKENEDVKAMKVSRLE

SEQ ID NO: 77444 - protein, 39 aa, Artificial Sequence; identical to SEQ ID NO: 26869
  Cyclic GFR-binding peptide
  MOD_RES (1)..(33)..(34): Xaa is C or S

SEQ ID NO: 77445 - protein, 34 aa, Artificial Sequence
  Cyclic GFR-binding peptide
  MOD_RES (30)..(30): Xaa is C or S
NSLQELKPKKRVYEYYVVPLPEHHVRSPQXKVSS

SEQ ID NO: 77446 - protein, 34 aa, Artificial Sequence; identical to SEQ ID NO: 26871
  Cyclic GFR-binding peptide
  MOD_RES (31)..(32): Xaa is C or S

SEQ ID NO: 77447 - protein, 26 aa, Artificial Sequence
  Cyclic GFR-binding peptide
  MOD_RES (26)..(26): Xaa is C or S
SMEGIIVNSSDDMIQVTINSLKTPAX

SEQ ID NO: 77448 - protein, 33 aa, Artificial Sequence
  Cyclic GFR-binding peptide
  MOD_RES (33)..(33): Xaa is C or S
ELTNSLQEFIPKKRVIEYYVVPLPELQVQTPRX

SEQ ID NO: 77449 - protein, 32 aa, Artificial Sequence
  Cyclic GFR-binding peptide
  MOD_RES (27)..(28): Xaa is C or S
DVQVEKVVKENEDVKAMKVSRLETPVXXAKPI

SEQ ID NO: 77450 - protein, 24 aa, Artificial Sequence
  Cyclic GFR-binding peptide
VQVEKVKPKRGVVKAIKVSRLAQP

SEQ ID NO: 77451 - protein, 27 aa, Artificial Sequence
  Cyclic GFR-binding peptide
MNVQVEKIVNSSDDVKAVKVSRLQTPA

SEQ ID NO: 77452 - protein, 37 aa, Artificial Sequence; identical to SEQ ID NO: 26876
  Cyclic GFR-binding peptide
  MOD_RES (2)..(4)..(35)..(36): Xaa is C or S

SEQ ID NO: 77453 - protein, 29 aa, Artificial Sequence
  Cyclic GFR-binding peptide
  MOD_RES (28)..(29): Xaa is C or S
MDVTAKKVVKENEDIKRMQVPRLETPVXX

SEQ ID NO: 77454 - protein, 34 aa, Artificial Sequence; identical to SEQ ID NO: 26877
  Cyclic GFR-binding peptide
  MOD_RES (32)..(33): Xaa is C or S

SEQ ID NO: 77455 - protein, 23 aa, Artificial Sequence
  Cyclic GFR-binding peptide
NVTAKKIVNSSDDIKRVQVPRLQ

SEQ ID NO: 77456 - protein, 40 aa, Artificial Sequence; identical to SEQ ID NO: 26881
  Cyclic GFR-binding peptide
  MOD_RES (1)..(3)..(34)..(35): Xaa is C or S

SEQ ID NO: 77457 - protein, 27 aa, Artificial Sequence
  Cyclic GFR-binding peptide
  MOD_RES (1)..(1): Xaa is C or S
XSRVIMVQVEKVKPKRGVVKAIKVSRL

SEQ ID NO: 77458 - protein, 34 aa, Artificial Sequence; identical to SEQ ID NO: 26887
  Cyclic GFR-binding peptide
  MOD_RES (2)..(34): Xaa is C or S

SEQ ID NO: 77459 - protein, 33 aa, Artificial Sequence; identical to SEQ ID NO: 26889
  Cyclic GFR-binding peptide
  MOD_RES (2)..(2): Xaa is C or S

SEQ ID NO: 77460 - protein, 41 aa, Artificial Sequence; identical to SEQ ID NO: 26892
  Cyclic GFR-binding peptide
  MOD_RES (1)..(3)..(35)..(36): Xaa is C or S

SEQ ID NO: 77461 - protein, 32 aa, Artificial Sequence
  Cyclic GFR-binding peptide
  MOD_RES (1)..(3): Xaa is C or S
XGXGEVVMDSMEGIVVKENEDMIQMTINSLET

SEQ ID NO: 77462 - protein, 28 aa, Artificial Sequence
  Cyclic GFR-binding peptide
  MOD_RES (2)..(2): Xaa is C or S
KXSKVVMVQVEKVKPTRGVVKAIKVSRL

SEQ ID NO: 77463 - protein, 31 aa, Artificial Sequence; identical to SEQ ID NO: 26893
  Cyclic GFR-binding peptide
  MOD_RES (31)..(31): Xaa is C or S

SEQ ID NO: 77464 - protein, 30 aa, Artificial Sequence
  Cyclic GFR-binding peptide
  MOD_RES (1)..(1): Xaa is C or S
XSRVVMNVQVEKIVNSSDDVKAVKVSRLKT

SEQ ID NO: 77465 - protein, 27 aa, Artificial Sequence
  Cyclic GFR-binding peptide
EVVMDSMEGIVVKENEDMIQMTINSLE

SEQ ID NO: 77466 - protein, 27 aa, Artificial Sequence
  Cyclic GFR-binding peptide
  MOD_RES (1)..(1): Xaa is C or S
XSRVVMNVTAKKIVNSSDDIKRVQVPR

SEQ ID NO: 77467 - protein, 30 aa, Artificial Sequence
  Cyclic GFR-binding peptide
  MOD_RES (29)..(30): Xaa is C or S
VMDVTAKKVVKENEDIKRMQVPRLETPVXX

SEQ ID NO: 77468 - protein, 28 aa, Artificial Sequence
  Cyclic GFR-binding peptide
  MOD_RES (27)..(28): Xaa is C or S
MVQVEKVKPTRGVVKAIKVSRLDQPVXX

SEQ ID NO: 77469 - protein, 39 aa, Artificial Sequence; identical to SEQ ID NO: 26902
  Cyclic GFR-binding peptide
  MOD_RES (35)..(35): Xaa is C or S

SEQ ID NO: 77470 - protein, 30 aa, Artificial Sequence
  Cyclic GFR-binding peptide
  MOD_RES (26)..(27): Xaa is C or S
VQVEKVKPTRGVVKAIKVSRLDQPVXXPSA

SEQ ID NO: 77471 - protein, 39 aa, Artificial Sequence; identical to SEQ ID NO: 26906
  Cyclic GFR-binding peptide
  MOD_RES (1)..(33)..(34): Xaa is C or S

SEQ ID NO: 77472 - protein, 27 aa, Artificial Sequence
  Cyclic GFR-binding peptide
VMSMEGIVKPTRGVMIQITINSLDQPV

SEQ ID NO: 77473 - protein, 28 aa, Artificial Sequence
  Cyclic GFR-binding peptide
VIMVQVEKIKPTKGIVKAIKVSRLDQSV

SEQ ID NO: 77474 - protein, 31 aa, Artificial Sequence
  Cyclic GFR-binding peptide
  MOD_RES (1)..(1): Xaa is C or S
XGEVVMEVQVEKVVKDYEDVKAMKVSRLETP

SEQ ID NO: 77475 - protein, 29 aa, Artificial Sequence
  Cyclic GFR-binding peptide
  MOD_RES (26)..(26): Xaa is C or S
VTAKKIVNSSDDIKRVQVPRLKTPAXTPK

SEQ ID NO: 77476 - protein, 34 aa, Artificial Sequence; identical to SEQ ID NO: 26915
  Cyclic GFR-binding peptide
  MOD_RES (1)..(33)..(34): Xaa is C or S

SEQ ID NO: 77477 - protein, 24 aa, Artificial Sequence
  Cyclic GFR-binding peptide
VQVEKIKPTKGIVKAIKVSRLDQS

SEQ ID NO: 77478 - protein, 31 aa, Artificial Sequence
  Cyclic GFR-binding peptide
  MOD_RES (26)..(27): Xaa is C or S
VQVEKVVKDYEDVKAMKVSRLETPVXXAKPI

SEQ ID NO: 77479 - protein, 40 aa, Artificial Sequence; identical to SEQ ID NO: 26923
  Cyclic GFR-binding peptide
  MOD_RES (1)..(3)..(35)..(36): Xaa is C or S

SEQ ID NO: 77480 - protein, 25 aa, Artificial Sequence
  Cyclic GFR-binding peptide
VQVEKIVNSSDDVKAVKVSRLKTPA

SEQ ID NO: 77481 - protein, 42 aa, Artificial Sequence; identical to SEQ ID NO: 26924
  Cyclic GFR-binding peptide
  MOD_RES (2)..(4)..(38): Xaa is C or S

SEQ ID NO: 77482 - protein, 31 aa, Artificial Sequence
  Cyclic GFR-binding peptide
  MOD_RES (1)..(3): Xaa is C or S
XGXGEVVMDVTAKKVVKENEDIKRMQVPRLE

SEQ ID NO: 77483 - protein, 35 aa, Artificial Sequence; identical to SEQ ID NO: 26925
  Cyclic GFR-binding peptide
  MOD_RES (32)..(32): Xaa is C or S

SEQ ID NO: 77484 - protein, 29 aa, Artificial Sequence
  Cyclic GFR-binding peptide
LTNSLQEFIPKKRVIEYYVVPLPELQVQT

SEQ ID NO: 77485 - protein, 43 aa, Artificial Sequence; identical to SEQ ID NO: 26929
  Cyclic GFR-binding peptide
  MOD_RES (2)..(39): Xaa is C or S

SEQ ID NO: 77486 - protein, 31 aa, Artificial Sequence; identical to SEQ ID NO: 26931
  Cyclic GFR-binding peptide
  MOD_RES (31)..(31): Xaa is C or S

SEQ ID NO: 77487 - protein, 21 aa, Artificial Sequence
  Cyclic GFR-binding peptide
VTAKKVVKDYEDIKRMQVPRL

SEQ ID NO: 77488 - protein, 40 aa, Artificial Sequence; identical to SEQ ID NO: 26935
  Cyclic GFR-binding peptide
  MOD_RES (2)..(4): Xaa is C or S

SEQ ID NO: 77489 - protein, 31 aa, Artificial Sequence
  Cyclic GFR-binding peptide
  MOD_RES (28)..(29): Xaa is C or S
IMVQVEKIKPTKGIVKAIKVSRLDQSVXXPS

SEQ ID NO: 77490 - protein, 28 aa, Artificial Sequence
  Cyclic GFR-binding peptide
VIMSMEGIIKPTKGIMIQITINSLDQSV

SEQ ID NO: 77491 - protein, 33 aa, Artificial Sequence; identical to SEQ ID NO: 26936
  Cyclic GFR-binding peptide
  MOD_RES (2)..(33): Xaa is C or S

SEQ ID NO: 77492 - protein, 35 aa, Artificial Sequence; identical to SEQ ID NO: 26937
  Cyclic GFR-binding peptide
  MOD_RES (32)..(33): Xaa is C or S

SEQ ID NO: 77493 - protein, 27 aa, Artificial Sequence
  Cyclic GFR-binding peptide
RVVMNVQVEKIVNSSDDVKAVKVSRLK

SEQ ID NO: 77494 - protein, 32 aa, Artificial Sequence
  Cyclic GFR-binding peptide
  MOD_RES (27)..(28): Xaa is C or S
NSMEGIIVNSSDDMIQVTINSLKTPAXXPKPV

SEQ ID NO: 77495 - protein, 39 aa, Artificial Sequence; identical to SEQ ID NO: 26945
  Cyclic GFR-binding peptide
  MOD_RES (35)..(35): Xaa is C or S

SEQ ID NO: 77496 - protein, 39 aa, Artificial Sequence; identical to SEQ ID NO: 26946
  Cyclic GFR-binding peptide
  MOD_RES (1)..(3)..(35)..(36): Xaa is C or S

SEQ ID NO: 77497 - protein, 28 aa, Artificial Sequence
  Cyclic GFR-binding peptide
  MOD_RES (26)..(27): Xaa is C or S
VTAKKIKPTKGIIKRIQVPRLDQSVXXP

SEQ ID NO: 77498 - protein, 31 aa, Artificial Sequence; identical to SEQ ID NO: 26948
  Cyclic GFR-binding peptide
  MOD_RES (31)..(31): Xaa is C or S

SEQ ID NO: 77499 - protein, 34 aa, Artificial Sequence
  Cyclic GFR-binding peptide
  MOD_RES (2)..(4): Xaa is C or S
RXEXKNHQLFNSLQEHQGQHPKIRYYVMPLPEEE

SEQ ID NO: 77500 - protein, 22 aa, Artificial Sequence
  Cyclic GFR-binding peptide
MSMEGIIKPTKGIMIQITINSL

SEQ ID NO: 77501 - protein, 29 aa, Artificial Sequence
  Cyclic GFR-binding peptide
  MOD_RES (28)..(29): Xaa is C or S
IMVTAKKIKPTKGIIKRIQVPRLDQSVXX

SEQ ID NO: 77502 - protein, 28 aa, Artificial Sequence
  Cyclic GFR-binding peptide
VVMESMEGIVVKDYEDMIQMTINSLETP

SEQ ID NO: 77503 - protein, 29 aa, Artificial Sequence
  Cyclic GFR-binding peptide
  MOD_RES (28)..(29): Xaa is C or S
MDSMEGIVVKENEDMIQMTINSLETPVXX

SEQ ID NO: 77504 - protein, 24 aa, Artificial Sequence
  Cyclic GFR-binding peptide
NVQVEKIVNSSDDVKAVKVSRLKT

SEQ ID NO: 77505 - protein, 39 aa, Artificial Sequence; identical to SEQ ID NO: 26962
  Cyclic GFR-binding peptide
  MOD_RES (2)..(34): Xaa is C or S

SEQ ID NO: 77506 - protein, 30 aa, Artificial Sequence
  Cyclic GFR-binding peptide
  MOD_RES (26)..(27): Xaa is C or S
VTAKKIKPTKGIIKRIQVPRLDQSVXXPSA

SEQ ID NO: 77507 - protein, 36 aa, Artificial Sequence
  Cyclic GFR-binding peptide
  MOD_RES (30)..(31): Xaa is C or S
KVVMVQVEKVKPTRGVVKAIKVSRLDQPVXXPSASA

SEQ ID NO: 77508 - protein, 31 aa, Artificial Sequence
  Cyclic GFR-binding peptide
  MOD_RES (28)..(29): Xaa is C or S
MNSMEGIIVNSSDDMIQVTINSLKTPAXXPK

SEQ ID NO: 77509 - protein, 28 aa, Artificial Sequence
  Cyclic GFR-binding peptide
  MOD_RES (28)..(28): Xaa is C or S
MNVQVEKIVNSSDDVKAVKVSRLQTPAX

SEQ ID NO: 77510 - protein, 34 aa, Artificial Sequence
  Cyclic GFR-binding peptide
  MOD_RES (2)..(2): Xaa is C or S
EXKNHQLFNSLQEHQGQHPKIRYYLMTLPEEETP

SEQ ID NO: 77511 - protein, 22 aa, Artificial Sequence
  Cyclic GFR-binding peptide
SMEGIIVNSSDDMIQVTINSLK

SEQ ID NO: 77512 - protein, 34 aa, Artificial Sequence
  Cyclic GFR-binding peptide
  MOD_RES (2)..(4): Xaa is C or S
RXGXGEVVMEVTAKKVVKDYEDIKRMQVPRLETP

SEQ ID NO: 77513 - protein, 35 aa, Artificial Sequence; identical to SEQ ID NO: 26966
  Cyclic GFR-binding peptide
  MOD_RES (2)..(4): Xaa is C or S

SEQ ID NO: 77514 - protein, 32 aa, Artificial Sequence
  Cyclic GFR-binding peptide
  MOD_RES (2)..(4): Xaa is C or S
SXKXSRVIMSMEGIVKPKRGVMIQITINSLAQ

SEQ ID NO: 77515 - protein, 23 aa, Artificial Sequence
  Cyclic GFR-binding peptide
VTAKKIKPTKGIIKRIQVPRLDQ

SEQ ID NO: 77516 - protein, 31 aa, Artificial Sequence
  Cyclic GFR-binding peptide
  MOD_RES (1)..(3): Xaa is C or S
XKXSRVIMSMEGIVKPKRGVMIQITINSLAQ

SEQ ID NO: 77517 - protein, 26 aa, Artificial Sequence
  Cyclic GFR-binding peptide
EVQVEKVVKDYEDVKAMKVSRLETPV

SEQ ID NO: 77518 - protein, 33 aa, Artificial Sequence
  Cyclic GFR-binding peptide
  MOD_RES (29)..(29): Xaa is C or S
FNSLQEHQGQHPKIRYYLMTLPEEETPVXELGE

SEQ ID NO: 77519 - protein, 31 aa, Artificial Sequence
  Cyclic GFR-binding peptide
  MOD_RES (1)..(3): Xaa is C or S
XKXSRVIMVQVEKVKPKRGVVKAIKVSRLAQ

SEQ ID NO: 77520 - protein, 38 aa, Artificial Sequence; identical to SEQ ID NO: 26972
  Cyclic GFR-binding peptide
  MOD_RES (37)..(37): Xaa is C or S

SEQ ID NO: 77521 - protein, 37 aa, Artificial Sequence; identical to SEQ ID NO: 26976
  Cyclic GFR-binding peptide
  MOD_RES (32)..(33): Xaa is C or S

SEQ ID NO: 77522 - protein, 35 aa, Artificial Sequence; identical to SEQ ID NO: 26977
  Cyclic GFR-binding peptide
  MOD_RES (31)..(32): Xaa is C or S

SEQ ID NO: 77523 - protein, 38 aa, Artificial Sequence; identical to SEQ ID NO: 26978
  Cyclic GFR-binding peptide
  MOD_RES (2)..(2): Xaa is C or S

SEQ ID NO: 77524 - protein, 31 aa, Artificial Sequence
  Cyclic GFR-binding peptide
  MOD_RES (27)..(28): Xaa is C or S
DSMEGIVVKENEDMIQMTINSLETPVXXAKP

SEQ ID NO: 77525 - protein, 32 aa, Artificial Sequence
  Cyclic GFR-binding peptide
  MOD_RES (2)..(2): Xaa is C or S
GXGEVVMESMEGIVVKDYEDMIQMTINSLETP

SEQ ID NO: 77526 - protein, 40 aa, Artificial Sequence; identical to SEQ ID NO: 26981
  Cyclic GFR-binding peptide
  MOD_RES (2)..(34)..(35): Xaa is C or S

SEQ ID NO: 77527 - protein, 25 aa, Artificial Sequence
  Cyclic GFR-binding peptide
SKVVMVTAKKVKPTRGVIKRIQVPR

SEQ ID NO: 77528 - protein, 29 aa, Artificial Sequence
  Cyclic GFR-binding peptide
TNSLQEFIPKKRVIEYYVVPLPELQVQTP

SEQ ID NO: 77529 - protein, 36 aa, Artificial Sequence
  Cyclic GFR-binding peptide
  MOD_RES (30)..(31): Xaa is C or S
KVVMVTAKKVKPTRGVIKRIQVPRLDQPVXXPSASA

SEQ ID NO: 77530 - protein, 41 aa, Artificial Sequence; identical to SEQ ID NO: 26984
  Cyclic GFR-binding peptide
  MOD_RES (1)..(3)..(40): Xaa is C or S

SEQ ID NO: 77531 - protein, 25 aa, Artificial Sequence
  Cyclic GFR-binding peptide
MNVQVEKIVNSSDDVKAVKVSRLQT

SEQ ID NO: 77532 - protein, 23 aa, Artificial Sequence
  Cyclic GFR-binding peptide
SMEGIVKPKRGVMIQITINSLAQ

SEQ ID NO: 77533 - protein, 33 aa, Artificial Sequence; identical to SEQ ID NO: 26990
  Cyclic GFR-binding peptide
  MOD_RES (1)..(33): Xaa is C or S

SEQ ID NO: 77534 - protein, 31 aa, Artificial Sequence
  Cyclic GFR-binding peptide
  MOD_RES (2)..(4): Xaa is C or S
RXGXGEVVMEVQVEKVVKDYEDVKAMKVSRL

SEQ ID NO: 77535 - protein, 30 aa, Artificial Sequence
  Cyclic GFR-binding peptide
HEELRNSLQELKPKKRVYEYYLVTLPEHHV

SEQ ID NO: 77536 - protein, 44 aa, Artificial Sequence; identical to SEQ ID NO: 26993
  Cyclic GFR-binding peptide
  MOD_RES (1)..(3)..(40): Xaa is C or S

SEQ ID NO: 77537 - protein, 30 aa, Artificial Sequence
  Cyclic GFR-binding peptide
  MOD_RES (2)..(2): Xaa is C or S
GXGEVVMDSMEGIVVKENEDMIQMTINSLE

SEQ ID NO: 77538 - protein, 43 aa, Artificial Sequence; identical to SEQ ID NO: 26996
  Cyclic GFR-binding peptide
  MOD_RES (1)..(3)..(40): Xaa is C or S

SEQ ID NO: 77539 - protein, 35 aa, Artificial Sequence; identical to SEQ ID NO: 26997
  Cyclic GFR-binding peptide
  MOD_RES (2)..(34)..(35): Xaa is C or S

SEQ ID NO: 77540 - protein, 25 aa, Artificial Sequence
  Cyclic GFR-binding peptide
RNSLQELKPKKRVYEYYVVPLPEHH

SEQ ID NO: 77541 - protein, 43 aa, Artificial Sequence; identical to SEQ ID NO: 27003
  Cyclic GFR-binding peptide
  MOD_RES (1)..(3)..(37): Xaa is C or S

SEQ ID NO: 77542 - protein, 33 aa, Artificial Sequence
  Cyclic GFR-binding peptide
  MOD_RES (2)..(2): Xaa is C or S
KXALHDELTNSLQEFIPKKRVIEYYVVPLPELQ

SEQ ID NO: 77543 - protein, 33 aa, Artificial Sequence
  Cyclic GFR-binding peptide
  MOD_RES (29)..(30): Xaa is C or S
VIMVTAKKVKPKRGVIKRIQVPRLAQPVXXPAA

SEQ ID NO: 77544 - protein, 35 aa, Artificial Sequence; identical to SEQ ID NO: 27010
  Cyclic GFR-binding peptide
  MOD_RES (1)..(32)..(33): Xaa is C or S

SEQ ID NO: 77545 - protein, 38 aa, Artificial Sequence; identical to SEQ ID NO: 27012
  Cyclic GFR-binding peptide
  MOD_RES (2)..(4)..(35)..(36): Xaa is C or S

SEQ ID NO: 77546 - protein, 34 aa, Artificial Sequence; identical to SEQ ID NO: 27013
  Cyclic GFR-binding peptide
  MOD_RES (1)..(33)..(34): Xaa is C or S

SEQ ID NO: 77547 - protein, 39 aa, Artificial Sequence; identical to SEQ ID NO: 27015
  Cyclic GFR-binding peptide
  MOD_RES (2)..(4)..(36)..(37): Xaa is C or S

SEQ ID NO: 77548 - protein, 28 aa, Artificial Sequence
  Cyclic GFR-binding peptide
  MOD_RES (27)..(28): Xaa is C or S
EVQVEKVVKDYEDVKAMKVSRLETPVXX

SEQ ID NO: 77549 - protein, 28 aa, Artificial Sequence
  Cyclic GFR-binding peptide
LFNSLQEHQGQHPKIRYYLMTLPEEETP

SEQ ID NO: 77550 - protein, 31 aa, Artificial Sequence
  Cyclic GFR-binding peptide
  MOD_RES (31)..(31): Xaa is C or S
RNSLQELKPKKRVYEYYLVTLPEHHVRSPQX

SEQ ID NO: 77551 - protein, 30 aa, Artificial Sequence
  Cyclic GFR-binding peptide
ARVVMNSMEGIIVNSSDDMIQVTINSLQTP

SEQ ID NO: 77552 - protein, 28 aa, Artificial Sequence
  Cyclic GFR-binding peptide
  MOD_RES (26)..(27): Xaa is C or S
VTAKKVVKENEDIKRMQVPRLETPVXXA

SEQ ID NO: 77553 - protein, 38 aa, Artificial Sequence; identical to SEQ ID NO: 27023
  Cyclic GFR-binding peptide
  MOD_RES (1)..(3)..(35)..(36): Xaa is C or S

SEQ ID NO: 77554 - protein, 38 aa, Artificial Sequence; identical to SEQ ID NO: 27024
  Cyclic GFR-binding peptide
  MOD_RES (1)..(3)..(35)..(36): Xaa is C or S

SEQ ID NO: 77555 - protein, 29 aa, Artificial Sequence
  Cyclic GFR-binding peptide
  MOD_RES (28)..(29): Xaa is C or S
IMSMEGIIKPTKGIMIQITINSLDQSVXX

SEQ ID NO: 77556 - protein, 36 aa, Artificial Sequence; identical to SEQ ID NO: 27030
  Cyclic GFR-binding peptide
  MOD_RES (2)..(4)..(35)..(36): Xaa is C or S

SEQ ID NO: 77557 - protein, 29 aa, Artificial Sequence
  Cyclic GFR-binding peptide
  MOD_RES (27)..(28): Xaa is C or S
MVQVEKVKPTRGVVKAIKVSRLDQPVXXP

SEQ ID NO: 77558 - protein, 29 aa, Artificial Sequence
  Cyclic GFR-binding peptide
RVVMNVTAKKIVNSSDDIKRVQVPRLKTP

SEQ ID NO: 77559 - protein, 32 aa, Artificial Sequence
  Cyclic GFR-binding peptide
  MOD_RES (1)..(3): Xaa is C or S
XGXGEVVMDVQVEKVVKENEDVKAMKVSRLET

SEQ ID NO: 77560 - protein, 33 aa, Artificial Sequence
  Cyclic GFR-binding peptide
  MOD_RES (1)..(3): Xaa is C or S
XAXELHEELRNSLQELKPKKRVYEYYVVPLPEH

SEQ ID NO: 77561 - protein, 26 aa, Artificial Sequence
  Cyclic GFR-binding peptide
NSLQELKPKKRVYEYYLVTLPEHHVR

SEQ ID NO: 77562 - protein, 25 aa, Artificial Sequence
  Cyclic GFR-binding peptide
VMNVTAKKIVNSSDDIKRVQVPRLQ

SEQ ID NO: 77563 - protein, 34 aa, Artificial Sequence
  Cyclic GFR-binding peptide
  MOD_RES (2)..(2): Xaa is C or S
AXELHEELRNSLQELKPKKRVYEYYLVTLPEHHV

SEQ ID NO: 77564 - protein, 25 aa, Artificial Sequence
  Cyclic GFR-binding peptide
VMEVTAKKVVKDYEDIKRMQVPRLE

SEQ ID NO: 77565 - protein, 27 aa, Artificial Sequence
  Cyclic GFR-binding peptide
  MOD_RES (1)..(1): Xaa is C or S
XARVVMNVTAKKIVNSSDDIKRVQVPR

SEQ ID NO: 77566 - protein, 36 aa, Artificial Sequence
  Cyclic GFR-binding peptide
  MOD_RES (2)..(4): Xaa is C or S
RXEXKNHQLFNSLQEHQGQHPKIRYYLMTLPEEETP

SEQ ID NO: 77567 - protein, 32 aa, Artificial Sequence
  Cyclic GFR-binding peptide
  MOD_RES (28)..(28): Xaa is C or S
NSLQEHQGQHPKIRYYLMTLPEEETPVXELGE

SEQ ID NO: 77568 - protein, 28 aa, Artificial Sequence
  Cyclic GFR-binding peptide
  MOD_RES (2)..(2): Xaa is C or S
KXSKVVMSMEGIVKPTRGVMIQITINSL

SEQ ID NO: 77569 - protein, 24 aa, Artificial Sequence
  Cyclic GFR-binding peptide
MVQVEKVKPKRGVVKAIKVSRLAQ

SEQ ID NO: 77570 - protein, 37 aa, Artificial Sequence; identical to SEQ ID NO: 27044
  Cyclic GFR-binding peptide
  MOD_RES (31)..(32): Xaa is C or S

SEQ ID NO: 77571 - protein, 32 aa, Artificial Sequence
  Cyclic GFR-binding peptide
  MOD_RES (28)..(29): Xaa is C or S
MDVTAKKVVKENEDIKRMQVPRLETPVXXAKP

SEQ ID NO: 77572 - protein, 26 aa, Artificial Sequence
  Cyclic GFR-binding peptide
NSLQEFIPKKRVIEYYVVPLPELQVQ

SEQ ID NO: 77573 - protein, 33 aa, Artificial Sequence; identical to SEQ ID NO: 27053
  Cyclic GFR-binding peptide
  MOD_RES (1)..(33): Xaa is C or S

SEQ ID NO: 77574 - protein, 32 aa, Artificial Sequence
  Cyclic GFR-binding peptide
  MOD_RES (26)..(27): Xaa is C or S
VQVEKIVNSSDDVKAVKVSRLQTPAXXPKPVT

SEQ ID NO: 77575 - protein, 35 aa, Artificial Sequence
  Cyclic GFR-binding peptide
  MOD_RES (30)..(31): Xaa is C or S
RVIMVQVEKVKPKRGVVKAIKVSRLAQPVXXPAAS

SEQ ID NO: 77576 - protein, 33 aa, Artificial Sequence; identical to SEQ ID NO: 27055
  Cyclic GFR-binding peptide
  MOD_RES (32)..(32): Xaa is C or S

SEQ ID NO: 77577 - protein, 36 aa, Artificial Sequence; identical to SEQ ID NO: 27056
  Cyclic GFR-binding peptide
  MOD_RES (2)..(33)..(34): Xaa is C or S

SEQ ID NO: 77578 - protein, 33 aa, Artificial Sequence
  Cyclic GFR-binding peptide
  MOD_RES (27)..(28): Xaa is C or S
NVTAKKIVNSSDDIKRVQVPRLQTPAXXPKPVT

SEQ ID NO: 77579 - protein, 37 aa, Artificial Sequence; identical to SEQ ID NO: 27058
  Cyclic GFR-binding peptide
  MOD_RES (31)..(31): Xaa is C or S

SEQ ID NO: 77580 - protein, 27 aa, Artificial Sequence
  Cyclic GFR-binding peptide
SKVIMVTAKKIKPTKGIIKRIQVPRLD

SEQ ID NO: 77581 - protein, 33 aa, Artificial Sequence; identical to SEQ ID NO: 27060
  Cyclic GFR-binding peptide
  MOD_RES (31)..(32): Xaa is C or S

SEQ ID NO: 77582 - protein, 33 aa, Artificial Sequence; identical to SEQ ID NO: 27061
  Cyclic GFR-binding peptide
  MOD_RES (31)..(32): Xaa is C or S

SEQ ID NO: 77583 - protein, 23 aa, Artificial Sequence
  Cyclic GFR-binding peptide
SMEGIIVNSSDDMIQVTINSLKT

SEQ ID NO: 77584 - protein, 35 aa, Artificial Sequence; identical to SEQ ID NO: 27062
  Cyclic GFR-binding peptide
  MOD_RES (2)..(4): Xaa is C or S

SEQ ID NO: 77585 - protein, 24 aa, Artificial Sequence
  Cyclic GFR-binding peptide
NSLQELKPKKRVYEYYLVTLPEHH

SEQ ID NO: 77586 - protein, 36 aa, Artificial Sequence; identical to SEQ ID NO: 27065
  Cyclic GFR-binding peptide
  MOD_RES (35)..(35): Xaa is C or S

SEQ ID NO: 77587 - protein, 29 aa, Artificial Sequence
  Cyclic GFR-binding peptide
EVVMDSMEGIVVKENEDMIQMTINSLETP

SEQ ID NO: 77588 - protein, 36 aa, Artificial Sequence; identical to SEQ ID NO: 27069
  Cyclic GFR-binding peptide

SEQ ID NO: 77589 - protein, 31 aa, Artificial Sequence; identical to SEQ ID NO: 27074
  Cyclic GFR-binding peptide

SEQ ID NO: 77590 - protein, 25 aa, Artificial Sequence
  Cyclic GFR-binding peptide
IMVQVEKVKPKRGVVKAIKVSRLAQ

SEQ ID NO: 77591 - protein, 20 aa, Artificial Sequence
  Cyclic GFR-binding peptide
VQVEKVVKENEDVKAMKVSR

SEQ ID NO: 77592 - protein, 30 aa, Artificial Sequence
  Cyclic GFR-binding peptide
HEELRNSLQELKPKKRVYEYYVVPLPEHHV

SEQ ID NO: 77593 - protein, 42 aa, Artificial Sequence; identical to SEQ ID NO: 27077
  Cyclic GFR-binding peptide
  MOD_RES (2)..(4)..(36)..(37): Xaa is C or S

SEQ ID NO: 77594 - protein, 25 aa, Artificial Sequence
  Cyclic GFR-binding peptide
MNVQVEKIVNSSDDVKAVKVSRLKT

SEQ ID NO: 77595 - protein, 40 aa, Artificial Sequence; identical to SEQ ID NO: 27083
  Cyclic GFR-binding peptide
  MOD_RES (36)..(36): Xaa is C or S

SEQ ID NO: 77596 - protein, 39 aa, Artificial Sequence; identical to SEQ ID NO: 27085
  Cyclic GFR-binding peptide
  MOD_RES (1)..(3)..(35)..(36): Xaa is C or S

SEQ ID NO: 77597 - protein, 28 aa, Artificial Sequence
  Cyclic GFR-binding peptide
  MOD_RES (1)..(3): Xaa is C or S
XKXSKVVMVQVEKVKPTRGVVKAIKVSR

SEQ ID NO: 77598 - protein, 26 aa, Artificial Sequence
  Cyclic GFR-binding peptide
VMEVTAKKVVKDYEDIKRMQVPRLET

SEQ ID NO: 77599 - protein, 36 aa, Artificial Sequence; identical to SEQ ID NO: 27090
  Cyclic GFR-binding peptide
  MOD_RES (1)..(33): Xaa is C or S

SEQ ID NO: 77600 - protein, 39 aa, Artificial Sequence; identical to SEQ ID NO: 27092
  Cyclic GFR-binding peptide
  MOD_RES (2)..(39): Xaa is C or S

SEQ ID NO: 77601 - protein, 29 aa, Artificial Sequence
  Cyclic GFR-binding peptide
SKVVMVTAKKVKPTRGVIKRIQVPRLDQP

SEQ ID NO: 77602 - protein, 28 aa, Artificial Sequence
  Cyclic GFR-binding peptide
VMDVQVEKVVKENEDVKAMKVSRLETPV

SEQ ID NO: 77603 - protein, 27 aa, Artificial Sequence
  Cyclic GFR-binding peptide
  MOD_RES (26)..(27): Xaa is C or S
VQVEKIKPTKGIVKAIKVSRLDQSVXX

SEQ ID NO: 77604 - protein, 28 aa, Artificial Sequence
  Cyclic GFR-binding peptide
  MOD_RES (28)..(28): Xaa is C or S
MEVQVEKVVKDYEDVKAMKVSRLETPVX

SEQ ID NO: 77605 - protein, 28 aa, Artificial Sequence
  Cyclic GFR-binding peptide
  MOD_RES (28)..(28): Xaa is C or S
VMSMEGIVKPTRGVMIQITINSLDQPVX

SEQ ID NO: 77606 - protein, 29 aa, Artificial Sequence
  Cyclic GFR-binding peptide
  MOD_RES (29)..(29): Xaa is C or S
FNSLQEHQGQHPKIRYYLMTLPEEETPVX

SEQ ID NO: 77607 - protein, 25 aa, Artificial Sequence
  Cyclic GFR-binding peptide
VVMDSMEGIVVKENEDMIQMTINSL

SEQ ID NO: 77608 - protein, 31 aa, Artificial Sequence
  Cyclic GFR-binding peptide
  MOD_RES (30)..(31): Xaa is C or S
KVIMVTAKKIKPTKGIIKRIQVPRLDQSVXX

SEQ ID NO: 77609 - protein, 21 aa, Artificial Sequence
  Cyclic GFR-binding peptide
SMEGIVKPKRGVMIQITINSL

SEQ ID NO: 77610 - protein, 34 aa, Artificial Sequence; identical to SEQ ID NO: 27121
  Cyclic GFR-binding peptide
  MOD_RES (1)..(33)..(34): Xaa is C or S

SEQ ID NO: 77611 - protein, 33 aa, Artificial Sequence
  Cyclic GFR-binding peptide
  MOD_RES (27)..(28): Xaa is C or S
MVQVEKVKPTRGVVKAIKVSRLDQPVXXPSASA

SEQ ID NO: 77612 - protein, 30 aa, Artificial Sequence
  Cyclic GFR-binding peptide
  MOD_RES (28)..(29): Xaa is C or S
IMSMEGIVKPKRGVMIQITINSLAQPVXXP

SEQ ID NO: 77613 - protein, 35 aa, Artificial Sequence; identical to SEQ ID NO: 27122
  Cyclic GFR-binding peptide
  MOD_RES (2)..(34): Xaa is C or S

SEQ ID NO: 77614 - protein, 39 aa, Artificial Sequence; identical to SEQ ID NO: 27123
  Cyclic GFR-binding peptide
  MOD_RES (1)..(3)..(35)..(36): Xaa is C or S

SEQ ID NO: 77615 - protein, 28 aa, Artificial Sequence
  Cyclic GFR-binding peptide
  MOD_RES (1)..(3): Xaa is C or S
XKXSRVIMSMEGIVKPKRGVMIQITINS

SEQ ID NO: 77616 - protein, 35 aa, Artificial Sequence
  Cyclic GFR-binding peptide
  MOD_RES (29)..(30): Xaa is C or S
VMEVQVEKVVKDYEDVKAMKVSRLETPVXXAKPIS

SEQ ID NO: 77617 - protein, 39 aa, Artificial Sequence; identical to SEQ ID NO: 27128
  Cyclic GFR-binding peptide
  MOD_RES (2)..(34): Xaa is C or S

SEQ ID NO: 77618 - protein, 27 aa, Artificial Sequence
  Cyclic GFR-binding peptide
  MOD_RES (26)..(27): Xaa is C or S
VQVEKIVNSSDDVKAVKVSRLQTPAXX

SEQ ID NO: 77619 - protein, 27 aa, Artificial Sequence
  Cyclic GFR-binding peptide
  MOD_RES (27)..(27): Xaa is C or S
EVQVEKVVKDYEDVKAMKVSRLETPVX

SEQ ID NO: 77620 - protein, 38 aa, Artificial Sequence; identical to SEQ ID NO: 27131
  Cyclic GFR-binding peptide
  MOD_RES (2)..(4)..(36)..(37): Xaa is C or S

SEQ ID NO: 77621 - protein, 34 aa, Artificial Sequence; identical to SEQ ID NO: 27133
  Cyclic GFR-binding peptide
  MOD_RES (2)..(4): Xaa is C or S

SEQ ID NO: 77622 - protein, 27 aa, Artificial Sequence
  Cyclic GFR-binding peptide
MDSMEGIVVKENEDMIQMTINSLETPV

SEQ ID NO: 77623 - protein, 31 aa, Artificial Sequence
  Cyclic GFR-binding peptide
  MOD_RES (30)..(30): Xaa is C or S
VVMNSMEGIIVNSSDDMIQVTINSLKTPAXT

SEQ ID NO: 77624 - protein, 39 aa, Artificial Sequence; identical to SEQ ID NO: 27136
  Cyclic GFR-binding peptide
  MOD_RES (2)..(33)..(34): Xaa is C or S

SEQ ID NO: 77625 - protein, 27 aa, Artificial Sequence
  Cyclic GFR-binding peptide
  MOD_RES (26)..(27): Xaa is C or S
VTAKKIKPTKGIIKRIQVPRLDQSVXX

SEQ ID NO: 77626 - protein, 30 aa, Artificial Sequence
  Cyclic GFR-binding peptide
  MOD_RES (2)..(4): Xaa is C or S
SXKXSKVVMVTAKKVKPTRGVIKRIQVPRL

SEQ ID NO: 77627 - protein, 28 aa, Artificial Sequence
  Cyclic GFR-binding peptide
  MOD_RES (28)..(28): Xaa is C or S
IMSMEGIVKPKRGVMIQITINSLAQPVX

SEQ ID NO: 77628 - protein, 32 aa, Artificial Sequence
  Cyclic GFR-binding peptide
  MOD_RES (29)..(29): Xaa is C or S
VMNVQVEKIVNSSDDVKAVKVSRLKTPAXTPK

SEQ ID NO: 77629 - protein, 24 aa, Artificial Sequence
  Cyclic GFR-binding peptide
VTAKKVKPTRGVIKRIQVPRLDQP

SEQ ID NO: 77630 - protein, 29 aa, Artificial Sequence
  Cyclic GFR-binding peptide
SKVIMSMEGIIKPTKGIMIQITINSLDQS

SEQ ID NO: 77631 - protein, 24 aa, Artificial Sequence
  Cyclic GFR-binding peptide
NVQVEKIVNSSDDVKAVKVSRLQT

SEQ ID NO: 77632 - protein, 26 aa, Artificial Sequence
  Cyclic GFR-binding peptide
IMVTAKKVKPKRGVIKRIQVPRLAQP

SEQ ID NO: 77633 - protein, 34 aa, Artificial Sequence
  Cyclic GFR-binding peptide
  MOD_RES (30)..(31): Xaa is C or S
VVMEVTAKKVVKDYEDIKRMQVPRLETPVXXAKP

SEQ ID NO: 77634 - protein, 32 aa, Artificial Sequence; identical to SEQ ID NO: 27152
  Cyclic GFR-binding peptide
  MOD_RES (1)..(32): Xaa is C or S

SEQ ID NO: 77635 - protein, 25 aa, Artificial Sequence
  Cyclic GFR-binding peptide
SMEGIIVNSSDDMIQVTINSLQTPA

SEQ ID NO: 77636 - protein, 32 aa, Artificial Sequence; identical to SEQ ID NO: 27154
  Cyclic GFR-binding peptide
  MOD_RES (1)..(1): Xaa is C or S

SEQ ID NO: 77637 - protein, 32 aa, Artificial Sequence
  Cyclic GFR-binding peptide
  MOD_RES (26)..(27): Xaa is C or S
VTAKKIVNSSDDIKRVQVPRLKTPAXXPKPVY

SEQ ID NO: 77638 - protein, 34 aa, Artificial Sequence
  Cyclic GFR-binding peptide
  MOD_RES (30)..(31): Xaa is C or S
KVIMVQVEKIKPTKGIVKAIKVSRLDQSVXXPSA

SEQ ID NO: 77639 - protein, 33 aa, Artificial Sequence
  Cyclic GFR-binding peptide
  MOD_RES (27)..(28): Xaa is C or S
EVTAKKVVKDYEDIKRMQVPRLETPVXXAKPIS

SEQ ID NO: 77640 - protein, 34 aa, Artificial Sequence; identical to SEQ ID NO: 27164
  Cyclic GFR-binding peptide
  MOD_RES (1)..(33)..(34): Xaa is C or S

SEQ ID NO: 77641 - protein, 36 aa, Artificial Sequence; identical to SEQ ID NO: 27167
  Cyclic GFR-binding peptide
  MOD_RES (35)..(35): Xaa is C or S

SEQ ID NO: 77642 - protein, 24 aa, Artificial Sequence
  Cyclic GFR-binding peptide
VVMDSMEGIVVKENEDMIQMTINS

SEQ ID NO: 77643 - protein, 34 aa, Artificial Sequence
  Cyclic GFR-binding peptide
  MOD_RES (2)..(4): Xaa is C or S
RXGXGEVVMDSMEGIVVKENEDMIQMTINSLETP

SEQ ID NO: 77644 - protein, 25 aa, Artificial Sequence
  Cyclic GFR-binding peptide
MVQVEKVKPKRGVVKAIKVSRLAQP

SEQ ID NO: 77645 - protein, 26 aa, Artificial Sequence
  Cyclic GFR-binding peptide
RVIMVQVEKVKPKRGVVKAIKVSRLA

SEQ ID NO: 77646 - protein, 21 aa, Artificial Sequence
  Cyclic GFR-binding peptide
MVQVEKVKPTRGVVKAIKVSR

SEQ ID NO: 77647 - protein, 25 aa, Artificial Sequence
  Cyclic GFR-binding peptide
TNSLQEFIPKKRVIEYYVVPLPELQ

SEQ ID NO: 77648 - protein, 37 aa, Artificial Sequence; identical to SEQ ID NO: 27172
  Cyclic GFR-binding peptide
  MOD_RES (1)..(3): Xaa is C or S

SEQ ID NO: 77649 - protein, 25 aa, Artificial Sequence
  Cyclic GFR-binding peptide
IMSMEGIIKPTKGIMIQITINSLDQ

SEQ ID NO: 77650 - protein, 42 aa, Artificial Sequence; identical to SEQ ID NO: 27179
  Cyclic GFR-binding peptide
  MOD_RES (2)..(4)..(36): Xaa is C or S

SEQ ID NO: 77651 - protein, 23 aa, Artificial Sequence
  Cyclic GFR-binding peptide
IMVQVEKVKPKRGVVKAIKVSRL

SEQ ID NO: 77652 - protein, 40 aa, Artificial Sequence; identical to SEQ ID NO: 27185
  Cyclic GFR-binding peptide
  MOD_RES (2)..(34)..(35): Xaa is C or S

SEQ ID NO: 77653 - protein, 30 aa, Artificial Sequence
  Cyclic GFR-binding peptide
  MOD_RES (29)..(30): Xaa is C or S
VMNSMEGIIVNSSDDMIQVTINSLKTPAXX

SEQ ID NO: 77654 - protein, 27 aa, Artificial Sequence
  Cyclic GFR-binding peptide
VMVQVEKVKPTRGVVKAIKVSRLDQPV

SEQ ID NO: 77655 - protein, 31 aa, Artificial Sequence
  Cyclic GFR-binding peptide
  MOD_RES (1)..(1): Xaa is C or S
XELHEELRNSLQELKPKKRVYEYYVVPLPEH

SEQ ID NO: 77656 - protein, 40 aa, Artificial Sequence; identical to SEQ ID NO: 27193
  Cyclic GFR-binding peptide
  MOD_RES (1)..(38): Xaa is C or S

SEQ ID NO: 77657 - protein, 38 aa, Artificial Sequence; identical to SEQ ID NO: 27194
  Cyclic GFR-binding peptide
  MOD_RES (32)..(33): Xaa is C or S

SEQ ID NO: 77658 - protein, 33 aa, Artificial Sequence; identical to SEQ ID NO: 27196
  Cyclic GFR-binding peptide
  MOD_RES (2)..(33): Xaa is C or S

SEQ ID NO: 77659 - protein, 38 aa, Artificial Sequence; identical to SEQ ID NO: 27197
  Cyclic GFR-binding peptide
  MOD_RES (1)..(3)..(35): Xaa is C or S

SEQ ID NO: 77660 - protein, 28 aa, Artificial Sequence
  Cyclic GFR-binding peptide
  MOD_RES (2)..(2): Xaa is C or S
GXARVVMNVQVEKIVNSSDDVKAVKVSR

SEQ ID NO: 77661 - protein, 33 aa, Artificial Sequence
  Cyclic GFR-binding peptide
  MOD_RES (2)..(4): Xaa is C or S
AXAXELHEELRNSLQELKPKKRVYEYYVVPLPE

SEQ ID NO: 77662 - protein, 30 aa, Artificial Sequence
  Cyclic GFR-binding peptide
  MOD_RES (30)..(30): Xaa is C or S
RVIMSMEGIVKPKRGVMIQITINSLAQPVX

SEQ ID NO: 77663 - protein, 34 aa, Artificial Sequence; identical to SEQ ID NO: 27203
  Cyclic GFR-binding peptide
  MOD_RES (31)..(32): Xaa is C or S

SEQ ID NO: 77664 - protein, 28 aa, Artificial Sequence
  Cyclic GFR-binding peptide
  MOD_RES (27)..(28): Xaa is C or S
MVTAKKIKPTKGIIKRIQVPRLDQSVXX

SEQ ID NO: 77665 - protein, 36 aa, Artificial Sequence; identical to SEQ ID NO: 27207
  Cyclic GFR-binding peptide
  MOD_RES (2)..(4)..(35)..(36): Xaa is C or S

SEQ ID NO: 77666 - protein, 33 aa, Artificial Sequence
  Cyclic GFR-binding peptide
  MOD_RES (29)..(30): Xaa is C or S
VIMVQVEKVKPKRGVVKAIKVSRLAQPVXXPAA

SEQ ID NO: 77667 - protein, 26 aa, Artificial Sequence
  Cyclic GFR-binding peptide
  MOD_RES (26)..(26): Xaa is C or S
VTAKKIVNSSDDIKRVQVPRLQTPAX

SEQ ID NO: 77668 - protein, 32 aa, Artificial Sequence
  Cyclic GFR-binding peptide
  MOD_RES (28)..(29): Xaa is C or S
MEVQVEKVVKDYEDVKAMKVSRLETPVXXAKP

SEQ ID NO: 77669 - protein, 33 aa, Artificial Sequence; identical to SEQ ID NO: 27210
  Cyclic GFR-binding peptide
  MOD_RES (2)..(2): Xaa is C or S

SEQ ID NO: 77670 - protein, 43 aa, Artificial Sequence; identical to SEQ ID NO: 27211
  Cyclic GFR-binding peptide
  MOD_RES (1)..(3)..(40): Xaa is C or S

SEQ ID NO: 77671 - protein, 32 aa, Artificial Sequence
  Cyclic GFR-binding peptide
  MOD_RES (27)..(28): Xaa is C or S
DVTAKKVVKENEDIKRMQVPRLETPVXXAKPI

SEQ ID NO: 77672 - protein, 35 aa, Artificial Sequence
  Cyclic GFR-binding peptide
  MOD_RES (1)..(3): Xaa is C or S
XEXKNHQLFNSLQEHQGQHPKIRYYVMPLPEEETP

SEQ ID NO: 77673 - protein, 25 aa, Artificial Sequence
  Cyclic GFR-binding peptide
MDVQVEKVVKENEDVKAMKVSRLET

SEQ ID NO: 77674 - protein, 36 aa, Artificial Sequence; identical to SEQ ID NO: 27215
  Cyclic GFR-binding peptide
  MOD_RES (2)..(34)..(35): Xaa is C or S

SEQ ID NO: 77675 - protein, 34 aa, Artificial Sequence
  Cyclic GFR-binding peptide
  MOD_RES (2)..(4): Xaa is C or S
HXGXARVVMNSMEGIIVNSSDDMIQVTINSLQTP

SEQ ID NO: 77676 - protein, 28 aa, Artificial Sequence
  Cyclic GFR-binding peptide
  MOD_RES (26)..(27): Xaa is C or S
VQVEKIVNSSDDVKAVKVSRLKTPAXXP

SEQ ID NO: 77677 - protein, 22 aa, Artificial Sequence
  Cyclic GFR-binding peptide
IMVQVEKIKPTKGIVKAIKVSR

SEQ ID NO: 77678 - protein, 34 aa, Artificial Sequence; identical to SEQ ID NO: 27217
  Cyclic GFR-binding peptide
  MOD_RES (33)..(33): Xaa is C or S

SEQ ID NO: 77679 - protein, 30 aa, Artificial Sequence
  Cyclic GFR-binding peptide
  MOD_RES (1)..(3): Xaa is C or S
XGXGEVVMDSMEGIVVKENEDMIQMTINSL

SEQ ID NO: 77680 - protein, 26 aa, Artificial Sequence
  Cyclic GFR-binding peptide
GEVVMDSMEGIVVKENEDMIQMTINS

SEQ ID NO: 77681 - protein, 30 aa, Artificial Sequence
  Cyclic GFR-binding peptide
  MOD_RES (27)..(28): Xaa is C or S
EVTAKKVVKDYEDIKRMQVPRLETPVXXAK

SEQ ID NO: 77682 - protein, 34 aa, Artificial Sequence
  Cyclic GFR-binding peptide
  MOD_RES (28)..(29): Xaa is C or S
IMVTAKKIKPTKGIIKRIQVPRLDQSVXXPSASA

SEQ ID NO: 77683 - protein, 42 aa, Artificial Sequence; identical to SEQ ID NO: 27218
  Cyclic GFR-binding peptide
  MOD_RES (2)..(4)..(36)..(37): Xaa is C or S

SEQ ID NO: 77684 - protein, 39 aa, Artificial Sequence; identical to SEQ ID NO: 27221
  Cyclic GFR-binding peptide
  MOD_RES (36)..(36): Xaa is C or S

SEQ ID NO: 77685 - protein, 36 aa, Artificial Sequence; identical to SEQ ID NO: 27222
  Cyclic GFR-binding peptide
  MOD_RES (1)..(33)..(34): Xaa is C or S

SEQ ID NO: 77686 - protein, 33 aa, Artificial Sequence
  Cyclic GFR-binding peptide
  MOD_RES (28)..(29): Xaa is C or S
MEVTAKKVVKDYEDIKRMQVPRLETPVXXAKPI

SEQ ID NO: 77687 - protein, 26 aa, Artificial Sequence
  Cyclic GFR-binding peptide
RNSLQELKPKKRVYEYYVVPLPEHHV

SEQ ID NO: 77688 - protein, 23 aa, Artificial Sequence
  Cyclic GFR-binding peptide
ESMEGIVVKDYEDMIQMTINSLE

SEQ ID NO: 77689 - protein, 41 aa, Artificial Sequence; identical to SEQ ID NO: 27230
  Cyclic GFR-binding peptide
  MOD_RES (1)..(3)..(35)..(36): Xaa is C or S

SEQ ID NO: 77690 - protein, 36 aa, Artificial Sequence; identical to SEQ ID NO: 27232
  Cyclic GFR-binding peptide
  MOD_RES (31)..(32): Xaa is C or S

SEQ ID NO: 77691 - protein, 30 aa, Artificial Sequence
  Cyclic GFR-binding peptide
GEVVMESMEGIVVKDYEDMIQMTINSLETP

SEQ ID NO: 77692 - protein, 32 aa, Artificial Sequence
  Cyclic GFR-binding peptide
  MOD_RES (27)..(28): Xaa is C or S
NVQVEKIVNSSDDVKAVKVSRLKTPAXXPKPV

SEQ ID NO: 77693 - protein, 39 aa, Artificial Sequence; identical to SEQ ID NO: 27234
  Cyclic GFR-binding peptide
  MOD_RES (1)..(3)..(35): Xaa is C or S

SEQ ID NO: 77694 - protein, 35 aa, Artificial Sequence; identical to SEQ ID NO: 27236
  Cyclic GFR-binding peptide
  MOD_RES (31)..(32): Xaa is C or S

SEQ ID NO: 77695 - protein, 27 aa, Artificial Sequence
  Cyclic GFR-binding peptide
EVVMEVQVEKVVKDYEDVKAMKVSRLE

SEQ ID NO: 77696 - protein, 30 aa, Artificial Sequence
  Cyclic GFR-binding peptide
GEVVMDSMEGIVVKENEDMIQMTINSLETP

SEQ ID NO: 77697 - protein, 29 aa, Artificial Sequence
  Cyclic GFR-binding peptide
  MOD_RES (1)..(1): Xaa is C or S
XSRVVMNSMEGIIVNSSDDMIQVTINSLK

SEQ ID NO: 77698 - protein, 29 aa, Artificial Sequence
  Cyclic GFR-binding peptide
QLFNSLQEHQGQHPKIRYYLMTLPEEETP

SEQ ID NO: 77699 - protein, 28 aa, Artificial Sequence
  Cyclic GFR-binding peptide
VVMVTAKKVKPTRGVIKRIQVPRLDQPV

SEQ ID NO: 77700 - protein, 34 aa, Artificial Sequence; identical to SEQ ID NO: 27247
  Cyclic GFR-binding peptide

SEQ ID NO: 77701 - protein, 31 aa, Artificial Sequence
  Cyclic GFR-binding peptide
  MOD_RES (27)..(28): Xaa is C or S
MVTAKKIKPTKGIIKRIQVPRLDQSVXXPSA

SEQ ID NO: 77702 - protein, 36 aa, Artificial Sequence
  Cyclic GFR-binding peptide
  MOD_RES (30)..(31): Xaa is C or S
VVMEVQVEKVVKDYEDVKAMKVSRLETPVXXAKPIS

SEQ ID NO: 77703 - protein, 34 aa, Artificial Sequence; identical to SEQ ID NO: 27255
  Cyclic GFR-binding peptide

SEQ ID NO: 77704 - protein, 32 aa, Artificial Sequence; identical to SEQ ID NO: 27256
  Cyclic GFR-binding peptide
  MOD_RES (31)..(32): Xaa is C or S

SEQ ID NO: 77705 - protein, 36 aa, Artificial Sequence; identical to SEQ ID NO: 27258
  Cyclic GFR-binding peptide
  MOD_RES (1)..(33)..(34): Xaa is C or S

SEQ ID NO: 77706 - protein, 30 aa, Artificial Sequence
  Cyclic GFR-binding peptide
EELRNSLQELKPKKRVYEYYVVPLPEHHVR

SEQ ID NO: 77707 - protein, 31 aa, Artificial Sequence; identical to SEQ ID NO: 27259
  Cyclic GFR-binding peptide

SEQ ID NO: 77708 - protein, 32 aa, Artificial Sequence
  Cyclic GFR-binding peptide
  MOD_RES (27)..(28): Xaa is C or S
EVQVEKVVKDYEDVKAMKVSRLETPVXXAKPI

SEQ ID NO: 77709 - protein, 38 aa, Artificial Sequence; identical to SEQ ID NO: 27268
  Cyclic GFR-binding peptide
  MOD_RES (2)..(4)..(36)..(37): Xaa is C or S

SEQ ID NO: 77710 - protein, 28 aa, Artificial Sequence
  Cyclic GFR-binding peptide
  MOD_RES (1)..(1): Xaa is C or S
XSKVVMVTAKKVKPTRGVIKRIQVPRLD

SEQ ID NO: 77711 - protein, 32 aa, Artificial Sequence
  Cyclic GFR-binding peptide
  MOD_RES (30)..(31): Xaa is C or S
KVIMVQVEKIKPTKGIVKAIKVSRLDQSVXXP

SEQ ID NO: 77712 - protein, 29 aa, Artificial Sequence
  Cyclic GFR-binding peptide
  MOD_RES (27)..(27): Xaa is C or S
NVQVEKIVNSSDDVKAVKVSRLKTPAXTP

SEQ ID NO: 77713 - protein, 39 aa, Artificial Sequence; identical to SEQ ID NO: 27274
  Cyclic GFR-binding peptide
  MOD_RES (1)..(33)..(34): Xaa is C or S

SEQ ID NO: 77714 - protein, 36 aa, Artificial Sequence; identical to SEQ ID NO: 27276
  Cyclic GFR-binding peptide
  MOD_RES (36)..(36): Xaa is C or S

SEQ ID NO: 77715 - protein, 40 aa, Artificial Sequence; identical to SEQ ID NO: 27277
  Cyclic GFR-binding peptide
  MOD_RES (2)..(4): Xaa is C or S

SEQ ID NO: 77716 - protein, 27 aa, Artificial Sequence
  Cyclic GFR-binding peptide
  MOD_RES (27)..(27): Xaa is C or S
NSMEGIIVNSSDDMIQVTINSLKTPAX

SEQ ID NO: 77717 - protein, 32 aa, Artificial Sequence; identical to SEQ ID NO: 27282
  Cyclic GFR-binding peptide
  MOD_RES (31)..(32): Xaa is C or S

SEQ ID NO: 77718 - protein, 36 aa, Artificial Sequence
  Cyclic GFR-binding peptide
  MOD_RES (30)..(31): Xaa is C or S
VVMNVQVEKIVNSSDDVKAVKVSRLKTPAXXPKPVY

SEQ ID NO: 77719 - protein, 28 aa, Artificial Sequence
  Cyclic GFR-binding peptide
ELTNSLQEFIPKKRVIEYYLVTLPELQV

SEQ ID NO: 77720 - protein, 35 aa, Artificial Sequence
  Cyclic GFR-binding peptide
  MOD_RES (30)..(31): Xaa is C or S
KVIMVTAKKIKPTKGIIKRIQVPRLDQSVXXPSAS

SEQ ID NO: 77721 - protein, 22 aa, Artificial Sequence
  Cyclic GFR-binding peptide
NSLQELKPKKRVYEYYVVPLPE

SEQ ID NO: 77722 - protein, 34 aa, Artificial Sequence; identical to SEQ ID NO: 27295
  Cyclic GFR-binding peptide
  MOD_RES (31)..(32): Xaa is C or S

SEQ ID NO: 77723 - protein, 38 aa, Artificial Sequence; identical to SEQ ID NO: 27297
  Cyclic GFR-binding peptide
  MOD_RES (2)..(33)..(34): Xaa is C or S

SEQ ID NO: 77724 - protein, 36 aa, Artificial Sequence; identical to SEQ ID NO: 27299
  Cyclic GFR-binding peptide
  MOD_RES (2)..(4)..(36): Xaa is C or S

SEQ ID NO: 77725 - protein, 34 aa, Artificial Sequence
  Cyclic GFR-binding peptide
  MOD_RES (1)..(3): Xaa is C or S
XKXALHDELTNSLQEFIPKKRVIEYYVVPLPELQ

SEQ ID NO: 77726 - protein, 29 aa, Artificial Sequence
  Cyclic GFR-binding peptide
LHEELRNSLQELKPKKRVYEYYVVPLPEH

SEQ ID NO: 77727 - protein, 35 aa, Artificial Sequence; identical to SEQ ID NO: 27302
  Cyclic GFR-binding peptide

SEQ ID NO: 77728 - protein, 35 aa, Artificial Sequence; identical to SEQ ID NO: 27304
  Cyclic GFR-binding peptide
  MOD_RES (2)..(34): Xaa is C or S

SEQ ID NO: 77729 - protein, 33 aa, Artificial Sequence
  Cyclic GFR-binding peptide
  MOD_RES (29)..(30): Xaa is C or S
VMNSMEGIIVNSSDDMIQVTINSLKTPAXXPKP

SEQ ID NO: 77730 - protein, 26 aa, Artificial Sequence
  Cyclic GFR-binding peptide
ESMEGIVVKDYEDMIQMTINSLETPV

SEQ ID NO: 77731 - protein, 29 aa, Artificial Sequence
  Cyclic GFR-binding peptide
RVIMSMEGIVKPKRGVMIQITINSLAQPV

SEQ ID NO: 77732 - protein, 22 aa, Artificial Sequence
  Cyclic GFR-binding peptide
MVTAKKVKPKRGVIKRIQVPRL

SEQ ID NO: 77733 - protein, 32 aa, Artificial Sequence
  Cyclic GFR-binding peptide
  MOD_RES (2)..(4): Xaa is C or S
SXKXSKVIMSMEGIIKPTKGIMIQITINSLDQ

SEQ ID NO: 77734 - protein, 24 aa, Artificial Sequence
  Cyclic GFR-binding peptide
NSMEGIIVNSSDDMIQVTINSLKT

SEQ ID NO: 77735 - protein, 32 aa, Artificial Sequence
  Cyclic GFR-binding peptide
  MOD_RES (32)..(32): Xaa is C or S
LTNSLQEFIPKKRVIEYYVVPLPELQVQTPRX

SEQ ID NO: 77736 - protein, 38 aa, Artificial Sequence; identical to SEQ ID NO: 27312
  Cyclic GFR-binding peptide
  MOD_RES (2)..(4)..(38): Xaa is C or S

SEQ ID NO: 77737 - protein, 25 aa, Artificial Sequence
  Cyclic GFR-binding peptide
NSLQELKPKKRVYEYYVVPLPEHHV

SEQ ID NO: 77738 - protein, 29 aa, Artificial Sequence
  Cyclic GFR-binding peptide
RVVMNVTAKKIVNSSDDIKRVQVPRLQTP

SEQ ID NO: 77739 - protein, 31 aa, Artificial Sequence
  Cyclic GFR-binding peptide
  MOD_RES (27)..(28): Xaa is C or S
DVTAKKVVKENEDIKRMQVPRLETPVXXAKP

SEQ ID NO: 77740 - protein, 41 aa, Artificial Sequence; identical to SEQ ID NO: 27330
  Cyclic GFR-binding peptide
  MOD_RES (1)..(3)..(35)..(36): Xaa is C or S

SEQ ID NO: 77741 - protein, 34 aa, Artificial Sequence; identical to SEQ ID NO: 27332
  Cyclic GFR-binding peptide
  MOD_RES (2)..(4): Xaa is C or S

SEQ ID NO: 77742 - protein, 29 aa, Artificial Sequence
  Cyclic GFR-binding peptide
  MOD_RES (29)..(29): Xaa is C or S
VIMVQVEKVKPKRGVVKAIKVSRLAQPVX

SEQ ID NO: 77743 - protein, 37 aa, Artificial Sequence; identical to SEQ ID NO: 27337
  Cyclic GFR-binding peptide
  MOD_RES (2)..(4): Xaa is C or S

SEQ ID NO: 77744 - protein, 34 aa, Artificial Sequence
  Cyclic GFR-binding peptide
  MOD_RES (31)..(31): Xaa is C or S
RNSLQELKPKKRVYEYYVVPLPEHHVRSPQXKVS

SEQ ID NO: 77745 - protein, 34 aa, Artificial Sequence
  Cyclic GFR-binding peptide
  MOD_RES (28)..(29): Xaa is C or S
VMVTAKKVKPTRGVIKRIQVPRLDQPVXXPSASA

SEQ ID NO: 77746 - protein, 27 aa, Artificial Sequence
  Cyclic GFR-binding peptide
IMVQVEKIKPTKGIVKAIKVSRLDQSV

SEQ ID NO: 77747 - protein, 37 aa, Artificial Sequence; identical to SEQ ID NO: 27339
  Cyclic GFR-binding peptide
  MOD_RES (2)..(34)..(35): Xaa is C or S

SEQ ID NO: 77748 - protein, 34 aa, Artificial Sequence
  Cyclic GFR-binding peptide
  MOD_RES (30)..(31): Xaa is C or S
VVMNSMEGIIVNSSDDMIQVTINSLQTPAXXPKP

SEQ ID NO: 77749 - protein, 30 aa, Artificial Sequence
  Cyclic GFR-binding peptide
  MOD_RES (26)..(27): Xaa is C or S
SMEGIVVKDYEDMIQMTINSLETPVXXAKP

SEQ ID NO: 77750 - protein, 29 aa, Artificial Sequence
  Cyclic GFR-binding peptide
VVMEVTAKKVVKDYEDIKRMQVPRLETPV

SEQ ID NO: 77751 - protein, 28 aa, Artificial Sequence
  Cyclic GFR-binding peptide
GEVVMDVTAKKVVKENEDIKRMQVPRLE

SEQ ID NO: 77752 - protein, 26 aa, Artificial Sequence
  Cyclic GFR-binding peptide
VVMEVTAKKVVKDYEDIKRMQVPRLE

SEQ ID NO: 77753 - protein, 33 aa, Artificial Sequence
  Cyclic GFR-binding peptide
  MOD_RES (33)..(33): Xaa is C or S
ELTNSLQEFIPKKRVIEYYLVTLPELQVQTPRX

SEQ ID NO: 77754 - protein, 25 aa, Artificial Sequence
  Cyclic GFR-binding peptide
MVTAKKVKPTRGVIKRIQVPRLDQP

SEQ ID NO: 77755 - protein, 23 aa, Artificial Sequence
  Cyclic GFR-binding peptide
MDSMEGIVVKENEDMIQMTINSL

SEQ ID NO: 77756 - protein, 37 aa, Artificial Sequence; identical to SEQ ID NO: 27342
  Cyclic GFR-binding peptide
  MOD_RES (32)..(33): Xaa is C or S

SEQ ID NO: 77757 - protein, 22 aa, Artificial Sequence
  Cyclic GFR-binding peptide
SMEGIIKPTKGIMIQITINSLD

SEQ ID NO: 77758 - protein, 41 aa, Artificial Sequence; identical to SEQ ID NO: 27344
  Cyclic GFR-binding peptide
  MOD_RES (2)..(4)..(35)..(36): Xaa is C or S

SEQ ID NO: 77759 - protein, 31 aa, Artificial Sequence
  Cyclic GFR-binding peptide
  MOD_RES (2)..(4): Xaa is C or S
SXKXSKVIMVQVEKIKPTKGIVKAIKVSRLD

SEQ ID NO: 77760 - protein, 29 aa, Artificial Sequence
  Cyclic GFR-binding peptide
SKVIMVQVEKIKPTKGIVKAIKVSRLDQS

SEQ ID NO: 77761 - protein, 36 aa, Artificial Sequence; identical to SEQ ID NO: 27348
  Cyclic GFR-binding peptide
  MOD_RES (1)..(35): Xaa is C or S

SEQ ID NO: 77762 - protein, 26 aa, Artificial Sequence
  Cyclic GFR-binding peptide
SKVVMVQVEKVKPTRGVVKAIKVSRL

SEQ ID NO: 77763 - protein, 27 aa, Artificial Sequence
  Cyclic GFR-binding peptide
  MOD_RES (1)..(1): Xaa is C or S
XGEVVMDSMEGIVVKENEDMIQMTINS

SEQ ID NO: 77764 - protein, 25 aa, Artificial Sequence
  Cyclic GFR-binding peptide
RVIMVQVEKVKPKRGVVKAIKVSRL

SEQ ID NO: 77765 - protein, 28 aa, Artificial Sequence
  Cyclic GFR-binding peptide
  MOD_RES (27)..(28): Xaa is C or S
NVQVEKIVNSSDDVKAVKVSRLKTPAXX

SEQ ID NO: 77766 - protein, 27 aa, Artificial Sequence
  Cyclic GFR-binding peptide
  MOD_RES (26)..(27): Xaa is C or S
VQVEKVKPTRGVVKAIKVSRLDQPVXX

SEQ ID NO: 77767 - protein, 25 aa, Artificial Sequence
  Cyclic GFR-binding peptide
VVMNVTAKKIVNSSDDIKRVQVPRL

SEQ ID NO: 77768 - protein, 30 aa, Artificial Sequence
  Cyclic GFR-binding peptide
EELRNSLQELKPKKRVYEYYLVTLPEHHVR

SEQ ID NO: 77769 - protein, 23 aa, Artificial Sequence
  Cyclic GFR-binding peptide
SMEGIVVKDYEDMIQMTINSLET

SEQ ID NO: 77770 - protein, 33 aa, Artificial Sequence
  Cyclic GFR-binding peptide
  MOD_RES (30)..(31): Xaa is C or S
KVVMVQVEKVKPTRGVVKAIKVSRLDQPVXXPS

SEQ ID NO: 77771 - protein, 31 aa, Artificial Sequence
  Cyclic GFR-binding peptide
  MOD_RES (30)..(31): Xaa is C or S
VVMNVTAKKIVNSSDDIKRVQVPRLQTPAXX

SEQ ID NO: 77772 - protein, 40 aa, Artificial Sequence; identical to SEQ ID NO: 27355
  Cyclic GFR-binding peptide
  MOD_RES (1)..(38): Xaa is C or S

SEQ ID NO: 77773 - protein, 35 aa, Artificial Sequence
  Cyclic GFR-binding peptide
  MOD_RES (2)..(4): Xaa is C or S
AXAXELHEELRNSLQELKPKKRVYEYYVVPLPEHH

SEQ ID NO: 77774 - protein, 24 aa, Artificial Sequence
  Cyclic GFR-binding peptide
MVTAKKIKPTKGIIKRIQVPRLDQ

SEQ ID NO: 77775 - protein, 22 aa, Artificial Sequence
  Cyclic GFR-binding peptide
VTAKKIKPTKGIIKRIQVPRLD

SEQ ID NO: 77776 - protein, 38 aa, Artificial Sequence; identical to SEQ ID NO: 27360
  Cyclic GFR-binding peptide
  MOD_RES (2)..(4)..(35)..(36): Xaa is C or S

SEQ ID NO: 77777 - protein, 35 aa, Artificial Sequence
  Cyclic GFR-binding peptide
  MOD_RES (31)..(31): Xaa is C or S
QLFNSLQEHQGQHPKIRYYVMPLPEEETPVXELGE

SEQ ID NO: 77778 - protein, 31 aa, Artificial Sequence
  Cyclic GFR-binding peptide
  MOD_RES (1)..(3): Xaa is C or S
XKXSRVIMVTAKKVKPKRGVIKRIQVPRLAQ

SEQ ID NO: 77779 - protein, 20 aa, Artificial Sequence
  Cyclic GFR-binding peptide
VTAKKVKPTRGVIKRIQVPR

SEQ ID NO: 77780 - protein, 37 aa, Artificial Sequence; identical to SEQ ID NO: 27368
  Cyclic GFR-binding peptide
  MOD_RES (31)..(32): Xaa is C or S

SEQ ID NO: 77781 - protein, 23 aa, Artificial Sequence
  Cyclic GFR-binding peptide
VVMVQVEKVKPTRGVVKAIKVSR

SEQ ID NO: 77782 - protein, 33 aa, Artificial Sequence
  Cyclic GFR-binding peptide
  MOD_RES (27)..(28): Xaa is C or S
NSMEGIIVNSSDDMIQVTINSLQTPAXXPKPVT

SEQ ID NO: 77783 - protein, 30 aa, Artificial Sequence
  Cyclic GFR-binding peptide
  MOD_RES (26)..(26): Xaa is C or S
VQVEKIVNSSDDVKAVKVSRLKTPAXTPKT

SEQ ID NO: 77784 - protein, 36 aa, Artificial Sequence; identical to SEQ ID NO: 27377
  Cyclic GFR-binding peptide
  MOD_RES (1)..(3)..(34)..(35): Xaa is C or S

SEQ ID NO: 77785 - protein, 26 aa, Artificial Sequence
  Cyclic GFR-binding peptide
NSMEGIIVNSSDDMIQVTINSLQTPA

SEQ ID NO: 77786 - protein, 28 aa, Artificial Sequence
  Cyclic GFR-binding peptide
  MOD_RES (26)..(27): Xaa is C or S
VTAKKIVNSSDDIKRVQVPRLKTPAXXP

SEQ ID NO: 77787 - protein, 29 aa, Artificial Sequence
  Cyclic GFR-binding peptide
  MOD_RES (28)..(29): Xaa is C or S
IMSMEGIVKPKRGVMIQITINSLAQPVXX

SEQ ID NO: 77788 - protein, 27 aa, Artificial Sequence
  Cyclic GFR-binding peptide
  MOD_RES (27)..(27): Xaa is C or S
NVQVEKIVNSSDDVKAVKVSRLQTPAX

SEQ ID NO: 77789 - protein, 24 aa, Artificial Sequence
  Cyclic GFR-binding peptide
KVIMSMEGIIKPTKGIMIQITINS

SEQ ID NO: 77790 - protein, 35 aa, Artificial Sequence
  Cyclic GFR-binding peptide
  MOD_RES (29)..(30): Xaa is C or S
VMNVTAKKIVNSSDDIKRVQVPRLQTPAXXPKPVT

SEQ ID NO: 77791 - protein, 34 aa, Artificial Sequence; identical to SEQ ID NO: 27383
  Cyclic GFR-binding peptide
  MOD_RES (2)..(33)..(34): Xaa is C or S

SEQ ID NO: 77792 - protein, 24 aa, Artificial Sequence
  Cyclic GFR-binding peptide
MNVTAKKIVNSSDDIKRVQVPRLQ

SEQ ID NO: 77793 - protein, 36 aa, Artificial Sequence; identical to SEQ ID NO: 27387
  Cyclic GFR-binding peptide
  MOD_RES (2)..(4)..(35)..(36): Xaa is C or S

SEQ ID NO: 77794 - protein, 27 aa, Artificial Sequence
  Cyclic GFR-binding peptide
RNSLQELKPKKRVYEYYVVPLPEHHVR

SEQ ID NO: 77795 - protein, 29 aa, Artificial Sequence
  Cyclic GFR-binding peptide
  MOD_RES (1)..(1): Xaa is C or S
XKNHQLFNSLQEHQGQHPKIRYYLMTLPE

SEQ ID NO: 77796 - protein, 39 aa, Artificial Sequence; identical to SEQ ID NO: 27389
  Cyclic GFR-binding peptide
  MOD_RES (1)..(3)..(34)..(35): Xaa is C or S

SEQ ID NO: 77797 - protein, 36 aa, Artificial Sequence
  Cyclic GFR-binding peptide
  MOD_RES (30)..(31): Xaa is C or S
RVIMVTAKKVKPKRGVIKRIQVPRLAQPVXXPAASA

SEQ ID NO: 77798 - protein, 29 aa, Artificial Sequence
  Cyclic GFR-binding peptide
  MOD_RES (29)..(29): Xaa is C or S
VIMSMEGIVKPKRGVMIQITINSLAQPVX

SEQ ID NO: 77799 - protein, 29 aa, Artificial Sequence
  Cyclic GFR-binding peptide
  MOD_RES (1)..(3): Xaa is C or S
XKXSKVIMVQVEKIKPTKGIVKAIKVSRL

SEQ ID NO: 77800 - protein, 36 aa, Artificial Sequence; identical to SEQ ID NO: 27395
  Cyclic GFR-binding peptide
  MOD_RES (31)..(32): Xaa is C or S

SEQ ID NO: 77801 - protein, 32 aa, Artificial Sequence
  Cyclic GFR-binding peptide
  MOD_RES (1)..(3): Xaa is C or S
XGXGEVVMDVTAKKVVKENEDIKRMQVPRLET

SEQ ID NO: 77802 - protein, 39 aa, Artificial Sequence; identical to SEQ ID NO: 27401
  Cyclic GFR-binding peptide
  MOD_RES (2)..(34)..(35): Xaa is C or S

SEQ ID NO: 77803 - protein, 37 aa, Artificial Sequence; identical to SEQ ID NO: 27404
  Cyclic GFR-binding peptide
  MOD_RES (2)..(36): Xaa is C or S

SEQ ID NO: 77804 - protein, 32 aa, Artificial Sequence
  Cyclic GFR-binding peptide
  MOD_RES (1)..(3): Xaa is C or S
XKXSKVVMVTAKKVKPTRGVIKRIQVPRLDQP

SEQ ID NO: 77805 - protein, 28 aa, Artificial Sequence
  Cyclic GFR-binding peptide
QLFNSLQEHQGQHPKIRYYVMPLPEEET

SEQ ID NO: 77806 - protein, 30 aa, Artificial Sequence
  Cyclic GFR-binding peptide
  MOD_RES (1)..(1): Xaa is C or S
XSRVIMVQVEKVKPKRGVVKAIKVSRLAQP

SEQ ID NO: 77807 - protein, 24 aa, Artificial Sequence
  Cyclic GFR-binding peptide
SMEGIIKPTKGIMIQITINSLDQS

SEQ ID NO: 77808 - protein, 29 aa, Artificial Sequence
  Cyclic GFR-binding peptide
ELHEELRNSLQELKPKKRVYEYYLVTLPE

SEQ ID NO: 77809 - protein, 34 aa, Artificial Sequence; identical to SEQ ID NO: 27411
  Cyclic GFR-binding peptide
  MOD_RES (2)..(34): Xaa is C or S

SEQ ID NO: 77810 - protein, 37 aa, Artificial Sequence; identical to SEQ ID NO: 27417
  Cyclic GFR-binding peptide
  MOD_RES (2)..(34)..(35): Xaa is C or S

SEQ ID NO: 77811 - protein, 34 aa, Artificial Sequence; identical to SEQ ID NO: 27418
  Cyclic GFR-binding peptide

SEQ ID NO: 77812 - protein, 32 aa, Artificial Sequence
  Cyclic GFR-binding peptide
  MOD_RES (29)..(29): Xaa is C or S
VMNSMEGIIVNSSDDMIQVTINSLKTPAXTPK

SEQ ID NO: 77813 - protein, 30 aa, Artificial Sequence
  Cyclic GFR-binding peptide
  MOD_RES (27)..(28): Xaa is C or S
DSMEGIVVKENEDMIQMTINSLETPVXXAK

SEQ ID NO: 77814 - protein, 39 aa, Artificial Sequence; identical to SEQ ID NO: 27422
  Cyclic GFR-binding peptide
  MOD_RES (1)..(33)..(34): Xaa is C or S

SEQ ID NO: 77815 - protein, 32 aa, Artificial Sequence; identical to SEQ ID NO: 27424
  Cyclic GFR-binding peptide
  MOD_RES (1)..(1): Xaa is C or S

SEQ ID NO: 77816 - protein, 33 aa, Artificial Sequence; identical to SEQ ID NO: 27425
  Cyclic GFR-binding peptide

SEQ ID NO: 77817 - protein, 34 aa, Artificial Sequence; identical to SEQ ID NO: 27429
  Cyclic GFR-binding peptide
  MOD_RES (2)..(33)..(34): Xaa is C or S

SEQ ID NO: 77818 - protein, 37 aa, Artificial Sequence; identical to SEQ ID NO: 27428
  Cyclic GFR-binding peptide
  MOD_RES (37)..(37): Xaa is C or S

SEQ ID NO: 77819 - protein, 27 aa, Artificial Sequence
  Cyclic GFR-binding peptide
MNVTAKKIVNSSDDIKRVQVPRLQTPA

SEQ ID NO: 77820 - protein, 32 aa, Artificial Sequence
  Cyclic GFR-binding peptide
  MOD_RES (32)..(32): Xaa is C or S
LRNSLQELKPKKRVYEYYLVTLPEHHVRSPQX

SEQ ID NO: 77821 - protein, 25 aa, Artificial Sequence
  Cyclic GFR-binding peptide
VQVEKVVKENEDVKAMKVSRLETPV

SEQ ID NO: 77822 - protein, 37 aa, Artificial Sequence; identical to SEQ ID NO: 27431
  Cyclic GFR-binding peptide
  MOD_RES (31)..(32): Xaa is C or S

SEQ ID NO: 77823 - protein, 28 aa, Artificial Sequence
  Cyclic GFR-binding peptide
  MOD_RES (2)..(2): Xaa is C or S
KXSRVIMVTAKKVKPKRGVIKRIQVPRL

SEQ ID NO: 77824 - protein, 35 aa, Artificial Sequence; identical to SEQ ID NO: 27432
  Cyclic GFR-binding peptide
  MOD_RES (2)..(33)..(34): Xaa is C or S

SEQ ID NO: 77825 - protein, 36 aa, Artificial Sequence; identical to SEQ ID NO: 27435
  Cyclic GFR-binding peptide
  MOD_RES (2)..(4)..(36): Xaa is C or S

SEQ ID NO: 77826 - protein, 23 aa, Artificial Sequence
  Cyclic GFR-binding peptide
VTAKKIVNSSDDIKRVQVPRLQT

SEQ ID NO: 77827 - protein, 27 aa, Artificial Sequence
  Cyclic GFR-binding peptide
  MOD_RES (2)..(2): Xaa is C or S
KXSKVVMVQVEKVKPTRGVVKAIKVSR

SEQ ID NO: 77828 - protein, 37 aa, Artificial Sequence; identical to SEQ ID NO: 27438
  Cyclic GFR-binding peptide
  MOD_RES (32)..(33): Xaa is C or S

SEQ ID NO: 77829 - protein, 36 aa, Artificial Sequence; identical to SEQ ID NO: 27442
  Cyclic GFR-binding peptide
  MOD_RES (2)..(34): Xaa is C or S

SEQ ID NO: 77830 - protein, 24 aa, Artificial Sequence
  Cyclic GFR-binding peptide
VQVEKVKPTRGVVKAIKVSRLDQP

SEQ ID NO: 77831 - protein, 30 aa, Artificial Sequence
  Cyclic GFR-binding peptide
  MOD_RES (29)..(29): Xaa is C or S
VMNSMEGIIVNSSDDMIQVTINSLKTPAXT

SEQ ID NO: 77832 - protein, 37 aa, Artificial Sequence; identical to SEQ ID NO: 27445
  Cyclic GFR-binding peptide
  MOD_RES (32)..(33): Xaa is C or S

SEQ ID NO: 77833 - protein, 39 aa, Artificial Sequence; identical to SEQ ID NO: 27446
  Cyclic GFR-binding peptide
  MOD_RES (2)..(34)..(35): Xaa is C or S

SEQ ID NO: 77834 - protein, 36 aa, Artificial Sequence; identical to SEQ ID NO: 27450
  Cyclic GFR-binding peptide
  MOD_RES (36)..(36): Xaa is C or S

SEQ ID NO: 77835 - protein, 38 aa, Artificial Sequence; identical to SEQ ID NO: 27449
  Cyclic GFR-binding peptide
  MOD_RES (36)..(36): Xaa is C or S

SEQ ID NO: 77836 - protein, 35 aa, Artificial Sequence; identical to SEQ ID NO: 27451
  Cyclic GFR-binding peptide

SEQ ID NO: 77837 - protein, 33 aa, Artificial Sequence; identical to SEQ ID NO: 27456
  Cyclic GFR-binding peptide
  MOD_RES (1)..(33): Xaa is C or S

SEQ ID NO: 77838 - protein, 27 aa, Artificial Sequence
  Cyclic GFR-binding peptide
IMVTAKKIKPTKGIIKRIQVPRLDQSV

SEQ ID NO: 77839 - protein, 30 aa, Artificial Sequence
  Cyclic GFR-binding peptide
  MOD_RES (2)..(4): Xaa is C or S
RXGXGEVVMDVTAKKVVKENEDIKRMQVPR

SEQ ID NO: 77840 - protein, 33 aa, Artificial Sequence
  Cyclic GFR-binding peptide
  MOD_RES (29)..(30): Xaa is C or S
VIMVTAKKIKPTKGIIKRIQVPRLDQSVXXPSA

SEQ ID NO: 77841 - protein, 31 aa, Artificial Sequence
  Cyclic GFR-binding peptide
  MOD_RES (30)..(31): Xaa is C or S
VVMESMEGIVVKDYEDMIQMTINSLETPVXX

SEQ ID NO: 77842 - protein, 36 aa, Artificial Sequence; identical to SEQ ID NO: 27461
  Cyclic GFR-binding peptide
  MOD_RES (32)..(33): Xaa is C or S

SEQ ID NO: 77843 - protein, 26 aa, Artificial Sequence
  Cyclic GFR-binding peptide
  MOD_RES (26)..(26): Xaa is C or S
SMEGIIVNSSDDMIQVTINSLQTPAX

SEQ ID NO: 77844 - protein, 36 aa, Artificial Sequence; identical to SEQ ID NO: 27465
  Cyclic GFR-binding peptide
  MOD_RES (1)..(3)..(34)..(35): Xaa is C or S

SEQ ID NO: 77845 - protein, 30 aa, Artificial Sequence
  Cyclic GFR-binding peptide
  MOD_RES (2)..(4): Xaa is C or S
RXGXGEVVMEVQVEKVVKDYEDVKAMKVSR

SEQ ID NO: 77846 - protein, 31 aa, Artificial Sequence
  Cyclic GFR-binding peptide
  MOD_RES (1)..(1): Xaa is C or S
XGEVVMDVTAKKVVKENEDIKRMQVPRLETP

SEQ ID NO: 77847 - protein, 32 aa, Artificial Sequence
  Cyclic GFR-binding peptide
  MOD_RES (29)..(29): Xaa is C or S
FNSLQEHQGQHPKIRYYLMTLPEEETPVXELG

SEQ ID NO: 77848 - protein, 27 aa, Artificial Sequence
  Cyclic GFR-binding peptide
  MOD_RES (26)..(27): Xaa is C or S
SMEGIVVKENEDMIQMTINSLETPVXX

SEQ ID NO: 77849 - protein, 26 aa, Artificial Sequence
  Cyclic GFR-binding peptide
TNSLQEFIPKKRVIEYYLVTLPELQV

SEQ ID NO: 77850 - protein, 32 aa, Artificial Sequence
  Cyclic GFR-binding peptide
  MOD_RES (30)..(31): Xaa is C or S
VVMNSMEGIIVNSSDDMIQVTINSLKTPAXXP

SEQ ID NO: 77851 - protein, 36 aa, Artificial Sequence
  Cyclic GFR-binding peptide
  MOD_RES (32)..(32): Xaa is C or S
LTNSLQEFIPKKRVIEYYLVTLPELQVQTPRXQVNR

SEQ ID NO: 77852 - protein, 34 aa, Artificial Sequence
  Cyclic GFR-binding peptide
  MOD_RES (34)..(34): Xaa is C or S
EELRNSLQELKPKKRVYEYYLVTLPEHHVRSPQX

SEQ ID NO: 77853 - protein, 28 aa, Artificial Sequence
  Cyclic GFR-binding peptide
RVVMNVTAKKIVNSSDDIKRVQVPRLQT

SEQ ID NO: 77854 - protein, 36 aa, Artificial Sequence; identical to SEQ ID NO: 27477
  Cyclic GFR-binding peptide
  MOD_RES (2)..(4)..(36): Xaa is C or S

SEQ ID NO: 77855 - protein, 23 aa, Artificial Sequence
  Cyclic GFR-binding peptide
VVMSMEGIVKPTRGVMIQITINS

SEQ ID NO: 77856 - protein, 32 aa, Artificial Sequence
  Cyclic GFR-binding peptide
  MOD_RES (29)..(30): Xaa is C or S
VMNVQVEKIVNSSDDVKAVKVSRLKTPAXXPK

SEQ ID NO: 77857 - protein, 26 aa, Artificial Sequence
  Cyclic GFR-binding peptide
NVQVEKIVNSSDDVKAVKVSRLQTPA

SEQ ID NO: 77858 - protein, 31 aa, Artificial Sequence
  Cyclic GFR-binding peptide
  MOD_RES (2)..(4): Xaa is C or S
SXKXSRVIMSMEGIVKPKRGVMIQITINSLA

SEQ ID NO: 77859 - protein, 36 aa, Artificial Sequence
  Cyclic GFR-binding peptide
  MOD_RES (30)..(31): Xaa is C or S
VVMDSMEGIVVKENEDMIQMTINSLETPVXXAKPIK

SEQ ID NO: 77860 - protein, 33 aa, Artificial Sequence; identical to SEQ ID NO: 27483
  Cyclic GFR-binding peptide

SEQ ID NO: 77861 - protein, 30 aa, Artificial Sequence
  Cyclic GFR-binding peptide
  MOD_RES (2)..(2): Xaa is C or S
EXKNHQLFNSLQEHQGQHPKIRYYLMTLPE

SEQ ID NO: 77862 - protein, 36 aa, Artificial Sequence; identical to SEQ ID NO: 27485
  Cyclic GFR-binding peptide
  MOD_RES (1)..(35): Xaa is C or S

SEQ ID NO: 77863 - protein, 32 aa, Artificial Sequence; identical to SEQ ID NO: 27486
  Cyclic GFR-binding peptide
  MOD_RES (1)..(32): Xaa is C or S

SEQ ID NO: 77864 - protein, 33 aa, Artificial Sequence; identical to SEQ ID NO: 27488
  Cyclic GFR-binding peptide
  MOD_RES (31)..(32): Xaa is C or S

SEQ ID NO: 77865 - protein, 33 aa, Artificial Sequence; identical to SEQ ID NO: 27487
  Cyclic GFR-binding peptide

SEQ ID NO: 77866 - protein, 34 aa, Artificial Sequence; identical to SEQ ID NO: 27492
  Cyclic GFR-binding peptide
  MOD_RES (2)..(34): Xaa is C or S

SEQ ID NO: 77867 - protein, 29 aa, Artificial Sequence
  Cyclic GFR-binding peptide
  MOD_RES (2)..(4): Xaa is C or S
SXKXSKVVMSMEGIVKPTRGVMIQITINS

SEQ ID NO: 77868 - protein, 29 aa, Artificial Sequence
  Cyclic GFR-binding peptide
VVMNVQVEKIVNSSDDVKAVKVSRLKTPA

SEQ ID NO: 77869 - protein, 26 aa, Artificial Sequence
  Cyclic GFR-binding peptide
KVVMSMEGIVKPTRGVMIQITINSLD

SEQ ID NO: 77870 - protein, 41 aa, Artificial Sequence; identical to SEQ ID NO: 27495
  Cyclic GFR-binding peptide
  MOD_RES (2)..(4)..(36)..(37): Xaa is C or S

SEQ ID NO: 77871 - protein, 31 aa, Artificial Sequence
  Cyclic GFR-binding peptide
  MOD_RES (2)..(4): Xaa is C or S
RXGXGEVVMDVQVEKVVKENEDVKAMKVSRL

SEQ ID NO: 77872 - protein, 23 aa, Artificial Sequence
  Cyclic GFR-binding peptide
NSLQEFIPKKRVIEYYVVPLPEL

SEQ ID NO: 77873 - protein, 41 aa, Artificial Sequence; identical to SEQ ID NO: 27501
  Cyclic GFR-binding peptide
  MOD_RES (2)..(4)..(36)..(37): Xaa is C or S

SEQ ID NO: 77874 - protein, 36 aa, Artificial Sequence; identical to SEQ ID NO: 27502
  Cyclic GFR-binding peptide
  MOD_RES (2)..(33)..(34): Xaa is C or S

SEQ ID NO: 77875 - protein, 35 aa, Artificial Sequence; identical to SEQ ID NO: 27503
  Cyclic GFR-binding peptide
  MOD_RES (31)..(32): Xaa is C or S

SEQ ID NO: 77876 - protein, 27 aa, Artificial Sequence
  Cyclic GFR-binding peptide
VIMVTAKKVKPKRGVIKRIQVPRLAQP

SEQ ID NO: 77877 - protein, 36 aa, Artificial Sequence; identical to SEQ ID NO: 27508
  Cyclic GFR-binding peptide
  MOD_RES (32)..(33): Xaa is C or S

SEQ ID NO: 77878 - protein, 38 aa, Artificial Sequence; identical to SEQ ID NO: 27514
  Cyclic GFR-binding peptide
  MOD_RES (1)..(3)..(35)..(36): Xaa is C or S

SEQ ID NO: 77879 - protein, 22 aa, Artificial Sequence
  Cyclic GFR-binding peptide
NSLQELKPKKRVYEYYLVTLPE

SEQ ID NO: 77880 - protein, 27 aa, Artificial Sequence
  Cyclic GFR-binding peptide
NSLQELKPKKRVYEYYVVPLPEHHVRS

SEQ ID NO: 77881 - protein, 34 aa, Artificial Sequence; identical to SEQ ID NO: 27517
  Cyclic GFR-binding peptide
  MOD_RES (31)..(32): Xaa is C or S

SEQ ID NO: 77882 - protein, 36 aa, Artificial Sequence; identical to SEQ ID NO: 27518
  Cyclic GFR-binding peptide
  MOD_RES (1)..(3)..(34)..(35): Xaa is C or S

SEQ ID NO: 77883 - protein, 44 aa, Artificial Sequence; identical to SEQ ID NO: 27520
  Cyclic GFR-binding peptide
  MOD_RES (2)..(4)..(38): Xaa is C or S

SEQ ID NO: 77884 - protein, 36 aa, Artificial Sequence; identical to SEQ ID NO: 27524
  Cyclic GFR-binding peptide
  MOD_RES (1)..(3)..(34)..(35): Xaa is C or S

SEQ ID NO: 77885 - protein, 38 aa, Artificial Sequence; identical to SEQ ID NO: 27527
  Cyclic GFR-binding peptide
  MOD_RES (32)..(33): Xaa is C or S

SEQ ID NO: 77886 - protein, 30 aa, Artificial Sequence
  Cyclic GFR-binding peptide
  MOD_RES (30)..(30): Xaa is C or S
VVMEVTAKKVVKDYEDIKRMQVPRLETPVX

SEQ ID NO: 77887 - protein, 28 aa, Artificial Sequence
  Cyclic GFR-binding peptide
KNHQLFNSLQEHQGQHPKIRYYVMPLPE

SEQ ID NO: 77888 - protein, 24 aa, Artificial Sequence
  Cyclic GFR-binding peptide
MEVQVEKVVKDYEDVKAMKVSRLE

SEQ ID NO: 77889 - protein, 33 aa, Artificial Sequence
  Cyclic GFR-binding peptide
  MOD_RES (30)..(30): Xaa is C or S
NSLQEFIPKKRVIEYYVVPLPELQVQTPRXQVN

SEQ ID NO: 77890 - protein, 32 aa, Artificial Sequence; identical to SEQ ID NO: 27533
  Cyclic GFR-binding peptide
  MOD_RES (31)..(32): Xaa is C or S

SEQ ID NO: 77891 - protein, 36 aa, Artificial Sequence; identical to SEQ ID NO: 27535
  Cyclic GFR-binding peptide
  MOD_RES (32)..(33): Xaa is C or S

SEQ ID NO: 77892 - protein, 30 aa, Artificial Sequence
  Cyclic GFR-binding peptide
  MOD_RES (2)..(4): Xaa is C or S
HXGXSRVVMNVTAKKIVNSSDDIKRVQVPR

SEQ ID NO: 77893 - protein, 34 aa, Artificial Sequence; identical to SEQ ID NO: 27538
  Cyclic GFR-binding peptide

SEQ ID NO: 77894 - protein, 34 aa, Artificial Sequence; identical to SEQ ID NO: 27541
  Cyclic GFR-binding peptide
  MOD_RES (1)..(33)..(34): Xaa is C or S

SEQ ID NO: 77895 - protein, 33 aa, Artificial Sequence; identical to SEQ ID NO: 27540
  Cyclic GFR-binding peptide
  MOD_RES (31)..(32): Xaa is C or S

SEQ ID NO: 77896 - protein, 29 aa, Artificial Sequence
  Cyclic GFR-binding peptide
KVVMVTAKKVKPTRGVIKRIQVPRLDQPV

SEQ ID NO: 77897 - protein, 33 aa, Artificial Sequence
  Cyclic GFR-binding peptide
  MOD_RES (27)..(28): Xaa is C or S
NSMEGIIVNSSDDMIQVTINSLKTPAXXPKPVY

SEQ ID NO: 77898 - protein, 34 aa, Artificial Sequence
  Cyclic GFR-binding peptide
  MOD_RES (29)..(30): Xaa is C or S
VIMVTAKKVKPKRGVIKRIQVPRLAQPVXXPAAS

SEQ ID NO: 77899 - protein, 39 aa, Artificial Sequence; identical to SEQ ID NO: 27546
  Cyclic GFR-binding peptide
  MOD_RES (1)..(3)..(35)..(36): Xaa is C or S

SEQ ID NO: 77900 - protein, 30 aa, Artificial Sequence
  Cyclic GFR-binding peptide
LRNSLQELKPKKRVYEYYVVPLPEHHVRSP

SEQ ID NO: 77901 - protein, 42 aa, Artificial Sequence; identical to SEQ ID NO: 27547
  Cyclic GFR-binding peptide
  MOD_RES (1)..(3)..(37): Xaa is C or S

SEQ ID NO: 77902 - protein, 32 aa, Artificial Sequence
  Cyclic GFR-binding peptide
  MOD_RES (1)..(1): Xaa is C or S
XKNHQLFNSLQEHQGQHPKIRYYLMTLPEEET

SEQ ID NO: 77903 - protein, 28 aa, Artificial Sequence
  Cyclic GFR-binding peptide
VVMNVQVEKIVNSSDDVKAVKVSRLKTP

SEQ ID NO: 77904 - protein, 31 aa, Artificial Sequence
  Cyclic GFR-binding peptide
  MOD_RES (2)..(4): Xaa is C or S
SXKXSKVIMVTAKKIKPTKGIIKRIQVPRLD

SEQ ID NO: 77905 - protein, 35 aa, Artificial Sequence; identical to SEQ ID NO: 27556
  Cyclic GFR-binding peptide
  MOD_RES (1)..(3)..(35): Xaa is C or S

SEQ ID NO: 77906 - protein, 40 aa, Artificial Sequence; identical to SEQ ID NO: 27557
  Cyclic GFR-binding peptide
  MOD_RES (2)..(39): Xaa is C or S

SEQ ID NO: 77907 - protein, 27 aa, Artificial Sequence
  Cyclic GFR-binding peptide
  MOD_RES (26)..(27): Xaa is C or S
SMEGIIKPTKGIMIQITINSLDQSVXX

SEQ ID NO: 77908 - protein, 31 aa, Artificial Sequence
  Cyclic GFR-binding peptide
ELHEELRNSLQELKPKKRVYEYYVVPLPEHH

SEQ ID NO: 77909 - protein, 24 aa, Artificial Sequence
  Cyclic GFR-binding peptide
SMEGIVKPTRGVMIQITINSLDQP

SEQ ID NO: 77910 - protein, 36 aa, Artificial Sequence; identical to SEQ ID NO: 27566
  Cyclic GFR-binding peptide
  MOD_RES (2)..(34)..(35): Xaa is C or S

SEQ ID NO: 77911 - protein, 30 aa, Artificial Sequence
  Cyclic GFR-binding peptide
  MOD_RES (30)..(30): Xaa is C or S
VVMDSMEGIVVKENEDMIQMTINSLETPVX

SEQ ID NO: 77912 - protein, 27 aa, Artificial Sequence
  Cyclic GFR-binding peptide
NSLQEFIPKKRVIEYYLVTLPELQVQT

SEQ ID NO: 77913 - protein, 23 aa, Artificial Sequence
  Cyclic GFR-binding peptide
MVTAKKVKPTRGVIKRIQVPRLD

SEQ ID NO: 77914 - protein, 28 aa, Artificial Sequence
  Cyclic GFR-binding peptide
RVVMNSMEGIIVNSSDDMIQVTINSLQT

SEQ ID NO: 77915 - protein, 35 aa, Artificial Sequence; identical to SEQ ID NO: 27573
  Cyclic GFR-binding peptide
  MOD_RES (2)..(4)..(35): Xaa is C or S

SEQ ID NO: 77916 - protein, 33 aa, Artificial Sequence
  Cyclic GFR-binding peptide
  MOD_RES (29)..(30): Xaa is C or S
VMNVQVEKIVNSSDDVKAVKVSRLKTPAXXPKP

SEQ ID NO: 77917 - protein, 42 aa, Artificial Sequence; identical to SEQ ID NO: 27580
  Cyclic GFR-binding peptide
  MOD_RES (2)..(4)..(36)..(37): Xaa is C or S

SEQ ID NO: 77918 - protein, 29 aa, Artificial Sequence
  Cyclic GFR-binding peptide
  MOD_RES (29)..(29): Xaa is C or S
VMEVTAKKVVKDYEDIKRMQVPRLETPVX

SEQ ID NO: 77919 - protein, 37 aa, Artificial Sequence; identical to SEQ ID NO: 27582
  Cyclic GFR-binding peptide
  MOD_RES (2)..(4)..(35)..(36): Xaa is C or S

SEQ ID NO: 77920 - protein, 36 aa, Artificial Sequence; identical to SEQ ID NO: 27583
  Cyclic GFR-binding peptide
  MOD_RES (31)..(32): Xaa is C or S

SEQ ID NO: 77921 - protein, 35 aa, Artificial Sequence
  Cyclic GFR-binding peptide
  MOD_RES (30)..(31): Xaa is C or S
KVVMSMEGIVKPTRGVMIQITINSLDQPVXXPSAS

SEQ ID NO: 77922 - protein, 31 aa, Artificial Sequence; identical to SEQ ID NO: 27585
  Cyclic GFR-binding peptide
  MOD_RES (1)..(1): Xaa is C or S

SEQ ID NO: 77923 - protein, 33 aa, Artificial Sequence
  Cyclic GFR-binding peptide
  MOD_RES (29)..(30): Xaa is C or S
VMDVQVEKVVKENEDVKAMKVSRLETPVXXAKP

SEQ ID NO: 77924 - protein, 29 aa, Artificial Sequence
  Cyclic GFR-binding peptide
  MOD_RES (27)..(28): Xaa is C or S
EVQVEKVVKDYEDVKAMKVSRLETPVXXA

SEQ ID NO: 77925 - protein, 20 aa, Artificial Sequence
  Cyclic GFR-binding peptide
SMEGIVKPKRGVMIQITINS

SEQ ID NO: 77926 - protein, 39 aa, Artificial Sequence; identical to SEQ ID NO: 27590
  Cyclic GFR-binding peptide
  MOD_RES (35)..(35): Xaa is C or S

SEQ ID NO: 77927 - protein, 30 aa, Artificial Sequence
  Cyclic GFR-binding peptide
  MOD_RES (29)..(30): Xaa is C or S
VMNVTAKKIVNSSDDIKRVQVPRLQTPAXX

SEQ ID NO: 77928 - protein, 26 aa, Artificial Sequence
  Cyclic GFR-binding peptide
  MOD_RES (1)..(1): Xaa is C or S
XSKVVMVQVEKVKPTRGVVKAIKVSR

SEQ ID NO: 77929 - protein, 33 aa, Artificial Sequence; identical to SEQ ID NO: 27592
  Cyclic GFR-binding peptide
  MOD_RES (1)..(3): Xaa is C or S

SEQ ID NO: 77930 - protein, 37 aa, Artificial Sequence; identical to SEQ ID NO: 27593
  Cyclic GFR-binding peptide
  MOD_RES (2)..(4)..(36)..(37): Xaa is C or S

SEQ ID NO: 77931 - protein, 37 aa, Artificial Sequence; identical to SEQ ID NO: 27595
  Cyclic GFR-binding peptide
  MOD_RES (1)..(3)..(35)..(36): Xaa is C or S

SEQ ID NO: 77932 - protein, 27 aa, Artificial Sequence
  Cyclic GFR-binding peptide
SRVIMSMEGIVKPKRGVMIQITINSLA

SEQ ID NO: 77933 - protein, 34 aa, Artificial Sequence
  Cyclic GFR-binding peptide
  MOD_RES (28)..(29): Xaa is C or S
IMVQVEKIKPTKGIVKAIKVSRLDQSVXXPSASA

SEQ ID NO: 77934 - protein, 33 aa, Artificial Sequence; identical to SEQ ID NO: 27598
  Cyclic GFR-binding peptide
  MOD_RES (32)..(33): Xaa is C or S

SEQ ID NO: 77935 - protein, 33 aa, Artificial Sequence
  Cyclic GFR-binding peptide
  MOD_RES (28)..(29): Xaa is C or S
MNVTAKKIVNSSDDIKRVQVPRLKTPAXXPKPV

SEQ ID NO: 77936 - protein, 27 aa, Artificial Sequence
  Cyclic GFR-binding peptide
VVMNVTAKKIVNSSDDIKRVQVPRLQT

SEQ ID NO: 77937 - protein, 25 aa, Artificial Sequence
  Cyclic GFR-binding peptide
VQVEKIVNSSDDVKAVKVSRLQTPA

SEQ ID NO: 77938 - protein, 29 aa, Artificial Sequence
  Cyclic GFR-binding peptide
  MOD_RES (2)..(2): Xaa is C or S
GXGEVVMEVTAKKVVKDYEDIKRMQVPRL

SEQ ID NO: 77939 - protein, 22 aa, Artificial Sequence
  Cyclic GFR-binding peptide
MVTAKKVKPTRGVIKRIQVPRL

SEQ ID NO: 77940 - protein, 32 aa, Artificial Sequence
  Cyclic GFR-binding peptide
  MOD_RES (27)..(28): Xaa is C or S
NVQVEKIVNSSDDVKAVKVSRLQTPAXXPKPV

SEQ ID NO: 77941 - protein, 31 aa, Artificial Sequence; identical to SEQ ID NO: 27604
  Cyclic GFR-binding peptide

SEQ ID NO: 77942 - protein, 39 aa, Artificial Sequence; identical to SEQ ID NO: 27605
  Cyclic GFR-binding peptide
  MOD_RES (2)..(4)..(36)..(37): Xaa is C or S

SEQ ID NO: 77943 - protein, 28 aa, Artificial Sequence
  Cyclic GFR-binding peptide
KVVMSMEGIVKPTRGVMIQITINSLDQP

SEQ ID NO: 77944 - protein, 41 aa, Artificial Sequence; identical to SEQ ID NO: 27611
  Cyclic GFR-binding peptide
  MOD_RES (1)..(3)..(37): Xaa is C or S

SEQ ID NO: 77945 - protein, 23 aa, Artificial Sequence
  Cyclic GFR-binding peptide
EVQVEKVVKDYEDVKAMKVSRLE

SEQ ID NO: 77946 - protein, 41 aa, Artificial Sequence; identical to SEQ ID NO: 27615
  Cyclic GFR-binding peptide
  MOD_RES (1)..(35): Xaa is C or S

SEQ ID NO: 77947 - protein, 35 aa, Artificial Sequence; identical to SEQ ID NO: 27616
  Cyclic GFR-binding peptide
  MOD_RES (1)..(3)..(35): Xaa is C or S

SEQ ID NO: 77948 - protein, 30 aa, Artificial Sequence
  Cyclic GFR-binding peptide
  MOD_RES (30)..(30): Xaa is C or S
NSLQEFIPKKRVIEYYLVTLPELQVQTPRX

SEQ ID NO: 77949 - protein, 31 aa, Artificial Sequence; identical to SEQ ID NO: 27621
  Cyclic GFR-binding peptide

SEQ ID NO: 77950 - protein, 26 aa, Artificial Sequence
  Cyclic GFR-binding peptide
VMNVQVEKIVNSSDDVKAVKVSRLQT

SEQ ID NO: 77951 - protein, 33 aa, Artificial Sequence; identical to SEQ ID NO: 27623
  Cyclic GFR-binding peptide

SEQ ID NO: 77952 - protein, 33 aa, Artificial Sequence
  Cyclic GFR-binding peptide
  MOD_RES (1)..(1): Xaa is C or S
XELHEELRNSLQELKPKKRVYEYYLVTLPEHHV

SEQ ID NO: 77953 - protein, 37 aa, Artificial Sequence; identical to SEQ ID NO: 27626
  Cyclic GFR-binding peptide
  MOD_RES (31)..(32): Xaa is C or S

SEQ ID NO: 77954 - protein, 35 aa, Artificial Sequence; identical to SEQ ID NO: 27628
  Cyclic GFR-binding peptide

SEQ ID NO: 77955 - protein, 26 aa, Artificial Sequence
  Cyclic GFR-binding peptide
  MOD_RES (26)..(26): Xaa is C or S
VQVEKVVKENEDVKAMKVSRLETPVX

SEQ ID NO: 77956 - protein, 30 aa, Artificial Sequence
  Cyclic GFR-binding peptide
  MOD_RES (29)..(30): Xaa is C or S
VMNVQVEKIVNSSDDVKAVKVSRLKTPAXX

SEQ ID NO: 77957 - protein, 34 aa, Artificial Sequence
  Cyclic GFR-binding peptide
  MOD_RES (30)..(30): Xaa is C or S
VVMNVTAKKIVNSSDDIKRVQVPRLKTPAXTPKT

SEQ ID NO: 77958 - protein, 34 aa, Artificial Sequence
  Cyclic GFR-binding peptide
  MOD_RES (28)..(29): Xaa is C or S
VMVQVEKVKPTRGVVKAIKVSRLDQPVXXPSASA

SEQ ID NO: 77959 - protein, 22 aa, Artificial Sequence
  Cyclic GFR-binding peptide
MVQVEKIKPTKGIVKAIKVSRL

SEQ ID NO: 77960 - protein, 32 aa, Artificial Sequence; identical to SEQ ID NO: 27634
  Cyclic GFR-binding peptide
  MOD_RES (2)..(2): Xaa is C or S

SEQ ID NO: 77961 - protein, 27 aa, Artificial Sequence
  Cyclic GFR-binding peptide
SKVVMVQVEKVKPTRGVVKAIKVSRLD

SEQ ID NO: 77962 - protein, 36 aa, Artificial Sequence
  Cyclic GFR-binding peptide
  MOD_RES (2)..(4): Xaa is C or S
EXKXALHDELTNSLQEFIPKKRVIEYYLVTLPELQV

SEQ ID NO: 77963 - protein, 28 aa, Artificial Sequence
  Cyclic GFR-binding peptide
SKVVMSMEGIVKPTRGVMIQITINSLDQ

SEQ ID NO: 77964 - protein, 35 aa, Artificial Sequence
  Cyclic GFR-binding peptide
  MOD_RES (29)..(30): Xaa is C or S
VIMVTAKKVKPKRGVIKRIQVPRLAQPVXXPAASA

SEQ ID NO: 77965 - protein, 28 aa, Artificial Sequence
  Cyclic GFR-binding peptide
  MOD_RES (26)..(27): Xaa is C or S
VTAKKVKPKRGVIKRIQVPRLAQPVXXP

SEQ ID NO: 77966 - protein, 37 aa, Artificial Sequence; identical to SEQ ID NO: 27639
  Cyclic GFR-binding peptide
  MOD_RES (31)..(32): Xaa is C or S

SEQ ID NO: 77967 - protein, 30 aa, Artificial Sequence
  Cyclic GFR-binding peptide
  MOD_RES (30)..(30): Xaa is C or S
KVVMVTAKKVKPTRGVIKRIQVPRLDQPVX

SEQ ID NO: 77968 - protein, 34 aa, Artificial Sequence; identical to SEQ ID NO: 27642
  Cyclic GFR-binding peptide
  MOD_RES (1)..(32)..(33): Xaa is C or S

SEQ ID NO: 77969 - protein, 28 aa, Artificial Sequence
  Cyclic GFR-binding peptide
EELRNSLQELKPKKRVYEYYVVPLPEHH

SEQ ID NO: 77970 - protein, 39 aa, Artificial Sequence; identical to SEQ ID NO: 27646
  Cyclic GFR-binding peptide
  MOD_RES (1)..(33): Xaa is C or S

SEQ ID NO: 77971 - protein, 25 aa, Artificial Sequence
  Cyclic GFR-binding peptide
MNSMEGIIVNSSDDMIQVTINSLQT

SEQ ID NO: 77972 - protein, 31 aa, Artificial Sequence; identical to SEQ ID NO: 27648
  Cyclic GFR-binding peptide

SEQ ID NO: 77973 - protein, 20 aa, Artificial Sequence
  Cyclic GFR-binding peptide
SMEGIVVKENEDMIQMTINS

SEQ ID NO: 77974 - protein, 25 aa, Artificial Sequence
  Cyclic GFR-binding peptide
NSMEGIIVNSSDDMIQVTINSLQTP

SEQ ID NO: 77975 - protein, 39 aa, Artificial Sequence; identical to SEQ ID NO: 27652
  Cyclic GFR-binding peptide
  MOD_RES (2)..(39): Xaa is C or S

SEQ ID NO: 77976 - protein, 34 aa, Artificial Sequence
  Cyclic GFR-binding peptide
  MOD_RES (28)..(29): Xaa is C or S
IMVTAKKVKPKRGVIKRIQVPRLAQPVXXPAASA

SEQ ID NO: 77977 - protein, 20 aa, Artificial Sequence
  Cyclic GFR-binding peptide
SMEGIIKPTKGIMIQITINS

SEQ ID NO: 77978 - protein, 38 aa, Artificial Sequence
  Cyclic GFR-binding peptide
  MOD_RES (34)..(34): Xaa is C or S
EELRNSLQELKPKKRVYEYYVVPLPEHHVRSPQXKVSS

SEQ ID NO: 77979 - protein, 26 aa, Artificial Sequence
  Cyclic GFR-binding peptide
VVMDSMEGIVVKENEDMIQMTINSLE

SEQ ID NO: 77980 - protein, 32 aa, Artificial Sequence
  Cyclic GFR-binding peptide
  MOD_RES (28)..(29): Xaa is C or S
MEVTAKKVVKDYEDIKRMQVPRLETPVXXAKP

SEQ ID NO: 77981 - protein, 29 aa, Artificial Sequence
  Cyclic GFR-binding peptide
  MOD_RES (29)..(29): Xaa is C or S
VVMSMEGIVKPTRGVMIQITINSLDQPVX

SEQ ID NO: 77982 - protein, 35 aa, Artificial Sequence
  Cyclic GFR-binding peptide
  MOD_RES (30)..(30): Xaa is C or S
VVMNVTAKKIVNSSDDIKRVQVPRLKTPAXTPKTV

SEQ ID NO: 77983 - protein, 25 aa, Artificial Sequence
  Cyclic GFR-binding peptide
VMDVQVEKVVKENEDVKAMKVSRLE

SEQ ID NO: 77984 - protein, 39 aa, Artificial Sequence; identical to SEQ ID NO: 27663
  Cyclic GFR-binding peptide
  MOD_RES (2)..(34)..(35): Xaa is C or S

SEQ ID NO: 77985 - protein, 38 aa, Artificial Sequence; identical to SEQ ID NO: 27665
  Cyclic GFR-binding peptide
  MOD_RES (2)..(34)..(35): Xaa is C or S

SEQ ID NO: 77986 - protein, 36 aa, Artificial Sequence
  Cyclic GFR-binding peptide
  MOD_RES (30)..(31): Xaa is C or S
KVIMVQVEKIKPTKGIVKAIKVSRLDQSVXXPSASA

SEQ ID NO: 77987 - protein, 35 aa, Artificial Sequence; identical to SEQ ID NO: 27668
  Cyclic GFR-binding peptide
  MOD_RES (33)..(33): Xaa is C or S

SEQ ID NO: 77988 - protein, 29 aa, Artificial Sequence
  Cyclic GFR-binding peptide
ELTNSLQEFIPKKRVIEYYVVPLPELQVQ

SEQ ID NO: 77989 - protein, 35 aa, Artificial Sequence; identical to SEQ ID NO: 27671
  Cyclic GFR-binding peptide
  MOD_RES (2)..(4): Xaa is C or S

SEQ ID NO: 77990 - protein, 28 aa, Artificial Sequence
  Cyclic GFR-binding peptide
  MOD_RES (27)..(28): Xaa is C or S
MVQVEKVKPKRGVVKAIKVSRLAQPVXX

SEQ ID NO: 77991 - protein, 23 aa, Artificial Sequence
  Cyclic GFR-binding peptide
SMEGIIVNSSDDMIQVTINSLQT

SEQ ID NO: 77992 - protein, 28 aa, Artificial Sequence
  Cyclic GFR-binding peptide
EVVMESMEGIVVKDYEDMIQMTINSLET

SEQ ID NO: 77993 - protein, 21 aa, Artificial Sequence
  Cyclic GFR-binding peptide
VQVEKVKPTRGVVKAIKVSRL

SEQ ID NO: 77994 - protein, 35 aa, Artificial Sequence; identical to SEQ ID NO: 27679
  Cyclic GFR-binding peptide
  MOD_RES (1)..(3)..(35): Xaa is C or S

SEQ ID NO: 77995 - protein, 28 aa, Artificial Sequence
  Cyclic GFR-binding peptide
  MOD_RES (28)..(28): Xaa is C or S
NSLQEHQGQHPKIRYYVMPLPEEETPVX

SEQ ID NO: 77996 - protein, 24 aa, Artificial Sequence
  Cyclic GFR-binding peptide
FNSLQEHQGQHPKIRYYLMTLPEE

SEQ ID NO: 77997 - protein, 31 aa, Artificial Sequence
  Cyclic GFR-binding peptide
ELTNSLQEFIPKKRVIEYYLVTLPELQVQTP

SEQ ID NO: 77998 - protein, 33 aa, Artificial Sequence
  Cyclic GFR-binding peptide
  MOD_RES (30)..(31): Xaa is C or S
KVIMVTAKKIKPTKGIIKRIQVPRLDQSVXXPS

SEQ ID NO: 77999 - protein, 30 aa, Artificial Sequence
  Cyclic GFR-binding peptide
  MOD_RES (27)..(28): Xaa is C or S
NVTAKKIVNSSDDIKRVQVPRLQTPAXXPK

SEQ ID NO: 78000 - protein, 37 aa, Artificial Sequence; identical to SEQ ID NO: 27682
  Cyclic GFR-binding peptide
  MOD_RES (2)..(33)..(34): Xaa is C or S

SEQ ID NO: 78001 - protein, 38 aa, Artificial Sequence; identical to SEQ ID NO: 27685
  Cyclic GFR-binding peptide
  MOD_RES (32)..(32): Xaa is C or S

SEQ ID NO: 78002 - protein, 33 aa, Artificial Sequence
  Cyclic GFR-binding peptide
  MOD_RES (30)..(31): Xaa is C or S
RVIMVQVEKVKPKRGVVKAIKVSRLAQPVXXPA

SEQ ID NO: 78003 - protein, 42 aa, Artificial Sequence; identical to SEQ ID NO: 27686
  Cyclic GFR-binding peptide
  MOD_RES (2)..(4)..(41): Xaa is C or S

SEQ ID NO: 78004 - protein, 33 aa, Artificial Sequence
  Cyclic GFR-binding peptide
  MOD_RES (30)..(31): Xaa is C or S
VVMDSMEGIVVKENEDMIQMTINSLETPVXXAK

SEQ ID NO: 78005 - protein, 32 aa, Artificial Sequence
  Cyclic GFR-binding peptide
  MOD_RES (26)..(27): Xaa is C or S
SMEGIVVKENEDMIQMTINSLETPVXXAKPIK

SEQ ID NO: 78006 - protein, 42 aa, Artificial Sequence; identical to SEQ ID NO: 27690
  Cyclic GFR-binding peptide
  MOD_RES (1)..(3)..(37): Xaa is C or S

SEQ ID NO: 78007 - protein, 23 aa, Artificial Sequence
  Cyclic GFR-binding peptide
NSLQELKPKKRVYEYYVVPLPEH

SEQ ID NO: 78008 - protein, 30 aa, Artificial Sequence
  Cyclic GFR-binding peptide
RNSLQELKPKKRVYEYYLVTLPEHHVRSPQ

SEQ ID NO: 78009 - protein, 32 aa, Artificial Sequence; identical to SEQ ID NO: 27693
  Cyclic GFR-binding peptide
  MOD_RES (31)..(32): Xaa is C or S

SEQ ID NO: 78010 - protein, 36 aa, Artificial Sequence
  Cyclic GFR-binding peptide
  MOD_RES (30)..(30): Xaa is C or S
VVMNVQVEKIVNSSDDVKAVKVSRLKTPAXTPKTVH

SEQ ID NO: 78011 - protein, 35 aa, Artificial Sequence
  Cyclic GFR-binding peptide
  MOD_RES (2)..(2): Xaa is C or S
AXELHEELRNSLQELKPKKRVYEYYVVPLPEHHVR

SEQ ID NO: 78012 - protein, 35 aa, Artificial Sequence; identical to SEQ ID NO: 27695
  Cyclic GFR-binding peptide
  MOD_RES (2)..(4): Xaa is C or S

SEQ ID NO: 78013 - protein, 36 aa, Artificial Sequence
  Cyclic GFR-binding peptide
  MOD_RES (1)..(3): Xaa is C or S
XAXELHEELRNSLQELKPKKRVYEYYLVTLPEHHVR

SEQ ID NO: 78014 - protein, 22 aa, Artificial Sequence
  Cyclic GFR-binding peptide
VQVEKIVNSSDDVKAVKVSRLK

SEQ ID NO: 78015 - protein, 32 aa, Artificial Sequence
  Cyclic GFR-binding peptide
KNHQLFNSLQEHQGQHPKIRYYVMPLPEEETP

SEQ ID NO: 78016 - protein, 27 aa, Artificial Sequence
  Cyclic GFR-binding peptide
VVMVQVEKVKPTRGVVKAIKVSRLDQP

SEQ ID NO: 78017 - protein, 23 aa, Artificial Sequence
  Cyclic GFR-binding peptide
IMVTAKKIKPTKGIIKRIQVPRL

SEQ ID NO: 78018 - protein, 35 aa, Artificial Sequence; identical to SEQ ID NO: 27697
  Cyclic GFR-binding peptide
  MOD_RES (31)..(32): Xaa is C or S

SEQ ID NO: 78019 - protein, 30 aa, Artificial Sequence
  Cyclic GFR-binding peptide
  MOD_RES (26)..(27): Xaa is C or S
VTAKKVVKDYEDIKRMQVPRLETPVXXAKP

SEQ ID NO: 78020 - protein, 32 aa, Artificial Sequence
  Cyclic GFR-binding peptide
  MOD_RES (31)..(31): Xaa is C or S
QLFNSLQEHQGQHPKIRYYLMTLPEEETPVXE

SEQ ID NO: 78021 - protein, 26 aa, Artificial Sequence
  Cyclic GFR-binding peptide
  MOD_RES (1)..(1): Xaa is C or S
XSKVVMSMEGIVKPTRGVMIQITINS

SEQ ID NO: 78022 - protein, 41 aa, Artificial Sequence; identical to SEQ ID NO: 27703
  Cyclic GFR-binding peptide
  MOD_RES (2)..(4)..(35)..(36): Xaa is C or S

SEQ ID NO: 78023 - protein, 29 aa, Artificial Sequence
  Cyclic GFR-binding peptide
  MOD_RES (1)..(3): Xaa is C or S
XGXGEVVMEVTAKKVVKDYEDIKRMQVPR

SEQ ID NO: 78024 - protein, 25 aa, Artificial Sequence
  Cyclic GFR-binding peptide
IMVTAKKVKPKRGVIKRIQVPRLAQ

SEQ ID NO: 78025 - protein, 34 aa, Artificial Sequence
  Cyclic GFR-binding peptide
  MOD_RES (2)..(4): Xaa is C or S
EXKXALHDELTNSLQEFIPKKRVIEYYLVTLPEL

SEQ ID NO: 78026 - protein, 31 aa, Artificial Sequence
  Cyclic GFR-binding peptide
  MOD_RES (2)..(2): Xaa is C or S
AXELHEELRNSLQELKPKKRVYEYYLVTLPE

SEQ ID NO: 78027 - protein, 23 aa, Artificial Sequence
  Cyclic GFR-binding peptide
DVQVEKVVKENEDVKAMKVSRLE

SEQ ID NO: 78028 - protein, 36 aa, Artificial Sequence
  Cyclic GFR-binding peptide
  MOD_RES (30)..(30): Xaa is C or S
LFNSLQEHQGQHPKIRYYVMPLPEEETPVXELGEDN

SEQ ID NO: 78029 - protein, 31 aa, Artificial Sequence; identical to SEQ ID NO: 27708
  Cyclic GFR-binding peptide
  MOD_RES (31)..(31): Xaa is C or S

SEQ ID NO: 78030 - protein, 31 aa, Artificial Sequence
  Cyclic GFR-binding peptide
  MOD_RES (26)..(27): Xaa is C or S
VQVEKIKPTKGIVKAIKVSRLDQSVXXPSAS

SEQ ID NO: 78031 - protein, 36 aa, Artificial Sequence; identical to SEQ ID NO: 27711
  Cyclic GFR-binding peptide
  MOD_RES (2)..(4)..(35)..(36): Xaa is C or S

SEQ ID NO: 78032 - protein, 40 aa, Artificial Sequence; identical to SEQ ID NO: 27712
  Cyclic GFR-binding peptide
  MOD_RES (1)..(3)..(35)..(36): Xaa is C or S

SEQ ID NO: 78033 - protein, 26 aa, Artificial Sequence
  Cyclic GFR-binding peptide
ELTNSLQEFIPKKRVIEYYVVPLPEL

SEQ ID NO: 78034 - protein, 29 aa, Artificial Sequence
  Cyclic GFR-binding peptide
HDELTNSLQEFIPKKRVIEYYLVTLPELQ

SEQ ID NO: 78035 - protein, 21 aa, Artificial Sequence
  Cyclic GFR-binding peptide
MSMEGIIKPTKGIMIQITINS

SEQ ID NO: 78036 - protein, 36 aa, Artificial Sequence; identical to SEQ ID NO: 27716
  Cyclic GFR-binding peptide
  MOD_RES (31)..(32): Xaa is C or S

SEQ ID NO: 78037 - protein, 30 aa, Artificial Sequence
  Cyclic GFR-binding peptide
LTNSLQEFIPKKRVIEYYVVPLPELQVQTP

SEQ ID NO: 78038 - protein, 32 aa, Artificial Sequence
  Cyclic GFR-binding peptide
  MOD_RES (27)..(28): Xaa is C or S
MVQVEKVKPKRGVVKAIKVSRLAQPVXXPAAS

SEQ ID NO: 78039 - protein, 26 aa, Artificial Sequence
  Cyclic GFR-binding peptide
  MOD_RES (1)..(1): Xaa is C or S
XSRVIMVTAKKVKPKRGVIKRIQVPR

SEQ ID NO: 78040 - protein, 24 aa, Artificial Sequence
  Cyclic GFR-binding peptide
VMNSMEGIIVNSSDDMIQVTINSL

SEQ ID NO: 78041 - protein, 34 aa, Artificial Sequence; identical to SEQ ID NO: 27721
  Cyclic GFR-binding peptide
  MOD_RES (32)..(33): Xaa is C or S

SEQ ID NO: 78042 - protein, 38 aa, Artificial Sequence; identical to SEQ ID NO: 27722
  Cyclic GFR-binding peptide
  MOD_RES (1)..(33)..(34): Xaa is C or S

SEQ ID NO: 78043 - protein, 30 aa, Artificial Sequence
  Cyclic GFR-binding peptide
  MOD_RES (27)..(28): Xaa is C or S
NVQVEKIVNSSDDVKAVKVSRLKTPAXXPK

SEQ ID NO: 78044 - protein, 33 aa, Artificial Sequence
  Cyclic GFR-binding peptide
  MOD_RES (30)..(30): Xaa is C or S
LFNSLQEHQGQHPKIRYYLMTLPEEETPVXELG

SEQ ID NO: 78045 - protein, 29 aa, Artificial Sequence
  Cyclic GFR-binding peptide
  MOD_RES (27)..(28): Xaa is C or S
NSMEGIIVNSSDDMIQVTINSLQTPAXXP

SEQ ID NO: 78046 - protein, 26 aa, Artificial Sequence
  Cyclic GFR-binding peptide
GEVVMESMEGIVVKDYEDMIQMTINS

SEQ ID NO: 78047 - protein, 36 aa, Artificial Sequence; identical to SEQ ID NO: 27724
  Cyclic GFR-binding peptide
  MOD_RES (2)..(36): Xaa is C or S

SEQ ID NO: 78048 - protein, 32 aa, Artificial Sequence; identical to SEQ ID NO: 27725
  Cyclic GFR-binding peptide
  MOD_RES (32)..(32): Xaa is C or S

SEQ ID NO: 78049 - protein, 25 aa, Artificial Sequence
  Cyclic GFR-binding peptide
VVMVTAKKVKPTRGVIKRIQVPRLD

SEQ ID NO: 78050 - protein, 20 aa, Artificial Sequence
  Cyclic GFR-binding peptide
SMEGIIKPTKGIMIQITINS

SEQ ID NO: 78051 - protein, 35 aa, Artificial Sequence
  Cyclic GFR-binding peptide
  MOD_RES (29)..(30): Xaa is C or S
VMDVQVEKVVKENEDVKAMKVSRLETPVXXAKPIK

SEQ ID NO: 78052 - protein, 36 aa, Artificial Sequence
  Cyclic GFR-binding peptide
  MOD_RES (30)..(30): Xaa is C or S
LFNSLQEHQGQHPKIRYYLMTLPEEETPVXELGEDN

SEQ ID NO: 78053 - protein, 34 aa, Artificial Sequence
  Cyclic GFR-binding peptide
  MOD_RES (1)..(1): Xaa is C or S
XALHDELTNSLQEFIPKKRVIEYYLVTLPELQVQ

SEQ ID NO: 78054 - protein, 31 aa, Artificial Sequence
  Cyclic GFR-binding peptide
  MOD_RES (30)..(31): Xaa is C or S
KVVMSMEGIVKPTRGVMIQITINSLDQPVXX

SEQ ID NO: 78055 - protein, 33 aa, Artificial Sequence; identical to SEQ ID NO: 27730
  Cyclic GFR-binding peptide
  MOD_RES (1)..(33): Xaa is C or S

SEQ ID NO: 78056 - protein, 34 aa, Artificial Sequence; identical to SEQ ID NO: 27732
  Cyclic GFR-binding peptide
  MOD_RES (2)..(34): Xaa is C or S

SEQ ID NO: 78057 - protein, 35 aa, Artificial Sequence; identical to SEQ ID NO: 27733
  Cyclic GFR-binding peptide
  MOD_RES (1)..(33)..(34): Xaa is C or S

SEQ ID NO: 78058 - protein, 28 aa, Artificial Sequence
  Cyclic GFR-binding peptide
ELRNSLQELKPKKRVYEYYVVPLPEHHV

SEQ ID NO: 78059 - protein, 24 aa, Artificial Sequence
  Cyclic GFR-binding peptide
VTAKKIKPTKGIIKRIQVPRLDQS

SEQ ID NO: 78060 - protein, 25 aa, Artificial Sequence
  Cyclic GFR-binding peptide
VMDSMEGIVVKENEDMIQMTINSLE

SEQ ID NO: 78061 - protein, 36 aa, Artificial Sequence; identical to SEQ ID NO: 27738
  Cyclic GFR-binding peptide
  MOD_RES (1)..(1): Xaa is C or S

SEQ ID NO: 78062 - protein, 30 aa, Artificial Sequence
  Cyclic GFR-binding peptide
LTNSLQEFIPKKRVIEYYLVTLPELQVQTP

SEQ ID NO: 78063 - protein, 29 aa, Artificial Sequence
  Cyclic GFR-binding peptide
  MOD_RES (1)..(3): Xaa is C or S
XGXSRVVMNVTAKKIVNSSDDIKRVQVPR

SEQ ID NO: 78064 - protein, 31 aa, Artificial Sequence
  Cyclic GFR-binding peptide
  MOD_RES (2)..(4): Xaa is C or S
HXGXSRVVMNVQVEKIVNSSDDVKAVKVSRL

SEQ ID NO: 78065 - protein, 39 aa, Artificial Sequence; identical to SEQ ID NO: 27742
  Cyclic GFR-binding peptide
  MOD_RES (1)..(38): Xaa is C or S

SEQ ID NO: 78066 - protein, 30 aa, Artificial Sequence
  Cyclic GFR-binding peptide
  MOD_RES (28)..(29): Xaa is C or S
MNVTAKKIVNSSDDIKRVQVPRLKTPAXXP

SEQ ID NO: 78067 - protein, 36 aa, Artificial Sequence; identical to SEQ ID NO: 27746
  Cyclic GFR-binding peptide
  MOD_RES (2)..(33)..(34): Xaa is C or S

SEQ ID NO: 78068 - protein, 34 aa, Artificial Sequence; identical to SEQ ID NO: 27749
  Cyclic GFR-binding peptide
  MOD_RES (32)..(33): Xaa is C or S

SEQ ID NO: 78069 - protein, 36 aa, Artificial Sequence; identical to SEQ ID NO: 27755
  Cyclic GFR-binding peptide
  MOD_RES (1)..(33)..(34): Xaa is C or S

SEQ ID NO: 78070 - protein, 25 aa, Artificial Sequence
  Cyclic GFR-binding peptide
MESMEGIVVKDYEDMIQMTINSLET

SEQ ID NO: 78071 - protein, 31 aa, Artificial Sequence
  Cyclic GFR-binding peptide
  MOD_RES (26)..(27): Xaa is C or S
VTAKKVVKDYEDIKRMQVPRLETPVXXAKPI

SEQ ID NO: 78072 - protein, 26 aa, Artificial Sequence
  Cyclic GFR-binding peptide
NSMEGIIVNSSDDMIQVTINSLKTPA

SEQ ID NO: 78073 - protein, 31 aa, Artificial Sequence
  Cyclic GFR-binding peptide
  MOD_RES (2)..(2): Xaa is C or S
GXARVVMNVQVEKIVNSSDDVKAVKVSRLQT

SEQ ID NO: 78074 - protein, 31 aa, Artificial Sequence
  Cyclic GFR-binding peptide
  MOD_RES (27)..(28): Xaa is C or S
NSMEGIIVNSSDDMIQVTINSLQTPAXXPKP

SEQ ID NO: 78075 - protein, 38 aa, Artificial Sequence; identical to SEQ ID NO: 27758
  Cyclic GFR-binding peptide
  MOD_RES (2)..(4)..(36)..(37): Xaa is C or S

SEQ ID NO: 78076 - protein, 39 aa, Artificial Sequence; identical to SEQ ID NO: 27762
  Cyclic GFR-binding peptide
  MOD_RES (2)..(33)..(34): Xaa is C or S

SEQ ID NO: 78077 - protein, 29 aa, Artificial Sequence
  Cyclic GFR-binding peptide
  MOD_RES (1)..(1): Xaa is C or S
XARVVMNSMEGIIVNSSDDMIQVTINSLQ

SEQ ID NO: 78078 - protein, 22 aa, Artificial Sequence
  Cyclic GFR-binding peptide
NSLQEHQGQHPKIRYYLMTLPE

SEQ ID NO: 78079 - protein, 29 aa, Artificial Sequence
  Cyclic GFR-binding peptide
EVVMESMEGIVVKDYEDMIQMTINSLETP

SEQ ID NO: 78080 - protein, 36 aa, Artificial Sequence; identical to SEQ ID NO: 27766
  Cyclic GFR-binding peptide
  MOD_RES (2)..(4)..(36): Xaa is C or S

SEQ ID NO: 78081 - protein, 32 aa, Artificial Sequence
  Cyclic GFR-binding peptide
  MOD_RES (28)..(29): Xaa is C or S
MNVQVEKIVNSSDDVKAVKVSRLKTPAXXPKP

SEQ ID NO: 78082 - protein, 29 aa, Artificial Sequence
  Cyclic GFR-binding peptide
  MOD_RES (28)..(29): Xaa is C or S
IMVQVEKIKPTKGIVKAIKVSRLDQSVXX

SEQ ID NO: 78083 - protein, 27 aa, Artificial Sequence
  Cyclic GFR-binding peptide
VMNVQVEKIVNSSDDVKAVKVSRLKTP

SEQ ID NO: 78084 - protein, 27 aa, Artificial Sequence
  Cyclic GFR-binding peptide
EVVMESMEGIVVKDYEDMIQMTINSLE

SEQ ID NO: 78085 - protein, 28 aa, Artificial Sequence
  Cyclic GFR-binding peptide
VMDVTAKKVVKENEDIKRMQVPRLETPV

SEQ ID NO: 78086 - protein, 32 aa, Artificial Sequence
  Cyclic GFR-binding peptide
  MOD_RES (28)..(29): Xaa is C or S
VMSMEGIVKPTRGVMIQITINSLDQPVXXPSA

SEQ ID NO: 78087 - protein, 38 aa, Artificial Sequence; identical to SEQ ID NO: 27776
  Cyclic GFR-binding peptide
  MOD_RES (1)..(32)..(33): Xaa is C or S

SEQ ID NO: 78088 - protein, 30 aa, Artificial Sequence
  Cyclic GFR-binding peptide
  MOD_RES (2)..(4): Xaa is C or S
HXGXARVVMNVQVEKIVNSSDDVKAVKVSR

SEQ ID NO: 78089 - protein, 27 aa, Artificial Sequence
  Cyclic GFR-binding peptide
  MOD_RES (27)..(27): Xaa is C or S
ESMEGIVVKDYEDMIQMTINSLETPVX

SEQ ID NO: 78090 - protein, 36 aa, Artificial Sequence; identical to SEQ ID NO: 27778
  Cyclic GFR-binding peptide
  MOD_RES (1)..(1): Xaa is C or S

SEQ ID NO: 78091 - protein, 41 aa, Artificial Sequence; identical to SEQ ID NO: 27779
  Cyclic GFR-binding peptide
  MOD_RES (2)..(36): Xaa is C or S

SEQ ID NO: 78092 - protein, 28 aa, Artificial Sequence
  Cyclic GFR-binding peptide
  MOD_RES (27)..(28): Xaa is C or S
DSMEGIVVKENEDMIQMTINSLETPVXX

SEQ ID NO: 78093 - protein, 38 aa, Artificial Sequence; identical to SEQ ID NO: 27782
  Cyclic GFR-binding peptide
  MOD_RES (37)..(37): Xaa is C or S

SEQ ID NO: 78094 - protein, 44 aa, Artificial Sequence; identical to SEQ ID NO: 27787
  Cyclic GFR-binding peptide
  MOD_RES (1)..(3)..(40): Xaa is C or S

SEQ ID NO: 78095 - protein, 27 aa, Artificial Sequence
  Cyclic GFR-binding peptide
VMNVTAKKIVNSSDDIKRVQVPRLQTP

SEQ ID NO: 78096 - protein, 30 aa, Artificial Sequence
  Cyclic GFR-binding peptide
  MOD_RES (30)..(30): Xaa is C or S
VVMNVQVEKIVNSSDDVKAVKVSRLKTPAX

SEQ ID NO: 78097 - protein, 38 aa, Artificial Sequence; identical to SEQ ID NO: 27789
  Cyclic GFR-binding peptide
  MOD_RES (1)..(33)..(34): Xaa is C or S

SEQ ID NO: 78098 - protein, 29 aa, Artificial Sequence
  Cyclic GFR-binding peptide
VVMDSMEGIVVKENEDMIQMTINSLETPV

SEQ ID NO: 78099 - protein, 29 aa, Artificial Sequence
  Cyclic GFR-binding peptide
NHQLFNSLQEHQGQHPKIRYYLMTLPEEE

SEQ ID NO: 78100 - protein, 27 aa, Artificial Sequence
  Cyclic GFR-binding peptide
VVMNVTAKKIVNSSDDIKRVQVPRLKT

SEQ ID NO: 78101 - protein, 28 aa, Artificial Sequence
  Cyclic GFR-binding peptide
RVIMVTAKKVKPKRGVIKRIQVPRLAQP

SEQ ID NO: 78102 - protein, 24 aa, Artificial Sequence
  Cyclic GFR-binding peptide
VMNVQVEKIVNSSDDVKAVKVSRL

SEQ ID NO: 78103 - protein, 23 aa, Artificial Sequence
  Cyclic GFR-binding peptide
TNSLQEFIPKKRVIEYYVVPLPE

SEQ ID NO: 78104 - protein, 26 aa, Artificial Sequence
  Cyclic GFR-binding peptide
MNSMEGIIVNSSDDMIQVTINSLQTP

SEQ ID NO: 78105 - protein, 33 aa, Artificial Sequence
  Cyclic GFR-binding peptide
  MOD_RES (29)..(30): Xaa is C or S
VIMSMEGIVKPKRGVMIQITINSLAQPVXXPAA

SEQ ID NO: 78106 - protein, 31 aa, Artificial Sequence
  Cyclic GFR-binding peptide
  MOD_RES (2)..(2): Xaa is C or S
GXSRVVMNVQVEKIVNSSDDVKAVKVSRLKT

SEQ ID NO: 78107 - protein, 29 aa, Artificial Sequence
  Cyclic GFR-binding peptide
  MOD_RES (1)..(1): Xaa is C or S
XGEVVMDSMEGIVVKENEDMIQMTINSLE

SEQ ID NO: 78108 - protein, 32 aa, Artificial Sequence
  Cyclic GFR-binding peptide
  MOD_RES (31)..(31): Xaa is C or S
TNSLQEFIPKKRVIEYYVVPLPELQVQTPRXQ

SEQ ID NO: 78109 - protein, 34 aa, Artificial Sequence
  Cyclic GFR-binding peptide
  MOD_RES (30)..(31): Xaa is C or S
VVMDSMEGIVVKENEDMIQMTINSLETPVXXAKP

SEQ ID NO: 78110 - protein, 28 aa, Artificial Sequence
  Cyclic GFR-binding peptide
HDELTNSLQEFIPKKRVIEYYVVPLPEL

SEQ ID NO: 78111 - protein, 31 aa, Artificial Sequence
  Cyclic GFR-binding peptide
  MOD_RES (29)..(30): Xaa is C or S
VIMVTAKKIKPTKGIIKRIQVPRLDQSVXXP

SEQ ID NO: 78112 - protein, 27 aa, Artificial Sequence
  Cyclic GFR-binding peptide
SKVVMVTAKKVKPTRGVIKRIQVPRLD

SEQ ID NO: 78113 - protein, 40 aa, Artificial Sequence; identical to SEQ ID NO: 27811
  Cyclic GFR-binding peptide
  MOD_RES (2)..(34)..(35): Xaa is C or S

SEQ ID NO: 78114 - protein, 27 aa, Artificial Sequence
  Cyclic GFR-binding peptide
VVMSMEGIVKPTRGVMIQITINSLDQP

SEQ ID NO: 78115 - protein, 23 aa, Artificial Sequence
  Cyclic GFR-binding peptide
VQVEKVVKDYEDVKAMKVSRLET

SEQ ID NO: 78116 - protein, 33 aa, Artificial Sequence; identical to SEQ ID NO: 27822
  Cyclic GFR-binding peptide
  MOD_RES (31)..(32): Xaa is C or S

SEQ ID NO: 78117 - protein, 38 aa, Artificial Sequence; identical to SEQ ID NO: 27821
  Cyclic GFR-binding peptide
  MOD_RES (1)..(33)..(34): Xaa is C or S

SEQ ID NO: 78118 - protein, 35 aa, Artificial Sequence
  Cyclic GFR-binding peptide
  MOD_RES (29)..(30): Xaa is C or S
VMDSMEGIVVKENEDMIQMTINSLETPVXXAKPIK

SEQ ID NO: 78119 - protein, 34 aa, Artificial Sequence
  Cyclic GFR-binding peptide
  MOD_RES (28)..(29): Xaa is C or S
MDSMEGIVVKENEDMIQMTINSLETPVXXAKPIK

SEQ ID NO: 78120 - protein, 26 aa, Artificial Sequence
  Cyclic GFR-binding peptide
QLFNSLQEHQGQHPKIRYYLMTLPEE

SEQ ID NO: 78121 - protein, 41 aa, Artificial Sequence; identical to SEQ ID NO: 27824
  Cyclic GFR-binding peptide
  MOD_RES (2)..(4)..(35)..(36): Xaa is C or S

SEQ ID NO: 78122 - protein, 21 aa, Artificial Sequence
  Cyclic GFR-binding peptide
VTAKKVVKENEDIKRMQVPRL

SEQ ID NO: 78123 - protein, 30 aa, Artificial Sequence
  Cyclic GFR-binding peptide
  MOD_RES (26)..(26): Xaa is C or S
SMEGIIVNSSDDMIQVTINSLKTPAXTPKT

SEQ ID NO: 78124 - protein, 41 aa, Artificial Sequence; identical to SEQ ID NO: 27827
  Cyclic GFR-binding peptide
  MOD_RES (2)..(4)..(36)..(37): Xaa is C or S

SEQ ID NO: 78125 - protein, 25 aa, Artificial Sequence
  Cyclic GFR-binding peptide
VMNSMEGIIVNSSDDMIQVTINSLK

SEQ ID NO: 78126 - protein, 39 aa, Artificial Sequence; identical to SEQ ID NO: 27834
  Cyclic GFR-binding peptide
  MOD_RES (2)..(4)..(36)..(37): Xaa is C or S

SEQ ID NO: 78127 - protein, 41 aa, Artificial Sequence; identical to SEQ ID NO: 27835
  Cyclic GFR-binding peptide
  MOD_RES (2)..(4)..(41): Xaa is C or S

SEQ ID NO: 78128 - protein, 34 aa, Artificial Sequence; identical to SEQ ID NO: 27837
  Cyclic GFR-binding peptide
  MOD_RES (1)..(3): Xaa is C or S

SEQ ID NO: 78129 - protein, 32 aa, Artificial Sequence; identical to SEQ ID NO: 27841
  Cyclic GFR-binding peptide
  MOD_RES (31)..(32): Xaa is C or S

SEQ ID NO: 78130 - protein, 28 aa, Artificial Sequence
  Cyclic GFR-binding peptide
  MOD_RES (26)..(27): Xaa is C or S
VQVEKIVNSSDDVKAVKVSRLQTPAXXP

SEQ ID NO: 78131 - protein, 37 aa, Artificial Sequence; identical to SEQ ID NO: 27842
  Cyclic GFR-binding peptide
  MOD_RES (37)..(37): Xaa is C or S

SEQ ID NO: 78132 - protein, 40 aa, Artificial Sequence; identical to SEQ ID NO: 27844
  Cyclic GFR-binding peptide
  MOD_RES (1)..(3)..(34)..(35): Xaa is C or S

SEQ ID NO: 78133 - protein, 28 aa, Artificial Sequence
  Cyclic GFR-binding peptide
  MOD_RES (28)..(28): Xaa is C or S
IMVQVEKIKPTKGIVKAIKVSRLDQSVX

SEQ ID NO: 78134 - protein, 31 aa, Artificial Sequence
  Cyclic GFR-binding peptide
  MOD_RES (28)..(28): Xaa is C or S
NSLQEHQGQHPKIRYYLMTLPEEETPVXELG

SEQ ID NO: 78135 - protein, 38 aa, Artificial Sequence; identical to SEQ ID NO: 27846
  Cyclic GFR-binding peptide
  MOD_RES (1)..(3)..(35)..(36): Xaa is C or S

SEQ ID NO: 78136 - protein, 30 aa, Artificial Sequence
  Cyclic GFR-binding peptide
  MOD_RES (30)..(30): Xaa is C or S
VVMNVTAKKIVNSSDDIKRVQVPRLQTPAX

SEQ ID NO: 78137 - protein, 29 aa, Artificial Sequence
  Cyclic GFR-binding peptide
  MOD_RES (28)..(29): Xaa is C or S
VMVQVEKVKPTRGVVKAIKVSRLDQPVXX

SEQ ID NO: 78138 - protein, 35 aa, Artificial Sequence; identical to SEQ ID NO: 27848
  Cyclic GFR-binding peptide
  MOD_RES (34)..(34): Xaa is C or S

SEQ ID NO: 78139 - protein, 27 aa, Artificial Sequence
  Cyclic GFR-binding peptide
RVIMVTAKKVKPKRGVIKRIQVPRLAQ

SEQ ID NO: 78140 - protein, 34 aa, Artificial Sequence; identical to SEQ ID NO: 27852
  Cyclic GFR-binding peptide
  MOD_RES (2)..(33)..(34): Xaa is C or S

SEQ ID NO: 78141 - protein, 39 aa, Artificial Sequence; identical to SEQ ID NO: 27853
  Cyclic GFR-binding peptide
  MOD_RES (1)..(33): Xaa is C or S

SEQ ID NO: 78142 - protein, 35 aa, Artificial Sequence; identical to SEQ ID NO: 27855
  Cyclic GFR-binding peptide
  MOD_RES (1)..(32)..(33): Xaa is C or S

SEQ ID NO: 78143 - protein, 26 aa, Artificial Sequence
  Cyclic GFR-binding peptide
ELRNSLQELKPKKRVYEYYVVPLPEH

SEQ ID NO: 78144 - protein, 33 aa, Artificial Sequence; identical to SEQ ID NO: 27858
  Cyclic GFR-binding peptide
  MOD_RES (1)..(32)..(33): Xaa is C or S

SEQ ID NO: 78145 - protein, 34 aa, Artificial Sequence
  Cyclic GFR-binding peptide
  MOD_RES (2)..(2): Xaa is C or S
AXELHEELRNSLQELKPKKRVYEYYVVPLPEHHV

SEQ ID NO: 78146 - protein, 34 aa, Artificial Sequence
  Cyclic GFR-binding peptide
  MOD_RES (28)..(29): Xaa is C or S
IMVQVEKVKPKRGVVKAIKVSRLAQPVXXPAASA

SEQ ID NO: 78147 - protein, 30 aa, Artificial Sequence
  Cyclic GFR-binding peptide
  MOD_RES (1)..(1): Xaa is C or S
XSKVVMVQVEKVKPTRGVVKAIKVSRLDQP

SEQ ID NO: 78148 - protein, 34 aa, Artificial Sequence; identical to SEQ ID NO: 27862
  Cyclic GFR-binding peptide
  MOD_RES (1)..(3)..(34): Xaa is C or S

SEQ ID NO: 78149 - protein, 32 aa, Artificial Sequence; identical to SEQ ID NO: 27864
  Cyclic GFR-binding peptide
  MOD_RES (1)..(32): Xaa is C or S

SEQ ID NO: 78150 - protein, 25 aa, Artificial Sequence
  Cyclic GFR-binding peptide
VQVEKVKPTRGVVKAIKVSRLDQPV

SEQ ID NO: 78151 - protein, 28 aa, Artificial Sequence
  Cyclic GFR-binding peptide
SRVIMSMEGIVKPKRGVMIQITINSLAQ

SEQ ID NO: 78152 - protein, 39 aa, Artificial Sequence; identical to SEQ ID NO: 27870
  Cyclic GFR-binding peptide
  MOD_RES (2)..(34)..(35): Xaa is C or S

SEQ ID NO: 78153 - protein, 40 aa, Artificial Sequence; identical to SEQ ID NO: 27871
  Cyclic GFR-binding peptide
  MOD_RES (2)..(34): Xaa is C or S

SEQ ID NO: 78154 - protein, 31 aa, Artificial Sequence
  Cyclic GFR-binding peptide
  MOD_RES (27)..(27): Xaa is C or S
NSMEGIIVNSSDDMIQVTINSLKTPAXTPKT

SEQ ID NO: 78155 - protein, 32 aa, Artificial Sequence
  Cyclic GFR-binding peptide
  MOD_RES (31)..(31): Xaa is C or S
RNSLQELKPKKRVYEYYLVTLPEHHVRSPQXK

SEQ ID NO: 78156 - protein, 41 aa, Artificial Sequence; identical to SEQ ID NO: 27876
  Cyclic GFR-binding peptide
  MOD_RES (1)..(38): Xaa is C or S

SEQ ID NO: 78157 - protein, 30 aa, Artificial Sequence
  Cyclic GFR-binding peptide
  MOD_RES (28)..(29): Xaa is C or S
MDVTAKKVVKENEDIKRMQVPRLETPVXXA

SEQ ID NO: 78158 - protein, 30 aa, Artificial Sequence
  Cyclic GFR-binding peptide
  MOD_RES (2)..(4): Xaa is C or S
SXKXSRVIMVTAKKVKPKRGVIKRIQVPRL

SEQ ID NO: 78159 - protein, 37 aa, Artificial Sequence
  Cyclic GFR-binding peptide
  MOD_RES (33)..(33): Xaa is C or S
ELTNSLQEFIPKKRVIEYYLVTLPELQVQTPRXQVNR

SEQ ID NO: 78160 - protein, 30 aa, Artificial Sequence
  Cyclic GFR-binding peptide
  MOD_RES (27)..(28): Xaa is C or S
MVTAKKIKPTKGIIKRIQVPRLDQSVXXPS

SEQ ID NO: 78161 - protein, 36 aa, Artificial Sequence; identical to SEQ ID NO: 27882
  Cyclic GFR-binding peptide
  MOD_RES (1)..(32)..(33): Xaa is C or S

SEQ ID NO: 78162 - protein, 27 aa, Artificial Sequence
  Cyclic GFR-binding peptide
  MOD_RES (26)..(27): Xaa is C or S
VQVEKVVKENEDVKAMKVSRLETPVXX

SEQ ID NO: 78163 - protein, 27 aa, Artificial Sequence
  Cyclic GFR-binding peptide
  MOD_RES (1)..(1): Xaa is C or S
XGEVVMDVQVEKVVKENEDVKAMKVSR

SEQ ID NO: 78164 - protein, 23 aa, Artificial Sequence
  Cyclic GFR-binding peptide
MVQVEKVKPTRGVVKAIKVSRLD

SEQ ID NO: 78165 - protein, 35 aa, Artificial Sequence; identical to SEQ ID NO: 27886
  Cyclic GFR-binding peptide
  MOD_RES (2)..(4)..(35): Xaa is C or S

SEQ ID NO: 78166 - protein, 34 aa, Artificial Sequence; identical to SEQ ID NO: 27887
  Cyclic GFR-binding peptide
  MOD_RES (1)..(3)..(34): Xaa is C or S

SEQ ID NO: 78167 - protein, 43 aa, Artificial Sequence; identical to SEQ ID NO: 27889
  Cyclic GFR-binding peptide
  MOD_RES (2)..(4)..(41): Xaa is C or S

SEQ ID NO: 78168 - protein, 23 aa, Artificial Sequence
  Cyclic GFR-binding peptide
IMVQVEKIKPTKGIVKAIKVSRL

SEQ ID NO: 78169 - protein, 40 aa, Artificial Sequence; identical to SEQ ID NO: 27890
  Cyclic GFR-binding peptide
  MOD_RES (2)..(4)..(36)..(37): Xaa is C or S

SEQ ID NO: 78170 - protein, 35 aa, Artificial Sequence
  Cyclic GFR-binding peptide
  MOD_RES (34)..(34): Xaa is C or S
DELTNSLQEFIPKKRVIEYYLVTLPELQVQTPRXQ

SEQ ID NO: 78171 - protein, 30 aa, Artificial Sequence
  Cyclic GFR-binding peptide
  MOD_RES (1)..(1): Xaa is C or S
XGEVVMDVTAKKVVKENEDIKRMQVPRLET

SEQ ID NO: 78172 - protein, 33 aa, Artificial Sequence; identical to SEQ ID NO: 27894
  Cyclic GFR-binding peptide
  MOD_RES (32)..(33): Xaa is C or S

SEQ ID NO: 78173 - protein, 30 aa, Artificial Sequence
  Cyclic GFR-binding peptide
LHDELTNSLQEFIPKKRVIEYYVVPLPELQ

SEQ ID NO: 78174 - protein, 33 aa, Artificial Sequence
  Cyclic GFR-binding peptide
  MOD_RES (30)..(31): Xaa is C or S
VVMEVQVEKVVKDYEDVKAMKVSRLETPVXXAK

SEQ ID NO: 78175 - protein, 44 aa, Artificial Sequence; identical to SEQ ID NO: 27896
  Cyclic GFR-binding peptide
  MOD_RES (2)..(4)..(41): Xaa is C or S

SEQ ID NO: 78176 - protein, 33 aa, Artificial Sequence
  Cyclic GFR-binding peptide
  MOD_RES (30)..(30): Xaa is C or S
VVMNSMEGIIVNSSDDMIQVTINSLKTPAXTPK

SEQ ID NO: 78177 - protein, 23 aa, Artificial Sequence
  Cyclic GFR-binding peptide
DVTAKKVVKENEDIKRMQVPRLE

SEQ ID NO: 78178 - protein, 34 aa, Artificial Sequence
  Cyclic GFR-binding peptide
  MOD_RES (29)..(30): Xaa is C or S
VMDSMEGIVVKENEDMIQMTINSLETPVXXAKPI

SEQ ID NO: 78179 - protein, 36 aa, Artificial Sequence; identical to SEQ ID NO: 27902
  Cyclic GFR-binding peptide
  MOD_RES (34)..(34): Xaa is C or S

SEQ ID NO: 78180 - protein, 40 aa, Artificial Sequence; identical to SEQ ID NO: 27903
  Cyclic GFR-binding peptide
  MOD_RES (1)..(3)..(35)..(36): Xaa is C or S

SEQ ID NO: 78181 - protein, 20 aa, Artificial Sequence
  Cyclic GFR-binding peptide
VQVEKIKPTKGIVKAIKVSR

SEQ ID NO: 78182 - protein, 34 aa, Artificial Sequence
  Cyclic GFR-binding peptide
  MOD_RES (33)..(33): Xaa is C or S
ELRNSLQELKPKKRVYEYYVVPLPEHHVRSPQXK

SEQ ID NO: 78183 - protein, 24 aa, Artificial Sequence
  Cyclic GFR-binding peptide
MSMEGIVKPKRGVMIQITINSLAQ

SEQ ID NO: 78184 - protein, 28 aa, Artificial Sequence
  Cyclic GFR-binding peptide
RVIMVQVEKVKPKRGVVKAIKVSRLAQP

SEQ ID NO: 78185 - protein, 29 aa, Artificial Sequence
  Cyclic GFR-binding peptide
  MOD_RES (27)..(28): Xaa is C or S
MSMEGIIKPTKGIMIQITINSLDQSVXXP

SEQ ID NO: 78186 - protein, 30 aa, Artificial Sequence
  Cyclic GFR-binding peptide
  MOD_RES (2)..(4): Xaa is C or S
SXKXSRVIMVQVEKVKPKRGVVKAIKVSRL

SEQ ID NO: 78187 - protein, 38 aa, Artificial Sequence; identical to SEQ ID NO: 27915
  Cyclic GFR-binding peptide
  MOD_RES (1)..(38): Xaa is C or S

SEQ ID NO: 78188 - protein, 30 aa, Artificial Sequence
  Cyclic GFR-binding peptide
RNSLQELKPKKRVYEYYVVPLPEHHVRSPQ

SEQ ID NO: 78189 - protein, 35 aa, Artificial Sequence; identical to SEQ ID NO: 27918
  Cyclic GFR-binding peptide
  MOD_RES (2)..(34)..(35): Xaa is C or S

SEQ ID NO: 78190 - protein, 29 aa, Artificial Sequence
  Cyclic GFR-binding peptide
VVMNVTAKKIVNSSDDIKRVQVPRLQTPA

SEQ ID NO: 78191 - protein, 35 aa, Artificial Sequence; identical to SEQ ID NO: 27921
  Cyclic GFR-binding peptide
  MOD_RES (32)..(32): Xaa is C or S

SEQ ID NO: 78192 - protein, 31 aa, Artificial Sequence
  Cyclic GFR-binding peptide
  MOD_RES (29)..(30): Xaa is C or S
VIMSMEGIIKPTKGIMIQITINSLDQSVXXP

SEQ ID NO: 78193 - protein, 31 aa, Artificial Sequence
  Cyclic GFR-binding peptide
  MOD_RES (29)..(29): Xaa is C or S
VMNSMEGIIVNSSDDMIQVTINSLKTPAXTP

SEQ ID NO: 78194 - protein, 30 aa, Artificial Sequence
  Cyclic GFR-binding peptide
  MOD_RES (27)..(27): Xaa is C or S
NVTAKKIVNSSDDIKRVQVPRLKTPAXTPK

SEQ ID NO: 78195 - protein, 38 aa, Artificial Sequence; identical to SEQ ID NO: 27924
  Cyclic GFR-binding peptide
  MOD_RES (32)..(33): Xaa is C or S

SEQ ID NO: 78196 - protein, 37 aa, Artificial Sequence; identical to SEQ ID NO: 27930
  Cyclic GFR-binding peptide
  MOD_RES (2)..(4)..(36)..(37): Xaa is C or S

SEQ ID NO: 78197 - protein, 27 aa, Artificial Sequence
  Cyclic GFR-binding peptide
  MOD_RES (1)..(1): Xaa is C or S
XSKVIMVQVEKIKPTKGIVKAIKVSRL

SEQ ID NO: 78198 - protein, 30 aa, Artificial Sequence
  Cyclic GFR-binding peptide
  MOD_RES (28)..(28): Xaa is C or S
NSLQEHQGQHPKIRYYLMTLPEEETPVXEL

SEQ ID NO: 78199 - protein, 28 aa, Artificial Sequence
  Cyclic GFR-binding peptide
ARVVMNVTAKKIVNSSDDIKRVQVPRLQ

SEQ ID NO: 78200 - protein, 36 aa, Artificial Sequence; identical to SEQ ID NO: 27933
  Cyclic GFR-binding peptide
  MOD_RES (2)..(4)..(35)..(36): Xaa is C or S

SEQ ID NO: 78201 - protein, 24 aa, Artificial Sequence
  Cyclic GFR-binding peptide
RVIMSMEGIVKPKRGVMIQITINS

SEQ ID NO: 78202 - protein, 32 aa, Artificial Sequence
  Cyclic GFR-binding peptide
  MOD_RES (2)..(2): Xaa is C or S
EXKNHQLFNSLQEHQGQHPKIRYYLMTLPEEE

SEQ ID NO: 78203 - protein, 37 aa, Artificial Sequence; identical to SEQ ID NO: 27934
  Cyclic GFR-binding peptide
  MOD_RES (1)..(33)..(34): Xaa is C or S

SEQ ID NO: 78204 - protein, 25 aa, Artificial Sequence
  Cyclic GFR-binding peptide
EVVMDSMEGIVVKENEDMIQMTINS

SEQ ID NO: 78205 - protein, 30 aa, Artificial Sequence
  Cyclic GFR-binding peptide
  MOD_RES (1)..(3): Xaa is C or S
XKXSRVIMVTAKKVKPKRGVIKRIQVPRLA

SEQ ID NO: 78206 - protein, 35 aa, Artificial Sequence
  Cyclic GFR-binding peptide
  MOD_RES (2)..(4): Xaa is C or S
EXKXALHDELTNSLQEFIPKKRVIEYYVVPLPELQ

SEQ ID NO: 78207 - protein, 33 aa, Artificial Sequence; identical to SEQ ID NO: 27942
  Cyclic GFR-binding peptide
  MOD_RES (32)..(33): Xaa is C or S

SEQ ID NO: 78208 - protein, 28 aa, Artificial Sequence
  Cyclic GFR-binding peptide
HQLFNSLQEHQGQHPKIRYYVMPLPEEE

SEQ ID NO: 78209 - protein, 24 aa, Artificial Sequence
  Cyclic GFR-binding peptide
LTNSLQEFIPKKRVIEYYVVPLPE

SEQ ID NO: 78210 - protein, 32 aa, Artificial Sequence
  Cyclic GFR-binding peptide
  MOD_RES (27)..(28): Xaa is C or S
NVTAKKIVNSSDDIKRVQVPRLQTPAXXPKPV

SEQ ID NO: 78211 - protein, 28 aa, Artificial Sequence
  Cyclic GFR-binding peptide
  MOD_RES (1)..(1): Xaa is C or S
XSRVVMNVQVEKIVNSSDDVKAVKVSRL

SEQ ID NO: 78212 - protein, 28 aa, Artificial Sequence
  Cyclic GFR-binding peptide
KVIMVTAKKIKPTKGIIKRIQVPRLDQS

SEQ ID NO: 78213 - protein, 37 aa, Artificial Sequence; identical to SEQ ID NO: 27949
  Cyclic GFR-binding peptide
  MOD_RES (2)..(33)..(34): Xaa is C or S

SEQ ID NO: 78214 - protein, 29 aa, Artificial Sequence
  Cyclic GFR-binding peptide
  MOD_RES (2)..(2): Xaa is C or S
GXGEVVMDVQVEKVVKENEDVKAMKVSRL

SEQ ID NO: 78215 - protein, 31 aa, Artificial Sequence; identical to SEQ ID NO: 27952
  Cyclic GFR-binding peptide

SEQ ID NO: 78216 - protein, 35 aa, Artificial Sequence; identical to SEQ ID NO: 27957
  Cyclic GFR-binding peptide
  MOD_RES (32)..(33): Xaa is C or S

SEQ ID NO: 78217 - protein, 23 aa, Artificial Sequence
  Cyclic GFR-binding peptide
MVQVEKVKPKRGVVKAIKVSRLA

SEQ ID NO: 78218 - protein, 37 aa, Artificial Sequence; identical to SEQ ID NO: 27958
  Cyclic GFR-binding peptide
  MOD_RES (1)..(3)..(34)..(35): Xaa is C or S

SEQ ID NO: 78219 - protein, 28 aa, Artificial Sequence
  Cyclic GFR-binding peptide
SRVVMNSMEGIIVNSSDDMIQVTINSLK

SEQ ID NO: 78220 - protein, 34 aa, Artificial Sequence; identical to SEQ ID NO: 27962
  Cyclic GFR-binding peptide
  MOD_RES (2)..(33)..(34): Xaa is C or S

SEQ ID NO: 78221 - protein, 37 aa, Artificial Sequence; identical to SEQ ID NO: 27963
  Cyclic GFR-binding peptide
  MOD_RES (1)..(32)..(33): Xaa is C or S

SEQ ID NO: 78222 - protein, 27 aa, Artificial Sequence
  Cyclic GFR-binding peptide
VIMVQVEKVKPKRGVVKAIKVSRLAQP

SEQ ID NO: 78223 - protein, 40 aa, Artificial Sequence; identical to SEQ ID NO: 27967
  Cyclic GFR-binding peptide
  MOD_RES (2)..(4)..(35)..(36): Xaa is C or S

SEQ ID NO: 78224 - protein, 25 aa, Artificial Sequence
  Cyclic GFR-binding peptide
KVIMVQVEKIKPTKGIVKAIKVSRL

SEQ ID NO: 78225 - protein, 31 aa, Artificial Sequence
  Cyclic GFR-binding peptide
  MOD_RES (31)..(31): Xaa is C or S
TNSLQEFIPKKRVIEYYVVPLPELQVQTPRX

SEQ ID NO: 78226 - protein, 33 aa, Artificial Sequence
  Cyclic GFR-binding peptide
  MOD_RES (1)..(3): Xaa is C or S
XGXGEVVMESMEGIVVKDYEDMIQMTINSLETP

SEQ ID NO: 78227 - protein, 32 aa, Artificial Sequence
  Cyclic GFR-binding peptide
  MOD_RES (30)..(31): Xaa is C or S
VVMNSMEGIIVNSSDDMIQVTINSLQTPAXXP

SEQ ID NO: 78228 - protein, 32 aa, Artificial Sequence
  Cyclic GFR-binding peptide
  MOD_RES (2)..(4): Xaa is C or S
RXGXGEVVMEVQVEKVVKDYEDVKAMKVSRLE

SEQ ID NO: 78229 - protein, 34 aa, Artificial Sequence; identical to SEQ ID NO: 27980
  Cyclic GFR-binding peptide
  MOD_RES (1)..(32)..(33): Xaa is C or S

SEQ ID NO: 78230 - protein, 23 aa, Artificial Sequence
  Cyclic GFR-binding peptide
VTAKKVVKDYEDIKRMQVPRLET

SEQ ID NO: 78231 - protein, 37 aa, Artificial Sequence
  Cyclic GFR-binding peptide
  MOD_RES (32)..(32): Xaa is C or S
HQLFNSLQEHQGQHPKIRYYVMPLPEEETPVXELGED

SEQ ID NO: 78232 - protein, 36 aa, Artificial Sequence
  Cyclic GFR-binding peptide
  MOD_RES (34)..(34): Xaa is C or S
EELRNSLQELKPKKRVYEYYLVTLPEHHVRSPQXKV

SEQ ID NO: 78233 - protein, 27 aa, Artificial Sequence
  Cyclic GFR-binding peptide
  MOD_RES (26)..(27): Xaa is C or S
SMEGIVKPTRGVMIQITINSLDQPVXX

SEQ ID NO: 78234 - protein, 30 aa, Artificial Sequence
  Cyclic GFR-binding peptide
  MOD_RES (28)..(29): Xaa is C or S
MESMEGIVVKDYEDMIQMTINSLETPVXXA

SEQ ID NO: 78235 - protein, 27 aa, Artificial Sequence
  Cyclic GFR-binding peptide
NHQLFNSLQEHQGQHPKIRYYVMPLPE

SEQ ID NO: 78236 - protein, 27 aa, Artificial Sequence
  Cyclic GFR-binding peptide
KVIMVTAKKIKPTKGIIKRIQVPRLDQ

SEQ ID NO: 78237 - protein, 33 aa, Artificial Sequence
  Cyclic GFR-binding peptide
  MOD_RES (27)..(28): Xaa is C or S
DSMEGIVVKENEDMIQMTINSLETPVXXAKPIK

SEQ ID NO: 78238 - protein, 31 aa, Artificial Sequence; identical to SEQ ID NO: 27988
  Cyclic GFR-binding peptide

SEQ ID NO: 78239 - protein, 20 aa, Artificial Sequence
  Cyclic GFR-binding peptide
VTAKKVVKDYEDIKRMQVPR

SEQ ID NO: 78240 - protein, 24 aa, Artificial Sequence
  Cyclic GFR-binding peptide
MSMEGIVKPTRGVMIQITINSLDQ

SEQ ID NO: 78241 - protein, 34 aa, Artificial Sequence
  Cyclic GFR-binding peptide
  MOD_RES (1)..(1): Xaa is C or S
XALHDELTNSLQEFIPKKRVIEYYVVPLPELQVQ

SEQ ID NO: 78242 - protein, 41 aa, Artificial Sequence; identical to SEQ ID NO: 27993
  Cyclic GFR-binding peptide
  MOD_RES (2)..(4)..(36): Xaa is C or S

SEQ ID NO: 78243 - protein, 31 aa, Artificial Sequence
  Cyclic GFR-binding peptide
  MOD_RES (30)..(31): Xaa is C or S
RVIMSMEGIVKPKRGVMIQITINSLAQPVXX

SEQ ID NO: 78244 - protein, 35 aa, Artificial Sequence
  Cyclic GFR-binding peptide
  MOD_RES (1)..(3): Xaa is C or S
XEXKNHQLFNSLQEHQGQHPKIRYYLMTLPEEETP

SEQ ID NO: 78245 - protein, 25 aa, Artificial Sequence
  Cyclic GFR-binding peptide
VTAKKVKPTRGVIKRIQVPRLDQPV

SEQ ID NO: 78246 - protein, 31 aa, Artificial Sequence
  Cyclic GFR-binding peptide
  MOD_RES (29)..(29): Xaa is C or S
VMNVQVEKIVNSSDDVKAVKVSRLKTPAXTP

SEQ ID NO: 78247 - protein, 32 aa, Artificial Sequence; identical to SEQ ID NO: 28000
  Cyclic GFR-binding peptide
  MOD_RES (2)..(2): Xaa is C or S

SEQ ID NO: 78248 - protein, 33 aa, Artificial Sequence
  Cyclic GFR-binding peptide
  MOD_RES (29)..(30): Xaa is C or S
VMDSMEGIVVKENEDMIQMTINSLETPVXXAKP

SEQ ID NO: 78249 - protein, 34 aa, Artificial Sequence; identical to SEQ ID NO: 28001
  Cyclic GFR-binding peptide
  MOD_RES (32)..(33): Xaa is C or S

SEQ ID NO: 78250 - protein, 39 aa, Artificial Sequence; identical to SEQ ID NO: 28002
  Cyclic GFR-binding peptide
  MOD_RES (2)..(4)..(36)..(37): Xaa is C or S

SEQ ID NO: 78251 - protein, 31 aa, Artificial Sequence
  Cyclic GFR-binding peptide
  MOD_RES (1)..(1): Xaa is C or S
XKNHQLFNSLQEHQGQHPKIRYYLMTLPEEE

SEQ ID NO: 78252 - protein, 33 aa, Artificial Sequence
  Cyclic GFR-binding peptide
  MOD_RES (30)..(31): Xaa is C or S
VVMEVTAKKVVKDYEDIKRMQVPRLETPVXXAK

SEQ ID NO: 78253 - protein, 23 aa, Artificial Sequence
  Cyclic GFR-binding peptide
IMVTAKKVKPKRGVIKRIQVPRL

SEQ ID NO: 78254 - protein, 26 aa, Artificial Sequence
  Cyclic GFR-binding peptide
MDVQVEKVVKENEDVKAMKVSRLETP

SEQ ID NO: 78255 - protein, 32 aa, Artificial Sequence; identical to SEQ ID NO: 28008
  Cyclic GFR-binding peptide
  MOD_RES (31)..(32): Xaa is C or S

SEQ ID NO: 78256 - protein, 32 aa, Artificial Sequence
  Cyclic GFR-binding peptide
  MOD_RES (2)..(4): Xaa is C or S
RXEXKNHQLFNSLQEHQGQHPKIRYYVMPLPE

SEQ ID NO: 78257 - protein, 33 aa, Artificial Sequence
  Cyclic GFR-binding peptide
  MOD_RES (1)..(1): Xaa is C or S
XALHDELTNSLQEFIPKKRVIEYYVVPLPELQV

SEQ ID NO: 78258 - protein, 33 aa, Artificial Sequence; identical to SEQ ID NO: 28017
  Cyclic GFR-binding peptide
  MOD_RES (31)..(32): Xaa is C or S

SEQ ID NO: 78259 - protein, 29 aa, Artificial Sequence
  Cyclic GFR-binding peptide
  MOD_RES (2)..(2): Xaa is C or S
GXARVVMNVTAKKIVNSSDDIKRVQVPRL

SEQ ID NO: 78260 - protein, 33 aa, Artificial Sequence
  Cyclic GFR-binding peptide
  MOD_RES (28)..(28): Xaa is C or S
NSLQEHQGQHPKIRYYVMPLPEEETPVXELGED

SEQ ID NO: 78261 - protein, 25 aa, Artificial Sequence
  Cyclic GFR-binding peptide
KVIMVTAKKIKPTKGIIKRIQVPRL

SEQ ID NO: 78262 - protein, 28 aa, Artificial Sequence
  Cyclic GFR-binding peptide
  MOD_RES (26)..(27): Xaa is C or S
SMEGIIVNSSDDMIQVTINSLKTPAXXP

SEQ ID NO: 78263 - protein, 32 aa, Artificial Sequence
  Cyclic GFR-binding peptide
  MOD_RES (32)..(32): Xaa is C or S
LTNSLQEFIPKKRVIEYYLVTLPELQVQTPRX

SEQ ID NO: 78264 - protein, 37 aa, Artificial Sequence; identical to SEQ ID NO: 28020
  Cyclic GFR-binding peptide
  MOD_RES (31)..(32): Xaa is C or S

SEQ ID NO: 78265 - protein, 30 aa, Artificial Sequence
  Cyclic GFR-binding peptide
  MOD_RES (30)..(30): Xaa is C or S
VVMNVQVEKIVNSSDDVKAVKVSRLQTPAX

SEQ ID NO: 78266 - protein, 38 aa, Artificial Sequence; identical to SEQ ID NO: 28024
  Cyclic GFR-binding peptide
  MOD_RES (1)..(3)..(34)..(35): Xaa is C or S

SEQ ID NO: 78267 - protein, 32 aa, Artificial Sequence
  Cyclic GFR-binding peptide
  MOD_RES (1)..(1): Xaa is C or S
XKNHQLFNSLQEHQGQHPKIRYYVMPLPEEET

SEQ ID NO: 78268 - protein, 31 aa, Artificial Sequence
  Cyclic GFR-binding peptide
  MOD_RES (1)..(1): Xaa is C or S
XARVVMNVTAKKIVNSSDDIKRVQVPRLQTP

SEQ ID NO: 78269 - protein, 33 aa, Artificial Sequence
  Cyclic GFR-binding peptide
  MOD_RES (33)..(33): Xaa is C or S
ELRNSLQELKPKKRVYEYYLVTLPEHHVRSPQX

SEQ ID NO: 78270 - protein, 22 aa, Artificial Sequence
  Cyclic GFR-binding peptide
SMEGIVKPKRGVMIQITINSLA

SEQ ID NO: 78271 - protein, 23 aa, Artificial Sequence
  Cyclic GFR-binding peptide
VMNVTAKKIVNSSDDIKRVQVPR

SEQ ID NO: 78272 - protein, 34 aa, Artificial Sequence
  Cyclic GFR-binding peptide
  MOD_RES (30)..(31): Xaa is C or S
VVMNSMEGIIVNSSDDMIQVTINSLKTPAXXPKP

SEQ ID NO: 78273 - protein, 25 aa, Artificial Sequence
  Cyclic GFR-binding peptide
KVVMVQVEKVKPTRGVVKAIKVSRL

SEQ ID NO: 78274 - protein, 25 aa, Artificial Sequence
  Cyclic GFR-binding peptide
MDVTAKKVVKENEDIKRMQVPRLET

SEQ ID NO: 78275 - protein, 27 aa, Artificial Sequence
  Cyclic GFR-binding peptide
EVVMEVTAKKVVKDYEDIKRMQVPRLE

SEQ ID NO: 78276 - protein, 26 aa, Artificial Sequence
  Cyclic GFR-binding peptide
GEVVMEVQVEKVVKDYEDVKAMKVSR

SEQ ID NO: 78277 - protein, 35 aa, Artificial Sequence
  Cyclic GFR-binding peptide
  MOD_RES (1)..(3): Xaa is C or S
XAXELHEELRNSLQELKPKKRVYEYYVVPLPEHHV

SEQ ID NO: 78278 - protein, 32 aa, Artificial Sequence
  Cyclic GFR-binding peptide
  MOD_RES (26)..(27): Xaa is C or S
VTAKKVVKENEDIKRMQVPRLETPVXXAKPIK

SEQ ID NO: 78279 - protein, 29 aa, Artificial Sequence
  Cyclic GFR-binding peptide
SRVIMVQVEKVKPKRGVVKAIKVSRLAQP

SEQ ID NO: 78280 - protein, 34 aa, Artificial Sequence; identical to SEQ ID NO: 28045
  Cyclic GFR-binding peptide
  MOD_RES (1)..(3): Xaa is C or S

SEQ ID NO: 78281 - protein, 40 aa, Artificial Sequence; identical to SEQ ID NO: 28050
  Cyclic GFR-binding peptide
  MOD_RES (2)..(4)..(36)..(37): Xaa is C or S

SEQ ID NO: 78282 - protein, 35 aa, Artificial Sequence
  Cyclic GFR-binding peptide
  MOD_RES (2)..(2): Xaa is C or S
KXALHDELTNSLQEFIPKKRVIEYYVVPLPELQVQ

SEQ ID NO: 78283 - protein, 29 aa, Artificial Sequence
  Cyclic GFR-binding peptide
HQLFNSLQEHQGQHPKIRYYVMPLPEEET

SEQ ID NO: 78284 - protein, 26 aa, Artificial Sequence
  Cyclic GFR-binding peptide
SKVIMVTAKKIKPTKGIIKRIQVPRL

SEQ ID NO: 78285 - protein, 28 aa, Artificial Sequence
  Cyclic GFR-binding peptide
ARVVMNVQVEKIVNSSDDVKAVKVSRLQ

SEQ ID NO: 78286 - protein, 38 aa, Artificial Sequence; identical to SEQ ID NO: 28058
  Cyclic GFR-binding peptide
  MOD_RES (35)..(35): Xaa is C or S

SEQ ID NO: 78287 - protein, 29 aa, Artificial Sequence
  Cyclic GFR-binding peptide
  MOD_RES (2)..(2): Xaa is C or S
KXSRVIMVTAKKVKPKRGVIKRIQVPRLA

SEQ ID NO: 78288 - protein, 32 aa, Artificial Sequence
  Cyclic GFR-binding peptide
  MOD_RES (29)..(30): Xaa is C or S
VIMSMEGIVKPKRGVMIQITINSLAQPVXXPA

SEQ ID NO: 78289 - protein, 35 aa, Artificial Sequence; identical to SEQ ID NO: 28061
  Cyclic GFR-binding peptide
  MOD_RES (31)..(32): Xaa is C or S

SEQ ID NO: 78290 - protein, 35 aa, Artificial Sequence
  Cyclic GFR-binding peptide
  MOD_RES (32)..(32): Xaa is C or S
LTNSLQEFIPKKRVIEYYVVPLPELQVQTPRXQVN

SEQ ID NO: 78291 - protein, 33 aa, Artificial Sequence
  Cyclic GFR-binding peptide
  MOD_RES (2)..(2): Xaa is C or S
AXELHEELRNSLQELKPKKRVYEYYVVPLPEHH

SEQ ID NO: 78292 - protein, 27 aa, Artificial Sequence
  Cyclic GFR-binding peptide
VVMDSMEGIVVKENEDMIQMTINSLET

SEQ ID NO: 78293 - protein, 32 aa, Artificial Sequence
  Cyclic GFR-binding peptide
  MOD_RES (31)..(31): Xaa is C or S
TNSLQEFIPKKRVIEYYLVTLPELQVQTPRXQ

SEQ ID NO: 78294 - protein, 30 aa, Artificial Sequence
  Cyclic GFR-binding peptide
  MOD_RES (1)..(3): Xaa is C or S
XKXSKVVMVQVEKVKPTRGVVKAIKVSRLD

SEQ ID NO: 78295 - protein, 41 aa, Artificial Sequence; identical to SEQ ID NO: 28065
  Cyclic GFR-binding peptide
  MOD_RES (1)..(35): Xaa is C or S

SEQ ID NO: 78296 - protein, 26 aa, Artificial Sequence
  Cyclic GFR-binding peptide
LRNSLQELKPKKRVYEYYVVPLPEHH

SEQ ID NO: 78297 - protein, 32 aa, Artificial Sequence
  Cyclic GFR-binding peptide
  MOD_RES (27)..(28): Xaa is C or S
MVQVEKVKPTRGVVKAIKVSRLDQPVXXPSAS

SEQ ID NO: 78298 - protein, 45 aa, Artificial Sequence; identical to SEQ ID NO: 28067
  Cyclic GFR-binding peptide
  MOD_RES (2)..(4)..(41): Xaa is C or S

SEQ ID NO: 78299 - protein, 38 aa, Artificial Sequence; identical to SEQ ID NO: 28070
  Cyclic GFR-binding peptide
  MOD_RES (1)..(32)..(33): Xaa is C or S

SEQ ID NO: 78300 - protein, 32 aa, Artificial Sequence; identical to SEQ ID NO: 28071
  Cyclic GFR-binding peptide
  MOD_RES (32)..(32): Xaa is C or S

SEQ ID NO: 78301 - protein, 27 aa, Artificial Sequence
  Cyclic GFR-binding peptide
SKVVMSMEGIVKPTRGVMIQITINSLD

SEQ ID NO: 78302 - protein, 28 aa, Artificial Sequence
  Cyclic GFR-binding peptide
  MOD_RES (1)..(1): Xaa is C or S
XSRVIMSMEGIVKPKRGVMIQITINSLA

SEQ ID NO: 78303 - protein, 30 aa, Artificial Sequence
  Cyclic GFR-binding peptide
  MOD_RES (2)..(2): Xaa is C or S
GXGEVVMEVQVEKVVKDYEDVKAMKVSRLE

SEQ ID NO: 78304 - protein, 30 aa, Artificial Sequence
  Cyclic GFR-binding peptide
  MOD_RES (2)..(2): Xaa is C or S
KXSRVIMVTAKKVKPKRGVIKRIQVPRLAQ

SEQ ID NO: 78305 - protein, 28 aa, Artificial Sequence
  Cyclic GFR-binding peptide
LFNSLQEHQGQHPKIRYYVMPLPEEETP

SEQ ID NO: 78306 - protein, 24 aa, Artificial Sequence
  Cyclic GFR-binding peptide
TNSLQEFIPKKRVIEYYVVPLPEL

SEQ ID NO: 78307 - protein, 42 aa, Artificial Sequence; identical to SEQ ID NO: 28083
  Cyclic GFR-binding peptide
  MOD_RES (1)..(3)..(40): Xaa is C or S

SEQ ID NO: 78308 - protein, 32 aa, Artificial Sequence; identical to SEQ ID NO: 28088
  Cyclic GFR-binding peptide
  MOD_RES (2)..(2): Xaa is C or S

SEQ ID NO: 78309 - protein, 26 aa, Artificial Sequence
  Cyclic GFR-binding peptide
DVQVEKVVKENEDVKAMKVSRLETPV

SEQ ID NO: 78310 - protein, 34 aa, Artificial Sequence; identical to SEQ ID NO: 28095
  Cyclic GFR-binding peptide
  MOD_RES (2)..(34): Xaa is C or S

SEQ ID NO: 78311 - protein, 39 aa, Artificial Sequence; identical to SEQ ID NO: 28097
  Cyclic GFR-binding peptide
  MOD_RES (1)..(3)..(35): Xaa is C or S

SEQ ID NO: 78312 - protein, 37 aa, Artificial Sequence; identical to SEQ ID NO: 28100
  Cyclic GFR-binding peptide
  MOD_RES (1)..(32)..(33): Xaa is C or S

SEQ ID NO: 78313 - protein, 40 aa, Artificial Sequence; identical to SEQ ID NO: 28101
  Cyclic GFR-binding peptide
  MOD_RES (37)..(37): Xaa is C or S

SEQ ID NO: 78314 - protein, 27 aa, Artificial Sequence
  Cyclic GFR-binding peptide
KVVMVQVEKVKPTRGVVKAIKVSRLDQ

SEQ ID NO: 78315 - protein, 23 aa, Artificial Sequence
  Cyclic GFR-binding peptide
VMNSMEGIIVNSSDDMIQVTINS

SEQ ID NO: 78316 - protein, 29 aa, Artificial Sequence
  Cyclic GFR-binding peptide
NSLQEFIPKKRVIEYYLVTLPELQVQTPR

SEQ ID NO: 78317 - protein, 25 aa, Artificial Sequence
  Cyclic GFR-binding peptide
MSMEGIIKPTKGIMIQITINSLDQS

SEQ ID NO: 78318 - protein, 30 aa, Artificial Sequence; identical to SEQ ID NO: 28105
  Cyclic GFR-binding peptide

SEQ ID NO: 78319 - protein, 31 aa, Artificial Sequence
  Cyclic GFR-binding peptide
  MOD_RES (2)..(2): Xaa is C or S
GXGEVVMDVQVEKVVKENEDVKAMKVSRLET

SEQ ID NO: 78320 - protein, 41 aa, Artificial Sequence; identical to SEQ ID NO: 28107
  Cyclic GFR-binding peptide
  MOD_RES (1)..(38): Xaa is C or S

SEQ ID NO: 78321 - protein, 33 aa, Artificial Sequence
  Cyclic GFR-binding peptide
  MOD_RES (1)..(3): Xaa is C or S
XAXELHEELRNSLQELKPKKRVYEYYLVTLPEH

SEQ ID NO: 78322 - protein, 31 aa, Artificial Sequence
  Cyclic GFR-binding peptide
  MOD_RES (1)..(3): Xaa is C or S
XKXSKVIMVTAKKIKPTKGIIKRIQVPRLDQ

SEQ ID NO: 78323 - protein, 24 aa, Artificial Sequence
  Cyclic GFR-binding peptide
VMESMEGIVVKDYEDMIQMTINSL

SEQ ID NO: 78324 - protein, 38 aa, Artificial Sequence; identical to SEQ ID NO: 28115
  Cyclic GFR-binding peptide
  MOD_RES (2)..(33)..(34): Xaa is C or S

SEQ ID NO: 78325 - protein, 23 aa, Artificial Sequence
  Cyclic GFR-binding peptide
MNVQVEKIVNSSDDVKAVKVSRL

SEQ ID NO: 78326 - protein, 35 aa, Artificial Sequence; identical to SEQ ID NO: 28116
  Cyclic GFR-binding peptide
  MOD_RES (32)..(33): Xaa is C or S

SEQ ID NO: 78327 - protein, 31 aa, Artificial Sequence
  Cyclic GFR-binding peptide
  MOD_RES (2)..(2): Xaa is C or S
GXGEVVMESMEGIVVKDYEDMIQMTINSLET

SEQ ID NO: 78328 - protein, 22 aa, Artificial Sequence
  Cyclic GFR-binding peptide
IMVTAKKIKPTKGIIKRIQVPR

SEQ ID NO: 78329 - protein, 36 aa, Artificial Sequence
  Cyclic GFR-binding peptide
  MOD_RES (1)..(3): Xaa is C or S
XKXALHDELTNSLQEFIPKKRVIEYYVVPLPELQVQ

SEQ ID NO: 78330 - protein, 28 aa, Artificial Sequence
  Cyclic GFR-binding peptide
  MOD_RES (1)..(1): Xaa is C or S
XARVVMNSMEGIIVNSSDDMIQVTINSL

SEQ ID NO: 78331 - protein, 40 aa, Artificial Sequence; identical to SEQ ID NO: 28124
  Cyclic GFR-binding peptide
  MOD_RES (1)..(3)..(35)..(36): Xaa is C or S

SEQ ID NO: 78332 - protein, 32 aa, Artificial Sequence
  Cyclic GFR-binding peptide
  MOD_RES (29)..(30): Xaa is C or S
VIMVTAKKVKPKRGVIKRIQVPRLAQPVXXPA

SEQ ID NO: 78333 - protein, 28 aa, Artificial Sequence
  Cyclic GFR-binding peptide
  MOD_RES (2)..(2): Xaa is C or S
GXSRVVMNVTAKKIVNSSDDIKRVQVPR

SEQ ID NO: 78334 - protein, 32 aa, Artificial Sequence; identical to SEQ ID NO: 28129
  Cyclic GFR-binding peptide
  MOD_RES (32)..(32): Xaa is C or S

SEQ ID NO: 78335 - protein, 28 aa, Artificial Sequence
  Cyclic GFR-binding peptide
KVIMVQVEKIKPTKGIVKAIKVSRLDQS

SEQ ID NO: 78336 - protein, 28 aa, Artificial Sequence
  Cyclic GFR-binding peptide
  MOD_RES (2)..(2): Xaa is C or S
GXARVVMNSMEGIIVNSSDDMIQVTINS

SEQ ID NO: 78337 - protein, 22 aa, Artificial Sequence
  Cyclic GFR-binding peptide
VMVQVEKVKPTRGVVKAIKVSR

SEQ ID NO: 78338 - protein, 31 aa, Artificial Sequence; identical to SEQ ID NO: 28132
  Cyclic GFR-binding peptide
  MOD_RES (31)..(31): Xaa is C or S

SEQ ID NO: 78339 - protein, 32 aa, Artificial Sequence
  Cyclic GFR-binding peptide
EELRNSLQELKPKKRVYEYYVVPLPEHHVRSP

SEQ ID NO: 78340 - protein, 28 aa, Artificial Sequence
  Cyclic GFR-binding peptide
VMNVTAKKIVNSSDDIKRVQVPRLQTPA

SEQ ID NO: 78341 - protein, 24 aa, Artificial Sequence
  Cyclic GFR-binding peptide
MDSMEGIVVKENEDMIQMTINSLE

SEQ ID NO: 78342 - protein, 35 aa, Artificial Sequence; identical to SEQ ID NO: 28135
  Cyclic GFR-binding peptide
  MOD_RES (1)..(1): Xaa is C or S

SEQ ID NO: 78343 - protein, 30 aa, Artificial Sequence
  Cyclic GFR-binding peptide
  MOD_RES (2)..(4): Xaa is C or S
SXKXSKVIMSMEGIIKPTKGIMIQITINSL

SEQ ID NO: 78344 - protein, 37 aa, Artificial Sequence; identical to SEQ ID NO: 28137
  Cyclic GFR-binding peptide
  MOD_RES (31)..(32): Xaa is C or S

SEQ ID NO: 78345 - protein, 37 aa, Artificial Sequence; identical to SEQ ID NO: 28139
  Cyclic GFR-binding peptide
  MOD_RES (36)..(36): Xaa is C or S

SEQ ID NO: 78346 - protein, 26 aa, Artificial Sequence
  Cyclic GFR-binding peptide
NSLQELKPKKRVYEYYVVPLPEHHVR

SEQ ID NO: 78347 - protein, 38 aa, Artificial Sequence; identical to SEQ ID NO: 28141
  Cyclic GFR-binding peptide
  MOD_RES (2)..(2): Xaa is C or S

SEQ ID NO: 78348 - protein, 27 aa, Artificial Sequence
  Cyclic GFR-binding peptide
SRVVMNVQVEKIVNSSDDVKAVKVSRL

SEQ ID NO: 78349 - protein, 37 aa, Artificial Sequence; identical to SEQ ID NO: 28145
  Cyclic GFR-binding peptide
  MOD_RES (1)..(3)..(34)..(35): Xaa is C or S

SEQ ID NO: 78350 - protein, 38 aa, Artificial Sequence; identical to SEQ ID NO: 28146
  Cyclic GFR-binding peptide
  MOD_RES (2)..(4)..(35)..(36): Xaa is C or S

SEQ ID NO: 78351 - protein, 36 aa, Artificial Sequence; identical to SEQ ID NO: 28147
  Cyclic GFR-binding peptide
  MOD_RES (31)..(32): Xaa is C or S

SEQ ID NO: 78352 - protein, 30 aa, Artificial Sequence
  Cyclic GFR-binding peptide
  MOD_RES (27)..(28): Xaa is C or S
MSMEGIVKPTRGVMIQITINSLDQPVXXPS

SEQ ID NO: 78353 - protein, 27 aa, Artificial Sequence
  Cyclic GFR-binding peptide
KVIMVQVEKIKPTKGIVKAIKVSRLDQ

SEQ ID NO: 78354 - protein, 35 aa, Artificial Sequence; identical to SEQ ID NO: 28149
  Cyclic GFR-binding peptide
  MOD_RES (31)..(32): Xaa is C or S

SEQ ID NO: 78355 - protein, 34 aa, Artificial Sequence
  Cyclic GFR-binding peptide
  MOD_RES (29)..(30): Xaa is C or S
VMNVQVEKIVNSSDDVKAVKVSRLKTPAXXPKPV

SEQ ID NO: 78356 - protein, 34 aa, Artificial Sequence
  Cyclic GFR-binding peptide
  MOD_RES (31)..(31): Xaa is C or S
QLFNSLQEHQGQHPKIRYYVMPLPEEETPVXELG

SEQ ID NO: 78357 - protein, 27 aa, Artificial Sequence
  Cyclic GFR-binding peptide
ARVVMNVQVEKIVNSSDDVKAVKVSRL

SEQ ID NO: 78358 - protein, 32 aa, Artificial Sequence
  Cyclic GFR-binding peptide
  MOD_RES (26)..(27): Xaa is C or S
VTAKKVKPKRGVIKRIQVPRLAQPVXXPAASA

SEQ ID NO: 78359 - protein, 29 aa, Artificial Sequence
  Cyclic GFR-binding peptide
  MOD_RES (27)..(28): Xaa is C or S
DVTAKKVVKENEDIKRMQVPRLETPVXXA

SEQ ID NO: 78360 - protein, 29 aa, Artificial Sequence
  Cyclic GFR-binding peptide
HQLFNSLQEHQGQHPKIRYYLMTLPEEET

SEQ ID NO: 78361 - protein, 27 aa, Artificial Sequence
  Cyclic GFR-binding peptide
FNSLQEHQGQHPKIRYYVMPLPEEETP

SEQ ID NO: 78362 - protein, 36 aa, Artificial Sequence; identical to SEQ ID NO: 28156
  Cyclic GFR-binding peptide
  MOD_RES (1)..(32)..(33): Xaa is C or S

SEQ ID NO: 78363 - protein, 42 aa, Artificial Sequence; identical to SEQ ID NO: 28160
  Cyclic GFR-binding peptide
  MOD_RES (1)..(38): Xaa is C or S

SEQ ID NO: 78364 - protein, 32 aa, Artificial Sequence
  Cyclic GFR-binding peptide
  MOD_RES (1)..(1): Xaa is C or S
XELHEELRNSLQELKPKKRVYEYYVVPLPEHH

SEQ ID NO: 78365 - protein, 32 aa, Artificial Sequence; identical to SEQ ID NO: 28165
  Cyclic GFR-binding peptide

SEQ ID NO: 78366 - protein, 31 aa, Artificial Sequence
  Cyclic GFR-binding peptide
KNHQLFNSLQEHQGQHPKIRYYVMPLPEEET

SEQ ID NO: 78367 - protein, 36 aa, Artificial Sequence; identical to SEQ ID NO: 28169
  Cyclic GFR-binding peptide
  MOD_RES (31)..(32): Xaa is C or S

SEQ ID NO: 78368 - protein, 31 aa, Artificial Sequence
  Cyclic GFR-binding peptide
  MOD_RES (2)..(2): Xaa is C or S
KXSRVIMVTAKKVKPKRGVIKRIQVPRLAQP

SEQ ID NO: 78369 - protein, 35 aa, Artificial Sequence
  Cyclic GFR-binding peptide
  MOD_RES (32)..(32): Xaa is C or S
HQLFNSLQEHQGQHPKIRYYVMPLPEEETPVXELG

SEQ ID NO: 78370 - protein, 40 aa, Artificial Sequence; identical to SEQ ID NO: 28171
  Cyclic GFR-binding peptide
  MOD_RES (1)..(38): Xaa is C or S

SEQ ID NO: 78371 - protein, 37 aa, Artificial Sequence; identical to SEQ ID NO: 28172
  Cyclic GFR-binding peptide
  MOD_RES (2)..(34): Xaa is C or S

SEQ ID NO: 78372 - protein, 28 aa, Artificial Sequence
  Cyclic GFR-binding peptide
VVMNVQVEKIVNSSDDVKAVKVSRLQTP

SEQ ID NO: 78373 - protein, 23 aa, Artificial Sequence
  Cyclic GFR-binding peptide
VMNVQVEKIVNSSDDVKAVKVSR

SEQ ID NO: 78374 - protein, 31 aa, Artificial Sequence
  Cyclic GFR-binding peptide
  MOD_RES (1)..(1): Xaa is C or S
XSRVVMNVTAKKIVNSSDDIKRVQVPRLKTP

SEQ ID NO: 78375 - protein, 29 aa, Artificial Sequence
  Cyclic GFR-binding peptide
DELTNSLQEFIPKKRVIEYYLVTLPELQV

SEQ ID NO: 78376 - protein, 34 aa, Artificial Sequence
  Cyclic GFR-binding peptide
  MOD_RES (1)..(3): Xaa is C or S
XEXKNHQLFNSLQEHQGQHPKIRYYVMPLPEEET

SEQ ID NO: 78377 - protein, 26 aa, Artificial Sequence
  Cyclic GFR-binding peptide
LTNSLQEFIPKKRVIEYYVVPLPELQ

SEQ ID NO: 78378 - protein, 31 aa, Artificial Sequence
  Cyclic GFR-binding peptide
  MOD_RES (29)..(30): Xaa is C or S
VMNVQVEKIVNSSDDVKAVKVSRLQTPAXXP

SEQ ID NO: 78379 - protein, 22 aa, Artificial Sequence
  Cyclic GFR-binding peptide
NSLQEHQGQHPKIRYYVMPLPE

SEQ ID NO: 78380 - protein, 30 aa, Artificial Sequence
  Cyclic GFR-binding peptide
  MOD_RES (1)..(1): Xaa is C or S
XELHEELRNSLQELKPKKRVYEYYLVTLPE

SEQ ID NO: 78381 - protein, 30 aa, Artificial Sequence
  Cyclic GFR-binding peptide
NHQLFNSLQEHQGQHPKIRYYLMTLPEEET

SEQ ID NO: 78382 - protein, 32 aa, Artificial Sequence
  Cyclic GFR-binding peptide
  MOD_RES (2)..(2): Xaa is C or S
GXGEVVMEVQVEKVVKDYEDVKAMKVSRLETP

SEQ ID NO: 78383 - protein, 27 aa, Artificial Sequence
  Cyclic GFR-binding peptide
  MOD_RES (2)..(2): Xaa is C or S
KXSRVIMVQVEKVKPKRGVVKAIKVSR

SEQ ID NO: 78384 - protein, 30 aa, Artificial Sequence
  Cyclic GFR-binding peptide
  MOD_RES (26)..(26): Xaa is C or S
VTAKKIVNSSDDIKRVQVPRLKTPAXTPKT

SEQ ID NO: 78385 - protein, 28 aa, Artificial Sequence
  Cyclic GFR-binding peptide
LHDELTNSLQEFIPKKRVIEYYLVTLPE

SEQ ID NO: 78386 - protein, 32 aa, Artificial Sequence
  Cyclic GFR-binding peptide
  MOD_RES (30)..(31): Xaa is C or S
RVIMVTAKKVKPKRGVIKRIQVPRLAQPVXXP

SEQ ID NO: 78387 - protein, 29 aa, Artificial Sequence
  Cyclic GFR-binding peptide
  MOD_RES (1)..(1): Xaa is C or S
XSRVVMNVQVEKIVNSSDDVKAVKVSRLK

SEQ ID NO: 78388 - protein, 38 aa, Artificial Sequence; identical to SEQ ID NO: 28195
  Cyclic GFR-binding peptide
  MOD_RES (1)..(3): Xaa is C or S

SEQ ID NO: 78389 - protein, 38 aa, Artificial Sequence; identical to SEQ ID NO: 28196
  Cyclic GFR-binding peptide
  MOD_RES (2)..(4)..(35)..(36): Xaa is C or S

SEQ ID NO: 78390 - protein, 40 aa, Artificial Sequence; identical to SEQ ID NO: 28197
  Cyclic GFR-binding peptide
  MOD_RES (1)..(3)..(35): Xaa is C or S

SEQ ID NO: 78391 - protein, 23 aa, Artificial Sequence
  Cyclic GFR-binding peptide
RNSLQELKPKKRVYEYYLVTLPE

SEQ ID NO: 78392 - protein, 27 aa, Artificial Sequence
  Cyclic GFR-binding peptide
  MOD_RES (27)..(27): Xaa is C or S
DVTAKKVVKENEDIKRMQVPRLETPVX

SEQ ID NO: 78393 - protein, 26 aa, Artificial Sequence
  Cyclic GFR-binding peptide
NSLQEHQGQHPKIRYYLMTLPEEETP

SEQ ID NO: 78394 - protein, 34 aa, Artificial Sequence
  Cyclic GFR-binding peptide
  MOD_RES (29)..(30): Xaa is C or S
VIMSMEGIVKPKRGVMIQITINSLAQPVXXPAAS

SEQ ID NO: 78395 - protein, 31 aa, Artificial Sequence; identical to SEQ ID NO: 28201
  Cyclic GFR-binding peptide
  MOD_RES (31)..(31): Xaa is C or S

SEQ ID NO: 78396 - protein, 29 aa, Artificial Sequence
  Cyclic GFR-binding peptide
EVVMEVTAKKVVKDYEDIKRMQVPRLETP

SEQ ID NO: 78397 - protein, 33 aa, Artificial Sequence; identical to SEQ ID NO: 28202
  Cyclic GFR-binding peptide
  MOD_RES (2)..(2): Xaa is C or S

SEQ ID NO: 78398 - protein, 25 aa, Artificial Sequence
  Cyclic GFR-binding peptide
VTAKKIVNSSDDIKRVQVPRLQTPA

SEQ ID NO: 78399 - protein, 25 aa, Artificial Sequence
  Cyclic GFR-binding peptide
VVMVQVEKVKPTRGVVKAIKVSRLD

SEQ ID NO: 78400 - protein, 32 aa, Artificial Sequence; identical to SEQ ID NO: 28216
  Cyclic GFR-binding peptide
  MOD_RES (31)..(32): Xaa is C or S

SEQ ID NO: 78401 - protein, 29 aa, Artificial Sequence
  Cyclic GFR-binding peptide
  MOD_RES (1)..(1): Xaa is C or S
XGEVVMEVTAKKVVKDYEDIKRMQVPRLE

SEQ ID NO: 78402 - protein, 28 aa, Artificial Sequence
  Cyclic GFR-binding peptide
  MOD_RES (1)..(1): Xaa is C or S
XARVVMNVQVEKIVNSSDDVKAVKVSRL

SEQ ID NO: 78403 - protein, 35 aa, Artificial Sequence; identical to SEQ ID NO: 28221
  Cyclic GFR-binding peptide
  MOD_RES (2)..(34)..(35): Xaa is C or S

SEQ ID NO: 78404 - protein, 29 aa, Artificial Sequence
  Cyclic GFR-binding peptide
  MOD_RES (1)..(3): Xaa is C or S
XGXARVVMNSMEGIIVNSSDDMIQVTINS

SEQ ID NO: 78405 - protein, 30 aa, Artificial Sequence
  Cyclic GFR-binding peptide
  MOD_RES (29)..(29): Xaa is C or S
VMNVQVEKIVNSSDDVKAVKVSRLKTPAXT

SEQ ID NO: 78406 - protein, 30 aa, Artificial Sequence
  Cyclic GFR-binding peptide
  MOD_RES (1)..(3): Xaa is C or S
XKXSKVIMSMEGIIKPTKGIMIQITINSLD

SEQ ID NO: 78407 - protein, 31 aa, Artificial Sequence
  Cyclic GFR-binding peptide
HDELTNSLQEFIPKKRVIEYYVVPLPELQVQ

SEQ ID NO: 78408 - protein, 24 aa, Artificial Sequence
  Cyclic GFR-binding peptide
EVTAKKVVKDYEDIKRMQVPRLET

SEQ ID NO: 78409 - protein, 36 aa, Artificial Sequence
  Cyclic GFR-binding peptide
  MOD_RES (2)..(4): Xaa is C or S
AXAXELHEELRNSLQELKPKKRVYEYYLVTLPEHHV

SEQ ID NO: 78410 - protein, 27 aa, Artificial Sequence
  Cyclic GFR-binding peptide
VIMSMEGIVKPKRGVMIQITINSLAQP

SEQ ID NO: 78411 - protein, 34 aa, Artificial Sequence
  Cyclic GFR-binding peptide
  MOD_RES (29)..(30): Xaa is C or S
VMNSMEGIIVNSSDDMIQVTINSLKTPAXXPKPV

SEQ ID NO: 78412 - protein, 30 aa, Artificial Sequence
  Cyclic GFR-binding peptide
  MOD_RES (1)..(1): Xaa is C or S
XARVVMNVTAKKIVNSSDDIKRVQVPRLQT

SEQ ID NO: 78413 - protein, 34 aa, Artificial Sequence; identical to SEQ ID NO: 28227
  Cyclic GFR-binding peptide
  MOD_RES (1)..(32)..(33): Xaa is C or S

SEQ ID NO: 78414 - protein, 35 aa, Artificial Sequence
  Cyclic GFR-binding peptide
  MOD_RES (29)..(30): Xaa is C or S
VMDVTAKKVVKENEDIKRMQVPRLETPVXXAKPIK

SEQ ID NO: 78415 - protein, 33 aa, Artificial Sequence; identical to SEQ ID NO: 28229
  Cyclic GFR-binding peptide
  MOD_RES (2)..(2): Xaa is C or S

SEQ ID NO: 78416 - protein, 28 aa, Artificial Sequence
  Cyclic GFR-binding peptide
SKVVMVTAKKVKPTRGVIKRIQVPRLDQ

SEQ ID NO: 78417 - protein, 25 aa, Artificial Sequence
  Cyclic GFR-binding peptide
QLFNSLQEHQGQHPKIRYYVMPLPE

SEQ ID NO: 78418 - protein, 32 aa, Artificial Sequence
  Cyclic GFR-binding peptide
  MOD_RES (2)..(4): Xaa is C or S
SXKXSKVVMVQVEKVKPTRGVVKAIKVSRLDQ

SEQ ID NO: 78419 - protein, 31 aa, Artificial Sequence
  Cyclic GFR-binding peptide
  MOD_RES (30)..(31): Xaa is C or S
VVMDVQVEKVVKENEDVKAMKVSRLETPVXX

SEQ ID NO: 78420 - protein, 34 aa, Artificial Sequence
  Cyclic GFR-binding peptide
  MOD_RES (28)..(29): Xaa is C or S
MNVQVEKIVNSSDDVKAVKVSRLKTPAXXPKPVY

SEQ ID NO: 78421 - protein, 31 aa, Artificial Sequence
  Cyclic GFR-binding peptide
EELRNSLQELKPKKRVYEYYVVPLPEHHVRS

SEQ ID NO: 78422 - protein, 28 aa, Artificial Sequence
  Cyclic GFR-binding peptide
  MOD_RES (27)..(27): Xaa is C or S
NSMEGIIVNSSDDMIQVTINSLKTPAXT

SEQ ID NO: 78423 - protein, 29 aa, Artificial Sequence
  Cyclic GFR-binding peptide
ALHDELTNSLQEFIPKKRVIEYYVVPLPE

SEQ ID NO: 78424 - protein, 33 aa, Artificial Sequence
  Cyclic GFR-binding peptide
  MOD_RES (27)..(28): Xaa is C or S
MSMEGIIKPTKGIMIQITINSLDQSVXXPSASA

SEQ ID NO: 78425 - protein, 36 aa, Artificial Sequence; identical to SEQ ID NO: 28238
  Cyclic GFR-binding peptide
  MOD_RES (1)..(3)..(35)..(36): Xaa is C or S

SEQ ID NO: 78426 - protein, 36 aa, Artificial Sequence
  Cyclic GFR-binding peptide
  MOD_RES (33)..(33): Xaa is C or S
ELRNSLQELKPKKRVYEYYLVTLPEHHVRSPQXKVS

SEQ ID NO: 78427 - protein, 28 aa, Artificial Sequence
  Cyclic GFR-binding peptide
  MOD_RES (1)..(1): Xaa is C or S
XGEVVMDVTAKKVVKENEDIKRMQVPRL

SEQ ID NO: 78428 - protein, 34 aa, Artificial Sequence
  Cyclic GFR-binding peptide
  MOD_RES (30)..(31): Xaa is C or S
RVIMSMEGIVKPKRGVMIQITINSLAQPVXXPAA

SEQ ID NO: 78429 - protein, 37 aa, Artificial Sequence; identical to SEQ ID NO: 28241
  Cyclic GFR-binding peptide
  MOD_RES (35)..(35): Xaa is C or S

SEQ ID NO: 78430 - protein, 33 aa, Artificial Sequence; identical to SEQ ID NO: 28242
  Cyclic GFR-binding peptide
  MOD_RES (1)..(3): Xaa is C or S

SEQ ID NO: 78431 - protein, 23 aa, Artificial Sequence
  Cyclic GFR-binding peptide
MNVTAKKIVNSSDDIKRVQVPRL

SEQ ID NO: 78432 - protein, 28 aa, Artificial Sequence
  Cyclic GFR-binding peptide
  MOD_RES (1)..(1): Xaa is C or S
XSKVIMVTAKKIKPTKGIIKRIQVPRLD

SEQ ID NO: 78433 - protein, 32 aa, Artificial Sequence
  Cyclic GFR-binding peptide
  MOD_RES (2)..(2): Xaa is C or S
AXELHEELRNSLQELKPKKRVYEYYLVTLPEH

SEQ ID NO: 78434 - protein, 28 aa, Artificial Sequence
  Cyclic GFR-binding peptide
NSLQELKPKKRVYEYYLVTLPEHHVRSP

SEQ ID NO: 78435 - protein, 37 aa, Artificial Sequence; identical to SEQ ID NO: 28247
  Cyclic GFR-binding peptide
  MOD_RES (1)..(33)..(34): Xaa is C or S

SEQ ID NO: 78436 - protein, 27 aa, Artificial Sequence
  Cyclic GFR-binding peptide
  MOD_RES (2)..(2): Xaa is C or S
KXSKVIMVTAKKIKPTKGIIKRIQVPR

SEQ ID NO: 78437 - protein, 36 aa, Artificial Sequence; identical to SEQ ID NO: 28248
  Cyclic GFR-binding peptide
  MOD_RES (1)..(3)..(35): Xaa is C or S

SEQ ID NO: 78438 - protein, 28 aa, Artificial Sequence
  Cyclic GFR-binding peptide
  MOD_RES (2)..(2): Xaa is C or S
GXGEVVMEVQVEKVVKDYEDVKAMKVSR

SEQ ID NO: 78439 - protein, 39 aa, Artificial Sequence; identical to SEQ ID NO: 28249
  Cyclic GFR-binding peptide
  MOD_RES (1)..(3)..(34)..(35): Xaa is C or S

SEQ ID NO: 78440 - protein, 28 aa, Artificial Sequence
  Cyclic GFR-binding peptide
LHEELRNSLQELKPKKRVYEYYLVTLPE

SEQ ID NO: 78441 - protein, 25 aa, Artificial Sequence
  Cyclic GFR-binding peptide
VMNVQVEKIVNSSDDVKAVKVSRLK

SEQ ID NO: 78442 - protein, 35 aa, Artificial Sequence
  Cyclic GFR-binding peptide
  MOD_RES (30)..(31): Xaa is C or S
VVMDVTAKKVVKENEDIKRMQVPRLETPVXXAKPI

SEQ ID NO: 78443 - protein, 39 aa, Artificial Sequence; identical to SEQ ID NO: 28254
  Cyclic GFR-binding peptide
  MOD_RES (34)..(34): Xaa is C or S

SEQ ID NO: 78444 - protein, 36 aa, Artificial Sequence; identical to SEQ ID NO: 28253
  Cyclic GFR-binding peptide
  MOD_RES (32)..(32): Xaa is C or S

SEQ ID NO: 78445 - protein, 33 aa, Artificial Sequence
  Cyclic GFR-binding peptide
  MOD_RES (1)..(3): Xaa is C or S
XGXGEVVMDVQVEKVVKENEDVKAMKVSRLETP

SEQ ID NO: 78446 - protein, 31 aa, Artificial Sequence
  Cyclic GFR-binding peptide
  MOD_RES (30)..(30): Xaa is C or S
LFNSLQEHQGQHPKIRYYLMTLPEEETPVXE

SEQ ID NO: 78447 - protein, 32 aa, Artificial Sequence; identical to SEQ ID NO: 28272
  Cyclic GFR-binding peptide
  MOD_RES (1)..(1): Xaa is C or S

SEQ ID NO: 78448 - protein, 26 aa, Artificial Sequence
  Cyclic GFR-binding peptide
  MOD_RES (26)..(26): Xaa is C or S
VTAKKVKPTRGVIKRIQVPRLDQPVX

SEQ ID NO: 78449 - protein, 37 aa, Artificial Sequence; identical to SEQ ID NO: 28274
  Cyclic GFR-binding peptide
  MOD_RES (1)..(3)..(34)..(35): Xaa is C or S

SEQ ID NO: 78450 - protein, 31 aa, Artificial Sequence
  Cyclic GFR-binding peptide
  MOD_RES (2)..(4): Xaa is C or S
HXGXARVVMNSMEGIIVNSSDDMIQVTINSL

SEQ ID NO: 78451 - protein, 32 aa, Artificial Sequence
  Cyclic GFR-binding peptide
  MOD_RES (2)..(4): Xaa is C or S
HXGXSRVVMNSMEGIIVNSSDDMIQVTINSLK

SEQ ID NO: 78452 - protein, 36 aa, Artificial Sequence; identical to SEQ ID NO: 28281
  Cyclic GFR-binding peptide
  MOD_RES (1)..(3)..(35)..(36): Xaa is C or S

SEQ ID NO: 78453 - protein, 30 aa, Artificial Sequence
  Cyclic GFR-binding peptide
GEVVMEVQVEKVVKDYEDVKAMKVSRLETP

SEQ ID NO: 78454 - protein, 23 aa, Artificial Sequence
  Cyclic GFR-binding peptide
VMVQVEKVKPTRGVVKAIKVSRL

SEQ ID NO: 78455 - protein, 32 aa, Artificial Sequence
  Cyclic GFR-binding peptide
  MOD_RES (2)..(4): Xaa is C or S
RXGXGEVVMDVTAKKVVKENEDIKRMQVPRLE

SEQ ID NO: 78456 - protein, 33 aa, Artificial Sequence; identical to SEQ ID NO: 28291
  Cyclic GFR-binding peptide
  MOD_RES (31)..(32): Xaa is C or S

SEQ ID NO: 78457 - protein, 22 aa, Artificial Sequence
  Cyclic GFR-binding peptide
VQVEKVVKENEDVKAMKVSRLE

SEQ ID NO: 78458 - protein, 21 aa, Artificial Sequence
  Cyclic GFR-binding peptide
VTAKKIVNSSDDIKRVQVPRL

SEQ ID NO: 78459 - protein, 33 aa, Artificial Sequence; identical to SEQ ID NO: 28298
  Cyclic GFR-binding peptide
  MOD_RES (2)..(33): Xaa is C or S

SEQ ID NO: 78460 - protein, 39 aa, Artificial Sequence; identical to SEQ ID NO: 28299
  Cyclic GFR-binding peptide
  MOD_RES (2)..(4)..(36): Xaa is C or S

SEQ ID NO: 78461 - protein, 26 aa, Artificial Sequence
  Cyclic GFR-binding peptide
IMVQVEKVKPKRGVVKAIKVSRLAQP

SEQ ID NO: 78462 - protein, 31 aa, Artificial Sequence
  Cyclic GFR-binding peptide
  MOD_RES (29)..(30): Xaa is C or S
VVMVTAKKVKPTRGVIKRIQVPRLDQPVXXP

SEQ ID NO: 78463 - protein, 22 aa, Artificial Sequence
  Cyclic GFR-binding peptide
MVQVEKVKPKRGVVKAIKVSRL

SEQ ID NO: 78464 - protein, 32 aa, Artificial Sequence
  Cyclic GFR-binding peptide
  MOD_RES (27)..(28): Xaa is C or S
EVTAKKVVKDYEDIKRMQVPRLETPVXXAKPI

SEQ ID NO: 78465 - protein, 34 aa, Artificial Sequence
  Cyclic GFR-binding peptide
  MOD_RES (33)..(33): Xaa is C or S
ELTNSLQEFIPKKRVIEYYLVTLPELQVQTPRXQ

SEQ ID NO: 78466 - protein, 36 aa, Artificial Sequence; identical to SEQ ID NO: 28302
  Cyclic GFR-binding peptide
  MOD_RES (1)..(33)..(34): Xaa is C or S

SEQ ID NO: 78467 - protein, 32 aa, Artificial Sequence
  Cyclic GFR-binding peptide
  MOD_RES (30)..(30): Xaa is C or S
VVMNVTAKKIVNSSDDIKRVQVPRLKTPAXTP

SEQ ID NO: 78468 - protein, 35 aa, Artificial Sequence; identical to SEQ ID NO: 28305
  Cyclic GFR-binding peptide
  MOD_RES (31)..(31): Xaa is C or S

SEQ ID NO: 78469 - protein, 37 aa, Artificial Sequence; identical to SEQ ID NO: 28307
  Cyclic GFR-binding peptide
  MOD_RES (1)..(3)..(35)..(36): Xaa is C or S

SEQ ID NO: 78470 - protein, 28 aa, Artificial Sequence
  Cyclic GFR-binding peptide
RVVMNVQVEKIVNSSDDVKAVKVSRLQT

SEQ ID NO: 78471 - protein, 36 aa, Artificial Sequence; identical to SEQ ID NO: 28310
  Cyclic GFR-binding peptide
  MOD_RES (31)..(32): Xaa is C or S

SEQ ID NO: 78472 - protein, 38 aa, Artificial Sequence; identical to SEQ ID NO: 28312
  Cyclic GFR-binding peptide
  MOD_RES (1)..(3)..(34)..(35): Xaa is C or S

SEQ ID NO: 78473 - protein, 29 aa, Artificial Sequence
  Cyclic GFR-binding peptide
ARVVMNVTAKKIVNSSDDIKRVQVPRLQT

SEQ ID NO: 78474 - protein, 29 aa, Artificial Sequence
  Cyclic GFR-binding peptide
ELRNSLQELKPKKRVYEYYLVTLPEHHVR

SEQ ID NO: 78475 - protein, 25 aa, Artificial Sequence
  Cyclic GFR-binding peptide
VIMVTAKKVKPKRGVIKRIQVPRLA

SEQ ID NO: 78476 - protein, 31 aa, Artificial Sequence
  Cyclic GFR-binding peptide
NHQLFNSLQEHQGQHPKIRYYVMPLPEEETP

SEQ ID NO: 78477 - protein, 33 aa, Artificial Sequence; identical to SEQ ID NO: 28317
  Cyclic GFR-binding peptide
  MOD_RES (2)..(33): Xaa is C or S

SEQ ID NO: 78478 - protein, 33 aa, Artificial Sequence
  Cyclic GFR-binding peptide
  MOD_RES (2)..(4): Xaa is C or S
SXKXSRVIMSMEGIVKPKRGVMIQITINSLAQP

SEQ ID NO: 78479 - protein, 32 aa, Artificial Sequence
  Cyclic GFR-binding peptide
  MOD_RES (30)..(30): Xaa is C or S
NSLQELKPKKRVYEYYVVPLPEHHVRSPQXKV

SEQ ID NO: 78480 - protein, 35 aa, Artificial Sequence; identical to SEQ ID NO: 28319
  Cyclic GFR-binding peptide
  MOD_RES (2)..(4): Xaa is C or S

SEQ ID NO: 78481 - protein, 36 aa, Artificial Sequence; identical to SEQ ID NO: 28321
  Cyclic GFR-binding peptide
  MOD_RES (1)..(3)..(35)..(36): Xaa is C or S

SEQ ID NO: 78482 - protein, 33 aa, Artificial Sequence
  Cyclic GFR-binding peptide
  MOD_RES (2)..(4): Xaa is C or S
SXKXSKVIMSMEGIIKPTKGIMIQITINSLDQS

SEQ ID NO: 78483 - protein, 31 aa, Artificial Sequence
  Cyclic GFR-binding peptide
  MOD_RES (30)..(30): Xaa is C or S
NSLQELKPKKRVYEYYLVTLPEHHVRSPQXK

SEQ ID NO: 78484 - protein, 30 aa, Artificial Sequence
  Cyclic GFR-binding peptide
ELRNSLQELKPKKRVYEYYVVPLPEHHVRS

SEQ ID NO: 78485 - protein, 37 aa, Artificial Sequence; identical to SEQ ID NO: 28324
  Cyclic GFR-binding peptide
  MOD_RES (1)..(33)..(34): Xaa is C or S

SEQ ID NO: 78486 - protein, 22 aa, Artificial Sequence
  Cyclic GFR-binding peptide
VMVTAKKVKPTRGVIKRIQVPR

SEQ ID NO: 78487 - protein, 38 aa, Artificial Sequence; identical to SEQ ID NO: 28327
  Cyclic GFR-binding peptide
  MOD_RES (2)..(34): Xaa is C or S

SEQ ID NO: 78488 - protein, 41 aa, Artificial Sequence; identical to SEQ ID NO: 28329
  Cyclic GFR-binding peptide
  MOD_RES (2)..(4)..(41): Xaa is C or S

SEQ ID NO: 78489 - protein, 28 aa, Artificial Sequence
  Cyclic GFR-binding peptide
  MOD_RES (2)..(2): Xaa is C or S
GXGEVVMDVTAKKVVKENEDIKRMQVPR

SEQ ID NO: 78490 - protein, 34 aa, Artificial Sequence
  Cyclic GFR-binding peptide
  MOD_RES (29)..(30): Xaa is C or S
VMDVQVEKVVKENEDVKAMKVSRLETPVXXAKPI

SEQ ID NO: 78491 - protein, 35 aa, Artificial Sequence; identical to SEQ ID NO: 28337
  Cyclic GFR-binding peptide
  MOD_RES (2)..(34)..(35): Xaa is C or S

SEQ ID NO: 78492 - protein, 34 aa, Artificial Sequence
  Cyclic GFR-binding peptide
  MOD_RES (2)..(4): Xaa is C or S
HXGXSRVVMNVQVEKIVNSSDDVKAVKVSRLKTP

SEQ ID NO: 78493 - protein, 35 aa, Artificial Sequence
  Cyclic GFR-binding peptide
  MOD_RES (30)..(31): Xaa is C or S
VVMNVQVEKIVNSSDDVKAVKVSRLKTPAXXPKPV

SEQ ID NO: 78494 - protein, 35 aa, Artificial Sequence
  Cyclic GFR-binding peptide
  MOD_RES (33)..(33): Xaa is C or S
ELTNSLQEFIPKKRVIEYYLVTLPELQVQTPRXQV

SEQ ID NO: 78495 - protein, 32 aa, Artificial Sequence
  Cyclic GFR-binding peptide
  MOD_RES (29)..(30): Xaa is C or S
VMNVTAKKIVNSSDDIKRVQVPRLKTPAXXPK

SEQ ID NO: 78496 - protein, 25 aa, Artificial Sequence
  Cyclic GFR-binding peptide
LFNSLQEHQGQHPKIRYYVMPLPEE

SEQ ID NO: 78497 - protein, 34 aa, Artificial Sequence
  Cyclic GFR-binding peptide
  MOD_RES (1)..(3): Xaa is C or S
XEXKNHQLFNSLQEHQGQHPKIRYYLMTLPEEET

SEQ ID NO: 78498 - protein, 32 aa, Artificial Sequence; identical to SEQ ID NO: 28344
  Cyclic GFR-binding peptide
  MOD_RES (2)..(2): Xaa is C or S

SEQ ID NO: 78499 - protein, 33 aa, Artificial Sequence; identical to SEQ ID NO: 28345
  Cyclic GFR-binding peptide
  MOD_RES (2)..(2): Xaa is C or S

SEQ ID NO: 78500 - protein, 22 aa, Artificial Sequence
  Cyclic GFR-binding peptide
VTAKKVKPKRGVIKRIQVPRLA

SEQ ID NO: 78501 - protein, 27 aa, Artificial Sequence
  Cyclic GFR-binding peptide
  MOD_RES (27)..(27): Xaa is C or S
DVQVEKVVKENEDVKAMKVSRLETPVX

SEQ ID NO: 78502 - protein, 33 aa, Artificial Sequence
  Cyclic GFR-binding peptide
  MOD_RES (28)..(28): Xaa is C or S
MNSMEGIIVNSSDDMIQVTINSLKTPAXTPKTV

SEQ ID NO: 78503 - protein, 33 aa, Artificial Sequence
  Cyclic GFR-binding peptide
  MOD_RES (28)..(29): Xaa is C or S
MNVQVEKIVNSSDDVKAVKVSRLQTPAXXPKPV

SEQ ID NO: 78504 - protein, 34 aa, Artificial Sequence
  Cyclic GFR-binding peptide
  MOD_RES (30)..(30): Xaa is C or S
NSLQEFIPKKRVIEYYLVTLPELQVQTPRXQVNR

SEQ ID NO: 78505 - protein, 34 aa, Artificial Sequence
  Cyclic GFR-binding peptide
  MOD_RES (30)..(30): Xaa is C or S
LFNSLQEHQGQHPKIRYYVMPLPEEETPVXELGE

SEQ ID NO: 78506 - protein, 33 aa, Artificial Sequence; identical to SEQ ID NO: 28354
  Cyclic GFR-binding peptide
  MOD_RES (2)..(33): Xaa is C or S

SEQ ID NO: 78507 - protein, 25 aa, Artificial Sequence
  Cyclic GFR-binding peptide
SMEGIVKPTRGVMIQITINSLDQPV

SEQ ID NO: 78508 - protein, 28 aa, Artificial Sequence
  Cyclic GFR-binding peptide
SKVVMVQVEKVKPTRGVVKAIKVSRLDQ

SEQ ID NO: 78509 - protein, 40 aa, Artificial Sequence; identical to SEQ ID NO: 28359
  Cyclic GFR-binding peptide
  MOD_RES (2)..(34)..(35): Xaa is C or S

SEQ ID NO: 78510 - protein, 34 aa, Artificial Sequence; identical to SEQ ID NO: 28361
  Cyclic GFR-binding peptide
  MOD_RES (1)..(3): Xaa is C or S

SEQ ID NO: 78511 - protein, 37 aa, Artificial Sequence; identical to SEQ ID NO: 28360
  Cyclic GFR-binding peptide
  MOD_RES (2)..(33)..(34): Xaa is C or S

SEQ ID NO: 78512 - protein, 28 aa, Artificial Sequence
  Cyclic GFR-binding peptide
RVVMNVTAKKIVNSSDDIKRVQVPRLKT

SEQ ID NO: 78513 - protein, 31 aa, Artificial Sequence
  Cyclic GFR-binding peptide
  MOD_RES (29)..(30): Xaa is C or S
VIMVQVEKIKPTKGIVKAIKVSRLDQSVXXP

SEQ ID NO: 78514 - protein, 35 aa, Artificial Sequence; identical to SEQ ID NO: 28364
  Cyclic GFR-binding peptide
  MOD_RES (31)..(32): Xaa is C or S

SEQ ID NO: 78515 - protein, 32 aa, Artificial Sequence
  Cyclic GFR-binding peptide
  MOD_RES (30)..(30): Xaa is C or S
LFNSLQEHQGQHPKIRYYVMPLPEEETPVXEL

SEQ ID NO: 78516 - protein, 24 aa, Artificial Sequence
  Cyclic GFR-binding peptide
MEVTAKKVVKDYEDIKRMQVPRLE

SEQ ID NO: 78517 - protein, 35 aa, Artificial Sequence
  Cyclic GFR-binding peptide
  MOD_RES (30)..(31): Xaa is C or S
VVMDVQVEKVVKENEDVKAMKVSRLETPVXXAKPI

SEQ ID NO: 78518 - protein, 26 aa, Artificial Sequence
  Cyclic GFR-binding peptide
SRVVMNVQVEKIVNSSDDVKAVKVSR

SEQ ID NO: 78519 - protein, 42 aa, Artificial Sequence; identical to SEQ ID NO: 28368
  Cyclic GFR-binding peptide
  MOD_RES (2)..(4)..(36)..(37): Xaa is C or S

SEQ ID NO: 78520 - protein, 30 aa, Artificial Sequence
  Cyclic GFR-binding peptide
ELHEELRNSLQELKPKKRVYEYYVVPLPEH

SEQ ID NO: 78521 - protein, 35 aa, Artificial Sequence
  Cyclic GFR-binding peptide
  MOD_RES (30)..(31): Xaa is C or S
VVMNVQVEKIVNSSDDVKAVKVSRLQTPAXXPKPV

SEQ ID NO: 78522 - protein, 38 aa, Artificial Sequence; identical to SEQ ID NO: 28373
  Cyclic GFR-binding peptide
  MOD_RES (2)..(34)..(35): Xaa is C or S

SEQ ID NO: 78523 - protein, 26 aa, Artificial Sequence
  Cyclic GFR-binding peptide
DVTAKKVVKENEDIKRMQVPRLETPV

SEQ ID NO: 78524 - protein, 36 aa, Artificial Sequence; identical to SEQ ID NO: 28378
  Cyclic GFR-binding peptide
  MOD_RES (2)..(4)..(35)..(36): Xaa is C or S

SEQ ID NO: 78525 - protein, 24 aa, Artificial Sequence
  Cyclic GFR-binding peptide
NVTAKKIVNSSDDIKRVQVPRLQT

SEQ ID NO: 78526 - protein, 29 aa, Artificial Sequence
  Cyclic GFR-binding peptide
  MOD_RES (1)..(3): Xaa is C or S
XGXSRVVMNVQVEKIVNSSDDVKAVKVSR

SEQ ID NO: 78527 - protein, 26 aa, Artificial Sequence
  Cyclic GFR-binding peptide
ARVVMNVQVEKIVNSSDDVKAVKVSR

SEQ ID NO: 78528 - protein, 32 aa, Artificial Sequence
  Cyclic GFR-binding peptide
  MOD_RES (30)..(30): Xaa is C or S
NSLQEFIPKKRVIEYYLVTLPELQVQTPRXQV

SEQ ID NO: 78529 - protein, 30 aa, Artificial Sequence
  Cyclic GFR-binding peptide
  MOD_RES (2)..(2): Xaa is C or S
GXGEVVMDVTAKKVVKENEDIKRMQVPRLE

SEQ ID NO: 78530 - protein, 26 aa, Artificial Sequence
  Cyclic GFR-binding peptide
  MOD_RES (1)..(1): Xaa is C or S
XSKVIMSMEGIIKPTKGIMIQITINS

SEQ ID NO: 78531 - protein, 21 aa, Artificial Sequence
  Cyclic GFR-binding peptide
MSMEGIVKPKRGVMIQITINS

SEQ ID NO: 78532 - protein, 35 aa, Artificial Sequence; identical to SEQ ID NO: 28391
  Cyclic GFR-binding peptide
  MOD_RES (1)..(33)..(34): Xaa is C or S

SEQ ID NO: 78533 - protein, 37 aa, Artificial Sequence; identical to SEQ ID NO: 28392
  Cyclic GFR-binding peptide
  MOD_RES (1)..(3)..(35): Xaa is C or S

SEQ ID NO: 78534 - protein, 34 aa, Artificial Sequence; identical to SEQ ID NO: 28394
  Cyclic GFR-binding peptide
  MOD_RES (2)..(4): Xaa is C or S

SEQ ID NO: 78535 - protein, 37 aa, Artificial Sequence; identical to SEQ ID NO: 28396
  Cyclic GFR-binding peptide
  MOD_RES (1)..(1): Xaa is C or S

SEQ ID NO: 78536 - protein, 31 aa, Artificial Sequence
  Cyclic GFR-binding peptide
  MOD_RES (27)..(28): Xaa is C or S
ESMEGIVVKDYEDMIQMTINSLETPVXXAKP

SEQ ID NO: 78537 - protein, 38 aa, Artificial Sequence; identical to SEQ ID NO: 28402
  Cyclic GFR-binding peptide
  MOD_RES (34)..(34): Xaa is C or S

SEQ ID NO: 78538 - protein, 32 aa, Artificial Sequence
  Cyclic GFR-binding peptide
  MOD_RES (29)..(30): Xaa is C or S
VMDVTAKKVVKENEDIKRMQVPRLETPVXXAK

SEQ ID NO: 78539 - protein, 30 aa, Artificial Sequence
  Cyclic GFR-binding peptide
ELTNSLQEFIPKKRVIEYYVVPLPELQVQT

SEQ ID NO: 78540 - protein, 29 aa, Artificial Sequence
  Cyclic GFR-binding peptide
  MOD_RES (26)..(27): Xaa is C or S
SMEGIIKPTKGIMIQITINSLDQSVXXPS

SEQ ID NO: 78541 - protein, 34 aa, Artificial Sequence; identical to SEQ ID NO: 28409
  Cyclic GFR-binding peptide
  MOD_RES (2)..(33)..(34): Xaa is C or S

SEQ ID NO: 78542 - protein, 33 aa, Artificial Sequence
  Cyclic GFR-binding peptide
  MOD_RES (2)..(4): Xaa is C or S
HXGXSRVVMNVTAKKIVNSSDDIKRVQVPRLKT

SEQ ID NO: 78543 - protein, 25 aa, Artificial Sequence
  Cyclic GFR-binding peptide
VMSMEGIVKPTRGVMIQITINSLDQ

SEQ ID NO: 78544 - protein, 26 aa, Artificial Sequence
  Cyclic GFR-binding peptide
TNSLQEFIPKKRVIEYYVVPLPELQV

SEQ ID NO: 78545 - protein, 29 aa, Artificial Sequence
  Cyclic GFR-binding peptide
EVVMEVQVEKVVKDYEDVKAMKVSRLETP

SEQ ID NO: 78546 - protein, 27 aa, Artificial Sequence
  Cyclic GFR-binding peptide
  MOD_RES (26)..(27): Xaa is C or S
VTAKKVKPTRGVIKRIQVPRLDQPVXX

SEQ ID NO: 78547 - protein, 22 aa, Artificial Sequence
  Cyclic GFR-binding peptide
NSLQELKPKKRVYEYYVVPLPE

SEQ ID NO: 78548 - protein, 30 aa, Artificial Sequence
  Cyclic GFR-binding peptide
  MOD_RES (1)..(3): Xaa is C or S
XGXSRVVMNSMEGIIVNSSDDMIQVTINSL

SEQ ID NO: 78549 - protein, 38 aa, Artificial Sequence; identical to SEQ ID NO: 28419
  Cyclic GFR-binding peptide
  MOD_RES (2)..(34)..(35): Xaa is C or S

SEQ ID NO: 78550 - protein, 32 aa, Artificial Sequence; identical to SEQ ID NO: 28421
  Cyclic GFR-binding peptide
  MOD_RES (2)..(2): Xaa is C or S

SEQ ID NO: 78551 - protein, 37 aa, Artificial Sequence; identical to SEQ ID NO: 28423
  Cyclic GFR-binding peptide
  MOD_RES (1)..(32)..(33): Xaa is C or S

SEQ ID NO: 78552 - protein, 25 aa, Artificial Sequence
  Cyclic GFR-binding peptide
VTAKKIKPTKGIIKRIQVPRLDQSV

SEQ ID NO: 78553 - protein, 35 aa, Artificial Sequence
  Cyclic GFR-binding peptide
  MOD_RES (30)..(31): Xaa is C or S
VVMNVTAKKIVNSSDDIKRVQVPRLQTPAXXPKPV

SEQ ID NO: 78554 - protein, 33 aa, Artificial Sequence
  Cyclic GFR-binding peptide
  MOD_RES (27)..(28): Xaa is C or S
MVTAKKVKPKRGVIKRIQVPRLAQPVXXPAASA

SEQ ID NO: 78555 - protein, 31 aa, Artificial Sequence; identical to SEQ ID NO: 28424
  Cyclic GFR-binding peptide
  MOD_RES (31)..(31): Xaa is C or S

SEQ ID NO: 78556 - protein, 32 aa, Artificial Sequence
  Cyclic GFR-binding peptide
  MOD_RES (27)..(28): Xaa is C or S
MVTAKKVKPTRGVIKRIQVPRLDQPVXXPSAS

SEQ ID NO: 78557 - protein, 24 aa, Artificial Sequence
  Cyclic GFR-binding peptide
IMVQVEKVKPKRGVVKAIKVSRLA

SEQ ID NO: 78558 - protein, 43 aa, Artificial Sequence; identical to SEQ ID NO: 28428
  Cyclic GFR-binding peptide
  MOD_RES (1)..(3)..(40): Xaa is C or S

SEQ ID NO: 78559 - protein, 27 aa, Artificial Sequence
  Cyclic GFR-binding peptide
VVMEVQVEKVVKDYEDVKAMKVSRLET

SEQ ID NO: 78560 - protein, 39 aa, Artificial Sequence; identical to SEQ ID NO: 28432
  Cyclic GFR-binding peptide
  MOD_RES (2)..(4)..(36)..(37): Xaa is C or S

SEQ ID NO: 78561 - protein, 32 aa, Artificial Sequence
  Cyclic GFR-binding peptide
  MOD_RES (30)..(30): Xaa is C or S
VVMNVQVEKIVNSSDDVKAVKVSRLKTPAXTP

SEQ ID NO: 78562 - protein, 34 aa, Artificial Sequence; identical to SEQ ID NO: 28434
  Cyclic GFR-binding peptide
  MOD_RES (31)..(32): Xaa is C or S

SEQ ID NO: 78563 - protein, 41 aa, Artificial Sequence; identical to SEQ ID NO: 28437
  Cyclic GFR-binding peptide
  MOD_RES (1)..(3)..(35)..(36): Xaa is C or S

SEQ ID NO: 78564 - protein, 32 aa, Artificial Sequence
  Cyclic GFR-binding peptide
  MOD_RES (1)..(3): Xaa is C or S
XGXARVVMNVQVEKIVNSSDDVKAVKVSRLQT

SEQ ID NO: 78565 - protein, 34 aa, Artificial Sequence
  Cyclic GFR-binding peptide
  MOD_RES (29)..(30): Xaa is C or S
VIMVQVEKVKPKRGVVKAIKVSRLAQPVXXPAAS

SEQ ID NO: 78566 - protein, 31 aa, Artificial Sequence; identical to SEQ ID NO: 28440
  Cyclic GFR-binding peptide
  MOD_RES (1)..(1): Xaa is C or S

SEQ ID NO: 78567 - protein, 24 aa, Artificial Sequence
  Cyclic GFR-binding peptide
VMNVTAKKIVNSSDDIKRVQVPRL

SEQ ID NO: 78568 - protein, 33 aa, Artificial Sequence; identical to SEQ ID NO: 28445
  Cyclic GFR-binding peptide
  MOD_RES (31)..(32): Xaa is C or S

SEQ ID NO: 78569 - protein, 38 aa, Artificial Sequence; identical to SEQ ID NO: 28446
  Cyclic GFR-binding peptide
  MOD_RES (2)..(33)..(34): Xaa is C or S

SEQ ID NO: 78570 - protein, 35 aa, Artificial Sequence
  Cyclic GFR-binding peptide
  MOD_RES (31)..(31): Xaa is C or S
TNSLQEFIPKKRVIEYYVVPLPELQVQTPRXQVNR

SEQ ID NO: 78571 - protein, 34 aa, Artificial Sequence
  Cyclic GFR-binding peptide
  MOD_RES (2)..(4): Xaa is C or S
RXGXGEVVMESMEGIVVKDYEDMIQMTINSLETP

SEQ ID NO: 78572 - protein, 31 aa, Artificial Sequence
  Cyclic GFR-binding peptide
  MOD_RES (29)..(30): Xaa is C or S
VMEVTAKKVVKDYEDIKRMQVPRLETPVXXA

SEQ ID NO: 78573 - protein, 30 aa, Artificial Sequence
  Cyclic GFR-binding peptide
  MOD_RES (2)..(4): Xaa is C or S
SXKXSKVVMVQVEKVKPTRGVVKAIKVSRL

SEQ ID NO: 78574 - protein, 37 aa, Artificial Sequence; identical to SEQ ID NO: 28453
  Cyclic GFR-binding peptide
  MOD_RES (2)..(4)..(36)..(37): Xaa is C or S

SEQ ID NO: 78575 - protein, 25 aa, Artificial Sequence
  Cyclic GFR-binding peptide
VVMSMEGIVKPTRGVMIQITINSLD

SEQ ID NO: 78576 - protein, 31 aa, Artificial Sequence
  Cyclic GFR-binding peptide
  MOD_RES (26)..(27): Xaa is C or S
VQVEKIVNSSDDVKAVKVSRLKTPAXXPKPV

SEQ ID NO: 78577 - protein, 35 aa, Artificial Sequence
  Cyclic GFR-binding peptide
  MOD_RES (30)..(31): Xaa is C or S
VVMESMEGIVVKDYEDMIQMTINSLETPVXXAKPI

SEQ ID NO: 78578 - protein, 34 aa, Artificial Sequence; identical to SEQ ID NO: 28457
  Cyclic GFR-binding peptide

SEQ ID NO: 78579 - protein, 36 aa, Artificial Sequence; identical to SEQ ID NO: 28458
  Cyclic GFR-binding peptide
  MOD_RES (32)..(33): Xaa is C or S

SEQ ID NO: 78580 - protein, 37 aa, Artificial Sequence
  Cyclic GFR-binding peptide
  MOD_RES (33)..(33): Xaa is C or S
ELRNSLQELKPKKRVYEYYVVPLPEHHVRSPQXKVSS

SEQ ID NO: 78581 - protein, 38 aa, Artificial Sequence; identical to SEQ ID NO: 28464
  Cyclic GFR-binding peptide
  MOD_RES (2)..(33)..(34): Xaa is C or S

SEQ ID NO: 78582 - protein, 31 aa, Artificial Sequence
  Cyclic GFR-binding peptide
  MOD_RES (28)..(29): Xaa is C or S
IMSMEGIVKPKRGVMIQITINSLAQPVXXPA

SEQ ID NO: 78583 - protein, 37 aa, Artificial Sequence; identical to SEQ ID NO: 28466
  Cyclic GFR-binding peptide
  MOD_RES (32)..(33): Xaa is C or S

SEQ ID NO: 78584 - protein, 37 aa, Artificial Sequence; identical to SEQ ID NO: 28468
  Cyclic GFR-binding peptide
  MOD_RES (2)..(34)..(35): Xaa is C or S

SEQ ID NO: 78585 - protein, 39 aa, Artificial Sequence; identical to SEQ ID NO: 28469
  Cyclic GFR-binding peptide
  MOD_RES (2)..(34): Xaa is C or S

SEQ ID NO: 78586 - protein, 31 aa, Artificial Sequence
  Cyclic GFR-binding peptide
  MOD_RES (29)..(30): Xaa is C or S
VMNSMEGIIVNSSDDMIQVTINSLQTPAXXP

SEQ ID NO: 78587 - protein, 37 aa, Artificial Sequence; identical to SEQ ID NO: 28470
  Cyclic GFR-binding peptide
  MOD_RES (1)..(3)..(34)..(35): Xaa is C or S

SEQ ID NO: 78588 - protein, 35 aa, Artificial Sequence; identical to SEQ ID NO: 28472
  Cyclic GFR-binding peptide
  MOD_RES (2)..(33)..(34): Xaa is C or S

SEQ ID NO: 78589 - protein, 34 aa, Artificial Sequence; identical to SEQ ID NO: 28474
  Cyclic GFR-binding peptide
  MOD_RES (31)..(32): Xaa is C or S

SEQ ID NO: 78590 - protein, 38 aa, Artificial Sequence; identical to SEQ ID NO: 28475
  Cyclic GFR-binding peptide
  MOD_RES (1)..(32)..(33): Xaa is C or S

SEQ ID NO: 78591 - protein, 33 aa, Artificial Sequence
  Cyclic GFR-binding peptide
  MOD_RES (28)..(29): Xaa is C or S
MNVQVEKIVNSSDDVKAVKVSRLKTPAXXPKPV

SEQ ID NO: 78592 - protein, 32 aa, Artificial Sequence
  Cyclic GFR-binding peptide
ALHDELTNSLQEFIPKKRVIEYYLVTLPELQV

SEQ ID NO: 78593 - protein, 38 aa, Artificial Sequence; identical to SEQ ID NO: 28477
  Cyclic GFR-binding peptide
  MOD_RES (2)..(4)..(36)..(37): Xaa is C or S

SEQ ID NO: 78594 - protein, 37 aa, Artificial Sequence; identical to SEQ ID NO: 28480
  Cyclic GFR-binding peptide
  MOD_RES (2)..(33)..(34): Xaa is C or S

SEQ ID NO: 78595 - protein, 31 aa, Artificial Sequence; identical to SEQ ID NO: 28481
  Cyclic GFR-binding peptide

SEQ ID NO: 78596 - protein, 20 aa, Artificial Sequence
  Cyclic GFR-binding peptide
VQVEKVVKDYEDVKAMKVSR

SEQ ID NO: 78597 - protein, 41 aa, Artificial Sequence; identical to SEQ ID NO: 28490
  Cyclic GFR-binding peptide
  MOD_RES (3)..(40): Xaa is C or S

SEQ ID NO: 78598 - protein, 32 aa, Artificial Sequence
  Cyclic GFR-binding peptide
VHHEPLPVVYYEYVRKKPKLEQLSNRLEEHLE

SEQ ID NO: 78599 - protein, 34 aa, Artificial Sequence
  Cyclic GFR-binding peptide
  MOD_RES (32)..(34): Xaa is C or S
HHEPLTVLYYEYVRKKPKLEQLSNRLEEHLEXAX

SEQ ID NO: 78600 - protein, 27 aa, Artificial Sequence
  Cyclic GFR-binding peptide
  MOD_RES (1)..(2): Xaa is C or S
XXVPQALRPVQIRKIVGRKPKVKKATV

SEQ ID NO: 78601 - protein, 23 aa, Artificial Sequence
  Cyclic GFR-binding peptide
EPLTVLYYEIVRKKPIFEQLSNT

SEQ ID NO: 78602 - protein, 35 aa, Artificial Sequence
  Cyclic GFR-binding peptide
  MOD_RES (32)..(34): Xaa is C or S
HHEPLTVLYYEYVRKKPKLEQLSNRLEEHLEXAXA

SEQ ID NO: 78603 - protein, 31 aa, Artificial Sequence
  Cyclic GFR-binding peptide
  MOD_RES (28)..(30): Xaa is C or S
ALRPVQIRKIVGRKPKVKKATVMIVRSXKXS

SEQ ID NO: 78604 - protein, 28 aa, Artificial Sequence
  Cyclic GFR-binding peptide
  MOD_RES (28)..(28): Xaa is C or S
LSNITMQIMDENEKVVIGEMSDMVVEGX

SEQ ID NO: 78605 - protein, 28 aa, Artificial Sequence
  Cyclic GFR-binding peptide
PSRVHHEPLPVVYYEYVRKKPKLEQLSN

SEQ ID NO: 78606 - protein, 40 aa, Artificial Sequence; identical to SEQ ID NO: 28503
  Cyclic GFR-binding peptide
  MOD_RES (6)..(7)..(39): Xaa is C or S

SEQ ID NO: 78607 - protein, 32 aa, Artificial Sequence
  Cyclic GFR-binding peptide
  MOD_RES (29)..(31): Xaa is C or S
KLRSVKVAKVDDSSNVIKEVQVNMVVRSXGXH

SEQ ID NO: 78608 - protein, 28 aa, Artificial Sequence
  Cyclic GFR-binding peptide
APTKLSNITVQIMDDSSNVIIGEMSNMV

SEQ ID NO: 78609 - protein, 30 aa, Artificial Sequence
  Cyclic GFR-binding peptide
VQLEPLTVLYYEIVRKKPIFEQLSNTLEDH

SEQ ID NO: 78610 - protein, 27 aa, Artificial Sequence
  Cyclic GFR-binding peptide
  MOD_RES (1)..(1): Xaa is C or S
XVPTELSNITMQIMDENEKVVIGEMSD

SEQ ID NO: 78611 - protein, 35 aa, Artificial Sequence; identical to SEQ ID NO: 28510
  Cyclic GFR-binding peptide
  MOD_RES (32)..(34): Xaa is C or S

SEQ ID NO: 78612 - protein, 27 aa, Artificial Sequence
  Cyclic GFR-binding peptide
TKLRSVKVAKVDDSSNVIKEVQVNMVV

SEQ ID NO: 78613 - protein, 30 aa, Artificial Sequence; identical to SEQ ID NO: 28511
  Cyclic GFR-binding peptide

SEQ ID NO: 78614 - protein, 40 aa, Artificial Sequence; identical to SEQ ID NO: 28514
  Cyclic GFR-binding peptide
  MOD_RES (6)..(38)..(40): Xaa is C or S

SEQ ID NO: 78615 - protein, 25 aa, Artificial Sequence
  Cyclic GFR-binding peptide
QLRSVKVAKVDDSSNVIKEVQVNMV

SEQ ID NO: 78616 - protein, 26 aa, Artificial Sequence
  Cyclic GFR-binding peptide
QDLRSVKIAKVIGKTPKIKEVQVMIV

SEQ ID NO: 78617 - protein, 22 aa, Artificial Sequence
  Cyclic GFR-binding peptide
LSNITMQIMDEYDKVVIGEMSE

SEQ ID NO: 78618 - protein, 32 aa, Artificial Sequence
  Cyclic GFR-binding peptide
  MOD_RES (3)..(4): Xaa is C or S
SPXXVPQDLSNITIQIMVGRTPKVIGEMSMVV

SEQ ID NO: 78619 - protein, 30 aa, Artificial Sequence
  Cyclic GFR-binding peptide
  MOD_RES (27)..(29): Xaa is C or S
RSVKMAKVDENEKVVKEVQVDMVVEGXGXR

SEQ ID NO: 78620 - protein, 30 aa, Artificial Sequence
  Cyclic GFR-binding peptide
  MOD_RES (1)..(1): Xaa is C or S
XAPTKLRPVQVRKIDDSSNVIKKATVNMVV

SEQ ID NO: 78621 - protein, 36 aa, Artificial Sequence; identical to SEQ ID NO: 28526
  Cyclic GFR-binding peptide
  MOD_RES (2)..(3)..(35): Xaa is C or S

SEQ ID NO: 78622 - protein, 32 aa, Artificial Sequence; identical to SEQ ID NO: 28527
  Cyclic GFR-binding peptide
  MOD_RES (32)..(32): Xaa is C or S

SEQ ID NO: 78623 - protein, 29 aa, Artificial Sequence
  Cyclic GFR-binding peptide
  MOD_RES (3)..(4): Xaa is C or S
SPXXVPQDLRSVKIAKVVGRTPKVKEVQV

SEQ ID NO: 78624 - protein, 33 aa, Artificial Sequence; identical to SEQ ID NO: 28532
  Cyclic GFR-binding peptide
  MOD_RES (32)..(32): Xaa is C or S

SEQ ID NO: 78625 - protein, 35 aa, Artificial Sequence
  Cyclic GFR-binding peptide
  MOD_RES (33)..(35): Xaa is C or S
VQLEPLTVLYYEIVRKKPIFEQLSNTLEDHLAXKX

SEQ ID NO: 78626 - protein, 41 aa, Artificial Sequence; identical to SEQ ID NO: 28537
  Cyclic GFR-binding peptide
  MOD_RES (5)..(5): Xaa is C or S

SEQ ID NO: 78627 - protein, 30 aa, Artificial Sequence
  Cyclic GFR-binding peptide
VPTEEEPLPMVYYRIKPHQGQHEQLSNFLQ

SEQ ID NO: 78628 - protein, 28 aa, Artificial Sequence
  Cyclic GFR-binding peptide
SQDLSNITIQIMIGKTPKIIGEMSMIVK

SEQ ID NO: 78629 - protein, 25 aa, Artificial Sequence
  Cyclic GFR-binding peptide
PQDLRSVKIAKVVGRTPKVKEVQVM

SEQ ID NO: 78630 - protein, 38 aa, Artificial Sequence; identical to SEQ ID NO: 28543
  Cyclic GFR-binding peptide
  MOD_RES (4)..(5)..(36)..(38): Xaa is C or S

SEQ ID NO: 78631 - protein, 37 aa, Artificial Sequence; identical to SEQ ID NO: 28545
  Cyclic GFR-binding peptide
  MOD_RES (6)..(6): Xaa is C or S

SEQ ID NO: 78632 - protein, 34 aa, Artificial Sequence
  Cyclic GFR-binding peptide
  MOD_RES (5)..(5): Xaa is C or S
EGLEXVPTEEEPLTMLYYRIKPHQGQHEQLSNFL

SEQ ID NO: 78633 - protein, 23 aa, Artificial Sequence
  Cyclic GFR-binding peptide
QALRSVKIAKVVGRKPKVKEVQV

SEQ ID NO: 78634 - protein, 35 aa, Artificial Sequence
  Cyclic GFR-binding peptide
  MOD_RES (6)..(6): Xaa is C or S
VTKPTXAPTKLRSVKVAKVDDSSNVIKEVQVNMVV

SEQ ID NO: 78635 - protein, 35 aa, Artificial Sequence
  Cyclic GFR-binding peptide
  MOD_RES (5)..(6): Xaa is C or S
VPKPXXAPTKLRPVQVRKIDDSSNVIKKATVNMVV

SEQ ID NO: 78636 - protein, 39 aa, Artificial Sequence; identical to SEQ ID NO: 28552
  Cyclic GFR-binding peptide
  MOD_RES (4)..(5)..(37)..(39): Xaa is C or S

SEQ ID NO: 78637 - protein, 24 aa, Artificial Sequence
  Cyclic GFR-binding peptide
EPLPVVYYEYVRKKPKLEQLSNRL

SEQ ID NO: 78638 - protein, 24 aa, Artificial Sequence
  Cyclic GFR-binding peptide
TELSNITMQIMDEYDKVVIGEMSE

SEQ ID NO: 78639 - protein, 29 aa, Artificial Sequence
  Cyclic GFR-binding peptide
PTKLRSVKVAKVDDSSNVIKEVQVNMVVR

SEQ ID NO: 78640 - protein, 24 aa, Artificial Sequence
  Cyclic GFR-binding peptide
SNITIQIMVGRTPKVIGEMSMVVK

SEQ ID NO: 78641 - protein, 28 aa, Artificial Sequence
  Cyclic GFR-binding peptide
  MOD_RES (1)..(2): Xaa is C or S
XXVPQALRPVQIRKIVGRKPKVKKATVM

SEQ ID NO: 78642 - protein, 29 aa, Artificial Sequence
  Cyclic GFR-binding peptide
  MOD_RES (1)..(1): Xaa is C or S
XVPTEEEPLPMVYYRIKPHQGQHEQLSNF

SEQ ID NO: 78643 - protein, 34 aa, Artificial Sequence; identical to SEQ ID NO: 28557
  Cyclic GFR-binding peptide
  MOD_RES (4)..(4): Xaa is C or S

SEQ ID NO: 78644 - protein, 30 aa, Artificial Sequence
  Cyclic GFR-binding peptide
  MOD_RES (4)..(5): Xaa is C or S
PKPXXAPTKLRSVKVAKVDDSSNVIKEVQV

SEQ ID NO: 78645 - protein, 40 aa, Artificial Sequence; identical to SEQ ID NO: 28559
  Cyclic GFR-binding peptide
  MOD_RES (6)..(7)..(38)..(40): Xaa is C or S

SEQ ID NO: 78646 - protein, 30 aa, Artificial Sequence
  Cyclic GFR-binding peptide
EEEPLTMLYYRIKPHQGQHEQLSNFLQHNK

SEQ ID NO: 78647 - protein, 39 aa, Artificial Sequence; identical to SEQ ID NO: 28564
  Cyclic GFR-binding peptide
  MOD_RES (4)..(5)..(36)..(38): Xaa is C or S

SEQ ID NO: 78648 - protein, 35 aa, Artificial Sequence; identical to SEQ ID NO: 28566
  Cyclic GFR-binding peptide
  MOD_RES (4)..(5): Xaa is C or S

SEQ ID NO: 78649 - protein, 31 aa, Artificial Sequence
  Cyclic GFR-binding peptide
PSRVHHEPLPVVYYEYVRKKPKLEQLSNRLE

SEQ ID NO: 78650 - protein, 25 aa, Artificial Sequence
  Cyclic GFR-binding peptide
LRSVKVAKVDDSSNVIKEVQVNMVV

SEQ ID NO: 78651 - protein, 23 aa, Artificial Sequence
  Cyclic GFR-binding peptide
DLSNITIQIMVGRTPKVIGEMSM

SEQ ID NO: 78652 - protein, 23 aa, Artificial Sequence
  Cyclic GFR-binding peptide
QLRSVKVAKVDDSSNVIKEVQVN

SEQ ID NO: 78653 - protein, 33 aa, Artificial Sequence
  Cyclic GFR-binding peptide
  MOD_RES (5)..(5): Xaa is C or S
EGLEXVPTEEEPLPMVYYRIKPHQGQHEQLSNF

SEQ ID NO: 78654 - protein, 36 aa, Artificial Sequence; identical to SEQ ID NO: 28573
  Cyclic GFR-binding peptide
  MOD_RES (35)..(35): Xaa is C or S

SEQ ID NO: 78655 - protein, 31 aa, Artificial Sequence
  Cyclic GFR-binding peptide
  MOD_RES (5)..(6): Xaa is C or S
SAAPXXVPQALRPVQIRKIVGRKPKVKKATV

SEQ ID NO: 78656 - protein, 35 aa, Artificial Sequence; identical to SEQ ID NO: 28575
  Cyclic GFR-binding peptide
  MOD_RES (2)..(3)..(35): Xaa is C or S

SEQ ID NO: 78657 - protein, 35 aa, Artificial Sequence
  Cyclic GFR-binding peptide
  MOD_RES (4)..(4): Xaa is C or S
NVQXRPTQVQLEPLTVLYYEIVRKKPIFEQLSNTL

SEQ ID NO: 78658 - protein, 27 aa, Artificial Sequence
  Cyclic GFR-binding peptide
QLEPLPVVYYEIVRKKPIFEQLSNTLE

SEQ ID NO: 78659 - protein, 29 aa, Artificial Sequence
  Cyclic GFR-binding peptide
  MOD_RES (29)..(29): Xaa is C or S
QALSNITIQIMVGRKPKVIGEMSMIVRSX

SEQ ID NO: 78660 - protein, 25 aa, Artificial Sequence
  Cyclic GFR-binding peptide
RPVQVRKIDDSSNVIKKATVNMVVR

SEQ ID NO: 78661 - protein, 28 aa, Artificial Sequence
  Cyclic GFR-binding peptide
TKLRSVKVAKVDDSSNVIKEVQVNMVVR

SEQ ID NO: 78662 - protein, 34 aa, Artificial Sequence; identical to SEQ ID NO: 28585
  Cyclic GFR-binding peptide
  MOD_RES (1)..(32)..(34): Xaa is C or S

SEQ ID NO: 78663 - protein, 34 aa, Artificial Sequence
  Cyclic GFR-binding peptide
  MOD_RES (4)..(5): Xaa is C or S
PKPXXAPTKLRSVKVAKVDDSSNVIKEVQVNMVV

SEQ ID NO: 78664 - protein, 31 aa, Artificial Sequence
  Cyclic GFR-binding peptide
QVQLEPLTVLYYEIVRKKPIFEQLSNTLEDH

SEQ ID NO: 78665 - protein, 34 aa, Artificial Sequence
  Cyclic GFR-binding peptide
  MOD_RES (7)..(7): Xaa is C or S
NDEGLEXVPTEEEPLPMVYYRIKPHQGQHEQLSN

SEQ ID NO: 78666 - protein, 31 aa, Artificial Sequence
  Cyclic GFR-binding peptide
  MOD_RES (5)..(6): Xaa is C or S
VPKPXXAPTKLRPVQVRKIDDSSNVIKKATV

SEQ ID NO: 78667 - protein, 32 aa, Artificial Sequence
  Cyclic GFR-binding peptide
  MOD_RES (3)..(4): Xaa is C or S
KPXXAPTQLRSVKVAKVDDSSNVIKEVQVNMV

SEQ ID NO: 78668 - protein, 29 aa, Artificial Sequence
  Cyclic GFR-binding peptide
TELRSVKMAKVDEYDKVVKEVQVEMVVEG

SEQ ID NO: 78669 - protein, 40 aa, Artificial Sequence; identical to SEQ ID NO: 28590
  Cyclic GFR-binding peptide
  MOD_RES (6)..(7)..(38)..(40): Xaa is C or S

SEQ ID NO: 78670 - protein, 31 aa, Artificial Sequence
  Cyclic GFR-binding peptide
  MOD_RES (30)..(30): Xaa is C or S
TQLSNITVQIMDDSSNVIIGEMSNMVVRAXG

SEQ ID NO: 78671 - protein, 31 aa, Artificial Sequence
  Cyclic GFR-binding peptide
  MOD_RES (28)..(30): Xaa is C or S
DLSNITIQIMVGRTPKVIGEMSMVVKSXKXS

SEQ ID NO: 78672 - protein, 32 aa, Artificial Sequence
  Cyclic GFR-binding peptide
PTEEEPLTMLYYRIKPHQGQHEQLSNFLQHNK

SEQ ID NO: 78673 - protein, 31 aa, Artificial Sequence
  Cyclic GFR-binding peptide
  MOD_RES (31)..(31): Xaa is C or S
LEPLPVVYYEIVRKKPIFEQLSNTLEDHLAX

SEQ ID NO: 78674 - protein, 35 aa, Artificial Sequence; identical to SEQ ID NO: 28602
  Cyclic GFR-binding peptide
  MOD_RES (3)..(4)..(35): Xaa is C or S

SEQ ID NO: 78675 - protein, 32 aa, Artificial Sequence
  Cyclic GFR-binding peptide
  MOD_RES (6)..(6): Xaa is C or S
VTKPTXAPTKLRSVKVAKVDDSSNVIKEVQVN

SEQ ID NO: 78676 - protein, 28 aa, Artificial Sequence
  Cyclic GFR-binding peptide
  MOD_RES (27)..(27): Xaa is C or S
RSVKVAKVDDSSNVIKEVQVNMVVRSXG

SEQ ID NO: 78677 - protein, 30 aa, Artificial Sequence
  Cyclic GFR-binding peptide
  MOD_RES (1)..(2): Xaa is C or S
XXVPQDLRPVQIRKIVGRTPKVKKATVMVV

SEQ ID NO: 78678 - protein, 38 aa, Artificial Sequence; identical to SEQ ID NO: 28605
  Cyclic GFR-binding peptide
  MOD_RES (1)..(38): Xaa is C or S

SEQ ID NO: 78679 - protein, 28 aa, Artificial Sequence
  Cyclic GFR-binding peptide
  MOD_RES (2)..(3): Xaa is C or S
AXXVPTELRSVKMAKVDENEKVVKEVQV

SEQ ID NO: 78680 - protein, 31 aa, Artificial Sequence
  Cyclic GFR-binding peptide
  MOD_RES (2)..(3): Xaa is C or S
PXXAPTKLRSVKVAKVDDSSNVIKEVQVNMV

SEQ ID NO: 78681 - protein, 39 aa, Artificial Sequence; identical to SEQ ID NO: 28607
  Cyclic GFR-binding peptide
  MOD_RES (5)..(6)..(37)..(39): Xaa is C or S

SEQ ID NO: 78682 - protein, 33 aa, Artificial Sequence
  Cyclic GFR-binding peptide
  MOD_RES (5)..(6): Xaa is C or S
SASPXXVSQDLRSVKIAKVIGKTPKIKEVQVMI

SEQ ID NO: 78683 - protein, 34 aa, Artificial Sequence; identical to SEQ ID NO: 28609
  Cyclic GFR-binding peptide
  MOD_RES (4)..(4): Xaa is C or S

SEQ ID NO: 78684 - protein, 25 aa, Artificial Sequence
  Cyclic GFR-binding peptide
PTELSNITMQIMDEYDKVVIGEMSE

SEQ ID NO: 78685 - protein, 38 aa, Artificial Sequence; identical to SEQ ID NO: 28611
  Cyclic GFR-binding peptide
  MOD_RES (3)..(4)..(36)..(38): Xaa is C or S

SEQ ID NO: 78686 - protein, 34 aa, Artificial Sequence
  Cyclic GFR-binding peptide
  MOD_RES (33)..(33): Xaa is C or S
VQLEPLTVLYYEIVRKKPIFEQLSNTLEDHLAXK

SEQ ID NO: 78687 - protein, 26 aa, Artificial Sequence
  Cyclic GFR-binding peptide
PTEEEPLPMVYYRIKPHQGQHEQLSN

SEQ ID NO: 78688 - protein, 33 aa, Artificial Sequence; identical to SEQ ID NO: 28617
  Cyclic GFR-binding peptide

SEQ ID NO: 78689 - protein, 28 aa, Artificial Sequence
  Cyclic GFR-binding peptide
QALRPVQIRKIVGRKPKVKKATVMIVRS

SEQ ID NO: 78690 - protein, 27 aa, Artificial Sequence
  Cyclic GFR-binding peptide
TELRPVQMRKIDEYDKVVKKATVEMVV

SEQ ID NO: 78691 - protein, 22 aa, Artificial Sequence
  Cyclic GFR-binding peptide
LSNITIQIMVGRTPKVIGEMSM

SEQ ID NO: 78692 - protein, 28 aa, Artificial Sequence
  Cyclic GFR-binding peptide
TKLSNITVQIMDDSSNVIIGEMSNMVVR

SEQ ID NO: 78693 - protein, 35 aa, Artificial Sequence; identical to SEQ ID NO: 28621
  Cyclic GFR-binding peptide
  MOD_RES (4)..(5): Xaa is C or S

SEQ ID NO: 78694 - protein, 26 aa, Artificial Sequence
  Cyclic GFR-binding peptide
ELRSVKMAKVDEYDKVVKEVQVEMVV

SEQ ID NO: 78695 - protein, 27 aa, Artificial Sequence
  Cyclic GFR-binding peptide
APTKLRPVQVRKIDDSSNVIKKATVNM

SEQ ID NO: 78696 - protein, 34 aa, Artificial Sequence; identical to SEQ ID NO: 28627
  Cyclic GFR-binding peptide
  MOD_RES (32)..(34): Xaa is C or S

SEQ ID NO: 78697 - protein, 28 aa, Artificial Sequence
  Cyclic GFR-binding peptide
QLEPLPVVYYEIVRKKPIFEQLSNTLED

SEQ ID NO: 78698 - protein, 27 aa, Artificial Sequence
  Cyclic GFR-binding peptide
  MOD_RES (2)..(2): Xaa is C or S
TXAPTKLRPVQVRKIDDSSNVIKKATV

SEQ ID NO: 78699 - protein, 32 aa, Artificial Sequence
  Cyclic GFR-binding peptide
  MOD_RES (3)..(4): Xaa is C or S
KAXXVPTELSNITMQIMDENEKVVIGEMSDMV

SEQ ID NO: 78700 - protein, 31 aa, Artificial Sequence; identical to SEQ ID NO: 28629
  Cyclic GFR-binding peptide
  MOD_RES (31)..(31): Xaa is C or S

SEQ ID NO: 78701 - protein, 37 aa, Artificial Sequence; identical to SEQ ID NO: 28630
  Cyclic GFR-binding peptide
  MOD_RES (1)..(2)..(34)..(36): Xaa is C or S

SEQ ID NO: 78702 - protein, 20 aa, Artificial Sequence
  Cyclic GFR-binding peptide
RPVQVRKIDDSSNVIKKATV

SEQ ID NO: 78703 - protein, 29 aa, Artificial Sequence
  Cyclic GFR-binding peptide
PSRVHHEPLPVVYYEYVRKKPKLEQLSNR

SEQ ID NO: 78704 - protein, 34 aa, Artificial Sequence; identical to SEQ ID NO: 28636
  Cyclic GFR-binding peptide
  MOD_RES (3)..(4): Xaa is C or S

SEQ ID NO: 78705 - protein, 25 aa, Artificial Sequence
  Cyclic GFR-binding peptide
TELRPVQMRKIDEYDKVVKKATVEM

SEQ ID NO: 78706 - protein, 29 aa, Artificial Sequence
  Cyclic GFR-binding peptide
  MOD_RES (3)..(4): Xaa is C or S
SPXXVSQDLRPVQIRKIIGKTPKIKKATV

SEQ ID NO: 78707 - protein, 38 aa, Artificial Sequence; identical to SEQ ID NO: 28646
  Cyclic GFR-binding peptide
  MOD_RES (5)..(6)..(38): Xaa is C or S

SEQ ID NO: 78708 - protein, 40 aa, Artificial Sequence; identical to SEQ ID NO: 28647
  Cyclic GFR-binding peptide
  MOD_RES (5)..(6)..(38)..(40): Xaa is C or S

SEQ ID NO: 78709 - protein, 32 aa, Artificial Sequence
  Cyclic GFR-binding peptide
  MOD_RES (4)..(5): Xaa is C or S
PKPXXAPTQLRSVKVAKVDDSSNVIKEVQVNM

SEQ ID NO: 78710 - protein, 33 aa, Artificial Sequence; identical to SEQ ID NO: 28650
  Cyclic GFR-binding peptide
  MOD_RES (2)..(3): Xaa is C or S

SEQ ID NO: 78711 - protein, 35 aa, Artificial Sequence; identical to SEQ ID NO: 28653
  Cyclic GFR-binding peptide
  MOD_RES (3)..(4): Xaa is C or S

SEQ ID NO: 78712 - protein, 33 aa, Artificial Sequence
  Cyclic GFR-binding peptide
  MOD_RES (5)..(6): Xaa is C or S
SAAPXXVPQALRPVQIRKIVGRKPKVKKATVMI

SEQ ID NO: 78713 - protein, 27 aa, Artificial Sequence
  Cyclic GFR-binding peptide
  MOD_RES (1)..(2): Xaa is C or S
XXAPTKLSNITVQIMDDSSNVIIGEMS

SEQ ID NO: 78714 - protein, 35 aa, Artificial Sequence; identical to SEQ ID NO: 28655
  Cyclic GFR-binding peptide
  MOD_RES (2)..(3)..(34): Xaa is C or S

SEQ ID NO: 78715 - protein, 30 aa, Artificial Sequence
  Cyclic GFR-binding peptide
  MOD_RES (1)..(2): Xaa is C or S
XXAPTKLRPVQVRKIDDSSNVIKKATVNMV

SEQ ID NO: 78716 - protein, 24 aa, Artificial Sequence
  Cyclic GFR-binding peptide
KLRPVQVRKIDDSSNVIKKATVNM

SEQ ID NO: 78717 - protein, 30 aa, Artificial Sequence; identical to SEQ ID NO: 28659
  Cyclic GFR-binding peptide

SEQ ID NO: 78718 - protein, 30 aa, Artificial Sequence
  Cyclic GFR-binding peptide
  MOD_RES (28)..(30): Xaa is C or S
LSNITMQIMDEYDKVVIGEMSEMVVEGXGX

SEQ ID NO: 78719 - protein, 34 aa, Artificial Sequence
  Cyclic GFR-binding peptide
  MOD_RES (31)..(33): Xaa is C or S
PTELRSVKMAKVDEYDKVVKEVQVEMVVEGXGXR

SEQ ID NO: 78720 - protein, 32 aa, Artificial Sequence
  Cyclic GFR-binding peptide
  MOD_RES (5)..(6): Xaa is C or S
SASPXXVSQDLSNITIQIMIGKTPKIIGEMSM

SEQ ID NO: 78721 - protein, 27 aa, Artificial Sequence
  Cyclic GFR-binding peptide
EPLTVLYYEYVRKKPKLEQLSNRLEEH

SEQ ID NO: 78722 - protein, 35 aa, Artificial Sequence
  Cyclic GFR-binding peptide
  MOD_RES (5)..(6): Xaa is C or S
VPKPXXAPTQLSNITVQIMDDSSNVIIGEMSNMVV

SEQ ID NO: 78723 - protein, 25 aa, Artificial Sequence
  Cyclic GFR-binding peptide
LSNITMQIMDEYDKVVIGEMSEMVV

SEQ ID NO: 78724 - protein, 34 aa, Artificial Sequence; identical to SEQ ID NO: 28664
  Cyclic GFR-binding peptide
  MOD_RES (1)..(32)..(34): Xaa is C or S

SEQ ID NO: 78725 - protein, 24 aa, Artificial Sequence
  Cyclic GFR-binding peptide
QDLRSVKIAKVVGRTPKVKEVQVM

SEQ ID NO: 78726 - protein, 32 aa, Artificial Sequence
  Cyclic GFR-binding peptide
  MOD_RES (3)..(4): Xaa is C or S
KPXXAPTQLSNITVQIMDDSSNVIIGEMSNMV

SEQ ID NO: 78727 - protein, 27 aa, Artificial Sequence
  Cyclic GFR-binding peptide
  MOD_RES (1)..(2): Xaa is C or S
XXAPTKLRPVQVRKIDDSSNVIKKATV

SEQ ID NO: 78728 - protein, 31 aa, Artificial Sequence
  Cyclic GFR-binding peptide
VHHEPLPVVYYEYVRKKPKLEQLSNRLEEHL

SEQ ID NO: 78729 - protein, 37 aa, Artificial Sequence; identical to SEQ ID NO: 28672
  Cyclic GFR-binding peptide
  MOD_RES (4)..(5)..(36): Xaa is C or S

SEQ ID NO: 78730 - protein, 32 aa, Artificial Sequence
  Cyclic GFR-binding peptide
  MOD_RES (4)..(4): Xaa is C or S
KPTXAPTKLRPVQVRKIDDSSNVIKKATVNMV

SEQ ID NO: 78731 - protein, 35 aa, Artificial Sequence; identical to SEQ ID NO: 28678
  Cyclic GFR-binding peptide
  MOD_RES (35)..(35): Xaa is C or S

SEQ ID NO: 78732 - protein, 39 aa, Artificial Sequence; identical to SEQ ID NO: 28679
  Cyclic GFR-binding peptide
  MOD_RES (5)..(6)..(38): Xaa is C or S

SEQ ID NO: 78733 - protein, 24 aa, Artificial Sequence
  Cyclic GFR-binding peptide
PTKLRPVQVRKIDDSSNVIKKATV

SEQ ID NO: 78734 - protein, 30 aa, Artificial Sequence
  Cyclic GFR-binding peptide
  MOD_RES (4)..(5): Xaa is C or S
ASPXXVPQDLSNITIQIMVGRTPKVIGEMS

SEQ ID NO: 78735 - protein, 40 aa, Artificial Sequence; identical to SEQ ID NO: 28681
  Cyclic GFR-binding peptide
  MOD_RES (37)..(39): Xaa is C or S

SEQ ID NO: 78736 - protein, 33 aa, Artificial Sequence; identical to SEQ ID NO: 28682
  Cyclic GFR-binding peptide
  MOD_RES (1)..(2): Xaa is C or S

SEQ ID NO: 78737 - protein, 34 aa, Artificial Sequence; identical to SEQ ID NO: 28684
  Cyclic GFR-binding peptide
  MOD_RES (2)..(3)..(34): Xaa is C or S

SEQ ID NO: 78738 - protein, 29 aa, Artificial Sequence
  Cyclic GFR-binding peptide
  MOD_RES (27)..(29): Xaa is C or S
RSVKMAKVDENEKVVKEVQVDMVVEGXGX

SEQ ID NO: 78739 - protein, 29 aa, Artificial Sequence
  Cyclic GFR-binding peptide
  MOD_RES (27)..(29): Xaa is C or S
LSNITIQIMVGRTPKVIGEMSMVVKSXKX

SEQ ID NO: 78740 - protein, 26 aa, Artificial Sequence
  Cyclic GFR-binding peptide
  MOD_RES (1)..(1): Xaa is C or S
XVSQDLSNITIQIMIGKTPKIIGEMS

SEQ ID NO: 78741 - protein, 31 aa, Artificial Sequence
  Cyclic GFR-binding peptide
  MOD_RES (6)..(6): Xaa is C or S
VTKPTXAPTKLRSVKVAKVDDSSNVIKEVQV

SEQ ID NO: 78742 - protein, 23 aa, Artificial Sequence
  Cyclic GFR-binding peptide
RPVQMRKIDENEKVVKKATVDMV

SEQ ID NO: 78743 - protein, 29 aa, Artificial Sequence
  Cyclic GFR-binding peptide
  MOD_RES (1)..(2): Xaa is C or S
XXVPQDLRPVQIRKIVGRTPKVKKATVMV

SEQ ID NO: 78744 - protein, 28 aa, Artificial Sequence
  Cyclic GFR-binding peptide
TQVQLEPLTVLYYEIVRKKPIFEQLSNT

SEQ ID NO: 78745 - protein, 30 aa, Artificial Sequence
  Cyclic GFR-binding peptide
  MOD_RES (2)..(3): Xaa is C or S
AXXVPTELRSVKMAKVDENEKVVKEVQVDM

SEQ ID NO: 78746 - protein, 28 aa, Artificial Sequence
  Cyclic GFR-binding peptide
  MOD_RES (3)..(3): Xaa is C or S
PTXAPTKLRPVQVRKIDDSSNVIKKATV

SEQ ID NO: 78747 - protein, 30 aa, Artificial Sequence
  Cyclic GFR-binding peptide
  MOD_RES (3)..(4): Xaa is C or S
KPXXAPTQLSNITVQIMDDSSNVIIGEMSN

SEQ ID NO: 78748 - protein, 34 aa, Artificial Sequence
  Cyclic GFR-binding peptide
  MOD_RES (4)..(5): Xaa is C or S
ASPXXVPQDLSNITIQIMVGRTPKVIGEMSMVVK

SEQ ID NO: 78749 - protein, 35 aa, Artificial Sequence
  Cyclic GFR-binding peptide
  MOD_RES (6)..(6): Xaa is C or S
DEGLEXVPTEEEPLPMVYYRIKPHQGQHEQLSNFL

SEQ ID NO: 78750 - protein, 42 aa, Artificial Sequence; identical to SEQ ID NO: 28698
  Cyclic GFR-binding peptide
  MOD_RES (7)..(39)..(41): Xaa is C or S

SEQ ID NO: 78751 - protein, 33 aa, Artificial Sequence
  Cyclic GFR-binding peptide
  MOD_RES (5)..(6): Xaa is C or S
IPKAXXVPTELSNITMQIMDENEKVVIGEMSDM

SEQ ID NO: 78752 - protein, 33 aa, Artificial Sequence
  Cyclic GFR-binding peptide
  MOD_RES (5)..(6): Xaa is C or S
IPKAXXVPTELRSVKMAKVDENEKVVKEVQVDM

SEQ ID NO: 78753 - protein, 28 aa, Artificial Sequence
  Cyclic GFR-binding peptide
PTQLRPVQVRKIDDSSNVIKKATVNMVV

SEQ ID NO: 78754 - protein, 34 aa, Artificial Sequence
  Cyclic GFR-binding peptide
  MOD_RES (4)..(5): Xaa is C or S
ASPXXVSQDLRPVQIRKIIGKTPKIKKATVMIVK

SEQ ID NO: 78755 - protein, 40 aa, Artificial Sequence; identical to SEQ ID NO: 28702
  Cyclic GFR-binding peptide
  MOD_RES (4)..(4): Xaa is C or S

SEQ ID NO: 78756 - protein, 20 aa, Artificial Sequence
  Cyclic GFR-binding peptide
SNITVQIMDDSSNVIIGEMS

SEQ ID NO: 78757 - protein, 33 aa, Artificial Sequence
  Cyclic GFR-binding peptide
  MOD_RES (6)..(7): Xaa is C or S
SIPKAXXVPTELRSVKMAKVDEYDKVVKEVQVE

SEQ ID NO: 78758 - protein, 33 aa, Artificial Sequence; identical to SEQ ID NO: 28703
  Cyclic GFR-binding peptide
  MOD_RES (1)..(2)..(33): Xaa is C or S

SEQ ID NO: 78759 - protein, 27 aa, Artificial Sequence
  Cyclic GFR-binding peptide
DLRSVKIAKVIGKTPKIKEVQVMIVKS

SEQ ID NO: 78760 - protein, 38 aa, Artificial Sequence; identical to SEQ ID NO: 28704
  Cyclic GFR-binding peptide
  MOD_RES (3)..(4)..(35)..(37): Xaa is C or S

SEQ ID NO: 78761 - protein, 29 aa, Artificial Sequence
  Cyclic GFR-binding peptide
PQALRPVQIRKIVGRKPKVKKATVMIVRS

SEQ ID NO: 78762 - protein, 28 aa, Artificial Sequence
  Cyclic GFR-binding peptide
  MOD_RES (1)..(1): Xaa is C or S
XVSQDLRPVQIRKIIGKTPKIKKATVMI

SEQ ID NO: 78763 - protein, 39 aa, Artificial Sequence; identical to SEQ ID NO: 28708
  Cyclic GFR-binding peptide
  MOD_RES (3)..(37)..(39): Xaa is C or S

SEQ ID NO: 78764 - protein, 32 aa, Artificial Sequence
  Cyclic GFR-binding peptide
  MOD_RES (3)..(4): Xaa is C or S
SPXXVPQDLRSVKIAKVVGRTPKVKEVQVMVV

SEQ ID NO: 78765 - protein, 33 aa, Artificial Sequence
  Cyclic GFR-binding peptide
  MOD_RES (2)..(2): Xaa is C or S
EXVPTEEEPLTMLYYRIKPHQGQHEQLSNFLQH

SEQ ID NO: 78766 - protein, 32 aa, Artificial Sequence
  Cyclic GFR-binding peptide
  MOD_RES (31)..(31): Xaa is C or S
HEPLPVVYYEYVRKKPKLEQLSNRLEEHLEXA

SEQ ID NO: 78767 - protein, 27 aa, Artificial Sequence
  Cyclic GFR-binding peptide
SRVHHEPLTVLYYEYVRKKPKLEQLSN

SEQ ID NO: 78768 - protein, 31 aa, Artificial Sequence
  Cyclic GFR-binding peptide
  MOD_RES (3)..(4): Xaa is C or S
KAXXVPTELRPVQMRKIDENEKVVKKATVDM

SEQ ID NO: 78769 - protein, 29 aa, Artificial Sequence
  Cyclic GFR-binding peptide
PTQVQLEPLTVLYYEIVRKKPIFEQLSNT

SEQ ID NO: 78770 - protein, 30 aa, Artificial Sequence
  Cyclic GFR-binding peptide
  MOD_RES (29)..(29): Xaa is C or S
QDLSNITIQIMVGRTPKVIGEMSMVVKSXK

SEQ ID NO: 78771 - protein, 37 aa, Artificial Sequence; identical to SEQ ID NO: 28713
  Cyclic GFR-binding peptide
  MOD_RES (4)..(4): Xaa is C or S

SEQ ID NO: 78772 - protein, 31 aa, Artificial Sequence
  Cyclic GFR-binding peptide
  MOD_RES (1)..(2): Xaa is C or S
XXVPTELRPVQMRKIDENEKVVKKATVDMVV

SEQ ID NO: 78773 - protein, 26 aa, Artificial Sequence
  Cyclic GFR-binding peptide
VPTELSNITMQIMDENEKVVIGEMSD

SEQ ID NO: 78774 - protein, 32 aa, Artificial Sequence; identical to SEQ ID NO: 28716
  Cyclic GFR-binding peptide
  MOD_RES (32)..(32): Xaa is C or S

SEQ ID NO: 78775 - protein, 38 aa, Artificial Sequence; identical to SEQ ID NO: 28717
  Cyclic GFR-binding peptide
  MOD_RES (6)..(7): Xaa is C or S

SEQ ID NO: 78776 - protein, 21 aa, Artificial Sequence
  Cyclic GFR-binding peptide
SNITVQIMDDSSNVIIGEMSN

SEQ ID NO: 78777 - protein, 40 aa, Artificial Sequence; identical to SEQ ID NO: 28720
  Cyclic GFR-binding peptide
  MOD_RES (7)..(39): Xaa is C or S

SEQ ID NO: 78778 - protein, 36 aa, Artificial Sequence; identical to SEQ ID NO: 28721
  Cyclic GFR-binding peptide
  MOD_RES (1)..(2)..(34)..(36): Xaa is C or S

SEQ ID NO: 78779 - protein, 31 aa, Artificial Sequence
  Cyclic GFR-binding peptide
  MOD_RES (29)..(31): Xaa is C or S
ELSNITMQIMDEYDKVVIGEMSEMVVEGXGX

SEQ ID NO: 78780 - protein, 34 aa, Artificial Sequence
  Cyclic GFR-binding peptide
  MOD_RES (32)..(34): Xaa is C or S
HHEPLPVVYYEYVRKKPKLEQLSNRLEEHLEXAX

SEQ ID NO: 78781 - protein, 38 aa, Artificial Sequence; identical to SEQ ID NO: 28722
  Cyclic GFR-binding peptide
  MOD_RES (6)..(7): Xaa is C or S

SEQ ID NO: 78782 - protein, 28 aa, Artificial Sequence
  Cyclic GFR-binding peptide
  MOD_RES (27)..(27): Xaa is C or S
LRSVKIAKVVGRKPKVKEVQVMIVRSXK

SEQ ID NO: 78783 - protein, 36 aa, Artificial Sequence; identical to SEQ ID NO: 28725
  Cyclic GFR-binding peptide
  MOD_RES (2)..(3)..(35): Xaa is C or S

SEQ ID NO: 78784 - protein, 26 aa, Artificial Sequence
  Cyclic GFR-binding peptide
PTQLRPVQVRKIDDSSNVIKKATVNM

SEQ ID NO: 78785 - protein, 30 aa, Artificial Sequence
  Cyclic GFR-binding peptide
  MOD_RES (2)..(3): Xaa is C or S
PXXVSQDLRPVQIRKIIGKTPKIKKATVMI

SEQ ID NO: 78786 - protein, 24 aa, Artificial Sequence
  Cyclic GFR-binding peptide
EPLPMVYYRIKPHQGQHEQLSNFL

SEQ ID NO: 78787 - protein, 30 aa, Artificial Sequence
  Cyclic GFR-binding peptide
  MOD_RES (27)..(29): Xaa is C or S
RSVKVAKVDDSSNVIKEVQVNMVVRSXGXH

SEQ ID NO: 78788 - protein, 34 aa, Artificial Sequence
  Cyclic GFR-binding peptide
  MOD_RES (33)..(33): Xaa is C or S
PTEEEPLPMVYYRIKPHQGQHEQLSNFLQHNKXE

SEQ ID NO: 78789 - protein, 36 aa, Artificial Sequence; identical to SEQ ID NO: 28735
  Cyclic GFR-binding peptide
  MOD_RES (4)..(5)..(36): Xaa is C or S

SEQ ID NO: 78790 - protein, 29 aa, Artificial Sequence
  Cyclic GFR-binding peptide
  MOD_RES (1)..(1): Xaa is C or S
XAPTQLRPVQVRKIDDSSNVIKKATVNMV

SEQ ID NO: 78791 - protein, 33 aa, Artificial Sequence; identical to SEQ ID NO: 28738
  Cyclic GFR-binding peptide
  MOD_RES (1)..(2)..(33): Xaa is C or S

SEQ ID NO: 78792 - protein, 33 aa, Artificial Sequence
  Cyclic GFR-binding peptide
  MOD_RES (4)..(5): Xaa is C or S
ASPXXVSQDLSNITIQIMIGKTPKIIGEMSMIV

SEQ ID NO: 78793 - protein, 29 aa, Artificial Sequence
  Cyclic GFR-binding peptide
  MOD_RES (28)..(28): Xaa is C or S
DLSNITIQIMVGRTPKVIGEMSMVVKSXK

SEQ ID NO: 78794 - protein, 33 aa, Artificial Sequence; identical to SEQ ID NO: 28740
  Cyclic GFR-binding peptide
  MOD_RES (2)..(3): Xaa is C or S

SEQ ID NO: 78795 - protein, 41 aa, Artificial Sequence; identical to SEQ ID NO: 28742
  Cyclic GFR-binding peptide
  MOD_RES (6)..(7)..(39)..(41): Xaa is C or S

SEQ ID NO: 78796 - protein, 36 aa, Artificial Sequence; identical to SEQ ID NO: 28745
  Cyclic GFR-binding peptide
  MOD_RES (4)..(5)..(36): Xaa is C or S

SEQ ID NO: 78797 - protein, 32 aa, Artificial Sequence
  Cyclic GFR-binding peptide
  MOD_RES (5)..(6): Xaa is C or S
SASPXXVPQDLSNITIQIMVGRTPKVIGEMSM

SEQ ID NO: 78798 - protein, 33 aa, Artificial Sequence; identical to SEQ ID NO: 28747
  Cyclic GFR-binding peptide
  MOD_RES (32)..(32): Xaa is C or S

SEQ ID NO: 78799 - protein, 29 aa, Artificial Sequence
  Cyclic GFR-binding peptide
  MOD_RES (28)..(28): Xaa is C or S
LSNITMQIMDENEKVVIGEMSDMVVEGXG

SEQ ID NO: 78800 - protein, 27 aa, Artificial Sequence
  Cyclic GFR-binding peptide
  MOD_RES (27)..(27): Xaa is C or S
LRSVKIAKVVGRTPKVKEVQVMVVKSX

SEQ ID NO: 78801 - protein, 28 aa, Artificial Sequence
  Cyclic GFR-binding peptide
SRVHHEPLPVVYYEYVRKKPKLEQLSNR

SEQ ID NO: 78802 - protein, 26 aa, Artificial Sequence
  Cyclic GFR-binding peptide
LRPVQMRKIDENEKVVKKATVDMVVE

SEQ ID NO: 78803 - protein, 40 aa, Artificial Sequence; identical to SEQ ID NO: 28752
  Cyclic GFR-binding peptide
  MOD_RES (6)..(40): Xaa is C or S

SEQ ID NO: 78804 - protein, 34 aa, Artificial Sequence
  Cyclic GFR-binding peptide
  MOD_RES (6)..(7): Xaa is C or S
SIPKAXXVPTELRSVKMAKVDEYDKVVKEVQVEM

SEQ ID NO: 78805 - protein, 21 aa, Artificial Sequence
  Cyclic GFR-binding peptide
LRSVKIAKVVGRKPKVKEVQV

SEQ ID NO: 78806 - protein, 41 aa, Artificial Sequence; identical to SEQ ID NO: 28755
  Cyclic GFR-binding peptide
  MOD_RES (5)..(6)..(38)..(40): Xaa is C or S

SEQ ID NO: 78807 - protein, 27 aa, Artificial Sequence
  Cyclic GFR-binding peptide
LSNITMQIMDEYDKVVIGEMSEMVVEG

SEQ ID NO: 78808 - protein, 31 aa, Artificial Sequence; identical to SEQ ID NO: 28756
  Cyclic GFR-binding peptide
  MOD_RES (31)..(31): Xaa is C or S

SEQ ID NO: 78809 - protein, 36 aa, Artificial Sequence; identical to SEQ ID NO: 28761
  Cyclic GFR-binding peptide
  MOD_RES (3)..(4)..(35): Xaa is C or S

SEQ ID NO: 78810 - protein, 30 aa, Artificial Sequence
  Cyclic GFR-binding peptide
  MOD_RES (1)..(2): Xaa is C or S
XXVSQDLRSVKIAKVIGKTPKIKEVQVMIV

SEQ ID NO: 78811 - protein, 34 aa, Artificial Sequence
  Cyclic GFR-binding peptide
  MOD_RES (3)..(3): Xaa is C or S
VKXQPSRVHHEPLPVVYYEYVRKKPKLEQLSNRL

SEQ ID NO: 78812 - protein, 34 aa, Artificial Sequence; identical to SEQ ID NO: 28768
  Cyclic GFR-binding peptide
  MOD_RES (2)..(3): Xaa is C or S

SEQ ID NO: 78813 - protein, 21 aa, Artificial Sequence
  Cyclic GFR-binding peptide
RPVQIRKIVGRTPKVKKATVM

SEQ ID NO: 78814 - protein, 31 aa, Artificial Sequence
  Cyclic GFR-binding peptide
  MOD_RES (28)..(30): Xaa is C or S
LRSVKVAKVDDSSNVIKEVQVNMVVRAXGXH

SEQ ID NO: 78815 - protein, 31 aa, Artificial Sequence
  Cyclic GFR-binding peptide
  MOD_RES (5)..(6): Xaa is C or S
VPKPXXAPTKLSNITVQIMDDSSNVIIGEMS

SEQ ID NO: 78816 - protein, 29 aa, Artificial Sequence
  Cyclic GFR-binding peptide
  MOD_RES (26)..(28): Xaa is C or S
RSVKIAKVIGKTPKIKEVQVMIVKSXKXS

SEQ ID NO: 78817 - protein, 32 aa, Artificial Sequence
  Cyclic GFR-binding peptide
  MOD_RES (30)..(32): Xaa is C or S
TQLSNITVQIMDDSSNVIIGEMSNMVVRAXGX

SEQ ID NO: 78818 - protein, 34 aa, Artificial Sequence
  Cyclic GFR-binding peptide
  MOD_RES (34)..(34): Xaa is C or S
RVHHEPLPVVYYEYVRKKPKLEQLSNRLEEHLEX

SEQ ID NO: 78819 - protein, 28 aa, Artificial Sequence
  Cyclic GFR-binding peptide
APTKLRSVKVAKVDDSSNVIKEVQVNMV

SEQ ID NO: 78820 - protein, 32 aa, Artificial Sequence
  Cyclic GFR-binding peptide
PSRVHHEPLTVLYYEYVRKKPKLEQLSNRLEE

SEQ ID NO: 78821 - protein, 30 aa, Artificial Sequence
  Cyclic GFR-binding peptide
  MOD_RES (2)..(3): Xaa is C or S
PXXVSQDLRSVKIAKVIGKTPKIKEVQVMI

SEQ ID NO: 78822 - protein, 32 aa, Artificial Sequence
  Cyclic GFR-binding peptide
  MOD_RES (2)..(3): Xaa is C or S
PXXVPQALRSVKIAKVVGRKPKVKEVQVMIVR

SEQ ID NO: 78823 - protein, 30 aa, Artificial Sequence
  Cyclic GFR-binding peptide
  MOD_RES (1)..(1): Xaa is C or S
XVPTELRSVKMAKVDEYDKVVKEVQVEMVV

SEQ ID NO: 78824 - protein, 30 aa, Artificial Sequence
  Cyclic GFR-binding peptide
  MOD_RES (28)..(30): Xaa is C or S
ALSNITIQIMVGRKPKVIGEMSMIVRSXKX

SEQ ID NO: 78825 - protein, 34 aa, Artificial Sequence; identical to SEQ ID NO: 28773
  Cyclic GFR-binding peptide
  MOD_RES (1)..(33): Xaa is C or S

SEQ ID NO: 78826 - protein, 23 aa, Artificial Sequence
  Cyclic GFR-binding peptide
LRSVKMAKVDEYDKVVKEVQVEM

SEQ ID NO: 78827 - protein, 40 aa, Artificial Sequence; identical to SEQ ID NO: 28775
  Cyclic GFR-binding peptide
  MOD_RES (5)..(5): Xaa is C or S

SEQ ID NO: 78828 - protein, 37 aa, Artificial Sequence
  Cyclic GFR-binding peptide
  MOD_RES (4)..(4): Xaa is C or S
NVQXRPTQVQLEPLTVLYYEIVRKKPIFEQLSNTLED

SEQ ID NO: 78829 - protein, 35 aa, Artificial Sequence
  Cyclic GFR-binding peptide
  MOD_RES (1)..(2)..(33)..(35): Xaa is C or S
XXVSQDLSNITIQIMIGKTPKIIGEMSMIVKSXKX

SEQ ID NO: 78830 - protein, 33 aa, Artificial Sequence
  Cyclic GFR-binding peptide
  MOD_RES (31)..(33): Xaa is C or S
EEEPLPMVYYRIKPHQGQHEQLSNFLQHNKXEX

SEQ ID NO: 78831 - protein, 32 aa, Artificial Sequence; identical to SEQ ID NO: 28786
  Cyclic GFR-binding peptide
  MOD_RES (32)..(32): Xaa is C or S

SEQ ID NO: 78832 - protein, 36 aa, Artificial Sequence; identical to SEQ ID NO: 28785
  Cyclic GFR-binding peptide
  MOD_RES (3)..(4)..(36): Xaa is C or S

SEQ ID NO: 78833 - protein, 33 aa, Artificial Sequence
  Cyclic GFR-binding peptide
  MOD_RES (4)..(5): Xaa is C or S
ASPXXVSQDLRSVKIAKVIGKTPKIKEVQVMIV

SEQ ID NO: 78834 - protein, 35 aa, Artificial Sequence; identical to SEQ ID NO: 28787
  Cyclic GFR-binding peptide
  MOD_RES (1)..(2)..(33)..(35): Xaa is C or S

SEQ ID NO: 78835 - protein, 37 aa, Artificial Sequence; identical to SEQ ID NO: 28789
  Cyclic GFR-binding peptide
  MOD_RES (4)..(5)..(37): Xaa is C or S

SEQ ID NO: 78836 - protein, 35 aa, Artificial Sequence; identical to SEQ ID NO: 28790
  Cyclic GFR-binding peptide
  MOD_RES (3)..(4)..(35): Xaa is C or S

SEQ ID NO: 78837 - protein, 36 aa, Artificial Sequence; identical to SEQ ID NO: 28791
  Cyclic GFR-binding peptide
  MOD_RES (1)..(33)..(35): Xaa is C or S

SEQ ID NO: 78838 - protein, 29 aa, Artificial Sequence
  Cyclic GFR-binding peptide
PTKLSNITVQIMDDSSNVIIGEMSNMVVR

SEQ ID NO: 78839 - protein, 23 aa, Artificial Sequence
  Cyclic GFR-binding peptide
LSNITIQIMIGKTPKIIGEMSMI

SEQ ID NO: 78840 - protein, 32 aa, Artificial Sequence
  Cyclic GFR-binding peptide
  MOD_RES (31)..(31): Xaa is C or S
PTQLRSVKVAKVDDSSNVIKEVQVNMVVRAXG

SEQ ID NO: 78841 - protein, 34 aa, Artificial Sequence
  Cyclic GFR-binding peptide
  MOD_RES (6)..(7): Xaa is C or S
TVPKPXXAPTQLRPVQVRKIDDSSNVIKKATVNM

SEQ ID NO: 78842 - protein, 35 aa, Artificial Sequence; identical to SEQ ID NO: 28800
  Cyclic GFR-binding peptide
  MOD_RES (3)..(4): Xaa is C or S

SEQ ID NO: 78843 - protein, 25 aa, Artificial Sequence
  Cyclic GFR-binding peptide
SQDLRSVKIAKVIGKTPKIKEVQVM

SEQ ID NO: 78844 - protein, 33 aa, Artificial Sequence
  Cyclic GFR-binding peptide
  MOD_RES (3)..(4): Xaa is C or S
KAXXVPTELSNITMQIMDEYDKVVIGEMSEMVV

SEQ ID NO: 78845 - protein, 35 aa, Artificial Sequence; identical to SEQ ID NO: 28803
  Cyclic GFR-binding peptide
  MOD_RES (4)..(5): Xaa is C or S

SEQ ID NO: 78846 - protein, 37 aa, Artificial Sequence; identical to SEQ ID NO: 28805
  Cyclic GFR-binding peptide
  MOD_RES (4)..(5)..(37): Xaa is C or S

SEQ ID NO: 78847 - protein, 33 aa, Artificial Sequence
  Cyclic GFR-binding peptide
  MOD_RES (30)..(32): Xaa is C or S
PQALRPVQIRKIVGRKPKVKKATVMIVRSXKXS

SEQ ID NO: 78848 - protein, 38 aa, Artificial Sequence; identical to SEQ ID NO: 28807
  Cyclic GFR-binding peptide
  MOD_RES (2)..(3)..(35)..(37): Xaa is C or S

SEQ ID NO: 78849 - protein, 33 aa, Artificial Sequence
  Cyclic GFR-binding peptide
  MOD_RES (31)..(33): Xaa is C or S
LEPLPVVYYEIVRKKPIFEQLSNTLEDHLAXKX

SEQ ID NO: 78850 - protein, 30 aa, Artificial Sequence
  Cyclic GFR-binding peptide
  MOD_RES (3)..(3): Xaa is C or S
PTXAPTKLSNITVQIMDDSSNVIIGEMSNM

SEQ ID NO: 78851 - protein, 31 aa, Artificial Sequence
  Cyclic GFR-binding peptide
  MOD_RES (4)..(5): Xaa is C or S
ASPXXVPQDLSNITIQIMVGRTPKVIGEMSM

SEQ ID NO: 78852 - protein, 30 aa, Artificial Sequence
  Cyclic GFR-binding peptide
  MOD_RES (1)..(1): Xaa is C or S
XVSQDLSNITIQIMIGKTPKIIGEMSMIVK

SEQ ID NO: 78853 - protein, 22 aa, Artificial Sequence
  Cyclic GFR-binding peptide
RPVQVRKIDDSSNVIKKATVNM

SEQ ID NO: 78854 - protein, 31 aa, Artificial Sequence
  Cyclic GFR-binding peptide
  MOD_RES (30)..(30): Xaa is C or S
PQALSNITIQIMVGRKPKVIGEMSMIVRSXK

SEQ ID NO: 78855 - protein, 27 aa, Artificial Sequence
  Cyclic GFR-binding peptide
  MOD_RES (1)..(1): Xaa is C or S
XVPTELRPVQMRKIDEYDKVVKKATVE

SEQ ID NO: 78856 - protein, 41 aa, Artificial Sequence; identical to SEQ ID NO: 28814
  Cyclic GFR-binding peptide
  MOD_RES (3)..(40): Xaa is C or S

SEQ ID NO: 78857 - protein, 35 aa, Artificial Sequence; identical to SEQ ID NO: 28815
  Cyclic GFR-binding peptide
  MOD_RES (5)..(5): Xaa is C or S

SEQ ID NO: 78858 - protein, 29 aa, Artificial Sequence
  Cyclic GFR-binding peptide
  MOD_RES (2)..(2): Xaa is C or S
TXAPTKLRPVQVRKIDDSSNVIKKATVNM

SEQ ID NO: 78859 - protein, 32 aa, Artificial Sequence
  Cyclic GFR-binding peptide
  MOD_RES (6)..(7): Xaa is C or S
TVPKPXXAPTQLSNITVQIMDDSSNVIIGEMS

SEQ ID NO: 78860 - protein, 38 aa, Artificial Sequence; identical to SEQ ID NO: 28820
  Cyclic GFR-binding peptide
  MOD_RES (7)..(7): Xaa is C or S

SEQ ID NO: 78861 - protein, 32 aa, Artificial Sequence
  Cyclic GFR-binding peptide
  MOD_RES (31)..(31): Xaa is C or S
PTKLRSVKVAKVDDSSNVIKEVQVNMVVRSXG

SEQ ID NO: 78862 - protein, 29 aa, Artificial Sequence
  Cyclic GFR-binding peptide
VPTEEEPLTMLYYRIKPHQGQHEQLSNFL

SEQ ID NO: 78863 - protein, 27 aa, Artificial Sequence
  Cyclic GFR-binding peptide
VPTELRPVQMRKIDEYDKVVKKATVEM

SEQ ID NO: 78864 - protein, 38 aa, Artificial Sequence; identical to SEQ ID NO: 28829
  Cyclic GFR-binding peptide
  MOD_RES (3)..(3): Xaa is C or S

SEQ ID NO: 78865 - protein, 36 aa, Artificial Sequence
  Cyclic GFR-binding peptide
  MOD_RES (6)..(6): Xaa is C or S
DEGLEXVPTEEEPLTMLYYRIKPHQGQHEQLSNFLQ

SEQ ID NO: 78866 - protein, 33 aa, Artificial Sequence
  Cyclic GFR-binding peptide
  MOD_RES (5)..(6): Xaa is C or S
SAAPXXVPQALRSVKIAKVVGRKPKVKEVQVMI

SEQ ID NO: 78867 - protein, 31 aa, Artificial Sequence
  Cyclic GFR-binding peptide
  MOD_RES (5)..(6): Xaa is C or S
SAAPXXVPQALSNITIQIMVGRKPKVIGEMS

SEQ ID NO: 78868 - protein, 40 aa, Artificial Sequence; identical to SEQ ID NO: 28832
  Cyclic GFR-binding peptide
  MOD_RES (6)..(7)..(38)..(40): Xaa is C or S

SEQ ID NO: 78869 - protein, 27 aa, Artificial Sequence
  Cyclic GFR-binding peptide
DLSNITIQIMIGKTPKIIGEMSMIVKS

SEQ ID NO: 78870 - protein, 35 aa, Artificial Sequence; identical to SEQ ID NO: 28836
  Cyclic GFR-binding peptide
  MOD_RES (1)..(32)..(34): Xaa is C or S

SEQ ID NO: 78871 - protein, 30 aa, Artificial Sequence
  Cyclic GFR-binding peptide
  MOD_RES (3)..(4): Xaa is C or S
SPXXVPQDLRSVKIAKVVGRTPKVKEVQVM

SEQ ID NO: 78872 - protein, 34 aa, Artificial Sequence
  Cyclic GFR-binding peptide
  MOD_RES (6)..(7): Xaa is C or S
ASAAPXXVPQALSNITIQIMVGRKPKVIGEMSMI

SEQ ID NO: 78873 - protein, 25 aa, Artificial Sequence
  Cyclic GFR-binding peptide
ELRSVKMAKVDEYDKVVKEVQVEMV

SEQ ID NO: 78874 - protein, 37 aa, Artificial Sequence; identical to SEQ ID NO: 28845
  Cyclic GFR-binding peptide
  MOD_RES (1)..(1): Xaa is C or S

SEQ ID NO: 78875 - protein, 32 aa, Artificial Sequence
  Cyclic GFR-binding peptide
RPTQVQLEPLTVLYYEIVRKKPIFEQLSNTLE

SEQ ID NO: 78876 - protein, 35 aa, Artificial Sequence; identical to SEQ ID NO: 28847
  Cyclic GFR-binding peptide
  MOD_RES (4)..(5): Xaa is C or S

SEQ ID NO: 78877 - protein, 27 aa, Artificial Sequence
  Cyclic GFR-binding peptide
  MOD_RES (1)..(1): Xaa is C or S
XVSQDLSNITIQIMIGKTPKIIGEMSM

SEQ ID NO: 78878 - protein, 28 aa, Artificial Sequence
  Cyclic GFR-binding peptide
  MOD_RES (28)..(28): Xaa is C or S
ALRPVQIRKIVGRKPKVKKATVMIVRSX

SEQ ID NO: 78879 - protein, 20 aa, Artificial Sequence
  Cyclic GFR-binding peptide
SNITVQIMDDSSNVIIGEMS

SEQ ID NO: 78880 - protein, 24 aa, Artificial Sequence
  Cyclic GFR-binding peptide
KLRSVKVAKVDDSSNVIKEVQVNM

SEQ ID NO: 78881 - protein, 29 aa, Artificial Sequence
  Cyclic GFR-binding peptide
  MOD_RES (3)..(3): Xaa is C or S
PTXAPTKLRPVQVRKIDDSSNVIKKATVN

SEQ ID NO: 78882 - protein, 28 aa, Artificial Sequence
  Cyclic GFR-binding peptide
  MOD_RES (26)..(28): Xaa is C or S
SNITIQIMVGRTPKVIGEMSMVVKSXKX

SEQ ID NO: 78883 - protein, 28 aa, Artificial Sequence
  Cyclic GFR-binding peptide
  MOD_RES (1)..(2): Xaa is C or S
XXAPTKLRPVQVRKIDDSSNVIKKATVN

SEQ ID NO: 78884 - protein, 37 aa, Artificial Sequence
  Cyclic GFR-binding peptide
  MOD_RES (34)..(36): Xaa is C or S
RVHHEPLTVLYYEYVRKKPKLEQLSNRLEEHLEXAXA

SEQ ID NO: 78885 - protein, 21 aa, Artificial Sequence
  Cyclic GFR-binding peptide
LRSVKMAKVDEYDKVVKEVQV

SEQ ID NO: 78886 - protein, 25 aa, Artificial Sequence
  Cyclic GFR-binding peptide
LRPVQIRKIVGRTPKVKKATVMVVK

SEQ ID NO: 78887 - protein, 27 aa, Artificial Sequence
  Cyclic GFR-binding peptide
  MOD_RES (26)..(26): Xaa is C or S
RPVQIRKIVGRKPKVKKATVMIVRSXK

SEQ ID NO: 78888 - protein, 25 aa, Artificial Sequence
  Cyclic GFR-binding peptide
PTKLRPVQVRKIDDSSNVIKKATVN

SEQ ID NO: 78889 - protein, 29 aa, Artificial Sequence
  Cyclic GFR-binding peptide
APTQLRSVKVAKVDDSSNVIKEVQVNMVV

SEQ ID NO: 78890 - protein, 38 aa, Artificial Sequence; identical to SEQ ID NO: 28868
  Cyclic GFR-binding peptide
  MOD_RES (36)..(38): Xaa is C or S

SEQ ID NO: 78891 - protein, 30 aa, Artificial Sequence
  Cyclic GFR-binding peptide
  MOD_RES (29)..(29): Xaa is C or S
ELRPVQMRKIDEYDKVVKKATVEMVVEGXG

SEQ ID NO: 78892 - protein, 31 aa, Artificial Sequence
  Cyclic GFR-binding peptide
  MOD_RES (4)..(5): Xaa is C or S
ASPXXVSQDLRSVKIAKVIGKTPKIKEVQVM

SEQ ID NO: 78893 - protein, 36 aa, Artificial Sequence
  Cyclic GFR-binding peptide
  MOD_RES (33)..(35): Xaa is C or S
VQLEPLPVVYYEIVRKKPIFEQLSNTLEDHLAXKXE

SEQ ID NO: 78894 - protein, 39 aa, Artificial Sequence; identical to SEQ ID NO: 28876
  Cyclic GFR-binding peptide
  MOD_RES (3)..(3): Xaa is C or S

SEQ ID NO: 78895 - protein, 31 aa, Artificial Sequence
  Cyclic GFR-binding peptide
  MOD_RES (2)..(3): Xaa is C or S
PXXAPTKLSNITVQIMDDSSNVIIGEMSNMV

SEQ ID NO: 78896 - protein, 27 aa, Artificial Sequence
  Cyclic GFR-binding peptide
  MOD_RES (27)..(27): Xaa is C or S
LRPVQIRKIVGRKPKVKKATVMIVRSX

SEQ ID NO: 78897 - protein, 35 aa, Artificial Sequence; identical to SEQ ID NO: 28881
  Cyclic GFR-binding peptide
  MOD_RES (3)..(4): Xaa is C or S

SEQ ID NO: 78898 - protein, 32 aa, Artificial Sequence
  Cyclic GFR-binding peptide
  MOD_RES (3)..(4): Xaa is C or S
KAXXVPTELRSVKMAKVDENEKVVKEVQVDMV

SEQ ID NO: 78899 - protein, 36 aa, Artificial Sequence; identical to SEQ ID NO: 28882
  Cyclic GFR-binding peptide

SEQ ID NO: 78900 - protein, 29 aa, Artificial Sequence
  Cyclic GFR-binding peptide
  MOD_RES (28)..(28): Xaa is C or S
DLSNITIQIMIGKTPKIIGEMSMIVKSXK

SEQ ID NO: 78901 - protein, 33 aa, Artificial Sequence
  Cyclic GFR-binding peptide
RPTQVQLEPLTVLYYEIVRKKPIFEQLSNTLED

SEQ ID NO: 78902 - protein, 30 aa, Artificial Sequence
  Cyclic GFR-binding peptide
  MOD_RES (29)..(29): Xaa is C or S
KLRPVQVRKIDDSSNVIKKATVNMVVRSXG

SEQ ID NO: 78903 - protein, 38 aa, Artificial Sequence; identical to SEQ ID NO: 28890
  Cyclic GFR-binding peptide
  MOD_RES (4)..(5)..(36)..(38): Xaa is C or S

SEQ ID NO: 78904 - protein, 39 aa, Artificial Sequence; identical to SEQ ID NO: 28891
  Cyclic GFR-binding peptide
  MOD_RES (3)..(4)..(36)..(38): Xaa is C or S

SEQ ID NO: 78905 - protein, 27 aa, Artificial Sequence
  Cyclic GFR-binding peptide
  MOD_RES (1)..(2): Xaa is C or S
XXVPQALSNITIQIMVGRKPKVIGEMS

SEQ ID NO: 78906 - protein, 31 aa, Artificial Sequence
  Cyclic GFR-binding peptide
  MOD_RES (31)..(31): Xaa is C or S
PTKLRSVKVAKVDDSSNVIKEVQVNMVVRSX

SEQ ID NO: 78907 - protein, 42 aa, Artificial Sequence
  Cyclic GFR-binding peptide
  MOD_RES (2)..(39)..(41): Xaa is C or S
KXQPSRVHHEPLTVLYYEYVRKKPKLEQLSNRLEEHLEXAXA

SEQ ID NO: 78908 - protein, 34 aa, Artificial Sequence
  Cyclic GFR-binding peptide
  MOD_RES (6)..(7): Xaa is C or S
KIPKAXXVPTELRPVQMRKIDENEKVVKKATVDM

SEQ ID NO: 78909 - protein, 37 aa, Artificial Sequence; identical to SEQ ID NO: 28895
  Cyclic GFR-binding peptide
  MOD_RES (6)..(6): Xaa is C or S

SEQ ID NO: 78910 - protein, 30 aa, Artificial Sequence
  Cyclic GFR-binding peptide
RPTQVQLEPLTVLYYEIVRKKPIFEQLSNT

SEQ ID NO: 78911 - protein, 27 aa, Artificial Sequence
  Cyclic GFR-binding peptide
  MOD_RES (1)..(1): Xaa is C or S
XVPQDLSNITIQIMVGRTPKVIGEMSM

SEQ ID NO: 78912 - protein, 33 aa, Artificial Sequence
  Cyclic GFR-binding peptide
  MOD_RES (3)..(4): Xaa is C or S
KPXXAPTQLSNITVQIMDDSSNVIIGEMSNMVV

SEQ ID NO: 78913 - protein, 39 aa, Artificial Sequence; identical to SEQ ID NO: 28897
  Cyclic GFR-binding peptide
  MOD_RES (6)..(7)..(39): Xaa is C or S

SEQ ID NO: 78914 - protein, 26 aa, Artificial Sequence
  Cyclic GFR-binding peptide
PTELRPVQMRKIDENEKVVKKATVDM

SEQ ID NO: 78915 - protein, 32 aa, Artificial Sequence; identical to SEQ ID NO: 28899
  Cyclic GFR-binding peptide
  MOD_RES (32)..(32): Xaa is C or S

SEQ ID NO: 78916 - protein, 30 aa, Artificial Sequence
  Cyclic GFR-binding peptide
  MOD_RES (3)..(4): Xaa is C or S
KAXXVPTELSNITMQIMDEYDKVVIGEMSE

SEQ ID NO: 78917 - protein, 39 aa, Artificial Sequence; identical to SEQ ID NO: 28901
  Cyclic GFR-binding peptide
  MOD_RES (6)..(7)..(39): Xaa is C or S

SEQ ID NO: 78918 - protein, 39 aa, Artificial Sequence; identical to SEQ ID NO: 28902
  Cyclic GFR-binding peptide
  MOD_RES (7)..(7): Xaa is C or S

SEQ ID NO: 78919 - protein, 33 aa, Artificial Sequence
  Cyclic GFR-binding peptide
  MOD_RES (5)..(6): Xaa is C or S
SASPXXVSQDLRPVQIRKIIGKTPKIKKATVMI

SEQ ID NO: 78920 - protein, 34 aa, Artificial Sequence
  Cyclic GFR-binding peptide
  MOD_RES (6)..(7): Xaa is C or S
SIPKAXXVPTELSNITMQIMDEYDKVVIGEMSEM

SEQ ID NO: 78921 - protein, 36 aa, Artificial Sequence; identical to SEQ ID NO: 28907
  Cyclic GFR-binding peptide
  MOD_RES (2)..(3)..(35): Xaa is C or S

SEQ ID NO: 78922 - protein, 35 aa, Artificial Sequence
  Cyclic GFR-binding peptide
  MOD_RES (6)..(7): Xaa is C or S
ASASPXXVSQDLRPVQIRKIIGKTPKIKKATVMIV

SEQ ID NO: 78923 - protein, 33 aa, Artificial Sequence
  Cyclic GFR-binding peptide
  MOD_RES (30)..(32): Xaa is C or S
TELRSVKMAKVDENEKVVKEVQVDMVVEGXGXR

SEQ ID NO: 78924 - protein, 40 aa, Artificial Sequence; identical to SEQ ID NO: 28915
  Cyclic GFR-binding peptide
  MOD_RES (5)..(6)..(37)..(39): Xaa is C or S

SEQ ID NO: 78925 - protein, 34 aa, Artificial Sequence
  Cyclic GFR-binding peptide
  MOD_RES (33)..(33): Xaa is C or S
VQLEPLPVVYYEIVRKKPIFEQLSNTLEDHLAXK

SEQ ID NO: 78926 - protein, 36 aa, Artificial Sequence; identical to SEQ ID NO: 28917
  Cyclic GFR-binding peptide
  MOD_RES (5)..(6): Xaa is C or S

SEQ ID NO: 78927 - protein, 32 aa, Artificial Sequence; identical to SEQ ID NO: 28918
  Cyclic GFR-binding peptide
  MOD_RES (1)..(2): Xaa is C or S

SEQ ID NO: 78928 - protein, 28 aa, Artificial Sequence
  Cyclic GFR-binding peptide
  MOD_RES (28)..(28): Xaa is C or S
LSNITMQIMDEYDKVVIGEMSEMVVEGX

SEQ ID NO: 78929 - protein, 25 aa, Artificial Sequence
  Cyclic GFR-binding peptide
RSVKMAKVDENEKVVKEVQVDMVVE

SEQ ID NO: 78930 - protein, 36 aa, Artificial Sequence; identical to SEQ ID NO: 28923
  Cyclic GFR-binding peptide
  MOD_RES (4)..(5): Xaa is C or S

SEQ ID NO: 78931 - protein, 29 aa, Artificial Sequence
  Cyclic GFR-binding peptide
APTKLSNITVQIMDDSSNVIIGEMSNMVV

SEQ ID NO: 78932 - protein, 32 aa, Artificial Sequence
  Cyclic GFR-binding peptide
  MOD_RES (6)..(7): Xaa is C or S
ASAAPXXVPQALSNITIQIMVGRKPKVIGEMS

SEQ ID NO: 78933 - protein, 42 aa, Artificial Sequence; identical to SEQ ID NO: 28928
  Cyclic GFR-binding peptide
  MOD_RES (5)..(42): Xaa is C or S

SEQ ID NO: 78934 - protein, 31 aa, Artificial Sequence
  Cyclic GFR-binding peptide
  MOD_RES (5)..(6): Xaa is C or S
IPKAXXVPTELSNITMQIMDENEKVVIGEMS

SEQ ID NO: 78935 - protein, 27 aa, Artificial Sequence
  Cyclic GFR-binding peptide
EEPLPMVYYRIKPHQGQHEQLSNFLQH

SEQ ID NO: 78936 - protein, 37 aa, Artificial Sequence
  Cyclic GFR-binding peptide
  MOD_RES (6)..(6): Xaa is C or S
DEGLEXVPTEEEPLTMLYYRIKPHQGQHEQLSNFLQH

SEQ ID NO: 78937 - protein, 30 aa, Artificial Sequence
  Cyclic GFR-binding peptide
  MOD_RES (3)..(4): Xaa is C or S
SPXXVSQDLRSVKIAKVIGKTPKIKEVQVM

SEQ ID NO: 78938 - protein, 36 aa, Artificial Sequence
  Cyclic GFR-binding peptide
  MOD_RES (7)..(7): Xaa is C or S
HVTKPTXAPTKLRPVQVRKIDDSSNVIKKATVNMVV

SEQ ID NO: 78939 - protein, 32 aa, Artificial Sequence
  Cyclic GFR-binding peptide
  MOD_RES (2)..(3): Xaa is C or S
PXXVPQDLRSVKIAKVVGRTPKVKEVQVMVVK

SEQ ID NO: 78940 - protein, 35 aa, Artificial Sequence; identical to SEQ ID NO: 28933
  Cyclic GFR-binding peptide
  MOD_RES (3)..(4): Xaa is C or S

SEQ ID NO: 78941 - protein, 35 aa, Artificial Sequence; identical to SEQ ID NO: 28935
  Cyclic GFR-binding peptide
  MOD_RES (35)..(35): Xaa is C or S

SEQ ID NO: 78942 - protein, 31 aa, Artificial Sequence; identical to SEQ ID NO: 28943
  Cyclic GFR-binding peptide
  MOD_RES (1)..(1): Xaa is C or S

SEQ ID NO: 78943 - protein, 22 aa, Artificial Sequence
  Cyclic GFR-binding peptide
RSVKVAKVDDSSNVIKEVQVNM

SEQ ID NO: 78944 - protein, 39 aa, Artificial Sequence; identical to SEQ ID NO: 28947
  Cyclic GFR-binding peptide
  MOD_RES (3)..(4)..(36)..(38): Xaa is C or S

SEQ ID NO: 78945 - protein, 28 aa, Artificial Sequence
  Cyclic GFR-binding peptide
VPTELRPVQMRKIDEYDKVVKKATVEMV

SEQ ID NO: 78946 - protein, 31 aa, Artificial Sequence
  Cyclic GFR-binding peptide
  MOD_RES (4)..(5): Xaa is C or S
PKPXXAPTKLRPVQVRKIDDSSNVIKKATVN

SEQ ID NO: 78947 - protein, 36 aa, Artificial Sequence
  Cyclic GFR-binding peptide
  MOD_RES (5)..(5): Xaa is C or S
EGLEXVPTEEEPLTMLYYRIKPHQGQHEQLSNFLQH

SEQ ID NO: 78948 - protein, 38 aa, Artificial Sequence; identical to SEQ ID NO: 28951
  Cyclic GFR-binding peptide
  MOD_RES (6)..(38): Xaa is C or S

SEQ ID NO: 78949 - protein, 41 aa, Artificial Sequence; identical to SEQ ID NO: 28952
  Cyclic GFR-binding peptide
  MOD_RES (6)..(7)..(38)..(40): Xaa is C or S

SEQ ID NO: 78950 - protein, 37 aa, Artificial Sequence; identical to SEQ ID NO: 28953
  Cyclic GFR-binding peptide
  MOD_RES (2)..(3)..(35)..(37): Xaa is C or S

SEQ ID NO: 78951 - protein, 33 aa, Artificial Sequence; identical to SEQ ID NO: 28954
  Cyclic GFR-binding peptide
  MOD_RES (31)..(33): Xaa is C or S

SEQ ID NO: 78952 - protein, 35 aa, Artificial Sequence; identical to SEQ ID NO: 28955
  Cyclic GFR-binding peptide
  MOD_RES (1)..(1): Xaa is C or S

SEQ ID NO: 78953 - protein, 34 aa, Artificial Sequence
  Cyclic GFR-binding peptide
  MOD_RES (31)..(33): Xaa is C or S
PTELRPVQMRKIDENEKVVKKATVDMVVEGXGXR

SEQ ID NO: 78954 - protein, 33 aa, Artificial Sequence
  Cyclic GFR-binding peptide
  MOD_RES (33)..(33): Xaa is C or S
PTEEEPLTMLYYRIKPHQGQHEQLSNFLQHNKX

SEQ ID NO: 78955 - protein, 27 aa, Artificial Sequence
  Cyclic GFR-binding peptide
  MOD_RES (27)..(27): Xaa is C or S
LSNITIQIMVGRTPKVIGEMSMVVKSX

SEQ ID NO: 78956 - protein, 31 aa, Artificial Sequence; identical to SEQ ID NO: 28962
  Cyclic GFR-binding peptide
  MOD_RES (1)..(1): Xaa is C or S

SEQ ID NO: 78957 - protein, 25 aa, Artificial Sequence
  Cyclic GFR-binding peptide
LRPVQIRKIVGRKPKVKKATVMIVR

SEQ ID NO: 78958 - protein, 30 aa, Artificial Sequence
  Cyclic GFR-binding peptide
  MOD_RES (27)..(29): Xaa is C or S
SNITMQIMDENEKVVIGEMSDMVVEGXGXR

SEQ ID NO: 78959 - protein, 40 aa, Artificial Sequence; identical to SEQ ID NO: 28970
  Cyclic GFR-binding peptide
  MOD_RES (6)..(7)..(39): Xaa is C or S

SEQ ID NO: 78960 - protein, 22 aa, Artificial Sequence
  Cyclic GFR-binding peptide
LRSVKVAKVDDSSNVIKEVQVN

SEQ ID NO: 78961 - protein, 37 aa, Artificial Sequence; identical to SEQ ID NO: 28972
  Cyclic GFR-binding peptide
  MOD_RES (5)..(37): Xaa is C or S

SEQ ID NO: 78962 - protein, 22 aa, Artificial Sequence
  Cyclic GFR-binding peptide
ALRSVKIAKVVGRKPKVKEVQV

SEQ ID NO: 78963 - protein, 29 aa, Artificial Sequence
  Cyclic GFR-binding peptide
  MOD_RES (2)..(2): Xaa is C or S
TXAPTKLRSVKVAKVDDSSNVIKEVQVNM

SEQ ID NO: 78964 - protein, 27 aa, Artificial Sequence
  Cyclic GFR-binding peptide
RVHHEPLTVLYYEYVRKKPKLEQLSNR

SEQ ID NO: 78965 - protein, 32 aa, Artificial Sequence
  Cyclic GFR-binding peptide
  MOD_RES (6)..(6): Xaa is C or S
VTKPTXAPTKLSNITVQIMDDSSNVIIGEMSN

SEQ ID NO: 78966 - protein, 20 aa, Artificial Sequence
  Cyclic GFR-binding peptide
RPVQIRKIVGRKPKVKKATV

SEQ ID NO: 78967 - protein, 40 aa, Artificial Sequence; identical to SEQ ID NO: 28980
  Cyclic GFR-binding peptide
  MOD_RES (1)..(38)..(40): Xaa is C or S

SEQ ID NO: 78968 - protein, 23 aa, Artificial Sequence
  Cyclic GFR-binding peptide
LSNITMQIMDEYDKVVIGEMSEM

SEQ ID NO: 78969 - protein, 37 aa, Artificial Sequence; identical to SEQ ID NO: 28981
  Cyclic GFR-binding peptide
  MOD_RES (6)..(7): Xaa is C or S

SEQ ID NO: 78970 - protein, 33 aa, Artificial Sequence
  Cyclic GFR-binding peptide
  MOD_RES (3)..(4): Xaa is C or S
KPXXAPTKLRPVQVRKIDDSSNVIKKATVNMVV

SEQ ID NO: 78971 - protein, 26 aa, Artificial Sequence
  Cyclic GFR-binding peptide
LRSVKIAKVIGKTPKIKEVQVMIVKS

SEQ ID NO: 78972 - protein, 26 aa, Artificial Sequence
  Cyclic GFR-binding peptide
ELRPVQMRKIDENEKVVKKATVDMVV

SEQ ID NO: 78973 - protein, 29 aa, Artificial Sequence
  Cyclic GFR-binding peptide
QPSRVHHEPLPVVYYEYVRKKPKLEQLSN

SEQ ID NO: 78974 - protein, 34 aa, Artificial Sequence
  Cyclic GFR-binding peptide
  MOD_RES (4)..(4): Xaa is C or S
NVQXRPTQVQLEPLPVVYYEIVRKKPIFEQLSNT

SEQ ID NO: 78975 - protein, 27 aa, Artificial Sequence
  Cyclic GFR-binding peptide
  MOD_RES (1)..(2): Xaa is C or S
XXAPTQLRPVQVRKIDDSSNVIKKATV

SEQ ID NO: 78976 - protein, 32 aa, Artificial Sequence
  Cyclic GFR-binding peptide
  MOD_RES (5)..(5): Xaa is C or S
TKPTXAPTKLRSVKVAKVDDSSNVIKEVQVNM

SEQ ID NO: 78977 - protein, 31 aa, Artificial Sequence
  Cyclic GFR-binding peptide
  MOD_RES (2)..(3): Xaa is C or S
PXXVPQDLRSVKIAKVVGRTPKVKEVQVMVV

SEQ ID NO: 78978 - protein, 27 aa, Artificial Sequence
  Cyclic GFR-binding peptide
QDLRPVQIRKIVGRTPKVKKATVMVVK

SEQ ID NO: 78979 - protein, 38 aa, Artificial Sequence; identical to SEQ ID NO: 28989
  Cyclic GFR-binding peptide
  MOD_RES (3)..(37): Xaa is C or S

SEQ ID NO: 78980 - protein, 26 aa, Artificial Sequence
  Cyclic GFR-binding peptide
VPQALRSVKIAKVVGRKPKVKEVQVM

SEQ ID NO: 78981 - protein, 35 aa, Artificial Sequence
  Cyclic GFR-binding peptide
  MOD_RES (33)..(35): Xaa is C or S
VQLEPLPVVYYEIVRKKPIFEQLSNTLEDHLAXKX

SEQ ID NO: 78982 - protein, 39 aa, Artificial Sequence; identical to SEQ ID NO: 28993
  Cyclic GFR-binding peptide
  MOD_RES (5)..(6)..(37)..(39): Xaa is C or S

SEQ ID NO: 78983 - protein, 24 aa, Artificial Sequence
  Cyclic GFR-binding peptide
PTKLSNITVQIMDDSSNVIIGEMS

SEQ ID NO: 78984 - protein, 41 aa, Artificial Sequence; identical to SEQ ID NO: 28994
  Cyclic GFR-binding peptide
  MOD_RES (5)..(39)..(41): Xaa is C or S

SEQ ID NO: 78985 - protein, 35 aa, Artificial Sequence; identical to SEQ ID NO: 28995
  Cyclic GFR-binding peptide
  MOD_RES (3)..(4): Xaa is C or S

SEQ ID NO: 78986 - protein, 36 aa, Artificial Sequence; identical to SEQ ID NO: 28998
  Cyclic GFR-binding peptide
  MOD_RES (1)..(35): Xaa is C or S

SEQ ID NO: 78987 - protein, 25 aa, Artificial Sequence
  Cyclic GFR-binding peptide
ALRSVKIAKVVGRKPKVKEVQVMIV

SEQ ID NO: 78988 - protein, 36 aa, Artificial Sequence
  Cyclic GFR-binding peptide
  MOD_RES (33)..(35): Xaa is C or S
VHHEPLPVVYYEYVRKKPKLEQLSNRLEEHLEXAXA

SEQ ID NO: 78989 - protein, 21 aa, Artificial Sequence
  Cyclic GFR-binding peptide
SNITMQIMDENEKVVIGEMSD

SEQ ID NO: 78990 - protein, 37 aa, Artificial Sequence; identical to SEQ ID NO: 29004
  Cyclic GFR-binding peptide
  MOD_RES (36)..(36): Xaa is C or S

SEQ ID NO: 78991 - protein, 24 aa, Artificial Sequence
  Cyclic GFR-binding peptide
TKLRPVQVRKIDDSSNVIKKATVN

SEQ ID NO: 78992 - protein, 29 aa, Artificial Sequence
  Cyclic GFR-binding peptide
  MOD_RES (1)..(2): Xaa is C or S
XXVPTELSNITMQIMDEYDKVVIGEMSEM

SEQ ID NO: 78993 - protein, 28 aa, Artificial Sequence
  Cyclic GFR-binding peptide
QDLRPVQIRKIIGKTPKIKKATVMIVKS

SEQ ID NO: 78994 - protein, 38 aa, Artificial Sequence; identical to SEQ ID NO: 29008
  Cyclic GFR-binding peptide
  MOD_RES (4)..(36)..(38): Xaa is C or S

SEQ ID NO: 78995 - protein, 27 aa, Artificial Sequence
  Cyclic GFR-binding peptide
  MOD_RES (27)..(27): Xaa is C or S
SNITVQIMDDSSNVIIGEMSNMVVRAX

SEQ ID NO: 78996 - protein, 24 aa, Artificial Sequence
  Cyclic GFR-binding peptide
TELRSVKMAKVDEYDKVVKEVQVE

SEQ ID NO: 78997 - protein, 26 aa, Artificial Sequence
  Cyclic GFR-binding peptide
DLSNITIQIMIGKTPKIIGEMSMIVK

SEQ ID NO: 78998 - protein, 32 aa, Artificial Sequence; identical to SEQ ID NO: 29013
  Cyclic GFR-binding peptide

SEQ ID NO: 78999 - protein, 31 aa, Artificial Sequence
  Cyclic GFR-binding peptide
  MOD_RES (3)..(4): Xaa is C or S
SPXXVPQDLSNITIQIMVGRTPKVIGEMSMV

SEQ ID NO: 79000 - protein, 32 aa, Artificial Sequence; identical to SEQ ID NO: 29016
  Cyclic GFR-binding peptide
  MOD_RES (1)..(2): Xaa is C or S

SEQ ID NO: 79001 - protein, 41 aa, Artificial Sequence; identical to SEQ ID NO: 29017
  Cyclic GFR-binding peptide
  MOD_RES (4)..(41): Xaa is C or S

SEQ ID NO: 79002 - protein, 33 aa, Artificial Sequence; identical to SEQ ID NO: 29019
  Cyclic GFR-binding peptide
  MOD_RES (1)..(2): Xaa is C or S

SEQ ID NO: 79003 - protein, 24 aa, Artificial Sequence
  Cyclic GFR-binding peptide
LRPVQIRKIVGRTPKVKKATVMVV

SEQ ID NO: 79004 - protein, 31 aa, Artificial Sequence
  Cyclic GFR-binding peptide
PSRVHHEPLTVLYYEYVRKKPKLEQLSNRLE

SEQ ID NO: 79005 - protein, 26 aa, Artificial Sequence
  Cyclic GFR-binding peptide
TEEEPLPMVYYRIKPHQGQHEQLSNF

SEQ ID NO: 79006 - protein, 38 aa, Artificial Sequence; identical to SEQ ID NO: 29023
  Cyclic GFR-binding peptide
  MOD_RES (6)..(7)..(38): Xaa is C or S

SEQ ID NO: 79007 - protein, 23 aa, Artificial Sequence
  Cyclic GFR-binding peptide
RSVKMAKVDEYDKVVKEVQVEMV

SEQ ID NO: 79008 - protein, 35 aa, Artificial Sequence; identical to SEQ ID NO: 29025
  Cyclic GFR-binding peptide
  MOD_RES (1)..(2)..(34): Xaa is C or S

SEQ ID NO: 79009 - protein, 27 aa, Artificial Sequence
  Cyclic GFR-binding peptide
VPTELSNITMQIMDEYDKVVIGEMSEM

SEQ ID NO: 79010 - protein, 26 aa, Artificial Sequence
  Cyclic GFR-binding peptide
LSNITIQIMVGRKPKVIGEMSMIVRS

SEQ ID NO: 79011 - protein, 32 aa, Artificial Sequence
  Cyclic GFR-binding peptide
  MOD_RES (29)..(31): Xaa is C or S
QLSNITVQIMDDSSNVIIGEMSNMVVRAXGXH

SEQ ID NO: 79012 - protein, 33 aa, Artificial Sequence; identical to SEQ ID NO: 29034
  Cyclic GFR-binding peptide
  MOD_RES (1)..(2): Xaa is C or S

SEQ ID NO: 79013 - protein, 33 aa, Artificial Sequence; identical to SEQ ID NO: 29036
  Cyclic GFR-binding peptide
  MOD_RES (31)..(33): Xaa is C or S

SEQ ID NO: 79014 - protein, 40 aa, Artificial Sequence; identical to SEQ ID NO: 29038
  Cyclic GFR-binding peptide
  MOD_RES (6)..(7)..(38)..(40): Xaa is C or S

SEQ ID NO: 79015 - protein, 26 aa, Artificial Sequence
  Cyclic GFR-binding peptide
PTKLSNITVQIMDDSSNVIIGEMSNM

SEQ ID NO: 79016 - protein, 41 aa, Artificial Sequence; identical to SEQ ID NO: 29039
  Cyclic GFR-binding peptide
  MOD_RES (5)..(6)..(38)..(40): Xaa is C or S

SEQ ID NO: 79017 - protein, 39 aa, Artificial Sequence; identical to SEQ ID NO: 29040
  Cyclic GFR-binding peptide
  MOD_RES (37)..(39): Xaa is C or S

SEQ ID NO: 79018 - protein, 35 aa, Artificial Sequence; identical to SEQ ID NO: 29045
  Cyclic GFR-binding peptide
  MOD_RES (1)..(1): Xaa is C or S

SEQ ID NO: 79019 - protein, 38 aa, Artificial Sequence; identical to SEQ ID NO: 29046
  Cyclic GFR-binding peptide
  MOD_RES (2)..(3)..(35)..(37): Xaa is C or S

SEQ ID NO: 79020 - protein, 28 aa, Artificial Sequence
  Cyclic GFR-binding peptide
  MOD_RES (26)..(28): Xaa is C or S
RPVQIRKIVGRKPKVKKATVMIVRSXKX

SEQ ID NO: 79021 - protein, 30 aa, Artificial Sequence
  Cyclic GFR-binding peptide
VQLEPLPVVYYEIVRKKPIFEQLSNTLEDH

SEQ ID NO: 79022 - protein, 22 aa, Artificial Sequence
  Cyclic GFR-binding peptide
LRSVKMAKVDEYDKVVKEVQVE

SEQ ID NO: 79023 - protein, 30 aa, Artificial Sequence
  Cyclic GFR-binding peptide
  MOD_RES (4)..(5): Xaa is C or S
ASPXXVPQDLRPVQIRKIVGRTPKVKKATV

SEQ ID NO: 79024 - protein, 30 aa, Artificial Sequence
  Cyclic GFR-binding peptide
  MOD_RES (28)..(30): Xaa is C or S
LRSVKVAKVDDSSNVIKEVQVNMVVRAXGX

SEQ ID NO: 79025 - protein, 23 aa, Artificial Sequence
  Cyclic GFR-binding peptide
RPVQIRKIIGKTPKIKKATVMIV

SEQ ID NO: 79026 - protein, 24 aa, Artificial Sequence
  Cyclic GFR-binding peptide
TELRSVKMAKVDENEKVVKEVQVD

SEQ ID NO: 79027 - protein, 27 aa, Artificial Sequence
  Cyclic GFR-binding peptide
PTKLSNITVQIMDDSSNVIIGEMSNMV

SEQ ID NO: 79028 - protein, 22 aa, Artificial Sequence
  Cyclic GFR-binding peptide
RSVKMAKVDEYDKVVKEVQVEM

SEQ ID NO: 79029 - protein, 38 aa, Artificial Sequence; identical to SEQ ID NO: 29063
  Cyclic GFR-binding peptide
  MOD_RES (5)..(6)..(37): Xaa is C or S

SEQ ID NO: 79030 - protein, 22 aa, Artificial Sequence
  Cyclic GFR-binding peptide
LRSVKMAKVDENEKVVKEVQVD

SEQ ID NO: 79031 - protein, 31 aa, Artificial Sequence; identical to SEQ ID NO: 29064
  Cyclic GFR-binding peptide
  MOD_RES (1)..(1): Xaa is C or S

SEQ ID NO: 79032 - protein, 42 aa, Artificial Sequence; identical to SEQ ID NO: 29070
  Cyclic GFR-binding peptide
  MOD_RES (7)..(41): Xaa is C or S

SEQ ID NO: 79033 - protein, 29 aa, Artificial Sequence
  Cyclic GFR-binding peptide
  MOD_RES (1)..(2): Xaa is C or S
XXAPTKLSNITVQIMDDSSNVIIGEMSNM

SEQ ID NO: 79034 - protein, 29 aa, Artificial Sequence
  Cyclic GFR-binding peptide
  MOD_RES (27)..(29): Xaa is C or S
SNITMQIMDEYDKVVIGEMSEMVVEGXGX

SEQ ID NO: 79035 - protein, 30 aa, Artificial Sequence
  Cyclic GFR-binding peptide
  MOD_RES (27)..(29): Xaa is C or S
SNITVQIMDDSSNVIIGEMSNMVVRSXGXH

SEQ ID NO: 79036 - protein, 41 aa, Artificial Sequence; identical to SEQ ID NO: 29071
  Cyclic GFR-binding peptide
  MOD_RES (6)..(7)..(38)..(40): Xaa is C or S

SEQ ID NO: 79037 - protein, 38 aa, Artificial Sequence; identical to SEQ ID NO: 29073
  Cyclic GFR-binding peptide
  MOD_RES (2)..(3)..(35)..(37): Xaa is C or S

SEQ ID NO: 79038 - protein, 30 aa, Artificial Sequence
  Cyclic GFR-binding peptide
HHEPLPVVYYEYVRKKPKLEQLSNRLEEHL

SEQ ID NO: 79039 - protein, 27 aa, Artificial Sequence
  Cyclic GFR-binding peptide
QALRSVKIAKVVGRKPKVKEVQVMIVR

SEQ ID NO: 79040 - protein, 40 aa, Artificial Sequence; identical to SEQ ID NO: 29075
  Cyclic GFR-binding peptide
  MOD_RES (5)..(39): Xaa is C or S

SEQ ID NO: 79041 - protein, 30 aa, Artificial Sequence
  Cyclic GFR-binding peptide
  MOD_RES (1)..(1): Xaa is C or S
XAPTQLSNITVQIMDDSSNVIIGEMSNMVV

SEQ ID NO: 79042 - protein, 27 aa, Artificial Sequence
  Cyclic GFR-binding peptide
  MOD_RES (26)..(26): Xaa is C or S
SNITIQIMIGKTPKIIGEMSMIVKSXK

SEQ ID NO: 79043 - protein, 32 aa, Artificial Sequence
  Cyclic GFR-binding peptide
  MOD_RES (6)..(7): Xaa is C or S
TVPKPXXAPTQLRPVQVRKIDDSSNVIKKATV

SEQ ID NO: 79044 - protein, 38 aa, Artificial Sequence; identical to SEQ ID NO: 29081
  Cyclic GFR-binding peptide
  MOD_RES (6)..(7): Xaa is C or S

SEQ ID NO: 79045 - protein, 34 aa, Artificial Sequence
  Cyclic GFR-binding peptide
  MOD_RES (3)..(3): Xaa is C or S
VQXRPTQVQLEPLTVLYYEIVRKKPIFEQLSNTL

SEQ ID NO: 79046 - protein, 39 aa, Artificial Sequence; identical to SEQ ID NO: 29086
  Cyclic GFR-binding peptide
  MOD_RES (7)..(7): Xaa is C or S

SEQ ID NO: 79047 - protein, 37 aa, Artificial Sequence; identical to SEQ ID NO: 29087
  Cyclic GFR-binding peptide
  MOD_RES (1)..(35)..(37): Xaa is C or S

SEQ ID NO: 79048 - protein, 31 aa, Artificial Sequence
  Cyclic GFR-binding peptide
  MOD_RES (1)..(2): Xaa is C or S
XXAPTKLRPVQVRKIDDSSNVIKKATVNMVV

SEQ ID NO: 79049 - protein, 28 aa, Artificial Sequence
  Cyclic GFR-binding peptide
ELSNITMQIMDENEKVVIGEMSDMVVEG

SEQ ID NO: 79050 - protein, 33 aa, Artificial Sequence
  Cyclic GFR-binding peptide
  MOD_RES (30)..(32): Xaa is C or S
TELSNITMQIMDENEKVVIGEMSDMVVEGXGXR

SEQ ID NO: 79051 - protein, 29 aa, Artificial Sequence
  Cyclic GFR-binding peptide
  MOD_RES (29)..(29): Xaa is C or S
QLRSVKVAKVDDSSNVIKEVQVNMVVRAX

SEQ ID NO: 79052 - protein, 40 aa, Artificial Sequence; identical to SEQ ID NO: 29088
  Cyclic GFR-binding peptide
  MOD_RES (5)..(6)..(37)..(39): Xaa is C or S

SEQ ID NO: 79053 - protein, 33 aa, Artificial Sequence; identical to SEQ ID NO: 29089
  Cyclic GFR-binding peptide
  MOD_RES (2)..(3): Xaa is C or S

SEQ ID NO: 79054 - protein, 26 aa, Artificial Sequence
  Cyclic GFR-binding peptide
PQALSNITIQIMVGRKPKVIGEMSMI

SEQ ID NO: 79055 - protein, 28 aa, Artificial Sequence
  Cyclic GFR-binding peptide
QVQLEPLPVVYYEIVRKKPIFEQLSNTL

SEQ ID NO: 79056 - protein, 26 aa, Artificial Sequence
  Cyclic GFR-binding peptide
  MOD_RES (1)..(1): Xaa is C or S
XVSQDLRPVQIRKIIGKTPKIKKATV

SEQ ID NO: 79057 - protein, 23 aa, Artificial Sequence
  Cyclic GFR-binding peptide
QLSNITVQIMDDSSNVIIGEMSN

SEQ ID NO: 79058 - protein, 43 aa, Artificial Sequence; identical to SEQ ID NO: 29095
  Cyclic GFR-binding peptide
  MOD_RES (6)..(40)..(42): Xaa is C or S

SEQ ID NO: 79059 - protein, 28 aa, Artificial Sequence
  Cyclic GFR-binding peptide
VPQDLRSVKIAKVVGRTPKVKEVQVMVV

SEQ ID NO: 79060 - protein, 36 aa, Artificial Sequence; identical to SEQ ID NO: 29101
  Cyclic GFR-binding peptide
  MOD_RES (2)..(3)..(35): Xaa is C or S

SEQ ID NO: 79061 - protein, 38 aa, Artificial Sequence; identical to SEQ ID NO: 29106
  Cyclic GFR-binding peptide
  MOD_RES (2)..(3)..(35)..(37): Xaa is C or S

SEQ ID NO: 79062 - protein, 36 aa, Artificial Sequence; identical to SEQ ID NO: 29110
  Cyclic GFR-binding peptide
  MOD_RES (2)..(3)..(35): Xaa is C or S

SEQ ID NO: 79063 - protein, 33 aa, Artificial Sequence; identical to SEQ ID NO: 29111
  Cyclic GFR-binding peptide
  MOD_RES (2)..(3): Xaa is C or S

SEQ ID NO: 79064 - protein, 32 aa, Artificial Sequence; identical to SEQ ID NO: 29112
  Cyclic GFR-binding peptide
  MOD_RES (1)..(2): Xaa is C or S

SEQ ID NO: 79065 - protein, 25 aa, Artificial Sequence
  Cyclic GFR-binding peptide
APTKLRPVQVRKIDDSSNVIKKATV

SEQ ID NO: 79066 - protein, 39 aa, Artificial Sequence; identical to SEQ ID NO: 29114
  Cyclic GFR-binding peptide
  MOD_RES (4)..(38): Xaa is C or S

SEQ ID NO: 79067 - protein, 33 aa, Artificial Sequence
  Cyclic GFR-binding peptide
  MOD_RES (33)..(33): Xaa is C or S
VHHEPLPVVYYEYVRKKPKLEQLSNRLEEHLEX

SEQ ID NO: 79068 - protein, 23 aa, Artificial Sequence
  Cyclic GFR-binding peptide
SNITMQIMDEYDKVVIGEMSEMV

SEQ ID NO: 79069 - protein, 38 aa, Artificial Sequence; identical to SEQ ID NO: 29118
  Cyclic GFR-binding peptide
  MOD_RES (5)..(6)..(38): Xaa is C or S

SEQ ID NO: 79070 - protein, 32 aa, Artificial Sequence; identical to SEQ ID NO: 29119
  Cyclic GFR-binding peptide
  MOD_RES (32)..(32): Xaa is C or S

SEQ ID NO: 79071 - protein, 31 aa, Artificial Sequence
  Cyclic GFR-binding peptide
  MOD_RES (29)..(31): Xaa is C or S
ELRSVKMAKVDENEKVVKEVQVDMVVEGXGX

SEQ ID NO: 79072 - protein, 32 aa, Artificial Sequence
  Cyclic GFR-binding peptide
VQLEPLPVVYYEIVRKKPIFEQLSNTLEDHLA

SEQ ID NO: 79073 - protein, 31 aa, Artificial Sequence
  Cyclic GFR-binding peptide
  MOD_RES (4)..(5): Xaa is C or S
AAPXXVPQALSNITIQIMVGRKPKVIGEMSM

SEQ ID NO: 79074 - protein, 30 aa, Artificial Sequence
  Cyclic GFR-binding peptide
  MOD_RES (1)..(1): Xaa is C or S
XVPTELRPVQMRKIDENEKVVKKATVDMVV

SEQ ID NO: 79075 - protein, 30 aa, Artificial Sequence
  Cyclic GFR-binding peptide
  MOD_RES (3)..(4): Xaa is C or S
APXXVPQALSNITIQIMVGRKPKVIGEMSM

SEQ ID NO: 79076 - protein, 39 aa, Artificial Sequence; identical to SEQ ID NO: 29125
  Cyclic GFR-binding peptide
  MOD_RES (6)..(7)..(39): Xaa is C or S

SEQ ID NO: 79077 - protein, 33 aa, Artificial Sequence
  Cyclic GFR-binding peptide
  MOD_RES (32)..(32): Xaa is C or S
HHEPLTVLYYEYVRKKPKLEQLSNRLEEHLEXA

SEQ ID NO: 79078 - protein, 29 aa, Artificial Sequence
  Cyclic GFR-binding peptide
  MOD_RES (29)..(29): Xaa is C or S
QALRSVKIAKVVGRKPKVKEVQVMIVRSX

SEQ ID NO: 79079 - protein, 27 aa, Artificial Sequence
  Cyclic GFR-binding peptide
LRSVKMAKVDEYDKVVKEVQVEMVVEG

SEQ ID NO: 79080 - protein, 20 aa, Artificial Sequence
  Cyclic GFR-binding peptide
RPVQMRKIDENEKVVKKATV

SEQ ID NO: 79081 - protein, 39 aa, Artificial Sequence; identical to SEQ ID NO: 29130
  Cyclic GFR-binding peptide
  MOD_RES (5)..(6)..(37)..(39): Xaa is C or S

SEQ ID NO: 79082 - protein, 41 aa, Artificial Sequence; identical to SEQ ID NO: 29132
  Cyclic GFR-binding peptide
  MOD_RES (6)..(7)..(39)..(41): Xaa is C or S

SEQ ID NO: 79083 - protein, 24 aa, Artificial Sequence
  Cyclic GFR-binding peptide
LRSVKIAKVVGRKPKVKEVQVMIV

SEQ ID NO: 79084 - protein, 26 aa, Artificial Sequence
  Cyclic GFR-binding peptide
LSNITVQIMDDSSNVIIGEMSNMVVR

SEQ ID NO: 79085 - protein, 35 aa, Artificial Sequence
  Cyclic GFR-binding peptide
  MOD_RES (4)..(4): Xaa is C or S
GLEXVPTEEEPLTMLYYRIKPHQGQHEQLSNFLQH

SEQ ID NO: 79086 - protein, 27 aa, Artificial Sequence
  Cyclic GFR-binding peptide
HHEPLPVVYYEYVRKKPKLEQLSNRLE

SEQ ID NO: 79087 - protein, 28 aa, Artificial Sequence
  Cyclic GFR-binding peptide
  MOD_RES (2)..(3): Xaa is C or S
PXXVSQDLRSVKIAKVIGKTPKIKEVQV

SEQ ID NO: 79088 - protein, 24 aa, Artificial Sequence
  Cyclic GFR-binding peptide
LSNITIQIMVGRKPKVIGEMSMIV

SEQ ID NO: 79089 - protein, 35 aa, Artificial Sequence; identical to SEQ ID NO: 29136
  Cyclic GFR-binding peptide
  MOD_RES (1)..(33)..(35): Xaa is C or S

SEQ ID NO: 79090 - protein, 25 aa, Artificial Sequence
  Cyclic GFR-binding peptide
QLSNITVQIMDDSSNVIIGEMSNMV

SEQ ID NO: 79091 - protein, 29 aa, Artificial Sequence
  Cyclic GFR-binding peptide
  MOD_RES (1)..(2): Xaa is C or S
XXVPQALRPVQIRKIVGRKPKVKKATVMI

SEQ ID NO: 79092 - protein, 24 aa, Artificial Sequence
  Cyclic GFR-binding peptide
PTELRPVQMRKIDEYDKVVKKATV

SEQ ID NO: 79093 - protein, 26 aa, Artificial Sequence
  Cyclic GFR-binding peptide
  MOD_RES (1)..(1): Xaa is C or S
XAPTKLRSVKVAKVDDSSNVIKEVQV

SEQ ID NO: 79094 - protein, 26 aa, Artificial Sequence
  Cyclic GFR-binding peptide
VSQDLSNITIQIMIGKTPKIIGEMSM

SEQ ID NO: 79095 - protein, 26 aa, Artificial Sequence
  Cyclic GFR-binding peptide
QLRPVQVRKIDDSSNVIKKATVNMVV

SEQ ID NO: 79096 - protein, 30 aa, Artificial Sequence
  Cyclic GFR-binding peptide
VPTEEEPLTMLYYRIKPHQGQHEQLSNFLQ

SEQ ID NO: 79097 - protein, 36 aa, Artificial Sequence; identical to SEQ ID NO: 29141
  Cyclic GFR-binding peptide
  MOD_RES (1)..(2)..(34)..(36): Xaa is C or S

SEQ ID NO: 79098 - protein, 39 aa, Artificial Sequence; identical to SEQ ID NO: 29144
  Cyclic GFR-binding peptide
  MOD_RES (2)..(39): Xaa is C or S

SEQ ID NO: 79099 - protein, 44 aa, Artificial Sequence; identical to SEQ ID NO: 29147
  Cyclic GFR-binding peptide
  MOD_RES (4)..(41)..(43): Xaa is C or S

SEQ ID NO: 79100 - protein, 25 aa, Artificial Sequence
  Cyclic GFR-binding peptide
PTELRSVKMAKVDENEKVVKEVQVD

SEQ ID NO: 79101 - protein, 32 aa, Artificial Sequence; identical to SEQ ID NO: 29149
  Cyclic GFR-binding peptide
  MOD_RES (2)..(2): Xaa is C or S

SEQ ID NO: 79102 - protein, 39 aa, Artificial Sequence; identical to SEQ ID NO: 29150
  Cyclic GFR-binding peptide
  MOD_RES (5)..(6)..(37)..(39): Xaa is C or S

SEQ ID NO: 79103 - protein, 27 aa, Artificial Sequence
  Cyclic GFR-binding peptide
PTELRPVQMRKIDENEKVVKKATVDMV

SEQ ID NO: 79104 - protein, 31 aa, Artificial Sequence
  Cyclic GFR-binding peptide
  MOD_RES (30)..(30): Xaa is C or S
PQDLRPVQIRKIVGRTPKVKKATVMVVKSXK

SEQ ID NO: 79105 - protein, 27 aa, Artificial Sequence
  Cyclic GFR-binding peptide
  MOD_RES (1)..(1): Xaa is C or S
XVPQALRSVKIAKVVGRKPKVKEVQVM

SEQ ID NO: 79106 - protein, 28 aa, Artificial Sequence
  Cyclic GFR-binding peptide
  MOD_RES (1)..(1): Xaa is C or S
XVPTELRSVKMAKVDENEKVVKEVQVDM

SEQ ID NO: 79107 - protein, 30 aa, Artificial Sequence
  Cyclic GFR-binding peptide
  MOD_RES (4)..(5): Xaa is C or S
PKPXXAPTQLRSVKVAKVDDSSNVIKEVQV

SEQ ID NO: 79108 - protein, 37 aa, Artificial Sequence
  Cyclic GFR-binding peptide
  MOD_RES (5)..(5): Xaa is C or S
SSVKXQPSRVHHEPLTVLYYEYVRKKPKLEQLSNRLE

SEQ ID NO: 79109 - protein, 33 aa, Artificial Sequence
  Cyclic GFR-binding peptide
  MOD_RES (31)..(33): Xaa is C or S
PTKLRPVQVRKIDDSSNVIKKATVNMVVRSXGX

SEQ ID NO: 79110 - protein, 37 aa, Artificial Sequence; identical to SEQ ID NO: 29159
  Cyclic GFR-binding peptide
  MOD_RES (4)..(5)..(37): Xaa is C or S

SEQ ID NO: 79111 - protein, 35 aa, Artificial Sequence; identical to SEQ ID NO: 29160
  Cyclic GFR-binding peptide
  MOD_RES (1)..(2)..(34): Xaa is C or S

SEQ ID NO: 79112 - protein, 32 aa, Artificial Sequence
  Cyclic GFR-binding peptide
  MOD_RES (30)..(32): Xaa is C or S
TKLRPVQVRKIDDSSNVIKKATVNMVVRSXGX

SEQ ID NO: 79113 - protein, 36 aa, Artificial Sequence; identical to SEQ ID NO: 29165
  Cyclic GFR-binding peptide
  MOD_RES (4)..(5): Xaa is C or S

SEQ ID NO: 79114 - protein, 38 aa, Artificial Sequence; identical to SEQ ID NO: 29166
  Cyclic GFR-binding peptide
  MOD_RES (36)..(38): Xaa is C or S

SEQ ID NO: 79115 - protein, 24 aa, Artificial Sequence
  Cyclic GFR-binding peptide
PQALSNITIQIMVGRKPKVIGEMS

SEQ ID NO: 79116 - protein, 30 aa, Artificial Sequence
  Cyclic GFR-binding peptide
  MOD_RES (4)..(5): Xaa is C or S
ASPXXVSQDLRSVKIAKVIGKTPKIKEVQV

SEQ ID NO: 79117 - protein, 30 aa, Artificial Sequence
  Cyclic GFR-binding peptide
  MOD_RES (1)..(1): Xaa is C or S
XVPQDLRSVKIAKVVGRTPKVKEVQVMVVK

SEQ ID NO: 79118 - protein, 30 aa, Artificial Sequence
  Cyclic GFR-binding peptide
  MOD_RES (27)..(29): Xaa is C or S
RPVQVRKIDDSSNVIKKATVNMVVRAXGXH

SEQ ID NO: 79119 - protein, 36 aa, Artificial Sequence
  Cyclic GFR-binding peptide
  MOD_RES (6)..(7): Xaa is C or S
ASASPXXVSQDLRPVQIRKIIGKTPKIKKATVMIVK

SEQ ID NO: 79120 - protein, 36 aa, Artificial Sequence; identical to SEQ ID NO: 29170
  Cyclic GFR-binding peptide
  MOD_RES (3)..(4)..(36): Xaa is C or S

SEQ ID NO: 79121 - protein, 34 aa, Artificial Sequence; identical to SEQ ID NO: 29176
  Cyclic GFR-binding peptide
  MOD_RES (1)..(1): Xaa is C or S

SEQ ID NO: 79122 - protein, 32 aa, Artificial Sequence; identical to SEQ ID NO: 29177
  Cyclic GFR-binding peptide

SEQ ID NO: 79123 - protein, 30 aa, Artificial Sequence; identical to SEQ ID NO: 29179
  Cyclic GFR-binding peptide

SEQ ID NO: 79124 - protein, 28 aa, Artificial Sequence
  Cyclic GFR-binding peptide
VPQDLSNITIQIMVGRTPKVIGEMSMVV

SEQ ID NO: 79125 - protein, 33 aa, Artificial Sequence
  Cyclic GFR-binding peptide
  MOD_RES (3)..(3): Xaa is C or S
VQXRPTQVQLEPLTVLYYEIVRKKPIFEQLSNT

SEQ ID NO: 79126 - protein, 38 aa, Artificial Sequence; identical to SEQ ID NO: 29184
  Cyclic GFR-binding peptide
  MOD_RES (4)..(5)..(36)..(38): Xaa is C or S

SEQ ID NO: 79127 - protein, 29 aa, Artificial Sequence
  Cyclic GFR-binding peptide
  MOD_RES (28)..(28): Xaa is C or S
LRSVKVAKVDDSSNVIKEVQVNMVVRSXG

SEQ ID NO: 79128 - protein, 26 aa, Artificial Sequence
  Cyclic GFR-binding peptide
LRSVKMAKVDEYDKVVKEVQVEMVVE

SEQ ID NO: 79129 - protein, 27 aa, Artificial Sequence
  Cyclic GFR-binding peptide
LEPLTVLYYEIVRKKPIFEQLSNTLED

SEQ ID NO: 79130 - protein, 31 aa, Artificial Sequence
  Cyclic GFR-binding peptide
  MOD_RES (1)..(2): Xaa is C or S
XXAPTQLSNITVQIMDDSSNVIIGEMSNMVV

SEQ ID NO: 79131 - protein, 32 aa, Artificial Sequence
  Cyclic GFR-binding peptide
  MOD_RES (5)..(6): Xaa is C or S
SAAPXXVPQALSNITIQIMVGRKPKVIGEMSM

SEQ ID NO: 79132 - protein, 31 aa, Artificial Sequence
  Cyclic GFR-binding peptide
  MOD_RES (29)..(31): Xaa is C or S
ELRSVKMAKVDEYDKVVKEVQVEMVVEGXGX

SEQ ID NO: 79133 - protein, 24 aa, Artificial Sequence
  Cyclic GFR-binding peptide
KLSNITVQIMDDSSNVIIGEMSNM

SEQ ID NO: 79134 - protein, 24 aa, Artificial Sequence
  Cyclic GFR-binding peptide
RPVQIRKIIGKTPKIKKATVMIVK

SEQ ID NO: 79135 - protein, 30 aa, Artificial Sequence
  Cyclic GFR-binding peptide
  MOD_RES (1)..(1): Xaa is C or S
XVPTEEEPLPMVYYRIKPHQGQHEQLSNFL

SEQ ID NO: 79136 - protein, 37 aa, Artificial Sequence; identical to SEQ ID NO: 29187
  Cyclic GFR-binding peptide
  MOD_RES (36)..(36): Xaa is C or S

SEQ ID NO: 79137 - protein, 34 aa, Artificial Sequence; identical to SEQ ID NO: 29189
  Cyclic GFR-binding peptide
  MOD_RES (1)..(2)..(34): Xaa is C or S

SEQ ID NO: 79138 - protein, 31 aa, Artificial Sequence
  Cyclic GFR-binding peptide
  MOD_RES (2)..(2): Xaa is C or S
TXAPTKLRSVKVAKVDDSSNVIKEVQVNMVV

SEQ ID NO: 79139 - protein, 31 aa, Artificial Sequence
  Cyclic GFR-binding peptide
VQLEPLPVVYYEIVRKKPIFEQLSNTLEDHL

SEQ ID NO: 79140 - protein, 36 aa, Artificial Sequence
  Cyclic GFR-binding peptide
  MOD_RES (6)..(7): Xaa is C or S
SIPKAXXVPTELSNITMQIMDEYDKVVIGEMSEMVV

SEQ ID NO: 79141 - protein, 30 aa, Artificial Sequence
  Cyclic GFR-binding peptide
PTKLRPVQVRKIDDSSNVIKKATVNMVVRS

SEQ ID NO: 79142 - protein, 38 aa, Artificial Sequence; identical to SEQ ID NO: 29200
  Cyclic GFR-binding peptide
  MOD_RES (37)..(37): Xaa is C or S

SEQ ID NO: 79143 - protein, 27 aa, Artificial Sequence
  Cyclic GFR-binding peptide
QVQLEPLPVVYYEIVRKKPIFEQLSNT

SEQ ID NO: 79144 - protein, 35 aa, Artificial Sequence
  Cyclic GFR-binding peptide
  MOD_RES (5)..(6): Xaa is C or S
SAAPXXVPQALSNITIQIMVGRKPKVIGEMSMIVR

SEQ ID NO: 79145 - protein, 40 aa, Artificial Sequence; identical to SEQ ID NO: 29208
  Cyclic GFR-binding peptide
  MOD_RES (7)..(39): Xaa is C or S

SEQ ID NO: 79146 - protein, 32 aa, Artificial Sequence; identical to SEQ ID NO: 29209
  Cyclic GFR-binding peptide
  MOD_RES (1)..(2): Xaa is C or S

SEQ ID NO: 79147 - protein, 39 aa, Artificial Sequence; identical to SEQ ID NO: 29210
  Cyclic GFR-binding peptide
  MOD_RES (1)..(38): Xaa is C or S

SEQ ID NO: 79148 - protein, 31 aa, Artificial Sequence
  Cyclic GFR-binding peptide
  MOD_RES (3)..(3): Xaa is C or S
PTXAPTKLRPVQVRKIDDSSNVIKKATVNMV

SEQ ID NO: 79149 - protein, 38 aa, Artificial Sequence; identical to SEQ ID NO: 29216
  Cyclic GFR-binding peptide
  MOD_RES (3)..(4)..(35)..(37): Xaa is C or S

SEQ ID NO: 79150 - protein, 33 aa, Artificial Sequence
  Cyclic GFR-binding peptide
  MOD_RES (5)..(6): Xaa is C or S
SAAPXXVPQALSNITIQIMVGRKPKVIGEMSMI

SEQ ID NO: 79151 - protein, 28 aa, Artificial Sequence
  Cyclic GFR-binding peptide
TELRSVKMAKVDEYDKVVKEVQVEMVVE

SEQ ID NO: 79152 - protein, 30 aa, Artificial Sequence
  Cyclic GFR-binding peptide
  MOD_RES (1)..(1): Xaa is C or S
XVPQALRSVKIAKVVGRKPKVKEVQVMIVR

SEQ ID NO: 79153 - protein, 28 aa, Artificial Sequence
  Cyclic GFR-binding peptide
  MOD_RES (1)..(2): Xaa is C or S
XXAPTKLSNITVQIMDDSSNVIIGEMSN

SEQ ID NO: 79154 - protein, 30 aa, Artificial Sequence
  Cyclic GFR-binding peptide
QVQLEPLPVVYYEIVRKKPIFEQLSNTLED

SEQ ID NO: 79155 - protein, 33 aa, Artificial Sequence
  Cyclic GFR-binding peptide
  MOD_RES (30)..(32): Xaa is C or S
TELSNITMQIMDEYDKVVIGEMSEMVVEGXGXR

SEQ ID NO: 79156 - protein, 38 aa, Artificial Sequence; identical to SEQ ID NO: 29219
  Cyclic GFR-binding peptide
  MOD_RES (4)..(5)..(37): Xaa is C or S

SEQ ID NO: 79157 - protein, 28 aa, Artificial Sequence
  Cyclic GFR-binding peptide
EPLTMLYYRIKPHQGQHEQLSNFLQHNK

SEQ ID NO: 79158 - protein, 29 aa, Artificial Sequence
  Cyclic GFR-binding peptide
  MOD_RES (3)..(3): Xaa is C or S
PTXAPTKLSNITVQIMDDSSNVIIGEMSN

SEQ ID NO: 79159 - protein, 29 aa, Artificial Sequence
  Cyclic GFR-binding peptide
  MOD_RES (27)..(29): Xaa is C or S
SNITMQIMDENEKVVIGEMSDMVVEGXGX

SEQ ID NO: 79160 - protein, 26 aa, Artificial Sequence
  Cyclic GFR-binding peptide
QDLRPVQIRKIVGRTPKVKKATVMVV

SEQ ID NO: 79161 - protein, 35 aa, Artificial Sequence
  Cyclic GFR-binding peptide
  MOD_RES (5)..(5): Xaa is C or S
SSVKXQPSRVHHEPLPVVYYEYVRKKPKLEQLSNR

SEQ ID NO: 79162 - protein, 29 aa, Artificial Sequence
  Cyclic GFR-binding peptide
  MOD_RES (2)..(3): Xaa is C or S
PXXAPTKLRPVQVRKIDDSSNVIKKATVN

SEQ ID NO: 79163 - protein, 42 aa, Artificial Sequence; identical to SEQ ID NO: 29222
  Cyclic GFR-binding peptide
  MOD_RES (6)..(7)..(39)..(41): Xaa is C or S

SEQ ID NO: 79164 - protein, 43 aa, Artificial Sequence; identical to SEQ ID NO: 29224
  Cyclic GFR-binding peptide
  MOD_RES (3)..(40)..(42): Xaa is C or S

SEQ ID NO: 79165 - protein, 34 aa, Artificial Sequence; identical to SEQ ID NO: 29225
  Cyclic GFR-binding peptide
  MOD_RES (3)..(4): Xaa is C or S

SEQ ID NO: 79166 - protein, 33 aa, Artificial Sequence
  Cyclic GFR-binding peptide
  MOD_RES (6)..(7): Xaa is C or S
TVPKPXXAPTQLRSVKVAKVDDSSNVIKEVQVN

SEQ ID NO: 79167 - protein, 33 aa, Artificial Sequence
  Cyclic GFR-binding peptide
  MOD_RES (7)..(7): Xaa is C or S
HVTKPTXAPTKLRSVKVAKVDDSSNVIKEVQVN

SEQ ID NO: 79168 - protein, 32 aa, Artificial Sequence
  Cyclic GFR-binding peptide
  MOD_RES (29)..(31): Xaa is C or S
QLRSVKVAKVDDSSNVIKEVQVNMVVRAXGXH

SEQ ID NO: 79169 - protein, 28 aa, Artificial Sequence
  Cyclic GFR-binding peptide
  MOD_RES (28)..(28): Xaa is C or S
LRPVQVRKIDDSSNVIKKATVNMVVRSX

SEQ ID NO: 79170 - protein, 33 aa, Artificial Sequence
  Cyclic GFR-binding peptide
  MOD_RES (5)..(6): Xaa is C or S
IPKAXXVPTELRPVQMRKIDENEKVVKKATVDM

SEQ ID NO: 79171 - protein, 37 aa, Artificial Sequence; identical to SEQ ID NO: 29229
  Cyclic GFR-binding peptide
  MOD_RES (4)..(5)..(37): Xaa is C or S

SEQ ID NO: 79172 - protein, 34 aa, Artificial Sequence; identical to SEQ ID NO: 29230
  Cyclic GFR-binding peptide
  MOD_RES (2)..(3): Xaa is C or S

SEQ ID NO: 79173 - protein, 31 aa, Artificial Sequence
  Cyclic GFR-binding peptide
  MOD_RES (29)..(31): Xaa is C or S
QLSNITVQIMDDSSNVIIGEMSNMVVRAXGX

SEQ ID NO: 79174 - protein, 32 aa, Artificial Sequence
  Cyclic GFR-binding peptide
VHHEPLTVLYYEYVRKKPKLEQLSNRLEEHLE

SEQ ID NO: 79175 - protein, 29 aa, Artificial Sequence
  Cyclic GFR-binding peptide
  MOD_RES (29)..(29): Xaa is C or S
EPLPMVYYRIKPHQGQHEQLSNFLQHNKX

SEQ ID NO: 79176 - protein, 33 aa, Artificial Sequence; identical to SEQ ID NO: 29235
  Cyclic GFR-binding peptide
  MOD_RES (1)..(1): Xaa is C or S

SEQ ID NO: 79177 - protein, 32 aa, Artificial Sequence
  Cyclic GFR-binding peptide
  MOD_RES (2)..(2): Xaa is C or S
EXVPTEEEPLPMVYYRIKPHQGQHEQLSNFLQ

SEQ ID NO: 79178 - protein, 26 aa, Artificial Sequence
  Cyclic GFR-binding peptide
VPQDLSNITIQIMVGRTPKVIGEMSM

SEQ ID NO: 79179 - protein, 33 aa, Artificial Sequence; identical to SEQ ID NO: 29237
  Cyclic GFR-binding peptide

SEQ ID NO: 79180 - protein, 26 aa, Artificial Sequence
  Cyclic GFR-binding peptide
  MOD_RES (1)..(1): Xaa is C or S
XVPQALRSVKIAKVVGRKPKVKEVQV

SEQ ID NO: 79181 - protein, 29 aa, Artificial Sequence
  Cyclic GFR-binding peptide
  MOD_RES (29)..(29): Xaa is C or S
QDLRSVKIAKVIGKTPKIKEVQVMIVKSX

SEQ ID NO: 79182 - protein, 27 aa, Artificial Sequence
  Cyclic GFR-binding peptide
  MOD_RES (26)..(26): Xaa is C or S
SNITIQIMVGRTPKVIGEMSMVVKSXK

SEQ ID NO: 79183 - protein, 39 aa, Artificial Sequence; identical to SEQ ID NO: 29241
  Cyclic GFR-binding peptide
  MOD_RES (4)..(5)..(37)..(39): Xaa is C or S

SEQ ID NO: 79184 - protein, 34 aa, Artificial Sequence; identical to SEQ ID NO: 29243
  Cyclic GFR-binding peptide
  MOD_RES (1)..(2)..(33): Xaa is C or S

SEQ ID NO: 79185 - protein, 30 aa, Artificial Sequence
  Cyclic GFR-binding peptide
  MOD_RES (30)..(30): Xaa is C or S
SQDLRPVQIRKIIGKTPKIKKATVMIVKSX

SEQ ID NO: 79186 - protein, 31 aa, Artificial Sequence
  Cyclic GFR-binding peptide
  MOD_RES (1)..(2): Xaa is C or S
XXVSQDLSNITIQIMIGKTPKIIGEMSMIVK

SEQ ID NO: 79187 - protein, 35 aa, Artificial Sequence; identical to SEQ ID NO: 29244
  Cyclic GFR-binding peptide
  MOD_RES (3)..(4)..(35): Xaa is C or S

SEQ ID NO: 79188 - protein, 37 aa, Artificial Sequence; identical to SEQ ID NO: 29247
  Cyclic GFR-binding peptide
  MOD_RES (4)..(5)..(37): Xaa is C or S

SEQ ID NO: 79189 - protein, 21 aa, Artificial Sequence
  Cyclic GFR-binding peptide
SNITMQIMDEYDKVVIGEMSE

SEQ ID NO: 79190 - protein, 36 aa, Artificial Sequence; identical to SEQ ID NO: 29251
  Cyclic GFR-binding peptide
  MOD_RES (4)..(5): Xaa is C or S

SEQ ID NO: 79191 - protein, 32 aa, Artificial Sequence
  Cyclic GFR-binding peptide
  MOD_RES (2)..(3): Xaa is C or S
PXXVPQDLRPVQIRKIVGRTPKVKKATVMVVK

SEQ ID NO: 79192 - protein, 44 aa, Artificial Sequence; identical to SEQ ID NO: 29253
  Cyclic GFR-binding peptide
  MOD_RES (4)..(41)..(43): Xaa is C or S

SEQ ID NO: 79193 - protein, 26 aa, Artificial Sequence
  Cyclic GFR-binding peptide
  MOD_RES (1)..(1): Xaa is C or S
XVPTELSNITMQIMDENEKVVIGEMS

SEQ ID NO: 79194 - protein, 30 aa, Artificial Sequence
  Cyclic GFR-binding peptide
  MOD_RES (1)..(2): Xaa is C or S
XXAPTQLRSVKVAKVDDSSNVIKEVQVNMV

SEQ ID NO: 79195 - protein, 27 aa, Artificial Sequence
  Cyclic GFR-binding peptide
  MOD_RES (1)..(1): Xaa is C or S
XVPQDLRPVQIRKIVGRTPKVKKATVM

SEQ ID NO: 79196 - protein, 32 aa, Artificial Sequence
  Cyclic GFR-binding peptide
RPTQVQLEPLPVVYYEIVRKKPIFEQLSNTLE

SEQ ID NO: 79197 - protein, 33 aa, Artificial Sequence
  Cyclic GFR-binding peptide
  MOD_RES (3)..(4): Xaa is C or S
APXXVPQALSNITIQIMVGRKPKVIGEMSMIVR

SEQ ID NO: 79198 - protein, 39 aa, Artificial Sequence; identical to SEQ ID NO: 29262
  Cyclic GFR-binding peptide
  MOD_RES (4)..(4): Xaa is C or S

SEQ ID NO: 79199 - protein, 36 aa, Artificial Sequence; identical to SEQ ID NO: 29263
  Cyclic GFR-binding peptide
  MOD_RES (2)..(3)..(35): Xaa is C or S

SEQ ID NO: 79200 - protein, 34 aa, Artificial Sequence; identical to SEQ ID NO: 29267
  Cyclic GFR-binding peptide
  MOD_RES (3)..(4): Xaa is C or S

SEQ ID NO: 79201 - protein, 27 aa, Artificial Sequence
  Cyclic GFR-binding peptide
  MOD_RES (27)..(27): Xaa is C or S
LSNITIQIMIGKTPKIIGEMSMIVKSX

SEQ ID NO: 79202 - protein, 27 aa, Artificial Sequence
  Cyclic GFR-binding peptide
PTELSNITMQIMDENEKVVIGEMSDMV

SEQ ID NO: 79203 - protein, 32 aa, Artificial Sequence
  Cyclic GFR-binding peptide
  MOD_RES (2)..(3): Xaa is C or S
PXXVSQDLSNITIQIMIGKTPKIIGEMSMIVK

SEQ ID NO: 79204 - protein, 28 aa, Artificial Sequence
  Cyclic GFR-binding peptide
  MOD_RES (2)..(3): Xaa is C or S
PXXVPQDLRPVQIRKIVGRTPKVKKATV

SEQ ID NO: 79205 - protein, 42 aa, Artificial Sequence; identical to SEQ ID NO: 29272
  Cyclic GFR-binding peptide
  MOD_RES (4)..(41): Xaa is C or S

SEQ ID NO: 79206 - protein, 28 aa, Artificial Sequence
  Cyclic GFR-binding peptide
TELRPVQMRKIDENEKVVKKATVDMVVE

SEQ ID NO: 79207 - protein, 34 aa, Artificial Sequence; identical to SEQ ID NO: 29276
  Cyclic GFR-binding peptide
  MOD_RES (1)..(33): Xaa is C or S

SEQ ID NO: 79208 - protein, 26 aa, Artificial Sequence
  Cyclic GFR-binding peptide
ALSNITIQIMVGRKPKVIGEMSMIVR

SEQ ID NO: 79209 - protein, 36 aa, Artificial Sequence
  Cyclic GFR-binding peptide
  MOD_RES (6)..(6): Xaa is C or S
DEGLEXVPTEEEPLPMVYYRIKPHQGQHEQLSNFLQ

SEQ ID NO: 79210 - protein, 34 aa, Artificial Sequence; identical to SEQ ID NO: 29284
  Cyclic GFR-binding peptide
  MOD_RES (1)..(32)..(34): Xaa is C or S

SEQ ID NO: 79211 - protein, 29 aa, Artificial Sequence
  Cyclic GFR-binding peptide
SQDLRPVQIRKIIGKTPKIKKATVMIVKS

SEQ ID NO: 79212 - protein, 30 aa, Artificial Sequence
  Cyclic GFR-binding peptide
  MOD_RES (3)..(3): Xaa is C or S
PTXAPTKLRSVKVAKVDDSSNVIKEVQVNM

SEQ ID NO: 79213 - protein, 40 aa, Artificial Sequence; identical to SEQ ID NO: 29291
  Cyclic GFR-binding peptide
  MOD_RES (5)..(6)..(38)..(40): Xaa is C or S

SEQ ID NO: 79214 - protein, 30 aa, Artificial Sequence
  Cyclic GFR-binding peptide
  MOD_RES (2)..(3): Xaa is C or S
PXXVSQDLSNITIQIMIGKTPKIIGEMSMI

SEQ ID NO: 79215 - protein, 22 aa, Artificial Sequence
  Cyclic GFR-binding peptide
ELRSVKMAKVDEYDKVVKEVQV

SEQ ID NO: 79216 - protein, 26 aa, Artificial Sequence
  Cyclic GFR-binding peptide
VPQALSNITIQIMVGRKPKVIGEMSM

SEQ ID NO: 79217 - protein, 34 aa, Artificial Sequence
  Cyclic GFR-binding peptide
  MOD_RES (1)..(1): Xaa is C or S
XRPTQVQLEPLPVVYYEIVRKKPIFEQLSNTLED

SEQ ID NO: 79218 - protein, 24 aa, Artificial Sequence
  Cyclic GFR-binding peptide
QLEPLTVLYYEIVRKKPIFEQLSN

SEQ ID NO: 79219 - protein, 35 aa, Artificial Sequence; identical to SEQ ID NO: 29302
  Cyclic GFR-binding peptide
  MOD_RES (1)..(33)..(35): Xaa is C or S

SEQ ID NO: 79220 - protein, 26 aa, Artificial Sequence
  Cyclic GFR-binding peptide
TELRSVKMAKVDENEKVVKEVQVDMV

SEQ ID NO: 79221 - protein, 24 aa, Artificial Sequence
  Cyclic GFR-binding peptide
EEPLPMVYYRIKPHQGQHEQLSNF

SEQ ID NO: 79222 - protein, 35 aa, Artificial Sequence; identical to SEQ ID NO: 29309
  Cyclic GFR-binding peptide
  MOD_RES (1)..(2)..(34): Xaa is C or S

SEQ ID NO: 79223 - protein, 31 aa, Artificial Sequence
  Cyclic GFR-binding peptide
  MOD_RES (28)..(30): Xaa is C or S
LSNITMQIMDENEKVVIGEMSDMVVEGXGXR

SEQ ID NO: 79224 - protein, 32 aa, Artificial Sequence
  Cyclic GFR-binding peptide
  MOD_RES (6)..(7): Xaa is C or S
KIPKAXXVPTELRSVKMAKVDENEKVVKEVQV

SEQ ID NO: 79225 - protein, 35 aa, Artificial Sequence; identical to SEQ ID NO: 29313
  Cyclic GFR-binding peptide
  MOD_RES (3)..(35): Xaa is C or S

SEQ ID NO: 79226 - protein, 25 aa, Artificial Sequence
  Cyclic GFR-binding peptide
KLRPVQVRKIDDSSNVIKKATVNMV

SEQ ID NO: 79227 - protein, 24 aa, Artificial Sequence
  Cyclic GFR-binding peptide
LSNITIQIMVGRTPKVIGEMSMVV

SEQ ID NO: 79228 - protein, 25 aa, Artificial Sequence
  Cyclic GFR-binding peptide
RPVQIRKIIGKTPKIKKATVMIVKS

SEQ ID NO: 79229 - protein, 30 aa, Artificial Sequence
  Cyclic GFR-binding peptide
  MOD_RES (29)..(29): Xaa is C or S
QLRPVQVRKIDDSSNVIKKATVNMVVRAXG

SEQ ID NO: 79230 - protein, 22 aa, Artificial Sequence
  Cyclic GFR-binding peptide
LRSVKIAKVVGRTPKVKEVQVM

SEQ ID NO: 79231 - protein, 36 aa, Artificial Sequence
  Cyclic GFR-binding peptide
  MOD_RES (6)..(7): Xaa is C or S
ASAAPXXVPQALSNITIQIMVGRKPKVIGEMSMIVR

SEQ ID NO: 79232 - protein, 33 aa, Artificial Sequence
  Cyclic GFR-binding peptide
  MOD_RES (4)..(5): Xaa is C or S
PKPXXAPTQLRPVQVRKIDDSSNVIKKATVNMV

SEQ ID NO: 79233 - protein, 33 aa, Artificial Sequence; identical to SEQ ID NO: 29321
  Cyclic GFR-binding peptide
  MOD_RES (1)..(33): Xaa is C or S

SEQ ID NO: 79234 - protein, 36 aa, Artificial Sequence; identical to SEQ ID NO: 29326
  Cyclic GFR-binding peptide
  MOD_RES (2)..(3)..(35): Xaa is C or S

SEQ ID NO: 79235 - protein, 22 aa, Artificial Sequence
  Cyclic GFR-binding peptide
DLRSVKIAKVVGRTPKVKEVQV

SEQ ID NO: 79236 - protein, 33 aa, Artificial Sequence
  Cyclic GFR-binding peptide
  MOD_RES (4)..(5): Xaa is C or S
PKPXXAPTQLRSVKVAKVDDSSNVIKEVQVNMV

SEQ ID NO: 79237 - protein, 29 aa, Artificial Sequence
  Cyclic GFR-binding peptide
  MOD_RES (3)..(4): Xaa is C or S
KPXXAPTKLRPVQVRKIDDSSNVIKKATV

SEQ ID NO: 79238 - protein, 33 aa, Artificial Sequence
  Cyclic GFR-binding peptide
  MOD_RES (2)..(2): Xaa is C or S
KXQPSRVHHEPLTVLYYEYVRKKPKLEQLSNRL

SEQ ID NO: 79239 - protein, 34 aa, Artificial Sequence
  Cyclic GFR-binding peptide
  MOD_RES (6)..(7): Xaa is C or S
SIPKAXXVPTELRPVQMRKIDEYDKVVKKATVEM

SEQ ID NO: 79240 - protein, 37 aa, Artificial Sequence; identical to SEQ ID NO: 29332
  Cyclic GFR-binding peptide
  MOD_RES (3)..(4)..(36): Xaa is C or S

SEQ ID NO: 79241 - protein, 31 aa, Artificial Sequence
  Cyclic GFR-binding peptide
  MOD_RES (29)..(31): Xaa is C or S
QDLSNITIQIMVGRTPKVIGEMSMVVKSXKX

SEQ ID NO: 79242 - protein, 27 aa, Artificial Sequence
  Cyclic GFR-binding peptide
  MOD_RES (1)..(2): Xaa is C or S
XXVPTELRPVQMRKIDEYDKVVKKATV

SEQ ID NO: 79243 - protein, 31 aa, Artificial Sequence
  Cyclic GFR-binding peptide
  MOD_RES (5)..(6): Xaa is C or S
IPKAXXVPTELSNITMQIMDEYDKVVIGEMS

SEQ ID NO: 79244 - protein, 41 aa, Artificial Sequence; identical to SEQ ID NO: 29336
  Cyclic GFR-binding peptide
  MOD_RES (5)..(6)..(38)..(40): Xaa is C or S

SEQ ID NO: 79245 - protein, 29 aa, Artificial Sequence
  Cyclic GFR-binding peptide
  MOD_RES (28)..(28): Xaa is C or S
DLRSVKIAKVIGKTPKIKEVQVMIVKSXK

SEQ ID NO: 79246 - protein, 27 aa, Artificial Sequence
  Cyclic GFR-binding peptide
  MOD_RES (1)..(1): Xaa is C or S
XVSQDLRPVQIRKIIGKTPKIKKATVM

SEQ ID NO: 79247 - protein, 34 aa, Artificial Sequence
  Cyclic GFR-binding peptide
  MOD_RES (4)..(5): Xaa is C or S
PKAXXVPTELSNITMQIMDEYDKVVIGEMSEMVV

SEQ ID NO: 79248 - protein, 34 aa, Artificial Sequence
  Cyclic GFR-binding peptide
  MOD_RES (2)..(2): Xaa is C or S
QXRPTQVQLEPLPVVYYEIVRKKPIFEQLSNTLE

SEQ ID NO: 79249 - protein, 25 aa, Artificial Sequence
  Cyclic GFR-binding peptide
EPLTVLYYEYVRKKPKLEQLSNRLE

SEQ ID NO: 79250 - protein, 32 aa, Artificial Sequence
  Cyclic GFR-binding peptide
  MOD_RES (2)..(3): Xaa is C or S
AXXVPTELRPVQMRKIDENEKVVKKATVDMVV

SEQ ID NO: 79251 - protein, 31 aa, Artificial Sequence
  Cyclic GFR-binding peptide
  MOD_RES (5)..(6): Xaa is C or S
SASPXXVSQDLSNITIQIMIGKTPKIIGEMS

SEQ ID NO: 79252 - protein, 32 aa, Artificial Sequence; identical to SEQ ID NO: 29347
  Cyclic GFR-binding peptide
  MOD_RES (32)..(32): Xaa is C or S

SEQ ID NO: 79253 - protein, 27 aa, Artificial Sequence
  Cyclic GFR-binding peptide
PTELRSVKMAKVDEYDKVVKEVQVEMV

SEQ ID NO: 79254 - protein, 31 aa, Artificial Sequence
  Cyclic GFR-binding peptide
  MOD_RES (30)..(30): Xaa is C or S
TKLSNITVQIMDDSSNVIIGEMSNMVVRSXG

SEQ ID NO: 79255 - protein, 31 aa, Artificial Sequence
  Cyclic GFR-binding peptide
  MOD_RES (30)..(30): Xaa is C or S
SQDLSNITIQIMIGKTPKIIGEMSMIVKSXK

SEQ ID NO: 79256 - protein, 34 aa, Artificial Sequence; identical to SEQ ID NO: 29351
  Cyclic GFR-binding peptide

SEQ ID NO: 79257 - protein, 24 aa, Artificial Sequence
  Cyclic GFR-binding peptide
RPVQMRKIDEYDKVVKKATVEMVV

SEQ ID NO: 79258 - protein, 30 aa, Artificial Sequence
  Cyclic GFR-binding peptide
  MOD_RES (28)..(30): Xaa is C or S
LRSVKMAKVDEYDKVVKEVQVEMVVEGXGX

SEQ ID NO: 79259 - protein, 32 aa, Artificial Sequence
  Cyclic GFR-binding peptide
  MOD_RES (29)..(31): Xaa is C or S
ELRPVQMRKIDEYDKVVKKATVEMVVEGXGXR

SEQ ID NO: 79260 - protein, 32 aa, Artificial Sequence
  Cyclic GFR-binding peptide
  MOD_RES (3)..(4): Xaa is C or S
KPXXAPTKLSNITVQIMDDSSNVIIGEMSNMV

SEQ ID NO: 79261 - protein, 29 aa, Artificial Sequence
  Cyclic GFR-binding peptide
  MOD_RES (28)..(28): Xaa is C or S
LRPVQVRKIDDSSNVIKKATVNMVVRSXG

SEQ ID NO: 79262 - protein, 29 aa, Artificial Sequence
  Cyclic GFR-binding peptide
VPTELSNITMQIMDEYDKVVIGEMSEMVV

SEQ ID NO: 79263 - protein, 30 aa, Artificial Sequence
  Cyclic GFR-binding peptide
  MOD_RES (29)..(29): Xaa is C or S
KLRSVKVAKVDDSSNVIKEVQVNMVVRSXG

SEQ ID NO: 79264 - protein, 32 aa, Artificial Sequence
  Cyclic GFR-binding peptide
  MOD_RES (30)..(32): Xaa is C or S
SQDLRPVQIRKIIGKTPKIKKATVMIVKSXKX

SEQ ID NO: 79265 - protein, 33 aa, Artificial Sequence; identical to SEQ ID NO: 29355
  Cyclic GFR-binding peptide
  MOD_RES (1)..(2): Xaa is C or S

SEQ ID NO: 79266 - protein, 33 aa, Artificial Sequence; identical to SEQ ID NO: 29359
  Cyclic GFR-binding peptide
  MOD_RES (1)..(1): Xaa is C or S

SEQ ID NO: 79267 - protein, 31 aa, Artificial Sequence
  Cyclic GFR-binding peptide
  MOD_RES (2)..(2): Xaa is C or S
EXVPTEEEPLPMVYYRIKPHQGQHEQLSNFL

SEQ ID NO: 79268 - protein, 21 aa, Artificial Sequence
  Cyclic GFR-binding peptide
LRSVKVAKVDDSSNVIKEVQV

SEQ ID NO: 79269 - protein, 34 aa, Artificial Sequence; identical to SEQ ID NO: 29361
  Cyclic GFR-binding peptide
  MOD_RES (3)..(4): Xaa is C or S

SEQ ID NO: 79270 - protein, 36 aa, Artificial Sequence; identical to SEQ ID NO: 29360
  Cyclic GFR-binding peptide
  MOD_RES (4)..(5)..(36): Xaa is C or S

SEQ ID NO: 79271 - protein, 40 aa, Artificial Sequence; identical to SEQ ID NO: 29362
  Cyclic GFR-binding peptide
  MOD_RES (5)..(5): Xaa is C or S

SEQ ID NO: 79272 - protein, 30 aa, Artificial Sequence
  Cyclic GFR-binding peptide
  MOD_RES (30)..(30): Xaa is C or S
TKLSNITVQIMDDSSNVIIGEMSNMVVRSX

SEQ ID NO: 79273 - protein, 38 aa, Artificial Sequence; identical to SEQ ID NO: 29369
  Cyclic GFR-binding peptide
  MOD_RES (6)..(7): Xaa is C or S

SEQ ID NO: 79274 - protein, 27 aa, Artificial Sequence
  Cyclic GFR-binding peptide
  MOD_RES (1)..(1): Xaa is C or S
XVSQDLRSVKIAKVIGKTPKIKEVQVM

SEQ ID NO: 79275 - protein, 30 aa, Artificial Sequence
  Cyclic GFR-binding peptide
  MOD_RES (1)..(2): Xaa is C or S
XXVSQDLSNITIQIMIGKTPKIIGEMSMIV

SEQ ID NO: 79276 - protein, 33 aa, Artificial Sequence
  Cyclic GFR-binding peptide
  MOD_RES (6)..(7): Xaa is C or S
ASASPXXVPQDLRPVQIRKIVGRTPKVKKATVM

SEQ ID NO: 79277 - protein, 34 aa, Artificial Sequence
  Cyclic GFR-binding peptide
  MOD_RES (6)..(6): Xaa is C or S
VTKPTXAPTKLRSVKVAKVDDSSNVIKEVQVNMV

SEQ ID NO: 79278 - protein, 34 aa, Artificial Sequence; identical to SEQ ID NO: 29377
  Cyclic GFR-binding peptide
  MOD_RES (1)..(2)..(34): Xaa is C or S

SEQ ID NO: 79279 - protein, 35 aa, Artificial Sequence
  Cyclic GFR-binding peptide
  MOD_RES (32)..(34): Xaa is C or S
QLEPLTVLYYEIVRKKPIFEQLSNTLEDHLAXKXE

SEQ ID NO: 79280 - protein, 27 aa, Artificial Sequence
  Cyclic GFR-binding peptide
APTKLRSVKVAKVDDSSNVIKEVQVNM

SEQ ID NO: 79281 - protein, 36 aa, Artificial Sequence
  Cyclic GFR-binding peptide
  MOD_RES (6)..(7): Xaa is C or S
TVPKPXXAPTQLSNITVQIMDDSSNVIIGEMSNMVV

SEQ ID NO: 79282 - protein, 33 aa, Artificial Sequence; identical to SEQ ID NO: 29382
  Cyclic GFR-binding peptide
  MOD_RES (31)..(33): Xaa is C or S

SEQ ID NO: 79283 - protein, 31 aa, Artificial Sequence
  Cyclic GFR-binding peptide
  MOD_RES (3)..(4): Xaa is C or S
SPXXVPQDLRSVKIAKVVGRTPKVKEVQVMV

SEQ ID NO: 79284 - protein, 38 aa, Artificial Sequence; identical to SEQ ID NO: 29385
  Cyclic GFR-binding peptide
  MOD_RES (7)..(7): Xaa is C or S

SEQ ID NO: 79285 - protein, 32 aa, Artificial Sequence
  Cyclic GFR-binding peptide
  MOD_RES (29)..(31): Xaa is C or S
QDLRPVQIRKIVGRTPKVKKATVMVVKSXKXS

SEQ ID NO: 79286 - protein, 36 aa, Artificial Sequence; identical to SEQ ID NO: 29390
  Cyclic GFR-binding peptide
  MOD_RES (34)..(36): Xaa is C or S

SEQ ID NO: 79287 - protein, 33 aa, Artificial Sequence
  Cyclic GFR-binding peptide
QVQLEPLTVLYYEIVRKKPIFEQLSNTLEDHLA

SEQ ID NO: 79288 - protein, 31 aa, Artificial Sequence
  Cyclic GFR-binding peptide
  MOD_RES (5)..(6): Xaa is C or S
VPKPXXAPTQLSNITVQIMDDSSNVIIGEMS

SEQ ID NO: 79289 - protein, 34 aa, Artificial Sequence
  Cyclic GFR-binding peptide
  MOD_RES (2)..(2): Xaa is C or S
KXQPSRVHHEPLTVLYYEYVRKKPKLEQLSNRLE

SEQ ID NO: 79290 - protein, 32 aa, Artificial Sequence; identical to SEQ ID NO: 29396
  Cyclic GFR-binding peptide
  MOD_RES (1)..(32): Xaa is C or S

SEQ ID NO: 79291 - protein, 34 aa, Artificial Sequence; identical to SEQ ID NO: 29397
  Cyclic GFR-binding peptide
  MOD_RES (2)..(34): Xaa is C or S

SEQ ID NO: 79292 - protein, 34 aa, Artificial Sequence
  Cyclic GFR-binding peptide
  MOD_RES (5)..(6): Xaa is C or S
SASPXXVSQDLRPVQIRKIIGKTPKIKKATVMIV

SEQ ID NO: 79293 - protein, 28 aa, Artificial Sequence
  Cyclic GFR-binding peptide
RVHHEPLTVLYYEYVRKKPKLEQLSNRL

SEQ ID NO: 79294 - protein, 23 aa, Artificial Sequence
  Cyclic GFR-binding peptide
TKLRSVKVAKVDDSSNVIKEVQV

SEQ ID NO: 79295 - protein, 24 aa, Artificial Sequence
  Cyclic GFR-binding peptide
LRPVQMRKIDEYDKVVKKATVEMV

SEQ ID NO: 79296 - protein, 26 aa, Artificial Sequence
  Cyclic GFR-binding peptide
KLSNITVQIMDDSSNVIIGEMSNMVV

SEQ ID NO: 79297 - protein, 29 aa, Artificial Sequence
  Cyclic GFR-binding peptide
  MOD_RES (1)..(2): Xaa is C or S
XXAPTQLRPVQVRKIDDSSNVIKKATVNM

SEQ ID NO: 79298 - protein, 40 aa, Artificial Sequence; identical to SEQ ID NO: 29400
  Cyclic GFR-binding peptide
  MOD_RES (6)..(7)..(39): Xaa is C or S

SEQ ID NO: 79299 - protein, 31 aa, Artificial Sequence; identical to SEQ ID NO: 29401
  Cyclic GFR-binding peptide
  MOD_RES (1)..(1): Xaa is C or S

SEQ ID NO: 79300 - protein, 28 aa, Artificial Sequence
  Cyclic GFR-binding peptide
VPTELSNITMQIMDEYDKVVIGEMSEMV

SEQ ID NO: 79301 - protein, 28 aa, Artificial Sequence
  Cyclic GFR-binding peptide
  MOD_RES (27)..(27): Xaa is C or S
LRPVQIRKIVGRTPKVKKATVMVVKSXK

SEQ ID NO: 79302 - protein, 33 aa, Artificial Sequence
  Cyclic GFR-binding peptide
  MOD_RES (31)..(33): Xaa is C or S
PTELRPVQMRKIDENEKVVKKATVDMVVEGXGX

SEQ ID NO: 79303 - protein, 33 aa, Artificial Sequence
  Cyclic GFR-binding peptide
  MOD_RES (4)..(5): Xaa is C or S
PKPXXAPTQLSNITVQIMDDSSNVIIGEMSNMV

SEQ ID NO: 79304 - protein, 36 aa, Artificial Sequence
  Cyclic GFR-binding peptide
  MOD_RES (6)..(7): Xaa is C or S
YVPKPXXAPTKLSNITVQIMDDSSNVIIGEMSNMVV

SEQ ID NO: 79305 - protein, 27 aa, Artificial Sequence
  Cyclic GFR-binding peptide
  MOD_RES (27)..(27): Xaa is C or S
RPVQMRKIDEYDKVVKKATVEMVVEGX

SEQ ID NO: 79306 - protein, 28 aa, Artificial Sequence
  Cyclic GFR-binding peptide
PTELRPVQMRKIDENEKVVKKATVDMVV

SEQ ID NO: 79307 - protein, 37 aa, Artificial Sequence; identical to SEQ ID NO: 29409
  Cyclic GFR-binding peptide
  MOD_RES (1)..(2)..(34)..(36): Xaa is C or S

SEQ ID NO: 79308 - protein, 30 aa, Artificial Sequence
  Cyclic GFR-binding peptide
  MOD_RES (30)..(30): Xaa is C or S
EPLPVVYYEYVRKKPKLEQLSNRLEEHLEX

SEQ ID NO: 79309 - protein, 27 aa, Artificial Sequence
  Cyclic GFR-binding peptide
  MOD_RES (1)..(2): Xaa is C or S
XXAPTQLSNITVQIMDDSSNVIIGEMS

SEQ ID NO: 79310 - protein, 28 aa, Artificial Sequence
  Cyclic GFR-binding peptide
  MOD_RES (27)..(27): Xaa is C or S
RPVQVRKIDDSSNVIKKATVNMVVRAXG

SEQ ID NO: 79311 - protein, 41 aa, Artificial Sequence; identical to SEQ ID NO: 29417
  Cyclic GFR-binding peptide
  MOD_RES (5)..(6)..(38)..(40): Xaa is C or S

SEQ ID NO: 79312 - protein, 24 aa, Artificial Sequence
  Cyclic GFR-binding peptide
PTELSNITMQIMDENEKVVIGEMS

SEQ ID NO: 79313 - protein, 34 aa, Artificial Sequence; identical to SEQ ID NO: 29419
  Cyclic GFR-binding peptide
  MOD_RES (2)..(34): Xaa is C or S

SEQ ID NO: 79314 - protein, 25 aa, Artificial Sequence
  Cyclic GFR-binding peptide
VSQDLRSVKIAKVIGKTPKIKEVQV

SEQ ID NO: 79315 - protein, 33 aa, Artificial Sequence
  Cyclic GFR-binding peptide
  MOD_RES (2)..(2): Xaa is C or S
QXRPTQVQLEPLPVVYYEIVRKKPIFEQLSNTL

SEQ ID NO: 79316 - protein, 25 aa, Artificial Sequence
  Cyclic GFR-binding peptide
DLSNITIQIMIGKTPKIIGEMSMIV

SEQ ID NO: 79317 - protein, 21 aa, Artificial Sequence
  Cyclic GFR-binding peptide
LRPVQIRKIIGKTPKIKKATV

SEQ ID NO: 79318 - protein, 39 aa, Artificial Sequence; identical to SEQ ID NO: 29424
  Cyclic GFR-binding peptide
  MOD_RES (5)..(5): Xaa is C or S

SEQ ID NO: 79319 - protein, 31 aa, Artificial Sequence
  Cyclic GFR-binding peptide
  MOD_RES (2)..(3): Xaa is C or S
PXXVPQDLSNITIQIMVGRTPKVIGEMSMVV

SEQ ID NO: 79320 - protein, 27 aa, Artificial Sequence
  Cyclic GFR-binding peptide
PTELSNITMQIMDEYDKVVIGEMSEMV

SEQ ID NO: 79321 - protein, 27 aa, Artificial Sequence
  Cyclic GFR-binding peptide
  MOD_RES (1)..(1): Xaa is C or S
XAPTQLSNITVQIMDDSSNVIIGEMSN

SEQ ID NO: 79322 - protein, 29 aa, Artificial Sequence
  Cyclic GFR-binding peptide
  MOD_RES (29)..(29): Xaa is C or S
QLRPVQVRKIDDSSNVIKKATVNMVVRAX

SEQ ID NO: 79323 - protein, 33 aa, Artificial Sequence
  Cyclic GFR-binding peptide
  MOD_RES (32)..(32): Xaa is C or S
TEEEPLPMVYYRIKPHQGQHEQLSNFLQHNKXE

SEQ ID NO: 79324 - protein, 26 aa, Artificial Sequence
  Cyclic GFR-binding peptide
LRPVQIRKIVGRTPKVKKATVMVVKS

SEQ ID NO: 79325 - protein, 31 aa, Artificial Sequence
  Cyclic GFR-binding peptide
  MOD_RES (1)..(2): Xaa is C or S
XXAPTKLRSVKVAKVDDSSNVIKEVQVNMVV

SEQ ID NO: 79326 - protein, 34 aa, Artificial Sequence; identical to SEQ ID NO: 29431
  Cyclic GFR-binding peptide
  MOD_RES (1)..(2)..(33): Xaa is C or S

SEQ ID NO: 79327 - protein, 27 aa, Artificial Sequence
  Cyclic GFR-binding peptide
APTKLSNITVQIMDDSSNVIIGEMSNM

SEQ ID NO: 79328 - protein, 29 aa, Artificial Sequence
  Cyclic GFR-binding peptide
  MOD_RES (28)..(28): Xaa is C or S
LSNITVQIMDDSSNVIIGEMSNMVVRAXG

SEQ ID NO: 79329 - protein, 32 aa, Artificial Sequence
  Cyclic GFR-binding peptide
  MOD_RES (30)..(32): Xaa is C or S
EEPLPMVYYRIKPHQGQHEQLSNFLQHNKXEX

SEQ ID NO: 79330 - protein, 25 aa, Artificial Sequence
  Cyclic GFR-binding peptide
ALSNITIQIMVGRKPKVIGEMSMIV

SEQ ID NO: 79331 - protein, 27 aa, Artificial Sequence
  Cyclic GFR-binding peptide
  MOD_RES (27)..(27): Xaa is C or S
SNITVQIMDDSSNVIIGEMSNMVVRSX

SEQ ID NO: 79332 - protein, 29 aa, Artificial Sequence
  Cyclic GFR-binding peptide
  MOD_RES (27)..(29): Xaa is C or S
LRSVKIAKVVGRKPKVKEVQVMIVRSXKX

SEQ ID NO: 79333 - protein, 37 aa, Artificial Sequence; identical to SEQ ID NO: 29432
  Cyclic GFR-binding peptide
  MOD_RES (6)..(7): Xaa is C or S

SEQ ID NO: 79334 - protein, 34 aa, Artificial Sequence
  Cyclic GFR-binding peptide
  MOD_RES (5)..(5): Xaa is C or S
TKPTXAPTKLSNITVQIMDDSSNVIIGEMSNMVV

SEQ ID NO: 79335 - protein, 40 aa, Artificial Sequence; identical to SEQ ID NO: 29434
  Cyclic GFR-binding peptide
  MOD_RES (4)..(5)..(37)..(39): Xaa is C or S

SEQ ID NO: 79336 - protein, 34 aa, Artificial Sequence
  Cyclic GFR-binding peptide
  MOD_RES (6)..(6): Xaa is C or S
VTKPTXAPTKLSNITVQIMDDSSNVIIGEMSNMV

SEQ ID NO: 79337 - protein, 37 aa, Artificial Sequence; identical to SEQ ID NO: 29437
  Cyclic GFR-binding peptide
  MOD_RES (2)..(3)..(35)..(37): Xaa is C or S

SEQ ID NO: 79338 - protein, 25 aa, Artificial Sequence
  Cyclic GFR-binding peptide
LRSVKMAKVDENEKVVKEVQVDMVV

SEQ ID NO: 79339 - protein, 34 aa, Artificial Sequence
  Cyclic GFR-binding peptide
  MOD_RES (5)..(5): Xaa is C or S
RNVQXRPTQVQLEPLPVVYYEIVRKKPIFEQLSN

SEQ ID NO: 79340 - protein, 38 aa, Artificial Sequence; identical to SEQ ID NO: 29444
  Cyclic GFR-binding peptide
  MOD_RES (6)..(7): Xaa is C or S

SEQ ID NO: 79341 - protein, 33 aa, Artificial Sequence; identical to SEQ ID NO: 29445
  Cyclic GFR-binding peptide
  MOD_RES (3)..(3): Xaa is C or S

SEQ ID NO: 79342 - protein, 24 aa, Artificial Sequence
  Cyclic GFR-binding peptide
SNITVQIMDDSSNVIIGEMSNMVV

SEQ ID NO: 79343 - protein, 31 aa, Artificial Sequence
  Cyclic GFR-binding peptide
  MOD_RES (4)..(5): Xaa is C or S
AAPXXVPQALRPVQIRKIVGRKPKVKKATVM

SEQ ID NO: 79344 - protein, 33 aa, Artificial Sequence; identical to SEQ ID NO: 29449
  Cyclic GFR-binding peptide
  MOD_RES (1)..(32): Xaa is C or S

SEQ ID NO: 79345 - protein, 40 aa, Artificial Sequence; identical to SEQ ID NO: 29450
  Cyclic GFR-binding peptide
  MOD_RES (4)..(5)..(37)..(39): Xaa is C or S

SEQ ID NO: 79346 - protein, 25 aa, Artificial Sequence
  Cyclic GFR-binding peptide
DLRPVQIRKIIGKTPKIKKATVMIV

SEQ ID NO: 79347 - protein, 39 aa, Artificial Sequence; identical to SEQ ID NO: 29451
  Cyclic GFR-binding peptide
  MOD_RES (4)..(5)..(36)..(38): Xaa is C or S

SEQ ID NO: 79348 - protein, 39 aa, Artificial Sequence; identical to SEQ ID NO: 29452
  Cyclic GFR-binding peptide
  MOD_RES (37)..(39): Xaa is C or S

SEQ ID NO: 79349 - protein, 27 aa, Artificial Sequence
  Cyclic GFR-binding peptide
  MOD_RES (27)..(27): Xaa is C or S
RSVKMAKVDEYDKVVKEVQVEMVVEGX

SEQ ID NO: 79350 - protein, 43 aa, Artificial Sequence; identical to SEQ ID NO: 29454
  Cyclic GFR-binding peptide
  MOD_RES (6)..(40)..(42): Xaa is C or S

SEQ ID NO: 79351 - protein, 25 aa, Artificial Sequence
  Cyclic GFR-binding peptide
APTKLSNITVQIMDDSSNVIIGEMS

SEQ ID NO: 79352 - protein, 34 aa, Artificial Sequence
  Cyclic GFR-binding peptide
  MOD_RES (31)..(33): Xaa is C or S
HEPLTVLYYEYVRKKPKLEQLSNRLEEHLEXAXA

SEQ ID NO: 79353 - protein, 27 aa, Artificial Sequence
  Cyclic GFR-binding peptide
ALRSVKIAKVVGRKPKVKEVQVMIVRS

SEQ ID NO: 79354 - protein, 38 aa, Artificial Sequence; identical to SEQ ID NO: 29462
  Cyclic GFR-binding peptide
  MOD_RES (2)..(2): Xaa is C or S

SEQ ID NO: 79355 - protein, 33 aa, Artificial Sequence; identical to SEQ ID NO: 29464
  Cyclic GFR-binding peptide
  MOD_RES (1)..(33): Xaa is C or S

SEQ ID NO: 79356 - protein, 30 aa, Artificial Sequence
  Cyclic GFR-binding peptide
  MOD_RES (3)..(4): Xaa is C or S
KPXXAPTQLRSVKVAKVDDSSNVIKEVQVN

SEQ ID NO: 79357 - protein, 29 aa, Artificial Sequence
  Cyclic GFR-binding peptide
VPQALRPVQIRKIVGRKPKVKKATVMIVR

SEQ ID NO: 79358 - protein, 32 aa, Artificial Sequence
  Cyclic GFR-binding peptide
  MOD_RES (5)..(5): Xaa is C or S
TKPTXAPTKLSNITVQIMDDSSNVIIGEMSNM

SEQ ID NO: 79359 - protein, 26 aa, Artificial Sequence
  Cyclic GFR-binding peptide
  MOD_RES (1)..(1): Xaa is C or S
XVPQDLRSVKIAKVVGRTPKVKEVQV

SEQ ID NO: 79360 - protein, 33 aa, Artificial Sequence
  Cyclic GFR-binding peptide
  MOD_RES (5)..(6): Xaa is C or S
SASPXXVSQDLSNITIQIMIGKTPKIIGEMSMI

SEQ ID NO: 79361 - protein, 31 aa, Artificial Sequence
  Cyclic GFR-binding peptide
  MOD_RES (2)..(3): Xaa is C or S
PXXVPQALRPVQIRKIVGRKPKVKKATVMIV

SEQ ID NO: 79362 - protein, 35 aa, Artificial Sequence; identical to SEQ ID NO: 29481
  Cyclic GFR-binding peptide
  MOD_RES (3)..(4): Xaa is C or S

SEQ ID NO: 79363 - protein, 41 aa, Artificial Sequence; identical to SEQ ID NO: 29483
  Cyclic GFR-binding peptide
  MOD_RES (4)..(41): Xaa is C or S

SEQ ID NO: 79364 - protein, 38 aa, Artificial Sequence; identical to SEQ ID NO: 29484
  Cyclic GFR-binding peptide
  MOD_RES (5)..(6)..(38): Xaa is C or S

SEQ ID NO: 79365 - protein, 36 aa, Artificial Sequence; identical to SEQ ID NO: 29487
  Cyclic GFR-binding peptide
  MOD_RES (34)..(36): Xaa is C or S

SEQ ID NO: 79366 - protein, 32 aa, Artificial Sequence
  Cyclic GFR-binding peptide
  MOD_RES (1)..(1): Xaa is C or S
XVPTEEEPLPMVYYRIKPHQGQHEQLSNFLQH

SEQ ID NO: 79367 - protein, 26 aa, Artificial Sequence
  Cyclic GFR-binding peptide
VSQDLRPVQIRKIIGKTPKIKKATVM

SEQ ID NO: 79368 - protein, 28 aa, Artificial Sequence
  Cyclic GFR-binding peptide
APTQLRSVKVAKVDDSSNVIKEVQVNMV

SEQ ID NO: 79369 - protein, 29 aa, Artificial Sequence
  Cyclic GFR-binding peptide
  MOD_RES (1)..(1): Xaa is C or S
XAPTKLRPVQVRKIDDSSNVIKKATVNMV

SEQ ID NO: 79370 - protein, 40 aa, Artificial Sequence; identical to SEQ ID NO: 29495
  Cyclic GFR-binding peptide
  MOD_RES (6)..(7)..(39): Xaa is C or S

SEQ ID NO: 79371 - protein, 24 aa, Artificial Sequence
  Cyclic GFR-binding peptide
RPVQMRKIDENEKVVKKATVDMVV

SEQ ID NO: 79372 - protein, 29 aa, Artificial Sequence
  Cyclic GFR-binding peptide
  MOD_RES (1)..(2): Xaa is C or S
XXAPTKLRPVQVRKIDDSSNVIKKATVNM

SEQ ID NO: 79373 - protein, 28 aa, Artificial Sequence
  Cyclic GFR-binding peptide
  MOD_RES (26)..(28): Xaa is C or S
RSVKIAKVVGRKPKVKEVQVMIVRSXKX

SEQ ID NO: 79374 - protein, 29 aa, Artificial Sequence
  Cyclic GFR-binding peptide
EPLPVVYYEYVRKKPKLEQLSNRLEEHLE

SEQ ID NO: 79375 - protein, 25 aa, Artificial Sequence
  Cyclic GFR-binding peptide
RPVQMRKIDEYDKVVKKATVEMVVE

SEQ ID NO: 79376 - protein, 32 aa, Artificial Sequence
  Cyclic GFR-binding peptide
  MOD_RES (2)..(3): Xaa is C or S
AXXVPTELRSVKMAKVDENEKVVKEVQVDMVV

SEQ ID NO: 79377 - protein, 27 aa, Artificial Sequence
  Cyclic GFR-binding peptide
VPQDLRPVQIRKIVGRTPKVKKATVMV

SEQ ID NO: 79378 - protein, 36 aa, Artificial Sequence
  Cyclic GFR-binding peptide
  MOD_RES (3)..(3): Xaa is C or S
VQXRPTQVQLEPLPVVYYEIVRKKPIFEQLSNTLED

SEQ ID NO: 79379 - protein, 31 aa, Artificial Sequence
  Cyclic GFR-binding peptide
  MOD_RES (30)..(30): Xaa is C or S
TELRPVQMRKIDEYDKVVKKATVEMVVEGXG

SEQ ID NO: 79380 - protein, 30 aa, Artificial Sequence
  Cyclic GFR-binding peptide
  MOD_RES (1)..(2): Xaa is C or S
XXAPTQLSNITVQIMDDSSNVIIGEMSNMV

SEQ ID NO: 79381 - protein, 32 aa, Artificial Sequence; identical to SEQ ID NO: 29508
  Cyclic GFR-binding peptide
  MOD_RES (1)..(2): Xaa is C or S

SEQ ID NO: 79382 - protein, 27 aa, Artificial Sequence
  Cyclic GFR-binding peptide
TEEEPLPMVYYRIKPHQGQHEQLSNFL

SEQ ID NO: 79383 - protein, 31 aa, Artificial Sequence; identical to SEQ ID NO: 29510
  Cyclic GFR-binding peptide
  MOD_RES (1)..(1): Xaa is C or S

SEQ ID NO: 79384 - protein, 36 aa, Artificial Sequence; identical to SEQ ID NO: 29511
  Cyclic GFR-binding peptide
  MOD_RES (3)..(4)..(36): Xaa is C or S

SEQ ID NO: 79385 - protein, 25 aa, Artificial Sequence
  Cyclic GFR-binding peptide
DLRSVKIAKVIGKTPKIKEVQVMIV

SEQ ID NO: 79386 - protein, 28 aa, Artificial Sequence
  Cyclic GFR-binding peptide
VPTEEEPLTMLYYRIKPHQGQHEQLSNF

SEQ ID NO: 79387 - protein, 24 aa, Artificial Sequence
  Cyclic GFR-binding peptide
TELSNITMQIMDENEKVVIGEMSD

SEQ ID NO: 79388 - protein, 26 aa, Artificial Sequence
  Cyclic GFR-binding peptide
  MOD_RES (1)..(1): Xaa is C or S
XVPTELRPVQMRKIDENEKVVKKATV

SEQ ID NO: 79389 - protein, 37 aa, Artificial Sequence; identical to SEQ ID NO: 29514
  Cyclic GFR-binding peptide
  MOD_RES (3)..(4)..(36): Xaa is C or S

SEQ ID NO: 79390 - protein, 32 aa, Artificial Sequence
  Cyclic GFR-binding peptide
  MOD_RES (5)..(6): Xaa is C or S
SAAPXXVPQALRPVQIRKIVGRKPKVKKATVM

SEQ ID NO: 79391 - protein, 31 aa, Artificial Sequence
  Cyclic GFR-binding peptide
  MOD_RES (5)..(6): Xaa is C or S
SASPXXVSQDLRPVQIRKIIGKTPKIKKATV

SEQ ID NO: 79392 - protein, 41 aa, Artificial Sequence; identical to SEQ ID NO: 29517
  Cyclic GFR-binding peptide
  MOD_RES (7)..(39)..(41): Xaa is C or S

SEQ ID NO: 79393 - protein, 33 aa, Artificial Sequence
  Cyclic GFR-binding peptide
  MOD_RES (30)..(32): Xaa is C or S
PQDLRSVKIAKVVGRTPKVKEVQVMVVKSXKXS

SEQ ID NO: 79394 - protein, 37 aa, Artificial Sequence; identical to SEQ ID NO: 29518
  Cyclic GFR-binding peptide
  MOD_RES (2)..(3)..(35)..(37): Xaa is C or S

SEQ ID NO: 79395 - protein, 36 aa, Artificial Sequence; identical to SEQ ID NO: 29520
  Cyclic GFR-binding peptide
  MOD_RES (3)..(4)..(35): Xaa is C or S

SEQ ID NO: 79396 - protein, 31 aa, Artificial Sequence
  Cyclic GFR-binding peptide
  MOD_RES (3)..(4): Xaa is C or S
SPXXVPQDLRPVQIRKIVGRTPKVKKATVMV

SEQ ID NO: 79397 - protein, 27 aa, Artificial Sequence
  Cyclic GFR-binding peptide
  MOD_RES (1)..(1): Xaa is C or S
XVPQALSNITIQIMVGRKPKVIGEMSM

SEQ ID NO: 79398 - protein, 27 aa, Artificial Sequence
  Cyclic GFR-binding peptide
QLRPVQVRKIDDSSNVIKKATVNMVVR

SEQ ID NO: 79399 - protein, 28 aa, Artificial Sequence
  Cyclic GFR-binding peptide
  MOD_RES (1)..(2): Xaa is C or S
XXVPQALSNITIQIMVGRKPKVIGEMSM

SEQ ID NO: 79400 - protein, 29 aa, Artificial Sequence
  Cyclic GFR-binding peptide
  MOD_RES (27)..(29): Xaa is C or S
LRPVQIRKIVGRKPKVKKATVMIVRSXKX

SEQ ID NO: 79401 - protein, 35 aa, Artificial Sequence; identical to SEQ ID NO: 29529
  Cyclic GFR-binding peptide
  MOD_RES (3)..(4): Xaa is C or S

SEQ ID NO: 79402 - protein, 26 aa, Artificial Sequence
  Cyclic GFR-binding peptide
EPLPVVYYEYVRKKPKLEQLSNRLEE

SEQ ID NO: 79403 - protein, 37 aa, Artificial Sequence; identical to SEQ ID NO: 29536
  Cyclic GFR-binding peptide
  MOD_RES (6)..(7): Xaa is C or S

SEQ ID NO: 79404 - protein, 26 aa, Artificial Sequence
  Cyclic GFR-binding peptide
PQDLSNITIQIMVGRTPKVIGEMSMV

SEQ ID NO: 79405 - protein, 31 aa, Artificial Sequence
  Cyclic GFR-binding peptide
  MOD_RES (3)..(4): Xaa is C or S
KPXXAPTQLSNITVQIMDDSSNVIIGEMSNM

SEQ ID NO: 79406 - protein, 37 aa, Artificial Sequence
  Cyclic GFR-binding peptide
  MOD_RES (5)..(5): Xaa is C or S
RNVQXRPTQVQLEPLPVVYYEIVRKKPIFEQLSNTLE

SEQ ID NO: 79407 - protein, 40 aa, Artificial Sequence; identical to SEQ ID NO: 29540
  Cyclic GFR-binding peptide
  MOD_RES (37)..(39): Xaa is C or S

SEQ ID NO: 79408 - protein, 33 aa, Artificial Sequence
  Cyclic GFR-binding peptide
  MOD_RES (3)..(3): Xaa is C or S
LEXVPTEEEPLPMVYYRIKPHQGQHEQLSNFLQ

SEQ ID NO: 79409 - protein, 40 aa, Artificial Sequence; identical to SEQ ID NO: 29546
  Cyclic GFR-binding peptide
  MOD_RES (3)..(37)..(39): Xaa is C or S

SEQ ID NO: 79410 - protein, 24 aa, Artificial Sequence
  Cyclic GFR-binding peptide
LRSVKIAKVVGRTPKVKEVQVMVV

SEQ ID NO: 79411 - protein, 29 aa, Artificial Sequence
  Cyclic GFR-binding peptide
  MOD_RES (1)..(2): Xaa is C or S
XXVPQDLSNITIQIMVGRTPKVIGEMSMV

SEQ ID NO: 79412 - protein, 31 aa, Artificial Sequence; identical to SEQ ID NO: 29549
  Cyclic GFR-binding peptide
  MOD_RES (31)..(31): Xaa is C or S

SEQ ID NO: 79413 - protein, 30 aa, Artificial Sequence; identical to SEQ ID NO: 1140
  Cyclic GFR-binding peptide

SEQ ID NO: 79414 - protein, 26 aa, Artificial Sequence
  Cyclic GFR-binding peptide
VPQDLRPVQIRKIVGRTPKVKKATVM

SEQ ID NO: 79415 - protein, 30 aa, Artificial Sequence
  Cyclic GFR-binding peptide
  MOD_RES (29)..(29): Xaa is C or S
QDLSNITIQIMIGKTPKIIGEMSMIVKSXK

SEQ ID NO: 79416 - protein, 28 aa, Artificial Sequence
  Cyclic GFR-binding peptide
  MOD_RES (1)..(1): Xaa is C or S
XVPTELSNITMQIMDENEKVVIGEMSDM

SEQ ID NO: 79417 - protein, 39 aa, Artificial Sequence; identical to SEQ ID NO: 29557
  Cyclic GFR-binding peptide
  MOD_RES (6)..(7)..(39): Xaa is C or S

SEQ ID NO: 79418 - protein, 36 aa, Artificial Sequence
  Cyclic GFR-binding peptide
  MOD_RES (6)..(7): Xaa is C or S
ASASPXXVPQDLSNITIQIMVGRTPKVIGEMSMVVK

SEQ ID NO: 79419 - protein, 37 aa, Artificial Sequence; identical to SEQ ID NO: 29559
  Cyclic GFR-binding peptide
  MOD_RES (6)..(7): Xaa is C or S

SEQ ID NO: 79420 - protein, 28 aa, Artificial Sequence
  Cyclic GFR-binding peptide
PQDLRSVKIAKVVGRTPKVKEVQVMVVK

SEQ ID NO: 79421 - protein, 29 aa, Artificial Sequence
  Cyclic GFR-binding peptide
  MOD_RES (2)..(3): Xaa is C or S
PXXAPTQLRSVKVAKVDDSSNVIKEVQVN

SEQ ID NO: 79422 - protein, 34 aa, Artificial Sequence
  Cyclic GFR-binding peptide
  MOD_RES (6)..(7): Xaa is C or S
TVPKPXXAPTQLSNITVQIMDDSSNVIIGEMSNM

SEQ ID NO: 79423 - protein, 30 aa, Artificial Sequence
  Cyclic GFR-binding peptide
  MOD_RES (29)..(29): Xaa is C or S
QDLRSVKIAKVVGRTPKVKEVQVMVVKSXK

SEQ ID NO: 79424 - protein, 28 aa, Artificial Sequence
  Cyclic GFR-binding peptide
EEEPLTMLYYRIKPHQGQHEQLSNFLQH

SEQ ID NO: 79425 - protein, 36 aa, Artificial Sequence; identical to SEQ ID NO: 29569
  Cyclic GFR-binding peptide
  MOD_RES (6)..(6): Xaa is C or S

SEQ ID NO: 79426 - protein, 25 aa, Artificial Sequence
  Cyclic GFR-binding peptide
EEPLTMLYYRIKPHQGQHEQLSNFL

SEQ ID NO: 79427 - protein, 33 aa, Artificial Sequence
  Cyclic GFR-binding peptide
  MOD_RES (4)..(5): Xaa is C or S
ASPXXVPQDLRPVQIRKIVGRTPKVKKATVMVV

SEQ ID NO: 79428 - protein, 30 aa, Artificial Sequence
  Cyclic GFR-binding peptide
  MOD_RES (30)..(30): Xaa is C or S
TELRPVQMRKIDEYDKVVKKATVEMVVEGX

SEQ ID NO: 79429 - protein, 36 aa, Artificial Sequence; identical to SEQ ID NO: 29579
  Cyclic GFR-binding peptide
  MOD_RES (4)..(5)..(36): Xaa is C or S

SEQ ID NO: 79430 - protein, 34 aa, Artificial Sequence
  Cyclic GFR-binding peptide
  MOD_RES (32)..(34): Xaa is C or S
QLEPLTVLYYEIVRKKPIFEQLSNTLEDHLAXKX

SEQ ID NO: 79431 - protein, 36 aa, Artificial Sequence; identical to SEQ ID NO: 29581
  Cyclic GFR-binding peptide
  MOD_RES (1)..(2)..(33)..(35): Xaa is C or S

SEQ ID NO: 79432 - protein, 27 aa, Artificial Sequence
  Cyclic GFR-binding peptide
LRPVQMRKIDEYDKVVKKATVEMVVEG

SEQ ID NO: 79433 - protein, 29 aa, Artificial Sequence
  Cyclic GFR-binding peptide
SRVHHEPLTVLYYEYVRKKPKLEQLSNRL

SEQ ID NO: 79434 - protein, 25 aa, Artificial Sequence
  Cyclic GFR-binding peptide
ELRPVQMRKIDENEKVVKKATVDMV

SEQ ID NO: 79435 - protein, 35 aa, Artificial Sequence; identical to SEQ ID NO: 29582
  Cyclic GFR-binding peptide
  MOD_RES (1)..(32)..(34): Xaa is C or S

SEQ ID NO: 79436 - protein, 21 aa, Artificial Sequence
  Cyclic GFR-binding peptide
RPVQMRKIDEYDKVVKKATVE

SEQ ID NO: 79437 - protein, 28 aa, Artificial Sequence
  Cyclic GFR-binding peptide
APTQLSNITVQIMDDSSNVIIGEMSNMV

SEQ ID NO: 79438 - protein, 33 aa, Artificial Sequence; identical to SEQ ID NO: 29586
  Cyclic GFR-binding peptide

SEQ ID NO: 79439 - protein, 31 aa, Artificial Sequence
  Cyclic GFR-binding peptide
QPSRVHHEPLPVVYYEYVRKKPKLEQLSNRL

SEQ ID NO: 79440 - protein, 29 aa, Artificial Sequence
  Cyclic GFR-binding peptide
  MOD_RES (1)..(2): Xaa is C or S
XXAPTQLRSVKVAKVDDSSNVIKEVQVNM

SEQ ID NO: 79441 - protein, 22 aa, Artificial Sequence
  Cyclic GFR-binding peptide
RPVQMRKIDEYDKVVKKATVEM

SEQ ID NO: 79442 - protein, 30 aa, Artificial Sequence
  Cyclic GFR-binding peptide
  MOD_RES (3)..(4): Xaa is C or S
KAXXVPTELRSVKMAKVDEYDKVVKEVQVE

SEQ ID NO: 79443 - protein, 42 aa, Artificial Sequence; identical to SEQ ID NO: 29591
  Cyclic GFR-binding peptide
  MOD_RES (6)..(7)..(39)..(41): Xaa is C or S

SEQ ID NO: 79444 - protein, 22 aa, Artificial Sequence
  Cyclic GFR-binding peptide
LSNITMQIMDENEKVVIGEMSD

SEQ ID NO: 79445 - protein, 23 aa, Artificial Sequence
  Cyclic GFR-binding peptide
LRPVQMRKIDEYDKVVKKATVEM

SEQ ID NO: 79446 - protein, 32 aa, Artificial Sequence; identical to SEQ ID NO: 29593
  Cyclic GFR-binding peptide
  MOD_RES (32)..(32): Xaa is C or S

SEQ ID NO: 79447 - protein, 29 aa, Artificial Sequence
  Cyclic GFR-binding peptide
  MOD_RES (3)..(4): Xaa is C or S
KPXXAPTKLSNITVQIMDDSSNVIIGEMS

SEQ ID NO: 79448 - protein, 27 aa, Artificial Sequence
  Cyclic GFR-binding peptide
HHEPLTVLYYEYVRKKPKLEQLSNRLE

SEQ ID NO: 79449 - protein, 32 aa, Artificial Sequence
  Cyclic GFR-binding peptide
  MOD_RES (4)..(5): Xaa is C or S
PKPXXAPTQLSNITVQIMDDSSNVIIGEMSNM

SEQ ID NO: 79450 - protein, 28 aa, Artificial Sequence
  Cyclic GFR-binding peptide
  MOD_RES (27)..(27): Xaa is C or S
SNITMQIMDENEKVVIGEMSDMVVEGXG

SEQ ID NO: 79451 - protein, 38 aa, Artificial Sequence; identical to SEQ ID NO: 29602
  Cyclic GFR-binding peptide
  MOD_RES (6)..(7): Xaa is C or S

SEQ ID NO: 79452 - protein, 31 aa, Artificial Sequence
  Cyclic GFR-binding peptide
  MOD_RES (30)..(30): Xaa is C or S
PQDLRSVKIAKVVGRTPKVKEVQVMVVKSXK

SEQ ID NO: 79453 - protein, 36 aa, Artificial Sequence; identical to SEQ ID NO: 29603
  Cyclic GFR-binding peptide

SEQ ID NO: 79454 - protein, 30 aa, Artificial Sequence
  Cyclic GFR-binding peptide
PTELRSVKMAKVDENEKVVKEVQVDMVVEG

SEQ ID NO: 79455 - protein, 29 aa, Artificial Sequence
  Cyclic GFR-binding peptide
  MOD_RES (1)..(1): Xaa is C or S
XVSQDLRSVKIAKVIGKTPKIKEVQVMIV

SEQ ID NO: 79456 - protein, 39 aa, Artificial Sequence; identical to SEQ ID NO: 29605
  Cyclic GFR-binding peptide
  MOD_RES (4)..(5)..(37)..(39): Xaa is C or S

SEQ ID NO: 79457 - protein, 38 aa, Artificial Sequence; identical to SEQ ID NO: 29607
  Cyclic GFR-binding peptide
  MOD_RES (3)..(3): Xaa is C or S

SEQ ID NO: 79458 - protein, 38 aa, Artificial Sequence; identical to SEQ ID NO: 29609
  Cyclic GFR-binding peptide
  MOD_RES (3)..(4)..(36)..(38): Xaa is C or S

SEQ ID NO: 79459 - protein, 30 aa, Artificial Sequence
  Cyclic GFR-binding peptide
  MOD_RES (28)..(30): Xaa is C or S
LRPVQVRKIDDSSNVIKKATVNMVVRSXGX

SEQ ID NO: 79460 - protein, 23 aa, Artificial Sequence
  Cyclic GFR-binding peptide
TQLRSVKVAKVDDSSNVIKEVQV

SEQ ID NO: 79461 - protein, 35 aa, Artificial Sequence
  Cyclic GFR-binding peptide
  MOD_RES (6)..(7): Xaa is C or S
ASAAPXXVPQALRSVKIAKVVGRKPKVKEVQVMIV

SEQ ID NO: 79462 - protein, 31 aa, Artificial Sequence
  Cyclic GFR-binding peptide
  MOD_RES (4)..(5): Xaa is C or S
ASPXXVSQDLSNITIQIMIGKTPKIIGEMSM

SEQ ID NO: 79463 - protein, 32 aa, Artificial Sequence
  Cyclic GFR-binding peptide
  MOD_RES (4)..(5): Xaa is C or S
PKPXXAPTKLSNITVQIMDDSSNVIIGEMSNM

SEQ ID NO: 79464 - protein, 27 aa, Artificial Sequence
  Cyclic GFR-binding peptide
  MOD_RES (1)..(1): Xaa is C or S
XVPQDLRSVKIAKVVGRTPKVKEVQVM

SEQ ID NO: 79465 - protein, 30 aa, Artificial Sequence
  Cyclic GFR-binding peptide
  MOD_RES (4)..(5): Xaa is C or S
PKAXXVPTELRSVKMAKVDEYDKVVKEVQV

SEQ ID NO: 79466 - protein, 38 aa, Artificial Sequence; identical to SEQ ID NO: 29615
  Cyclic GFR-binding peptide
  MOD_RES (4)..(5)..(37): Xaa is C or S

SEQ ID NO: 79467 - protein, 32 aa, Artificial Sequence
  Cyclic GFR-binding peptide
  MOD_RES (2)..(2): Xaa is C or S
KXQPSRVHHEPLPVVYYEYVRKKPKLEQLSNR

SEQ ID NO: 79468 - protein, 33 aa, Artificial Sequence; identical to SEQ ID NO: 29617
  Cyclic GFR-binding peptide
  MOD_RES (2)..(3): Xaa is C or S

SEQ ID NO: 79469 - protein, 22 aa, Artificial Sequence
  Cyclic GFR-binding peptide
LSNITVQIMDDSSNVIIGEMSN

SEQ ID NO: 79470 - protein, 28 aa, Artificial Sequence
  Cyclic GFR-binding peptide
  MOD_RES (2)..(3): Xaa is C or S
PXXVPQDLSNITIQIMVGRTPKVIGEMS

SEQ ID NO: 79471 - protein, 37 aa, Artificial Sequence; identical to SEQ ID NO: 29622
  Cyclic GFR-binding peptide
  MOD_RES (2)..(34)..(36): Xaa is C or S

SEQ ID NO: 79472 - protein, 28 aa, Artificial Sequence
  Cyclic GFR-binding peptide
ELRSVKMAKVDENEKVVKEVQVDMVVEG

SEQ ID NO: 79473 - protein, 38 aa, Artificial Sequence; identical to SEQ ID NO: 29623
  Cyclic GFR-binding peptide
  MOD_RES (5)..(6)..(38): Xaa is C or S

SEQ ID NO: 79474 - protein, 39 aa, Artificial Sequence; identical to SEQ ID NO: 29624
  Cyclic GFR-binding peptide
  MOD_RES (4)..(5)..(36)..(38): Xaa is C or S

SEQ ID NO: 79475 - protein, 39 aa, Artificial Sequence; identical to SEQ ID NO: 29626
  Cyclic GFR-binding peptide
  MOD_RES (3)..(37)..(39): Xaa is C or S

SEQ ID NO: 79476 - protein, 31 aa, Artificial Sequence
  Cyclic GFR-binding peptide
  MOD_RES (4)..(4): Xaa is C or S
GLEXVPTEEEPLPMVYYRIKPHQGQHEQLSN

SEQ ID NO: 79477 - protein, 35 aa, Artificial Sequence; identical to SEQ ID NO: 29629
  Cyclic GFR-binding peptide
  MOD_RES (1)..(2)..(34): Xaa is C or S

SEQ ID NO: 79478 - protein, 32 aa, Artificial Sequence
  Cyclic GFR-binding peptide
  MOD_RES (30)..(32): Xaa is C or S
PQALRSVKIAKVVGRKPKVKEVQVMIVRSXKX

SEQ ID NO: 79479 - protein, 37 aa, Artificial Sequence; identical to SEQ ID NO: 29632
  Cyclic GFR-binding peptide
  MOD_RES (2)..(3)..(34)..(36): Xaa is C or S

SEQ ID NO: 79480 - protein, 32 aa, Artificial Sequence
  Cyclic GFR-binding peptide
  MOD_RES (30)..(32): Xaa is C or S
SQDLRSVKIAKVIGKTPKIKEVQVMIVKSXKX

SEQ ID NO: 79481 - protein, 27 aa, Artificial Sequence
  Cyclic GFR-binding peptide
PTQLSNITVQIMDDSSNVIIGEMSNMV

SEQ ID NO: 79482 - protein, 31 aa, Artificial Sequence
  Cyclic GFR-binding peptide
  MOD_RES (5)..(6): Xaa is C or S
SASPXXVPQDLRSVKIAKVVGRTPKVKEVQV

SEQ ID NO: 79483 - protein, 29 aa, Artificial Sequence
  Cyclic GFR-binding peptide
  MOD_RES (1)..(2): Xaa is C or S
XXAPTKLRSVKVAKVDDSSNVIKEVQVNM

SEQ ID NO: 79484 - protein, 23 aa, Artificial Sequence
  Cyclic GFR-binding peptide
ELRPVQMRKIDEYDKVVKKATVE

SEQ ID NO: 79485 - protein, 31 aa, Artificial Sequence
  Cyclic GFR-binding peptide
VQLEPLTVLYYEIVRKKPIFEQLSNTLEDHL

SEQ ID NO: 79486 - protein, 37 aa, Artificial Sequence; identical to SEQ ID NO: 29640
  Cyclic GFR-binding peptide
  MOD_RES (3)..(3): Xaa is C or S

SEQ ID NO: 79487 - protein, 27 aa, Artificial Sequence
  Cyclic GFR-binding peptide
QLEPLTVLYYEIVRKKPIFEQLSNTLE

SEQ ID NO: 79488 - protein, 30 aa, Artificial Sequence
  Cyclic GFR-binding peptide
PTKLRSVKVAKVDDSSNVIKEVQVNMVVRS

SEQ ID NO: 79489 - protein, 29 aa, Artificial Sequence
  Cyclic GFR-binding peptide
  MOD_RES (28)..(28): Xaa is C or S
DLRSVKIAKVVGRTPKVKEVQVMVVKSXK

SEQ ID NO: 79490 - protein, 31 aa, Artificial Sequence
  Cyclic GFR-binding peptide
  MOD_RES (1)..(1): Xaa is C or S
XVPTEEEPLTMLYYRIKPHQGQHEQLSNFLQ

SEQ ID NO: 79491 - protein, 33 aa, Artificial Sequence
  Cyclic GFR-binding peptide
  MOD_RES (33)..(33): Xaa is C or S
VQLEPLTVLYYEIVRKKPIFEQLSNTLEDHLAX

SEQ ID NO: 79492 - protein, 38 aa, Artificial Sequence; identical to SEQ ID NO: 29653
  Cyclic GFR-binding peptide
  MOD_RES (5)..(6)..(38): Xaa is C or S

SEQ ID NO: 79493 - protein, 26 aa, Artificial Sequence
  Cyclic GFR-binding peptide
QDLSNITIQIMIGKTPKIIGEMSMIV

SEQ ID NO: 79494 - protein, 21 aa, Artificial Sequence
  Cyclic GFR-binding peptide
LSNITIQIMVGRTPKVIGEMS

SEQ ID NO: 79495 - protein, 32 aa, Artificial Sequence
  Cyclic GFR-binding peptide
  MOD_RES (31)..(31): Xaa is C or S
PTQLRPVQVRKIDDSSNVIKKATVNMVVRAXG

SEQ ID NO: 79496 - protein, 26 aa, Artificial Sequence
  Cyclic GFR-binding peptide
LSNITIQIMIGKTPKIIGEMSMIVKS

SEQ ID NO: 79497 - protein, 37 aa, Artificial Sequence; identical to SEQ ID NO: 29659
  Cyclic GFR-binding peptide
  MOD_RES (37)..(37): Xaa is C or S

SEQ ID NO: 79498 - protein, 38 aa, Artificial Sequence; identical to SEQ ID NO: 29661
  Cyclic GFR-binding peptide
  MOD_RES (35)..(37): Xaa is C or S

SEQ ID NO: 79499 - protein, 34 aa, Artificial Sequence
  Cyclic GFR-binding peptide
  MOD_RES (4)..(4): Xaa is C or S
SVKXQPSRVHHEPLTVLYYEYVRKKPKLEQLSNR

SEQ ID NO: 79500 - protein, 29 aa, Artificial Sequence
  Cyclic GFR-binding peptide
  MOD_RES (1)..(1): Xaa is C or S
XAPTQLSNITVQIMDDSSNVIIGEMSNMV

SEQ ID NO: 79501 - protein, 28 aa, Artificial Sequence
  Cyclic GFR-binding peptide
KLRSVKVAKVDDSSNVIKEVQVNMVVRS

SEQ ID NO: 79502 - protein, 37 aa, Artificial Sequence; identical to SEQ ID NO: 29672
  Cyclic GFR-binding peptide
  MOD_RES (35)..(37): Xaa is C or S

SEQ ID NO: 79503 - protein, 36 aa, Artificial Sequence; identical to SEQ ID NO: 29673
  Cyclic GFR-binding peptide
  MOD_RES (3)..(4)..(36): Xaa is C or S

SEQ ID NO: 79504 - protein, 29 aa, Artificial Sequence
  Cyclic GFR-binding peptide
HHEPLTVLYYEYVRKKPKLEQLSNRLEEH

SEQ ID NO: 79505 - protein, 23 aa, Artificial Sequence
  Cyclic GFR-binding peptide
QDLRSVKIAKVVGRTPKVKEVQV

SEQ ID NO: 79506 - protein, 29 aa, Artificial Sequence
  Cyclic GFR-binding peptide
  MOD_RES (1)..(1): Xaa is C or S
XVPTELSNITMQIMDENEKVVIGEMSDMV

SEQ ID NO: 79507 - protein, 40 aa, Artificial Sequence; identical to SEQ ID NO: 29677
  Cyclic GFR-binding peptide
  MOD_RES (4)..(5)..(37)..(39): Xaa is C or S

SEQ ID NO: 79508 - protein, 29 aa, Artificial Sequence
  Cyclic GFR-binding peptide
TELSNITMQIMDEYDKVVIGEMSEMVVEG

SEQ ID NO: 79509 - protein, 32 aa, Artificial Sequence
  Cyclic GFR-binding peptide
  MOD_RES (2)..(3): Xaa is C or S
AXXVPTELRSVKMAKVDEYDKVVKEVQVEMVV

SEQ ID NO: 79510 - protein, 36 aa, Artificial Sequence
  Cyclic GFR-binding peptide
  MOD_RES (4)..(4): Xaa is C or S
NVQXRPTQVQLEPLTVLYYEIVRKKPIFEQLSNTLE

SEQ ID NO: 79511 - protein, 32 aa, Artificial Sequence
  Cyclic GFR-binding peptide
  MOD_RES (30)..(32): Xaa is C or S
TELRSVKMAKVDEYDKVVKEVQVEMVVEGXGX

SEQ ID NO: 79512 - protein, 28 aa, Artificial Sequence
  Cyclic GFR-binding peptide
  MOD_RES (1)..(1): Xaa is C or S
XVPTELRPVQMRKIDENEKVVKKATVDM

SEQ ID NO: 79513 - protein, 26 aa, Artificial Sequence
  Cyclic GFR-binding peptide
VPTELRPVQMRKIDEYDKVVKKATVE

SEQ ID NO: 79514 - protein, 41 aa, Artificial Sequence; identical to SEQ ID NO: 29683
  Cyclic GFR-binding peptide
  MOD_RES (6)..(38)..(40): Xaa is C or S

SEQ ID NO: 79515 - protein, 36 aa, Artificial Sequence
  Cyclic GFR-binding peptide
  MOD_RES (34)..(36): Xaa is C or S
QVQLEPLTVLYYEIVRKKPIFEQLSNTLEDHLAXKX

SEQ ID NO: 79516 - protein, 20 aa, Artificial Sequence
  Cyclic GFR-binding peptide
RPVQMRKIDEYDKVVKKATV

SEQ ID NO: 79517 - protein, 37 aa, Artificial Sequence; identical to SEQ ID NO: 29688
  Cyclic GFR-binding peptide
  MOD_RES (7)..(7): Xaa is C or S

SEQ ID NO: 79518 - protein, 37 aa, Artificial Sequence; identical to SEQ ID NO: 29689
  Cyclic GFR-binding peptide
  MOD_RES (37)..(37): Xaa is C or S

SEQ ID NO: 79519 - protein, 32 aa, Artificial Sequence
  Cyclic GFR-binding peptide
  MOD_RES (31)..(31): Xaa is C or S
PTKLRPVQVRKIDDSSNVIKKATVNMVVRSXG

SEQ ID NO: 79520 - protein, 28 aa, Artificial Sequence
  Cyclic GFR-binding peptide
VPTELRSVKMAKVDEYDKVVKEVQVEMV

SEQ ID NO: 79521 - protein, 26 aa, Artificial Sequence
  Cyclic GFR-binding peptide
LSNITMQIMDEYDKVVIGEMSEMVVE

SEQ ID NO: 79522 - protein, 32 aa, Artificial Sequence
  Cyclic GFR-binding peptide
  MOD_RES (30)..(32): Xaa is C or S
PQALRPVQIRKIVGRKPKVKKATVMIVRSXKX

SEQ ID NO: 79523 - protein, 27 aa, Artificial Sequence
  Cyclic GFR-binding peptide
  MOD_RES (1)..(2): Xaa is C or S
XXVPTELRPVQMRKIDENEKVVKKATV

SEQ ID NO: 79524 - protein, 34 aa, Artificial Sequence; identical to SEQ ID NO: 29694
  Cyclic GFR-binding peptide
  MOD_RES (2)..(3)..(34): Xaa is C or S

SEQ ID NO: 79525 - protein, 35 aa, Artificial Sequence
  Cyclic GFR-binding peptide
  MOD_RES (6)..(7): Xaa is C or S
ASAAPXXVPQALSNITIQIMVGRKPKVIGEMSMIV

SEQ ID NO: 79526 - protein, 29 aa, Artificial Sequence
  Cyclic GFR-binding peptide
  MOD_RES (3)..(4): Xaa is C or S
KAXXVPTELRSVKMAKVDENEKVVKEVQV

SEQ ID NO: 79527 - protein, 28 aa, Artificial Sequence
  Cyclic GFR-binding peptide
  MOD_RES (3)..(3): Xaa is C or S
PTXAPTKLSNITVQIMDDSSNVIIGEMS

SEQ ID NO: 79528 - protein, 29 aa, Artificial Sequence
  Cyclic GFR-binding peptide
  MOD_RES (1)..(1): Xaa is C or S
XVSQDLSNITIQIMIGKTPKIIGEMSMIV

SEQ ID NO: 79529 - protein, 29 aa, Artificial Sequence
  Cyclic GFR-binding peptide
HHEPLPVVYYEYVRKKPKLEQLSNRLEEH

SEQ ID NO: 79530 - protein, 32 aa, Artificial Sequence
  Cyclic GFR-binding peptide
  MOD_RES (4)..(5): Xaa is C or S
PKPXXAPTQLRPVQVRKIDDSSNVIKKATVNM

SEQ ID NO: 79531 - protein, 33 aa, Artificial Sequence; identical to SEQ ID NO: 29705
  Cyclic GFR-binding peptide
  MOD_RES (1)..(2): Xaa is C or S

SEQ ID NO: 79532 - protein, 35 aa, Artificial Sequence; identical to SEQ ID NO: 29707
  Cyclic GFR-binding peptide
  MOD_RES (2)..(3)..(35): Xaa is C or S

SEQ ID NO: 79533 - protein, 33 aa, Artificial Sequence
  Cyclic GFR-binding peptide
  MOD_RES (7)..(7): Xaa is C or S
HVTKPTXAPTKLSNITVQIMDDSSNVIIGEMSN

SEQ ID NO: 79534 - protein, 22 aa, Artificial Sequence
  Cyclic GFR-binding peptide
SNITMQIMDEYDKVVIGEMSEM

SEQ ID NO: 79535 - protein, 35 aa, Artificial Sequence; identical to SEQ ID NO: 29711
  Cyclic GFR-binding peptide
  MOD_RES (2)..(3)..(35): Xaa is C or S

SEQ ID NO: 79536 - protein, 30 aa, Artificial Sequence
  Cyclic GFR-binding peptide
  MOD_RES (28)..(30): Xaa is C or S
LRSVKMAKVDENEKVVKEVQVDMVVEGXGX

SEQ ID NO: 79537 - protein, 33 aa, Artificial Sequence
  Cyclic GFR-binding peptide
  MOD_RES (30)..(32): Xaa is C or S
PQDLSNITIQIMVGRTPKVIGEMSMVVKSXKXS

SEQ ID NO: 79538 - protein, 26 aa, Artificial Sequence
  Cyclic GFR-binding peptide
RPVQMRKIDEYDKVVKKATVEMVVEG

SEQ ID NO: 79539 - protein, 37 aa, Artificial Sequence; identical to SEQ ID NO: 29720
  Cyclic GFR-binding peptide
  MOD_RES (3)..(3): Xaa is C or S

SEQ ID NO: 79540 - protein, 40 aa, Artificial Sequence; identical to SEQ ID NO: 29725
  Cyclic GFR-binding peptide
  MOD_RES (4)..(4): Xaa is C or S

SEQ ID NO: 79541 - protein, 33 aa, Artificial Sequence
  Cyclic GFR-binding peptide
  MOD_RES (3)..(4): Xaa is C or S
SPXXVPQDLSNITIQIMVGRTPKVIGEMSMVVK

SEQ ID NO: 79542 - protein, 28 aa, Artificial Sequence
  Cyclic GFR-binding peptide
PTELRSVKMAKVDEYDKVVKEVQVEMVV

SEQ ID NO: 79543 - protein, 33 aa, Artificial Sequence; identical to SEQ ID NO: 29728
  Cyclic GFR-binding peptide
  MOD_RES (1)..(2)..(33): Xaa is C or S

SEQ ID NO: 79544 - protein, 38 aa, Artificial Sequence; identical to SEQ ID NO: 29729
  Cyclic GFR-binding peptide
  MOD_RES (4)..(5)..(37): Xaa is C or S

SEQ ID NO: 79545 - protein, 32 aa, Artificial Sequence; identical to SEQ ID NO: 29731
  Cyclic GFR-binding peptide
  MOD_RES (31)..(31): Xaa is C or S

SEQ ID NO: 79546 - protein, 33 aa, Artificial Sequence
  Cyclic GFR-binding peptide
  MOD_RES (3)..(3): Xaa is C or S
VKXQPSRVHHEPLTVLYYEYVRKKPKLEQLSNR

SEQ ID NO: 79547 - protein, 33 aa, Artificial Sequence; identical to SEQ ID NO: 29734
  Cyclic GFR-binding peptide
  MOD_RES (2)..(3): Xaa is C or S

SEQ ID NO: 79548 - protein, 24 aa, Artificial Sequence
  Cyclic GFR-binding peptide
HEPLTVLYYEYVRKKPKLEQLSNR

SEQ ID NO: 79549 - protein, 27 aa, Artificial Sequence
  Cyclic GFR-binding peptide
PTKLRPVQVRKIDDSSNVIKKATVNMV

SEQ ID NO: 79550 - protein, 30 aa, Artificial Sequence; identical to SEQ ID NO: 1098
  Cyclic GFR-binding peptide

SEQ ID NO: 79551 - protein, 33 aa, Artificial Sequence
  Cyclic GFR-binding peptide
QPSRVHHEPLPVVYYEYVRKKPKLEQLSNRLEE

SEQ ID NO: 79552 - protein, 33 aa, Artificial Sequence
  Cyclic GFR-binding peptide
  MOD_RES (4)..(5): Xaa is C or S
PKPXXAPTKLRPVQVRKIDDSSNVIKKATVNMV

SEQ ID NO: 79553 - protein, 26 aa, Artificial Sequence
  Cyclic GFR-binding peptide
APTQLRPVQVRKIDDSSNVIKKATVN

SEQ ID NO: 79554 - protein, 42 aa, Artificial Sequence; identical to SEQ ID NO: 29738
  Cyclic GFR-binding peptide
  MOD_RES (3)..(40)..(42): Xaa is C or S

SEQ ID NO: 79555 - protein, 36 aa, Artificial Sequence; identical to SEQ ID NO: 29740
  Cyclic GFR-binding peptide
  MOD_RES (4)..(5): Xaa is C or S

SEQ ID NO: 79556 - protein, 31 aa, Artificial Sequence
  Cyclic GFR-binding peptide
  MOD_RES (2)..(2): Xaa is C or S
TXAPTKLRPVQVRKIDDSSNVIKKATVNMVV

SEQ ID NO: 79557 - protein, 40 aa, Artificial Sequence; identical to SEQ ID NO: 29746
  Cyclic GFR-binding peptide
  MOD_RES (7)..(7): Xaa is C or S

SEQ ID NO: 79558 - protein, 33 aa, Artificial Sequence; identical to SEQ ID NO: 29747
  Cyclic GFR-binding peptide
  MOD_RES (32)..(32): Xaa is C or S

SEQ ID NO: 79559 - protein, 21 aa, Artificial Sequence
  Cyclic GFR-binding peptide
RSVKMAKVDEYDKVVKEVQVE

SEQ ID NO: 79560 - protein, 33 aa, Artificial Sequence
  Cyclic GFR-binding peptide
  MOD_RES (31)..(33): Xaa is C or S
LEPLTVLYYEIVRKKPIFEQLSNTLEDHLAXKX

SEQ ID NO: 79561 - protein, 32 aa, Artificial Sequence
  Cyclic GFR-binding peptide
  MOD_RES (5)..(5): Xaa is C or S
TKPTXAPTKLRPVQVRKIDDSSNVIKKATVNM

SEQ ID NO: 79562 - protein, 32 aa, Artificial Sequence
  Cyclic GFR-binding peptide
  MOD_RES (7)..(7): Xaa is C or S
HVTKPTXAPTKLRSVKVAKVDDSSNVIKEVQV

SEQ ID NO: 79563 - protein, 31 aa, Artificial Sequence
  Cyclic GFR-binding peptide
  MOD_RES (5)..(6): Xaa is C or S
VPKPXXAPTQLRPVQVRKIDDSSNVIKKATV

SEQ ID NO: 79564 - protein, 35 aa, Artificial Sequence; identical to SEQ ID NO: 29755
  Cyclic GFR-binding peptide
  MOD_RES (34)..(34): Xaa is C or S

SEQ ID NO: 79565 - protein, 26 aa, Artificial Sequence
  Cyclic GFR-binding peptide
  MOD_RES (26)..(26): Xaa is C or S
RSVKIAKVIGKTPKIKEVQVMIVKSX

SEQ ID NO: 79566 - protein, 24 aa, Artificial Sequence
  Cyclic GFR-binding peptide
EPLTVLYYEIVRKKPIFEQLSNTL

SEQ ID NO: 79567 - protein, 21 aa, Artificial Sequence
  Cyclic GFR-binding peptide
LRSVKMAKVDENEKVVKEVQV

SEQ ID NO: 79568 - protein, 28 aa, Artificial Sequence
  Cyclic GFR-binding peptide
QLSNITVQIMDDSSNVIIGEMSNMVVRA

SEQ ID NO: 79569 - protein, 28 aa, Artificial Sequence
  Cyclic GFR-binding peptide
  MOD_RES (28)..(28): Xaa is C or S
DLSNITIQIMVGRTPKVIGEMSMVVKSX

SEQ ID NO: 79570 - protein, 31 aa, Artificial Sequence
  Cyclic GFR-binding peptide
  MOD_RES (30)..(30): Xaa is C or S
EPLTVLYYEIVRKKPIFEQLSNTLEDHLAXK

SEQ ID NO: 79571 - protein, 33 aa, Artificial Sequence
  Cyclic GFR-binding peptide
  MOD_RES (4)..(5): Xaa is C or S
PKAXXVPTELRPVQMRKIDENEKVVKKATVDMV

SEQ ID NO: 79572 - protein, 38 aa, Artificial Sequence; identical to SEQ ID NO: 29757
  Cyclic GFR-binding peptide
  MOD_RES (4)..(5)..(37): Xaa is C or S

SEQ ID NO: 79573 - protein, 34 aa, Artificial Sequence; identical to SEQ ID NO: 29758
  Cyclic GFR-binding peptide

SEQ ID NO: 79574 - protein, 37 aa, Artificial Sequence
  Cyclic GFR-binding peptide
  MOD_RES (34)..(36): Xaa is C or S
RVHHEPLPVVYYEYVRKKPKLEQLSNRLEEHLEXAXA

SEQ ID NO: 79575 - protein, 38 aa, Artificial Sequence
  Cyclic GFR-binding peptide
  MOD_RES (5)..(5): Xaa is C or S
SSVKXQPSRVHHEPLTVLYYEYVRKKPKLEQLSNRLEE

SEQ ID NO: 79576 - protein, 28 aa, Artificial Sequence
  Cyclic GFR-binding peptide
HHEPLTVLYYEYVRKKPKLEQLSNRLEE

SEQ ID NO: 79577 - protein, 27 aa, Artificial Sequence
  Cyclic GFR-binding peptide
  MOD_RES (1)..(1): Xaa is C or S
XAPTQLRPVQVRKIDDSSNVIKKATVN

SEQ ID NO: 79578 - protein, 27 aa, Artificial Sequence
  Cyclic GFR-binding peptide
VSQDLSNITIQIMIGKTPKIIGEMSMI

SEQ ID NO: 79579 - protein, 27 aa, Artificial Sequence
  Cyclic GFR-binding peptide
VPTELRSVKMAKVDEYDKVVKEVQVEM

SEQ ID NO: 79580 - protein, 25 aa, Artificial Sequence
  Cyclic GFR-binding peptide
VPTELRPVQMRKIDEYDKVVKKATV

SEQ ID NO: 79581 - protein, 26 aa, Artificial Sequence
  Cyclic GFR-binding peptide
  MOD_RES (1)..(1): Xaa is C or S
XAPTQLRSVKVAKVDDSSNVIKEVQV

SEQ ID NO: 79582 - protein, 26 aa, Artificial Sequence
  Cyclic GFR-binding peptide
HHEPLTVLYYEYVRKKPKLEQLSNRL

SEQ ID NO: 79583 - protein, 38 aa, Artificial Sequence; identical to SEQ ID NO: 29765
  Cyclic GFR-binding peptide
  MOD_RES (3)..(4)..(36)..(38): Xaa is C or S

SEQ ID NO: 79584 - protein, 31 aa, Artificial Sequence
  Cyclic GFR-binding peptide
  MOD_RES (3)..(3): Xaa is C or S
LEXVPTEEEPLTMLYYRIKPHQGQHEQLSNF

SEQ ID NO: 79585 - protein, 29 aa, Artificial Sequence
  Cyclic GFR-binding peptide
PTQLRSVKVAKVDDSSNVIKEVQVNMVVR

SEQ ID NO: 79586 - protein, 37 aa, Artificial Sequence; identical to SEQ ID NO: 29770
  Cyclic GFR-binding peptide
  MOD_RES (4)..(4): Xaa is C or S

SEQ ID NO: 79587 - protein, 24 aa, Artificial Sequence
  Cyclic GFR-binding peptide
PTELRPVQMRKIDENEKVVKKATV

SEQ ID NO: 79588 - protein, 33 aa, Artificial Sequence
  Cyclic GFR-binding peptide
  MOD_RES (30)..(32): Xaa is C or S
TELRSVKMAKVDEYDKVVKEVQVEMVVEGXGXR

SEQ ID NO: 79589 - protein, 30 aa, Artificial Sequence; identical to SEQ ID NO: 29774
  Cyclic GFR-binding peptide

SEQ ID NO: 79590 - protein, 37 aa, Artificial Sequence; identical to SEQ ID NO: 29777
  Cyclic GFR-binding peptide
  MOD_RES (5)..(6): Xaa is C or S

SEQ ID NO: 79591 - protein, 30 aa, Artificial Sequence
  Cyclic GFR-binding peptide
EEEPLPMVYYRIKPHQGQHEQLSNFLQHNK

SEQ ID NO: 79592 - protein, 29 aa, Artificial Sequence
  Cyclic GFR-binding peptide
  MOD_RES (1)..(1): Xaa is C or S
XVPTELRSVKMAKVDENEKVVKEVQVDMV

SEQ ID NO: 79593 - protein, 29 aa, Artificial Sequence
  Cyclic GFR-binding peptide
  MOD_RES (1)..(2): Xaa is C or S
XXVPTELRSVKMAKVDEYDKVVKEVQVEM

SEQ ID NO: 79594 - protein, 38 aa, Artificial Sequence; identical to SEQ ID NO: 29783
  Cyclic GFR-binding peptide
  MOD_RES (4)..(38): Xaa is C or S

SEQ ID NO: 79595 - protein, 32 aa, Artificial Sequence; identical to SEQ ID NO: 29784
  Cyclic GFR-binding peptide
  MOD_RES (1)..(2): Xaa is C or S

SEQ ID NO: 79596 - protein, 38 aa, Artificial Sequence; identical to SEQ ID NO: 29788
  Cyclic GFR-binding peptide
  MOD_RES (36)..(38): Xaa is C or S

SEQ ID NO: 79597 - protein, 33 aa, Artificial Sequence; identical to SEQ ID NO: 29790
  Cyclic GFR-binding peptide
  MOD_RES (1)..(33): Xaa is C or S

SEQ ID NO: 79598 - protein, 22 aa, Artificial Sequence
  Cyclic GFR-binding peptide
EPLPVVYYEIVRKKPIFEQLSN

SEQ ID NO: 79599 - protein, 29 aa, Artificial Sequence
  Cyclic GFR-binding peptide
QVQLEPLTVLYYEIVRKKPIFEQLSNTLE

SEQ ID NO: 79600 - protein, 35 aa, Artificial Sequence; identical to SEQ ID NO: 29793
  Cyclic GFR-binding peptide

SEQ ID NO: 79601 - protein, 28 aa, Artificial Sequence
  Cyclic GFR-binding peptide
PTELRPVQMRKIDEYDKVVKKATVEMVV

SEQ ID NO: 79602 - protein, 29 aa, Artificial Sequence
  Cyclic GFR-binding peptide
  MOD_RES (1)..(1): Xaa is C or S
XVPQDLRPVQIRKIVGRTPKVKKATVMVV

SEQ ID NO: 79603 - protein, 38 aa, Artificial Sequence; identical to SEQ ID NO: 29798
  Cyclic GFR-binding peptide
  MOD_RES (4)..(5)..(37): Xaa is C or S

SEQ ID NO: 79604 - protein, 38 aa, Artificial Sequence; identical to SEQ ID NO: 29799
  Cyclic GFR-binding peptide
  MOD_RES (5)..(6)..(37): Xaa is C or S

SEQ ID NO: 79605 - protein, 26 aa, Artificial Sequence
  Cyclic GFR-binding peptide
VSQDLRSVKIAKVIGKTPKIKEVQVM

SEQ ID NO: 79606 - protein, 36 aa, Artificial Sequence; identical to SEQ ID NO: 29802
  Cyclic GFR-binding peptide
  MOD_RES (2)..(2): Xaa is C or S

SEQ ID NO: 79607 - protein, 31 aa, Artificial Sequence
  Cyclic GFR-binding peptide
  MOD_RES (1)..(1): Xaa is C or S
XRPTQVQLEPLTVLYYEIVRKKPIFEQLSNT

SEQ ID NO: 79608 - protein, 21 aa, Artificial Sequence
  Cyclic GFR-binding peptide
SNITIQIMVGRTPKVIGEMSM

SEQ ID NO: 79609 - protein, 36 aa, Artificial Sequence; identical to SEQ ID NO: 29807
  Cyclic GFR-binding peptide
  MOD_RES (1)..(2)..(34)..(36): Xaa is C or S

SEQ ID NO: 79610 - protein, 20 aa, Artificial Sequence
  Cyclic GFR-binding peptide
SNITIQIMVGRKPKVIGEMS

SEQ ID NO: 79611 - protein, 37 aa, Artificial Sequence; identical to SEQ ID NO: 29808
  Cyclic GFR-binding peptide
  MOD_RES (1)..(2)..(34)..(36): Xaa is C or S

SEQ ID NO: 79612 - protein, 25 aa, Artificial Sequence
  Cyclic GFR-binding peptide
EPLPVVYYEIVRKKPIFEQLSNTLE

SEQ ID NO: 79613 - protein, 30 aa, Artificial Sequence
  Cyclic GFR-binding peptide
  MOD_RES (1)..(2): Xaa is C or S
XXVPTELRPVQMRKIDEYDKVVKKATVEMV

SEQ ID NO: 79614 - protein, 22 aa, Artificial Sequence
  Cyclic GFR-binding peptide
DLRSVKIAKVIGKTPKIKEVQV

SEQ ID NO: 79615 - protein, 35 aa, Artificial Sequence
  Cyclic GFR-binding peptide
  MOD_RES (33)..(35): Xaa is C or S
VHHEPLTVLYYEYVRKKPKLEQLSNRLEEHLEXAX

SEQ ID NO: 79616 - protein, 41 aa, Artificial Sequence; identical to SEQ ID NO: 29816
  Cyclic GFR-binding peptide
  MOD_RES (5)..(6)..(38)..(40): Xaa is C or S

SEQ ID NO: 79617 - protein, 35 aa, Artificial Sequence; identical to SEQ ID NO: 29818
  Cyclic GFR-binding peptide
  MOD_RES (3)..(35): Xaa is C or S

SEQ ID NO: 79618 - protein, 37 aa, Artificial Sequence; identical to SEQ ID NO: 29819
  Cyclic GFR-binding peptide
  MOD_RES (2)..(2): Xaa is C or S

SEQ ID NO: 79619 - protein, 30 aa, Artificial Sequence
  Cyclic GFR-binding peptide
  MOD_RES (29)..(29): Xaa is C or S
QDLRSVKIAKVIGKTPKIKEVQVMIVKSXK

SEQ ID NO: 79620 - protein, 37 aa, Artificial Sequence; identical to SEQ ID NO: 29821
  Cyclic GFR-binding peptide
  MOD_RES (2)..(3)..(35)..(37): Xaa is C or S

SEQ ID NO: 79621 - protein, 27 aa, Artificial Sequence
  Cyclic GFR-binding peptide
PTQLRSVKVAKVDDSSNVIKEVQVNMV

SEQ ID NO: 79622 - protein, 33 aa, Artificial Sequence
  Cyclic GFR-binding peptide
  MOD_RES (31)..(33): Xaa is C or S
PTQLRSVKVAKVDDSSNVIKEVQVNMVVRAXGX

SEQ ID NO: 79623 - protein, 39 aa, Artificial Sequence; identical to SEQ ID NO: 29824
  Cyclic GFR-binding peptide
  MOD_RES (4)..(36)..(38): Xaa is C or S

SEQ ID NO: 79624 - protein, 32 aa, Artificial Sequence; identical to SEQ ID NO: 29828
  Cyclic GFR-binding peptide
  MOD_RES (2)..(2): Xaa is C or S

SEQ ID NO: 79625 - protein, 43 aa, Artificial Sequence; identical to SEQ ID NO: 29829
  Cyclic GFR-binding peptide
  MOD_RES (7)..(41)..(43): Xaa is C or S

SEQ ID NO: 79626 - protein, 24 aa, Artificial Sequence
  Cyclic GFR-binding peptide
EEEPLTMLYYRIKPHQGQHEQLSN

SEQ ID NO: 79627 - protein, 24 aa, Artificial Sequence
  Cyclic GFR-binding peptide
DLSNITIQIMIGKTPKIIGEMSMI

SEQ ID NO: 79628 - protein, 39 aa, Artificial Sequence; identical to SEQ ID NO: 29830
  Cyclic GFR-binding peptide
  MOD_RES (36)..(38): Xaa is C or S

SEQ ID NO: 79629 - protein, 31 aa, Artificial Sequence
  Cyclic GFR-binding peptide
  MOD_RES (3)..(4): Xaa is C or S
KAXXVPTELSNITMQIMDENEKVVIGEMSDM

SEQ ID NO: 79630 - protein, 37 aa, Artificial Sequence; identical to SEQ ID NO: 29834
  Cyclic GFR-binding peptide
  MOD_RES (2)..(3)..(35)..(37): Xaa is C or S

SEQ ID NO: 79631 - protein, 31 aa, Artificial Sequence
  Cyclic GFR-binding peptide
  MOD_RES (4)..(5): Xaa is C or S
AAPXXVPQALRSVKIAKVVGRKPKVKEVQVM

SEQ ID NO: 79632 - protein, 35 aa, Artificial Sequence; identical to SEQ ID NO: 29838
  Cyclic GFR-binding peptide
  MOD_RES (4)..(5): Xaa is C or S

SEQ ID NO: 79633 - protein, 27 aa, Artificial Sequence
  Cyclic GFR-binding peptide
KLRPVQVRKIDDSSNVIKKATVNMVVR

SEQ ID NO: 79634 - protein, 31 aa, Artificial Sequence; identical to SEQ ID NO: 29840
  Cyclic GFR-binding peptide
  MOD_RES (1)..(1): Xaa is C or S

SEQ ID NO: 79635 - protein, 25 aa, Artificial Sequence
  Cyclic GFR-binding peptide
PTELSNITMQIMDENEKVVIGEMSD

SEQ ID NO: 79636 - protein, 27 aa, Artificial Sequence
  Cyclic GFR-binding peptide
VQLEPLTVLYYEIVRKKPIFEQLSNTL

SEQ ID NO: 79637 - protein, 24 aa, Artificial Sequence
  Cyclic GFR-binding peptide
RSVKMAKVDEYDKVVKEVQVEMVV

SEQ ID NO: 79638 - protein, 29 aa, Artificial Sequence
  Cyclic GFR-binding peptide
  MOD_RES (2)..(3): Xaa is C or S
PXXVPQALRPVQIRKIVGRKPKVKKATVM

SEQ ID NO: 79639 - protein, 38 aa, Artificial Sequence; identical to SEQ ID NO: 29844
  Cyclic GFR-binding peptide
  MOD_RES (3)..(3): Xaa is C or S

SEQ ID NO: 79640 - protein, 31 aa, Artificial Sequence; identical to SEQ ID NO: 29845
  Cyclic GFR-binding peptide

SEQ ID NO: 79641 - protein, 37 aa, Artificial Sequence; identical to SEQ ID NO: 29847
  Cyclic GFR-binding peptide
  MOD_RES (3)..(4)..(36): Xaa is C or S

SEQ ID NO: 79642 - protein, 41 aa, Artificial Sequence; identical to SEQ ID NO: 29848
  Cyclic GFR-binding peptide
  MOD_RES (6)..(38)..(40): Xaa is C or S

SEQ ID NO: 79643 - protein, 33 aa, Artificial Sequence
  Cyclic GFR-binding peptide
  MOD_RES (30)..(32): Xaa is C or S
SQDLRPVQIRKIIGKTPKIKKATVMIVKSXKXS

SEQ ID NO: 79644 - protein, 35 aa, Artificial Sequence; identical to SEQ ID NO: 29850
  Cyclic GFR-binding peptide
  MOD_RES (32)..(34): Xaa is C or S

SEQ ID NO: 79645 - protein, 26 aa, Artificial Sequence
  Cyclic GFR-binding peptide
VHHEPLTVLYYEYVRKKPKLEQLSNR

SEQ ID NO: 79646 - protein, 30 aa, Artificial Sequence; identical to SEQ ID NO: 1158
  Cyclic GFR-binding peptide

SEQ ID NO: 79647 - protein, 36 aa, Artificial Sequence; identical to SEQ ID NO: 29853
  Cyclic GFR-binding peptide
  MOD_RES (4)..(36): Xaa is C or S

SEQ ID NO: 79648 - protein, 22 aa, Artificial Sequence
  Cyclic GFR-binding peptide
QLRSVKVAKVDDSSNVIKEVQV

SEQ ID NO: 79649 - protein, 27 aa, Artificial Sequence
  Cyclic GFR-binding peptide
PTELRSVKMAKVDENEKVVKEVQVDMV

SEQ ID NO: 79650 - protein, 28 aa, Artificial Sequence
  Cyclic GFR-binding peptide
  MOD_RES (1)..(1): Xaa is C or S
XVSQDLSNITIQIMIGKTPKIIGEMSMI

SEQ ID NO: 79651 - protein, 31 aa, Artificial Sequence
  Cyclic GFR-binding peptide
  MOD_RES (4)..(5): Xaa is C or S
PKAXXVPTELRSVKMAKVDEYDKVVKEVQVE

SEQ ID NO: 79652 - protein, 37 aa, Artificial Sequence; identical to SEQ ID NO: 29858
  Cyclic GFR-binding peptide
  MOD_RES (6)..(7): Xaa is C or S

SEQ ID NO: 79653 - protein, 28 aa, Artificial Sequence
  Cyclic GFR-binding peptide
KLRPVQVRKIDDSSNVIKKATVNMVVRS

SEQ ID NO: 79654 - protein, 26 aa, Artificial Sequence
  Cyclic GFR-binding peptide
  MOD_RES (1)..(1): Xaa is C or S
XVPTELRSVKMAKVDEYDKVVKEVQV

SEQ ID NO: 79655 - protein, 37 aa, Artificial Sequence; identical to SEQ ID NO: 29863
  Cyclic GFR-binding peptide
  MOD_RES (1)..(35)..(37): Xaa is C or S

SEQ ID NO: 79656 - protein, 41 aa, Artificial Sequence; identical to SEQ ID NO: 29865
  Cyclic GFR-binding peptide
  MOD_RES (7)..(39)..(41): Xaa is C or S

SEQ ID NO: 79657 - protein, 36 aa, Artificial Sequence; identical to SEQ ID NO: 29866
  Cyclic GFR-binding peptide
  MOD_RES (5)..(6): Xaa is C or S

SEQ ID NO: 79658 - protein, 26 aa, Artificial Sequence
  Cyclic GFR-binding peptide
PQDLRSVKIAKVVGRTPKVKEVQVMV

SEQ ID NO: 79659 - protein, 28 aa, Artificial Sequence
  Cyclic GFR-binding peptide
VHHEPLTVLYYEYVRKKPKLEQLSNRLE

SEQ ID NO: 79660 - protein, 40 aa, Artificial Sequence; identical to SEQ ID NO: 29868
  Cyclic GFR-binding peptide
  MOD_RES (5)..(5): Xaa is C or S

SEQ ID NO: 79661 - protein, 23 aa, Artificial Sequence
  Cyclic GFR-binding peptide
TELSNITMQIMDENEKVVIGEMS

SEQ ID NO: 79662 - protein, 33 aa, Artificial Sequence
  Cyclic GFR-binding peptide
  MOD_RES (4)..(4): Xaa is C or S
SVKXQPSRVHHEPLPVVYYEYVRKKPKLEQLSN

SEQ ID NO: 79663 - protein, 37 aa, Artificial Sequence; identical to SEQ ID NO: 29872
  Cyclic GFR-binding peptide
  MOD_RES (35)..(37): Xaa is C or S

SEQ ID NO: 79664 - protein, 34 aa, Artificial Sequence; identical to SEQ ID NO: 29874
  Cyclic GFR-binding peptide
  MOD_RES (2)..(3): Xaa is C or S

SEQ ID NO: 79665 - protein, 32 aa, Artificial Sequence; identical to SEQ ID NO: 29877
  Cyclic GFR-binding peptide
  MOD_RES (1)..(1): Xaa is C or S

SEQ ID NO: 79666 - protein, 34 aa, Artificial Sequence; identical to SEQ ID NO: 29881
  Cyclic GFR-binding peptide
  MOD_RES (2)..(3): Xaa is C or S

SEQ ID NO: 79667 - protein, 28 aa, Artificial Sequence
  Cyclic GFR-binding peptide
RVHHEPLPVVYYEYVRKKPKLEQLSNRL

SEQ ID NO: 79668 - protein, 27 aa, Artificial Sequence
  Cyclic GFR-binding peptide
VPQALRPVQIRKIVGRKPKVKKATVMI

SEQ ID NO: 79669 - protein, 24 aa, Artificial Sequence
  Cyclic GFR-binding peptide
ELSNITMQIMDEYDKVVIGEMSEM

SEQ ID NO: 79670 - protein, 35 aa, Artificial Sequence; identical to SEQ ID NO: 29884
  Cyclic GFR-binding peptide
  MOD_RES (1)..(32)..(34): Xaa is C or S

SEQ ID NO: 79671 - protein, 25 aa, Artificial Sequence
  Cyclic GFR-binding peptide
EPLTMLYYRIKPHQGQHEQLSNFLQ

SEQ ID NO: 79672 - protein, 32 aa, Artificial Sequence
  Cyclic GFR-binding peptide
  MOD_RES (6)..(7): Xaa is C or S
ASASPXXVPQDLRPVQIRKIVGRTPKVKKATV

SEQ ID NO: 79673 - protein, 35 aa, Artificial Sequence
  Cyclic GFR-binding peptide
  MOD_RES (6)..(7): Xaa is C or S
ASASPXXVPQDLRPVQIRKIVGRTPKVKKATVMVV

SEQ ID NO: 79674 - protein, 36 aa, Artificial Sequence; identical to SEQ ID NO: 29891
  Cyclic GFR-binding peptide
  MOD_RES (3)..(4)..(36): Xaa is C or S

SEQ ID NO: 79675 - protein, 39 aa, Artificial Sequence; identical to SEQ ID NO: 29892
  Cyclic GFR-binding peptide
  MOD_RES (4)..(5)..(36)..(38): Xaa is C or S

SEQ ID NO: 79676 - protein, 29 aa, Artificial Sequence
  Cyclic GFR-binding peptide
  MOD_RES (29)..(29): Xaa is C or S
ELSNITMQIMDEYDKVVIGEMSEMVVEGX

SEQ ID NO: 79677 - protein, 36 aa, Artificial Sequence; identical to SEQ ID NO: 29899
  Cyclic GFR-binding peptide
  MOD_RES (3)..(4)..(35): Xaa is C or S

SEQ ID NO: 79678 - protein, 35 aa, Artificial Sequence; identical to SEQ ID NO: 29902
  Cyclic GFR-binding peptide
  MOD_RES (1)..(33)..(35): Xaa is C or S

SEQ ID NO: 79679 - protein, 38 aa, Artificial Sequence; identical to SEQ ID NO: 29904
  Cyclic GFR-binding peptide
  MOD_RES (4)..(5)..(37): Xaa is C or S

SEQ ID NO: 79680 - protein, 37 aa, Artificial Sequence; identical to SEQ ID NO: 29907
  Cyclic GFR-binding peptide
  MOD_RES (5)..(6): Xaa is C or S

SEQ ID NO: 79681 - protein, 39 aa, Artificial Sequence; identical to SEQ ID NO: 29909
  Cyclic GFR-binding peptide
  MOD_RES (5)..(37)..(39): Xaa is C or S

SEQ ID NO: 79682 - protein, 27 aa, Artificial Sequence
  Cyclic GFR-binding peptide
QDLSNITIQIMIGKTPKIIGEMSMIVK

SEQ ID NO: 79683 - protein, 35 aa, Artificial Sequence; identical to SEQ ID NO: 29911
  Cyclic GFR-binding peptide
  MOD_RES (2)..(3)..(35): Xaa is C or S

SEQ ID NO: 79684 - protein, 35 aa, Artificial Sequence; identical to SEQ ID NO: 29913
  Cyclic GFR-binding peptide
  MOD_RES (35)..(35): Xaa is C or S

SEQ ID NO: 79685 - protein, 29 aa, Artificial Sequence
  Cyclic GFR-binding peptide
  MOD_RES (28)..(28): Xaa is C or S
LRSVKVAKVDDSSNVIKEVQVNMVVRAXG

SEQ ID NO: 79686 - protein, 28 aa, Artificial Sequence
  Cyclic GFR-binding peptide
APTKLRPVQVRKIDDSSNVIKKATVNMV

SEQ ID NO: 79687 - protein, 29 aa, Artificial Sequence
  Cyclic GFR-binding peptide
  MOD_RES (26)..(28): Xaa is C or S
RPVQIRKIVGRKPKVKKATVMIVRSXKXS

SEQ ID NO: 79688 - protein, 34 aa, Artificial Sequence
  Cyclic GFR-binding peptide
  MOD_RES (4)..(5): Xaa is C or S
PKAXXVPTELRSVKMAKVDENEKVVKEVQVDMVV

SEQ ID NO: 79689 - protein, 37 aa, Artificial Sequence; identical to SEQ ID NO: 29919
  Cyclic GFR-binding peptide
  MOD_RES (5)..(6)..(37): Xaa is C or S

SEQ ID NO: 79690 - protein, 25 aa, Artificial Sequence
  Cyclic GFR-binding peptide
PTKLSNITVQIMDDSSNVIIGEMSN

SEQ ID NO: 79691 - protein, 32 aa, Artificial Sequence; identical to SEQ ID NO: 29922
  Cyclic GFR-binding peptide
  MOD_RES (1)..(32): Xaa is C or S

SEQ ID NO: 79692 - protein, 37 aa, Artificial Sequence; identical to SEQ ID NO: 29923
  Cyclic GFR-binding peptide
  MOD_RES (34)..(36): Xaa is C or S

SEQ ID NO: 79693 - protein, 37 aa, Artificial Sequence; identical to SEQ ID NO: 29925
  Cyclic GFR-binding peptide
  MOD_RES (1)..(2)..(34)..(36): Xaa is C or S

SEQ ID NO: 79694 - protein, 30 aa, Artificial Sequence
  Cyclic GFR-binding peptide
  MOD_RES (29)..(29): Xaa is C or S
ELRSVKMAKVDENEKVVKEVQVDMVVEGXG

SEQ ID NO: 79695 - protein, 42 aa, Artificial Sequence; identical to SEQ ID NO: 29929
  Cyclic GFR-binding peptide
  MOD_RES (5)..(42): Xaa is C or S

SEQ ID NO: 79696 - protein, 26 aa, Artificial Sequence
  Cyclic GFR-binding peptide
  MOD_RES (26)..(26): Xaa is C or S
SNITIQIMVGRKPKVIGEMSMIVRSX

SEQ ID NO: 79697 - protein, 29 aa, Artificial Sequence
  Cyclic GFR-binding peptide
  MOD_RES (1)..(1): Xaa is C or S
XAPTQLRSVKVAKVDDSSNVIKEVQVNMV

SEQ ID NO: 79698 - protein, 28 aa, Artificial Sequence
  Cyclic GFR-binding peptide
TEEEPLTMLYYRIKPHQGQHEQLSNFLQ

SEQ ID NO: 79699 - protein, 33 aa, Artificial Sequence
  Cyclic GFR-binding peptide
  MOD_RES (30)..(32): Xaa is C or S
TELRPVQMRKIDENEKVVKKATVDMVVEGXGXR

SEQ ID NO: 79700 - protein, 24 aa, Artificial Sequence
  Cyclic GFR-binding peptide
DLRPVQIRKIIGKTPKIKKATVMI

SEQ ID NO: 79701 - protein, 33 aa, Artificial Sequence
  Cyclic GFR-binding peptide
  MOD_RES (30)..(32): Xaa is C or S
EEPLPMVYYRIKPHQGQHEQLSNFLQHNKXEXR

SEQ ID NO: 79702 - protein, 29 aa, Artificial Sequence
  Cyclic GFR-binding peptide
QLEPLPVVYYEIVRKKPIFEQLSNTLEDH

SEQ ID NO: 79703 - protein, 29 aa, Artificial Sequence
  Cyclic GFR-binding peptide
VHHEPLTVLYYEYVRKKPKLEQLSNRLEE

SEQ ID NO: 79704 - protein, 34 aa, Artificial Sequence
  Cyclic GFR-binding peptide
  MOD_RES (6)..(6): Xaa is C or S
DEGLEXVPTEEEPLTMLYYRIKPHQGQHEQLSNF

SEQ ID NO: 79705 - protein, 37 aa, Artificial Sequence; identical to SEQ ID NO: 29940
  Cyclic GFR-binding peptide
  MOD_RES (2)..(3)..(34)..(36): Xaa is C or S

SEQ ID NO: 79706 - protein, 21 aa, Artificial Sequence
  Cyclic GFR-binding peptide
LRPVQIRKIVGRTPKVKKATV

SEQ ID NO: 79707 - protein, 33 aa, Artificial Sequence
  Cyclic GFR-binding peptide
  MOD_RES (4)..(4): Xaa is C or S
GLEXVPTEEEPLPMVYYRIKPHQGQHEQLSNFL

SEQ ID NO: 79708 - protein, 30 aa, Artificial Sequence
  Cyclic GFR-binding peptide
  MOD_RES (2)..(3): Xaa is C or S
AXXVPTELRPVQMRKIDEYDKVVKKATVEM

SEQ ID NO: 79709 - protein, 32 aa, Artificial Sequence
  Cyclic GFR-binding peptide
  MOD_RES (6)..(7): Xaa is C or S
ASASPXXVSQDLSNITIQIMIGKTPKIIGEMS

SEQ ID NO: 79710 - protein, 31 aa, Artificial Sequence; identical to SEQ ID NO: 29945
  Cyclic GFR-binding peptide
  MOD_RES (1)..(1): Xaa is C or S

SEQ ID NO: 79711 - protein, 28 aa, Artificial Sequence
  Cyclic GFR-binding peptide
  MOD_RES (2)..(2): Xaa is C or S
TXAPTKLRPVQVRKIDDSSNVIKKATVN

SEQ ID NO: 79712 - protein, 37 aa, Artificial Sequence; identical to SEQ ID NO: 29947
  Cyclic GFR-binding peptide
  MOD_RES (5)..(6)..(37): Xaa is C or S

SEQ ID NO: 79713 - protein, 32 aa, Artificial Sequence
  Cyclic GFR-binding peptide
  MOD_RES (6)..(7): Xaa is C or S
SIPKAXXVPTELRPVQMRKIDEYDKVVKKATV

SEQ ID NO: 79714 - protein, 29 aa, Artificial Sequence
  Cyclic GFR-binding peptide
  MOD_RES (27)..(29): Xaa is C or S
RSVKMAKVDEYDKVVKEVQVEMVVEGXGX

SEQ ID NO: 79715 - protein, 32 aa, Artificial Sequence
  Cyclic GFR-binding peptide
  MOD_RES (4)..(5): Xaa is C or S
ASPXXVSQDLRPVQIRKIIGKTPKIKKATVMI

SEQ ID NO: 79716 - protein, 36 aa, Artificial Sequence
  Cyclic GFR-binding peptide
  MOD_RES (4)..(4): Xaa is C or S
SVKXQPSRVHHEPLPVVYYEYVRKKPKLEQLSNRLE

SEQ ID NO: 79717 - protein, 44 aa, Artificial Sequence; identical to SEQ ID NO: 29956
  Cyclic GFR-binding peptide
  MOD_RES (5)..(42)..(44): Xaa is C or S

SEQ ID NO: 79718 - protein, 29 aa, Artificial Sequence
  Cyclic GFR-binding peptide
  MOD_RES (3)..(4): Xaa is C or S
KPXXAPTQLRPVQVRKIDDSSNVIKKATV

SEQ ID NO: 79719 - protein, 30 aa, Artificial Sequence
  Cyclic GFR-binding peptide
  MOD_RES (1)..(2): Xaa is C or S
XXVPTELRSVKMAKVDENEKVVKEVQVDMV

SEQ ID NO: 79720 - protein, 39 aa, Artificial Sequence; identical to SEQ ID NO: 29961
  Cyclic GFR-binding peptide
  MOD_RES (3)..(4)..(36)..(38): Xaa is C or S

SEQ ID NO: 79721 - protein, 28 aa, Artificial Sequence
  Cyclic GFR-binding peptide
EPLPVVYYEIVRKKPIFEQLSNTLEDHL

SEQ ID NO: 79722 - protein, 30 aa, Artificial Sequence
  Cyclic GFR-binding peptide
  MOD_RES (1)..(2): Xaa is C or S
XXVPQDLRSVKIAKVVGRTPKVKEVQVMVV

SEQ ID NO: 79723 - protein, 28 aa, Artificial Sequence
  Cyclic GFR-binding peptide
PQDLRPVQIRKIVGRTPKVKKATVMVVK

SEQ ID NO: 79724 - protein, 32 aa, Artificial Sequence; identical to SEQ ID NO: 29967
  Cyclic GFR-binding peptide
  MOD_RES (1)..(32): Xaa is C or S

SEQ ID NO: 79725 - protein, 40 aa, Artificial Sequence; identical to SEQ ID NO: 29966
  Cyclic GFR-binding peptide
  MOD_RES (2)..(39): Xaa is C or S

SEQ ID NO: 79726 - protein, 25 aa, Artificial Sequence
  Cyclic GFR-binding peptide
VPTELRPVQMRKIDENEKVVKKATV

SEQ ID NO: 79727 - protein, 31 aa, Artificial Sequence
  Cyclic GFR-binding peptide
VPTEEEPLPMVYYRIKPHQGQHEQLSNFLQH

SEQ ID NO: 79728 - protein, 30 aa, Artificial Sequence
  Cyclic GFR-binding peptide
HHEPLTVLYYEYVRKKPKLEQLSNRLEEHL

SEQ ID NO: 79729 - protein, 30 aa, Artificial Sequence
  Cyclic GFR-binding peptide
PTEEEPLPMVYYRIKPHQGQHEQLSNFLQH

SEQ ID NO: 79730 - protein, 38 aa, Artificial Sequence; identical to SEQ ID NO: 29972
  Cyclic GFR-binding peptide
  MOD_RES (6)..(7)..(38): Xaa is C or S

SEQ ID NO: 79731 - protein, 31 aa, Artificial Sequence
  Cyclic GFR-binding peptide
  MOD_RES (31)..(31): Xaa is C or S
LEPLTVLYYEIVRKKPIFEQLSNTLEDHLAX

SEQ ID NO: 79732 - protein, 31 aa, Artificial Sequence
  Cyclic GFR-binding peptide
VHHEPLTVLYYEYVRKKPKLEQLSNRLEEHL

SEQ ID NO: 79733 - protein, 32 aa, Artificial Sequence
  Cyclic GFR-binding peptide
  MOD_RES (3)..(4): Xaa is C or S
KPXXAPTQLRPVQVRKIDDSSNVIKKATVNMV

SEQ ID NO: 79734 - protein, 37 aa, Artificial Sequence
  Cyclic GFR-binding peptide
  MOD_RES (4)..(4): Xaa is C or S
SVKXQPSRVHHEPLPVVYYEYVRKKPKLEQLSNRLEE

SEQ ID NO: 79735 - protein, 36 aa, Artificial Sequence; identical to SEQ ID NO: 29984
  Cyclic GFR-binding peptide
  MOD_RES (3)..(4)..(35): Xaa is C or S

SEQ ID NO: 79736 - protein, 29 aa, Artificial Sequence
  Cyclic GFR-binding peptide
  MOD_RES (29)..(29): Xaa is C or S
ELRPVQMRKIDENEKVVKKATVDMVVEGX

SEQ ID NO: 79737 - protein, 31 aa, Artificial Sequence
  Cyclic GFR-binding peptide
  MOD_RES (4)..(5): Xaa is C or S
PKPXXAPTKLSNITVQIMDDSSNVIIGEMSN

SEQ ID NO: 79738 - protein, 30 aa, Artificial Sequence
  Cyclic GFR-binding peptide
PTKLSNITVQIMDDSSNVIIGEMSNMVVRS

SEQ ID NO: 79739 - protein, 31 aa, Artificial Sequence; identical to SEQ ID NO: 29991
  Cyclic GFR-binding peptide

SEQ ID NO: 79740 - protein, 30 aa, Artificial Sequence
  Cyclic GFR-binding peptide
  MOD_RES (4)..(5): Xaa is C or S
PKAXXVPTELRSVKMAKVDENEKVVKEVQV

SEQ ID NO: 79741 - protein, 28 aa, Artificial Sequence
  Cyclic GFR-binding peptide
  MOD_RES (28)..(28): Xaa is C or S
DLSNITIQIMIGKTPKIIGEMSMIVKSX

SEQ ID NO: 79742 - protein, 32 aa, Artificial Sequence
  Cyclic GFR-binding peptide
  MOD_RES (2)..(3): Xaa is C or S
PXXAPTQLRSVKVAKVDDSSNVIKEVQVNMVV

SEQ ID NO: 79743 - protein, 28 aa, Artificial Sequence
  Cyclic GFR-binding peptide
TQVQLEPLPVVYYEIVRKKPIFEQLSNT

SEQ ID NO: 79744 - protein, 32 aa, Artificial Sequence
  Cyclic GFR-binding peptide
  MOD_RES (6)..(7): Xaa is C or S
YVPKPXXAPTKLRSVKVAKVDDSSNVIKEVQV

SEQ ID NO: 79745 - protein, 37 aa, Artificial Sequence; identical to SEQ ID NO: 30000
  Cyclic GFR-binding peptide
  MOD_RES (1)..(2)..(34)..(36): Xaa is C or S

SEQ ID NO: 79746 - protein, 40 aa, Artificial Sequence; identical to SEQ ID NO: 30004
  Cyclic GFR-binding peptide
  MOD_RES (2)..(39): Xaa is C or S

SEQ ID NO: 79747 - protein, 24 aa, Artificial Sequence
  Cyclic GFR-binding peptide
RPVQVRKIDDSSNVIKKATVNMVV

SEQ ID NO: 79748 - protein, 40 aa, Artificial Sequence; identical to SEQ ID NO: 30006
  Cyclic GFR-binding peptide
  MOD_RES (6)..(7)..(39): Xaa is C or S

SEQ ID NO: 79749 - protein, 38 aa, Artificial Sequence; identical to SEQ ID NO: 30007
  Cyclic GFR-binding peptide
  MOD_RES (2)..(3)..(35)..(37): Xaa is C or S

SEQ ID NO: 79750 - protein, 28 aa, Artificial Sequence
  Cyclic GFR-binding peptide
  MOD_RES (1)..(2): Xaa is C or S
XXVPQDLRPVQIRKIVGRTPKVKKATVM

SEQ ID NO: 79751 - protein, 26 aa, Artificial Sequence
  Cyclic GFR-binding peptide
LSNITIQIMVGRTPKVIGEMSMVVKS

SEQ ID NO: 79752 - protein, 32 aa, Artificial Sequence
  Cyclic GFR-binding peptide
  MOD_RES (5)..(5): Xaa is C or S
EGLEXVPTEEEPLPMVYYRIKPHQGQHEQLSN

SEQ ID NO: 79753 - protein, 35 aa, Artificial Sequence; identical to SEQ ID NO: 30011
  Cyclic GFR-binding peptide
  MOD_RES (1)..(32)..(34): Xaa is C or S

SEQ ID NO: 79754 - protein, 35 aa, Artificial Sequence
  Cyclic GFR-binding peptide
  MOD_RES (7)..(7): Xaa is C or S
HVTKPTXAPTKLRPVQVRKIDDSSNVIKKATVNMV

SEQ ID NO: 79755 - protein, 25 aa, Artificial Sequence
  Cyclic GFR-binding peptide
LSNITIQIMIGKTPKIIGEMSMIVK

SEQ ID NO: 79756 - protein, 31 aa, Artificial Sequence
  Cyclic GFR-binding peptide
  MOD_RES (3)..(4): Xaa is C or S
KPXXAPTQLRSVKVAKVDDSSNVIKEVQVNM

SEQ ID NO: 79757 - protein, 32 aa, Artificial Sequence
  Cyclic GFR-binding peptide
  MOD_RES (3)..(4): Xaa is C or S
SPXXVPQDLRPVQIRKIVGRTPKVKKATVMVV

SEQ ID NO: 79758 - protein, 37 aa, Artificial Sequence; identical to SEQ ID NO: 30012
  Cyclic GFR-binding peptide
  MOD_RES (4)..(5)..(36): Xaa is C or S

SEQ ID NO: 79759 - protein, 33 aa, Artificial Sequence
  Cyclic GFR-binding peptide
  MOD_RES (4)..(4): Xaa is C or S
KPTXAPTKLRSVKVAKVDDSSNVIKEVQVNMVV

SEQ ID NO: 79760 - protein, 31 aa, Artificial Sequence
  Cyclic GFR-binding peptide
  MOD_RES (30)..(30): Xaa is C or S
TELRPVQMRKIDENEKVVKKATVDMVVEGXG

SEQ ID NO: 79761 - protein, 43 aa, Artificial Sequence; identical to SEQ ID NO: 30021
  Cyclic GFR-binding peptide
  MOD_RES (4)..(41)..(43): Xaa is C or S

SEQ ID NO: 79762 - protein, 23 aa, Artificial Sequence
  Cyclic GFR-binding peptide
RPVQMRKIDEYDKVVKKATVEMV

SEQ ID NO: 79763 - protein, 31 aa, Artificial Sequence
  Cyclic GFR-binding peptide
PTQVQLEPLPVVYYEIVRKKPIFEQLSNTLE

SEQ ID NO: 79764 - protein, 38 aa, Artificial Sequence; identical to SEQ ID NO: 30024
  Cyclic GFR-binding peptide
  MOD_RES (5)..(6)..(38): Xaa is C or S

SEQ ID NO: 79765 - protein, 39 aa, Artificial Sequence; identical to SEQ ID NO: 30026
  Cyclic GFR-binding peptide
  MOD_RES (4)..(5)..(37)..(39): Xaa is C or S

SEQ ID NO: 79766 - protein, 31 aa, Artificial Sequence
  Cyclic GFR-binding peptide
  MOD_RES (31)..(31): Xaa is C or S
PTQLSNITVQIMDDSSNVIIGEMSNMVVRAX

SEQ ID NO: 79767 - protein, 30 aa, Artificial Sequence
  Cyclic GFR-binding peptide
  MOD_RES (27)..(29): Xaa is C or S
SNITVQIMDDSSNVIIGEMSNMVVRAXGXH

SEQ ID NO: 79768 - protein, 26 aa, Artificial Sequence
  Cyclic GFR-binding peptide
PTELSNITMQIMDENEKVVIGEMSDM

SEQ ID NO: 79769 - protein, 31 aa, Artificial Sequence
  Cyclic GFR-binding peptide
  MOD_RES (31)..(31): Xaa is C or S
PTELSNITMQIMDEYDKVVIGEMSEMVVEGX

SEQ ID NO: 79770 - protein, 29 aa, Artificial Sequence
  Cyclic GFR-binding peptide
  MOD_RES (27)..(29): Xaa is C or S
LRPVQIRKIIGKTPKIKKATVMIVKSXKX

SEQ ID NO: 79771 - protein, 32 aa, Artificial Sequence
  Cyclic GFR-binding peptide
  MOD_RES (30)..(32): Xaa is C or S
TELSNITMQIMDEYDKVVIGEMSEMVVEGXGX

SEQ ID NO: 79772 - protein, 37 aa, Artificial Sequence; identical to SEQ ID NO: 30031
  Cyclic GFR-binding peptide
  MOD_RES (3)..(4)..(36): Xaa is C or S

SEQ ID NO: 79773 - protein, 39 aa, Artificial Sequence; identical to SEQ ID NO: 30032
  Cyclic GFR-binding peptide
  MOD_RES (5)..(6)..(37)..(39): Xaa is C or S

SEQ ID NO: 79774 - protein, 32 aa, Artificial Sequence
  Cyclic GFR-binding peptide
  MOD_RES (30)..(32): Xaa is C or S
PQDLRSVKIAKVVGRTPKVKEVQVMVVKSXKX

SEQ ID NO: 79775 - protein, 21 aa, Artificial Sequence
  Cyclic GFR-binding peptide
RPVQMRKIDENEKVVKKATVD

SEQ ID NO: 79776 - protein, 32 aa, Artificial Sequence
  Cyclic GFR-binding peptide
  MOD_RES (4)..(5): Xaa is C or S
AAPXXVPQALRPVQIRKIVGRKPKVKKATVMI

SEQ ID NO: 79777 - protein, 30 aa, Artificial Sequence
  Cyclic GFR-binding peptide
PTQLRPVQVRKIDDSSNVIKKATVNMVVRA

SEQ ID NO: 79778 - protein, 36 aa, Artificial Sequence
  Cyclic GFR-binding peptide
  MOD_RES (6)..(7): Xaa is C or S
TVPKPXXAPTQLRSVKVAKVDDSSNVIKEVQVNMVV

SEQ ID NO: 79779 - protein, 38 aa, Artificial Sequence
  Cyclic GFR-binding peptide
  MOD_RES (7)..(7): Xaa is C or S
NDEGLEXVPTEEEPLPMVYYRIKPHQGQHEQLSNFLQH

SEQ ID NO: 79780 - protein, 24 aa, Artificial Sequence
  Cyclic GFR-binding peptide
RSVKIAKVVGRKPKVKEVQVMIVR

SEQ ID NO: 79781 - protein, 36 aa, Artificial Sequence; identical to SEQ ID NO: 30037
  Cyclic GFR-binding peptide
  MOD_RES (6)..(6): Xaa is C or S

SEQ ID NO: 79782 - protein, 24 aa, Artificial Sequence
  Cyclic GFR-binding peptide
LSNITIQIMIGKTPKIIGEMSMIV

SEQ ID NO: 79783 - protein, 33 aa, Artificial Sequence
  Cyclic GFR-binding peptide
  MOD_RES (6)..(7): Xaa is C or S
KIPKAXXVPTELRSVKMAKVDENEKVVKEVQVD

SEQ ID NO: 79784 - protein, 23 aa, Artificial Sequence
  Cyclic GFR-binding peptide
ALSNITIQIMVGRKPKVIGEMSM

SEQ ID NO: 79785 - protein, 31 aa, Artificial Sequence
  Cyclic GFR-binding peptide
  MOD_RES (30)..(30): Xaa is C or S
TELRSVKMAKVDEYDKVVKEVQVEMVVEGXG

SEQ ID NO: 79786 - protein, 36 aa, Artificial Sequence; identical to SEQ ID NO: 30041
  Cyclic GFR-binding peptide
  MOD_RES (5)..(6): Xaa is C or S

SEQ ID NO: 79787 - protein, 28 aa, Artificial Sequence
  Cyclic GFR-binding peptide
TELSNITMQIMDENEKVVIGEMSDMVVE

SEQ ID NO: 79788 - protein, 25 aa, Artificial Sequence
  Cyclic GFR-binding peptide
PTQLRSVKVAKVDDSSNVIKEVQVN

SEQ ID NO: 79789 - protein, 35 aa, Artificial Sequence; identical to SEQ ID NO: 30042
  Cyclic GFR-binding peptide
  MOD_RES (1)..(35): Xaa is C or S

SEQ ID NO: 79790 - protein, 35 aa, Artificial Sequence
  Cyclic GFR-binding peptide
  MOD_RES (6)..(7): Xaa is C or S
ASASPXXVSQDLRSVKIAKVIGKTPKIKEVQVMIV

SEQ ID NO: 79791 - protein, 35 aa, Artificial Sequence
  Cyclic GFR-binding peptide
  MOD_RES (7)..(7): Xaa is C or S
NDEGLEXVPTEEEPLTMLYYRIKPHQGQHEQLSNF

SEQ ID NO: 79792 - protein, 40 aa, Artificial Sequence; identical to SEQ ID NO: 30044
  Cyclic GFR-binding peptide
  MOD_RES (5)..(6)..(37)..(39): Xaa is C or S

SEQ ID NO: 79793 - protein, 27 aa, Artificial Sequence
  Cyclic GFR-binding peptide
  MOD_RES (27)..(27): Xaa is C or S
LRPVQIRKIIGKTPKIKKATVMIVKSX

SEQ ID NO: 79794 - protein, 42 aa, Artificial Sequence; identical to SEQ ID NO: 30047
  Cyclic GFR-binding peptide
  MOD_RES (2)..(39)..(41): Xaa is C or S

SEQ ID NO: 79795 - protein, 20 aa, Artificial Sequence
  Cyclic GFR-binding peptide
SNITMQIMDEYDKVVIGEMS

SEQ ID NO: 79796 - protein, 27 aa, Artificial Sequence
  Cyclic GFR-binding peptide
ELRPVQMRKIDENEKVVKKATVDMVVE

SEQ ID NO: 79797 - protein, 33 aa, Artificial Sequence; identical to SEQ ID NO: 30049
  Cyclic GFR-binding peptide
  MOD_RES (31)..(33): Xaa is C or S

SEQ ID NO: 79798 - protein, 26 aa, Artificial Sequence
  Cyclic GFR-binding peptide
VPQDLRSVKIAKVVGRTPKVKEVQVM

SEQ ID NO: 79799 - protein, 35 aa, Artificial Sequence; identical to SEQ ID NO: 30055
  Cyclic GFR-binding peptide
  MOD_RES (3)..(35): Xaa is C or S

SEQ ID NO: 79800 - protein, 34 aa, Artificial Sequence; identical to SEQ ID NO: 30057
  Cyclic GFR-binding peptide
  MOD_RES (2)..(2): Xaa is C or S

SEQ ID NO: 79801 - protein, 29 aa, Artificial Sequence
  Cyclic GFR-binding peptide
PTEEEPLPMVYYRIKPHQGQHEQLSNFLQ

SEQ ID NO: 79802 - protein, 34 aa, Artificial Sequence
  Cyclic GFR-binding peptide
  MOD_RES (4)..(4): Xaa is C or S
GLEXVPTEEEPLTMLYYRIKPHQGQHEQLSNFLQ

SEQ ID NO: 79803 - protein, 33 aa, Artificial Sequence
  Cyclic GFR-binding peptide
  MOD_RES (30)..(32): Xaa is C or S
PQDLRPVQIRKIVGRTPKVKKATVMVVKSXKXS

SEQ ID NO: 79804 - protein, 26 aa, Artificial Sequence
  Cyclic GFR-binding peptide
SQDLRSVKIAKVIGKTPKIKEVQVMI

SEQ ID NO: 79805 - protein, 29 aa, Artificial Sequence
  Cyclic GFR-binding peptide
LEPLTVLYYEIVRKKPIFEQLSNTLEDHL

SEQ ID NO: 79806 - protein, 20 aa, Artificial Sequence
  Cyclic GFR-binding peptide
SNITMQIMDEYDKVVIGEMS

SEQ ID NO: 79807 - protein, 30 aa, Artificial Sequence
  Cyclic GFR-binding peptide
SRVHHEPLTVLYYEYVRKKPKLEQLSNRLE

SEQ ID NO: 79808 - protein, 33 aa, Artificial Sequence
  Cyclic GFR-binding peptide
  MOD_RES (30)..(32): Xaa is C or S
EEPLTMLYYRIKPHQGQHEQLSNFLQHNKXEXR

SEQ ID NO: 79809 - protein, 32 aa, Artificial Sequence; identical to SEQ ID NO: 30061
  Cyclic GFR-binding peptide
  MOD_RES (1)..(1): Xaa is C or S

SEQ ID NO: 79810 - protein, 32 aa, Artificial Sequence
  Cyclic GFR-binding peptide
  MOD_RES (3)..(4): Xaa is C or S
KAXXVPTELRSVKMAKVDEYDKVVKEVQVEMV

SEQ ID NO: 79811 - protein, 31 aa, Artificial Sequence
  Cyclic GFR-binding peptide
QLEPLPVVYYEIVRKKPIFEQLSNTLEDHLA

SEQ ID NO: 79812 - protein, 32 aa, Artificial Sequence
  Cyclic GFR-binding peptide
  MOD_RES (29)..(31): Xaa is C or S
KLRPVQVRKIDDSSNVIKKATVNMVVRSXGXH

SEQ ID NO: 79813 - protein, 31 aa, Artificial Sequence
  Cyclic GFR-binding peptide
  MOD_RES (28)..(30): Xaa is C or S
LRPVQVRKIDDSSNVIKKATVNMVVRAXGXH

SEQ ID NO: 79814 - protein, 37 aa, Artificial Sequence
  Cyclic GFR-binding peptide
  MOD_RES (4)..(4): Xaa is C or S
SVKXQPSRVHHEPLTVLYYEYVRKKPKLEQLSNRLEE

SEQ ID NO: 79815 - protein, 30 aa, Artificial Sequence
  Cyclic GFR-binding peptide
PTQLRSVKVAKVDDSSNVIKEVQVNMVVRA

SEQ ID NO: 79816 - protein, 35 aa, Artificial Sequence
  Cyclic GFR-binding peptide
  MOD_RES (5)..(6): Xaa is C or S
SASPXXVPQDLRSVKIAKVVGRTPKVKEVQVMVVK

SEQ ID NO: 79817 - protein, 31 aa, Artificial Sequence
  Cyclic GFR-binding peptide
  MOD_RES (30)..(30): Xaa is C or S
TQLRPVQVRKIDDSSNVIKKATVNMVVRAXG

SEQ ID NO: 79818 - protein, 29 aa, Artificial Sequence
  Cyclic GFR-binding peptide
PQDLRSVKIAKVVGRTPKVKEVQVMVVKS

SEQ ID NO: 79819 - protein, 32 aa, Artificial Sequence; identical to SEQ ID NO: 30072
  Cyclic GFR-binding peptide
  MOD_RES (1)..(2): Xaa is C or S

SEQ ID NO: 79820 - protein, 39 aa, Artificial Sequence; identical to SEQ ID NO: 30071
  Cyclic GFR-binding peptide
  MOD_RES (5)..(6)..(38): Xaa is C or S

SEQ ID NO: 79821 - protein, 23 aa, Artificial Sequence
  Cyclic GFR-binding peptide
QDLSNITIQIMIGKTPKIIGEMS

SEQ ID NO: 79822 - protein, 29 aa, Artificial Sequence
  Cyclic GFR-binding peptide
VPTELRSVKMAKVDENEKVVKEVQVDMVV

SEQ ID NO: 79823 - protein, 24 aa, Artificial Sequence
  Cyclic GFR-binding peptide
QLRSVKVAKVDDSSNVIKEVQVNM

SEQ ID NO: 79824 - protein, 37 aa, Artificial Sequence; identical to SEQ ID NO: 30078
  Cyclic GFR-binding peptide
  MOD_RES (6)..(7): Xaa is C or S

SEQ ID NO: 79825 - protein, 35 aa, Artificial Sequence
  Cyclic GFR-binding peptide
  MOD_RES (5)..(5): Xaa is C or S
EGLEXVPTEEEPLTMLYYRIKPHQGQHEQLSNFLQ

SEQ ID NO: 79826 - protein, 32 aa, Artificial Sequence
  Cyclic GFR-binding peptide
  MOD_RES (6)..(7): Xaa is C or S
SIPKAXXVPTELRSVKMAKVDEYDKVVKEVQV

SEQ ID NO: 79827 - protein, 34 aa, Artificial Sequence
  Cyclic GFR-binding peptide
  MOD_RES (31)..(33): Xaa is C or S
PTQLRSVKVAKVDDSSNVIKEVQVNMVVRAXGXH

SEQ ID NO: 79828 - protein, 32 aa, Artificial Sequence
  Cyclic GFR-binding peptide
  MOD_RES (4)..(5): Xaa is C or S
ASPXXVPQDLRPVQIRKIVGRTPKVKKATVMV

SEQ ID NO: 79829 - protein, 37 aa, Artificial Sequence; identical to SEQ ID NO: 30082
  Cyclic GFR-binding peptide
  MOD_RES (6)..(7): Xaa is C or S

SEQ ID NO: 79830 - protein, 32 aa, Artificial Sequence; identical to SEQ ID NO: 30083
  Cyclic GFR-binding peptide
  MOD_RES (32)..(32): Xaa is C or S

SEQ ID NO: 79831 - protein, 32 aa, Artificial Sequence; identical to SEQ ID NO: 30085
  Cyclic GFR-binding peptide
  MOD_RES (1)..(32): Xaa is C or S

SEQ ID NO: 79832 - protein, 29 aa, Artificial Sequence
  Cyclic GFR-binding peptide
  MOD_RES (3)..(4): Xaa is C or S
KPXXAPTQLRSVKVAKVDDSSNVIKEVQV

SEQ ID NO: 79833 - protein, 42 aa, Artificial Sequence; identical to SEQ ID NO: 30086
  Cyclic GFR-binding peptide
  MOD_RES (3)..(40)..(42): Xaa is C or S

SEQ ID NO: 79834 - protein, 24 aa, Artificial Sequence
  Cyclic GFR-binding peptide
LRSVKIAKVIGKTPKIKEVQVMIV

SEQ ID NO: 79835 - protein, 36 aa, Artificial Sequence; identical to SEQ ID NO: 30094
  Cyclic GFR-binding peptide
  MOD_RES (5)..(6): Xaa is C or S

SEQ ID NO: 79836 - protein, 35 aa, Artificial Sequence; identical to SEQ ID NO: 30097
  Cyclic GFR-binding peptide
  MOD_RES (2)..(3)..(35): Xaa is C or S

SEQ ID NO: 79837 - protein, 30 aa, Artificial Sequence
  Cyclic GFR-binding peptide
  MOD_RES (30)..(30): Xaa is C or S
SQDLSNITIQIMIGKTPKIIGEMSMIVKSX

SEQ ID NO: 79838 - protein, 34 aa, Artificial Sequence; identical to SEQ ID NO: 30103
  Cyclic GFR-binding peptide
  MOD_RES (3)..(4): Xaa is C or S

SEQ ID NO: 79839 - protein, 23 aa, Artificial Sequence
  Cyclic GFR-binding peptide
SNITMQIMDENEKVVIGEMSDMV

SEQ ID NO: 79840 - protein, 33 aa, Artificial Sequence
  Cyclic GFR-binding peptide
  MOD_RES (30)..(32): Xaa is C or S
TKLSNITVQIMDDSSNVIIGEMSNMVVRSXGXH

SEQ ID NO: 79841 - protein, 36 aa, Artificial Sequence; identical to SEQ ID NO: 30107
  Cyclic GFR-binding peptide
  MOD_RES (5)..(6): Xaa is C or S

SEQ ID NO: 79842 - protein, 33 aa, Artificial Sequence; identical to SEQ ID NO: 30112
  Cyclic GFR-binding peptide
  MOD_RES (1)..(32): Xaa is C or S

SEQ ID NO: 79843 - protein, 31 aa, Artificial Sequence
  Cyclic GFR-binding peptide
  MOD_RES (1)..(1): Xaa is C or S
XQPSRVHHEPLPVVYYEYVRKKPKLEQLSNR

SEQ ID NO: 79844 - protein, 35 aa, Artificial Sequence; identical to SEQ ID NO: 30115
  Cyclic GFR-binding peptide
  MOD_RES (3)..(4)..(35): Xaa is C or S

SEQ ID NO: 79845 - protein, 34 aa, Artificial Sequence; identical to SEQ ID NO: 30117
  Cyclic GFR-binding peptide
  MOD_RES (2)..(3)..(34): Xaa is C or S

SEQ ID NO: 79846 - protein, 34 aa, Artificial Sequence; identical to SEQ ID NO: 30118
  Cyclic GFR-binding peptide
  MOD_RES (2)..(3): Xaa is C or S

SEQ ID NO: 79847 - protein, 36 aa, Artificial Sequence; identical to SEQ ID NO: 30119
  Cyclic GFR-binding peptide
  MOD_RES (1)..(2)..(34)..(36): Xaa is C or S

SEQ ID NO: 79848 - protein, 39 aa, Artificial Sequence; identical to SEQ ID NO: 30121
  Cyclic GFR-binding peptide
  MOD_RES (3)..(3): Xaa is C or S

SEQ ID NO: 79849 - protein, 27 aa, Artificial Sequence
  Cyclic GFR-binding peptide
VHHEPLTVLYYEYVRKKPKLEQLSNRL

SEQ ID NO: 79850 - protein, 40 aa, Artificial Sequence; identical to SEQ ID NO: 30124
  Cyclic GFR-binding peptide
  MOD_RES (2)..(39): Xaa is C or S

SEQ ID NO: 79851 - protein, 23 aa, Artificial Sequence
  Cyclic GFR-binding peptide
LSNITVQIMDDSSNVIIGEMSNM

SEQ ID NO: 79852 - protein, 32 aa, Artificial Sequence
  Cyclic GFR-binding peptide
  MOD_RES (6)..(7): Xaa is C or S
ASASPXXVSQDLRPVQIRKIIGKTPKIKKATV

SEQ ID NO: 79853 - protein, 25 aa, Artificial Sequence
  Cyclic GFR-binding peptide
SNITIQIMVGRTPKVIGEMSMVVKS

SEQ ID NO: 79854 - protein, 26 aa, Artificial Sequence
  Cyclic GFR-binding peptide
ELRSVKMAKVDENEKVVKEVQVDMVV

SEQ ID NO: 79855 - protein, 26 aa, Artificial Sequence
  Cyclic GFR-binding peptide
  MOD_RES (26)..(26): Xaa is C or S
RSVKIAKVVGRKPKVKEVQVMIVRSX

SEQ ID NO: 79856 - protein, 25 aa, Artificial Sequence
  Cyclic GFR-binding peptide
RSVKIAKVVGRTPKVKEVQVMVVKS

SEQ ID NO: 79857 - protein, 24 aa, Artificial Sequence
  Cyclic GFR-binding peptide
PTQLSNITVQIMDDSSNVIIGEMS

SEQ ID NO: 79858 - protein, 27 aa, Artificial Sequence
  Cyclic GFR-binding peptide
TELRPVQMRKIDENEKVVKKATVDMVV

SEQ ID NO: 79859 - protein, 37 aa, Artificial Sequence; identical to SEQ ID NO: 30127
  Cyclic GFR-binding peptide
  MOD_RES (5)..(6): Xaa is C or S

SEQ ID NO: 79860 - protein, 28 aa, Artificial Sequence
  Cyclic GFR-binding peptide
  MOD_RES (27)..(27): Xaa is C or S
RPVQMRKIDEYDKVVKKATVEMVVEGXG

SEQ ID NO: 79861 - protein, 38 aa, Artificial Sequence; identical to SEQ ID NO: 30131
  Cyclic GFR-binding peptide
  MOD_RES (1)..(38): Xaa is C or S

SEQ ID NO: 79862 - protein, 26 aa, Artificial Sequence
  Cyclic GFR-binding peptide
DLRSVKIAKVVGRTPKVKEVQVMVVK

SEQ ID NO: 79863 - protein, 25 aa, Artificial Sequence
  Cyclic GFR-binding peptide
VPTELRSVKMAKVDEYDKVVKEVQV

SEQ ID NO: 79864 - protein, 34 aa, Artificial Sequence
  Cyclic GFR-binding peptide
  MOD_RES (1)..(1): Xaa is C or S
XQPSRVHHEPLPVVYYEYVRKKPKLEQLSNRLEE

SEQ ID NO: 79865 - protein, 37 aa, Artificial Sequence; identical to SEQ ID NO: 30133
  Cyclic GFR-binding peptide
  MOD_RES (6)..(7): Xaa is C or S

SEQ ID NO: 79866 - protein, 37 aa, Artificial Sequence; identical to SEQ ID NO: 30136
  Cyclic GFR-binding peptide
  MOD_RES (2)..(3)..(34)..(36): Xaa is C or S

SEQ ID NO: 79867 - protein, 34 aa, Artificial Sequence
  Cyclic GFR-binding peptide
  MOD_RES (34)..(34): Xaa is C or S
RVHHEPLTVLYYEYVRKKPKLEQLSNRLEEHLEX

SEQ ID NO: 79868 - protein, 38 aa, Artificial Sequence; identical to SEQ ID NO: 30140
  Cyclic GFR-binding peptide
  MOD_RES (1)..(35)..(37): Xaa is C or S

SEQ ID NO: 79869 - protein, 33 aa, Artificial Sequence; identical to SEQ ID NO: 30142
  Cyclic GFR-binding peptide

SEQ ID NO: 79870 - protein, 20 aa, Artificial Sequence
  Cyclic GFR-binding peptide
SNITMQIMDENEKVVIGEMS

SEQ ID NO: 79871 - protein, 29 aa, Artificial Sequence
  Cyclic GFR-binding peptide
  MOD_RES (28)..(28): Xaa is C or S
LRPVQMRKIDENEKVVKKATVDMVVEGXG

SEQ ID NO: 79872 - protein, 34 aa, Artificial Sequence; identical to SEQ ID NO: 30147
  Cyclic GFR-binding peptide
  MOD_RES (32)..(34): Xaa is C or S

SEQ ID NO: 79873 - protein, 30 aa, Artificial Sequence
  Cyclic GFR-binding peptide
  MOD_RES (29)..(29): Xaa is C or S
QLRSVKVAKVDDSSNVIKEVQVNMVVRAXG

SEQ ID NO: 79874 - protein, 31 aa, Artificial Sequence
  Cyclic GFR-binding peptide
  MOD_RES (29)..(31): Xaa is C or S
ELSNITMQIMDENEKVVIGEMSDMVVEGXGX

SEQ ID NO: 79875 - protein, 36 aa, Artificial Sequence; identical to SEQ ID NO: 30151
  Cyclic GFR-binding peptide
  MOD_RES (5)..(6): Xaa is C or S

SEQ ID NO: 79876 - protein, 29 aa, Artificial Sequence
  Cyclic GFR-binding peptide
  MOD_RES (29)..(29): Xaa is C or S
QDLRSVKIAKVVGRTPKVKEVQVMVVKSX

SEQ ID NO: 79877 - protein, 34 aa, Artificial Sequence; identical to SEQ ID NO: 30157
  Cyclic GFR-binding peptide
  MOD_RES (32)..(34): Xaa is C or S

SEQ ID NO: 79878 - protein, 38 aa, Artificial Sequence; identical to SEQ ID NO: 30160
  Cyclic GFR-binding peptide
  MOD_RES (6)..(38): Xaa is C or S

SEQ ID NO: 79879 - protein, 36 aa, Artificial Sequence; identical to SEQ ID NO: 30169
  Cyclic GFR-binding peptide
  MOD_RES (6)..(6): Xaa is C or S

SEQ ID NO: 79880 - protein, 34 aa, Artificial Sequence; identical to SEQ ID NO: 30174
  Cyclic GFR-binding peptide
  MOD_RES (3)..(4): Xaa is C or S

SEQ ID NO: 79881 - protein, 30 aa, Artificial Sequence
  Cyclic GFR-binding peptide
  MOD_RES (3)..(4): Xaa is C or S
APXXVPQALRPVQIRKIVGRKPKVKKATVM

SEQ ID NO: 79882 - protein, 28 aa, Artificial Sequence
  Cyclic GFR-binding peptide
ELRPVQMRKIDEYDKVVKKATVEMVVEG

SEQ ID NO: 79883 - protein, 40 aa, Artificial Sequence; identical to SEQ ID NO: 30176
  Cyclic GFR-binding peptide
  MOD_RES (5)..(6)..(38)..(40): Xaa is C or S

SEQ ID NO: 79884 - protein, 36 aa, Artificial Sequence; identical to SEQ ID NO: 30179
  Cyclic GFR-binding peptide
  MOD_RES (2)..(3)..(34)..(36): Xaa is C or S

SEQ ID NO: 79885 - protein, 32 aa, Artificial Sequence
  Cyclic GFR-binding peptide
  MOD_RES (3)..(4): Xaa is C or S
KAXXVPTELSNITMQIMDEYDKVVIGEMSEMV

SEQ ID NO: 79886 - protein, 33 aa, Artificial Sequence
  Cyclic GFR-binding peptide
  MOD_RES (30)..(32): Xaa is C or S
TQLRPVQVRKIDDSSNVIKKATVNMVVRAXGXH

SEQ ID NO: 79887 - protein, 25 aa, Artificial Sequence
  Cyclic GFR-binding peptide
QDLRPVQIRKIVGRTPKVKKATVMV

SEQ ID NO: 79888 - protein, 38 aa, Artificial Sequence; identical to SEQ ID NO: 30188
  Cyclic GFR-binding peptide
  MOD_RES (6)..(7)..(38): Xaa is C or S

SEQ ID NO: 79889 - protein, 36 aa, Artificial Sequence; identical to SEQ ID NO: 30192
  Cyclic GFR-binding peptide
  MOD_RES (1)..(2)..(34)..(36): Xaa is C or S

SEQ ID NO: 79890 - protein, 28 aa, Artificial Sequence
  Cyclic GFR-binding peptide
PTELSNITMQIMDENEKVVIGEMSDMVV

SEQ ID NO: 79891 - protein, 32 aa, Artificial Sequence
  Cyclic GFR-binding peptide
  MOD_RES (4)..(5): Xaa is C or S
PKAXXVPTELSNITMQIMDEYDKVVIGEMSEM

SEQ ID NO: 79892 - protein, 33 aa, Artificial Sequence; identical to SEQ ID NO: 30194
  Cyclic GFR-binding peptide
  MOD_RES (2)..(3): Xaa is C or S

SEQ ID NO: 79893 - protein, 34 aa, Artificial Sequence; identical to SEQ ID NO: 30196
  Cyclic GFR-binding peptide
  MOD_RES (3)..(3): Xaa is C or S

SEQ ID NO: 79894 - protein, 23 aa, Artificial Sequence
  Cyclic GFR-binding peptide
RSVKMAKVDENEKVVKEVQVDMV

SEQ ID NO: 79895 - protein, 33 aa, Artificial Sequence
  Cyclic GFR-binding peptide
  MOD_RES (1)..(1): Xaa is C or S
XQPSRVHHEPLPVVYYEYVRKKPKLEQLSNRLE

SEQ ID NO: 79896 - protein, 28 aa, Artificial Sequence
  Cyclic GFR-binding peptide
  MOD_RES (2)..(3): Xaa is C or S
PXXVPQALRSVKIAKVVGRKPKVKEVQV

SEQ ID NO: 79897 - protein, 33 aa, Artificial Sequence; identical to SEQ ID NO: 30201
  Cyclic GFR-binding peptide
  MOD_RES (3)..(3): Xaa is C or S

SEQ ID NO: 79898 - protein, 32 aa, Artificial Sequence
  Cyclic GFR-binding peptide
  MOD_RES (31)..(31): Xaa is C or S
PTELSNITMQIMDENEKVVIGEMSDMVVEGXG

SEQ ID NO: 79899 - protein, 30 aa, Artificial Sequence
  Cyclic GFR-binding peptide
  MOD_RES (29)..(29): Xaa is C or S
KLSNITVQIMDDSSNVIIGEMSNMVVRSXG

SEQ ID NO: 79900 - protein, 28 aa, Artificial Sequence
  Cyclic GFR-binding peptide
  MOD_RES (28)..(28): Xaa is C or S
LRPVQVRKIDDSSNVIKKATVNMVVRAX

SEQ ID NO: 79901 - protein, 28 aa, Artificial Sequence
  Cyclic GFR-binding peptide
HEPLPVVYYEYVRKKPKLEQLSNRLEEH

SEQ ID NO: 79902 - protein, 32 aa, Artificial Sequence
  Cyclic GFR-binding peptide
  MOD_RES (6)..(7): Xaa is C or S
ASASPXXVPQDLSNITIQIMVGRTPKVIGEMS

SEQ ID NO: 79903 - protein, 34 aa, Artificial Sequence
  Cyclic GFR-binding peptide
  MOD_RES (7)..(7): Xaa is C or S
NDEGLEXVPTEEEPLTMLYYRIKPHQGQHEQLSN

SEQ ID NO: 79904 - protein, 30 aa, Artificial Sequence; identical to SEQ ID NO: 30204
  Cyclic GFR-binding peptide

SEQ ID NO: 79905 - protein, 24 aa, Artificial Sequence
  Cyclic GFR-binding peptide
QLEPLPVVYYEIVRKKPIFEQLSN

SEQ ID NO: 79906 - protein, 30 aa, Artificial Sequence
  Cyclic GFR-binding peptide
  MOD_RES (29)..(29): Xaa is C or S
ELSNITMQIMDEYDKVVIGEMSEMVVEGXG

SEQ ID NO: 79907 - protein, 33 aa, Artificial Sequence; identical to SEQ ID NO: 30215
  Cyclic GFR-binding peptide
  MOD_RES (1)..(32): Xaa is C or S

SEQ ID NO: 79908 - protein, 29 aa, Artificial Sequence
  Cyclic GFR-binding peptide
RPTQVQLEPLPVVYYEIVRKKPIFEQLSN

SEQ ID NO: 79909 - protein, 34 aa, Artificial Sequence; identical to SEQ ID NO: 30219
  Cyclic GFR-binding peptide
  MOD_RES (2)..(3): Xaa is C or S

SEQ ID NO: 79910 - protein, 34 aa, Artificial Sequence
  Cyclic GFR-binding peptide
  MOD_RES (5)..(6): Xaa is C or S
VPKPXXAPTQLRSVKVAKVDDSSNVIKEVQVNMV

SEQ ID NO: 79911 - protein, 32 aa, Artificial Sequence
  Cyclic GFR-binding peptide
  MOD_RES (6)..(7): Xaa is C or S
SIPKAXXVPTELSNITMQIMDEYDKVVIGEMS

SEQ ID NO: 79912 - protein, 30 aa, Artificial Sequence
  Cyclic GFR-binding peptide
  MOD_RES (1)..(2): Xaa is C or S
XXVPTELSNITMQIMDENEKVVIGEMSDMV

SEQ ID NO: 79913 - protein, 20 aa, Artificial Sequence
  Cyclic GFR-binding peptide
RPVQIRKIIGKTPKIKKATV

SEQ ID NO: 79914 - protein, 31 aa, Artificial Sequence
  Cyclic GFR-binding peptide
  MOD_RES (2)..(3): Xaa is C or S
PXXVPQALSNITIQIMVGRKPKVIGEMSMIV

SEQ ID NO: 79915 - protein, 38 aa, Artificial Sequence; identical to SEQ ID NO: 30233
  Cyclic GFR-binding peptide
  MOD_RES (2)..(2): Xaa is C or S

SEQ ID NO: 79916 - protein, 39 aa, Artificial Sequence; identical to SEQ ID NO: 30238
  Cyclic GFR-binding peptide
  MOD_RES (5)..(6)..(38): Xaa is C or S

SEQ ID NO: 79917 - protein, 33 aa, Artificial Sequence
  Cyclic GFR-binding peptide
  MOD_RES (31)..(33): Xaa is C or S
PTQLSNITVQIMDDSSNVIIGEMSNMVVRAXGX

SEQ ID NO: 79918 - protein, 30 aa, Artificial Sequence
  Cyclic GFR-binding peptide
  MOD_RES (30)..(30): Xaa is C or S
TELRSVKMAKVDEYDKVVKEVQVEMVVEGX

SEQ ID NO: 79919 - protein, 31 aa, Artificial Sequence
  Cyclic GFR-binding peptide
  MOD_RES (30)..(30): Xaa is C or S
PQALRSVKIAKVVGRKPKVKEVQVMIVRSXK

SEQ ID NO: 79920 - protein, 30 aa, Artificial Sequence
  Cyclic GFR-binding peptide
  MOD_RES (30)..(30): Xaa is C or S
TELSNITMQIMDENEKVVIGEMSDMVVEGX

SEQ ID NO: 79921 - protein, 36 aa, Artificial Sequence; identical to SEQ ID NO: 30247
  Cyclic GFR-binding peptide
  MOD_RES (1)..(33)..(35): Xaa is C or S

SEQ ID NO: 79922 - protein, 30 aa, Artificial Sequence
  Cyclic GFR-binding peptide
  MOD_RES (1)..(1): Xaa is C or S
XVPQDLSNITIQIMVGRTPKVIGEMSMVVK

SEQ ID NO: 79923 - protein, 34 aa, Artificial Sequence; identical to SEQ ID NO: 30252
  Cyclic GFR-binding peptide
  MOD_RES (3)..(3): Xaa is C or S

SEQ ID NO: 79924 - protein, 29 aa, Artificial Sequence
  Cyclic GFR-binding peptide
  MOD_RES (29)..(29): Xaa is C or S
KLRPVQVRKIDDSSNVIKKATVNMVVRSX

SEQ ID NO: 79925 - protein, 30 aa, Artificial Sequence
  Cyclic GFR-binding peptide
  MOD_RES (28)..(30): Xaa is C or S
LSNITVQIMDDSSNVIIGEMSNMVVRAXGX

SEQ ID NO: 79926 - protein, 31 aa, Artificial Sequence; identical to SEQ ID NO: 30254
  Cyclic GFR-binding peptide
  MOD_RES (1)..(1): Xaa is C or S

SEQ ID NO: 79927 - protein, 32 aa, Artificial Sequence
  Cyclic GFR-binding peptide
  MOD_RES (2)..(3): Xaa is C or S
AXXVPTELSNITMQIMDEYDKVVIGEMSEMVV

SEQ ID NO: 79928 - protein, 31 aa, Artificial Sequence
  Cyclic GFR-binding peptide
  MOD_RES (5)..(5): Xaa is C or S
TKPTXAPTKLRPVQVRKIDDSSNVIKKATVN

SEQ ID NO: 79929 - protein, 37 aa, Artificial Sequence; identical to SEQ ID NO: 30261
  Cyclic GFR-binding peptide
  MOD_RES (1)..(2)..(34)..(36): Xaa is C or S

SEQ ID NO: 79930 - protein, 29 aa, Artificial Sequence
  Cyclic GFR-binding peptide
PQDLSNITIQIMVGRTPKVIGEMSMVVKS

SEQ ID NO: 79931 - protein, 34 aa, Artificial Sequence
  Cyclic GFR-binding peptide
  MOD_RES (4)..(5): Xaa is C or S
PKPXXAPTKLRPVQVRKIDDSSNVIKKATVNMVV

SEQ ID NO: 79932 - protein, 23 aa, Artificial Sequence
  Cyclic GFR-binding peptide
EPLTMLYYRIKPHQGQHEQLSNF

SEQ ID NO: 79933 - protein, 39 aa, Artificial Sequence; identical to SEQ ID NO: 30266
  Cyclic GFR-binding peptide
  MOD_RES (6)..(7)..(38): Xaa is C or S

SEQ ID NO: 79934 - protein, 28 aa, Artificial Sequence
  Cyclic GFR-binding peptide
TELRSVKMAKVDENEKVVKEVQVDMVVE

SEQ ID NO: 79935 - protein, 25 aa, Artificial Sequence
  Cyclic GFR-binding peptide
QDLRSVKIAKVIGKTPKIKEVQVMI

SEQ ID NO: 79936 - protein, 38 aa, Artificial Sequence; identical to SEQ ID NO: 30272
  Cyclic GFR-binding peptide
  MOD_RES (2)..(3)..(35)..(37): Xaa is C or S

SEQ ID NO: 79937 - protein, 33 aa, Artificial Sequence
  Cyclic GFR-binding peptide
  MOD_RES (3)..(4): Xaa is C or S
SPXXVSQDLSNITIQIMIGKTPKIIGEMSMIVK

SEQ ID NO: 79938 - protein, 31 aa, Artificial Sequence; identical to SEQ ID NO: 30276
  Cyclic GFR-binding peptide
  MOD_RES (31)..(31): Xaa is C or S

SEQ ID NO: 79939 - protein, 31 aa, Artificial Sequence
  Cyclic GFR-binding peptide
TQVQLEPLTVLYYEIVRKKPIFEQLSNTLED

SEQ ID NO: 79940 - protein, 41 aa, Artificial Sequence; identical to SEQ ID NO: 30281
  Cyclic GFR-binding peptide
  MOD_RES (6)..(7)..(38)..(40): Xaa is C or S

SEQ ID NO: 79941 - protein, 29 aa, Artificial Sequence
  Cyclic GFR-binding peptide
  MOD_RES (1)..(2): Xaa is C or S
XXVPTELRPVQMRKIDEYDKVVKKATVEM

SEQ ID NO: 79942 - protein, 36 aa, Artificial Sequence; identical to SEQ ID NO: 30285
  Cyclic GFR-binding peptide
  MOD_RES (4)..(5)..(36): Xaa is C or S

SEQ ID NO: 79943 - protein, 39 aa, Artificial Sequence; identical to SEQ ID NO: 30286
  Cyclic GFR-binding peptide
  MOD_RES (4)..(5)..(36)..(38): Xaa is C or S

SEQ ID NO: 79944 - protein, 32 aa, Artificial Sequence; identical to SEQ ID NO: 30289
  Cyclic GFR-binding peptide
  MOD_RES (1)..(1): Xaa is C or S

SEQ ID NO: 79945 - protein, 33 aa, Artificial Sequence
  Cyclic GFR-binding peptide
  MOD_RES (3)..(4): Xaa is C or S
KAXXVPTELRPVQMRKIDENEKVVKKATVDMVV

SEQ ID NO: 79946 - protein, 30 aa, Artificial Sequence
  Cyclic GFR-binding peptide
  MOD_RES (3)..(3): Xaa is C or S
PTXAPTKLRPVQVRKIDDSSNVIKKATVNM

SEQ ID NO: 79947 - protein, 21 aa, Artificial Sequence
  Cyclic GFR-binding peptide
RSVKIAKVVGRKPKVKEVQVM

SEQ ID NO: 79948 - protein, 20 aa, Artificial Sequence
  Cyclic GFR-binding peptide
RSVKIAKVVGRTPKVKEVQV

SEQ ID NO: 79949 - protein, 28 aa, Artificial Sequence
  Cyclic GFR-binding peptide
VQLEPLPVVYYEIVRKKPIFEQLSNTLE

SEQ ID NO: 79950 - protein, 34 aa, Artificial Sequence
  Cyclic GFR-binding peptide
  MOD_RES (4)..(5): Xaa is C or S
PKPXXAPTQLRPVQVRKIDDSSNVIKKATVNMVV

SEQ ID NO: 79951 - protein, 26 aa, Artificial Sequence
  Cyclic GFR-binding peptide
RSVKMAKVDENEKVVKEVQVDMVVEG

SEQ ID NO: 79952 - protein, 29 aa, Artificial Sequence
  Cyclic GFR-binding peptide
  MOD_RES (29)..(29): Xaa is C or S
QDLSNITIQIMVGRTPKVIGEMSMVVKSX

SEQ ID NO: 79953 - protein, 22 aa, Artificial Sequence
  Cyclic GFR-binding peptide
SNITIQIMIGKTPKIIGEMSMI

SEQ ID NO: 79954 - protein, 34 aa, Artificial Sequence
  Cyclic GFR-binding peptide
  MOD_RES (5)..(6): Xaa is C or S
SASPXXVSQDLSNITIQIMIGKTPKIIGEMSMIV

SEQ ID NO: 79955 - protein, 34 aa, Artificial Sequence; identical to SEQ ID NO: 30303
  Cyclic GFR-binding peptide
  MOD_RES (31)..(33): Xaa is C or S

SEQ ID NO: 79956 - protein, 27 aa, Artificial Sequence
  Cyclic GFR-binding peptide
ELRSVKMAKVDENEKVVKEVQVDMVVE

SEQ ID NO: 79957 - protein, 35 aa, Artificial Sequence
  Cyclic GFR-binding peptide
  MOD_RES (34)..(34): Xaa is C or S
RVHHEPLTVLYYEYVRKKPKLEQLSNRLEEHLEXA

SEQ ID NO: 79958 - protein, 39 aa, Artificial Sequence; identical to SEQ ID NO: 30308
  Cyclic GFR-binding peptide
  MOD_RES (2)..(39): Xaa is C or S

SEQ ID NO: 79959 - protein, 35 aa, Artificial Sequence
  Cyclic GFR-binding peptide
  MOD_RES (4)..(4): Xaa is C or S
SVKXQPSRVHHEPLPVVYYEYVRKKPKLEQLSNRL

SEQ ID NO: 79960 - protein, 38 aa, Artificial Sequence; identical to SEQ ID NO: 30309
  Cyclic GFR-binding peptide
  MOD_RES (3)..(35)..(37): Xaa is C or S

SEQ ID NO: 79961 - protein, 29 aa, Artificial Sequence
  Cyclic GFR-binding peptide
PTELRSVKMAKVDENEKVVKEVQVDMVVE

SEQ ID NO: 79962 - protein, 28 aa, Artificial Sequence
  Cyclic GFR-binding peptide
  MOD_RES (28)..(28): Xaa is C or S
LRSVKMAKVDENEKVVKEVQVDMVVEGX

SEQ ID NO: 79963 - protein, 39 aa, Artificial Sequence; identical to SEQ ID NO: 30313
  Cyclic GFR-binding peptide
  MOD_RES (4)..(4): Xaa is C or S

SEQ ID NO: 79964 - protein, 29 aa, Artificial Sequence
  Cyclic GFR-binding peptide
VPQDLSNITIQIMVGRTPKVIGEMSMVVK

SEQ ID NO: 79965 - protein, 36 aa, Artificial Sequence
  Cyclic GFR-binding peptide
  MOD_RES (4)..(4): Xaa is C or S
NVQXRPTQVQLEPLPVVYYEIVRKKPIFEQLSNTLE

SEQ ID NO: 79966 - protein, 32 aa, Artificial Sequence
  Cyclic GFR-binding peptide
  MOD_RES (30)..(32): Xaa is C or S
TKLSNITVQIMDDSSNVIIGEMSNMVVRSXGX

SEQ ID NO: 79967 - protein, 33 aa, Artificial Sequence
  Cyclic GFR-binding peptide
  MOD_RES (6)..(6): Xaa is C or S
DEGLEXVPTEEEPLTMLYYRIKPHQGQHEQLSN

SEQ ID NO: 79968 - protein, 20 aa, Artificial Sequence
  Cyclic GFR-binding peptide
RPVQMRKIDENEKVVKKATV

SEQ ID NO: 79969 - protein, 30 aa, Artificial Sequence
  Cyclic GFR-binding peptide
  MOD_RES (1)..(1): Xaa is C or S
XVPTELRSVKMAKVDENEKVVKEVQVDMVV

SEQ ID NO: 79970 - protein, 35 aa, Artificial Sequence; identical to SEQ ID NO: 30321
  Cyclic GFR-binding peptide
  MOD_RES (4)..(5): Xaa is C or S

SEQ ID NO: 79971 - protein, 24 aa, Artificial Sequence
  Cyclic GFR-binding peptide
LSNITMQIMDENEKVVIGEMSDMV

SEQ ID NO: 79972 - protein, 37 aa, Artificial Sequence; identical to SEQ ID NO: 30323
  Cyclic GFR-binding peptide
  MOD_RES (5)..(6): Xaa is C or S

SEQ ID NO: 79973 - protein, 30 aa, Artificial Sequence
  Cyclic GFR-binding peptide
LEPLPVVYYEIVRKKPIFEQLSNTLEDHLA

SEQ ID NO: 79974 - protein, 31 aa, Artificial Sequence
  Cyclic GFR-binding peptide
  MOD_RES (1)..(2): Xaa is C or S
XXVPQDLRSVKIAKVVGRTPKVKEVQVMVVK

SEQ ID NO: 79975 - protein, 33 aa, Artificial Sequence
  Cyclic GFR-binding peptide
  MOD_RES (4)..(5): Xaa is C or S
ASPXXVPQDLSNITIQIMVGRTPKVIGEMSMVV

SEQ ID NO: 79976 - protein, 20 aa, Artificial Sequence
  Cyclic GFR-binding peptide
SNITIQIMVGRTPKVIGEMS

SEQ ID NO: 79977 - protein, 24 aa, Artificial Sequence
  Cyclic GFR-binding peptide
DLRSVKIAKVIGKTPKIKEVQVMI

SEQ ID NO: 79978 - protein, 36 aa, Artificial Sequence; identical to SEQ ID NO: 30334
  Cyclic GFR-binding peptide
  MOD_RES (2)..(3)..(34)..(36): Xaa is C or S

SEQ ID NO: 79979 - protein, 34 aa, Artificial Sequence
  Cyclic GFR-binding peptide
  MOD_RES (31)..(33): Xaa is C or S
PTELRSVKMAKVDENEKVVKEVQVDMVVEGXGXR

SEQ ID NO: 79980 - protein, 33 aa, Artificial Sequence; identical to SEQ ID NO: 30336
  Cyclic GFR-binding peptide
  MOD_RES (2)..(3): Xaa is C or S

SEQ ID NO: 79981 - protein, 33 aa, Artificial Sequence
  Cyclic GFR-binding peptide
  MOD_RES (4)..(5): Xaa is C or S
ASPXXVPQDLRSVKIAKVVGRTPKVKEVQVMVV

SEQ ID NO: 79982 - protein, 26 aa, Artificial Sequence
  Cyclic GFR-binding peptide
PQDLRPVQIRKIVGRTPKVKKATVMV

SEQ ID NO: 79983 - protein, 29 aa, Artificial Sequence
  Cyclic GFR-binding peptide
  MOD_RES (3)..(4): Xaa is C or S
KAXXVPTELRSVKMAKVDEYDKVVKEVQV

SEQ ID NO: 79984 - protein, 32 aa, Artificial Sequence
  Cyclic GFR-binding peptide
  MOD_RES (6)..(7): Xaa is C or S
ASASPXXVSQDLRSVKIAKVIGKTPKIKEVQV

SEQ ID NO: 79985 - protein, 32 aa, Artificial Sequence; identical to SEQ ID NO: 30342
  Cyclic GFR-binding peptide
  MOD_RES (1)..(2): Xaa is C or S

SEQ ID NO: 79986 - protein, 23 aa, Artificial Sequence
  Cyclic GFR-binding peptide
RPVQIRKIVGRKPKVKKATVMIV

SEQ ID NO: 79987 - protein, 26 aa, Artificial Sequence
  Cyclic GFR-binding peptide
DLRPVQIRKIIGKTPKIKKATVMIVK

SEQ ID NO: 79988 - protein, 25 aa, Artificial Sequence
  Cyclic GFR-binding peptide
EEEPLTMLYYRIKPHQGQHEQLSNF

SEQ ID NO: 79989 - protein, 34 aa, Artificial Sequence; identical to SEQ ID NO: 30349
  Cyclic GFR-binding peptide
  MOD_RES (34)..(34): Xaa is C or S

SEQ ID NO: 79990 - protein, 33 aa, Artificial Sequence
  Cyclic GFR-binding peptide
  MOD_RES (31)..(33): Xaa is C or S
PTKLSNITVQIMDDSSNVIIGEMSNMVVRSXGX

SEQ ID NO: 79991 - protein, 29 aa, Artificial Sequence
  Cyclic GFR-binding peptide
VHHEPLPVVYYEYVRKKPKLEQLSNRLEE

SEQ ID NO: 79992 - protein, 31 aa, Artificial Sequence
  Cyclic GFR-binding peptide
  MOD_RES (29)..(31): Xaa is C or S
KLRSVKVAKVDDSSNVIKEVQVNMVVRSXGX

SEQ ID NO: 79993 - protein, 34 aa, Artificial Sequence
  Cyclic GFR-binding peptide
  MOD_RES (7)..(7): Xaa is C or S
HVTKPTXAPTKLSNITVQIMDDSSNVIIGEMSNM

SEQ ID NO: 79994 - protein, 29 aa, Artificial Sequence
  Cyclic GFR-binding peptide
  MOD_RES (2)..(3): Xaa is C or S
PXXVSQDLRSVKIAKVIGKTPKIKEVQVM

SEQ ID NO: 79995 - protein, 40 aa, Artificial Sequence; identical to SEQ ID NO: 30353
  Cyclic GFR-binding peptide
  MOD_RES (4)..(38)..(40): Xaa is C or S

SEQ ID NO: 79996 - protein, 32 aa, Artificial Sequence
  Cyclic GFR-binding peptide
  MOD_RES (3)..(3): Xaa is C or S
VQXRPTQVQLEPLPVVYYEIVRKKPIFEQLSN

SEQ ID NO: 79997 - protein, 37 aa, Artificial Sequence
  Cyclic GFR-binding peptide
  MOD_RES (7)..(7): Xaa is C or S
NDEGLEXVPTEEEPLTMLYYRIKPHQGQHEQLSNFLQ

SEQ ID NO: 79998 - protein, 23 aa, Artificial Sequence
  Cyclic GFR-binding peptide
LSNITIQIMVGRKPKVIGEMSMI

SEQ ID NO: 79999 - protein, 32 aa, Artificial Sequence
  Cyclic GFR-binding peptide
  MOD_RES (3)..(4): Xaa is C or S
SPXXVSQDLSNITIQIMIGKTPKIIGEMSMIV

SEQ ID NO: 80000 - protein, 22 aa, Artificial Sequence
  Cyclic GFR-binding peptide
EPLPVVYYEIVRKKPIFEQLSN

SEQ ID NO: 80001 - protein, 37 aa, Artificial Sequence; identical to SEQ ID NO: 30360
  Cyclic GFR-binding peptide
  MOD_RES (2)..(2): Xaa is C or S

SEQ ID NO: 80002 - protein, 32 aa, Artificial Sequence
  Cyclic GFR-binding peptide
  MOD_RES (5)..(6): Xaa is C or S
SASPXXVSQDLRPVQIRKIIGKTPKIKKATVM

SEQ ID NO: 80003 - protein, 40 aa, Artificial Sequence; identical to SEQ ID NO: 30362
  Cyclic GFR-binding peptide
  MOD_RES (6)..(7)..(39): Xaa is C or S

SEQ ID NO: 80004 - protein, 34 aa, Artificial Sequence
  Cyclic GFR-binding peptide
  MOD_RES (5)..(6): Xaa is C or S
IPKAXXVPTELRPVQMRKIDEYDKVVKKATVEMV

SEQ ID NO: 80005 - protein, 36 aa, Artificial Sequence; identical to SEQ ID NO: 30363
  Cyclic GFR-binding peptide
  MOD_RES (5)..(6): Xaa is C or S

SEQ ID NO: 80006 - protein, 26 aa, Artificial Sequence
  Cyclic GFR-binding peptide
SQDLRPVQIRKIIGKTPKIKKATVMI

SEQ ID NO: 80007 - protein, 29 aa, Artificial Sequence
  Cyclic GFR-binding peptide
  MOD_RES (1)..(1): Xaa is C or S
XVSQDLRPVQIRKIIGKTPKIKKATVMIV

SEQ ID NO: 80008 - protein, 26 aa, Artificial Sequence
  Cyclic GFR-binding peptide
VPQALRPVQIRKIVGRKPKVKKATVM

SEQ ID NO: 80009 - protein, 27 aa, Artificial Sequence
  Cyclic GFR-binding peptide
EPLTMLYYRIKPHQGQHEQLSNFLQHN

SEQ ID NO: 80010 - protein, 34 aa, Artificial Sequence; identical to SEQ ID NO: 30365
  Cyclic GFR-binding peptide
  MOD_RES (1)..(32)..(34): Xaa is C or S

SEQ ID NO: 80011 - protein, 37 aa, Artificial Sequence; identical to SEQ ID NO: 30366
  Cyclic GFR-binding peptide
  MOD_RES (3)..(4)..(36): Xaa is C or S

SEQ ID NO: 80012 - protein, 30 aa, Artificial Sequence
  Cyclic GFR-binding peptide
  MOD_RES (28)..(30): Xaa is C or S
DLRPVQIRKIVGRTPKVKKATVMVVKSXKX

SEQ ID NO: 80013 - protein, 23 aa, Artificial Sequence
  Cyclic GFR-binding peptide
TELRPVQMRKIDENEKVVKKATV

SEQ ID NO: 80014 - protein, 30 aa, Artificial Sequence
  Cyclic GFR-binding peptide
  MOD_RES (30)..(30): Xaa is C or S
PQALSNITIQIMVGRKPKVIGEMSMIVRSX

SEQ ID NO: 80015 - protein, 24 aa, Artificial Sequence
  Cyclic GFR-binding peptide
QDLRPVQIRKIVGRTPKVKKATVM

SEQ ID NO: 80016 - protein, 20 aa, Artificial Sequence
  Cyclic GFR-binding peptide
RSVKIAKVVGRKPKVKEVQV

SEQ ID NO: 80017 - protein, 38 aa, Artificial Sequence; identical to SEQ ID NO: 30373
  Cyclic GFR-binding peptide
  MOD_RES (5)..(6)..(37): Xaa is C or S

SEQ ID NO: 80018 - protein, 38 aa, Artificial Sequence; identical to SEQ ID NO: 30376
  Cyclic GFR-binding peptide
  MOD_RES (5)..(6)..(37): Xaa is C or S

SEQ ID NO: 80019 - protein, 33 aa, Artificial Sequence
  Cyclic GFR-binding peptide
QVQLEPLPVVYYEIVRKKPIFEQLSNTLEDHLA

SEQ ID NO: 80020 - protein, 39 aa, Artificial Sequence; identical to SEQ ID NO: 30379
  Cyclic GFR-binding peptide
  MOD_RES (5)..(6)..(37)..(39): Xaa is C or S

SEQ ID NO: 80021 - protein, 34 aa, Artificial Sequence; identical to SEQ ID NO: 30382
  Cyclic GFR-binding peptide

SEQ ID NO: 80022 - protein, 28 aa, Artificial Sequence
  Cyclic GFR-binding peptide
  MOD_RES (1)..(1): Xaa is C or S
XVPTELRPVQMRKIDEYDKVVKKATVEM

SEQ ID NO: 80023 - protein, 42 aa, Artificial Sequence; identical to SEQ ID NO: 30383
  Cyclic GFR-binding peptide
  MOD_RES (6)..(7)..(39)..(41): Xaa is C or S

SEQ ID NO: 80024 - protein, 38 aa, Artificial Sequence; identical to SEQ ID NO: 30384
  Cyclic GFR-binding peptide
  MOD_RES (5)..(6)..(38): Xaa is C or S

SEQ ID NO: 80025 - protein, 36 aa, Artificial Sequence; identical to SEQ ID NO: 30386
  Cyclic GFR-binding peptide
  MOD_RES (5)..(6): Xaa is C or S

SEQ ID NO: 80026 - protein, 29 aa, Artificial Sequence
  Cyclic GFR-binding peptide
  MOD_RES (27)..(29): Xaa is C or S
LSNITIQIMIGKTPKIIGEMSMIVKSXKX

SEQ ID NO: 80027 - protein, 37 aa, Artificial Sequence; identical to SEQ ID NO: 30388
  Cyclic GFR-binding peptide
  MOD_RES (5)..(6)..(37): Xaa is C or S

SEQ ID NO: 80028 - protein, 36 aa, Artificial Sequence; identical to SEQ ID NO: 30389
  Cyclic GFR-binding peptide
  MOD_RES (2)..(3)..(35): Xaa is C or S

SEQ ID NO: 80029 - protein, 38 aa, Artificial Sequence
  Cyclic GFR-binding peptide
  MOD_RES (5)..(5): Xaa is C or S
RNVQXRPTQVQLEPLPVVYYEIVRKKPIFEQLSNTLED

SEQ ID NO: 80030 - protein, 39 aa, Artificial Sequence; identical to SEQ ID NO: 30391
  Cyclic GFR-binding peptide
  MOD_RES (6)..(7)..(39): Xaa is C or S

SEQ ID NO: 80031 - protein, 26 aa, Artificial Sequence
  Cyclic GFR-binding peptide
  MOD_RES (1)..(1): Xaa is C or S
XVPQALSNITIQIMVGRKPKVIGEMS

SEQ ID NO: 80032 - protein, 33 aa, Artificial Sequence
  Cyclic GFR-binding peptide
  MOD_RES (6)..(7): Xaa is C or S
ASASPXXVPQDLSNITIQIMVGRTPKVIGEMSM

SEQ ID NO: 80033 - protein, 28 aa, Artificial Sequence
  Cyclic GFR-binding peptide
PQALSNITIQIMVGRKPKVIGEMSMIVR

SEQ ID NO: 80034 - protein, 38 aa, Artificial Sequence; identical to SEQ ID NO: 30395
  Cyclic GFR-binding peptide
  MOD_RES (6)..(7): Xaa is C or S

SEQ ID NO: 80035 - protein, 38 aa, Artificial Sequence; identical to SEQ ID NO: 30396
  Cyclic GFR-binding peptide
  MOD_RES (4)..(36)..(38): Xaa is C or S

SEQ ID NO: 80036 - protein, 33 aa, Artificial Sequence; identical to SEQ ID NO: 30397
  Cyclic GFR-binding peptide
  MOD_RES (32)..(32): Xaa is C or S

SEQ ID NO: 80037 - protein, 29 aa, Artificial Sequence
  Cyclic GFR-binding peptide
EEEPLPMVYYRIKPHQGQHEQLSNFLQHN

SEQ ID NO: 80038 - protein, 37 aa, Artificial Sequence; identical to SEQ ID NO: 30400
  Cyclic GFR-binding peptide
  MOD_RES (1)..(2)..(34)..(36): Xaa is C or S

SEQ ID NO: 80039 - protein, 32 aa, Artificial Sequence
  Cyclic GFR-binding peptide
  MOD_RES (6)..(6): Xaa is C or S
VTKPTXAPTKLRPVQVRKIDDSSNVIKKATVN

SEQ ID NO: 80040 - protein, 20 aa, Artificial Sequence
  Cyclic GFR-binding peptide
RSVKMAKVDENEKVVKEVQV

SEQ ID NO: 80041 - protein, 25 aa, Artificial Sequence
  Cyclic GFR-binding peptide
VPTELSNITMQIMDEYDKVVIGEMS

SEQ ID NO: 80042 - protein, 24 aa, Artificial Sequence
  Cyclic GFR-binding peptide
LRSVKMAKVDENEKVVKEVQVDMV

SEQ ID NO: 80043 - protein, 28 aa, Artificial Sequence
  Cyclic GFR-binding peptide
  MOD_RES (26)..(28): Xaa is C or S
RPVQIRKIIGKTPKIKKATVMIVKSXKX

SEQ ID NO: 80044 - protein, 26 aa, Artificial Sequence
  Cyclic GFR-binding peptide
TELSNITMQIMDENEKVVIGEMSDMV

SEQ ID NO: 80045 - protein, 30 aa, Artificial Sequence
  Cyclic GFR-binding peptide
  MOD_RES (30)..(30): Xaa is C or S
PQDLRPVQIRKIVGRTPKVKKATVMVVKSX

SEQ ID NO: 80046 - protein, 35 aa, Artificial Sequence; identical to SEQ ID NO: 30410
  Cyclic GFR-binding peptide
  MOD_RES (2)..(3)..(34): Xaa is C or S

SEQ ID NO: 80047 - protein, 33 aa, Artificial Sequence
  Cyclic GFR-binding peptide
  MOD_RES (3)..(4): Xaa is C or S
KPXXAPTQLRPVQVRKIDDSSNVIKKATVNMVV

SEQ ID NO: 80048 - protein, 45 aa, Artificial Sequence; identical to SEQ ID NO: 30413
  Cyclic GFR-binding peptide
  MOD_RES (5)..(42)..(44): Xaa is C or S

SEQ ID NO: 80049 - protein, 30 aa, Artificial Sequence
  Cyclic GFR-binding peptide
  MOD_RES (1)..(2): Xaa is C or S
XXVPQALRSVKIAKVVGRKPKVKEVQVMIV

SEQ ID NO: 80050 - protein, 24 aa, Artificial Sequence
  Cyclic GFR-binding peptide
ALSNITIQIMVGRKPKVIGEMSMI

SEQ ID NO: 80051 - protein, 31 aa, Artificial Sequence; identical to SEQ ID NO: 30414
  Cyclic GFR-binding peptide
  MOD_RES (1)..(1): Xaa is C or S

SEQ ID NO: 80052 - protein, 26 aa, Artificial Sequence
  Cyclic GFR-binding peptide
  MOD_RES (1)..(1): Xaa is C or S
XVPTELRPVQMRKIDEYDKVVKKATV

SEQ ID NO: 80053 - protein, 35 aa, Artificial Sequence; identical to SEQ ID NO: 30420
  Cyclic GFR-binding peptide

SEQ ID NO: 80054 - protein, 32 aa, Artificial Sequence
  Cyclic GFR-binding peptide
  MOD_RES (3)..(4): Xaa is C or S
SPXXVSQDLRSVKIAKVIGKTPKIKEVQVMIV

SEQ ID NO: 80055 - protein, 24 aa, Artificial Sequence
  Cyclic GFR-binding peptide
ELRPVQMRKIDENEKVVKKATVDM

SEQ ID NO: 80056 - protein, 38 aa, Artificial Sequence; identical to SEQ ID NO: 30426
  Cyclic GFR-binding peptide
  MOD_RES (6)..(7): Xaa is C or S

SEQ ID NO: 80057 - protein, 27 aa, Artificial Sequence
  Cyclic GFR-binding peptide
VPTELRSVKMAKVDENEKVVKEVQVDM

SEQ ID NO: 80058 - protein, 35 aa, Artificial Sequence; identical to SEQ ID NO: 30428
  Cyclic GFR-binding peptide
  MOD_RES (2)..(3)..(35): Xaa is C or S

SEQ ID NO: 80059 - protein, 41 aa, Artificial Sequence; identical to SEQ ID NO: 30429
  Cyclic GFR-binding peptide
  MOD_RES (7)..(39)..(41): Xaa is C or S

SEQ ID NO: 80060 - protein, 39 aa, Artificial Sequence; identical to SEQ ID NO: 30432
  Cyclic GFR-binding peptide
  MOD_RES (6)..(7)..(38): Xaa is C or S

SEQ ID NO: 80061 - protein, 34 aa, Artificial Sequence; identical to SEQ ID NO: 30435
  Cyclic GFR-binding peptide
  MOD_RES (1)..(33): Xaa is C or S

SEQ ID NO: 80062 - protein, 37 aa, Artificial Sequence; identical to SEQ ID NO: 30436
  Cyclic GFR-binding peptide
  MOD_RES (2)..(3)..(34)..(36): Xaa is C or S

SEQ ID NO: 80063 - protein, 29 aa, Artificial Sequence
  Cyclic GFR-binding peptide
  MOD_RES (26)..(28): Xaa is C or S
SNITIQIMIGKTPKIIGEMSMIVKSXKXS

SEQ ID NO: 80064 - protein, 34 aa, Artificial Sequence
  Cyclic GFR-binding peptide
  MOD_RES (1)..(1): Xaa is C or S
XRPTQVQLEPLTVLYYEIVRKKPIFEQLSNTLED

SEQ ID NO: 80065 - protein, 29 aa, Artificial Sequence
  Cyclic GFR-binding peptide
VPTEEEPLPMVYYRIKPHQGQHEQLSNFL

SEQ ID NO: 80066 - protein, 37 aa, Artificial Sequence; identical to SEQ ID NO: 30439
  Cyclic GFR-binding peptide
  MOD_RES (6)..(7): Xaa is C or S

SEQ ID NO: 80067 - protein, 27 aa, Artificial Sequence
  Cyclic GFR-binding peptide
TQLSNITVQIMDDSSNVIIGEMSNMVV

SEQ ID NO: 80068 - protein, 35 aa, Artificial Sequence; identical to SEQ ID NO: 30442
  Cyclic GFR-binding peptide
  MOD_RES (1)..(33)..(35): Xaa is C or S

SEQ ID NO: 80069 - protein, 33 aa, Artificial Sequence
  Cyclic GFR-binding peptide
RVHHEPLTVLYYEYVRKKPKLEQLSNRLEEHLE

SEQ ID NO: 80070 - protein, 26 aa, Artificial Sequence
  Cyclic GFR-binding peptide
QDLRPVQIRKIIGKTPKIKKATVMIV

SEQ ID NO: 80071 - protein, 35 aa, Artificial Sequence
  Cyclic GFR-binding peptide
  MOD_RES (4)..(4): Xaa is C or S
SVKXQPSRVHHEPLTVLYYEYVRKKPKLEQLSNRL

SEQ ID NO: 80072 - protein, 37 aa, Artificial Sequence; identical to SEQ ID NO: 30445
  Cyclic GFR-binding peptide
  MOD_RES (35)..(37): Xaa is C or S

SEQ ID NO: 80073 - protein, 36 aa, Artificial Sequence; identical to SEQ ID NO: 30449
  Cyclic GFR-binding peptide
  MOD_RES (2)..(3)..(34)..(36): Xaa is C or S

SEQ ID NO: 80074 - protein, 34 aa, Artificial Sequence; identical to SEQ ID NO: 30450
  Cyclic GFR-binding peptide
  MOD_RES (32)..(34): Xaa is C or S

SEQ ID NO: 80075 - protein, 28 aa, Artificial Sequence
  Cyclic GFR-binding peptide
  MOD_RES (28)..(28): Xaa is C or S
DLRSVKIAKVIGKTPKIKEVQVMIVKSX

SEQ ID NO: 80076 - protein, 36 aa, Artificial Sequence
  Cyclic GFR-binding peptide
  MOD_RES (6)..(7): Xaa is C or S
KIPKAXXVPTELRPVQMRKIDENEKVVKKATVDMVV

SEQ ID NO: 80077 - protein, 31 aa, Artificial Sequence
  Cyclic GFR-binding peptide
  MOD_RES (29)..(31): Xaa is C or S
QLRSVKVAKVDDSSNVIKEVQVNMVVRAXGX

SEQ ID NO: 80078 - protein, 35 aa, Artificial Sequence; identical to SEQ ID NO: 30456
  Cyclic GFR-binding peptide
  MOD_RES (3)..(4)..(35): Xaa is C or S

SEQ ID NO: 80079 - protein, 31 aa, Artificial Sequence
  Cyclic GFR-binding peptide
  MOD_RES (4)..(4): Xaa is C or S
KPTXAPTKLSNITVQIMDDSSNVIIGEMSNM

SEQ ID NO: 80080 - protein, 40 aa, Artificial Sequence; identical to SEQ ID NO: 30458
  Cyclic GFR-binding peptide
  MOD_RES (4)..(5)..(37)..(39): Xaa is C or S

SEQ ID NO: 80081 - protein, 33 aa, Artificial Sequence
  Cyclic GFR-binding peptide
  MOD_RES (3)..(4): Xaa is C or S
KPXXAPTKLRSVKVAKVDDSSNVIKEVQVNMVV

SEQ ID NO: 80082 - protein, 25 aa, Artificial Sequence
  Cyclic GFR-binding peptide
VQLEPLTVLYYEIVRKKPIFEQLSN

SEQ ID NO: 80083 - protein, 32 aa, Artificial Sequence
  Cyclic GFR-binding peptide
  MOD_RES (2)..(3): Xaa is C or S
PXXAPTKLRSVKVAKVDDSSNVIKEVQVNMVV

SEQ ID NO: 80084 - protein, 30 aa, Artificial Sequence
  Cyclic GFR-binding peptide
  MOD_RES (2)..(2): Xaa is C or S
EXVPTEEEPLPMVYYRIKPHQGQHEQLSNF

SEQ ID NO: 80085 - protein, 27 aa, Artificial Sequence
  Cyclic GFR-binding peptide
  MOD_RES (27)..(27): Xaa is C or S
RSVKVAKVDDSSNVIKEVQVNMVVRAX

SEQ ID NO: 80086 - protein, 36 aa, Artificial Sequence; identical to SEQ ID NO: 30462
  Cyclic GFR-binding peptide
  MOD_RES (5)..(6): Xaa is C or S

SEQ ID NO: 80087 - protein, 42 aa, Artificial Sequence; identical to SEQ ID NO: 30463
  Cyclic GFR-binding peptide
  MOD_RES (7)..(41): Xaa is C or S

SEQ ID NO: 80088 - protein, 21 aa, Artificial Sequence
  Cyclic GFR-binding peptide
LSNITIQIMIGKTPKIIGEMS

SEQ ID NO: 80089 - protein, 29 aa, Artificial Sequence
  Cyclic GFR-binding peptide
  MOD_RES (27)..(29): Xaa is C or S
LRSVKIAKVVGRTPKVKEVQVMVVKSXKX

SEQ ID NO: 80090 - protein, 31 aa, Artificial Sequence
  Cyclic GFR-binding peptide
  MOD_RES (1)..(2): Xaa is C or S
XXVPQALRSVKIAKVVGRKPKVKEVQVMIVR

SEQ ID NO: 80091 - protein, 35 aa, Artificial Sequence
  Cyclic GFR-binding peptide
  MOD_RES (34)..(34): Xaa is C or S
QVQLEPLTVLYYEIVRKKPIFEQLSNTLEDHLAXK

SEQ ID NO: 80092 - protein, 29 aa, Artificial Sequence
  Cyclic GFR-binding peptide
  MOD_RES (28)..(28): Xaa is C or S
LRSVKMAKVDEYDKVVKEVQVEMVVEGXG

SEQ ID NO: 80093 - protein, 29 aa, Artificial Sequence
  Cyclic GFR-binding peptide
  MOD_RES (4)..(4): Xaa is C or S
KPTXAPTKLSNITVQIMDDSSNVIIGEMS

SEQ ID NO: 80094 - protein, 29 aa, Artificial Sequence
  Cyclic GFR-binding peptide
TQLSNITVQIMDDSSNVIIGEMSNMVVRA

SEQ ID NO: 80095 - protein, 31 aa, Artificial Sequence
  Cyclic GFR-binding peptide
  MOD_RES (28)..(30): Xaa is C or S
DLRPVQIRKIVGRTPKVKKATVMVVKSXKXS

SEQ ID NO: 80096 - protein, 29 aa, Artificial Sequence
  Cyclic GFR-binding peptide
  MOD_RES (26)..(28): Xaa is C or S
RSVKIAKVVGRKPKVKEVQVMIVRSXKXS

SEQ ID NO: 80097 - protein, 23 aa, Artificial Sequence
  Cyclic GFR-binding peptide
QDLRSVKIAKVIGKTPKIKEVQV

SEQ ID NO: 80098 - protein, 28 aa, Artificial Sequence
  Cyclic GFR-binding peptide
  MOD_RES (1)..(1): Xaa is C or S
XAPTQLSNITVQIMDDSSNVIIGEMSNM

SEQ ID NO: 80099 - protein, 29 aa, Artificial Sequence
  Cyclic GFR-binding peptide
PTQLSNITVQIMDDSSNVIIGEMSNMVVR

SEQ ID NO: 80100 - protein, 31 aa, Artificial Sequence
  Cyclic GFR-binding peptide
  MOD_RES (5)..(6): Xaa is C or S
SASPXXVPQDLRPVQIRKIVGRTPKVKKATV

SEQ ID NO: 80101 - protein, 20 aa, Artificial Sequence
  Cyclic GFR-binding peptide
RSVKMAKVDEYDKVVKEVQV

SEQ ID NO: 80102 - protein, 36 aa, Artificial Sequence; identical to SEQ ID NO: 30478
  Cyclic GFR-binding peptide
  MOD_RES (4)..(5)..(36): Xaa is C or S

SEQ ID NO: 80103 - protein, 30 aa, Artificial Sequence
  Cyclic GFR-binding peptide
  MOD_RES (30)..(30): Xaa is C or S
TQLRSVKVAKVDDSSNVIKEVQVNMVVRAX

SEQ ID NO: 80104 - protein, 31 aa, Artificial Sequence
  Cyclic GFR-binding peptide
  MOD_RES (31)..(31): Xaa is C or S
PTKLSNITVQIMDDSSNVIIGEMSNMVVRSX

SEQ ID NO: 80105 - protein, 27 aa, Artificial Sequence
  Cyclic GFR-binding peptide
HEPLPVVYYEYVRKKPKLEQLSNRLEE

SEQ ID NO: 80106 - protein, 35 aa, Artificial Sequence
  Cyclic GFR-binding peptide
  MOD_RES (6)..(7): Xaa is C or S
SIPKAXXVPTELRPVQMRKIDEYDKVVKKATVEMV

SEQ ID NO: 80107 - protein, 31 aa, Artificial Sequence
  Cyclic GFR-binding peptide
  MOD_RES (2)..(2): Xaa is C or S
QXRPTQVQLEPLPVVYYEIVRKKPIFEQLSN

SEQ ID NO: 80108 - protein, 26 aa, Artificial Sequence
  Cyclic GFR-binding peptide
EPLTMLYYRIKPHQGQHEQLSNFLQH

SEQ ID NO: 80109 - protein, 30 aa, Artificial Sequence; identical to SEQ ID NO: 30490
  Cyclic GFR-binding peptide

SEQ ID NO: 80110 - protein, 26 aa, Artificial Sequence
  Cyclic GFR-binding peptide
QALSNITIQIMVGRKPKVIGEMSMIV

SEQ ID NO: 80111 - protein, 31 aa, Artificial Sequence
  Cyclic GFR-binding peptide
  MOD_RES (2)..(3): Xaa is C or S
AXXVPTELSNITMQIMDENEKVVIGEMSDMV

SEQ ID NO: 80112 - protein, 26 aa, Artificial Sequence
  Cyclic GFR-binding peptide
QALRSVKIAKVVGRKPKVKEVQVMIV

SEQ ID NO: 80113 - protein, 42 aa, Artificial Sequence; identical to SEQ ID NO: 30492
  Cyclic GFR-binding peptide
  MOD_RES (3)..(40)..(42): Xaa is C or S

SEQ ID NO: 80114 - protein, 39 aa, Artificial Sequence; identical to SEQ ID NO: 30494
  Cyclic GFR-binding peptide
  MOD_RES (6)..(7)..(39): Xaa is C or S

SEQ ID NO: 80115 - protein, 32 aa, Artificial Sequence
  Cyclic GFR-binding peptide
  MOD_RES (4)..(5): Xaa is C or S
AAPXXVPQALRSVKIAKVVGRKPKVKEVQVMI

SEQ ID NO: 80116 - protein, 29 aa, Artificial Sequence
  Cyclic GFR-binding peptide
  MOD_RES (3)..(4): Xaa is C or S
APXXVPQALSNITIQIMVGRKPKVIGEMS

SEQ ID NO: 80117 - protein, 35 aa, Artificial Sequence; identical to SEQ ID NO: 30497
  Cyclic GFR-binding peptide
  MOD_RES (32)..(34): Xaa is C or S

SEQ ID NO: 80118 - protein, 35 aa, Artificial Sequence; identical to SEQ ID NO: 30499
  Cyclic GFR-binding peptide
  MOD_RES (1)..(2)..(33)..(35): Xaa is C or S

SEQ ID NO: 80119 - protein, 28 aa, Artificial Sequence
  Cyclic GFR-binding peptide
  MOD_RES (27)..(27): Xaa is C or S
LRPVQIRKIIGKTPKIKKATVMIVKSXK

SEQ ID NO: 80120 - protein, 28 aa, Artificial Sequence
  Cyclic GFR-binding peptide
PTKLSNITVQIMDDSSNVIIGEMSNMVV

SEQ ID NO: 80121 - protein, 24 aa, Artificial Sequence
  Cyclic GFR-binding peptide
RSVKIAKVIGKTPKIKEVQVMIVK

SEQ ID NO: 80122 - protein, 39 aa, Artificial Sequence; identical to SEQ ID NO: 30503
  Cyclic GFR-binding peptide
  MOD_RES (4)..(38): Xaa is C or S

SEQ ID NO: 80123 - protein, 22 aa, Artificial Sequence
  Cyclic GFR-binding peptide
EPLPMVYYRIKPHQGQHEQLSN

SEQ ID NO: 80124 - protein, 29 aa, Artificial Sequence
  Cyclic GFR-binding peptide
  MOD_RES (1)..(2): Xaa is C or S
XXAPTQLSNITVQIMDDSSNVIIGEMSNM

SEQ ID NO: 80125 - protein, 29 aa, Artificial Sequence
  Cyclic GFR-binding peptide
  MOD_RES (3)..(4): Xaa is C or S
KPXXAPTQLSNITVQIMDDSSNVIIGEMS

SEQ ID NO: 80126 - protein, 23 aa, Artificial Sequence
  Cyclic GFR-binding peptide
KLRPVQVRKIDDSSNVIKKATVN

SEQ ID NO: 80127 - protein, 32 aa, Artificial Sequence
  Cyclic GFR-binding peptide
  MOD_RES (32)..(32): Xaa is C or S
QLEPLPVVYYEIVRKKPIFEQLSNTLEDHLAX

SEQ ID NO: 80128 - protein, 34 aa, Artificial Sequence; identical to SEQ ID NO: 30518
  Cyclic GFR-binding peptide
  MOD_RES (3)..(4): Xaa is C or S

SEQ ID NO: 80129 - protein, 33 aa, Artificial Sequence; identical to SEQ ID NO: 30519
  Cyclic GFR-binding peptide

SEQ ID NO: 80130 - protein, 32 aa, Artificial Sequence
  Cyclic GFR-binding peptide
QVQLEPLPVVYYEIVRKKPIFEQLSNTLEDHL

SEQ ID NO: 80131 - protein, 36 aa, Artificial Sequence; identical to SEQ ID NO: 30522
  Cyclic GFR-binding peptide
  MOD_RES (2)..(3)..(34)..(36): Xaa is C or S

SEQ ID NO: 80132 - protein, 26 aa, Artificial Sequence
  Cyclic GFR-binding peptide
KLRSVKVAKVDDSSNVIKEVQVNMVV

SEQ ID NO: 80133 - protein, 23 aa, Artificial Sequence
  Cyclic GFR-binding peptide
QDLRPVQIRKIVGRTPKVKKATV

SEQ ID NO: 80134 - protein, 27 aa, Artificial Sequence
  Cyclic GFR-binding peptide
  MOD_RES (26)..(26): Xaa is C or S
RSVKIAKVIGKTPKIKEVQVMIVKSXK

SEQ ID NO: 80135 - protein, 30 aa, Artificial Sequence
  Cyclic GFR-binding peptide
  MOD_RES (3)..(4): Xaa is C or S
SPXXVPQDLRPVQIRKIVGRTPKVKKATVM

SEQ ID NO: 80136 - protein, 31 aa, Artificial Sequence
  Cyclic GFR-binding peptide
  MOD_RES (4)..(5): Xaa is C or S
ASPXXVPQDLRPVQIRKIVGRTPKVKKATVM

SEQ ID NO: 80137 - protein, 35 aa, Artificial Sequence; identical to SEQ ID NO: 30535
  Cyclic GFR-binding peptide
  MOD_RES (1)..(2)..(34): Xaa is C or S

SEQ ID NO: 80138 - protein, 25 aa, Artificial Sequence
  Cyclic GFR-binding peptide
EPLTVLYYEIVRKKPIFEQLSNTLE

SEQ ID NO: 80139 - protein, 34 aa, Artificial Sequence
  Cyclic GFR-binding peptide
  MOD_RES (5)..(5): Xaa is C or S
SSVKXQPSRVHHEPLTVLYYEYVRKKPKLEQLSN

SEQ ID NO: 80140 - protein, 37 aa, Artificial Sequence; identical to SEQ ID NO: 30539
  Cyclic GFR-binding peptide
  MOD_RES (3)..(37): Xaa is C or S

SEQ ID NO: 80141 - protein, 25 aa, Artificial Sequence
  Cyclic GFR-binding peptide
LSNITIQIMVGRKPKVIGEMSMIVR

SEQ ID NO: 80142 - protein, 40 aa, Artificial Sequence; identical to SEQ ID NO: 30542
  Cyclic GFR-binding peptide
  MOD_RES (6)..(7)..(38)..(40): Xaa is C or S

SEQ ID NO: 80143 - protein, 33 aa, Artificial Sequence
  Cyclic GFR-binding peptide
  MOD_RES (3)..(3): Xaa is C or S
LEXVPTEEEPLTMLYYRIKPHQGQHEQLSNFLQ

SEQ ID NO: 80144 - protein, 39 aa, Artificial Sequence; identical to SEQ ID NO: 30547
  Cyclic GFR-binding peptide
  MOD_RES (7)..(39): Xaa is C or S

SEQ ID NO: 80145 - protein, 32 aa, Artificial Sequence
  Cyclic GFR-binding peptide
RVHHEPLPVVYYEYVRKKPKLEQLSNRLEEHL

SEQ ID NO: 80146 - protein, 33 aa, Artificial Sequence
  Cyclic GFR-binding peptide
  MOD_RES (4)..(5): Xaa is C or S
PKAXXVPTELSNITMQIMDEYDKVVIGEMSEMV

SEQ ID NO: 80147 - protein, 38 aa, Artificial Sequence; identical to SEQ ID NO: 30551
  Cyclic GFR-binding peptide
  MOD_RES (4)..(5)..(37): Xaa is C or S

SEQ ID NO: 80148 - protein, 34 aa, Artificial Sequence
  Cyclic GFR-binding peptide
  MOD_RES (5)..(6): Xaa is C or S
IPKAXXVPTELRSVKMAKVDEYDKVVKEVQVEMV

SEQ ID NO: 80149 - protein, 36 aa, Artificial Sequence; identical to SEQ ID NO: 30553
  Cyclic GFR-binding peptide
  MOD_RES (2)..(3)..(35): Xaa is C or S

SEQ ID NO: 80150 - protein, 34 aa, Artificial Sequence; identical to SEQ ID NO: 30552
  Cyclic GFR-binding peptide
  MOD_RES (2)..(3): Xaa is C or S

SEQ ID NO: 80151 - protein, 31 aa, Artificial Sequence
  Cyclic GFR-binding peptide
  MOD_RES (29)..(31): Xaa is C or S
EPLPMVYYRIKPHQGQHEQLSNFLQHNKXEX

SEQ ID NO: 80152 - protein, 28 aa, Artificial Sequence
  Cyclic GFR-binding peptide
VPQALRPVQIRKIVGRKPKVKKATVMIV

SEQ ID NO: 80153 - protein, 29 aa, Artificial Sequence
  Cyclic GFR-binding peptide
  MOD_RES (2)..(3): Xaa is C or S
PXXVPQDLSNITIQIMVGRTPKVIGEMSM

SEQ ID NO: 80154 - protein, 32 aa, Artificial Sequence; identical to SEQ ID NO: 30560
  Cyclic GFR-binding peptide
  MOD_RES (1)..(1): Xaa is C or S

SEQ ID NO: 80155 - protein, 29 aa, Artificial Sequence
  Cyclic GFR-binding peptide
  MOD_RES (26)..(28): Xaa is C or S
RPVQIRKIVGRTPKVKKATVMVVKSXKXS

SEQ ID NO: 80156 - protein, 23 aa, Artificial Sequence
  Cyclic GFR-binding peptide
RSVKIAKVIGKTPKIKEVQVMIV

SEQ ID NO: 80157 - protein, 40 aa, Artificial Sequence; identical to SEQ ID NO: 30567
  Cyclic GFR-binding peptide
  MOD_RES (5)..(39): Xaa is C or S

SEQ ID NO: 80158 - protein, 29 aa, Artificial Sequence
  Cyclic GFR-binding peptide
PTELRPVQMRKIDENEKVVKKATVDMVVE

SEQ ID NO: 80159 - protein, 34 aa, Artificial Sequence
  Cyclic GFR-binding peptide
  MOD_RES (4)..(5): Xaa is C or S
ASPXXVPQDLRPVQIRKIVGRTPKVKKATVMVVK

SEQ ID NO: 80160 - protein, 34 aa, Artificial Sequence
  Cyclic GFR-binding peptide
  MOD_RES (6)..(7): Xaa is C or S
ASASPXXVPQDLSNITIQIMVGRTPKVIGEMSMV

SEQ ID NO: 80161 - protein, 33 aa, Artificial Sequence; identical to SEQ ID NO: 30571
  Cyclic GFR-binding peptide
  MOD_RES (1)..(33): Xaa is C or S

SEQ ID NO: 80162 - protein, 34 aa, Artificial Sequence; identical to SEQ ID NO: 30573
  Cyclic GFR-binding peptide
  MOD_RES (1)..(1): Xaa is C or S

SEQ ID NO: 80163 - protein, 37 aa, Artificial Sequence; identical to SEQ ID NO: 30579
  Cyclic GFR-binding peptide
  MOD_RES (36)..(36): Xaa is C or S

SEQ ID NO: 80164 - protein, 29 aa, Artificial Sequence
  Cyclic GFR-binding peptide
  MOD_RES (29)..(29): Xaa is C or S
QDLSNITIQIMIGKTPKIIGEMSMIVKSX

SEQ ID NO: 80165 - protein, 41 aa, Artificial Sequence; identical to SEQ ID NO: 30582
  Cyclic GFR-binding peptide
  MOD_RES (5)..(5): Xaa is C or S

SEQ ID NO: 80166 - protein, 26 aa, Artificial Sequence
  Cyclic GFR-binding peptide
PTQLRSVKVAKVDDSSNVIKEVQVNM

SEQ ID NO: 80167 - protein, 39 aa, Artificial Sequence; identical to SEQ ID NO: 30587
  Cyclic GFR-binding peptide
  MOD_RES (5)..(6)..(37)..(39): Xaa is C or S

SEQ ID NO: 80168 - protein, 29 aa, Artificial Sequence
  Cyclic GFR-binding peptide
  MOD_RES (28)..(28): Xaa is C or S
DLRPVQIRKIIGKTPKIKKATVMIVKSXK

SEQ ID NO: 80169 - protein, 28 aa, Artificial Sequence
  Cyclic GFR-binding peptide
  MOD_RES (28)..(28): Xaa is C or S
LRSVKMAKVDEYDKVVKEVQVEMVVEGX

SEQ ID NO: 80170 - protein, 33 aa, Artificial Sequence; identical to SEQ ID NO: 30589
  Cyclic GFR-binding peptide
  MOD_RES (31)..(33): Xaa is C or S

SEQ ID NO: 80171 - protein, 30 aa, Artificial Sequence
  Cyclic GFR-binding peptide
  MOD_RES (1)..(1): Xaa is C or S
XVSQDLRPVQIRKIIGKTPKIKKATVMIVK

SEQ ID NO: 80172 - protein, 31 aa, Artificial Sequence
  Cyclic GFR-binding peptide
RPTQVQLEPLPVVYYEIVRKKPIFEQLSNTL

SEQ ID NO: 80173 - protein, 27 aa, Artificial Sequence
  Cyclic GFR-binding peptide
KLSNITVQIMDDSSNVIIGEMSNMVVR

SEQ ID NO: 80174 - protein, 33 aa, Artificial Sequence; identical to SEQ ID NO: 30594
  Cyclic GFR-binding peptide
  MOD_RES (32)..(32): Xaa is C or S

SEQ ID NO: 80175 - protein, 31 aa, Artificial Sequence
  Cyclic GFR-binding peptide
  MOD_RES (1)..(1): Xaa is C or S
XVPTEEEPLPMVYYRIKPHQGQHEQLSNFLQ

SEQ ID NO: 80176 - protein, 38 aa, Artificial Sequence; identical to SEQ ID NO: 30595
  Cyclic GFR-binding peptide
  MOD_RES (3)..(4)..(35)..(37): Xaa is C or S

SEQ ID NO: 80177 - protein, 31 aa, Artificial Sequence
  Cyclic GFR-binding peptide
  MOD_RES (2)..(3): Xaa is C or S
AXXVPTELRSVKMAKVDENEKVVKEVQVDMV

SEQ ID NO: 80178 - protein, 28 aa, Artificial Sequence
  Cyclic GFR-binding peptide
EPLPVVYYEYVRKKPKLEQLSNRLEEHL

SEQ ID NO: 80179 - protein, 22 aa, Artificial Sequence
  Cyclic GFR-binding peptide
SNITVQIMDDSSNVIIGEMSNM

SEQ ID NO: 80180 - protein, 37 aa, Artificial Sequence; identical to SEQ ID NO: 30599
  Cyclic GFR-binding peptide
  MOD_RES (2)..(3)..(34)..(36): Xaa is C or S

SEQ ID NO: 80181 - protein, 36 aa, Artificial Sequence
  Cyclic GFR-binding peptide
  MOD_RES (33)..(35): Xaa is C or S
PTEEEPLPMVYYRIKPHQGQHEQLSNFLQHNKXEXR

SEQ ID NO: 80182 - protein, 34 aa, Artificial Sequence; identical to SEQ ID NO: 30601
  Cyclic GFR-binding peptide
  MOD_RES (3)..(4): Xaa is C or S

SEQ ID NO: 80183 - protein, 36 aa, Artificial Sequence; identical to SEQ ID NO: 30602
  Cyclic GFR-binding peptide
  MOD_RES (3)..(35): Xaa is C or S

SEQ ID NO: 80184 - protein, 26 aa, Artificial Sequence
  Cyclic GFR-binding peptide
RPVQMRKIDENEKVVKKATVDMVVEG

SEQ ID NO: 80185 - protein, 27 aa, Artificial Sequence
  Cyclic GFR-binding peptide
TELSNITMQIMDEYDKVVIGEMSEMVV

SEQ ID NO: 80186 - protein, 41 aa, Artificial Sequence; identical to SEQ ID NO: 30605
  Cyclic GFR-binding peptide
  MOD_RES (6)..(7)..(38)..(40): Xaa is C or S

SEQ ID NO: 80187 - protein, 31 aa, Artificial Sequence
  Cyclic GFR-binding peptide
  MOD_RES (28)..(30): Xaa is C or S
DLSNITIQIMIGKTPKIIGEMSMIVKSXKXS

SEQ ID NO: 80188 - protein, 27 aa, Artificial Sequence
  Cyclic GFR-binding peptide
SQDLRPVQIRKIIGKTPKIKKATVMIV

SEQ ID NO: 80189 - protein, 24 aa, Artificial Sequence
  Cyclic GFR-binding peptide
PTELSNITMQIMDEYDKVVIGEMS

SEQ ID NO: 80190 - protein, 29 aa, Artificial Sequence
  Cyclic GFR-binding peptide
  MOD_RES (2)..(2): Xaa is C or S
TXAPTKLSNITVQIMDDSSNVIIGEMSNM

SEQ ID NO: 80191 - protein, 38 aa, Artificial Sequence; identical to SEQ ID NO: 30607
  Cyclic GFR-binding peptide
  MOD_RES (3)..(37): Xaa is C or S

SEQ ID NO: 80192 - protein, 33 aa, Artificial Sequence
  Cyclic GFR-binding peptide
  MOD_RES (6)..(7): Xaa is C or S
YVPKPXXAPTKLRPVQVRKIDDSSNVIKKATVN

SEQ ID NO: 80193 - protein, 35 aa, Artificial Sequence; identical to SEQ ID NO: 30614
  Cyclic GFR-binding peptide
  MOD_RES (3)..(4): Xaa is C or S

SEQ ID NO: 80194 - protein, 27 aa, Artificial Sequence
  Cyclic GFR-binding peptide
TKLSNITVQIMDDSSNVIIGEMSNMVV

SEQ ID NO: 80195 - protein, 30 aa, Artificial Sequence
  Cyclic GFR-binding peptide
  MOD_RES (30)..(30): Xaa is C or S
TQLSNITVQIMDDSSNVIIGEMSNMVVRAX

SEQ ID NO: 80196 - protein, 30 aa, Artificial Sequence
  Cyclic GFR-binding peptide
PSRVHHEPLTVLYYEYVRKKPKLEQLSNRL

SEQ ID NO: 80197 - protein, 33 aa, Artificial Sequence; identical to SEQ ID NO: 30617
  Cyclic GFR-binding peptide
  MOD_RES (2)..(3): Xaa is C or S

SEQ ID NO: 80198 - protein, 34 aa, Artificial Sequence
  Cyclic GFR-binding peptide
  MOD_RES (6)..(6): Xaa is C or S
VTKPTXAPTKLRPVQVRKIDDSSNVIKKATVNMV

SEQ ID NO: 80199 - protein, 33 aa, Artificial Sequence
  Cyclic GFR-binding peptide
  MOD_RES (6)..(7): Xaa is C or S
ASASPXXVSQDLRPVQIRKIIGKTPKIKKATVM

SEQ ID NO: 80200 - protein, 31 aa, Artificial Sequence
  Cyclic GFR-binding peptide
TEEEPLTMLYYRIKPHQGQHEQLSNFLQHNK

SEQ ID NO: 80201 - protein, 36 aa, Artificial Sequence; identical to SEQ ID NO: 30619
  Cyclic GFR-binding peptide
  MOD_RES (3)..(4)..(35): Xaa is C or S

SEQ ID NO: 80202 - protein, 31 aa, Artificial Sequence
  Cyclic GFR-binding peptide
  MOD_RES (3)..(4): Xaa is C or S
KAXXVPTELRSVKMAKVDENEKVVKEVQVDM

SEQ ID NO: 80203 - protein, 30 aa, Artificial Sequence
  Cyclic GFR-binding peptide
  MOD_RES (30)..(30): Xaa is C or S
TELRSVKMAKVDENEKVVKEVQVDMVVEGX

SEQ ID NO: 80204 - protein, 37 aa, Artificial Sequence; identical to SEQ ID NO: 30622
  Cyclic GFR-binding peptide
  MOD_RES (6)..(6): Xaa is C or S

SEQ ID NO: 80205 - protein, 27 aa, Artificial Sequence
  Cyclic GFR-binding peptide
  MOD_RES (27)..(27): Xaa is C or S
RPVQMRKIDENEKVVKKATVDMVVEGX

SEQ ID NO: 80206 - protein, 20 aa, Artificial Sequence
  Cyclic GFR-binding peptide
RPVQVRKIDDSSNVIKKATV

SEQ ID NO: 80207 - protein, 35 aa, Artificial Sequence
  Cyclic GFR-binding peptide
  MOD_RES (5)..(6): Xaa is C or S
IPKAXXVPTELRSVKMAKVDEYDKVVKEVQVEMVV

SEQ ID NO: 80208 - protein, 32 aa, Artificial Sequence
  Cyclic GFR-binding peptide
PTQVQLEPLPVVYYEIVRKKPIFEQLSNTLED

SEQ ID NO: 80209 - protein, 31 aa, Artificial Sequence
  Cyclic GFR-binding peptide
  MOD_RES (3)..(4): Xaa is C or S
APXXVPQALRPVQIRKIVGRKPKVKKATVMI

SEQ ID NO: 80210 - protein, 34 aa, Artificial Sequence; identical to SEQ ID NO: 30632
  Cyclic GFR-binding peptide

SEQ ID NO: 80211 - protein, 35 aa, Artificial Sequence
  Cyclic GFR-binding peptide
  MOD_RES (3)..(3): Xaa is C or S
VQXRPTQVQLEPLPVVYYEIVRKKPIFEQLSNTLE

SEQ ID NO: 80212 - protein, 25 aa, Artificial Sequence
  Cyclic GFR-binding peptide
LSNITVQIMDDSSNVIIGEMSNMVV

SEQ ID NO: 80213 - protein, 25 aa, Artificial Sequence
  Cyclic GFR-binding peptide
ELSNITMQIMDEYDKVVIGEMSEMV

SEQ ID NO: 80214 - protein, 31 aa, Artificial Sequence
  Cyclic GFR-binding peptide
  MOD_RES (30)..(30): Xaa is C or S
EPLPVVYYEYVRKKPKLEQLSNRLEEHLEXA

SEQ ID NO: 80215 - protein, 33 aa, Artificial Sequence; identical to SEQ ID NO: 30642
  Cyclic GFR-binding peptide
  MOD_RES (1)..(2)..(33): Xaa is C or S

SEQ ID NO: 80216 - protein, 26 aa, Artificial Sequence
  Cyclic GFR-binding peptide
QLRSVKVAKVDDSSNVIKEVQVNMVV

SEQ ID NO: 80217 - protein, 38 aa, Artificial Sequence; identical to SEQ ID NO: 30648
  Cyclic GFR-binding peptide
  MOD_RES (3)..(4)..(36)..(38): Xaa is C or S

SEQ ID NO: 80218 - protein, 29 aa, Artificial Sequence
  Cyclic GFR-binding peptide
  MOD_RES (28)..(28): Xaa is C or S
LSNITVQIMDDSSNVIIGEMSNMVVRSXG

SEQ ID NO: 80219 - protein, 24 aa, Artificial Sequence
  Cyclic GFR-binding peptide
HEPLPVVYYEYVRKKPKLEQLSNR

SEQ ID NO: 80220 - protein, 34 aa, Artificial Sequence
  Cyclic GFR-binding peptide
  MOD_RES (6)..(7): Xaa is C or S
KIPKAXXVPTELRSVKMAKVDENEKVVKEVQVDM

SEQ ID NO: 80221 - protein, 31 aa, Artificial Sequence
  Cyclic GFR-binding peptide
  MOD_RES (30)..(30): Xaa is C or S
TKLRPVQVRKIDDSSNVIKKATVNMVVRSXG

SEQ ID NO: 80222 - protein, 34 aa, Artificial Sequence
  Cyclic GFR-binding peptide
  MOD_RES (6)..(7): Xaa is C or S
TVPKPXXAPTQLRSVKVAKVDDSSNVIKEVQVNM

SEQ ID NO: 80223 - protein, 28 aa, Artificial Sequence
  Cyclic GFR-binding peptide
VPQALSNITIQIMVGRKPKVIGEMSMIV

SEQ ID NO: 80224 - protein, 34 aa, Artificial Sequence
  Cyclic GFR-binding peptide
  MOD_RES (31)..(33): Xaa is C or S
PTKLSNITVQIMDDSSNVIIGEMSNMVVRSXGXH

SEQ ID NO: 80225 - protein, 27 aa, Artificial Sequence
  Cyclic GFR-binding peptide
  MOD_RES (1)..(1): Xaa is C or S
XAPTKLRSVKVAKVDDSSNVIKEVQVN

SEQ ID NO: 80226 - protein, 25 aa, Artificial Sequence
  Cyclic GFR-binding peptide
PTELRSVKMAKVDEYDKVVKEVQVE

SEQ ID NO: 80227 - protein, 42 aa, Artificial Sequence; identical to SEQ ID NO: 30658
  Cyclic GFR-binding peptide
  MOD_RES (6)..(7)..(39)..(41): Xaa is C or S

SEQ ID NO: 80228 - protein, 30 aa, Artificial Sequence; identical to SEQ ID NO: 30662
  Cyclic GFR-binding peptide

SEQ ID NO: 80229 - protein, 37 aa, Artificial Sequence; identical to SEQ ID NO: 30667
  Cyclic GFR-binding peptide
  MOD_RES (4)..(5)..(37): Xaa is C or S

SEQ ID NO: 80230 - protein, 33 aa, Artificial Sequence; identical to SEQ ID NO: 30670
  Cyclic GFR-binding peptide
  MOD_RES (2)..(3): Xaa is C or S

SEQ ID NO: 80231 - protein, 36 aa, Artificial Sequence
  Cyclic GFR-binding peptide
  MOD_RES (6)..(7): Xaa is C or S
ASASPXXVSQDLSNITIQIMIGKTPKIIGEMSMIVK

SEQ ID NO: 80232 - protein, 29 aa, Artificial Sequence
  Cyclic GFR-binding peptide
RVHHEPLPVVYYEYVRKKPKLEQLSNRLE

SEQ ID NO: 80233 - protein, 23 aa, Artificial Sequence
  Cyclic GFR-binding peptide
HEPLTVLYYEYVRKKPKLEQLSN

SEQ ID NO: 80234 - protein, 25 aa, Artificial Sequence
  Cyclic GFR-binding peptide
PQALSNITIQIMVGRKPKVIGEMSM

SEQ ID NO: 80235 - protein, 38 aa, Artificial Sequence; identical to SEQ ID NO: 30678
  Cyclic GFR-binding peptide
  MOD_RES (37)..(37): Xaa is C or S

SEQ ID NO: 80236 - protein, 34 aa, Artificial Sequence
  Cyclic GFR-binding peptide
  MOD_RES (3)..(3): Xaa is C or S
VKXQPSRVHHEPLTVLYYEYVRKKPKLEQLSNRL

SEQ ID NO: 80237 - protein, 40 aa, Artificial Sequence; identical to SEQ ID NO: 30681
  Cyclic GFR-binding peptide
  MOD_RES (5)..(6)..(37)..(39): Xaa is C or S

SEQ ID NO: 80238 - protein, 45 aa, Artificial Sequence; identical to SEQ ID NO: 30683
  Cyclic GFR-binding peptide
  MOD_RES (5)..(42)..(44): Xaa is C or S

SEQ ID NO: 80239 - protein, 29 aa, Artificial Sequence
  Cyclic GFR-binding peptide
VSQDLRPVQIRKIIGKTPKIKKATVMIVK

SEQ ID NO: 80240 - protein, 33 aa, Artificial Sequence
  Cyclic GFR-binding peptide
  MOD_RES (4)..(4): Xaa is C or S
NVQXRPTQVQLEPLTVLYYEIVRKKPIFEQLSN

SEQ ID NO: 80241 - protein, 30 aa, Artificial Sequence
  Cyclic GFR-binding peptide
  MOD_RES (30)..(30): Xaa is C or S
EPLPVVYYEIVRKKPIFEQLSNTLEDHLAX

SEQ ID NO: 80242 - protein, 41 aa, Artificial Sequence; identical to SEQ ID NO: 30687
  Cyclic GFR-binding peptide
  MOD_RES (6)..(7)..(39)..(41): Xaa is C or S

SEQ ID NO: 80243 - protein, 31 aa, Artificial Sequence; identical to SEQ ID NO: 30690
  Cyclic GFR-binding peptide
  MOD_RES (1)..(1): Xaa is C or S

SEQ ID NO: 80244 - protein, 33 aa, Artificial Sequence
  Cyclic GFR-binding peptide
  MOD_RES (5)..(6): Xaa is C or S
IPKAXXVPTELSNITMQIMDEYDKVVIGEMSEM

SEQ ID NO: 80245 - protein, 34 aa, Artificial Sequence; identical to SEQ ID NO: 30691
  Cyclic GFR-binding peptide
  MOD_RES (32)..(34): Xaa is C or S

SEQ ID NO: 80246 - protein, 26 aa, Artificial Sequence
  Cyclic GFR-binding peptide
QDLSNITIQIMVGRTPKVIGEMSMVV

SEQ ID NO: 80247 - protein, 32 aa, Artificial Sequence
  Cyclic GFR-binding peptide
  MOD_RES (5)..(6): Xaa is C or S
IPKAXXVPTELSNITMQIMDEYDKVVIGEMSE

SEQ ID NO: 80248 - protein, 31 aa, Artificial Sequence
  Cyclic GFR-binding peptide
  MOD_RES (29)..(31): Xaa is C or S
QDLRSVKIAKVIGKTPKIKEVQVMIVKSXKX

SEQ ID NO: 80249 - protein, 31 aa, Artificial Sequence
  Cyclic GFR-binding peptide
PTEEEPLTMLYYRIKPHQGQHEQLSNFLQHN

SEQ ID NO: 80250 - protein, 35 aa, Artificial Sequence; identical to SEQ ID NO: 30697
  Cyclic GFR-binding peptide
  MOD_RES (3)..(3): Xaa is C or S

SEQ ID NO: 80251 - protein, 33 aa, Artificial Sequence
  Cyclic GFR-binding peptide
  MOD_RES (30)..(32): Xaa is C or S
SQDLRSVKIAKVIGKTPKIKEVQVMIVKSXKXS

SEQ ID NO: 80252 - protein, 36 aa, Artificial Sequence; identical to SEQ ID NO: 30701
  Cyclic GFR-binding peptide
  MOD_RES (2)..(34)..(36): Xaa is C or S

SEQ ID NO: 80253 - protein, 26 aa, Artificial Sequence
  Cyclic GFR-binding peptide
EPLPVVYYEIVRKKPIFEQLSNTLED

SEQ ID NO: 80254 - protein, 26 aa, Artificial Sequence
  Cyclic GFR-binding peptide
EEEPLPMVYYRIKPHQGQHEQLSNFL

SEQ ID NO: 80255 - protein, 30 aa, Artificial Sequence
  Cyclic GFR-binding peptide
  MOD_RES (4)..(5): Xaa is C or S
PKPXXAPTQLRPVQVRKIDDSSNVIKKATV

SEQ ID NO: 80256 - protein, 42 aa, Artificial Sequence; identical to SEQ ID NO: 30705
  Cyclic GFR-binding peptide
  MOD_RES (4)..(41): Xaa is C or S

SEQ ID NO: 80257 - protein, 27 aa, Artificial Sequence
  Cyclic GFR-binding peptide
TQVQLEPLPVVYYEIVRKKPIFEQLSN

SEQ ID NO: 80258 - protein, 25 aa, Artificial Sequence
  Cyclic GFR-binding peptide
RPVQIRKIVGRKPKVKKATVMIVRS

SEQ ID NO: 80259 - protein, 31 aa, Artificial Sequence
  Cyclic GFR-binding peptide
  MOD_RES (30)..(30): Xaa is C or S
EEPLTMLYYRIKPHQGQHEQLSNFLQHNKXE

SEQ ID NO: 80260 - protein, 37 aa, Artificial Sequence; identical to SEQ ID NO: 30716
  Cyclic GFR-binding peptide
  MOD_RES (3)..(4)..(36): Xaa is C or S

SEQ ID NO: 80261 - protein, 32 aa, Artificial Sequence
  Cyclic GFR-binding peptide
  MOD_RES (5)..(6): Xaa is C or S
SASPXXVSQDLRSVKIAKVIGKTPKIKEVQVM

SEQ ID NO: 80262 - protein, 24 aa, Artificial Sequence
  Cyclic GFR-binding peptide
PTQLRPVQVRKIDDSSNVIKKATV

SEQ ID NO: 80263 - protein, 32 aa, Artificial Sequence
  Cyclic GFR-binding peptide
  MOD_RES (31)..(31): Xaa is C or S
LEPLTVLYYEIVRKKPIFEQLSNTLEDHLAXK

SEQ ID NO: 80264 - protein, 36 aa, Artificial Sequence; identical to SEQ ID NO: 30719
  Cyclic GFR-binding peptide
  MOD_RES (1)..(2)..(33)..(35): Xaa is C or S

SEQ ID NO: 80265 - protein, 32 aa, Artificial Sequence; identical to SEQ ID NO: 30720
  Cyclic GFR-binding peptide
  MOD_RES (1)..(2): Xaa is C or S

SEQ ID NO: 80266 - protein, 29 aa, Artificial Sequence
  Cyclic GFR-binding peptide
  MOD_RES (2)..(3): Xaa is C or S
PXXAPTKLRSVKVAKVDDSSNVIKEVQVN

SEQ ID NO: 80267 - protein, 37 aa, Artificial Sequence; identical to SEQ ID NO: 30731
  Cyclic GFR-binding peptide
  MOD_RES (7)..(7): Xaa is C or S

SEQ ID NO: 80268 - protein, 40 aa, Artificial Sequence; identical to SEQ ID NO: 30732
  Cyclic GFR-binding peptide
  MOD_RES (4)..(5)..(37)..(39): Xaa is C or S

SEQ ID NO: 80269 - protein, 23 aa, Artificial Sequence
  Cyclic GFR-binding peptide
LRSVKMAKVDENEKVVKEVQVDM

SEQ ID NO: 80270 - protein, 31 aa, Artificial Sequence
  Cyclic GFR-binding peptide
  MOD_RES (31)..(31): Xaa is C or S
PTQLRSVKVAKVDDSSNVIKEVQVNMVVRAX

SEQ ID NO: 80271 - protein, 34 aa, Artificial Sequence; identical to SEQ ID NO: 30736
  Cyclic GFR-binding peptide
  MOD_RES (3)..(4): Xaa is C or S

SEQ ID NO: 80272 - protein, 22 aa, Artificial Sequence
  Cyclic GFR-binding peptide
EPLTVLYYEIVRKKPIFEQLSN

SEQ ID NO: 80273 - protein, 25 aa, Artificial Sequence
  Cyclic GFR-binding peptide
QDLRPVQIRKIIGKTPKIKKATVMI

SEQ ID NO: 80274 - protein, 32 aa, Artificial Sequence
  Cyclic GFR-binding peptide
  MOD_RES (31)..(31): Xaa is C or S
PTKLSNITVQIMDDSSNVIIGEMSNMVVRSXG

SEQ ID NO: 80275 - protein, 40 aa, Artificial Sequence; identical to SEQ ID NO: 30745
  Cyclic GFR-binding peptide
  MOD_RES (5)..(6)..(38)..(40): Xaa is C or S

SEQ ID NO: 80276 - protein, 36 aa, Artificial Sequence; identical to SEQ ID NO: 30751
  Cyclic GFR-binding peptide
  MOD_RES (36)..(36): Xaa is C or S

SEQ ID NO: 80277 - protein, 34 aa, Artificial Sequence; identical to SEQ ID NO: 30752
  Cyclic GFR-binding peptide
  MOD_RES (1)..(2)..(33): Xaa is C or S

SEQ ID NO: 80278 - protein, 24 aa, Artificial Sequence
  Cyclic GFR-binding peptide
TQLSNITVQIMDDSSNVIIGEMSN

SEQ ID NO: 80279 - protein, 29 aa, Artificial Sequence
  Cyclic GFR-binding peptide
  MOD_RES (28)..(28): Xaa is C or S
ALRSVKIAKVVGRKPKVKEVQVMIVRSXK

SEQ ID NO: 80280 - protein, 32 aa, Artificial Sequence; identical to SEQ ID NO: 30756
  Cyclic GFR-binding peptide
  MOD_RES (31)..(31): Xaa is C or S

SEQ ID NO: 80281 - protein, 37 aa, Artificial Sequence; identical to SEQ ID NO: 30758
  Cyclic GFR-binding peptide
  MOD_RES (2)..(3)..(35)..(37): Xaa is C or S

SEQ ID NO: 80282 - protein, 35 aa, Artificial Sequence; identical to SEQ ID NO: 30759
  Cyclic GFR-binding peptide
  MOD_RES (2)..(3)..(34): Xaa is C or S

SEQ ID NO: 80283 - protein, 26 aa, Artificial Sequence
  Cyclic GFR-binding peptide
  MOD_RES (1)..(1): Xaa is C or S
XVPQALRPVQIRKIVGRKPKVKKATV

SEQ ID NO: 80284 - protein, 33 aa, Artificial Sequence
  Cyclic GFR-binding peptide
  MOD_RES (5)..(5): Xaa is C or S
TKPTXAPTKLRPVQVRKIDDSSNVIKKATVNMV

SEQ ID NO: 80285 - protein, 30 aa, Artificial Sequence
  Cyclic GFR-binding peptide
  MOD_RES (2)..(3): Xaa is C or S
AXXVPTELRSVKMAKVDEYDKVVKEVQVEM

SEQ ID NO: 80286 - protein, 26 aa, Artificial Sequence
  Cyclic GFR-binding peptide
PTKLRSVKVAKVDDSSNVIKEVQVNM

SEQ ID NO: 80287 - protein, 30 aa, Artificial Sequence
  Cyclic GFR-binding peptide
  MOD_RES (29)..(29): Xaa is C or S
QLSNITVQIMDDSSNVIIGEMSNMVVRAXG

SEQ ID NO: 80288 - protein, 30 aa, Artificial Sequence
  Cyclic GFR-binding peptide
  MOD_RES (1)..(1): Xaa is C or S
XRPTQVQLEPLPVVYYEIVRKKPIFEQLSN

SEQ ID NO: 80289 - protein, 32 aa, Artificial Sequence; identical to SEQ ID NO: 30766
  Cyclic GFR-binding peptide
  MOD_RES (2)..(2): Xaa is C or S

SEQ ID NO: 80290 - protein, 32 aa, Artificial Sequence
  Cyclic GFR-binding peptide
  MOD_RES (2)..(3): Xaa is C or S
PXXAPTKLRPVQVRKIDDSSNVIKKATVNMVV

SEQ ID NO: 80291 - protein, 36 aa, Artificial Sequence
  Cyclic GFR-binding peptide
  MOD_RES (5)..(5): Xaa is C or S
SSVKXQPSRVHHEPLPVVYYEYVRKKPKLEQLSNRL

SEQ ID NO: 80292 - protein, 26 aa, Artificial Sequence
  Cyclic GFR-binding peptide
EPLTVLYYEIVRKKPIFEQLSNTLED

SEQ ID NO: 80293 - protein, 38 aa, Artificial Sequence
  Cyclic GFR-binding peptide
  MOD_RES (4)..(5)..(36)..(38): Xaa is C or S
ASPXXVSQDLRSVKIAKVIGKTPKIKEVQVMIVKSXKX

SEQ ID NO: 80294 - protein, 39 aa, Artificial Sequence; identical to SEQ ID NO: 30775
  Cyclic GFR-binding peptide
  MOD_RES (5)..(6)..(38): Xaa is C or S

SEQ ID NO: 80295 - protein, 33 aa, Artificial Sequence
  Cyclic GFR-binding peptide
  MOD_RES (31)..(33): Xaa is C or S
PTELSNITMQIMDENEKVVIGEMSDMVVEGXGX

SEQ ID NO: 80296 - protein, 24 aa, Artificial Sequence
  Cyclic GFR-binding peptide
EEEPLPMVYYRIKPHQGQHEQLSN

SEQ ID NO: 80297 - protein, 36 aa, Artificial Sequence; identical to SEQ ID NO: 30777
  Cyclic GFR-binding peptide
  MOD_RES (4)..(5): Xaa is C or S

SEQ ID NO: 80298 - protein, 37 aa, Artificial Sequence; identical to SEQ ID NO: 30779
  Cyclic GFR-binding peptide
  MOD_RES (4)..(5)..(36): Xaa is C or S

SEQ ID NO: 80299 - protein, 26 aa, Artificial Sequence
  Cyclic GFR-binding peptide
QDLRSVKIAKVVGRTPKVKEVQVMVV

SEQ ID NO: 80300 - protein, 26 aa, Artificial Sequence
  Cyclic GFR-binding peptide
TKLRSVKVAKVDDSSNVIKEVQVNMV

SEQ ID NO: 80301 - protein, 39 aa, Artificial Sequence; identical to SEQ ID NO: 30784
  Cyclic GFR-binding peptide
  MOD_RES (3)..(4)..(36)..(38): Xaa is C or S

SEQ ID NO: 80302 - protein, 27 aa, Artificial Sequence
  Cyclic GFR-binding peptide
VHHEPLPVVYYEYVRKKPKLEQLSNRL

SEQ ID NO: 80303 - protein, 31 aa, Artificial Sequence
  Cyclic GFR-binding peptide
  MOD_RES (28)..(30): Xaa is C or S
LSNITVQIMDDSSNVIIGEMSNMVVRSXGXH

SEQ ID NO: 80304 - protein, 39 aa, Artificial Sequence; identical to SEQ ID NO: 30785
  Cyclic GFR-binding peptide
  MOD_RES (1)..(38): Xaa is C or S

SEQ ID NO: 80305 - protein, 29 aa, Artificial Sequence
  Cyclic GFR-binding peptide
  MOD_RES (27)..(29): Xaa is C or S
RSVKVAKVDDSSNVIKEVQVNMVVRAXGX

SEQ ID NO: 80306 - protein, 30 aa, Artificial Sequence
  Cyclic GFR-binding peptide
  MOD_RES (2)..(3): Xaa is C or S
PXXAPTQLSNITVQIMDDSSNVIIGEMSNM

SEQ ID NO: 80307 - protein, 33 aa, Artificial Sequence
  Cyclic GFR-binding peptide
  MOD_RES (3)..(4): Xaa is C or S
KAXXVPTELRSVKMAKVDENEKVVKEVQVDMVV

SEQ ID NO: 80308 - protein, 27 aa, Artificial Sequence
  Cyclic GFR-binding peptide
  MOD_RES (2)..(2): Xaa is C or S
TXAPTKLSNITVQIMDDSSNVIIGEMS

SEQ ID NO: 80309 - protein, 37 aa, Artificial Sequence; identical to SEQ ID NO: 30796
  Cyclic GFR-binding peptide
  MOD_RES (3)..(4)..(35)..(37): Xaa is C or S

SEQ ID NO: 80310 - protein, 34 aa, Artificial Sequence
  Cyclic GFR-binding peptide
  MOD_RES (5)..(6): Xaa is C or S
IPKAXXVPTELSNITMQIMDEYDKVVIGEMSEMV

SEQ ID NO: 80311 - protein, 37 aa, Artificial Sequence; identical to SEQ ID NO: 30797
  Cyclic GFR-binding peptide
  MOD_RES (5)..(37): Xaa is C or S

SEQ ID NO: 80312 - protein, 30 aa, Artificial Sequence; identical to SEQ ID NO: 30800
  Cyclic GFR-binding peptide

SEQ ID NO: 80313 - protein, 21 aa, Artificial Sequence
  Cyclic GFR-binding peptide
RPVQIRKIVGRKPKVKKATVM

SEQ ID NO: 80314 - protein, 36 aa, Artificial Sequence; identical to SEQ ID NO: 30802
  Cyclic GFR-binding peptide
  MOD_RES (5)..(6): Xaa is C or S

SEQ ID NO: 80315 - protein, 38 aa, Artificial Sequence; identical to SEQ ID NO: 30803
  Cyclic GFR-binding peptide
  MOD_RES (4)..(5)..(36)..(38): Xaa is C or S

SEQ ID NO: 80316 - protein, 41 aa, Artificial Sequence; identical to SEQ ID NO: 30806
  Cyclic GFR-binding peptide
  MOD_RES (6)..(7)..(39)..(41): Xaa is C or S

SEQ ID NO: 80317 - protein, 37 aa, Artificial Sequence; identical to SEQ ID NO: 30813
  Cyclic GFR-binding peptide
  MOD_RES (3)..(37): Xaa is C or S

SEQ ID NO: 80318 - protein, 28 aa, Artificial Sequence
  Cyclic GFR-binding peptide
  MOD_RES (27)..(27): Xaa is C or S
RSVKMAKVDENEKVVKEVQVDMVVEGXG

SEQ ID NO: 80319 - protein, 37 aa, Artificial Sequence; identical to SEQ ID NO: 30814
  Cyclic GFR-binding peptide
  MOD_RES (2)..(3)..(34)..(36): Xaa is C or S

SEQ ID NO: 80320 - protein, 33 aa, Artificial Sequence
  Cyclic GFR-binding peptide
  MOD_RES (6)..(7): Xaa is C or S
ASAAPXXVPQALSNITIQIMVGRKPKVIGEMSM

SEQ ID NO: 80321 - protein, 36 aa, Artificial Sequence; identical to SEQ ID NO: 30816
  Cyclic GFR-binding peptide
  MOD_RES (5)..(6): Xaa is C or S

SEQ ID NO: 80322 - protein, 29 aa, Artificial Sequence
  Cyclic GFR-binding peptide
HEPLTVLYYEYVRKKPKLEQLSNRLEEHL

SEQ ID NO: 80323 - protein, 37 aa, Artificial Sequence; identical to SEQ ID NO: 30820
  Cyclic GFR-binding peptide
  MOD_RES (4)..(5)..(37): Xaa is C or S

SEQ ID NO: 80324 - protein, 30 aa, Artificial Sequence
  Cyclic GFR-binding peptide
  MOD_RES (2)..(3): Xaa is C or S
PXXAPTKLSNITVQIMDDSSNVIIGEMSNM

SEQ ID NO: 80325 - protein, 25 aa, Artificial Sequence
  Cyclic GFR-binding peptide
VPQALRPVQIRKIVGRKPKVKKATV

SEQ ID NO: 80326 - protein, 35 aa, Artificial Sequence
  Cyclic GFR-binding peptide
  MOD_RES (6)..(7): Xaa is C or S
ASASPXXVSQDLSNITIQIMIGKTPKIIGEMSMIV

SEQ ID NO: 80327 - protein, 33 aa, Artificial Sequence
  Cyclic GFR-binding peptide
  MOD_RES (4)..(5): Xaa is C or S
PKAXXVPTELRSVKMAKVDEYDKVVKEVQVEMV

SEQ ID NO: 80328 - protein, 34 aa, Artificial Sequence; identical to SEQ ID NO: 30826
  Cyclic GFR-binding peptide
  MOD_RES (31)..(33): Xaa is C or S

SEQ ID NO: 80329 - protein, 35 aa, Artificial Sequence
  Cyclic GFR-binding peptide
  MOD_RES (5)..(6): Xaa is C or S
VPKPXXAPTKLSNITVQIMDDSSNVIIGEMSNMVV

SEQ ID NO: 80330 - protein, 33 aa, Artificial Sequence
  Cyclic GFR-binding peptide
  MOD_RES (5)..(5): Xaa is C or S
TKPTXAPTKLSNITVQIMDDSSNVIIGEMSNMV

SEQ ID NO: 80331 - protein, 23 aa, Artificial Sequence
  Cyclic GFR-binding peptide
KLRSVKVAKVDDSSNVIKEVQVN

SEQ ID NO: 80332 - protein, 27 aa, Artificial Sequence
  Cyclic GFR-binding peptide
  MOD_RES (1)..(2): Xaa is C or S
XXVPTELSNITMQIMDEYDKVVIGEMS

SEQ ID NO: 80333 - protein, 41 aa, Artificial Sequence; identical to SEQ ID NO: 30832
  Cyclic GFR-binding peptide
  MOD_RES (6)..(7)..(39)..(41): Xaa is C or S

SEQ ID NO: 80334 - protein, 26 aa, Artificial Sequence
  Cyclic GFR-binding peptide
APTKLRPVQVRKIDDSSNVIKKATVN

SEQ ID NO: 80335 - protein, 26 aa, Artificial Sequence
  Cyclic GFR-binding peptide
LRPVQIRKIVGRKPKVKKATVMIVRS

SEQ ID NO: 80336 - protein, 26 aa, Artificial Sequence
  Cyclic GFR-binding peptide
  MOD_RES (1)..(1): Xaa is C or S
XVPTELSNITMQIMDEYDKVVIGEMS

SEQ ID NO: 80337 - protein, 25 aa, Artificial Sequence
  Cyclic GFR-binding peptide
HHEPLTVLYYEYVRKKPKLEQLSNR

SEQ ID NO: 80338 - protein, 41 aa, Artificial Sequence; identical to SEQ ID NO: 30836
  Cyclic GFR-binding peptide
  MOD_RES (1)..(38)..(40): Xaa is C or S

SEQ ID NO: 80339 - protein, 36 aa, Artificial Sequence; identical to SEQ ID NO: 30839
  Cyclic GFR-binding peptide
  MOD_RES (3)..(4)..(36): Xaa is C or S

SEQ ID NO: 80340 - protein, 27 aa, Artificial Sequence
  Cyclic GFR-binding peptide
VPTEEEPLTMLYYRIKPHQGQHEQLSN

SEQ ID NO: 80341 - protein, 30 aa, Artificial Sequence
  Cyclic GFR-binding peptide
  MOD_RES (4)..(5): Xaa is C or S
PKAXXVPTELSNITMQIMDENEKVVIGEMS

SEQ ID NO: 80342 - protein, 28 aa, Artificial Sequence
  Cyclic GFR-binding peptide
  MOD_RES (1)..(1): Xaa is C or S
XVPTEEEPLTMLYYRIKPHQGQHEQLSN

SEQ ID NO: 80343 - protein, 37 aa, Artificial Sequence; identical to SEQ ID NO: 30840
  Cyclic GFR-binding peptide
  MOD_RES (4)..(5)..(37): Xaa is C or S

SEQ ID NO: 80344 - protein, 37 aa, Artificial Sequence; identical to SEQ ID NO: 30841
  Cyclic GFR-binding peptide
  MOD_RES (2)..(3)..(35)..(37): Xaa is C or S

SEQ ID NO: 80345 - protein, 30 aa, Artificial Sequence
  Cyclic GFR-binding peptide
  MOD_RES (4)..(5): Xaa is C or S
AAPXXVPQALSNITIQIMVGRKPKVIGEMS

SEQ ID NO: 80346 - protein, 33 aa, Artificial Sequence; identical to SEQ ID NO: 30847
  Cyclic GFR-binding peptide
  MOD_RES (32)..(32): Xaa is C or S

SEQ ID NO: 80347 - protein, 34 aa, Artificial Sequence; identical to SEQ ID NO: 30852
  Cyclic GFR-binding peptide

SEQ ID NO: 80348 - protein, 38 aa, Artificial Sequence; identical to SEQ ID NO: 30853
  Cyclic GFR-binding peptide
  MOD_RES (6)..(7)..(38): Xaa is C or S

SEQ ID NO: 80349 - protein, 28 aa, Artificial Sequence
  Cyclic GFR-binding peptide
  MOD_RES (1)..(2): Xaa is C or S
XXVPTELRPVQMRKIDENEKVVKKATVD

SEQ ID NO: 80350 - protein, 30 aa, Artificial Sequence
  Cyclic GFR-binding peptide
  MOD_RES (3)..(4): Xaa is C or S
KAXXVPTELRSVKMAKVDENEKVVKEVQVD

SEQ ID NO: 80351 - protein, 31 aa, Artificial Sequence
  Cyclic GFR-binding peptide
  MOD_RES (4)..(5): Xaa is C or S
ASPXXVPQDLRSVKIAKVVGRTPKVKEVQVM

SEQ ID NO: 80352 - protein, 28 aa, Artificial Sequence
  Cyclic GFR-binding peptide
VPTEEEPLPMVYYRIKPHQGQHEQLSNF

SEQ ID NO: 80353 - protein, 29 aa, Artificial Sequence
  Cyclic GFR-binding peptide
  MOD_RES (3)..(4): Xaa is C or S
KAXXVPTELRPVQMRKIDENEKVVKKATV

SEQ ID NO: 80354 - protein, 27 aa, Artificial Sequence
  Cyclic GFR-binding peptide
QVQLEPLTVLYYEIVRKKPIFEQLSNT

SEQ ID NO: 80355 - protein, 41 aa, Artificial Sequence; identical to SEQ ID NO: 30858
  Cyclic GFR-binding peptide
  MOD_RES (2)..(39)..(41): Xaa is C or S

SEQ ID NO: 80356 - protein, 20 aa, Artificial Sequence
  Cyclic GFR-binding peptide
RSVKIAKVIGKTPKIKEVQV

SEQ ID NO: 80357 - protein, 33 aa, Artificial Sequence
  Cyclic GFR-binding peptide
  MOD_RES (31)..(33): Xaa is C or S
EEEPLTMLYYRIKPHQGQHEQLSNFLQHNKXEX

SEQ ID NO: 80358 - protein, 37 aa, Artificial Sequence; identical to SEQ ID NO: 30860
  Cyclic GFR-binding peptide
  MOD_RES (3)..(4)..(35)..(37): Xaa is C or S

SEQ ID NO: 80359 - protein, 23 aa, Artificial Sequence
  Cyclic GFR-binding peptide
DLRPVQIRKIIGKTPKIKKATVM

SEQ ID NO: 80360 - protein, 40 aa, Artificial Sequence; identical to SEQ ID NO: 30866
  Cyclic GFR-binding peptide
  MOD_RES (4)..(5)..(37)..(39): Xaa is C or S

SEQ ID NO: 80361 - protein, 34 aa, Artificial Sequence
  Cyclic GFR-binding peptide
  MOD_RES (31)..(33): Xaa is C or S
EEEPLTMLYYRIKPHQGQHEQLSNFLQHNKXEXR

SEQ ID NO: 80362 - protein, 36 aa, Artificial Sequence; identical to SEQ ID NO: 30870
  Cyclic GFR-binding peptide
  MOD_RES (1)..(33)..(35): Xaa is C or S

SEQ ID NO: 80363 - protein, 30 aa, Artificial Sequence
  Cyclic GFR-binding peptide
PTELRPVQMRKIDENEKVVKKATVDMVVEG

SEQ ID NO: 80364 - protein, 32 aa, Artificial Sequence; identical to SEQ ID NO: 30872
  Cyclic GFR-binding peptide

SEQ ID NO: 80365 - protein, 29 aa, Artificial Sequence
  Cyclic GFR-binding peptide
  MOD_RES (26)..(28): Xaa is C or S
RSVKIAKVVGRTPKVKEVQVMVVKSXKXS

SEQ ID NO: 80366 - protein, 30 aa, Artificial Sequence
  Cyclic GFR-binding peptide
  MOD_RES (28)..(30): Xaa is C or S
LRPVQMRKIDEYDKVVKKATVEMVVEGXGX

SEQ ID NO: 80367 - protein, 40 aa, Artificial Sequence; identical to SEQ ID NO: 30877
  Cyclic GFR-binding peptide
  MOD_RES (3)..(37)..(39): Xaa is C or S

SEQ ID NO: 80368 - protein, 26 aa, Artificial Sequence
  Cyclic GFR-binding peptide
HEPLTVLYYEYVRKKPKLEQLSNRLE

SEQ ID NO: 80369 - protein, 32 aa, Artificial Sequence
  Cyclic GFR-binding peptide
  MOD_RES (29)..(31): Xaa is C or S
ELSNITMQIMDEYDKVVIGEMSEMVVEGXGXR

SEQ ID NO: 80370 - protein, 38 aa, Artificial Sequence; identical to SEQ ID NO: 30883
  Cyclic GFR-binding peptide
  MOD_RES (4)..(5)..(36)..(38): Xaa is C or S

SEQ ID NO: 80371 - protein, 32 aa, Artificial Sequence
  Cyclic GFR-binding peptide
  MOD_RES (29)..(31): Xaa is C or S
QALRPVQIRKIVGRKPKVKKATVMIVRSXKXS

SEQ ID NO: 80372 - protein, 44 aa, Artificial Sequence; identical to SEQ ID NO: 30886
  Cyclic GFR-binding peptide
  MOD_RES (7)..(41)..(43): Xaa is C or S

SEQ ID NO: 80373 - protein, 33 aa, Artificial Sequence; identical to SEQ ID NO: 30888
  Cyclic GFR-binding peptide
  MOD_RES (2)..(2): Xaa is C or S

SEQ ID NO: 80374 - protein, 31 aa, Artificial Sequence
  Cyclic GFR-binding peptide
VPTEEEPLTMLYYRIKPHQGQHEQLSNFLQH

SEQ ID NO: 80375 - protein, 30 aa, Artificial Sequence
  Cyclic GFR-binding peptide
  MOD_RES (27)..(29): Xaa is C or S
LSNITIQIMVGRTPKVIGEMSMVVKSXKXS

SEQ ID NO: 80376 - protein, 36 aa, Artificial Sequence
  Cyclic GFR-binding peptide
  MOD_RES (34)..(36): Xaa is C or S
RVHHEPLPVVYYEYVRKKPKLEQLSNRLEEHLEXAX

SEQ ID NO: 80377 - protein, 30 aa, Artificial Sequence
  Cyclic GFR-binding peptide
  MOD_RES (4)..(5): Xaa is C or S
PKPXXAPTQLSNITVQIMDDSSNVIIGEMS

SEQ ID NO: 80378 - protein, 21 aa, Artificial Sequence
  Cyclic GFR-binding peptide
RSVKIAKVIGKTPKIKEVQVM

SEQ ID NO: 80379 - protein, 26 aa, Artificial Sequence
  Cyclic GFR-binding peptide
PTKLRPVQVRKIDDSSNVIKKATVNM

SEQ ID NO: 80380 - protein, 29 aa, Artificial Sequence
  Cyclic GFR-binding peptide
VSQDLRSVKIAKVIGKTPKIKEVQVMIVK

SEQ ID NO: 80381 - protein, 37 aa, Artificial Sequence; identical to SEQ ID NO: 30900
  Cyclic GFR-binding peptide
  MOD_RES (6)..(7): Xaa is C or S

SEQ ID NO: 80382 - protein, 36 aa, Artificial Sequence; identical to SEQ ID NO: 30901
  Cyclic GFR-binding peptide
  MOD_RES (3)..(3): Xaa is C or S

SEQ ID NO: 80383 - protein, 25 aa, Artificial Sequence
  Cyclic GFR-binding peptide
TELSNITMQIMDENEKVVIGEMSDM

SEQ ID NO: 80384 - protein, 27 aa, Artificial Sequence
  Cyclic GFR-binding peptide
EEEPLPMVYYRIKPHQGQHEQLSNFLQ

SEQ ID NO: 80385 - protein, 32 aa, Artificial Sequence
  Cyclic GFR-binding peptide
  MOD_RES (3)..(3): Xaa is C or S
PTXAPTKLSNITVQIMDDSSNVIIGEMSNMVV

SEQ ID NO: 80386 - protein, 26 aa, Artificial Sequence
  Cyclic GFR-binding peptide
EPLPMVYYRIKPHQGQHEQLSNFLQH

SEQ ID NO: 80387 - protein, 21 aa, Artificial Sequence
  Cyclic GFR-binding peptide
RSVKVAKVDDSSNVIKEVQVN

SEQ ID NO: 80388 - protein, 21 aa, Artificial Sequence
  Cyclic GFR-binding peptide
LRSVKIAKVIGKTPKIKEVQV

SEQ ID NO: 80389 - protein, 29 aa, Artificial Sequence
  Cyclic GFR-binding peptide
TELRPVQMRKIDEYDKVVKKATVEMVVEG

SEQ ID NO: 80390 - protein, 33 aa, Artificial Sequence
  Cyclic GFR-binding peptide
  MOD_RES (6)..(7): Xaa is C or S
SIPKAXXVPTELSNITMQIMDEYDKVVIGEMSE

SEQ ID NO: 80391 - protein, 22 aa, Artificial Sequence
  Cyclic GFR-binding peptide
LRPVQMRKIDEYDKVVKKATVE

SEQ ID NO: 80392 - protein, 25 aa, Artificial Sequence
  Cyclic GFR-binding peptide
EPLPVVYYEYVRKKPKLEQLSNRLE

SEQ ID NO: 80393 - protein, 37 aa, Artificial Sequence; identical to SEQ ID NO: 30912
  Cyclic GFR-binding peptide
  MOD_RES (3)..(4)..(36): Xaa is C or S

SEQ ID NO: 80394 - protein, 35 aa, Artificial Sequence; identical to SEQ ID NO: 30913
  Cyclic GFR-binding peptide
  MOD_RES (4)..(5): Xaa is C or S

SEQ ID NO: 80395 - protein, 30 aa, Artificial Sequence
  Cyclic GFR-binding peptide
  MOD_RES (1)..(1): Xaa is C or S
XQPSRVHHEPLTVLYYEYVRKKPKLEQLSN

SEQ ID NO: 80396 - protein, 31 aa, Artificial Sequence
  Cyclic GFR-binding peptide
HHEPLTVLYYEYVRKKPKLEQLSNRLEEHLE

SEQ ID NO: 80397 - protein, 28 aa, Artificial Sequence
  Cyclic GFR-binding peptide
  MOD_RES (2)..(3): Xaa is C or S
AXXVPTELSNITMQIMDEYDKVVIGEMS

SEQ ID NO: 80398 - protein, 33 aa, Artificial Sequence
  Cyclic GFR-binding peptide
  MOD_RES (30)..(32): Xaa is C or S
EPLPVVYYEIVRKKPIFEQLSNTLEDHLAXKXE

SEQ ID NO: 80399 - protein, 34 aa, Artificial Sequence
  Cyclic GFR-binding peptide
  MOD_RES (5)..(6): Xaa is C or S
SASPXXVPQDLRSVKIAKVVGRTPKVKEVQVMVV

SEQ ID NO: 80400 - protein, 41 aa, Artificial Sequence; identical to SEQ ID NO: 30929
  Cyclic GFR-binding peptide
  MOD_RES (5)..(6)..(38)..(40): Xaa is C or S

SEQ ID NO: 80401 - protein, 34 aa, Artificial Sequence; identical to SEQ ID NO: 30930
  Cyclic GFR-binding peptide

SEQ ID NO: 80402 - protein, 28 aa, Artificial Sequence
  Cyclic GFR-binding peptide
SRVHHEPLTVLYYEYVRKKPKLEQLSNR

SEQ ID NO: 80403 - protein, 30 aa, Artificial Sequence; identical to SEQ ID NO: 30934
  Cyclic GFR-binding peptide

SEQ ID NO: 80404 - protein, 31 aa, Artificial Sequence
  Cyclic GFR-binding peptide
  MOD_RES (29)..(31): Xaa is C or S
QLRPVQVRKIDDSSNVIKKATVNMVVRAXGX

SEQ ID NO: 80405 - protein, 40 aa, Artificial Sequence; identical to SEQ ID NO: 30936
  Cyclic GFR-binding peptide
  MOD_RES (4)..(4): Xaa is C or S

SEQ ID NO: 80406 - protein, 29 aa, Artificial Sequence
  Cyclic GFR-binding peptide
  MOD_RES (4)..(4): Xaa is C or S
KPTXAPTKLRSVKVAKVDDSSNVIKEVQV

SEQ ID NO: 80407 - protein, 34 aa, Artificial Sequence; identical to SEQ ID NO: 30939
  Cyclic GFR-binding peptide
  MOD_RES (31)..(33): Xaa is C or S

SEQ ID NO: 80408 - protein, 36 aa, Artificial Sequence; identical to SEQ ID NO: 30941
  Cyclic GFR-binding peptide
  MOD_RES (3)..(4)..(36): Xaa is C or S

SEQ ID NO: 80409 - protein, 26 aa, Artificial Sequence
  Cyclic GFR-binding peptide
LRSVKVAKVDDSSNVIKEVQVNMVVR

SEQ ID NO: 80410 - protein, 29 aa, Artificial Sequence
  Cyclic GFR-binding peptide
EEPLTMLYYRIKPHQGQHEQLSNFLQHNK

SEQ ID NO: 80411 - protein, 30 aa, Artificial Sequence
  Cyclic GFR-binding peptide
  MOD_RES (28)..(30): Xaa is C or S
DLSNITIQIMVGRTPKVIGEMSMVVKSXKX

SEQ ID NO: 80412 - protein, 30 aa, Artificial Sequence
  Cyclic GFR-binding peptide
  MOD_RES (3)..(4): Xaa is C or S
SPXXVSQDLSNITIQIMIGKTPKIIGEMSM

SEQ ID NO: 80413 - protein, 23 aa, Artificial Sequence
  Cyclic GFR-binding peptide
EEPLTMLYYRIKPHQGQHEQLSN

SEQ ID NO: 80414 - protein, 27 aa, Artificial Sequence
  Cyclic GFR-binding peptide
LEPLPVVYYEIVRKKPIFEQLSNTLED

SEQ ID NO: 80415 - protein, 34 aa, Artificial Sequence; identical to SEQ ID NO: 30953
  Cyclic GFR-binding peptide
  MOD_RES (1)..(32)..(34): Xaa is C or S

SEQ ID NO: 80416 - protein, 35 aa, Artificial Sequence
  Cyclic GFR-binding peptide
  MOD_RES (5)..(6): Xaa is C or S
IPKAXXVPTELRPVQMRKIDEYDKVVKKATVEMVV

SEQ ID NO: 80417 - protein, 23 aa, Artificial Sequence
  Cyclic GFR-binding peptide
ELSNITMQIMDENEKVVIGEMSD

SEQ ID NO: 80418 - protein, 33 aa, Artificial Sequence
  Cyclic GFR-binding peptide
  MOD_RES (5)..(5): Xaa is C or S
TKPTXAPTKLRSVKVAKVDDSSNVIKEVQVNMV

SEQ ID NO: 80419 - protein, 35 aa, Artificial Sequence; identical to SEQ ID NO: 30956
  Cyclic GFR-binding peptide
  MOD_RES (2)..(2): Xaa is C or S

SEQ ID NO: 80420 - protein, 29 aa, Artificial Sequence
  Cyclic GFR-binding peptide
  MOD_RES (28)..(28): Xaa is C or S
ALSNITIQIMVGRKPKVIGEMSMIVRSXK

SEQ ID NO: 80421 - protein, 28 aa, Artificial Sequence
  Cyclic GFR-binding peptide
  MOD_RES (1)..(1): Xaa is C or S
XVPQALRSVKIAKVVGRKPKVKEVQVMI

SEQ ID NO: 80422 - protein, 37 aa, Artificial Sequence; identical to SEQ ID NO: 30962
  Cyclic GFR-binding peptide
  MOD_RES (3)..(35)..(37): Xaa is C or S

SEQ ID NO: 80423 - protein, 25 aa, Artificial Sequence
  Cyclic GFR-binding peptide
HEPLPVVYYEYVRKKPKLEQLSNRL

SEQ ID NO: 80424 - protein, 28 aa, Artificial Sequence
  Cyclic GFR-binding peptide
ELRSVKMAKVDEYDKVVKEVQVEMVVEG

SEQ ID NO: 80425 - protein, 24 aa, Artificial Sequence
  Cyclic GFR-binding peptide
PQALRPVQIRKIVGRKPKVKKATV

SEQ ID NO: 80426 - protein, 38 aa, Artificial Sequence
  Cyclic GFR-binding peptide
  MOD_RES (5)..(5): Xaa is C or S
RNVQXRPTQVQLEPLTVLYYEIVRKKPIFEQLSNTLED

SEQ ID NO: 80427 - protein, 31 aa, Artificial Sequence
  Cyclic GFR-binding peptide
  MOD_RES (1)..(2): Xaa is C or S
XXVPTELRPVQMRKIDEYDKVVKKATVEMVV

SEQ ID NO: 80428 - protein, 34 aa, Artificial Sequence; identical to SEQ ID NO: 30967
  Cyclic GFR-binding peptide
  MOD_RES (1)..(2)..(34): Xaa is C or S

SEQ ID NO: 80429 - protein, 34 aa, Artificial Sequence; identical to SEQ ID NO: 30968
  Cyclic GFR-binding peptide
  MOD_RES (32)..(34): Xaa is C or S

SEQ ID NO: 80430 - protein, 32 aa, Artificial Sequence
  Cyclic GFR-binding peptide
  MOD_RES (5)..(6): Xaa is C or S
VPKPXXAPTQLSNITVQIMDDSSNVIIGEMSN

SEQ ID NO: 80431 - protein, 30 aa, Artificial Sequence
  Cyclic GFR-binding peptide
QLEPLTVLYYEIVRKKPIFEQLSNTLEDHL

SEQ ID NO: 80432 - protein, 31 aa, Artificial Sequence
  Cyclic GFR-binding peptide
  MOD_RES (2)..(3): Xaa is C or S
PXXAPTKLRPVQVRKIDDSSNVIKKATVNMV

SEQ ID NO: 80433 - protein, 24 aa, Artificial Sequence
  Cyclic GFR-binding peptide
PTELRSVKMAKVDEYDKVVKEVQV

SEQ ID NO: 80434 - protein, 29 aa, Artificial Sequence
  Cyclic GFR-binding peptide
  MOD_RES (3)..(4): Xaa is C or S
APXXVPQALRPVQIRKIVGRKPKVKKATV

SEQ ID NO: 80435 - protein, 29 aa, Artificial Sequence
  Cyclic GFR-binding peptide
  MOD_RES (1)..(2): Xaa is C or S
XXVPQALRSVKIAKVVGRKPKVKEVQVMI

SEQ ID NO: 80436 - protein, 27 aa, Artificial Sequence
  Cyclic GFR-binding peptide
TEEEPLTMLYYRIKPHQGQHEQLSNFL

SEQ ID NO: 80437 - protein, 40 aa, Artificial Sequence; identical to SEQ ID NO: 30972
  Cyclic GFR-binding peptide
  MOD_RES (6)..(7)..(38)..(40): Xaa is C or S

SEQ ID NO: 80438 - protein, 38 aa, Artificial Sequence; identical to SEQ ID NO: 30973
  Cyclic GFR-binding peptide
  MOD_RES (4)..(4): Xaa is C or S

SEQ ID NO: 80439 - protein, 32 aa, Artificial Sequence
  Cyclic GFR-binding peptide
  MOD_RES (29)..(31): Xaa is C or S
QDLRSVKIAKVIGKTPKIKEVQVMIVKSXKXS

SEQ ID NO: 80440 - protein, 30 aa, Artificial Sequence
  Cyclic GFR-binding peptide
  MOD_RES (4)..(4): Xaa is C or S
KPTXAPTKLSNITVQIMDDSSNVIIGEMSN

SEQ ID NO: 80441 - protein, 25 aa, Artificial Sequence
  Cyclic GFR-binding peptide
LEPLPVVYYEIVRKKPIFEQLSNTL

SEQ ID NO: 80442 - protein, 32 aa, Artificial Sequence
  Cyclic GFR-binding peptide
  MOD_RES (4)..(5): Xaa is C or S
ASPXXVPQDLRSVKIAKVVGRTPKVKEVQVMV

SEQ ID NO: 80443 - protein, 31 aa, Artificial Sequence
  Cyclic GFR-binding peptide
  MOD_RES (31)..(31): Xaa is C or S
PTELSNITMQIMDENEKVVIGEMSDMVVEGX

SEQ ID NO: 80444 - protein, 34 aa, Artificial Sequence
  Cyclic GFR-binding peptide
  MOD_RES (6)..(6): Xaa is C or S
DEGLEXVPTEEEPLPMVYYRIKPHQGQHEQLSNF

SEQ ID NO: 80445 - protein, 35 aa, Artificial Sequence
  Cyclic GFR-binding peptide
  MOD_RES (7)..(7): Xaa is C or S
HVTKPTXAPTKLRSVKVAKVDDSSNVIKEVQVNMV

SEQ ID NO: 80446 - protein, 25 aa, Artificial Sequence
  Cyclic GFR-binding peptide
PTELRPVQMRKIDEYDKVVKKATVE

SEQ ID NO: 80447 - protein, 38 aa, Artificial Sequence; identical to SEQ ID NO: 30982
  Cyclic GFR-binding peptide
  MOD_RES (5)..(6)..(38): Xaa is C or S

SEQ ID NO: 80448 - protein, 35 aa, Artificial Sequence
  Cyclic GFR-binding peptide
  MOD_RES (5)..(6): Xaa is C or S
IPKAXXVPTELSNITMQIMDENEKVVIGEMSDMVV

SEQ ID NO: 80449 - protein, 37 aa, Artificial Sequence; identical to SEQ ID NO: 30986
  Cyclic GFR-binding peptide
  MOD_RES (5)..(6): Xaa is C or S

SEQ ID NO: 80450 - protein, 34 aa, Artificial Sequence; identical to SEQ ID NO: 30985
  Cyclic GFR-binding peptide
  MOD_RES (1)..(33): Xaa is C or S

SEQ ID NO: 80451 - protein, 34 aa, Artificial Sequence; identical to SEQ ID NO: 30990
  Cyclic GFR-binding peptide
  MOD_RES (1)..(33): Xaa is C or S

SEQ ID NO: 80452 - protein, 25 aa, Artificial Sequence
  Cyclic GFR-binding peptide
VPQALSNITIQIMVGRKPKVIGEMS

SEQ ID NO: 80453 - protein, 39 aa, Artificial Sequence; identical to SEQ ID NO: 30992
  Cyclic GFR-binding peptide
  MOD_RES (3)..(3): Xaa is C or S

SEQ ID NO: 80454 - protein, 34 aa, Artificial Sequence
  Cyclic GFR-binding peptide
  MOD_RES (31)..(33): Xaa is C or S
LEPLPVVYYEIVRKKPIFEQLSNTLEDHLAXKXE

SEQ ID NO: 80455 - protein, 35 aa, Artificial Sequence; identical to SEQ ID NO: 30995
  Cyclic GFR-binding peptide
  MOD_RES (3)..(4)..(35): Xaa is C or S

SEQ ID NO: 80456 - protein, 32 aa, Artificial Sequence
  Cyclic GFR-binding peptide
  MOD_RES (4)..(5): Xaa is C or S
ASPXXVSQDLRSVKIAKVIGKTPKIKEVQVMI

SEQ ID NO: 80457 - protein, 37 aa, Artificial Sequence; identical to SEQ ID NO: 30997
  Cyclic GFR-binding peptide
  MOD_RES (2)..(3)..(35)..(37): Xaa is C or S

SEQ ID NO: 80458 - protein, 42 aa, Artificial Sequence; identical to SEQ ID NO: 31000
  Cyclic GFR-binding peptide
  MOD_RES (7)..(39)..(41): Xaa is C or S

SEQ ID NO: 80459 - protein, 36 aa, Artificial Sequence; identical to SEQ ID NO: 31001
  Cyclic GFR-binding peptide
  MOD_RES (2)..(3)..(34)..(36): Xaa is C or S

SEQ ID NO: 80460 - protein, 35 aa, Artificial Sequence; identical to SEQ ID NO: 31006
  Cyclic GFR-binding peptide
  MOD_RES (2)..(3)..(34): Xaa is C or S

SEQ ID NO: 80461 - protein, 30 aa, Artificial Sequence; identical to SEQ ID NO: 31007
  Cyclic GFR-binding peptide

SEQ ID NO: 80462 - protein, 39 aa, Artificial Sequence; identical to SEQ ID NO: 31008
  Cyclic GFR-binding peptide
  MOD_RES (6)..(7)..(38): Xaa is C or S

SEQ ID NO: 80463 - protein, 26 aa, Artificial Sequence
  Cyclic GFR-binding peptide
LEPLTVLYYEIVRKKPIFEQLSNTLE

SEQ ID NO: 80464 - protein, 27 aa, Artificial Sequence
  Cyclic GFR-binding peptide
VQLEPLPVVYYEIVRKKPIFEQLSNTL

SEQ ID NO: 80465 - protein, 37 aa, Artificial Sequence; identical to SEQ ID NO: 31014
  Cyclic GFR-binding peptide
  MOD_RES (3)..(3): Xaa is C or S

SEQ ID NO: 80466 - protein, 22 aa, Artificial Sequence
  Cyclic GFR-binding peptide
RSVKMAKVDENEKVVKEVQVDM

SEQ ID NO: 80467 - protein, 30 aa, Artificial Sequence
  Cyclic GFR-binding peptide
  MOD_RES (2)..(3): Xaa is C or S
AXXVPTELSNITMQIMDENEKVVIGEMSDM

SEQ ID NO: 80468 - protein, 28 aa, Artificial Sequence
  Cyclic GFR-binding peptide
  MOD_RES (27)..(27): Xaa is C or S
LSNITIQIMVGRKPKVIGEMSMIVRSXK

SEQ ID NO: 80469 - protein, 34 aa, Artificial Sequence; identical to SEQ ID NO: 31016
  Cyclic GFR-binding peptide

SEQ ID NO: 80470 - protein, 34 aa, Artificial Sequence; identical to SEQ ID NO: 31017
  Cyclic GFR-binding peptide
  MOD_RES (3)..(4): Xaa is C or S

SEQ ID NO: 80471 - protein, 36 aa, Artificial Sequence; identical to SEQ ID NO: 31022
  Cyclic GFR-binding peptide
  MOD_RES (3)..(4)..(36): Xaa is C or S

SEQ ID NO: 80472 - protein, 34 aa, Artificial Sequence; identical to SEQ ID NO: 31023
  Cyclic GFR-binding peptide
  MOD_RES (2)..(3)..(34): Xaa is C or S

SEQ ID NO: 80473 - protein, 31 aa, Artificial Sequence
  Cyclic GFR-binding peptide
  MOD_RES (30)..(30): Xaa is C or S
EPLPVVYYEIVRKKPIFEQLSNTLEDHLAXK

SEQ ID NO: 80474 - protein, 30 aa, Artificial Sequence
  Cyclic GFR-binding peptide
  MOD_RES (27)..(29): Xaa is C or S
SNITMQIMDEYDKVVIGEMSEMVVEGXGXR

SEQ ID NO: 80475 - protein, 32 aa, Artificial Sequence
  Cyclic GFR-binding peptide
PTQVQLEPLTVLYYEIVRKKPIFEQLSNTLED

SEQ ID NO: 80476 - protein, 29 aa, Artificial Sequence
  Cyclic GFR-binding peptide
TELSNITMQIMDENEKVVIGEMSDMVVEG

SEQ ID NO: 80477 - protein, 38 aa, Artificial Sequence; identical to SEQ ID NO: 31033
  Cyclic GFR-binding peptide
  MOD_RES (4)..(5)..(36)..(38): Xaa is C or S

SEQ ID NO: 80478 - protein, 23 aa, Artificial Sequence
  Cyclic GFR-binding peptide
RSVKIAKVVGRKPKVKEVQVMIV

SEQ ID NO: 80479 - protein, 31 aa, Artificial Sequence
  Cyclic GFR-binding peptide
  MOD_RES (2)..(3): Xaa is C or S
AXXVPTELRPVQMRKIDENEKVVKKATVDMV

SEQ ID NO: 80480 - protein, 36 aa, Artificial Sequence; identical to SEQ ID NO: 31036
  Cyclic GFR-binding peptide
  MOD_RES (1)..(2)..(34)..(36): Xaa is C or S

SEQ ID NO: 80481 - protein, 26 aa, Artificial Sequence
  Cyclic GFR-binding peptide
LRSVKIAKVVGRKPKVKEVQVMIVRS

SEQ ID NO: 80482 - protein, 33 aa, Artificial Sequence; identical to SEQ ID NO: 31037
  Cyclic GFR-binding peptide
  MOD_RES (1)..(33): Xaa is C or S

SEQ ID NO: 80483 - protein, 32 aa, Artificial Sequence
  Cyclic GFR-binding peptide
  MOD_RES (31)..(31): Xaa is C or S
PTQLSNITVQIMDDSSNVIIGEMSNMVVRAXG

SEQ ID NO: 80484 - protein, 26 aa, Artificial Sequence
  Cyclic GFR-binding peptide
TKLSNITVQIMDDSSNVIIGEMSNMV

SEQ ID NO: 80485 - protein, 33 aa, Artificial Sequence
  Cyclic GFR-binding peptide
  MOD_RES (6)..(7): Xaa is C or S
KIPKAXXVPTELRPVQMRKIDENEKVVKKATVD

SEQ ID NO: 80486 - protein, 33 aa, Artificial Sequence
  Cyclic GFR-binding peptide
  MOD_RES (31)..(33): Xaa is C or S
PTELRSVKMAKVDEYDKVVKEVQVEMVVEGXGX

SEQ ID NO: 80487 - protein, 39 aa, Artificial Sequence; identical to SEQ ID NO: 31042
  Cyclic GFR-binding peptide
  MOD_RES (6)..(7)..(38): Xaa is C or S

SEQ ID NO: 80488 - protein, 33 aa, Artificial Sequence
  Cyclic GFR-binding peptide
  MOD_RES (33)..(33): Xaa is C or S
PTEEEPLPMVYYRIKPHQGQHEQLSNFLQHNKX

SEQ ID NO: 80489 - protein, 27 aa, Artificial Sequence
  Cyclic GFR-binding peptide
EPLPVVYYEYVRKKPKLEQLSNRLEEH

SEQ ID NO: 80490 - protein, 31 aa, Artificial Sequence
  Cyclic GFR-binding peptide
  MOD_RES (28)..(30): Xaa is C or S
DLRSVKIAKVVGRTPKVKEVQVMVVKSXKXS

SEQ ID NO: 80491 - protein, 33 aa, Artificial Sequence
  Cyclic GFR-binding peptide
  MOD_RES (32)..(32): Xaa is C or S
TEEEPLTMLYYRIKPHQGQHEQLSNFLQHNKXE

SEQ ID NO: 80492 - protein, 36 aa, Artificial Sequence; identical to SEQ ID NO: 31052
  Cyclic GFR-binding peptide
  MOD_RES (1)..(33)..(35): Xaa is C or S

SEQ ID NO: 80493 - protein, 21 aa, Artificial Sequence
  Cyclic GFR-binding peptide
RSVKMAKVDENEKVVKEVQVD

SEQ ID NO: 80494 - protein, 22 aa, Artificial Sequence
  Cyclic GFR-binding peptide
EPLTVLYYEIVRKKPIFEQLSN

SEQ ID NO: 80495 - protein, 32 aa, Artificial Sequence
  Cyclic GFR-binding peptide
  MOD_RES (1)..(1): Xaa is C or S
XQPSRVHHEPLPVVYYEYVRKKPKLEQLSNRL

SEQ ID NO: 80496 - protein, 30 aa, Artificial Sequence
  Cyclic GFR-binding peptide
  MOD_RES (1)..(2): Xaa is C or S
XXVPQDLSNITIQIMVGRTPKVIGEMSMVV

SEQ ID NO: 80497 - protein, 31 aa, Artificial Sequence
  Cyclic GFR-binding peptide
QPSRVHHEPLTVLYYEYVRKKPKLEQLSNRL

SEQ ID NO: 80498 - protein, 28 aa, Artificial Sequence
  Cyclic GFR-binding peptide
  MOD_RES (1)..(2): Xaa is C or S
XXVPTELRSVKMAKVDENEKVVKEVQVD

SEQ ID NO: 80499 - protein, 33 aa, Artificial Sequence
  Cyclic GFR-binding peptide
  MOD_RES (30)..(32): Xaa is C or S
EPLTVLYYEYVRKKPKLEQLSNRLEEHLEXAXA

SEQ ID NO: 80500 - protein, 40 aa, Artificial Sequence; identical to SEQ ID NO: 31062
  Cyclic GFR-binding peptide
  MOD_RES (1)..(38)..(40): Xaa is C or S

SEQ ID NO: 80501 - protein, 35 aa, Artificial Sequence; identical to SEQ ID NO: 31064
  Cyclic GFR-binding peptide
  MOD_RES (32)..(34): Xaa is C or S

SEQ ID NO: 80502 - protein, 41 aa, Artificial Sequence; identical to SEQ ID NO: 31068
  Cyclic GFR-binding peptide
  MOD_RES (6)..(7)..(39)..(41): Xaa is C or S

SEQ ID NO: 80503 - protein, 28 aa, Artificial Sequence
  Cyclic GFR-binding peptide
VPQALRSVKIAKVVGRKPKVKEVQVMIV

SEQ ID NO: 80504 - protein, 37 aa, Artificial Sequence; identical to SEQ ID NO: 31070
  Cyclic GFR-binding peptide
  MOD_RES (2)..(34)..(36): Xaa is C or S

SEQ ID NO: 80505 - protein, 35 aa, Artificial Sequence
  Cyclic GFR-binding peptide
  MOD_RES (6)..(7): Xaa is C or S
YVPKPXXAPTKLRSVKVAKVDDSSNVIKEVQVNMV

SEQ ID NO: 80506 - protein, 32 aa, Artificial Sequence
  Cyclic GFR-binding peptide
  MOD_RES (31)..(31): Xaa is C or S
PTELRPVQMRKIDEYDKVVKKATVEMVVEGXG

SEQ ID NO: 80507 - protein, 35 aa, Artificial Sequence
  Cyclic GFR-binding peptide
  MOD_RES (2)..(2): Xaa is C or S
KXQPSRVHHEPLTVLYYEYVRKKPKLEQLSNRLEE

SEQ ID NO: 80508 - protein, 31 aa, Artificial Sequence
  Cyclic GFR-binding peptide
  MOD_RES (29)..(31): Xaa is C or S
EPLTMLYYRIKPHQGQHEQLSNFLQHNKXEX

SEQ ID NO: 80509 - protein, 32 aa, Artificial Sequence
  Cyclic GFR-binding peptide
  MOD_RES (29)..(31): Xaa is C or S
QDLSNITIQIMVGRTPKVIGEMSMVVKSXKXS

SEQ ID NO: 80510 - protein, 30 aa, Artificial Sequence
  Cyclic GFR-binding peptide
  MOD_RES (28)..(30): Xaa is C or S
ALRSVKIAKVVGRKPKVKEVQVMIVRSXKX

SEQ ID NO: 80511 - protein, 38 aa, Artificial Sequence; identical to SEQ ID NO: 31078
  Cyclic GFR-binding peptide
  MOD_RES (5)..(5): Xaa is C or S

SEQ ID NO: 80512 - protein, 36 aa, Artificial Sequence; identical to SEQ ID NO: 31080
  Cyclic GFR-binding peptide
  MOD_RES (2)..(2): Xaa is C or S

SEQ ID NO: 80513 - protein, 30 aa, Artificial Sequence
  Cyclic GFR-binding peptide
  MOD_RES (4)..(5): Xaa is C or S
AAPXXVPQALRSVKIAKVVGRKPKVKEVQV

SEQ ID NO: 80514 - protein, 27 aa, Artificial Sequence
  Cyclic GFR-binding peptide
  MOD_RES (1)..(2): Xaa is C or S
XXVPTELRSVKMAKVDEYDKVVKEVQV

SEQ ID NO: 80515 - protein, 25 aa, Artificial Sequence
  Cyclic GFR-binding peptide
PQDLSNITIQIMVGRTPKVIGEMSM

SEQ ID NO: 80516 - protein, 28 aa, Artificial Sequence
  Cyclic GFR-binding peptide
  MOD_RES (28)..(28): Xaa is C or S
DLRSVKIAKVVGRTPKVKEVQVMVVKSX

SEQ ID NO: 80517 - protein, 30 aa, Artificial Sequence
  Cyclic GFR-binding peptide
  MOD_RES (30)..(30): Xaa is C or S
SQDLRSVKIAKVIGKTPKIKEVQVMIVKSX

SEQ ID NO: 80518 - protein, 36 aa, Artificial Sequence; identical to SEQ ID NO: 31084
  Cyclic GFR-binding peptide
  MOD_RES (35)..(35): Xaa is C or S

SEQ ID NO: 80519 - protein, 30 aa, Artificial Sequence; identical to SEQ ID NO: 31087
  Cyclic GFR-binding peptide

SEQ ID NO: 80520 - protein, 29 aa, Artificial Sequence
  Cyclic GFR-binding peptide
QPSRVHHEPLTVLYYEYVRKKPKLEQLSN

SEQ ID NO: 80521 - protein, 39 aa, Artificial Sequence; identical to SEQ ID NO: 31094
  Cyclic GFR-binding peptide
  MOD_RES (6)..(7)..(38): Xaa is C or S

SEQ ID NO: 80522 - protein, 27 aa, Artificial Sequence
  Cyclic GFR-binding peptide
HEPLTVLYYEYVRKKPKLEQLSNRLEE

SEQ ID NO: 80523 - protein, 31 aa, Artificial Sequence
  Cyclic GFR-binding peptide
  MOD_RES (1)..(2): Xaa is C or S
XXVPTELRSVKMAKVDEYDKVVKEVQVEMVV

SEQ ID NO: 80524 - protein, 28 aa, Artificial Sequence
  Cyclic GFR-binding peptide
QLEPLTVLYYEIVRKKPIFEQLSNTLED

SEQ ID NO: 80525 - protein, 21 aa, Artificial Sequence
  Cyclic GFR-binding peptide
RPVQVRKIDDSSNVIKKATVN

SEQ ID NO: 80526 - protein, 28 aa, Artificial Sequence
  Cyclic GFR-binding peptide
  MOD_RES (2)..(3): Xaa is C or S
AXXVPTELRSVKMAKVDEYDKVVKEVQV

SEQ ID NO: 80527 - protein, 40 aa, Artificial Sequence; identical to SEQ ID NO: 31101
  Cyclic GFR-binding peptide
  MOD_RES (5)..(37)..(39): Xaa is C or S

SEQ ID NO: 80528 - protein, 27 aa, Artificial Sequence
  Cyclic GFR-binding peptide
LRPVQMRKIDENEKVVKKATVDMVVEG

SEQ ID NO: 80529 - protein, 40 aa, Artificial Sequence; identical to SEQ ID NO: 31105
  Cyclic GFR-binding peptide
  MOD_RES (6)..(40): Xaa is C or S

SEQ ID NO: 80530 - protein, 31 aa, Artificial Sequence
  Cyclic GFR-binding peptide
  MOD_RES (4)..(5): Xaa is C or S
PKPXXAPTQLRSVKVAKVDDSSNVIKEVQVN

SEQ ID NO: 80531 - protein, 31 aa, Artificial Sequence
  Cyclic GFR-binding peptide
  MOD_RES (5)..(6): Xaa is C or S
SAAPXXVPQALRSVKIAKVVGRKPKVKEVQV

SEQ ID NO: 80532 - protein, 34 aa, Artificial Sequence
  Cyclic GFR-binding peptide
  MOD_RES (4)..(5): Xaa is C or S
ASPXXVPQDLRSVKIAKVVGRTPKVKEVQVMVVK

SEQ ID NO: 80533 - protein, 23 aa, Artificial Sequence
  Cyclic GFR-binding peptide
LEPLTVLYYEIVRKKPIFEQLSN

SEQ ID NO: 80534 - protein, 37 aa, Artificial Sequence; identical to SEQ ID NO: 31111
  Cyclic GFR-binding peptide
  MOD_RES (4)..(5)..(36): Xaa is C or S

SEQ ID NO: 80535 - protein, 20 aa, Artificial Sequence
  Cyclic GFR-binding peptide
RSVKVAKVDDSSNVIKEVQV

SEQ ID NO: 80536 - protein, 42 aa, Artificial Sequence; identical to SEQ ID NO: 31112
  Cyclic GFR-binding peptide
  MOD_RES (6)..(7)..(39)..(41): Xaa is C or S

SEQ ID NO: 80537 - protein, 35 aa, Artificial Sequence; identical to SEQ ID NO: 31115
  Cyclic GFR-binding peptide
  MOD_RES (4)..(5): Xaa is C or S

SEQ ID NO: 80538 - protein, 26 aa, Artificial Sequence
  Cyclic GFR-binding peptide
QALRPVQIRKIVGRKPKVKKATVMIV

SEQ ID NO: 80539 - protein, 41 aa, Artificial Sequence; identical to SEQ ID NO: 31120
  Cyclic GFR-binding peptide
  MOD_RES (5)..(6)..(38)..(40): Xaa is C or S

SEQ ID NO: 80540 - protein, 33 aa, Artificial Sequence; identical to SEQ ID NO: 31121
  Cyclic GFR-binding peptide
  MOD_RES (1)..(2): Xaa is C or S

SEQ ID NO: 80541 - protein, 30 aa, Artificial Sequence
  Cyclic GFR-binding peptide
TEEEPLPMVYYRIKPHQGQHEQLSNFLQHN

SEQ ID NO: 80542 - protein, 35 aa, Artificial Sequence; identical to SEQ ID NO: 31122
  Cyclic GFR-binding peptide
  MOD_RES (1)..(2)..(34): Xaa is C or S

SEQ ID NO: 80543 - protein, 33 aa, Artificial Sequence; identical to SEQ ID NO: 31123
  Cyclic GFR-binding peptide
  MOD_RES (1)..(2)..(33): Xaa is C or S

SEQ ID NO: 80544 - protein, 33 aa, Artificial Sequence
  Cyclic GFR-binding peptide
  MOD_RES (6)..(7): Xaa is C or S
YVPKPXXAPTKLRSVKVAKVDDSSNVIKEVQVN

SEQ ID NO: 80545 - protein, 37 aa, Artificial Sequence; identical to SEQ ID NO: 31126
  Cyclic GFR-binding peptide
  MOD_RES (37)..(37): Xaa is C or S

SEQ ID NO: 80546 - protein, 39 aa, Artificial Sequence; identical to SEQ ID NO: 31127
  Cyclic GFR-binding peptide
  MOD_RES (4)..(5)..(37)..(39): Xaa is C or S

SEQ ID NO: 80547 - protein, 37 aa, Artificial Sequence; identical to SEQ ID NO: 31130
  Cyclic GFR-binding peptide
  MOD_RES (4)..(36): Xaa is C or S

SEQ ID NO: 80548 - protein, 35 aa, Artificial Sequence; identical to SEQ ID NO: 31132
  Cyclic GFR-binding peptide

SEQ ID NO: 80549 - protein, 38 aa, Artificial Sequence; identical to SEQ ID NO: 31133
  Cyclic GFR-binding peptide
  MOD_RES (3)..(4)..(36)..(38): Xaa is C or S

SEQ ID NO: 80550 - protein, 28 aa, Artificial Sequence
  Cyclic GFR-binding peptide
EEPLPMVYYRIKPHQGQHEQLSNFLQHN

SEQ ID NO: 80551 - protein, 25 aa, Artificial Sequence
  Cyclic GFR-binding peptide
TELRSVKMAKVDEYDKVVKEVQVEM

SEQ ID NO: 80552 - protein, 34 aa, Artificial Sequence; identical to SEQ ID NO: 31137
  Cyclic GFR-binding peptide
  MOD_RES (32)..(34): Xaa is C or S

SEQ ID NO: 80553 - protein, 25 aa, Artificial Sequence
  Cyclic GFR-binding peptide
SQDLRPVQIRKIIGKTPKIKKATVM

SEQ ID NO: 80554 - protein, 29 aa, Artificial Sequence
  Cyclic GFR-binding peptide
  MOD_RES (2)..(3): Xaa is C or S
AXXVPTELSNITMQIMDENEKVVIGEMSD

SEQ ID NO: 80555 - protein, 30 aa, Artificial Sequence
  Cyclic GFR-binding peptide
  MOD_RES (3)..(4): Xaa is C or S
KAXXVPTELRPVQMRKIDENEKVVKKATVD

SEQ ID NO: 80556 - protein, 38 aa, Artificial Sequence; identical to SEQ ID NO: 31138
  Cyclic GFR-binding peptide
  MOD_RES (3)..(4)..(36)..(38): Xaa is C or S

SEQ ID NO: 80557 - protein, 30 aa, Artificial Sequence
  Cyclic GFR-binding peptide
  MOD_RES (4)..(5): Xaa is C or S
PKAXXVPTELRPVQMRKIDENEKVVKKATV

SEQ ID NO: 80558 - protein, 31 aa, Artificial Sequence
  Cyclic GFR-binding peptide
  MOD_RES (29)..(31): Xaa is C or S
KLRPVQVRKIDDSSNVIKKATVNMVVRSXGX

SEQ ID NO: 80559 - protein, 22 aa, Artificial Sequence
  Cyclic GFR-binding peptide
DLRPVQIRKIVGRTPKVKKATV

SEQ ID NO: 80560 - protein, 35 aa, Artificial Sequence
  Cyclic GFR-binding peptide
  MOD_RES (5)..(6): Xaa is C or S
SASPXXVSQDLSNITIQIMIGKTPKIIGEMSMIVK

SEQ ID NO: 80561 - protein, 30 aa, Artificial Sequence
  Cyclic GFR-binding peptide
  MOD_RES (3)..(4): Xaa is C or S
APXXVPQALRSVKIAKVVGRKPKVKEVQVM

SEQ ID NO: 80562 - protein, 34 aa, Artificial Sequence
  Cyclic GFR-binding peptide
  MOD_RES (5)..(6): Xaa is C or S
SASPXXVPQDLSNITIQIMVGRTPKVIGEMSMVV

SEQ ID NO: 80563 - protein, 34 aa, Artificial Sequence
  Cyclic GFR-binding peptide
  MOD_RES (3)..(3): Xaa is C or S
LEXVPTEEEPLPMVYYRIKPHQGQHEQLSNFLQH

SEQ ID NO: 80564 - protein, 33 aa, Artificial Sequence
  Cyclic GFR-binding peptide
  MOD_RES (4)..(4): Xaa is C or S
KPTXAPTKLRPVQVRKIDDSSNVIKKATVNMVV

SEQ ID NO: 80565 - protein, 35 aa, Artificial Sequence; identical to SEQ ID NO: 31147
  Cyclic GFR-binding peptide
  MOD_RES (1)..(2)..(34): Xaa is C or S

SEQ ID NO: 80566 - protein, 42 aa, Artificial Sequence; identical to SEQ ID NO: 31148
  Cyclic GFR-binding peptide
  MOD_RES (4)..(41): Xaa is C or S

SEQ ID NO: 80567 - protein, 24 aa, Artificial Sequence
  Cyclic GFR-binding peptide
LRPVQIRKIVGRKPKVKKATVMIV

SEQ ID NO: 80568 - protein, 31 aa, Artificial Sequence
  Cyclic GFR-binding peptide
  MOD_RES (5)..(6): Xaa is C or S
IPKAXXVPTELRPVQMRKIDENEKVVKKATV

SEQ ID NO: 80569 - protein, 23 aa, Artificial Sequence
  Cyclic GFR-binding peptide
SNITIQIMIGKTPKIIGEMSMIV

SEQ ID NO: 80570 - protein, 22 aa, Artificial Sequence
  Cyclic GFR-binding peptide
ELRPVQMRKIDEYDKVVKKATV

SEQ ID NO: 80571 - protein, 34 aa, Artificial Sequence
  Cyclic GFR-binding peptide
  MOD_RES (4)..(5): Xaa is C or S
AAPXXVPQALRPVQIRKIVGRKPKVKKATVMIVR

SEQ ID NO: 80572 - protein, 35 aa, Artificial Sequence
  Cyclic GFR-binding peptide
  MOD_RES (6)..(7): Xaa is C or S
YVPKPXXAPTKLSNITVQIMDDSSNVIIGEMSNMV

SEQ ID NO: 80573 - protein, 32 aa, Artificial Sequence
  Cyclic GFR-binding peptide
  MOD_RES (6)..(7): Xaa is C or S
ASASPXXVPQDLRSVKIAKVVGRTPKVKEVQV

SEQ ID NO: 80574 - protein, 30 aa, Artificial Sequence
  Cyclic GFR-binding peptide
  MOD_RES (1)..(1): Xaa is C or S
XVSQDLRSVKIAKVIGKTPKIKEVQVMIVK

SEQ ID NO: 80575 - protein, 33 aa, Artificial Sequence
  Cyclic GFR-binding peptide
  MOD_RES (30)..(32): Xaa is C or S
TELRPVQMRKIDEYDKVVKKATVEMVVEGXGXR

SEQ ID NO: 80576 - protein, 35 aa, Artificial Sequence; identical to SEQ ID NO: 31163
  Cyclic GFR-binding peptide
  MOD_RES (1)..(2)..(33)..(35): Xaa is C or S

SEQ ID NO: 80577 - protein, 34 aa, Artificial Sequence
  Cyclic GFR-binding peptide
  MOD_RES (6)..(7): Xaa is C or S
ASASPXXVSQDLSNITIQIMIGKTPKIIGEMSMI

SEQ ID NO: 80578 - protein, 31 aa, Artificial Sequence; identical to SEQ ID NO: 31171
  Cyclic GFR-binding peptide
  MOD_RES (1)..(1): Xaa is C or S

SEQ ID NO: 80579 - protein, 34 aa, Artificial Sequence; identical to SEQ ID NO: 31174
  Cyclic GFR-binding peptide
  MOD_RES (3)..(3): Xaa is C or S

SEQ ID NO: 80580 - protein, 26 aa, Artificial Sequence
  Cyclic GFR-binding peptide
APTKLRSVKVAKVDDSSNVIKEVQVN

SEQ ID NO: 80581 - protein, 30 aa, Artificial Sequence
  Cyclic GFR-binding peptide
  MOD_RES (1)..(2): Xaa is C or S
XXVPQALRPVQIRKIVGRKPKVKKATVMIV

SEQ ID NO: 80582 - protein, 35 aa, Artificial Sequence; identical to SEQ ID NO: 31182
  Cyclic GFR-binding peptide
  MOD_RES (3)..(4): Xaa is C or S

SEQ ID NO: 80583 - protein, 37 aa, Artificial Sequence; identical to SEQ ID NO: 31183
  Cyclic GFR-binding peptide
  MOD_RES (5)..(6)..(37): Xaa is C or S

SEQ ID NO: 80584 - protein, 23 aa, Artificial Sequence
  Cyclic GFR-binding peptide
DLRSVKIAKVIGKTPKIKEVQVM

SEQ ID NO: 80585 - protein, 39 aa, Artificial Sequence; identical to SEQ ID NO: 31184
  Cyclic GFR-binding peptide
  MOD_RES (4)..(5)..(37)..(39): Xaa is C or S

SEQ ID NO: 80586 - protein, 33 aa, Artificial Sequence; identical to SEQ ID NO: 31185
  Cyclic GFR-binding peptide
  MOD_RES (1)..(2): Xaa is C or S

SEQ ID NO: 80587 - protein, 31 aa, Artificial Sequence
  Cyclic GFR-binding peptide
TQVQLEPLPVVYYEIVRKKPIFEQLSNTLED

SEQ ID NO: 80588 - protein, 34 aa, Artificial Sequence; identical to SEQ ID NO: 31187
  Cyclic GFR-binding peptide
  MOD_RES (2)..(3)..(34): Xaa is C or S

SEQ ID NO: 80589 - protein, 23 aa, Artificial Sequence
  Cyclic GFR-binding peptide
TELRSVKMAKVDENEKVVKEVQV

SEQ ID NO: 80590 - protein, 30 aa, Artificial Sequence
  Cyclic GFR-binding peptide
RPTQVQLEPLPVVYYEIVRKKPIFEQLSNT

SEQ ID NO: 80591 - protein, 37 aa, Artificial Sequence; identical to SEQ ID NO: 31189
  Cyclic GFR-binding peptide
  MOD_RES (3)..(4)..(35)..(37): Xaa is C or S

SEQ ID NO: 80592 - protein, 29 aa, Artificial Sequence
  Cyclic GFR-binding peptide
TQVQLEPLTVLYYEIVRKKPIFEQLSNTL

SEQ ID NO: 80593 - protein, 32 aa, Artificial Sequence
  Cyclic GFR-binding peptide
  MOD_RES (2)..(3): Xaa is C or S
PXXVPQALSNITIQIMVGRKPKVIGEMSMIVR

SEQ ID NO: 80594 - protein, 22 aa, Artificial Sequence
  Cyclic GFR-binding peptide
SNITIQIMVGRKPKVIGEMSMI

SEQ ID NO: 80595 - protein, 35 aa, Artificial Sequence; identical to SEQ ID NO: 31193
  Cyclic GFR-binding peptide
  MOD_RES (34)..(34): Xaa is C or S

SEQ ID NO: 80596 - protein, 30 aa, Artificial Sequence
  Cyclic GFR-binding peptide
  MOD_RES (27)..(29): Xaa is C or S
LRSVKIAKVIGKTPKIKEVQVMIVKSXKXS

SEQ ID NO: 80597 - protein, 31 aa, Artificial Sequence
  Cyclic GFR-binding peptide
  MOD_RES (28)..(30): Xaa is C or S
LRPVQMRKIDEYDKVVKKATVEMVVEGXGXR

SEQ ID NO: 80598 - protein, 27 aa, Artificial Sequence
  Cyclic GFR-binding peptide
VPQALRSVKIAKVVGRKPKVKEVQVMI

SEQ ID NO: 80599 - protein, 39 aa, Artificial Sequence; identical to SEQ ID NO: 31200
  Cyclic GFR-binding peptide
  MOD_RES (4)..(36)..(38): Xaa is C or S

SEQ ID NO: 80600 - protein, 36 aa, Artificial Sequence; identical to SEQ ID NO: 31205
  Cyclic GFR-binding peptide
  MOD_RES (5)..(6): Xaa is C or S

SEQ ID NO: 80601 - protein, 38 aa, Artificial Sequence; identical to SEQ ID NO: 31204
  Cyclic GFR-binding peptide
  MOD_RES (5)..(37): Xaa is C or S

SEQ ID NO: 80602 - protein, 39 aa, Artificial Sequence; identical to SEQ ID NO: 31208
  Cyclic GFR-binding peptide
  MOD_RES (6)..(6): Xaa is C or S

SEQ ID NO: 80603 - protein, 32 aa, Artificial Sequence; identical to SEQ ID NO: 31210
  Cyclic GFR-binding peptide
  MOD_RES (1)..(2): Xaa is C or S

SEQ ID NO: 80604 - protein, 32 aa, Artificial Sequence
  Cyclic GFR-binding peptide
  MOD_RES (30)..(32): Xaa is C or S
EPLTVLYYEYVRKKPKLEQLSNRLEEHLEXAX

SEQ ID NO: 80605 - protein, 34 aa, Artificial Sequence; identical to SEQ ID NO: 28491
  Cyclic GFR-binding peptide
  MOD_RES (1)..(2)..(34): Xaa is C or S

SEQ ID NO: 80606 - protein, 28 aa, Artificial Sequence
  Cyclic GFR-binding peptide
  MOD_RES (2)..(3): Xaa is C or S
AXXVPTELRPVQMRKIDEYDKVVKKATV

SEQ ID NO: 80607 - protein, 35 aa, Artificial Sequence; identical to SEQ ID NO: 28492
  Cyclic GFR-binding peptide
  MOD_RES (1)..(2)..(34): Xaa is C or S

SEQ ID NO: 80608 - protein, 39 aa, Artificial Sequence; identical to SEQ ID NO: 28494
  Cyclic GFR-binding peptide
  MOD_RES (4)..(5)..(37)..(39): Xaa is C or S

SEQ ID NO: 80609 - protein, 34 aa, Artificial Sequence; identical to SEQ ID NO: 28495
  Cyclic GFR-binding peptide
  MOD_RES (1)..(32)..(34): Xaa is C or S

SEQ ID NO: 80610 - protein, 30 aa, Artificial Sequence
  Cyclic GFR-binding peptide
  MOD_RES (2)..(3): Xaa is C or S
PXXAPTQLRPVQVRKIDDSSNVIKKATVNM

SEQ ID NO: 80611 - protein, 38 aa, Artificial Sequence; identical to SEQ ID NO: 28497
  Cyclic GFR-binding peptide
  MOD_RES (3)..(35)..(37): Xaa is C or S

SEQ ID NO: 80612 - protein, 41 aa, Artificial Sequence; identical to SEQ ID NO: 28498
  Cyclic GFR-binding peptide
  MOD_RES (4)..(38)..(40): Xaa is C or S

SEQ ID NO: 80613 - protein, 38 aa, Artificial Sequence; identical to SEQ ID NO: 28501
  Cyclic GFR-binding peptide
  MOD_RES (2)..(36)..(38): Xaa is C or S

SEQ ID NO: 80614 - protein, 36 aa, Artificial Sequence; identical to SEQ ID NO: 28505
  Cyclic GFR-binding peptide
  MOD_RES (3)..(4)..(35): Xaa is C or S

SEQ ID NO: 80615 - protein, 24 aa, Artificial Sequence
  Cyclic GFR-binding peptide
DLRSVKIAKVVGRTPKVKEVQVMV

SEQ ID NO: 80616 - protein, 23 aa, Artificial Sequence
  Cyclic GFR-binding peptide
RPVQIRKIVGRTPKVKKATVMVV

SEQ ID NO: 80617 - protein, 33 aa, Artificial Sequence; identical to SEQ ID NO: 28515
  Cyclic GFR-binding peptide
  MOD_RES (1)..(2)..(33): Xaa is C or S

SEQ ID NO: 80618 - protein, 39 aa, Artificial Sequence; identical to SEQ ID NO: 28516
  Cyclic GFR-binding peptide
  MOD_RES (6)..(7)..(38): Xaa is C or S

SEQ ID NO: 80619 - protein, 39 aa, Artificial Sequence; identical to SEQ ID NO: 28518
  Cyclic GFR-binding peptide
  MOD_RES (3)..(4)..(36)..(38): Xaa is C or S

SEQ ID NO: 80620 - protein, 27 aa, Artificial Sequence
  Cyclic GFR-binding peptide
VPTEEEPLPMVYYRIKPHQGQHEQLSN

SEQ ID NO: 80621 - protein, 25 aa, Artificial Sequence
  Cyclic GFR-binding peptide
RPVQMRKIDENEKVVKKATVDMVVE

SEQ ID NO: 80622 - protein, 29 aa, Artificial Sequence
  Cyclic GFR-binding peptide
VPTELRSVKMAKVDEYDKVVKEVQVEMVV

SEQ ID NO: 80623 - protein, 31 aa, Artificial Sequence
  Cyclic GFR-binding peptide
  MOD_RES (1)..(1): Xaa is C or S
XAPTKLRSVKVAKVDDSSNVIKEVQVNMVVR

SEQ ID NO: 80624 - protein, 33 aa, Artificial Sequence; identical to SEQ ID NO: 28522
  Cyclic GFR-binding peptide
  MOD_RES (1)..(33): Xaa is C or S

SEQ ID NO: 80625 - protein, 35 aa, Artificial Sequence
  Cyclic GFR-binding peptide
  MOD_RES (7)..(7): Xaa is C or S
HVTKPTXAPTKLSNITVQIMDDSSNVIIGEMSNMV

SEQ ID NO: 80626 - protein, 32 aa, Artificial Sequence
  Cyclic GFR-binding peptide
  MOD_RES (30)..(32): Xaa is C or S
TKLRSVKVAKVDDSSNVIKEVQVNMVVRSXGX

SEQ ID NO: 80627 - protein, 31 aa, Artificial Sequence
  Cyclic GFR-binding peptide
  MOD_RES (1)..(2): Xaa is C or S
XXAPTKLSNITVQIMDDSSNVIIGEMSNMVV

SEQ ID NO: 80628 - protein, 36 aa, Artificial Sequence; identical to SEQ ID NO: 28528
  Cyclic GFR-binding peptide
  MOD_RES (4)..(5): Xaa is C or S

SEQ ID NO: 80629 - protein, 31 aa, Artificial Sequence
  Cyclic GFR-binding peptide
  MOD_RES (29)..(31): Xaa is C or S
QDLRSVKIAKVVGRTPKVKEVQVMVVKSXKX

SEQ ID NO: 80630 - protein, 33 aa, Artificial Sequence
  Cyclic GFR-binding peptide
  MOD_RES (31)..(33): Xaa is C or S
PTQLRPVQVRKIDDSSNVIKKATVNMVVRAXGX

SEQ ID NO: 80631 - protein, 29 aa, Artificial Sequence
  Cyclic GFR-binding peptide
  MOD_RES (1)..(1): Xaa is C or S
XVPQALRPVQIRKIVGRKPKVKKATVMIV

SEQ ID NO: 80632 - protein, 33 aa, Artificial Sequence
  Cyclic GFR-binding peptide
RPTQVQLEPLPVVYYEIVRKKPIFEQLSNTLED

SEQ ID NO: 80633 - protein, 33 aa, Artificial Sequence; identical to SEQ ID NO: 28536
  Cyclic GFR-binding peptide
  MOD_RES (31)..(33): Xaa is C or S

SEQ ID NO: 80634 - protein, 40 aa, Artificial Sequence; identical to SEQ ID NO: 28540
  Cyclic GFR-binding peptide
  MOD_RES (4)..(38)..(40): Xaa is C or S

SEQ ID NO: 80635 - protein, 29 aa, Artificial Sequence
  Cyclic GFR-binding peptide
EEPLPMVYYRIKPHQGQHEQLSNFLQHNK

SEQ ID NO: 80636 - protein, 35 aa, Artificial Sequence; identical to SEQ ID NO: 28542
  Cyclic GFR-binding peptide
  MOD_RES (1)..(2)..(33)..(35): Xaa is C or S

SEQ ID NO: 80637 - protein, 29 aa, Artificial Sequence
  Cyclic GFR-binding peptide
  MOD_RES (2)..(3): Xaa is C or S
AXXVPTELRPVQMRKIDEYDKVVKKATVE

SEQ ID NO: 80638 - protein, 22 aa, Artificial Sequence
  Cyclic GFR-binding peptide
SNITIQIMVGRTPKVIGEMSMV

SEQ ID NO: 80639 - protein, 21 aa, Artificial Sequence
  Cyclic GFR-binding peptide
LRPVQIRKIVGRKPKVKKATV

SEQ ID NO: 80640 - protein, 29 aa, Artificial Sequence
  Cyclic GFR-binding peptide
TKLRSVKVAKVDDSSNVIKEVQVNMVVRS

SEQ ID NO: 80641 - protein, 34 aa, Artificial Sequence; identical to SEQ ID NO: 28546
  Cyclic GFR-binding peptide
  MOD_RES (2)..(3): Xaa is C or S

SEQ ID NO: 80642 - protein, 25 aa, Artificial Sequence
  Cyclic GFR-binding peptide
LEPLTVLYYEIVRKKPIFEQLSNTL

SEQ ID NO: 80643 - protein, 37 aa, Artificial Sequence; identical to SEQ ID NO: 28549
  Cyclic GFR-binding peptide
  MOD_RES (2)..(36): Xaa is C or S

SEQ ID NO: 80644 - protein, 31 aa, Artificial Sequence
  Cyclic GFR-binding peptide
  MOD_RES (3)..(4): Xaa is C or S
KAXXVPTELRSVKMAKVDEYDKVVKEVQVEM

SEQ ID NO: 80645 - protein, 35 aa, Artificial Sequence
  Cyclic GFR-binding peptide
  MOD_RES (32)..(34): Xaa is C or S
TEEEPLPMVYYRIKPHQGQHEQLSNFLQHNKXEXR

SEQ ID NO: 80646 - protein, 41 aa, Artificial Sequence; identical to SEQ ID NO: 28551
  Cyclic GFR-binding peptide
  MOD_RES (3)..(40): Xaa is C or S

SEQ ID NO: 80647 - protein, 38 aa, Artificial Sequence; identical to SEQ ID NO: 28553
  Cyclic GFR-binding peptide
  MOD_RES (6)..(7)..(38): Xaa is C or S

SEQ ID NO: 80648 - protein, 35 aa, Artificial Sequence
  Cyclic GFR-binding peptide
  MOD_RES (6)..(7): Xaa is C or S
TVPKPXXAPTQLRSVKVAKVDDSSNVIKEVQVNMV

SEQ ID NO: 80649 - protein, 28 aa, Artificial Sequence
  Cyclic GFR-binding peptide
  MOD_RES (3)..(3): Xaa is C or S
PTXAPTKLRSVKVAKVDDSSNVIKEVQV

SEQ ID NO: 80650 - protein, 31 aa, Artificial Sequence
  Cyclic GFR-binding peptide
  MOD_RES (31)..(31): Xaa is C or S
EEEPLPMVYYRIKPHQGQHEQLSNFLQHNKX

SEQ ID NO: 80651 - protein, 24 aa, Artificial Sequence
  Cyclic GFR-binding peptide
LRPVQIRKIIGKTPKIKKATVMIV

SEQ ID NO: 80652 - protein, 40 aa, Artificial Sequence; identical to SEQ ID NO: 28555
  Cyclic GFR-binding peptide
  MOD_RES (5)..(37)..(39): Xaa is C or S

SEQ ID NO: 80653 - protein, 30 aa, Artificial Sequence
  Cyclic GFR-binding peptide
  MOD_RES (28)..(30): Xaa is C or S
LRPVQVRKIDDSSNVIKKATVNMVVRAXGX

SEQ ID NO: 80654 - protein, 44 aa, Artificial Sequence; identical to SEQ ID NO: 28558
  Cyclic GFR-binding peptide
  MOD_RES (5)..(42)..(44): Xaa is C or S

SEQ ID NO: 80655 - protein, 24 aa, Artificial Sequence
  Cyclic GFR-binding peptide
PTKLRSVKVAKVDDSSNVIKEVQV

SEQ ID NO: 80656 - protein, 40 aa, Artificial Sequence; identical to SEQ ID NO: 28562
  Cyclic GFR-binding peptide
  MOD_RES (6)..(7)..(39): Xaa is C or S

SEQ ID NO: 80657 - protein, 28 aa, Artificial Sequence
  Cyclic GFR-binding peptide
  MOD_RES (1)..(1): Xaa is C or S
XVPQDLRPVQIRKIVGRTPKVKKATVMV

SEQ ID NO: 80658 - protein, 31 aa, Artificial Sequence
  Cyclic GFR-binding peptide
  MOD_RES (3)..(4): Xaa is C or S
KPXXAPTKLRSVKVAKVDDSSNVIKEVQVNM

SEQ ID NO: 80659 - protein, 37 aa, Artificial Sequence; identical to SEQ ID NO: 28565
  Cyclic GFR-binding peptide
  MOD_RES (2)..(34)..(36): Xaa is C or S

SEQ ID NO: 80660 - protein, 31 aa, Artificial Sequence
  Cyclic GFR-binding peptide
  MOD_RES (1)..(2): Xaa is C or S
XXAPTQLRSVKVAKVDDSSNVIKEVQVNMVV

SEQ ID NO: 80661 - protein, 31 aa, Artificial Sequence
  Cyclic GFR-binding peptide
  MOD_RES (3)..(4): Xaa is C or S
SPXXVSQDLSNITIQIMIGKTPKIIGEMSMI

SEQ ID NO: 80662 - protein, 35 aa, Artificial Sequence; identical to SEQ ID NO: 28568
  Cyclic GFR-binding peptide
  MOD_RES (1)..(32)..(34): Xaa is C or S

SEQ ID NO: 80663 - protein, 30 aa, Artificial Sequence
  Cyclic GFR-binding peptide
  MOD_RES (4)..(5): Xaa is C or S
PKPXXAPTKLRPVQVRKIDDSSNVIKKATV

SEQ ID NO: 80664 - protein, 26 aa, Artificial Sequence
  Cyclic GFR-binding peptide
  MOD_RES (26)..(26): Xaa is C or S
RPVQIRKIIGKTPKIKKATVMIVKSX

SEQ ID NO: 80665 - protein, 33 aa, Artificial Sequence
  Cyclic GFR-binding peptide
  MOD_RES (2)..(2): Xaa is C or S
QXRPTQVQLEPLTVLYYEIVRKKPIFEQLSNTL

SEQ ID NO: 80666 - protein, 37 aa, Artificial Sequence; identical to SEQ ID NO: 28569
  Cyclic GFR-binding peptide
  MOD_RES (4)..(5)..(36): Xaa is C or S

SEQ ID NO: 80667 - protein, 32 aa, Artificial Sequence; identical to SEQ ID NO: 28571
  Cyclic GFR-binding peptide
  MOD_RES (1)..(1): Xaa is C or S

SEQ ID NO: 80668 - protein, 40 aa, Artificial Sequence; identical to SEQ ID NO: 28572
  Cyclic GFR-binding peptide
  MOD_RES (1)..(38)..(40): Xaa is C or S

SEQ ID NO: 80669 - protein, 28 aa, Artificial Sequence
  Cyclic GFR-binding peptide
EEPLTMLYYRIKPHQGQHEQLSNFLQHN

SEQ ID NO: 80670 - protein, 37 aa, Artificial Sequence; identical to SEQ ID NO: 28574
  Cyclic GFR-binding peptide
  MOD_RES (1)..(1): Xaa is C or S

SEQ ID NO: 80671 - protein, 22 aa, Artificial Sequence
  Cyclic GFR-binding peptide
ELSNITMQIMDENEKVVIGEMS

SEQ ID NO: 80672 - protein, 31 aa, Artificial Sequence; identical to SEQ ID NO: 28578
  Cyclic GFR-binding peptide

SEQ ID NO: 80673 - protein, 32 aa, Artificial Sequence
  Cyclic GFR-binding peptide
  MOD_RES (3)..(4): Xaa is C or S
KAXXVPTELRPVQMRKIDEYDKVVKKATVEMV

SEQ ID NO: 80674 - protein, 42 aa, Artificial Sequence; identical to SEQ ID NO: 28579
  Cyclic GFR-binding peptide
  MOD_RES (5)..(39)..(41): Xaa is C or S

SEQ ID NO: 80675 - protein, 29 aa, Artificial Sequence
  Cyclic GFR-binding peptide
SRVHHEPLPVVYYEYVRKKPKLEQLSNRL

SEQ ID NO: 80676 - protein, 30 aa, Artificial Sequence
  Cyclic GFR-binding peptide
  MOD_RES (2)..(3): Xaa is C or S
PXXVPQALRPVQIRKIVGRKPKVKKATVMI

SEQ ID NO: 80677 - protein, 28 aa, Artificial Sequence
  Cyclic GFR-binding peptide
QDLRSVKIAKVIGKTPKIKEVQVMIVKS

SEQ ID NO: 80678 - protein, 29 aa, Artificial Sequence
  Cyclic GFR-binding peptide
  MOD_RES (27)..(29): Xaa is C or S
SNITVQIMDDSSNVIIGEMSNMVVRSXGX

SEQ ID NO: 80679 - protein, 35 aa, Artificial Sequence
  Cyclic GFR-binding peptide
  MOD_RES (6)..(7): Xaa is C or S
ASASPXXVPQDLSNITIQIMVGRTPKVIGEMSMVV

SEQ ID NO: 80680 - protein, 29 aa, Artificial Sequence
  Cyclic GFR-binding peptide
VQLEPLPVVYYEIVRKKPIFEQLSNTLED

SEQ ID NO: 80681 - protein, 28 aa, Artificial Sequence
  Cyclic GFR-binding peptide
QDLSNITIQIMIGKTPKIIGEMSMIVKS

SEQ ID NO: 80682 - protein, 26 aa, Artificial Sequence
  Cyclic GFR-binding peptide
  MOD_RES (1)..(1): Xaa is C or S
XVPQDLSNITIQIMVGRTPKVIGEMS

SEQ ID NO: 80683 - protein, 31 aa, Artificial Sequence
  Cyclic GFR-binding peptide
  MOD_RES (29)..(31): Xaa is C or S
KLSNITVQIMDDSSNVIIGEMSNMVVRSXGX

SEQ ID NO: 80684 - protein, 26 aa, Artificial Sequence
  Cyclic GFR-binding peptide
RPVQVRKIDDSSNVIKKATVNMVVRA

SEQ ID NO: 80685 - protein, 40 aa, Artificial Sequence; identical to SEQ ID NO: 28589
  Cyclic GFR-binding peptide
  MOD_RES (6)..(7)..(39): Xaa is C or S

SEQ ID NO: 80686 - protein, 31 aa, Artificial Sequence
  Cyclic GFR-binding peptide
  MOD_RES (5)..(5): Xaa is C or S
TKPTXAPTKLRSVKVAKVDDSSNVIKEVQVN

SEQ ID NO: 80687 - protein, 34 aa, Artificial Sequence; identical to SEQ ID NO: 28592
  Cyclic GFR-binding peptide
  MOD_RES (3)..(4): Xaa is C or S

SEQ ID NO: 80688 - protein, 26 aa, Artificial Sequence
  Cyclic GFR-binding peptide
RPVQVRKIDDSSNVIKKATVNMVVRS

SEQ ID NO: 80689 - protein, 32 aa, Artificial Sequence; identical to SEQ ID NO: 28596
  Cyclic GFR-binding peptide
  MOD_RES (1)..(2): Xaa is C or S

SEQ ID NO: 80690 - protein, 33 aa, Artificial Sequence
  Cyclic GFR-binding peptide
  MOD_RES (30)..(32): Xaa is C or S
PQALRSVKIAKVVGRKPKVKEVQVMIVRSXKXS

SEQ ID NO: 80691 - protein, 34 aa, Artificial Sequence; identical to SEQ ID NO: 28599
  Cyclic GFR-binding peptide
  MOD_RES (1)..(2)..(33): Xaa is C or S

SEQ ID NO: 80692 - protein, 25 aa, Artificial Sequence
  Cyclic GFR-binding peptide
RSVKMAKVDEYDKVVKEVQVEMVVE

SEQ ID NO: 80693 - protein, 39 aa, Artificial Sequence; identical to SEQ ID NO: 28610
  Cyclic GFR-binding peptide
  MOD_RES (5)..(39): Xaa is C or S

SEQ ID NO: 80694 - protein, 33 aa, Artificial Sequence
  Cyclic GFR-binding peptide
  MOD_RES (3)..(3): Xaa is C or S
VKXQPSRVHHEPLPVVYYEYVRKKPKLEQLSNR

SEQ ID NO: 80695 - protein, 30 aa, Artificial Sequence
  Cyclic GFR-binding peptide
  MOD_RES (2)..(2): Xaa is C or S
TXAPTKLRPVQVRKIDDSSNVIKKATVNMV

SEQ ID NO: 80696 - protein, 41 aa, Artificial Sequence; identical to SEQ ID NO: 28612
  Cyclic GFR-binding peptide
  MOD_RES (2)..(39)..(41): Xaa is C or S

SEQ ID NO: 80697 - protein, 40 aa, Artificial Sequence; identical to SEQ ID NO: 28613
  Cyclic GFR-binding peptide
  MOD_RES (6)..(38)..(40): Xaa is C or S

SEQ ID NO: 80698 - protein, 31 aa, Artificial Sequence
  Cyclic GFR-binding peptide
  MOD_RES (30)..(30): Xaa is C or S
TELSNITMQIMDENEKVVIGEMSDMVVEGXG

SEQ ID NO: 80699 - protein, 25 aa, Artificial Sequence
  Cyclic GFR-binding peptide
QALSNITIQIMVGRKPKVIGEMSMI

SEQ ID NO: 80700 - protein, 32 aa, Artificial Sequence; identical to SEQ ID NO: 28623
  Cyclic GFR-binding peptide
  MOD_RES (1)..(2): Xaa is C or S

SEQ ID NO: 80701 - protein, 35 aa, Artificial Sequence; identical to SEQ ID NO: 28624
  Cyclic GFR-binding peptide
  MOD_RES (32)..(34): Xaa is C or S

SEQ ID NO: 80702 - protein, 35 aa, Artificial Sequence
  Cyclic GFR-binding peptide
  MOD_RES (7)..(7): Xaa is C or S
NDEGLEXVPTEEEPLPMVYYRIKPHQGQHEQLSNF

SEQ ID NO: 80703 - protein, 36 aa, Artificial Sequence
  Cyclic GFR-binding peptide
  MOD_RES (6)..(7): Xaa is C or S
ASAAPXXVPQALRSVKIAKVVGRKPKVKEVQVMIVR

SEQ ID NO: 80704 - protein, 35 aa, Artificial Sequence; identical to SEQ ID NO: 28632
  Cyclic GFR-binding peptide
  MOD_RES (2)..(34): Xaa is C or S

SEQ ID NO: 80705 - protein, 35 aa, Artificial Sequence
  Cyclic GFR-binding peptide
  MOD_RES (5)..(6): Xaa is C or S
SAAPXXVPQALRPVQIRKIVGRKPKVKKATVMIVR

SEQ ID NO: 80706 - protein, 27 aa, Artificial Sequence
  Cyclic GFR-binding peptide
TELRSVKMAKVDENEKVVKEVQVDMVV

SEQ ID NO: 80707 - protein, 38 aa, Artificial Sequence; identical to SEQ ID NO: 28643
  Cyclic GFR-binding peptide
  MOD_RES (6)..(6): Xaa is C or S

SEQ ID NO: 80708 - protein, 39 aa, Artificial Sequence; identical to SEQ ID NO: 28645
  Cyclic GFR-binding peptide
  MOD_RES (2)..(36)..(38): Xaa is C or S

SEQ ID NO: 80709 - protein, 22 aa, Artificial Sequence
  Cyclic GFR-binding peptide
QLRPVQVRKIDDSSNVIKKATV

SEQ ID NO: 80710 - protein, 32 aa, Artificial Sequence
  Cyclic GFR-binding peptide
  MOD_RES (5)..(6): Xaa is C or S
VPKPXXAPTKLRPVQVRKIDDSSNVIKKATVN

SEQ ID NO: 80711 - protein, 23 aa, Artificial Sequence
  Cyclic GFR-binding peptide
EEPLPMVYYRIKPHQGQHEQLSN

SEQ ID NO: 80712 - protein, 31 aa, Artificial Sequence
  Cyclic GFR-binding peptide
  MOD_RES (29)..(31): Xaa is C or S
QDLSNITIQIMIGKTPKIIGEMSMIVKSXKX

SEQ ID NO: 80713 - protein, 33 aa, Artificial Sequence
  Cyclic GFR-binding peptide
  MOD_RES (32)..(32): Xaa is C or S
QLEPLTVLYYEIVRKKPIFEQLSNTLEDHLAXK

SEQ ID NO: 80714 - protein, 29 aa, Artificial Sequence
  Cyclic GFR-binding peptide
TELRSVKMAKVDENEKVVKEVQVDMVVEG

SEQ ID NO: 80715 - protein, 36 aa, Artificial Sequence; identical to SEQ ID NO: 28657
  Cyclic GFR-binding peptide
  MOD_RES (4)..(4): Xaa is C or S

SEQ ID NO: 80716 - protein, 35 aa, Artificial Sequence; identical to SEQ ID NO: 28658
  Cyclic GFR-binding peptide
  MOD_RES (2)..(3)..(34): Xaa is C or S

SEQ ID NO: 80717 - protein, 24 aa, Artificial Sequence
  Cyclic GFR-binding peptide
ALRPVQIRKIVGRKPKVKKATVMI

SEQ ID NO: 80718 - protein, 28 aa, Artificial Sequence
  Cyclic GFR-binding peptide
  MOD_RES (27)..(27): Xaa is C or S
LRSVKIAKVIGKTPKIKEVQVMIVKSXK

SEQ ID NO: 80719 - protein, 25 aa, Artificial Sequence
  Cyclic GFR-binding peptide
PTQLRPVQVRKIDDSSNVIKKATVN

SEQ ID NO: 80720 - protein, 33 aa, Artificial Sequence
  Cyclic GFR-binding peptide
  MOD_RES (5)..(6): Xaa is C or S
SASPXXVPQDLRSVKIAKVVGRTPKVKEVQVMV

SEQ ID NO: 80721 - protein, 31 aa, Artificial Sequence
  Cyclic GFR-binding peptide
  MOD_RES (1)..(2): Xaa is C or S
XXVSQDLRSVKIAKVIGKTPKIKEVQVMIVK

SEQ ID NO: 80722 - protein, 37 aa, Artificial Sequence; identical to SEQ ID NO: 28663
  Cyclic GFR-binding peptide
  MOD_RES (6)..(7): Xaa is C or S

SEQ ID NO: 80723 - protein, 33 aa, Artificial Sequence; identical to SEQ ID NO: 28665
  Cyclic GFR-binding peptide
  MOD_RES (1)..(2)..(33): Xaa is C or S

SEQ ID NO: 80724 - protein, 28 aa, Artificial Sequence
  Cyclic GFR-binding peptide
  MOD_RES (1)..(1): Xaa is C or S
XAPTKLSNITVQIMDDSSNVIIGEMSNM

SEQ ID NO: 80725 - protein, 35 aa, Artificial Sequence
  Cyclic GFR-binding peptide
  MOD_RES (32)..(34): Xaa is C or S
TEEEPLTMLYYRIKPHQGQHEQLSNFLQHNKXEXR

SEQ ID NO: 80726 - protein, 40 aa, Artificial Sequence; identical to SEQ ID NO: 28669
  Cyclic GFR-binding peptide
  MOD_RES (3)..(40): Xaa is C or S

SEQ ID NO: 80727 - protein, 31 aa, Artificial Sequence
  Cyclic GFR-binding peptide
  MOD_RES (31)..(31): Xaa is C or S
PTELRSVKMAKVDENEKVVKEVQVDMVVEGX

SEQ ID NO: 80728 - protein, 29 aa, Artificial Sequence
  Cyclic GFR-binding peptide
TELRPVQMRKIDENEKVVKKATVDMVVEG

SEQ ID NO: 80729 - protein, 24 aa, Artificial Sequence
  Cyclic GFR-binding peptide
SNITMQIMDEYDKVVIGEMSEMVV

SEQ ID NO: 80730 - protein, 29 aa, Artificial Sequence
  Cyclic GFR-binding peptide
  MOD_RES (2)..(3): Xaa is C or S
PXXAPTQLRPVQVRKIDDSSNVIKKATVN

SEQ ID NO: 80731 - protein, 41 aa, Artificial Sequence; identical to SEQ ID NO: 28675
  Cyclic GFR-binding peptide
  MOD_RES (3)..(40): Xaa is C or S

SEQ ID NO: 80732 - protein, 25 aa, Artificial Sequence
  Cyclic GFR-binding peptide
VQLEPLPVVYYEIVRKKPIFEQLSN

SEQ ID NO: 80733 - protein, 27 aa, Artificial Sequence
  Cyclic GFR-binding peptide
QALSNITIQIMVGRKPKVIGEMSMIVR

SEQ ID NO: 80734 - protein, 31 aa, Artificial Sequence; identical to SEQ ID NO: 28688
  Cyclic GFR-binding peptide
  MOD_RES (1)..(1): Xaa is C or S

SEQ ID NO: 80735 - protein, 29 aa, Artificial Sequence
  Cyclic GFR-binding peptide
  MOD_RES (3)..(4): Xaa is C or S
SPXXVPQDLRPVQIRKIVGRTPKVKKATV

SEQ ID NO: 80736 - protein, 34 aa, Artificial Sequence
  Cyclic GFR-binding peptide
  MOD_RES (4)..(5): Xaa is C or S
PKAXXVPTELRSVKMAKVDEYDKVVKEVQVEMVV

SEQ ID NO: 80737 - protein, 25 aa, Artificial Sequence
  Cyclic GFR-binding peptide
SNITIQIMIGKTPKIIGEMSMIVKS

SEQ ID NO: 80738 - protein, 32 aa, Artificial Sequence
  Cyclic GFR-binding peptide
  MOD_RES (2)..(3): Xaa is C or S
PXXVPQDLSNITIQIMVGRTPKVIGEMSMVVK

SEQ ID NO: 80739 - protein, 34 aa, Artificial Sequence
  Cyclic GFR-binding peptide
  MOD_RES (4)..(5): Xaa is C or S
AAPXXVPQALRSVKIAKVVGRKPKVKEVQVMIVR

SEQ ID NO: 80740 - protein, 28 aa, Artificial Sequence
  Cyclic GFR-binding peptide
  MOD_RES (1)..(2): Xaa is C or S
XXVSQDLRSVKIAKVIGKTPKIKEVQVM

SEQ ID NO: 80741 - protein, 35 aa, Artificial Sequence; identical to SEQ ID NO: 28699
  Cyclic GFR-binding peptide
  MOD_RES (1)..(1): Xaa is C or S

SEQ ID NO: 80742 - protein, 26 aa, Artificial Sequence
  Cyclic GFR-binding peptide
LRPVQVRKIDDSSNVIKKATVNMVVR

SEQ ID NO: 80743 - protein, 22 aa, Artificial Sequence
  Cyclic GFR-binding peptide
ELSNITMQIMDEYDKVVIGEMS

SEQ ID NO: 80744 - protein, 28 aa, Artificial Sequence
  Cyclic GFR-binding peptide
  MOD_RES (2)..(3): Xaa is C or S
PXXAPTQLSNITVQIMDDSSNVIIGEMS

SEQ ID NO: 80745 - protein, 31 aa, Artificial Sequence
  Cyclic GFR-binding peptide
  MOD_RES (28)..(30): Xaa is C or S
ALRSVKIAKVVGRKPKVKEVQVMIVRSXKXS

SEQ ID NO: 80746 - protein, 22 aa, Artificial Sequence
  Cyclic GFR-binding peptide
RPVQIRKIVGRKPKVKKATVMI

SEQ ID NO: 80747 - protein, 32 aa, Artificial Sequence; identical to SEQ ID NO: 28709
  Cyclic GFR-binding peptide
  MOD_RES (31)..(31): Xaa is C or S

SEQ ID NO: 80748 - protein, 30 aa, Artificial Sequence
  Cyclic GFR-binding peptide
  MOD_RES (28)..(30): Xaa is C or S
LRSVKVAKVDDSSNVIKEVQVNMVVRSXGX

SEQ ID NO: 80749 - protein, 40 aa, Artificial Sequence; identical to SEQ ID NO: 28710
  Cyclic GFR-binding peptide
  MOD_RES (1)..(38)..(40): Xaa is C or S

SEQ ID NO: 80750 - protein, 38 aa, Artificial Sequence; identical to SEQ ID NO: 28711
  Cyclic GFR-binding peptide
  MOD_RES (6)..(38): Xaa is C or S

SEQ ID NO: 80751 - protein, 31 aa, Artificial Sequence
  Cyclic GFR-binding peptide
  MOD_RES (4)..(5): Xaa is C or S
PKAXXVPTELRPVQMRKIDEYDKVVKKATVE

SEQ ID NO: 80752 - protein, 40 aa, Artificial Sequence; identical to SEQ ID NO: 28714
  Cyclic GFR-binding peptide
  MOD_RES (5)..(6)..(38)..(40): Xaa is C or S

SEQ ID NO: 80753 - protein, 38 aa, Artificial Sequence; identical to SEQ ID NO: 28723
  Cyclic GFR-binding peptide
  MOD_RES (3)..(35)..(37): Xaa is C or S

SEQ ID NO: 80754 - protein, 26 aa, Artificial Sequence
  Cyclic GFR-binding peptide
PTELRSVKMAKVDEYDKVVKEVQVEM

SEQ ID NO: 80755 - protein, 29 aa, Artificial Sequence
  Cyclic GFR-binding peptide
  MOD_RES (29)..(29): Xaa is C or S
QDLRPVQIRKIIGKTPKIKKATVMIVKSX

SEQ ID NO: 80756 - protein, 39 aa, Artificial Sequence; identical to SEQ ID NO: 28727
  Cyclic GFR-binding peptide
  MOD_RES (4)..(5)..(36)..(38): Xaa is C or S

SEQ ID NO: 80757 - protein, 36 aa, Artificial Sequence; identical to SEQ ID NO: 28728
  Cyclic GFR-binding peptide
  MOD_RES (2)..(3)..(35): Xaa is C or S

SEQ ID NO: 80758 - protein, 30 aa, Artificial Sequence
  Cyclic GFR-binding peptide
  MOD_RES (30)..(30): Xaa is C or S
EEPLPMVYYRIKPHQGQHEQLSNFLQHNKX

SEQ ID NO: 80759 - protein, 21 aa, Artificial Sequence
  Cyclic GFR-binding peptide
RPVQIRKIIGKTPKIKKATVM

SEQ ID NO: 80760 - protein, 23 aa, Artificial Sequence
  Cyclic GFR-binding peptide
SNITIQIMVGRKPKVIGEMSMIV

SEQ ID NO: 80761 - protein, 29 aa, Artificial Sequence
  Cyclic GFR-binding peptide
  MOD_RES (26)..(28): Xaa is C or S
RPVQIRKIIGKTPKIKKATVMIVKSXKXS

SEQ ID NO: 80762 - protein, 39 aa, Artificial Sequence; identical to SEQ ID NO: 28731
  Cyclic GFR-binding peptide
  MOD_RES (5)..(6)..(38): Xaa is C or S

SEQ ID NO: 80763 - protein, 36 aa, Artificial Sequence
  Cyclic GFR-binding peptide
  MOD_RES (5)..(5): Xaa is C or S
SSVKXQPSRVHHEPLTVLYYEYVRKKPKLEQLSNRL

SEQ ID NO: 80764 - protein, 29 aa, Artificial Sequence
  Cyclic GFR-binding peptide
LEPLPVVYYEIVRKKPIFEQLSNTLEDHL

SEQ ID NO: 80765 - protein, 43 aa, Artificial Sequence; identical to SEQ ID NO: 28734
  Cyclic GFR-binding peptide
  MOD_RES (5)..(42): Xaa is C or S

SEQ ID NO: 80766 - protein, 25 aa, Artificial Sequence
  Cyclic GFR-binding peptide
SNITIQIMVGRKPKVIGEMSMIVRS

SEQ ID NO: 80767 - protein, 37 aa, Artificial Sequence; identical to SEQ ID NO: 28736
  Cyclic GFR-binding peptide
  MOD_RES (1)..(2)..(34)..(36): Xaa is C or S

SEQ ID NO: 80768 - protein, 34 aa, Artificial Sequence; identical to SEQ ID NO: 28737
  Cyclic GFR-binding peptide
  MOD_RES (3)..(4): Xaa is C or S

SEQ ID NO: 80769 - protein, 35 aa, Artificial Sequence
  Cyclic GFR-binding peptide
  MOD_RES (6)..(7): Xaa is C or S
ASASPXXVPQDLRSVKIAKVVGRTPKVKEVQVMVV

SEQ ID NO: 80770 - protein, 27 aa, Artificial Sequence
  Cyclic GFR-binding peptide
  MOD_RES (27)..(27): Xaa is C or S
LSNITIQIMVGRKPKVIGEMSMIVRSX

SEQ ID NO: 80771 - protein, 29 aa, Artificial Sequence
  Cyclic GFR-binding peptide
VSQDLSNITIQIMIGKTPKIIGEMSMIVK

SEQ ID NO: 80772 - protein, 45 aa, Artificial Sequence; identical to SEQ ID NO: 28744
  Cyclic GFR-binding peptide
  MOD_RES (5)..(42)..(44): Xaa is C or S

SEQ ID NO: 80773 - protein, 34 aa, Artificial Sequence; identical to SEQ ID NO: 28746
  Cyclic GFR-binding peptide
  MOD_RES (31)..(33): Xaa is C or S

SEQ ID NO: 80774 - protein, 27 aa, Artificial Sequence
  Cyclic GFR-binding peptide
  MOD_RES (26)..(26): Xaa is C or S
SNITIQIMVGRKPKVIGEMSMIVRSXK

SEQ ID NO: 80775 - protein, 30 aa, Artificial Sequence
  Cyclic GFR-binding peptide
  MOD_RES (4)..(5): Xaa is C or S
ASPXXVSQDLSNITIQIMIGKTPKIIGEMS

SEQ ID NO: 80776 - protein, 39 aa, Artificial Sequence; identical to SEQ ID NO: 28748
  Cyclic GFR-binding peptide
  MOD_RES (3)..(4)..(36)..(38): Xaa is C or S

SEQ ID NO: 80777 - protein, 25 aa, Artificial Sequence
  Cyclic GFR-binding peptide
RSVKIAKVVGRKPKVKEVQVMIVRS

SEQ ID NO: 80778 - protein, 29 aa, Artificial Sequence
  Cyclic GFR-binding peptide
  MOD_RES (3)..(4): Xaa is C or S
SPXXVSQDLRSVKIAKVIGKTPKIKEVQV

SEQ ID NO: 80779 - protein, 36 aa, Artificial Sequence
  Cyclic GFR-binding peptide
  MOD_RES (6)..(7): Xaa is C or S
YVPKPXXAPTKLRPVQVRKIDDSSNVIKKATVNMVV

SEQ ID NO: 80780 - protein, 31 aa, Artificial Sequence
  Cyclic GFR-binding peptide
  MOD_RES (3)..(3): Xaa is C or S
LEXVPTEEEPLPMVYYRIKPHQGQHEQLSNF

SEQ ID NO: 80781 - protein, 22 aa, Artificial Sequence
  Cyclic GFR-binding peptide
DLSNITIQIMVGRTPKVIGEMS

SEQ ID NO: 80782 - protein, 22 aa, Artificial Sequence
  Cyclic GFR-binding peptide
RPVQMRKIDENEKVVKKATVDM

SEQ ID NO: 80783 - protein, 20 aa, Artificial Sequence
  Cyclic GFR-binding peptide
RSVKVAKVDDSSNVIKEVQV

SEQ ID NO: 80784 - protein, 26 aa, Artificial Sequence
  Cyclic GFR-binding peptide
DLRSVKIAKVIGKTPKIKEVQVMIVK

SEQ ID NO: 80785 - protein, 26 aa, Artificial Sequence
  Cyclic GFR-binding peptide
EPLTVLYYEYVRKKPKLEQLSNRLEE

SEQ ID NO: 80786 - protein, 39 aa, Artificial Sequence; identical to SEQ ID NO: 28758
  Cyclic GFR-binding peptide
  MOD_RES (4)..(5)..(36)..(38): Xaa is C or S

SEQ ID NO: 80787 - protein, 35 aa, Artificial Sequence; identical to SEQ ID NO: 28759
  Cyclic GFR-binding peptide
  MOD_RES (1)..(33)..(35): Xaa is C or S

SEQ ID NO: 80788 - protein, 28 aa, Artificial Sequence
  Cyclic GFR-binding peptide
TELRPVQMRKIDEYDKVVKKATVEMVVE

SEQ ID NO: 80789 - protein, 37 aa, Artificial Sequence; identical to SEQ ID NO: 28764
  Cyclic GFR-binding peptide
  MOD_RES (2)..(3)..(35)..(37): Xaa is C or S

SEQ ID NO: 80790 - protein, 41 aa, Artificial Sequence; identical to SEQ ID NO: 28765
  Cyclic GFR-binding peptide
  MOD_RES (1)..(38)..(40): Xaa is C or S

SEQ ID NO: 80791 - protein, 33 aa, Artificial Sequence
  Cyclic GFR-binding peptide
  MOD_RES (2)..(2): Xaa is C or S
KXQPSRVHHEPLPVVYYEYVRKKPKLEQLSNRL

SEQ ID NO: 80792 - protein, 32 aa, Artificial Sequence; identical to SEQ ID NO: 28770
  Cyclic GFR-binding peptide
  MOD_RES (1)..(1): Xaa is C or S

SEQ ID NO: 80793 - protein, 31 aa, Artificial Sequence
  Cyclic GFR-binding peptide
  MOD_RES (4)..(5): Xaa is C or S
PKPXXAPTQLRPVQVRKIDDSSNVIKKATVN

SEQ ID NO: 80794 - protein, 36 aa, Artificial Sequence; identical to SEQ ID NO: 28772
  Cyclic GFR-binding peptide
  MOD_RES (1)..(33)..(35): Xaa is C or S

SEQ ID NO: 80795 - protein, 33 aa, Artificial Sequence
  Cyclic GFR-binding peptide
  MOD_RES (3)..(4): Xaa is C or S
APXXVPQALRPVQIRKIVGRKPKVKKATVMIVR

SEQ ID NO: 80796 - protein, 35 aa, Artificial Sequence; identical to SEQ ID NO: 28774
  Cyclic GFR-binding peptide
  MOD_RES (2)..(3)..(35): Xaa is C or S

SEQ ID NO: 80797 - protein, 35 aa, Artificial Sequence; identical to SEQ ID NO: 28776
  Cyclic GFR-binding peptide
  MOD_RES (4)..(5): Xaa is C or S

SEQ ID NO: 80798 - protein, 32 aa, Artificial Sequence
  Cyclic GFR-binding peptide
  MOD_RES (2)..(3): Xaa is C or S
PXXVSQDLRPVQIRKIIGKTPKIKKATVMIVK

SEQ ID NO: 80799 - protein, 40 aa, Artificial Sequence; identical to SEQ ID NO: 28781
  Cyclic GFR-binding peptide
  MOD_RES (5)..(6)..(37)..(39): Xaa is C or S

SEQ ID NO: 80800 - protein, 32 aa, Artificial Sequence
  Cyclic GFR-binding peptide
  MOD_RES (3)..(4): Xaa is C or S
APXXVPQALRSVKIAKVVGRKPKVKEVQVMIV

SEQ ID NO: 80801 - protein, 31 aa, Artificial Sequence
  Cyclic GFR-binding peptide
  MOD_RES (6)..(6): Xaa is C or S
VTKPTXAPTKLRPVQVRKIDDSSNVIKKATV

SEQ ID NO: 80802 - protein, 27 aa, Artificial Sequence
  Cyclic GFR-binding peptide
  MOD_RES (1)..(2): Xaa is C or S
XXVPQALRSVKIAKVVGRKPKVKEVQV

SEQ ID NO: 80803 - protein, 30 aa, Artificial Sequence
  Cyclic GFR-binding peptide
  MOD_RES (27)..(29): Xaa is C or S
RPVQMRKIDEYDKVVKKATVEMVVEGXGXR

SEQ ID NO: 80804 - protein, 38 aa, Artificial Sequence; identical to SEQ ID NO: 28792
  Cyclic GFR-binding peptide
  MOD_RES (5)..(6)..(37): Xaa is C or S

SEQ ID NO: 80805 - protein, 32 aa, Artificial Sequence
  Cyclic GFR-binding peptide
  MOD_RES (4)..(5): Xaa is C or S
PKAXXVPTELSNITMQIMDENEKVVIGEMSDM

SEQ ID NO: 80806 - protein, 35 aa, Artificial Sequence
  Cyclic GFR-binding peptide
  MOD_RES (6)..(7): Xaa is C or S
TVPKPXXAPTQLSNITVQIMDDSSNVIIGEMSNMV

SEQ ID NO: 80807 - protein, 36 aa, Artificial Sequence; identical to SEQ ID NO: 28797
  Cyclic GFR-binding peptide
  MOD_RES (1)..(1): Xaa is C or S

SEQ ID NO: 80808 - protein, 36 aa, Artificial Sequence
  Cyclic GFR-binding peptide
  MOD_RES (7)..(7): Xaa is C or S
HVTKPTXAPTKLSNITVQIMDDSSNVIIGEMSNMVV

SEQ ID NO: 80809 - protein, 23 aa, Artificial Sequence
  Cyclic GFR-binding peptide
KLSNITVQIMDDSSNVIIGEMSN

SEQ ID NO: 80810 - protein, 36 aa, Artificial Sequence
  Cyclic GFR-binding peptide
  MOD_RES (6)..(7): Xaa is C or S
SIPKAXXVPTELRPVQMRKIDEYDKVVKKATVEMVV

SEQ ID NO: 80811 - protein, 29 aa, Artificial Sequence
  Cyclic GFR-binding peptide
  MOD_RES (1)..(1): Xaa is C or S
XVPTELSNITMQIMDEYDKVVIGEMSEMV

SEQ ID NO: 80812 - protein, 35 aa, Artificial Sequence; identical to SEQ ID NO: 28802
  Cyclic GFR-binding peptide
  MOD_RES (4)..(5): Xaa is C or S

SEQ ID NO: 80813 - protein, 29 aa, Artificial Sequence
  Cyclic GFR-binding peptide
  MOD_RES (2)..(3): Xaa is C or S
PXXVPQALRSVKIAKVVGRKPKVKEVQVM

SEQ ID NO: 80814 - protein, 35 aa, Artificial Sequence
  Cyclic GFR-binding peptide
  MOD_RES (5)..(6): Xaa is C or S
SASPXXVSQDLRSVKIAKVIGKTPKIKEVQVMIVK

SEQ ID NO: 80815 - protein, 39 aa, Artificial Sequence; identical to SEQ ID NO: 28806
  Cyclic GFR-binding peptide
  MOD_RES (4)..(5)..(37)..(39): Xaa is C or S

SEQ ID NO: 80816 - protein, 32 aa, Artificial Sequence
  Cyclic GFR-binding peptide
QPSRVHHEPLPVVYYEYVRKKPKLEQLSNRLE

SEQ ID NO: 80817 - protein, 33 aa, Artificial Sequence
  Cyclic GFR-binding peptide
  MOD_RES (6)..(7): Xaa is C or S
ASAAPXXVPQALRSVKIAKVVGRKPKVKEVQVM

SEQ ID NO: 80818 - protein, 32 aa, Artificial Sequence
  Cyclic GFR-binding peptide
  MOD_RES (30)..(32): Xaa is C or S
TELRPVQMRKIDEYDKVVKKATVEMVVEGXGX

SEQ ID NO: 80819 - protein, 32 aa, Artificial Sequence
  Cyclic GFR-binding peptide
  MOD_RES (29)..(31): Xaa is C or S
QDLRPVQIRKIIGKTPKIKKATVMIVKSXKXS

SEQ ID NO: 80820 - protein, 33 aa, Artificial Sequence
  Cyclic GFR-binding peptide
  MOD_RES (30)..(32): Xaa is C or S
TQLRSVKVAKVDDSSNVIKEVQVNMVVRAXGXH

SEQ ID NO: 80821 - protein, 36 aa, Artificial Sequence; identical to SEQ ID NO: 28813
  Cyclic GFR-binding peptide
  MOD_RES (35)..(35): Xaa is C or S

SEQ ID NO: 80822 - protein, 25 aa, Artificial Sequence
  Cyclic GFR-binding peptide
RSVKIAKVIGKTPKIKEVQVMIVKS

SEQ ID NO: 80823 - protein, 24 aa, Artificial Sequence
  Cyclic GFR-binding peptide
RPVQIRKIVGRKPKVKKATVMIVR

SEQ ID NO: 80824 - protein, 28 aa, Artificial Sequence
  Cyclic GFR-binding peptide
  MOD_RES (27)..(27): Xaa is C or S
SNITMQIMDEYDKVVIGEMSEMVVEGXG

SEQ ID NO: 80825 - protein, 36 aa, Artificial Sequence
  Cyclic GFR-binding peptide
  MOD_RES (6)..(7): Xaa is C or S
TVPKPXXAPTQLRPVQVRKIDDSSNVIKKATVNMVV

SEQ ID NO: 80826 - protein, 30 aa, Artificial Sequence
  Cyclic GFR-binding peptide
  MOD_RES (2)..(3): Xaa is C or S
PXXVPQDLRSVKIAKVVGRTPKVKEVQVMV

SEQ ID NO: 80827 - protein, 23 aa, Artificial Sequence
  Cyclic GFR-binding peptide
EPLPMVYYRIKPHQGQHEQLSNF

SEQ ID NO: 80828 - protein, 31 aa, Artificial Sequence
  Cyclic GFR-binding peptide
RVHHEPLTVLYYEYVRKKPKLEQLSNRLEEH

SEQ ID NO: 80829 - protein, 40 aa, Artificial Sequence; identical to SEQ ID NO: 28822
  Cyclic GFR-binding peptide
  MOD_RES (4)..(5)..(37)..(39): Xaa is C or S

SEQ ID NO: 80830 - protein, 29 aa, Artificial Sequence
  Cyclic GFR-binding peptide
  MOD_RES (2)..(3): Xaa is C or S
PXXVPQDLRPVQIRKIVGRTPKVKKATVM

SEQ ID NO: 80831 - protein, 26 aa, Artificial Sequence
  Cyclic GFR-binding peptide
QVQLEPLTVLYYEIVRKKPIFEQLSN

SEQ ID NO: 80832 - protein, 25 aa, Artificial Sequence
  Cyclic GFR-binding peptide
RSVKVAKVDDSSNVIKEVQVNMVVR

SEQ ID NO: 80833 - protein, 32 aa, Artificial Sequence
  Cyclic GFR-binding peptide
  MOD_RES (7)..(7): Xaa is C or S
HVTKPTXAPTKLRPVQVRKIDDSSNVIKKATV

SEQ ID NO: 80834 - protein, 33 aa, Artificial Sequence
  Cyclic GFR-binding peptide
  MOD_RES (5)..(6): Xaa is C or S
VPKPXXAPTQLRPVQVRKIDDSSNVIKKATVNM

SEQ ID NO: 80835 - protein, 24 aa, Artificial Sequence
  Cyclic GFR-binding peptide
HHEPLPVVYYEYVRKKPKLEQLSN

SEQ ID NO: 80836 - protein, 29 aa, Artificial Sequence
  Cyclic GFR-binding peptide
VPTELRPVQMRKIDENEKVVKKATVDMVV

SEQ ID NO: 80837 - protein, 35 aa, Artificial Sequence
  Cyclic GFR-binding peptide
  MOD_RES (5)..(5): Xaa is C or S
SSVKXQPSRVHHEPLTVLYYEYVRKKPKLEQLSNR

SEQ ID NO: 80838 - protein, 26 aa, Artificial Sequence
  Cyclic GFR-binding peptide
TELSNITMQIMDEYDKVVIGEMSEMV

SEQ ID NO: 80839 - protein, 33 aa, Artificial Sequence
  Cyclic GFR-binding peptide
  MOD_RES (6)..(6): Xaa is C or S
VTKPTXAPTKLRPVQVRKIDDSSNVIKKATVNM

SEQ ID NO: 80840 - protein, 38 aa, Artificial Sequence; identical to SEQ ID NO: 28835
  Cyclic GFR-binding peptide
  MOD_RES (6)..(6): Xaa is C or S

SEQ ID NO: 80841 - protein, 25 aa, Artificial Sequence
  Cyclic GFR-binding peptide
QLEPLTVLYYEIVRKKPIFEQLSNT

SEQ ID NO: 80842 - protein, 38 aa, Artificial Sequence; identical to SEQ ID NO: 28841
  Cyclic GFR-binding peptide
  MOD_RES (6)..(7)..(38): Xaa is C or S

SEQ ID NO: 80843 - protein, 27 aa, Artificial Sequence
  Cyclic GFR-binding peptide
ALRPVQIRKIVGRKPKVKKATVMIVRS

SEQ ID NO: 80844 - protein, 33 aa, Artificial Sequence; identical to SEQ ID NO: 28844
  Cyclic GFR-binding peptide
  MOD_RES (1)..(2): Xaa is C or S

SEQ ID NO: 80845 - protein, 20 aa, Artificial Sequence
  Cyclic GFR-binding peptide
RSVKIAKVVGRKPKVKEVQV

SEQ ID NO: 80846 - protein, 22 aa, Artificial Sequence
  Cyclic GFR-binding peptide
EPLTVLYYEYVRKKPKLEQLSN

SEQ ID NO: 80847 - protein, 33 aa, Artificial Sequence
  Cyclic GFR-binding peptide
  MOD_RES (3)..(4): Xaa is C or S
SPXXVSQDLRSVKIAKVIGKTPKIKEVQVMIVK

SEQ ID NO: 80848 - protein, 35 aa, Artificial Sequence; identical to SEQ ID NO: 28848
  Cyclic GFR-binding peptide
  MOD_RES (32)..(34): Xaa is C or S

SEQ ID NO: 80849 - protein, 34 aa, Artificial Sequence; identical to SEQ ID NO: 28851
  Cyclic GFR-binding peptide
  MOD_RES (32)..(34): Xaa is C or S

SEQ ID NO: 80850 - protein, 26 aa, Artificial Sequence
  Cyclic GFR-binding peptide
  MOD_RES (26)..(26): Xaa is C or S
RPVQIRKIVGRTPKVKKATVMVVKSX

SEQ ID NO: 80851 - protein, 29 aa, Artificial Sequence
  Cyclic GFR-binding peptide
  MOD_RES (27)..(29): Xaa is C or S
RPVQMRKIDENEKVVKKATVDMVVEGXGX

SEQ ID NO: 80852 - protein, 32 aa, Artificial Sequence
  Cyclic GFR-binding peptide
  MOD_RES (30)..(32): Xaa is C or S
PQALSNITIQIMVGRKPKVIGEMSMIVRSXKX

SEQ ID NO: 80853 - protein, 31 aa, Artificial Sequence
  Cyclic GFR-binding peptide
  MOD_RES (3)..(4): Xaa is C or S
KAXXVPTELSNITMQIMDEYDKVVIGEMSEM

SEQ ID NO: 80854 - protein, 33 aa, Artificial Sequence
  Cyclic GFR-binding peptide
  MOD_RES (5)..(6): Xaa is C or S
SASPXXVPQDLSNITIQIMVGRTPKVIGEMSMV

SEQ ID NO: 80855 - protein, 32 aa, Artificial Sequence
  Cyclic GFR-binding peptide
  MOD_RES (31)..(31): Xaa is C or S
PTELRPVQMRKIDENEKVVKKATVDMVVEGXG

SEQ ID NO: 80856 - protein, 24 aa, Artificial Sequence
  Cyclic GFR-binding peptide
LRSVKMAKVDEYDKVVKEVQVEMV

SEQ ID NO: 80857 - protein, 34 aa, Artificial Sequence
  Cyclic GFR-binding peptide
  MOD_RES (3)..(3): Xaa is C or S
VQXRPTQVQLEPLPVVYYEIVRKKPIFEQLSNTL

SEQ ID NO: 80858 - protein, 39 aa, Artificial Sequence; identical to SEQ ID NO: 28858
  Cyclic GFR-binding peptide
  MOD_RES (4)..(5)..(36)..(38): Xaa is C or S

SEQ ID NO: 80859 - protein, 33 aa, Artificial Sequence; identical to SEQ ID NO: 28859
  Cyclic GFR-binding peptide
  MOD_RES (2)..(2): Xaa is C or S

SEQ ID NO: 80860 - protein, 31 aa, Artificial Sequence; identical to SEQ ID NO: 28860
  Cyclic GFR-binding peptide
  MOD_RES (1)..(1): Xaa is C or S

SEQ ID NO: 80861 - protein, 32 aa, Artificial Sequence
  Cyclic GFR-binding peptide
QPSRVHHEPLTVLYYEYVRKKPKLEQLSNRLE

SEQ ID NO: 80862 - protein, 35 aa, Artificial Sequence; identical to SEQ ID NO: 28863
  Cyclic GFR-binding peptide
  MOD_RES (1)..(1): Xaa is C or S

SEQ ID NO: 80863 - protein, 34 aa, Artificial Sequence; identical to SEQ ID NO: 28864
  Cyclic GFR-binding peptide
  MOD_RES (3)..(4): Xaa is C or S

SEQ ID NO: 80864 - protein, 35 aa, Artificial Sequence
  Cyclic GFR-binding peptide
  MOD_RES (5)..(6): Xaa is C or S
SASPXXVPQDLRPVQIRKIVGRTPKVKKATVMVVK

SEQ ID NO: 80865 - protein, 25 aa, Artificial Sequence
  Cyclic GFR-binding peptide
TKLSNITVQIMDDSSNVIIGEMSNM

SEQ ID NO: 80866 - protein, 26 aa, Artificial Sequence
  Cyclic GFR-binding peptide
TKLRPVQVRKIDDSSNVIKKATVNMV

SEQ ID NO: 80867 - protein, 29 aa, Artificial Sequence
  Cyclic GFR-binding peptide
  MOD_RES (26)..(28): Xaa is C or S
SNITIQIMVGRKPKVIGEMSMIVRSXKXS

SEQ ID NO: 80868 - protein, 36 aa, Artificial Sequence; identical to SEQ ID NO: 28872
  Cyclic GFR-binding peptide
  MOD_RES (1)..(33)..(35): Xaa is C or S

SEQ ID NO: 80869 - protein, 28 aa, Artificial Sequence
  Cyclic GFR-binding peptide
  MOD_RES (1)..(2): Xaa is C or S
XXVSQDLSNITIQIMIGKTPKIIGEMSM

SEQ ID NO: 80870 - protein, 39 aa, Artificial Sequence; identical to SEQ ID NO: 28873
  Cyclic GFR-binding peptide
  MOD_RES (4)..(4): Xaa is C or S

SEQ ID NO: 80871 - protein, 35 aa, Artificial Sequence; identical to SEQ ID NO: 28875
  Cyclic GFR-binding peptide
  MOD_RES (2)..(3)..(35): Xaa is C or S

SEQ ID NO: 80872 - protein, 30 aa, Artificial Sequence
  Cyclic GFR-binding peptide
  MOD_RES (27)..(29): Xaa is C or S
LSNITIQIMVGRKPKVIGEMSMIVRSXKXS

SEQ ID NO: 80873 - protein, 40 aa, Artificial Sequence; identical to SEQ ID NO: 28877
  Cyclic GFR-binding peptide
  MOD_RES (4)..(5)..(37)..(39): Xaa is C or S

SEQ ID NO: 80874 - protein, 35 aa, Artificial Sequence; identical to SEQ ID NO: 28880
  Cyclic GFR-binding peptide
  MOD_RES (1)..(2)..(33)..(35): Xaa is C or S

SEQ ID NO: 80875 - protein, 34 aa, Artificial Sequence
  Cyclic GFR-binding peptide
  MOD_RES (31)..(33): Xaa is C or S
PTQLRPVQVRKIDDSSNVIKKATVNMVVRAXGXH

SEQ ID NO: 80876 - protein, 39 aa, Artificial Sequence; identical to SEQ ID NO: 28886
  Cyclic GFR-binding peptide
  MOD_RES (37)..(39): Xaa is C or S

SEQ ID NO: 80877 - protein, 29 aa, Artificial Sequence
  Cyclic GFR-binding peptide
TKLSNITVQIMDDSSNVIIGEMSNMVVRS

SEQ ID NO: 80878 - protein, 27 aa, Artificial Sequence
  Cyclic GFR-binding peptide
  MOD_RES (1)..(2): Xaa is C or S
XXAPTKLRSVKVAKVDDSSNVIKEVQV

SEQ ID NO: 80879 - protein, 35 aa, Artificial Sequence; identical to SEQ ID NO: 28887
  Cyclic GFR-binding peptide
  MOD_RES (1)..(2)..(33)..(35): Xaa is C or S

SEQ ID NO: 80880 - protein, 31 aa, Artificial Sequence
  Cyclic GFR-binding peptide
  MOD_RES (1)..(2): Xaa is C or S
XXVPQALRPVQIRKIVGRKPKVKKATVMIVR

SEQ ID NO: 80881 - protein, 35 aa, Artificial Sequence; identical to SEQ ID NO: 28889
  Cyclic GFR-binding peptide
  MOD_RES (2)..(3)..(35): Xaa is C or S

SEQ ID NO: 80882 - protein, 34 aa, Artificial Sequence; identical to SEQ ID NO: 28893
  Cyclic GFR-binding peptide
  MOD_RES (1)..(32)..(34): Xaa is C or S

SEQ ID NO: 80883 - protein, 23 aa, Artificial Sequence
  Cyclic GFR-binding peptide
LRPVQMRKIDENEKVVKKATVDM

SEQ ID NO: 80884 - protein, 30 aa, Artificial Sequence
  Cyclic GFR-binding peptide
  MOD_RES (28)..(30): Xaa is C or S
LRPVQMRKIDENEKVVKKATVDMVVEGXGX

SEQ ID NO: 80885 - protein, 28 aa, Artificial Sequence
  Cyclic GFR-binding peptide
  MOD_RES (1)..(1): Xaa is C or S
XVPTELSNITMQIMDEYDKVVIGEMSEM

SEQ ID NO: 80886 - protein, 29 aa, Artificial Sequence
  Cyclic GFR-binding peptide
  MOD_RES (29)..(29): Xaa is C or S
ELRSVKMAKVDEYDKVVKEVQVEMVVEGX

SEQ ID NO: 80887 - protein, 28 aa, Artificial Sequence
  Cyclic GFR-binding peptide
VSQDLRPVQIRKIIGKTPKIKKATVMIV

SEQ ID NO: 80888 - protein, 31 aa, Artificial Sequence; identical to SEQ ID NO: 28905
  Cyclic GFR-binding peptide

SEQ ID NO: 80889 - protein, 36 aa, Artificial Sequence
  Cyclic GFR-binding peptide
  MOD_RES (6)..(7): Xaa is C or S
KIPKAXXVPTELRSVKMAKVDENEKVVKEVQVDMVV

SEQ ID NO: 80890 - protein, 33 aa, Artificial Sequence
  Cyclic GFR-binding peptide
  MOD_RES (3)..(4): Xaa is C or S
KPXXAPTKLSNITVQIMDDSSNVIIGEMSNMVV

SEQ ID NO: 80891 - protein, 22 aa, Artificial Sequence
  Cyclic GFR-binding peptide
QLSNITVQIMDDSSNVIIGEMS

SEQ ID NO: 80892 - protein, 24 aa, Artificial Sequence
  Cyclic GFR-binding peptide
EPLTMLYYRIKPHQGQHEQLSNFL

SEQ ID NO: 80893 - protein, 28 aa, Artificial Sequence
  Cyclic GFR-binding peptide
  MOD_RES (1)..(2): Xaa is C or S
XXVPTELSNITMQIMDEYDKVVIGEMSE

SEQ ID NO: 80894 - protein, 33 aa, Artificial Sequence
  Cyclic GFR-binding peptide
  MOD_RES (6)..(7): Xaa is C or S
ASASPXXVSQDLRSVKIAKVIGKTPKIKEVQVM

SEQ ID NO: 80895 - protein, 32 aa, Artificial Sequence
  Cyclic GFR-binding peptide
  MOD_RES (5)..(6): Xaa is C or S
IPKAXXVPTELSNITMQIMDENEKVVIGEMSD

SEQ ID NO: 80896 - protein, 24 aa, Artificial Sequence
  Cyclic GFR-binding peptide
QALRPVQIRKIVGRKPKVKKATVM

SEQ ID NO: 80897 - protein, 43 aa, Artificial Sequence; identical to SEQ ID NO: 28920
  Cyclic GFR-binding peptide
  MOD_RES (5)..(42): Xaa is C or S

SEQ ID NO: 80898 - protein, 32 aa, Artificial Sequence
  Cyclic GFR-binding peptide
  MOD_RES (4)..(4): Xaa is C or S
GLEXVPTEEEPLPMVYYRIKPHQGQHEQLSNF

SEQ ID NO: 80899 - protein, 28 aa, Artificial Sequence
  Cyclic GFR-binding peptide
  MOD_RES (28)..(28): Xaa is C or S
LSNITVQIMDDSSNVIIGEMSNMVVRSX

SEQ ID NO: 80900 - protein, 41 aa, Artificial Sequence; identical to SEQ ID NO: 28922
  Cyclic GFR-binding peptide
  MOD_RES (2)..(39)..(41): Xaa is C or S

SEQ ID NO: 80901 - protein, 26 aa, Artificial Sequence
  Cyclic GFR-binding peptide
EEPLPMVYYRIKPHQGQHEQLSNFLQ

SEQ ID NO: 80902 - protein, 36 aa, Artificial Sequence; identical to SEQ ID NO: 28925
  Cyclic GFR-binding peptide
  MOD_RES (4)..(5)..(36): Xaa is C or S

SEQ ID NO: 80903 - protein, 31 aa, Artificial Sequence
  Cyclic GFR-binding peptide
  MOD_RES (1)..(2): Xaa is C or S
XXVPTELSNITMQIMDENEKVVIGEMSDMVV

SEQ ID NO: 80904 - protein, 30 aa, Artificial Sequence
  Cyclic GFR-binding peptide
  MOD_RES (29)..(29): Xaa is C or S
QALRSVKIAKVVGRKPKVKEVQVMIVRSXK

SEQ ID NO: 80905 - protein, 28 aa, Artificial Sequence
  Cyclic GFR-binding peptide
  MOD_RES (2)..(2): Xaa is C or S
TXAPTKLRSVKVAKVDDSSNVIKEVQVN

SEQ ID NO: 80906 - protein, 31 aa, Artificial Sequence
  Cyclic GFR-binding peptide
  MOD_RES (31)..(31): Xaa is C or S
HEPLTVLYYEYVRKKPKLEQLSNRLEEHLEX

SEQ ID NO: 80907 - protein, 29 aa, Artificial Sequence
  Cyclic GFR-binding peptide
  MOD_RES (28)..(28): Xaa is C or S
LSNITMQIMDEYDKVVIGEMSEMVVEGXG

SEQ ID NO: 80908 - protein, 26 aa, Artificial Sequence
  Cyclic GFR-binding peptide
LRPVQMRKIDEYDKVVKKATVEMVVE

SEQ ID NO: 80909 - protein, 34 aa, Artificial Sequence; identical to SEQ ID NO: 28930
  Cyclic GFR-binding peptide
  MOD_RES (3)..(4): Xaa is C or S

SEQ ID NO: 80910 - protein, 24 aa, Artificial Sequence
  Cyclic GFR-binding peptide
EPLTVLYYEYVRKKPKLEQLSNRL

SEQ ID NO: 80911 - protein, 26 aa, Artificial Sequence
  Cyclic GFR-binding peptide
KLRPVQVRKIDDSSNVIKKATVNMVV

SEQ ID NO: 80912 - protein, 33 aa, Artificial Sequence; identical to SEQ ID NO: 28934
  Cyclic GFR-binding peptide
  MOD_RES (2)..(3): Xaa is C or S

SEQ ID NO: 80913 - protein, 32 aa, Artificial Sequence
  Cyclic GFR-binding peptide
  MOD_RES (29)..(31): Xaa is C or S
QLRPVQVRKIDDSSNVIKKATVNMVVRAXGXH

SEQ ID NO: 80914 - protein, 36 aa, Artificial Sequence; identical to SEQ ID NO: 28941
  Cyclic GFR-binding peptide
  MOD_RES (1)..(2)..(34)..(36): Xaa is C or S

SEQ ID NO: 80915 - protein, 32 aa, Artificial Sequence
  Cyclic GFR-binding peptide
QVQLEPLTVLYYEIVRKKPIFEQLSNTLEDHL

SEQ ID NO: 80916 - protein, 42 aa, Artificial Sequence; identical to SEQ ID NO: 28942
  Cyclic GFR-binding peptide
  MOD_RES (6)..(7)..(39)..(41): Xaa is C or S

SEQ ID NO: 80917 - protein, 29 aa, Artificial Sequence
  Cyclic GFR-binding peptide
  MOD_RES (2)..(3): Xaa is C or S
PXXVSQDLRPVQIRKIIGKTPKIKKATVM

SEQ ID NO: 80918 - protein, 33 aa, Artificial Sequence; identical to SEQ ID NO: 28944
  Cyclic GFR-binding peptide
  MOD_RES (31)..(33): Xaa is C or S

SEQ ID NO: 80919 - protein, 37 aa, Artificial Sequence; identical to SEQ ID NO: 28946
  Cyclic GFR-binding peptide
  MOD_RES (6)..(7): Xaa is C or S

SEQ ID NO: 80920 - protein, 25 aa, Artificial Sequence
  Cyclic GFR-binding peptide
VPQALRSVKIAKVVGRKPKVKEVQV

SEQ ID NO: 80921 - protein, 37 aa, Artificial Sequence; identical to SEQ ID NO: 28948
  Cyclic GFR-binding peptide
  MOD_RES (6)..(7): Xaa is C or S

SEQ ID NO: 80922 - protein, 31 aa, Artificial Sequence; identical to SEQ ID NO: 28949
  Cyclic GFR-binding peptide
  MOD_RES (31)..(31): Xaa is C or S

SEQ ID NO: 80923 - protein, 37 aa, Artificial Sequence; identical to SEQ ID NO: 28950
  Cyclic GFR-binding peptide
  MOD_RES (5)..(6)..(37): Xaa is C or S

SEQ ID NO: 80924 - protein, 31 aa, Artificial Sequence
  Cyclic GFR-binding peptide
  MOD_RES (2)..(3): Xaa is C or S
AXXVPTELSNITMQIMDEYDKVVIGEMSEMV

SEQ ID NO: 80925 - protein, 32 aa, Artificial Sequence
  Cyclic GFR-binding peptide
RVHHEPLTVLYYEYVRKKPKLEQLSNRLEEHL

SEQ ID NO: 80926 - protein, 30 aa, Artificial Sequence
  Cyclic GFR-binding peptide
TQVQLEPLTVLYYEIVRKKPIFEQLSNTLE

SEQ ID NO: 80927 - protein, 29 aa, Artificial Sequence
  Cyclic GFR-binding peptide
  MOD_RES (3)..(4): Xaa is C or S
KAXXVPTELSNITMQIMDENEKVVIGEMS

SEQ ID NO: 80928 - protein, 27 aa, Artificial Sequence
  Cyclic GFR-binding peptide
  MOD_RES (26)..(26): Xaa is C or S
RPVQIRKIVGRTPKVKKATVMVVKSXK

SEQ ID NO: 80929 - protein, 33 aa, Artificial Sequence
  Cyclic GFR-binding peptide
  MOD_RES (3)..(4): Xaa is C or S
KPXXAPTQLRSVKVAKVDDSSNVIKEVQVNMVV

SEQ ID NO: 80930 - protein, 25 aa, Artificial Sequence
  Cyclic GFR-binding peptide
PQALRPVQIRKIVGRKPKVKKATVM

SEQ ID NO: 80931 - protein, 31 aa, Artificial Sequence
  Cyclic GFR-binding peptide
  MOD_RES (4)..(4): Xaa is C or S
KPTXAPTKLRPVQVRKIDDSSNVIKKATVNM

SEQ ID NO: 80932 - protein, 33 aa, Artificial Sequence; identical to SEQ ID NO: 28966
  Cyclic GFR-binding peptide
  MOD_RES (1)..(2)..(33): Xaa is C or S

SEQ ID NO: 80933 - protein, 31 aa, Artificial Sequence
  Cyclic GFR-binding peptide
  MOD_RES (5)..(6): Xaa is C or S
VPKPXXAPTQLRSVKVAKVDDSSNVIKEVQV

SEQ ID NO: 80934 - protein, 32 aa, Artificial Sequence; identical to SEQ ID NO: 28967
  Cyclic GFR-binding peptide
  MOD_RES (31)..(31): Xaa is C or S

SEQ ID NO: 80935 - protein, 29 aa, Artificial Sequence
  Cyclic GFR-binding peptide
  MOD_RES (3)..(4): Xaa is C or S
SPXXVPQDLSNITIQIMVGRTPKVIGEMS

SEQ ID NO: 80936 - protein, 39 aa, Artificial Sequence; identical to SEQ ID NO: 28969
  Cyclic GFR-binding peptide
  MOD_RES (3)..(3): Xaa is C or S

SEQ ID NO: 80937 - protein, 37 aa, Artificial Sequence; identical to SEQ ID NO: 28971
  Cyclic GFR-binding peptide
  MOD_RES (3)..(4)..(35)..(37): Xaa is C or S

SEQ ID NO: 80938 - protein, 26 aa, Artificial Sequence
  Cyclic GFR-binding peptide
PTELSNITMQIMDEYDKVVIGEMSEM

SEQ ID NO: 80939 - protein, 28 aa, Artificial Sequence
  Cyclic GFR-binding peptide
  MOD_RES (1)..(2): Xaa is C or S
XXVPQDLSNITIQIMVGRTPKVIGEMSM

SEQ ID NO: 80940 - protein, 28 aa, Artificial Sequence
  Cyclic GFR-binding peptide
  MOD_RES (1)..(2): Xaa is C or S
XXAPTQLSNITVQIMDDSSNVIIGEMSN

SEQ ID NO: 80941 - protein, 27 aa, Artificial Sequence
  Cyclic GFR-binding peptide
  MOD_RES (1)..(1): Xaa is C or S
XAPTKLRPVQVRKIDDSSNVIKKATVN

SEQ ID NO: 80942 - protein, 30 aa, Artificial Sequence; identical to SEQ ID NO: 28973
  Cyclic GFR-binding peptide

SEQ ID NO: 80943 - protein, 27 aa, Artificial Sequence
  Cyclic GFR-binding peptide
EPLPVVYYEIVRKKPIFEQLSNTLEDH

SEQ ID NO: 80944 - protein, 38 aa, Artificial Sequence; identical to SEQ ID NO: 28974
  Cyclic GFR-binding peptide
  MOD_RES (35)..(37): Xaa is C or S

SEQ ID NO: 80945 - protein, 35 aa, Artificial Sequence
  Cyclic GFR-binding peptide
  MOD_RES (2)..(2): Xaa is C or S
KXQPSRVHHEPLPVVYYEYVRKKPKLEQLSNRLEE

SEQ ID NO: 80946 - protein, 25 aa, Artificial Sequence
  Cyclic GFR-binding peptide
LSNITIQIMVGRTPKVIGEMSMVVK

SEQ ID NO: 80947 - protein, 34 aa, Artificial Sequence; identical to SEQ ID NO: 28977
  Cyclic GFR-binding peptide
  MOD_RES (1)..(2)..(34): Xaa is C or S

SEQ ID NO: 80948 - protein, 30 aa, Artificial Sequence
  Cyclic GFR-binding peptide
  MOD_RES (4)..(5): Xaa is C or S
PKPXXAPTKLSNITVQIMDDSSNVIIGEMS

SEQ ID NO: 80949 - protein, 36 aa, Artificial Sequence; identical to SEQ ID NO: 28982
  Cyclic GFR-binding peptide
  MOD_RES (36)..(36): Xaa is C or S

SEQ ID NO: 80950 - protein, 32 aa, Artificial Sequence; identical to SEQ ID NO: 28983
  Cyclic GFR-binding peptide
  MOD_RES (1)..(32): Xaa is C or S

SEQ ID NO: 80951 - protein, 37 aa, Artificial Sequence; identical to SEQ ID NO: 28985
  Cyclic GFR-binding peptide
  MOD_RES (3)..(4)..(36): Xaa is C or S

SEQ ID NO: 80952 - protein, 30 aa, Artificial Sequence
  Cyclic GFR-binding peptide
  MOD_RES (1)..(1): Xaa is C or S
XVPTEEEPLTMLYYRIKPHQGQHEQLSNFL

SEQ ID NO: 80953 - protein, 33 aa, Artificial Sequence
  Cyclic GFR-binding peptide
  MOD_RES (2)..(2): Xaa is C or S
EXVPTEEEPLPMVYYRIKPHQGQHEQLSNFLQH

SEQ ID NO: 80954 - protein, 29 aa, Artificial Sequence
  Cyclic GFR-binding peptide
EPLTVLYYEIVRKKPIFEQLSNTLEDHLA

SEQ ID NO: 80955 - protein, 24 aa, Artificial Sequence
  Cyclic GFR-binding peptide
PTELRSVKMAKVDENEKVVKEVQV

SEQ ID NO: 80956 - protein, 28 aa, Artificial Sequence
  Cyclic GFR-binding peptide
PTQLSNITVQIMDDSSNVIIGEMSNMVV

SEQ ID NO: 80957 - protein, 35 aa, Artificial Sequence; identical to SEQ ID NO: 28991
  Cyclic GFR-binding peptide

SEQ ID NO: 80958 - protein, 30 aa, Artificial Sequence
  Cyclic GFR-binding peptide
  MOD_RES (28)..(30): Xaa is C or S
DLRPVQIRKIIGKTPKIKKATVMIVKSXKX

SEQ ID NO: 80959 - protein, 43 aa, Artificial Sequence; identical to SEQ ID NO: 28996
  Cyclic GFR-binding peptide
  MOD_RES (3)..(40)..(42): Xaa is C or S

SEQ ID NO: 80960 - protein, 22 aa, Artificial Sequence
  Cyclic GFR-binding peptide
LSNITIQIMVGRKPKVIGEMSM

SEQ ID NO: 80961 - protein, 25 aa, Artificial Sequence
  Cyclic GFR-binding peptide
VSQDLSNITIQIMIGKTPKIIGEMS

SEQ ID NO: 80962 - protein, 29 aa, Artificial Sequence
  Cyclic GFR-binding peptide
  MOD_RES (2)..(2): Xaa is C or S
EXVPTEEEPLPMVYYRIKPHQGQHEQLSN

SEQ ID NO: 80963 - protein, 36 aa, Artificial Sequence; identical to SEQ ID NO: 29000
  Cyclic GFR-binding peptide
  MOD_RES (4)..(4): Xaa is C or S

SEQ ID NO: 80964 - protein, 39 aa, Artificial Sequence; identical to SEQ ID NO: 29002
  Cyclic GFR-binding peptide
  MOD_RES (5)..(6)..(38): Xaa is C or S

SEQ ID NO: 80965 - protein, 38 aa, Artificial Sequence; identical to SEQ ID NO: 29005
  Cyclic GFR-binding peptide
  MOD_RES (3)..(4)..(35)..(37): Xaa is C or S

SEQ ID NO: 80966 - protein, 30 aa, Artificial Sequence; identical to SEQ ID NO: 1100
  Cyclic GFR-binding peptide

SEQ ID NO: 80967 - protein, 23 aa, Artificial Sequence
  Cyclic GFR-binding peptide
ALRPVQIRKIVGRKPKVKKATVM

SEQ ID NO: 80968 - protein, 31 aa, Artificial Sequence
  Cyclic GFR-binding peptide
  MOD_RES (2)..(3): Xaa is C or S
PXXAPTQLRPVQVRKIDDSSNVIKKATVNMV

SEQ ID NO: 80969 - protein, 29 aa, Artificial Sequence
  Cyclic GFR-binding peptide
VPQDLRSVKIAKVVGRTPKVKEVQVMVVK

SEQ ID NO: 80970 - protein, 30 aa, Artificial Sequence
  Cyclic GFR-binding peptide
  MOD_RES (1)..(1): Xaa is C or S
XVPTELSNITMQIMDEYDKVVIGEMSEMVV

SEQ ID NO: 80971 - protein, 29 aa, Artificial Sequence
  Cyclic GFR-binding peptide
  MOD_RES (27)..(29): Xaa is C or S
LSNITIQIMVGRKPKVIGEMSMIVRSXKX

SEQ ID NO: 80972 - protein, 31 aa, Artificial Sequence
  Cyclic GFR-binding peptide
  MOD_RES (3)..(4): Xaa is C or S
APXXVPQALRSVKIAKVVGRKPKVKEVQVMI

SEQ ID NO: 80973 - protein, 33 aa, Artificial Sequence
  Cyclic GFR-binding peptide
  MOD_RES (5)..(6): Xaa is C or S
SASPXXVPQDLRPVQIRKIVGRTPKVKKATVMV

SEQ ID NO: 80974 - protein, 36 aa, Artificial Sequence; identical to SEQ ID NO: 29009
  Cyclic GFR-binding peptide
  MOD_RES (35)..(35): Xaa is C or S

SEQ ID NO: 80975 - protein, 38 aa, Artificial Sequence; identical to SEQ ID NO: 29010
  Cyclic GFR-binding peptide
  MOD_RES (5)..(6)..(38): Xaa is C or S

SEQ ID NO: 80976 - protein, 27 aa, Artificial Sequence
  Cyclic GFR-binding peptide
EPLTVLYYEIVRKKPIFEQLSNTLEDH

SEQ ID NO: 80977 - protein, 24 aa, Artificial Sequence
  Cyclic GFR-binding peptide
RSVKVAKVDDSSNVIKEVQVNMVV

SEQ ID NO: 80978 - protein, 35 aa, Artificial Sequence; identical to SEQ ID NO: 29018
  Cyclic GFR-binding peptide
  MOD_RES (4)..(5): Xaa is C or S

SEQ ID NO: 80979 - protein, 26 aa, Artificial Sequence
  Cyclic GFR-binding peptide
LSNITMQIMDENEKVVIGEMSDMVVE

SEQ ID NO: 80980 - protein, 41 aa, Artificial Sequence; identical to SEQ ID NO: 29020
  Cyclic GFR-binding peptide
  MOD_RES (6)..(40): Xaa is C or S

SEQ ID NO: 80981 - protein, 29 aa, Artificial Sequence
  Cyclic GFR-binding peptide
  MOD_RES (29)..(29): Xaa is C or S
QDLRPVQIRKIVGRTPKVKKATVMVVKSX

SEQ ID NO: 80982 - protein, 34 aa, Artificial Sequence; identical to SEQ ID NO: 29021
  Cyclic GFR-binding peptide
  MOD_RES (1)..(33): Xaa is C or S

SEQ ID NO: 80983 - protein, 24 aa, Artificial Sequence
  Cyclic GFR-binding peptide
RPVQIRKIVGRTPKVKKATVMVVK

SEQ ID NO: 80984 - protein, 27 aa, Artificial Sequence
  Cyclic GFR-binding peptide
VPQALSNITIQIMVGRKPKVIGEMSMI

SEQ ID NO: 80985 - protein, 34 aa, Artificial Sequence; identical to SEQ ID NO: 29028
  Cyclic GFR-binding peptide
  MOD_RES (31)..(33): Xaa is C or S

SEQ ID NO: 80986 - protein, 29 aa, Artificial Sequence
  Cyclic GFR-binding peptide
  MOD_RES (28)..(28): Xaa is C or S
DLRPVQIRKIVGRTPKVKKATVMVVKSXK

SEQ ID NO: 80987 - protein, 33 aa, Artificial Sequence; identical to SEQ ID NO: 29032
  Cyclic GFR-binding peptide
  MOD_RES (2)..(3): Xaa is C or S

SEQ ID NO: 80988 - protein, 32 aa, Artificial Sequence
  Cyclic GFR-binding peptide
  MOD_RES (32)..(32): Xaa is C or S
QLEPLTVLYYEIVRKKPIFEQLSNTLEDHLAX

SEQ ID NO: 80989 - protein, 35 aa, Artificial Sequence; identical to SEQ ID NO: 29033
  Cyclic GFR-binding peptide
  MOD_RES (4)..(5): Xaa is C or S

SEQ ID NO: 80990 - protein, 28 aa, Artificial Sequence
  Cyclic GFR-binding peptide
PTKLRPVQVRKIDDSSNVIKKATVNMVV

SEQ ID NO: 80991 - protein, 30 aa, Artificial Sequence
  Cyclic GFR-binding peptide
  MOD_RES (29)..(29): Xaa is C or S
QALSNITIQIMVGRKPKVIGEMSMIVRSXK

SEQ ID NO: 80992 - protein, 32 aa, Artificial Sequence
  Cyclic GFR-binding peptide
  MOD_RES (2)..(3): Xaa is C or S
AXXVPTELSNITMQIMDENEKVVIGEMSDMVV

SEQ ID NO: 80993 - protein, 31 aa, Artificial Sequence
  Cyclic GFR-binding peptide
  MOD_RES (28)..(30): Xaa is C or S
LRPVQMRKIDENEKVVKKATVDMVVEGXGXR

SEQ ID NO: 80994 - protein, 35 aa, Artificial Sequence; identical to SEQ ID NO: 29043
  Cyclic GFR-binding peptide
  MOD_RES (1)..(33)..(35): Xaa is C or S

SEQ ID NO: 80995 - protein, 30 aa, Artificial Sequence
  Cyclic GFR-binding peptide
  MOD_RES (1)..(2): Xaa is C or S
XXVPTELSNITMQIMDEYDKVVIGEMSEMV

SEQ ID NO: 80996 - protein, 26 aa, Artificial Sequence
  Cyclic GFR-binding peptide
ALRPVQIRKIVGRKPKVKKATVMIVR

SEQ ID NO: 80997 - protein, 38 aa, Artificial Sequence; identical to SEQ ID NO: 29048
  Cyclic GFR-binding peptide
  MOD_RES (4)..(5)..(37): Xaa is C or S

SEQ ID NO: 80998 - protein, 34 aa, Artificial Sequence
  Cyclic GFR-binding peptide
  MOD_RES (6)..(7): Xaa is C or S
YVPKPXXAPTKLRPVQVRKIDDSSNVIKKATVNM

SEQ ID NO: 80999 - protein, 42 aa, Artificial Sequence; identical to SEQ ID NO: 29049
  Cyclic GFR-binding peptide
  MOD_RES (6)..(7)..(39)..(41): Xaa is C or S

SEQ ID NO: 81000 - protein, 28 aa, Artificial Sequence
  Cyclic GFR-binding peptide
  MOD_RES (1)..(1): Xaa is C or S
XVPQALRPVQIRKIVGRKPKVKKATVMI

SEQ ID NO: 81001 - protein, 36 aa, Artificial Sequence; identical to SEQ ID NO: 29051
  Cyclic GFR-binding peptide
  MOD_RES (1)..(33)..(35): Xaa is C or S

SEQ ID NO: 81002 - protein, 37 aa, Artificial Sequence; identical to SEQ ID NO: 29052
  Cyclic GFR-binding peptide
  MOD_RES (2)..(3)..(35)..(37): Xaa is C or S

SEQ ID NO: 81003 - protein, 29 aa, Artificial Sequence
  Cyclic GFR-binding peptide
  MOD_RES (1)..(2): Xaa is C or S
XXVPTELRSVKMAKVDENEKVVKEVQVDM

SEQ ID NO: 81004 - protein, 34 aa, Artificial Sequence
  Cyclic GFR-binding peptide
  MOD_RES (4)..(5): Xaa is C or S
PKAXXVPTELRPVQMRKIDENEKVVKKATVDMVV

SEQ ID NO: 81005 - protein, 34 aa, Artificial Sequence
  Cyclic GFR-binding peptide
  MOD_RES (3)..(3): Xaa is C or S
LEXVPTEEEPLTMLYYRIKPHQGQHEQLSNFLQH

SEQ ID NO: 81006 - protein, 28 aa, Artificial Sequence
  Cyclic GFR-binding peptide
  MOD_RES (1)..(1): Xaa is C or S
XVPQDLRSVKIAKVVGRTPKVKEVQVMV

SEQ ID NO: 81007 - protein, 26 aa, Artificial Sequence
  Cyclic GFR-binding peptide
DLRPVQIRKIVGRTPKVKKATVMVVK

SEQ ID NO: 81008 - protein, 36 aa, Artificial Sequence; identical to SEQ ID NO: 29056
  Cyclic GFR-binding peptide
  MOD_RES (1)..(1): Xaa is C or S

SEQ ID NO: 81009 - protein, 27 aa, Artificial Sequence
  Cyclic GFR-binding peptide
QDLSNITIQIMVGRTPKVIGEMSMVVK

SEQ ID NO: 81010 - protein, 32 aa, Artificial Sequence
  Cyclic GFR-binding peptide
  MOD_RES (2)..(3): Xaa is C or S
PXXAPTQLRPVQVRKIDDSSNVIKKATVNMVV

SEQ ID NO: 81011 - protein, 38 aa, Artificial Sequence; identical to SEQ ID NO: 29061
  Cyclic GFR-binding peptide
  MOD_RES (35)..(37): Xaa is C or S

SEQ ID NO: 81012 - protein, 32 aa, Artificial Sequence
  Cyclic GFR-binding peptide
  MOD_RES (31)..(31): Xaa is C or S
PTELRSVKMAKVDENEKVVKEVQVDMVVEGXG

SEQ ID NO: 81013 - protein, 30 aa, Artificial Sequence
  Cyclic GFR-binding peptide
  MOD_RES (2)..(3): Xaa is C or S
PXXVPQALRSVKIAKVVGRKPKVKEVQVMI

SEQ ID NO: 81014 - protein, 37 aa, Artificial Sequence; identical to SEQ ID NO: 29066
  Cyclic GFR-binding peptide
  MOD_RES (1)..(2)..(34)..(36): Xaa is C or S

SEQ ID NO: 81015 - protein, 32 aa, Artificial Sequence; identical to SEQ ID NO: 29067
  Cyclic GFR-binding peptide
  MOD_RES (1)..(1): Xaa is C or S

SEQ ID NO: 81016 - protein, 34 aa, Artificial Sequence
  Cyclic GFR-binding peptide
  MOD_RES (31)..(33): Xaa is C or S
HEPLPVVYYEYVRKKPKLEQLSNRLEEHLEXAXA

SEQ ID NO: 81017 - protein, 29 aa, Artificial Sequence
  Cyclic GFR-binding peptide
  MOD_RES (29)..(29): Xaa is C or S
ELRSVKMAKVDENEKVVKEVQVDMVVEGX

SEQ ID NO: 81018 - protein, 30 aa, Artificial Sequence
  Cyclic GFR-binding peptide
  MOD_RES (30)..(30): Xaa is C or S
TKLRPVQVRKIDDSSNVIKKATVNMVVRSX

SEQ ID NO: 81019 - protein, 30 aa, Artificial Sequence
  Cyclic GFR-binding peptide
  MOD_RES (29)..(29): Xaa is C or S
EPLPMVYYRIKPHQGQHEQLSNFLQHNKXE

SEQ ID NO: 81020 - protein, 35 aa, Artificial Sequence; identical to SEQ ID NO: 29072
  Cyclic GFR-binding peptide
  MOD_RES (4)..(4): Xaa is C or S

SEQ ID NO: 81021 - protein, 35 aa, Artificial Sequence; identical to SEQ ID NO: 29074
  Cyclic GFR-binding peptide
  MOD_RES (1)..(32)..(34): Xaa is C or S

SEQ ID NO: 81022 - protein, 32 aa, Artificial Sequence; identical to SEQ ID NO: 29077
  Cyclic GFR-binding peptide
  MOD_RES (1)..(32): Xaa is C or S

SEQ ID NO: 81023 - protein, 30 aa, Artificial Sequence
  Cyclic GFR-binding peptide
  MOD_RES (28)..(30): Xaa is C or S
DLRSVKIAKVIGKTPKIKEVQVMIVKSXKX

SEQ ID NO: 81024 - protein, 29 aa, Artificial Sequence
  Cyclic GFR-binding peptide
APTKLRPVQVRKIDDSSNVIKKATVNMVV

SEQ ID NO: 81025 - protein, 24 aa, Artificial Sequence
  Cyclic GFR-binding peptide
QDLSNITIQIMIGKTPKIIGEMSM

SEQ ID NO: 81026 - protein, 31 aa, Artificial Sequence
  Cyclic GFR-binding peptide
  MOD_RES (2)..(3): Xaa is C or S
AXXVPTELRSVKMAKVDEYDKVVKEVQVEMV

SEQ ID NO: 81027 - protein, 23 aa, Artificial Sequence
  Cyclic GFR-binding peptide
QALRPVQIRKIVGRKPKVKKATV

SEQ ID NO: 81028 - protein, 25 aa, Artificial Sequence
  Cyclic GFR-binding peptide
TEEEPLPMVYYRIKPHQGQHEQLSN

SEQ ID NO: 81029 - protein, 25 aa, Artificial Sequence
  Cyclic GFR-binding peptide
SNITMQIMDEYDKVVIGEMSEMVVE

SEQ ID NO: 81030 - protein, 32 aa, Artificial Sequence; identical to SEQ ID NO: 29094
  Cyclic GFR-binding peptide
  MOD_RES (1)..(2): Xaa is C or S

SEQ ID NO: 81031 - protein, 33 aa, Artificial Sequence; identical to SEQ ID NO: 29096
  Cyclic GFR-binding peptide
  MOD_RES (3)..(3): Xaa is C or S

SEQ ID NO: 81032 - protein, 34 aa, Artificial Sequence
  Cyclic GFR-binding peptide
  MOD_RES (7)..(7): Xaa is C or S
HVTKPTXAPTKLRPVQVRKIDDSSNVIKKATVNM

SEQ ID NO: 81033 - protein, 35 aa, Artificial Sequence; identical to SEQ ID NO: 29097
  Cyclic GFR-binding peptide
  MOD_RES (5)..(5): Xaa is C or S

SEQ ID NO: 81034 - protein, 32 aa, Artificial Sequence
  Cyclic GFR-binding peptide
  MOD_RES (30)..(32): Xaa is C or S
EPLTVLYYEIVRKKPIFEQLSNTLEDHLAXKX

SEQ ID NO: 81035 - protein, 31 aa, Artificial Sequence
  Cyclic GFR-binding peptide
RVHHEPLPVVYYEYVRKKPKLEQLSNRLEEH

SEQ ID NO: 81036 - protein, 34 aa, Artificial Sequence
  Cyclic GFR-binding peptide
  MOD_RES (4)..(5): Xaa is C or S
PKPXXAPTQLRSVKVAKVDDSSNVIKEVQVNMVV

SEQ ID NO: 81037 - protein, 26 aa, Artificial Sequence
  Cyclic GFR-binding peptide
QLSNITVQIMDDSSNVIIGEMSNMVV

SEQ ID NO: 81038 - protein, 29 aa, Artificial Sequence
  Cyclic GFR-binding peptide
  MOD_RES (1)..(1): Xaa is C or S
XVPTELRPVQMRKIDENEKVVKKATVDMV

SEQ ID NO: 81039 - protein, 25 aa, Artificial Sequence
  Cyclic GFR-binding peptide
VHHEPLTVLYYEYVRKKPKLEQLSN

SEQ ID NO: 81040 - protein, 40 aa, Artificial Sequence; identical to SEQ ID NO: 29108
  Cyclic GFR-binding peptide
  MOD_RES (5)..(6)..(38)..(40): Xaa is C or S

SEQ ID NO: 81041 - protein, 31 aa, Artificial Sequence
  Cyclic GFR-binding peptide
  MOD_RES (1)..(2): Xaa is C or S
XXVPQDLRPVQIRKIVGRTPKVKKATVMVVK

SEQ ID NO: 81042 - protein, 28 aa, Artificial Sequence
  Cyclic GFR-binding peptide
PTQVQLEPLTVLYYEIVRKKPIFEQLSN

SEQ ID NO: 81043 - protein, 36 aa, Artificial Sequence; identical to SEQ ID NO: 29116
  Cyclic GFR-binding peptide
  MOD_RES (4)..(5): Xaa is C or S

SEQ ID NO: 81044 - protein, 33 aa, Artificial Sequence
  Cyclic GFR-binding peptide
  MOD_RES (30)..(32): Xaa is C or S
EPLTVLYYEIVRKKPIFEQLSNTLEDHLAXKXE

SEQ ID NO: 81045 - protein, 28 aa, Artificial Sequence
  Cyclic GFR-binding peptide
QVQLEPLTVLYYEIVRKKPIFEQLSNTL

SEQ ID NO: 81046 - protein, 27 aa, Artificial Sequence
  Cyclic GFR-binding peptide
LRSVKMAKVDENEKVVKEVQVDMVVEG

SEQ ID NO: 81047 - protein, 27 aa, Artificial Sequence
  Cyclic GFR-binding peptide
QLSNITVQIMDDSSNVIIGEMSNMVVR

SEQ ID NO: 81048 - protein, 31 aa, Artificial Sequence
  Cyclic GFR-binding peptide
  MOD_RES (28)..(30): Xaa is C or S
LRPVQVRKIDDSSNVIKKATVNMVVRSXGXH

SEQ ID NO: 81049 - protein, 37 aa, Artificial Sequence; identical to SEQ ID NO: 29121
  Cyclic GFR-binding peptide
  MOD_RES (5)..(5): Xaa is C or S

SEQ ID NO: 81050 - protein, 30 aa, Artificial Sequence
  Cyclic GFR-binding peptide
  MOD_RES (1)..(2): Xaa is C or S
XXVPTELRSVKMAKVDEYDKVVKEVQVEMV

SEQ ID NO: 81051 - protein, 35 aa, Artificial Sequence; identical to SEQ ID NO: 29122
  Cyclic GFR-binding peptide
  MOD_RES (1)..(33)..(35): Xaa is C or S

SEQ ID NO: 81052 - protein, 35 aa, Artificial Sequence; identical to SEQ ID NO: 29123
  Cyclic GFR-binding peptide
  MOD_RES (3)..(4)..(35): Xaa is C or S

SEQ ID NO: 81053 - protein, 30 aa, Artificial Sequence
  Cyclic GFR-binding peptide
QVQLEPLTVLYYEIVRKKPIFEQLSNTLED

SEQ ID NO: 81054 - protein, 22 aa, Artificial Sequence
  Cyclic GFR-binding peptide
SNITMQIMDENEKVVIGEMSDM

SEQ ID NO: 81055 - protein, 43 aa, Artificial Sequence; identical to SEQ ID NO: 29127
  Cyclic GFR-binding peptide
  MOD_RES (5)..(42): Xaa is C or S

SEQ ID NO: 81056 - protein, 22 aa, Artificial Sequence
  Cyclic GFR-binding peptide
ELRPVQMRKIDENEKVVKKATV

SEQ ID NO: 81057 - protein, 41 aa, Artificial Sequence; identical to SEQ ID NO: 29128
  Cyclic GFR-binding peptide
  MOD_RES (4)..(38)..(40): Xaa is C or S

SEQ ID NO: 81058 - protein, 31 aa, Artificial Sequence
  Cyclic GFR-binding peptide
  MOD_RES (29)..(31): Xaa is C or S
QDLRPVQIRKIVGRTPKVKKATVMVVKSXKX

SEQ ID NO: 81059 - protein, 33 aa, Artificial Sequence; identical to SEQ ID NO: 29131
  Cyclic GFR-binding peptide

SEQ ID NO: 81060 - protein, 35 aa, Artificial Sequence
  Cyclic GFR-binding peptide
  MOD_RES (6)..(6): Xaa is C or S
DEGLEXVPTEEEPLTMLYYRIKPHQGQHEQLSNFL

SEQ ID NO: 81061 - protein, 30 aa, Artificial Sequence
  Cyclic GFR-binding peptide
HEPLTVLYYEYVRKKPKLEQLSNRLEEHLE

SEQ ID NO: 81062 - protein, 39 aa, Artificial Sequence; identical to SEQ ID NO: 29135
  Cyclic GFR-binding peptide
  MOD_RES (36)..(38): Xaa is C or S

SEQ ID NO: 81063 - protein, 32 aa, Artificial Sequence; identical to SEQ ID NO: 29138
  Cyclic GFR-binding peptide
  MOD_RES (1)..(1): Xaa is C or S

SEQ ID NO: 81064 - protein, 35 aa, Artificial Sequence
  Cyclic GFR-binding peptide
  MOD_RES (3)..(3): Xaa is C or S
VKXQPSRVHHEPLPVVYYEYVRKKPKLEQLSNRLE

SEQ ID NO: 81065 - protein, 34 aa, Artificial Sequence; identical to SEQ ID NO: 29142
  Cyclic GFR-binding peptide
  MOD_RES (1)..(33): Xaa is C or S

SEQ ID NO: 81066 - protein, 31 aa, Artificial Sequence; identical to SEQ ID NO: 29145
  Cyclic GFR-binding peptide
  MOD_RES (31)..(31): Xaa is C or S

SEQ ID NO: 81067 - protein, 21 aa, Artificial Sequence
  Cyclic GFR-binding peptide
LSNITVQIMDDSSNVIIGEMS

SEQ ID NO: 81068 - protein, 37 aa, Artificial Sequence; identical to SEQ ID NO: 29154
  Cyclic GFR-binding peptide
  MOD_RES (3)..(4)..(35)..(37): Xaa is C or S

SEQ ID NO: 81069 - protein, 40 aa, Artificial Sequence; identical to SEQ ID NO: 29155
  Cyclic GFR-binding peptide
  MOD_RES (4)..(5)..(37)..(39): Xaa is C or S

SEQ ID NO: 81070 - protein, 37 aa, Artificial Sequence; identical to SEQ ID NO: 29157
  Cyclic GFR-binding peptide
  MOD_RES (5)..(5): Xaa is C or S

SEQ ID NO: 81071 - protein, 23 aa, Artificial Sequence
  Cyclic GFR-binding peptide
DLSNITIQIMIGKTPKIIGEMSM

SEQ ID NO: 81072 - protein, 26 aa, Artificial Sequence
  Cyclic GFR-binding peptide
TELRSVKMAKVDEYDKVVKEVQVEMV

SEQ ID NO: 81073 - protein, 34 aa, Artificial Sequence; identical to SEQ ID NO: 29162
  Cyclic GFR-binding peptide
  MOD_RES (4)..(4): Xaa is C or S

SEQ ID NO: 81074 - protein, 37 aa, Artificial Sequence; identical to SEQ ID NO: 29164
  Cyclic GFR-binding peptide
  MOD_RES (2)..(3)..(34)..(36): Xaa is C or S

SEQ ID NO: 81075 - protein, 36 aa, Artificial Sequence; identical to SEQ ID NO: 29167
  Cyclic GFR-binding peptide
  MOD_RES (5)..(5): Xaa is C or S

SEQ ID NO: 81076 - protein, 34 aa, Artificial Sequence
  Cyclic GFR-binding peptide
  MOD_RES (5)..(5): Xaa is C or S
TKPTXAPTKLRSVKVAKVDDSSNVIKEVQVNMVV

SEQ ID NO: 81077 - protein, 27 aa, Artificial Sequence
  Cyclic GFR-binding peptide
LSNITVQIMDDSSNVIIGEMSNMVVRA

SEQ ID NO: 81078 - protein, 24 aa, Artificial Sequence
  Cyclic GFR-binding peptide
PTQLRSVKVAKVDDSSNVIKEVQV

SEQ ID NO: 81079 - protein, 28 aa, Artificial Sequence
  Cyclic GFR-binding peptide
LEPLTVLYYEIVRKKPIFEQLSNTLEDH

SEQ ID NO: 81080 - protein, 32 aa, Artificial Sequence
  Cyclic GFR-binding peptide
  MOD_RES (4)..(5): Xaa is C or S
ASPXXVSQDLSNITIQIMIGKTPKIIGEMSMI

SEQ ID NO: 81081 - protein, 24 aa, Artificial Sequence
  Cyclic GFR-binding peptide
LEPLTVLYYEIVRKKPIFEQLSNT

SEQ ID NO: 81082 - protein, 24 aa, Artificial Sequence
  Cyclic GFR-binding peptide
RSVKIAKVVGRTPKVKEVQVMVVK

SEQ ID NO: 81083 - protein, 27 aa, Artificial Sequence
  Cyclic GFR-binding peptide
LSNITVQIMDDSSNVIIGEMSNMVVRS

SEQ ID NO: 81084 - protein, 29 aa, Artificial Sequence
  Cyclic GFR-binding peptide
  MOD_RES (2)..(3): Xaa is C or S
AXXVPTELRSVKMAKVDENEKVVKEVQVD

SEQ ID NO: 81085 - protein, 20 aa, Artificial Sequence
  Cyclic GFR-binding peptide
RPVQIRKIVGRKPKVKKATV

SEQ ID NO: 81086 - protein, 31 aa, Artificial Sequence
  Cyclic GFR-binding peptide
  MOD_RES (4)..(5): Xaa is C or S
PKAXXVPTELRSVKMAKVDENEKVVKEVQVD

SEQ ID NO: 81087 - protein, 27 aa, Artificial Sequence
  Cyclic GFR-binding peptide
  MOD_RES (2)..(2): Xaa is C or S
TXAPTKLRSVKVAKVDDSSNVIKEVQV

SEQ ID NO: 81088 - protein, 35 aa, Artificial Sequence; identical to SEQ ID NO: 29183
  Cyclic GFR-binding peptide
  MOD_RES (2)..(3)..(34): Xaa is C or S

SEQ ID NO: 81089 - protein, 29 aa, Artificial Sequence
  Cyclic GFR-binding peptide
APTQLSNITVQIMDDSSNVIIGEMSNMVV

SEQ ID NO: 81090 - protein, 23 aa, Artificial Sequence
  Cyclic GFR-binding peptide
LRPVQIRKIVGRTPKVKKATVMV

SEQ ID NO: 81091 - protein, 41 aa, Artificial Sequence; identical to SEQ ID NO: 29185
  Cyclic GFR-binding peptide
  MOD_RES (6)..(7)..(39)..(41): Xaa is C or S

SEQ ID NO: 81092 - protein, 29 aa, Artificial Sequence
  Cyclic GFR-binding peptide
  MOD_RES (1)..(1): Xaa is C or S
XVPQDLRSVKIAKVVGRTPKVKEVQVMVV

SEQ ID NO: 81093 - protein, 28 aa, Artificial Sequence
  Cyclic GFR-binding peptide
  MOD_RES (2)..(3): Xaa is C or S
PXXVSQDLSNITIQIMIGKTPKIIGEMS

SEQ ID NO: 81094 - protein, 27 aa, Artificial Sequence
  Cyclic GFR-binding peptide
  MOD_RES (1)..(1): Xaa is C or S
XVPQALRPVQIRKIVGRKPKVKKATVM

SEQ ID NO: 81095 - protein, 34 aa, Artificial Sequence
  Cyclic GFR-binding peptide
  MOD_RES (6)..(7): Xaa is C or S
YVPKPXXAPTKLSNITVQIMDDSSNVIIGEMSNM

SEQ ID NO: 81096 - protein, 28 aa, Artificial Sequence
  Cyclic GFR-binding peptide
  MOD_RES (2)..(3): Xaa is C or S
PXXVPQALSNITIQIMVGRKPKVIGEMS

SEQ ID NO: 81097 - protein, 31 aa, Artificial Sequence
  Cyclic GFR-binding peptide
SRVHHEPLTVLYYEYVRKKPKLEQLSNRLEE

SEQ ID NO: 81098 - protein, 36 aa, Artificial Sequence; identical to SEQ ID NO: 29195
  Cyclic GFR-binding peptide
  MOD_RES (5)..(5): Xaa is C or S

SEQ ID NO: 81099 - protein, 30 aa, Artificial Sequence; identical to SEQ ID NO: 1139
  Cyclic GFR-binding peptide

SEQ ID NO: 81100 - protein, 30 aa, Artificial Sequence
  Cyclic GFR-binding peptide
  MOD_RES (30)..(30): Xaa is C or S
PQDLSNITIQIMVGRTPKVIGEMSMVVKSX

SEQ ID NO: 81101 - protein, 22 aa, Artificial Sequence
  Cyclic GFR-binding peptide
RSVKIAKVVGRKPKVKEVQVMI

SEQ ID NO: 81102 - protein, 40 aa, Artificial Sequence; identical to SEQ ID NO: 29197
  Cyclic GFR-binding peptide
  MOD_RES (5)..(6)..(38)..(40): Xaa is C or S

SEQ ID NO: 81103 - protein, 34 aa, Artificial Sequence
  Cyclic GFR-binding peptide
  MOD_RES (5)..(6): Xaa is C or S
SASPXXVSQDLRSVKIAKVIGKTPKIKEVQVMIV

SEQ ID NO: 81104 - protein, 28 aa, Artificial Sequence
  Cyclic GFR-binding peptide
  MOD_RES (28)..(28): Xaa is C or S
LRPVQMRKIDEYDKVVKKATVEMVVEGX

SEQ ID NO: 81105 - protein, 38 aa, Artificial Sequence; identical to SEQ ID NO: 29199
  Cyclic GFR-binding peptide
  MOD_RES (3)..(4)..(36)..(38): Xaa is C or S

SEQ ID NO: 81106 - protein, 38 aa, Artificial Sequence; identical to SEQ ID NO: 29201
  Cyclic GFR-binding peptide
  MOD_RES (4)..(5)..(37): Xaa is C or S

SEQ ID NO: 81107 - protein, 39 aa, Artificial Sequence; identical to SEQ ID NO: 29203
  Cyclic GFR-binding peptide
  MOD_RES (5)..(6)..(38): Xaa is C or S

SEQ ID NO: 81108 - protein, 40 aa, Artificial Sequence; identical to SEQ ID NO: 29204
  Cyclic GFR-binding peptide
  MOD_RES (5)..(6)..(37)..(39): Xaa is C or S

SEQ ID NO: 81109 - protein, 34 aa, Artificial Sequence
  Cyclic GFR-binding peptide
  MOD_RES (5)..(6): Xaa is C or S
IPKAXXVPTELRPVQMRKIDENEKVVKKATVDMV

SEQ ID NO: 81110 - protein, 37 aa, Artificial Sequence
  Cyclic GFR-binding peptide
  MOD_RES (34)..(36): Xaa is C or S
QVQLEPLTVLYYEIVRKKPIFEQLSNTLEDHLAXKXE

SEQ ID NO: 81111 - protein, 36 aa, Artificial Sequence; identical to SEQ ID NO: 29206
  Cyclic GFR-binding peptide
  MOD_RES (1)..(2)..(34)..(36): Xaa is C or S

SEQ ID NO: 81112 - protein, 27 aa, Artificial Sequence
  Cyclic GFR-binding peptide
EEPLTMLYYRIKPHQGQHEQLSNFLQH

SEQ ID NO: 81113 - protein, 32 aa, Artificial Sequence
  Cyclic GFR-binding peptide
  MOD_RES (6)..(7): Xaa is C or S
ASAAPXXVPQALRSVKIAKVVGRKPKVKEVQV

SEQ ID NO: 81114 - protein, 39 aa, Artificial Sequence; identical to SEQ ID NO: 29211
  Cyclic GFR-binding peptide
  MOD_RES (3)..(4)..(36)..(38): Xaa is C or S

SEQ ID NO: 81115 - protein, 37 aa, Artificial Sequence; identical to SEQ ID NO: 29212
  Cyclic GFR-binding peptide
  MOD_RES (4)..(5)..(37): Xaa is C or S

SEQ ID NO: 81116 - protein, 22 aa, Artificial Sequence
  Cyclic GFR-binding peptide
KLRPVQVRKIDDSSNVIKKATV

SEQ ID NO: 81117 - protein, 38 aa, Artificial Sequence; identical to SEQ ID NO: 29215
  Cyclic GFR-binding peptide
  MOD_RES (5)..(37): Xaa is C or S

SEQ ID NO: 81118 - protein, 26 aa, Artificial Sequence
  Cyclic GFR-binding peptide
  MOD_RES (1)..(1): Xaa is C or S
XAPTKLRPVQVRKIDDSSNVIKKATV

SEQ ID NO: 81119 - protein, 32 aa, Artificial Sequence
  Cyclic GFR-binding peptide
  MOD_RES (31)..(31): Xaa is C or S
LEPLPVVYYEIVRKKPIFEQLSNTLEDHLAXK

SEQ ID NO: 81120 - protein, 32 aa, Artificial Sequence
  Cyclic GFR-binding peptide
  MOD_RES (4)..(5): Xaa is C or S
PKAXXVPTELRSVKMAKVDENEKVVKEVQVDM

SEQ ID NO: 81121 - protein, 27 aa, Artificial Sequence
  Cyclic GFR-binding peptide
TQLRSVKVAKVDDSSNVIKEVQVNMVV

SEQ ID NO: 81122 - protein, 24 aa, Artificial Sequence
  Cyclic GFR-binding peptide
TELRPVQMRKIDENEKVVKKATVD

SEQ ID NO: 81123 - protein, 34 aa, Artificial Sequence
  Cyclic GFR-binding peptide
  MOD_RES (7)..(7): Xaa is C or S
HVTKPTXAPTKLRSVKVAKVDDSSNVIKEVQVNM

SEQ ID NO: 81124 - protein, 35 aa, Artificial Sequence; identical to SEQ ID NO: 29223
  Cyclic GFR-binding peptide
  MOD_RES (4)..(5): Xaa is C or S

SEQ ID NO: 81125 - protein, 32 aa, Artificial Sequence
  Cyclic GFR-binding peptide
  MOD_RES (30)..(32): Xaa is C or S
EPLPVVYYEYVRKKPKLEQLSNRLEEHLEXAX

SEQ ID NO: 81126 - protein, 35 aa, Artificial Sequence; identical to SEQ ID NO: 29226
  Cyclic GFR-binding peptide
  MOD_RES (1)..(2)..(33)..(35): Xaa is C or S

SEQ ID NO: 81127 - protein, 35 aa, Artificial Sequence
  Cyclic GFR-binding peptide
  MOD_RES (6)..(7): Xaa is C or S
SIPKAXXVPTELSNITMQIMDEYDKVVIGEMSEMV

SEQ ID NO: 81128 - protein, 25 aa, Artificial Sequence
  Cyclic GFR-binding peptide
TQLRPVQVRKIDDSSNVIKKATVNM

SEQ ID NO: 81129 - protein, 29 aa, Artificial Sequence
  Cyclic GFR-binding peptide
  MOD_RES (1)..(1): Xaa is C or S
XAPTKLSNITVQIMDDSSNVIIGEMSNMV

SEQ ID NO: 81130 - protein, 35 aa, Artificial Sequence
  Cyclic GFR-binding peptide
  MOD_RES (3)..(3): Xaa is C or S
VKXQPSRVHHEPLTVLYYEYVRKKPKLEQLSNRLE

SEQ ID NO: 81131 - protein, 34 aa, Artificial Sequence
  Cyclic GFR-binding peptide
  MOD_RES (4)..(5): Xaa is C or S
ASPXXVSQDLSNITIQIMIGKTPKIIGEMSMIVK

SEQ ID NO: 81132 - protein, 36 aa, Artificial Sequence; identical to SEQ ID NO: 29233
  Cyclic GFR-binding peptide
  MOD_RES (5)..(6): Xaa is C or S

SEQ ID NO: 81133 - protein, 42 aa, Artificial Sequence; identical to SEQ ID NO: 29234
  Cyclic GFR-binding peptide
  MOD_RES (5)..(42): Xaa is C or S

SEQ ID NO: 81134 - protein, 26 aa, Artificial Sequence
  Cyclic GFR-binding peptide
  MOD_RES (1)..(1): Xaa is C or S
XVSQDLRSVKIAKVIGKTPKIKEVQV

SEQ ID NO: 81135 - protein, 35 aa, Artificial Sequence
  Cyclic GFR-binding peptide
  MOD_RES (6)..(6): Xaa is C or S
VTKPTXAPTKLSNITVQIMDDSSNVIIGEMSNMVV

SEQ ID NO: 81136 - protein, 39 aa, Artificial Sequence; identical to SEQ ID NO: 29242
  Cyclic GFR-binding peptide
  MOD_RES (36)..(38): Xaa is C or S

SEQ ID NO: 81137 - protein, 34 aa, Artificial Sequence; identical to SEQ ID NO: 29248
  Cyclic GFR-binding peptide
  MOD_RES (1)..(2)..(34): Xaa is C or S

SEQ ID NO: 81138 - protein, 32 aa, Artificial Sequence; identical to SEQ ID NO: 29249
  Cyclic GFR-binding peptide
  MOD_RES (1)..(1): Xaa is C or S

SEQ ID NO: 81139 - protein, 29 aa, Artificial Sequence
  Cyclic GFR-binding peptide
  MOD_RES (27)..(29): Xaa is C or S
RPVQVRKIDDSSNVIKKATVNMVVRAXGX

SEQ ID NO: 81140 - protein, 37 aa, Artificial Sequence
  Cyclic GFR-binding peptide
  MOD_RES (7)..(7): Xaa is C or S
NDEGLEXVPTEEEPLPMVYYRIKPHQGQHEQLSNFLQ

SEQ ID NO: 81141 - protein, 33 aa, Artificial Sequence; identical to SEQ ID NO: 29254
  Cyclic GFR-binding peptide
  MOD_RES (2)..(3): Xaa is C or S

SEQ ID NO: 81142 - protein, 34 aa, Artificial Sequence; identical to SEQ ID NO: 29256
  Cyclic GFR-binding peptide
  MOD_RES (1)..(2)..(34): Xaa is C or S

SEQ ID NO: 81143 - protein, 33 aa, Artificial Sequence
  Cyclic GFR-binding peptide
  MOD_RES (4)..(5): Xaa is C or S
PKAXXVPTELRPVQMRKIDEYDKVVKKATVEMV

SEQ ID NO: 81144 - protein, 35 aa, Artificial Sequence; identical to SEQ ID NO: 29259
  Cyclic GFR-binding peptide
  MOD_RES (1)..(33)..(35): Xaa is C or S

SEQ ID NO: 81145 - protein, 27 aa, Artificial Sequence
  Cyclic GFR-binding peptide
PTEEEPLTMLYYRIKPHQGQHEQLSNF

SEQ ID NO: 81146 - protein, 31 aa, Artificial Sequence
  Cyclic GFR-binding peptide
  MOD_RES (4)..(4): Xaa is C or S
KPTXAPTKLRSVKVAKVDDSSNVIKEVQVNM

SEQ ID NO: 81147 - protein, 35 aa, Artificial Sequence; identical to SEQ ID NO: 29266
  Cyclic GFR-binding peptide
  MOD_RES (1)..(2)..(33)..(35): Xaa is C or S

SEQ ID NO: 81148 - protein, 26 aa, Artificial Sequence
  Cyclic GFR-binding peptide
ELSNITMQIMDEYDKVVIGEMSEMVV

SEQ ID NO: 81149 - protein, 23 aa, Artificial Sequence
  Cyclic GFR-binding peptide
TKLRPVQVRKIDDSSNVIKKATV

SEQ ID NO: 81150 - protein, 22 aa, Artificial Sequence
  Cyclic GFR-binding peptide
LRPVQMRKIDENEKVVKKATVD

SEQ ID NO: 81151 - protein, 29 aa, Artificial Sequence
  Cyclic GFR-binding peptide
  MOD_RES (2)..(2): Xaa is C or S
EXVPTEEEPLTMLYYRIKPHQGQHEQLSN

SEQ ID NO: 81152 - protein, 36 aa, Artificial Sequence; identical to SEQ ID NO: 29271
  Cyclic GFR-binding peptide
  MOD_RES (1)..(2)..(34)..(36): Xaa is C or S

SEQ ID NO: 81153 - protein, 32 aa, Artificial Sequence
  Cyclic GFR-binding peptide
  MOD_RES (32)..(32): Xaa is C or S
HHEPLTVLYYEYVRKKPKLEQLSNRLEEHLEX

SEQ ID NO: 81154 - protein, 28 aa, Artificial Sequence
  Cyclic GFR-binding peptide
  MOD_RES (1)..(2): Xaa is C or S
XXVPTELRPVQMRKIDEYDKVVKKATVE

SEQ ID NO: 81155 - protein, 30 aa, Artificial Sequence
  Cyclic GFR-binding peptide
  MOD_RES (3)..(4): Xaa is C or S
KPXXAPTKLRPVQVRKIDDSSNVIKKATVN

SEQ ID NO: 81156 - protein, 31 aa, Artificial Sequence
  Cyclic GFR-binding peptide
  MOD_RES (30)..(30): Xaa is C or S
EEPLPMVYYRIKPHQGQHEQLSNFLQHNKXE

SEQ ID NO: 81157 - protein, 26 aa, Artificial Sequence
  Cyclic GFR-binding peptide
TQLSNITVQIMDDSSNVIIGEMSNMV

SEQ ID NO: 81158 - protein, 40 aa, Artificial Sequence; identical to SEQ ID NO: 29275
  Cyclic GFR-binding peptide
  MOD_RES (4)..(5)..(37)..(39): Xaa is C or S

SEQ ID NO: 81159 - protein, 37 aa, Artificial Sequence; identical to SEQ ID NO: 29277
  Cyclic GFR-binding peptide
  MOD_RES (3)..(35)..(37): Xaa is C or S

SEQ ID NO: 81160 - protein, 23 aa, Artificial Sequence
  Cyclic GFR-binding peptide
QDLSNITIQIMVGRTPKVIGEMS

SEQ ID NO: 81161 - protein, 41 aa, Artificial Sequence; identical to SEQ ID NO: 29279
  Cyclic GFR-binding peptide
  MOD_RES (6)..(7)..(39)..(41): Xaa is C or S

SEQ ID NO: 81162 - protein, 36 aa, Artificial Sequence; identical to SEQ ID NO: 29280
  Cyclic GFR-binding peptide
  MOD_RES (5)..(6): Xaa is C or S

SEQ ID NO: 81163 - protein, 27 aa, Artificial Sequence
  Cyclic GFR-binding peptide
QLRSVKVAKVDDSSNVIKEVQVNMVVR

SEQ ID NO: 81164 - protein, 39 aa, Artificial Sequence; identical to SEQ ID NO: 29285
  Cyclic GFR-binding peptide
  MOD_RES (5)..(6)..(38): Xaa is C or S

SEQ ID NO: 81165 - protein, 30 aa, Artificial Sequence
  Cyclic GFR-binding peptide
  MOD_RES (30)..(30): Xaa is C or S
TELSNITMQIMDEYDKVVIGEMSEMVVEGX

SEQ ID NO: 81166 - protein, 44 aa, Artificial Sequence; identical to SEQ ID NO: 29288
  Cyclic GFR-binding peptide
  MOD_RES (4)..(41)..(43): Xaa is C or S

SEQ ID NO: 81167 - protein, 33 aa, Artificial Sequence
  Cyclic GFR-binding peptide
  MOD_RES (5)..(6): Xaa is C or S
VPKPXXAPTKLSNITVQIMDDSSNVIIGEMSNM

SEQ ID NO: 81168 - protein, 32 aa, Artificial Sequence
  Cyclic GFR-binding peptide
  MOD_RES (29)..(31): Xaa is C or S
ELRSVKMAKVDENEKVVKEVQVDMVVEGXGXR

SEQ ID NO: 81169 - protein, 35 aa, Artificial Sequence; identical to SEQ ID NO: 29295
  Cyclic GFR-binding peptide
  MOD_RES (2)..(3)..(34): Xaa is C or S

SEQ ID NO: 81170 - protein, 28 aa, Artificial Sequence
  Cyclic GFR-binding peptide
ELSNITMQIMDEYDKVVIGEMSEMVVEG

SEQ ID NO: 81171 - protein, 22 aa, Artificial Sequence
  Cyclic GFR-binding peptide
LRPVQVRKIDDSSNVIKKATVN

SEQ ID NO: 81172 - protein, 39 aa, Artificial Sequence; identical to SEQ ID NO: 29297
  Cyclic GFR-binding peptide
  MOD_RES (37)..(39): Xaa is C or S

SEQ ID NO: 81173 - protein, 27 aa, Artificial Sequence
  Cyclic GFR-binding peptide
APTQLSNITVQIMDDSSNVIIGEMSNM

SEQ ID NO: 81174 - protein, 24 aa, Artificial Sequence
  Cyclic GFR-binding peptide
RSVKMAKVDENEKVVKEVQVDMVV

SEQ ID NO: 81175 - protein, 25 aa, Artificial Sequence
  Cyclic GFR-binding peptide
PTKLRSVKVAKVDDSSNVIKEVQVN

SEQ ID NO: 81176 - protein, 36 aa, Artificial Sequence; identical to SEQ ID NO: 29299
  Cyclic GFR-binding peptide
  MOD_RES (4)..(36): Xaa is C or S

SEQ ID NO: 81177 - protein, 30 aa, Artificial Sequence
  Cyclic GFR-binding peptide
  MOD_RES (29)..(29): Xaa is C or S
QDLRPVQIRKIIGKTPKIKKATVMIVKSXK

SEQ ID NO: 81178 - protein, 41 aa, Artificial Sequence; identical to SEQ ID NO: 29300
  Cyclic GFR-binding peptide
  MOD_RES (5)..(6)..(38)..(40): Xaa is C or S

SEQ ID NO: 81179 - protein, 36 aa, Artificial Sequence
  Cyclic GFR-binding peptide
  MOD_RES (5)..(5): Xaa is C or S
RNVQXRPTQVQLEPLPVVYYEIVRKKPIFEQLSNTL

SEQ ID NO: 81180 - protein, 30 aa, Artificial Sequence
  Cyclic GFR-binding peptide
  MOD_RES (30)..(30): Xaa is C or S
EPLTVLYYEIVRKKPIFEQLSNTLEDHLAX

SEQ ID NO: 81181 - protein, 29 aa, Artificial Sequence
  Cyclic GFR-binding peptide
  MOD_RES (3)..(4): Xaa is C or S
KAXXVPTELSNITMQIMDEYDKVVIGEMS

SEQ ID NO: 81182 - protein, 23 aa, Artificial Sequence
  Cyclic GFR-binding peptide
LSNITIQIMVGRTPKVIGEMSMV

SEQ ID NO: 81183 - protein, 32 aa, Artificial Sequence
  Cyclic GFR-binding peptide
  MOD_RES (3)..(3): Xaa is C or S
LEXVPTEEEPLTMLYYRIKPHQGQHEQLSNFL

SEQ ID NO: 81184 - protein, 33 aa, Artificial Sequence
  Cyclic GFR-binding peptide
RVHHEPLPVVYYEYVRKKPKLEQLSNRLEEHLE

SEQ ID NO: 81185 - protein, 27 aa, Artificial Sequence
  Cyclic GFR-binding peptide
EEEPLTMLYYRIKPHQGQHEQLSNFLQ

SEQ ID NO: 81186 - protein, 30 aa, Artificial Sequence
  Cyclic GFR-binding peptide
  MOD_RES (1)..(1): Xaa is C or S
XQPSRVHHEPLPVVYYEYVRKKPKLEQLSN

SEQ ID NO: 81187 - protein, 30 aa, Artificial Sequence
  Cyclic GFR-binding peptide
  MOD_RES (2)..(3): Xaa is C or S
PXXAPTKLRSVKVAKVDDSSNVIKEVQVNM

SEQ ID NO: 81188 - protein, 32 aa, Artificial Sequence
  Cyclic GFR-binding peptide
  MOD_RES (30)..(32): Xaa is C or S
TQLRPVQVRKIDDSSNVIKKATVNMVVRAXGX

SEQ ID NO: 81189 - protein, 35 aa, Artificial Sequence; identical to SEQ ID NO: 29307
  Cyclic GFR-binding peptide
  MOD_RES (4)..(5): Xaa is C or S

SEQ ID NO: 81190 - protein, 23 aa, Artificial Sequence
  Cyclic GFR-binding peptide
EPLPVVYYEYVRKKPKLEQLSNR

SEQ ID NO: 81191 - protein, 25 aa, Artificial Sequence
  Cyclic GFR-binding peptide
LRSVKMAKVDEYDKVVKEVQVEMVV

SEQ ID NO: 81192 - protein, 31 aa, Artificial Sequence
  Cyclic GFR-binding peptide
  MOD_RES (4)..(5): Xaa is C or S
PKPXXAPTKLRSVKVAKVDDSSNVIKEVQVN

SEQ ID NO: 81193 - protein, 39 aa, Artificial Sequence; identical to SEQ ID NO: 29310
  Cyclic GFR-binding peptide
  MOD_RES (4)..(5)..(36)..(38): Xaa is C or S

SEQ ID NO: 81194 - protein, 36 aa, Artificial Sequence; identical to SEQ ID NO: 29316
  Cyclic GFR-binding peptide
  MOD_RES (3)..(35): Xaa is C or S

SEQ ID NO: 81195 - protein, 34 aa, Artificial Sequence
  Cyclic GFR-binding peptide
  MOD_RES (5)..(6): Xaa is C or S
VPKPXXAPTQLSNITVQIMDDSSNVIIGEMSNMV

SEQ ID NO: 81196 - protein, 35 aa, Artificial Sequence
  Cyclic GFR-binding peptide
  MOD_RES (5)..(5): Xaa is C or S
RNVQXRPTQVQLEPLTVLYYEIVRKKPIFEQLSNT

SEQ ID NO: 81197 - protein, 30 aa, Artificial Sequence
  Cyclic GFR-binding peptide
  MOD_RES (1)..(2): Xaa is C or S
XXVPQALSNITIQIMVGRKPKVIGEMSMIV

SEQ ID NO: 81198 - protein, 35 aa, Artificial Sequence; identical to SEQ ID NO: 29322
  Cyclic GFR-binding peptide
  MOD_RES (2)..(3)..(35): Xaa is C or S

SEQ ID NO: 81199 - protein, 33 aa, Artificial Sequence
  Cyclic GFR-binding peptide
  MOD_RES (31)..(33): Xaa is C or S
PTKLRSVKVAKVDDSSNVIKEVQVNMVVRSXGX

SEQ ID NO: 81200 - protein, 37 aa, Artificial Sequence; identical to SEQ ID NO: 29324
  Cyclic GFR-binding peptide
  MOD_RES (5)..(6): Xaa is C or S

SEQ ID NO: 81201 - protein, 27 aa, Artificial Sequence
  Cyclic GFR-binding peptide
SQDLSNITIQIMIGKTPKIIGEMSMIV

SEQ ID NO: 81202 - protein, 37 aa, Artificial Sequence
  Cyclic GFR-binding peptide
  MOD_RES (34)..(36): Xaa is C or S
QVQLEPLPVVYYEIVRKKPIFEQLSNTLEDHLAXKXE

SEQ ID NO: 81203 - protein, 36 aa, Artificial Sequence; identical to SEQ ID NO: 29329
  Cyclic GFR-binding peptide

SEQ ID NO: 81204 - protein, 30 aa, Artificial Sequence
  Cyclic GFR-binding peptide
  MOD_RES (4)..(4): Xaa is C or S
KPTXAPTKLRSVKVAKVDDSSNVIKEVQVN

SEQ ID NO: 81205 - protein, 20 aa, Artificial Sequence
  Cyclic GFR-binding peptide
SNITIQIMVGRTPKVIGEMS

SEQ ID NO: 81206 - protein, 30 aa, Artificial Sequence
  Cyclic GFR-binding peptide
  MOD_RES (4)..(5): Xaa is C or S
AAPXXVPQALRPVQIRKIVGRKPKVKKATV

SEQ ID NO: 81207 - protein, 28 aa, Artificial Sequence
  Cyclic GFR-binding peptide
  MOD_RES (1)..(2): Xaa is C or S
XXAPTQLRPVQVRKIDDSSNVIKKATVN

SEQ ID NO: 81208 - protein, 33 aa, Artificial Sequence; identical to SEQ ID NO: 29330
  Cyclic GFR-binding peptide
  MOD_RES (1)..(33): Xaa is C or S

SEQ ID NO: 81209 - protein, 36 aa, Artificial Sequence
  Cyclic GFR-binding peptide
  MOD_RES (5)..(5): Xaa is C or S
EGLEXVPTEEEPLPMVYYRIKPHQGQHEQLSNFLQH

SEQ ID NO: 81210 - protein, 28 aa, Artificial Sequence
  Cyclic GFR-binding peptide
  MOD_RES (26)..(28): Xaa is C or S
RPVQIRKIVGRTPKVKKATVMVVKSXKX

SEQ ID NO: 81211 - protein, 32 aa, Artificial Sequence
  Cyclic GFR-binding peptide
  MOD_RES (29)..(31): Xaa is C or S
EPLTMLYYRIKPHQGQHEQLSNFLQHNKXEXR

SEQ ID NO: 81212 - protein, 39 aa, Artificial Sequence; identical to SEQ ID NO: 29334
  Cyclic GFR-binding peptide
  MOD_RES (2)..(39): Xaa is C or S

SEQ ID NO: 81213 - protein, 33 aa, Artificial Sequence
  Cyclic GFR-binding peptide
  MOD_RES (30)..(32): Xaa is C or S
TQLSNITVQIMDDSSNVIIGEMSNMVVRAXGXH

SEQ ID NO: 81214 - protein, 35 aa, Artificial Sequence
  Cyclic GFR-binding peptide
  MOD_RES (6)..(7): Xaa is C or S
YVPKPXXAPTKLRPVQVRKIDDSSNVIKKATVNMV

SEQ ID NO: 81215 - protein, 27 aa, Artificial Sequence
  Cyclic GFR-binding peptide
PTELRPVQMRKIDEYDKVVKKATVEMV

SEQ ID NO: 81216 - protein, 35 aa, Artificial Sequence; identical to SEQ ID NO: 29337
  Cyclic GFR-binding peptide
  MOD_RES (1)..(33)..(35): Xaa is C or S

SEQ ID NO: 81217 - protein, 30 aa, Artificial Sequence
  Cyclic GFR-binding peptide
  MOD_RES (27)..(29): Xaa is C or S
LRPVQIRKIIGKTPKIKKATVMIVKSXKXS

SEQ ID NO: 81218 - protein, 26 aa, Artificial Sequence
  Cyclic GFR-binding peptide
TQLRPVQVRKIDDSSNVIKKATVNMV

SEQ ID NO: 81219 - protein, 29 aa, Artificial Sequence
  Cyclic GFR-binding peptide
PQALSNITIQIMVGRKPKVIGEMSMIVRS

SEQ ID NO: 81220 - protein, 38 aa, Artificial Sequence; identical to SEQ ID NO: 29342
  Cyclic GFR-binding peptide
  MOD_RES (3)..(4)..(35)..(37): Xaa is C or S

SEQ ID NO: 81221 - protein, 28 aa, Artificial Sequence
  Cyclic GFR-binding peptide
  MOD_RES (2)..(3): Xaa is C or S
PXXAPTQLRPVQVRKIDDSSNVIKKATV

SEQ ID NO: 81222 - protein, 34 aa, Artificial Sequence; identical to SEQ ID NO: 29345
  Cyclic GFR-binding peptide
  MOD_RES (34)..(34): Xaa is C or S

SEQ ID NO: 81223 - protein, 32 aa, Artificial Sequence
  Cyclic GFR-binding peptide
  MOD_RES (29)..(31): Xaa is C or S
QALRSVKIAKVVGRKPKVKEVQVMIVRSXKXS

SEQ ID NO: 81224 - protein, 33 aa, Artificial Sequence
  Cyclic GFR-binding peptide
QPSRVHHEPLTVLYYEYVRKKPKLEQLSNRLEE

SEQ ID NO: 81225 - protein, 39 aa, Artificial Sequence; identical to SEQ ID NO: 29348
  Cyclic GFR-binding peptide
  MOD_RES (6)..(7)..(39): Xaa is C or S

SEQ ID NO: 81226 - protein, 24 aa, Artificial Sequence
  Cyclic GFR-binding peptide
QLSNITVQIMDDSSNVIIGEMSNM

SEQ ID NO: 81227 - protein, 22 aa, Artificial Sequence
  Cyclic GFR-binding peptide
LRPVQIRKIIGKTPKIKKATVM

SEQ ID NO: 81228 - protein, 38 aa, Artificial Sequence; identical to SEQ ID NO: 29349
  Cyclic GFR-binding peptide
  MOD_RES (2)..(3)..(35)..(37): Xaa is C or S

SEQ ID NO: 81229 - protein, 31 aa, Artificial Sequence
  Cyclic GFR-binding peptide
  MOD_RES (28)..(30): Xaa is C or S
LSNITMQIMDEYDKVVIGEMSEMVVEGXGXR

SEQ ID NO: 81230 - protein, 28 aa, Artificial Sequence
  Cyclic GFR-binding peptide
  MOD_RES (1)..(2): Xaa is C or S
XXAPTQLRSVKVAKVDDSSNVIKEVQVN

SEQ ID NO: 81231 - protein, 26 aa, Artificial Sequence
  Cyclic GFR-binding peptide
QLEPLTVLYYEIVRKKPIFEQLSNTL

SEQ ID NO: 81232 - protein, 27 aa, Artificial Sequence
  Cyclic GFR-binding peptide
  MOD_RES (27)..(27): Xaa is C or S
LRPVQIRKIVGRTPKVKKATVMVVKSX

SEQ ID NO: 81233 - protein, 25 aa, Artificial Sequence
  Cyclic GFR-binding peptide
TKLRPVQVRKIDDSSNVIKKATVNM

SEQ ID NO: 81234 - protein, 34 aa, Artificial Sequence
  Cyclic GFR-binding peptide
  MOD_RES (5)..(6): Xaa is C or S
SASPXXVPQDLRPVQIRKIVGRTPKVKKATVMVV

SEQ ID NO: 81235 - protein, 32 aa, Artificial Sequence
  Cyclic GFR-binding peptide
  MOD_RES (30)..(32): Xaa is C or S
PQDLSNITIQIMVGRTPKVIGEMSMVVKSXKX

SEQ ID NO: 81236 - protein, 29 aa, Artificial Sequence
  Cyclic GFR-binding peptide
  MOD_RES (27)..(29): Xaa is C or S
LRPVQIRKIVGRTPKVKKATVMVVKSXKX

SEQ ID NO: 81237 - protein, 31 aa, Artificial Sequence
  Cyclic GFR-binding peptide
  MOD_RES (30)..(30): Xaa is C or S
PQDLSNITIQIMVGRTPKVIGEMSMVVKSXK

SEQ ID NO: 81238 - protein, 26 aa, Artificial Sequence
  Cyclic GFR-binding peptide
SQDLSNITIQIMIGKTPKIIGEMSMI

SEQ ID NO: 81239 - protein, 35 aa, Artificial Sequence; identical to SEQ ID NO: 29358
  Cyclic GFR-binding peptide

SEQ ID NO: 81240 - protein, 37 aa, Artificial Sequence; identical to SEQ ID NO: 29363
  Cyclic GFR-binding peptide
  MOD_RES (5)..(37): Xaa is C or S

SEQ ID NO: 81241 - protein, 33 aa, Artificial Sequence
  Cyclic GFR-binding peptide
  MOD_RES (5)..(6): Xaa is C or S
VPKPXXAPTQLSNITVQIMDDSSNVIIGEMSNM

SEQ ID NO: 81242 - protein, 35 aa, Artificial Sequence; identical to SEQ ID NO: 29364
  Cyclic GFR-binding peptide
  MOD_RES (1)..(35): Xaa is C or S

SEQ ID NO: 81243 - protein, 43 aa, Artificial Sequence; identical to SEQ ID NO: 29368
  Cyclic GFR-binding peptide
  MOD_RES (3)..(40)..(42): Xaa is C or S

SEQ ID NO: 81244 - protein, 30 aa, Artificial Sequence
  Cyclic GFR-binding peptide
  MOD_RES (30)..(30): Xaa is C or S
PQALRPVQIRKIVGRKPKVKKATVMIVRSX

SEQ ID NO: 81245 - protein, 34 aa, Artificial Sequence
  Cyclic GFR-binding peptide
  MOD_RES (5)..(6): Xaa is C or S
VPKPXXAPTQLRPVQVRKIDDSSNVIKKATVNMV

SEQ ID NO: 81246 - protein, 25 aa, Artificial Sequence
  Cyclic GFR-binding peptide
QDLRSVKIAKVVGRTPKVKEVQVMV

SEQ ID NO: 81247 - protein, 37 aa, Artificial Sequence; identical to SEQ ID NO: 29374
  Cyclic GFR-binding peptide
  MOD_RES (3)..(4)..(36): Xaa is C or S

SEQ ID NO: 81248 - protein, 28 aa, Artificial Sequence
  Cyclic GFR-binding peptide
QALRSVKIAKVVGRKPKVKEVQVMIVRS

SEQ ID NO: 81249 - protein, 33 aa, Artificial Sequence
  Cyclic GFR-binding peptide
  MOD_RES (7)..(7): Xaa is C or S
HVTKPTXAPTKLRPVQVRKIDDSSNVIKKATVN

SEQ ID NO: 81250 - protein, 32 aa, Artificial Sequence
  Cyclic GFR-binding peptide
  MOD_RES (2)..(3): Xaa is C or S
AXXVPTELRPVQMRKIDEYDKVVKKATVEMVV

SEQ ID NO: 81251 - protein, 37 aa, Artificial Sequence; identical to SEQ ID NO: 29375
  Cyclic GFR-binding peptide
  MOD_RES (2)..(2): Xaa is C or S

SEQ ID NO: 81252 - protein, 32 aa, Artificial Sequence; identical to SEQ ID NO: 29376
  Cyclic GFR-binding peptide

SEQ ID NO: 81253 - protein, 25 aa, Artificial Sequence
  Cyclic GFR-binding peptide
HEPLTVLYYEYVRKKPKLEQLSNRL

SEQ ID NO: 81254 - protein, 32 aa, Artificial Sequence; identical to SEQ ID NO: 29381
  Cyclic GFR-binding peptide
  MOD_RES (1)..(2): Xaa is C or S

SEQ ID NO: 81255 - protein, 25 aa, Artificial Sequence
  Cyclic GFR-binding peptide
SNITVQIMDDSSNVIIGEMSNMVVR

SEQ ID NO: 81256 - protein, 38 aa, Artificial Sequence; identical to SEQ ID NO: 29383
  Cyclic GFR-binding peptide
  MOD_RES (6)..(7): Xaa is C or S

SEQ ID NO: 81257 - protein, 31 aa, Artificial Sequence
  Cyclic GFR-binding peptide
  MOD_RES (3)..(4): Xaa is C or S
KAXXVPTELRPVQMRKIDEYDKVVKKATVEM

SEQ ID NO: 81258 - protein, 28 aa, Artificial Sequence
  Cyclic GFR-binding peptide
  MOD_RES (2)..(3): Xaa is C or S
AXXVPTELSNITMQIMDENEKVVIGEMS

SEQ ID NO: 81259 - protein, 24 aa, Artificial Sequence
  Cyclic GFR-binding peptide
DLRPVQIRKIVGRTPKVKKATVMV

SEQ ID NO: 81260 - protein, 30 aa, Artificial Sequence
  Cyclic GFR-binding peptide
  MOD_RES (1)..(1): Xaa is C or S
XVPQALRPVQIRKIVGRKPKVKKATVMIVR

SEQ ID NO: 81261 - protein, 32 aa, Artificial Sequence
  Cyclic GFR-binding peptide
  MOD_RES (31)..(31): Xaa is C or S
EEEPLPMVYYRIKPHQGQHEQLSNFLQHNKXE

SEQ ID NO: 81262 - protein, 31 aa, Artificial Sequence
  Cyclic GFR-binding peptide
  MOD_RES (3)..(4): Xaa is C or S
KPXXAPTQLRPVQVRKIDDSSNVIKKATVNM

SEQ ID NO: 81263 - protein, 38 aa, Artificial Sequence; identical to SEQ ID NO: 29387
  Cyclic GFR-binding peptide
  MOD_RES (2)..(36)..(38): Xaa is C or S

SEQ ID NO: 81264 - protein, 29 aa, Artificial Sequence
  Cyclic GFR-binding peptide
  MOD_RES (1)..(1): Xaa is C or S
XAPTKLRSVKVAKVDDSSNVIKEVQVNMV

SEQ ID NO: 81265 - protein, 27 aa, Artificial Sequence
  Cyclic GFR-binding peptide
SQDLRSVKIAKVIGKTPKIKEVQVMIV

SEQ ID NO: 81266 - protein, 38 aa, Artificial Sequence; identical to SEQ ID NO: 29391
  Cyclic GFR-binding peptide
  MOD_RES (35)..(37): Xaa is C or S

SEQ ID NO: 81267 - protein, 31 aa, Artificial Sequence; identical to SEQ ID NO: 29392
  Cyclic GFR-binding peptide
  MOD_RES (31)..(31): Xaa is C or S

SEQ ID NO: 81268 - protein, 41 aa, Artificial Sequence; identical to SEQ ID NO: 29393
  Cyclic GFR-binding peptide
  MOD_RES (5)..(6)..(38)..(40): Xaa is C or S

SEQ ID NO: 81269 - protein, 25 aa, Artificial Sequence
  Cyclic GFR-binding peptide
LRPVQMRKIDEYDKVVKKATVEMVV

SEQ ID NO: 81270 - protein, 32 aa, Artificial Sequence
  Cyclic GFR-binding peptide
  MOD_RES (29)..(31): Xaa is C or S
ELSNITMQIMDENEKVVIGEMSDMVVEGXGXR

SEQ ID NO: 81271 - protein, 33 aa, Artificial Sequence
  Cyclic GFR-binding peptide
  MOD_RES (6)..(6): Xaa is C or S
VTKPTXAPTKLRSVKVAKVDDSSNVIKEVQVNM

SEQ ID NO: 81272 - protein, 29 aa, Artificial Sequence
  Cyclic GFR-binding peptide
VPQALRSVKIAKVVGRKPKVKEVQVMIVR

SEQ ID NO: 81273 - protein, 36 aa, Artificial Sequence
  Cyclic GFR-binding peptide
  MOD_RES (3)..(3): Xaa is C or S
VKXQPSRVHHEPLPVVYYEYVRKKPKLEQLSNRLEE

SEQ ID NO: 81274 - protein, 35 aa, Artificial Sequence; identical to SEQ ID NO: 29398
  Cyclic GFR-binding peptide
  MOD_RES (32)..(34): Xaa is C or S

SEQ ID NO: 81275 - protein, 26 aa, Artificial Sequence
  Cyclic GFR-binding peptide
SNITVQIMDDSSNVIIGEMSNMVVRA

SEQ ID NO: 81276 - protein, 29 aa, Artificial Sequence
  Cyclic GFR-binding peptide
  MOD_RES (29)..(29): Xaa is C or S
QALRPVQIRKIVGRKPKVKKATVMIVRSX

SEQ ID NO: 81277 - protein, 38 aa, Artificial Sequence; identical to SEQ ID NO: 29402
  Cyclic GFR-binding peptide
  MOD_RES (1)..(38): Xaa is C or S

SEQ ID NO: 81278 - protein, 26 aa, Artificial Sequence
  Cyclic GFR-binding peptide
SNITVQIMDDSSNVIIGEMSNMVVRS

SEQ ID NO: 81279 - protein, 31 aa, Artificial Sequence
  Cyclic GFR-binding peptide
  MOD_RES (29)..(31): Xaa is C or S
ELRPVQMRKIDEYDKVVKKATVEMVVEGXGX

SEQ ID NO: 81280 - protein, 34 aa, Artificial Sequence; identical to SEQ ID NO: 29405
  Cyclic GFR-binding peptide
  MOD_RES (2)..(34): Xaa is C or S

SEQ ID NO: 81281 - protein, 37 aa, Artificial Sequence; identical to SEQ ID NO: 29406
  Cyclic GFR-binding peptide
  MOD_RES (6)..(7): Xaa is C or S

SEQ ID NO: 81282 - protein, 26 aa, Artificial Sequence
  Cyclic GFR-binding peptide
TELRPVQMRKIDENEKVVKKATVDMV

SEQ ID NO: 81283 - protein, 30 aa, Artificial Sequence
  Cyclic GFR-binding peptide
  MOD_RES (2)..(3): Xaa is C or S
PXXVPQDLSNITIQIMVGRTPKVIGEMSMV

SEQ ID NO: 81284 - protein, 28 aa, Artificial Sequence
  Cyclic GFR-binding peptide
  MOD_RES (1)..(1): Xaa is C or S
XAPTKLRPVQVRKIDDSSNVIKKATVNM

SEQ ID NO: 81285 - protein, 31 aa, Artificial Sequence
  Cyclic GFR-binding peptide
  MOD_RES (2)..(3): Xaa is C or S
PXXVPQALRSVKIAKVVGRKPKVKEVQVMIV

SEQ ID NO: 81286 - protein, 31 aa, Artificial Sequence
  Cyclic GFR-binding peptide
QLEPLTVLYYEIVRKKPIFEQLSNTLEDHLA

SEQ ID NO: 81287 - protein, 31 aa, Artificial Sequence
  Cyclic GFR-binding peptide
  MOD_RES (5)..(6): Xaa is C or S
IPKAXXVPTELRSVKMAKVDENEKVVKEVQV

SEQ ID NO: 81288 - protein, 20 aa, Artificial Sequence
  Cyclic GFR-binding peptide
RPVQIRKIIGKTPKIKKATV

SEQ ID NO: 81289 - protein, 28 aa, Artificial Sequence
  Cyclic GFR-binding peptide
  MOD_RES (27)..(27): Xaa is C or S
SNITVQIMDDSSNVIIGEMSNMVVRSXG

SEQ ID NO: 81290 - protein, 28 aa, Artificial Sequence
  Cyclic GFR-binding peptide
  MOD_RES (2)..(3): Xaa is C or S
PXXVPQDLRSVKIAKVVGRTPKVKEVQV

SEQ ID NO: 81291 - protein, 40 aa, Artificial Sequence; identical to SEQ ID NO: 29413
  Cyclic GFR-binding peptide
  MOD_RES (5)..(6)..(37)..(39): Xaa is C or S

SEQ ID NO: 81292 - protein, 32 aa, Artificial Sequence
  Cyclic GFR-binding peptide
  MOD_RES (3)..(3): Xaa is C or S
VKXQPSRVHHEPLTVLYYEYVRKKPKLEQLSN

SEQ ID NO: 81293 - protein, 35 aa, Artificial Sequence; identical to SEQ ID NO: 29415
  Cyclic GFR-binding peptide
  MOD_RES (1)..(32)..(34): Xaa is C or S

SEQ ID NO: 81294 - protein, 37 aa, Artificial Sequence; identical to SEQ ID NO: 29416
  Cyclic GFR-binding peptide
  MOD_RES (36)..(36): Xaa is C or S

SEQ ID NO: 81295 - protein, 37 aa, Artificial Sequence; identical to SEQ ID NO: 29420
  Cyclic GFR-binding peptide
  MOD_RES (5)..(6): Xaa is C or S

SEQ ID NO: 81296 - protein, 34 aa, Artificial Sequence; identical to SEQ ID NO: 29421
  Cyclic GFR-binding peptide
  MOD_RES (31)..(33): Xaa is C or S

SEQ ID NO: 81297 - protein, 34 aa, Artificial Sequence
  Cyclic GFR-binding peptide
  MOD_RES (4)..(4): Xaa is C or S
NVQXRPTQVQLEPLTVLYYEIVRKKPIFEQLSNT

SEQ ID NO: 81298 - protein, 28 aa, Artificial Sequence
  Cyclic GFR-binding peptide
PTQVQLEPLPVVYYEIVRKKPIFEQLSN

SEQ ID NO: 81299 - protein, 39 aa, Artificial Sequence; identical to SEQ ID NO: 29426
  Cyclic GFR-binding peptide
  MOD_RES (6)..(7)..(39): Xaa is C or S

SEQ ID NO: 81300 - protein, 31 aa, Artificial Sequence
  Cyclic GFR-binding peptide
  MOD_RES (2)..(2): Xaa is C or S
KXQPSRVHHEPLPVVYYEYVRKKPKLEQLSN

SEQ ID NO: 81301 - protein, 39 aa, Artificial Sequence; identical to SEQ ID NO: 29430
  Cyclic GFR-binding peptide
  MOD_RES (6)..(7)..(38): Xaa is C or S

SEQ ID NO: 81302 - protein, 27 aa, Artificial Sequence
  Cyclic GFR-binding peptide
  MOD_RES (27)..(27): Xaa is C or S
SNITMQIMDEYDKVVIGEMSEMVVEGX

SEQ ID NO: 81303 - protein, 32 aa, Artificial Sequence
  Cyclic GFR-binding peptide
  MOD_RES (1)..(1): Xaa is C or S
XVPTEEEPLTMLYYRIKPHQGQHEQLSNFLQH

SEQ ID NO: 81304 - protein, 29 aa, Artificial Sequence
  Cyclic GFR-binding peptide
  MOD_RES (1)..(1): Xaa is C or S
XVPTELRSVKMAKVDEYDKVVKEVQVEMV

SEQ ID NO: 81305 - protein, 30 aa, Artificial Sequence
  Cyclic GFR-binding peptide
  MOD_RES (1)..(1): Xaa is C or S
XAPTKLSNITVQIMDDSSNVIIGEMSNMVV

SEQ ID NO: 81306 - protein, 25 aa, Artificial Sequence
  Cyclic GFR-binding peptide
EEEPLPMVYYRIKPHQGQHEQLSNF

SEQ ID NO: 81307 - protein, 27 aa, Artificial Sequence
  Cyclic GFR-binding peptide
LSNITMQIMDENEKVVIGEMSDMVVEG

SEQ ID NO: 81308 - protein, 31 aa, Artificial Sequence
  Cyclic GFR-binding peptide
  MOD_RES (31)..(31): Xaa is C or S
PTELRPVQMRKIDEYDKVVKKATVEMVVEGX

SEQ ID NO: 81309 - protein, 31 aa, Artificial Sequence
  Cyclic GFR-binding peptide
  MOD_RES (3)..(4): Xaa is C or S
KPXXAPTKLRPVQVRKIDDSSNVIKKATVNM

SEQ ID NO: 81310 - protein, 33 aa, Artificial Sequence
  Cyclic GFR-binding peptide
  MOD_RES (4)..(4): Xaa is C or S
SVKXQPSRVHHEPLTVLYYEYVRKKPKLEQLSN

SEQ ID NO: 81311 - protein, 40 aa, Artificial Sequence; identical to SEQ ID NO: 29435
  Cyclic GFR-binding peptide
  MOD_RES (5)..(6)..(38)..(40): Xaa is C or S

SEQ ID NO: 81312 - protein, 40 aa, Artificial Sequence; identical to SEQ ID NO: 29439
  Cyclic GFR-binding peptide
  MOD_RES (7)..(7): Xaa is C or S

SEQ ID NO: 81313 - protein, 30 aa, Artificial Sequence; identical to SEQ ID NO: 29442
  Cyclic GFR-binding peptide

SEQ ID NO: 81314 - protein, 32 aa, Artificial Sequence
  Cyclic GFR-binding peptide
  MOD_RES (30)..(32): Xaa is C or S
EEPLTMLYYRIKPHQGQHEQLSNFLQHNKXEX

SEQ ID NO: 81315 - protein, 38 aa, Artificial Sequence; identical to SEQ ID NO: 29448
  Cyclic GFR-binding peptide
  MOD_RES (3)..(4)..(36)..(38): Xaa is C or S

SEQ ID NO: 81316 - protein, 31 aa, Artificial Sequence
  Cyclic GFR-binding peptide
  MOD_RES (5)..(6): Xaa is C or S
SASPXXVPQDLSNITIQIMVGRTPKVIGEMS

SEQ ID NO: 81317 - protein, 28 aa, Artificial Sequence
  Cyclic GFR-binding peptide
  MOD_RES (1)..(1): Xaa is C or S
XAPTQLRPVQVRKIDDSSNVIKKATVNM

SEQ ID NO: 81318 - protein, 29 aa, Artificial Sequence
  Cyclic GFR-binding peptide
  MOD_RES (3)..(4): Xaa is C or S
APXXVPQALRSVKIAKVVGRKPKVKEVQV

SEQ ID NO: 81319 - protein, 41 aa, Artificial Sequence; identical to SEQ ID NO: 29455
  Cyclic GFR-binding peptide
  MOD_RES (6)..(7)..(38)..(40): Xaa is C or S

SEQ ID NO: 81320 - protein, 36 aa, Artificial Sequence; identical to SEQ ID NO: 29456
  Cyclic GFR-binding peptide
  MOD_RES (1)..(2)..(33)..(35): Xaa is C or S

SEQ ID NO: 81321 - protein, 26 aa, Artificial Sequence
  Cyclic GFR-binding peptide
TEEEPLTMLYYRIKPHQGQHEQLSNF

SEQ ID NO: 81322 - protein, 35 aa, Artificial Sequence
  Cyclic GFR-binding peptide
  MOD_RES (2)..(2): Xaa is C or S
QXRPTQVQLEPLPVVYYEIVRKKPIFEQLSNTLED

SEQ ID NO: 81323 - protein, 21 aa, Artificial Sequence
  Cyclic GFR-binding peptide
LSNITMQIMDEYDKVVIGEMS

SEQ ID NO: 81324 - protein, 42 aa, Artificial Sequence; identical to SEQ ID NO: 29465
  Cyclic GFR-binding peptide
  MOD_RES (4)..(41): Xaa is C or S

SEQ ID NO: 81325 - protein, 34 aa, Artificial Sequence
  Cyclic GFR-binding peptide
  MOD_RES (5)..(6): Xaa is C or S
VPKPXXAPTKLRPVQVRKIDDSSNVIKKATVNMV

SEQ ID NO: 81326 - protein, 27 aa, Artificial Sequence
  Cyclic GFR-binding peptide
  MOD_RES (27)..(27): Xaa is C or S
RSVKVAKVDDSSNVIKEVQVNMVVRSX

SEQ ID NO: 81327 - protein, 33 aa, Artificial Sequence
  Cyclic GFR-binding peptide
  MOD_RES (5)..(6): Xaa is C or S
IPKAXXVPTELRSVKMAKVDEYDKVVKEVQVEM

SEQ ID NO: 81328 - protein, 28 aa, Artificial Sequence
  Cyclic GFR-binding peptide
HEPLTVLYYEYVRKKPKLEQLSNRLEEH

SEQ ID NO: 81329 - protein, 28 aa, Artificial Sequence
  Cyclic GFR-binding peptide
  MOD_RES (28)..(28): Xaa is C or S
ALRSVKIAKVVGRKPKVKEVQVMIVRSX

SEQ ID NO: 81330 - protein, 31 aa, Artificial Sequence
  Cyclic GFR-binding peptide
  MOD_RES (30)..(30): Xaa is C or S
SQDLRPVQIRKIIGKTPKIKKATVMIVKSXK

SEQ ID NO: 81331 - protein, 36 aa, Artificial Sequence; identical to SEQ ID NO: 29471
  Cyclic GFR-binding peptide
  MOD_RES (1)..(33)..(35): Xaa is C or S

SEQ ID NO: 81332 - protein, 30 aa, Artificial Sequence
  Cyclic GFR-binding peptide
  MOD_RES (2)..(2): Xaa is C or S
EXVPTEEEPLTMLYYRIKPHQGQHEQLSNF

SEQ ID NO: 81333 - protein, 30 aa, Artificial Sequence; identical to SEQ ID NO: 1159
  Cyclic GFR-binding peptide

SEQ ID NO: 81334 - protein, 30 aa, Artificial Sequence
  Cyclic GFR-binding peptide
PTELRPVQMRKIDEYDKVVKKATVEMVVEG

SEQ ID NO: 81335 - protein, 30 aa, Artificial Sequence
  Cyclic GFR-binding peptide
  MOD_RES (2)..(3): Xaa is C or S
PXXAPTQLRSVKVAKVDDSSNVIKEVQVNM

SEQ ID NO: 81336 - protein, 37 aa, Artificial Sequence
  Cyclic GFR-binding peptide
  MOD_RES (4)..(4): Xaa is C or S
NVQXRPTQVQLEPLPVVYYEIVRKKPIFEQLSNTLED

SEQ ID NO: 81337 - protein, 29 aa, Artificial Sequence
  Cyclic GFR-binding peptide
  MOD_RES (2)..(3): Xaa is C or S
PXXVPQALSNITIQIMVGRKPKVIGEMSM

SEQ ID NO: 81338 - protein, 33 aa, Artificial Sequence; identical to SEQ ID NO: 29485
  Cyclic GFR-binding peptide
  MOD_RES (32)..(32): Xaa is C or S

SEQ ID NO: 81339 - protein, 26 aa, Artificial Sequence
  Cyclic GFR-binding peptide
EEEPLTMLYYRIKPHQGQHEQLSNFL

SEQ ID NO: 81340 - protein, 38 aa, Artificial Sequence; identical to SEQ ID NO: 29489
  Cyclic GFR-binding peptide
  MOD_RES (4)..(4): Xaa is C or S

SEQ ID NO: 81341 - protein, 28 aa, Artificial Sequence
  Cyclic GFR-binding peptide
  MOD_RES (26)..(28): Xaa is C or S
RSVKIAKVIGKTPKIKEVQVMIVKSXKX

SEQ ID NO: 81342 - protein, 36 aa, Artificial Sequence; identical to SEQ ID NO: 29490
  Cyclic GFR-binding peptide
  MOD_RES (2)..(34)..(36): Xaa is C or S

SEQ ID NO: 81343 - protein, 37 aa, Artificial Sequence; identical to SEQ ID NO: 29491
  Cyclic GFR-binding peptide
  MOD_RES (5)..(6)..(37): Xaa is C or S

SEQ ID NO: 81344 - protein, 21 aa, Artificial Sequence
  Cyclic GFR-binding peptide
LSNITMQIMDENEKVVIGEMS

SEQ ID NO: 81345 - protein, 33 aa, Artificial Sequence
  Cyclic GFR-binding peptide
  MOD_RES (31)..(33): Xaa is C or S
PTELRPVQMRKIDEYDKVVKKATVEMVVEGXGX

SEQ ID NO: 81346 - protein, 38 aa, Artificial Sequence; identical to SEQ ID NO: 29494
  Cyclic GFR-binding peptide
  MOD_RES (4)..(4): Xaa is C or S

SEQ ID NO: 81347 - protein, 32 aa, Artificial Sequence
  Cyclic GFR-binding peptide
  MOD_RES (7)..(7): Xaa is C or S
HVTKPTXAPTKLSNITVQIMDDSSNVIIGEMS

SEQ ID NO: 81348 - protein, 31 aa, Artificial Sequence
  Cyclic GFR-binding peptide
  MOD_RES (3)..(4): Xaa is C or S
SPXXVSQDLRPVQIRKIIGKTPKIKKATVMI

SEQ ID NO: 81349 - protein, 33 aa, Artificial Sequence; identical to SEQ ID NO: 29498
  Cyclic GFR-binding peptide
  MOD_RES (1)..(32): Xaa is C or S

SEQ ID NO: 81350 - protein, 29 aa, Artificial Sequence
  Cyclic GFR-binding peptide
TQLRSVKVAKVDDSSNVIKEVQVNMVVRA

SEQ ID NO: 81351 - protein, 30 aa, Artificial Sequence
  Cyclic GFR-binding peptide
  MOD_RES (1)..(2): Xaa is C or S
XXVSQDLRPVQIRKIIGKTPKIKKATVMIV

SEQ ID NO: 81352 - protein, 29 aa, Artificial Sequence
  Cyclic GFR-binding peptide
  MOD_RES (3)..(4): Xaa is C or S
KPXXAPTKLRSVKVAKVDDSSNVIKEVQV

SEQ ID NO: 81353 - protein, 38 aa, Artificial Sequence; identical to SEQ ID NO: 29500
  Cyclic GFR-binding peptide
  MOD_RES (2)..(3)..(35)..(37): Xaa is C or S

SEQ ID NO: 81354 - protein, 25 aa, Artificial Sequence
  Cyclic GFR-binding peptide
PTELRPVQMRKIDENEKVVKKATVD

SEQ ID NO: 81355 - protein, 40 aa, Artificial Sequence; identical to SEQ ID NO: 29503
  Cyclic GFR-binding peptide
  MOD_RES (6)..(7)..(38)..(40): Xaa is C or S

SEQ ID NO: 81356 - protein, 29 aa, Artificial Sequence
  Cyclic GFR-binding peptide
  MOD_RES (3)..(4): Xaa is C or S
KAXXVPTELRPVQMRKIDEYDKVVKKATV

SEQ ID NO: 81357 - protein, 41 aa, Artificial Sequence; identical to SEQ ID NO: 29506
  Cyclic GFR-binding peptide
  MOD_RES (5)..(5): Xaa is C or S

SEQ ID NO: 81358 - protein, 25 aa, Artificial Sequence
  Cyclic GFR-binding peptide
TEEEPLTMLYYRIKPHQGQHEQLSN

SEQ ID NO: 81359 - protein, 33 aa, Artificial Sequence
  Cyclic GFR-binding peptide
  MOD_RES (3)..(4): Xaa is C or S
SPXXVPQDLRPVQIRKIVGRTPKVKKATVMVVK

SEQ ID NO: 81360 - protein, 32 aa, Artificial Sequence
  Cyclic GFR-binding peptide
  MOD_RES (6)..(7): Xaa is C or S
YVPKPXXAPTKLSNITVQIMDDSSNVIIGEMS

SEQ ID NO: 81361 - protein, 30 aa, Artificial Sequence
  Cyclic GFR-binding peptide
  MOD_RES (3)..(4): Xaa is C or S
KPXXAPTKLSNITVQIMDDSSNVIIGEMSN

SEQ ID NO: 81362 - protein, 34 aa, Artificial Sequence; identical to SEQ ID NO: 29519
  Cyclic GFR-binding peptide
  MOD_RES (32)..(34): Xaa is C or S

SEQ ID NO: 81363 - protein, 29 aa, Artificial Sequence
  Cyclic GFR-binding peptide
TKLRPVQVRKIDDSSNVIKKATVNMVVRS

SEQ ID NO: 81364 - protein, 26 aa, Artificial Sequence
  Cyclic GFR-binding peptide
LRSVKMAKVDENEKVVKEVQVDMVVE

SEQ ID NO: 81365 - protein, 33 aa, Artificial Sequence
  Cyclic GFR-binding peptide
  MOD_RES (30)..(32): Xaa is C or S
TKLRSVKVAKVDDSSNVIKEVQVNMVVRSXGXH

SEQ ID NO: 81366 - protein, 28 aa, Artificial Sequence
  Cyclic GFR-binding peptide
  MOD_RES (1)..(1): Xaa is C or S
XAPTKLRSVKVAKVDDSSNVIKEVQVNM

SEQ ID NO: 81367 - protein, 39 aa, Artificial Sequence; identical to SEQ ID NO: 29525
  Cyclic GFR-binding peptide
  MOD_RES (36)..(38): Xaa is C or S

SEQ ID NO: 81368 - protein, 28 aa, Artificial Sequence
  Cyclic GFR-binding peptide
PTELRSVKMAKVDENEKVVKEVQVDMVV

SEQ ID NO: 81369 - protein, 28 aa, Artificial Sequence
  Cyclic GFR-binding peptide
  MOD_RES (26)..(28): Xaa is C or S
SNITIQIMIGKTPKIIGEMSMIVKSXKX

SEQ ID NO: 81370 - protein, 29 aa, Artificial Sequence
  Cyclic GFR-binding peptide
PSRVHHEPLTVLYYEYVRKKPKLEQLSNR

SEQ ID NO: 81371 - protein, 24 aa, Artificial Sequence
  Cyclic GFR-binding peptide
QDLRSVKIAKVIGKTPKIKEVQVM

SEQ ID NO: 81372 - protein, 34 aa, Artificial Sequence
  Cyclic GFR-binding peptide
  MOD_RES (31)..(33): Xaa is C or S
PTKLRPVQVRKIDDSSNVIKKATVNMVVRSXGXH

SEQ ID NO: 81373 - protein, 30 aa, Artificial Sequence
  Cyclic GFR-binding peptide
LEPLTVLYYEIVRKKPIFEQLSNTLEDHLA

SEQ ID NO: 81374 - protein, 32 aa, Artificial Sequence
  Cyclic GFR-binding peptide
  MOD_RES (30)..(32): Xaa is C or S
EPLPVVYYEIVRKKPIFEQLSNTLEDHLAXKX

SEQ ID NO: 81375 - protein, 28 aa, Artificial Sequence
  Cyclic GFR-binding peptide
  MOD_RES (27)..(27): Xaa is C or S
LSNITIQIMIGKTPKIIGEMSMIVKSXK

SEQ ID NO: 81376 - protein, 29 aa, Artificial Sequence
  Cyclic GFR-binding peptide
  MOD_RES (2)..(3): Xaa is C or S
PXXAPTKLSNITVQIMDDSSNVIIGEMSN

SEQ ID NO: 81377 - protein, 31 aa, Artificial Sequence
  Cyclic GFR-binding peptide
  MOD_RES (30)..(30): Xaa is C or S
SQDLRSVKIAKVIGKTPKIKEVQVMIVKSXK

SEQ ID NO: 81378 - protein, 32 aa, Artificial Sequence
  Cyclic GFR-binding peptide
  MOD_RES (30)..(32): Xaa is C or S
SQDLSNITIQIMIGKTPKIIGEMSMIVKSXKX

SEQ ID NO: 81379 - protein, 40 aa, Artificial Sequence; identical to SEQ ID NO: 29539
  Cyclic GFR-binding peptide
  MOD_RES (5)..(6)..(37)..(39): Xaa is C or S

SEQ ID NO: 81380 - protein, 37 aa, Artificial Sequence; identical to SEQ ID NO: 29541
  Cyclic GFR-binding peptide
  MOD_RES (4)..(36): Xaa is C or S

SEQ ID NO: 81381 - protein, 41 aa, Artificial Sequence; identical to SEQ ID NO: 29543
  Cyclic GFR-binding peptide
  MOD_RES (6)..(7)..(38)..(40): Xaa is C or S

SEQ ID NO: 81382 - protein, 30 aa, Artificial Sequence
  Cyclic GFR-binding peptide
PTEEEPLTMLYYRIKPHQGQHEQLSNFLQH

SEQ ID NO: 81383 - protein, 30 aa, Artificial Sequence
  Cyclic GFR-binding peptide
  MOD_RES (3)..(3): Xaa is C or S
LEXVPTEEEPLPMVYYRIKPHQGQHEQLSN

SEQ ID NO: 81384 - protein, 24 aa, Artificial Sequence
  Cyclic GFR-binding peptide
DLSNITIQIMVGRTPKVIGEMSMV

SEQ ID NO: 81385 - protein, 30 aa, Artificial Sequence
  Cyclic GFR-binding peptide
  MOD_RES (30)..(30): Xaa is C or S
EEPLTMLYYRIKPHQGQHEQLSNFLQHNKX

SEQ ID NO: 81386 - protein, 31 aa, Artificial Sequence
  Cyclic GFR-binding peptide
  MOD_RES (2)..(2): Xaa is C or S
QXRPTQVQLEPLTVLYYEIVRKKPIFEQLSN

SEQ ID NO: 81387 - protein, 30 aa, Artificial Sequence; identical to SEQ ID NO: 29551
  Cyclic GFR-binding peptide

SEQ ID NO: 81388 - protein, 27 aa, Artificial Sequence
  Cyclic GFR-binding peptide
LRPVQVRKIDDSSNVIKKATVNMVVRA

SEQ ID NO: 81389 - protein, 33 aa, Artificial Sequence
  Cyclic GFR-binding peptide
  MOD_RES (3)..(3): Xaa is C or S
VQXRPTQVQLEPLPVVYYEIVRKKPIFEQLSNT

SEQ ID NO: 81390 - protein, 30 aa, Artificial Sequence
  Cyclic GFR-binding peptide
  MOD_RES (2)..(3): Xaa is C or S
PXXVPQDLRPVQIRKIVGRTPKVKKATVMV

SEQ ID NO: 81391 - protein, 24 aa, Artificial Sequence
  Cyclic GFR-binding peptide
LRPVQMRKIDENEKVVKKATVDMV

SEQ ID NO: 81392 - protein, 33 aa, Artificial Sequence; identical to SEQ ID NO: 29554
  Cyclic GFR-binding peptide
  MOD_RES (1)..(2): Xaa is C or S

SEQ ID NO: 81393 - protein, 33 aa, Artificial Sequence; identical to SEQ ID NO: 29556
  Cyclic GFR-binding peptide
  MOD_RES (1)..(33): Xaa is C or S

SEQ ID NO: 81394 - protein, 38 aa, Artificial Sequence; identical to SEQ ID NO: 29555
  Cyclic GFR-binding peptide
  MOD_RES (4)..(38): Xaa is C or S

SEQ ID NO: 81395 - protein, 42 aa, Artificial Sequence; identical to SEQ ID NO: 29558
  Cyclic GFR-binding peptide
  MOD_RES (6)..(7)..(39)..(41): Xaa is C or S

SEQ ID NO: 81396 - protein, 34 aa, Artificial Sequence; identical to SEQ ID NO: 29561
  Cyclic GFR-binding peptide
  MOD_RES (3)..(4): Xaa is C or S

SEQ ID NO: 81397 - protein, 41 aa, Artificial Sequence; identical to SEQ ID NO: 29562
  Cyclic GFR-binding peptide
  MOD_RES (5)..(5): Xaa is C or S

SEQ ID NO: 81398 - protein, 25 aa, Artificial Sequence
  Cyclic GFR-binding peptide
VPTELSNITMQIMDENEKVVIGEMS

SEQ ID NO: 81399 - protein, 27 aa, Artificial Sequence
  Cyclic GFR-binding peptide
LRPVQVRKIDDSSNVIKKATVNMVVRS

SEQ ID NO: 81400 - protein, 32 aa, Artificial Sequence; identical to SEQ ID NO: 29564
  Cyclic GFR-binding peptide
  MOD_RES (32)..(32): Xaa is C or S

SEQ ID NO: 81401 - protein, 22 aa, Artificial Sequence
  Cyclic GFR-binding peptide
EPLTMLYYRIKPHQGQHEQLSN

SEQ ID NO: 81402 - protein, 32 aa, Artificial Sequence; identical to SEQ ID NO: 29565
  Cyclic GFR-binding peptide

SEQ ID NO: 81403 - protein, 36 aa, Artificial Sequence; identical to SEQ ID NO: 29566
  Cyclic GFR-binding peptide
  MOD_RES (4)..(5): Xaa is C or S

SEQ ID NO: 81404 - protein, 29 aa, Artificial Sequence
  Cyclic GFR-binding peptide
  MOD_RES (2)..(3): Xaa is C or S
AXXVPTELSNITMQIMDEYDKVVIGEMSE

SEQ ID NO: 81405 - protein, 40 aa, Artificial Sequence; identical to SEQ ID NO: 29570
  Cyclic GFR-binding peptide
  MOD_RES (5)..(37)..(39): Xaa is C or S

SEQ ID NO: 81406 - protein, 39 aa, Artificial Sequence; identical to SEQ ID NO: 29571
  Cyclic GFR-binding peptide
  MOD_RES (5)..(39): Xaa is C or S

SEQ ID NO: 81407 - protein, 26 aa, Artificial Sequence
  Cyclic GFR-binding peptide
PTELRPVQMRKIDEYDKVVKKATVEM

SEQ ID NO: 81408 - protein, 34 aa, Artificial Sequence; identical to SEQ ID NO: 29573
  Cyclic GFR-binding peptide
  MOD_RES (2)..(3)..(34): Xaa is C or S

SEQ ID NO: 81409 - protein, 42 aa, Artificial Sequence; identical to SEQ ID NO: 29574
  Cyclic GFR-binding peptide
  MOD_RES (2)..(39)..(41): Xaa is C or S

SEQ ID NO: 81410 - protein, 27 aa, Artificial Sequence
  Cyclic GFR-binding peptide
PQDLRPVQIRKIVGRTPKVKKATVMVV

SEQ ID NO: 81411 - protein, 32 aa, Artificial Sequence
  Cyclic GFR-binding peptide
  MOD_RES (3)..(4): Xaa is C or S
SPXXVSQDLRPVQIRKIIGKTPKIKKATVMIV

SEQ ID NO: 81412 - protein, 28 aa, Artificial Sequence
  Cyclic GFR-binding peptide
VPTELSNITMQIMDENEKVVIGEMSDMV

SEQ ID NO: 81413 - protein, 32 aa, Artificial Sequence
  Cyclic GFR-binding peptide
  MOD_RES (4)..(5): Xaa is C or S
AAPXXVPQALSNITIQIMVGRKPKVIGEMSMI

SEQ ID NO: 81414 - protein, 38 aa, Artificial Sequence
  Cyclic GFR-binding peptide
  MOD_RES (7)..(7): Xaa is C or S
NDEGLEXVPTEEEPLTMLYYRIKPHQGQHEQLSNFLQH

SEQ ID NO: 81415 - protein, 20 aa, Artificial Sequence
  Cyclic GFR-binding peptide
RPVQIRKIVGRTPKVKKATV

SEQ ID NO: 81416 - protein, 27 aa, Artificial Sequence
  Cyclic GFR-binding peptide
VPTELRPVQMRKIDENEKVVKKATVDM

SEQ ID NO: 81417 - protein, 39 aa, Artificial Sequence; identical to SEQ ID NO: 29583
  Cyclic GFR-binding peptide
  MOD_RES (2)..(36)..(38): Xaa is C or S

SEQ ID NO: 81418 - protein, 20 aa, Artificial Sequence
  Cyclic GFR-binding peptide
RSVKIAKVVGRTPKVKEVQV

SEQ ID NO: 81419 - protein, 30 aa, Artificial Sequence
  Cyclic GFR-binding peptide
  MOD_RES (29)..(29): Xaa is C or S
QDLRPVQIRKIVGRTPKVKKATVMVVKSXK

SEQ ID NO: 81420 - protein, 31 aa, Artificial Sequence
  Cyclic GFR-binding peptide
RPTQVQLEPLTVLYYEIVRKKPIFEQLSNTL

SEQ ID NO: 81421 - protein, 32 aa, Artificial Sequence
  Cyclic GFR-binding peptide
  MOD_RES (4)..(5): Xaa is C or S
PKPXXAPTKLRPVQVRKIDDSSNVIKKATVNM

SEQ ID NO: 81422 - protein, 25 aa, Artificial Sequence
  Cyclic GFR-binding peptide
LRPVQMRKIDENEKVVKKATVDMVV

SEQ ID NO: 81423 - protein, 36 aa, Artificial Sequence
  Cyclic GFR-binding peptide
  MOD_RES (3)..(3): Xaa is C or S
VQXRPTQVQLEPLTVLYYEIVRKKPIFEQLSNTLED

SEQ ID NO: 81424 - protein, 31 aa, Artificial Sequence
  Cyclic GFR-binding peptide
  MOD_RES (6)..(6): Xaa is C or S
VTKPTXAPTKLSNITVQIMDDSSNVIIGEMS

SEQ ID NO: 81425 - protein, 24 aa, Artificial Sequence
  Cyclic GFR-binding peptide
ELRSVKMAKVDENEKVVKEVQVDM

SEQ ID NO: 81426 - protein, 39 aa, Artificial Sequence; identical to SEQ ID NO: 29588
  Cyclic GFR-binding peptide
  MOD_RES (6)..(7)..(39): Xaa is C or S

SEQ ID NO: 81427 - protein, 34 aa, Artificial Sequence
  Cyclic GFR-binding peptide
  MOD_RES (5)..(5): Xaa is C or S
SSVKXQPSRVHHEPLPVVYYEYVRKKPKLEQLSN

SEQ ID NO: 81428 - protein, 34 aa, Artificial Sequence; identical to SEQ ID NO: 29590
  Cyclic GFR-binding peptide
  MOD_RES (3)..(4): Xaa is C or S

SEQ ID NO: 81429 - protein, 26 aa, Artificial Sequence
  Cyclic GFR-binding peptide
  MOD_RES (1)..(1): Xaa is C or S
XAPTKLSNITVQIMDDSSNVIIGEMS

SEQ ID NO: 81430 - protein, 33 aa, Artificial Sequence
  Cyclic GFR-binding peptide
  MOD_RES (1)..(1): Xaa is C or S
XRPTQVQLEPLPVVYYEIVRKKPIFEQLSNTLE

SEQ ID NO: 81431 - protein, 32 aa, Artificial Sequence
  Cyclic GFR-binding peptide
  MOD_RES (5)..(6): Xaa is C or S
IPKAXXVPTELRSVKMAKVDENEKVVKEVQVD

SEQ ID NO: 81432 - protein, 24 aa, Artificial Sequence
  Cyclic GFR-binding peptide
PQALRSVKIAKVVGRKPKVKEVQV

SEQ ID NO: 81433 - protein, 27 aa, Artificial Sequence
  Cyclic GFR-binding peptide
APTQLRSVKVAKVDDSSNVIKEVQVNM

SEQ ID NO: 81434 - protein, 37 aa, Artificial Sequence; identical to SEQ ID NO: 29595
  Cyclic GFR-binding peptide
  MOD_RES (2)..(3)..(34)..(36): Xaa is C or S

SEQ ID NO: 81435 - protein, 29 aa, Artificial Sequence
  Cyclic GFR-binding peptide
  MOD_RES (1)..(2): Xaa is C or S
XXVPTELRPVQMRKIDENEKVVKKATVDM

SEQ ID NO: 81436 - protein, 34 aa, Artificial Sequence; identical to SEQ ID NO: 29596
  Cyclic GFR-binding peptide
  MOD_RES (2)..(3): Xaa is C or S

SEQ ID NO: 81437 - protein, 23 aa, Artificial Sequence
  Cyclic GFR-binding peptide
QLRPVQVRKIDDSSNVIKKATVN

SEQ ID NO: 81438 - protein, 40 aa, Artificial Sequence; identical to SEQ ID NO: 29600
  Cyclic GFR-binding peptide
  MOD_RES (6)..(7)..(38)..(40): Xaa is C or S

SEQ ID NO: 81439 - protein, 27 aa, Artificial Sequence
  Cyclic GFR-binding peptide
  MOD_RES (27)..(27): Xaa is C or S
LRSVKIAKVVGRKPKVKEVQVMIVRSX

SEQ ID NO: 81440 - protein, 34 aa, Artificial Sequence; identical to SEQ ID NO: 29606
  Cyclic GFR-binding peptide
  MOD_RES (1)..(33): Xaa is C or S

SEQ ID NO: 81441 - protein, 33 aa, Artificial Sequence; identical to SEQ ID NO: 29608
  Cyclic GFR-binding peptide
  MOD_RES (32)..(32): Xaa is C or S

SEQ ID NO: 81442 - protein, 41 aa, Artificial Sequence; identical to SEQ ID NO: 29611
  Cyclic GFR-binding peptide
  MOD_RES (6)..(7)..(39)..(41): Xaa is C or S

SEQ ID NO: 81443 - protein, 32 aa, Artificial Sequence
  Cyclic GFR-binding peptide
  MOD_RES (30)..(32): Xaa is C or S
TELSNITMQIMDENEKVVIGEMSDMVVEGXGX

SEQ ID NO: 81444 - protein, 28 aa, Artificial Sequence
  Cyclic GFR-binding peptide
  MOD_RES (27)..(27): Xaa is C or S
LRSVKIAKVVGRTPKVKEVQVMVVKSXK

SEQ ID NO: 81445 - protein, 31 aa, Artificial Sequence; identical to SEQ ID NO: 29612
  Cyclic GFR-binding peptide
  MOD_RES (1)..(1): Xaa is C or S

SEQ ID NO: 81446 - protein, 30 aa, Artificial Sequence
  Cyclic GFR-binding peptide
  MOD_RES (30)..(30): Xaa is C or S
TKLRSVKVAKVDDSSNVIKEVQVNMVVRSX

SEQ ID NO: 81447 - protein, 27 aa, Artificial Sequence
  Cyclic GFR-binding peptide
ELSNITMQIMDENEKVVIGEMSDMVVE

SEQ ID NO: 81448 - protein, 27 aa, Artificial Sequence
  Cyclic GFR-binding peptide
  MOD_RES (27)..(27): Xaa is C or S
RPVQVRKIDDSSNVIKKATVNMVVRSX

SEQ ID NO: 81449 - protein, 30 aa, Artificial Sequence
  Cyclic GFR-binding peptide
  MOD_RES (1)..(2): Xaa is C or S
XXVPTELRPVQMRKIDENEKVVKKATVDMV

SEQ ID NO: 81450 - protein, 28 aa, Artificial Sequence
  Cyclic GFR-binding peptide
  MOD_RES (1)..(2): Xaa is C or S
XXVPQDLRSVKIAKVVGRTPKVKEVQVM

SEQ ID NO: 81451 - protein, 39 aa, Artificial Sequence; identical to SEQ ID NO: 29621
  Cyclic GFR-binding peptide
  MOD_RES (5)..(5): Xaa is C or S

SEQ ID NO: 81452 - protein, 30 aa, Artificial Sequence
  Cyclic GFR-binding peptide
  MOD_RES (4)..(5): Xaa is C or S
ASPXXVPQDLRSVKIAKVVGRTPKVKEVQV

SEQ ID NO: 81453 - protein, 39 aa, Artificial Sequence; identical to SEQ ID NO: 29625
  Cyclic GFR-binding peptide
  MOD_RES (6)..(7)..(39): Xaa is C or S

SEQ ID NO: 81454 - protein, 27 aa, Artificial Sequence
  Cyclic GFR-binding peptide
VPQDLSNITIQIMVGRTPKVIGEMSMV

SEQ ID NO: 81455 - protein, 28 aa, Artificial Sequence
  Cyclic GFR-binding peptide
VSQDLRSVKIAKVIGKTPKIKEVQVMIV

SEQ ID NO: 81456 - protein, 31 aa, Artificial Sequence
  Cyclic GFR-binding peptide
  MOD_RES (31)..(31): Xaa is C or S
PTELRSVKMAKVDEYDKVVKEVQVEMVVEGX

SEQ ID NO: 81457 - protein, 29 aa, Artificial Sequence
  Cyclic GFR-binding peptide
  MOD_RES (4)..(4): Xaa is C or S
KPTXAPTKLRPVQVRKIDDSSNVIKKATV

SEQ ID NO: 81458 - protein, 34 aa, Artificial Sequence; identical to SEQ ID NO: 29634
  Cyclic GFR-binding peptide
  MOD_RES (1)..(2)..(34): Xaa is C or S

SEQ ID NO: 81459 - protein, 24 aa, Artificial Sequence
  Cyclic GFR-binding peptide
SQDLRSVKIAKVIGKTPKIKEVQV

SEQ ID NO: 81460 - protein, 31 aa, Artificial Sequence
  Cyclic GFR-binding peptide
  MOD_RES (5)..(6): Xaa is C or S
IPKAXXVPTELRSVKMAKVDEYDKVVKEVQV

SEQ ID NO: 81461 - protein, 40 aa, Artificial Sequence; identical to SEQ ID NO: 29642
  Cyclic GFR-binding peptide
  MOD_RES (5)..(6)..(38)..(40): Xaa is C or S

SEQ ID NO: 81462 - protein, 25 aa, Artificial Sequence
  Cyclic GFR-binding peptide
APTKLRSVKVAKVDDSSNVIKEVQV

SEQ ID NO: 81463 - protein, 42 aa, Artificial Sequence; identical to SEQ ID NO: 29643
  Cyclic GFR-binding peptide
  MOD_RES (5)..(39)..(41): Xaa is C or S

SEQ ID NO: 81464 - protein, 31 aa, Artificial Sequence
  Cyclic GFR-binding peptide
  MOD_RES (29)..(31): Xaa is C or S
ELRPVQMRKIDENEKVVKKATVDMVVEGXGX

SEQ ID NO: 81465 - protein, 35 aa, Artificial Sequence; identical to SEQ ID NO: 29644
  Cyclic GFR-binding peptide
  MOD_RES (4)..(4): Xaa is C or S

SEQ ID NO: 81466 - protein, 29 aa, Artificial Sequence
  Cyclic GFR-binding peptide
TQVQLEPLPVVYYEIVRKKPIFEQLSNTL

SEQ ID NO: 81467 - protein, 43 aa, Artificial Sequence; identical to SEQ ID NO: 29648
  Cyclic GFR-binding peptide
  MOD_RES (5)..(42): Xaa is C or S

SEQ ID NO: 81468 - protein, 31 aa, Artificial Sequence; identical to SEQ ID NO: 29650
  Cyclic GFR-binding peptide
  MOD_RES (1)..(1): Xaa is C or S

SEQ ID NO: 81469 - protein, 21 aa, Artificial Sequence
  Cyclic GFR-binding peptide
LRPVQMRKIDEYDKVVKKATV

SEQ ID NO: 81470 - protein, 40 aa, Artificial Sequence; identical to SEQ ID NO: 29654
  Cyclic GFR-binding peptide
  MOD_RES (37)..(39): Xaa is C or S

SEQ ID NO: 81471 - protein, 31 aa, Artificial Sequence
  Cyclic GFR-binding peptide
  MOD_RES (3)..(4): Xaa is C or S
SPXXVSQDLRSVKIAKVIGKTPKIKEVQVMI

SEQ ID NO: 81472 - protein, 28 aa, Artificial Sequence
  Cyclic GFR-binding peptide
VSQDLSNITIQIMIGKTPKIIGEMSMIV

SEQ ID NO: 81473 - protein, 33 aa, Artificial Sequence; identical to SEQ ID NO: 29655
  Cyclic GFR-binding peptide
  MOD_RES (1)..(32): Xaa is C or S

SEQ ID NO: 81474 - protein, 35 aa, Artificial Sequence; identical to SEQ ID NO: 29656
  Cyclic GFR-binding peptide
  MOD_RES (3)..(4): Xaa is C or S

SEQ ID NO: 81475 - protein, 27 aa, Artificial Sequence
  Cyclic GFR-binding peptide
KLRSVKVAKVDDSSNVIKEVQVNMVVR

SEQ ID NO: 81476 - protein, 32 aa, Artificial Sequence
  Cyclic GFR-binding peptide
  MOD_RES (5)..(6): Xaa is C or S
VPKPXXAPTKLSNITVQIMDDSSNVIIGEMSN

SEQ ID NO: 81477 - protein, 39 aa, Artificial Sequence; identical to SEQ ID NO: 29664
  Cyclic GFR-binding peptide
  MOD_RES (5)..(5): Xaa is C or S

SEQ ID NO: 81478 - protein, 39 aa, Artificial Sequence; identical to SEQ ID NO: 29665
  Cyclic GFR-binding peptide
  MOD_RES (4)..(5)..(37)..(39): Xaa is C or S

SEQ ID NO: 81479 - protein, 28 aa, Artificial Sequence
  Cyclic GFR-binding peptide
  MOD_RES (2)..(3): Xaa is C or S
PXXVSQDLRPVQIRKIIGKTPKIKKATV

SEQ ID NO: 81480 - protein, 31 aa, Artificial Sequence; identical to SEQ ID NO: 29667
  Cyclic GFR-binding peptide
  MOD_RES (1)..(1): Xaa is C or S

SEQ ID NO: 81481 - protein, 34 aa, Artificial Sequence
  Cyclic GFR-binding peptide
  MOD_RES (31)..(33): Xaa is C or S
EEEPLPMVYYRIKPHQGQHEQLSNFLQHNKXEXR

SEQ ID NO: 81482 - protein, 22 aa, Artificial Sequence
  Cyclic GFR-binding peptide
LSNITIQIMIGKTPKIIGEMSM

SEQ ID NO: 81483 - protein, 29 aa, Artificial Sequence
  Cyclic GFR-binding peptide
  MOD_RES (1)..(2): Xaa is C or S
XXVSQDLRPVQIRKIIGKTPKIKKATVMI

SEQ ID NO: 81484 - protein, 28 aa, Artificial Sequence
  Cyclic GFR-binding peptide
PTELSNITMQIMDEYDKVVIGEMSEMVV

SEQ ID NO: 81485 - protein, 29 aa, Artificial Sequence
  Cyclic GFR-binding peptide
  MOD_RES (1)..(2): Xaa is C or S
XXVPTELSNITMQIMDENEKVVIGEMSDM

SEQ ID NO: 81486 - protein, 24 aa, Artificial Sequence
  Cyclic GFR-binding peptide
TKLRSVKVAKVDDSSNVIKEVQVN

SEQ ID NO: 81487 - protein, 39 aa, Artificial Sequence; identical to SEQ ID NO: 29681
  Cyclic GFR-binding peptide
  MOD_RES (6)..(38): Xaa is C or S

SEQ ID NO: 81488 - protein, 30 aa, Artificial Sequence
  Cyclic GFR-binding peptide
  MOD_RES (4)..(5): Xaa is C or S
ASPXXVSQDLRPVQIRKIIGKTPKIKKATV

SEQ ID NO: 81489 - protein, 36 aa, Artificial Sequence
  Cyclic GFR-binding peptide
  MOD_RES (6)..(7): Xaa is C or S
ASASPXXVPQDLRSVKIAKVVGRTPKVKEVQVMVVK

SEQ ID NO: 81490 - protein, 31 aa, Artificial Sequence
  Cyclic GFR-binding peptide
  MOD_RES (3)..(4): Xaa is C or S
KPXXAPTKLSNITVQIMDDSSNVIIGEMSNM

SEQ ID NO: 81491 - protein, 28 aa, Artificial Sequence
  Cyclic GFR-binding peptide
  MOD_RES (1)..(1): Xaa is C or S
XAPTQLRSVKVAKVDDSSNVIKEVQVNM

SEQ ID NO: 81492 - protein, 34 aa, Artificial Sequence
  Cyclic GFR-binding peptide
  MOD_RES (33)..(33): Xaa is C or S
PTEEEPLTMLYYRIKPHQGQHEQLSNFLQHNKXE

SEQ ID NO: 81493 - protein, 22 aa, Artificial Sequence
  Cyclic GFR-binding peptide
KLSNITVQIMDDSSNVIIGEMS

SEQ ID NO: 81494 - protein, 34 aa, Artificial Sequence
  Cyclic GFR-binding peptide
  MOD_RES (31)..(33): Xaa is C or S
PTELRPVQMRKIDEYDKVVKKATVEMVVEGXGXR

SEQ ID NO: 81495 - protein, 35 aa, Artificial Sequence; identical to SEQ ID NO: 29686
  Cyclic GFR-binding peptide
  MOD_RES (32)..(34): Xaa is C or S

SEQ ID NO: 81496 - protein, 32 aa, Artificial Sequence
  Cyclic GFR-binding peptide
  MOD_RES (29)..(31): Xaa is C or S
QALSNITIQIMVGRKPKVIGEMSMIVRSXKXS

SEQ ID NO: 81497 - protein, 23 aa, Artificial Sequence
  Cyclic GFR-binding peptide
QDLRPVQIRKIIGKTPKIKKATV

SEQ ID NO: 81498 - protein, 31 aa, Artificial Sequence
  Cyclic GFR-binding peptide
  MOD_RES (29)..(31): Xaa is C or S
QALSNITIQIMVGRKPKVIGEMSMIVRSXKX

SEQ ID NO: 81499 - protein, 26 aa, Artificial Sequence
  Cyclic GFR-binding peptide
VPTELRSVKMAKVDEYDKVVKEVQVE

SEQ ID NO: 81500 - protein, 33 aa, Artificial Sequence
  Cyclic GFR-binding peptide
  MOD_RES (5)..(5): Xaa is C or S
EGLEXVPTEEEPLTMLYYRIKPHQGQHEQLSNF

SEQ ID NO: 81501 - protein, 31 aa, Artificial Sequence
  Cyclic GFR-binding peptide
  MOD_RES (29)..(31): Xaa is C or S
QALRSVKIAKVVGRKPKVKEVQVMIVRSXKX

SEQ ID NO: 81502 - protein, 38 aa, Artificial Sequence; identical to SEQ ID NO: 29692
  Cyclic GFR-binding peptide
  MOD_RES (2)..(2): Xaa is C or S

SEQ ID NO: 81503 - protein, 37 aa, Artificial Sequence; identical to SEQ ID NO: 29696
  Cyclic GFR-binding peptide
  MOD_RES (5)..(6): Xaa is C or S

SEQ ID NO: 81504 - protein, 35 aa, Artificial Sequence; identical to SEQ ID NO: 29697
  Cyclic GFR-binding peptide
  MOD_RES (4)..(5): Xaa is C or S

SEQ ID NO: 81505 - protein, 38 aa, Artificial Sequence; identical to SEQ ID NO: 29698
  Cyclic GFR-binding peptide
  MOD_RES (37)..(37): Xaa is C or S

SEQ ID NO: 81506 - protein, 31 aa, Artificial Sequence
  Cyclic GFR-binding peptide
  MOD_RES (4)..(5): Xaa is C or S
PKAXXVPTELSNITMQIMDENEKVVIGEMSD

SEQ ID NO: 81507 - protein, 32 aa, Artificial Sequence
  Cyclic GFR-binding peptide
  MOD_RES (31)..(31): Xaa is C or S
PTELSNITMQIMDEYDKVVIGEMSEMVVEGXG

SEQ ID NO: 81508 - protein, 40 aa, Artificial Sequence; identical to SEQ ID NO: 29701
  Cyclic GFR-binding peptide
  MOD_RES (6)..(7)..(39): Xaa is C or S

SEQ ID NO: 81509 - protein, 25 aa, Artificial Sequence
  Cyclic GFR-binding peptide
RPVQIRKIVGRTPKVKKATVMVVKS

SEQ ID NO: 81510 - protein, 29 aa, Artificial Sequence
  Cyclic GFR-binding peptide
PTQVQLEPLPVVYYEIVRKKPIFEQLSNT

SEQ ID NO: 81511 - protein, 36 aa, Artificial Sequence
  Cyclic GFR-binding peptide
  MOD_RES (6)..(7): Xaa is C or S
ASASPXXVPQDLRPVQIRKIVGRTPKVKKATVMVVK

SEQ ID NO: 81512 - protein, 41 aa, Artificial Sequence; identical to SEQ ID NO: 29704
  Cyclic GFR-binding peptide
  MOD_RES (2)..(39)..(41): Xaa is C or S

SEQ ID NO: 81513 - protein, 25 aa, Artificial Sequence
  Cyclic GFR-binding peptide
TQLRSVKVAKVDDSSNVIKEVQVNM

SEQ ID NO: 81514 - protein, 23 aa, Artificial Sequence
  Cyclic GFR-binding peptide
QALSNITIQIMVGRKPKVIGEMS

SEQ ID NO: 81515 - protein, 33 aa, Artificial Sequence; identical to SEQ ID NO: 29710
  Cyclic GFR-binding peptide
  MOD_RES (1)..(33): Xaa is C or S

SEQ ID NO: 81516 - protein, 31 aa, Artificial Sequence
  Cyclic GFR-binding peptide
  MOD_RES (28)..(30): Xaa is C or S
LRSVKMAKVDEYDKVVKEVQVEMVVEGXGXR

SEQ ID NO: 81517 - protein, 30 aa, Artificial Sequence
  Cyclic GFR-binding peptide
VHHEPLTVLYYEYVRKKPKLEQLSNRLEEH

SEQ ID NO: 81518 - protein, 44 aa, Artificial Sequence; identical to SEQ ID NO: 29713
  Cyclic GFR-binding peptide
  MOD_RES (5)..(42)..(44): Xaa is C or S

SEQ ID NO: 81519 - protein, 30 aa, Artificial Sequence
  Cyclic GFR-binding peptide
  MOD_RES (29)..(29): Xaa is C or S
ELSNITMQIMDENEKVVIGEMSDMVVEGXG

SEQ ID NO: 81520 - protein, 43 aa, Artificial Sequence; identical to SEQ ID NO: 29716
  Cyclic GFR-binding peptide
  MOD_RES (4)..(41)..(43): Xaa is C or S

SEQ ID NO: 81521 - protein, 35 aa, Artificial Sequence; identical to SEQ ID NO: 29717
  Cyclic GFR-binding peptide
  MOD_RES (1)..(2)..(34): Xaa is C or S

SEQ ID NO: 81522 - protein, 25 aa, Artificial Sequence
  Cyclic GFR-binding peptide
HHEPLPVVYYEYVRKKPKLEQLSNR

SEQ ID NO: 81523 - protein, 43 aa, Artificial Sequence; identical to SEQ ID NO: 29723
  Cyclic GFR-binding peptide
  MOD_RES (7)..(41)..(43): Xaa is C or S

SEQ ID NO: 81524 - protein, 33 aa, Artificial Sequence
  Cyclic GFR-binding peptide
  MOD_RES (32)..(32): Xaa is C or S
QLEPLPVVYYEIVRKKPIFEQLSNTLEDHLAXK

SEQ ID NO: 81525 - protein, 33 aa, Artificial Sequence
  Cyclic GFR-binding peptide
  MOD_RES (4)..(5): Xaa is C or S
AAPXXVPQALRPVQIRKIVGRKPKVKKATVMIV

SEQ ID NO: 81526 - protein, 35 aa, Artificial Sequence; identical to SEQ ID NO: 29730
  Cyclic GFR-binding peptide
  MOD_RES (3)..(4)..(35): Xaa is C or S

SEQ ID NO: 81527 - protein, 38 aa, Artificial Sequence; identical to SEQ ID NO: 29732
  Cyclic GFR-binding peptide
  MOD_RES (3)..(4)..(35)..(37): Xaa is C or S

SEQ ID NO: 81528 - protein, 34 aa, Artificial Sequence; identical to SEQ ID NO: 29733
  Cyclic GFR-binding peptide
  MOD_RES (1)..(2)..(34): Xaa is C or S

SEQ ID NO: 81529 - protein, 39 aa, Artificial Sequence; identical to SEQ ID NO: 29735
  Cyclic GFR-binding peptide
  MOD_RES (3)..(4)..(36)..(38): Xaa is C or S

SEQ ID NO: 81530 - protein, 28 aa, Artificial Sequence
  Cyclic GFR-binding peptide
  MOD_RES (1)..(2): Xaa is C or S
XXVPTELRSVKMAKVDEYDKVVKEVQVE

SEQ ID NO: 81531 - protein, 28 aa, Artificial Sequence
  Cyclic GFR-binding peptide
PTEEEPLTMLYYRIKPHQGQHEQLSNFL

SEQ ID NO: 81532 - protein, 31 aa, Artificial Sequence
  Cyclic GFR-binding peptide
  MOD_RES (1)..(1): Xaa is C or S
XQPSRVHHEPLTVLYYEYVRKKPKLEQLSNR

SEQ ID NO: 81533 - protein, 30 aa, Artificial Sequence
  Cyclic GFR-binding peptide
PTQLSNITVQIMDDSSNVIIGEMSNMVVRA

SEQ ID NO: 81534 - protein, 28 aa, Artificial Sequence
  Cyclic GFR-binding peptide
  MOD_RES (2)..(3): Xaa is C or S
AXXVPTELRPVQMRKIDENEKVVKKATV

SEQ ID NO: 81535 - protein, 38 aa, Artificial Sequence; identical to SEQ ID NO: 29743
  Cyclic GFR-binding peptide
  MOD_RES (3)..(4)..(36)..(38): Xaa is C or S

SEQ ID NO: 81536 - protein, 38 aa, Artificial Sequence; identical to SEQ ID NO: 29744
  Cyclic GFR-binding peptide
  MOD_RES (3)..(4)..(36)..(38): Xaa is C or S

SEQ ID NO: 81537 - protein, 29 aa, Artificial Sequence
  Cyclic GFR-binding peptide
  MOD_RES (1)..(2): Xaa is C or S
XXVSQDLSNITIQIMIGKTPKIIGEMSMI

SEQ ID NO: 81538 - protein, 36 aa, Artificial Sequence; identical to SEQ ID NO: 29750
  Cyclic GFR-binding peptide
  MOD_RES (1)..(2)..(33)..(35): Xaa is C or S

SEQ ID NO: 81539 - protein, 29 aa, Artificial Sequence
  Cyclic GFR-binding peptide
  MOD_RES (2)..(3): Xaa is C or S
PXXVPQDLRSVKIAKVVGRTPKVKEVQVM

SEQ ID NO: 81540 - protein, 29 aa, Artificial Sequence
  Cyclic GFR-binding peptide
PTKLRPVQVRKIDDSSNVIKKATVNMVVR

SEQ ID NO: 81541 - protein, 32 aa, Artificial Sequence
  Cyclic GFR-binding peptide
  MOD_RES (30)..(32): Xaa is C or S
TELRSVKMAKVDENEKVVKEVQVDMVVEGXGX

SEQ ID NO: 81542 - protein, 33 aa, Artificial Sequence
  Cyclic GFR-binding peptide
  MOD_RES (31)..(33): Xaa is C or S
HEPLPVVYYEYVRKKPKLEQLSNRLEEHLEXAX

SEQ ID NO: 81543 - protein, 26 aa, Artificial Sequence
  Cyclic GFR-binding peptide
RVHHEPLTVLYYEYVRKKPKLEQLSN

SEQ ID NO: 81544 - protein, 25 aa, Artificial Sequence
  Cyclic GFR-binding peptide
QLRPVQVRKIDDSSNVIKKATVNMV

SEQ ID NO: 81545 - protein, 34 aa, Artificial Sequence
  Cyclic GFR-binding peptide
  MOD_RES (33)..(33): Xaa is C or S
VHHEPLTVLYYEYVRKKPKLEQLSNRLEEHLEXA

SEQ ID NO: 81546 - protein, 25 aa, Artificial Sequence
  Cyclic GFR-binding peptide
ELRPVQMRKIDEYDKVVKKATVEMV

SEQ ID NO: 81547 - protein, 27 aa, Artificial Sequence
  Cyclic GFR-binding peptide
  MOD_RES (27)..(27): Xaa is C or S
RPVQVRKIDDSSNVIKKATVNMVVRAX

SEQ ID NO: 81548 - protein, 36 aa, Artificial Sequence
  Cyclic GFR-binding peptide
  MOD_RES (33)..(35): Xaa is C or S
PTEEEPLTMLYYRIKPHQGQHEQLSNFLQHNKXEXR

SEQ ID NO: 81549 - protein, 32 aa, Artificial Sequence
  Cyclic GFR-binding peptide
  MOD_RES (5)..(5): Xaa is C or S
EGLEXVPTEEEPLTMLYYRIKPHQGQHEQLSN

SEQ ID NO: 81550 - protein, 28 aa, Artificial Sequence
  Cyclic GFR-binding peptide
  MOD_RES (27)..(27): Xaa is C or S
LSNITIQIMVGRTPKVIGEMSMVVKSXK

SEQ ID NO: 81551 - protein, 24 aa, Artificial Sequence
  Cyclic GFR-binding peptide
QALRSVKIAKVVGRKPKVKEVQVM

SEQ ID NO: 81552 - protein, 37 aa, Artificial Sequence; identical to SEQ ID NO: 29764
  Cyclic GFR-binding peptide
  MOD_RES (6)..(7): Xaa is C or S

SEQ ID NO: 81553 - protein, 32 aa, Artificial Sequence
  Cyclic GFR-binding peptide
  MOD_RES (4)..(5): Xaa is C or S
PKAXXVPTELRPVQMRKIDENEKVVKKATVDM

SEQ ID NO: 81554 - protein, 26 aa, Artificial Sequence
  Cyclic GFR-binding peptide
QVQLEPLPVVYYEIVRKKPIFEQLSN

SEQ ID NO: 81555 - protein, 33 aa, Artificial Sequence; identical to SEQ ID NO: 29773
  Cyclic GFR-binding peptide
  MOD_RES (1)..(33): Xaa is C or S

SEQ ID NO: 81556 - protein, 32 aa, Artificial Sequence
  Cyclic GFR-binding peptide
  MOD_RES (6)..(7): Xaa is C or S
TVPKPXXAPTQLRSVKVAKVDDSSNVIKEVQV

SEQ ID NO: 81557 - protein, 35 aa, Artificial Sequence
  Cyclic GFR-binding peptide
  MOD_RES (5)..(6): Xaa is C or S
SAAPXXVPQALRSVKIAKVVGRKPKVKEVQVMIVR

SEQ ID NO: 81558 - protein, 33 aa, Artificial Sequence; identical to SEQ ID NO: 29775
  Cyclic GFR-binding peptide
  MOD_RES (2)..(2): Xaa is C or S

SEQ ID NO: 81559 - protein, 36 aa, Artificial Sequence; identical to SEQ ID NO: 29776
  Cyclic GFR-binding peptide
  MOD_RES (3)..(4)..(35): Xaa is C or S

SEQ ID NO: 81560 - protein, 33 aa, Artificial Sequence
  Cyclic GFR-binding peptide
  MOD_RES (6)..(7): Xaa is C or S
TVPKPXXAPTQLRPVQVRKIDDSSNVIKKATVN

SEQ ID NO: 81561 - protein, 37 aa, Artificial Sequence; identical to SEQ ID NO: 29778
  Cyclic GFR-binding peptide
  MOD_RES (7)..(7): Xaa is C or S

SEQ ID NO: 81562 - protein, 27 aa, Artificial Sequence
  Cyclic GFR-binding peptide
DLRPVQIRKIIGKTPKIKKATVMIVKS

SEQ ID NO: 81563 - protein, 33 aa, Artificial Sequence; identical to SEQ ID NO: 29780
  Cyclic GFR-binding peptide
  MOD_RES (2)..(3): Xaa is C or S

SEQ ID NO: 81564 - protein, 33 aa, Artificial Sequence; identical to SEQ ID NO: 29781
  Cyclic GFR-binding peptide
  MOD_RES (2)..(3): Xaa is C or S

SEQ ID NO: 81565 - protein, 23 aa, Artificial Sequence
  Cyclic GFR-binding peptide
TKLSNITVQIMDDSSNVIIGEMS

SEQ ID NO: 81566 - protein, 35 aa, Artificial Sequence; identical to SEQ ID NO: 29782
  Cyclic GFR-binding peptide
  MOD_RES (32)..(34): Xaa is C or S

SEQ ID NO: 81567 - protein, 24 aa, Artificial Sequence
  Cyclic GFR-binding peptide
HHEPLTVLYYEYVRKKPKLEQLSN

SEQ ID NO: 81568 - protein, 36 aa, Artificial Sequence; identical to SEQ ID NO: 29785
  Cyclic GFR-binding peptide
  MOD_RES (2)..(2): Xaa is C or S

SEQ ID NO: 81569 - protein, 29 aa, Artificial Sequence
  Cyclic GFR-binding peptide
PTELSNITMQIMDENEKVVIGEMSDMVVE

SEQ ID NO: 81570 - protein, 36 aa, Artificial Sequence; identical to SEQ ID NO: 29789
  Cyclic GFR-binding peptide

SEQ ID NO: 81571 - protein, 31 aa, Artificial Sequence; identical to SEQ ID NO: 29794
  Cyclic GFR-binding peptide

SEQ ID NO: 81572 - protein, 25 aa, Artificial Sequence
  Cyclic GFR-binding peptide
QALRSVKIAKVVGRKPKVKEVQVMI

SEQ ID NO: 81573 - protein, 20 aa, Artificial Sequence
  Cyclic GFR-binding peptide
RSVKMAKVDENEKVVKEVQV

SEQ ID NO: 81574 - protein, 30 aa, Artificial Sequence
  Cyclic GFR-binding peptide
VHHEPLPVVYYEYVRKKPKLEQLSNRLEEH

SEQ ID NO: 81575 - protein, 42 aa, Artificial Sequence; identical to SEQ ID NO: 29797
  Cyclic GFR-binding peptide
  MOD_RES (6)..(7)..(39)..(41): Xaa is C or S

SEQ ID NO: 81576 - protein, 25 aa, Artificial Sequence
  Cyclic GFR-binding peptide
TKLRSVKVAKVDDSSNVIKEVQVNM

SEQ ID NO: 81577 - protein, 40 aa, Artificial Sequence; identical to SEQ ID NO: 29803
  Cyclic GFR-binding peptide
  MOD_RES (5)..(5): Xaa is C or S

SEQ ID NO: 81578 - protein, 39 aa, Artificial Sequence; identical to SEQ ID NO: 29805
  Cyclic GFR-binding peptide
  MOD_RES (4)..(5)..(37)..(39): Xaa is C or S

SEQ ID NO: 81579 - protein, 28 aa, Artificial Sequence
  Cyclic GFR-binding peptide
  MOD_RES (26)..(28): Xaa is C or S
RSVKIAKVVGRTPKVKEVQVMVVKSXKX

SEQ ID NO: 81580 - protein, 26 aa, Artificial Sequence
  Cyclic GFR-binding peptide
TELRPVQMRKIDEYDKVVKKATVEMV

SEQ ID NO: 81581 - protein, 36 aa, Artificial Sequence; identical to SEQ ID NO: 29810
  Cyclic GFR-binding peptide
  MOD_RES (4)..(36): Xaa is C or S

SEQ ID NO: 81582 - protein, 39 aa, Artificial Sequence; identical to SEQ ID NO: 29812
  Cyclic GFR-binding peptide
  MOD_RES (1)..(38): Xaa is C or S

SEQ ID NO: 81583 - protein, 29 aa, Artificial Sequence
  Cyclic GFR-binding peptide
PQDLRPVQIRKIVGRTPKVKKATVMVVKS

SEQ ID NO: 81584 - protein, 28 aa, Artificial Sequence
  Cyclic GFR-binding peptide
VPTELRSVKMAKVDENEKVVKEVQVDMV

SEQ ID NO: 81585 - protein, 27 aa, Artificial Sequence
  Cyclic GFR-binding peptide
  MOD_RES (1)..(2): Xaa is C or S
XXVSQDLRSVKIAKVIGKTPKIKEVQV

SEQ ID NO: 81586 - protein, 28 aa, Artificial Sequence
  Cyclic GFR-binding peptide
  MOD_RES (1)..(1): Xaa is C or S
XVPTELRSVKMAKVDEYDKVVKEVQVEM

SEQ ID NO: 81587 - protein, 28 aa, Artificial Sequence
  Cyclic GFR-binding peptide
  MOD_RES (1)..(1): Xaa is C or S
XVPQDLSNITIQIMVGRTPKVIGEMSMV

SEQ ID NO: 81588 - protein, 29 aa, Artificial Sequence
  Cyclic GFR-binding peptide
  MOD_RES (1)..(1): Xaa is C or S
XVPTEEEPLTMLYYRIKPHQGQHEQLSNF

SEQ ID NO: 81589 - protein, 25 aa, Artificial Sequence
  Cyclic GFR-binding peptide
LSNITMQIMDENEKVVIGEMSDMVV

SEQ ID NO: 81590 - protein, 31 aa, Artificial Sequence
  Cyclic GFR-binding peptide
  MOD_RES (1)..(2): Xaa is C or S
XXVSQDLRPVQIRKIIGKTPKIKKATVMIVK

SEQ ID NO: 81591 - protein, 21 aa, Artificial Sequence
  Cyclic GFR-binding peptide
LSNITIQIMVGRKPKVIGEMS

SEQ ID NO: 81592 - protein, 34 aa, Artificial Sequence; identical to SEQ ID NO: 29841
  Cyclic GFR-binding peptide
  MOD_RES (1)..(2)..(34): Xaa is C or S

SEQ ID NO: 81593 - protein, 33 aa, Artificial Sequence
  Cyclic GFR-binding peptide
  MOD_RES (6)..(7): Xaa is C or S
ASASPXXVPQDLRSVKIAKVVGRTPKVKEVQVM

SEQ ID NO: 81594 - protein, 30 aa, Artificial Sequence
  Cyclic GFR-binding peptide
  MOD_RES (2)..(3): Xaa is C or S
PXXVPQALSNITIQIMVGRKPKVIGEMSMI

SEQ ID NO: 81595 - protein, 35 aa, Artificial Sequence; identical to SEQ ID NO: 29842
  Cyclic GFR-binding peptide
  MOD_RES (2)..(34): Xaa is C or S

SEQ ID NO: 81596 - protein, 39 aa, Artificial Sequence; identical to SEQ ID NO: 29843
  Cyclic GFR-binding peptide
  MOD_RES (4)..(5)..(37)..(39): Xaa is C or S

SEQ ID NO: 81597 - protein, 28 aa, Artificial Sequence
  Cyclic GFR-binding peptide
  MOD_RES (26)..(28): Xaa is C or S
SNITIQIMVGRKPKVIGEMSMIVRSXKX

SEQ ID NO: 81598 - protein, 35 aa, Artificial Sequence
  Cyclic GFR-binding peptide
  MOD_RES (6)..(7): Xaa is C or S
SIPKAXXVPTELRSVKMAKVDEYDKVVKEVQVEMV

SEQ ID NO: 81599 - protein, 39 aa, Artificial Sequence; identical to SEQ ID NO: 29849
  Cyclic GFR-binding peptide
  MOD_RES (6)..(38): Xaa is C or S

SEQ ID NO: 81600 - protein, 27 aa, Artificial Sequence
  Cyclic GFR-binding peptide
  MOD_RES (1)..(2): Xaa is C or S
XXAPTQLRSVKVAKVDDSSNVIKEVQV

SEQ ID NO: 81601 - protein, 27 aa, Artificial Sequence
  Cyclic GFR-binding peptide
  MOD_RES (1)..(1): Xaa is C or S
XVPTELRSVKMAKVDEYDKVVKEVQVE

SEQ ID NO: 81602 - protein, 38 aa, Artificial Sequence; identical to SEQ ID NO: 29852
  Cyclic GFR-binding peptide
  MOD_RES (2)..(3)..(35)..(37): Xaa is C or S

SEQ ID NO: 81603 - protein, 34 aa, Artificial Sequence; identical to SEQ ID NO: 29854
  Cyclic GFR-binding peptide
  MOD_RES (31)..(33): Xaa is C or S

SEQ ID NO: 81604 - protein, 27 aa, Artificial Sequence
  Cyclic GFR-binding peptide
VPTELSNITMQIMDENEKVVIGEMSDM

SEQ ID NO: 81605 - protein, 31 aa, Artificial Sequence
  Cyclic GFR-binding peptide
  MOD_RES (2)..(2): Xaa is C or S
TXAPTKLSNITVQIMDDSSNVIIGEMSNMVV

SEQ ID NO: 81606 - protein, 39 aa, Artificial Sequence; identical to SEQ ID NO: 29857
  Cyclic GFR-binding peptide
  MOD_RES (6)..(7)..(38): Xaa is C or S

SEQ ID NO: 81607 - protein, 27 aa, Artificial Sequence
  Cyclic GFR-binding peptide
  MOD_RES (1)..(2): Xaa is C or S
XXVSQDLRPVQIRKIIGKTPKIKKATV

SEQ ID NO: 81608 - protein, 30 aa, Artificial Sequence
  Cyclic GFR-binding peptide
  MOD_RES (27)..(29): Xaa is C or S
LRPVQIRKIVGRTPKVKKATVMVVKSXKXS

SEQ ID NO: 81609 - protein, 28 aa, Artificial Sequence
  Cyclic GFR-binding peptide
  MOD_RES (1)..(1): Xaa is C or S
XVPQALSNITIQIMVGRKPKVIGEMSMI

SEQ ID NO: 81610 - protein, 32 aa, Artificial Sequence
  Cyclic GFR-binding peptide
  MOD_RES (4)..(4): Xaa is C or S
KPTXAPTKLRSVKVAKVDDSSNVIKEVQVNMV

SEQ ID NO: 81611 - protein, 24 aa, Artificial Sequence
  Cyclic GFR-binding peptide
PQDLRPVQIRKIVGRTPKVKKATV

SEQ ID NO: 81612 - protein, 29 aa, Artificial Sequence
  Cyclic GFR-binding peptide
SQDLSNITIQIMIGKTPKIIGEMSMIVKS

SEQ ID NO: 81613 - protein, 24 aa, Artificial Sequence
  Cyclic GFR-binding peptide
TQLRSVKVAKVDDSSNVIKEVQVN

SEQ ID NO: 81614 - protein, 26 aa, Artificial Sequence
  Cyclic GFR-binding peptide
PQALRPVQIRKIVGRKPKVKKATVMI

SEQ ID NO: 81615 - protein, 34 aa, Artificial Sequence
  Cyclic GFR-binding peptide
  MOD_RES (4)..(5): Xaa is C or S
PKAXXVPTELRPVQMRKIDEYDKVVKKATVEMVV

SEQ ID NO: 81616 - protein, 32 aa, Artificial Sequence; identical to SEQ ID NO: 29873
  Cyclic GFR-binding peptide
  MOD_RES (1)..(32): Xaa is C or S

SEQ ID NO: 81617 - protein, 25 aa, Artificial Sequence
  Cyclic GFR-binding peptide
APTQLSNITVQIMDDSSNVIIGEMS

SEQ ID NO: 81618 - protein, 32 aa, Artificial Sequence; identical to SEQ ID NO: 29875
  Cyclic GFR-binding peptide
  MOD_RES (32)..(32): Xaa is C or S

SEQ ID NO: 81619 - protein, 32 aa, Artificial Sequence
  Cyclic GFR-binding peptide
  MOD_RES (6)..(7): Xaa is C or S
YVPKPXXAPTKLRPVQVRKIDDSSNVIKKATV

SEQ ID NO: 81620 - protein, 34 aa, Artificial Sequence
  Cyclic GFR-binding peptide
  MOD_RES (4)..(5): Xaa is C or S
ASPXXVSQDLRSVKIAKVIGKTPKIKEVQVMIVK

SEQ ID NO: 81621 - protein, 33 aa, Artificial Sequence
  Cyclic GFR-binding peptide
  MOD_RES (6)..(7): Xaa is C or S
SIPKAXXVPTELRPVQMRKIDEYDKVVKKATVE

SEQ ID NO: 81622 - protein, 34 aa, Artificial Sequence; identical to SEQ ID NO: 29885
  Cyclic GFR-binding peptide
  MOD_RES (1)..(2)..(34): Xaa is C or S

SEQ ID NO: 81623 - protein, 36 aa, Artificial Sequence; identical to SEQ ID NO: 29888
  Cyclic GFR-binding peptide
  MOD_RES (2)..(2): Xaa is C or S

SEQ ID NO: 81624 - protein, 24 aa, Artificial Sequence
  Cyclic GFR-binding peptide
SNITMQIMDENEKVVIGEMSDMVV

SEQ ID NO: 81625 - protein, 34 aa, Artificial Sequence
  Cyclic GFR-binding peptide
  MOD_RES (31)..(33): Xaa is C or S
PTELSNITMQIMDENEKVVIGEMSDMVVEGXGXR

SEQ ID NO: 81626 - protein, 25 aa, Artificial Sequence
  Cyclic GFR-binding peptide
PQALRSVKIAKVVGRKPKVKEVQVM

SEQ ID NO: 81627 - protein, 26 aa, Artificial Sequence
  Cyclic GFR-binding peptide
ALRSVKIAKVVGRKPKVKEVQVMIVR

SEQ ID NO: 81628 - protein, 21 aa, Artificial Sequence
  Cyclic GFR-binding peptide
RSVKIAKVVGRTPKVKEVQVM

SEQ ID NO: 81629 - protein, 25 aa, Artificial Sequence
  Cyclic GFR-binding peptide
QLEPLPVVYYEIVRKKPIFEQLSNT

SEQ ID NO: 81630 - protein, 37 aa, Artificial Sequence; identical to SEQ ID NO: 29893
  Cyclic GFR-binding peptide
  MOD_RES (35)..(37): Xaa is C or S

SEQ ID NO: 81631 - protein, 25 aa, Artificial Sequence
  Cyclic GFR-binding peptide
QDLSNITIQIMIGKTPKIIGEMSMI

SEQ ID NO: 81632 - protein, 42 aa, Artificial Sequence; identical to SEQ ID NO: 29900
  Cyclic GFR-binding peptide
  MOD_RES (7)..(39)..(41): Xaa is C or S

SEQ ID NO: 81633 - protein, 23 aa, Artificial Sequence
  Cyclic GFR-binding peptide
LRSVKIAKVVGRKPKVKEVQVMI

SEQ ID NO: 81634 - protein, 40 aa, Artificial Sequence; identical to SEQ ID NO: 29906
  Cyclic GFR-binding peptide
  MOD_RES (6)..(7)..(39): Xaa is C or S

SEQ ID NO: 81635 - protein, 30 aa, Artificial Sequence
  Cyclic GFR-binding peptide
  MOD_RES (1)..(2): Xaa is C or S
XXAPTKLSNITVQIMDDSSNVIIGEMSNMV

SEQ ID NO: 81636 - protein, 27 aa, Artificial Sequence
  Cyclic GFR-binding peptide
VPQDLRSVKIAKVVGRTPKVKEVQVMV

SEQ ID NO: 81637 - protein, 31 aa, Artificial Sequence
  Cyclic GFR-binding peptide
  MOD_RES (31)..(31): Xaa is C or S
HEPLPVVYYEYVRKKPKLEQLSNRLEEHLEX

SEQ ID NO: 81638 - protein, 40 aa, Artificial Sequence; identical to SEQ ID NO: 29914
  Cyclic GFR-binding peptide
  MOD_RES (3)..(40): Xaa is C or S

SEQ ID NO: 81639 - protein, 38 aa, Artificial Sequence; identical to SEQ ID NO: 29915
  Cyclic GFR-binding peptide
  MOD_RES (6)..(7): Xaa is C or S

SEQ ID NO: 81640 - protein, 33 aa, Artificial Sequence; identical to SEQ ID NO: 29917
  Cyclic GFR-binding peptide
  MOD_RES (1)..(32): Xaa is C or S

SEQ ID NO: 81641 - protein, 38 aa, Artificial Sequence; identical to SEQ ID NO: 29918
  Cyclic GFR-binding peptide
  MOD_RES (4)..(36)..(38): Xaa is C or S

SEQ ID NO: 81642 - protein, 28 aa, Artificial Sequence
  Cyclic GFR-binding peptide
  MOD_RES (27)..(27): Xaa is C or S
RSVKVAKVDDSSNVIKEVQVNMVVRAXG

SEQ ID NO: 81643 - protein, 33 aa, Artificial Sequence
  Cyclic GFR-binding peptide
  MOD_RES (30)..(32): Xaa is C or S
EPLPVVYYEYVRKKPKLEQLSNRLEEHLEXAXA

SEQ ID NO: 81644 - protein, 30 aa, Artificial Sequence
  Cyclic GFR-binding peptide
  MOD_RES (1)..(1): Xaa is C or S
XVPQALSNITIQIMVGRKPKVIGEMSMIVR

SEQ ID NO: 81645 - protein, 34 aa, Artificial Sequence; identical to SEQ ID NO: 29924
  Cyclic GFR-binding peptide
  MOD_RES (3)..(4): Xaa is C or S

SEQ ID NO: 81646 - protein, 28 aa, Artificial Sequence
  Cyclic GFR-binding peptide
  MOD_RES (1)..(2): Xaa is C or S
XXVSQDLRPVQIRKIIGKTPKIKKATVM

SEQ ID NO: 81647 - protein, 36 aa, Artificial Sequence; identical to SEQ ID NO: 29928
  Cyclic GFR-binding peptide
  MOD_RES (1)..(2)..(33)..(35): Xaa is C or S

SEQ ID NO: 81648 - protein, 33 aa, Artificial Sequence
  Cyclic GFR-binding peptide
  MOD_RES (4)..(5): Xaa is C or S
AAPXXVPQALRSVKIAKVVGRKPKVKEVQVMIV

SEQ ID NO: 81649 - protein, 26 aa, Artificial Sequence
  Cyclic GFR-binding peptide
  MOD_RES (1)..(1): Xaa is C or S
XAPTQLRPVQVRKIDDSSNVIKKATV

SEQ ID NO: 81650 - protein, 32 aa, Artificial Sequence
  Cyclic GFR-binding peptide
  MOD_RES (4)..(5): Xaa is C or S
PKAXXVPTELRSVKMAKVDEYDKVVKEVQVEM

SEQ ID NO: 81651 - protein, 33 aa, Artificial Sequence; identical to SEQ ID NO: 29931
  Cyclic GFR-binding peptide
  MOD_RES (32)..(32): Xaa is C or S

SEQ ID NO: 81652 - protein, 43 aa, Artificial Sequence; identical to SEQ ID NO: 29932
  Cyclic GFR-binding peptide
  MOD_RES (4)..(41)..(43): Xaa is C or S

SEQ ID NO: 81653 - protein, 32 aa, Artificial Sequence
  Cyclic GFR-binding peptide
  MOD_RES (5)..(6): Xaa is C or S
IPKAXXVPTELRPVQMRKIDENEKVVKKATVD

SEQ ID NO: 81654 - protein, 35 aa, Artificial Sequence
  Cyclic GFR-binding peptide
  MOD_RES (33)..(35): Xaa is C or S
PTEEEPLPMVYYRIKPHQGQHEQLSNFLQHNKXEX

SEQ ID NO: 81655 - protein, 25 aa, Artificial Sequence
  Cyclic GFR-binding peptide
TELRSVKMAKVDENEKVVKEVQVDM

SEQ ID NO: 81656 - protein, 36 aa, Artificial Sequence; identical to SEQ ID NO: 29936
  Cyclic GFR-binding peptide
  MOD_RES (2)..(3)..(35): Xaa is C or S

SEQ ID NO: 81657 - protein, 34 aa, Artificial Sequence
  Cyclic GFR-binding peptide
  MOD_RES (31)..(33): Xaa is C or S
PTQLSNITVQIMDDSSNVIIGEMSNMVVRAXGXH

SEQ ID NO: 81658 - protein, 28 aa, Artificial Sequence
  Cyclic GFR-binding peptide
  MOD_RES (2)..(3): Xaa is C or S
PXXAPTKLRSVKVAKVDDSSNVIKEVQV

SEQ ID NO: 81659 - protein, 22 aa, Artificial Sequence
  Cyclic GFR-binding peptide
RSVKIAKVIGKTPKIKEVQVMI

SEQ ID NO: 81660 - protein, 34 aa, Artificial Sequence; identical to SEQ ID NO: 29938
  Cyclic GFR-binding peptide
  MOD_RES (2)..(2): Xaa is C or S

SEQ ID NO: 81661 - protein, 30 aa, Artificial Sequence
  Cyclic GFR-binding peptide
  MOD_RES (28)..(30): Xaa is C or S
LSNITMQIMDENEKVVIGEMSDMVVEGXGX

SEQ ID NO: 81662 - protein, 26 aa, Artificial Sequence
  Cyclic GFR-binding peptide
SNITMQIMDENEKVVIGEMSDMVVEG

SEQ ID NO: 81663 - protein, 30 aa, Artificial Sequence
  Cyclic GFR-binding peptide
  MOD_RES (3)..(4): Xaa is C or S
KAXXVPTELRPVQMRKIDEYDKVVKKATVE

SEQ ID NO: 81664 - protein, 34 aa, Artificial Sequence
  Cyclic GFR-binding peptide
  MOD_RES (6)..(7): Xaa is C or S
ASASPXXVSQDLRPVQIRKIIGKTPKIKKATVMI

SEQ ID NO: 81665 - protein, 42 aa, Artificial Sequence; identical to SEQ ID NO: 29939
  Cyclic GFR-binding peptide
  MOD_RES (6)..(7)..(39)..(41): Xaa is C or S

SEQ ID NO: 81666 - protein, 39 aa, Artificial Sequence; identical to SEQ ID NO: 29942
  Cyclic GFR-binding peptide
  MOD_RES (4)..(4): Xaa is C or S

SEQ ID NO: 81667 - protein, 36 aa, Artificial Sequence; identical to SEQ ID NO: 29943
  Cyclic GFR-binding peptide
  MOD_RES (3)..(4)..(36): Xaa is C or S

SEQ ID NO: 81668 - protein, 33 aa, Artificial Sequence
  Cyclic GFR-binding peptide
  MOD_RES (5)..(6): Xaa is C or S
IPKAXXVPTELRPVQMRKIDEYDKVVKKATVEM

SEQ ID NO: 81669 - protein, 26 aa, Artificial Sequence
  Cyclic GFR-binding peptide
VHHEPLPVVYYEYVRKKPKLEQLSNR

SEQ ID NO: 81670 - protein, 23 aa, Artificial Sequence
  Cyclic GFR-binding peptide
ELSNITMQIMDEYDKVVIGEMSE

SEQ ID NO: 81671 - protein, 41 aa, Artificial Sequence; identical to SEQ ID NO: 29951
  Cyclic GFR-binding peptide
  MOD_RES (6)..(7)..(39)..(41): Xaa is C or S

SEQ ID NO: 81672 - protein, 36 aa, Artificial Sequence; identical to SEQ ID NO: 29953
  Cyclic GFR-binding peptide
  MOD_RES (5)..(6): Xaa is C or S

SEQ ID NO: 81673 - protein, 30 aa, Artificial Sequence
  Cyclic GFR-binding peptide
PTELSNITMQIMDEYDKVVIGEMSEMVVEG

SEQ ID NO: 81674 - protein, 32 aa, Artificial Sequence
  Cyclic GFR-binding peptide
  MOD_RES (5)..(6): Xaa is C or S
VPKPXXAPTKLRSVKVAKVDDSSNVIKEVQVN

SEQ ID NO: 81675 - protein, 39 aa, Artificial Sequence; identical to SEQ ID NO: 29955
  Cyclic GFR-binding peptide
  MOD_RES (5)..(37)..(39): Xaa is C or S

SEQ ID NO: 81676 - protein, 35 aa, Artificial Sequence; identical to SEQ ID NO: 29957
  Cyclic GFR-binding peptide
  MOD_RES (4)..(5): Xaa is C or S

SEQ ID NO: 81677 - protein, 27 aa, Artificial Sequence
  Cyclic GFR-binding peptide
ELRSVKMAKVDEYDKVVKEVQVEMVVE

SEQ ID NO: 81678 - protein, 30 aa, Artificial Sequence
  Cyclic GFR-binding peptide
PTELSNITMQIMDENEKVVIGEMSDMVVEG

SEQ ID NO: 81679 - protein, 29 aa, Artificial Sequence
  Cyclic GFR-binding peptide
  MOD_RES (29)..(29): Xaa is C or S
KLSNITVQIMDDSSNVIIGEMSNMVVRSX

SEQ ID NO: 81680 - protein, 29 aa, Artificial Sequence
  Cyclic GFR-binding peptide
PTEEEPLTMLYYRIKPHQGQHEQLSNFLQ

SEQ ID NO: 81681 - protein, 28 aa, Artificial Sequence
  Cyclic GFR-binding peptide
VPQDLRPVQIRKIVGRTPKVKKATVMVV

SEQ ID NO: 81682 - protein, 34 aa, Artificial Sequence; identical to SEQ ID NO: 29968
  Cyclic GFR-binding peptide

SEQ ID NO: 81683 - protein, 31 aa, Artificial Sequence
  Cyclic GFR-binding peptide
  MOD_RES (4)..(5): Xaa is C or S
ASPXXVSQDLRPVQIRKIIGKTPKIKKATVM

SEQ ID NO: 81684 - protein, 36 aa, Artificial Sequence
  Cyclic GFR-binding peptide
  MOD_RES (6)..(7): Xaa is C or S
SIPKAXXVPTELRSVKMAKVDEYDKVVKEVQVEMVV

SEQ ID NO: 81685 - protein, 34 aa, Artificial Sequence; identical to SEQ ID NO: 29976
  Cyclic GFR-binding peptide

SEQ ID NO: 81686 - protein, 32 aa, Artificial Sequence; identical to SEQ ID NO: 29977
  Cyclic GFR-binding peptide
  MOD_RES (1)..(2): Xaa is C or S

SEQ ID NO: 81687 - protein, 36 aa, Artificial Sequence; identical to SEQ ID NO: 29979
  Cyclic GFR-binding peptide
  MOD_RES (3)..(4)..(36): Xaa is C or S

SEQ ID NO: 81688 - protein, 30 aa, Artificial Sequence
  Cyclic GFR-binding peptide
RVHHEPLPVVYYEYVRKKPKLEQLSNRLEE

SEQ ID NO: 81689 - protein, 31 aa, Artificial Sequence; identical to SEQ ID NO: 29980
  Cyclic GFR-binding peptide

SEQ ID NO: 81690 - protein, 32 aa, Artificial Sequence
  Cyclic GFR-binding peptide
  MOD_RES (5)..(6): Xaa is C or S
IPKAXXVPTELRSVKMAKVDEYDKVVKEVQVE

SEQ ID NO: 81691 - protein, 38 aa, Artificial Sequence; identical to SEQ ID NO: 29989
  Cyclic GFR-binding peptide
  MOD_RES (2)..(3)..(35)..(37): Xaa is C or S

SEQ ID NO: 81692 - protein, 28 aa, Artificial Sequence
  Cyclic GFR-binding peptide
  MOD_RES (28)..(28): Xaa is C or S
DLRPVQIRKIVGRTPKVKKATVMVVKSX

SEQ ID NO: 81693 - protein, 32 aa, Artificial Sequence
  Cyclic GFR-binding peptide
  MOD_RES (2)..(3): Xaa is C or S
PXXVSQDLRSVKIAKVIGKTPKIKEVQVMIVK

SEQ ID NO: 81694 - protein, 29 aa, Artificial Sequence
  Cyclic GFR-binding peptide
  MOD_RES (3)..(3): Xaa is C or S
PTXAPTKLRSVKVAKVDDSSNVIKEVQVN

SEQ ID NO: 81695 - protein, 39 aa, Artificial Sequence; identical to SEQ ID NO: 29995
  Cyclic GFR-binding peptide
  MOD_RES (6)..(7)..(39): Xaa is C or S

SEQ ID NO: 81696 - protein, 36 aa, Artificial Sequence; identical to SEQ ID NO: 29997
  Cyclic GFR-binding peptide
  MOD_RES (1)..(1): Xaa is C or S

SEQ ID NO: 81697 - protein, 40 aa, Artificial Sequence; identical to SEQ ID NO: 29998
  Cyclic GFR-binding peptide
  MOD_RES (37)..(39): Xaa is C or S

SEQ ID NO: 81698 - protein, 27 aa, Artificial Sequence
  Cyclic GFR-binding peptide
  MOD_RES (1)..(1): Xaa is C or S
XAPTKLSNITVQIMDDSSNVIIGEMSN

SEQ ID NO: 81699 - protein, 32 aa, Artificial Sequence; identical to SEQ ID NO: 30003
  Cyclic GFR-binding peptide
  MOD_RES (1)..(2): Xaa is C or S

SEQ ID NO: 81700 - protein, 36 aa, Artificial Sequence
  Cyclic GFR-binding peptide
  MOD_RES (6)..(7): Xaa is C or S
YVPKPXXAPTKLRSVKVAKVDDSSNVIKEVQVNMVV

SEQ ID NO: 81701 - protein, 28 aa, Artificial Sequence
  Cyclic GFR-binding peptide
VQLEPLTVLYYEIVRKKPIFEQLSNTLE

SEQ ID NO: 81702 - protein, 35 aa, Artificial Sequence
  Cyclic GFR-binding peptide
  MOD_RES (5)..(6): Xaa is C or S
SASPXXVSQDLRPVQIRKIIGKTPKIKKATVMIVK

SEQ ID NO: 81703 - protein, 22 aa, Artificial Sequence
  Cyclic GFR-binding peptide
EPLPVVYYEYVRKKPKLEQLSN

SEQ ID NO: 81704 - protein, 34 aa, Artificial Sequence; identical to SEQ ID NO: 30016
  Cyclic GFR-binding peptide
  MOD_RES (3)..(4): Xaa is C or S

SEQ ID NO: 81705 - protein, 38 aa, Artificial Sequence; identical to SEQ ID NO: 30018
  Cyclic GFR-binding peptide
  MOD_RES (5)..(6)..(37): Xaa is C or S

SEQ ID NO: 81706 - protein, 36 aa, Artificial Sequence; identical to SEQ ID NO: 30020
  Cyclic GFR-binding peptide
  MOD_RES (1)..(33)..(35): Xaa is C or S

SEQ ID NO: 81707 - protein, 34 aa, Artificial Sequence
  Cyclic GFR-binding peptide
  MOD_RES (32)..(34): Xaa is C or S
QLEPLPVVYYEIVRKKPIFEQLSNTLEDHLAXKX

SEQ ID NO: 81708 - protein, 29 aa, Artificial Sequence
  Cyclic GFR-binding peptide
HEPLPVVYYEYVRKKPKLEQLSNRLEEHL

SEQ ID NO: 81709 - protein, 35 aa, Artificial Sequence; identical to SEQ ID NO: 30023
  Cyclic GFR-binding peptide

SEQ ID NO: 81710 - protein, 35 aa, Artificial Sequence; identical to SEQ ID NO: 30025
  Cyclic GFR-binding peptide
  MOD_RES (2)..(34): Xaa is C or S

SEQ ID NO: 81711 - protein, 33 aa, Artificial Sequence
  Cyclic GFR-binding peptide
  MOD_RES (4)..(5): Xaa is C or S
PKPXXAPTKLSNITVQIMDDSSNVIIGEMSNMV

SEQ ID NO: 81712 - protein, 26 aa, Artificial Sequence
  Cyclic GFR-binding peptide
VPTELSNITMQIMDEYDKVVIGEMSE

SEQ ID NO: 81713 - protein, 29 aa, Artificial Sequence
  Cyclic GFR-binding peptide
VPQALSNITIQIMVGRKPKVIGEMSMIVR

SEQ ID NO: 81714 - protein, 22 aa, Artificial Sequence
  Cyclic GFR-binding peptide
LRPVQIRKIVGRKPKVKKATVM

SEQ ID NO: 81715 - protein, 32 aa, Artificial Sequence
  Cyclic GFR-binding peptide
  MOD_RES (29)..(31): Xaa is C or S
QDLSNITIQIMIGKTPKIIGEMSMIVKSXKXS

SEQ ID NO: 81716 - protein, 24 aa, Artificial Sequence
  Cyclic GFR-binding peptide
TKLSNITVQIMDDSSNVIIGEMSN

SEQ ID NO: 81717 - protein, 32 aa, Artificial Sequence
  Cyclic GFR-binding peptide
  MOD_RES (1)..(1): Xaa is C or S
XRPTQVQLEPLPVVYYEIVRKKPIFEQLSNTL

SEQ ID NO: 81718 - protein, 38 aa, Artificial Sequence; identical to SEQ ID NO: 30033
  Cyclic GFR-binding peptide
  MOD_RES (1)..(35)..(37): Xaa is C or S

SEQ ID NO: 81719 - protein, 25 aa, Artificial Sequence
  Cyclic GFR-binding peptide
VHHEPLPVVYYEYVRKKPKLEQLSN

SEQ ID NO: 81720 - protein, 29 aa, Artificial Sequence
  Cyclic GFR-binding peptide
PTQLRPVQVRKIDDSSNVIKKATVNMVVR

SEQ ID NO: 81721 - protein, 31 aa, Artificial Sequence
  Cyclic GFR-binding peptide
  MOD_RES (4)..(5): Xaa is C or S
PKAXXVPTELRPVQMRKIDENEKVVKKATVD

SEQ ID NO: 81722 - protein, 41 aa, Artificial Sequence; identical to SEQ ID NO: 30051
  Cyclic GFR-binding peptide
  MOD_RES (6)..(7)..(39)..(41): Xaa is C or S

SEQ ID NO: 81723 - protein, 34 aa, Artificial Sequence; identical to SEQ ID NO: 30053
  Cyclic GFR-binding peptide
  MOD_RES (31)..(33): Xaa is C or S

SEQ ID NO: 81724 - protein, 29 aa, Artificial Sequence
  Cyclic GFR-binding peptide
  MOD_RES (1)..(1): Xaa is C or S
XVPQALRSVKIAKVVGRKPKVKEVQVMIV

SEQ ID NO: 81725 - protein, 37 aa, Artificial Sequence; identical to SEQ ID NO: 30058
  Cyclic GFR-binding peptide
  MOD_RES (34)..(36): Xaa is C or S

SEQ ID NO: 81726 - protein, 34 aa, Artificial Sequence
  Cyclic GFR-binding peptide
  MOD_RES (4)..(4): Xaa is C or S
SVKXQPSRVHHEPLPVVYYEYVRKKPKLEQLSNR

SEQ ID NO: 81727 - protein, 34 aa, Artificial Sequence
  Cyclic GFR-binding peptide
  MOD_RES (6)..(7): Xaa is C or S
ASASPXXVPQDLRPVQIRKIVGRTPKVKKATVMV

SEQ ID NO: 81728 - protein, 27 aa, Artificial Sequence
  Cyclic GFR-binding peptide
VSQDLRSVKIAKVIGKTPKIKEVQVMI

SEQ ID NO: 81729 - protein, 37 aa, Artificial Sequence; identical to SEQ ID NO: 30060
  Cyclic GFR-binding peptide
  MOD_RES (3)..(4)..(36): Xaa is C or S

SEQ ID NO: 81730 - protein, 34 aa, Artificial Sequence
  Cyclic GFR-binding peptide
  MOD_RES (4)..(5): Xaa is C or S
PKPXXAPTQLSNITVQIMDDSSNVIIGEMSNMVV

SEQ ID NO: 81731 - protein, 30 aa, Artificial Sequence
  Cyclic GFR-binding peptide
  MOD_RES (4)..(5): Xaa is C or S
PKAXXVPTELSNITMQIMDEYDKVVIGEMS

SEQ ID NO: 81732 - protein, 29 aa, Artificial Sequence
  Cyclic GFR-binding peptide
VPTELRPVQMRKIDEYDKVVKKATVEMVV

SEQ ID NO: 81733 - protein, 28 aa, Artificial Sequence
  Cyclic GFR-binding peptide
ELRPVQMRKIDENEKVVKKATVDMVVEG

SEQ ID NO: 81734 - protein, 26 aa, Artificial Sequence
  Cyclic GFR-binding peptide
ELRPVQMRKIDEYDKVVKKATVEMVV

SEQ ID NO: 81735 - protein, 33 aa, Artificial Sequence
  Cyclic GFR-binding peptide
  MOD_RES (1)..(1): Xaa is C or S
XRPTQVQLEPLTVLYYEIVRKKPIFEQLSNTLE

SEQ ID NO: 81736 - protein, 25 aa, Artificial Sequence
  Cyclic GFR-binding peptide
PQDLRPVQIRKIVGRTPKVKKATVM

SEQ ID NO: 81737 - protein, 23 aa, Artificial Sequence
  Cyclic GFR-binding peptide
LSNITMQIMDENEKVVIGEMSDM

SEQ ID NO: 81738 - protein, 37 aa, Artificial Sequence; identical to SEQ ID NO: 30063
  Cyclic GFR-binding peptide
  MOD_RES (5)..(6): Xaa is C or S

SEQ ID NO: 81739 - protein, 22 aa, Artificial Sequence
  Cyclic GFR-binding peptide
DLSNITIQIMIGKTPKIIGEMS

SEQ ID NO: 81740 - protein, 41 aa, Artificial Sequence; identical to SEQ ID NO: 30065
  Cyclic GFR-binding peptide
  MOD_RES (6)..(7)..(38)..(40): Xaa is C or S

SEQ ID NO: 81741 - protein, 31 aa, Artificial Sequence
  Cyclic GFR-binding peptide
  MOD_RES (28)..(30): Xaa is C or S
DLRSVKIAKVIGKTPKIKEVQVMIVKSXKXS

SEQ ID NO: 81742 - protein, 29 aa, Artificial Sequence
  Cyclic GFR-binding peptide
SQDLRSVKIAKVIGKTPKIKEVQVMIVKS

SEQ ID NO: 81743 - protein, 36 aa, Artificial Sequence; identical to SEQ ID NO: 30069
  Cyclic GFR-binding peptide
  MOD_RES (2)..(36): Xaa is C or S

SEQ ID NO: 81744 - protein, 26 aa, Artificial Sequence
  Cyclic GFR-binding peptide
LRSVKIAKVVGRTPKVKEVQVMVVKS

SEQ ID NO: 81745 - protein, 27 aa, Artificial Sequence
  Cyclic GFR-binding peptide
  MOD_RES (27)..(27): Xaa is C or S
SNITMQIMDENEKVVIGEMSDMVVEGX

SEQ ID NO: 81746 - protein, 25 aa, Artificial Sequence
  Cyclic GFR-binding peptide
LRSVKIAKVVGRKPKVKEVQVMIVR

SEQ ID NO: 81747 - protein, 28 aa, Artificial Sequence
  Cyclic GFR-binding peptide
  MOD_RES (1)..(2): Xaa is C or S
XXAPTKLRSVKVAKVDDSSNVIKEVQVN

SEQ ID NO: 81748 - protein, 27 aa, Artificial Sequence
  Cyclic GFR-binding peptide
  MOD_RES (1)..(2): Xaa is C or S
XXVPQDLRSVKIAKVVGRTPKVKEVQV

SEQ ID NO: 81749 - protein, 25 aa, Artificial Sequence
  Cyclic GFR-binding peptide
LRPVQVRKIDDSSNVIKKATVNMVV

SEQ ID NO: 81750 - protein, 30 aa, Artificial Sequence
  Cyclic GFR-binding peptide
RVHHEPLTVLYYEYVRKKPKLEQLSNRLEE

SEQ ID NO: 81751 - protein, 23 aa, Artificial Sequence
  Cyclic GFR-binding peptide
TELSNITMQIMDEYDKVVIGEMS

SEQ ID NO: 81752 - protein, 33 aa, Artificial Sequence
  Cyclic GFR-binding peptide
  MOD_RES (3)..(4): Xaa is C or S
SPXXVPQDLRSVKIAKVVGRTPKVKEVQVMVVK

SEQ ID NO: 81753 - protein, 31 aa, Artificial Sequence
  Cyclic GFR-binding peptide
  MOD_RES (1)..(2): Xaa is C or S
XXAPTQLRPVQVRKIDDSSNVIKKATVNMVV

SEQ ID NO: 81754 - protein, 40 aa, Artificial Sequence; identical to SEQ ID NO: 30076
  Cyclic GFR-binding peptide
  MOD_RES (3)..(40): Xaa is C or S

SEQ ID NO: 81755 - protein, 35 aa, Artificial Sequence
  Cyclic GFR-binding peptide
  MOD_RES (32)..(34): Xaa is C or S
HHEPLPVVYYEYVRKKPKLEQLSNRLEEHLEXAXA

SEQ ID NO: 81756 - protein, 24 aa, Artificial Sequence
  Cyclic GFR-binding peptide
QDLRPVQIRKIIGKTPKIKKATVM

SEQ ID NO: 81757 - protein, 22 aa, Artificial Sequence
  Cyclic GFR-binding peptide
DLRPVQIRKIIGKTPKIKKATV

SEQ ID NO: 81758 - protein, 38 aa, Artificial Sequence; identical to SEQ ID NO: 30081
  Cyclic GFR-binding peptide
  MOD_RES (3)..(4)..(35)..(37): Xaa is C or S

SEQ ID NO: 81759 - protein, 35 aa, Artificial Sequence
  Cyclic GFR-binding peptide
  MOD_RES (5)..(5): Xaa is C or S
EGLEXVPTEEEPLPMVYYRIKPHQGQHEQLSNFLQ

SEQ ID NO: 81760 - protein, 31 aa, Artificial Sequence
  Cyclic GFR-binding peptide
  MOD_RES (29)..(31): Xaa is C or S
QALRPVQIRKIVGRKPKVKKATVMIVRSXKX

SEQ ID NO: 81761 - protein, 20 aa, Artificial Sequence
  Cyclic GFR-binding peptide
RPVQIRKIVGRTPKVKKATV

SEQ ID NO: 81762 - protein, 37 aa, Artificial Sequence; identical to SEQ ID NO: 30089
  Cyclic GFR-binding peptide
  MOD_RES (6)..(7): Xaa is C or S

SEQ ID NO: 81763 - protein, 23 aa, Artificial Sequence
  Cyclic GFR-binding peptide
RSVKIAKVVGRTPKVKEVQVMVV

SEQ ID NO: 81764 - protein, 33 aa, Artificial Sequence
  Cyclic GFR-binding peptide
  MOD_RES (6)..(7): Xaa is C or S
TVPKPXXAPTQLSNITVQIMDDSSNVIIGEMSN

SEQ ID NO: 81765 - protein, 30 aa, Artificial Sequence
  Cyclic GFR-binding peptide
  MOD_RES (5)..(5): Xaa is C or S
TKPTXAPTKLRSVKVAKVDDSSNVIKEVQV

SEQ ID NO: 81766 - protein, 36 aa, Artificial Sequence; identical to SEQ ID NO: 30098
  Cyclic GFR-binding peptide
  MOD_RES (2)..(3)..(34)..(36): Xaa is C or S

SEQ ID NO: 81767 - protein, 26 aa, Artificial Sequence
  Cyclic GFR-binding peptide
APTQLSNITVQIMDDSSNVIIGEMSN

SEQ ID NO: 81768 - protein, 28 aa, Artificial Sequence
  Cyclic GFR-binding peptide
  MOD_RES (2)..(3): Xaa is C or S
PXXAPTKLRPVQVRKIDDSSNVIKKATV

SEQ ID NO: 81769 - protein, 29 aa, Artificial Sequence
  Cyclic GFR-binding peptide
  MOD_RES (1)..(2): Xaa is C or S
XXVPQALSNITIQIMVGRKPKVIGEMSMI

SEQ ID NO: 81770 - protein, 27 aa, Artificial Sequence
  Cyclic GFR-binding peptide
  MOD_RES (1)..(1): Xaa is C or S
XAPTQLRSVKVAKVDDSSNVIKEVQVN

SEQ ID NO: 81771 - protein, 24 aa, Artificial Sequence
  Cyclic GFR-binding peptide
SNITIQIMIGKTPKIIGEMSMIVK

SEQ ID NO: 81772 - protein, 35 aa, Artificial Sequence
  Cyclic GFR-binding peptide
  MOD_RES (6)..(7): Xaa is C or S
TVPKPXXAPTQLRPVQVRKIDDSSNVIKKATVNMV

SEQ ID NO: 81773 - protein, 34 aa, Artificial Sequence; identical to SEQ ID NO: 30104
  Cyclic GFR-binding peptide
  MOD_RES (1)..(2)..(33): Xaa is C or S

SEQ ID NO: 81774 - protein, 24 aa, Artificial Sequence
  Cyclic GFR-binding peptide
QLRPVQVRKIDDSSNVIKKATVNM

SEQ ID NO: 81775 - protein, 36 aa, Artificial Sequence; identical to SEQ ID NO: 30108
  Cyclic GFR-binding peptide
  MOD_RES (1)..(2)..(33)..(35): Xaa is C or S

SEQ ID NO: 81776 - protein, 27 aa, Artificial Sequence
  Cyclic GFR-binding peptide
RVHHEPLPVVYYEYVRKKPKLEQLSNR

SEQ ID NO: 81777 - protein, 29 aa, Artificial Sequence
  Cyclic GFR-binding peptide
  MOD_RES (29)..(29): Xaa is C or S
EPLTMLYYRIKPHQGQHEQLSNFLQHNKX

SEQ ID NO: 81778 - protein, 39 aa, Artificial Sequence; identical to SEQ ID NO: 30110
  Cyclic GFR-binding peptide
  MOD_RES (5)..(6)..(37)..(39): Xaa is C or S

SEQ ID NO: 81779 - protein, 36 aa, Artificial Sequence
  Cyclic GFR-binding peptide
  MOD_RES (6)..(7): Xaa is C or S
ASAAPXXVPQALRPVQIRKIVGRKPKVKKATVMIVR

SEQ ID NO: 81780 - protein, 29 aa, Artificial Sequence
  Cyclic GFR-binding peptide
  MOD_RES (1)..(1): Xaa is C or S
XVPQALSNITIQIMVGRKPKVIGEMSMIV

SEQ ID NO: 81781 - protein, 29 aa, Artificial Sequence
  Cyclic GFR-binding peptide
  MOD_RES (27)..(29): Xaa is C or S
LRSVKIAKVIGKTPKIKEVQVMIVKSXKX

SEQ ID NO: 81782 - protein, 36 aa, Artificial Sequence; identical to SEQ ID NO: 30116
  Cyclic GFR-binding peptide
  MOD_RES (5)..(6): Xaa is C or S

SEQ ID NO: 81783 - protein, 32 aa, Artificial Sequence
  Cyclic GFR-binding peptide
  MOD_RES (30)..(32): Xaa is C or S
TELRPVQMRKIDENEKVVKKATVDMVVEGXGX

SEQ ID NO: 81784 - protein, 39 aa, Artificial Sequence; identical to SEQ ID NO: 30122
  Cyclic GFR-binding peptide
  MOD_RES (5)..(6)..(38): Xaa is C or S

SEQ ID NO: 81785 - protein, 37 aa, Artificial Sequence; identical to SEQ ID NO: 30125
  Cyclic GFR-binding peptide
  MOD_RES (2)..(36): Xaa is C or S

SEQ ID NO: 81786 - protein, 32 aa, Artificial Sequence
  Cyclic GFR-binding peptide
  MOD_RES (30)..(32): Xaa is C or S
PQDLRPVQIRKIVGRTPKVKKATVMVVKSXKX

SEQ ID NO: 81787 - protein, 28 aa, Artificial Sequence
  Cyclic GFR-binding peptide
TEEEPLPMVYYRIKPHQGQHEQLSNFLQ

SEQ ID NO: 81788 - protein, 30 aa, Artificial Sequence
  Cyclic GFR-binding peptide
  MOD_RES (30)..(30): Xaa is C or S
PQALRSVKIAKVVGRKPKVKEVQVMIVRSX

SEQ ID NO: 81789 - protein, 24 aa, Artificial Sequence
  Cyclic GFR-binding peptide
SQDLSNITIQIMIGKTPKIIGEMS

SEQ ID NO: 81790 - protein, 29 aa, Artificial Sequence
  Cyclic GFR-binding peptide
EPLTVLYYEYVRKKPKLEQLSNRLEEHLE

SEQ ID NO: 81791 - protein, 34 aa, Artificial Sequence; identical to SEQ ID NO: 30132
  Cyclic GFR-binding peptide
  MOD_RES (1)..(33): Xaa is C or S

SEQ ID NO: 81792 - protein, 37 aa, Artificial Sequence; identical to SEQ ID NO: 30138
  Cyclic GFR-binding peptide
  MOD_RES (3)..(4)..(36): Xaa is C or S

SEQ ID NO: 81793 - protein, 34 aa, Artificial Sequence; identical to SEQ ID NO: 30139
  Cyclic GFR-binding peptide

SEQ ID NO: 81794 - protein, 32 aa, Artificial Sequence
  Cyclic GFR-binding peptide
  MOD_RES (4)..(4): Xaa is C or S
KPTXAPTKLSNITVQIMDDSSNVIIGEMSNMV

SEQ ID NO: 81795 - protein, 30 aa, Artificial Sequence
  Cyclic GFR-binding peptide
  MOD_RES (3)..(4): Xaa is C or S
KAXXVPTELSNITMQIMDENEKVVIGEMSD

SEQ ID NO: 81796 - protein, 39 aa, Artificial Sequence; identical to SEQ ID NO: 30143
  Cyclic GFR-binding peptide
  MOD_RES (6)..(7)..(39): Xaa is C or S

SEQ ID NO: 81797 - protein, 32 aa, Artificial Sequence; identical to SEQ ID NO: 30145
  Cyclic GFR-binding peptide
  MOD_RES (32)..(32): Xaa is C or S

SEQ ID NO: 81798 - protein, 33 aa, Artificial Sequence; identical to SEQ ID NO: 30146
  Cyclic GFR-binding peptide

SEQ ID NO: 81799 - protein, 34 aa, Artificial Sequence; identical to SEQ ID NO: 30150
  Cyclic GFR-binding peptide
  MOD_RES (1)..(2)..(33): Xaa is C or S

SEQ ID NO: 81800 - protein, 37 aa, Artificial Sequence; identical to SEQ ID NO: 30149
  Cyclic GFR-binding peptide
  MOD_RES (1)..(1): Xaa is C or S

SEQ ID NO: 81801 - protein, 27 aa, Artificial Sequence
  Cyclic GFR-binding peptide
APTQLRPVQVRKIDDSSNVIKKATVNM

SEQ ID NO: 81802 - protein, 32 aa, Artificial Sequence
  Cyclic GFR-binding peptide
  MOD_RES (1)..(1): Xaa is C or S
XQPSRVHHEPLTVLYYEYVRKKPKLEQLSNRL

SEQ ID NO: 81803 - protein, 25 aa, Artificial Sequence
  Cyclic GFR-binding peptide
VPTELRSVKMAKVDENEKVVKEVQV

SEQ ID NO: 81804 - protein, 37 aa, Artificial Sequence; identical to SEQ ID NO: 30152
  Cyclic GFR-binding peptide
  MOD_RES (6)..(7): Xaa is C or S

SEQ ID NO: 81805 - protein, 28 aa, Artificial Sequence
  Cyclic GFR-binding peptide
  MOD_RES (27)..(27): Xaa is C or S
LRPVQIRKIVGRKPKVKKATVMIVRSXK

SEQ ID NO: 81806 - protein, 35 aa, Artificial Sequence; identical to SEQ ID NO: 30153
  Cyclic GFR-binding peptide
  MOD_RES (2)..(3)..(34): Xaa is C or S

SEQ ID NO: 81807 - protein, 36 aa, Artificial Sequence; identical to SEQ ID NO: 30156
  Cyclic GFR-binding peptide
  MOD_RES (1)..(33)..(35): Xaa is C or S

SEQ ID NO: 81808 - protein, 23 aa, Artificial Sequence
  Cyclic GFR-binding peptide
TQLRPVQVRKIDDSSNVIKKATV

SEQ ID NO: 81809 - protein, 27 aa, Artificial Sequence
  Cyclic GFR-binding peptide
  MOD_RES (26)..(26): Xaa is C or S
RSVKIAKVVGRTPKVKEVQVMVVKSXK

SEQ ID NO: 81810 - protein, 37 aa, Artificial Sequence; identical to SEQ ID NO: 30159
  Cyclic GFR-binding peptide
  MOD_RES (5)..(6): Xaa is C or S

SEQ ID NO: 81811 - protein, 36 aa, Artificial Sequence; identical to SEQ ID NO: 30163
  Cyclic GFR-binding peptide
  MOD_RES (3)..(35): Xaa is C or S

SEQ ID NO: 81812 - protein, 24 aa, Artificial Sequence
  Cyclic GFR-binding peptide
PQDLRSVKIAKVVGRTPKVKEVQV

SEQ ID NO: 81813 - protein, 30 aa, Artificial Sequence
  Cyclic GFR-binding peptide
  MOD_RES (2)..(2): Xaa is C or S
TXAPTKLSNITVQIMDDSSNVIIGEMSNMV

SEQ ID NO: 81814 - protein, 37 aa, Artificial Sequence; identical to SEQ ID NO: 30166
  Cyclic GFR-binding peptide
  MOD_RES (5)..(6): Xaa is C or S

SEQ ID NO: 81815 - protein, 39 aa, Artificial Sequence; identical to SEQ ID NO: 30167
  Cyclic GFR-binding peptide
  MOD_RES (5)..(6)..(38): Xaa is C or S

SEQ ID NO: 81816 - protein, 36 aa, Artificial Sequence; identical to SEQ ID NO: 30171
  Cyclic GFR-binding peptide
  MOD_RES (1)..(1): Xaa is C or S

SEQ ID NO: 81817 - protein, 38 aa, Artificial Sequence; identical to SEQ ID NO: 30170
  Cyclic GFR-binding peptide
  MOD_RES (3)..(3): Xaa is C or S

SEQ ID NO: 81818 - protein, 35 aa, Artificial Sequence; identical to SEQ ID NO: 30172
  Cyclic GFR-binding peptide

SEQ ID NO: 81819 - protein, 33 aa, Artificial Sequence; identical to SEQ ID NO: 30177
  Cyclic GFR-binding peptide
  MOD_RES (1)..(33): Xaa is C or S

SEQ ID NO: 81820 - protein, 27 aa, Artificial Sequence
  Cyclic GFR-binding peptide
VSQDLRPVQIRKIIGKTPKIKKATVMI

SEQ ID NO: 81821 - protein, 30 aa, Artificial Sequence
  Cyclic GFR-binding peptide
  MOD_RES (27)..(29): Xaa is C or S
RPVQMRKIDENEKVVKKATVDMVVEGXGXR

SEQ ID NO: 81822 - protein, 33 aa, Artificial Sequence
  Cyclic GFR-binding peptide
  MOD_RES (4)..(5): Xaa is C or S
ASPXXVSQDLRPVQIRKIIGKTPKIKKATVMIV

SEQ ID NO: 81823 - protein, 31 aa, Artificial Sequence
  Cyclic GFR-binding peptide
  MOD_RES (1)..(2): Xaa is C or S
XXVPTELSNITMQIMDEYDKVVIGEMSEMVV

SEQ ID NO: 81824 - protein, 36 aa, Artificial Sequence; identical to SEQ ID NO: 30182
  Cyclic GFR-binding peptide
  MOD_RES (4)..(5): Xaa is C or S

SEQ ID NO: 81825 - protein, 26 aa, Artificial Sequence
  Cyclic GFR-binding peptide
  MOD_RES (1)..(1): Xaa is C or S
XAPTQLSNITVQIMDDSSNVIIGEMS

SEQ ID NO: 81826 - protein, 36 aa, Artificial Sequence; identical to SEQ ID NO: 30186
  Cyclic GFR-binding peptide
  MOD_RES (2)..(3)..(34)..(36): Xaa is C or S

SEQ ID NO: 81827 - protein, 30 aa, Artificial Sequence
  Cyclic GFR-binding peptide
  MOD_RES (27)..(29): Xaa is C or S
RSVKMAKVDEYDKVVKEVQVEMVVEGXGXR

SEQ ID NO: 81828 - protein, 31 aa, Artificial Sequence
  Cyclic GFR-binding peptide
  MOD_RES (31)..(31): Xaa is C or S
PTELRPVQMRKIDENEKVVKKATVDMVVEGX

SEQ ID NO: 81829 - protein, 32 aa, Artificial Sequence
  Cyclic GFR-binding peptide
  MOD_RES (4)..(4): Xaa is C or S
GLEXVPTEEEPLTMLYYRIKPHQGQHEQLSNF

SEQ ID NO: 81830 - protein, 27 aa, Artificial Sequence
  Cyclic GFR-binding peptide
  MOD_RES (1)..(2): Xaa is C or S
XXVPTELSNITMQIMDENEKVVIGEMS

SEQ ID NO: 81831 - protein, 26 aa, Artificial Sequence
  Cyclic GFR-binding peptide
VQLEPLTVLYYEIVRKKPIFEQLSNT

SEQ ID NO: 81832 - protein, 32 aa, Artificial Sequence
  Cyclic GFR-binding peptide
  MOD_RES (2)..(3): Xaa is C or S
PXXAPTKLSNITVQIMDDSSNVIIGEMSNMVV

SEQ ID NO: 81833 - protein, 36 aa, Artificial Sequence
  Cyclic GFR-binding peptide
  MOD_RES (5)..(5): Xaa is C or S
RNVQXRPTQVQLEPLTVLYYEIVRKKPIFEQLSNTL

SEQ ID NO: 81834 - protein, 34 aa, Artificial Sequence
  Cyclic GFR-binding peptide
  MOD_RES (1)..(1): Xaa is C or S
XQPSRVHHEPLTVLYYEYVRKKPKLEQLSNRLEE

SEQ ID NO: 81835 - protein, 28 aa, Artificial Sequence
  Cyclic GFR-binding peptide
TQLRPVQVRKIDDSSNVIKKATVNMVVR

SEQ ID NO: 81836 - protein, 36 aa, Artificial Sequence; identical to SEQ ID NO: 30198
  Cyclic GFR-binding peptide
  MOD_RES (1)..(33)..(35): Xaa is C or S

SEQ ID NO: 81837 - protein, 23 aa, Artificial Sequence
  Cyclic GFR-binding peptide
SNITIQIMVGRTPKVIGEMSMVV

SEQ ID NO: 81838 - protein, 32 aa, Artificial Sequence
  Cyclic GFR-binding peptide
  MOD_RES (3)..(4): Xaa is C or S
KPXXAPTKLRSVKVAKVDDSSNVIKEVQVNMV

SEQ ID NO: 81839 - protein, 26 aa, Artificial Sequence
  Cyclic GFR-binding peptide
APTQLRSVKVAKVDDSSNVIKEVQVN

SEQ ID NO: 81840 - protein, 31 aa, Artificial Sequence
  Cyclic GFR-binding peptide
  MOD_RES (28)..(30): Xaa is C or S
ALSNITIQIMVGRKPKVIGEMSMIVRSXKXS

SEQ ID NO: 81841 - protein, 36 aa, Artificial Sequence
  Cyclic GFR-binding peptide
  MOD_RES (6)..(7): Xaa is C or S
KIPKAXXVPTELSNITMQIMDENEKVVIGEMSDMVV

SEQ ID NO: 81842 - protein, 33 aa, Artificial Sequence; identical to SEQ ID NO: 30205
  Cyclic GFR-binding peptide

SEQ ID NO: 81843 - protein, 30 aa, Artificial Sequence
  Cyclic GFR-binding peptide
  MOD_RES (29)..(29): Xaa is C or S
EPLTMLYYRIKPHQGQHEQLSNFLQHNKXE

SEQ ID NO: 81844 - protein, 36 aa, Artificial Sequence; identical to SEQ ID NO: 30207
  Cyclic GFR-binding peptide
  MOD_RES (2)..(36): Xaa is C or S

SEQ ID NO: 81845 - protein, 32 aa, Artificial Sequence; identical to SEQ ID NO: 30208
  Cyclic GFR-binding peptide
  MOD_RES (1)..(32): Xaa is C or S

SEQ ID NO: 81846 - protein, 33 aa, Artificial Sequence; identical to SEQ ID NO: 30210
  Cyclic GFR-binding peptide
  MOD_RES (2)..(3): Xaa is C or S

SEQ ID NO: 81847 - protein, 33 aa, Artificial Sequence; identical to SEQ ID NO: 30209
  Cyclic GFR-binding peptide

SEQ ID NO: 81848 - protein, 34 aa, Artificial Sequence; identical to SEQ ID NO: 30214
  Cyclic GFR-binding peptide
  MOD_RES (1)..(33): Xaa is C or S

SEQ ID NO: 81849 - protein, 29 aa, Artificial Sequence
  Cyclic GFR-binding peptide
  MOD_RES (26)..(28): Xaa is C or S
SNITIQIMVGRTPKVIGEMSMVVKSXKXS

SEQ ID NO: 81850 - protein, 29 aa, Artificial Sequence
  Cyclic GFR-binding peptide
APTKLRSVKVAKVDDSSNVIKEVQVNMVV

SEQ ID NO: 81851 - protein, 26 aa, Artificial Sequence
  Cyclic GFR-binding peptide
DLSNITIQIMVGRTPKVIGEMSMVVK

SEQ ID NO: 81852 - protein, 41 aa, Artificial Sequence; identical to SEQ ID NO: 30217
  Cyclic GFR-binding peptide
  MOD_RES (5)..(6)..(38)..(40): Xaa is C or S

SEQ ID NO: 81853 - protein, 31 aa, Artificial Sequence
  Cyclic GFR-binding peptide
  MOD_RES (28)..(30): Xaa is C or S
LRSVKMAKVDENEKVVKEVQVDMVVEGXGXR

SEQ ID NO: 81854 - protein, 23 aa, Artificial Sequence
  Cyclic GFR-binding peptide
LEPLPVVYYEIVRKKPIFEQLSN

SEQ ID NO: 81855 - protein, 41 aa, Artificial Sequence; identical to SEQ ID NO: 30223
  Cyclic GFR-binding peptide
  MOD_RES (5)..(6)..(38)..(40): Xaa is C or S

SEQ ID NO: 81856 - protein, 36 aa, Artificial Sequence; identical to SEQ ID NO: 30224
  Cyclic GFR-binding peptide
  MOD_RES (3)..(4)..(35): Xaa is C or S

SEQ ID NO: 81857 - protein, 35 aa, Artificial Sequence; identical to SEQ ID NO: 30225
  Cyclic GFR-binding peptide
  MOD_RES (4)..(5): Xaa is C or S

SEQ ID NO: 81858 - protein, 27 aa, Artificial Sequence
  Cyclic GFR-binding peptide
PQALRPVQIRKIVGRKPKVKKATVMIV

SEQ ID NO: 81859 - protein, 36 aa, Artificial Sequence; identical to SEQ ID NO: 30230
  Cyclic GFR-binding peptide
  MOD_RES (4)..(5): Xaa is C or S

SEQ ID NO: 81860 - protein, 38 aa, Artificial Sequence; identical to SEQ ID NO: 30236
  Cyclic GFR-binding peptide
  MOD_RES (3)..(4)..(36)..(38): Xaa is C or S

SEQ ID NO: 81861 - protein, 22 aa, Artificial Sequence
  Cyclic GFR-binding peptide
EPLTVLYYEYVRKKPKLEQLSN

SEQ ID NO: 81862 - protein, 27 aa, Artificial Sequence
  Cyclic GFR-binding peptide
SRVHHEPLPVVYYEYVRKKPKLEQLSN

SEQ ID NO: 81863 - protein, 34 aa, Artificial Sequence; identical to SEQ ID NO: 30239
  Cyclic GFR-binding peptide
  MOD_RES (3)..(4): Xaa is C or S

SEQ ID NO: 81864 - protein, 36 aa, Artificial Sequence; identical to SEQ ID NO: 30240
  Cyclic GFR-binding peptide
  MOD_RES (2)..(3)..(34)..(36): Xaa is C or S

SEQ ID NO: 81865 - protein, 44 aa, Artificial Sequence; identical to SEQ ID NO: 30242
  Cyclic GFR-binding peptide
  MOD_RES (7)..(41)..(43): Xaa is C or S

SEQ ID NO: 81866 - protein, 36 aa, Artificial Sequence; identical to SEQ ID NO: 30246
  Cyclic GFR-binding peptide
  MOD_RES (2)..(3)..(34)..(36): Xaa is C or S

SEQ ID NO: 81867 - protein, 38 aa, Artificial Sequence; identical to SEQ ID NO: 30249
  Cyclic GFR-binding peptide
  MOD_RES (6)..(7): Xaa is C or S

SEQ ID NO: 81868 - protein, 30 aa, Artificial Sequence
  Cyclic GFR-binding peptide
  MOD_RES (1)..(1): Xaa is C or S
XVPTELRPVQMRKIDEYDKVVKKATVEMVV

SEQ ID NO: 81869 - protein, 28 aa, Artificial Sequence
  Cyclic GFR-binding peptide
EPLPMVYYRIKPHQGQHEQLSNFLQHNK

SEQ ID NO: 81870 - protein, 24 aa, Artificial Sequence
  Cyclic GFR-binding peptide
ELRSVKMAKVDEYDKVVKEVQVEM

SEQ ID NO: 81871 - protein, 33 aa, Artificial Sequence
  Cyclic GFR-binding peptide
  MOD_RES (4)..(4): Xaa is C or S
NVQXRPTQVQLEPLPVVYYEIVRKKPIFEQLSN

SEQ ID NO: 81872 - protein, 32 aa, Artificial Sequence; identical to SEQ ID NO: 30255
  Cyclic GFR-binding peptide
  MOD_RES (1)..(2): Xaa is C or S

SEQ ID NO: 81873 - protein, 36 aa, Artificial Sequence; identical to SEQ ID NO: 30257
  Cyclic GFR-binding peptide
  MOD_RES (4)..(5): Xaa is C or S

SEQ ID NO: 81874 - protein, 30 aa, Artificial Sequence
  Cyclic GFR-binding peptide
  MOD_RES (27)..(29): Xaa is C or S
RPVQVRKIDDSSNVIKKATVNMVVRSXGXH

SEQ ID NO: 81875 - protein, 34 aa, Artificial Sequence; identical to SEQ ID NO: 30260
  Cyclic GFR-binding peptide

SEQ ID NO: 81876 - protein, 34 aa, Artificial Sequence; identical to SEQ ID NO: 30263
  Cyclic GFR-binding peptide
  MOD_RES (1)..(2)..(34): Xaa is C or S

SEQ ID NO: 81877 - protein, 33 aa, Artificial Sequence; identical to SEQ ID NO: 30262
  Cyclic GFR-binding peptide
  MOD_RES (2)..(3): Xaa is C or S

SEQ ID NO: 81878 - protein, 29 aa, Artificial Sequence
  Cyclic GFR-binding peptide
VPQDLRPVQIRKIVGRTPKVKKATVMVVK

SEQ ID NO: 81879 - protein, 33 aa, Artificial Sequence
  Cyclic GFR-binding peptide
  MOD_RES (6)..(7): Xaa is C or S
YVPKPXXAPTKLSNITVQIMDDSSNVIIGEMSN

SEQ ID NO: 81880 - protein, 34 aa, Artificial Sequence
  Cyclic GFR-binding peptide
  MOD_RES (5)..(6): Xaa is C or S
SAAPXXVPQALRPVQIRKIVGRKPKVKKATVMIV

SEQ ID NO: 81881 - protein, 39 aa, Artificial Sequence; identical to SEQ ID NO: 30268
  Cyclic GFR-binding peptide
  MOD_RES (4)..(5)..(37)..(39): Xaa is C or S

SEQ ID NO: 81882 - protein, 30 aa, Artificial Sequence
  Cyclic GFR-binding peptide
PSRVHHEPLPVVYYEYVRKKPKLEQLSNRL

SEQ ID NO: 81883 - protein, 42 aa, Artificial Sequence; identical to SEQ ID NO: 30269
  Cyclic GFR-binding peptide
  MOD_RES (6)..(40)..(42): Xaa is C or S

SEQ ID NO: 81884 - protein, 32 aa, Artificial Sequence
  Cyclic GFR-binding peptide
  MOD_RES (32)..(32): Xaa is C or S
TEEEPLTMLYYRIKPHQGQHEQLSNFLQHNKX

SEQ ID NO: 81885 - protein, 28 aa, Artificial Sequence
  Cyclic GFR-binding peptide
PTKLRSVKVAKVDDSSNVIKEVQVNMVV

SEQ ID NO: 81886 - protein, 31 aa, Artificial Sequence
  Cyclic GFR-binding peptide
  MOD_RES (28)..(30): Xaa is C or S
DLRPVQIRKIIGKTPKIKKATVMIVKSXKXS

SEQ ID NO: 81887 - protein, 35 aa, Artificial Sequence; identical to SEQ ID NO: 30278
  Cyclic GFR-binding peptide
  MOD_RES (1)..(33)..(35): Xaa is C or S

SEQ ID NO: 81888 - protein, 40 aa, Artificial Sequence; identical to SEQ ID NO: 30279
  Cyclic GFR-binding peptide
  MOD_RES (2)..(39): Xaa is C or S

SEQ ID NO: 81889 - protein, 27 aa, Artificial Sequence
  Cyclic GFR-binding peptide
  MOD_RES (1)..(2): Xaa is C or S
XXVSQDLSNITIQIMIGKTPKIIGEMS

SEQ ID NO: 81890 - protein, 31 aa, Artificial Sequence
  Cyclic GFR-binding peptide
HHEPLPVVYYEYVRKKPKLEQLSNRLEEHLE

SEQ ID NO: 81891 - protein, 24 aa, Artificial Sequence
  Cyclic GFR-binding peptide
PQDLSNITIQIMVGRTPKVIGEMS

SEQ ID NO: 81892 - protein, 36 aa, Artificial Sequence; identical to SEQ ID NO: 30288
  Cyclic GFR-binding peptide
  MOD_RES (2)..(3)..(35): Xaa is C or S

SEQ ID NO: 81893 - protein, 30 aa, Artificial Sequence
  Cyclic GFR-binding peptide
  MOD_RES (1)..(1): Xaa is C or S
XVPTELSNITMQIMDENEKVVIGEMSDMVV

SEQ ID NO: 81894 - protein, 27 aa, Artificial Sequence
  Cyclic GFR-binding peptide
TQVQLEPLTVLYYEIVRKKPIFEQLSN

SEQ ID NO: 81895 - protein, 23 aa, Artificial Sequence
  Cyclic GFR-binding peptide
DLRPVQIRKIVGRTPKVKKATVM

SEQ ID NO: 81896 - protein, 28 aa, Artificial Sequence
  Cyclic GFR-binding peptide
TQLSNITVQIMDDSSNVIIGEMSNMVVR

SEQ ID NO: 81897 - protein, 35 aa, Artificial Sequence; identical to SEQ ID NO: 30295
  Cyclic GFR-binding peptide
  MOD_RES (1)..(32)..(34): Xaa is C or S

SEQ ID NO: 81898 - protein, 33 aa, Artificial Sequence
  Cyclic GFR-binding peptide
  MOD_RES (4)..(5): Xaa is C or S
PKPXXAPTKLRSVKVAKVDDSSNVIKEVQVNMV

SEQ ID NO: 81899 - protein, 42 aa, Artificial Sequence; identical to SEQ ID NO: 30302
  Cyclic GFR-binding peptide
  MOD_RES (6)..(7)..(39)..(41): Xaa is C or S

SEQ ID NO: 81900 - protein, 29 aa, Artificial Sequence
  Cyclic GFR-binding peptide
  MOD_RES (1)..(1): Xaa is C or S
XVPTELRPVQMRKIDEYDKVVKKATVEMV

SEQ ID NO: 81901 - protein, 37 aa, Artificial Sequence; identical to SEQ ID NO: 30304
  Cyclic GFR-binding peptide
  MOD_RES (2)..(3)..(34)..(36): Xaa is C or S

SEQ ID NO: 81902 - protein, 36 aa, Artificial Sequence; identical to SEQ ID NO: 30305
  Cyclic GFR-binding peptide
  MOD_RES (5)..(6): Xaa is C or S

SEQ ID NO: 81903 - protein, 35 aa, Artificial Sequence
  Cyclic GFR-binding peptide
  MOD_RES (5)..(6): Xaa is C or S
SASPXXVPQDLSNITIQIMVGRTPKVIGEMSMVVK

SEQ ID NO: 81904 - protein, 31 aa, Artificial Sequence; identical to SEQ ID NO: 30307
  Cyclic GFR-binding peptide
  MOD_RES (31)..(31): Xaa is C or S

SEQ ID NO: 81905 - protein, 33 aa, Artificial Sequence
  Cyclic GFR-binding peptide
  MOD_RES (4)..(5): Xaa is C or S
PKAXXVPTELRSVKMAKVDENEKVVKEVQVDMV

SEQ ID NO: 81906 - protein, 29 aa, Artificial Sequence
  Cyclic GFR-binding peptide
  MOD_RES (2)..(3): Xaa is C or S
AXXVPTELRSVKMAKVDEYDKVVKEVQVE

SEQ ID NO: 81907 - protein, 20 aa, Artificial Sequence
  Cyclic GFR-binding peptide
SNITIQIMVGRKPKVIGEMS

SEQ ID NO: 81908 - protein, 39 aa, Artificial Sequence; identical to SEQ ID NO: 30312
  Cyclic GFR-binding peptide
  MOD_RES (5)..(5): Xaa is C or S

SEQ ID NO: 81909 - protein, 30 aa, Artificial Sequence
  Cyclic GFR-binding peptide
  MOD_RES (1)..(2): Xaa is C or S
XXAPTQLRPVQVRKIDDSSNVIKKATVNMV

SEQ ID NO: 81910 - protein, 26 aa, Artificial Sequence
  Cyclic GFR-binding peptide
  MOD_RES (26)..(26): Xaa is C or S
RSVKIAKVVGRTPKVKEVQVMVVKSX

SEQ ID NO: 81911 - protein, 33 aa, Artificial Sequence; identical to SEQ ID NO: 30314
  Cyclic GFR-binding peptide
  MOD_RES (31)..(33): Xaa is C or S

SEQ ID NO: 81912 - protein, 37 aa, Artificial Sequence; identical to SEQ ID NO: 30315
  Cyclic GFR-binding peptide
  MOD_RES (1)..(2)..(34)..(36): Xaa is C or S

SEQ ID NO: 81913 - protein, 37 aa, Artificial Sequence; identical to SEQ ID NO: 30317
  Cyclic GFR-binding peptide
  MOD_RES (2)..(3)..(35)..(37): Xaa is C or S

SEQ ID NO: 81914 - protein, 27 aa, Artificial Sequence
  Cyclic GFR-binding peptide
ALSNITIQIMVGRKPKVIGEMSMIVRS

SEQ ID NO: 81915 - protein, 34 aa, Artificial Sequence
  Cyclic GFR-binding peptide
  MOD_RES (6)..(7): Xaa is C or S
ASASPXXVSQDLRSVKIAKVIGKTPKIKEVQVMI

SEQ ID NO: 81916 - protein, 33 aa, Artificial Sequence; identical to SEQ ID NO: 30320
  Cyclic GFR-binding peptide
  MOD_RES (1)..(2): Xaa is C or S

SEQ ID NO: 81917 - protein, 33 aa, Artificial Sequence
  Cyclic GFR-binding peptide
  MOD_RES (5)..(6): Xaa is C or S
VPKPXXAPTKLRPVQVRKIDDSSNVIKKATVNM

SEQ ID NO: 81918 - protein, 27 aa, Artificial Sequence
  Cyclic GFR-binding peptide
TQLRPVQVRKIDDSSNVIKKATVNMVV

SEQ ID NO: 81919 - protein, 25 aa, Artificial Sequence
  Cyclic GFR-binding peptide
APTQLRSVKVAKVDDSSNVIKEVQV

SEQ ID NO: 81920 - protein, 29 aa, Artificial Sequence
  Cyclic GFR-binding peptide
  MOD_RES (28)..(28): Xaa is C or S
LRPVQMRKIDEYDKVVKKATVEMVVEGXG

SEQ ID NO: 81921 - protein, 22 aa, Artificial Sequence
  Cyclic GFR-binding peptide
LRPVQIRKIVGRTPKVKKATVM

SEQ ID NO: 81922 - protein, 32 aa, Artificial Sequence
  Cyclic GFR-binding peptide
  MOD_RES (5)..(6): Xaa is C or S
VPKPXXAPTQLRSVKVAKVDDSSNVIKEVQVN

SEQ ID NO: 81923 - protein, 31 aa, Artificial Sequence; identical to SEQ ID NO: 30326
  Cyclic GFR-binding peptide

SEQ ID NO: 81924 - protein, 39 aa, Artificial Sequence; identical to SEQ ID NO: 30327
  Cyclic GFR-binding peptide
  MOD_RES (3)..(4)..(36)..(38): Xaa is C or S

SEQ ID NO: 81925 - protein, 28 aa, Artificial Sequence
  Cyclic GFR-binding peptide
PQDLSNITIQIMVGRTPKVIGEMSMVVK

SEQ ID NO: 81926 - protein, 41 aa, Artificial Sequence; identical to SEQ ID NO: 30333
  Cyclic GFR-binding peptide
  MOD_RES (5)..(39)..(41): Xaa is C or S

SEQ ID NO: 81927 - protein, 23 aa, Artificial Sequence
  Cyclic GFR-binding peptide
ELRSVKMAKVDEYDKVVKEVQVE

SEQ ID NO: 81928 - protein, 41 aa, Artificial Sequence; identical to SEQ ID NO: 30337
  Cyclic GFR-binding peptide
  MOD_RES (7)..(41): Xaa is C or S

SEQ ID NO: 81929 - protein, 35 aa, Artificial Sequence; identical to SEQ ID NO: 30338
  Cyclic GFR-binding peptide
  MOD_RES (1)..(33)..(35): Xaa is C or S

SEQ ID NO: 81930 - protein, 30 aa, Artificial Sequence
  Cyclic GFR-binding peptide
  MOD_RES (1)..(1): Xaa is C or S
XRPTQVQLEPLTVLYYEIVRKKPIFEQLSN

SEQ ID NO: 81931 - protein, 31 aa, Artificial Sequence; identical to SEQ ID NO: 30343
  Cyclic GFR-binding peptide

SEQ ID NO: 81932 - protein, 26 aa, Artificial Sequence
  Cyclic GFR-binding peptide
TQLRSVKVAKVDDSSNVIKEVQVNMV

SEQ ID NO: 81933 - protein, 33 aa, Artificial Sequence; identical to SEQ ID NO: 30345
  Cyclic GFR-binding peptide

SEQ ID NO: 81934 - protein, 33 aa, Artificial Sequence
  Cyclic GFR-binding peptide
  MOD_RES (33)..(33): Xaa is C or S
VHHEPLTVLYYEYVRKKPKLEQLSNRLEEHLEX

SEQ ID NO: 81935 - protein, 37 aa, Artificial Sequence; identical to SEQ ID NO: 30348
  Cyclic GFR-binding peptide
  MOD_RES (6)..(7): Xaa is C or S

SEQ ID NO: 81936 - protein, 35 aa, Artificial Sequence; identical to SEQ ID NO: 30350
  Cyclic GFR-binding peptide

SEQ ID NO: 81937 - protein, 26 aa, Artificial Sequence
  Cyclic GFR-binding peptide
  MOD_RES (1)..(1): Xaa is C or S
XVPTELRSVKMAKVDENEKVVKEVQV

SEQ ID NO: 81938 - protein, 30 aa, Artificial Sequence
  Cyclic GFR-binding peptide
  MOD_RES (1)..(2): Xaa is C or S
XXAPTKLRSVKVAKVDDSSNVIKEVQVNMV

SEQ ID NO: 81939 - protein, 34 aa, Artificial Sequence
  Cyclic GFR-binding peptide
  MOD_RES (5)..(5): Xaa is C or S
TKPTXAPTKLRPVQVRKIDDSSNVIKKATVNMVV

SEQ ID NO: 81940 - protein, 34 aa, Artificial Sequence
  Cyclic GFR-binding peptide
  MOD_RES (6)..(7): Xaa is C or S
ASASPXXVPQDLRSVKIAKVVGRTPKVKEVQVMV

SEQ ID NO: 81941 - protein, 22 aa, Artificial Sequence
  Cyclic GFR-binding peptide
LRSVKIAKVIGKTPKIKEVQVM

SEQ ID NO: 81942 - protein, 32 aa, Artificial Sequence; identical to SEQ ID NO: 30356
  Cyclic GFR-binding peptide
  MOD_RES (31)..(31): Xaa is C or S

SEQ ID NO: 81943 - protein, 27 aa, Artificial Sequence
  Cyclic GFR-binding peptide
DLRSVKIAKVVGRTPKVKEVQVMVVKS

SEQ ID NO: 81944 - protein, 36 aa, Artificial Sequence
  Cyclic GFR-binding peptide
  MOD_RES (33)..(35): Xaa is C or S
VQLEPLTVLYYEIVRKKPIFEQLSNTLEDHLAXKXE

SEQ ID NO: 81945 - protein, 28 aa, Artificial Sequence
  Cyclic GFR-binding peptide
QDLSNITIQIMVGRTPKVIGEMSMVVKS

SEQ ID NO: 81946 - protein, 35 aa, Artificial Sequence
  Cyclic GFR-binding peptide
  MOD_RES (6)..(7): Xaa is C or S
ASAAPXXVPQALRPVQIRKIVGRKPKVKKATVMIV

SEQ ID NO: 81947 - protein, 28 aa, Artificial Sequence
  Cyclic GFR-binding peptide
  MOD_RES (2)..(3): Xaa is C or S
PXXVPQALRPVQIRKIVGRKPKVKKATV

SEQ ID NO: 81948 - protein, 37 aa, Artificial Sequence; identical to SEQ ID NO: 30361
  Cyclic GFR-binding peptide
  MOD_RES (6)..(7): Xaa is C or S

SEQ ID NO: 81949 - protein, 30 aa, Artificial Sequence
  Cyclic GFR-binding peptide
  MOD_RES (1)..(1): Xaa is C or S
XVPQDLRPVQIRKIVGRTPKVKKATVMVVK

SEQ ID NO: 81950 - protein, 34 aa, Artificial Sequence; identical to SEQ ID NO: 30364
  Cyclic GFR-binding peptide
  MOD_RES (2)..(3)..(34): Xaa is C or S

SEQ ID NO: 81951 - protein, 28 aa, Artificial Sequence
  Cyclic GFR-binding peptide
HHEPLPVVYYEYVRKKPKLEQLSNRLEE

SEQ ID NO: 81952 - protein, 39 aa, Artificial Sequence; identical to SEQ ID NO: 30368
  Cyclic GFR-binding peptide
  MOD_RES (7)..(39): Xaa is C or S

SEQ ID NO: 81953 - protein, 25 aa, Artificial Sequence
  Cyclic GFR-binding peptide
TQLSNITVQIMDDSSNVIIGEMSNM

SEQ ID NO: 81954 - protein, 31 aa, Artificial Sequence; identical to SEQ ID NO: 30370
  Cyclic GFR-binding peptide

SEQ ID NO: 81955 - protein, 20 aa, Artificial Sequence
  Cyclic GFR-binding peptide
SNITMQIMDENEKVVIGEMS

SEQ ID NO: 81956 - protein, 25 aa, Artificial Sequence
  Cyclic GFR-binding peptide
PTQLSNITVQIMDDSSNVIIGEMSN

SEQ ID NO: 81957 - protein, 39 aa, Artificial Sequence; identical to SEQ ID NO: 30374
  Cyclic GFR-binding peptide
  MOD_RES (1)..(38): Xaa is C or S

SEQ ID NO: 81958 - protein, 34 aa, Artificial Sequence
  Cyclic GFR-binding peptide
  MOD_RES (6)..(7): Xaa is C or S
ASAAPXXVPQALRPVQIRKIVGRKPKVKKATVMI

SEQ ID NO: 81959 - protein, 20 aa, Artificial Sequence
  Cyclic GFR-binding peptide
SNITIQIMIGKTPKIIGEMS

SEQ ID NO: 81960 - protein, 38 aa, Artificial Sequence
  Cyclic GFR-binding peptide
  MOD_RES (5)..(5): Xaa is C or S
SSVKXQPSRVHHEPLPVVYYEYVRKKPKLEQLSNRLEE

SEQ ID NO: 81961 - protein, 26 aa, Artificial Sequence
  Cyclic GFR-binding peptide
ELSNITMQIMDENEKVVIGEMSDMVV

SEQ ID NO: 81962 - protein, 32 aa, Artificial Sequence
  Cyclic GFR-binding peptide
  MOD_RES (4)..(5): Xaa is C or S
PKAXXVPTELRPVQMRKIDEYDKVVKKATVEM

SEQ ID NO: 81963 - protein, 29 aa, Artificial Sequence
  Cyclic GFR-binding peptide
  MOD_RES (1)..(1): Xaa is C or S
XVPQDLSNITIQIMVGRTPKVIGEMSMVV

SEQ ID NO: 81964 - protein, 35 aa, Artificial Sequence
  Cyclic GFR-binding peptide
  MOD_RES (6)..(6): Xaa is C or S
VTKPTXAPTKLRPVQVRKIDDSSNVIKKATVNMVV

SEQ ID NO: 81965 - protein, 25 aa, Artificial Sequence
  Cyclic GFR-binding peptide
ELRSVKMAKVDENEKVVKEVQVDMV

SEQ ID NO: 81966 - protein, 39 aa, Artificial Sequence; identical to SEQ ID NO: 30385
  Cyclic GFR-binding peptide
  MOD_RES (5)..(6)..(38): Xaa is C or S

SEQ ID NO: 81967 - protein, 38 aa, Artificial Sequence; identical to SEQ ID NO: 30387
  Cyclic GFR-binding peptide
  MOD_RES (4)..(5)..(37): Xaa is C or S

SEQ ID NO: 81968 - protein, 36 aa, Artificial Sequence
  Cyclic GFR-binding peptide
  MOD_RES (6)..(7): Xaa is C or S
ASASPXXVSQDLRSVKIAKVIGKTPKIKEVQVMIVK

SEQ ID NO: 81969 - protein, 35 aa, Artificial Sequence; identical to SEQ ID NO: 30390
  Cyclic GFR-binding peptide
  MOD_RES (3)..(3): Xaa is C or S

SEQ ID NO: 81970 - protein, 29 aa, Artificial Sequence
  Cyclic GFR-binding peptide
QVQLEPLPVVYYEIVRKKPIFEQLSNTLE

SEQ ID NO: 81971 - protein, 35 aa, Artificial Sequence; identical to SEQ ID NO: 30393
  Cyclic GFR-binding peptide
  MOD_RES (32)..(34): Xaa is C or S

SEQ ID NO: 81972 - protein, 28 aa, Artificial Sequence
  Cyclic GFR-binding peptide
  MOD_RES (1)..(2): Xaa is C or S
XXVPQALRSVKIAKVVGRKPKVKEVQVM

SEQ ID NO: 81973 - protein, 23 aa, Artificial Sequence
  Cyclic GFR-binding peptide
TQLSNITVQIMDDSSNVIIGEMS

SEQ ID NO: 81974 - protein, 28 aa, Artificial Sequence
  Cyclic GFR-binding peptide
TELSNITMQIMDEYDKVVIGEMSEMVVE

SEQ ID NO: 81975 - protein, 21 aa, Artificial Sequence
  Cyclic GFR-binding peptide
LRSVKIAKVVGRTPKVKEVQV

SEQ ID NO: 81976 - protein, 35 aa, Artificial Sequence; identical to SEQ ID NO: 30401
  Cyclic GFR-binding peptide
  MOD_RES (1)..(33)..(35): Xaa is C or S

SEQ ID NO: 81977 - protein, 28 aa, Artificial Sequence
  Cyclic GFR-binding peptide
  MOD_RES (1)..(1): Xaa is C or S
XVPTEEEPLPMVYYRIKPHQGQHEQLSN

SEQ ID NO: 81978 - protein, 24 aa, Artificial Sequence
  Cyclic GFR-binding peptide
EEPLTMLYYRIKPHQGQHEQLSNF

SEQ ID NO: 81979 - protein, 31 aa, Artificial Sequence
  Cyclic GFR-binding peptide
PTQVQLEPLTVLYYEIVRKKPIFEQLSNTLE

SEQ ID NO: 81980 - protein, 33 aa, Artificial Sequence
  Cyclic GFR-binding peptide
  MOD_RES (3)..(4): Xaa is C or S
SPXXVSQDLRPVQIRKIIGKTPKIKKATVMIVK

SEQ ID NO: 81981 - protein, 30 aa, Artificial Sequence
  Cyclic GFR-binding peptide
  MOD_RES (3)..(4): Xaa is C or S
KPXXAPTQLRPVQVRKIDDSSNVIKKATVN

SEQ ID NO: 81982 - protein, 37 aa, Artificial Sequence; identical to SEQ ID NO: 30404
  Cyclic GFR-binding peptide
  MOD_RES (4)..(5)..(36): Xaa is C or S

SEQ ID NO: 81983 - protein, 38 aa, Artificial Sequence; identical to SEQ ID NO: 30407
  Cyclic GFR-binding peptide
  MOD_RES (7)..(7): Xaa is C or S

SEQ ID NO: 81984 - protein, 33 aa, Artificial Sequence
  Cyclic GFR-binding peptide
  MOD_RES (3)..(4): Xaa is C or S
APXXVPQALRSVKIAKVVGRKPKVKEVQVMIVR

SEQ ID NO: 81985 - protein, 42 aa, Artificial Sequence; identical to SEQ ID NO: 30408
  Cyclic GFR-binding peptide
  MOD_RES (2)..(39)..(41): Xaa is C or S

SEQ ID NO: 81986 - protein, 33 aa, Artificial Sequence
  Cyclic GFR-binding peptide
  MOD_RES (3)..(4): Xaa is C or S
KAXXVPTELSNITMQIMDENEKVVIGEMSDMVV

SEQ ID NO: 81987 - protein, 32 aa, Artificial Sequence
  Cyclic GFR-binding peptide
  MOD_RES (6)..(7): Xaa is C or S
KIPKAXXVPTELSNITMQIMDENEKVVIGEMS

SEQ ID NO: 81988 - protein, 42 aa, Artificial Sequence; identical to SEQ ID NO: 30412
  Cyclic GFR-binding peptide
  MOD_RES (6)..(40)..(42): Xaa is C or S

SEQ ID NO: 81989 - protein, 23 aa, Artificial Sequence
  Cyclic GFR-binding peptide
HEPLPVVYYEYVRKKPKLEQLSN

SEQ ID NO: 81990 - protein, 30 aa, Artificial Sequence
  Cyclic GFR-binding peptide
QPSRVHHEPLTVLYYEYVRKKPKLEQLSNR

SEQ ID NO: 81991 - protein, 32 aa, Artificial Sequence; identical to SEQ ID NO: 30415
  Cyclic GFR-binding peptide
  MOD_RES (1)..(2): Xaa is C or S

SEQ ID NO: 81992 - protein, 36 aa, Artificial Sequence
  Cyclic GFR-binding peptide
  MOD_RES (7)..(7): Xaa is C or S
HVTKPTXAPTKLRSVKVAKVDDSSNVIKEVQVNMVV

SEQ ID NO: 81993 - protein, 35 aa, Artificial Sequence
  Cyclic GFR-binding peptide
  MOD_RES (34)..(34): Xaa is C or S
RVHHEPLPVVYYEYVRKKPKLEQLSNRLEEHLEXA

SEQ ID NO: 81994 - protein, 35 aa, Artificial Sequence; identical to SEQ ID NO: 30417
  Cyclic GFR-binding peptide
  MOD_RES (32)..(34): Xaa is C or S

SEQ ID NO: 81995 - protein, 36 aa, Artificial Sequence
  Cyclic GFR-binding peptide
  MOD_RES (34)..(36): Xaa is C or S
RVHHEPLTVLYYEYVRKKPKLEQLSNRLEEHLEXAX

SEQ ID NO: 81996 - protein, 22 aa, Artificial Sequence
  Cyclic GFR-binding peptide
KLRSVKVAKVDDSSNVIKEVQV

SEQ ID NO: 81997 - protein, 32 aa, Artificial Sequence
  Cyclic GFR-binding peptide
PTEEEPLPMVYYRIKPHQGQHEQLSNFLQHNK

SEQ ID NO: 81998 - protein, 27 aa, Artificial Sequence
  Cyclic GFR-binding peptide
PQDLRSVKIAKVVGRTPKVKEVQVMVV

SEQ ID NO: 81999 - protein, 23 aa, Artificial Sequence
  Cyclic GFR-binding peptide
LRPVQIRKIIGKTPKIKKATVMI

SEQ ID NO: 82000 - protein, 35 aa, Artificial Sequence; identical to SEQ ID NO: 30419
  Cyclic GFR-binding peptide
  MOD_RES (4)..(5): Xaa is C or S

SEQ ID NO: 82001 - protein, 30 aa, Artificial Sequence
  Cyclic GFR-binding peptide
  MOD_RES (4)..(5): Xaa is C or S
PKAXXVPTELRPVQMRKIDEYDKVVKKATV

SEQ ID NO: 82002 - protein, 32 aa, Artificial Sequence
  Cyclic GFR-binding peptide
  MOD_RES (2)..(2): Xaa is C or S
EXVPTEEEPLTMLYYRIKPHQGQHEQLSNFLQ

SEQ ID NO: 82003 - protein, 26 aa, Artificial Sequence
  Cyclic GFR-binding peptide
  MOD_RES (26)..(26): Xaa is C or S
SNITIQIMVGRTPKVIGEMSMVVKSX

SEQ ID NO: 82004 - protein, 41 aa, Artificial Sequence; identical to SEQ ID NO: 30425
  Cyclic GFR-binding peptide
  MOD_RES (6)..(7)..(38)..(40): Xaa is C or S

SEQ ID NO: 82005 - protein, 29 aa, Artificial Sequence
  Cyclic GFR-binding peptide
  MOD_RES (27)..(29): Xaa is C or S
RPVQMRKIDEYDKVVKKATVEMVVEGXGX

SEQ ID NO: 82006 - protein, 25 aa, Artificial Sequence
  Cyclic GFR-binding peptide
QALRPVQIRKIVGRKPKVKKATVMI

SEQ ID NO: 82007 - protein, 34 aa, Artificial Sequence
  Cyclic GFR-binding peptide
  MOD_RES (31)..(33): Xaa is C or S
LEPLTVLYYEIVRKKPIFEQLSNTLEDHLAXKXE

SEQ ID NO: 82008 - protein, 31 aa, Artificial Sequence
  Cyclic GFR-binding peptide
  MOD_RES (30)..(30): Xaa is C or S
EPLTVLYYEYVRKKPKLEQLSNRLEEHLEXA

SEQ ID NO: 82009 - protein, 23 aa, Artificial Sequence
  Cyclic GFR-binding peptide
ELRSVKMAKVDENEKVVKEVQVD

SEQ ID NO: 82010 - protein, 36 aa, Artificial Sequence
  Cyclic GFR-binding peptide
  MOD_RES (7)..(7): Xaa is C or S
NDEGLEXVPTEEEPLPMVYYRIKPHQGQHEQLSNFL

SEQ ID NO: 82011 - protein, 31 aa, Artificial Sequence; identical to SEQ ID NO: 30430
  Cyclic GFR-binding peptide
  MOD_RES (1)..(1): Xaa is C or S

SEQ ID NO: 82012 - protein, 31 aa, Artificial Sequence
  Cyclic GFR-binding peptide
  MOD_RES (5)..(6): Xaa is C or S
SASPXXVSQDLRSVKIAKVIGKTPKIKEVQV

SEQ ID NO: 82013 - protein, 36 aa, Artificial Sequence; identical to SEQ ID NO: 30433
  Cyclic GFR-binding peptide
  MOD_RES (1)..(2)..(33)..(35): Xaa is C or S

SEQ ID NO: 82014 - protein, 40 aa, Artificial Sequence; identical to SEQ ID NO: 30434
  Cyclic GFR-binding peptide
  MOD_RES (5)..(6)..(38)..(40): Xaa is C or S

SEQ ID NO: 82015 - protein, 26 aa, Artificial Sequence
  Cyclic GFR-binding peptide
LEPLPVVYYEIVRKKPIFEQLSNTLE

SEQ ID NO: 82016 - protein, 29 aa, Artificial Sequence
  Cyclic GFR-binding peptide
QLEPLTVLYYEIVRKKPIFEQLSNTLEDH

SEQ ID NO: 82017 - protein, 21 aa, Artificial Sequence
  Cyclic GFR-binding peptide
SNITIQIMIGKTPKIIGEMSM

SEQ ID NO: 82018 - protein, 36 aa, Artificial Sequence; identical to SEQ ID NO: 30438
  Cyclic GFR-binding peptide
  MOD_RES (5)..(6): Xaa is C or S

SEQ ID NO: 82019 - protein, 30 aa, Artificial Sequence
  Cyclic GFR-binding peptide
PTQVQLEPLPVVYYEIVRKKPIFEQLSNTL

SEQ ID NO: 82020 - protein, 32 aa, Artificial Sequence
  Cyclic GFR-binding peptide
  MOD_RES (5)..(6): Xaa is C or S
SAAPXXVPQALRSVKIAKVVGRKPKVKEVQVM

SEQ ID NO: 82021 - protein, 26 aa, Artificial Sequence
  Cyclic GFR-binding peptide
  MOD_RES (26)..(26): Xaa is C or S
RPVQIRKIVGRKPKVKKATVMIVRSX

SEQ ID NO: 82022 - protein, 24 aa, Artificial Sequence
  Cyclic GFR-binding peptide
LSNITVQIMDDSSNVIIGEMSNMV

SEQ ID NO: 82023 - protein, 34 aa, Artificial Sequence; identical to SEQ ID NO: 30443
  Cyclic GFR-binding peptide
  MOD_RES (2)..(3): Xaa is C or S

SEQ ID NO: 82024 - protein, 38 aa, Artificial Sequence; identical to SEQ ID NO: 30444
  Cyclic GFR-binding peptide
  MOD_RES (5)..(6)..(38): Xaa is C or S

SEQ ID NO: 82025 - protein, 30 aa, Artificial Sequence
  Cyclic GFR-binding peptide
  MOD_RES (3)..(4): Xaa is C or S
KPXXAPTKLRSVKVAKVDDSSNVIKEVQVN

SEQ ID NO: 82026 - protein, 33 aa, Artificial Sequence
  Cyclic GFR-binding peptide
  MOD_RES (4)..(4): Xaa is C or S
GLEXVPTEEEPLTMLYYRIKPHQGQHEQLSNFL

SEQ ID NO: 82027 - protein, 29 aa, Artificial Sequence
  Cyclic GFR-binding peptide
  MOD_RES (2)..(3): Xaa is C or S
PXXAPTQLSNITVQIMDDSSNVIIGEMSN

SEQ ID NO: 82028 - protein, 26 aa, Artificial Sequence
  Cyclic GFR-binding peptide
SNITMQIMDEYDKVVIGEMSEMVVEG

SEQ ID NO: 82029 - protein, 36 aa, Artificial Sequence; identical to SEQ ID NO: 30446
  Cyclic GFR-binding peptide
  MOD_RES (1)..(35): Xaa is C or S

SEQ ID NO: 82030 - protein, 32 aa, Artificial Sequence; identical to SEQ ID NO: 30447
  Cyclic GFR-binding peptide
  MOD_RES (1)..(1): Xaa is C or S

SEQ ID NO: 82031 - protein, 25 aa, Artificial Sequence
  Cyclic GFR-binding peptide
DLRPVQIRKIVGRTPKVKKATVMVV

SEQ ID NO: 82032 - protein, 20 aa, Artificial Sequence
  Cyclic GFR-binding peptide
SNITIQIMIGKTPKIIGEMS

SEQ ID NO: 82033 - protein, 35 aa, Artificial Sequence
  Cyclic GFR-binding peptide
  MOD_RES (6)..(7): Xaa is C or S
KIPKAXXVPTELRSVKMAKVDENEKVVKEVQVDMV

SEQ ID NO: 82034 - protein, 36 aa, Artificial Sequence
  Cyclic GFR-binding peptide
  MOD_RES (7)..(7): Xaa is C or S
NDEGLEXVPTEEEPLTMLYYRIKPHQGQHEQLSNFL

SEQ ID NO: 82035 - protein, 34 aa, Artificial Sequence
  Cyclic GFR-binding peptide
  MOD_RES (34)..(34): Xaa is C or S
QVQLEPLTVLYYEIVRKKPIFEQLSNTLEDHLAX

SEQ ID NO: 82036 - protein, 31 aa, Artificial Sequence
  Cyclic GFR-binding peptide
  MOD_RES (1)..(2): Xaa is C or S
XXVPQDLSNITIQIMVGRTPKVIGEMSMVVK

SEQ ID NO: 82037 - protein, 33 aa, Artificial Sequence; identical to SEQ ID NO: 30452
  Cyclic GFR-binding peptide
  MOD_RES (1)..(33): Xaa is C or S

SEQ ID NO: 82038 - protein, 34 aa, Artificial Sequence; identical to SEQ ID NO: 30454
  Cyclic GFR-binding peptide
  MOD_RES (1)..(33): Xaa is C or S

SEQ ID NO: 82039 - protein, 35 aa, Artificial Sequence; identical to SEQ ID NO: 30455
  Cyclic GFR-binding peptide
  MOD_RES (2)..(3)..(35): Xaa is C or S

SEQ ID NO: 82040 - protein, 28 aa, Artificial Sequence
  Cyclic GFR-binding peptide
VHHEPLPVVYYEYVRKKPKLEQLSNRLE

SEQ ID NO: 82041 - protein, 24 aa, Artificial Sequence
  Cyclic GFR-binding peptide
SQDLRPVQIRKIIGKTPKIKKATV

SEQ ID NO: 82042 - protein, 25 aa, Artificial Sequence
  Cyclic GFR-binding peptide
ELSNITMQIMDENEKVVIGEMSDMV

SEQ ID NO: 82043 - protein, 36 aa, Artificial Sequence; identical to SEQ ID NO: 30460
  Cyclic GFR-binding peptide
  MOD_RES (36)..(36): Xaa is C or S

SEQ ID NO: 82044 - protein, 30 aa, Artificial Sequence
  Cyclic GFR-binding peptide
PTQVQLEPLTVLYYEIVRKKPIFEQLSNTL

SEQ ID NO: 82045 - protein, 29 aa, Artificial Sequence
  Cyclic GFR-binding peptide
  MOD_RES (27)..(29): Xaa is C or S
RPVQVRKIDDSSNVIKKATVNMVVRSXGX

SEQ ID NO: 82046 - protein, 31 aa, Artificial Sequence
  Cyclic GFR-binding peptide
  MOD_RES (28)..(30): Xaa is C or S
LRSVKVAKVDDSSNVIKEVQVNMVVRSXGXH

SEQ ID NO: 82047 - protein, 39 aa, Artificial Sequence; identical to SEQ ID NO: 30464
  Cyclic GFR-binding peptide
  MOD_RES (2)..(39): Xaa is C or S

SEQ ID NO: 82048 - protein, 30 aa, Artificial Sequence
  Cyclic GFR-binding peptide
  MOD_RES (2)..(3): Xaa is C or S
PXXAPTKLRPVQVRKIDDSSNVIKKATVNM

SEQ ID NO: 82049 - protein, 36 aa, Artificial Sequence; identical to SEQ ID NO: 30468
  Cyclic GFR-binding peptide
  MOD_RES (3)..(4)..(35): Xaa is C or S

SEQ ID NO: 82050 - protein, 34 aa, Artificial Sequence; identical to SEQ ID NO: 30471
  Cyclic GFR-binding peptide
  MOD_RES (2)..(3): Xaa is C or S

SEQ ID NO: 82051 - protein, 36 aa, Artificial Sequence; identical to SEQ ID NO: 30477
  Cyclic GFR-binding peptide
  MOD_RES (3)..(4)..(36): Xaa is C or S

SEQ ID NO: 82052 - protein, 25 aa, Artificial Sequence
  Cyclic GFR-binding peptide
TELSNITMQIMDEYDKVVIGEMSEM

SEQ ID NO: 82053 - protein, 31 aa, Artificial Sequence
  Cyclic GFR-binding peptide
  MOD_RES (5)..(6): Xaa is C or S
IPKAXXVPTELRPVQMRKIDEYDKVVKKATV

SEQ ID NO: 82054 - protein, 26 aa, Artificial Sequence
  Cyclic GFR-binding peptide
APTKLSNITVQIMDDSSNVIIGEMSN

SEQ ID NO: 82055 - protein, 31 aa, Artificial Sequence
  Cyclic GFR-binding peptide
  MOD_RES (30)..(30): Xaa is C or S
TQLRSVKVAKVDDSSNVIKEVQVNMVVRAXG

SEQ ID NO: 82056 - protein, 31 aa, Artificial Sequence
  Cyclic GFR-binding peptide
  MOD_RES (4)..(5): Xaa is C or S
PKPXXAPTQLSNITVQIMDDSSNVIIGEMSN

SEQ ID NO: 82057 - protein, 38 aa, Artificial Sequence; identical to SEQ ID NO: 30480
  Cyclic GFR-binding peptide
  MOD_RES (2)..(3)..(35)..(37): Xaa is C or S

SEQ ID NO: 82058 - protein, 39 aa, Artificial Sequence; identical to SEQ ID NO: 30484
  Cyclic GFR-binding peptide
  MOD_RES (6)..(7)..(38): Xaa is C or S

SEQ ID NO: 82059 - protein, 29 aa, Artificial Sequence
  Cyclic GFR-binding peptide
  MOD_RES (29)..(29): Xaa is C or S
QLSNITVQIMDDSSNVIIGEMSNMVVRAX

SEQ ID NO: 82060 - protein, 22 aa, Artificial Sequence
  Cyclic GFR-binding peptide
EPLTMLYYRIKPHQGQHEQLSN

SEQ ID NO: 82061 - protein, 29 aa, Artificial Sequence
  Cyclic GFR-binding peptide
PTELSNITMQIMDEYDKVVIGEMSEMVVE

SEQ ID NO: 82062 - protein, 36 aa, Artificial Sequence; identical to SEQ ID NO: 30488
  Cyclic GFR-binding peptide
  MOD_RES (1)..(33)..(35): Xaa is C or S

SEQ ID NO: 82063 - protein, 32 aa, Artificial Sequence
  Cyclic GFR-binding peptide
  MOD_RES (4)..(5): Xaa is C or S
PKPXXAPTKLRSVKVAKVDDSSNVIKEVQVNM

SEQ ID NO: 82064 - protein, 29 aa, Artificial Sequence
  Cyclic GFR-binding peptide
  MOD_RES (1)..(2): Xaa is C or S
XXVSQDLRSVKIAKVIGKTPKIKEVQVMI

SEQ ID NO: 82065 - protein, 27 aa, Artificial Sequence
  Cyclic GFR-binding peptide
PTKLRSVKVAKVDDSSNVIKEVQVNMV

SEQ ID NO: 82066 - protein, 27 aa, Artificial Sequence
  Cyclic GFR-binding peptide
ELSNITMQIMDEYDKVVIGEMSEMVVE

SEQ ID NO: 82067 - protein, 28 aa, Artificial Sequence
  Cyclic GFR-binding peptide
VPTELRPVQMRKIDENEKVVKKATVDMV

SEQ ID NO: 82068 - protein, 32 aa, Artificial Sequence
  Cyclic GFR-binding peptide
  MOD_RES (4)..(5): Xaa is C or S
ASPXXVPQDLSNITIQIMVGRTPKVIGEMSMV

SEQ ID NO: 82069 - protein, 38 aa, Artificial Sequence; identical to SEQ ID NO: 30498
  Cyclic GFR-binding peptide
  MOD_RES (6)..(7)..(38): Xaa is C or S

SEQ ID NO: 82070 - protein, 30 aa, Artificial Sequence
  Cyclic GFR-binding peptide
  MOD_RES (27)..(29): Xaa is C or S
RSVKVAKVDDSSNVIKEVQVNMVVRAXGXH

SEQ ID NO: 82071 - protein, 27 aa, Artificial Sequence
  Cyclic GFR-binding peptide
  MOD_RES (1)..(1): Xaa is C or S
XVPTELSNITMQIMDEYDKVVIGEMSE

SEQ ID NO: 82072 - protein, 36 aa, Artificial Sequence; identical to SEQ ID NO: 30500
  Cyclic GFR-binding peptide
  MOD_RES (36)..(36): Xaa is C or S

SEQ ID NO: 82073 - protein, 41 aa, Artificial Sequence; identical to SEQ ID NO: 30501
  Cyclic GFR-binding peptide
  MOD_RES (6)..(40): Xaa is C or S

SEQ ID NO: 82074 - protein, 28 aa, Artificial Sequence
  Cyclic GFR-binding peptide
  MOD_RES (1)..(2): Xaa is C or S
XXVPTELSNITMQIMDENEKVVIGEMSD

SEQ ID NO: 82075 - protein, 38 aa, Artificial Sequence; identical to SEQ ID NO: 30504
  Cyclic GFR-binding peptide
  MOD_RES (2)..(2): Xaa is C or S

SEQ ID NO: 82076 - protein, 44 aa, Artificial Sequence; identical to SEQ ID NO: 30509
  Cyclic GFR-binding peptide
  MOD_RES (5)..(42)..(44): Xaa is C or S

SEQ ID NO: 82077 - protein, 27 aa, Artificial Sequence
  Cyclic GFR-binding peptide
PTQLRPVQVRKIDDSSNVIKKATVNMV

SEQ ID NO: 82078 - protein, 30 aa, Artificial Sequence
  Cyclic GFR-binding peptide
  MOD_RES (1)..(1): Xaa is C or S
XAPTKLRSVKVAKVDDSSNVIKEVQVNMVV

SEQ ID NO: 82079 - protein, 38 aa, Artificial Sequence; identical to SEQ ID NO: 30511
  Cyclic GFR-binding peptide
  MOD_RES (5)..(6)..(38): Xaa is C or S

SEQ ID NO: 82080 - protein, 29 aa, Artificial Sequence
  Cyclic GFR-binding peptide
VPTELSNITMQIMDENEKVVIGEMSDMVV

SEQ ID NO: 82081 - protein, 29 aa, Artificial Sequence
  Cyclic GFR-binding peptide
EEEPLTMLYYRIKPHQGQHEQLSNFLQHN

SEQ ID NO: 82082 - protein, 27 aa, Artificial Sequence
  Cyclic GFR-binding peptide
TKLRPVQVRKIDDSSNVIKKATVNMVV

SEQ ID NO: 82083 - protein, 28 aa, Artificial Sequence
  Cyclic GFR-binding peptide
PQALRPVQIRKIVGRKPKVKKATVMIVR

SEQ ID NO: 82084 - protein, 24 aa, Artificial Sequence
  Cyclic GFR-binding peptide
LRSVKVAKVDDSSNVIKEVQVNMV

SEQ ID NO: 82085 - protein, 23 aa, Artificial Sequence
  Cyclic GFR-binding peptide
EPLPVVYYEIVRKKPIFEQLSNT

SEQ ID NO: 82086 - protein, 26 aa, Artificial Sequence
  Cyclic GFR-binding peptide
PTQLSNITVQIMDDSSNVIIGEMSNM

SEQ ID NO: 82087 - protein, 33 aa, Artificial Sequence
  Cyclic GFR-binding peptide
  MOD_RES (4)..(5): Xaa is C or S
AAPXXVPQALSNITIQIMVGRKPKVIGEMSMIV

SEQ ID NO: 82088 - protein, 31 aa, Artificial Sequence
  Cyclic GFR-binding peptide
  MOD_RES (30)..(30): Xaa is C or S
TKLRSVKVAKVDDSSNVIKEVQVNMVVRSXG

SEQ ID NO: 82089 - protein, 29 aa, Artificial Sequence
  Cyclic GFR-binding peptide
  MOD_RES (29)..(29): Xaa is C or S
ELSNITMQIMDENEKVVIGEMSDMVVEGX

SEQ ID NO: 82090 - protein, 32 aa, Artificial Sequence
  Cyclic GFR-binding peptide
  MOD_RES (2)..(2): Xaa is C or S
QXRPTQVQLEPLPVVYYEIVRKKPIFEQLSNT

SEQ ID NO: 82091 - protein, 34 aa, Artificial Sequence
  Cyclic GFR-binding peptide
  MOD_RES (4)..(5): Xaa is C or S
PKAXXVPTELSNITMQIMDENEKVVIGEMSDMVV

SEQ ID NO: 82092 - protein, 28 aa, Artificial Sequence
  Cyclic GFR-binding peptide
LEPLPVVYYEIVRKKPIFEQLSNTLEDH

SEQ ID NO: 82093 - protein, 31 aa, Artificial Sequence
  Cyclic GFR-binding peptide
  MOD_RES (2)..(3): Xaa is C or S
PXXVSQDLRPVQIRKIIGKTPKIKKATVMIV

SEQ ID NO: 82094 - protein, 27 aa, Artificial Sequence
  Cyclic GFR-binding peptide
DLRPVQIRKIVGRTPKVKKATVMVVKS

SEQ ID NO: 82095 - protein, 40 aa, Artificial Sequence; identical to SEQ ID NO: 30533
  Cyclic GFR-binding peptide
  MOD_RES (6)..(7)..(39): Xaa is C or S

SEQ ID NO: 82096 - protein, 27 aa, Artificial Sequence
  Cyclic GFR-binding peptide
PQDLSNITIQIMVGRTPKVIGEMSMVV

SEQ ID NO: 82097 - protein, 23 aa, Artificial Sequence
  Cyclic GFR-binding peptide
TELRSVKMAKVDEYDKVVKEVQV

SEQ ID NO: 82098 - protein, 33 aa, Artificial Sequence; identical to SEQ ID NO: 30544
  Cyclic GFR-binding peptide
  MOD_RES (2)..(3): Xaa is C or S

SEQ ID NO: 82099 - protein, 38 aa, Artificial Sequence; identical to SEQ ID NO: 30543
  Cyclic GFR-binding peptide
  MOD_RES (5)..(6)..(38): Xaa is C or S

SEQ ID NO: 82100 - protein, 35 aa, Artificial Sequence
  Cyclic GFR-binding peptide
  MOD_RES (6)..(7): Xaa is C or S
KIPKAXXVPTELSNITMQIMDENEKVVIGEMSDMV

SEQ ID NO: 82101 - protein, 34 aa, Artificial Sequence
  Cyclic GFR-binding peptide
  MOD_RES (6)..(7): Xaa is C or S
KIPKAXXVPTELSNITMQIMDENEKVVIGEMSDM

SEQ ID NO: 82102 - protein, 26 aa, Artificial Sequence
  Cyclic GFR-binding peptide
EEPLTMLYYRIKPHQGQHEQLSNFLQ

SEQ ID NO: 82103 - protein, 41 aa, Artificial Sequence; identical to SEQ ID NO: 30546
  Cyclic GFR-binding peptide
  MOD_RES (6)..(7)..(38)..(40): Xaa is C or S

SEQ ID NO: 82104 - protein, 21 aa, Artificial Sequence
  Cyclic GFR-binding peptide
LRPVQMRKIDENEKVVKKATV

SEQ ID NO: 82105 - protein, 30 aa, Artificial Sequence
  Cyclic GFR-binding peptide
  MOD_RES (5)..(5): Xaa is C or S
TKPTXAPTKLSNITVQIMDDSSNVIIGEMS

SEQ ID NO: 82106 - protein, 41 aa, Artificial Sequence; identical to SEQ ID NO: 30549
  Cyclic GFR-binding peptide
  MOD_RES (5)..(6)..(38)..(40): Xaa is C or S

SEQ ID NO: 82107 - protein, 25 aa, Artificial Sequence
  Cyclic GFR-binding peptide
KLSNITVQIMDDSSNVIIGEMSNMV

SEQ ID NO: 82108 - protein, 39 aa, Artificial Sequence; identical to SEQ ID NO: 30556
  Cyclic GFR-binding peptide
  MOD_RES (3)..(4)..(36)..(38): Xaa is C or S

SEQ ID NO: 82109 - protein, 41 aa, Artificial Sequence; identical to SEQ ID NO: 30557
  Cyclic GFR-binding peptide
  MOD_RES (1)..(38)..(40): Xaa is C or S

SEQ ID NO: 82110 - protein, 34 aa, Artificial Sequence; identical to SEQ ID NO: 30559
  Cyclic GFR-binding peptide
  MOD_RES (32)..(34): Xaa is C or S

SEQ ID NO: 82111 - protein, 32 aa, Artificial Sequence; identical to SEQ ID NO: 30563
  Cyclic GFR-binding peptide
  MOD_RES (1)..(2): Xaa is C or S

SEQ ID NO: 82112 - protein, 28 aa, Artificial Sequence
  Cyclic GFR-binding peptide
  MOD_RES (2)..(3): Xaa is C or S
PXXAPTQLRSVKVAKVDDSSNVIKEVQV

SEQ ID NO: 82113 - protein, 37 aa, Artificial Sequence; identical to SEQ ID NO: 30564
  Cyclic GFR-binding peptide
  MOD_RES (1)..(1): Xaa is C or S

SEQ ID NO: 82114 - protein, 40 aa, Artificial Sequence; identical to SEQ ID NO: 30566
  Cyclic GFR-binding peptide
  MOD_RES (6)..(7)..(38)..(40): Xaa is C or S

SEQ ID NO: 82115 - protein, 28 aa, Artificial Sequence
  Cyclic GFR-binding peptide
  MOD_RES (1)..(1): Xaa is C or S
XVSQDLRSVKIAKVIGKTPKIKEVQVMI

SEQ ID NO: 82116 - protein, 31 aa, Artificial Sequence
  Cyclic GFR-binding peptide
  MOD_RES (4)..(4): Xaa is C or S
GLEXVPTEEEPLTMLYYRIKPHQGQHEQLSN

SEQ ID NO: 82117 - protein, 38 aa, Artificial Sequence; identical to SEQ ID NO: 30568
  Cyclic GFR-binding peptide
  MOD_RES (3)..(4)..(36)..(38): Xaa is C or S

SEQ ID NO: 82118 - protein, 30 aa, Artificial Sequence
  Cyclic GFR-binding peptide
  MOD_RES (1)..(1): Xaa is C or S
XAPTQLRPVQVRKIDDSSNVIKKATVNMVV

SEQ ID NO: 82119 - protein, 29 aa, Artificial Sequence
  Cyclic GFR-binding peptide
  MOD_RES (1)..(2): Xaa is C or S
XXVPQDLRSVKIAKVVGRTPKVKEVQVMV

SEQ ID NO: 82120 - protein, 35 aa, Artificial Sequence; identical to SEQ ID NO: 30570
  Cyclic GFR-binding peptide
  MOD_RES (2)..(2): Xaa is C or S

SEQ ID NO: 82121 - protein, 27 aa, Artificial Sequence
  Cyclic GFR-binding peptide
QALRPVQIRKIVGRKPKVKKATVMIVR

SEQ ID NO: 82122 - protein, 34 aa, Artificial Sequence; identical to SEQ ID NO: 30574
  Cyclic GFR-binding peptide
  MOD_RES (1)..(2)..(33): Xaa is C or S

SEQ ID NO: 82123 - protein, 39 aa, Artificial Sequence; identical to SEQ ID NO: 30575
  Cyclic GFR-binding peptide
  MOD_RES (7)..(39): Xaa is C or S

SEQ ID NO: 82124 - protein, 35 aa, Artificial Sequence; identical to SEQ ID NO: 30577
  Cyclic GFR-binding peptide
  MOD_RES (3)..(4)..(35): Xaa is C or S

SEQ ID NO: 82125 - protein, 26 aa, Artificial Sequence
  Cyclic GFR-binding peptide
HEPLPVVYYEYVRKKPKLEQLSNRLE

SEQ ID NO: 82126 - protein, 33 aa, Artificial Sequence; identical to SEQ ID NO: 30580
  Cyclic GFR-binding peptide
  MOD_RES (1)..(2)..(33): Xaa is C or S

SEQ ID NO: 82127 - protein, 34 aa, Artificial Sequence
  Cyclic GFR-binding peptide
  MOD_RES (33)..(33): Xaa is C or S
VHHEPLPVVYYEYVRKKPKLEQLSNRLEEHLEXA

SEQ ID NO: 82128 - protein, 34 aa, Artificial Sequence
  Cyclic GFR-binding peptide
  MOD_RES (6)..(7): Xaa is C or S
ASAAPXXVPQALRSVKIAKVVGRKPKVKEVQVMI

SEQ ID NO: 82129 - protein, 30 aa, Artificial Sequence
  Cyclic GFR-binding peptide
  MOD_RES (30)..(30): Xaa is C or S
PQDLRSVKIAKVVGRTPKVKEVQVMVVKSX

SEQ ID NO: 82130 - protein, 34 aa, Artificial Sequence; identical to SEQ ID NO: 30584
  Cyclic GFR-binding peptide
  MOD_RES (1)..(32)..(34): Xaa is C or S

SEQ ID NO: 82131 - protein, 32 aa, Artificial Sequence; identical to SEQ ID NO: 30586
  Cyclic GFR-binding peptide
  MOD_RES (1)..(32): Xaa is C or S

SEQ ID NO: 82132 - protein, 25 aa, Artificial Sequence
  Cyclic GFR-binding peptide
VPQDLRSVKIAKVVGRTPKVKEVQV

SEQ ID NO: 82133 - protein, 28 aa, Artificial Sequence
  Cyclic GFR-binding peptide
QALSNITIQIMVGRKPKVIGEMSMIVRS

SEQ ID NO: 82134 - protein, 39 aa, Artificial Sequence; identical to SEQ ID NO: 30592
  Cyclic GFR-binding peptide
  MOD_RES (5)..(6)..(38): Xaa is C or S

SEQ ID NO: 82135 - protein, 40 aa, Artificial Sequence; identical to SEQ ID NO: 30593
  Cyclic GFR-binding peptide
  MOD_RES (7)..(39): Xaa is C or S

SEQ ID NO: 82136 - protein, 31 aa, Artificial Sequence
  Cyclic GFR-binding peptide
  MOD_RES (5)..(5): Xaa is C or S
TKPTXAPTKLSNITVQIMDDSSNVIIGEMSN

SEQ ID NO: 82137 - protein, 32 aa, Artificial Sequence
  Cyclic GFR-binding peptide
  MOD_RES (2)..(2): Xaa is C or S
KXQPSRVHHEPLTVLYYEYVRKKPKLEQLSNR

SEQ ID NO: 82138 - protein, 41 aa, Artificial Sequence; identical to SEQ ID NO: 30598
  Cyclic GFR-binding peptide
  MOD_RES (4)..(41): Xaa is C or S

SEQ ID NO: 82139 - protein, 30 aa, Artificial Sequence
  Cyclic GFR-binding peptide
  MOD_RES (2)..(3): Xaa is C or S
AXXVPTELRPVQMRKIDENEKVVKKATVDM

SEQ ID NO: 82140 - protein, 30 aa, Artificial Sequence
  Cyclic GFR-binding peptide
  MOD_RES (27)..(29): Xaa is C or S
LRPVQIRKIVGRKPKVKKATVMIVRSXKXS

SEQ ID NO: 82141 - protein, 37 aa, Artificial Sequence
  Cyclic GFR-binding peptide
  MOD_RES (5)..(5): Xaa is C or S
RNVQXRPTQVQLEPLTVLYYEIVRKKPIFEQLSNTLE

SEQ ID NO: 82142 - protein, 30 aa, Artificial Sequence
  Cyclic GFR-binding peptide
  MOD_RES (3)..(4): Xaa is C or S
SPXXVSQDLRPVQIRKIIGKTPKIKKATVM

SEQ ID NO: 82143 - protein, 36 aa, Artificial Sequence; identical to SEQ ID NO: 30604
  Cyclic GFR-binding peptide
  MOD_RES (4)..(5)..(36): Xaa is C or S

SEQ ID NO: 82144 - protein, 27 aa, Artificial Sequence
  Cyclic GFR-binding peptide
  MOD_RES (1)..(2): Xaa is C or S
XXVPTELRSVKMAKVDENEKVVKEVQV

SEQ ID NO: 82145 - protein, 27 aa, Artificial Sequence
  Cyclic GFR-binding peptide
  MOD_RES (27)..(27): Xaa is C or S
RSVKMAKVDENEKVVKEVQVDMVVEGX

SEQ ID NO: 82146 - protein, 23 aa, Artificial Sequence
  Cyclic GFR-binding peptide
DLRSVKIAKVVGRTPKVKEVQVM

SEQ ID NO: 82147 - protein, 35 aa, Artificial Sequence; identical to SEQ ID NO: 30608
  Cyclic GFR-binding peptide
  MOD_RES (1)..(32)..(34): Xaa is C or S

SEQ ID NO: 82148 - protein, 34 aa, Artificial Sequence; identical to SEQ ID NO: 30609
  Cyclic GFR-binding peptide
  MOD_RES (1)..(32)..(34): Xaa is C or S

SEQ ID NO: 82149 - protein, 43 aa, Artificial Sequence; identical to SEQ ID NO: 30611
  Cyclic GFR-binding peptide
  MOD_RES (3)..(40)..(42): Xaa is C or S

SEQ ID NO: 82150 - protein, 23 aa, Artificial Sequence
  Cyclic GFR-binding peptide
LRSVKIAKVIGKTPKIKEVQVMI

SEQ ID NO: 82151 - protein, 40 aa, Artificial Sequence; identical to SEQ ID NO: 30612
  Cyclic GFR-binding peptide
  MOD_RES (4)..(5)..(37)..(39): Xaa is C or S

SEQ ID NO: 82152 - protein, 35 aa, Artificial Sequence
  Cyclic GFR-binding peptide
  MOD_RES (2)..(2): Xaa is C or S
QXRPTQVQLEPLTVLYYEIVRKKPIFEQLSNTLED

SEQ ID NO: 82153 - protein, 30 aa, Artificial Sequence
  Cyclic GFR-binding peptide
  MOD_RES (30)..(30): Xaa is C or S
TELRPVQMRKIDENEKVVKKATVDMVVEGX

SEQ ID NO: 82154 - protein, 33 aa, Artificial Sequence; identical to SEQ ID NO: 30616
  Cyclic GFR-binding peptide
  MOD_RES (1)..(2): Xaa is C or S

SEQ ID NO: 82155 - protein, 30 aa, Artificial Sequence
  Cyclic GFR-binding peptide
QLEPLPVVYYEIVRKKPIFEQLSNTLEDHL

SEQ ID NO: 82156 - protein, 33 aa, Artificial Sequence
  Cyclic GFR-binding peptide
  MOD_RES (3)..(4): Xaa is C or S
KAXXVPTELRSVKMAKVDEYDKVVKEVQVEMVV

SEQ ID NO: 82157 - protein, 44 aa, Artificial Sequence; identical to SEQ ID NO: 30618
  Cyclic GFR-binding peptide
  MOD_RES (4)..(41)..(43): Xaa is C or S

SEQ ID NO: 82158 - protein, 33 aa, Artificial Sequence
  Cyclic GFR-binding peptide
  MOD_RES (4)..(4): Xaa is C or S
KPTXAPTKLSNITVQIMDDSSNVIIGEMSNMVV

SEQ ID NO: 82159 - protein, 23 aa, Artificial Sequence
  Cyclic GFR-binding peptide
ELRPVQMRKIDENEKVVKKATVD

SEQ ID NO: 82160 - protein, 34 aa, Artificial Sequence
  Cyclic GFR-binding peptide
  MOD_RES (5)..(6): Xaa is C or S
IPKAXXVPTELSNITMQIMDENEKVVIGEMSDMV

SEQ ID NO: 82161 - protein, 36 aa, Artificial Sequence; identical to SEQ ID NO: 30624
  Cyclic GFR-binding peptide
  MOD_RES (3)..(3): Xaa is C or S

SEQ ID NO: 82162 - protein, 40 aa, Artificial Sequence; identical to SEQ ID NO: 30625
  Cyclic GFR-binding peptide
  MOD_RES (5)..(6)..(38)..(40): Xaa is C or S

SEQ ID NO: 82163 - protein, 20 aa, Artificial Sequence
  Cyclic GFR-binding peptide
RSVKIAKVIGKTPKIKEVQV

SEQ ID NO: 82164 - protein, 34 aa, Artificial Sequence
  Cyclic GFR-binding peptide
  MOD_RES (2)..(2): Xaa is C or S
KXQPSRVHHEPLPVVYYEYVRKKPKLEQLSNRLE

SEQ ID NO: 82165 - protein, 24 aa, Artificial Sequence
  Cyclic GFR-binding peptide
QALSNITIQIMVGRKPKVIGEMSM

SEQ ID NO: 82166 - protein, 28 aa, Artificial Sequence
  Cyclic GFR-binding peptide
PQALRSVKIAKVVGRKPKVKEVQVMIVR

SEQ ID NO: 82167 - protein, 29 aa, Artificial Sequence
  Cyclic GFR-binding peptide
  MOD_RES (2)..(3): Xaa is C or S
PXXVSQDLSNITIQIMIGKTPKIIGEMSM

SEQ ID NO: 82168 - protein, 30 aa, Artificial Sequence
  Cyclic GFR-binding peptide
  MOD_RES (27)..(29): Xaa is C or S
LRSVKIAKVVGRKPKVKEVQVMIVRSXKXS

SEQ ID NO: 82169 - protein, 38 aa, Artificial Sequence; identical to SEQ ID NO: 30637
  Cyclic GFR-binding peptide
  MOD_RES (1)..(38): Xaa is C or S

SEQ ID NO: 82170 - protein, 30 aa, Artificial Sequence
  Cyclic GFR-binding peptide
QPSRVHHEPLPVVYYEYVRKKPKLEQLSNR

SEQ ID NO: 82171 - protein, 35 aa, Artificial Sequence; identical to SEQ ID NO: 30640
  Cyclic GFR-binding peptide
  MOD_RES (1)..(2)..(34): Xaa is C or S

SEQ ID NO: 82172 - protein, 29 aa, Artificial Sequence
  Cyclic GFR-binding peptide
APTQLRPVQVRKIDDSSNVIKKATVNMVV

SEQ ID NO: 82173 - protein, 35 aa, Artificial Sequence; identical to SEQ ID NO: 30643
  Cyclic GFR-binding peptide
  MOD_RES (4)..(4): Xaa is C or S

SEQ ID NO: 82174 - protein, 31 aa, Artificial Sequence
  Cyclic GFR-binding peptide
  MOD_RES (2)..(3): Xaa is C or S
PXXVSQDLSNITIQIMIGKTPKIIGEMSMIV

SEQ ID NO: 82175 - protein, 31 aa, Artificial Sequence
  Cyclic GFR-binding peptide
  MOD_RES (3)..(3): Xaa is C or S
PTXAPTKLSNITVQIMDDSSNVIIGEMSNMV

SEQ ID NO: 82176 - protein, 30 aa, Artificial Sequence
  Cyclic GFR-binding peptide
  MOD_RES (4)..(4): Xaa is C or S
KPTXAPTKLRPVQVRKIDDSSNVIKKATVN

SEQ ID NO: 82177 - protein, 38 aa, Artificial Sequence; identical to SEQ ID NO: 30646
  Cyclic GFR-binding peptide
  MOD_RES (6)..(7): Xaa is C or S

SEQ ID NO: 82178 - protein, 37 aa, Artificial Sequence; identical to SEQ ID NO: 30652
  Cyclic GFR-binding peptide
  MOD_RES (1)..(2)..(34)..(36): Xaa is C or S

SEQ ID NO: 82179 - protein, 27 aa, Artificial Sequence
  Cyclic GFR-binding peptide
  MOD_RES (27)..(27): Xaa is C or S
LRSVKIAKVIGKTPKIKEVQVMIVKSX

SEQ ID NO: 82180 - protein, 30 aa, Artificial Sequence
  Cyclic GFR-binding peptide
  MOD_RES (3)..(3): Xaa is C or S
LEXVPTEEEPLTMLYYRIKPHQGQHEQLSN

SEQ ID NO: 82181 - protein, 28 aa, Artificial Sequence
  Cyclic GFR-binding peptide
QLRPVQVRKIDDSSNVIKKATVNMVVRA

SEQ ID NO: 82182 - protein, 36 aa, Artificial Sequence; identical to SEQ ID NO: 30655
  Cyclic GFR-binding peptide
  MOD_RES (1)..(2)..(33)..(35): Xaa is C or S

SEQ ID NO: 82183 - protein, 24 aa, Artificial Sequence
  Cyclic GFR-binding peptide
SNITIQIMVGRKPKVIGEMSMIVR

SEQ ID NO: 82184 - protein, 32 aa, Artificial Sequence
  Cyclic GFR-binding peptide
  MOD_RES (31)..(31): Xaa is C or S
EEEPLTMLYYRIKPHQGQHEQLSNFLQHNKXE

SEQ ID NO: 82185 - protein, 37 aa, Artificial Sequence; identical to SEQ ID NO: 30656
  Cyclic GFR-binding peptide
  MOD_RES (4)..(5)..(37): Xaa is C or S

SEQ ID NO: 82186 - protein, 25 aa, Artificial Sequence
  Cyclic GFR-binding peptide
SNITMQIMDENEKVVIGEMSDMVVE

SEQ ID NO: 82187 - protein, 30 aa, Artificial Sequence
  Cyclic GFR-binding peptide
  MOD_RES (28)..(30): Xaa is C or S
ALRPVQIRKIVGRKPKVKKATVMIVRSXKX

SEQ ID NO: 82188 - protein, 35 aa, Artificial Sequence
  Cyclic GFR-binding peptide
  MOD_RES (32)..(34): Xaa is C or S
QLEPLPVVYYEIVRKKPIFEQLSNTLEDHLAXKXE

SEQ ID NO: 82189 - protein, 33 aa, Artificial Sequence; identical to SEQ ID NO: 30664
  Cyclic GFR-binding peptide
  MOD_RES (1)..(2): Xaa is C or S

SEQ ID NO: 82190 - protein, 28 aa, Artificial Sequence
  Cyclic GFR-binding peptide
EEEPLPMVYYRIKPHQGQHEQLSNFLQH

SEQ ID NO: 82191 - protein, 24 aa, Artificial Sequence
  Cyclic GFR-binding peptide
EPLPVVYYEIVRKKPIFEQLSNTL

SEQ ID NO: 82192 - protein, 32 aa, Artificial Sequence
  Cyclic GFR-binding peptide
  MOD_RES (5)..(6): Xaa is C or S
VPKPXXAPTQLRPVQVRKIDDSSNVIKKATVN

SEQ ID NO: 82193 - protein, 28 aa, Artificial Sequence
  Cyclic GFR-binding peptide
  MOD_RES (28)..(28): Xaa is C or S
LRSVKVAKVDDSSNVIKEVQVNMVVRSX

SEQ ID NO: 82194 - protein, 28 aa, Artificial Sequence
  Cyclic GFR-binding peptide
SQDLRPVQIRKIIGKTPKIKKATVMIVK

SEQ ID NO: 82195 - protein, 37 aa, Artificial Sequence; identical to SEQ ID NO: 30671
  Cyclic GFR-binding peptide
  MOD_RES (4)..(5)..(36): Xaa is C or S

SEQ ID NO: 82196 - protein, 29 aa, Artificial Sequence
  Cyclic GFR-binding peptide
  MOD_RES (28)..(28): Xaa is C or S
LRSVKMAKVDENEKVVKEVQVDMVVEGXG

SEQ ID NO: 82197 - protein, 31 aa, Artificial Sequence; identical to SEQ ID NO: 30674
  Cyclic GFR-binding peptide

SEQ ID NO: 82198 - protein, 35 aa, Artificial Sequence; identical to SEQ ID NO: 30679
  Cyclic GFR-binding peptide
  MOD_RES (3)..(4): Xaa is C or S

SEQ ID NO: 82199 - protein, 23 aa, Artificial Sequence
  Cyclic GFR-binding peptide
ALRSVKIAKVVGRKPKVKEVQVM

SEQ ID NO: 82200 - protein, 37 aa, Artificial Sequence; identical to SEQ ID NO: 30680
  Cyclic GFR-binding peptide
  MOD_RES (3)..(4)..(35)..(37): Xaa is C or S

SEQ ID NO: 82201 - protein, 28 aa, Artificial Sequence
  Cyclic GFR-binding peptide
KLSNITVQIMDDSSNVIIGEMSNMVVRS

SEQ ID NO: 82202 - protein, 34 aa, Artificial Sequence; identical to SEQ ID NO: 30684
  Cyclic GFR-binding peptide
  MOD_RES (1)..(2)..(33): Xaa is C or S

SEQ ID NO: 82203 - protein, 37 aa, Artificial Sequence; identical to SEQ ID NO: 30685
  Cyclic GFR-binding peptide
  MOD_RES (5)..(6)..(37): Xaa is C or S

SEQ ID NO: 82204 - protein, 27 aa, Artificial Sequence
  Cyclic GFR-binding peptide
PQALRSVKIAKVVGRKPKVKEVQVMIV

SEQ ID NO: 82205 - protein, 40 aa, Artificial Sequence; identical to SEQ ID NO: 30689
  Cyclic GFR-binding peptide
  MOD_RES (5)..(6)..(37)..(39): Xaa is C or S

SEQ ID NO: 82206 - protein, 25 aa, Artificial Sequence
  Cyclic GFR-binding peptide
LRSVKIAKVIGKTPKIKEVQVMIVK

SEQ ID NO: 82207 - protein, 31 aa, Artificial Sequence
  Cyclic GFR-binding peptide
  MOD_RES (1)..(1): Xaa is C or S
XRPTQVQLEPLPVVYYEIVRKKPIFEQLSNT

SEQ ID NO: 82208 - protein, 33 aa, Artificial Sequence
  Cyclic GFR-binding peptide
  MOD_RES (31)..(33): Xaa is C or S
PTELSNITMQIMDEYDKVVIGEMSEMVVEGXGX

SEQ ID NO: 82209 - protein, 32 aa, Artificial Sequence
  Cyclic GFR-binding peptide
  MOD_RES (2)..(3): Xaa is C or S
PXXAPTQLSNITVQIMDDSSNVIIGEMSNMVV

SEQ ID NO: 82210 - protein, 32 aa, Artificial Sequence
  Cyclic GFR-binding peptide
  MOD_RES (29)..(31): Xaa is C or S
ELRSVKMAKVDEYDKVVKEVQVEMVVEGXGXR

SEQ ID NO: 82211 - protein, 34 aa, Artificial Sequence; identical to SEQ ID NO: 30702
  Cyclic GFR-binding peptide
  MOD_RES (2)..(3)..(34): Xaa is C or S

SEQ ID NO: 82212 - protein, 23 aa, Artificial Sequence
  Cyclic GFR-binding peptide
TELRPVQMRKIDEYDKVVKKATV

SEQ ID NO: 82213 - protein, 37 aa, Artificial Sequence
  Cyclic GFR-binding peptide
  MOD_RES (6)..(6): Xaa is C or S
DEGLEXVPTEEEPLPMVYYRIKPHQGQHEQLSNFLQH

SEQ ID NO: 82214 - protein, 36 aa, Artificial Sequence
  Cyclic GFR-binding peptide
  MOD_RES (3)..(3): Xaa is C or S
VKXQPSRVHHEPLTVLYYEYVRKKPKLEQLSNRLEE

SEQ ID NO: 82215 - protein, 27 aa, Artificial Sequence
  Cyclic GFR-binding peptide
  MOD_RES (1)..(2): Xaa is C or S
XXVPQDLSNITIQIMVGRTPKVIGEMS

SEQ ID NO: 82216 - protein, 30 aa, Artificial Sequence
  Cyclic GFR-binding peptide
  MOD_RES (2)..(3): Xaa is C or S
AXXVPTELSNITMQIMDEYDKVVIGEMSEM

SEQ ID NO: 82217 - protein, 27 aa, Artificial Sequence
  Cyclic GFR-binding peptide
EPLPMVYYRIKPHQGQHEQLSNFLQHN

SEQ ID NO: 82218 - protein, 27 aa, Artificial Sequence
  Cyclic GFR-binding peptide
QDLRPVQIRKIIGKTPKIKKATVMIVK

SEQ ID NO: 82219 - protein, 33 aa, Artificial Sequence
  Cyclic GFR-binding peptide
  MOD_RES (6)..(7): Xaa is C or S
KIPKAXXVPTELSNITMQIMDENEKVVIGEMSD

SEQ ID NO: 82220 - protein, 31 aa, Artificial Sequence; identical to SEQ ID NO: 30710
  Cyclic GFR-binding peptide

SEQ ID NO: 82221 - protein, 20 aa, Artificial Sequence
  Cyclic GFR-binding peptide
RPVQMRKIDEYDKVVKKATV

SEQ ID NO: 82222 - protein, 24 aa, Artificial Sequence
  Cyclic GFR-binding peptide
QDLSNITIQIMVGRTPKVIGEMSM

SEQ ID NO: 82223 - protein, 34 aa, Artificial Sequence
  Cyclic GFR-binding peptide
  MOD_RES (34)..(34): Xaa is C or S
QVQLEPLPVVYYEIVRKKPIFEQLSNTLEDHLAX

SEQ ID NO: 82224 - protein, 41 aa, Artificial Sequence; identical to SEQ ID NO: 30715
  Cyclic GFR-binding peptide
  MOD_RES (6)..(38)..(40): Xaa is C or S

SEQ ID NO: 82225 - protein, 31 aa, Artificial Sequence
  Cyclic GFR-binding peptide
  MOD_RES (1)..(2): Xaa is C or S
XXVPQALSNITIQIMVGRKPKVIGEMSMIVR

SEQ ID NO: 82226 - protein, 35 aa, Artificial Sequence
  Cyclic GFR-binding peptide
  MOD_RES (33)..(35): Xaa is C or S
PTEEEPLTMLYYRIKPHQGQHEQLSNFLQHNKXEX

SEQ ID NO: 82227 - protein, 25 aa, Artificial Sequence
  Cyclic GFR-binding peptide
VPQDLRPVQIRKIVGRTPKVKKATV

SEQ ID NO: 82228 - protein, 31 aa, Artificial Sequence
  Cyclic GFR-binding peptide
  MOD_RES (3)..(3): Xaa is C or S
PTXAPTKLRSVKVAKVDDSSNVIKEVQVNMV

SEQ ID NO: 82229 - protein, 32 aa, Artificial Sequence; identical to SEQ ID NO: 30722
  Cyclic GFR-binding peptide
  MOD_RES (31)..(31): Xaa is C or S

SEQ ID NO: 82230 - protein, 33 aa, Artificial Sequence
  Cyclic GFR-binding peptide
  MOD_RES (4)..(5): Xaa is C or S
PKAXXVPTELSNITMQIMDENEKVVIGEMSDMV

SEQ ID NO: 82231 - protein, 34 aa, Artificial Sequence; identical to SEQ ID NO: 30723
  Cyclic GFR-binding peptide
  MOD_RES (2)..(3): Xaa is C or S

SEQ ID NO: 82232 - protein, 39 aa, Artificial Sequence; identical to SEQ ID NO: 30724
  Cyclic GFR-binding peptide
  MOD_RES (3)..(4)..(36)..(38): Xaa is C or S

SEQ ID NO: 82233 - protein, 31 aa, Artificial Sequence
  Cyclic GFR-binding peptide
  MOD_RES (31)..(31): Xaa is C or S
EEEPLTMLYYRIKPHQGQHEQLSNFLQHNKX

SEQ ID NO: 82234 - protein, 33 aa, Artificial Sequence
  Cyclic GFR-binding peptide
  MOD_RES (3)..(4): Xaa is C or S
KAXXVPTELRPVQMRKIDEYDKVVKKATVEMVV

SEQ ID NO: 82235 - protein, 23 aa, Artificial Sequence
  Cyclic GFR-binding peptide
LRPVQIRKIVGRKPKVKKATVMI

SEQ ID NO: 82236 - protein, 26 aa, Artificial Sequence
  Cyclic GFR-binding peptide
PTELRSVKMAKVDENEKVVKEVQVDM

SEQ ID NO: 82237 - protein, 32 aa, Artificial Sequence; identical to SEQ ID NO: 30730
  Cyclic GFR-binding peptide
  MOD_RES (1)..(2): Xaa is C or S

SEQ ID NO: 82238 - protein, 32 aa, Artificial Sequence
  Cyclic GFR-binding peptide
  MOD_RES (29)..(31): Xaa is C or S
EPLPMVYYRIKPHQGQHEQLSNFLQHNKXEXR

SEQ ID NO: 82239 - protein, 33 aa, Artificial Sequence
  Cyclic GFR-binding peptide
  MOD_RES (33)..(33): Xaa is C or S
VQLEPLPVVYYEIVRKKPIFEQLSNTLEDHLAX

SEQ ID NO: 82240 - protein, 33 aa, Artificial Sequence; identical to SEQ ID NO: 30739
  Cyclic GFR-binding peptide
  MOD_RES (2)..(3): Xaa is C or S

SEQ ID NO: 82241 - protein, 29 aa, Artificial Sequence
  Cyclic GFR-binding peptide
  MOD_RES (28)..(28): Xaa is C or S
LRPVQVRKIDDSSNVIKKATVNMVVRAXG

SEQ ID NO: 82242 - protein, 33 aa, Artificial Sequence
  Cyclic GFR-binding peptide
  MOD_RES (6)..(6): Xaa is C or S
DEGLEXVPTEEEPLPMVYYRIKPHQGQHEQLSN

SEQ ID NO: 82243 - protein, 25 aa, Artificial Sequence
  Cyclic GFR-binding peptide
LRPVQIRKIIGKTPKIKKATVMIVK

SEQ ID NO: 82244 - protein, 28 aa, Artificial Sequence
  Cyclic GFR-binding peptide
  MOD_RES (2)..(3): Xaa is C or S
PXXAPTKLSNITVQIMDDSSNVIIGEMS

SEQ ID NO: 82245 - protein, 32 aa, Artificial Sequence
  Cyclic GFR-binding peptide
  MOD_RES (1)..(1): Xaa is C or S
XRPTQVQLEPLTVLYYEIVRKKPIFEQLSNTL

SEQ ID NO: 82246 - protein, 37 aa, Artificial Sequence; identical to SEQ ID NO: 30742
  Cyclic GFR-binding peptide
  MOD_RES (6)..(7): Xaa is C or S

SEQ ID NO: 82247 - protein, 30 aa, Artificial Sequence
  Cyclic GFR-binding peptide
  MOD_RES (1)..(1): Xaa is C or S
XAPTQLRSVKVAKVDDSSNVIKEVQVNMVV

SEQ ID NO: 82248 - protein, 38 aa, Artificial Sequence; identical to SEQ ID NO: 30746
  Cyclic GFR-binding peptide
  MOD_RES (4)..(5)..(36)..(38): Xaa is C or S

SEQ ID NO: 82249 - protein, 32 aa, Artificial Sequence
  Cyclic GFR-binding peptide
  MOD_RES (32)..(32): Xaa is C or S
TEEEPLPMVYYRIKPHQGQHEQLSNFLQHNKX

SEQ ID NO: 82250 - protein, 31 aa, Artificial Sequence
  Cyclic GFR-binding peptide
  MOD_RES (31)..(31): Xaa is C or S
PTQLRPVQVRKIDDSSNVIKKATVNMVVRAX

SEQ ID NO: 82251 - protein, 33 aa, Artificial Sequence
  Cyclic GFR-binding peptide
  MOD_RES (1)..(1): Xaa is C or S
XQPSRVHHEPLTVLYYEYVRKKPKLEQLSNRLE

SEQ ID NO: 82252 - protein, 22 aa, Artificial Sequence
  Cyclic GFR-binding peptide
ALSNITIQIMVGRKPKVIGEMS

SEQ ID NO: 82253 - protein, 23 aa, Artificial Sequence
  Cyclic GFR-binding peptide
RPVQVRKIDDSSNVIKKATVNMV

SEQ ID NO: 82254 - protein, 34 aa, Artificial Sequence
  Cyclic GFR-binding peptide
  MOD_RES (4)..(5): Xaa is C or S
PKPXXAPTKLSNITVQIMDDSSNVIIGEMSNMVV

SEQ ID NO: 82255 - protein, 25 aa, Artificial Sequence
  Cyclic GFR-binding peptide
LRSVKIAKVVGRTPKVKEVQVMVVK

SEQ ID NO: 82256 - protein, 25 aa, Artificial Sequence
  Cyclic GFR-binding peptide
TELRPVQMRKIDENEKVVKKATVDM

SEQ ID NO: 82257 - protein, 27 aa, Artificial Sequence
  Cyclic GFR-binding peptide
ELRPVQMRKIDEYDKVVKKATVEMVVE

SEQ ID NO: 82258 - protein, 26 aa, Artificial Sequence
  Cyclic GFR-binding peptide
RSVKMAKVDEYDKVVKEVQVEMVVEG

SEQ ID NO: 82259 - protein, 35 aa, Artificial Sequence
  Cyclic GFR-binding peptide
  MOD_RES (33)..(35): Xaa is C or S
VHHEPLPVVYYEYVRKKPKLEQLSNRLEEHLEXAX

SEQ ID NO: 82260 - protein, 32 aa, Artificial Sequence
  Cyclic GFR-binding peptide
  MOD_RES (6)..(7): Xaa is C or S
KIPKAXXVPTELRPVQMRKIDENEKVVKKATV

SEQ ID NO: 82261 - protein, 29 aa, Artificial Sequence
  Cyclic GFR-binding peptide
PQALRSVKIAKVVGRKPKVKEVQVMIVRS

SEQ ID NO: 82262 - protein, 34 aa, Artificial Sequence; identical to SEQ ID NO: 30767
  Cyclic GFR-binding peptide
  MOD_RES (32)..(34): Xaa is C or S

SEQ ID NO: 82263 - protein, 40 aa, Artificial Sequence; identical to SEQ ID NO: 30772
  Cyclic GFR-binding peptide
  MOD_RES (4)..(5)..(37)..(39): Xaa is C or S

SEQ ID NO: 82264 - protein, 35 aa, Artificial Sequence
  Cyclic GFR-binding peptide
  MOD_RES (34)..(34): Xaa is C or S
QVQLEPLPVVYYEIVRKKPIFEQLSNTLEDHLAXK

SEQ ID NO: 82265 - protein, 29 aa, Artificial Sequence
  Cyclic GFR-binding peptide
TEEEPLPMVYYRIKPHQGQHEQLSNFLQH

SEQ ID NO: 82266 - protein, 26 aa, Artificial Sequence
  Cyclic GFR-binding peptide
LRPVQIRKIIGKTPKIKKATVMIVKS

SEQ ID NO: 82267 - protein, 28 aa, Artificial Sequence
  Cyclic GFR-binding peptide
QLRSVKVAKVDDSSNVIKEVQVNMVVRA

SEQ ID NO: 82268 - protein, 38 aa, Artificial Sequence; identical to SEQ ID NO: 30780
  Cyclic GFR-binding peptide
  MOD_RES (4)..(4): Xaa is C or S

SEQ ID NO: 82269 - protein, 29 aa, Artificial Sequence
  Cyclic GFR-binding peptide
  MOD_RES (28)..(28): Xaa is C or S
ALRPVQIRKIVGRKPKVKKATVMIVRSXK

SEQ ID NO: 82270 - protein, 32 aa, Artificial Sequence
  Cyclic GFR-binding peptide
  MOD_RES (3)..(4): Xaa is C or S
APXXVPQALSNITIQIMVGRKPKVIGEMSMIV

SEQ ID NO: 82271 - protein, 35 aa, Artificial Sequence; identical to SEQ ID NO: 30783
  Cyclic GFR-binding peptide
  MOD_RES (4)..(5): Xaa is C or S

SEQ ID NO: 82272 - protein, 35 aa, Artificial Sequence
  Cyclic GFR-binding peptide
  MOD_RES (4)..(4): Xaa is C or S
NVQXRPTQVQLEPLPVVYYEIVRKKPIFEQLSNTL

SEQ ID NO: 82273 - protein, 33 aa, Artificial Sequence
  Cyclic GFR-binding peptide
  MOD_RES (32)..(32): Xaa is C or S
HHEPLPVVYYEYVRKKPKLEQLSNRLEEHLEXA

SEQ ID NO: 82274 - protein, 27 aa, Artificial Sequence
  Cyclic GFR-binding peptide
TELSNITMQIMDENEKVVIGEMSDMVV

SEQ ID NO: 82275 - protein, 32 aa, Artificial Sequence
  Cyclic GFR-binding peptide
  MOD_RES (2)..(2): Xaa is C or S
QXRPTQVQLEPLTVLYYEIVRKKPIFEQLSNT

SEQ ID NO: 82276 - protein, 30 aa, Artificial Sequence
  Cyclic GFR-binding peptide
  MOD_RES (28)..(30): Xaa is C or S
DLRSVKIAKVVGRTPKVKEVQVMVVKSXKX

SEQ ID NO: 82277 - protein, 41 aa, Artificial Sequence; identical to SEQ ID NO: 30787
  Cyclic GFR-binding peptide
  MOD_RES (7)..(41): Xaa is C or S

SEQ ID NO: 82278 - protein, 26 aa, Artificial Sequence
  Cyclic GFR-binding peptide
HHEPLPVVYYEYVRKKPKLEQLSNRL

SEQ ID NO: 82279 - protein, 32 aa, Artificial Sequence
  Cyclic GFR-binding peptide
  MOD_RES (5)..(6): Xaa is C or S
SASPXXVPQDLRSVKIAKVVGRTPKVKEVQVM

SEQ ID NO: 82280 - protein, 45 aa, Artificial Sequence; identical to SEQ ID NO: 30789
  Cyclic GFR-binding peptide
  MOD_RES (5)..(42)..(44): Xaa is C or S

SEQ ID NO: 82281 - protein, 38 aa, Artificial Sequence; identical to SEQ ID NO: 30792
  Cyclic GFR-binding peptide
  MOD_RES (6)..(7)..(38): Xaa is C or S

SEQ ID NO: 82282 - protein, 32 aa, Artificial Sequence; identical to SEQ ID NO: 30793
  Cyclic GFR-binding peptide
  MOD_RES (1)..(1): Xaa is C or S

SEQ ID NO: 82283 - protein, 27 aa, Artificial Sequence
  Cyclic GFR-binding peptide
DLSNITIQIMVGRTPKVIGEMSMVVKS

SEQ ID NO: 82284 - protein, 28 aa, Artificial Sequence
  Cyclic GFR-binding peptide
  MOD_RES (28)..(28): Xaa is C or S
ALSNITIQIMVGRKPKVIGEMSMIVRSX

SEQ ID NO: 82285 - protein, 30 aa, Artificial Sequence
  Cyclic GFR-binding peptide
  MOD_RES (29)..(29): Xaa is C or S
ELRSVKMAKVDEYDKVVKEVQVEMVVEGXG

SEQ ID NO: 82286 - protein, 30 aa, Artificial Sequence
  Cyclic GFR-binding peptide
  MOD_RES (29)..(29): Xaa is C or S
QALRPVQIRKIVGRKPKVKKATVMIVRSXK

SEQ ID NO: 82287 - protein, 28 aa, Artificial Sequence
  Cyclic GFR-binding peptide
PTEEEPLPMVYYRIKPHQGQHEQLSNFL

SEQ ID NO: 82288 - protein, 24 aa, Artificial Sequence
  Cyclic GFR-binding peptide
LEPLPVVYYEIVRKKPIFEQLSNT

SEQ ID NO: 82289 - protein, 42 aa, Artificial Sequence; identical to SEQ ID NO: 30805
  Cyclic GFR-binding peptide
  MOD_RES (3)..(40)..(42): Xaa is C or S

SEQ ID NO: 82290 - protein, 32 aa, Artificial Sequence; identical to SEQ ID NO: 30810
  Cyclic GFR-binding peptide
  MOD_RES (31)..(31): Xaa is C or S

SEQ ID NO: 82291 - protein, 26 aa, Artificial Sequence
  Cyclic GFR-binding peptide
VPTELRSVKMAKVDENEKVVKEVQVD

SEQ ID NO: 82292 - protein, 34 aa, Artificial Sequence; identical to SEQ ID NO: 30817
  Cyclic GFR-binding peptide
  MOD_RES (1)..(33): Xaa is C or S

SEQ ID NO: 82293 - protein, 39 aa, Artificial Sequence; identical to SEQ ID NO: 30819
  Cyclic GFR-binding peptide
  MOD_RES (5)..(37)..(39): Xaa is C or S

SEQ ID NO: 82294 - protein, 37 aa, Artificial Sequence; identical to SEQ ID NO: 30822
  Cyclic GFR-binding peptide
  MOD_RES (5)..(6)..(37): Xaa is C or S

SEQ ID NO: 82295 - protein, 40 aa, Artificial Sequence; identical to SEQ ID NO: 30823
  Cyclic GFR-binding peptide
  MOD_RES (4)..(4): Xaa is C or S

SEQ ID NO: 82296 - protein, 27 aa, Artificial Sequence
  Cyclic GFR-binding peptide
QDLRSVKIAKVVGRTPKVKEVQVMVVK

SEQ ID NO: 82297 - protein, 23 aa, Artificial Sequence
  Cyclic GFR-binding peptide
SNITVQIMDDSSNVIIGEMSNMV

SEQ ID NO: 82298 - protein, 29 aa, Artificial Sequence
  Cyclic GFR-binding peptide
RPTQVQLEPLTVLYYEIVRKKPIFEQLSN

SEQ ID NO: 82299 - protein, 25 aa, Artificial Sequence
  Cyclic GFR-binding peptide
SQDLSNITIQIMIGKTPKIIGEMSM

SEQ ID NO: 82300 - protein, 30 aa, Artificial Sequence; identical to SEQ ID NO: 30827
  Cyclic GFR-binding peptide

SEQ ID NO: 82301 - protein, 31 aa, Artificial Sequence
  Cyclic GFR-binding peptide
  MOD_RES (30)..(30): Xaa is C or S
TELRSVKMAKVDENEKVVKEVQVDMVVEGXG

SEQ ID NO: 82302 - protein, 41 aa, Artificial Sequence; identical to SEQ ID NO: 30829
  Cyclic GFR-binding peptide
  MOD_RES (4)..(41): Xaa is C or S

SEQ ID NO: 82303 - protein, 33 aa, Artificial Sequence
  Cyclic GFR-binding peptide
  MOD_RES (31)..(33): Xaa is C or S
HEPLTVLYYEYVRKKPKLEQLSNRLEEHLEXAX

SEQ ID NO: 82304 - protein, 31 aa, Artificial Sequence
  Cyclic GFR-binding peptide
  MOD_RES (29)..(31): Xaa is C or S
QDLRPVQIRKIIGKTPKIKKATVMIVKSXKX

SEQ ID NO: 82305 - protein, 24 aa, Artificial Sequence
  Cyclic GFR-binding peptide
LSNITMQIMDEYDKVVIGEMSEMV

SEQ ID NO: 82306 - protein, 38 aa, Artificial Sequence; identical to SEQ ID NO: 30837
  Cyclic GFR-binding peptide
  MOD_RES (5)..(6)..(37): Xaa is C or S

SEQ ID NO: 82307 - protein, 23 aa, Artificial Sequence
  Cyclic GFR-binding peptide
LRSVKVAKVDDSSNVIKEVQVNM

SEQ ID NO: 82308 - protein, 35 aa, Artificial Sequence; identical to SEQ ID NO: 30838
  Cyclic GFR-binding peptide
  MOD_RES (3)..(4): Xaa is C or S

SEQ ID NO: 82309 - protein, 31 aa, Artificial Sequence
  Cyclic GFR-binding peptide
  MOD_RES (30)..(30): Xaa is C or S
TELSNITMQIMDEYDKVVIGEMSEMVVEGXG

SEQ ID NO: 82310 - protein, 22 aa, Artificial Sequence
  Cyclic GFR-binding peptide
RPVQIRKIIGKTPKIKKATVMI

SEQ ID NO: 82311 - protein, 36 aa, Artificial Sequence
  Cyclic GFR-binding peptide
  MOD_RES (34)..(36): Xaa is C or S
QVQLEPLPVVYYEIVRKKPIFEQLSNTLEDHLAXKX

SEQ ID NO: 82312 - protein, 28 aa, Artificial Sequence
  Cyclic GFR-binding peptide
  MOD_RES (28)..(28): Xaa is C or S
LSNITVQIMDDSSNVIIGEMSNMVVRAX

SEQ ID NO: 82313 - protein, 40 aa, Artificial Sequence; identical to SEQ ID NO: 30846
  Cyclic GFR-binding peptide
  MOD_RES (5)..(6)..(38)..(40): Xaa is C or S

SEQ ID NO: 82314 - protein, 32 aa, Artificial Sequence
  Cyclic GFR-binding peptide
  MOD_RES (3)..(4): Xaa is C or S
APXXVPQALRPVQIRKIVGRKPKVKKATVMIV

SEQ ID NO: 82315 - protein, 28 aa, Artificial Sequence
  Cyclic GFR-binding peptide
  MOD_RES (27)..(27): Xaa is C or S
RPVQVRKIDDSSNVIKKATVNMVVRSXG

SEQ ID NO: 82316 - protein, 32 aa, Artificial Sequence; identical to SEQ ID NO: 30851
  Cyclic GFR-binding peptide
  MOD_RES (1)..(1): Xaa is C or S

SEQ ID NO: 82317 - protein, 28 aa, Artificial Sequence
  Cyclic GFR-binding peptide
SQDLRSVKIAKVIGKTPKIKEVQVMIVK

SEQ ID NO: 82318 - protein, 28 aa, Artificial Sequence
  Cyclic GFR-binding peptide
  MOD_RES (27)..(27): Xaa is C or S
SNITVQIMDDSSNVIIGEMSNMVVRAXG

SEQ ID NO: 82319 - protein, 22 aa, Artificial Sequence
  Cyclic GFR-binding peptide
RSVKIAKVVGRTPKVKEVQVMV

SEQ ID NO: 82320 - protein, 31 aa, Artificial Sequence; identical to SEQ ID NO: 30854
  Cyclic GFR-binding peptide
  MOD_RES (1)..(1): Xaa is C or S

SEQ ID NO: 82321 - protein, 32 aa, Artificial Sequence
  Cyclic GFR-binding peptide
PSRVHHEPLPVVYYEYVRKKPKLEQLSNRLEE

SEQ ID NO: 82322 - protein, 28 aa, Artificial Sequence
  Cyclic GFR-binding peptide
APTQLRPVQVRKIDDSSNVIKKATVNMV

SEQ ID NO: 82323 - protein, 24 aa, Artificial Sequence
  Cyclic GFR-binding peptide
ELSNITMQIMDENEKVVIGEMSDM

SEQ ID NO: 82324 - protein, 35 aa, Artificial Sequence; identical to SEQ ID NO: 30857
  Cyclic GFR-binding peptide
  MOD_RES (35)..(35): Xaa is C or S

SEQ ID NO: 82325 - protein, 30 aa, Artificial Sequence
  Cyclic GFR-binding peptide
  MOD_RES (27)..(29): Xaa is C or S
LSNITIQIMIGKTPKIIGEMSMIVKSXKXS

SEQ ID NO: 82326 - protein, 37 aa, Artificial Sequence; identical to SEQ ID NO: 30859
  Cyclic GFR-binding peptide
  MOD_RES (6)..(7): Xaa is C or S

SEQ ID NO: 82327 - protein, 37 aa, Artificial Sequence; identical to SEQ ID NO: 30861
  Cyclic GFR-binding peptide
  MOD_RES (2)..(2): Xaa is C or S

SEQ ID NO: 82328 - protein, 26 aa, Artificial Sequence
  Cyclic GFR-binding peptide
RVHHEPLPVVYYEYVRKKPKLEQLSN

SEQ ID NO: 82329 - protein, 38 aa, Artificial Sequence; identical to SEQ ID NO: 30863
  Cyclic GFR-binding peptide
  MOD_RES (37)..(37): Xaa is C or S

SEQ ID NO: 82330 - protein, 27 aa, Artificial Sequence
  Cyclic GFR-binding peptide
LRSVKVAKVDDSSNVIKEVQVNMVVRS

SEQ ID NO: 82331 - protein, 37 aa, Artificial Sequence; identical to SEQ ID NO: 30867
  Cyclic GFR-binding peptide
  MOD_RES (3)..(4)..(35)..(37): Xaa is C or S

SEQ ID NO: 82332 - protein, 38 aa, Artificial Sequence; identical to SEQ ID NO: 30868
  Cyclic GFR-binding peptide
  MOD_RES (3)..(4)..(35)..(37): Xaa is C or S

SEQ ID NO: 82333 - protein, 36 aa, Artificial Sequence; identical to SEQ ID NO: 30869
  Cyclic GFR-binding peptide
  MOD_RES (5)..(6): Xaa is C or S

SEQ ID NO: 82334 - protein, 30 aa, Artificial Sequence
  Cyclic GFR-binding peptide
  MOD_RES (3)..(4): Xaa is C or S
SPXXVPQDLSNITIQIMVGRTPKVIGEMSM

SEQ ID NO: 82335 - protein, 27 aa, Artificial Sequence
  Cyclic GFR-binding peptide
QDLRSVKIAKVIGKTPKIKEVQVMIVK

SEQ ID NO: 82336 - protein, 35 aa, Artificial Sequence; identical to SEQ ID NO: 30871
  Cyclic GFR-binding peptide
  MOD_RES (4)..(5): Xaa is C or S

SEQ ID NO: 82337 - protein, 34 aa, Artificial Sequence
  Cyclic GFR-binding peptide
  MOD_RES (5)..(6): Xaa is C or S
VPKPXXAPTKLRSVKVAKVDDSSNVIKEVQVNMV

SEQ ID NO: 82338 - protein, 34 aa, Artificial Sequence
  Cyclic GFR-binding peptide
  MOD_RES (4)..(4): Xaa is C or S
GLEXVPTEEEPLPMVYYRIKPHQGQHEQLSNFLQ

SEQ ID NO: 82339 - protein, 27 aa, Artificial Sequence
  Cyclic GFR-binding peptide
LRSVKVAKVDDSSNVIKEVQVNMVVRA

SEQ ID NO: 82340 - protein, 32 aa, Artificial Sequence
  Cyclic GFR-binding peptide
  MOD_RES (6)..(7): Xaa is C or S
ASAAPXXVPQALRPVQIRKIVGRKPKVKKATV

SEQ ID NO: 82341 - protein, 29 aa, Artificial Sequence
  Cyclic GFR-binding peptide
  MOD_RES (2)..(3): Xaa is C or S
AXXVPTELRPVQMRKIDENEKVVKKATVD

SEQ ID NO: 82342 - protein, 29 aa, Artificial Sequence
  Cyclic GFR-binding peptide
TEEEPLTMLYYRIKPHQGQHEQLSNFLQH

SEQ ID NO: 82343 - protein, 27 aa, Artificial Sequence
  Cyclic GFR-binding peptide
PTEEEPLPMVYYRIKPHQGQHEQLSNF

SEQ ID NO: 82344 - protein, 36 aa, Artificial Sequence; identical to SEQ ID NO: 30878
  Cyclic GFR-binding peptide
  MOD_RES (4)..(5)..(36): Xaa is C or S

SEQ ID NO: 82345 - protein, 42 aa, Artificial Sequence; identical to SEQ ID NO: 30882
  Cyclic GFR-binding peptide
  MOD_RES (5)..(42): Xaa is C or S

SEQ ID NO: 82346 - protein, 32 aa, Artificial Sequence
  Cyclic GFR-binding peptide
  MOD_RES (32)..(32): Xaa is C or S
HHEPLPVVYYEYVRKKPKLEQLSNRLEEHLEX

SEQ ID NO: 82347 - protein, 32 aa, Artificial Sequence; identical to SEQ ID NO: 30887
  Cyclic GFR-binding peptide

SEQ ID NO: 82348 - protein, 31 aa, Artificial Sequence
  Cyclic GFR-binding peptide
TEEEPLPMVYYRIKPHQGQHEQLSNFLQHNK

SEQ ID NO: 82349 - protein, 36 aa, Artificial Sequence; identical to SEQ ID NO: 30891
  Cyclic GFR-binding peptide
  MOD_RES (5)..(6): Xaa is C or S

SEQ ID NO: 82350 - protein, 31 aa, Artificial Sequence
  Cyclic GFR-binding peptide
  MOD_RES (30)..(30): Xaa is C or S
PQALRPVQIRKIVGRKPKVKKATVMIVRSXK

SEQ ID NO: 82351 - protein, 35 aa, Artificial Sequence
  Cyclic GFR-binding peptide
  MOD_RES (4)..(4): Xaa is C or S
GLEXVPTEEEPLPMVYYRIKPHQGQHEQLSNFLQH

SEQ ID NO: 82352 - protein, 40 aa, Artificial Sequence; identical to SEQ ID NO: 30893
  Cyclic GFR-binding peptide
  MOD_RES (3)..(40): Xaa is C or S

SEQ ID NO: 82353 - protein, 37 aa, Artificial Sequence; identical to SEQ ID NO: 30894
  Cyclic GFR-binding peptide
  MOD_RES (4)..(36): Xaa is C or S

SEQ ID NO: 82354 - protein, 28 aa, Artificial Sequence
  Cyclic GFR-binding peptide
PTQLRSVKVAKVDDSSNVIKEVQVNMVV

SEQ ID NO: 82355 - protein, 23 aa, Artificial Sequence
  Cyclic GFR-binding peptide
RSVKVAKVDDSSNVIKEVQVNMV

SEQ ID NO: 82356 - protein, 31 aa, Artificial Sequence
  Cyclic GFR-binding peptide
  MOD_RES (31)..(31): Xaa is C or S
PTKLRPVQVRKIDDSSNVIKKATVNMVVRSX

SEQ ID NO: 82357 - protein, 29 aa, Artificial Sequence
  Cyclic GFR-binding peptide
VQLEPLTVLYYEIVRKKPIFEQLSNTLED

SEQ ID NO: 82358 - protein, 34 aa, Artificial Sequence
  Cyclic GFR-binding peptide
  MOD_RES (32)..(34): Xaa is C or S
TEEEPLPMVYYRIKPHQGQHEQLSNFLQHNKXEX

SEQ ID NO: 82359 - protein, 26 aa, Artificial Sequence
  Cyclic GFR-binding peptide
QLEPLPVVYYEIVRKKPIFEQLSNTL

SEQ ID NO: 82360 - protein, 31 aa, Artificial Sequence
  Cyclic GFR-binding peptide
  MOD_RES (2)..(3): Xaa is C or S
PXXAPTQLRSVKVAKVDDSSNVIKEVQVNMV

SEQ ID NO: 82361 - protein, 22 aa, Artificial Sequence
  Cyclic GFR-binding peptide
EPLPMVYYRIKPHQGQHEQLSN

SEQ ID NO: 82362 - protein, 30 aa, Artificial Sequence
  Cyclic GFR-binding peptide
  MOD_RES (30)..(30): Xaa is C or S
EPLTVLYYEYVRKKPKLEQLSNRLEEHLEX

SEQ ID NO: 82363 - protein, 30 aa, Artificial Sequence
  Cyclic GFR-binding peptide
TEEEPLTMLYYRIKPHQGQHEQLSNFLQHN

SEQ ID NO: 82364 - protein, 32 aa, Artificial Sequence
  Cyclic GFR-binding peptide
  MOD_RES (31)..(31): Xaa is C or S
PTELRSVKMAKVDEYDKVVKEVQVEMVVEGXG

SEQ ID NO: 82365 - protein, 27 aa, Artificial Sequence
  Cyclic GFR-binding peptide
  MOD_RES (26)..(26): Xaa is C or S
RSVKIAKVVGRKPKVKEVQVMIVRSXK

SEQ ID NO: 82366 - protein, 30 aa, Artificial Sequence
  Cyclic GFR-binding peptide
  MOD_RES (5)..(5): Xaa is C or S
TKPTXAPTKLRPVQVRKIDDSSNVIKKATV

SEQ ID NO: 82367 - protein, 28 aa, Artificial Sequence
  Cyclic GFR-binding peptide
EPLTVLYYEIVRKKPIFEQLSNTLEDHL

SEQ ID NO: 82368 - protein, 32 aa, Artificial Sequence
  Cyclic GFR-binding peptide
  MOD_RES (2)..(3): Xaa is C or S
PXXVPQALRPVQIRKIVGRKPKVKKATVMIVR

SEQ ID NO: 82369 - protein, 29 aa, Artificial Sequence
  Cyclic GFR-binding peptide
  MOD_RES (29)..(29): Xaa is C or S
KLRSVKVAKVDDSSNVIKEVQVNMVVRSX

SEQ ID NO: 82370 - protein, 38 aa, Artificial Sequence; identical to SEQ ID NO: 30917
  Cyclic GFR-binding peptide
  MOD_RES (36)..(38): Xaa is C or S

SEQ ID NO: 82371 - protein, 38 aa, Artificial Sequence; identical to SEQ ID NO: 30918
  Cyclic GFR-binding peptide
  MOD_RES (3)..(4)..(35)..(37): Xaa is C or S

SEQ ID NO: 82372 - protein, 40 aa, Artificial Sequence; identical to SEQ ID NO: 30919
  Cyclic GFR-binding peptide
  MOD_RES (6)..(38)..(40): Xaa is C or S

SEQ ID NO: 82373 - protein, 23 aa, Artificial Sequence
  Cyclic GFR-binding peptide
EPLTVLYYEYVRKKPKLEQLSNR

SEQ ID NO: 82374 - protein, 27 aa, Artificial Sequence
  Cyclic GFR-binding peptide
  MOD_RES (1)..(1): Xaa is C or S
XVPTELRPVQMRKIDENEKVVKKATVD

SEQ ID NO: 82375 - protein, 26 aa, Artificial Sequence
  Cyclic GFR-binding peptide
PTEEEPLTMLYYRIKPHQGQHEQLSN

SEQ ID NO: 82376 - protein, 34 aa, Artificial Sequence
  Cyclic GFR-binding peptide
  MOD_RES (5)..(6): Xaa is C or S
SAAPXXVPQALSNITIQIMVGRKPKVIGEMSMIV

SEQ ID NO: 82377 - protein, 31 aa, Artificial Sequence; identical to SEQ ID NO: 30923
  Cyclic GFR-binding peptide
  MOD_RES (1)..(1): Xaa is C or S

SEQ ID NO: 82378 - protein, 29 aa, Artificial Sequence
  Cyclic GFR-binding peptide
PTELRPVQMRKIDEYDKVVKKATVEMVVE

SEQ ID NO: 82379 - protein, 33 aa, Artificial Sequence; identical to SEQ ID NO: 30924
  Cyclic GFR-binding peptide
  MOD_RES (32)..(32): Xaa is C or S

SEQ ID NO: 82380 - protein, 25 aa, Artificial Sequence
  Cyclic GFR-binding peptide
APTQLRPVQVRKIDDSSNVIKKATV

SEQ ID NO: 82381 - protein, 25 aa, Artificial Sequence
  Cyclic GFR-binding peptide
DLRSVKIAKVVGRTPKVKEVQVMVV

SEQ ID NO: 82382 - protein, 32 aa, Artificial Sequence; identical to SEQ ID NO: 30938
  Cyclic GFR-binding peptide
  MOD_RES (1)..(2): Xaa is C or S

SEQ ID NO: 82383 - protein, 29 aa, Artificial Sequence
  Cyclic GFR-binding peptide
  MOD_RES (29)..(29): Xaa is C or S
ELRPVQMRKIDEYDKVVKKATVEMVVEGX

SEQ ID NO: 82384 - protein, 28 aa, Artificial Sequence
  Cyclic GFR-binding peptide
  MOD_RES (28)..(28): Xaa is C or S
LRSVKVAKVDDSSNVIKEVQVNMVVRAX

SEQ ID NO: 82385 - protein, 35 aa, Artificial Sequence; identical to SEQ ID NO: 30943
  Cyclic GFR-binding peptide
  MOD_RES (1)..(2)..(34): Xaa is C or S

SEQ ID NO: 82386 - protein, 29 aa, Artificial Sequence
  Cyclic GFR-binding peptide
  MOD_RES (27)..(29): Xaa is C or S
SNITVQIMDDSSNVIIGEMSNMVVRAXGX

SEQ ID NO: 82387 - protein, 30 aa, Artificial Sequence
  Cyclic GFR-binding peptide
  MOD_RES (2)..(2): Xaa is C or S
TXAPTKLRSVKVAKVDDSSNVIKEVQVNMV

SEQ ID NO: 82388 - protein, 30 aa, Artificial Sequence
  Cyclic GFR-binding peptide
  MOD_RES (28)..(30): Xaa is C or S
DLSNITIQIMIGKTPKIIGEMSMIVKSXKX

SEQ ID NO: 82389 - protein, 31 aa, Artificial Sequence
  Cyclic GFR-binding peptide
QVQLEPLPVVYYEIVRKKPIFEQLSNTLEDH

SEQ ID NO: 82390 - protein, 24 aa, Artificial Sequence
  Cyclic GFR-binding peptide
TELRPVQMRKIDEYDKVVKKATVE

SEQ ID NO: 82391 - protein, 36 aa, Artificial Sequence
  Cyclic GFR-binding peptide
  MOD_RES (33)..(35): Xaa is C or S
VHHEPLTVLYYEYVRKKPKLEQLSNRLEEHLEXAXA

SEQ ID NO: 82392 - protein, 27 aa, Artificial Sequence
  Cyclic GFR-binding peptide
PQALSNITIQIMVGRKPKVIGEMSMIV

SEQ ID NO: 82393 - protein, 34 aa, Artificial Sequence
  Cyclic GFR-binding peptide
  MOD_RES (5)..(6): Xaa is C or S
VPKPXXAPTKLSNITVQIMDDSSNVIIGEMSNMV

SEQ ID NO: 82394 - protein, 30 aa, Artificial Sequence
  Cyclic GFR-binding peptide
  MOD_RES (30)..(30): Xaa is C or S
TQLRPVQVRKIDDSSNVIKKATVNMVVRAX

SEQ ID NO: 82395 - protein, 34 aa, Artificial Sequence; identical to SEQ ID NO: 30949
  Cyclic GFR-binding peptide
  MOD_RES (2)..(3)..(34): Xaa is C or S

SEQ ID NO: 82396 - protein, 35 aa, Artificial Sequence
  Cyclic GFR-binding peptide
  MOD_RES (6)..(7): Xaa is C or S
KIPKAXXVPTELRPVQMRKIDENEKVVKKATVDMV

SEQ ID NO: 82397 - protein, 33 aa, Artificial Sequence; identical to SEQ ID NO: 30951
  Cyclic GFR-binding peptide
  MOD_RES (32)..(32): Xaa is C or S

SEQ ID NO: 82398 - protein, 28 aa, Artificial Sequence
  Cyclic GFR-binding peptide
QDLRPVQIRKIVGRTPKVKKATVMVVKS

SEQ ID NO: 82399 - protein, 25 aa, Artificial Sequence
  Cyclic GFR-binding peptide
EPLPMVYYRIKPHQGQHEQLSNFLQ

SEQ ID NO: 82400 - protein, 32 aa, Artificial Sequence
  Cyclic GFR-binding peptide
  MOD_RES (29)..(31): Xaa is C or S
QDLRSVKIAKVVGRTPKVKEVQVMVVKSXKXS

SEQ ID NO: 82401 - protein, 31 aa, Artificial Sequence
  Cyclic GFR-binding peptide
  MOD_RES (1)..(2): Xaa is C or S
XXVPTELRSVKMAKVDENEKVVKEVQVDMVV

SEQ ID NO: 82402 - protein, 34 aa, Artificial Sequence
  Cyclic GFR-binding peptide
  MOD_RES (6)..(7): Xaa is C or S
YVPKPXXAPTKLRSVKVAKVDDSSNVIKEVQVNM

SEQ ID NO: 82403 - protein, 31 aa, Artificial Sequence
  Cyclic GFR-binding peptide
SRVHHEPLPVVYYEYVRKKPKLEQLSNRLEE

SEQ ID NO: 82404 - protein, 28 aa, Artificial Sequence
  Cyclic GFR-binding peptide
  MOD_RES (2)..(2): Xaa is C or S
TXAPTKLSNITVQIMDDSSNVIIGEMSN

SEQ ID NO: 82405 - protein, 29 aa, Artificial Sequence
  Cyclic GFR-binding peptide
EPLPVVYYEIVRKKPIFEQLSNTLEDHLA

SEQ ID NO: 82406 - protein, 33 aa, Artificial Sequence
  Cyclic GFR-binding peptide
  MOD_RES (6)..(7): Xaa is C or S
ASASPXXVSQDLSNITIQIMIGKTPKIIGEMSM

SEQ ID NO: 82407 - protein, 36 aa, Artificial Sequence; identical to SEQ ID NO: 30960
  Cyclic GFR-binding peptide
  MOD_RES (1)..(2)..(34)..(36): Xaa is C or S

SEQ ID NO: 82408 - protein, 36 aa, Artificial Sequence
  Cyclic GFR-binding peptide
  MOD_RES (4)..(4): Xaa is C or S
SVKXQPSRVHHEPLTVLYYEYVRKKPKLEQLSNRLE

SEQ ID NO: 82409 - protein, 28 aa, Artificial Sequence
  Cyclic GFR-binding peptide
  MOD_RES (28)..(28): Xaa is C or S
LRPVQMRKIDENEKVVKKATVDMVVEGX

SEQ ID NO: 82410 - protein, 34 aa, Artificial Sequence
  Cyclic GFR-binding peptide
  MOD_RES (4)..(5): Xaa is C or S
AAPXXVPQALSNITIQIMVGRKPKVIGEMSMIVR

SEQ ID NO: 82411 - protein, 37 aa, Artificial Sequence; identical to SEQ ID NO: 30963
  Cyclic GFR-binding peptide
  MOD_RES (3)..(3): Xaa is C or S

SEQ ID NO: 82412 - protein, 33 aa, Artificial Sequence; identical to SEQ ID NO: 30964
  Cyclic GFR-binding peptide
  MOD_RES (31)..(33): Xaa is C or S

SEQ ID NO: 82413 - protein, 23 aa, Artificial Sequence
  Cyclic GFR-binding peptide
LRPVQVRKIDDSSNVIKKATVNM

SEQ ID NO: 82414 - protein, 28 aa, Artificial Sequence
  Cyclic GFR-binding peptide
  MOD_RES (28)..(28): Xaa is C or S
DLRPVQIRKIIGKTPKIKKATVMIVKSX

SEQ ID NO: 82415 - protein, 32 aa, Artificial Sequence
  Cyclic GFR-binding peptide
  MOD_RES (31)..(31): Xaa is C or S
HEPLTVLYYEYVRKKPKLEQLSNRLEEHLEXA

SEQ ID NO: 82416 - protein, 28 aa, Artificial Sequence
  Cyclic GFR-binding peptide
PSRVHHEPLTVLYYEYVRKKPKLEQLSN

SEQ ID NO: 82417 - protein, 37 aa, Artificial Sequence; identical to SEQ ID NO: 30969
  Cyclic GFR-binding peptide
  MOD_RES (4)..(5)..(37): Xaa is C or S

SEQ ID NO: 82418 - protein, 27 aa, Artificial Sequence
  Cyclic GFR-binding peptide
  MOD_RES (26)..(26): Xaa is C or S
RPVQIRKIIGKTPKIKKATVMIVKSXK

SEQ ID NO: 82419 - protein, 36 aa, Artificial Sequence; identical to SEQ ID NO: 30970
  Cyclic GFR-binding peptide
  MOD_RES (2)..(34)..(36): Xaa is C or S

SEQ ID NO: 82420 - protein, 28 aa, Artificial Sequence
  Cyclic GFR-binding peptide
  MOD_RES (27)..(27): Xaa is C or S
RSVKMAKVDEYDKVVKEVQVEMVVEGXG

SEQ ID NO: 82421 - protein, 39 aa, Artificial Sequence; identical to SEQ ID NO: 30971
  Cyclic GFR-binding peptide
  MOD_RES (5)..(6)..(37)..(39): Xaa is C or S

SEQ ID NO: 82422 - protein, 28 aa, Artificial Sequence
  Cyclic GFR-binding peptide
EPLTVLYYEYVRKKPKLEQLSNRLEEHL

SEQ ID NO: 82423 - protein, 25 aa, Artificial Sequence
  Cyclic GFR-binding peptide
KLRSVKVAKVDDSSNVIKEVQVNMV

SEQ ID NO: 82424 - protein, 35 aa, Artificial Sequence
  Cyclic GFR-binding peptide
  MOD_RES (5)..(6): Xaa is C or S
IPKAXXVPTELRPVQMRKIDENEKVVKKATVDMVV

SEQ ID NO: 82425 - protein, 39 aa, Artificial Sequence; identical to SEQ ID NO: 30976
  Cyclic GFR-binding peptide
  MOD_RES (6)..(6): Xaa is C or S

SEQ ID NO: 82426 - protein, 36 aa, Artificial Sequence; identical to SEQ ID NO: 30975
  Cyclic GFR-binding peptide
  MOD_RES (5)..(5): Xaa is C or S

SEQ ID NO: 82427 - protein, 33 aa, Artificial Sequence
  Cyclic GFR-binding peptide
  MOD_RES (31)..(33): Xaa is C or S
PTELRSVKMAKVDENEKVVKEVQVDMVVEGXGX

SEQ ID NO: 82428 - protein, 31 aa, Artificial Sequence
  Cyclic GFR-binding peptide
  MOD_RES (2)..(2): Xaa is C or S
EXVPTEEEPLTMLYYRIKPHQGQHEQLSNFL

SEQ ID NO: 82429 - protein, 32 aa, Artificial Sequence; identical to SEQ ID NO: 30994
  Cyclic GFR-binding peptide
  MOD_RES (32)..(32): Xaa is C or S

SEQ ID NO: 82430 - protein, 26 aa, Artificial Sequence
  Cyclic GFR-binding peptide
  MOD_RES (1)..(1): Xaa is C or S
XVPQDLRPVQIRKIVGRTPKVKKATV

SEQ ID NO: 82431 - protein, 37 aa, Artificial Sequence; identical to SEQ ID NO: 30996
  Cyclic GFR-binding peptide
  MOD_RES (3)..(4)..(35)..(37): Xaa is C or S

SEQ ID NO: 82432 - protein, 31 aa, Artificial Sequence
  Cyclic GFR-binding peptide
  MOD_RES (28)..(30): Xaa is C or S
LSNITVQIMDDSSNVIIGEMSNMVVRAXGXH

SEQ ID NO: 82433 - protein, 32 aa, Artificial Sequence
  Cyclic GFR-binding peptide
  MOD_RES (29)..(31): Xaa is C or S
KLSNITVQIMDDSSNVIIGEMSNMVVRSXGXH

SEQ ID NO: 82434 - protein, 36 aa, Artificial Sequence; identical to SEQ ID NO: 31003
  Cyclic GFR-binding peptide
  MOD_RES (1)..(2)..(34)..(36): Xaa is C or S

SEQ ID NO: 82435 - protein, 30 aa, Artificial Sequence
  Cyclic GFR-binding peptide
PTELRSVKMAKVDEYDKVVKEVQVEMVVEG

SEQ ID NO: 82436 - protein, 23 aa, Artificial Sequence
  Cyclic GFR-binding peptide
LRSVKIAKVVGRTPKVKEVQVMV

SEQ ID NO: 82437 - protein, 32 aa, Artificial Sequence
  Cyclic GFR-binding peptide
  MOD_RES (29)..(31): Xaa is C or S
ELRPVQMRKIDENEKVVKKATVDMVVEGXGXR

SEQ ID NO: 82438 - protein, 33 aa, Artificial Sequence; identical to SEQ ID NO: 31013
  Cyclic GFR-binding peptide
  MOD_RES (2)..(3): Xaa is C or S

SEQ ID NO: 82439 - protein, 22 aa, Artificial Sequence
  Cyclic GFR-binding peptide
ELRSVKMAKVDENEKVVKEVQV

SEQ ID NO: 82440 - protein, 21 aa, Artificial Sequence
  Cyclic GFR-binding peptide
LRPVQVRKIDDSSNVIKKATV

SEQ ID NO: 82441 - protein, 33 aa, Artificial Sequence; identical to SEQ ID NO: 31020
  Cyclic GFR-binding peptide
  MOD_RES (1)..(32): Xaa is C or S

SEQ ID NO: 82442 - protein, 39 aa, Artificial Sequence; identical to SEQ ID NO: 31021
  Cyclic GFR-binding peptide
  MOD_RES (4)..(36)..(38): Xaa is C or S

SEQ ID NO: 82443 - protein, 26 aa, Artificial Sequence
  Cyclic GFR-binding peptide
PQALRSVKIAKVVGRKPKVKEVQVMI

SEQ ID NO: 82444 - protein, 31 aa, Artificial Sequence
  Cyclic GFR-binding peptide
  MOD_RES (2)..(3): Xaa is C or S
PXXVPQDLRPVQIRKIVGRTPKVKKATVMVV

SEQ ID NO: 82445 - protein, 22 aa, Artificial Sequence
  Cyclic GFR-binding peptide
LRSVKIAKVVGRKPKVKEVQVM

SEQ ID NO: 82446 - protein, 32 aa, Artificial Sequence
  Cyclic GFR-binding peptide
  MOD_RES (5)..(6): Xaa is C or S
IPKAXXVPTELRPVQMRKIDEYDKVVKKATVE

SEQ ID NO: 82447 - protein, 34 aa, Artificial Sequence
  Cyclic GFR-binding peptide
  MOD_RES (2)..(2): Xaa is C or S
QXRPTQVQLEPLTVLYYEIVRKKPIFEQLSNTLE

SEQ ID NO: 82448 - protein, 36 aa, Artificial Sequence; identical to SEQ ID NO: 31024
  Cyclic GFR-binding peptide
  MOD_RES (3)..(4)..(36): Xaa is C or S

SEQ ID NO: 82449 - protein, 32 aa, Artificial Sequence
  Cyclic GFR-binding peptide
  MOD_RES (3)..(3): Xaa is C or S
PTXAPTKLRPVQVRKIDDSSNVIKKATVNMVV

SEQ ID NO: 82450 - protein, 35 aa, Artificial Sequence; identical to SEQ ID NO: 31027
  Cyclic GFR-binding peptide
  MOD_RES (5)..(5): Xaa is C or S

SEQ ID NO: 82451 - protein, 37 aa, Artificial Sequence; identical to SEQ ID NO: 31029
  Cyclic GFR-binding peptide
  MOD_RES (2)..(3)..(35)..(37): Xaa is C or S

SEQ ID NO: 82452 - protein, 28 aa, Artificial Sequence
  Cyclic GFR-binding peptide
TQLRSVKVAKVDDSSNVIKEVQVNMVVR

SEQ ID NO: 82453 - protein, 36 aa, Artificial Sequence; identical to SEQ ID NO: 31032
  Cyclic GFR-binding peptide
  MOD_RES (5)..(6): Xaa is C or S

SEQ ID NO: 82454 - protein, 38 aa, Artificial Sequence; identical to SEQ ID NO: 31034
  Cyclic GFR-binding peptide
  MOD_RES (4)..(5)..(36)..(38): Xaa is C or S

SEQ ID NO: 82455 - protein, 29 aa, Artificial Sequence
  Cyclic GFR-binding peptide
TQLRPVQVRKIDDSSNVIKKATVNMVVRA

SEQ ID NO: 82456 - protein, 29 aa, Artificial Sequence
  Cyclic GFR-binding peptide
RVHHEPLTVLYYEYVRKKPKLEQLSNRLE

SEQ ID NO: 82457 - protein, 25 aa, Artificial Sequence
  Cyclic GFR-binding peptide
ALRPVQIRKIVGRKPKVKKATVMIV

SEQ ID NO: 82458 - protein, 31 aa, Artificial Sequence
  Cyclic GFR-binding peptide
PTEEEPLPMVYYRIKPHQGQHEQLSNFLQHN

SEQ ID NO: 82459 - protein, 33 aa, Artificial Sequence; identical to SEQ ID NO: 31039
  Cyclic GFR-binding peptide
  MOD_RES (1)..(32): Xaa is C or S

SEQ ID NO: 82460 - protein, 33 aa, Artificial Sequence
  Cyclic GFR-binding peptide
  MOD_RES (30)..(32): Xaa is C or S
PQALSNITIQIMVGRKPKVIGEMSMIVRSXKXS

SEQ ID NO: 82461 - protein, 32 aa, Artificial Sequence
  Cyclic GFR-binding peptide
  MOD_RES (3)..(3): Xaa is C or S
VKXQPSRVHHEPLPVVYYEYVRKKPKLEQLSN

SEQ ID NO: 82462 - protein, 35 aa, Artificial Sequence; identical to SEQ ID NO: 31041
  Cyclic GFR-binding peptide
  MOD_RES (32)..(34): Xaa is C or S

SEQ ID NO: 82463 - protein, 36 aa, Artificial Sequence; identical to SEQ ID NO: 31043
  Cyclic GFR-binding peptide
  MOD_RES (1)..(2)..(34)..(36): Xaa is C or S

SEQ ID NO: 82464 - protein, 33 aa, Artificial Sequence
  Cyclic GFR-binding peptide
  MOD_RES (30)..(32): Xaa is C or S
SQDLSNITIQIMIGKTPKIIGEMSMIVKSXKXS

SEQ ID NO: 82465 - protein, 31 aa, Artificial Sequence
  Cyclic GFR-binding peptide
  MOD_RES (2)..(2): Xaa is C or S
KXQPSRVHHEPLTVLYYEYVRKKPKLEQLSN

SEQ ID NO: 82466 - protein, 30 aa, Artificial Sequence
  Cyclic GFR-binding peptide
SRVHHEPLPVVYYEYVRKKPKLEQLSNRLE

SEQ ID NO: 82467 - protein, 37 aa, Artificial Sequence; identical to SEQ ID NO: 31046
  Cyclic GFR-binding peptide
  MOD_RES (4)..(5)..(37): Xaa is C or S

SEQ ID NO: 82468 - protein, 22 aa, Artificial Sequence
  Cyclic GFR-binding peptide
RPVQIRKIVGRTPKVKKATVMV

SEQ ID NO: 82469 - protein, 38 aa, Artificial Sequence; identical to SEQ ID NO: 31049
  Cyclic GFR-binding peptide
  MOD_RES (5)..(37): Xaa is C or S

SEQ ID NO: 82470 - protein, 41 aa, Artificial Sequence; identical to SEQ ID NO: 31051
  Cyclic GFR-binding peptide
  MOD_RES (1)..(38)..(40): Xaa is C or S

SEQ ID NO: 82471 - protein, 28 aa, Artificial Sequence
  Cyclic GFR-binding peptide
  MOD_RES (27)..(27): Xaa is C or S
RPVQMRKIDENEKVVKKATVDMVVEGXG

SEQ ID NO: 82472 - protein, 34 aa, Artificial Sequence
  Cyclic GFR-binding peptide
  MOD_RES (5)..(6): Xaa is C or S
IPKAXXVPTELRSVKMAKVDENEKVVKEVQVDMV

SEQ ID NO: 82473 - protein, 35 aa, Artificial Sequence; identical to SEQ ID NO: 31059
  Cyclic GFR-binding peptide
  MOD_RES (1)..(2)..(34): Xaa is C or S

SEQ ID NO: 82474 - protein, 34 aa, Artificial Sequence
  Cyclic GFR-binding peptide
  MOD_RES (31)..(33): Xaa is C or S
PTKLRSVKVAKVDDSSNVIKEVQVNMVVRSXGXH

SEQ ID NO: 82475 - protein, 35 aa, Artificial Sequence
  Cyclic GFR-binding peptide
  MOD_RES (5)..(6): Xaa is C or S
VPKPXXAPTKLRSVKVAKVDDSSNVIKEVQVNMVV

SEQ ID NO: 82476 - protein, 35 aa, Artificial Sequence
  Cyclic GFR-binding peptide
  MOD_RES (3)..(3): Xaa is C or S
VQXRPTQVQLEPLTVLYYEIVRKKPIFEQLSNTLE

SEQ ID NO: 82477 - protein, 32 aa, Artificial Sequence
  Cyclic GFR-binding peptide
  MOD_RES (3)..(4): Xaa is C or S
KPXXAPTKLRPVQVRKIDDSSNVIKKATVNMV

SEQ ID NO: 82478 - protein, 25 aa, Artificial Sequence
  Cyclic GFR-binding peptide
EEPLPMVYYRIKPHQGQHEQLSNFL

SEQ ID NO: 82479 - protein, 34 aa, Artificial Sequence
  Cyclic GFR-binding peptide
  MOD_RES (32)..(34): Xaa is C or S
TEEEPLTMLYYRIKPHQGQHEQLSNFLQHNKXEX

SEQ ID NO: 82480 - protein, 32 aa, Artificial Sequence; identical to SEQ ID NO: 31066
  Cyclic GFR-binding peptide
  MOD_RES (31)..(31): Xaa is C or S

SEQ ID NO: 82481 - protein, 33 aa, Artificial Sequence; identical to SEQ ID NO: 31067
  Cyclic GFR-binding peptide
  MOD_RES (32)..(32): Xaa is C or S

SEQ ID NO: 82482 - protein, 22 aa, Artificial Sequence
  Cyclic GFR-binding peptide
ALRPVQIRKIVGRKPKVKKATV

SEQ ID NO: 82483 - protein, 27 aa, Artificial Sequence
  Cyclic GFR-binding peptide
  MOD_RES (1)..(1): Xaa is C or S
XVPTELRSVKMAKVDENEKVVKEVQVD

SEQ ID NO: 82484 - protein, 33 aa, Artificial Sequence
  Cyclic GFR-binding peptide
  MOD_RES (6)..(6): Xaa is C or S
VTKPTXAPTKLSNITVQIMDDSSNVIIGEMSNM

SEQ ID NO: 82485 - protein, 33 aa, Artificial Sequence
  Cyclic GFR-binding peptide
  MOD_RES (5)..(6): Xaa is C or S
VPKPXXAPTQLRSVKVAKVDDSSNVIKEVQVNM

SEQ ID NO: 82486 - protein, 34 aa, Artificial Sequence
  Cyclic GFR-binding peptide
  MOD_RES (5)..(5): Xaa is C or S
RNVQXRPTQVQLEPLTVLYYEIVRKKPIFEQLSN

SEQ ID NO: 82487 - protein, 34 aa, Artificial Sequence
  Cyclic GFR-binding peptide
  MOD_RES (5)..(5): Xaa is C or S
EGLEXVPTEEEPLPMVYYRIKPHQGQHEQLSNFL

SEQ ID NO: 82488 - protein, 33 aa, Artificial Sequence; identical to SEQ ID NO: 31076
  Cyclic GFR-binding peptide
  MOD_RES (1)..(32): Xaa is C or S

SEQ ID NO: 82489 - protein, 25 aa, Artificial Sequence
  Cyclic GFR-binding peptide
VPQDLSNITIQIMVGRTPKVIGEMS

SEQ ID NO: 82490 - protein, 28 aa, Artificial Sequence
  Cyclic GFR-binding peptide
QDLRSVKIAKVVGRTPKVKEVQVMVVKS

SEQ ID NO: 82491 - protein, 40 aa, Artificial Sequence; identical to SEQ ID NO: 31081
  Cyclic GFR-binding peptide
  MOD_RES (6)..(7)..(39): Xaa is C or S

SEQ ID NO: 82492 - protein, 34 aa, Artificial Sequence; identical to SEQ ID NO: 31083
  Cyclic GFR-binding peptide
  MOD_RES (32)..(34): Xaa is C or S

SEQ ID NO: 82493 - protein, 37 aa, Artificial Sequence; identical to SEQ ID NO: 31082
  Cyclic GFR-binding peptide
  MOD_RES (4)..(5)..(36): Xaa is C or S

SEQ ID NO: 82494 - protein, 28 aa, Artificial Sequence
  Cyclic GFR-binding peptide
TKLRPVQVRKIDDSSNVIKKATVNMVVR

SEQ ID NO: 82495 - protein, 31 aa, Artificial Sequence
  Cyclic GFR-binding peptide
  MOD_RES (2)..(3): Xaa is C or S
PXXVSQDLRSVKIAKVIGKTPKIKEVQVMIV

SEQ ID NO: 82496 - protein, 35 aa, Artificial Sequence; identical to SEQ ID NO: 31086
  Cyclic GFR-binding peptide
  MOD_RES (4)..(5): Xaa is C or S

SEQ ID NO: 82497 - protein, 32 aa, Artificial Sequence
  Cyclic GFR-binding peptide
  MOD_RES (3)..(3): Xaa is C or S
LEXVPTEEEPLPMVYYRIKPHQGQHEQLSNFL

SEQ ID NO: 82498 - protein, 24 aa, Artificial Sequence
  Cyclic GFR-binding peptide
ELRPVQMRKIDEYDKVVKKATVEM

SEQ ID NO: 82499 - protein, 35 aa, Artificial Sequence
  Cyclic GFR-binding peptide
  MOD_RES (5)..(6): Xaa is C or S
IPKAXXVPTELRSVKMAKVDENEKVVKEVQVDMVV

SEQ ID NO: 82500 - protein, 26 aa, Artificial Sequence
  Cyclic GFR-binding peptide
RSVKVAKVDDSSNVIKEVQVNMVVRS

SEQ ID NO: 82501 - protein, 42 aa, Artificial Sequence; identical to SEQ ID NO: 31090
  Cyclic GFR-binding peptide
  MOD_RES (6)..(7)..(39)..(41): Xaa is C or S

SEQ ID NO: 82502 - protein, 30 aa, Artificial Sequence
  Cyclic GFR-binding peptide
HEPLPVVYYEYVRKKPKLEQLSNRLEEHLE

SEQ ID NO: 82503 - protein, 35 aa, Artificial Sequence
  Cyclic GFR-binding peptide
  MOD_RES (5)..(6): Xaa is C or S
VPKPXXAPTQLRSVKVAKVDDSSNVIKEVQVNMVV

SEQ ID NO: 82504 - protein, 38 aa, Artificial Sequence; identical to SEQ ID NO: 31095
  Cyclic GFR-binding peptide
  MOD_RES (4)..(5)..(37): Xaa is C or S

SEQ ID NO: 82505 - protein, 26 aa, Artificial Sequence
  Cyclic GFR-binding peptide
VPTELRPVQMRKIDENEKVVKKATVD

SEQ ID NO: 82506 - protein, 36 aa, Artificial Sequence; identical to SEQ ID NO: 31100
  Cyclic GFR-binding peptide
  MOD_RES (1)..(2)..(33)..(35): Xaa is C or S

SEQ ID NO: 82507 - protein, 24 aa, Artificial Sequence
  Cyclic GFR-binding peptide
TQLRPVQVRKIDDSSNVIKKATVN

SEQ ID NO: 82508 - protein, 29 aa, Artificial Sequence
  Cyclic GFR-binding peptide
  MOD_RES (27)..(29): Xaa is C or S
RSVKVAKVDDSSNVIKEVQVNMVVRSXGX

SEQ ID NO: 82509 - protein, 26 aa, Artificial Sequence
  Cyclic GFR-binding peptide
RSVKVAKVDDSSNVIKEVQVNMVVRA

SEQ ID NO: 82510 - protein, 32 aa, Artificial Sequence
  Cyclic GFR-binding peptide
  MOD_RES (3)..(3): Xaa is C or S
VQXRPTQVQLEPLTVLYYEIVRKKPIFEQLSN

SEQ ID NO: 82511 - protein, 30 aa, Artificial Sequence
  Cyclic GFR-binding peptide
  MOD_RES (29)..(29): Xaa is C or S
ELRPVQMRKIDENEKVVKKATVDMVVEGXG

SEQ ID NO: 82512 - protein, 26 aa, Artificial Sequence
  Cyclic GFR-binding peptide
  MOD_RES (26)..(26): Xaa is C or S
SNITIQIMIGKTPKIIGEMSMIVKSX

SEQ ID NO: 82513 - protein, 21 aa, Artificial Sequence
  Cyclic GFR-binding peptide
SNITIQIMVGRKPKVIGEMSM

SEQ ID NO: 82514 - protein, 35 aa, Artificial Sequence; identical to SEQ ID NO: 31113
  Cyclic GFR-binding peptide
  MOD_RES (2)..(3)..(35): Xaa is C or S

SEQ ID NO: 82515 - protein, 37 aa, Artificial Sequence; identical to SEQ ID NO: 31114
  Cyclic GFR-binding peptide
  MOD_RES (3)..(35)..(37): Xaa is C or S

SEQ ID NO: 82516 - protein, 34 aa, Artificial Sequence; identical to SEQ ID NO: 31116
  Cyclic GFR-binding peptide
  MOD_RES (31)..(33): Xaa is C or S

SEQ ID NO: 82517 - protein, 37 aa, Artificial Sequence; identical to SEQ ID NO: 31118
  Cyclic GFR-binding peptide
  MOD_RES (37)..(37): Xaa is C or S

SEQ ID NO: 82518 - protein, 31 aa, Artificial Sequence
  Cyclic GFR-binding peptide
  MOD_RES (4)..(5): Xaa is C or S
PKAXXVPTELSNITMQIMDEYDKVVIGEMSE

SEQ ID NO: 82519 - protein, 38 aa, Artificial Sequence; identical to SEQ ID NO: 31124
  Cyclic GFR-binding peptide
  MOD_RES (5)..(5): Xaa is C or S

SEQ ID NO: 82520 - protein, 32 aa, Artificial Sequence
  Cyclic GFR-binding peptide
  MOD_RES (3)..(4): Xaa is C or S
KAXXVPTELRPVQMRKIDENEKVVKKATVDMV

SEQ ID NO: 82521 - protein, 30 aa, Artificial Sequence
  Cyclic GFR-binding peptide
TQVQLEPLPVVYYEIVRKKPIFEQLSNTLE

SEQ ID NO: 82522 - protein, 29 aa, Artificial Sequence
  Cyclic GFR-binding peptide
  MOD_RES (3)..(4): Xaa is C or S
SPXXVSQDLSNITIQIMIGKTPKIIGEMS

SEQ ID NO: 82523 - protein, 34 aa, Artificial Sequence; identical to SEQ ID NO: 31131
  Cyclic GFR-binding peptide
  MOD_RES (1)..(2)..(33): Xaa is C or S

SEQ ID NO: 82524 - protein, 33 aa, Artificial Sequence
  Cyclic GFR-binding peptide
  MOD_RES (30)..(32): Xaa is C or S
TKLRPVQVRKIDDSSNVIKKATVNMVVRSXGXH

SEQ ID NO: 82525 - protein, 25 aa, Artificial Sequence
  Cyclic GFR-binding peptide
QDLSNITIQIMVGRTPKVIGEMSMV

SEQ ID NO: 82526 - protein, 26 aa, Artificial Sequence
  Cyclic GFR-binding peptide
VQLEPLPVVYYEIVRKKPIFEQLSNT

SEQ ID NO: 82527 - protein, 29 aa, Artificial Sequence
  Cyclic GFR-binding peptide
PTELRSVKMAKVDEYDKVVKEVQVEMVVE

SEQ ID NO: 82528 - protein, 27 aa, Artificial Sequence
  Cyclic GFR-binding peptide
  MOD_RES (1)..(2): Xaa is C or S
XXVPQDLRPVQIRKIVGRTPKVKKATV

SEQ ID NO: 82529 - protein, 22 aa, Artificial Sequence
  Cyclic GFR-binding peptide
EPLPVVYYEYVRKKPKLEQLSN

SEQ ID NO: 82530 - protein, 30 aa, Artificial Sequence
  Cyclic GFR-binding peptide
  MOD_RES (28)..(30): Xaa is C or S
LSNITVQIMDDSSNVIIGEMSNMVVRSXGX

SEQ ID NO: 82531 - protein, 38 aa, Artificial Sequence; identical to SEQ ID NO: 31141
  Cyclic GFR-binding peptide
  MOD_RES (4)..(5)..(37): Xaa is C or S

SEQ ID NO: 82532 - protein, 32 aa, Artificial Sequence; identical to SEQ ID NO: 31143
  Cyclic GFR-binding peptide
  MOD_RES (31)..(31): Xaa is C or S

SEQ ID NO: 82533 - protein, 37 aa, Artificial Sequence; identical to SEQ ID NO: 31145
  Cyclic GFR-binding peptide
  MOD_RES (5)..(6)..(37): Xaa is C or S

SEQ ID NO: 82534 - protein, 25 aa, Artificial Sequence
  Cyclic GFR-binding peptide
VSQDLRPVQIRKIIGKTPKIKKATV

SEQ ID NO: 82535 - protein, 35 aa, Artificial Sequence
  Cyclic GFR-binding peptide
  MOD_RES (5)..(6): Xaa is C or S
VPKPXXAPTQLRPVQVRKIDDSSNVIKKATVNMVV

SEQ ID NO: 82536 - protein, 33 aa, Artificial Sequence
  Cyclic GFR-binding peptide
  MOD_RES (6)..(7): Xaa is C or S
ASAAPXXVPQALRPVQIRKIVGRKPKVKKATVM

SEQ ID NO: 82537 - protein, 31 aa, Artificial Sequence; identical to SEQ ID NO: 31146
  Cyclic GFR-binding peptide
  MOD_RES (1)..(1): Xaa is C or S

SEQ ID NO: 82538 - protein, 32 aa, Artificial Sequence
  Cyclic GFR-binding peptide
  MOD_RES (5)..(6): Xaa is C or S
SASPXXVPQDLRPVQIRKIVGRTPKVKKATVM

SEQ ID NO: 82539 - protein, 24 aa, Artificial Sequence
  Cyclic GFR-binding peptide
ALRSVKIAKVVGRKPKVKEVQVMI

SEQ ID NO: 82540 - protein, 43 aa, Artificial Sequence; identical to SEQ ID NO: 31150
  Cyclic GFR-binding peptide
  MOD_RES (4)..(41)..(43): Xaa is C or S

SEQ ID NO: 82541 - protein, 27 aa, Artificial Sequence
  Cyclic GFR-binding peptide
TELRSVKMAKVDEYDKVVKEVQVEMVV

SEQ ID NO: 82542 - protein, 39 aa, Artificial Sequence; identical to SEQ ID NO: 31154
  Cyclic GFR-binding peptide
  MOD_RES (3)..(4)..(36)..(38): Xaa is C or S

SEQ ID NO: 82543 - protein, 32 aa, Artificial Sequence
  Cyclic GFR-binding peptide
  MOD_RES (3)..(3): Xaa is C or S
PTXAPTKLRSVKVAKVDDSSNVIKEVQVNMVV

SEQ ID NO: 82544 - protein, 34 aa, Artificial Sequence; identical to SEQ ID NO: 31156
  Cyclic GFR-binding peptide
  MOD_RES (3)..(4): Xaa is C or S

SEQ ID NO: 82545 - protein, 41 aa, Artificial Sequence; identical to SEQ ID NO: 31159
  Cyclic GFR-binding peptide
  MOD_RES (6)..(7)..(39)..(41): Xaa is C or S

SEQ ID NO: 82546 - protein, 32 aa, Artificial Sequence
  Cyclic GFR-binding peptide
  MOD_RES (30)..(32): Xaa is C or S
TQLRSVKVAKVDDSSNVIKEVQVNMVVRAXGX

SEQ ID NO: 82547 - protein, 34 aa, Artificial Sequence
  Cyclic GFR-binding peptide
  MOD_RES (5)..(6): Xaa is C or S
SAAPXXVPQALRSVKIAKVVGRKPKVKEVQVMIV

SEQ ID NO: 82548 - protein, 31 aa, Artificial Sequence; identical to SEQ ID NO: 31162
  Cyclic GFR-binding peptide
  MOD_RES (31)..(31): Xaa is C or S

SEQ ID NO: 82549 - protein, 24 aa, Artificial Sequence
  Cyclic GFR-binding peptide
LRPVQVRKIDDSSNVIKKATVNMV

SEQ ID NO: 82550 - protein, 33 aa, Artificial Sequence; identical to SEQ ID NO: 31167
  Cyclic GFR-binding peptide
  MOD_RES (2)..(3): Xaa is C or S

SEQ ID NO: 82551 - protein, 38 aa, Artificial Sequence; identical to SEQ ID NO: 31168
  Cyclic GFR-binding peptide
  MOD_RES (5)..(6)..(37): Xaa is C or S

SEQ ID NO: 82552 - protein, 35 aa, Artificial Sequence
  Cyclic GFR-binding peptide
  MOD_RES (5)..(5): Xaa is C or S
RNVQXRPTQVQLEPLPVVYYEIVRKKPIFEQLSNT

SEQ ID NO: 82553 - protein, 34 aa, Artificial Sequence
  Cyclic GFR-binding peptide
  MOD_RES (31)..(33): Xaa is C or S
PTELSNITMQIMDEYDKVVIGEMSEMVVEGXGXR

SEQ ID NO: 82554 - protein, 31 aa, Artificial Sequence
  Cyclic GFR-binding peptide
  MOD_RES (2)..(3): Xaa is C or S
AXXVPTELRPVQMRKIDEYDKVVKKATVEMV

SEQ ID NO: 82555 - protein, 30 aa, Artificial Sequence
  Cyclic GFR-binding peptide
  MOD_RES (27)..(29): Xaa is C or S
LRSVKIAKVVGRTPKVKEVQVMVVKSXKXS

SEQ ID NO: 82556 - protein, 37 aa, Artificial Sequence; identical to SEQ ID NO: 31175
  Cyclic GFR-binding peptide
  MOD_RES (1)..(2)..(34)..(36): Xaa is C or S

SEQ ID NO: 82557 - protein, 25 aa, Artificial Sequence
  Cyclic GFR-binding peptide
DLSNITIQIMVGRTPKVIGEMSMVV

SEQ ID NO: 82558 - protein, 31 aa, Artificial Sequence
  Cyclic GFR-binding peptide
  MOD_RES (5)..(6): Xaa is C or S
VPKPXXAPTKLRSVKVAKVDDSSNVIKEVQV

SEQ ID NO: 82559 - protein, 35 aa, Artificial Sequence
  Cyclic GFR-binding peptide
  MOD_RES (5)..(6): Xaa is C or S
IPKAXXVPTELSNITMQIMDEYDKVVIGEMSEMVV

SEQ ID NO: 82560 - protein, 34 aa, Artificial Sequence; identical to SEQ ID NO: 31179
  Cyclic GFR-binding peptide

SEQ ID NO: 82561 - protein, 36 aa, Artificial Sequence; identical to SEQ ID NO: 31180
  Cyclic GFR-binding peptide
  MOD_RES (4)..(5): Xaa is C or S

SEQ ID NO: 82562 - protein, 37 aa, Artificial Sequence
  Cyclic GFR-binding peptide
  MOD_RES (5)..(5): Xaa is C or S
SSVKXQPSRVHHEPLPVVYYEYVRKKPKLEQLSNRLE

SEQ ID NO: 82563 - protein, 38 aa, Artificial Sequence; identical to SEQ ID NO: 31186
  Cyclic GFR-binding peptide
  MOD_RES (5)..(6)..(37): Xaa is C or S

SEQ ID NO: 82564 - protein, 31 aa, Artificial Sequence
  Cyclic GFR-binding peptide
  MOD_RES (3)..(4): Xaa is C or S
APXXVPQALSNITIQIMVGRKPKVIGEMSMI

SEQ ID NO: 82565 - protein, 37 aa, Artificial Sequence; identical to SEQ ID NO: 31188
  Cyclic GFR-binding peptide
  MOD_RES (5)..(6): Xaa is C or S

SEQ ID NO: 82566 - protein, 37 aa, Artificial Sequence; identical to SEQ ID NO: 31190
  Cyclic GFR-binding peptide
  MOD_RES (3)..(4)..(36): Xaa is C or S

SEQ ID NO: 82567 - protein, 39 aa, Artificial Sequence; identical to SEQ ID NO: 31191
  Cyclic GFR-binding peptide
  MOD_RES (6)..(38): Xaa is C or S

SEQ ID NO: 82568 - protein, 31 aa, Artificial Sequence
  Cyclic GFR-binding peptide
  MOD_RES (2)..(3): Xaa is C or S
PXXAPTQLSNITVQIMDDSSNVIIGEMSNMV

SEQ ID NO: 82569 - protein, 37 aa, Artificial Sequence; identical to SEQ ID NO: 31192
  Cyclic GFR-binding peptide
  MOD_RES (3)..(4)..(35)..(37): Xaa is C or S

SEQ ID NO: 82570 - protein, 35 aa, Artificial Sequence; identical to SEQ ID NO: 31194
  Cyclic GFR-binding peptide
  MOD_RES (2)..(3)..(34): Xaa is C or S

SEQ ID NO: 82571 - protein, 34 aa, Artificial Sequence; identical to SEQ ID NO: 31196
  Cyclic GFR-binding peptide
  MOD_RES (3)..(4): Xaa is C or S

SEQ ID NO: 82572 - protein, 38 aa, Artificial Sequence; identical to SEQ ID NO: 31197
  Cyclic GFR-binding peptide
  MOD_RES (6)..(7)..(38): Xaa is C or S

SEQ ID NO: 82573 - protein, 33 aa, Artificial Sequence
  Cyclic GFR-binding peptide
  MOD_RES (5)..(6): Xaa is C or S
VPKPXXAPTKLRSVKVAKVDDSSNVIKEVQVNM

SEQ ID NO: 82574 - protein, 32 aa, Artificial Sequence
  Cyclic GFR-binding peptide
VQLEPLTVLYYEIVRKKPIFEQLSNTLEDHLA

SEQ ID NO: 82575 - protein, 38 aa, Artificial Sequence; identical to SEQ ID NO: 31199
  Cyclic GFR-binding peptide
  MOD_RES (2)..(3)..(35)..(37): Xaa is C or S

SEQ ID NO: 82576 - protein, 37 aa, Artificial Sequence; identical to SEQ ID NO: 31202
  Cyclic GFR-binding peptide
  MOD_RES (4)..(5)..(36): Xaa is C or S

SEQ ID NO: 82577 - protein, 31 aa, Artificial Sequence; identical to SEQ ID NO: 31203
  Cyclic GFR-binding peptide

SEQ ID NO: 82578 - protein, 20 aa, Artificial Sequence
  Cyclic GFR-binding peptide
RSVKMAKVDEYDKVVKEVQV

SEQ ID NO: 82579 - protein, 32 aa, Artificial Sequence
  Cyclic GFR-binding peptide
  MOD_RES (2)..(4): Xaa is C or S
SXGXRDVVMGRYKKLIIQQKDNFYLMSIANMK

SEQ ID NO: 82580 - protein, 31 aa, Artificial Sequence; identical to SEQ ID NO: 31217
  Cyclic GFR-binding peptide
  MOD_RES (1)..(1): Xaa is C or S

SEQ ID NO: 82581 - protein, 25 aa, Artificial Sequence
  Cyclic GFR-binding peptide
VVMGRYKKLIIQQKDNFYLMSIANM

SEQ ID NO: 82582 - protein, 41 aa, Artificial Sequence; identical to SEQ ID NO: 31222
  Cyclic GFR-binding peptide
  MOD_RES (1)..(3)..(35)..(36): Xaa is C or S

SEQ ID NO: 82583 - protein, 34 aa, Artificial Sequence; identical to SEQ ID NO: 31223
  Cyclic GFR-binding peptide
  MOD_RES (1)..(32)..(33): Xaa is C or S

SEQ ID NO: 82584 - protein, 35 aa, Artificial Sequence; identical to SEQ ID NO: 31224
  Cyclic GFR-binding peptide
  MOD_RES (2)..(34)..(35): Xaa is C or S

SEQ ID NO: 82585 - protein, 25 aa, Artificial Sequence
  Cyclic GFR-binding peptide
EVIMRYKKLLLVRGNDFYLMSIANT

SEQ ID NO: 82586 - protein, 32 aa, Artificial Sequence; identical to SEQ ID NO: 31226
  Cyclic GFR-binding peptide
  MOD_RES (32)..(32): Xaa is C or S

SEQ ID NO: 82587 - protein, 34 aa, Artificial Sequence; identical to SEQ ID NO: 31229
  Cyclic GFR-binding peptide
  MOD_RES (2)..(4): Xaa is C or S

SEQ ID NO: 82588 - protein, 28 aa, Artificial Sequence
  Cyclic GFR-binding peptide
  MOD_RES (28)..(28): Xaa is C or S
MGRYKKLIIQQKDNFYLMSIANMKTPTX

SEQ ID NO: 82589 - protein, 40 aa, Artificial Sequence; identical to SEQ ID NO: 31231
  Cyclic GFR-binding peptide
  MOD_RES (1)..(3)..(35)..(36): Xaa is C or S

SEQ ID NO: 82590 - protein, 34 aa, Artificial Sequence
  Cyclic GFR-binding peptide
  MOD_RES (30)..(31): Xaa is C or S
EVIMRYKKLLLVRGNDFYLMSIANTKVPAXXTSP

SEQ ID NO: 82591 - protein, 30 aa, Artificial Sequence
  Cyclic GFR-binding peptide
  MOD_RES (2)..(4): Xaa is C or S
SXGXRDVVMGRYKKLIIQQKDNFYLMSIAN

SEQ ID NO: 82592 - protein, 33 aa, Artificial Sequence
  Cyclic GFR-binding peptide
  MOD_RES (28)..(29): Xaa is C or S
IMRYKKLLLVRGNDFYLMSIANTKVPAXXTSPV

SEQ ID NO: 82593 - protein, 32 aa, Artificial Sequence
  Cyclic GFR-binding peptide
  MOD_RES (27)..(28): Xaa is C or S
GRYKKLIIQQKDNFYLMSIANMKTPTXXPGAS

SEQ ID NO: 82594 - protein, 26 aa, Artificial Sequence
  Cyclic GFR-binding peptide
EVIMRYKKLLLVRGNDFYLMSIANTK

SEQ ID NO: 82595 - protein, 33 aa, Artificial Sequence
  Cyclic GFR-binding peptide
  MOD_RES (29)..(30): Xaa is C or S
VMGRYKKLIIQQKDNFYLMSIANMKTPTXXPGA

SEQ ID NO: 82596 - protein, 32 aa, Artificial Sequence
  Cyclic GFR-binding peptide
  MOD_RES (1)..(3): Xaa is C or S
XGXRDVVMGRYKKLIIQQKDNFYLMSIANMKT

SEQ ID NO: 82597 - protein, 27 aa, Artificial Sequence
  Cyclic GFR-binding peptide
EEVIMRYKKLLLVRGNDFYLMSIANTK

SEQ ID NO: 82598 - protein, 26 aa, Artificial Sequence
  Cyclic GFR-binding peptide
EEVIMRYKKLLLVRGNDFYLMSIANT

SEQ ID NO: 82599 - protein, 30 aa, Artificial Sequence
  Cyclic GFR-binding peptide
  MOD_RES (30)..(30): Xaa is C or S
EVIMRYKKLLLVRGNDFYLMSIANTKVPAX

SEQ ID NO: 82600 - protein, 38 aa, Artificial Sequence; identical to SEQ ID NO: 31238
  Cyclic GFR-binding peptide
  MOD_RES (2)..(34)..(35): Xaa is C or S

SEQ ID NO: 82601 - protein, 26 aa, Artificial Sequence
  Cyclic GFR-binding peptide
MRYKKLLLVRGNDFYLMSIANTKVPA

SEQ ID NO: 82602 - protein, 20 aa, Artificial Sequence
  Cyclic GFR-binding peptide
RYKKLIIQQKDNFYLMSIAN

SEQ ID NO: 82603 - protein, 21 aa, Artificial Sequence
  Cyclic GFR-binding peptide
GRYKKLIIQQKDNFYLMSIAN

SEQ ID NO: 82604 - protein, 36 aa, Artificial Sequence; identical to SEQ ID NO: 31239
  Cyclic GFR-binding peptide
  MOD_RES (31)..(32): Xaa is C or S

SEQ ID NO: 82605 - protein, 26 aa, Artificial Sequence
  Cyclic GFR-binding peptide
RDVVMGRYKKLIIQQKDNFYLMSIAN

SEQ ID NO: 82606 - protein, 32 aa, Artificial Sequence
  Cyclic GFR-binding peptide
  MOD_RES (1)..(3): Xaa is C or S
XGXEEVIMRYKKLLLVRGNDFYLMSIANTKVP

SEQ ID NO: 82607 - protein, 29 aa, Artificial Sequence
  Cyclic GFR-binding peptide
  MOD_RES (1)..(1): Xaa is C or S
XEEVIMRYKKLLLVRGNDFYLMSIANTKV

SEQ ID NO: 82608 - protein, 29 aa, Artificial Sequence
  Cyclic GFR-binding peptide
  MOD_RES (27)..(28): Xaa is C or S
GRYKKLIIQQKDNFYLMSIANMKTPTXXP

SEQ ID NO: 82609 - protein, 30 aa, Artificial Sequence
  Cyclic GFR-binding peptide
  MOD_RES (1)..(3): Xaa is C or S
XGXRDVVMGRYKKLIIQQKDNFYLMSIANM

SEQ ID NO: 82610 - protein, 29 aa, Artificial Sequence
  Cyclic GFR-binding peptide
  MOD_RES (1)..(3): Xaa is C or S
XGXRDVVMGRYKKLIIQQKDNFYLMSIAN

SEQ ID NO: 82611 - protein, 29 aa, Artificial Sequence
  Cyclic GFR-binding peptide
  MOD_RES (28)..(29): Xaa is C or S
MGRYKKLIIQQKDNFYLMSIANMKTPTXX

SEQ ID NO: 82612 - protein, 34 aa, Artificial Sequence
  Cyclic GFR-binding peptide
  MOD_RES (28)..(29): Xaa is C or S
MGRYKKLIIQQKDNFYLMSIANMKTPTXXPGASG

SEQ ID NO: 82613 - protein, 34 aa, Artificial Sequence; identical to SEQ ID NO: 31246
  Cyclic GFR-binding peptide
  MOD_RES (31)..(32): Xaa is C or S

SEQ ID NO: 82614 - protein, 25 aa, Artificial Sequence
  Cyclic GFR-binding peptide
MRYKKLLLVRGNDFYLMSIANTKVP

SEQ ID NO: 82615 - protein, 31 aa, Artificial Sequence
  Cyclic GFR-binding peptide
  MOD_RES (1)..(3): Xaa is C or S
XGXEEVIMRYKKLLLVRGNDFYLMSIANTKV

SEQ ID NO: 82616 - protein, 34 aa, Artificial Sequence; identical to SEQ ID NO: 31253
  Cyclic GFR-binding peptide
  MOD_RES (32)..(33): Xaa is C or S

SEQ ID NO: 82617 - protein, 23 aa, Artificial Sequence
  Cyclic GFR-binding peptide
VIMRYKKLLLVRGNDFYLMSIAN

SEQ ID NO: 82618 - protein, 38 aa, Artificial Sequence; identical to SEQ ID NO: 31256
  Cyclic GFR-binding peptide
  MOD_RES (1)..(3)..(35)..(36): Xaa is C or S

SEQ ID NO: 82619 - protein, 27 aa, Artificial Sequence
  Cyclic GFR-binding peptide
VVMGRYKKLIIQQKDNFYLMSIANMKT

SEQ ID NO: 82620 - protein, 21 aa, Artificial Sequence
  Cyclic GFR-binding peptide
RYKKLLLVRGNDFYLMSIANT

SEQ ID NO: 82621 - protein, 34 aa, Artificial Sequence; identical to SEQ ID NO: 31258
  Cyclic GFR-binding peptide
  MOD_RES (1)..(33)..(34): Xaa is C or S

SEQ ID NO: 82622 - protein, 32 aa, Artificial Sequence
  Cyclic GFR-binding peptide
  MOD_RES (30)..(31): Xaa is C or S
VVMGRYKKLIIQQKDNFYLMSIANMKTPTXXP

SEQ ID NO: 82623 - protein, 39 aa, Artificial Sequence; identical to SEQ ID NO: 31262
  Cyclic GFR-binding peptide
  MOD_RES (2)..(4)..(35)..(36): Xaa is C or S

SEQ ID NO: 82624 - protein, 36 aa, Artificial Sequence
  Cyclic GFR-binding peptide
  MOD_RES (30)..(31): Xaa is C or S
EVIMRYKKLLLVRGNDFYLMSIANTKVPAXXTSPVR

SEQ ID NO: 82625 - protein, 28 aa, Artificial Sequence
  Cyclic GFR-binding peptide
VIMRYKKLLLVRGNDFYLMSIANTKVPA

SEQ ID NO: 82626 - protein, 33 aa, Artificial Sequence; identical to SEQ ID NO: 31264
  Cyclic GFR-binding peptide
  MOD_RES (1)..(3): Xaa is C or S

SEQ ID NO: 82627 - protein, 33 aa, Artificial Sequence; identical to SEQ ID NO: 31265
  Cyclic GFR-binding peptide
  MOD_RES (31)..(32): Xaa is C or S

SEQ ID NO: 82628 - protein, 28 aa, Artificial Sequence
  Cyclic GFR-binding peptide
  MOD_RES (2)..(2): Xaa is C or S
GXRDVVMGRYKKLIIQQKDNFYLMSIAN

SEQ ID NO: 82629 - protein, 30 aa, Artificial Sequence
  Cyclic GFR-binding peptide
  MOD_RES (29)..(30): Xaa is C or S
VIMRYKKLLLVRGNDFYLMSIANTKVPAXX

SEQ ID NO: 82630 - protein, 36 aa, Artificial Sequence; identical to SEQ ID NO: 31268
  Cyclic GFR-binding peptide
  MOD_RES (1)..(33)..(34): Xaa is C or S

SEQ ID NO: 82631 - protein, 37 aa, Artificial Sequence; identical to SEQ ID NO: 31269
  Cyclic GFR-binding peptide
  MOD_RES (1)..(3)..(35)..(36): Xaa is C or S

SEQ ID NO: 82632 - protein, 34 aa, Artificial Sequence
  Cyclic GFR-binding peptide
  MOD_RES (28)..(29): Xaa is C or S
IMRYKKLLLVRGNDFYLMSIANTKVPAXXTSPVR

SEQ ID NO: 82633 - protein, 31 aa, Artificial Sequence
  Cyclic GFR-binding peptide
  MOD_RES (28)..(29): Xaa is C or S
MGRYKKLIIQQKDNFYLMSIANMKTPTXXPG

SEQ ID NO: 82634 - protein, 36 aa, Artificial Sequence; identical to SEQ ID NO: 31270
  Cyclic GFR-binding peptide
  MOD_RES (1)..(32)..(33): Xaa is C or S

SEQ ID NO: 82635 - protein, 27 aa, Artificial Sequence
  Cyclic GFR-binding peptide
RDVVMGRYKKLIIQQKDNFYLMSIANM

SEQ ID NO: 82636 - protein, 30 aa, Artificial Sequence
  Cyclic GFR-binding peptide
  MOD_RES (1)..(3): Xaa is C or S
XGXEEVIMRYKKLLLVRGNDFYLMSIANTK

SEQ ID NO: 82637 - protein, 37 aa, Artificial Sequence; identical to SEQ ID NO: 31274
  Cyclic GFR-binding peptide
  MOD_RES (31)..(32): Xaa is C or S

SEQ ID NO: 82638 - protein, 32 aa, Artificial Sequence; identical to SEQ ID NO: 31275
  Cyclic GFR-binding peptide
  MOD_RES (1)..(1): Xaa is C or S

SEQ ID NO: 82639 - protein, 28 aa, Artificial Sequence
  Cyclic GFR-binding peptide
EEVIMRYKKLLLVRGNDFYLMSIANTKV

SEQ ID NO: 82640 - protein, 24 aa, Artificial Sequence
  Cyclic GFR-binding peptide
IMRYKKLLLVRGNDFYLMSIANTK

SEQ ID NO: 82641 - protein, 30 aa, Artificial Sequence
  Cyclic GFR-binding peptide
  MOD_RES (1)..(1): Xaa is C or S
XRDVVMGRYKKLIIQQKDNFYLMSIANMKT

SEQ ID NO: 82642 - protein, 41 aa, Artificial Sequence; identical to SEQ ID NO: 31277
  Cyclic GFR-binding peptide
  MOD_RES (2)..(4)..(35)..(36): Xaa is C or S

SEQ ID NO: 82643 - protein, 34 aa, Artificial Sequence; identical to SEQ ID NO: 31279
  Cyclic GFR-binding peptide
  MOD_RES (1)..(3)..(34): Xaa is C or S

SEQ ID NO: 82644 - protein, 35 aa, Artificial Sequence; identical to SEQ ID NO: 31281
  Cyclic GFR-binding peptide
  MOD_RES (1)..(3)..(34)..(35): Xaa is C or S

SEQ ID NO: 82645 - protein, 36 aa, Artificial Sequence; identical to SEQ ID NO: 31282
  Cyclic GFR-binding peptide
  MOD_RES (2)..(4)..(35)..(36): Xaa is C or S

SEQ ID NO: 82646 - protein, 38 aa, Artificial Sequence; identical to SEQ ID NO: 31285
  Cyclic GFR-binding peptide
  MOD_RES (1)..(33)..(34): Xaa is C or S

SEQ ID NO: 82647 - protein, 32 aa, Artificial Sequence
  Cyclic GFR-binding peptide
  MOD_RES (27)..(28): Xaa is C or S
MRYKKLLLVRGNDFYLMSIANTKVPAXXTSPV

SEQ ID NO: 82648 - protein, 22 aa, Artificial Sequence
  Cyclic GFR-binding peptide
MRYKKLLLVRGNDFYLMSIANT

SEQ ID NO: 82649 - protein, 30 aa, Artificial Sequence
  Cyclic GFR-binding peptide
RDVVMGRYKKLIIQQKDNFYLMSIANMKTP

SEQ ID NO: 82650 - protein, 26 aa, Artificial Sequence
  Cyclic GFR-binding peptide
GRYKKLIIQQKDNFYLMSIANMKTPT

SEQ ID NO: 82651 - protein, 24 aa, Artificial Sequence
  Cyclic GFR-binding peptide
VIMRYKKLLLVRGNDFYLMSIANT

SEQ ID NO: 82652 - protein, 38 aa, Artificial Sequence; identical to SEQ ID NO: 31301
  Cyclic GFR-binding peptide
  MOD_RES (2)..(33)..(34): Xaa is C or S

SEQ ID NO: 82653 - protein, 27 aa, Artificial Sequence
  Cyclic GFR-binding peptide
  MOD_RES (26)..(27): Xaa is C or S
RYKKLIIQQKDNFYLMSIANMKTPTXX

SEQ ID NO: 82654 - protein, 39 aa, Artificial Sequence; identical to SEQ ID NO: 31304
  Cyclic GFR-binding peptide
  MOD_RES (1)..(33)..(34): Xaa is C or S

SEQ ID NO: 82655 - protein, 34 aa, Artificial Sequence
  Cyclic GFR-binding peptide
  MOD_RES (30)..(31): Xaa is C or S
VVMGRYKKLIIQQKDNFYLMSIANMKTPTXXPGA

SEQ ID NO: 82656 - protein, 36 aa, Artificial Sequence; identical to SEQ ID NO: 31306
  Cyclic GFR-binding peptide
  MOD_RES (1)..(3)..(34)..(35): Xaa is C or S

SEQ ID NO: 82657 - protein, 26 aa, Artificial Sequence
  Cyclic GFR-binding peptide
VVMGRYKKLIIQQKDNFYLMSIANMK

SEQ ID NO: 82658 - protein, 28 aa, Artificial Sequence
  Cyclic GFR-binding peptide
  MOD_RES (1)..(1): Xaa is C or S
XEEVIMRYKKLLLVRGNDFYLMSIANTK

SEQ ID NO: 82659 - protein, 30 aa, Artificial Sequence
  Cyclic GFR-binding peptide
  MOD_RES (26)..(27): Xaa is C or S
RYKKLLLVRGNDFYLMSIANTKVPAXXTSP

SEQ ID NO: 82660 - protein, 38 aa, Artificial Sequence; identical to SEQ ID NO: 31310
  Cyclic GFR-binding peptide
  MOD_RES (1)..(32)..(33): Xaa is C or S

SEQ ID NO: 82661 - protein, 35 aa, Artificial Sequence; identical to SEQ ID NO: 31312
  Cyclic GFR-binding peptide
  MOD_RES (31)..(32): Xaa is C or S

SEQ ID NO: 82662 - protein, 33 aa, Artificial Sequence; identical to SEQ ID NO: 31314
  Cyclic GFR-binding peptide
  MOD_RES (2)..(33): Xaa is C or S

SEQ ID NO: 82663 - protein, 23 aa, Artificial Sequence
  Cyclic GFR-binding peptide
GRYKKLIIQQKDNFYLMSIANMK

SEQ ID NO: 82664 - protein, 22 aa, Artificial Sequence
  Cyclic GFR-binding peptide
MGRYKKLIIQQKDNFYLMSIAN

SEQ ID NO: 82665 - protein, 31 aa, Artificial Sequence; identical to SEQ ID NO: 31319
  Cyclic GFR-binding peptide
  MOD_RES (31)..(31): Xaa is C or S

SEQ ID NO: 82666 - protein, 23 aa, Artificial Sequence
  Cyclic GFR-binding peptide
MGRYKKLIIQQKDNFYLMSIANM

SEQ ID NO: 82667 - protein, 25 aa, Artificial Sequence
  Cyclic GFR-binding peptide
IMRYKKLLLVRGNDFYLMSIANTKV

SEQ ID NO: 82668 - protein, 29 aa, Artificial Sequence
  Cyclic GFR-binding peptide
DVVMGRYKKLIIQQKDNFYLMSIANMKTP

SEQ ID NO: 82669 - protein, 33 aa, Artificial Sequence
  Cyclic GFR-binding peptide
  MOD_RES (2)..(4): Xaa is C or S
LXGXEEVIMRYKKLLLVRGNDFYLMSIANTKVP

SEQ ID NO: 82670 - protein, 23 aa, Artificial Sequence
  Cyclic GFR-binding peptide
RYKKLLLVRGNDFYLMSIANTKV

SEQ ID NO: 82671 - protein, 26 aa, Artificial Sequence
  Cyclic GFR-binding peptide
  MOD_RES (26)..(26): Xaa is C or S
RYKKLIIQQKDNFYLMSIANMKTPTX

SEQ ID NO: 82672 - protein, 28 aa, Artificial Sequence
  Cyclic GFR-binding peptide
  MOD_RES (1)..(1): Xaa is C or S
XRDVVMGRYKKLIIQQKDNFYLMSIANM

SEQ ID NO: 82673 - protein, 35 aa, Artificial Sequence
  Cyclic GFR-binding peptide
  MOD_RES (30)..(31): Xaa is C or S
EVIMRYKKLLLVRGNDFYLMSIANTKVPAXXTSPV

SEQ ID NO: 82674 - protein, 29 aa, Artificial Sequence
  Cyclic GFR-binding peptide
  MOD_RES (2)..(2): Xaa is C or S
GXRDVVMGRYKKLIIQQKDNFYLMSIANM

SEQ ID NO: 82675 - protein, 26 aa, Artificial Sequence
  Cyclic GFR-binding peptide
  MOD_RES (26)..(26): Xaa is C or S
RYKKLLLVRGNDFYLMSIANTKVPAX

SEQ ID NO: 82676 - protein, 33 aa, Artificial Sequence
  Cyclic GFR-binding peptide
  MOD_RES (2)..(4): Xaa is C or S
SXGXRDVVMGRYKKLIIQQKDNFYLMSIANMKT

SEQ ID NO: 82677 - protein, 28 aa, Artificial Sequence
  Cyclic GFR-binding peptide
VVMGRYKKLIIQQKDNFYLMSIANMKTP

SEQ ID NO: 82678 - protein, 30 aa, Artificial Sequence
  Cyclic GFR-binding peptide
  MOD_RES (28)..(29): Xaa is C or S
MGRYKKLIIQQKDNFYLMSIANMKTPTXXP

SEQ ID NO: 82679 - protein, 22 aa, Artificial Sequence
  Cyclic GFR-binding peptide
RYKKLIIQQKDNFYLMSIANMK

SEQ ID NO: 82680 - protein, 26 aa, Artificial Sequence
  Cyclic GFR-binding peptide
MGRYKKLIIQQKDNFYLMSIANMKTP

SEQ ID NO: 82681 - protein, 31 aa, Artificial Sequence
  Cyclic GFR-binding peptide
  MOD_RES (26)..(27): Xaa is C or S
RYKKLLLVRGNDFYLMSIANTKVPAXXTSPV

SEQ ID NO: 82682 - protein, 28 aa, Artificial Sequence
  Cyclic GFR-binding peptide
DVVMGRYKKLIIQQKDNFYLMSIANMKT

SEQ ID NO: 82683 - protein, 30 aa, Artificial Sequence
  Cyclic GFR-binding peptide
  MOD_RES (26)..(27): Xaa is C or S
RYKKLIIQQKDNFYLMSIANMKTPTXXPGA

SEQ ID NO: 82684 - protein, 37 aa, Artificial Sequence; identical to SEQ ID NO: 31336
  Cyclic GFR-binding peptide
  MOD_RES (1)..(3)..(34)..(35): Xaa is C or S

SEQ ID NO: 82685 - protein, 30 aa, Artificial Sequence
  Cyclic GFR-binding peptide
  MOD_RES (1)..(1): Xaa is C or S
XEEVIMRYKKLLLVRGNDFYLMSIANTKVP

SEQ ID NO: 82686 - protein, 24 aa, Artificial Sequence
  Cyclic GFR-binding peptide
GRYKKLIIQQKDNFYLMSIANMKT

SEQ ID NO: 82687 - protein, 24 aa, Artificial Sequence
  Cyclic GFR-binding peptide
VMGRYKKLIIQQKDNFYLMSIANM

SEQ ID NO: 82688 - protein, 32 aa, Artificial Sequence
  Cyclic GFR-binding peptide
  MOD_RES (2)..(4): Xaa is C or S
LXGXEEVIMRYKKLLLVRGNDFYLMSIANTKV

SEQ ID NO: 82689 - protein, 27 aa, Artificial Sequence
  Cyclic GFR-binding peptide
IMRYKKLLLVRGNDFYLMSIANTKVPA

SEQ ID NO: 82690 - protein, 31 aa, Artificial Sequence
  Cyclic GFR-binding peptide
  MOD_RES (2)..(2): Xaa is C or S
GXRDVVMGRYKKLIIQQKDNFYLMSIANMKT

SEQ ID NO: 82691 - protein, 41 aa, Artificial Sequence; identical to SEQ ID NO: 31344
  Cyclic GFR-binding peptide
  MOD_RES (2)..(4)..(36)..(37): Xaa is C or S

SEQ ID NO: 82692 - protein, 37 aa, Artificial Sequence; identical to SEQ ID NO: 31346
  Cyclic GFR-binding peptide
  MOD_RES (32)..(33): Xaa is C or S

SEQ ID NO: 82693 - protein, 22 aa, Artificial Sequence
  Cyclic GFR-binding peptide
GRYKKLIIQQKDNFYLMSIANM

SEQ ID NO: 82694 - protein, 33 aa, Artificial Sequence
  Cyclic GFR-binding peptide
  MOD_RES (28)..(29): Xaa is C or S
MGRYKKLIIQQKDNFYLMSIANMKTPTXXPGAS

SEQ ID NO: 82695 - protein, 27 aa, Artificial Sequence
  Cyclic GFR-binding peptide
  MOD_RES (26)..(27): Xaa is C or S
RYKKLLLVRGNDFYLMSIANTKVPAXX

SEQ ID NO: 82696 - protein, 36 aa, Artificial Sequence; identical to SEQ ID NO: 31350
  Cyclic GFR-binding peptide
  MOD_RES (2)..(34)..(35): Xaa is C or S

SEQ ID NO: 82697 - protein, 33 aa, Artificial Sequence
  Cyclic GFR-binding peptide
  MOD_RES (29)..(30): Xaa is C or S
VIMRYKKLLLVRGNDFYLMSIANTKVPAXXTSP

SEQ ID NO: 82698 - protein, 40 aa, Artificial Sequence; identical to SEQ ID NO: 31352
  Cyclic GFR-binding peptide
  MOD_RES (2)..(4)..(35)..(36): Xaa is C or S

SEQ ID NO: 82699 - protein, 32 aa, Artificial Sequence
  Cyclic GFR-binding peptide
  MOD_RES (29)..(30): Xaa is C or S
VIMRYKKLLLVRGNDFYLMSIANTKVPAXXTS

SEQ ID NO: 82700 - protein, 25 aa, Artificial Sequence
  Cyclic GFR-binding peptide
GRYKKLIIQQKDNFYLMSIANMKTP

SEQ ID NO: 82701 - protein, 39 aa, Artificial Sequence; identical to SEQ ID NO: 31357
  Cyclic GFR-binding peptide
  MOD_RES (1)..(3)..(34)..(35): Xaa is C or S

SEQ ID NO: 82702 - protein, 35 aa, Artificial Sequence; identical to SEQ ID NO: 31361
  Cyclic GFR-binding peptide
  MOD_RES (2)..(33)..(34): Xaa is C or S

SEQ ID NO: 82703 - protein, 25 aa, Artificial Sequence
  Cyclic GFR-binding peptide
EEVIMRYKKLLLVRGNDFYLMSIAN

SEQ ID NO: 82704 - protein, 29 aa, Artificial Sequence
  Cyclic GFR-binding peptide
  MOD_RES (28)..(29): Xaa is C or S
IMRYKKLLLVRGNDFYLMSIANTKVPAXX

SEQ ID NO: 82705 - protein, 32 aa, Artificial Sequence; identical to SEQ ID NO: 31362
  Cyclic GFR-binding peptide
  MOD_RES (1)..(32): Xaa is C or S

SEQ ID NO: 82706 - protein, 29 aa, Artificial Sequence
  Cyclic GFR-binding peptide
  MOD_RES (29)..(29): Xaa is C or S
VIMRYKKLLLVRGNDFYLMSIANTKVPAX

SEQ ID NO: 82707 - protein, 35 aa, Artificial Sequence; identical to SEQ ID NO: 31365
  Cyclic GFR-binding peptide
  MOD_RES (2)..(4)..(35): Xaa is C or S

SEQ ID NO: 82708 - protein, 28 aa, Artificial Sequence
  Cyclic GFR-binding peptide
  MOD_RES (27)..(28): Xaa is C or S
GRYKKLIIQQKDNFYLMSIANMKTPTXX

SEQ ID NO: 82709 - protein, 27 aa, Artificial Sequence
  Cyclic GFR-binding peptide
  MOD_RES (27)..(27): Xaa is C or S
GRYKKLIIQQKDNFYLMSIANMKTPTX

SEQ ID NO: 82710 - protein, 27 aa, Artificial Sequence
  Cyclic GFR-binding peptide
DVVMGRYKKLIIQQKDNFYLMSIANMK

SEQ ID NO: 82711 - protein, 35 aa, Artificial Sequence; identical to SEQ ID NO: 31367
  Cyclic GFR-binding peptide
  MOD_RES (31)..(32): Xaa is C or S

SEQ ID NO: 82712 - protein, 26 aa, Artificial Sequence
  Cyclic GFR-binding peptide
IMRYKKLLLVRGNDFYLMSIANTKVP

SEQ ID NO: 82713 - protein, 33 aa, Artificial Sequence
  Cyclic GFR-binding peptide
  MOD_RES (27)..(28): Xaa is C or S
MRYKKLLLVRGNDFYLMSIANTKVPAXXTSPVR

SEQ ID NO: 82714 - protein, 23 aa, Artificial Sequence
  Cyclic GFR-binding peptide
MRYKKLLLVRGNDFYLMSIANTK

SEQ ID NO: 82715 - protein, 28 aa, Artificial Sequence
  Cyclic GFR-binding peptide
  MOD_RES (2)..(2): Xaa is C or S
GXEEVIMRYKKLLLVRGNDFYLMSIANT

SEQ ID NO: 82716 - protein, 32 aa, Artificial Sequence
  Cyclic GFR-binding peptide
  MOD_RES (2)..(2): Xaa is C or S
GXRDVVMGRYKKLIIQQKDNFYLMSIANMKTP

SEQ ID NO: 82717 - protein, 28 aa, Artificial Sequence
  Cyclic GFR-binding peptide
VMGRYKKLIIQQKDNFYLMSIANMKTPT

SEQ ID NO: 82718 - protein, 29 aa, Artificial Sequence
  Cyclic GFR-binding peptide
  MOD_RES (26)..(27): Xaa is C or S
RYKKLLLVRGNDFYLMSIANTKVPAXXTS

SEQ ID NO: 82719 - protein, 23 aa, Artificial Sequence
  Cyclic GFR-binding peptide
RYKKLIIQQKDNFYLMSIANMKT

SEQ ID NO: 82720 - protein, 36 aa, Artificial Sequence; identical to SEQ ID NO: 31373
  Cyclic GFR-binding peptide
  MOD_RES (2)..(4)..(36): Xaa is C or S

SEQ ID NO: 82721 - protein, 32 aa, Artificial Sequence; identical to SEQ ID NO: 31374
  Cyclic GFR-binding peptide
  MOD_RES (31)..(32): Xaa is C or S

SEQ ID NO: 82722 - protein, 25 aa, Artificial Sequence
  Cyclic GFR-binding peptide
MGRYKKLIIQQKDNFYLMSIANMKT

SEQ ID NO: 82723 - protein, 35 aa, Artificial Sequence; identical to SEQ ID NO: 31375
  Cyclic GFR-binding peptide
  MOD_RES (1)..(3)..(35): Xaa is C or S

SEQ ID NO: 82724 - protein, 40 aa, Artificial Sequence; identical to SEQ ID NO: 31376
  Cyclic GFR-binding peptide
  MOD_RES (1)..(3)..(34)..(35): Xaa is C or S

SEQ ID NO: 82725 - protein, 31 aa, Artificial Sequence
  Cyclic GFR-binding peptide
  MOD_RES (26)..(27): Xaa is C or S
RYKKLIIQQKDNFYLMSIANMKTPTXXPGAS

SEQ ID NO: 82726 - protein, 31 aa, Artificial Sequence
  Cyclic GFR-binding peptide
  MOD_RES (1)..(1): Xaa is C or S
XRDVVMGRYKKLIIQQKDNFYLMSIANMKTP

SEQ ID NO: 82727 - protein, 32 aa, Artificial Sequence
  Cyclic GFR-binding peptide
  MOD_RES (30)..(31): Xaa is C or S
EVIMRYKKLLLVRGNDFYLMSIANTKVPAXXT

SEQ ID NO: 82728 - protein, 29 aa, Artificial Sequence
  Cyclic GFR-binding peptide
  MOD_RES (2)..(4): Xaa is C or S
LXGXEEVIMRYKKLLLVRGNDFYLMSIAN

SEQ ID NO: 82729 - protein, 38 aa, Artificial Sequence; identical to SEQ ID NO: 31380
  Cyclic GFR-binding peptide
  MOD_RES (2)..(4)..(36)..(37): Xaa is C or S

SEQ ID NO: 82730 - protein, 33 aa, Artificial Sequence
  Cyclic GFR-binding peptide
  MOD_RES (30)..(31): Xaa is C or S
VVMGRYKKLIIQQKDNFYLMSIANMKTPTXXPG

SEQ ID NO: 82731 - protein, 31 aa, Artificial Sequence; identical to SEQ ID NO: 31385
  Cyclic GFR-binding peptide
  MOD_RES (31)..(31): Xaa is C or S

SEQ ID NO: 82732 - protein, 38 aa, Artificial Sequence; identical to SEQ ID NO: 31213
  Cyclic GFR-binding peptide
  MOD_RES (32)..(33): Xaa is C or S

SEQ ID NO: 82733 - protein, 27 aa, Artificial Sequence
  Cyclic GFR-binding peptide
VIMRYKKLLLVRGNDFYLMSIANTKVP

SEQ ID NO: 82734 - protein, 37 aa, Artificial Sequence; identical to SEQ ID NO: 31219
  Cyclic GFR-binding peptide
  MOD_RES (2)..(4)..(36)..(37): Xaa is C or S

SEQ ID NO: 82735 - protein, 25 aa, Artificial Sequence
  Cyclic GFR-binding peptide
RYKKLIIQQKDNFYLMSIANMKTPT

SEQ ID NO: 82736 - protein, 37 aa, Artificial Sequence; identical to SEQ ID NO: 31220
  Cyclic GFR-binding peptide
  MOD_RES (2)..(34)..(35): Xaa is C or S

SEQ ID NO: 82737 - protein, 40 aa, Artificial Sequence; identical to SEQ ID NO: 31221
  Cyclic GFR-binding peptide
  MOD_RES (2)..(4)..(36)..(37): Xaa is C or S

SEQ ID NO: 82738 - protein, 29 aa, Artificial Sequence
  Cyclic GFR-binding peptide
  MOD_RES (26)..(27): Xaa is C or S
RYKKLIIQQKDNFYLMSIANMKTPTXXPG

SEQ ID NO: 82739 - protein, 30 aa, Artificial Sequence
  Cyclic GFR-binding peptide
  MOD_RES (30)..(30): Xaa is C or S
VVMGRYKKLIIQQKDNFYLMSIANMKTPTX

SEQ ID NO: 82740 - protein, 36 aa, Artificial Sequence
  Cyclic GFR-binding peptide
  MOD_RES (30)..(31): Xaa is C or S
VVMGRYKKLIIQQKDNFYLMSIANMKTPTXXPGASG

SEQ ID NO: 82741 - protein, 23 aa, Artificial Sequence
  Cyclic GFR-binding peptide
VMGRYKKLIIQQKDNFYLMSIAN

SEQ ID NO: 82742 - protein, 31 aa, Artificial Sequence
  Cyclic GFR-binding peptide
  MOD_RES (29)..(30): Xaa is C or S
VIMRYKKLLLVRGNDFYLMSIANTKVPAXXT

SEQ ID NO: 82743 - protein, 26 aa, Artificial Sequence
  Cyclic GFR-binding peptide
DVVMGRYKKLIIQQKDNFYLMSIANM

SEQ ID NO: 82744 - protein, 31 aa, Artificial Sequence
  Cyclic GFR-binding peptide
  MOD_RES (30)..(31): Xaa is C or S
EVIMRYKKLLLVRGNDFYLMSIANTKVPAXX

SEQ ID NO: 82745 - protein, 34 aa, Artificial Sequence
  Cyclic GFR-binding peptide
  MOD_RES (29)..(30): Xaa is C or S
VIMRYKKLLLVRGNDFYLMSIANTKVPAXXTSPV

SEQ ID NO: 82746 - protein, 25 aa, Artificial Sequence
  Cyclic GFR-binding peptide
VIMRYKKLLLVRGNDFYLMSIANTK

SEQ ID NO: 82747 - protein, 20 aa, Artificial Sequence
  Cyclic GFR-binding peptide
RYKKLLLVRGNDFYLMSIAN

SEQ ID NO: 82748 - protein, 27 aa, Artificial Sequence
  Cyclic GFR-binding peptide
VMGRYKKLIIQQKDNFYLMSIANMKTP

SEQ ID NO: 82749 - protein, 34 aa, Artificial Sequence; identical to SEQ ID NO: 31236
  Cyclic GFR-binding peptide
  MOD_RES (31)..(32): Xaa is C or S

SEQ ID NO: 82750 - protein, 32 aa, Artificial Sequence
  Cyclic GFR-binding peptide
  MOD_RES (28)..(29): Xaa is C or S
MGRYKKLIIQQKDNFYLMSIANMKTPTXXPGA

SEQ ID NO: 82751 - protein, 36 aa, Artificial Sequence; identical to SEQ ID NO: 31242
  Cyclic GFR-binding peptide
  MOD_RES (31)..(32): Xaa is C or S

SEQ ID NO: 82752 - protein, 29 aa, Artificial Sequence
  Cyclic GFR-binding peptide
  MOD_RES (2)..(2): Xaa is C or S
GXEEVIMRYKKLLLVRGNDFYLMSIANTK

SEQ ID NO: 82753 - protein, 29 aa, Artificial Sequence
  Cyclic GFR-binding peptide
VVMGRYKKLIIQQKDNFYLMSIANMKTPT

SEQ ID NO: 82754 - protein, 28 aa, Artificial Sequence
  Cyclic GFR-binding peptide
  MOD_RES (28)..(28): Xaa is C or S
IMRYKKLLLVRGNDFYLMSIANTKVPAX

SEQ ID NO: 82755 - protein, 33 aa, Artificial Sequence
  Cyclic GFR-binding peptide
  MOD_RES (1)..(3): Xaa is C or S
XGXRDVVMGRYKKLIIQQKDNFYLMSIANMKTP

SEQ ID NO: 82756 - protein, 35 aa, Artificial Sequence; identical to SEQ ID NO: 31244
  Cyclic GFR-binding peptide
  MOD_RES (2)..(4): Xaa is C or S

SEQ ID NO: 82757 - protein, 35 aa, Artificial Sequence; identical to SEQ ID NO: 31245
  Cyclic GFR-binding peptide
  MOD_RES (32)..(33): Xaa is C or S

SEQ ID NO: 82758 - protein, 30 aa, Artificial Sequence; identical to SEQ ID NO: 31249
  Cyclic GFR-binding peptide

SEQ ID NO: 82759 - protein, 33 aa, Artificial Sequence
  Cyclic GFR-binding peptide
  MOD_RES (27)..(28): Xaa is C or S
GRYKKLIIQQKDNFYLMSIANMKTPTXXPGASG

SEQ ID NO: 82760 - protein, 29 aa, Artificial Sequence
  Cyclic GFR-binding peptide
  MOD_RES (29)..(29): Xaa is C or S
VMGRYKKLIIQQKDNFYLMSIANMKTPTX

SEQ ID NO: 82761 - protein, 37 aa, Artificial Sequence; identical to SEQ ID NO: 31252
  Cyclic GFR-binding peptide
  MOD_RES (1)..(33)..(34): Xaa is C or S

SEQ ID NO: 82762 - protein, 38 aa, Artificial Sequence; identical to SEQ ID NO: 31260
  Cyclic GFR-binding peptide
  MOD_RES (2)..(4)..(35)..(36): Xaa is C or S

SEQ ID NO: 82763 - protein, 34 aa, Artificial Sequence
  Cyclic GFR-binding peptide
  MOD_RES (2)..(4): Xaa is C or S
SXGXRDVVMGRYKKLIIQQKDNFYLMSIANMKTP

SEQ ID NO: 82764 - protein, 31 aa, Artificial Sequence; identical to SEQ ID NO: 31263
  Cyclic GFR-binding peptide

SEQ ID NO: 82765 - protein, 30 aa, Artificial Sequence
  Cyclic GFR-binding peptide
  MOD_RES (2)..(2): Xaa is C or S
GXEEVIMRYKKLLLVRGNDFYLMSIANTKV

SEQ ID NO: 82766 - protein, 20 aa, Artificial Sequence
  Cyclic GFR-binding peptide
RYKKLLLVRGNDFYLMSIAN

SEQ ID NO: 82767 - protein, 24 aa, Artificial Sequence
  Cyclic GFR-binding peptide
VVMGRYKKLIIQQKDNFYLMSIAN

SEQ ID NO: 82768 - protein, 32 aa, Artificial Sequence; identical to SEQ ID NO: 31272
  Cyclic GFR-binding peptide
  MOD_RES (31)..(32): Xaa is C or S

SEQ ID NO: 82769 - protein, 39 aa, Artificial Sequence; identical to SEQ ID NO: 31273
  Cyclic GFR-binding peptide
  MOD_RES (1)..(3)..(35)..(36): Xaa is C or S

SEQ ID NO: 82770 - protein, 22 aa, Artificial Sequence
  Cyclic GFR-binding peptide
RYKKLLLVRGNDFYLMSIANTK

SEQ ID NO: 82771 - protein, 35 aa, Artificial Sequence
  Cyclic GFR-binding peptide
  MOD_RES (29)..(30): Xaa is C or S
VMGRYKKLIIQQKDNFYLMSIANMKTPTXXPGASG

SEQ ID NO: 82772 - protein, 23 aa, Artificial Sequence
  Cyclic GFR-binding peptide
IMRYKKLLLVRGNDFYLMSIANT

SEQ ID NO: 82773 - protein, 37 aa, Artificial Sequence; identical to SEQ ID NO: 31280
  Cyclic GFR-binding peptide
  MOD_RES (2)..(4)..(35)..(36): Xaa is C or S

SEQ ID NO: 82774 - protein, 30 aa, Artificial Sequence
  Cyclic GFR-binding peptide
  MOD_RES (28)..(29): Xaa is C or S
IMRYKKLLLVRGNDFYLMSIANTKVPAXXT

SEQ ID NO: 82775 - protein, 30 aa, Artificial Sequence
  Cyclic GFR-binding peptide
  MOD_RES (2)..(4): Xaa is C or S
LXGXEEVIMRYKKLLLVRGNDFYLMSIANT

SEQ ID NO: 82776 - protein, 24 aa, Artificial Sequence
  Cyclic GFR-binding peptide
EVIMRYKKLLLVRGNDFYLMSIAN

SEQ ID NO: 82777 - protein, 34 aa, Artificial Sequence; identical to SEQ ID NO: 31287
  Cyclic GFR-binding peptide
  MOD_RES (2)..(34): Xaa is C or S

SEQ ID NO: 82778 - protein, 37 aa, Artificial Sequence; identical to SEQ ID NO: 31288
  Cyclic GFR-binding peptide
  MOD_RES (2)..(33)..(34): Xaa is C or S

SEQ ID NO: 82779 - protein, 21 aa, Artificial Sequence
  Cyclic GFR-binding peptide
MRYKKLLLVRGNDFYLMSIAN

SEQ ID NO: 82780 - protein, 28 aa, Artificial Sequence
  Cyclic GFR-binding peptide
RDVVMGRYKKLIIQQKDNFYLMSIANMK

SEQ ID NO: 82781 - protein, 33 aa, Artificial Sequence
  Cyclic GFR-binding peptide
  MOD_RES (30)..(31): Xaa is C or S
EVIMRYKKLLLVRGNDFYLMSIANTKVPAXXTS

SEQ ID NO: 82782 - protein, 34 aa, Artificial Sequence; identical to SEQ ID NO: 31292
  Cyclic GFR-binding peptide
  MOD_RES (2)..(33)..(34): Xaa is C or S

SEQ ID NO: 82783 - protein, 33 aa, Artificial Sequence; identical to SEQ ID NO: 31293
  Cyclic GFR-binding peptide
  MOD_RES (32)..(33): Xaa is C or S

SEQ ID NO: 82784 - protein, 31 aa, Artificial Sequence
  Cyclic GFR-binding peptide
  MOD_RES (29)..(30): Xaa is C or S
VMGRYKKLIIQQKDNFYLMSIANMKTPTXXP

SEQ ID NO: 82785 - protein, 25 aa, Artificial Sequence
  Cyclic GFR-binding peptide
DVVMGRYKKLIIQQKDNFYLMSIAN

SEQ ID NO: 82786 - protein, 36 aa, Artificial Sequence; identical to SEQ ID NO: 31294
  Cyclic GFR-binding peptide
  MOD_RES (32)..(33): Xaa is C or S

SEQ ID NO: 82787 - protein, 33 aa, Artificial Sequence; identical to SEQ ID NO: 31297
  Cyclic GFR-binding peptide
  MOD_RES (1)..(33): Xaa is C or S

SEQ ID NO: 82788 - protein, 39 aa, Artificial Sequence; identical to SEQ ID NO: 31299
  Cyclic GFR-binding peptide
  MOD_RES (2)..(4)..(36)..(37): Xaa is C or S

SEQ ID NO: 82789 - protein, 37 aa, Artificial Sequence; identical to SEQ ID NO: 31300
  Cyclic GFR-binding peptide
  MOD_RES (31)..(32): Xaa is C or S

SEQ ID NO: 82790 - protein, 27 aa, Artificial Sequence
  Cyclic GFR-binding peptide
MGRYKKLIIQQKDNFYLMSIANMKTPT

SEQ ID NO: 82791 - protein, 28 aa, Artificial Sequence
  Cyclic GFR-binding peptide
  MOD_RES (26)..(27): Xaa is C or S
RYKKLIIQQKDNFYLMSIANMKTPTXXP

SEQ ID NO: 82792 - protein, 29 aa, Artificial Sequence
  Cyclic GFR-binding peptide
RDVVMGRYKKLIIQQKDNFYLMSIANMKT

SEQ ID NO: 82793 - protein, 24 aa, Artificial Sequence
  Cyclic GFR-binding peptide
MGRYKKLIIQQKDNFYLMSIANMK

SEQ ID NO: 82794 - protein, 30 aa, Artificial Sequence; identical to SEQ ID NO: 31315
  Cyclic GFR-binding peptide

SEQ ID NO: 82795 - protein, 34 aa, Artificial Sequence; identical to SEQ ID NO: 31316
  Cyclic GFR-binding peptide
  MOD_RES (1)..(3): Xaa is C or S

SEQ ID NO: 82796 - protein, 32 aa, Artificial Sequence
  Cyclic GFR-binding peptide
  MOD_RES (29)..(30): Xaa is C or S
VMGRYKKLIIQQKDNFYLMSIANMKTPTXXPG

SEQ ID NO: 82797 - protein, 30 aa, Artificial Sequence
  Cyclic GFR-binding peptide
  MOD_RES (27)..(28): Xaa is C or S
MRYKKLLLVRGNDFYLMSIANTKVPAXXTS

SEQ ID NO: 82798 - protein, 42 aa, Artificial Sequence; identical to SEQ ID NO: 31324
  Cyclic GFR-binding peptide
  MOD_RES (2)..(4)..(36)..(37): Xaa is C or S

SEQ ID NO: 82799 - protein, 36 aa, Artificial Sequence; identical to SEQ ID NO: 31326
  Cyclic GFR-binding peptide
  MOD_RES (2)..(33)..(34): Xaa is C or S

SEQ ID NO: 82800 - protein, 40 aa, Artificial Sequence; identical to SEQ ID NO: 31329
  Cyclic GFR-binding peptide
  MOD_RES (2)..(34)..(35): Xaa is C or S

SEQ ID NO: 82801 - protein, 24 aa, Artificial Sequence
  Cyclic GFR-binding peptide
RYKKLIIQQKDNFYLMSIANMKTP

SEQ ID NO: 82802 - protein, 28 aa, Artificial Sequence
  Cyclic GFR-binding peptide
  MOD_RES (1)..(3): Xaa is C or S
XGXEEVIMRYKKLLLVRGNDFYLMSIAN

SEQ ID NO: 82803 - protein, 31 aa, Artificial Sequence
  Cyclic GFR-binding peptide
  MOD_RES (2)..(4): Xaa is C or S
SXGXRDVVMGRYKKLIIQQKDNFYLMSIANM

SEQ ID NO: 82804 - protein, 36 aa, Artificial Sequence; identical to SEQ ID NO: 31332
  Cyclic GFR-binding peptide
  MOD_RES (1)..(3)..(35)..(36): Xaa is C or S

SEQ ID NO: 82805 - protein, 39 aa, Artificial Sequence; identical to SEQ ID NO: 31333
  Cyclic GFR-binding peptide
  MOD_RES (2)..(33)..(34): Xaa is C or S

SEQ ID NO: 82806 - protein, 31 aa, Artificial Sequence
  Cyclic GFR-binding peptide
  MOD_RES (2)..(2): Xaa is C or S
GXEEVIMRYKKLLLVRGNDFYLMSIANTKVP

SEQ ID NO: 82807 - protein, 35 aa, Artificial Sequence
  Cyclic GFR-binding peptide
  MOD_RES (29)..(30): Xaa is C or S
VIMRYKKLLLVRGNDFYLMSIANTKVPAXXTSPVR

SEQ ID NO: 82808 - protein, 24 aa, Artificial Sequence
  Cyclic GFR-binding peptide
MRYKKLLLVRGNDFYLMSIANTKV

SEQ ID NO: 82809 - protein, 31 aa, Artificial Sequence
  Cyclic GFR-binding peptide
  MOD_RES (27)..(28): Xaa is C or S
GRYKKLIIQQKDNFYLMSIANMKTPTXXPGA

SEQ ID NO: 82810 - protein, 33 aa, Artificial Sequence; identical to SEQ ID NO: 31338
  Cyclic GFR-binding peptide
  MOD_RES (31)..(32): Xaa is C or S

SEQ ID NO: 82811 - protein, 26 aa, Artificial Sequence
  Cyclic GFR-binding peptide
VMGRYKKLIIQQKDNFYLMSIANMKT

SEQ ID NO: 82812 - protein, 38 aa, Artificial Sequence; identical to SEQ ID NO: 31341
  Cyclic GFR-binding peptide
  MOD_RES (1)..(3)..(34)..(35): Xaa is C or S

SEQ ID NO: 82813 - protein, 28 aa, Artificial Sequence
  Cyclic GFR-binding peptide
  MOD_RES (26)..(27): Xaa is C or S
RYKKLLLVRGNDFYLMSIANTKVPAXXT

SEQ ID NO: 82814 - protein, 37 aa, Artificial Sequence; identical to SEQ ID NO: 31343
  Cyclic GFR-binding peptide
  MOD_RES (1)..(32)..(33): Xaa is C or S

SEQ ID NO: 82815 - protein, 33 aa, Artificial Sequence; identical to SEQ ID NO: 31345
  Cyclic GFR-binding peptide
  MOD_RES (2)..(2): Xaa is C or S

SEQ ID NO: 82816 - protein, 31 aa, Artificial Sequence
  Cyclic GFR-binding peptide
  MOD_RES (28)..(29): Xaa is C or S
IMRYKKLLLVRGNDFYLMSIANTKVPAXXTS

SEQ ID NO: 82817 - protein, 30 aa, Artificial Sequence
  Cyclic GFR-binding peptide
  MOD_RES (27)..(28): Xaa is C or S
GRYKKLIIQQKDNFYLMSIANMKTPTXXPG

SEQ ID NO: 82818 - protein, 32 aa, Artificial Sequence; identical to SEQ ID NO: 31347
  Cyclic GFR-binding peptide
  MOD_RES (2)..(2): Xaa is C or S

SEQ ID NO: 82819 - protein, 20 aa, Artificial Sequence
  Cyclic GFR-binding peptide
RYKKLIIQQKDNFYLMSIAN

SEQ ID NO: 82820 - protein, 39 aa, Artificial Sequence; identical to SEQ ID NO: 31355
  Cyclic GFR-binding peptide
  MOD_RES (2)..(34)..(35): Xaa is C or S

SEQ ID NO: 82821 - protein, 28 aa, Artificial Sequence
  Cyclic GFR-binding peptide
  MOD_RES (27)..(28): Xaa is C or S
MRYKKLLLVRGNDFYLMSIANTKVPAXX

SEQ ID NO: 82822 - protein, 27 aa, Artificial Sequence
  Cyclic GFR-binding peptide
  MOD_RES (27)..(27): Xaa is C or S
MRYKKLLLVRGNDFYLMSIANTKVPAX

SEQ ID NO: 82823 - protein, 35 aa, Artificial Sequence; identical to SEQ ID NO: 31360
  Cyclic GFR-binding peptide
  MOD_RES (1)..(33)..(34): Xaa is C or S

SEQ ID NO: 82824 - protein, 32 aa, Artificial Sequence
  Cyclic GFR-binding peptide
  MOD_RES (28)..(29): Xaa is C or S
IMRYKKLLLVRGNDFYLMSIANTKVPAXXTSP

SEQ ID NO: 82825 - protein, 24 aa, Artificial Sequence
  Cyclic GFR-binding peptide
RYKKLLLVRGNDFYLMSIANTKVP

SEQ ID NO: 82826 - protein, 22 aa, Artificial Sequence
  Cyclic GFR-binding peptide
IMRYKKLLLVRGNDFYLMSIAN

SEQ ID NO: 82827 - protein, 29 aa, Artificial Sequence
  Cyclic GFR-binding peptide
EEVIMRYKKLLLVRGNDFYLMSIANTKVP

SEQ ID NO: 82828 - protein, 35 aa, Artificial Sequence
  Cyclic GFR-binding peptide
  MOD_RES (30)..(31): Xaa is C or S
VVMGRYKKLIIQQKDNFYLMSIANMKTPTXXPGAS

SEQ ID NO: 82829 - protein, 29 aa, Artificial Sequence
  Cyclic GFR-binding peptide
  MOD_RES (1)..(1): Xaa is C or S
XRDVVMGRYKKLIIQQKDNFYLMSIANMK

SEQ ID NO: 82830 - protein, 27 aa, Artificial Sequence
  Cyclic GFR-binding peptide
  MOD_RES (2)..(2): Xaa is C or S
GXEEVIMRYKKLLLVRGNDFYLMSIAN

SEQ ID NO: 82831 - protein, 27 aa, Artificial Sequence
  Cyclic GFR-binding peptide
  MOD_RES (1)..(1): Xaa is C or S
XRDVVMGRYKKLIIQQKDNFYLMSIAN

SEQ ID NO: 82832 - protein, 29 aa, Artificial Sequence
  Cyclic GFR-binding peptide
  MOD_RES (1)..(3): Xaa is C or S
XGXEEVIMRYKKLLLVRGNDFYLMSIANT

SEQ ID NO: 82833 - protein, 35 aa, Artificial Sequence; identical to SEQ ID NO: 31371
  Cyclic GFR-binding peptide
  MOD_RES (1)..(32)..(33): Xaa is C or S

SEQ ID NO: 82834 - protein, 29 aa, Artificial Sequence
  Cyclic GFR-binding peptide
EVIMRYKKLLLVRGNDFYLMSIANTKVPA

SEQ ID NO: 82835 - protein, 28 aa, Artificial Sequence
  Cyclic GFR-binding peptide
EVIMRYKKLLLVRGNDFYLMSIANTKVP

SEQ ID NO: 82836 - protein, 31 aa, Artificial Sequence
  Cyclic GFR-binding peptide
  MOD_RES (1)..(3): Xaa is C or S
XGXRDVVMGRYKKLIIQQKDNFYLMSIANMK

SEQ ID NO: 82837 - protein, 25 aa, Artificial Sequence
  Cyclic GFR-binding peptide
RYKKLLLVRGNDFYLMSIANTKVPA

SEQ ID NO: 82838 - protein, 32 aa, Artificial Sequence
  Cyclic GFR-binding peptide
  MOD_RES (26)..(27): Xaa is C or S
RYKKLLLVRGNDFYLMSIANTKVPAXXTSPVR

SEQ ID NO: 82839 - protein, 31 aa, Artificial Sequence
  Cyclic GFR-binding peptide
  MOD_RES (2)..(4): Xaa is C or S
LXGXEEVIMRYKKLLLVRGNDFYLMSIANTK

SEQ ID NO: 82840 - protein, 34 aa, Artificial Sequence
  Cyclic GFR-binding peptide
  MOD_RES (29)..(30): Xaa is C or S
VMGRYKKLIIQQKDNFYLMSIANMKTPTXXPGAS

SEQ ID NO: 82841 - protein, 31 aa, Artificial Sequence
  Cyclic GFR-binding peptide
  MOD_RES (27)..(28): Xaa is C or S
MRYKKLLLVRGNDFYLMSIANTKVPAXXTSP

SEQ ID NO: 82842 - protein, 30 aa, Artificial Sequence
  Cyclic GFR-binding peptide
  MOD_RES (2)..(2): Xaa is C or S
GXRDVVMGRYKKLIIQQKDNFYLMSIANMK

SEQ ID NO: 82843 - protein, 26 aa, Artificial Sequence
  Cyclic GFR-binding peptide
VIMRYKKLLLVRGNDFYLMSIANTKV

SEQ ID NO: 82844 - protein, 27 aa, Artificial Sequence
  Cyclic GFR-binding peptide
EVIMRYKKLLLVRGNDFYLMSIANTKV

SEQ ID NO: 82845 - protein, 21 aa, Artificial Sequence
  Cyclic GFR-binding peptide
RYKKLIIQQKDNFYLMSIANM

SEQ ID NO: 82846 - protein, 27 aa, Artificial Sequence
  Cyclic GFR-binding peptide
  MOD_RES (1)..(1): Xaa is C or S
XEEVIMRYKKLLLVRGNDFYLMSIANT

SEQ ID NO: 82847 - protein, 31 aa, Artificial Sequence
  Cyclic GFR-binding peptide
  MOD_RES (30)..(31): Xaa is C or S
VVMGRYKKLIIQQKDNFYLMSIANMKTPTXX

SEQ ID NO: 82848 - protein, 33 aa, Artificial Sequence; identical to SEQ ID NO: 31381
  Cyclic GFR-binding peptide
  MOD_RES (1)..(32)..(33): Xaa is C or S

SEQ ID NO: 82849 - protein, 25 aa, Artificial Sequence
  Cyclic GFR-binding peptide
VMGRYKKLIIQQKDNFYLMSIANMK

SEQ ID NO: 82850 - protein, 29 aa, Artificial Sequence
  Cyclic GFR-binding peptide
  MOD_RES (27)..(28): Xaa is C or S
MRYKKLLLVRGNDFYLMSIANTKVPAXXT

SEQ ID NO: 82851 - protein, 30 aa, Artificial Sequence
  Cyclic GFR-binding peptide
  MOD_RES (29)..(30): Xaa is C or S
VMGRYKKLIIQQKDNFYLMSIANMKTPTXX

SEQ ID NO: 82852 - protein, 32 aa, Artificial Sequence
  Cyclic GFR-binding peptide
  MOD_RES (26)..(27): Xaa is C or S
RYKKLIIQQKDNFYLMSIANMKTPTXXPGASG

SEQ ID NO: 82853 - protein, 26 aa, Artificial Sequence
  Cyclic GFR-binding peptide
  MOD_RES (1)..(1): Xaa is C or S
XEEVIMRYKKLLLVRGNDFYLMSIAN

SEQ ID NO: 82854 - protein, 32 aa, Artificial Sequence
  Cyclic GFR-binding peptide
  MOD_RES (29)..(31): Xaa is C or S
KMNAISMLYFNDKQQIILKKYRGMVVDRXGXS

SEQ ID NO: 82855 - protein, 31 aa, Artificial Sequence; identical to SEQ ID NO: 31391
  Cyclic GFR-binding peptide
  MOD_RES (31)..(31): Xaa is C or S

SEQ ID NO: 82856 - protein, 25 aa, Artificial Sequence
  Cyclic GFR-binding peptide
MNAISMLYFNDKQQIILKKYRGMVV

SEQ ID NO: 82857 - protein, 41 aa, Artificial Sequence; identical to SEQ ID NO: 31396
  Cyclic GFR-binding peptide
  MOD_RES (6)..(7)..(39)..(41): Xaa is C or S

SEQ ID NO: 82858 - protein, 34 aa, Artificial Sequence; identical to SEQ ID NO: 31397
  Cyclic GFR-binding peptide
  MOD_RES (2)..(3)..(34): Xaa is C or S

SEQ ID NO: 82859 - protein, 35 aa, Artificial Sequence; identical to SEQ ID NO: 31398
  Cyclic GFR-binding peptide
  MOD_RES (1)..(2)..(34): Xaa is C or S

SEQ ID NO: 82860 - protein, 25 aa, Artificial Sequence
  Cyclic GFR-binding peptide
TNAISMLYFDNGRVLLLKKYRMIVE

SEQ ID NO: 82861 - protein, 32 aa, Artificial Sequence; identical to SEQ ID NO: 31400
  Cyclic GFR-binding peptide
  MOD_RES (1)..(1): Xaa is C or S

SEQ ID NO: 82862 - protein, 34 aa, Artificial Sequence; identical to SEQ ID NO: 31403
  Cyclic GFR-binding peptide
  MOD_RES (31)..(33): Xaa is C or S

SEQ ID NO: 82863 - protein, 28 aa, Artificial Sequence
  Cyclic GFR-binding peptide
  MOD_RES (1)..(1): Xaa is C or S
XTPTKMNAISMLYFNDKQQIILKKYRGM

SEQ ID NO: 82864 - protein, 40 aa, Artificial Sequence; identical to SEQ ID NO: 31405
  Cyclic GFR-binding peptide
  MOD_RES (5)..(6)..(38)..(40): Xaa is C or S

SEQ ID NO: 82865 - protein, 34 aa, Artificial Sequence
  Cyclic GFR-binding peptide
  MOD_RES (4)..(5): Xaa is C or S
PSTXXAPVKTNAISMLYFDNGRVLLLKKYRMIVE

SEQ ID NO: 82866 - protein, 30 aa, Artificial Sequence
  Cyclic GFR-binding peptide
  MOD_RES (27)..(29): Xaa is C or S
NAISMLYFNDKQQIILKKYRGMVVDRXGXS

SEQ ID NO: 82867 - protein, 33 aa, Artificial Sequence
  Cyclic GFR-binding peptide
  MOD_RES (5)..(6): Xaa is C or S
VPSTXXAPVKTNAISMLYFDNGRVLLLKKYRMI

SEQ ID NO: 82868 - protein, 32 aa, Artificial Sequence
  Cyclic GFR-binding peptide
  MOD_RES (5)..(6): Xaa is C or S
SAGPXXTPTKMNAISMLYFNDKQQIILKKYRG

SEQ ID NO: 82869 - protein, 26 aa, Artificial Sequence
  Cyclic GFR-binding peptide
KTNAISMLYFDNGRVLLLKKYRMIVE

SEQ ID NO: 82870 - protein, 33 aa, Artificial Sequence
  Cyclic GFR-binding peptide
  MOD_RES (4)..(5): Xaa is C or S
AGPXXTPTKMNAISMLYFNDKQQIILKKYRGMV

SEQ ID NO: 82871 - protein, 32 aa, Artificial Sequence
  Cyclic GFR-binding peptide
  MOD_RES (30)..(32): Xaa is C or S
TKMNAISMLYFNDKQQIILKKYRGMVVDRXGX

SEQ ID NO: 82872 - protein, 27 aa, Artificial Sequence
  Cyclic GFR-binding peptide
KTNAISMLYFDNGRVLLLKKYRMIVEE

SEQ ID NO: 82873 - protein, 26 aa, Artificial Sequence
  Cyclic GFR-binding peptide
TNAISMLYFDNGRVLLLKKYRMIVEE

SEQ ID NO: 82874 - protein, 30 aa, Artificial Sequence
  Cyclic GFR-binding peptide
  MOD_RES (1)..(1): Xaa is C or S
XAPVKTNAISMLYFDNGRVLLLKKYRMIVE

SEQ ID NO: 82875 - protein, 38 aa, Artificial Sequence; identical to SEQ ID NO: 31412
  Cyclic GFR-binding peptide
  MOD_RES (4)..(5)..(37): Xaa is C or S

SEQ ID NO: 82876 - protein, 26 aa, Artificial Sequence
  Cyclic GFR-binding peptide
APVKTNAISMLYFDNGRVLLLKKYRM

SEQ ID NO: 82877 - protein, 20 aa, Artificial Sequence
  Cyclic GFR-binding peptide
NAISMLYFNDKQQIILKKYR

SEQ ID NO: 82878 - protein, 21 aa, Artificial Sequence
  Cyclic GFR-binding peptide
NAISMLYFNDKQQIILKKYRG

SEQ ID NO: 82879 - protein, 36 aa, Artificial Sequence; identical to SEQ ID NO: 31413
  Cyclic GFR-binding peptide
  MOD_RES (5)..(6): Xaa is C or S

SEQ ID NO: 82880 - protein, 26 aa, Artificial Sequence
  Cyclic GFR-binding peptide
NAISMLYFNDKQQIILKKYRGMVVDR

SEQ ID NO: 82881 - protein, 32 aa, Artificial Sequence
  Cyclic GFR-binding peptide
  MOD_RES (30)..(32): Xaa is C or S
PVKTNAISMLYFDNGRVLLLKKYRMIVEEXGX

SEQ ID NO: 82882 - protein, 29 aa, Artificial Sequence
  Cyclic GFR-binding peptide
  MOD_RES (29)..(29): Xaa is C or S
VKTNAISMLYFDNGRVLLLKKYRMIVEEX

SEQ ID NO: 82883 - protein, 29 aa, Artificial Sequence
  Cyclic GFR-binding peptide
  MOD_RES (2)..(3): Xaa is C or S
PXXTPTKMNAISMLYFNDKQQIILKKYRG

SEQ ID NO: 82884 - protein, 30 aa, Artificial Sequence
  Cyclic GFR-binding peptide
  MOD_RES (28)..(30): Xaa is C or S
MNAISMLYFNDKQQIILKKYRGMVVDRXGX

SEQ ID NO: 82885 - protein, 29 aa, Artificial Sequence
  Cyclic GFR-binding peptide
  MOD_RES (27)..(29): Xaa is C or S
NAISMLYFNDKQQIILKKYRGMVVDRXGX

SEQ ID NO: 82886 - protein, 29 aa, Artificial Sequence
  Cyclic GFR-binding peptide
  MOD_RES (1)..(2): Xaa is C or S
XXTPTKMNAISMLYFNDKQQIILKKYRGM

SEQ ID NO: 82887 - protein, 34 aa, Artificial Sequence
  Cyclic GFR-binding peptide
  MOD_RES (6)..(7): Xaa is C or S
GSAGPXXTPTKMNAISMLYFNDKQQIILKKYRGM

SEQ ID NO: 82888 - protein, 34 aa, Artificial Sequence; identical to SEQ ID NO: 31421
  Cyclic GFR-binding peptide
  MOD_RES (3)..(4): Xaa is C or S

SEQ ID NO: 82889 - protein, 25 aa, Artificial Sequence
  Cyclic GFR-binding peptide
PVKTNAISMLYFDNGRVLLLKKYRM

SEQ ID NO: 82890 - protein, 31 aa, Artificial Sequence
  Cyclic GFR-binding peptide
  MOD_RES (29)..(31): Xaa is C or S
VKTNAISMLYFDNGRVLLLKKYRMIVEEXGX

SEQ ID NO: 82891 - protein, 34 aa, Artificial Sequence; identical to SEQ ID NO: 31428
  Cyclic GFR-binding peptide
  MOD_RES (2)..(3): Xaa is C or S

SEQ ID NO: 82892 - protein, 23 aa, Artificial Sequence
  Cyclic GFR-binding peptide
NAISMLYFDNGRVLLLKKYRMIV

SEQ ID NO: 82893 - protein, 38 aa, Artificial Sequence; identical to SEQ ID NO: 31431
  Cyclic GFR-binding peptide
  MOD_RES (3)..(4)..(36)..(38): Xaa is C or S

SEQ ID NO: 82894 - protein, 27 aa, Artificial Sequence
  Cyclic GFR-binding peptide
TKMNAISMLYFNDKQQIILKKYRGMVV

SEQ ID NO: 82895 - protein, 21 aa, Artificial Sequence
  Cyclic GFR-binding peptide
TNAISMLYFDNGRVLLLKKYR

SEQ ID NO: 82896 - protein, 34 aa, Artificial Sequence; identical to SEQ ID NO: 31433
  Cyclic GFR-binding peptide
  MOD_RES (1)..(2)..(34): Xaa is C or S

SEQ ID NO: 82897 - protein, 32 aa, Artificial Sequence
  Cyclic GFR-binding peptide
  MOD_RES (2)..(3): Xaa is C or S
PXXTPTKMNAISMLYFNDKQQIILKKYRGMVV

SEQ ID NO: 82898 - protein, 39 aa, Artificial Sequence; identical to SEQ ID NO: 31437
  Cyclic GFR-binding peptide
  MOD_RES (4)..(5)..(36)..(38): Xaa is C or S

SEQ ID NO: 82899 - protein, 36 aa, Artificial Sequence
  Cyclic GFR-binding peptide
  MOD_RES (6)..(7): Xaa is C or S
RVPSTXXAPVKTNAISMLYFDNGRVLLLKKYRMIVE

SEQ ID NO: 82900 - protein, 28 aa, Artificial Sequence
  Cyclic GFR-binding peptide
APVKTNAISMLYFDNGRVLLLKKYRMIV

SEQ ID NO: 82901 - protein, 33 aa, Artificial Sequence; identical to SEQ ID NO: 31439
  Cyclic GFR-binding peptide
  MOD_RES (31)..(33): Xaa is C or S

SEQ ID NO: 82902 - protein, 33 aa, Artificial Sequence; identical to SEQ ID NO: 31440
  Cyclic GFR-binding peptide
  MOD_RES (2)..(3): Xaa is C or S

SEQ ID NO: 82903 - protein, 28 aa, Artificial Sequence
  Cyclic GFR-binding peptide
  MOD_RES (27)..(27): Xaa is C or S
NAISMLYFNDKQQIILKKYRGMVVDRXG

SEQ ID NO: 82904 - protein, 30 aa, Artificial Sequence
  Cyclic GFR-binding peptide
  MOD_RES (1)..(2): Xaa is C or S
XXAPVKTNAISMLYFDNGRVLLLKKYRMIV

SEQ ID NO: 82905 - protein, 36 aa, Artificial Sequence; identical to SEQ ID NO: 31443
  Cyclic GFR-binding peptide
  MOD_RES (3)..(4)..(36): Xaa is C or S

SEQ ID NO: 82906 - protein, 37 aa, Artificial Sequence; identical to SEQ ID NO: 31444
  Cyclic GFR-binding peptide
  MOD_RES (2)..(3)..(35)..(37): Xaa is C or S

SEQ ID NO: 82907 - protein, 34 aa, Artificial Sequence
  Cyclic GFR-binding peptide
  MOD_RES (6)..(7): Xaa is C or S
RVPSTXXAPVKTNAISMLYFDNGRVLLLKKYRMI

SEQ ID NO: 82908 - protein, 31 aa, Artificial Sequence
  Cyclic GFR-binding peptide
  MOD_RES (3)..(4): Xaa is C or S
GPXXTPTKMNAISMLYFNDKQQIILKKYRGM

SEQ ID NO: 82909 - protein, 36 aa, Artificial Sequence; identical to SEQ ID NO: 31445
  Cyclic GFR-binding peptide
  MOD_RES (4)..(5)..(36): Xaa is C or S

SEQ ID NO: 82910 - protein, 27 aa, Artificial Sequence
  Cyclic GFR-binding peptide
MNAISMLYFNDKQQIILKKYRGMVVDR

SEQ ID NO: 82911 - protein, 30 aa, Artificial Sequence
  Cyclic GFR-binding peptide
  MOD_RES (28)..(30): Xaa is C or S
KTNAISMLYFDNGRVLLLKKYRMIVEEXGX

SEQ ID NO: 82912 - protein, 37 aa, Artificial Sequence; identical to SEQ ID NO: 31449
  Cyclic GFR-binding peptide
  MOD_RES (6)..(7): Xaa is C or S

SEQ ID NO: 82913 - protein, 32 aa, Artificial Sequence; identical to SEQ ID NO: 31450
  Cyclic GFR-binding peptide
  MOD_RES (32)..(32): Xaa is C or S

SEQ ID NO: 82914 - protein, 28 aa, Artificial Sequence
  Cyclic GFR-binding peptide
VKTNAISMLYFDNGRVLLLKKYRMIVEE

SEQ ID NO: 82915 - protein, 24 aa, Artificial Sequence
  Cyclic GFR-binding peptide
KTNAISMLYFDNGRVLLLKKYRMI

SEQ ID NO: 82916 - protein, 30 aa, Artificial Sequence
  Cyclic GFR-binding peptide
  MOD_RES (30)..(30): Xaa is C or S
TKMNAISMLYFNDKQQIILKKYRGMVVDRX

SEQ ID NO: 82917 - protein, 41 aa, Artificial Sequence; identical to SEQ ID NO: 31452
  Cyclic GFR-binding peptide
  MOD_RES (6)..(7)..(38)..(40): Xaa is C or S

SEQ ID NO: 82918 - protein, 34 aa, Artificial Sequence; identical to SEQ ID NO: 31454
  Cyclic GFR-binding peptide
  MOD_RES (1)..(32)..(34): Xaa is C or S

SEQ ID NO: 82919 - protein, 35 aa, Artificial Sequence; identical to SEQ ID NO: 31456
  Cyclic GFR-binding peptide
  MOD_RES (1)..(2)..(33)..(35): Xaa is C or S

SEQ ID NO: 82920 - protein, 36 aa, Artificial Sequence; identical to SEQ ID NO: 31457
  Cyclic GFR-binding peptide
  MOD_RES (1)..(2)..(33)..(35): Xaa is C or S

SEQ ID NO: 82921 - protein, 38 aa, Artificial Sequence; identical to SEQ ID NO: 31460
  Cyclic GFR-binding peptide
  MOD_RES (5)..(6)..(38): Xaa is C or S

SEQ ID NO: 82922 - protein, 32 aa, Artificial Sequence
  Cyclic GFR-binding peptide
  MOD_RES (5)..(6): Xaa is C or S
VPSTXXAPVKTNAISMLYFDNGRVLLLKKYRM

SEQ ID NO: 82923 - protein, 22 aa, Artificial Sequence
  Cyclic GFR-binding peptide
TNAISMLYFDNGRVLLLKKYRM

SEQ ID NO: 82924 - protein, 30 aa, Artificial Sequence
  Cyclic GFR-binding peptide
PTKMNAISMLYFNDKQQIILKKYRGMVVDR

SEQ ID NO: 82925 - protein, 26 aa, Artificial Sequence
  Cyclic GFR-binding peptide
TPTKMNAISMLYFNDKQQIILKKYRG

SEQ ID NO: 82926 - protein, 24 aa, Artificial Sequence
  Cyclic GFR-binding peptide
TNAISMLYFDNGRVLLLKKYRMIV

SEQ ID NO: 82927 - protein, 38 aa, Artificial Sequence; identical to SEQ ID NO: 31476
  Cyclic GFR-binding peptide
  MOD_RES (5)..(6)..(37): Xaa is C or S

SEQ ID NO: 82928 - protein, 27 aa, Artificial Sequence
  Cyclic GFR-binding peptide
  MOD_RES (1)..(2): Xaa is C or S
XXTPTKMNAISMLYFNDKQQIILKKYR

SEQ ID NO: 82929 - protein, 39 aa, Artificial Sequence; identical to SEQ ID NO: 31479
  Cyclic GFR-binding peptide
  MOD_RES (6)..(7)..(39): Xaa is C or S

SEQ ID NO: 82930 - protein, 34 aa, Artificial Sequence
  Cyclic GFR-binding peptide
  MOD_RES (4)..(5): Xaa is C or S
AGPXXTPTKMNAISMLYFNDKQQIILKKYRGMVV

SEQ ID NO: 82931 - protein, 36 aa, Artificial Sequence; identical to SEQ ID NO: 31481
  Cyclic GFR-binding peptide
  MOD_RES (2)..(3)..(34)..(36): Xaa is C or S

SEQ ID NO: 82932 - protein, 26 aa, Artificial Sequence
  Cyclic GFR-binding peptide
KMNAISMLYFNDKQQIILKKYRGMVV

SEQ ID NO: 82933 - protein, 28 aa, Artificial Sequence
  Cyclic GFR-binding peptide
  MOD_RES (28)..(28): Xaa is C or S
KTNAISMLYFDNGRVLLLKKYRMIVEEX

SEQ ID NO: 82934 - protein, 30 aa, Artificial Sequence
  Cyclic GFR-binding peptide
  MOD_RES (4)..(5): Xaa is C or S
PSTXXAPVKTNAISMLYFDNGRVLLLKKYR

SEQ ID NO: 82935 - protein, 38 aa, Artificial Sequence; identical to SEQ ID NO: 31485
  Cyclic GFR-binding peptide
  MOD_RES (6)..(7)..(38): Xaa is C or S

SEQ ID NO: 82936 - protein, 35 aa, Artificial Sequence; identical to SEQ ID NO: 31487
  Cyclic GFR-binding peptide
  MOD_RES (4)..(5): Xaa is C or S

SEQ ID NO: 82937 - protein, 33 aa, Artificial Sequence; identical to SEQ ID NO: 31489
  Cyclic GFR-binding peptide
  MOD_RES (1)..(32): Xaa is C or S

SEQ ID NO: 82938 - protein, 23 aa, Artificial Sequence
  Cyclic GFR-binding peptide
KMNAISMLYFNDKQQIILKKYRG

SEQ ID NO: 82939 - protein, 22 aa, Artificial Sequence
  Cyclic GFR-binding peptide
NAISMLYFNDKQQIILKKYRGM

SEQ ID NO: 82940 - protein, 31 aa, Artificial Sequence; identical to SEQ ID NO: 31495
  Cyclic GFR-binding peptide
  MOD_RES (1)..(1): Xaa is C or S

SEQ ID NO: 82941 - protein, 23 aa, Artificial Sequence
  Cyclic GFR-binding peptide
MNAISMLYFNDKQQIILKKYRGM

SEQ ID NO: 82942 - protein, 25 aa, Artificial Sequence
  Cyclic GFR-binding peptide
VKTNAISMLYFDNGRVLLLKKYRMI

SEQ ID NO: 82943 - protein, 29 aa, Artificial Sequence
  Cyclic GFR-binding peptide
PTKMNAISMLYFNDKQQIILKKYRGMVVD

SEQ ID NO: 82944 - protein, 33 aa, Artificial Sequence
  Cyclic GFR-binding peptide
  MOD_RES (30)..(32): Xaa is C or S
PVKTNAISMLYFDNGRVLLLKKYRMIVEEXGXL

SEQ ID NO: 82945 - protein, 23 aa, Artificial Sequence
  Cyclic GFR-binding peptide
VKTNAISMLYFDNGRVLLLKKYR

SEQ ID NO: 82946 - protein, 26 aa, Artificial Sequence
  Cyclic GFR-binding peptide
  MOD_RES (1)..(1): Xaa is C or S
XTPTKMNAISMLYFNDKQQIILKKYR

SEQ ID NO: 82947 - protein, 28 aa, Artificial Sequence
  Cyclic GFR-binding peptide
  MOD_RES (28)..(28): Xaa is C or S
MNAISMLYFNDKQQIILKKYRGMVVDRX

SEQ ID NO: 82948 - protein, 35 aa, Artificial Sequence
  Cyclic GFR-binding peptide
  MOD_RES (5)..(6): Xaa is C or S
VPSTXXAPVKTNAISMLYFDNGRVLLLKKYRMIVE

SEQ ID NO: 82949 - protein, 29 aa, Artificial Sequence
  Cyclic GFR-binding peptide
  MOD_RES (28)..(28): Xaa is C or S
MNAISMLYFNDKQQIILKKYRGMVVDRXG

SEQ ID NO: 82950 - protein, 26 aa, Artificial Sequence
  Cyclic GFR-binding peptide
  MOD_RES (1)..(1): Xaa is C or S
XAPVKTNAISMLYFDNGRVLLLKKYR

SEQ ID NO: 82951 - protein, 33 aa, Artificial Sequence
  Cyclic GFR-binding peptide
  MOD_RES (30)..(32): Xaa is C or S
TKMNAISMLYFNDKQQIILKKYRGMVVDRXGXS

SEQ ID NO: 82952 - protein, 28 aa, Artificial Sequence
  Cyclic GFR-binding peptide
PTKMNAISMLYFNDKQQIILKKYRGMVV

SEQ ID NO: 82953 - protein, 30 aa, Artificial Sequence
  Cyclic GFR-binding peptide
  MOD_RES (2)..(3): Xaa is C or S
PXXTPTKMNAISMLYFNDKQQIILKKYRGM

SEQ ID NO: 82954 - protein, 22 aa, Artificial Sequence
  Cyclic GFR-binding peptide
KMNAISMLYFNDKQQIILKKYR

SEQ ID NO: 82955 - protein, 26 aa, Artificial Sequence
  Cyclic GFR-binding peptide
PTKMNAISMLYFNDKQQIILKKYRGM

SEQ ID NO: 82956 - protein, 31 aa, Artificial Sequence
  Cyclic GFR-binding peptide
  MOD_RES (5)..(6): Xaa is C or S
VPSTXXAPVKTNAISMLYFDNGRVLLLKKYR

SEQ ID NO: 82957 - protein, 28 aa, Artificial Sequence
  Cyclic GFR-binding peptide
TKMNAISMLYFNDKQQIILKKYRGMVVD

SEQ ID NO: 82958 - protein, 30 aa, Artificial Sequence
  Cyclic GFR-binding peptide
  MOD_RES (4)..(5): Xaa is C or S
AGPXXTPTKMNAISMLYFNDKQQIILKKYR

SEQ ID NO: 82959 - protein, 37 aa, Artificial Sequence; identical to SEQ ID NO: 31511
  Cyclic GFR-binding peptide
  MOD_RES (3)..(4)..(35)..(37): Xaa is C or S

SEQ ID NO: 82960 - protein, 30 aa, Artificial Sequence
  Cyclic GFR-binding peptide
  MOD_RES (30)..(30): Xaa is C or S
PVKTNAISMLYFDNGRVLLLKKYRMIVEEX

SEQ ID NO: 82961 - protein, 24 aa, Artificial Sequence
  Cyclic GFR-binding peptide
TKMNAISMLYFNDKQQIILKKYRG

SEQ ID NO: 82962 - protein, 24 aa, Artificial Sequence
  Cyclic GFR-binding peptide
MNAISMLYFNDKQQIILKKYRGMV

SEQ ID NO: 82963 - protein, 32 aa, Artificial Sequence
  Cyclic GFR-binding peptide
  MOD_RES (29)..(31): Xaa is C or S
VKTNAISMLYFDNGRVLLLKKYRMIVEEXGXL

SEQ ID NO: 82964 - protein, 27 aa, Artificial Sequence
  Cyclic GFR-binding peptide
APVKTNAISMLYFDNGRVLLLKKYRMI

SEQ ID NO: 82965 - protein, 31 aa, Artificial Sequence
  Cyclic GFR-binding peptide
  MOD_RES (30)..(30): Xaa is C or S
TKMNAISMLYFNDKQQIILKKYRGMVVDRXG

SEQ ID NO: 82966 - protein, 41 aa, Artificial Sequence; identical to SEQ ID NO: 31519
  Cyclic GFR-binding peptide
  MOD_RES (5)..(6)..(38)..(40): Xaa is C or S

SEQ ID NO: 82967 - protein, 37 aa, Artificial Sequence; identical to SEQ ID NO: 31521
  Cyclic GFR-binding peptide
  MOD_RES (5)..(6): Xaa is C or S

SEQ ID NO: 82968 - protein, 22 aa, Artificial Sequence
  Cyclic GFR-binding peptide
MNAISMLYFNDKQQIILKKYRG

SEQ ID NO: 82969 - protein, 33 aa, Artificial Sequence
  Cyclic GFR-binding peptide
  MOD_RES (5)..(6): Xaa is C or S
SAGPXXTPTKMNAISMLYFNDKQQIILKKYRGM

SEQ ID NO: 82970 - protein, 27 aa, Artificial Sequence
  Cyclic GFR-binding peptide
  MOD_RES (1)..(2): Xaa is C or S
XXAPVKTNAISMLYFDNGRVLLLKKYR

SEQ ID NO: 82971 - protein, 36 aa, Artificial Sequence; identical to SEQ ID NO: 31525
  Cyclic GFR-binding peptide
  MOD_RES (2)..(3)..(35): Xaa is C or S

SEQ ID NO: 82972 - protein, 33 aa, Artificial Sequence
  Cyclic GFR-binding peptide
  MOD_RES (4)..(5): Xaa is C or S
PSTXXAPVKTNAISMLYFDNGRVLLLKKYRMIV

SEQ ID NO: 82973 - protein, 40 aa, Artificial Sequence; identical to SEQ ID NO: 31527
  Cyclic GFR-binding peptide
  MOD_RES (5)..(6)..(37)..(39): Xaa is C or S

SEQ ID NO: 82974 - protein, 32 aa, Artificial Sequence
  Cyclic GFR-binding peptide
  MOD_RES (3)..(4): Xaa is C or S
STXXAPVKTNAISMLYFDNGRVLLLKKYRMIV

SEQ ID NO: 82975 - protein, 25 aa, Artificial Sequence
  Cyclic GFR-binding peptide
PTKMNAISMLYFNDKQQIILKKYRG

SEQ ID NO: 82976 - protein, 39 aa, Artificial Sequence; identical to SEQ ID NO: 31532
  Cyclic GFR-binding peptide
  MOD_RES (5)..(6)..(37)..(39): Xaa is C or S

SEQ ID NO: 82977 - protein, 35 aa, Artificial Sequence; identical to SEQ ID NO: 31536
  Cyclic GFR-binding peptide
  MOD_RES (2)..(3)..(34): Xaa is C or S

SEQ ID NO: 82978 - protein, 25 aa, Artificial Sequence
  Cyclic GFR-binding peptide
NAISMLYFDNGRVLLLKKYRMIVEE

SEQ ID NO: 82979 - protein, 29 aa, Artificial Sequence
  Cyclic GFR-binding peptide
  MOD_RES (1)..(2): Xaa is C or S
XXAPVKTNAISMLYFDNGRVLLLKKYRMI

SEQ ID NO: 82980 - protein, 32 aa, Artificial Sequence; identical to SEQ ID NO: 31537
  Cyclic GFR-binding peptide
  MOD_RES (1)..(32): Xaa is C or S

SEQ ID NO: 82981 - protein, 29 aa, Artificial Sequence
  Cyclic GFR-binding peptide
  MOD_RES (1)..(1): Xaa is C or S
XAPVKTNAISMLYFDNGRVLLLKKYRMIV

SEQ ID NO: 82982 - protein, 35 aa, Artificial Sequence; identical to SEQ ID NO: 31540
  Cyclic GFR-binding peptide
  MOD_RES (1)..(32)..(34): Xaa is C or S

SEQ ID NO: 82983 - protein, 28 aa, Artificial Sequence
  Cyclic GFR-binding peptide
  MOD_RES (1)..(2): Xaa is C or S
XXTPTKMNAISMLYFNDKQQIILKKYRG

SEQ ID NO: 82984 - protein, 27 aa, Artificial Sequence
  Cyclic GFR-binding peptide
  MOD_RES (1)..(1): Xaa is C or S
XTPTKMNAISMLYFNDKQQIILKKYRG

SEQ ID NO: 82985 - protein, 27 aa, Artificial Sequence
  Cyclic GFR-binding peptide
KMNAISMLYFNDKQQIILKKYRGMVVD

SEQ ID NO: 82986 - protein, 35 aa, Artificial Sequence; identical to SEQ ID NO: 31542
  Cyclic GFR-binding peptide
  MOD_RES (4)..(5): Xaa is C or S

SEQ ID NO: 82987 - protein, 26 aa, Artificial Sequence
  Cyclic GFR-binding peptide
PVKTNAISMLYFDNGRVLLLKKYRMI

SEQ ID NO: 82988 - protein, 33 aa, Artificial Sequence
  Cyclic GFR-binding peptide
  MOD_RES (6)..(7): Xaa is C or S
RVPSTXXAPVKTNAISMLYFDNGRVLLLKKYRM

SEQ ID NO: 82989 - protein, 23 aa, Artificial Sequence
  Cyclic GFR-binding peptide
KTNAISMLYFDNGRVLLLKKYRM

SEQ ID NO: 82990 - protein, 28 aa, Artificial Sequence
  Cyclic GFR-binding peptide
  MOD_RES (27)..(27): Xaa is C or S
TNAISMLYFDNGRVLLLKKYRMIVEEXG

SEQ ID NO: 82991 - protein, 32 aa, Artificial Sequence
  Cyclic GFR-binding peptide
  MOD_RES (31)..(31): Xaa is C or S
PTKMNAISMLYFNDKQQIILKKYRGMVVDRXG

SEQ ID NO: 82992 - protein, 28 aa, Artificial Sequence
  Cyclic GFR-binding peptide
TPTKMNAISMLYFNDKQQIILKKYRGMV

SEQ ID NO: 82993 - protein, 29 aa, Artificial Sequence
  Cyclic GFR-binding peptide
  MOD_RES (3)..(4): Xaa is C or S
STXXAPVKTNAISMLYFDNGRVLLLKKYR

SEQ ID NO: 82994 - protein, 23 aa, Artificial Sequence
  Cyclic GFR-binding peptide
TKMNAISMLYFNDKQQIILKKYR

SEQ ID NO: 82995 - protein, 36 aa, Artificial Sequence; identical to SEQ ID NO: 31548
  Cyclic GFR-binding peptide
  MOD_RES (1)..(33)..(35): Xaa is C or S

SEQ ID NO: 82996 - protein, 32 aa, Artificial Sequence; identical to SEQ ID NO: 31549
  Cyclic GFR-binding peptide
  MOD_RES (1)..(2): Xaa is C or S

SEQ ID NO: 82997 - protein, 25 aa, Artificial Sequence
  Cyclic GFR-binding peptide
TKMNAISMLYFNDKQQIILKKYRGM

SEQ ID NO: 82998 - protein, 35 aa, Artificial Sequence; identical to SEQ ID NO: 31550
  Cyclic GFR-binding peptide
  MOD_RES (1)..(33)..(35): Xaa is C or S

SEQ ID NO: 82999 - protein, 40 aa, Artificial Sequence; identical to SEQ ID NO: 31551
  Cyclic GFR-binding peptide
  MOD_RES (6)..(7)..(38)..(40): Xaa is C or S

SEQ ID NO: 83000 - protein, 31 aa, Artificial Sequence
  Cyclic GFR-binding peptide
  MOD_RES (5)..(6): Xaa is C or S
SAGPXXTPTKMNAISMLYFNDKQQIILKKYR

SEQ ID NO: 83001 - protein, 31 aa, Artificial Sequence
  Cyclic GFR-binding peptide
  MOD_RES (31)..(31): Xaa is C or S
PTKMNAISMLYFNDKQQIILKKYRGMVVDRX

SEQ ID NO: 83002 - protein, 32 aa, Artificial Sequence
  Cyclic GFR-binding peptide
  MOD_RES (2)..(3): Xaa is C or S
TXXAPVKTNAISMLYFDNGRVLLLKKYRMIVE

SEQ ID NO: 83003 - protein, 29 aa, Artificial Sequence
  Cyclic GFR-binding peptide
  MOD_RES (26)..(28): Xaa is C or S
NAISMLYFDNGRVLLLKKYRMIVEEXGXL

SEQ ID NO: 83004 - protein, 38 aa, Artificial Sequence; identical to SEQ ID NO: 31555
  Cyclic GFR-binding peptide
  MOD_RES (2)..(3)..(35)..(37): Xaa is C or S

SEQ ID NO: 83005 - protein, 33 aa, Artificial Sequence
  Cyclic GFR-binding peptide
  MOD_RES (3)..(4): Xaa is C or S
GPXXTPTKMNAISMLYFNDKQQIILKKYRGMVV

SEQ ID NO: 83006 - protein, 31 aa, Artificial Sequence; identical to SEQ ID NO: 31560
  Cyclic GFR-binding peptide
  MOD_RES (1)..(1): Xaa is C or S

SEQ ID NO: 83007 - protein, 38 aa, Artificial Sequence; identical to SEQ ID NO: 31387
  Cyclic GFR-binding peptide
  MOD_RES (6)..(7): Xaa is C or S

SEQ ID NO: 83008 - protein, 27 aa, Artificial Sequence
  Cyclic GFR-binding peptide
PVKTNAISMLYFDNGRVLLLKKYRMIV

SEQ ID NO: 83009 - protein, 37 aa, Artificial Sequence; identical to SEQ ID NO: 31393
  Cyclic GFR-binding peptide
  MOD_RES (1)..(2)..(34)..(36): Xaa is C or S

SEQ ID NO: 83010 - protein, 25 aa, Artificial Sequence
  Cyclic GFR-binding peptide
TPTKMNAISMLYFNDKQQIILKKYR

SEQ ID NO: 83011 - protein, 37 aa, Artificial Sequence; identical to SEQ ID NO: 31394
  Cyclic GFR-binding peptide
  MOD_RES (3)..(4)..(36): Xaa is C or S

SEQ ID NO: 83012 - protein, 40 aa, Artificial Sequence; identical to SEQ ID NO: 31395
  Cyclic GFR-binding peptide
  MOD_RES (4)..(5)..(37)..(39): Xaa is C or S

SEQ ID NO: 83013 - protein, 29 aa, Artificial Sequence
  Cyclic GFR-binding peptide
  MOD_RES (3)..(4): Xaa is C or S
GPXXTPTKMNAISMLYFNDKQQIILKKYR

SEQ ID NO: 83014 - protein, 30 aa, Artificial Sequence
  Cyclic GFR-binding peptide
  MOD_RES (1)..(1): Xaa is C or S
XTPTKMNAISMLYFNDKQQIILKKYRGMVV

SEQ ID NO: 83015 - protein, 36 aa, Artificial Sequence
  Cyclic GFR-binding peptide
  MOD_RES (6)..(7): Xaa is C or S
GSAGPXXTPTKMNAISMLYFNDKQQIILKKYRGMVV

SEQ ID NO: 83016 - protein, 23 aa, Artificial Sequence
  Cyclic GFR-binding peptide
NAISMLYFNDKQQIILKKYRGMV

SEQ ID NO: 83017 - protein, 31 aa, Artificial Sequence
  Cyclic GFR-binding peptide
  MOD_RES (2)..(3): Xaa is C or S
TXXAPVKTNAISMLYFDNGRVLLLKKYRMIV

SEQ ID NO: 83018 - protein, 26 aa, Artificial Sequence
  Cyclic GFR-binding peptide
MNAISMLYFNDKQQIILKKYRGMVVD

SEQ ID NO: 83019 - protein, 31 aa, Artificial Sequence
  Cyclic GFR-binding peptide
  MOD_RES (1)..(2): Xaa is C or S
XXAPVKTNAISMLYFDNGRVLLLKKYRMIVE

SEQ ID NO: 83020 - protein, 34 aa, Artificial Sequence
  Cyclic GFR-binding peptide
  MOD_RES (5)..(6): Xaa is C or S
VPSTXXAPVKTNAISMLYFDNGRVLLLKKYRMIV

SEQ ID NO: 83021 - protein, 25 aa, Artificial Sequence
  Cyclic GFR-binding peptide
KTNAISMLYFDNGRVLLLKKYRMIV

SEQ ID NO: 83022 - protein, 20 aa, Artificial Sequence
  Cyclic GFR-binding peptide
NAISMLYFDNGRVLLLKKYR

SEQ ID NO: 83023 - protein, 27 aa, Artificial Sequence
  Cyclic GFR-binding peptide
PTKMNAISMLYFNDKQQIILKKYRGMV

SEQ ID NO: 83024 - protein, 34 aa, Artificial Sequence; identical to SEQ ID NO: 31410
  Cyclic GFR-binding peptide
  MOD_RES (3)..(4): Xaa is C or S

SEQ ID NO: 83025 - protein, 32 aa, Artificial Sequence
  Cyclic GFR-binding peptide
  MOD_RES (4)..(5): Xaa is C or S
AGPXXTPTKMNAISMLYFNDKQQIILKKYRGM

SEQ ID NO: 83026 - protein, 36 aa, Artificial Sequence; identical to SEQ ID NO: 31417
  Cyclic GFR-binding peptide
  MOD_RES (5)..(6): Xaa is C or S

SEQ ID NO: 83027 - protein, 29 aa, Artificial Sequence
  Cyclic GFR-binding peptide
  MOD_RES (28)..(28): Xaa is C or S
KTNAISMLYFDNGRVLLLKKYRMIVEEXG

SEQ ID NO: 83028 - protein, 29 aa, Artificial Sequence
  Cyclic GFR-binding peptide
TPTKMNAISMLYFNDKQQIILKKYRGMVV

SEQ ID NO: 83029 - protein, 28 aa, Artificial Sequence
  Cyclic GFR-binding peptide
  MOD_RES (1)..(1): Xaa is C or S
XAPVKTNAISMLYFDNGRVLLLKKYRMI

SEQ ID NO: 83030 - protein, 33 aa, Artificial Sequence
  Cyclic GFR-binding peptide
  MOD_RES (31)..(33): Xaa is C or S
PTKMNAISMLYFNDKQQIILKKYRGMVVDRXGX

SEQ ID NO: 83031 - protein, 35 aa, Artificial Sequence; identical to SEQ ID NO: 31419
  Cyclic GFR-binding peptide
  MOD_RES (32)..(34): Xaa is C or S

SEQ ID NO: 83032 - protein, 35 aa, Artificial Sequence; identical to SEQ ID NO: 31420
  Cyclic GFR-binding peptide
  MOD_RES (3)..(4): Xaa is C or S

SEQ ID NO: 83033 - protein, 30 aa, Artificial Sequence; identical to SEQ ID NO: 31424
  Cyclic GFR-binding peptide

SEQ ID NO: 83034 - protein, 33 aa, Artificial Sequence
  Cyclic GFR-binding peptide
  MOD_RES (6)..(7): Xaa is C or S
GSAGPXXTPTKMNAISMLYFNDKQQIILKKYRG

SEQ ID NO: 83035 - protein, 29 aa, Artificial Sequence
  Cyclic GFR-binding peptide
  MOD_RES (1)..(1): Xaa is C or S
XTPTKMNAISMLYFNDKQQIILKKYRGMV

SEQ ID NO: 83036 - protein, 37 aa, Artificial Sequence; identical to SEQ ID NO: 31427
  Cyclic GFR-binding peptide
  MOD_RES (4)..(5)..(37): Xaa is C or S

SEQ ID NO: 83037 - protein, 38 aa, Artificial Sequence; identical to SEQ ID NO: 31435
  Cyclic GFR-binding peptide
  MOD_RES (3)..(4)..(35)..(37): Xaa is C or S

SEQ ID NO: 83038 - protein, 34 aa, Artificial Sequence
  Cyclic GFR-binding peptide
  MOD_RES (31)..(33): Xaa is C or S
PTKMNAISMLYFNDKQQIILKKYRGMVVDRXGXS

SEQ ID NO: 83039 - protein, 31 aa, Artificial Sequence; identical to SEQ ID NO: 31438
  Cyclic GFR-binding peptide

SEQ ID NO: 83040 - protein, 30 aa, Artificial Sequence
  Cyclic GFR-binding peptide
  MOD_RES (29)..(29): Xaa is C or S
VKTNAISMLYFDNGRVLLLKKYRMIVEEXG

SEQ ID NO: 83041 - protein, 20 aa, Artificial Sequence
  Cyclic GFR-binding peptide
NAISMLYFDNGRVLLLKKYR

SEQ ID NO: 83042 - protein, 24 aa, Artificial Sequence
  Cyclic GFR-binding peptide
NAISMLYFNDKQQIILKKYRGMVV

SEQ ID NO: 83043 - protein, 32 aa, Artificial Sequence; identical to SEQ ID NO: 31447
  Cyclic GFR-binding peptide
  MOD_RES (1)..(2): Xaa is C or S

SEQ ID NO: 83044 - protein, 39 aa, Artificial Sequence; identical to SEQ ID NO: 31448
  Cyclic GFR-binding peptide
  MOD_RES (4)..(5)..(37)..(39): Xaa is C or S

SEQ ID NO: 83045 - protein, 22 aa, Artificial Sequence
  Cyclic GFR-binding peptide
KTNAISMLYFDNGRVLLLKKYR

SEQ ID NO: 83046 - protein, 35 aa, Artificial Sequence
  Cyclic GFR-binding peptide
  MOD_RES (6)..(7): Xaa is C or S
GSAGPXXTPTKMNAISMLYFNDKQQIILKKYRGMV

SEQ ID NO: 83047 - protein, 23 aa, Artificial Sequence
  Cyclic GFR-binding peptide
TNAISMLYFDNGRVLLLKKYRMI

SEQ ID NO: 83048 - protein, 37 aa, Artificial Sequence; identical to SEQ ID NO: 31455
  Cyclic GFR-binding peptide
  MOD_RES (2)..(3)..(34)..(36): Xaa is C or S

SEQ ID NO: 83049 - protein, 30 aa, Artificial Sequence
  Cyclic GFR-binding peptide
  MOD_RES (2)..(3): Xaa is C or S
TXXAPVKTNAISMLYFDNGRVLLLKKYRMI

SEQ ID NO: 83050 - protein, 30 aa, Artificial Sequence
  Cyclic GFR-binding peptide
  MOD_RES (27)..(29): Xaa is C or S
TNAISMLYFDNGRVLLLKKYRMIVEEXGXL

SEQ ID NO: 83051 - protein, 24 aa, Artificial Sequence
  Cyclic GFR-binding peptide
NAISMLYFDNGRVLLLKKYRMIVE

SEQ ID NO: 83052 - protein, 34 aa, Artificial Sequence; identical to SEQ ID NO: 31462
  Cyclic GFR-binding peptide
  MOD_RES (1)..(33): Xaa is C or S

SEQ ID NO: 83053 - protein, 37 aa, Artificial Sequence; identical to SEQ ID NO: 31463
  Cyclic GFR-binding peptide
  MOD_RES (4)..(5)..(36): Xaa is C or S

SEQ ID NO: 83054 - protein, 21 aa, Artificial Sequence
  Cyclic GFR-binding peptide
NAISMLYFDNGRVLLLKKYRM

SEQ ID NO: 83055 - protein, 28 aa, Artificial Sequence
  Cyclic GFR-binding peptide
KMNAISMLYFNDKQQIILKKYRGMVVDR

SEQ ID NO: 83056 - protein, 33 aa, Artificial Sequence
  Cyclic GFR-binding peptide
  MOD_RES (3)..(4): Xaa is C or S
STXXAPVKTNAISMLYFDNGRVLLLKKYRMIVE

SEQ ID NO: 83057 - protein, 34 aa, Artificial Sequence; identical to SEQ ID NO: 31467
  Cyclic GFR-binding peptide
  MOD_RES (1)..(2)..(33): Xaa is C or S

SEQ ID NO: 83058 - protein, 33 aa, Artificial Sequence; identical to SEQ ID NO: 31468
  Cyclic GFR-binding peptide
  MOD_RES (1)..(2): Xaa is C or S

SEQ ID NO: 83059 - protein, 31 aa, Artificial Sequence
  Cyclic GFR-binding peptide
  MOD_RES (2)..(3): Xaa is C or S
PXXTPTKMNAISMLYFNDKQQIILKKYRGMV

SEQ ID NO: 83060 - protein, 25 aa, Artificial Sequence
  Cyclic GFR-binding peptide
NAISMLYFNDKQQIILKKYRGMVVD

SEQ ID NO: 83061 - protein, 36 aa, Artificial Sequence; identical to SEQ ID NO: 31469
  Cyclic GFR-binding peptide
  MOD_RES (4)..(5): Xaa is C or S

SEQ ID NO: 83062 - protein, 33 aa, Artificial Sequence; identical to SEQ ID NO: 31472
  Cyclic GFR-binding peptide
  MOD_RES (1)..(33): Xaa is C or S

SEQ ID NO: 83063 - protein, 39 aa, Artificial Sequence; identical to SEQ ID NO: 31474
  Cyclic GFR-binding peptide
  MOD_RES (3)..(4)..(36)..(38): Xaa is C or S

SEQ ID NO: 83064 - protein, 37 aa, Artificial Sequence; identical to SEQ ID NO: 31475
  Cyclic GFR-binding peptide
  MOD_RES (6)..(7): Xaa is C or S

SEQ ID NO: 83065 - protein, 27 aa, Artificial Sequence
  Cyclic GFR-binding peptide
TPTKMNAISMLYFNDKQQIILKKYRGM

SEQ ID NO: 83066 - protein, 28 aa, Artificial Sequence
  Cyclic GFR-binding peptide
  MOD_RES (2)..(3): Xaa is C or S
PXXTPTKMNAISMLYFNDKQQIILKKYR

SEQ ID NO: 83067 - protein, 29 aa, Artificial Sequence
  Cyclic GFR-binding peptide
TKMNAISMLYFNDKQQIILKKYRGMVVDR

SEQ ID NO: 83068 - protein, 24 aa, Artificial Sequence
  Cyclic GFR-binding peptide
KMNAISMLYFNDKQQIILKKYRGM

SEQ ID NO: 83069 - protein, 30 aa, Artificial Sequence; identical to SEQ ID NO: 31490
  Cyclic GFR-binding peptide

SEQ ID NO: 83070 - protein, 34 aa, Artificial Sequence; identical to SEQ ID NO: 31491
  Cyclic GFR-binding peptide
  MOD_RES (32)..(34): Xaa is C or S

SEQ ID NO: 83071 - protein, 32 aa, Artificial Sequence
  Cyclic GFR-binding peptide
  MOD_RES (3)..(4): Xaa is C or S
GPXXTPTKMNAISMLYFNDKQQIILKKYRGMV

SEQ ID NO: 83072 - protein, 30 aa, Artificial Sequence
  Cyclic GFR-binding peptide
  MOD_RES (3)..(4): Xaa is C or S
STXXAPVKTNAISMLYFDNGRVLLLKKYRM

SEQ ID NO: 83073 - protein, 42 aa, Artificial Sequence
  Cyclic GFR-binding peptide
  MOD_RES (6)..(7)..(39)..(41): Xaa is C or S
GSAGPXXTPTKMNAISMLYFNDKQQIILKKYRGMVVDRXGXS

SEQ ID NO: 83074 - protein, 36 aa, Artificial Sequence; identical to SEQ ID NO: 31501
  Cyclic GFR-binding peptide
  MOD_RES (3)..(4)..(35): Xaa is C or S

SEQ ID NO: 83075 - protein, 40 aa, Artificial Sequence; identical to SEQ ID NO: 31504
  Cyclic GFR-binding peptide
  MOD_RES (6)..(7)..(39): Xaa is C or S

SEQ ID NO: 83076 - protein, 24 aa, Artificial Sequence
  Cyclic GFR-binding peptide
PTKMNAISMLYFNDKQQIILKKYR

SEQ ID NO: 83077 - protein, 28 aa, Artificial Sequence
  Cyclic GFR-binding peptide
  MOD_RES (26)..(28): Xaa is C or S
NAISMLYFDNGRVLLLKKYRMIVEEXGX

SEQ ID NO: 83078 - protein, 31 aa, Artificial Sequence
  Cyclic GFR-binding peptide
  MOD_RES (28)..(30): Xaa is C or S
MNAISMLYFNDKQQIILKKYRGMVVDRXGXS

SEQ ID NO: 83079 - protein, 36 aa, Artificial Sequence; identical to SEQ ID NO: 31507
  Cyclic GFR-binding peptide
  MOD_RES (1)..(2)..(34)..(36): Xaa is C or S

SEQ ID NO: 83080 - protein, 39 aa, Artificial Sequence; identical to SEQ ID NO: 31508
  Cyclic GFR-binding peptide
  MOD_RES (6)..(7)..(38): Xaa is C or S

SEQ ID NO: 83081 - protein, 31 aa, Artificial Sequence
  Cyclic GFR-binding peptide
  MOD_RES (30)..(30): Xaa is C or S
PVKTNAISMLYFDNGRVLLLKKYRMIVEEXG

SEQ ID NO: 83082 - protein, 35 aa, Artificial Sequence
  Cyclic GFR-binding peptide
  MOD_RES (6)..(7): Xaa is C or S
RVPSTXXAPVKTNAISMLYFDNGRVLLLKKYRMIV

SEQ ID NO: 83083 - protein, 24 aa, Artificial Sequence
  Cyclic GFR-binding peptide
VKTNAISMLYFDNGRVLLLKKYRM

SEQ ID NO: 83084 - protein, 31 aa, Artificial Sequence
  Cyclic GFR-binding peptide
  MOD_RES (4)..(5): Xaa is C or S
AGPXXTPTKMNAISMLYFNDKQQIILKKYRG

SEQ ID NO: 83085 - protein, 33 aa, Artificial Sequence; identical to SEQ ID NO: 31513
  Cyclic GFR-binding peptide
  MOD_RES (2)..(3): Xaa is C or S

SEQ ID NO: 83086 - protein, 26 aa, Artificial Sequence
  Cyclic GFR-binding peptide
TKMNAISMLYFNDKQQIILKKYRGMV

SEQ ID NO: 83087 - protein, 38 aa, Artificial Sequence; identical to SEQ ID NO: 31516
  Cyclic GFR-binding peptide
  MOD_RES (4)..(5)..(36)..(38): Xaa is C or S

SEQ ID NO: 83088 - protein, 28 aa, Artificial Sequence
  Cyclic GFR-binding peptide
  MOD_RES (2)..(3): Xaa is C or S
TXXAPVKTNAISMLYFDNGRVLLLKKYR

SEQ ID NO: 83089 - protein, 37 aa, Artificial Sequence; identical to SEQ ID NO: 31518
  Cyclic GFR-binding peptide
  MOD_RES (5)..(6)..(37): Xaa is C or S

SEQ ID NO: 83090 - protein, 33 aa, Artificial Sequence; identical to SEQ ID NO: 31520
  Cyclic GFR-binding peptide
  MOD_RES (32)..(32): Xaa is C or S

SEQ ID NO: 83091 - protein, 31 aa, Artificial Sequence
  Cyclic GFR-binding peptide
  MOD_RES (3)..(4): Xaa is C or S
STXXAPVKTNAISMLYFDNGRVLLLKKYRMI

SEQ ID NO: 83092 - protein, 30 aa, Artificial Sequence
  Cyclic GFR-binding peptide
  MOD_RES (3)..(4): Xaa is C or S
GPXXTPTKMNAISMLYFNDKQQIILKKYRG

SEQ ID NO: 83093 - protein, 32 aa, Artificial Sequence; identical to SEQ ID NO: 31522
  Cyclic GFR-binding peptide
  MOD_RES (31)..(31): Xaa is C or S

SEQ ID NO: 83094 - protein, 20 aa, Artificial Sequence
  Cyclic GFR-binding peptide
NAISMLYFNDKQQIILKKYR

SEQ ID NO: 83095 - protein, 39 aa, Artificial Sequence; identical to SEQ ID NO: 31530
  Cyclic GFR-binding peptide
  MOD_RES (5)..(6)..(38): Xaa is C or S

SEQ ID NO: 83096 - protein, 28 aa, Artificial Sequence
  Cyclic GFR-binding peptide
  MOD_RES (1)..(2): Xaa is C or S
XXAPVKTNAISMLYFDNGRVLLLKKYRM

SEQ ID NO: 83097 - protein, 27 aa, Artificial Sequence
  Cyclic GFR-binding peptide
  MOD_RES (1)..(1): Xaa is C or S
XAPVKTNAISMLYFDNGRVLLLKKYRM

SEQ ID NO: 83098 - protein, 35 aa, Artificial Sequence; identical to SEQ ID NO: 31535
  Cyclic GFR-binding peptide
  MOD_RES (2)..(3)..(35): Xaa is C or S

SEQ ID NO: 83099 - protein, 32 aa, Artificial Sequence
  Cyclic GFR-binding peptide
  MOD_RES (4)..(5): Xaa is C or S
PSTXXAPVKTNAISMLYFDNGRVLLLKKYRMI

SEQ ID NO: 83100 - protein, 24 aa, Artificial Sequence
  Cyclic GFR-binding peptide
PVKTNAISMLYFDNGRVLLLKKYR

SEQ ID NO: 83101 - protein, 22 aa, Artificial Sequence
  Cyclic GFR-binding peptide
NAISMLYFDNGRVLLLKKYRMI

SEQ ID NO: 83102 - protein, 29 aa, Artificial Sequence
  Cyclic GFR-binding peptide
PVKTNAISMLYFDNGRVLLLKKYRMIVEE

SEQ ID NO: 83103 - protein, 35 aa, Artificial Sequence
  Cyclic GFR-binding peptide
  MOD_RES (5)..(6): Xaa is C or S
SAGPXXTPTKMNAISMLYFNDKQQIILKKYRGMVV

SEQ ID NO: 83104 - protein, 29 aa, Artificial Sequence
  Cyclic GFR-binding peptide
  MOD_RES (29)..(29): Xaa is C or S
KMNAISMLYFNDKQQIILKKYRGMVVDRX

SEQ ID NO: 83105 - protein, 27 aa, Artificial Sequence
  Cyclic GFR-binding peptide
  MOD_RES (26)..(26): Xaa is C or S
NAISMLYFDNGRVLLLKKYRMIVEEXG

SEQ ID NO: 83106 - protein, 27 aa, Artificial Sequence
  Cyclic GFR-binding peptide
  MOD_RES (27)..(27): Xaa is C or S
NAISMLYFNDKQQIILKKYRGMVVDRX

SEQ ID NO: 83107 - protein, 29 aa, Artificial Sequence
  Cyclic GFR-binding peptide
  MOD_RES (27)..(29): Xaa is C or S
TNAISMLYFDNGRVLLLKKYRMIVEEXGX

SEQ ID NO: 83108 - protein, 35 aa, Artificial Sequence; identical to SEQ ID NO: 31546
  Cyclic GFR-binding peptide
  MOD_RES (3)..(4)..(35): Xaa is C or S

SEQ ID NO: 83109 - protein, 29 aa, Artificial Sequence
  Cyclic GFR-binding peptide
APVKTNAISMLYFDNGRVLLLKKYRMIVE

SEQ ID NO: 83110 - protein, 28 aa, Artificial Sequence
  Cyclic GFR-binding peptide
PVKTNAISMLYFDNGRVLLLKKYRMIVE

SEQ ID NO: 83111 - protein, 31 aa, Artificial Sequence
  Cyclic GFR-binding peptide
  MOD_RES (29)..(31): Xaa is C or S
KMNAISMLYFNDKQQIILKKYRGMVVDRXGX

SEQ ID NO: 83112 - protein, 25 aa, Artificial Sequence
  Cyclic GFR-binding peptide
APVKTNAISMLYFDNGRVLLLKKYR

SEQ ID NO: 83113 - protein, 32 aa, Artificial Sequence
  Cyclic GFR-binding peptide
  MOD_RES (6)..(7): Xaa is C or S
RVPSTXXAPVKTNAISMLYFDNGRVLLLKKYR

SEQ ID NO: 83114 - protein, 31 aa, Artificial Sequence
  Cyclic GFR-binding peptide
  MOD_RES (28)..(30): Xaa is C or S
KTNAISMLYFDNGRVLLLKKYRMIVEEXGXL

SEQ ID NO: 83115 - protein, 34 aa, Artificial Sequence
  Cyclic GFR-binding peptide
  MOD_RES (5)..(6): Xaa is C or S
SAGPXXTPTKMNAISMLYFNDKQQIILKKYRGMV

SEQ ID NO: 83116 - protein, 31 aa, Artificial Sequence
  Cyclic GFR-binding peptide
  MOD_RES (4)..(5): Xaa is C or S
PSTXXAPVKTNAISMLYFDNGRVLLLKKYRM

SEQ ID NO: 83117 - protein, 30 aa, Artificial Sequence
  Cyclic GFR-binding peptide
  MOD_RES (29)..(29): Xaa is C or S
KMNAISMLYFNDKQQIILKKYRGMVVDRXG

SEQ ID NO: 83118 - protein, 26 aa, Artificial Sequence
  Cyclic GFR-binding peptide
VKTNAISMLYFDNGRVLLLKKYRMIV

SEQ ID NO: 83119 - protein, 27 aa, Artificial Sequence
  Cyclic GFR-binding peptide
VKTNAISMLYFDNGRVLLLKKYRMIVE

SEQ ID NO: 83120 - protein, 21 aa, Artificial Sequence
  Cyclic GFR-binding peptide
MNAISMLYFNDKQQIILKKYR

SEQ ID NO: 83121 - protein, 27 aa, Artificial Sequence
  Cyclic GFR-binding peptide
  MOD_RES (27)..(27): Xaa is C or S
TNAISMLYFDNGRVLLLKKYRMIVEEX

SEQ ID NO: 83122 - protein, 31 aa, Artificial Sequence
  Cyclic GFR-binding peptide
  MOD_RES (1)..(2): Xaa is C or S
XXTPTKMNAISMLYFNDKQQIILKKYRGMVV

SEQ ID NO: 83123 - protein, 33 aa, Artificial Sequence; identical to SEQ ID NO: 31556
  Cyclic GFR-binding peptide
  MOD_RES (1)..(2)..(33): Xaa is C or S

SEQ ID NO: 83124 - protein, 25 aa, Artificial Sequence
  Cyclic GFR-binding peptide
KMNAISMLYFNDKQQIILKKYRGMV

SEQ ID NO: 83125 - protein, 29 aa, Artificial Sequence
  Cyclic GFR-binding peptide
  MOD_RES (2)..(3): Xaa is C or S
TXXAPVKTNAISMLYFDNGRVLLLKKYRM

SEQ ID NO: 83126 - protein, 30 aa, Artificial Sequence
  Cyclic GFR-binding peptide
  MOD_RES (1)..(2): Xaa is C or S
XXTPTKMNAISMLYFNDKQQIILKKYRGMV

SEQ ID NO: 83127 - protein, 32 aa, Artificial Sequence
  Cyclic GFR-binding peptide
  MOD_RES (6)..(7): Xaa is C or S
GSAGPXXTPTKMNAISMLYFNDKQQIILKKYR

SEQ ID NO: 83128 - protein, 26 aa, Artificial Sequence
  Cyclic GFR-binding peptide
  MOD_RES (26)..(26): Xaa is C or S
NAISMLYFDNGRVLLLKKYRMIVEEX

SEQ ID NO: 83129 - protein, 35 aa, Artificial Sequence
  Cyclic GFR-binding peptide
  MOD_RES (30)..(31): Xaa is C or S
VTMNEYKFKVVNKNEDLYLISIPEMKEPVXXPEPI

SEQ ID NO: 83130 - protein, 32 aa, Artificial Sequence
  Cyclic GFR-binding peptide
  MOD_RES (28)..(29): Xaa is C or S
MDYHYKLVVNNASDKYLISIPSLRTPVXXTPP

SEQ ID NO: 83131 - protein, 36 aa, Artificial Sequence; identical to SEQ ID NO: 31562
  Cyclic GFR-binding peptide
  MOD_RES (31)..(32): Xaa is C or S

SEQ ID NO: 83132 - protein, 31 aa, Artificial Sequence; identical to SEQ ID NO: 31561
  Cyclic GFR-binding peptide
  MOD_RES (31)..(31): Xaa is C or S

SEQ ID NO: 83133 - protein, 32 aa, Artificial Sequence; identical to SEQ ID NO: 31563
  Cyclic GFR-binding peptide
  MOD_RES (31)..(32): Xaa is C or S

SEQ ID NO: 83134 - protein, 28 aa, Artificial Sequence
  Cyclic GFR-binding peptide
  MOD_RES (26)..(27): Xaa is C or S
YHYKLVVNNASDKYLISIPSLRTPVXXT

SEQ ID NO: 83135 - protein, 39 aa, Artificial Sequence; identical to SEQ ID NO: 31565
  Cyclic GFR-binding peptide
  MOD_RES (1)..(33)..(34): Xaa is C or S

SEQ ID NO: 83136 - protein, 29 aa, Artificial Sequence
  Cyclic GFR-binding peptide
  MOD_RES (1)..(3): Xaa is C or S
XGXSEVVMDYHYKLVVNNASDKYLISIPS

SEQ ID NO: 83137 - protein, 32 aa, Artificial Sequence
  Cyclic GFR-binding peptide
  MOD_RES (28)..(29): Xaa is C or S
MDRHKRLVVNNASDYYLISTASLRTPVXXTPP

SEQ ID NO: 83138 - protein, 33 aa, Artificial Sequence; identical to SEQ ID NO: 31566
  Cyclic GFR-binding peptide
  MOD_RES (1)..(33): Xaa is C or S

SEQ ID NO: 83139 - protein, 32 aa, Artificial Sequence; identical to SEQ ID NO: 31567
  Cyclic GFR-binding peptide
  MOD_RES (32)..(32): Xaa is C or S

SEQ ID NO: 83140 - protein, 33 aa, Artificial Sequence
  Cyclic GFR-binding peptide
  MOD_RES (29)..(30): Xaa is C or S
VMDYHYKLVVNNASDKYLISIPSLRTPVXXTPP

SEQ ID NO: 83141 - protein, 23 aa, Artificial Sequence
  Cyclic GFR-binding peptide
EYKFKVVNNASDLYLISIPELRT

SEQ ID NO: 83142 - protein, 33 aa, Artificial Sequence; identical to SEQ ID NO: 31568
  Cyclic GFR-binding peptide
  MOD_RES (1)..(32)..(33): Xaa is C or S

SEQ ID NO: 83143 - protein, 29 aa, Artificial Sequence
  Cyclic GFR-binding peptide
RVIMPIKGYVKPKRGVFYLINIPSLAQPV

SEQ ID NO: 83144 - protein, 33 aa, Artificial Sequence
  Cyclic GFR-binding peptide
  MOD_RES (1)..(3): Xaa is C or S
XGXAEVVMDRHKRLVVNNAADYYLISTASLRAP

SEQ ID NO: 83145 - protein, 34 aa, Artificial Sequence; identical to SEQ ID NO: 31573
  Cyclic GFR-binding peptide
  MOD_RES (1)..(32)..(33): Xaa is C or S

SEQ ID NO: 83146 - protein, 37 aa, Artificial Sequence; identical to SEQ ID NO: 31574
  Cyclic GFR-binding peptide
  MOD_RES (32)..(33): Xaa is C or S

SEQ ID NO: 83147 - protein, 29 aa, Artificial Sequence
  Cyclic GFR-binding peptide
EVVMDYHYKLVVNNASDKYLISIPSLRTP

SEQ ID NO: 83148 - protein, 35 aa, Artificial Sequence; identical to SEQ ID NO: 31575
  Cyclic GFR-binding peptide
  MOD_RES (32)..(33): Xaa is C or S

SEQ ID NO: 83149 - protein, 35 aa, Artificial Sequence
  Cyclic GFR-binding peptide
  MOD_RES (29)..(30): Xaa is C or S
VIMRHKRLLLVRGNDYYLMSTASTKVPAXXTSPVR

SEQ ID NO: 83150 - protein, 37 aa, Artificial Sequence; identical to SEQ ID NO: 31576
  Cyclic GFR-binding peptide
  MOD_RES (31)..(32): Xaa is C or S

SEQ ID NO: 83151 - protein, 26 aa, Artificial Sequence
  Cyclic GFR-binding peptide
NRYKKLVVNKNEDFYLISIANMKEPV

SEQ ID NO: 83152 - protein, 30 aa, Artificial Sequence; identical to SEQ ID NO: 31579
  Cyclic GFR-binding peptide

SEQ ID NO: 83153 - protein, 34 aa, Artificial Sequence; identical to SEQ ID NO: 31580
  Cyclic GFR-binding peptide
  MOD_RES (31)..(32): Xaa is C or S

SEQ ID NO: 83154 - protein, 37 aa, Artificial Sequence; identical to SEQ ID NO: 31581
  Cyclic GFR-binding peptide
  MOD_RES (32)..(33): Xaa is C or S

SEQ ID NO: 83155 - protein, 26 aa, Artificial Sequence
  Cyclic GFR-binding peptide
SEVVMDYHYKLVVNNASDKYLISIPS

SEQ ID NO: 83156 - protein, 33 aa, Artificial Sequence; identical to SEQ ID NO: 31586
  Cyclic GFR-binding peptide
  MOD_RES (32)..(33): Xaa is C or S

SEQ ID NO: 83157 - protein, 27 aa, Artificial Sequence
  Cyclic GFR-binding peptide
  MOD_RES (26)..(27): Xaa is C or S
RHKRLLLVRGNDYYLMSTASTKVPAXX

SEQ ID NO: 83158 - protein, 28 aa, Artificial Sequence
  Cyclic GFR-binding peptide
  MOD_RES (28)..(28): Xaa is C or S
MDYHYKLVVNNASDKYLISIPSLRTPVX

SEQ ID NO: 83159 - protein, 28 aa, Artificial Sequence
  Cyclic GFR-binding peptide
  MOD_RES (28)..(28): Xaa is C or S
MDRHKRLVVNNASDYYLISTASLRTPVX

SEQ ID NO: 83160 - protein, 24 aa, Artificial Sequence
  Cyclic GFR-binding peptide
VVMGRHKRLIIQQKDNYYLMSTAS

SEQ ID NO: 83161 - protein, 20 aa, Artificial Sequence
  Cyclic GFR-binding peptide
YHYKLVVNNASDKYLISIPS

SEQ ID NO: 83162 - protein, 28 aa, Artificial Sequence
  Cyclic GFR-binding peptide
EVVMDYHYKLVVNNASDKYLISIPSLRT

SEQ ID NO: 83163 - protein, 37 aa, Artificial Sequence; identical to SEQ ID NO: 31591
  Cyclic GFR-binding peptide
  MOD_RES (2)..(33)..(34): Xaa is C or S

SEQ ID NO: 83164 - protein, 27 aa, Artificial Sequence
  Cyclic GFR-binding peptide
MNPIKGYVVNKNEDFYLINIPSMKEPV

SEQ ID NO: 83165 - protein, 24 aa, Artificial Sequence
  Cyclic GFR-binding peptide
VTMNEYKFKVVNKNEDLYLISIPE

SEQ ID NO: 83166 - protein, 26 aa, Artificial Sequence
  Cyclic GFR-binding peptide
  MOD_RES (26)..(26): Xaa is C or S
EYKFKIIQQKDNLYLMSIPEMKTPTX

SEQ ID NO: 83167 - protein, 28 aa, Artificial Sequence
  Cyclic GFR-binding peptide
  MOD_RES (26)..(27): Xaa is C or S
RHKRLVVNNAADYYLISTASLRAPVXXS

SEQ ID NO: 83168 - protein, 34 aa, Artificial Sequence; identical to SEQ ID NO: 31592
  Cyclic GFR-binding peptide
  MOD_RES (1)..(33)..(34): Xaa is C or S

SEQ ID NO: 83169 - protein, 22 aa, Artificial Sequence
  Cyclic GFR-binding peptide
DYHYKLVVNNASDKYLISIPSL

SEQ ID NO: 83170 - protein, 31 aa, Artificial Sequence; identical to SEQ ID NO: 31593
  Cyclic GFR-binding peptide
  MOD_RES (31)..(31): Xaa is C or S

SEQ ID NO: 83171 - protein, 30 aa, Artificial Sequence
  Cyclic GFR-binding peptide
  MOD_RES (30)..(30): Xaa is C or S
VVMDEYKFKVVNNASDLYLISIPELRTPVX

SEQ ID NO: 83172 - protein, 20 aa, Artificial Sequence
  Cyclic GFR-binding peptide
RHKRLIIQQKDNYYLMSTAS

SEQ ID NO: 83173 - protein, 42 aa, Artificial Sequence; identical to SEQ ID NO: 31594
  Cyclic GFR-binding peptide
  MOD_RES (2)..(4)..(36)..(37): Xaa is C or S

SEQ ID NO: 83174 - protein, 34 aa, Artificial Sequence; identical to SEQ ID NO: 31595
  Cyclic GFR-binding peptide
  MOD_RES (1)..(3)..(34): Xaa is C or S

SEQ ID NO: 83175 - protein, 38 aa, Artificial Sequence; identical to SEQ ID NO: 31596
  Cyclic GFR-binding peptide
  MOD_RES (1)..(3)..(35)..(36): Xaa is C or S

SEQ ID NO: 83176 - protein, 40 aa, Artificial Sequence; identical to SEQ ID NO: 31597
  Cyclic GFR-binding peptide
  MOD_RES (2)..(34)..(35): Xaa is C or S

SEQ ID NO: 83177 - protein, 37 aa, Artificial Sequence; identical to SEQ ID NO: 31599
  Cyclic GFR-binding peptide
  MOD_RES (2)..(4)..(36)..(37): Xaa is C or S

SEQ ID NO: 83178 - protein, 30 aa, Artificial Sequence
  Cyclic GFR-binding peptide
  MOD_RES (1)..(1): Xaa is C or S
XEEVIMYHYKLLLVRGNDKYLMSIPSTKVP

SEQ ID NO: 83179 - protein, 37 aa, Artificial Sequence; identical to SEQ ID NO: 31600
  Cyclic GFR-binding peptide
  MOD_RES (1)..(3)..(35)..(36): Xaa is C or S

SEQ ID NO: 83180 - protein, 31 aa, Artificial Sequence
  Cyclic GFR-binding peptide
  MOD_RES (2)..(4): Xaa is C or S
RXAXSEVTMNYHYKLVVNKNEDKYLISIPSM

SEQ ID NO: 83181 - protein, 34 aa, Artificial Sequence; identical to SEQ ID NO: 31601
  Cyclic GFR-binding peptide
  MOD_RES (1)..(3)..(34): Xaa is C or S

SEQ ID NO: 83182 - protein, 27 aa, Artificial Sequence
  Cyclic GFR-binding peptide
IMRHKRLLLVRGNDYYLMSTASTKVPA

SEQ ID NO: 83183 - protein, 36 aa, Artificial Sequence; identical to SEQ ID NO: 31602
  Cyclic GFR-binding peptide
  MOD_RES (1)..(32)..(33): Xaa is C or S

SEQ ID NO: 83184 - protein, 38 aa, Artificial Sequence; identical to SEQ ID NO: 31603
  Cyclic GFR-binding peptide
  MOD_RES (32)..(33): Xaa is C or S

SEQ ID NO: 83185 - protein, 40 aa, Artificial Sequence; identical to SEQ ID NO: 31604
  Cyclic GFR-binding peptide
  MOD_RES (2)..(34)..(35): Xaa is C or S

SEQ ID NO: 83186 - protein, 33 aa, Artificial Sequence
  Cyclic GFR-binding peptide
  MOD_RES (30)..(31): Xaa is C or S
EVIMYHYKLLLVRGNDKYLMSIPSTKVPAXXTS

SEQ ID NO: 83187 - protein, 34 aa, Artificial Sequence; identical to SEQ ID NO: 31605
  Cyclic GFR-binding peptide
  MOD_RES (32)..(33): Xaa is C or S

SEQ ID NO: 83188 - protein, 36 aa, Artificial Sequence; identical to SEQ ID NO: 31606
  Cyclic GFR-binding peptide
  MOD_RES (2)..(4)..(36): Xaa is C or S

SEQ ID NO: 83189 - protein, 25 aa, Artificial Sequence
  Cyclic GFR-binding peptide
VMDYHYKLVVNNASDKYLISIPSLR

SEQ ID NO: 83190 - protein, 27 aa, Artificial Sequence
  Cyclic GFR-binding peptide
  MOD_RES (27)..(27): Xaa is C or S
MRHKRLLLVRGNDYYLMSTASTKVPAX

SEQ ID NO: 83191 - protein, 27 aa, Artificial Sequence
  Cyclic GFR-binding peptide
  MOD_RES (1)..(1): Xaa is C or S
XSKVVMPIKGYVKPTRGVFYLINIPSL

SEQ ID NO: 83192 - protein, 31 aa, Artificial Sequence
  Cyclic GFR-binding peptide
  MOD_RES (1)..(3): Xaa is C or S
XGXSEVVMDEYKFKVVNNASDLYLISIPELR

SEQ ID NO: 83193 - protein, 34 aa, Artificial Sequence; identical to SEQ ID NO: 31608
  Cyclic GFR-binding peptide
  MOD_RES (2)..(4): Xaa is C or S

SEQ ID NO: 83194 - protein, 27 aa, Artificial Sequence
  Cyclic GFR-binding peptide
VMDYHYKLVVNNASDKYLISIPSLRTP

SEQ ID NO: 83195 - protein, 32 aa, Artificial Sequence
  Cyclic GFR-binding peptide
  MOD_RES (29)..(30): Xaa is C or S
VMGRHKRLIIQQKDNYYLMSTASMKTPTXXPG

SEQ ID NO: 83196 - protein, 24 aa, Artificial Sequence
  Cyclic GFR-binding peptide
EVIMEYKFKLLVRGNDLYLMSIPE

SEQ ID NO: 83197 - protein, 34 aa, Artificial Sequence; identical to SEQ ID NO: 31610
  Cyclic GFR-binding peptide
  MOD_RES (1)..(3): Xaa is C or S

SEQ ID NO: 83198 - protein, 25 aa, Artificial Sequence
  Cyclic GFR-binding peptide
VMDRHKRLVVNNASDYYLISTASLR

SEQ ID NO: 83199 - protein, 37 aa, Artificial Sequence; identical to SEQ ID NO: 31611
  Cyclic GFR-binding peptide
  MOD_RES (2)..(34)..(35): Xaa is C or S

SEQ ID NO: 83200 - protein, 23 aa, Artificial Sequence
  Cyclic GFR-binding peptide
RHKRLIIQQKDNYYLMSTASMKT

SEQ ID NO: 83201 - protein, 37 aa, Artificial Sequence; identical to SEQ ID NO: 31612
  Cyclic GFR-binding peptide
  MOD_RES (2)..(4)..(36)..(37): Xaa is C or S

SEQ ID NO: 83202 - protein, 33 aa, Artificial Sequence
  Cyclic GFR-binding peptide
  MOD_RES (2)..(4): Xaa is C or S
LXGXEEVIMRHKRLLLVRGNDYYLMSTASTKVP

SEQ ID NO: 83203 - protein, 27 aa, Artificial Sequence
  Cyclic GFR-binding peptide
TMNRYKKLVVNKNEDFYLISIANMKEP

SEQ ID NO: 83204 - protein, 37 aa, Artificial Sequence; identical to SEQ ID NO: 31613
  Cyclic GFR-binding peptide
  MOD_RES (1)..(3)..(34)..(35): Xaa is C or S

SEQ ID NO: 83205 - protein, 31 aa, Artificial Sequence
  Cyclic GFR-binding peptide
  MOD_RES (1)..(3): Xaa is C or S
XKXSKVVMPIKGYVKPTRGVFYLINIPSLDQ

SEQ ID NO: 83206 - protein, 38 aa, Artificial Sequence
  Cyclic GFR-binding peptide
  MOD_RES (1)..(3)..(35)..(36): Xaa is C or S
XGXESVAMGRHKRLYTVVGKDYYLISTASLKTPVXXAK

SEQ ID NO: 83207 - protein, 28 aa, Artificial Sequence
  Cyclic GFR-binding peptide
  MOD_RES (26)..(27): Xaa is C or S
PIKGYIKPTKGIFYLINIPSLDQSVXXP

SEQ ID NO: 83208 - protein, 31 aa, Artificial Sequence
  Cyclic GFR-binding peptide
  MOD_RES (1)..(3): Xaa is C or S
XGXEEVIMYHYKLLLVRGNDKYLMSIPSTKV

SEQ ID NO: 83209 - protein, 36 aa, Artificial Sequence; identical to SEQ ID NO: 31618
  Cyclic GFR-binding peptide
  MOD_RES (31)..(32): Xaa is C or S

SEQ ID NO: 83210 - protein, 37 aa, Artificial Sequence; identical to SEQ ID NO: 31617
  Cyclic GFR-binding peptide
  MOD_RES (1)..(3)..(34)..(35): Xaa is C or S

SEQ ID NO: 83211 - protein, 26 aa, Artificial Sequence
  Cyclic GFR-binding peptide
GEYKFKIIQQKDNLYLMSIPEMKTPT

SEQ ID NO: 83212 - protein, 30 aa, Artificial Sequence
  Cyclic GFR-binding peptide
  MOD_RES (28)..(29): Xaa is C or S
MNRYKKLVVNKNEDFYLISIANMKEPVXXP

SEQ ID NO: 83213 - protein, 31 aa, Artificial Sequence
  Cyclic GFR-binding peptide
  MOD_RES (28)..(29): Xaa is C or S
MNRYKKLVVNKNEDFYLISIANMKEPVXXPE

SEQ ID NO: 83214 - protein, 35 aa, Artificial Sequence; identical to SEQ ID NO: 31619
  Cyclic GFR-binding peptide
  MOD_RES (1)..(33)..(34): Xaa is C or S

SEQ ID NO: 83215 - protein, 36 aa, Artificial Sequence; identical to SEQ ID NO: 31620
  Cyclic GFR-binding peptide
  MOD_RES (2)..(34)..(35): Xaa is C or S

SEQ ID NO: 83216 - protein, 31 aa, Artificial Sequence
  Cyclic GFR-binding peptide
  MOD_RES (28)..(29): Xaa is C or S
VMPIKGYVKPTRGVFYLINIPSLDQPVXXPS

SEQ ID NO: 83217 - protein, 29 aa, Artificial Sequence
  Cyclic GFR-binding peptide
  MOD_RES (1)..(3): Xaa is C or S
XGXAEVVMDRHKRLVVNNAADYYLISTAS

SEQ ID NO: 83218 - protein, 31 aa, Artificial Sequence; identical to SEQ ID NO: 31621
  Cyclic GFR-binding peptide
  MOD_RES (31)..(31): Xaa is C or S

SEQ ID NO: 83219 - protein, 29 aa, Artificial Sequence
  Cyclic GFR-binding peptide
  MOD_RES (27)..(28): Xaa is C or S
DEYKFKVVNNASDLYLISIPELRTPVXXT

SEQ ID NO: 83220 - protein, 24 aa, Artificial Sequence
  Cyclic GFR-binding peptide
KVIMPIKGYIKPTKGIFYLINIPS

SEQ ID NO: 83221 - protein, 31 aa, Artificial Sequence
  Cyclic GFR-binding peptide
  MOD_RES (2)..(2): Xaa is C or S
GXSEVVMDEYKFKVVNNASDLYLISIPELRT

SEQ ID NO: 83222 - protein, 24 aa, Artificial Sequence
  Cyclic GFR-binding peptide
MPIKGYVKPTRGVFYLINIPSLDQ

SEQ ID NO: 83223 - protein, 28 aa, Artificial Sequence
  Cyclic GFR-binding peptide
VVMDEYKFKVVNNASDLYLISIPELRTP

SEQ ID NO: 83224 - protein, 32 aa, Artificial Sequence
  Cyclic GFR-binding peptide
  MOD_RES (2)..(2): Xaa is C or S
AXSEVTMNRHKRLVVNKNEDYYLISTASMKEP

SEQ ID NO: 83225 - protein, 26 aa, Artificial Sequence
  Cyclic GFR-binding peptide
MPIKGYVKPKRGVFYLINIPSLAQPV

SEQ ID NO: 83226 - protein, 37 aa, Artificial Sequence; identical to SEQ ID NO: 31623
  Cyclic GFR-binding peptide
  MOD_RES (1)..(33)..(34): Xaa is C or S

SEQ ID NO: 83227 - protein, 38 aa, Artificial Sequence; identical to SEQ ID NO: 31624
  Cyclic GFR-binding peptide
  MOD_RES (1)..(33)..(34): Xaa is C or S

SEQ ID NO: 83228 - protein, 31 aa, Artificial Sequence
  Cyclic GFR-binding peptide
  MOD_RES (2)..(2): Xaa is C or S
KXSRVIMPIKGYVKPKRGVFYLINIPSLAQP

SEQ ID NO: 83229 - protein, 27 aa, Artificial Sequence
  Cyclic GFR-binding peptide
EVTMNPIKGYVVNKNEDFYLINIPSMK

SEQ ID NO: 83230 - protein, 29 aa, Artificial Sequence
  Cyclic GFR-binding peptide
  MOD_RES (2)..(2): Xaa is C or S
KXSKVIMPIKGYIKPTKGIFYLINIPSLD

SEQ ID NO: 83231 - protein, 30 aa, Artificial Sequence
  Cyclic GFR-binding peptide
  MOD_RES (27)..(28): Xaa is C or S
MPIKGYVKPTRGVFYLINIPSLDQPVXXPS

SEQ ID NO: 83232 - protein, 35 aa, Artificial Sequence
  Cyclic GFR-binding peptide
  MOD_RES (29)..(30): Xaa is C or S
VIMYHYKLLLVRGNDKYLMSIPSTKVPAXXTSPVR

SEQ ID NO: 83233 - protein, 34 aa, Artificial Sequence; identical to SEQ ID NO: 31629
  Cyclic GFR-binding peptide
  MOD_RES (1)..(33)..(34): Xaa is C or S

SEQ ID NO: 83234 - protein, 30 aa, Artificial Sequence
  Cyclic GFR-binding peptide
  MOD_RES (30)..(30): Xaa is C or S
VVMGRHKRLIIQQKDNYYLMSTASMKTPTX

SEQ ID NO: 83235 - protein, 22 aa, Artificial Sequence
  Cyclic GFR-binding peptide
RHKRLYTVVGKDYYLISTASLK

SEQ ID NO: 83236 - protein, 26 aa, Artificial Sequence
  Cyclic GFR-binding peptide
MRHKRLLLVRGNDYYLMSTASTKVPA

SEQ ID NO: 83237 - protein, 30 aa, Artificial Sequence
  Cyclic GFR-binding peptide
  MOD_RES (30)..(30): Xaa is C or S
VVMGYHYKLIIQQKDNKYLMSIPSMKTPTX

SEQ ID NO: 83238 - protein, 27 aa, Artificial Sequence
  Cyclic GFR-binding peptide
RDVVMGEYKFKIIQQKDNLYLMSIPEM

SEQ ID NO: 83239 - protein, 26 aa, Artificial Sequence
  Cyclic GFR-binding peptide
RDVVMGYHYKLIIQQKDNKYLMSIPS

SEQ ID NO: 83240 - protein, 39 aa, Artificial Sequence; identical to SEQ ID NO: 31631
  Cyclic GFR-binding peptide
  MOD_RES (1)..(33)..(34): Xaa is C or S

SEQ ID NO: 83241 - protein, 29 aa, Artificial Sequence
  Cyclic GFR-binding peptide
  MOD_RES (26)..(27): Xaa is C or S
PIKGYVKPTRGVFYLINIPSLDQPVXXPS

SEQ ID NO: 83242 - protein, 32 aa, Artificial Sequence
  Cyclic GFR-binding peptide
  MOD_RES (29)..(30): Xaa is C or S
VMGEYKFKIIQQKDNLYLMSIPEMKTPTXXPG

SEQ ID NO: 83243 - protein, 29 aa, Artificial Sequence
  Cyclic GFR-binding peptide
  MOD_RES (28)..(29): Xaa is C or S
MNRHKRLVVNKNEDYYLISTASMKEPVXX

SEQ ID NO: 83244 - protein, 26 aa, Artificial Sequence
  Cyclic GFR-binding peptide
NRHKRLVVNKNEDYYLISTASMKEPV

SEQ ID NO: 83245 - protein, 32 aa, Artificial Sequence; identical to SEQ ID NO: 31632
  Cyclic GFR-binding peptide
  MOD_RES (31)..(32): Xaa is C or S

SEQ ID NO: 83246 - protein, 24 aa, Artificial Sequence
  Cyclic GFR-binding peptide
DEYKFKVVNNASDLYLISIPELRT

SEQ ID NO: 83247 - protein, 29 aa, Artificial Sequence
  Cyclic GFR-binding peptide
  MOD_RES (26)..(27): Xaa is C or S
RHKRLLLVRGNDYYLMSTASTKVPAXXTS

SEQ ID NO: 83248 - protein, 36 aa, Artificial Sequence; identical to SEQ ID NO: 31634
  Cyclic GFR-binding peptide
  MOD_RES (31)..(32): Xaa is C or S

SEQ ID NO: 83249 - protein, 34 aa, Artificial Sequence
  Cyclic GFR-binding peptide
  MOD_RES (28)..(29): Xaa is C or S
IMPIKGYVKPKRGVFYLINIPSLAQPVXXPAASA

SEQ ID NO: 83250 - protein, 28 aa, Artificial Sequence
  Cyclic GFR-binding peptide
  MOD_RES (2)..(2): Xaa is C or S
GXSEVVMDRHKRLVVNNASDYYLISTAS

SEQ ID NO: 83251 - protein, 30 aa, Artificial Sequence
  Cyclic GFR-binding peptide
  MOD_RES (1)..(1): Xaa is C or S
XEEVIMEYKFKLLVRGNDLYLMSIPETKVP

SEQ ID NO: 83252 - protein, 40 aa, Artificial Sequence; identical to SEQ ID NO: 31638
  Cyclic GFR-binding peptide
  MOD_RES (2)..(34)..(35): Xaa is C or S

SEQ ID NO: 83253 - protein, 41 aa, Artificial Sequence; identical to SEQ ID NO: 31639
  Cyclic GFR-binding peptide
  MOD_RES (1)..(3)..(35)..(36): Xaa is C or S

SEQ ID NO: 83254 - protein, 35 aa, Artificial Sequence; identical to SEQ ID NO: 31640
  Cyclic GFR-binding peptide
  MOD_RES (1)..(32)..(33): Xaa is C or S

SEQ ID NO: 83255 - protein, 29 aa, Artificial Sequence
  Cyclic GFR-binding peptide
  MOD_RES (1)..(3): Xaa is C or S
XGXEEVIMEYKFKLLVRGNDLYLMSIPET

SEQ ID NO: 83256 - protein, 39 aa, Artificial Sequence; identical to SEQ ID NO: 31642
  Cyclic GFR-binding peptide
  MOD_RES (2)..(34)..(35): Xaa is C or S

SEQ ID NO: 83257 - protein, 31 aa, Artificial Sequence
  Cyclic GFR-binding peptide
  MOD_RES (27)..(28): Xaa is C or S
NEYKFKVVNKNEDLYLISIPEMKEPVXXPEP

SEQ ID NO: 83258 - protein, 27 aa, Artificial Sequence
  Cyclic GFR-binding peptide
  MOD_RES (27)..(27): Xaa is C or S
NRYKKLVVNKNEDFYLISIANMKEPVX

SEQ ID NO: 83259 - protein, 28 aa, Artificial Sequence
  Cyclic GFR-binding peptide
  MOD_RES (1)..(1): Xaa is C or S
XSEVTMNRHKRLVVNKNEDYYLISTASM

SEQ ID NO: 83260 - protein, 29 aa, Artificial Sequence
  Cyclic GFR-binding peptide
  MOD_RES (28)..(29): Xaa is C or S
MNYHYKLVVNKNEDKYLISIPSMKEPVXX

SEQ ID NO: 83261 - protein, 34 aa, Artificial Sequence; identical to SEQ ID NO: 31644
  Cyclic GFR-binding peptide
  MOD_RES (32)..(33): Xaa is C or S

SEQ ID NO: 83262 - protein, 40 aa, Artificial Sequence; identical to SEQ ID NO: 31646
  Cyclic GFR-binding peptide
  MOD_RES (2)..(4)..(35)..(36): Xaa is C or S

SEQ ID NO: 83263 - protein, 28 aa, Artificial Sequence
  Cyclic GFR-binding peptide
  MOD_RES (2)..(2): Xaa is C or S
GXRDVVMGYHYKLIIQQKDNKYLMSIPS

SEQ ID NO: 83264 - protein, 38 aa, Artificial Sequence; identical to SEQ ID NO: 31647
  Cyclic GFR-binding peptide
  MOD_RES (2)..(33)..(34): Xaa is C or S

SEQ ID NO: 83265 - protein, 39 aa, Artificial Sequence; identical to SEQ ID NO: 31648
  Cyclic GFR-binding peptide
  MOD_RES (1)..(33)..(34): Xaa is C or S

SEQ ID NO: 83266 - protein, 31 aa, Artificial Sequence
  Cyclic GFR-binding peptide
  MOD_RES (27)..(28): Xaa is C or S
NYHYKLVVNKNEDKYLISIPSMKEPVXXPEP

SEQ ID NO: 83267 - protein, 32 aa, Artificial Sequence; identical to SEQ ID NO: 31650
  Cyclic GFR-binding peptide
  MOD_RES (32)..(32): Xaa is C or S

SEQ ID NO: 83268 - protein, 33 aa, Artificial Sequence
  Cyclic GFR-binding peptide
  MOD_RES (30)..(31): Xaa is C or S
VTMNEYKFKVVNKNEDLYLISIPEMKEPVXXPE

SEQ ID NO: 83269 - protein, 32 aa, Artificial Sequence
  Cyclic GFR-binding peptide
  MOD_RES (26)..(27): Xaa is C or S
RHKRLVVNNAADYYLISTASLRAPVXXSAPAA

SEQ ID NO: 83270 - protein, 23 aa, Artificial Sequence
  Cyclic GFR-binding peptide
EYKFKVVNKNEDLYLISIPEMKE

SEQ ID NO: 83271 - protein, 30 aa, Artificial Sequence; identical to SEQ ID NO: 31652
  Cyclic GFR-binding peptide

SEQ ID NO: 83272 - protein, 38 aa, Artificial Sequence; identical to SEQ ID NO: 31653
  Cyclic GFR-binding peptide
  MOD_RES (1)..(33)..(34): Xaa is C or S

SEQ ID NO: 83273 - protein, 28 aa, Artificial Sequence
  Cyclic GFR-binding peptide
SEVTMNPIKGYVVNKNEDFYLINIPSMK

SEQ ID NO: 83274 - protein, 39 aa, Artificial Sequence; identical to SEQ ID NO: 31654
  Cyclic GFR-binding peptide
  MOD_RES (1)..(3)..(35)..(36): Xaa is C or S

SEQ ID NO: 83275 - protein, 30 aa, Artificial Sequence
  Cyclic GFR-binding peptide
  MOD_RES (26)..(27): Xaa is C or S
YHYKLLLVRGNDKYLMSIPSTKVPAXXTSP

SEQ ID NO: 83276 - protein, 25 aa, Artificial Sequence
  Cyclic GFR-binding peptide
DEYKFKVVNNASDLYLISIPELRTP

SEQ ID NO: 83277 - protein, 38 aa, Artificial Sequence; identical to SEQ ID NO: 31655
  Cyclic GFR-binding peptide
  MOD_RES (2)..(4)..(36)..(37): Xaa is C or S

SEQ ID NO: 83278 - protein, 30 aa, Artificial Sequence
  Cyclic GFR-binding peptide
  MOD_RES (2)..(2): Xaa is C or S
KXSKVVMPIKGYVKPTRGVFYLINIPSLDQ

SEQ ID NO: 83279 - protein, 35 aa, Artificial Sequence; identical to SEQ ID NO: 31657
  Cyclic GFR-binding peptide
  MOD_RES (1)..(3)..(34)..(35): Xaa is C or S

SEQ ID NO: 83280 - protein, 25 aa, Artificial Sequence
  Cyclic GFR-binding peptide
MPIKGYIKPTKGIFYLINIPSLDQS

SEQ ID NO: 83281 - protein, 27 aa, Artificial Sequence
  Cyclic GFR-binding peptide
VTMNPIKGYVVNKNEDFYLINIPSMKE

SEQ ID NO: 83282 - protein, 35 aa, Artificial Sequence; identical to SEQ ID NO: 31658
  Cyclic GFR-binding peptide
  MOD_RES (2)..(4): Xaa is C or S

SEQ ID NO: 83283 - protein, 33 aa, Artificial Sequence
  Cyclic GFR-binding peptide
  MOD_RES (27)..(28): Xaa is C or S
MRHKRLLLVRGNDYYLMSTASTKVPAXXTSPVR

SEQ ID NO: 83284 - protein, 36 aa, Artificial Sequence; identical to SEQ ID NO: 31660
  Cyclic GFR-binding peptide
  MOD_RES (1)..(3)..(35)..(36): Xaa is C or S

SEQ ID NO: 83285 - protein, 36 aa, Artificial Sequence; identical to SEQ ID NO: 31661
  Cyclic GFR-binding peptide
  MOD_RES (2)..(4)..(36): Xaa is C or S

SEQ ID NO: 83286 - protein, 31 aa, Artificial Sequence
  Cyclic GFR-binding peptide
  MOD_RES (1)..(3): Xaa is C or S
XAXSEVTMNYHYKLVVNKNEDKYLISIPSMK

SEQ ID NO: 83287 - protein, 36 aa, Artificial Sequence; identical to SEQ ID NO: 31663
  Cyclic GFR-binding peptide
  MOD_RES (1)..(3)..(35)..(36): Xaa is C or S

SEQ ID NO: 83288 - protein, 38 aa, Artificial Sequence; identical to SEQ ID NO: 31664
  Cyclic GFR-binding peptide
  MOD_RES (2)..(34)..(35): Xaa is C or S

SEQ ID NO: 83289 - protein, 35 aa, Artificial Sequence; identical to SEQ ID NO: 31665
  Cyclic GFR-binding peptide
  MOD_RES (32)..(33): Xaa is C or S

SEQ ID NO: 83290 - protein, 27 aa, Artificial Sequence
  Cyclic GFR-binding peptide
  MOD_RES (27)..(27): Xaa is C or S
NPIKGYVVNKNEDFYLINIPSMKEPVX

SEQ ID NO: 83291 - protein, 36 aa, Artificial Sequence; identical to SEQ ID NO: 31667
  Cyclic GFR-binding peptide
  MOD_RES (1)..(32)..(33): Xaa is C or S

SEQ ID NO: 83292 - protein, 30 aa, Artificial Sequence
  Cyclic GFR-binding peptide
  MOD_RES (28)..(29): Xaa is C or S
MGEYKFKIIQQKDNLYLMSIPEMKTPTXXP

SEQ ID NO: 83293 - protein, 31 aa, Artificial Sequence
  Cyclic GFR-binding peptide
  MOD_RES (29)..(30): Xaa is C or S
VMDEYKFKVVNNASDLYLISIPELRTPVXXT

SEQ ID NO: 83294 - protein, 30 aa, Artificial Sequence
  Cyclic GFR-binding peptide
  MOD_RES (26)..(27): Xaa is C or S
PIKGYVVNKNEDFYLINIPSMKEPVXXPEP

SEQ ID NO: 83295 - protein, 29 aa, Artificial Sequence
  Cyclic GFR-binding peptide
EVIMYHYKLLLVRGNDKYLMSIPSTKVPA

SEQ ID NO: 83296 - protein, 31 aa, Artificial Sequence; identical to SEQ ID NO: 31672
  Cyclic GFR-binding peptide
  MOD_RES (1)..(1): Xaa is C or S

SEQ ID NO: 83297 - protein, 37 aa, Artificial Sequence; identical to SEQ ID NO: 31674
  Cyclic GFR-binding peptide
  MOD_RES (2)..(34)..(35): Xaa is C or S

SEQ ID NO: 83298 - protein, 33 aa, Artificial Sequence
  Cyclic GFR-binding peptide
  MOD_RES (29)..(30): Xaa is C or S
VMDRHKRLVVNNAADYYLISTASLRAPVXXSAP

SEQ ID NO: 83299 - protein, 38 aa, Artificial Sequence; identical to SEQ ID NO: 31676
  Cyclic GFR-binding peptide
  MOD_RES (1)..(3)..(35)..(36): Xaa is C or S

SEQ ID NO: 83300 - protein, 24 aa, Artificial Sequence
  Cyclic GFR-binding peptide
VVMGYHYKLIIQQKDNKYLMSIPS

SEQ ID NO: 83301 - protein, 23 aa, Artificial Sequence
  Cyclic GFR-binding peptide
VIMEYKFKLLVRGNDLYLMSIPE

SEQ ID NO: 83302 - protein, 35 aa, Artificial Sequence; identical to SEQ ID NO: 31683
  Cyclic GFR-binding peptide
  MOD_RES (1)..(33)..(34): Xaa is C or S

SEQ ID NO: 83303 - protein, 28 aa, Artificial Sequence
  Cyclic GFR-binding peptide
  MOD_RES (1)..(1): Xaa is C or S
XSEVVMDRHKRLVVNNASDYYLISTASL

SEQ ID NO: 83304 - protein, 29 aa, Artificial Sequence
  Cyclic GFR-binding peptide
  MOD_RES (29)..(29): Xaa is C or S
VIMEYKFKLLVRGNDLYLMSIPETKVPAX

SEQ ID NO: 83305 - protein, 30 aa, Artificial Sequence
  Cyclic GFR-binding peptide
  MOD_RES (2)..(2): Xaa is C or S
GXEEVIMRHKRLLLVRGNDYYLMSTASTKV

SEQ ID NO: 83306 - protein, 30 aa, Artificial Sequence
  Cyclic GFR-binding peptide
  MOD_RES (26)..(27): Xaa is C or S
PIKGYVKPKRGVFYLINIPSLAQPVXXPAA

SEQ ID NO: 83307 - protein, 37 aa, Artificial Sequence; identical to SEQ ID NO: 31686
  Cyclic GFR-binding peptide
  MOD_RES (31)..(32): Xaa is C or S

SEQ ID NO: 83308 - protein, 25 aa, Artificial Sequence
  Cyclic GFR-binding peptide
DVVMGYHYKLIIQQKDNKYLMSIPS

SEQ ID NO: 83309 - protein, 40 aa, Artificial Sequence; identical to SEQ ID NO: 31687
  Cyclic GFR-binding peptide
  MOD_RES (2)..(34)..(35): Xaa is C or S

SEQ ID NO: 83310 - protein, 25 aa, Artificial Sequence
  Cyclic GFR-binding peptide
DYHYKLVVNNASDKYLISIPSLRTP

SEQ ID NO: 83311 - protein, 33 aa, Artificial Sequence; identical to SEQ ID NO: 31688
  Cyclic GFR-binding peptide
  MOD_RES (1)..(3): Xaa is C or S

SEQ ID NO: 83312 - protein, 26 aa, Artificial Sequence
  Cyclic GFR-binding peptide
  MOD_RES (26)..(26): Xaa is C or S
RYKKLVVNKNEDFYLISIANMKEPVX

SEQ ID NO: 83313 - protein, 28 aa, Artificial Sequence
  Cyclic GFR-binding peptide
TMNYHYKLVVNKNEDKYLISIPSMKEPV

SEQ ID NO: 83314 - protein, 34 aa, Artificial Sequence
  Cyclic GFR-binding peptide
  MOD_RES (2)..(4): Xaa is C or S
SXGXRDVVMGYHYKLIIQQKDNKYLMSIPSMKTP

SEQ ID NO: 83315 - protein, 25 aa, Artificial Sequence
  Cyclic GFR-binding peptide
VMDEYKFKVVNNASDLYLISIPELR

SEQ ID NO: 83316 - protein, 29 aa, Artificial Sequence
  Cyclic GFR-binding peptide
  MOD_RES (2)..(2): Xaa is C or S
GXEEVIMRHKRLLLVRGNDYYLMSTASTK

SEQ ID NO: 83317 - protein, 37 aa, Artificial Sequence; identical to SEQ ID NO: 31692
  Cyclic GFR-binding peptide
  MOD_RES (32)..(33): Xaa is C or S

SEQ ID NO: 83318 - protein, 31 aa, Artificial Sequence
  Cyclic GFR-binding peptide
  MOD_RES (30)..(31): Xaa is C or S
VVMGRHKRLIIQQKDNYYLMSTASMKTPTXX

SEQ ID NO: 83319 - protein, 33 aa, Artificial Sequence
  Cyclic GFR-binding peptide
  MOD_RES (28)..(29): Xaa is C or S
IMRHKRLLLVRGNDYYLMSTASTKVPAXXTSPV

SEQ ID NO: 83320 - protein, 29 aa, Artificial Sequence
  Cyclic GFR-binding peptide
  MOD_RES (28)..(29): Xaa is C or S
MGRHKRLYTVVGKDYYLISTASLKTPVXX

SEQ ID NO: 83321 - protein, 30 aa, Artificial Sequence
  Cyclic GFR-binding peptide
  MOD_RES (1)..(1): Xaa is C or S
XESVAMGRHKRLYTVVGKDYYLISTASLKT

SEQ ID NO: 83322 - protein, 26 aa, Artificial Sequence
  Cyclic GFR-binding peptide
EEVIMRHKRLLLVRGNDYYLMSTAST

SEQ ID NO: 83323 - protein, 36 aa, Artificial Sequence
  Cyclic GFR-binding peptide
  MOD_RES (30)..(31): Xaa is C or S
EVIMYHYKLLLVRGNDKYLMSIPSTKVPAXXTSPVR

SEQ ID NO: 83324 - protein, 30 aa, Artificial Sequence
  Cyclic GFR-binding peptide
  MOD_RES (2)..(2): Xaa is C or S
GXSEVVMDEYKFKVVNNASDLYLISIPELR

SEQ ID NO: 83325 - protein, 36 aa, Artificial Sequence; identical to SEQ ID NO: 31697
  Cyclic GFR-binding peptide
  MOD_RES (1)..(3)..(34)..(35): Xaa is C or S

SEQ ID NO: 83326 - protein, 37 aa, Artificial Sequence; identical to SEQ ID NO: 31698
  Cyclic GFR-binding peptide
  MOD_RES (32)..(33): Xaa is C or S

SEQ ID NO: 83327 - protein, 24 aa, Artificial Sequence
  Cyclic GFR-binding peptide
AMGRHKRLYTVVGKDYYLISTASL

SEQ ID NO: 83328 - protein, 34 aa, Artificial Sequence; identical to SEQ ID NO: 31699
  Cyclic GFR-binding peptide
  MOD_RES (1)..(3): Xaa is C or S

SEQ ID NO: 83329 - protein, 41 aa, Artificial Sequence; identical to SEQ ID NO: 31701
  Cyclic GFR-binding peptide
  MOD_RES (1)..(3)..(35)..(36): Xaa is C or S

SEQ ID NO: 83330 - protein, 41 aa, Artificial Sequence; identical to SEQ ID NO: 31703
  Cyclic GFR-binding peptide
  MOD_RES (1)..(3)..(35)..(36): Xaa is C or S

SEQ ID NO: 83331 - protein, 33 aa, Artificial Sequence
  Cyclic GFR-binding peptide
  MOD_RES (30)..(31): Xaa is C or S
VTMNPIKGYVVNKNEDFYLINIPSMKEPVXXPE

SEQ ID NO: 83332 - protein, 37 aa, Artificial Sequence; identical to SEQ ID NO: 31705
  Cyclic GFR-binding peptide
  MOD_RES (32)..(33): Xaa is C or S

SEQ ID NO: 83333 - protein, 38 aa, Artificial Sequence; identical to SEQ ID NO: 31707
  Cyclic GFR-binding peptide
  MOD_RES (1)..(33)..(34): Xaa is C or S

SEQ ID NO: 83334 - protein, 28 aa, Artificial Sequence
  Cyclic GFR-binding peptide
EVVMDEYKFKVVNNASDLYLISIPELRT

SEQ ID NO: 83335 - protein, 30 aa, Artificial Sequence
  Cyclic GFR-binding peptide
  MOD_RES (29)..(30): Xaa is C or S
VIMPIKGYIKPTKGIFYLINIPSLDQSVXX

SEQ ID NO: 83336 - protein, 21 aa, Artificial Sequence
  Cyclic GFR-binding peptide
DRHKRLVVNNAADYYLISTAS

SEQ ID NO: 83337 - protein, 36 aa, Artificial Sequence; identical to SEQ ID NO: 31710
  Cyclic GFR-binding peptide
  MOD_RES (31)..(32): Xaa is C or S

SEQ ID NO: 83338 - protein, 30 aa, Artificial Sequence; identical to SEQ ID NO: 31711
  Cyclic GFR-binding peptide

SEQ ID NO: 83339 - protein, 35 aa, Artificial Sequence
  Cyclic GFR-binding peptide
  MOD_RES (29)..(30): Xaa is C or S
VIMPIKGYVKPKRGVFYLINIPSLAQPVXXPAASA

SEQ ID NO: 83340 - protein, 36 aa, Artificial Sequence
  Cyclic GFR-binding peptide
  MOD_RES (30)..(31): Xaa is C or S
VVMGEYKFKIIQQKDNLYLMSIPEMKTPTXXPGASG

SEQ ID NO: 83341 - protein, 36 aa, Artificial Sequence; identical to SEQ ID NO: 31712
  Cyclic GFR-binding peptide
  MOD_RES (32)..(33): Xaa is C or S

SEQ ID NO: 83342 - protein, 31 aa, Artificial Sequence; identical to SEQ ID NO: 31713
  Cyclic GFR-binding peptide
  MOD_RES (31)..(31): Xaa is C or S

SEQ ID NO: 83343 - protein, 23 aa, Artificial Sequence
  Cyclic GFR-binding peptide
TMNRYKKLVVNKNEDFYLISIAN

SEQ ID NO: 83344 - protein, 27 aa, Artificial Sequence
  Cyclic GFR-binding peptide
  MOD_RES (2)..(2): Xaa is C or S
KXSKVIMPIKGYIKPTKGIFYLINIPS

SEQ ID NO: 83345 - protein, 27 aa, Artificial Sequence
  Cyclic GFR-binding peptide
  MOD_RES (2)..(2): Xaa is C or S
GXEEVIMRHKRLLLVRGNDYYLMSTAS

SEQ ID NO: 83346 - protein, 36 aa, Artificial Sequence; identical to SEQ ID NO: 31716
  Cyclic GFR-binding peptide
  MOD_RES (1)..(32)..(33): Xaa is C or S

SEQ ID NO: 83347 - protein, 29 aa, Artificial Sequence
  Cyclic GFR-binding peptide
  MOD_RES (26)..(27): Xaa is C or S
RHKRLIIQQKDNYYLMSTASMKTPTXXPG

SEQ ID NO: 83348 - protein, 26 aa, Artificial Sequence
  Cyclic GFR-binding peptide
MNEYKFKVVNKNEDLYLISIPEMKEP

SEQ ID NO: 83349 - protein, 26 aa, Artificial Sequence
  Cyclic GFR-binding peptide
SRVIMPIKGYVKPKRGVFYLINIPSL

SEQ ID NO: 83350 - protein, 30 aa, Artificial Sequence
  Cyclic GFR-binding peptide
  MOD_RES (27)..(28): Xaa is C or S
MPIKGYIKPTKGIFYLINIPSLDQSVXXPS

SEQ ID NO: 83351 - protein, 25 aa, Artificial Sequence
  Cyclic GFR-binding peptide
VTMNYHYKLVVNKNEDKYLISIPSM

SEQ ID NO: 83352 - protein, 32 aa, Artificial Sequence
  Cyclic GFR-binding peptide
  MOD_RES (1)..(3): Xaa is C or S
XAXSEVTMNPIKGYVVNKNEDFYLINIPSMKE

SEQ ID NO: 83353 - protein, 35 aa, Artificial Sequence; identical to SEQ ID NO: 31718
  Cyclic GFR-binding peptide
  MOD_RES (1)..(3)..(35): Xaa is C or S

SEQ ID NO: 83354 - protein, 32 aa, Artificial Sequence
  Cyclic GFR-binding peptide
  MOD_RES (28)..(29): Xaa is C or S
MNEYKFKVVNKNEDLYLISIPEMKEPVXXPEP

SEQ ID NO: 83355 - protein, 34 aa, Artificial Sequence
  Cyclic GFR-binding peptide
  MOD_RES (30)..(31): Xaa is C or S
VTMNPIKGYVVNKNEDFYLINIPSMKEPVXXPEP

SEQ ID NO: 83356 - protein, 35 aa, Artificial Sequence; identical to SEQ ID NO: 31719
  Cyclic GFR-binding peptide
  MOD_RES (1)..(3)..(35): Xaa is C or S

SEQ ID NO: 83357 - protein, 32 aa, Artificial Sequence
  Cyclic GFR-binding peptide
  MOD_RES (29)..(30): Xaa is C or S
VMGYHYKLIIQQKDNKYLMSIPSMKTPTXXPG

SEQ ID NO: 83358 - protein, 33 aa, Artificial Sequence
  Cyclic GFR-binding peptide
  MOD_RES (28)..(29): Xaa is C or S
MNPIKGYVVNKNEDFYLINIPSMKEPVXXPEPI

SEQ ID NO: 83359 - protein, 32 aa, Artificial Sequence
  Cyclic GFR-binding peptide
  MOD_RES (27)..(28): Xaa is C or S
NEYKFKVVNKNEDLYLISIPEMKEPVXXPEPI

SEQ ID NO: 83360 - protein, 23 aa, Artificial Sequence
  Cyclic GFR-binding peptide
MDEYKFKVVNNASDLYLISIPEL

SEQ ID NO: 83361 - protein, 33 aa, Artificial Sequence
  Cyclic GFR-binding peptide
  MOD_RES (29)..(30): Xaa is C or S
VMDRHKRLVVNNASDYYLISTASLRTPVXXTPP

SEQ ID NO: 83362 - protein, 24 aa, Artificial Sequence
  Cyclic GFR-binding peptide
DYHYKLVVNNASDKYLISIPSLRT

SEQ ID NO: 83363 - protein, 30 aa, Artificial Sequence
  Cyclic GFR-binding peptide
  MOD_RES (26)..(27): Xaa is C or S
EYKFKLLVRGNDLYLMSIPETKVPAXXTSP

SEQ ID NO: 83364 - protein, 29 aa, Artificial Sequence
  Cyclic GFR-binding peptide
  MOD_RES (2)..(2): Xaa is C or S
GXESVAMGRHKRLYTVVGKDYYLISTASL

SEQ ID NO: 83365 - protein, 26 aa, Artificial Sequence
  Cyclic GFR-binding peptide
GRHKRLYTVVGKDYYLISTASLKTPV

SEQ ID NO: 83366 - protein, 40 aa, Artificial Sequence; identical to SEQ ID NO: 31726
  Cyclic GFR-binding peptide
  MOD_RES (2)..(4)..(36)..(37): Xaa is C or S

SEQ ID NO: 83367 - protein, 29 aa, Artificial Sequence
  Cyclic GFR-binding peptide
EVVMDEYKFKVVNNASDLYLISIPELRTP

SEQ ID NO: 83368 - protein, 24 aa, Artificial Sequence
  Cyclic GFR-binding peptide
YHYKLIIQQKDNKYLMSIPSMKTP

SEQ ID NO: 83369 - protein, 21 aa, Artificial Sequence
  Cyclic GFR-binding peptide
PIKGYVKPKRGVFYLINIPSL

SEQ ID NO: 83370 - protein, 35 aa, Artificial Sequence; identical to SEQ ID NO: 31734
  Cyclic GFR-binding peptide
  MOD_RES (2)..(34)..(35): Xaa is C or S

SEQ ID NO: 83371 - protein, 28 aa, Artificial Sequence
  Cyclic GFR-binding peptide
  MOD_RES (28)..(28): Xaa is C or S
MNEYKFKVVNKNEDLYLISIPEMKEPVX

SEQ ID NO: 83372 - protein, 23 aa, Artificial Sequence
  Cyclic GFR-binding peptide
YHYKLVVNKNEDKYLISIPSMKE

SEQ ID NO: 83373 - protein, 24 aa, Artificial Sequence
  Cyclic GFR-binding peptide
MDRHKRLVVNNAADYYLISTASLR

SEQ ID NO: 83374 - protein, 34 aa, Artificial Sequence
  Cyclic GFR-binding peptide
  MOD_RES (28)..(29): Xaa is C or S
MNRHKRLIVNSSDDYYLVSTASLKTPAXXPKPVH

SEQ ID NO: 83375 - protein, 35 aa, Artificial Sequence
  Cyclic GFR-binding peptide
  MOD_RES (30)..(31): Xaa is C or S
KVIMPIKGYIKPTKGIFYLINIPSLDQSVXXPSAS

SEQ ID NO: 83376 - protein, 31 aa, Artificial Sequence
  Cyclic GFR-binding peptide
  MOD_RES (26)..(27): Xaa is C or S
EYKFKVVNKNEDLYLISIPEMKEPVXXPEPI

SEQ ID NO: 83377 - protein, 21 aa, Artificial Sequence
  Cyclic GFR-binding peptide
MRHKRLLLVRGNDYYLMSTAS

SEQ ID NO: 83378 - protein, 42 aa, Artificial Sequence; identical to SEQ ID NO: 31736
  Cyclic GFR-binding peptide
  MOD_RES (2)..(4)..(36)..(37): Xaa is C or S

SEQ ID NO: 83379 - protein, 32 aa, Artificial Sequence
  Cyclic GFR-binding peptide
  MOD_RES (26)..(27): Xaa is C or S
RHKRLVVNNASDYYLISTASLRTPVXXTPPTS

SEQ ID NO: 83380 - protein, 29 aa, Artificial Sequence
  Cyclic GFR-binding peptide
  MOD_RES (29)..(29): Xaa is C or S
AMGRHKRLYTVVGKDYYLISTASLKTPVX

SEQ ID NO: 83381 - protein, 25 aa, Artificial Sequence
  Cyclic GFR-binding peptide
RHKRLVVNKNEDYYLISTASMKEPV

SEQ ID NO: 83382 - protein, 27 aa, Artificial Sequence
  Cyclic GFR-binding peptide
MDRHKRLVVNNAADYYLISTASLRAPV

SEQ ID NO: 83383 - protein, 35 aa, Artificial Sequence; identical to SEQ ID NO: 31738
  Cyclic GFR-binding peptide
  MOD_RES (2)..(33)..(34): Xaa is C or S

SEQ ID NO: 83384 - protein, 25 aa, Artificial Sequence
  Cyclic GFR-binding peptide
MPIKGYVKPTRGVFYLINIPSLDQP

SEQ ID NO: 83385 - protein, 34 aa, Artificial Sequence; identical to SEQ ID NO: 31739
  Cyclic GFR-binding peptide
  MOD_RES (32)..(33): Xaa is C or S

SEQ ID NO: 83386 - protein, 36 aa, Artificial Sequence; identical to SEQ ID NO: 31740
  Cyclic GFR-binding peptide
  MOD_RES (31)..(32): Xaa is C or S

SEQ ID NO: 83387 - protein, 29 aa, Artificial Sequence
  Cyclic GFR-binding peptide
  MOD_RES (1)..(1): Xaa is C or S
XSEVVMDRHKRLVVNNASDYYLISTASLR

SEQ ID NO: 83388 - protein, 32 aa, Artificial Sequence
  Cyclic GFR-binding peptide
  MOD_RES (26)..(27): Xaa is C or S
RYKKLVVNKNEDFYLISIANMKEPVXXPEPIG

SEQ ID NO: 83389 - protein, 24 aa, Artificial Sequence
  Cyclic GFR-binding peptide
EYKFKIIQQKDNLYLMSIPEMKTP

SEQ ID NO: 83390 - protein, 29 aa, Artificial Sequence
  Cyclic GFR-binding peptide
  MOD_RES (28)..(29): Xaa is C or S
MDRHKRLVVNNAADYYLISTASLRAPVXX

SEQ ID NO: 83391 - protein, 20 aa, Artificial Sequence
  Cyclic GFR-binding peptide
RHKRLVVNKNEDYYLISTAS

SEQ ID NO: 83392 - protein, 34 aa, Artificial Sequence; identical to SEQ ID NO: 31743
  Cyclic GFR-binding peptide
  MOD_RES (2)..(34): Xaa is C or S

SEQ ID NO: 83393 - protein, 32 aa, Artificial Sequence
  Cyclic GFR-binding peptide
  MOD_RES (1)..(3): Xaa is C or S
XGXSEVVMDRHKRLVVNNASDYYLISTASLRT

SEQ ID NO: 83394 - protein, 29 aa, Artificial Sequence
  Cyclic GFR-binding peptide
  MOD_RES (2)..(2): Xaa is C or S
GXAEVVMDRHKRLVVNNAADYYLISTASL

SEQ ID NO: 83395 - protein, 31 aa, Artificial Sequence
  Cyclic GFR-binding peptide
  MOD_RES (27)..(28): Xaa is C or S
MPIKGYIKPTKGIFYLINIPSLDQSVXXPSA

SEQ ID NO: 83396 - protein, 38 aa, Artificial Sequence; identical to SEQ ID NO: 31745
  Cyclic GFR-binding peptide
  MOD_RES (2)..(4)..(35)..(36): Xaa is C or S

SEQ ID NO: 83397 - protein, 26 aa, Artificial Sequence
  Cyclic GFR-binding peptide
  MOD_RES (26)..(26): Xaa is C or S
YHYKLVVNNASDKYLISIPSLRTPVX

SEQ ID NO: 83398 - protein, 26 aa, Artificial Sequence
  Cyclic GFR-binding peptide
VVMDEYKFKVVNNASDLYLISIPELR

SEQ ID NO: 83399 - protein, 32 aa, Artificial Sequence
  Cyclic GFR-binding peptide
  MOD_RES (1)..(3): Xaa is C or S
XGXEEVIMRHKRLLLVRGNDYYLMSTASTKVP

SEQ ID NO: 83400 - protein, 26 aa, Artificial Sequence
  Cyclic GFR-binding peptide
EVIMRHKRLLLVRGNDYYLMSTASTK

SEQ ID NO: 83401 - protein, 33 aa, Artificial Sequence
  Cyclic GFR-binding peptide
  MOD_RES (29)..(30): Xaa is C or S
TMNRYKKLVVNKNEDFYLISIANMKEPVXXPEP

SEQ ID NO: 83402 - protein, 38 aa, Artificial Sequence; identical to SEQ ID NO: 31748
  Cyclic GFR-binding peptide
  MOD_RES (2)..(34)..(35): Xaa is C or S

SEQ ID NO: 83403 - protein, 27 aa, Artificial Sequence
  Cyclic GFR-binding peptide
IMYHYKLLLVRGNDKYLMSIPSTKVPA

SEQ ID NO: 83404 - protein, 26 aa, Artificial Sequence
  Cyclic GFR-binding peptide
VVMGYHYKLIIQQKDNKYLMSIPSMK

SEQ ID NO: 83405 - protein, 33 aa, Artificial Sequence
  Cyclic GFR-binding peptide
  MOD_RES (30)..(31): Xaa is C or S
EVIMRHKRLLLVRGNDYYLMSTASTKVPAXXTS

SEQ ID NO: 83406 - protein, 40 aa, Artificial Sequence; identical to SEQ ID NO: 31752
  Cyclic GFR-binding peptide
  MOD_RES (2)..(4)..(36)..(37): Xaa is C or S

SEQ ID NO: 83407 - protein, 26 aa, Artificial Sequence
  Cyclic GFR-binding peptide
AEVVMDRHKRLVVNNAADYYLISTAS

SEQ ID NO: 83408 - protein, 29 aa, Artificial Sequence
  Cyclic GFR-binding peptide
  MOD_RES (28)..(29): Xaa is C or S
MDEYKFKVVNNASDLYLISIPELRTPVXX

SEQ ID NO: 83409 - protein, 27 aa, Artificial Sequence
  Cyclic GFR-binding peptide
  MOD_RES (27)..(27): Xaa is C or S
GRHKRLYTVVGKDYYLISTASLKTPVX

SEQ ID NO: 83410 - protein, 35 aa, Artificial Sequence; identical to SEQ ID NO: 31754
  Cyclic GFR-binding peptide
  MOD_RES (1)..(3)..(35): Xaa is C or S

SEQ ID NO: 83411 - protein, 31 aa, Artificial Sequence
  Cyclic GFR-binding peptide
  MOD_RES (1)..(1): Xaa is C or S
XRDVVMGYHYKLIIQQKDNKYLMSIPSMKTP

SEQ ID NO: 83412 - protein, 34 aa, Artificial Sequence
  Cyclic GFR-binding peptide
  MOD_RES (30)..(31): Xaa is C or S
EVIMRHKRLLLVRGNDYYLMSTASTKVPAXXTSP

SEQ ID NO: 83413 - protein, 33 aa, Artificial Sequence
  Cyclic GFR-binding peptide
  MOD_RES (29)..(30): Xaa is C or S
VMDEYKFKVVNNASDLYLISIPELRTPVXXTPP

SEQ ID NO: 83414 - protein, 29 aa, Artificial Sequence
  Cyclic GFR-binding peptide
  MOD_RES (1)..(1): Xaa is C or S
XRDVVMGRHKRLIIQQKDNYYLMSTASMK

SEQ ID NO: 83415 - protein, 29 aa, Artificial Sequence
  Cyclic GFR-binding peptide
  MOD_RES (29)..(29): Xaa is C or S
VIMYHYKLLLVRGNDKYLMSIPSTKVPAX

SEQ ID NO: 83416 - protein, 33 aa, Artificial Sequence
  Cyclic GFR-binding peptide
  MOD_RES (2)..(4): Xaa is C or S
RXGXSEVVMDEYKFKVVNNASDLYLISIPELRT

SEQ ID NO: 83417 - protein, 37 aa, Artificial Sequence; identical to SEQ ID NO: 31755
  Cyclic GFR-binding peptide
  MOD_RES (31)..(32): Xaa is C or S

SEQ ID NO: 83418 - protein, 31 aa, Artificial Sequence
  Cyclic GFR-binding peptide
  MOD_RES (1)..(1): Xaa is C or S
XSEVTMNYHYKLVVNKNEDKYLISIPSMKEP

SEQ ID NO: 83419 - protein, 32 aa, Artificial Sequence
  Cyclic GFR-binding peptide
  MOD_RES (27)..(28): Xaa is C or S
DRHKRLVVNNAADYYLISTASLRAPVXXSAPA

SEQ ID NO: 83420 - protein, 23 aa, Artificial Sequence
  Cyclic GFR-binding peptide
VIMRHKRLLLVRGNDYYLMSTAS

SEQ ID NO: 83421 - protein, 26 aa, Artificial Sequence
  Cyclic GFR-binding peptide
VIMPIKGYIKPTKGIFYLINIPSLDQ

SEQ ID NO: 83422 - protein, 21 aa, Artificial Sequence
  Cyclic GFR-binding peptide
RHKRLYTVVGKDYYLISTASL

SEQ ID NO: 83423 - protein, 29 aa, Artificial Sequence
  Cyclic GFR-binding peptide
VVMDYHYKLVVNNASDKYLISIPSLRTPV

SEQ ID NO: 83424 - protein, 29 aa, Artificial Sequence
  Cyclic GFR-binding peptide
  MOD_RES (29)..(29): Xaa is C or S
VIMRHKRLLLVRGNDYYLMSTASTKVPAX

SEQ ID NO: 83425 - protein, 30 aa, Artificial Sequence; identical to SEQ ID NO: 31756
  Cyclic GFR-binding peptide

SEQ ID NO: 83426 - protein, 33 aa, Artificial Sequence
  Cyclic GFR-binding peptide
  MOD_RES (28)..(29): Xaa is C or S
IMPIKGYIKPTKGIFYLINIPSLDQSVXXPSAS

SEQ ID NO: 83427 - protein, 35 aa, Artificial Sequence; identical to SEQ ID NO: 31757
  Cyclic GFR-binding peptide
  MOD_RES (1)..(3)..(34)..(35): Xaa is C or S

SEQ ID NO: 83428 - protein, 29 aa, Artificial Sequence
  Cyclic GFR-binding peptide
  MOD_RES (2)..(2): Xaa is C or S
AXSEVTMNPIKGYVVNKNEDFYLINIPSM

SEQ ID NO: 83429 - protein, 34 aa, Artificial Sequence; identical to SEQ ID NO: 31759
  Cyclic GFR-binding peptide
  MOD_RES (1)..(33)..(34): Xaa is C or S

SEQ ID NO: 83430 - protein, 21 aa, Artificial Sequence
  Cyclic GFR-binding peptide
RHKRLLLVRGNDYYLMSTAST

SEQ ID NO: 83431 - protein, 28 aa, Artificial Sequence
  Cyclic GFR-binding peptide
  MOD_RES (1)..(3): Xaa is C or S
XGXEEVIMRHKRLLLVRGNDYYLMSTAS

SEQ ID NO: 83432 - protein, 27 aa, Artificial Sequence
  Cyclic GFR-binding peptide
  MOD_RES (1)..(1): Xaa is C or S
XSKVIMPIKGYIKPTKGIFYLINIPSL

SEQ ID NO: 83433 - protein, 27 aa, Artificial Sequence
  Cyclic GFR-binding peptide
  MOD_RES (2)..(2): Xaa is C or S
GXEEVIMEYKFKLLVRGNDLYLMSIPE

SEQ ID NO: 83434 - protein, 38 aa, Artificial Sequence; identical to SEQ ID NO: 31764
  Cyclic GFR-binding peptide
  MOD_RES (2)..(4)..(36)..(37): Xaa is C or S

SEQ ID NO: 83435 - protein, 38 aa, Artificial Sequence; identical to SEQ ID NO: 31765
  Cyclic GFR-binding peptide
  MOD_RES (2)..(34)..(35): Xaa is C or S

SEQ ID NO: 83436 - protein, 34 aa, Artificial Sequence
  Cyclic GFR-binding peptide
  MOD_RES (28)..(29): Xaa is C or S
MDRHKRLVVNNASDYYLISTASLRTPVXXTPPTS

SEQ ID NO: 83437 - protein, 31 aa, Artificial Sequence; identical to SEQ ID NO: 31768
  Cyclic GFR-binding peptide

SEQ ID NO: 83438 - protein, 23 aa, Artificial Sequence
  Cyclic GFR-binding peptide
PIKGYVKPKRGVFYLINIPSLAQ

SEQ ID NO: 83439 - protein, 32 aa, Artificial Sequence
  Cyclic GFR-binding peptide
  MOD_RES (2)..(2): Xaa is C or S
GXSEVVMDYHYKLVVNNASDKYLISIPSLRTP

SEQ ID NO: 83440 - protein, 23 aa, Artificial Sequence
  Cyclic GFR-binding peptide
IMPIKGYIKPTKGIFYLINIPSL

SEQ ID NO: 83441 - protein, 27 aa, Artificial Sequence
  Cyclic GFR-binding peptide
  MOD_RES (27)..(27): Xaa is C or S
MPIKGYVKPKRGVFYLINIPSLAQPVX

SEQ ID NO: 83442 - protein, 30 aa, Artificial Sequence
  Cyclic GFR-binding peptide
SEVVMDYHYKLVVNNASDKYLISIPSLRTP

SEQ ID NO: 83443 - protein, 20 aa, Artificial Sequence
  Cyclic GFR-binding peptide
EYKFKVVNKNEDLYLISIPE

SEQ ID NO: 83444 - protein, 32 aa, Artificial Sequence
  Cyclic GFR-binding peptide
  MOD_RES (27)..(28): Xaa is C or S
NYHYKLVVNKNEDKYLISIPSMKEPVXXPEPI

SEQ ID NO: 83445 - protein, 22 aa, Artificial Sequence
  Cyclic GFR-binding peptide
DEYKFKVVNNASDLYLISIPEL

SEQ ID NO: 83446 - protein, 37 aa, Artificial Sequence; identical to SEQ ID NO: 31771
  Cyclic GFR-binding peptide
  MOD_RES (1)..(33)..(34): Xaa is C or S

SEQ ID NO: 83447 - protein, 22 aa, Artificial Sequence
  Cyclic GFR-binding peptide
MNYHYKLVVNKNEDKYLISIPS

SEQ ID NO: 83448 - protein, 33 aa, Artificial Sequence
  Cyclic GFR-binding peptide
  MOD_RES (2)..(4): Xaa is C or S
SXGXRDVVMGYHYKLIIQQKDNKYLMSIPSMKT

SEQ ID NO: 83449 - protein, 29 aa, Artificial Sequence
  Cyclic GFR-binding peptide
  MOD_RES (1)..(1): Xaa is C or S
XSEVVMDYHYKLVVNNASDKYLISIPSLR

SEQ ID NO: 83450 - protein, 32 aa, Artificial Sequence; identical to SEQ ID NO: 31773
  Cyclic GFR-binding peptide
  MOD_RES (32)..(32): Xaa is C or S

SEQ ID NO: 83451 - protein, 31 aa, Artificial Sequence
  Cyclic GFR-binding peptide
  MOD_RES (1)..(3): Xaa is C or S
XAXSEVTMNRHKRLVVNKNEDYYLISTASMK

SEQ ID NO: 83452 - protein, 39 aa, Artificial Sequence; identical to SEQ ID NO: 31774
  Cyclic GFR-binding peptide
  MOD_RES (2)..(4)..(36)..(37): Xaa is C or S

SEQ ID NO: 83453 - protein, 30 aa, Artificial Sequence; identical to SEQ ID NO: 31775
  Cyclic GFR-binding peptide

SEQ ID NO: 83454 - protein, 31 aa, Artificial Sequence
  Cyclic GFR-binding peptide
  MOD_RES (30)..(31): Xaa is C or S
KVIMPIKGYIKPTKGIFYLINIPSLDQSVXX

SEQ ID NO: 83455 - protein, 29 aa, Artificial Sequence
  Cyclic GFR-binding peptide
VTMNRHKRLVVNKNEDYYLISTASMKEPV

SEQ ID NO: 83456 - protein, 28 aa, Artificial Sequence
  Cyclic GFR-binding peptide
  MOD_RES (1)..(1): Xaa is C or S
XSKVVMPIKGYVKPTRGVFYLINIPSLD

SEQ ID NO: 83457 - protein, 32 aa, Artificial Sequence
  Cyclic GFR-binding peptide
  MOD_RES (2)..(2): Xaa is C or S
GXAEVVMDRHKRLVVNNAADYYLISTASLRAP

SEQ ID NO: 83458 - protein, 22 aa, Artificial Sequence
  Cyclic GFR-binding peptide
GEYKFKIIQQKDNLYLMSIPEM

SEQ ID NO: 83459 - protein, 26 aa, Artificial Sequence
  Cyclic GFR-binding peptide
  MOD_RES (26)..(26): Xaa is C or S
EYKFKVVNNASDLYLISIPELRTPVX

SEQ ID NO: 83460 - protein, 26 aa, Artificial Sequence
  Cyclic GFR-binding peptide
  MOD_RES (1)..(1): Xaa is C or S
XEEVIMYHYKLLLVRGNDKYLMSIPS

SEQ ID NO: 83461 - protein, 37 aa, Artificial Sequence; identical to SEQ ID NO: 31777
  Cyclic GFR-binding peptide
  MOD_RES (2)..(34)..(35): Xaa is C or S

SEQ ID NO: 83462 - protein, 30 aa, Artificial Sequence
  Cyclic GFR-binding peptide
  MOD_RES (27)..(28): Xaa is C or S
DRHKRLVVNNASDYYLISTASLRTPVXXTP

SEQ ID NO: 83463 - protein, 21 aa, Artificial Sequence
  Cyclic GFR-binding peptide
NRHKRLVVNKNEDYYLISTAS

SEQ ID NO: 83464 - protein, 31 aa, Artificial Sequence
  Cyclic GFR-binding peptide
  MOD_RES (30)..(31): Xaa is C or S
VVMDEYKFKVVNNASDLYLISIPELRTPVXX

SEQ ID NO: 83465 - protein, 30 aa, Artificial Sequence
  Cyclic GFR-binding peptide
  MOD_RES (2)..(2): Xaa is C or S
GXEEVIMEYKFKLLVRGNDLYLMSIPETKV

SEQ ID NO: 83466 - protein, 36 aa, Artificial Sequence
  Cyclic GFR-binding peptide
  MOD_RES (30)..(31): Xaa is C or S
EVIMRHKRLLLVRGNDYYLMSTASTKVPAXXTSPVR

SEQ ID NO: 83467 - protein, 38 aa, Artificial Sequence; identical to SEQ ID NO: 31780
  Cyclic GFR-binding peptide
  MOD_RES (1)..(32)..(33): Xaa is C or S

SEQ ID NO: 83468 - protein, 37 aa, Artificial Sequence; identical to SEQ ID NO: 31781
  Cyclic GFR-binding peptide
  MOD_RES (2)..(34)..(35): Xaa is C or S

SEQ ID NO: 83469 - protein, 25 aa, Artificial Sequence
  Cyclic GFR-binding peptide
GRHKRLYTVVGKDYYLISTASLKTP

SEQ ID NO: 83470 - protein, 33 aa, Artificial Sequence; identical to SEQ ID NO: 31782
  Cyclic GFR-binding peptide
  MOD_RES (32)..(33): Xaa is C or S

SEQ ID NO: 83471 - protein, 25 aa, Artificial Sequence
  Cyclic GFR-binding peptide
EVVMDRHKRLVVNNAADYYLISTAS

SEQ ID NO: 83472 - protein, 30 aa, Artificial Sequence
  Cyclic GFR-binding peptide
  MOD_RES (2)..(2): Xaa is C or S
GXAEVVMDRHKRLVVNNAADYYLISTASLR

SEQ ID NO: 83473 - protein, 25 aa, Artificial Sequence
  Cyclic GFR-binding peptide
MDRHKRLVVNNAADYYLISTASLRA

SEQ ID NO: 83474 - protein, 27 aa, Artificial Sequence
  Cyclic GFR-binding peptide
EVTMNEYKFKVVNKNEDLYLISIPEMK

SEQ ID NO: 83475 - protein, 41 aa, Artificial Sequence; identical to SEQ ID NO: 31786
  Cyclic GFR-binding peptide
  MOD_RES (1)..(3)..(35)..(36): Xaa is C or S

SEQ ID NO: 83476 - protein, 31 aa, Artificial Sequence
  Cyclic GFR-binding peptide
  MOD_RES (1)..(1): Xaa is C or S
XAEVVMDRHKRLVVNNAADYYLISTASLRAP

SEQ ID NO: 83477 - protein, 28 aa, Artificial Sequence
  Cyclic GFR-binding peptide
  MOD_RES (1)..(1): Xaa is C or S
XEEVIMEYKFKLLVRGNDLYLMSIPETK

SEQ ID NO: 83478 - protein, 35 aa, Artificial Sequence; identical to SEQ ID NO: 20531
  Cyclic GFR-binding peptide
  MOD_RES (2)..(4): Xaa is C or S

SEQ ID NO: 83479 - protein, 34 aa, Artificial Sequence; identical to SEQ ID NO: 31788
  Cyclic GFR-binding peptide
  MOD_RES (31)..(32): Xaa is C or S

SEQ ID NO: 83480 - protein, 35 aa, Artificial Sequence; identical to SEQ ID NO: 31789
  Cyclic GFR-binding peptide
  MOD_RES (1)..(33)..(34): Xaa is C or S

SEQ ID NO: 83481 - protein, 28 aa, Artificial Sequence
  Cyclic GFR-binding peptide
  MOD_RES (1)..(1): Xaa is C or S
XSEVVMDEYKFKVVNNASDLYLISIPEL

SEQ ID NO: 83482 - protein, 36 aa, Artificial Sequence; identical to SEQ ID NO: 31791
  Cyclic GFR-binding peptide
  MOD_RES (1)..(3)..(35)..(36): Xaa is C or S

SEQ ID NO: 83483 - protein, 31 aa, Artificial Sequence
  Cyclic GFR-binding peptide
  MOD_RES (29)..(30): Xaa is C or S
TMNPIKGYVVNKNEDFYLINIPSMKEPVXXP

SEQ ID NO: 83484 - protein, 34 aa, Artificial Sequence
  Cyclic GFR-binding peptide
  MOD_RES (30)..(31): Xaa is C or S
VVMDRHKRLVVNNASDYYLISTASLRTPVXXTPP

SEQ ID NO: 83485 - protein, 38 aa, Artificial Sequence; identical to SEQ ID NO: 31792
  Cyclic GFR-binding peptide
  MOD_RES (1)..(3)..(34)..(35): Xaa is C or S

SEQ ID NO: 83486 - protein, 30 aa, Artificial Sequence
  Cyclic GFR-binding peptide
  MOD_RES (26)..(27): Xaa is C or S
PIKGYIKPTKGIFYLINIPSLDQSVXXPSA

SEQ ID NO: 83487 - protein, 36 aa, Artificial Sequence; identical to SEQ ID NO: 31796
  Cyclic GFR-binding peptide
  MOD_RES (2)..(4)..(36): Xaa is C or S

SEQ ID NO: 83488 - protein, 33 aa, Artificial Sequence; identical to SEQ ID NO: 31797
  Cyclic GFR-binding peptide
  MOD_RES (31)..(32): Xaa is C or S

SEQ ID NO: 83489 - protein, 34 aa, Artificial Sequence; identical to SEQ ID NO: 31798
  Cyclic GFR-binding peptide
  MOD_RES (2)..(34): Xaa is C or S

SEQ ID NO: 83490 - protein, 37 aa, Artificial Sequence; identical to SEQ ID NO: 31799
  Cyclic GFR-binding peptide
  MOD_RES (32)..(33): Xaa is C or S

SEQ ID NO: 83491 - protein, 30 aa, Artificial Sequence
  Cyclic GFR-binding peptide
  MOD_RES (30)..(30): Xaa is C or S
VAMGRHKRLYTVVGKDYYLISTASLKTPVX

SEQ ID NO: 83492 - protein, 35 aa, Artificial Sequence; identical to SEQ ID NO: 31800
  Cyclic GFR-binding peptide
  MOD_RES (32)..(33): Xaa is C or S

SEQ ID NO: 83493 - protein, 36 aa, Artificial Sequence; identical to SEQ ID NO: 31801
  Cyclic GFR-binding peptide
  MOD_RES (1)..(33)..(34): Xaa is C or S

SEQ ID NO: 83494 - protein, 24 aa, Artificial Sequence
  Cyclic GFR-binding peptide
GRHKRLYTVVGKDYYLISTASLKT

SEQ ID NO: 83495 - protein, 24 aa, Artificial Sequence
  Cyclic GFR-binding peptide
NPIKGYVVNKNEDFYLINIPSMKE

SEQ ID NO: 83496 - protein, 30 aa, Artificial Sequence
  Cyclic GFR-binding peptide
  MOD_RES (2)..(2): Xaa is C or S
GXSEVVMDYHYKLVVNNASDKYLISIPSLR

SEQ ID NO: 83497 - protein, 32 aa, Artificial Sequence
  Cyclic GFR-binding peptide
  MOD_RES (2)..(4): Xaa is C or S
RXAXSEVTMNRHKRLVVNKNEDYYLISTASMK

SEQ ID NO: 83498 - protein, 24 aa, Artificial Sequence
  Cyclic GFR-binding peptide
MGRHKRLYTVVGKDYYLISTASLK

SEQ ID NO: 83499 - protein, 34 aa, Artificial Sequence; identical to SEQ ID NO: 31802
  Cyclic GFR-binding peptide
  MOD_RES (2)..(33)..(34): Xaa is C or S

SEQ ID NO: 83500 - protein, 22 aa, Artificial Sequence
  Cyclic GFR-binding peptide
GYHYKLIIQQKDNKYLMSIPSM

SEQ ID NO: 83501 - protein, 27 aa, Artificial Sequence
  Cyclic GFR-binding peptide
  MOD_RES (2)..(2): Xaa is C or S
KXSKVVMPIKGYVKPTRGVFYLINIPS

SEQ ID NO: 83502 - protein, 23 aa, Artificial Sequence
  Cyclic GFR-binding peptide
PIKGYIKPTKGIFYLINIPSLDQ

SEQ ID NO: 83503 - protein, 28 aa, Artificial Sequence
  Cyclic GFR-binding peptide
  MOD_RES (26)..(27): Xaa is C or S
RHKRLYTVVGKDYYLISTASLKTPVXXA

SEQ ID NO: 83504 - protein, 33 aa, Artificial Sequence; identical to SEQ ID NO: 31805
  Cyclic GFR-binding peptide
  MOD_RES (32)..(33): Xaa is C or S

SEQ ID NO: 83505 - protein, 34 aa, Artificial Sequence; identical to SEQ ID NO: 31806
  Cyclic GFR-binding peptide
  MOD_RES (2)..(34): Xaa is C or S

SEQ ID NO: 83506 - protein, 30 aa, Artificial Sequence
  Cyclic GFR-binding peptide
  MOD_RES (1)..(3): Xaa is C or S
XGXAEVVMDRHKRLVVNNAADYYLISTASL

SEQ ID NO: 83507 - protein, 23 aa, Artificial Sequence
  Cyclic GFR-binding peptide
MNRHKRLVVNKNEDYYLISTASM

SEQ ID NO: 83508 - protein, 26 aa, Artificial Sequence
  Cyclic GFR-binding peptide
MGYHYKLIIQQKDNKYLMSIPSMKTP

SEQ ID NO: 83509 - protein, 35 aa, Artificial Sequence; identical to SEQ ID NO: 31808
  Cyclic GFR-binding peptide
  MOD_RES (2)..(4): Xaa is C or S

SEQ ID NO: 83510 - protein, 31 aa, Artificial Sequence
  Cyclic GFR-binding peptide
  MOD_RES (28)..(29): Xaa is C or S
IMRHKRLLLVRGNDYYLMSTASTKVPAXXTS

SEQ ID NO: 83511 - protein, 34 aa, Artificial Sequence; identical to SEQ ID NO: 31809
  Cyclic GFR-binding peptide
  MOD_RES (2)..(34): Xaa is C or S

SEQ ID NO: 83512 - protein, 25 aa, Artificial Sequence
  Cyclic GFR-binding peptide
NPIKGYVVNKNEDFYLINIPSMKEP

SEQ ID NO: 83513 - protein, 30 aa, Artificial Sequence
  Cyclic GFR-binding peptide
  MOD_RES (2)..(4): Xaa is C or S
RXAXSEVTMNRHKRLVVNKNEDYYLISTAS

SEQ ID NO: 83514 - protein, 39 aa, Artificial Sequence; identical to SEQ ID NO: 31811
  Cyclic GFR-binding peptide
  MOD_RES (1)..(3)..(35)..(36): Xaa is C or S

SEQ ID NO: 83515 - protein, 32 aa, Artificial Sequence; identical to SEQ ID NO: 31812
  Cyclic GFR-binding peptide
  MOD_RES (31)..(32): Xaa is C or S

SEQ ID NO: 83516 - protein, 29 aa, Artificial Sequence
  Cyclic GFR-binding peptide
  MOD_RES (2)..(2): Xaa is C or S
GXEEVIMEYKFKLLVRGNDLYLMSIPETK

SEQ ID NO: 83517 - protein, 23 aa, Artificial Sequence
  Cyclic GFR-binding peptide
MNYHYKLVVNKNEDKYLISIPSM

SEQ ID NO: 83518 - protein, 38 aa, Artificial Sequence; identical to SEQ ID NO: 31814
  Cyclic GFR-binding peptide
  MOD_RES (2)..(4)..(36)..(37): Xaa is C or S

SEQ ID NO: 83519 - protein, 37 aa, Artificial Sequence; identical to SEQ ID NO: 31815
  Cyclic GFR-binding peptide
  MOD_RES (2)..(4)..(36)..(37): Xaa is C or S

SEQ ID NO: 83520 - protein, 22 aa, Artificial Sequence
  Cyclic GFR-binding peptide
RHKRLLLVRGNDYYLMSTASTK

SEQ ID NO: 83521 - protein, 32 aa, Artificial Sequence; identical to SEQ ID NO: 31816
  Cyclic GFR-binding peptide
  MOD_RES (1)..(32): Xaa is C or S

SEQ ID NO: 83522 - protein, 27 aa, Artificial Sequence
  Cyclic GFR-binding peptide
VTMNEYKFKVVNKNEDLYLISIPEMKE

SEQ ID NO: 83523 - protein, 20 aa, Artificial Sequence
  Cyclic GFR-binding peptide
PIKGYIKPTKGIFYLINIPS

SEQ ID NO: 83524 - protein, 30 aa, Artificial Sequence; identical to SEQ ID NO: 1933
  Cyclic GFR-binding peptide

SEQ ID NO: 83525 - protein, 33 aa, Artificial Sequence
  Cyclic GFR-binding peptide
  MOD_RES (29)..(30): Xaa is C or S
VIMPIKGYVKPKRGVFYLINIPSLAQPVXXPAA

SEQ ID NO: 83526 - protein, 22 aa, Artificial Sequence
  Cyclic GFR-binding peptide
IMPIKGYIKPTKGIFYLINIPS

SEQ ID NO: 83527 - protein, 34 aa, Artificial Sequence; identical to SEQ ID NO: 31823
  Cyclic GFR-binding peptide
  MOD_RES (31)..(32): Xaa is C or S

SEQ ID NO: 83528 - protein, 27 aa, Artificial Sequence
  Cyclic GFR-binding peptide
DVVMGRHKRLIIQQKDNYYLMSTASMK

SEQ ID NO: 83529 - protein, 40 aa, Artificial Sequence; identical to SEQ ID NO: 31826
  Cyclic GFR-binding peptide
  MOD_RES (2)..(34)..(35): Xaa is C or S

SEQ ID NO: 83530 - protein, 30 aa, Artificial Sequence
  Cyclic GFR-binding peptide
  MOD_RES (29)..(30): Xaa is C or S
VIMYHYKLLLVRGNDKYLMSIPSTKVPAXX

SEQ ID NO: 83531 - protein, 31 aa, Artificial Sequence
  Cyclic GFR-binding peptide
  MOD_RES (2)..(2): Xaa is C or S
GXRDVVMGYHYKLIIQQKDNKYLMSIPSMKT

SEQ ID NO: 83532 - protein, 28 aa, Artificial Sequence
  Cyclic GFR-binding peptide
VVMPIKGYVKPTRGVFYLINIPSLDQPV

SEQ ID NO: 83533 - protein, 31 aa, Artificial Sequence
  Cyclic GFR-binding peptide
  MOD_RES (2)..(4): Xaa is C or S
RXGXSEVVMDYHYKLVVNNASDKYLISIPSL

SEQ ID NO: 83534 - protein, 30 aa, Artificial Sequence
  Cyclic GFR-binding peptide
  MOD_RES (2)..(2): Xaa is C or S
GXEEVIMYHYKLLLVRGNDKYLMSIPSTKV

SEQ ID NO: 83535 - protein, 24 aa, Artificial Sequence
  Cyclic GFR-binding peptide
VIMRHKRLLLVRGNDYYLMSTAST

SEQ ID NO: 83536 - protein, 23 aa, Artificial Sequence
  Cyclic GFR-binding peptide
MPIKGYVKPKRGVFYLINIPSLA

SEQ ID NO: 83537 - protein, 28 aa, Artificial Sequence
  Cyclic GFR-binding peptide
VAMGRHKRLYTVVGKDYYLISTASLKTP

SEQ ID NO: 83538 - protein, 31 aa, Artificial Sequence
  Cyclic GFR-binding peptide
  MOD_RES (26)..(27): Xaa is C or S
RHKRLVVNNASDYYLISTASLRTPVXXTPPT

SEQ ID NO: 83539 - protein, 40 aa, Artificial Sequence; identical to SEQ ID NO: 31830
  Cyclic GFR-binding peptide
  MOD_RES (2)..(4)..(35)..(36): Xaa is C or S

SEQ ID NO: 83540 - protein, 38 aa, Artificial Sequence; identical to SEQ ID NO: 31834
  Cyclic GFR-binding peptide
  MOD_RES (2)..(34)..(35): Xaa is C or S

SEQ ID NO: 83541 - protein, 22 aa, Artificial Sequence
  Cyclic GFR-binding peptide
IMRHKRLLLVRGNDYYLMSTAS

SEQ ID NO: 83542 - protein, 22 aa, Artificial Sequence
  Cyclic GFR-binding peptide
YHYKLVVNKNEDKYLISIPSMK

SEQ ID NO: 83543 - protein, 22 aa, Artificial Sequence
  Cyclic GFR-binding peptide
IMYHYKLLLVRGNDKYLMSIPS

SEQ ID NO: 83544 - protein, 29 aa, Artificial Sequence
  Cyclic GFR-binding peptide
  MOD_RES (28)..(29): Xaa is C or S
IMYHYKLLLVRGNDKYLMSIPSTKVPAXX

SEQ ID NO: 83545 - protein, 36 aa, Artificial Sequence; identical to SEQ ID NO: 31838
  Cyclic GFR-binding peptide
  MOD_RES (2)..(33)..(34): Xaa is C or S

SEQ ID NO: 83546 - protein, 31 aa, Artificial Sequence; identical to SEQ ID NO: 31842
  Cyclic GFR-binding peptide

SEQ ID NO: 83547 - protein, 26 aa, Artificial Sequence
  Cyclic GFR-binding peptide
NPIKGYVVNKNEDFYLINIPSMKEPV

SEQ ID NO: 83548 - protein, 27 aa, Artificial Sequence
  Cyclic GFR-binding peptide
  MOD_RES (26)..(27): Xaa is C or S
RHKRLVVNNASDYYLISTASLRTPVXX

SEQ ID NO: 83549 - protein, 23 aa, Artificial Sequence
  Cyclic GFR-binding peptide
YHYKLLLVRGNDKYLMSIPSTKV

SEQ ID NO: 83550 - protein, 39 aa, Artificial Sequence; identical to SEQ ID NO: 31843
  Cyclic GFR-binding peptide
  MOD_RES (2)..(34)..(35): Xaa is C or S

SEQ ID NO: 83551 - protein, 35 aa, Artificial Sequence
  Cyclic GFR-binding peptide
  MOD_RES (30)..(31): Xaa is C or S
VTMNPIKGYVVNKNEDFYLINIPSMKEPVXXPEPI

SEQ ID NO: 83552 - protein, 27 aa, Artificial Sequence
  Cyclic GFR-binding peptide
MDEYKFKVVNNASDLYLISIPELRTPV

SEQ ID NO: 83553 - protein, 28 aa, Artificial Sequence
  Cyclic GFR-binding peptide
  MOD_RES (26)..(27): Xaa is C or S
EYKFKVVNNASDLYLISIPELRTPVXXT

SEQ ID NO: 83554 - protein, 25 aa, Artificial Sequence
  Cyclic GFR-binding peptide
EVIMRHKRLLLVRGNDYYLMSTAST

SEQ ID NO: 83555 - protein, 25 aa, Artificial Sequence
  Cyclic GFR-binding peptide
VIMEYKFKLLVRGNDLYLMSIPETK

SEQ ID NO: 83556 - protein, 41 aa, Artificial Sequence; identical to SEQ ID NO: 31845
  Cyclic GFR-binding peptide
  MOD_RES (2)..(4)..(35)..(36): Xaa is C or S

SEQ ID NO: 83557 - protein, 31 aa, Artificial Sequence
  Cyclic GFR-binding peptide
  MOD_RES (1)..(3): Xaa is C or S
XGXEEVIMRHKRLLLVRGNDYYLMSTASTKV

SEQ ID NO: 83558 - protein, 26 aa, Artificial Sequence
  Cyclic GFR-binding peptide
SKVIMPIKGYIKPTKGIFYLINIPSL

SEQ ID NO: 83559 - protein, 35 aa, Artificial Sequence
  Cyclic GFR-binding peptide
  MOD_RES (30)..(31): Xaa is C or S
VVMGEYKFKIIQQKDNLYLMSIPEMKTPTXXPGAS

SEQ ID NO: 83560 - protein, 32 aa, Artificial Sequence; identical to SEQ ID NO: 31847
  Cyclic GFR-binding peptide
  MOD_RES (1)..(1): Xaa is C or S

SEQ ID NO: 83561 - protein, 26 aa, Artificial Sequence
  Cyclic GFR-binding peptide
  MOD_RES (1)..(1): Xaa is C or S
XEEVIMEYKFKLLVRGNDLYLMSIPE

SEQ ID NO: 83562 - protein, 31 aa, Artificial Sequence
  Cyclic GFR-binding peptide
  MOD_RES (26)..(27): Xaa is C or S
PIKGYVVNKNEDFYLINIPSMKEPVXXPEPI

SEQ ID NO: 83563 - protein, 26 aa, Artificial Sequence
  Cyclic GFR-binding peptide
VAMGRHKRLYTVVGKDYYLISTASLK

SEQ ID NO: 83564 - protein, 20 aa, Artificial Sequence
  Cyclic GFR-binding peptide
PIKGYVKPTRGVFYLINIPS

SEQ ID NO: 83565 - protein, 37 aa, Artificial Sequence; identical to SEQ ID NO: 31850
  Cyclic GFR-binding peptide
  MOD_RES (32)..(33): Xaa is C or S

SEQ ID NO: 83566 - protein, 23 aa, Artificial Sequence
  Cyclic GFR-binding peptide
VMDRHKRLVVNNAADYYLISTAS

SEQ ID NO: 83567 - protein, 27 aa, Artificial Sequence
  Cyclic GFR-binding peptide
MNYHYKLVVNKNEDKYLISIPSMKEPV

SEQ ID NO: 83568 - protein, 33 aa, Artificial Sequence; identical to SEQ ID NO: 31851
  Cyclic GFR-binding peptide
  MOD_RES (2)..(33): Xaa is C or S

SEQ ID NO: 83569 - protein, 27 aa, Artificial Sequence
  Cyclic GFR-binding peptide
EVTMNRHKRLVVNKNEDYYLISTASMK

SEQ ID NO: 83570 - protein, 27 aa, Artificial Sequence
  Cyclic GFR-binding peptide
VVMDYHYKLVVNNASDKYLISIPSLRT

SEQ ID NO: 83571 - protein, 36 aa, Artificial Sequence; identical to SEQ ID NO: 31854
  Cyclic GFR-binding peptide
  MOD_RES (31)..(32): Xaa is C or S

SEQ ID NO: 83572 - protein, 31 aa, Artificial Sequence; identical to SEQ ID NO: 31855
  Cyclic GFR-binding peptide

SEQ ID NO: 83573 - protein, 37 aa, Artificial Sequence; identical to SEQ ID NO: 31856
  Cyclic GFR-binding peptide
  MOD_RES (1)..(33)..(34): Xaa is C or S

SEQ ID NO: 83574 - protein, 39 aa, Artificial Sequence; identical to SEQ ID NO: 31857
  Cyclic GFR-binding peptide
  MOD_RES (2)..(34)..(35): Xaa is C or S

SEQ ID NO: 83575 - protein, 33 aa, Artificial Sequence
  Cyclic GFR-binding peptide
  MOD_RES (2)..(4): Xaa is C or S
SXKXSKVVMPIKGYVKPTRGVFYLINIPSLDQP

SEQ ID NO: 83576 - protein, 36 aa, Artificial Sequence; identical to SEQ ID NO: 31861
  Cyclic GFR-binding peptide
  MOD_RES (1)..(32)..(33): Xaa is C or S

SEQ ID NO: 83577 - protein, 33 aa, Artificial Sequence; identical to SEQ ID NO: 31863
  Cyclic GFR-binding peptide
  MOD_RES (1)..(33): Xaa is C or S

SEQ ID NO: 83578 - protein, 37 aa, Artificial Sequence; identical to SEQ ID NO: 31864
  Cyclic GFR-binding peptide
  MOD_RES (31)..(32): Xaa is C or S

SEQ ID NO: 83579 - protein, 25 aa, Artificial Sequence
  Cyclic GFR-binding peptide
MNPIKGYVVNKNEDFYLINIPSMKE

SEQ ID NO: 83580 - protein, 28 aa, Artificial Sequence
  Cyclic GFR-binding peptide
EEVIMRHKRLLLVRGNDYYLMSTASTKV

SEQ ID NO: 83581 - protein, 42 aa, Artificial Sequence; identical to SEQ ID NO: 31866
  Cyclic GFR-binding peptide
  MOD_RES (2)..(4)..(36)..(37): Xaa is C or S

SEQ ID NO: 83582 - protein, 25 aa, Artificial Sequence
  Cyclic GFR-binding peptide
RHKRLIIQQKDNYYLMSTASMKTPT

SEQ ID NO: 83583 - protein, 25 aa, Artificial Sequence
  Cyclic GFR-binding peptide
DVVMGRHKRLIIQQKDNYYLMSTAS

SEQ ID NO: 83584 - protein, 25 aa, Artificial Sequence
  Cyclic GFR-binding peptide
EVVMDRHKRLVVNNASDYYLISTAS

SEQ ID NO: 83585 - protein, 34 aa, Artificial Sequence
  Cyclic GFR-binding peptide
  MOD_RES (30)..(31): Xaa is C or S
VTMNEYKFKVVNKNEDLYLISIPEMKEPVXXPEP

SEQ ID NO: 83586 - protein, 36 aa, Artificial Sequence; identical to SEQ ID NO: 31869
  Cyclic GFR-binding peptide
  MOD_RES (32)..(33): Xaa is C or S

SEQ ID NO: 83587 - protein, 31 aa, Artificial Sequence
  Cyclic GFR-binding peptide
  MOD_RES (30)..(31): Xaa is C or S
VTMNRYKKLVVNKNEDFYLISIANMKEPVXX

SEQ ID NO: 83588 - protein, 32 aa, Artificial Sequence
  Cyclic GFR-binding peptide
  MOD_RES (28)..(29): Xaa is C or S
VMPIKGYVKPTRGVFYLINIPSLDQPVXXPSA

SEQ ID NO: 83589 - protein, 27 aa, Artificial Sequence
  Cyclic GFR-binding peptide
  MOD_RES (1)..(1): Xaa is C or S
XSEVTMNRYKKLVVNKNEDFYLISIAN

SEQ ID NO: 83590 - protein, 37 aa, Artificial Sequence; identical to SEQ ID NO: 31870
  Cyclic GFR-binding peptide
  MOD_RES (1)..(3)..(35)..(36): Xaa is C or S

SEQ ID NO: 83591 - protein, 32 aa, Artificial Sequence
  Cyclic GFR-binding peptide
  MOD_RES (27)..(28): Xaa is C or S
MPIKGYVKPTRGVFYLINIPSLDQPVXXPSAS

SEQ ID NO: 83592 - protein, 37 aa, Artificial Sequence; identical to SEQ ID NO: 31871
  Cyclic GFR-binding peptide
  MOD_RES (2)..(33)..(34): Xaa is C or S

SEQ ID NO: 83593 - protein, 23 aa, Artificial Sequence
  Cyclic GFR-binding peptide
MYHYKLLLVRGNDKYLMSIPSTK

SEQ ID NO: 83594 - protein, 35 aa, Artificial Sequence; identical to SEQ ID NO: 31873
  Cyclic GFR-binding peptide
  MOD_RES (31)..(32): Xaa is C or S

SEQ ID NO: 83595 - protein, 32 aa, Artificial Sequence; identical to SEQ ID NO: 31874
  Cyclic GFR-binding peptide
  MOD_RES (2)..(2): Xaa is C or S

SEQ ID NO: 83596 - protein, 33 aa, Artificial Sequence
  Cyclic GFR-binding peptide
  MOD_RES (28)..(29): Xaa is C or S
IMYHYKLLLVRGNDKYLMSIPSTKVPAXXTSPV

SEQ ID NO: 83597 - protein, 34 aa, Artificial Sequence
  Cyclic GFR-binding peptide
  MOD_RES (28)..(29): Xaa is C or S
IMPIKGYIKPTKGIFYLINIPSLDQSVXXPSASA

SEQ ID NO: 83598 - protein, 33 aa, Artificial Sequence; identical to SEQ ID NO: 31878
  Cyclic GFR-binding peptide
  MOD_RES (31)..(32): Xaa is C or S

SEQ ID NO: 83599 - protein, 39 aa, Artificial Sequence; identical to SEQ ID NO: 31879
  Cyclic GFR-binding peptide
  MOD_RES (2)..(4)..(36)..(37): Xaa is C or S

SEQ ID NO: 83600 - protein, 27 aa, Artificial Sequence
  Cyclic GFR-binding peptide
MNRHKRLVVNKNEDYYLISTASMKEPV

SEQ ID NO: 83601 - protein, 36 aa, Artificial Sequence; identical to SEQ ID NO: 31880
  Cyclic GFR-binding peptide
  MOD_RES (2)..(34)..(35): Xaa is C or S

SEQ ID NO: 83602 - protein, 34 aa, Artificial Sequence
  Cyclic GFR-binding peptide
  MOD_RES (29)..(30): Xaa is C or S
VIMEYKFKLLVRGNDLYLMSIPETKVPAXXTSPV

SEQ ID NO: 83603 - protein, 35 aa, Artificial Sequence; identical to SEQ ID NO: 31881
  Cyclic GFR-binding peptide
  MOD_RES (1)..(32)..(33): Xaa is C or S

SEQ ID NO: 83604 - protein, 29 aa, Artificial Sequence
  Cyclic GFR-binding peptide
EVIMRHKRLLLVRGNDYYLMSTASTKVPA

SEQ ID NO: 83605 - protein, 33 aa, Artificial Sequence
  Cyclic GFR-binding peptide
  MOD_RES (27)..(28): Xaa is C or S
NRHKRLVVNKNEDYYLISTASMKEPVXXPEPIG

SEQ ID NO: 83606 - protein, 29 aa, Artificial Sequence
  Cyclic GFR-binding peptide
  MOD_RES (1)..(3): Xaa is C or S
XGXSEVVMDRHKRLVVNNASDYYLISTAS

SEQ ID NO: 83607 - protein, 24 aa, Artificial Sequence
  Cyclic GFR-binding peptide
VIMEYKFKLLVRGNDLYLMSIPET

SEQ ID NO: 83608 - protein, 35 aa, Artificial Sequence; identical to SEQ ID NO: 31886
  Cyclic GFR-binding peptide
  MOD_RES (31)..(32): Xaa is C or S

SEQ ID NO: 83609 - protein, 40 aa, Artificial Sequence; identical to SEQ ID NO: 31887
  Cyclic GFR-binding peptide
  MOD_RES (1)..(3)..(34)..(35): Xaa is C or S

SEQ ID NO: 83610 - protein, 32 aa, Artificial Sequence
  Cyclic GFR-binding peptide
  MOD_RES (29)..(30): Xaa is C or S
VMDRHKRLVVNNAADYYLISTASLRAPVXXSA

SEQ ID NO: 83611 - protein, 27 aa, Artificial Sequence
  Cyclic GFR-binding peptide
  MOD_RES (1)..(1): Xaa is C or S
XAEVVMDRHKRLVVNNAADYYLISTAS

SEQ ID NO: 83612 - protein, 36 aa, Artificial Sequence
  Cyclic GFR-binding peptide
  MOD_RES (30)..(31): Xaa is C or S
VTMNRHKRLVVNKNEDYYLISTASMKEPVXXPEPIG

SEQ ID NO: 83613 - protein, 33 aa, Artificial Sequence
  Cyclic GFR-binding peptide
  MOD_RES (27)..(28): Xaa is C or S
DRHKRLVVNNASDYYLISTASLRTPVXXTPPTS

SEQ ID NO: 83614 - protein, 40 aa, Artificial Sequence; identical to SEQ ID NO: 31890
  Cyclic GFR-binding peptide
  MOD_RES (1)..(3)..(34)..(35): Xaa is C or S

SEQ ID NO: 83615 - protein, 23 aa, Artificial Sequence
  Cyclic GFR-binding peptide
PIKGYVVNKNEDFYLINIPSMKE

SEQ ID NO: 83616 - protein, 31 aa, Artificial Sequence
  Cyclic GFR-binding peptide
  MOD_RES (2)..(2): Xaa is C or S
KXSKVIMPIKGYIKPTKGIFYLINIPSLDQS

SEQ ID NO: 83617 - protein, 31 aa, Artificial Sequence
  Cyclic GFR-binding peptide
  MOD_RES (27)..(28): Xaa is C or S
MPIKGYVKPTRGVFYLINIPSLDQPVXXPSA

SEQ ID NO: 83618 - protein, 34 aa, Artificial Sequence; identical to SEQ ID NO: 31897
  Cyclic GFR-binding peptide
  MOD_RES (31)..(32): Xaa is C or S

SEQ ID NO: 83619 - protein, 34 aa, Artificial Sequence; identical to SEQ ID NO: 31898
  Cyclic GFR-binding peptide
  MOD_RES (2)..(34): Xaa is C or S

SEQ ID NO: 83620 - protein, 36 aa, Artificial Sequence
  Cyclic GFR-binding peptide
  MOD_RES (30)..(31): Xaa is C or S
VVMNEYKFKIVNSSDDLYLVSIPELKTPAXXPKPVH

SEQ ID NO: 83621 - protein, 28 aa, Artificial Sequence
  Cyclic GFR-binding peptide
  MOD_RES (27)..(28): Xaa is C or S
NYHYKLVVNKNEDKYLISIPSMKEPVXX

SEQ ID NO: 83622 - protein, 30 aa, Artificial Sequence
  Cyclic GFR-binding peptide
  MOD_RES (29)..(30): Xaa is C or S
TMNYHYKLVVNKNEDKYLISIPSMKEPVXX

SEQ ID NO: 83623 - protein, 30 aa, Artificial Sequence
  Cyclic GFR-binding peptide
  MOD_RES (2)..(2): Xaa is C or S
GXRDVVMGYHYKLIIQQKDNKYLMSIPSMK

SEQ ID NO: 83624 - protein, 27 aa, Artificial Sequence
  Cyclic GFR-binding peptide
EVTMNYHYKLVVNKNEDKYLISIPSMK

SEQ ID NO: 83625 - protein, 32 aa, Artificial Sequence
  Cyclic GFR-binding peptide
  MOD_RES (26)..(27): Xaa is C or S
RHKRLLLVRGNDYYLMSTASTKVPAXXTSPVR

SEQ ID NO: 83626 - protein, 33 aa, Artificial Sequence; identical to SEQ ID NO: 31903
  Cyclic GFR-binding peptide
  MOD_RES (32)..(33): Xaa is C or S

SEQ ID NO: 83627 - protein, 28 aa, Artificial Sequence
  Cyclic GFR-binding peptide
  MOD_RES (2)..(2): Xaa is C or S
GXEEVIMEYKFKLLVRGNDLYLMSIPET

SEQ ID NO: 83628 - protein, 34 aa, Artificial Sequence; identical to SEQ ID NO: 31905
  Cyclic GFR-binding peptide
  MOD_RES (2)..(34): Xaa is C or S

SEQ ID NO: 83629 - protein, 26 aa, Artificial Sequence
  Cyclic GFR-binding peptide
AMGRHKRLYTVVGKDYYLISTASLKT

SEQ ID NO: 83630 - protein, 37 aa, Artificial Sequence; identical to SEQ ID NO: 31908
  Cyclic GFR-binding peptide
  MOD_RES (2)..(4)..(36)..(37): Xaa is C or S

SEQ ID NO: 83631 - protein, 36 aa, Artificial Sequence; identical to SEQ ID NO: 31909
  Cyclic GFR-binding peptide
  MOD_RES (1)..(33)..(34): Xaa is C or S

SEQ ID NO: 83632 - protein, 34 aa, Artificial Sequence
  Cyclic GFR-binding peptide
  MOD_RES (29)..(30): Xaa is C or S
TMNEYKFKVVNKNEDLYLISIPEMKEPVXXPEPI

SEQ ID NO: 83633 - protein, 31 aa, Artificial Sequence
  Cyclic GFR-binding peptide
  MOD_RES (1)..(3): Xaa is C or S
XGXEEVIMEYKFKLLVRGNDLYLMSIPETKV

SEQ ID NO: 83634 - protein, 21 aa, Artificial Sequence
  Cyclic GFR-binding peptide
PIKGYVKPTRGVFYLINIPSL

SEQ ID NO: 83635 - protein, 35 aa, Artificial Sequence; identical to SEQ ID NO: 31911
  Cyclic GFR-binding peptide
  MOD_RES (2)..(34)..(35): Xaa is C or S

SEQ ID NO: 83636 - protein, 31 aa, Artificial Sequence
  Cyclic GFR-binding peptide
  MOD_RES (29)..(30): Xaa is C or S
TMNEYKFKVVNKNEDLYLISIPEMKEPVXXP

SEQ ID NO: 83637 - protein, 34 aa, Artificial Sequence
  Cyclic GFR-binding peptide
  MOD_RES (29)..(30): Xaa is C or S
VIMRHKRLLLVRGNDYYLMSTASTKVPAXXTSPV

SEQ ID NO: 83638 - protein, 25 aa, Artificial Sequence
  Cyclic GFR-binding peptide
MEYKFKLLVRGNDLYLMSIPETKVP

SEQ ID NO: 83639 - protein, 32 aa, Artificial Sequence
  Cyclic GFR-binding peptide
  MOD_RES (2)..(2): Xaa is C or S
AXSEVTMNPIKGYVVNKNEDFYLINIPSMKEP

SEQ ID NO: 83640 - protein, 41 aa, Artificial Sequence; identical to SEQ ID NO: 31912
  Cyclic GFR-binding peptide
  MOD_RES (2)..(4)..(35)..(36): Xaa is C or S

SEQ ID NO: 83641 - protein, 22 aa, Artificial Sequence
  Cyclic GFR-binding peptide
RYKKLVVNKNEDFYLISIANMK

SEQ ID NO: 83642 - protein, 26 aa, Artificial Sequence
  Cyclic GFR-binding peptide
IMPIKGYVKPKRGVFYLINIPSLAQP

SEQ ID NO: 83643 - protein, 21 aa, Artificial Sequence
  Cyclic GFR-binding peptide
GEYKFKIIQQKDNLYLMSIPE

SEQ ID NO: 83644 - protein, 25 aa, Artificial Sequence
  Cyclic GFR-binding peptide
VIMRHKRLLLVRGNDYYLMSTASTK

SEQ ID NO: 83645 - protein, 33 aa, Artificial Sequence; identical to SEQ ID NO: 31916
  Cyclic GFR-binding peptide
  MOD_RES (31)..(32): Xaa is C or S

SEQ ID NO: 83646 - protein, 35 aa, Artificial Sequence
  Cyclic GFR-binding peptide
  MOD_RES (29)..(30): Xaa is C or S
TMNRHKRLVVNKNEDYYLISTASMKEPVXXPEPIG

SEQ ID NO: 83647 - protein, 28 aa, Artificial Sequence
  Cyclic GFR-binding peptide
  MOD_RES (1)..(1): Xaa is C or S
XSKVIMPIKGYIKPTKGIFYLINIPSLD

SEQ ID NO: 83648 - protein, 32 aa, Artificial Sequence
  Cyclic GFR-binding peptide
  MOD_RES (30)..(31): Xaa is C or S
VVMGRHKRLIIQQKDNYYLMSTASMKTPTXXP

SEQ ID NO: 83649 - protein, 33 aa, Artificial Sequence
  Cyclic GFR-binding peptide
  MOD_RES (29)..(30): Xaa is C or S
TMNPIKGYVVNKNEDFYLINIPSMKEPVXXPEP

SEQ ID NO: 83650 - protein, 25 aa, Artificial Sequence
  Cyclic GFR-binding peptide
RVIMPIKGYVKPKRGVFYLINIPSL

SEQ ID NO: 83651 - protein, 28 aa, Artificial Sequence
  Cyclic GFR-binding peptide
  MOD_RES (26)..(27): Xaa is C or S
PIKGYVVNKNEDFYLINIPSMKEPVXXP

SEQ ID NO: 83652 - protein, 31 aa, Artificial Sequence
  Cyclic GFR-binding peptide
  MOD_RES (28)..(29): Xaa is C or S
MGEYKFKIIQQKDNLYLMSIPEMKTPTXXPG

SEQ ID NO: 83653 - protein, 33 aa, Artificial Sequence
  Cyclic GFR-binding peptide
  MOD_RES (28)..(29): Xaa is C or S
MNRYKKLVVNKNEDFYLISIANMKEPVXXPEPI

SEQ ID NO: 83654 - protein, 40 aa, Artificial Sequence; identical to SEQ ID NO: 31919
  Cyclic GFR-binding peptide
  MOD_RES (2)..(4)..(36)..(37): Xaa is C or S

SEQ ID NO: 83655 - protein, 28 aa, Artificial Sequence
  Cyclic GFR-binding peptide
EVTMNRYKKLVVNKNEDFYLISIANMKE

SEQ ID NO: 83656 - protein, 29 aa, Artificial Sequence
  Cyclic GFR-binding peptide
  MOD_RES (2)..(2): Xaa is C or S
KXSKVVMPIKGYVKPTRGVFYLINIPSLD

SEQ ID NO: 83657 - protein, 30 aa, Artificial Sequence
  Cyclic GFR-binding peptide
  MOD_RES (2)..(2): Xaa is C or S
KXSKVIMPIKGYIKPTKGIFYLINIPSLDQ

SEQ ID NO: 83658 - protein, 24 aa, Artificial Sequence
  Cyclic GFR-binding peptide
MYHYKLLLVRGNDKYLMSIPSTKV

SEQ ID NO: 83659 - protein, 39 aa, Artificial Sequence; identical to SEQ ID NO: 31923
  Cyclic GFR-binding peptide
  MOD_RES (2)..(4)..(36)..(37): Xaa is C or S

SEQ ID NO: 83660 - protein, 32 aa, Artificial Sequence
  Cyclic GFR-binding peptide
  MOD_RES (26)..(27): Xaa is C or S
YHYKLVVNKNEDKYLISIPSMKEPVXXPEPIG

SEQ ID NO: 83661 - protein, 36 aa, Artificial Sequence; identical to SEQ ID NO: 31924
  Cyclic GFR-binding peptide
  MOD_RES (1)..(3)..(34)..(35): Xaa is C or S

SEQ ID NO: 83662 - protein, 20 aa, Artificial Sequence
  Cyclic GFR-binding peptide
EYKFKLLVRGNDLYLMSIPE

SEQ ID NO: 83663 - protein, 26 aa, Artificial Sequence
  Cyclic GFR-binding peptide
  MOD_RES (26)..(26): Xaa is C or S
YHYKLLLVRGNDKYLMSIPSTKVPAX

SEQ ID NO: 83664 - protein, 28 aa, Artificial Sequence
  Cyclic GFR-binding peptide
EEVIMEYKFKLLVRGNDLYLMSIPETKV

SEQ ID NO: 83665 - protein, 28 aa, Artificial Sequence
  Cyclic GFR-binding peptide
  MOD_RES (27)..(28): Xaa is C or S
NEYKFKVVNKNEDLYLISIPEMKEPVXX

SEQ ID NO: 83666 - protein, 30 aa, Artificial Sequence
  Cyclic GFR-binding peptide
  MOD_RES (1)..(3): Xaa is C or S
XAXSEVTMNRYKKLVVNKNEDFYLISIANM

SEQ ID NO: 83667 - protein, 35 aa, Artificial Sequence; identical to SEQ ID NO: 31930
  Cyclic GFR-binding peptide
  MOD_RES (1)..(3)..(34)..(35): Xaa is C or S

SEQ ID NO: 83668 - protein, 25 aa, Artificial Sequence
  Cyclic GFR-binding peptide
RHKRLVVNNASDYYLISTASLRTPV

SEQ ID NO: 83669 - protein, 29 aa, Artificial Sequence
  Cyclic GFR-binding peptide
KVVMPIKGYVKPTRGVFYLINIPSLDQPV

SEQ ID NO: 83670 - protein, 25 aa, Artificial Sequence
  Cyclic GFR-binding peptide
EVVMDEYKFKVVNNASDLYLISIPE

SEQ ID NO: 83671 - protein, 32 aa, Artificial Sequence
  Cyclic GFR-binding peptide
  MOD_RES (26)..(27): Xaa is C or S
EYKFKVVNKNEDLYLISIPEMKEPVXXPEPIG

SEQ ID NO: 83672 - protein, 25 aa, Artificial Sequence
  Cyclic GFR-binding peptide
MYHYKLLLVRGNDKYLMSIPSTKVP

SEQ ID NO: 83673 - protein, 30 aa, Artificial Sequence
  Cyclic GFR-binding peptide
  MOD_RES (30)..(30): Xaa is C or S
EVIMEYKFKLLVRGNDLYLMSIPETKVPAX

SEQ ID NO: 83674 - protein, 23 aa, Artificial Sequence
  Cyclic GFR-binding peptide
MGEYKFKIIQQKDNLYLMSIPEM

SEQ ID NO: 83675 - protein, 25 aa, Artificial Sequence
  Cyclic GFR-binding peptide
IMEYKFKLLVRGNDLYLMSIPETKV

SEQ ID NO: 83676 - protein, 26 aa, Artificial Sequence
  Cyclic GFR-binding peptide
  MOD_RES (1)..(1): Xaa is C or S
XSRVIMPIKGYVKPKRGVFYLINIPS

SEQ ID NO: 83677 - protein, 29 aa, Artificial Sequence
  Cyclic GFR-binding peptide
  MOD_RES (28)..(29): Xaa is C or S
MGRHKRLIIQQKDNYYLMSTASMKTPTXX

SEQ ID NO: 83678 - protein, 37 aa, Artificial Sequence; identical to SEQ ID NO: 31931
  Cyclic GFR-binding peptide
  MOD_RES (1)..(3)..(35)..(36): Xaa is C or S

SEQ ID NO: 83679 - protein, 21 aa, Artificial Sequence
  Cyclic GFR-binding peptide
GYHYKLIIQQKDNKYLMSIPS

SEQ ID NO: 83680 - protein, 23 aa, Artificial Sequence
  Cyclic GFR-binding peptide
IMPIKGYVKPKRGVFYLINIPSL

SEQ ID NO: 83681 - protein, 36 aa, Artificial Sequence; identical to SEQ ID NO: 31932
  Cyclic GFR-binding peptide
  MOD_RES (2)..(33)..(34): Xaa is C or S

SEQ ID NO: 83682 - protein, 36 aa, Artificial Sequence; identical to SEQ ID NO: 31933
  Cyclic GFR-binding peptide
  MOD_RES (32)..(33): Xaa is C or S

SEQ ID NO: 83683 - protein, 37 aa, Artificial Sequence; identical to SEQ ID NO: 31934
  Cyclic GFR-binding peptide
  MOD_RES (1)..(33)..(34): Xaa is C or S

SEQ ID NO: 83684 - protein, 26 aa, Artificial Sequence
  Cyclic GFR-binding peptide
MDYHYKLVVNNASDKYLISIPSLRTP

SEQ ID NO: 83685 - protein, 25 aa, Artificial Sequence
  Cyclic GFR-binding peptide
VTMNRYKKLVVNKNEDFYLISIANM

SEQ ID NO: 83686 - protein, 33 aa, Artificial Sequence
  Cyclic GFR-binding peptide
  MOD_RES (30)..(31): Xaa is C or S
VVMDRHKRLVVNNAADYYLISTASLRAPVXXSA

SEQ ID NO: 83687 - protein, 32 aa, Artificial Sequence; identical to SEQ ID NO: 31935
  Cyclic GFR-binding peptide
  MOD_RES (31)..(32): Xaa is C or S

SEQ ID NO: 83688 - protein, 32 aa, Artificial Sequence
  Cyclic GFR-binding peptide
  MOD_RES (1)..(3): Xaa is C or S
XGXSEVVMDEYKFKVVNNASDLYLISIPELRT

SEQ ID NO: 83689 - protein, 28 aa, Artificial Sequence
  Cyclic GFR-binding peptide
EVTMNRHKRLVVNKNEDYYLISTASMKE

SEQ ID NO: 83690 - protein, 32 aa, Artificial Sequence
  Cyclic GFR-binding peptide
  MOD_RES (30)..(31): Xaa is C or S
VTMNPIKGYVVNKNEDFYLINIPSMKEPVXXP

SEQ ID NO: 83691 - protein, 34 aa, Artificial Sequence
  Cyclic GFR-binding peptide
  MOD_RES (28)..(29): Xaa is C or S
MNYHYKLIVNSSDDKYLVSIPSLKTPAXXPKPVH

SEQ ID NO: 83692 - protein, 26 aa, Artificial Sequence
  Cyclic GFR-binding peptide
VTMNYHYKLVVNKNEDKYLISIPSMK

SEQ ID NO: 83693 - protein, 36 aa, Artificial Sequence; identical to SEQ ID NO: 31936
  Cyclic GFR-binding peptide
  MOD_RES (31)..(32): Xaa is C or S

SEQ ID NO: 83694 - protein, 33 aa, Artificial Sequence
  Cyclic GFR-binding peptide
  MOD_RES (2)..(4): Xaa is C or S
LXGXEEVIMYHYKLLLVRGNDKYLMSIPSTKVP

SEQ ID NO: 83695 - protein, 36 aa, Artificial Sequence; identical to SEQ ID NO: 31939
  Cyclic GFR-binding peptide
  MOD_RES (2)..(33)..(34): Xaa is C or S

SEQ ID NO: 83696 - protein, 32 aa, Artificial Sequence
  Cyclic GFR-binding peptide
  MOD_RES (2)..(2): Xaa is C or S
GXESVAMGRHKRLYTVVGKDYYLISTASLKTP

SEQ ID NO: 83697 - protein, 31 aa, Artificial Sequence
  Cyclic GFR-binding peptide
  MOD_RES (29)..(30): Xaa is C or S
VMDRHKRLVVNNASDYYLISTASLRTPVXXT

SEQ ID NO: 83698 - protein, 28 aa, Artificial Sequence
  Cyclic GFR-binding peptide
  MOD_RES (1)..(1): Xaa is C or S
XRDVVMGRHKRLIIQQKDNYYLMSTASM

SEQ ID NO: 83699 - protein, 27 aa, Artificial Sequence
  Cyclic GFR-binding peptide
VVMPIKGYVKPTRGVFYLINIPSLDQP

SEQ ID NO: 83700 - protein, 31 aa, Artificial Sequence
  Cyclic GFR-binding peptide
  MOD_RES (1)..(1): Xaa is C or S
XSEVVMDRHKRLVVNNASDYYLISTASLRTP

SEQ ID NO: 83701 - protein, 27 aa, Artificial Sequence
  Cyclic GFR-binding peptide
  MOD_RES (1)..(1): Xaa is C or S
XSEVVMDEYKFKVVNNASDLYLISIPE

SEQ ID NO: 83702 - protein, 32 aa, Artificial Sequence
  Cyclic GFR-binding peptide
  MOD_RES (27)..(28): Xaa is C or S
MPIKGYIKPTKGIFYLINIPSLDQSVXXPSAS

SEQ ID NO: 83703 - protein, 30 aa, Artificial Sequence
  Cyclic GFR-binding peptide
RDVVMGYHYKLIIQQKDNKYLMSIPSMKTP

SEQ ID NO: 83704 - protein, 29 aa, Artificial Sequence
  Cyclic GFR-binding peptide
  MOD_RES (1)..(3): Xaa is C or S
XKXSKVVMPIKGYVKPTRGVFYLINIPSL

SEQ ID NO: 83705 - protein, 30 aa, Artificial Sequence
  Cyclic GFR-binding peptide
  MOD_RES (29)..(30): Xaa is C or S
AMGRHKRLYTVVGKDYYLISTASLKTPVXX

SEQ ID NO: 83706 - protein, 36 aa, Artificial Sequence; identical to SEQ ID NO: 31941
  Cyclic GFR-binding peptide
  MOD_RES (1)..(33)..(34): Xaa is C or S

SEQ ID NO: 83707 - protein, 40 aa, Artificial Sequence; identical to SEQ ID NO: 31942
  Cyclic GFR-binding peptide
  MOD_RES (2)..(4)..(36)..(37): Xaa is C or S

SEQ ID NO: 83708 - protein, 28 aa, Artificial Sequence
  Cyclic GFR-binding peptide
EVVMDRHKRLVVNNASDYYLISTASLRT

SEQ ID NO: 83709 - protein, 29 aa, Artificial Sequence
  Cyclic GFR-binding peptide
RDVVMGEYKFKIIQQKDNLYLMSIPEMKT

SEQ ID NO: 83710 - protein, 29 aa, Artificial Sequence
  Cyclic GFR-binding peptide
  MOD_RES (1)..(1): Xaa is C or S
XEEVIMEYKFKLLVRGNDLYLMSIPETKV

SEQ ID NO: 83711 - protein, 37 aa, Artificial Sequence; identical to SEQ ID NO: 31944
  Cyclic GFR-binding peptide
  MOD_RES (1)..(3)..(35)..(36): Xaa is C or S

SEQ ID NO: 83712 - protein, 27 aa, Artificial Sequence
  Cyclic GFR-binding peptide
RDVVMGRHKRLIIQQKDNYYLMSTASM

SEQ ID NO: 83713 - protein, 35 aa, Artificial Sequence
  Cyclic GFR-binding peptide
  MOD_RES (30)..(31): Xaa is C or S
EVIMYHYKLLLVRGNDKYLMSIPSTKVPAXXTSPV

SEQ ID NO: 83714 - protein, 33 aa, Artificial Sequence
  Cyclic GFR-binding peptide
  MOD_RES (2)..(4): Xaa is C or S
RXGXSEVVMDRHKRLVVNNASDYYLISTASLRT

SEQ ID NO: 83715 - protein, 29 aa, Artificial Sequence
  Cyclic GFR-binding peptide
RDVVMGRHKRLIIQQKDNYYLMSTASMKT

SEQ ID NO: 83716 - protein, 41 aa, Artificial Sequence; identical to SEQ ID NO: 31947
  Cyclic GFR-binding peptide
  MOD_RES (1)..(3)..(35)..(36): Xaa is C or S

SEQ ID NO: 83717 - protein, 26 aa, Artificial Sequence
  Cyclic GFR-binding peptide
KVIMPIKGYIKPTKGIFYLINIPSLD

SEQ ID NO: 83718 - protein, 35 aa, Artificial Sequence; identical to SEQ ID NO: 31948
  Cyclic GFR-binding peptide
  MOD_RES (2)..(4): Xaa is C or S

SEQ ID NO: 83719 - protein, 37 aa, Artificial Sequence; identical to SEQ ID NO: 31949
  Cyclic GFR-binding peptide
  MOD_RES (2)..(4)..(36)..(37): Xaa is C or S

SEQ ID NO: 83720 - protein, 32 aa, Artificial Sequence
  Cyclic GFR-binding peptide
  MOD_RES (28)..(29): Xaa is C or S
MNRYKKLVVNKNEDFYLISIANMKEPVXXPEP

SEQ ID NO: 83721 - protein, 35 aa, Artificial Sequence
  Cyclic GFR-binding peptide
  MOD_RES (29)..(30): Xaa is C or S
TMNEYKFKVVNKNEDLYLISIPEMKEPVXXPEPIG

SEQ ID NO: 83722 - protein, 31 aa, Artificial Sequence
  Cyclic GFR-binding peptide
  MOD_RES (29)..(30): Xaa is C or S
TMNRHKRLVVNKNEDYYLISTASMKEPVXXP

SEQ ID NO: 83723 - protein, 25 aa, Artificial Sequence
  Cyclic GFR-binding peptide
TMNPIKGYVVNKNEDFYLINIPSMK

SEQ ID NO: 83724 - protein, 28 aa, Artificial Sequence
  Cyclic GFR-binding peptide
  MOD_RES (2)..(2): Xaa is C or S
GXAEVVMDRHKRLVVNNAADYYLISTAS

SEQ ID NO: 83725 - protein, 37 aa, Artificial Sequence; identical to SEQ ID NO: 31951
  Cyclic GFR-binding peptide
  MOD_RES (1)..(33)..(34): Xaa is C or S

SEQ ID NO: 83726 - protein, 24 aa, Artificial Sequence
  Cyclic GFR-binding peptide
MEYKFKLLVRGNDLYLMSIPETKV

SEQ ID NO: 83727 - protein, 31 aa, Artificial Sequence
  Cyclic GFR-binding peptide
  MOD_RES (1)..(1): Xaa is C or S
XSEVTMNPIKGYVVNKNEDFYLINIPSMKEP

SEQ ID NO: 83728 - protein, 31 aa, Artificial Sequence
  Cyclic GFR-binding peptide
  MOD_RES (28)..(29): Xaa is C or S
IMYHYKLLLVRGNDKYLMSIPSTKVPAXXTS

SEQ ID NO: 83729 - protein, 35 aa, Artificial Sequence; identical to SEQ ID NO: 31954
  Cyclic GFR-binding peptide
  MOD_RES (1)..(33)..(34): Xaa is C or S

SEQ ID NO: 83730 - protein, 36 aa, Artificial Sequence; identical to SEQ ID NO: 31955
  Cyclic GFR-binding peptide
  MOD_RES (32)..(33): Xaa is C or S

SEQ ID NO: 83731 - protein, 41 aa, Artificial Sequence; identical to SEQ ID NO: 31956
  Cyclic GFR-binding peptide
  MOD_RES (1)..(3)..(35)..(36): Xaa is C or S

SEQ ID NO: 83732 - protein, 21 aa, Artificial Sequence
  Cyclic GFR-binding peptide
MPIKGYIKPTKGIFYLINIPS

SEQ ID NO: 83733 - protein, 27 aa, Artificial Sequence
  Cyclic GFR-binding peptide
  MOD_RES (27)..(27): Xaa is C or S
DYHYKLVVNNASDKYLISIPSLRTPVX

SEQ ID NO: 83734 - protein, 33 aa, Artificial Sequence
  Cyclic GFR-binding peptide
  MOD_RES (30)..(31): Xaa is C or S
KVIMPIKGYIKPTKGIFYLINIPSLDQSVXXPS

SEQ ID NO: 83735 - protein, 34 aa, Artificial Sequence
  Cyclic GFR-binding peptide
  MOD_RES (29)..(30): Xaa is C or S
TMNRHKRLVVNKNEDYYLISTASMKEPVXXPEPI

SEQ ID NO: 83736 - protein, 30 aa, Artificial Sequence
  Cyclic GFR-binding peptide
  MOD_RES (27)..(28): Xaa is C or S
MPIKGYVKPKRGVFYLINIPSLAQPVXXPA

SEQ ID NO: 83737 - protein, 32 aa, Artificial Sequence; identical to SEQ ID NO: 31959
  Cyclic GFR-binding peptide
  MOD_RES (1)..(1): Xaa is C or S

SEQ ID NO: 83738 - protein, 33 aa, Artificial Sequence
  Cyclic GFR-binding peptide
  MOD_RES (30)..(31): Xaa is C or S
VVMDYHYKLVVNNASDKYLISIPSLRTPVXXTP

SEQ ID NO: 83739 - protein, 36 aa, Artificial Sequence; identical to SEQ ID NO: 31960
  Cyclic GFR-binding peptide
  MOD_RES (1)..(3)..(35)..(36): Xaa is C or S

SEQ ID NO: 83740 - protein, 34 aa, Artificial Sequence
  Cyclic GFR-binding peptide
  MOD_RES (29)..(30): Xaa is C or S
VMDRHKRLVVNNAADYYLISTASLRAPVXXSAPA

SEQ ID NO: 83741 - protein, 27 aa, Artificial Sequence
  Cyclic GFR-binding peptide
SVAMGRHKRLYTVVGKDYYLISTASLK

SEQ ID NO: 83742 - protein, 31 aa, Artificial Sequence
  Cyclic GFR-binding peptide
  MOD_RES (28)..(29): Xaa is C or S
MDEYKFKVVNNASDLYLISIPELRTPVXXTP

SEQ ID NO: 83743 - protein, 28 aa, Artificial Sequence
  Cyclic GFR-binding peptide
  MOD_RES (28)..(28): Xaa is C or S
MNRYKKLVVNKNEDFYLISIANMKEPVX

SEQ ID NO: 83744 - protein, 37 aa, Artificial Sequence; identical to SEQ ID NO: 31964
  Cyclic GFR-binding peptide
  MOD_RES (31)..(32): Xaa is C or S

SEQ ID NO: 83745 - protein, 35 aa, Artificial Sequence; identical to SEQ ID NO: 31966
  Cyclic GFR-binding peptide
  MOD_RES (1)..(3)..(34)..(35): Xaa is C or S

SEQ ID NO: 83746 - protein, 39 aa, Artificial Sequence; identical to SEQ ID NO: 31967
  Cyclic GFR-binding peptide
  MOD_RES (2)..(4)..(35)..(36): Xaa is C or S

SEQ ID NO: 83747 - protein, 32 aa, Artificial Sequence
  Cyclic GFR-binding peptide
  MOD_RES (1)..(3): Xaa is C or S
XAXSEVTMNEYKFKVVNKNEDLYLISIPEMKE

SEQ ID NO: 83748 - protein, 29 aa, Artificial Sequence
  Cyclic GFR-binding peptide
  MOD_RES (26)..(27): Xaa is C or S
EYKFKVVNNASDLYLISIPELRTPVXXTP

SEQ ID NO: 83749 - protein, 32 aa, Artificial Sequence
  Cyclic GFR-binding peptide
  MOD_RES (2)..(2): Xaa is C or S
AXSEVTMNRYKKLVVNKNEDFYLISIANMKEP

SEQ ID NO: 83750 - protein, 28 aa, Artificial Sequence
  Cyclic GFR-binding peptide
SEVTMNRYKKLVVNKNEDFYLISIANMK

SEQ ID NO: 83751 - protein, 36 aa, Artificial Sequence
  Cyclic GFR-binding peptide
  MOD_RES (30)..(31): Xaa is C or S
KVIMPIKGYIKPTKGIFYLINIPSLDQSVXXPSASA

SEQ ID NO: 83752 - protein, 25 aa, Artificial Sequence
  Cyclic GFR-binding peptide
VAMGRHKRLYTVVGKDYYLISTASL

SEQ ID NO: 83753 - protein, 36 aa, Artificial Sequence
  Cyclic GFR-binding peptide
  MOD_RES (30)..(31): Xaa is C or S
VVMNRHKRLIVNSSDDYYLVSTASLKTPAXXPKPVH

SEQ ID NO: 83754 - protein, 32 aa, Artificial Sequence
  Cyclic GFR-binding peptide
  MOD_RES (1)..(3): Xaa is C or S
XGXSEVVMDYHYKLVVNNASDKYLISIPSLRT

SEQ ID NO: 83755 - protein, 40 aa, Artificial Sequence; identical to SEQ ID NO: 31972
  Cyclic GFR-binding peptide
  MOD_RES (2)..(34)..(35): Xaa is C or S

SEQ ID NO: 83756 - protein, 30 aa, Artificial Sequence
  Cyclic GFR-binding peptide
  MOD_RES (1)..(3): Xaa is C or S
XKXSKVIMPIKGYIKPTKGIFYLINIPSLD

SEQ ID NO: 83757 - protein, 34 aa, Artificial Sequence
  Cyclic GFR-binding peptide
  MOD_RES (28)..(29): Xaa is C or S
MDYHYKLVVNNASDKYLISIPSLRTPVXXTPPTS

SEQ ID NO: 83758 - protein, 32 aa, Artificial Sequence
  Cyclic GFR-binding peptide
  MOD_RES (29)..(30): Xaa is C or S
VIMPIKGYIKPTKGIFYLINIPSLDQSVXXPS

SEQ ID NO: 83759 - protein, 31 aa, Artificial Sequence
  Cyclic GFR-binding peptide
  MOD_RES (2)..(4): Xaa is C or S
SXGXRDVVMGYHYKLIIQQKDNKYLMSIPSM

SEQ ID NO: 83760 - protein, 30 aa, Artificial Sequence
  Cyclic GFR-binding peptide
  MOD_RES (28)..(29): Xaa is C or S
IMYHYKLLLVRGNDKYLMSIPSTKVPAXXT

SEQ ID NO: 83761 - protein, 29 aa, Artificial Sequence
  Cyclic GFR-binding peptide
  MOD_RES (26)..(27): Xaa is C or S
YHYKLVVNNASDKYLISIPSLRTPVXXTP

SEQ ID NO: 83762 - protein, 42 aa, Artificial Sequence; identical to SEQ ID NO: 31977
  Cyclic GFR-binding peptide
  MOD_RES (2)..(4)..(36)..(37): Xaa is C or S

SEQ ID NO: 83763 - protein, 35 aa, Artificial Sequence; identical to SEQ ID NO: 31980
  Cyclic GFR-binding peptide
  MOD_RES (1)..(3)..(34)..(35): Xaa is C or S

SEQ ID NO: 83764 - protein, 33 aa, Artificial Sequence; identical to SEQ ID NO: 31981
  Cyclic GFR-binding peptide
  MOD_RES (31)..(32): Xaa is C or S

SEQ ID NO: 83765 - protein, 25 aa, Artificial Sequence
  Cyclic GFR-binding peptide
EVVMDYHYKLVVNNASDKYLISIPS

SEQ ID NO: 83766 - protein, 31 aa, Artificial Sequence
  Cyclic GFR-binding peptide
  MOD_RES (1)..(1): Xaa is C or S
XSEVVMDEYKFKVVNNASDLYLISIPELRTP

SEQ ID NO: 83767 - protein, 32 aa, Artificial Sequence
  Cyclic GFR-binding peptide
  MOD_RES (27)..(28): Xaa is C or S
MYHYKLLLVRGNDKYLMSIPSTKVPAXXTSPV

SEQ ID NO: 83768 - protein, 29 aa, Artificial Sequence
  Cyclic GFR-binding peptide
  MOD_RES (1)..(1): Xaa is C or S
XSEVTMNPIKGYVVNKNEDFYLINIPSMK

SEQ ID NO: 83769 - protein, 33 aa, Artificial Sequence
  Cyclic GFR-binding peptide
  MOD_RES (2)..(4): Xaa is C or S
LXGXEEVIMEYKFKLLVRGNDLYLMSIPETKVP

SEQ ID NO: 83770 - protein, 26 aa, Artificial Sequence
  Cyclic GFR-binding peptide
  MOD_RES (1)..(1): Xaa is C or S
XSKVVMPIKGYVKPTRGVFYLINIPS

SEQ ID NO: 83771 - protein, 28 aa, Artificial Sequence
  Cyclic GFR-binding peptide
EEVIMYHYKLLLVRGNDKYLMSIPSTKV

SEQ ID NO: 83772 - protein, 24 aa, Artificial Sequence
  Cyclic GFR-binding peptide
TMNRYKKLVVNKNEDFYLISIANM

SEQ ID NO: 83773 - protein, 32 aa, Artificial Sequence
  Cyclic GFR-binding peptide
  MOD_RES (27)..(28): Xaa is C or S
DRHKRLVVNNASDYYLISTASLRTPVXXTPPT

SEQ ID NO: 83774 - protein, 28 aa, Artificial Sequence
  Cyclic GFR-binding peptide
  MOD_RES (1)..(1): Xaa is C or S
XRDVVMGEYKFKIIQQKDNLYLMSIPEM

SEQ ID NO: 83775 - protein, 32 aa, Artificial Sequence
  Cyclic GFR-binding peptide
  MOD_RES (27)..(28): Xaa is C or S
NRHKRLVVNKNEDYYLISTASMKEPVXXPEPI

SEQ ID NO: 83776 - protein, 35 aa, Artificial Sequence; identical to SEQ ID NO: 31995
  Cyclic GFR-binding peptide
  MOD_RES (2)..(33)..(34): Xaa is C or S

SEQ ID NO: 83777 - protein, 39 aa, Artificial Sequence; identical to SEQ ID NO: 31996
  Cyclic GFR-binding peptide
  MOD_RES (2)..(4)..(36)..(37): Xaa is C or S

SEQ ID NO: 83778 - protein, 28 aa, Artificial Sequence
  Cyclic GFR-binding peptide
VMDRHKRLVVNNASDYYLISTASLRTPV

SEQ ID NO: 83779 - protein, 39 aa, Artificial Sequence; identical to SEQ ID NO: 31997
  Cyclic GFR-binding peptide
  MOD_RES (1)..(33)..(34): Xaa is C or S

SEQ ID NO: 83780 - protein, 40 aa, Artificial Sequence; identical to SEQ ID NO: 31998
  Cyclic GFR-binding peptide
  MOD_RES (2)..(34)..(35): Xaa is C or S

SEQ ID NO: 83781 - protein, 25 aa, Artificial Sequence
  Cyclic GFR-binding peptide
MNRHKRLVVNKNEDYYLISTASMKE

SEQ ID NO: 83782 - protein, 24 aa, Artificial Sequence
  Cyclic GFR-binding peptide
MNYHYKLVVNKNEDKYLISIPSMK

SEQ ID NO: 83783 - protein, 31 aa, Artificial Sequence
  Cyclic GFR-binding peptide
  MOD_RES (28)..(29): Xaa is C or S
MDRHKRLVVNNASDYYLISTASLRTPVXXTP

SEQ ID NO: 83784 - protein, 25 aa, Artificial Sequence
  Cyclic GFR-binding peptide
MDYHYKLVVNNASDKYLISIPSLRT

SEQ ID NO: 83785 - protein, 36 aa, Artificial Sequence; identical to SEQ ID NO: 32000
  Cyclic GFR-binding peptide
  MOD_RES (1)..(33)..(34): Xaa is C or S

SEQ ID NO: 83786 - protein, 36 aa, Artificial Sequence; identical to SEQ ID NO: 32001
  Cyclic GFR-binding peptide
  MOD_RES (32)..(33): Xaa is C or S

SEQ ID NO: 83787 - protein, 40 aa, Artificial Sequence; identical to SEQ ID NO: 32002
  Cyclic GFR-binding peptide
  MOD_RES (2)..(4)..(36)..(37): Xaa is C or S

SEQ ID NO: 83788 - protein, 30 aa, Artificial Sequence
  Cyclic GFR-binding peptide
  MOD_RES (2)..(2): Xaa is C or S
GXSEVVMDRHKRLVVNNASDYYLISTASLR

SEQ ID NO: 83789 - protein, 32 aa, Artificial Sequence; identical to SEQ ID NO: 32006
  Cyclic GFR-binding peptide
  MOD_RES (1)..(32): Xaa is C or S

SEQ ID NO: 83790 - protein, 36 aa, Artificial Sequence; identical to SEQ ID NO: 32010
  Cyclic GFR-binding peptide
  MOD_RES (2)..(34)..(35): Xaa is C or S

SEQ ID NO: 83791 - protein, 38 aa, Artificial Sequence; identical to SEQ ID NO: 32011
  Cyclic GFR-binding peptide
  MOD_RES (2)..(33)..(34): Xaa is C or S

SEQ ID NO: 83792 - protein, 36 aa, Artificial Sequence; identical to SEQ ID NO: 32012
  Cyclic GFR-binding peptide
  MOD_RES (31)..(32): Xaa is C or S

SEQ ID NO: 83793 - protein, 34 aa, Artificial Sequence; identical to SEQ ID NO: 32014
  Cyclic GFR-binding peptide
  MOD_RES (1)..(3): Xaa is C or S

SEQ ID NO: 83794 - protein, 36 aa, Artificial Sequence; identical to SEQ ID NO: 32015
  Cyclic GFR-binding peptide
  MOD_RES (2)..(34)..(35): Xaa is C or S

SEQ ID NO: 83795 - protein, 32 aa, Artificial Sequence; identical to SEQ ID NO: 32016
  Cyclic GFR-binding peptide
  MOD_RES (31)..(32): Xaa is C or S

SEQ ID NO: 83796 - protein, 29 aa, Artificial Sequence
  Cyclic GFR-binding peptide
  MOD_RES (27)..(28): Xaa is C or S
NYHYKLVVNKNEDKYLISIPSMKEPVXXP

SEQ ID NO: 83797 - protein, 39 aa, Artificial Sequence; identical to SEQ ID NO: 32017
  Cyclic GFR-binding peptide
  MOD_RES (2)..(34)..(35): Xaa is C or S

SEQ ID NO: 83798 - protein, 33 aa, Artificial Sequence; identical to SEQ ID NO: 32018
  Cyclic GFR-binding peptide
  MOD_RES (31)..(32): Xaa is C or S

SEQ ID NO: 83799 - protein, 36 aa, Artificial Sequence; identical to SEQ ID NO: 32019
  Cyclic GFR-binding peptide
  MOD_RES (31)..(32): Xaa is C or S

SEQ ID NO: 83800 - protein, 33 aa, Artificial Sequence
  Cyclic GFR-binding peptide
  MOD_RES (27)..(28): Xaa is C or S
DEYKFKVVNNASDLYLISIPELRTPVXXTPPTS

SEQ ID NO: 83801 - protein, 33 aa, Artificial Sequence; identical to SEQ ID NO: 32020
  Cyclic GFR-binding peptide
  MOD_RES (32)..(33): Xaa is C or S

SEQ ID NO: 83802 - protein, 23 aa, Artificial Sequence
  Cyclic GFR-binding peptide
RHKRLYTVVGKDYYLISTASLKT

SEQ ID NO: 83803 - protein, 26 aa, Artificial Sequence
  Cyclic GFR-binding peptide
DEYKFKVVNNASDLYLISIPELRTPV

SEQ ID NO: 83804 - protein, 22 aa, Artificial Sequence
  Cyclic GFR-binding peptide
EYKFKVVNKNEDLYLISIPEMK

SEQ ID NO: 83805 - protein, 36 aa, Artificial Sequence; identical to SEQ ID NO: 32021
  Cyclic GFR-binding peptide
  MOD_RES (2)..(4)..(35)..(36): Xaa is C or S

SEQ ID NO: 83806 - protein, 25 aa, Artificial Sequence
  Cyclic GFR-binding peptide
VIMPIKGYIKPTKGIFYLINIPSLD

SEQ ID NO: 83807 - protein, 27 aa, Artificial Sequence
  Cyclic GFR-binding peptide
AEVVMDRHKRLVVNNAADYYLISTASL

SEQ ID NO: 83808 - protein, 31 aa, Artificial Sequence
  Cyclic GFR-binding peptide
  MOD_RES (28)..(29): Xaa is C or S
MNPIKGYVVNKNEDFYLINIPSMKEPVXXPE

SEQ ID NO: 83809 - protein, 27 aa, Artificial Sequence
  Cyclic GFR-binding peptide
  MOD_RES (26)..(27): Xaa is C or S
YHYKLIIQQKDNKYLMSIPSMKTPTXX

SEQ ID NO: 83810 - protein, 27 aa, Artificial Sequence
  Cyclic GFR-binding peptide
  MOD_RES (27)..(27): Xaa is C or S
GRHKRLIIQQKDNYYLMSTASMKTPTX

SEQ ID NO: 83811 - protein, 26 aa, Artificial Sequence
  Cyclic GFR-binding peptide
MPIKGYVKPTRGVFYLINIPSLDQPV

SEQ ID NO: 83812 - protein, 36 aa, Artificial Sequence; identical to SEQ ID NO: 32022
  Cyclic GFR-binding peptide
  MOD_RES (1)..(3)..(35)..(36): Xaa is C or S

SEQ ID NO: 83813 - protein, 34 aa, Artificial Sequence; identical to SEQ ID NO: 32023
  Cyclic GFR-binding peptide
  MOD_RES (2)..(33)..(34): Xaa is C or S

SEQ ID NO: 83814 - protein, 29 aa, Artificial Sequence
  Cyclic GFR-binding peptide
  MOD_RES (27)..(28): Xaa is C or S
MPIKGYVKPTRGVFYLINIPSLDQPVXXP

SEQ ID NO: 83815 - protein, 34 aa, Artificial Sequence; identical to SEQ ID NO: 32024
  Cyclic GFR-binding peptide
  MOD_RES (32)..(33): Xaa is C or S

SEQ ID NO: 83816 - protein, 34 aa, Artificial Sequence; identical to SEQ ID NO: 32025
  Cyclic GFR-binding peptide
  MOD_RES (1)..(33)..(34): Xaa is C or S

SEQ ID NO: 83817 - protein, 24 aa, Artificial Sequence
  Cyclic GFR-binding peptide
KVVMPIKGYVKPTRGVFYLINIPS

SEQ ID NO: 83818 - protein, 30 aa, Artificial Sequence
  Cyclic GFR-binding peptide
  MOD_RES (26)..(27): Xaa is C or S
RHKRLVVNNAADYYLISTASLRAPVXXSAP

SEQ ID NO: 83819 - protein, 37 aa, Artificial Sequence; identical to SEQ ID NO: 32026
  Cyclic GFR-binding peptide
  MOD_RES (31)..(32): Xaa is C or S

SEQ ID NO: 83820 - protein, 30 aa, Artificial Sequence
  Cyclic GFR-binding peptide
  MOD_RES (26)..(27): Xaa is C or S
RYKKLVVNKNEDFYLISIANMKEPVXXPEP

SEQ ID NO: 83821 - protein, 20 aa, Artificial Sequence
  Cyclic GFR-binding peptide
YHYKLVVNKNEDKYLISIPS

SEQ ID NO: 83822 - protein, 39 aa, Artificial Sequence; identical to SEQ ID NO: 32032
  Cyclic GFR-binding peptide
  MOD_RES (1)..(3)..(34)..(35): Xaa is C or S

SEQ ID NO: 83823 - protein, 27 aa, Artificial Sequence
  Cyclic GFR-binding peptide
VMGYHYKLIIQQKDNKYLMSIPSMKTP

SEQ ID NO: 83824 - protein, 28 aa, Artificial Sequence
  Cyclic GFR-binding peptide
EVIMRHKRLLLVRGNDYYLMSTASTKVP

SEQ ID NO: 83825 - protein, 33 aa, Artificial Sequence
  Cyclic GFR-binding peptide
  MOD_RES (29)..(30): Xaa is C or S
VMGEYKFKIIQQKDNLYLMSIPEMKTPTXXPGA

SEQ ID NO: 83826 - protein, 27 aa, Artificial Sequence
  Cyclic GFR-binding peptide
  MOD_RES (26)..(27): Xaa is C or S
RHKRLYTVVGKDYYLISTASLKTPVXX

SEQ ID NO: 83827 - protein, 38 aa, Artificial Sequence; identical to SEQ ID NO: 32036
  Cyclic GFR-binding peptide
  MOD_RES (1)..(33)..(34): Xaa is C or S

SEQ ID NO: 83828 - protein, 29 aa, Artificial Sequence
  Cyclic GFR-binding peptide
AEVVMDRHKRLVVNNAADYYLISTASLRA

SEQ ID NO: 83829 - protein, 29 aa, Artificial Sequence
  Cyclic GFR-binding peptide
  MOD_RES (29)..(29): Xaa is C or S
TMNEYKFKVVNKNEDLYLISIPEMKEPVX

SEQ ID NO: 83830 - protein, 32 aa, Artificial Sequence; identical to SEQ ID NO: 32037
  Cyclic GFR-binding peptide
  MOD_RES (31)..(32): Xaa is C or S

SEQ ID NO: 83831 - protein, 21 aa, Artificial Sequence
  Cyclic GFR-binding peptide
RYKKLVVNKNEDFYLISIANM

SEQ ID NO: 83832 - protein, 30 aa, Artificial Sequence
  Cyclic GFR-binding peptide
  MOD_RES (30)..(30): Xaa is C or S
VTMNRYKKLVVNKNEDFYLISIANMKEPVX

SEQ ID NO: 83833 - protein, 30 aa, Artificial Sequence
  Cyclic GFR-binding peptide
  MOD_RES (1)..(1): Xaa is C or S
XSEVTMNRYKKLVVNKNEDFYLISIANMKE

SEQ ID NO: 83834 - protein, 29 aa, Artificial Sequence
  Cyclic GFR-binding peptide
  MOD_RES (1)..(3): Xaa is C or S
XGXSEVVMDEYKFKVVNNASDLYLISIPE

SEQ ID NO: 83835 - protein, 26 aa, Artificial Sequence
  Cyclic GFR-binding peptide
MNRYKKLVVNKNEDFYLISIANMKEP

SEQ ID NO: 83836 - protein, 28 aa, Artificial Sequence
  Cyclic GFR-binding peptide
DVVMGRHKRLIIQQKDNYYLMSTASMKT

SEQ ID NO: 83837 - protein, 23 aa, Artificial Sequence
  Cyclic GFR-binding peptide
MDRHKRLVVNNAADYYLISTASL

SEQ ID NO: 83838 - protein, 24 aa, Artificial Sequence
  Cyclic GFR-binding peptide
MDEYKFKVVNNASDLYLISIPELR

SEQ ID NO: 83839 - protein, 33 aa, Artificial Sequence
  Cyclic GFR-binding peptide
  MOD_RES (2)..(4): Xaa is C or S
RXGXAEVVMDRHKRLVVNNAADYYLISTASLRA

SEQ ID NO: 83840 - protein, 25 aa, Artificial Sequence
  Cyclic GFR-binding peptide
VMGYHYKLIIQQKDNKYLMSIPSMK

SEQ ID NO: 83841 - protein, 30 aa, Artificial Sequence
  Cyclic GFR-binding peptide
  MOD_RES (26)..(27): Xaa is C or S
YHYKLVVNKNEDKYLISIPSMKEPVXXPEP

SEQ ID NO: 83842 - protein, 33 aa, Artificial Sequence
  Cyclic GFR-binding peptide
  MOD_RES (27)..(28): Xaa is C or S
NRHKRLIVNSSDDYYLVSTASLKTPAXXPKPVH

SEQ ID NO: 83843 - protein, 38 aa, Artificial Sequence; identical to SEQ ID NO: 32043
  Cyclic GFR-binding peptide
  MOD_RES (1)..(3)..(35)..(36): Xaa is C or S

SEQ ID NO: 83844 - protein, 30 aa, Artificial Sequence
  Cyclic GFR-binding peptide
  MOD_RES (27)..(28): Xaa is C or S
GYHYKLIIQQKDNKYLMSIPSMKTPTXXPG

SEQ ID NO: 83845 - protein, 33 aa, Artificial Sequence
  Cyclic GFR-binding peptide
  MOD_RES (28)..(29): Xaa is C or S
MGRHKRLIIQQKDNYYLMSTASMKTPTXXPGAS

SEQ ID NO: 83846 - protein, 32 aa, Artificial Sequence; identical to SEQ ID NO: 32047
  Cyclic GFR-binding peptide
  MOD_RES (31)..(32): Xaa is C or S

SEQ ID NO: 83847 - protein, 28 aa, Artificial Sequence
  Cyclic GFR-binding peptide
  MOD_RES (28)..(28): Xaa is C or S
IMPIKGYVKPKRGVFYLINIPSLAQPVX

SEQ ID NO: 83848 - protein, 31 aa, Artificial Sequence
  Cyclic GFR-binding peptide
  MOD_RES (29)..(30): Xaa is C or S
VMGRHKRLIIQQKDNYYLMSTASMKTPTXXP

SEQ ID NO: 83849 - protein, 37 aa, Artificial Sequence; identical to SEQ ID NO: 32054
  Cyclic GFR-binding peptide
  MOD_RES (31)..(32): Xaa is C or S

SEQ ID NO: 83850 - protein, 32 aa, Artificial Sequence
  Cyclic GFR-binding peptide
  MOD_RES (27)..(28): Xaa is C or S
MEYKFKLLVRGNDLYLMSIPETKVPAXXTSPV

SEQ ID NO: 83851 - protein, 28 aa, Artificial Sequence
  Cyclic GFR-binding peptide
VVMDRHKRLVVNNAADYYLISTASLRAP

SEQ ID NO: 83852 - protein, 22 aa, Artificial Sequence
  Cyclic GFR-binding peptide
IMPIKGYVKPKRGVFYLINIPS

SEQ ID NO: 83853 - protein, 41 aa, Artificial Sequence; identical to SEQ ID NO: 32057
  Cyclic GFR-binding peptide
  MOD_RES (2)..(4)..(36)..(37): Xaa is C or S

SEQ ID NO: 83854 - protein, 24 aa, Artificial Sequence
  Cyclic GFR-binding peptide
NRYKKLVVNKNEDFYLISIANMKE

SEQ ID NO: 83855 - protein, 31 aa, Artificial Sequence
  Cyclic GFR-binding peptide
  MOD_RES (30)..(31): Xaa is C or S
VVMGEYKFKIIQQKDNLYLMSIPEMKTPTXX

SEQ ID NO: 83856 - protein, 24 aa, Artificial Sequence
  Cyclic GFR-binding peptide
VTMNRHKRLVVNKNEDYYLISTAS

SEQ ID NO: 83857 - protein, 36 aa, Artificial Sequence; identical to SEQ ID NO: 32059
  Cyclic GFR-binding peptide
  MOD_RES (1)..(3)..(35)..(36): Xaa is C or S

SEQ ID NO: 83858 - protein, 32 aa, Artificial Sequence
  Cyclic GFR-binding peptide
  MOD_RES (26)..(27): Xaa is C or S
RHKRLIVNSSDDYYLVSTASLKTPAXXPKPVH

SEQ ID NO: 83859 - protein, 33 aa, Artificial Sequence; identical to SEQ ID NO: 32060
  Cyclic GFR-binding peptide
  MOD_RES (2)..(2): Xaa is C or S

SEQ ID NO: 83860 - protein, 34 aa, Artificial Sequence; identical to SEQ ID NO: 32061
  Cyclic GFR-binding peptide
  MOD_RES (1)..(33)..(34): Xaa is C or S

SEQ ID NO: 83861 - protein, 30 aa, Artificial Sequence
  Cyclic GFR-binding peptide
  MOD_RES (26)..(27): Xaa is C or S
RHKRLVVNKNEDYYLISTASMKEPVXXPEP

SEQ ID NO: 83862 - protein, 36 aa, Artificial Sequence; identical to SEQ ID NO: 32062
  Cyclic GFR-binding peptide
  MOD_RES (32)..(33): Xaa is C or S

SEQ ID NO: 83863 - protein, 37 aa, Artificial Sequence; identical to SEQ ID NO: 32064
  Cyclic GFR-binding peptide
  MOD_RES (1)..(3)..(35)..(36): Xaa is C or S

SEQ ID NO: 83864 - protein, 26 aa, Artificial Sequence
  Cyclic GFR-binding peptide
IMYHYKLLLVRGNDKYLMSIPSTKVP

SEQ ID NO: 83865 - protein, 23 aa, Artificial Sequence
  Cyclic GFR-binding peptide
DYHYKLVVNNASDKYLISIPSLR

SEQ ID NO: 83866 - protein, 30 aa, Artificial Sequence
  Cyclic GFR-binding peptide
  MOD_RES (2)..(2): Xaa is C or S
AXSEVTMNPIKGYVVNKNEDFYLINIPSMK

SEQ ID NO: 83867 - protein, 37 aa, Artificial Sequence; identical to SEQ ID NO: 32067
  Cyclic GFR-binding peptide
  MOD_RES (2)..(4)..(35)..(36): Xaa is C or S

SEQ ID NO: 83868 - protein, 27 aa, Artificial Sequence
  Cyclic GFR-binding peptide
  MOD_RES (27)..(27): Xaa is C or S
DEYKFKVVNNASDLYLISIPELRTPVX

SEQ ID NO: 83869 - protein, 29 aa, Artificial Sequence
  Cyclic GFR-binding peptide
EEVIMEYKFKLLVRGNDLYLMSIPETKVP

SEQ ID NO: 83870 - protein, 28 aa, Artificial Sequence
  Cyclic GFR-binding peptide
DVVMGEYKFKIIQQKDNLYLMSIPEMKT

SEQ ID NO: 83871 - protein, 30 aa, Artificial Sequence
  Cyclic GFR-binding peptide
  MOD_RES (1)..(1): Xaa is C or S
XRDVVMGYHYKLIIQQKDNKYLMSIPSMKT

SEQ ID NO: 83872 - protein, 41 aa, Artificial Sequence; identical to SEQ ID NO: 32069
  Cyclic GFR-binding peptide
  MOD_RES (2)..(4)..(36)..(37): Xaa is C or S

SEQ ID NO: 83873 - protein, 27 aa, Artificial Sequence
  Cyclic GFR-binding peptide
MGRHKRLYTVVGKDYYLISTASLKTPV

SEQ ID NO: 83874 - protein, 30 aa, Artificial Sequence
  Cyclic GFR-binding peptide
  MOD_RES (30)..(30): Xaa is C or S
KVIMPIKGYIKPTKGIFYLINIPSLDQSVX

SEQ ID NO: 83875 - protein, 26 aa, Artificial Sequence
  Cyclic GFR-binding peptide
RDVVMGEYKFKIIQQKDNLYLMSIPE

SEQ ID NO: 83876 - protein, 32 aa, Artificial Sequence
  Cyclic GFR-binding peptide
  MOD_RES (2)..(4): Xaa is C or S
SXKXSKVVMPIKGYVKPTRGVFYLINIPSLDQ

SEQ ID NO: 83877 - protein, 35 aa, Artificial Sequence
  Cyclic GFR-binding peptide
  MOD_RES (30)..(31): Xaa is C or S
VAMGRHKRLYTVVGKDYYLISTASLKTPVXXAKSA

SEQ ID NO: 83878 - protein, 34 aa, Artificial Sequence; identical to SEQ ID NO: 32070
  Cyclic GFR-binding peptide
  MOD_RES (2)..(34): Xaa is C or S

SEQ ID NO: 83879 - protein, 29 aa, Artificial Sequence
  Cyclic GFR-binding peptide
VTMNRYKKLVVNKNEDFYLISIANMKEPV

SEQ ID NO: 83880 - protein, 36 aa, Artificial Sequence
  Cyclic GFR-binding peptide
  MOD_RES (30)..(31): Xaa is C or S
VAMGRHKRLYTVVGKDYYLISTASLKTPVXXAKSAK

SEQ ID NO: 83881 - protein, 35 aa, Artificial Sequence
  Cyclic GFR-binding peptide
  MOD_RES (30)..(31): Xaa is C or S
VVMDRHKRLVVNNAADYYLISTASLRAPVXXSAPA

SEQ ID NO: 83882 - protein, 22 aa, Artificial Sequence
  Cyclic GFR-binding peptide
NRYKKLVVNKNEDFYLISIANM

SEQ ID NO: 83883 - protein, 41 aa, Artificial Sequence; identical to SEQ ID NO: 32077
  Cyclic GFR-binding peptide
  MOD_RES (1)..(3)..(35)..(36): Xaa is C or S

SEQ ID NO: 83884 - protein, 28 aa, Artificial Sequence
  Cyclic GFR-binding peptide
VVMGRHKRLIIQQKDNYYLMSTASMKTP

SEQ ID NO: 83885 - protein, 31 aa, Artificial Sequence
  Cyclic GFR-binding peptide
  MOD_RES (2)..(2): Xaa is C or S
GXEEVIMEYKFKLLVRGNDLYLMSIPETKVP

SEQ ID NO: 83886 - protein, 29 aa, Artificial Sequence
  Cyclic GFR-binding peptide
SEVTMNPIKGYVVNKNEDFYLINIPSMKE

SEQ ID NO: 83887 - protein, 37 aa, Artificial Sequence; identical to SEQ ID NO: 32080
  Cyclic GFR-binding peptide
  MOD_RES (31)..(32): Xaa is C or S

SEQ ID NO: 83888 - protein, 33 aa, Artificial Sequence; identical to SEQ ID NO: 32081
  Cyclic GFR-binding peptide
  MOD_RES (2)..(33): Xaa is C or S

SEQ ID NO: 83889 - protein, 32 aa, Artificial Sequence
  Cyclic GFR-binding peptide
  MOD_RES (27)..(28): Xaa is C or S
NRYKKLVVNKNEDFYLISIANMKEPVXXPEPI

SEQ ID NO: 83890 - protein, 29 aa, Artificial Sequence
  Cyclic GFR-binding peptide
  MOD_RES (26)..(27): Xaa is C or S
EYKFKIIQQKDNLYLMSIPEMKTPTXXPG

SEQ ID NO: 83891 - protein, 34 aa, Artificial Sequence
  Cyclic GFR-binding peptide
  MOD_RES (30)..(31): Xaa is C or S
KVVMPIKGYVKPTRGVFYLINIPSLDQPVXXPSA

SEQ ID NO: 83892 - protein, 37 aa, Artificial Sequence; identical to SEQ ID NO: 32083
  Cyclic GFR-binding peptide
  MOD_RES (1)..(32)..(33): Xaa is C or S

SEQ ID NO: 83893 - protein, 29 aa, Artificial Sequence
  Cyclic GFR-binding peptide
  MOD_RES (1)..(3): Xaa is C or S
XAXSEVTMNYHYKLVVNKNEDKYLISIPS

SEQ ID NO: 83894 - protein, 34 aa, Artificial Sequence
  Cyclic GFR-binding peptide
  MOD_RES (2)..(4): Xaa is C or S
SXGXRDVVMGRHKRLIIQQKDNYYLMSTASMKTP

SEQ ID NO: 83895 - protein, 33 aa, Artificial Sequence; identical to SEQ ID NO: 32084
  Cyclic GFR-binding peptide
  MOD_RES (32)..(33): Xaa is C or S

SEQ ID NO: 83896 - protein, 26 aa, Artificial Sequence
  Cyclic GFR-binding peptide
MEYKFKLLVRGNDLYLMSIPETKVPA

SEQ ID NO: 83897 - protein, 33 aa, Artificial Sequence; identical to SEQ ID NO: 32085
  Cyclic GFR-binding peptide
  MOD_RES (1)..(33): Xaa is C or S

SEQ ID NO: 83898 - protein, 27 aa, Artificial Sequence
  Cyclic GFR-binding peptide
VIMRHKRLLLVRGNDYYLMSTASTKVP

SEQ ID NO: 83899 - protein, 31 aa, Artificial Sequence
  Cyclic GFR-binding peptide
  MOD_RES (30)..(31): Xaa is C or S
VAMGRHKRLYTVVGKDYYLISTASLKTPVXX

SEQ ID NO: 83900 - protein, 33 aa, Artificial Sequence
  Cyclic GFR-binding peptide
  MOD_RES (27)..(28): Xaa is C or S
GRHKRLYTVVGKDYYLISTASLKTPVXXAKSAK

SEQ ID NO: 83901 - protein, 39 aa, Artificial Sequence; identical to SEQ ID NO: 32086
  Cyclic GFR-binding peptide
  MOD_RES (1)..(33)..(34): Xaa is C or S

SEQ ID NO: 83902 - protein, 31 aa, Artificial Sequence; identical to SEQ ID NO: 32087
  Cyclic GFR-binding peptide
  MOD_RES (31)..(31): Xaa is C or S

SEQ ID NO: 83903 - protein, 33 aa, Artificial Sequence
  Cyclic GFR-binding peptide
  MOD_RES (2)..(4): Xaa is C or S
RXAXSEVTMNRHKRLVVNKNEDYYLISTASMKE

SEQ ID NO: 83904 - protein, 38 aa, Artificial Sequence; identical to SEQ ID NO: 32088
  Cyclic GFR-binding peptide
  MOD_RES (32)..(33): Xaa is C or S

SEQ ID NO: 83905 - protein, 25 aa, Artificial Sequence
  Cyclic GFR-binding peptide
GEYKFKIIQQKDNLYLMSIPEMKTP

SEQ ID NO: 83906 - protein, 25 aa, Artificial Sequence
  Cyclic GFR-binding peptide
MGRHKRLIIQQKDNYYLMSTASMKT

SEQ ID NO: 83907 - protein, 20 aa, Artificial Sequence
  Cyclic GFR-binding peptide
RHKRLLLVRGNDYYLMSTAS

SEQ ID NO: 83908 - protein, 38 aa, Artificial Sequence; identical to SEQ ID NO: 32091
  Cyclic GFR-binding peptide
  MOD_RES (2)..(34)..(35): Xaa is C or S

SEQ ID NO: 83909 - protein, 21 aa, Artificial Sequence
  Cyclic GFR-binding peptide
RHKRLVVNNAADYYLISTASL

SEQ ID NO: 83910 - protein, 35 aa, Artificial Sequence
  Cyclic GFR-binding peptide
  MOD_RES (29)..(30): Xaa is C or S
VMDYHYKLVVNNASDKYLISIPSLRTPVXXTPPTS

SEQ ID NO: 83911 - protein, 37 aa, Artificial Sequence; identical to SEQ ID NO: 32094
  Cyclic GFR-binding peptide
  MOD_RES (31)..(32): Xaa is C or S

SEQ ID NO: 83912 - protein, 31 aa, Artificial Sequence
  Cyclic GFR-binding peptide
  MOD_RES (26)..(27): Xaa is C or S
PIKGYIKPTKGIFYLINIPSLDQSVXXPSAS

SEQ ID NO: 83913 - protein, 34 aa, Artificial Sequence
  Cyclic GFR-binding peptide
  MOD_RES (2)..(4): Xaa is C or S
RXAXSEVTMNYHYKLVVNKNEDKYLISIPSMKEP

SEQ ID NO: 83914 - protein, 32 aa, Artificial Sequence
  Cyclic GFR-binding peptide
  MOD_RES (2)..(2): Xaa is C or S
GXRDVVMGRHKRLIIQQKDNYYLMSTASMKTP

SEQ ID NO: 83915 - protein, 38 aa, Artificial Sequence; identical to SEQ ID NO: 32096
  Cyclic GFR-binding peptide
  MOD_RES (2)..(34)..(35): Xaa is C or S

SEQ ID NO: 83916 - protein, 30 aa, Artificial Sequence
  Cyclic GFR-binding peptide
SEVTMNRHKRLVVNKNEDYYLISTASMKEP

SEQ ID NO: 83917 - protein, 37 aa, Artificial Sequence; identical to SEQ ID NO: 32097
  Cyclic GFR-binding peptide
  MOD_RES (1)..(3)..(35)..(36): Xaa is C or S

SEQ ID NO: 83918 - protein, 23 aa, Artificial Sequence
  Cyclic GFR-binding peptide
VMDEYKFKVVNNASDLYLISIPE

SEQ ID NO: 83919 - protein, 31 aa, Artificial Sequence
  Cyclic GFR-binding peptide
  MOD_RES (2)..(2): Xaa is C or S
GXSEVVMDYHYKLVVNNASDKYLISIPSLRT

SEQ ID NO: 83920 - protein, 38 aa, Artificial Sequence; identical to SEQ ID NO: 32098
  Cyclic GFR-binding peptide
  MOD_RES (2)..(34)..(35): Xaa is C or S

SEQ ID NO: 83921 - protein, 28 aa, Artificial Sequence
  Cyclic GFR-binding peptide
  MOD_RES (1)..(3): Xaa is C or S
XKXSKVIMPIKGYIKPTKGIFYLINIPS

SEQ ID NO: 83922 - protein, 32 aa, Artificial Sequence; identical to SEQ ID NO: 32099
  Cyclic GFR-binding peptide
  MOD_RES (1)..(32): Xaa is C or S

SEQ ID NO: 83923 - protein, 20 aa, Artificial Sequence
  Cyclic GFR-binding peptide
YHYKLLLVRGNDKYLMSIPS

SEQ ID NO: 83924 - protein, 36 aa, Artificial Sequence; identical to SEQ ID NO: 32103
  Cyclic GFR-binding peptide
  MOD_RES (1)..(3)..(34)..(35): Xaa is C or S

SEQ ID NO: 83925 - protein, 28 aa, Artificial Sequence
  Cyclic GFR-binding peptide
  MOD_RES (28)..(28): Xaa is C or S
MGYHYKLIIQQKDNKYLMSIPSMKTPTX

SEQ ID NO: 83926 - protein, 26 aa, Artificial Sequence
  Cyclic GFR-binding peptide
EVVMDEYKFKVVNNASDLYLISIPEL

SEQ ID NO: 83927 - protein, 35 aa, Artificial Sequence; identical to SEQ ID NO: 32106
  Cyclic GFR-binding peptide
  MOD_RES (1)..(33)..(34): Xaa is C or S

SEQ ID NO: 83928 - protein, 33 aa, Artificial Sequence; identical to SEQ ID NO: 32107
  Cyclic GFR-binding peptide
  MOD_RES (2)..(33): Xaa is C or S

SEQ ID NO: 83929 - protein, 40 aa, Artificial Sequence; identical to SEQ ID NO: 32109
  Cyclic GFR-binding peptide
  MOD_RES (2)..(34)..(35): Xaa is C or S

SEQ ID NO: 83930 - protein, 31 aa, Artificial Sequence; identical to SEQ ID NO: 32110
  Cyclic GFR-binding peptide
  MOD_RES (31)..(31): Xaa is C or S

SEQ ID NO: 83931 - protein, 33 aa, Artificial Sequence
  Cyclic GFR-binding peptide
  MOD_RES (28)..(29): Xaa is C or S
MDYHYKLVVNNASDKYLISIPSLRTPVXXTPPT

SEQ ID NO: 83932 - protein, 30 aa, Artificial Sequence
  Cyclic GFR-binding peptide
  MOD_RES (30)..(30): Xaa is C or S
VVMDRHKRLVVNNASDYYLISTASLRTPVX

SEQ ID NO: 83933 - protein, 32 aa, Artificial Sequence
  Cyclic GFR-binding peptide
  MOD_RES (1)..(3): Xaa is C or S
XKXSKVIMPIKGYIKPTKGIFYLINIPSLDQS

SEQ ID NO: 83934 - protein, 34 aa, Artificial Sequence
  Cyclic GFR-binding peptide
  MOD_RES (30)..(31): Xaa is C or S
EVIMEYKFKLLVRGNDLYLMSIPETKVPAXXTSP

SEQ ID NO: 83935 - protein, 28 aa, Artificial Sequence
  Cyclic GFR-binding peptide
VIMPIKGYIKPTKGIFYLINIPSLDQSV

SEQ ID NO: 83936 - protein, 33 aa, Artificial Sequence
  Cyclic GFR-binding peptide
  MOD_RES (29)..(30): Xaa is C or S
VIMYHYKLLLVRGNDKYLMSIPSTKVPAXXTSP

SEQ ID NO: 83937 - protein, 31 aa, Artificial Sequence
  Cyclic GFR-binding peptide
  MOD_RES (26)..(27): Xaa is C or S
RHKRLVVNKNEDYYLISTASMKEPVXXPEPI

SEQ ID NO: 83938 - protein, 32 aa, Artificial Sequence
  Cyclic GFR-binding peptide
  MOD_RES (28)..(29): Xaa is C or S
IMEYKFKLLVRGNDLYLMSIPETKVPAXXTSP

SEQ ID NO: 83939 - protein, 27 aa, Artificial Sequence
  Cyclic GFR-binding peptide
VVMGEYKFKIIQQKDNLYLMSIPEMKT

SEQ ID NO: 83940 - protein, 30 aa, Artificial Sequence
  Cyclic GFR-binding peptide
  MOD_RES (28)..(29): Xaa is C or S
IMPIKGYVKPKRGVFYLINIPSLAQPVXXP

SEQ ID NO: 83941 - protein, 35 aa, Artificial Sequence; identical to SEQ ID NO: 32116
  Cyclic GFR-binding peptide
  MOD_RES (2)..(4): Xaa is C or S

SEQ ID NO: 83942 - protein, 30 aa, Artificial Sequence
  Cyclic GFR-binding peptide
  MOD_RES (1)..(3): Xaa is C or S
XKXSKVVMPIKGYVKPTRGVFYLINIPSLD

SEQ ID NO: 83943 - protein, 21 aa, Artificial Sequence
  Cyclic GFR-binding peptide
EYKFKVVNKNEDLYLISIPEM

SEQ ID NO: 83944 - protein, 40 aa, Artificial Sequence; identical to SEQ ID NO: 32117
  Cyclic GFR-binding peptide
  MOD_RES (2)..(4)..(35)..(36): Xaa is C or S

SEQ ID NO: 83945 - protein, 38 aa, Artificial Sequence; identical to SEQ ID NO: 32118
  Cyclic GFR-binding peptide
  MOD_RES (2)..(4)..(35)..(36): Xaa is C or S

SEQ ID NO: 83946 - protein, 28 aa, Artificial Sequence
  Cyclic GFR-binding peptide
  MOD_RES (27)..(28): Xaa is C or S
GEYKFKIIQQKDNLYLMSIPEMKTPTXX

SEQ ID NO: 83947 - protein, 35 aa, Artificial Sequence; identical to SEQ ID NO: 32121
  Cyclic GFR-binding peptide
  MOD_RES (1)..(3)..(35): Xaa is C or S

SEQ ID NO: 83948 - protein, 32 aa, Artificial Sequence; identical to SEQ ID NO: 32124
  Cyclic GFR-binding peptide
  MOD_RES (2)..(2): Xaa is C or S

SEQ ID NO: 83949 - protein, 31 aa, Artificial Sequence
  Cyclic GFR-binding peptide
  MOD_RES (27)..(28): Xaa is C or S
GRHKRLIIQQKDNYYLMSTASMKTPTXXPGA

SEQ ID NO: 83950 - protein, 21 aa, Artificial Sequence
  Cyclic GFR-binding peptide
RHKRLVVNKNEDYYLISTASM

SEQ ID NO: 83951 - protein, 21 aa, Artificial Sequence
  Cyclic GFR-binding peptide
RHKRLIIQQKDNYYLMSTASM

SEQ ID NO: 83952 - protein, 35 aa, Artificial Sequence; identical to SEQ ID NO: 32125
  Cyclic GFR-binding peptide
  MOD_RES (1)..(32)..(33): Xaa is C or S

SEQ ID NO: 83953 - protein, 33 aa, Artificial Sequence; identical to SEQ ID NO: 32127
  Cyclic GFR-binding peptide
  MOD_RES (31)..(32): Xaa is C or S

SEQ ID NO: 83954 - protein, 24 aa, Artificial Sequence
  Cyclic GFR-binding peptide
RHKRLYTVVGKDYYLISTASLKTP

SEQ ID NO: 83955 - protein, 21 aa, Artificial Sequence
  Cyclic GFR-binding peptide
MYHYKLLLVRGNDKYLMSIPS

SEQ ID NO: 83956 - protein, 28 aa, Artificial Sequence
  Cyclic GFR-binding peptide
SEVTMNRHKRLVVNKNEDYYLISTASMK

SEQ ID NO: 83957 - protein, 36 aa, Artificial Sequence; identical to SEQ ID NO: 32130
  Cyclic GFR-binding peptide
  MOD_RES (2)..(34)..(35): Xaa is C or S

SEQ ID NO: 83958 - protein, 27 aa, Artificial Sequence
  Cyclic GFR-binding peptide
VMGRHKRLIIQQKDNYYLMSTASMKTP

SEQ ID NO: 83959 - protein, 37 aa, Artificial Sequence; identical to SEQ ID NO: 32131
  Cyclic GFR-binding peptide
  MOD_RES (2)..(34)..(35): Xaa is C or S

SEQ ID NO: 83960 - protein, 28 aa, Artificial Sequence
  Cyclic GFR-binding peptide
VTMNEYKFKVVNKNEDLYLISIPEMKEP

SEQ ID NO: 83961 - protein, 39 aa, Artificial Sequence; identical to SEQ ID NO: 32134
  Cyclic GFR-binding peptide
  MOD_RES (1)..(33)..(34): Xaa is C or S

SEQ ID NO: 83962 - protein, 39 aa, Artificial Sequence; identical to SEQ ID NO: 32138
  Cyclic GFR-binding peptide
  MOD_RES (2)..(4)..(36)..(37): Xaa is C or S

SEQ ID NO: 83963 - protein, 35 aa, Artificial Sequence; identical to SEQ ID NO: 32139
  Cyclic GFR-binding peptide
  MOD_RES (1)..(32)..(33): Xaa is C or S

SEQ ID NO: 83964 - protein, 20 aa, Artificial Sequence
  Cyclic GFR-binding peptide
RHKRLVVNKNEDYYLISTAS

SEQ ID NO: 83965 - protein, 25 aa, Artificial Sequence
  Cyclic GFR-binding peptide
MNEYKFKVVNKNEDLYLISIPEMKE

SEQ ID NO: 83966 - protein, 29 aa, Artificial Sequence
  Cyclic GFR-binding peptide
  MOD_RES (28)..(29): Xaa is C or S
IMPIKGYVKPKRGVFYLINIPSLAQPVXX

SEQ ID NO: 83967 - protein, 31 aa, Artificial Sequence
  Cyclic GFR-binding peptide
  MOD_RES (26)..(27): Xaa is C or S
PIKGYVKPTRGVFYLINIPSLDQPVXXPSAS

SEQ ID NO: 83968 - protein, 40 aa, Artificial Sequence; identical to SEQ ID NO: 32142
  Cyclic GFR-binding peptide
  MOD_RES (2)..(34)..(35): Xaa is C or S

SEQ ID NO: 83969 - protein, 36 aa, Artificial Sequence; identical to SEQ ID NO: 32143
  Cyclic GFR-binding peptide
  MOD_RES (1)..(33)..(34): Xaa is C or S

SEQ ID NO: 83970 - protein, 34 aa, Artificial Sequence
  Cyclic GFR-binding peptide
  MOD_RES (28)..(29): Xaa is C or S
MNYHYKLVVNKNEDKYLISIPSMKEPVXXPEPIG

SEQ ID NO: 83971 - protein, 21 aa, Artificial Sequence
  Cyclic GFR-binding peptide
YHYKLVVNKNEDKYLISIPSM

SEQ ID NO: 83972 - protein, 23 aa, Artificial Sequence
  Cyclic GFR-binding peptide
IMYHYKLLLVRGNDKYLMSIPST

SEQ ID NO: 83973 - protein, 39 aa, Artificial Sequence; identical to SEQ ID NO: 32148
  Cyclic GFR-binding peptide
  MOD_RES (2)..(4)..(36)..(37): Xaa is C or S

SEQ ID NO: 83974 - protein, 32 aa, Artificial Sequence
  Cyclic GFR-binding peptide
  MOD_RES (28)..(29): Xaa is C or S
MDRHKRLVVNNAADYYLISTASLRAPVXXSAP

SEQ ID NO: 83975 - protein, 32 aa, Artificial Sequence
  Cyclic GFR-binding peptide
  MOD_RES (26)..(27): Xaa is C or S
PIKGYVKPTRGVFYLINIPSLDQPVXXPSASA

SEQ ID NO: 83976 - protein, 26 aa, Artificial Sequence
  Cyclic GFR-binding peptide
  MOD_RES (26)..(26): Xaa is C or S
PIKGYVVNKNEDFYLINIPSMKEPVX

SEQ ID NO: 83977 - protein, 31 aa, Artificial Sequence; identical to SEQ ID NO: 32149
  Cyclic GFR-binding peptide

SEQ ID NO: 83978 - protein, 36 aa, Artificial Sequence; identical to SEQ ID NO: 32151
  Cyclic GFR-binding peptide
  MOD_RES (2)..(34)..(35): Xaa is C or S

SEQ ID NO: 83979 - protein, 33 aa, Artificial Sequence; identical to SEQ ID NO: 32152
  Cyclic GFR-binding peptide
  MOD_RES (31)..(32): Xaa is C or S

SEQ ID NO: 83980 - protein, 38 aa, Artificial Sequence; identical to SEQ ID NO: 32150
  Cyclic GFR-binding peptide
  MOD_RES (1)..(3)..(34)..(35): Xaa is C or S

SEQ ID NO: 83981 - protein, 25 aa, Artificial Sequence
  Cyclic GFR-binding peptide
RHKRLVVNNAADYYLISTASLRAPV

SEQ ID NO: 83982 - protein, 29 aa, Artificial Sequence
  Cyclic GFR-binding peptide
  MOD_RES (1)..(1): Xaa is C or S
XRDVVMGEYKFKIIQQKDNLYLMSIPEMK

SEQ ID NO: 83983 - protein, 29 aa, Artificial Sequence
  Cyclic GFR-binding peptide
KVIMPIKGYIKPTKGIFYLINIPSLDQSV

SEQ ID NO: 83984 - protein, 26 aa, Artificial Sequence
  Cyclic GFR-binding peptide
EVIMEYKFKLLVRGNDLYLMSIPETK

SEQ ID NO: 83985 - protein, 28 aa, Artificial Sequence
  Cyclic GFR-binding peptide
EVIMYHYKLLLVRGNDKYLMSIPSTKVP

SEQ ID NO: 83986 - protein, 35 aa, Artificial Sequence; identical to SEQ ID NO: 32153
  Cyclic GFR-binding peptide
  MOD_RES (2)..(4): Xaa is C or S

SEQ ID NO: 83987 - protein, 40 aa, Artificial Sequence; identical to SEQ ID NO: 32157
  Cyclic GFR-binding peptide
  MOD_RES (2)..(34)..(35): Xaa is C or S

SEQ ID NO: 83988 - protein, 35 aa, Artificial Sequence; identical to SEQ ID NO: 21184
  Cyclic GFR-binding peptide
  MOD_RES (2)..(4): Xaa is C or S

SEQ ID NO: 83989 - protein, 32 aa, Artificial Sequence
  Cyclic GFR-binding peptide
  MOD_RES (26)..(27): Xaa is C or S
YHYKLIVNSSDDKYLVSIPSLKTPAXXPKPVH

SEQ ID NO: 83990 - protein, 26 aa, Artificial Sequence
  Cyclic GFR-binding peptide
SKVVMPIKGYVKPTRGVFYLINIPSL

SEQ ID NO: 83991 - protein, 25 aa, Artificial Sequence
  Cyclic GFR-binding peptide
VVMPIKGYVKPTRGVFYLINIPSLD

SEQ ID NO: 83992 - protein, 37 aa, Artificial Sequence; identical to SEQ ID NO: 32159
  Cyclic GFR-binding peptide
  MOD_RES (2)..(4)..(35)..(36): Xaa is C or S

SEQ ID NO: 83993 - protein, 37 aa, Artificial Sequence; identical to SEQ ID NO: 32160
  Cyclic GFR-binding peptide
  MOD_RES (1)..(32)..(33): Xaa is C or S

SEQ ID NO: 83994 - protein, 32 aa, Artificial Sequence
  Cyclic GFR-binding peptide
  MOD_RES (1)..(3): Xaa is C or S
XAXSEVTMNRHKRLVVNKNEDYYLISTASMKE

SEQ ID NO: 83995 - protein, 33 aa, Artificial Sequence; identical to SEQ ID NO: 32161
  Cyclic GFR-binding peptide
  MOD_RES (1)..(32)..(33): Xaa is C or S

SEQ ID NO: 83996 - protein, 23 aa, Artificial Sequence
  Cyclic GFR-binding peptide
NYHYKLVVNKNEDKYLISIPSMK

SEQ ID NO: 83997 - protein, 28 aa, Artificial Sequence
  Cyclic GFR-binding peptide
TMNRYKKLVVNKNEDFYLISIANMKEPV

SEQ ID NO: 83998 - protein, 26 aa, Artificial Sequence
  Cyclic GFR-binding peptide
EVVMDRHKRLVVNNASDYYLISTASL

SEQ ID NO: 83999 - protein, 33 aa, Artificial Sequence; identical to SEQ ID NO: 32162
  Cyclic GFR-binding peptide
  MOD_RES (1)..(3): Xaa is C or S

SEQ ID NO: 84000 - protein, 28 aa, Artificial Sequence
  Cyclic GFR-binding peptide
  MOD_RES (28)..(28): Xaa is C or S
IMYHYKLLLVRGNDKYLMSIPSTKVPAX

SEQ ID NO: 84001 - protein, 32 aa, Artificial Sequence; identical to SEQ ID NO: 32164
  Cyclic GFR-binding peptide
  MOD_RES (31)..(32): Xaa is C or S

SEQ ID NO: 84002 - protein, 34 aa, Artificial Sequence; identical to SEQ ID NO: 32163
  Cyclic GFR-binding peptide
  MOD_RES (1)..(3): Xaa is C or S

SEQ ID NO: 84003 - protein, 26 aa, Artificial Sequence
  Cyclic GFR-binding peptide
VMPIKGYVKPTRGVFYLINIPSLDQP

SEQ ID NO: 84004 - protein, 27 aa, Artificial Sequence
  Cyclic GFR-binding peptide
MGYHYKLIIQQKDNKYLMSIPSMKTPT

SEQ ID NO: 84005 - protein, 29 aa, Artificial Sequence
  Cyclic GFR-binding peptide
  MOD_RES (2)..(2): Xaa is C or S
GXSEVVMDYHYKLVVNNASDKYLISIPSL

SEQ ID NO: 84006 - protein, 34 aa, Artificial Sequence
  Cyclic GFR-binding peptide
  MOD_RES (30)..(31): Xaa is C or S
VVMGEYKFKIIQQKDNLYLMSIPEMKTPTXXPGA

SEQ ID NO: 84007 - protein, 23 aa, Artificial Sequence
  Cyclic GFR-binding peptide
TMNRHKRLVVNKNEDYYLISTAS

SEQ ID NO: 84008 - protein, 35 aa, Artificial Sequence
  Cyclic GFR-binding peptide
  MOD_RES (29)..(30): Xaa is C or S
TMNPIKGYVVNKNEDFYLINIPSMKEPVXXPEPIG

SEQ ID NO: 84009 - protein, 23 aa, Artificial Sequence
  Cyclic GFR-binding peptide
MNEYKFKVVNKNEDLYLISIPEM

SEQ ID NO: 84010 - protein, 38 aa, Artificial Sequence; identical to SEQ ID NO: 32169
  Cyclic GFR-binding peptide
  MOD_RES (2)..(34)..(35): Xaa is C or S

SEQ ID NO: 84011 - protein, 27 aa, Artificial Sequence
  Cyclic GFR-binding peptide
  MOD_RES (26)..(27): Xaa is C or S
RHKRLIIQQKDNYYLMSTASMKTPTXX

SEQ ID NO: 84012 - protein, 30 aa, Artificial Sequence
  Cyclic GFR-binding peptide
  MOD_RES (27)..(28): Xaa is C or S
NYHYKLVVNKNEDKYLISIPSMKEPVXXPE

SEQ ID NO: 84013 - protein, 28 aa, Artificial Sequence
  Cyclic GFR-binding peptide
EVTMNPIKGYVVNKNEDFYLINIPSMKE

SEQ ID NO: 84014 - protein, 34 aa, Artificial Sequence
  Cyclic GFR-binding peptide
  MOD_RES (29)..(30): Xaa is C or S
VIMPIKGYVKPKRGVFYLINIPSLAQPVXXPAAS

SEQ ID NO: 84015 - protein, 26 aa, Artificial Sequence
  Cyclic GFR-binding peptide
MNRHKRLVVNKNEDYYLISTASMKEP

SEQ ID NO: 84016 - protein, 32 aa, Artificial Sequence; identical to SEQ ID NO: 32173
  Cyclic GFR-binding peptide
  MOD_RES (1)..(1): Xaa is C or S

SEQ ID NO: 84017 - protein, 29 aa, Artificial Sequence
  Cyclic GFR-binding peptide
  MOD_RES (1)..(1): Xaa is C or S
XSEVVMDEYKFKVVNNASDLYLISIPELR

SEQ ID NO: 84018 - protein, 31 aa, Artificial Sequence
  Cyclic GFR-binding peptide
  MOD_RES (27)..(28): Xaa is C or S
DRHKRLVVNNAADYYLISTASLRAPVXXSAP

SEQ ID NO: 84019 - protein, 34 aa, Artificial Sequence
  Cyclic GFR-binding peptide
  MOD_RES (28)..(29): Xaa is C or S
MNEYKFKIVNSSDDLYLVSIPELKTPAXXPKPVH

SEQ ID NO: 84020 - protein, 33 aa, Artificial Sequence; identical to SEQ ID NO: 32174
  Cyclic GFR-binding peptide
  MOD_RES (32)..(33): Xaa is C or S

SEQ ID NO: 84021 - protein, 23 aa, Artificial Sequence
  Cyclic GFR-binding peptide
PIKGYVKPTRGVFYLINIPSLDQ

SEQ ID NO: 84022 - protein, 32 aa, Artificial Sequence; identical to SEQ ID NO: 32175
  Cyclic GFR-binding peptide
  MOD_RES (1)..(32): Xaa is C or S

SEQ ID NO: 84023 - protein, 26 aa, Artificial Sequence
  Cyclic GFR-binding peptide
  MOD_RES (1)..(1): Xaa is C or S
XEEVIMRHKRLLLVRGNDYYLMSTAS

SEQ ID NO: 84024 - protein, 22 aa, Artificial Sequence
  Cyclic GFR-binding peptide
MGRHKRLYTVVGKDYYLISTAS

SEQ ID NO: 84025 - protein, 31 aa, Artificial Sequence
  Cyclic GFR-binding peptide
  MOD_RES (2)..(2): Xaa is C or S
GXEEVIMRHKRLLLVRGNDYYLMSTASTKVP

SEQ ID NO: 84026 - protein, 31 aa, Artificial Sequence
  Cyclic GFR-binding peptide
  MOD_RES (30)..(31): Xaa is C or S
VTMNRHKRLVVNKNEDYYLISTASMKEPVXX

SEQ ID NO: 84027 - protein, 37 aa, Artificial Sequence; identical to SEQ ID NO: 32179
  Cyclic GFR-binding peptide
  MOD_RES (2)..(4)..(36)..(37): Xaa is C or S

SEQ ID NO: 84028 - protein, 27 aa, Artificial Sequence
  Cyclic GFR-binding peptide
AMGRHKRLYTVVGKDYYLISTASLKTP

SEQ ID NO: 84029 - protein, 36 aa, Artificial Sequence; identical to SEQ ID NO: 32180
  Cyclic GFR-binding peptide
  MOD_RES (2)..(33)..(34): Xaa is C or S

SEQ ID NO: 84030 - protein, 27 aa, Artificial Sequence
  Cyclic GFR-binding peptide
VIMPIKGYVKPKRGVFYLINIPSLAQP

SEQ ID NO: 84031 - protein, 26 aa, Artificial Sequence
  Cyclic GFR-binding peptide
EVIMYHYKLLLVRGNDKYLMSIPSTK

SEQ ID NO: 84032 - protein, 30 aa, Artificial Sequence
  Cyclic GFR-binding peptide
  MOD_RES (1)..(3): Xaa is C or S
XGXSEVVMDRHKRLVVNNASDYYLISTASL

SEQ ID NO: 84033 - protein, 29 aa, Artificial Sequence
  Cyclic GFR-binding peptide
  MOD_RES (28)..(29): Xaa is C or S
MGYHYKLIIQQKDNKYLMSIPSMKTPTXX

SEQ ID NO: 84034 - protein, 31 aa, Artificial Sequence
  Cyclic GFR-binding peptide
  MOD_RES (26)..(27): Xaa is C or S
YHYKLVVNKNEDKYLISIPSMKEPVXXPEPI

SEQ ID NO: 84035 - protein, 34 aa, Artificial Sequence; identical to SEQ ID NO: 32182
  Cyclic GFR-binding peptide
  MOD_RES (32)..(33): Xaa is C or S

SEQ ID NO: 84036 - protein, 29 aa, Artificial Sequence
  Cyclic GFR-binding peptide
  MOD_RES (1)..(1): Xaa is C or S
XSKVIMPIKGYIKPTKGIFYLINIPSLDQ

SEQ ID NO: 84037 - protein, 31 aa, Artificial Sequence
  Cyclic GFR-binding peptide
  MOD_RES (28)..(29): Xaa is C or S
MGYHYKLIIQQKDNKYLMSIPSMKTPTXXPG

SEQ ID NO: 84038 - protein, 22 aa, Artificial Sequence
  Cyclic GFR-binding peptide
MEYKFKLLVRGNDLYLMSIPET

SEQ ID NO: 84039 - protein, 28 aa, Artificial Sequence
  Cyclic GFR-binding peptide
DVVMGYHYKLIIQQKDNKYLMSIPSMKT

SEQ ID NO: 84040 - protein, 29 aa, Artificial Sequence
  Cyclic GFR-binding peptide
  MOD_RES (27)..(28): Xaa is C or S
GRHKRLIIQQKDNYYLMSTASMKTPTXXP

SEQ ID NO: 84041 - protein, 39 aa, Artificial Sequence; identical to SEQ ID NO: 32186
  Cyclic GFR-binding peptide
  MOD_RES (1)..(3)..(35)..(36): Xaa is C or S

SEQ ID NO: 84042 - protein, 38 aa, Artificial Sequence; identical to SEQ ID NO: 32187
  Cyclic GFR-binding peptide
  MOD_RES (32)..(33): Xaa is C or S

SEQ ID NO: 84043 - protein, 30 aa, Artificial Sequence
  Cyclic GFR-binding peptide
  MOD_RES (30)..(30): Xaa is C or S
VTMNYHYKLVVNKNEDKYLISIPSMKEPVX

SEQ ID NO: 84044 - protein, 35 aa, Artificial Sequence; identical to SEQ ID NO: 32190
  Cyclic GFR-binding peptide
  MOD_RES (32)..(33): Xaa is C or S

SEQ ID NO: 84045 - protein, 24 aa, Artificial Sequence
  Cyclic GFR-binding peptide
MGYHYKLIIQQKDNKYLMSIPSMK

SEQ ID NO: 84046 - protein, 24 aa, Artificial Sequence
  Cyclic GFR-binding peptide
VVMPIKGYVKPTRGVFYLINIPSL

SEQ ID NO: 84047 - protein, 29 aa, Artificial Sequence
  Cyclic GFR-binding peptide
VVMDRHKRLVVNNASDYYLISTASLRTPV

SEQ ID NO: 84048 - protein, 33 aa, Artificial Sequence
  Cyclic GFR-binding peptide
  MOD_RES (1)..(3): Xaa is C or S
XGXSEVVMDRHKRLVVNNASDYYLISTASLRTP

SEQ ID NO: 84049 - protein, 25 aa, Artificial Sequence
  Cyclic GFR-binding peptide
VMDRHKRLVVNNAADYYLISTASLR

SEQ ID NO: 84050 - protein, 34 aa, Artificial Sequence
  Cyclic GFR-binding peptide
  MOD_RES (30)..(31): Xaa is C or S
VVMGYHYKLIIQQKDNKYLMSIPSMKTPTXXPGA

SEQ ID NO: 84051 - protein, 41 aa, Artificial Sequence; identical to SEQ ID NO: 32193
  Cyclic GFR-binding peptide
  MOD_RES (1)..(3)..(35)..(36): Xaa is C or S

SEQ ID NO: 84052 - protein, 28 aa, Artificial Sequence
  Cyclic GFR-binding peptide
VMGEYKFKIIQQKDNLYLMSIPEMKTPT

SEQ ID NO: 84053 - protein, 24 aa, Artificial Sequence
  Cyclic GFR-binding peptide
NRHKRLVVNKNEDYYLISTASMKE

SEQ ID NO: 84054 - protein, 27 aa, Artificial Sequence
  Cyclic GFR-binding peptide
  MOD_RES (1)..(1): Xaa is C or S
XEEVIMRHKRLLLVRGNDYYLMSTAST

SEQ ID NO: 84055 - protein, 24 aa, Artificial Sequence
  Cyclic GFR-binding peptide
RYKKLVVNKNEDFYLISIANMKEP

SEQ ID NO: 84056 - protein, 27 aa, Artificial Sequence
  Cyclic GFR-binding peptide
MDRHKRLVVNNASDYYLISTASLRTPV

SEQ ID NO: 84057 - protein, 34 aa, Artificial Sequence; identical to SEQ ID NO: 32196
  Cyclic GFR-binding peptide
  MOD_RES (1)..(3): Xaa is C or S

SEQ ID NO: 84058 - protein, 31 aa, Artificial Sequence
  Cyclic GFR-binding peptide
  MOD_RES (1)..(1): Xaa is C or S
XSEVTMNRYKKLVVNKNEDFYLISIANMKEP

SEQ ID NO: 84059 - protein, 35 aa, Artificial Sequence; identical to SEQ ID NO: 32198
  Cyclic GFR-binding peptide
  MOD_RES (32)..(33): Xaa is C or S

SEQ ID NO: 84060 - protein, 38 aa, Artificial Sequence; identical to SEQ ID NO: 32199
  Cyclic GFR-binding peptide
  MOD_RES (2)..(33)..(34): Xaa is C or S

SEQ ID NO: 84061 - protein, 23 aa, Artificial Sequence
  Cyclic GFR-binding peptide
VIMYHYKLLLVRGNDKYLMSIPS

SEQ ID NO: 84062 - protein, 33 aa, Artificial Sequence
  Cyclic GFR-binding peptide
  MOD_RES (27)..(28): Xaa is C or S
NRYKKLVVNKNEDFYLISIANMKEPVXXPEPIG

SEQ ID NO: 84063 - protein, 34 aa, Artificial Sequence; identical to SEQ ID NO: 32200
  Cyclic GFR-binding peptide
  MOD_RES (32)..(33): Xaa is C or S

SEQ ID NO: 84064 - protein, 35 aa, Artificial Sequence; identical to SEQ ID NO: 32203
  Cyclic GFR-binding peptide
  MOD_RES (1)..(3)..(34)..(35): Xaa is C or S

SEQ ID NO: 84065 - protein, 31 aa, Artificial Sequence
  Cyclic GFR-binding peptide
  MOD_RES (29)..(30): Xaa is C or S
VIMPIKGYIKPTKGIFYLINIPSLDQSVXXP

SEQ ID NO: 84066 - protein, 21 aa, Artificial Sequence
  Cyclic GFR-binding peptide
YHYKLIIQQKDNKYLMSIPSM

SEQ ID NO: 84067 - protein, 33 aa, Artificial Sequence
  Cyclic GFR-binding peptide
  MOD_RES (28)..(29): Xaa is C or S
MGRHKRLYTVVGKDYYLISTASLKTPVXXAKSA

SEQ ID NO: 84068 - protein, 27 aa, Artificial Sequence
  Cyclic GFR-binding peptide
  MOD_RES (1)..(1): Xaa is C or S
XEEVIMYHYKLLLVRGNDKYLMSIPST

SEQ ID NO: 84069 - protein, 26 aa, Artificial Sequence
  Cyclic GFR-binding peptide
VMDRHKRLVVNNASDYYLISTASLRT

SEQ ID NO: 84070 - protein, 37 aa, Artificial Sequence; identical to SEQ ID NO: 32207
  Cyclic GFR-binding peptide
  MOD_RES (1)..(3)..(34)..(35): Xaa is C or S

SEQ ID NO: 84071 - protein, 35 aa, Artificial Sequence; identical to SEQ ID NO: 32209
  Cyclic GFR-binding peptide
  MOD_RES (2)..(4): Xaa is C or S

SEQ ID NO: 84072 - protein, 33 aa, Artificial Sequence
  Cyclic GFR-binding peptide
  MOD_RES (30)..(31): Xaa is C or S
EVIMEYKFKLLVRGNDLYLMSIPETKVPAXXTS

SEQ ID NO: 84073 - protein, 34 aa, Artificial Sequence
  Cyclic GFR-binding peptide
  MOD_RES (30)..(31): Xaa is C or S
RVIMPIKGYVKPKRGVFYLINIPSLAQPVXXPAA

SEQ ID NO: 84074 - protein, 30 aa, Artificial Sequence
  Cyclic GFR-binding peptide
  MOD_RES (28)..(29): Xaa is C or S
IMRHKRLLLVRGNDYYLMSTASTKVPAXXT

SEQ ID NO: 84075 - protein, 36 aa, Artificial Sequence
  Cyclic GFR-binding peptide
  MOD_RES (30)..(31): Xaa is C or S
VVMGRHKRLIIQQKDNYYLMSTASMKTPTXXPGASG

SEQ ID NO: 84076 - protein, 31 aa, Artificial Sequence
  Cyclic GFR-binding peptide
  MOD_RES (27)..(28): Xaa is C or S
DYHYKLVVNNASDKYLISIPSLRTPVXXTPP

SEQ ID NO: 84077 - protein, 39 aa, Artificial Sequence; identical to SEQ ID NO: 32214
  Cyclic GFR-binding peptide
  MOD_RES (1)..(33)..(34): Xaa is C or S

SEQ ID NO: 84078 - protein, 32 aa, Artificial Sequence
  Cyclic GFR-binding peptide
  MOD_RES (29)..(30): Xaa is C or S
VMDEYKFKVVNNASDLYLISIPELRTPVXXTP

SEQ ID NO: 84079 - protein, 26 aa, Artificial Sequence
  Cyclic GFR-binding peptide
VVMDRHKRLVVNNASDYYLISTASLR

SEQ ID NO: 84080 - protein, 24 aa, Artificial Sequence
  Cyclic GFR-binding peptide
TMNPIKGYVVNKNEDFYLINIPSM

SEQ ID NO: 84081 - protein, 32 aa, Artificial Sequence
  Cyclic GFR-binding peptide
  MOD_RES (26)..(27): Xaa is C or S
EYKFKVVNNASDLYLISIPELRTPVXXTPPTS

SEQ ID NO: 84082 - protein, 22 aa, Artificial Sequence
  Cyclic GFR-binding peptide
MNPIKGYVVNKNEDFYLINIPS

SEQ ID NO: 84083 - protein, 26 aa, Artificial Sequence
  Cyclic GFR-binding peptide
VMDYHYKLVVNNASDKYLISIPSLRT

SEQ ID NO: 84084 - protein, 35 aa, Artificial Sequence; identical to SEQ ID NO: 32217
  Cyclic GFR-binding peptide
  MOD_RES (31)..(32): Xaa is C or S

SEQ ID NO: 84085 - protein, 20 aa, Artificial Sequence
  Cyclic GFR-binding peptide
RHKRLYTVVGKDYYLISTAS

SEQ ID NO: 84086 - protein, 23 aa, Artificial Sequence
  Cyclic GFR-binding peptide
MGYHYKLIIQQKDNKYLMSIPSM

SEQ ID NO: 84087 - protein, 34 aa, Artificial Sequence
  Cyclic GFR-binding peptide
  MOD_RES (30)..(31): Xaa is C or S
EVIMYHYKLLLVRGNDKYLMSIPSTKVPAXXTSP

SEQ ID NO: 84088 - protein, 29 aa, Artificial Sequence
  Cyclic GFR-binding peptide
  MOD_RES (26)..(27): Xaa is C or S
RHKRLVVNKNEDYYLISTASMKEPVXXPE

SEQ ID NO: 84089 - protein, 29 aa, Artificial Sequence
  Cyclic GFR-binding peptide
VTMNYHYKLVVNKNEDKYLISIPSMKEPV

SEQ ID NO: 84090 - protein, 25 aa, Artificial Sequence
  Cyclic GFR-binding peptide
IMRHKRLLLVRGNDYYLMSTASTKV

SEQ ID NO: 84091 - protein, 22 aa, Artificial Sequence
  Cyclic GFR-binding peptide
MDRHKRLVVNNAADYYLISTAS

SEQ ID NO: 84092 - protein, 31 aa, Artificial Sequence; identical to SEQ ID NO: 32220
  Cyclic GFR-binding peptide

SEQ ID NO: 84093 - protein, 34 aa, Artificial Sequence; identical to SEQ ID NO: 32221
  Cyclic GFR-binding peptide
  MOD_RES (31)..(32): Xaa is C or S

SEQ ID NO: 84094 - protein, 23 aa, Artificial Sequence
  Cyclic GFR-binding peptide
RHKRLVVNNASDYYLISTASLRT

SEQ ID NO: 84095 - protein, 31 aa, Artificial Sequence
  Cyclic GFR-binding peptide
  MOD_RES (27)..(28): Xaa is C or S
MYHYKLLLVRGNDKYLMSIPSTKVPAXXTSP

SEQ ID NO: 84096 - protein, 38 aa, Artificial Sequence; identical to SEQ ID NO: 32225
  Cyclic GFR-binding peptide
  MOD_RES (1)..(3)..(35)..(36): Xaa is C or S

SEQ ID NO: 84097 - protein, 42 aa, Artificial Sequence; identical to SEQ ID NO: 32229
  Cyclic GFR-binding peptide
  MOD_RES (2)..(4)..(36)..(37): Xaa is C or S

SEQ ID NO: 84098 - protein, 26 aa, Artificial Sequence
  Cyclic GFR-binding peptide
  MOD_RES (26)..(26): Xaa is C or S
RHKRLIIQQKDNYYLMSTASMKTPTX

SEQ ID NO: 84099 - protein, 33 aa, Artificial Sequence; identical to SEQ ID NO: 32233
  Cyclic GFR-binding peptide
  MOD_RES (32)..(33): Xaa is C or S

SEQ ID NO: 84100 - protein, 26 aa, Artificial Sequence
  Cyclic GFR-binding peptide
IMPIKGYIKPTKGIFYLINIPSLDQS

SEQ ID NO: 84101 - protein, 29 aa, Artificial Sequence
  Cyclic GFR-binding peptide
  MOD_RES (26)..(27): Xaa is C or S
RYKKLVVNKNEDFYLISIANMKEPVXXPE

SEQ ID NO: 84102 - protein, 27 aa, Artificial Sequence
  Cyclic GFR-binding peptide
  MOD_RES (26)..(27): Xaa is C or S
PIKGYVVNKNEDFYLINIPSMKEPVXX

SEQ ID NO: 84103 - protein, 30 aa, Artificial Sequence
  Cyclic GFR-binding peptide
  MOD_RES (2)..(4): Xaa is C or S
SXKXSKVVMPIKGYVKPTRGVFYLINIPSL

SEQ ID NO: 84104 - protein, 30 aa, Artificial Sequence
  Cyclic GFR-binding peptide
  MOD_RES (28)..(29): Xaa is C or S
MDEYKFKVVNNASDLYLISIPELRTPVXXT

SEQ ID NO: 84105 - protein, 30 aa, Artificial Sequence
  Cyclic GFR-binding peptide
ESVAMGRHKRLYTVVGKDYYLISTASLKTP

SEQ ID NO: 84106 - protein, 38 aa, Artificial Sequence; identical to SEQ ID NO: 32238
  Cyclic GFR-binding peptide
  MOD_RES (32)..(33): Xaa is C or S

SEQ ID NO: 84107 - protein, 21 aa, Artificial Sequence
  Cyclic GFR-binding peptide
DYHYKLVVNNASDKYLISIPS

SEQ ID NO: 84108 - protein, 41 aa, Artificial Sequence; identical to SEQ ID NO: 32241
  Cyclic GFR-binding peptide
  MOD_RES (1)..(3)..(35)..(36): Xaa is C or S

SEQ ID NO: 84109 - protein, 24 aa, Artificial Sequence
  Cyclic GFR-binding peptide
VMGEYKFKIIQQKDNLYLMSIPEM

SEQ ID NO: 84110 - protein, 35 aa, Artificial Sequence; identical to SEQ ID NO: 32242
  Cyclic GFR-binding peptide
  MOD_RES (31)..(32): Xaa is C or S

SEQ ID NO: 84111 - protein, 29 aa, Artificial Sequence
  Cyclic GFR-binding peptide
  MOD_RES (26)..(27): Xaa is C or S
RHKRLVVNNAADYYLISTASLRAPVXXSA

SEQ ID NO: 84112 - protein, 39 aa, Artificial Sequence; identical to SEQ ID NO: 32243
  Cyclic GFR-binding peptide
  MOD_RES (1)..(3)..(35)..(36): Xaa is C or S

SEQ ID NO: 84113 - protein, 27 aa, Artificial Sequence
  Cyclic GFR-binding peptide
SEVTMNRHKRLVVNKNEDYYLISTASM

SEQ ID NO: 84114 - protein, 38 aa, Artificial Sequence; identical to SEQ ID NO: 32244
  Cyclic GFR-binding peptide
  MOD_RES (1)..(33)..(34): Xaa is C or S

SEQ ID NO: 84115 - protein, 26 aa, Artificial Sequence
  Cyclic GFR-binding peptide
VIMEYKFKLLVRGNDLYLMSIPETKV

SEQ ID NO: 84116 - protein, 32 aa, Artificial Sequence
  Cyclic GFR-binding peptide
  MOD_RES (1)..(3): Xaa is C or S
XGXESVAMGRHKRLYTVVGKDYYLISTASLKT

SEQ ID NO: 84117 - protein, 30 aa, Artificial Sequence
  Cyclic GFR-binding peptide
  MOD_RES (2)..(4): Xaa is C or S
LXGXEEVIMRHKRLLLVRGNDYYLMSTAST

SEQ ID NO: 84118 - protein, 30 aa, Artificial Sequence
  Cyclic GFR-binding peptide
  MOD_RES (2)..(2): Xaa is C or S
GXRDVVMGEYKFKIIQQKDNLYLMSIPEMK

SEQ ID NO: 84119 - protein, 34 aa, Artificial Sequence; identical to SEQ ID NO: 32247
  Cyclic GFR-binding peptide
  MOD_RES (2)..(33)..(34): Xaa is C or S

SEQ ID NO: 84120 - protein, 33 aa, Artificial Sequence
  Cyclic GFR-binding peptide
  MOD_RES (29)..(30): Xaa is C or S
VIMPIKGYIKPTKGIFYLINIPSLDQSVXXPSA

SEQ ID NO: 84121 - protein, 29 aa, Artificial Sequence
  Cyclic GFR-binding peptide
EEVIMYHYKLLLVRGNDKYLMSIPSTKVP

SEQ ID NO: 84122 - protein, 22 aa, Artificial Sequence
  Cyclic GFR-binding peptide
MPIKGYVKPTRGVFYLINIPSL

SEQ ID NO: 84123 - protein, 38 aa, Artificial Sequence; identical to SEQ ID NO: 32249
  Cyclic GFR-binding peptide
  MOD_RES (2)..(4)..(36)..(37): Xaa is C or S

SEQ ID NO: 84124 - protein, 32 aa, Artificial Sequence; identical to SEQ ID NO: 32250
  Cyclic GFR-binding peptide
  MOD_RES (32)..(32): Xaa is C or S

SEQ ID NO: 84125 - protein, 29 aa, Artificial Sequence
  Cyclic GFR-binding peptide
  MOD_RES (2)..(2): Xaa is C or S
GXRDVVMGYHYKLIIQQKDNKYLMSIPSM

SEQ ID NO: 84126 - protein, 34 aa, Artificial Sequence; identical to SEQ ID NO: 32252
  Cyclic GFR-binding peptide
  MOD_RES (1)..(3)..(34): Xaa is C or S

SEQ ID NO: 84127 - protein, 37 aa, Artificial Sequence; identical to SEQ ID NO: 32253
  Cyclic GFR-binding peptide
  MOD_RES (1)..(32)..(33): Xaa is C or S

SEQ ID NO: 84128 - protein, 37 aa, Artificial Sequence; identical to SEQ ID NO: 32255
  Cyclic GFR-binding peptide
  MOD_RES (1)..(3)..(35)..(36): Xaa is C or S

SEQ ID NO: 84129 - protein, 25 aa, Artificial Sequence
  Cyclic GFR-binding peptide
TMNEYKFKVVNKNEDLYLISIPEMK

SEQ ID NO: 84130 - protein, 26 aa, Artificial Sequence
  Cyclic GFR-binding peptide
MGRHKRLIIQQKDNYYLMSTASMKTP

SEQ ID NO: 84131 - protein, 29 aa, Artificial Sequence
  Cyclic GFR-binding peptide
  MOD_RES (1)..(1): Xaa is C or S
XSEVTMNRHKRLVVNKNEDYYLISTASMK

SEQ ID NO: 84132 - protein, 21 aa, Artificial Sequence
  Cyclic GFR-binding peptide
RHKRLVVNNASDYYLISTASL

SEQ ID NO: 84133 - protein, 29 aa, Artificial Sequence
  Cyclic GFR-binding peptide
  MOD_RES (2)..(4): Xaa is C or S
SXKXSKVIMPIKGYIKPTKGIFYLINIPS

SEQ ID NO: 84134 - protein, 35 aa, Artificial Sequence; identical to SEQ ID NO: 32258
  Cyclic GFR-binding peptide
  MOD_RES (1)..(33)..(34): Xaa is C or S

SEQ ID NO: 84135 - protein, 33 aa, Artificial Sequence
  Cyclic GFR-binding peptide
  MOD_RES (1)..(3): Xaa is C or S
XGXRDVVMGRHKRLIIQQKDNYYLMSTASMKTP

SEQ ID NO: 84136 - protein, 29 aa, Artificial Sequence
  Cyclic GFR-binding peptide
  MOD_RES (29)..(29): Xaa is C or S
VIMPIKGYVKPKRGVFYLINIPSLAQPVX

SEQ ID NO: 84137 - protein, 38 aa, Artificial Sequence; identical to SEQ ID NO: 32260
  Cyclic GFR-binding peptide
  MOD_RES (2)..(33)..(34): Xaa is C or S

SEQ ID NO: 84138 - protein, 25 aa, Artificial Sequence
  Cyclic GFR-binding peptide
VTMNRHKRLVVNKNEDYYLISTASM

SEQ ID NO: 84139 - protein, 39 aa, Artificial Sequence; identical to SEQ ID NO: 32261
  Cyclic GFR-binding peptide
  MOD_RES (2)..(4)..(35)..(36): Xaa is C or S

SEQ ID NO: 84140 - protein, 26 aa, Artificial Sequence
  Cyclic GFR-binding peptide
DRHKRLVVNNAADYYLISTASLRAPV

SEQ ID NO: 84141 - protein, 27 aa, Artificial Sequence
  Cyclic GFR-binding peptide
  MOD_RES (26)..(27): Xaa is C or S
YHYKLVVNKNEDKYLISIPSMKEPVXX

SEQ ID NO: 84142 - protein, 29 aa, Artificial Sequence
  Cyclic GFR-binding peptide
  MOD_RES (26)..(27): Xaa is C or S
PIKGYVKPKRGVFYLINIPSLAQPVXXPA

SEQ ID NO: 84143 - protein, 26 aa, Artificial Sequence
  Cyclic GFR-binding peptide
  MOD_RES (26)..(26): Xaa is C or S
EYKFKVVNKNEDLYLISIPEMKEPVX

SEQ ID NO: 84144 - protein, 33 aa, Artificial Sequence; identical to SEQ ID NO: 32263
  Cyclic GFR-binding peptide
  MOD_RES (32)..(33): Xaa is C or S

SEQ ID NO: 84145 - protein, 37 aa, Artificial Sequence; identical to SEQ ID NO: 32264
  Cyclic GFR-binding peptide
  MOD_RES (2)..(33)..(34): Xaa is C or S

SEQ ID NO: 84146 - protein, 31 aa, Artificial Sequence
  Cyclic GFR-binding peptide
  MOD_RES (26)..(27): Xaa is C or S
RHKRLVVNNAADYYLISTASLRAPVXXSAPA

SEQ ID NO: 84147 - protein, 29 aa, Artificial Sequence
  Cyclic GFR-binding peptide
  MOD_RES (2)..(2): Xaa is C or S
GXEEVIMYHYKLLLVRGNDKYLMSIPSTK

SEQ ID NO: 84148 - protein, 30 aa, Artificial Sequence
  Cyclic GFR-binding peptide
RDVVMGRHKRLIIQQKDNYYLMSTASMKTP

SEQ ID NO: 84149 - protein, 25 aa, Artificial Sequence
  Cyclic GFR-binding peptide
MGEYKFKIIQQKDNLYLMSIPEMKT

SEQ ID NO: 84150 - protein, 34 aa, Artificial Sequence; identical to SEQ ID NO: 32267
  Cyclic GFR-binding peptide
  MOD_RES (1)..(3)..(34): Xaa is C or S

SEQ ID NO: 84151 - protein, 31 aa, Artificial Sequence; identical to SEQ ID NO: 32268
  Cyclic GFR-binding peptide

SEQ ID NO: 84152 - protein, 39 aa, Artificial Sequence; identical to SEQ ID NO: 32269
  Cyclic GFR-binding peptide
  MOD_RES (2)..(4)..(36)..(37): Xaa is C or S

SEQ ID NO: 84153 - protein, 32 aa, Artificial Sequence
  Cyclic GFR-binding peptide
  MOD_RES (30)..(31): Xaa is C or S
VVMGYHYKLIIQQKDNKYLMSIPSMKTPTXXP

SEQ ID NO: 84154 - protein, 26 aa, Artificial Sequence
  Cyclic GFR-binding peptide
  MOD_RES (26)..(26): Xaa is C or S
PIKGYVKPKRGVFYLINIPSLAQPVX

SEQ ID NO: 84155 - protein, 23 aa, Artificial Sequence
  Cyclic GFR-binding peptide
YHYKLVVNNASDKYLISIPSLRT

SEQ ID NO: 84156 - protein, 38 aa, Artificial Sequence; identical to SEQ ID NO: 32274
  Cyclic GFR-binding peptide
  MOD_RES (32)..(33): Xaa is C or S

SEQ ID NO: 84157 - protein, 23 aa, Artificial Sequence
  Cyclic GFR-binding peptide
VVMPIKGYVKPTRGVFYLINIPS

SEQ ID NO: 84158 - protein, 22 aa, Artificial Sequence
  Cyclic GFR-binding peptide
PIKGYVVNKNEDFYLINIPSMK

SEQ ID NO: 84159 - protein, 34 aa, Artificial Sequence; identical to SEQ ID NO: 20707
  Cyclic GFR-binding peptide
  MOD_RES (2)..(4): Xaa is C or S

SEQ ID NO: 84160 - protein, 31 aa, Artificial Sequence
  Cyclic GFR-binding peptide
  MOD_RES (26)..(27): Xaa is C or S
RHKRLLLVRGNDYYLMSTASTKVPAXXTSPV

SEQ ID NO: 84161 - protein, 30 aa, Artificial Sequence
  Cyclic GFR-binding peptide
  MOD_RES (29)..(30): Xaa is C or S
VIMRHKRLLLVRGNDYYLMSTASTKVPAXX

SEQ ID NO: 84162 - protein, 24 aa, Artificial Sequence
  Cyclic GFR-binding peptide
PIKGYVKPKRGVFYLINIPSLAQP

SEQ ID NO: 84163 - protein, 33 aa, Artificial Sequence
  Cyclic GFR-binding peptide
  MOD_RES (27)..(28): Xaa is C or S
GYHYKLIIQQKDNKYLMSIPSMKTPTXXPGASG

SEQ ID NO: 84164 - protein, 31 aa, Artificial Sequence
  Cyclic GFR-binding peptide
  MOD_RES (29)..(30): Xaa is C or S
VMDYHYKLVVNNASDKYLISIPSLRTPVXXT

SEQ ID NO: 84165 - protein, 27 aa, Artificial Sequence
  Cyclic GFR-binding peptide
  MOD_RES (26)..(27): Xaa is C or S
EYKFKIIQQKDNLYLMSIPEMKTPTXX

SEQ ID NO: 84166 - protein, 30 aa, Artificial Sequence
  Cyclic GFR-binding peptide
  MOD_RES (28)..(29): Xaa is C or S
MGYHYKLIIQQKDNKYLMSIPSMKTPTXXP

SEQ ID NO: 84167 - protein, 30 aa, Artificial Sequence; identical to SEQ ID NO: 32281
  Cyclic GFR-binding peptide

SEQ ID NO: 84168 - protein, 32 aa, Artificial Sequence; identical to SEQ ID NO: 32282
  Cyclic GFR-binding peptide
  MOD_RES (32)..(32): Xaa is C or S

SEQ ID NO: 84169 - protein, 28 aa, Artificial Sequence
  Cyclic GFR-binding peptide
TMNRHKRLVVNKNEDYYLISTASMKEPV

SEQ ID NO: 84170 - protein, 33 aa, Artificial Sequence
  Cyclic GFR-binding peptide
  MOD_RES (2)..(4): Xaa is C or S
RXAXSEVTMNRYKKLVVNKNEDFYLISIANMKE

SEQ ID NO: 84171 - protein, 33 aa, Artificial Sequence
  Cyclic GFR-binding peptide
  MOD_RES (28)..(29): Xaa is C or S
MGEYKFKIIQQKDNLYLMSIPEMKTPTXXPGAS

SEQ ID NO: 84172 - protein, 35 aa, Artificial Sequence; identical to SEQ ID NO: 32284
  Cyclic GFR-binding peptide
  MOD_RES (31)..(32): Xaa is C or S

SEQ ID NO: 84173 - protein, 29 aa, Artificial Sequence
  Cyclic GFR-binding peptide
SEVVMDRHKRLVVNNASDYYLISTASLRT

SEQ ID NO: 84174 - protein, 24 aa, Artificial Sequence
  Cyclic GFR-binding peptide
VTMNYHYKLVVNKNEDKYLISIPS

SEQ ID NO: 84175 - protein, 27 aa, Artificial Sequence
  Cyclic GFR-binding peptide
VVMDRHKRLVVNNASDYYLISTASLRT

SEQ ID NO: 84176 - protein, 28 aa, Artificial Sequence
  Cyclic GFR-binding peptide
  MOD_RES (1)..(1): Xaa is C or S
XEEVIMYHYKLLLVRGNDKYLMSIPSTK

SEQ ID NO: 84177 - protein, 31 aa, Artificial Sequence
  Cyclic GFR-binding peptide
  MOD_RES (2)..(2): Xaa is C or S
GXESVAMGRHKRLYTVVGKDYYLISTASLKT

SEQ ID NO: 84178 - protein, 27 aa, Artificial Sequence
  Cyclic GFR-binding peptide
EVVMDYHYKLVVNNASDKYLISIPSLR

SEQ ID NO: 84179 - protein, 33 aa, Artificial Sequence; identical to SEQ ID NO: 32289
  Cyclic GFR-binding peptide
  MOD_RES (31)..(32): Xaa is C or S

SEQ ID NO: 84180 - protein, 37 aa, Artificial Sequence; identical to SEQ ID NO: 32290
  Cyclic GFR-binding peptide
  MOD_RES (1)..(33)..(34): Xaa is C or S

SEQ ID NO: 84181 - protein, 30 aa, Artificial Sequence
  Cyclic GFR-binding peptide
  MOD_RES (29)..(30): Xaa is C or S
TMNRHKRLVVNKNEDYYLISTASMKEPVXX

SEQ ID NO: 84182 - protein, 42 aa, Artificial Sequence; identical to SEQ ID NO: 32291
  Cyclic GFR-binding peptide
  MOD_RES (2)..(4)..(36)..(37): Xaa is C or S

SEQ ID NO: 84183 - protein, 28 aa, Artificial Sequence
  Cyclic GFR-binding peptide
SEVVMDRHKRLVVNNASDYYLISTASLR

SEQ ID NO: 84184 - protein, 30 aa, Artificial Sequence; identical to SEQ ID NO: 32294
  Cyclic GFR-binding peptide

SEQ ID NO: 84185 - protein, 38 aa, Artificial Sequence; identical to SEQ ID NO: 32295
  Cyclic GFR-binding peptide
  MOD_RES (1)..(3)..(34)..(35): Xaa is C or S

SEQ ID NO: 84186 - protein, 23 aa, Artificial Sequence
  Cyclic GFR-binding peptide
GRHKRLYTVVGKDYYLISTASLK

SEQ ID NO: 84187 - protein, 24 aa, Artificial Sequence
  Cyclic GFR-binding peptide
VTMNPIKGYVVNKNEDFYLINIPS

SEQ ID NO: 84188 - protein, 28 aa, Artificial Sequence
  Cyclic GFR-binding peptide
  MOD_RES (2)..(2): Xaa is C or S
GXSEVVMDEYKFKVVNNASDLYLISIPE

SEQ ID NO: 84189 - protein, 25 aa, Artificial Sequence
  Cyclic GFR-binding peptide
EEVIMEYKFKLLVRGNDLYLMSIPE

SEQ ID NO: 84190 - protein, 32 aa, Artificial Sequence; identical to SEQ ID NO: 32297
  Cyclic GFR-binding peptide
  MOD_RES (2)..(2): Xaa is C or S

SEQ ID NO: 84191 - protein, 37 aa, Artificial Sequence; identical to SEQ ID NO: 32298
  Cyclic GFR-binding peptide
  MOD_RES (1)..(3)..(35)..(36): Xaa is C or S

SEQ ID NO: 84192 - protein, 30 aa, Artificial Sequence
  Cyclic GFR-binding peptide
  MOD_RES (26)..(27): Xaa is C or S
EYKFKVVNKNEDLYLISIPEMKEPVXXPEP

SEQ ID NO: 84193 - protein, 28 aa, Artificial Sequence
  Cyclic GFR-binding peptide
  MOD_RES (1)..(1): Xaa is C or S
XSEVTMNEYKFKVVNKNEDLYLISIPEM

SEQ ID NO: 84194 - protein, 27 aa, Artificial Sequence
  Cyclic GFR-binding peptide
EVVMDEYKFKVVNNASDLYLISIPELR

SEQ ID NO: 84195 - protein, 32 aa, Artificial Sequence
  Cyclic GFR-binding peptide
  MOD_RES (30)..(31): Xaa is C or S
VVMDRHKRLVVNNAADYYLISTASLRAPVXXS

SEQ ID NO: 84196 - protein, 31 aa, Artificial Sequence; identical to SEQ ID NO: 32299
  Cyclic GFR-binding peptide

SEQ ID NO: 84197 - protein, 21 aa, Artificial Sequence
  Cyclic GFR-binding peptide
YHYKLVVNNASDKYLISIPSL

SEQ ID NO: 84198 - protein, 33 aa, Artificial Sequence; identical to SEQ ID NO: 32301
  Cyclic GFR-binding peptide
  MOD_RES (1)..(3): Xaa is C or S

SEQ ID NO: 84199 - protein, 31 aa, Artificial Sequence
  Cyclic GFR-binding peptide
  MOD_RES (26)..(27): Xaa is C or S
RHKRLIIQQKDNYYLMSTASMKTPTXXPGAS

SEQ ID NO: 84200 - protein, 29 aa, Artificial Sequence
  Cyclic GFR-binding peptide
  MOD_RES (1)..(3): Xaa is C or S
XAXSEVTMNRYKKLVVNKNEDFYLISIAN

SEQ ID NO: 84201 - protein, 37 aa, Artificial Sequence; identical to SEQ ID NO: 32303
  Cyclic GFR-binding peptide
  MOD_RES (31)..(32): Xaa is C or S

SEQ ID NO: 84202 - protein, 25 aa, Artificial Sequence
  Cyclic GFR-binding peptide
DRHKRLVVNNAADYYLISTASLRAP

SEQ ID NO: 84203 - protein, 32 aa, Artificial Sequence
  Cyclic GFR-binding peptide
  MOD_RES (26)..(27): Xaa is C or S
PIKGYIKPTKGIFYLINIPSLDQSVXXPSASA

SEQ ID NO: 84204 - protein, 38 aa, Artificial Sequence; identical to SEQ ID NO: 32304
  Cyclic GFR-binding peptide
  MOD_RES (2)..(33)..(34): Xaa is C or S

SEQ ID NO: 84205 - protein, 27 aa, Artificial Sequence
  Cyclic GFR-binding peptide
  MOD_RES (26)..(27): Xaa is C or S
RHKRLVVNKNEDYYLISTASMKEPVXX

SEQ ID NO: 84206 - protein, 33 aa, Artificial Sequence
  Cyclic GFR-binding peptide
  MOD_RES (28)..(29): Xaa is C or S
MNEYKFKVVNKNEDLYLISIPEMKEPVXXPEPI

SEQ ID NO: 84207 - protein, 36 aa, Artificial Sequence
  Cyclic GFR-binding peptide
  MOD_RES (30)..(31): Xaa is C or S
VTMNYHYKLVVNKNEDKYLISIPSMKEPVXXPEPIG

SEQ ID NO: 84208 - protein, 32 aa, Artificial Sequence
  Cyclic GFR-binding peptide
  MOD_RES (30)..(31): Xaa is C or S
EVIMEYKFKLLVRGNDLYLMSIPETKVPAXXT

SEQ ID NO: 84209 - protein, 33 aa, Artificial Sequence
  Cyclic GFR-binding peptide
  MOD_RES (2)..(4): Xaa is C or S
RXAXSEVTMNEYKFKVVNKNEDLYLISIPEMKE

SEQ ID NO: 84210 - protein, 24 aa, Artificial Sequence
  Cyclic GFR-binding peptide
EYKFKLLVRGNDLYLMSIPETKVP

SEQ ID NO: 84211 - protein, 23 aa, Artificial Sequence
  Cyclic GFR-binding peptide
GRHKRLIIQQKDNYYLMSTASMK

SEQ ID NO: 84212 - protein, 32 aa, Artificial Sequence; identical to SEQ ID NO: 32307
  Cyclic GFR-binding peptide
  MOD_RES (1)..(1): Xaa is C or S

SEQ ID NO: 84213 - protein, 27 aa, Artificial Sequence
  Cyclic GFR-binding peptide
EVIMRHKRLLLVRGNDYYLMSTASTKV

SEQ ID NO: 84214 - protein, 35 aa, Artificial Sequence; identical to SEQ ID NO: 32310
  Cyclic GFR-binding peptide
  MOD_RES (2)..(34)..(35): Xaa is C or S

SEQ ID NO: 84215 - protein, 31 aa, Artificial Sequence
  Cyclic GFR-binding peptide
  MOD_RES (26)..(27): Xaa is C or S
YHYKLLLVRGNDKYLMSIPSTKVPAXXTSPV

SEQ ID NO: 84216 - protein, 20 aa, Artificial Sequence
  Cyclic GFR-binding peptide
RYKKLVVNKNEDFYLISIAN

SEQ ID NO: 84217 - protein, 34 aa, Artificial Sequence
  Cyclic GFR-binding peptide
  MOD_RES (2)..(4): Xaa is C or S
SXGXRDVVMGEYKFKIIQQKDNLYLMSIPEMKTP

SEQ ID NO: 84218 - protein, 34 aa, Artificial Sequence; identical to SEQ ID NO: 32313
  Cyclic GFR-binding peptide
  MOD_RES (31)..(32): Xaa is C or S

SEQ ID NO: 84219 - protein, 36 aa, Artificial Sequence; identical to SEQ ID NO: 32314
  Cyclic GFR-binding peptide
  MOD_RES (2)..(4)..(36): Xaa is C or S

SEQ ID NO: 84220 - protein, 38 aa, Artificial Sequence; identical to SEQ ID NO: 32315
  Cyclic GFR-binding peptide
  MOD_RES (1)..(3)..(35)..(36): Xaa is C or S

SEQ ID NO: 84221 - protein, 37 aa, Artificial Sequence; identical to SEQ ID NO: 32317
  Cyclic GFR-binding peptide
  MOD_RES (1)..(33)..(34): Xaa is C or S

SEQ ID NO: 84222 - protein, 36 aa, Artificial Sequence; identical to SEQ ID NO: 32319
  Cyclic GFR-binding peptide
  MOD_RES (1)..(33)..(34): Xaa is C or S

SEQ ID NO: 84223 - protein, 32 aa, Artificial Sequence
  Cyclic GFR-binding peptide
  MOD_RES (30)..(31): Xaa is C or S
VTMNEYKFKVVNKNEDLYLISIPEMKEPVXXP

SEQ ID NO: 84224 - protein, 24 aa, Artificial Sequence
  Cyclic GFR-binding peptide
IMPIKGYIKPTKGIFYLINIPSLD

SEQ ID NO: 84225 - protein, 22 aa, Artificial Sequence
  Cyclic GFR-binding peptide
MGEYKFKIIQQKDNLYLMSIPE

SEQ ID NO: 84226 - protein, 25 aa, Artificial Sequence
  Cyclic GFR-binding peptide
RHKRLYTVVGKDYYLISTASLKTPV

SEQ ID NO: 84227 - protein, 21 aa, Artificial Sequence
  Cyclic GFR-binding peptide
GRHKRLYTVVGKDYYLISTAS

SEQ ID NO: 84228 - protein, 37 aa, Artificial Sequence; identical to SEQ ID NO: 32320
  Cyclic GFR-binding peptide
  MOD_RES (2)..(4)..(36)..(37): Xaa is C or S

SEQ ID NO: 84229 - protein, 34 aa, Artificial Sequence
  Cyclic GFR-binding peptide
  MOD_RES (30)..(31): Xaa is C or S
VVMDRHKRLVVNNAADYYLISTASLRAPVXXSAP

SEQ ID NO: 84230 - protein, 35 aa, Artificial Sequence
  Cyclic GFR-binding peptide
  MOD_RES (29)..(30): Xaa is C or S
VMDRHKRLVVNNASDYYLISTASLRTPVXXTPPTS

SEQ ID NO: 84231 - protein, 36 aa, Artificial Sequence; identical to SEQ ID NO: 32322
  Cyclic GFR-binding peptide
  MOD_RES (2)..(4)..(35)..(36): Xaa is C or S

SEQ ID NO: 84232 - protein, 39 aa, Artificial Sequence; identical to SEQ ID NO: 32323
  Cyclic GFR-binding peptide
  MOD_RES (1)..(3)..(34)..(35): Xaa is C or S

SEQ ID NO: 84233 - protein, 28 aa, Artificial Sequence
  Cyclic GFR-binding peptide
VVMDYHYKLVVNNASDKYLISIPSLRTP

SEQ ID NO: 84234 - protein, 23 aa, Artificial Sequence
  Cyclic GFR-binding peptide
DRHKRLVVNNASDYYLISTASLR

SEQ ID NO: 84235 - protein, 39 aa, Artificial Sequence; identical to SEQ ID NO: 32324
  Cyclic GFR-binding peptide
  MOD_RES (2)..(4)..(36)..(37): Xaa is C or S

SEQ ID NO: 84236 - protein, 29 aa, Artificial Sequence
  Cyclic GFR-binding peptide
  MOD_RES (29)..(29): Xaa is C or S
VMGRHKRLIIQQKDNYYLMSTASMKTPTX

SEQ ID NO: 84237 - protein, 35 aa, Artificial Sequence; identical to SEQ ID NO: 32326
  Cyclic GFR-binding peptide
  MOD_RES (32)..(33): Xaa is C or S

SEQ ID NO: 84238 - protein, 29 aa, Artificial Sequence
  Cyclic GFR-binding peptide
EVTMNRYKKLVVNKNEDFYLISIANMKEP

SEQ ID NO: 84239 - protein, 30 aa, Artificial Sequence
  Cyclic GFR-binding peptide
  MOD_RES (27)..(28): Xaa is C or S
NPIKGYVVNKNEDFYLINIPSMKEPVXXPE

SEQ ID NO: 84240 - protein, 31 aa, Artificial Sequence
  Cyclic GFR-binding peptide
  MOD_RES (27)..(28): Xaa is C or S
GEYKFKIIQQKDNLYLMSIPEMKTPTXXPGA

SEQ ID NO: 84241 - protein, 34 aa, Artificial Sequence; identical to SEQ ID NO: 32327
  Cyclic GFR-binding peptide
  MOD_RES (32)..(33): Xaa is C or S

SEQ ID NO: 84242 - protein, 26 aa, Artificial Sequence
  Cyclic GFR-binding peptide
  MOD_RES (26)..(26): Xaa is C or S
YHYKLIIQQKDNKYLMSIPSMKTPTX

SEQ ID NO: 84243 - protein, 24 aa, Artificial Sequence
  Cyclic GFR-binding peptide
RHKRLVVNKNEDYYLISTASMKEP

SEQ ID NO: 84244 - protein, 33 aa, Artificial Sequence
  Cyclic GFR-binding peptide
  MOD_RES (30)..(31): Xaa is C or S
VVMDEYKFKVVNNASDLYLISIPELRTPVXXTP

SEQ ID NO: 84245 - protein, 35 aa, Artificial Sequence; identical to SEQ ID NO: 32330
  Cyclic GFR-binding peptide
  MOD_RES (2)..(34)..(35): Xaa is C or S

SEQ ID NO: 84246 - protein, 31 aa, Artificial Sequence
  Cyclic GFR-binding peptide
  MOD_RES (26)..(27): Xaa is C or S
YHYKLIIQQKDNKYLMSIPSMKTPTXXPGAS

SEQ ID NO: 84247 - protein, 40 aa, Artificial Sequence; identical to SEQ ID NO: 32333
  Cyclic GFR-binding peptide
  MOD_RES (2)..(4)..(35)..(36): Xaa is C or S

SEQ ID NO: 84248 - protein, 24 aa, Artificial Sequence
  Cyclic GFR-binding peptide
EYKFKVVNKNEDLYLISIPEMKEP

SEQ ID NO: 84249 - protein, 27 aa, Artificial Sequence
  Cyclic GFR-binding peptide
  MOD_RES (1)..(1): Xaa is C or S
XESVAMGRHKRLYTVVGKDYYLISTAS

SEQ ID NO: 84250 - protein, 36 aa, Artificial Sequence; identical to SEQ ID NO: 32336
  Cyclic GFR-binding peptide
  MOD_RES (2)..(4)..(36): Xaa is C or S

SEQ ID NO: 84251 - protein, 30 aa, Artificial Sequence
  Cyclic GFR-binding peptide
  MOD_RES (1)..(3): Xaa is C or S
XAXSEVTMNPIKGYVVNKNEDFYLINIPSM

SEQ ID NO: 84252 - protein, 33 aa, Artificial Sequence
  Cyclic GFR-binding peptide
  MOD_RES (30)..(31): Xaa is C or S
VTMNRHKRLVVNKNEDYYLISTASMKEPVXXPE

SEQ ID NO: 84253 - protein, 26 aa, Artificial Sequence
  Cyclic GFR-binding peptide
DRHKRLVVNNASDYYLISTASLRTPV

SEQ ID NO: 84254 - protein, 33 aa, Artificial Sequence
  Cyclic GFR-binding peptide
  MOD_RES (2)..(4): Xaa is C or S
RXAXSEVTMNYHYKLVVNKNEDKYLISIPSMKE

SEQ ID NO: 84255 - protein, 29 aa, Artificial Sequence
  Cyclic GFR-binding peptide
  MOD_RES (1)..(1): Xaa is C or S
XSEVTMNEYKFKVVNKNEDLYLISIPEMK

SEQ ID NO: 84256 - protein, 35 aa, Artificial Sequence; identical to SEQ ID NO: 32337
  Cyclic GFR-binding peptide
  MOD_RES (1)..(33)..(34): Xaa is C or S

SEQ ID NO: 84257 - protein, 38 aa, Artificial Sequence; identical to SEQ ID NO: 32338
  Cyclic GFR-binding peptide
  MOD_RES (2)..(34)..(35): Xaa is C or S

SEQ ID NO: 84258 - protein, 27 aa, Artificial Sequence
  Cyclic GFR-binding peptide
  MOD_RES (27)..(27): Xaa is C or S
MEYKFKLLVRGNDLYLMSIPETKVPAX

SEQ ID NO: 84259 - protein, 31 aa, Artificial Sequence
  Cyclic GFR-binding peptide
  MOD_RES (2)..(4): Xaa is C or S
SXKXSKVIMPIKGYIKPTKGIFYLINIPSLD

SEQ ID NO: 84260 - protein, 24 aa, Artificial Sequence
  Cyclic GFR-binding peptide
VTMNRYKKLVVNKNEDFYLISIAN

SEQ ID NO: 84261 - protein, 29 aa, Artificial Sequence
  Cyclic GFR-binding peptide
  MOD_RES (27)..(28): Xaa is C or S
GRHKRLYTVVGKDYYLISTASLKTPVXXA

SEQ ID NO: 84262 - protein, 29 aa, Artificial Sequence
  Cyclic GFR-binding peptide
  MOD_RES (29)..(29): Xaa is C or S
VMDRHKRLVVNNAADYYLISTASLRAPVX

SEQ ID NO: 84263 - protein, 37 aa, Artificial Sequence; identical to SEQ ID NO: 32343
  Cyclic GFR-binding peptide
  MOD_RES (31)..(32): Xaa is C or S

SEQ ID NO: 84264 - protein, 38 aa, Artificial Sequence; identical to SEQ ID NO: 32345
  Cyclic GFR-binding peptide
  MOD_RES (32)..(33): Xaa is C or S

SEQ ID NO: 84265 - protein, 26 aa, Artificial Sequence
  Cyclic GFR-binding peptide
SEVTMNRHKRLVVNKNEDYYLISTAS

SEQ ID NO: 84266 - protein, 32 aa, Artificial Sequence; identical to SEQ ID NO: 32347
  Cyclic GFR-binding peptide
  MOD_RES (1)..(1): Xaa is C or S

SEQ ID NO: 84267 - protein, 40 aa, Artificial Sequence; identical to SEQ ID NO: 32348
  Cyclic GFR-binding peptide
  MOD_RES (1)..(3)..(35)..(36): Xaa is C or S

SEQ ID NO: 84268 - protein, 28 aa, Artificial Sequence
  Cyclic GFR-binding peptide
  MOD_RES (1)..(1): Xaa is C or S
XEEVIMRHKRLLLVRGNDYYLMSTASTK

SEQ ID NO: 84269 - protein, 28 aa, Artificial Sequence
  Cyclic GFR-binding peptide
  MOD_RES (27)..(28): Xaa is C or S
MPIKGYIKPTKGIFYLINIPSLDQSVXX

SEQ ID NO: 84270 - protein, 35 aa, Artificial Sequence; identical to SEQ ID NO: 32349
  Cyclic GFR-binding peptide
  MOD_RES (2)..(33)..(34): Xaa is C or S

SEQ ID NO: 84271 - protein, 31 aa, Artificial Sequence; identical to SEQ ID NO: 32351
  Cyclic GFR-binding peptide
  MOD_RES (31)..(31): Xaa is C or S

SEQ ID NO: 84272 - protein, 30 aa, Artificial Sequence
  Cyclic GFR-binding peptide
  MOD_RES (30)..(30): Xaa is C or S
EVIMYHYKLLLVRGNDKYLMSIPSTKVPAX

SEQ ID NO: 84273 - protein, 36 aa, Artificial Sequence
  Cyclic GFR-binding peptide
  MOD_RES (30)..(31): Xaa is C or S
VTMNPIKGYVVNKNEDFYLINIPSMKEPVXXPEPIG

SEQ ID NO: 84274 - protein, 32 aa, Artificial Sequence; identical to SEQ ID NO: 32355
  Cyclic GFR-binding peptide
  MOD_RES (2)..(2): Xaa is C or S

SEQ ID NO: 84275 - protein, 29 aa, Artificial Sequence
  Cyclic GFR-binding peptide
  MOD_RES (26)..(27): Xaa is C or S
RHKRLYTVVGKDYYLISTASLKTPVXXAK

SEQ ID NO: 84276 - protein, 34 aa, Artificial Sequence
  Cyclic GFR-binding peptide
  MOD_RES (28)..(29): Xaa is C or S
IMEYKFKLLVRGNDLYLMSIPETKVPAXXTSPVR

SEQ ID NO: 84277 - protein, 27 aa, Artificial Sequence
  Cyclic GFR-binding peptide
  MOD_RES (26)..(27): Xaa is C or S
PIKGYVKPKRGVFYLINIPSLAQPVXX

SEQ ID NO: 84278 - protein, 24 aa, Artificial Sequence
  Cyclic GFR-binding peptide
GYHYKLIIQQKDNKYLMSIPSMKT

SEQ ID NO: 84279 - protein, 31 aa, Artificial Sequence
  Cyclic GFR-binding peptide
  MOD_RES (29)..(30): Xaa is C or S
VVMPIKGYVKPTRGVFYLINIPSLDQPVXXP

SEQ ID NO: 84280 - protein, 30 aa, Artificial Sequence; identical to SEQ ID NO: 32356
  Cyclic GFR-binding peptide

SEQ ID NO: 84281 - protein, 30 aa, Artificial Sequence
  Cyclic GFR-binding peptide
  MOD_RES (26)..(27): Xaa is C or S
YHYKLIIQQKDNKYLMSIPSMKTPTXXPGA

SEQ ID NO: 84282 - protein, 32 aa, Artificial Sequence
  Cyclic GFR-binding peptide
  MOD_RES (27)..(28): Xaa is C or S
MRHKRLLLVRGNDYYLMSTASTKVPAXXTSPV

SEQ ID NO: 84283 - protein, 24 aa, Artificial Sequence
  Cyclic GFR-binding peptide
RHKRLLLVRGNDYYLMSTASTKVP

SEQ ID NO: 84284 - protein, 31 aa, Artificial Sequence
  Cyclic GFR-binding peptide
  MOD_RES (28)..(29): Xaa is C or S
MGRHKRLYTVVGKDYYLISTASLKTPVXXAK

SEQ ID NO: 84285 - protein, 37 aa, Artificial Sequence; identical to SEQ ID NO: 32358
  Cyclic GFR-binding peptide
  MOD_RES (31)..(32): Xaa is C or S

SEQ ID NO: 84286 - protein, 25 aa, Artificial Sequence
  Cyclic GFR-binding peptide
VIMPIKGYVKPKRGVFYLINIPSLA

SEQ ID NO: 84287 - protein, 34 aa, Artificial Sequence; identical to SEQ ID NO: 32360
  Cyclic GFR-binding peptide
  MOD_RES (1)..(3): Xaa is C or S

SEQ ID NO: 84288 - protein, 31 aa, Artificial Sequence
  Cyclic GFR-binding peptide
  MOD_RES (29)..(30): Xaa is C or S
VIMRHKRLLLVRGNDYYLMSTASTKVPAXXT

SEQ ID NO: 84289 - protein, 27 aa, Artificial Sequence
  Cyclic GFR-binding peptide
  MOD_RES (27)..(27): Xaa is C or S
MPIKGYVKPTRGVFYLINIPSLDQPVX

SEQ ID NO: 84290 - protein, 29 aa, Artificial Sequence
  Cyclic GFR-binding peptide
  MOD_RES (29)..(29): Xaa is C or S
VMDEYKFKVVNNASDLYLISIPELRTPVX

SEQ ID NO: 84291 - protein, 29 aa, Artificial Sequence
  Cyclic GFR-binding peptide
  MOD_RES (2)..(4): Xaa is C or S
LXGXEEVIMEYKFKLLVRGNDLYLMSIPE

SEQ ID NO: 84292 - protein, 34 aa, Artificial Sequence; identical to SEQ ID NO: 32364
  Cyclic GFR-binding peptide
  MOD_RES (2)..(4): Xaa is C or S

SEQ ID NO: 84293 - protein, 23 aa, Artificial Sequence
  Cyclic GFR-binding peptide
VMGEYKFKIIQQKDNLYLMSIPE

SEQ ID NO: 84294 - protein, 30 aa, Artificial Sequence
  Cyclic GFR-binding peptide
SEVTMNRYKKLVVNKNEDFYLISIANMKEP

SEQ ID NO: 84295 - protein, 30 aa, Artificial Sequence
  Cyclic GFR-binding peptide
  MOD_RES (27)..(28): Xaa is C or S
DEYKFKVVNNASDLYLISIPELRTPVXXTP

SEQ ID NO: 84296 - protein, 37 aa, Artificial Sequence; identical to SEQ ID NO: 32365
  Cyclic GFR-binding peptide
  MOD_RES (2)..(34)..(35): Xaa is C or S

SEQ ID NO: 84297 - protein, 26 aa, Artificial Sequence
  Cyclic GFR-binding peptide
TMNRHKRLVVNKNEDYYLISTASMKE

SEQ ID NO: 84298 - protein, 35 aa, Artificial Sequence
  Cyclic GFR-binding peptide
  MOD_RES (29)..(30): Xaa is C or S
VMDRHKRLVVNNAADYYLISTASLRAPVXXSAPAA

SEQ ID NO: 84299 - protein, 33 aa, Artificial Sequence
  Cyclic GFR-binding peptide
  MOD_RES (27)..(28): Xaa is C or S
NYHYKLIVNSSDDKYLVSIPSLKTPAXXPKPVH

SEQ ID NO: 84300 - protein, 30 aa, Artificial Sequence
  Cyclic GFR-binding peptide
  MOD_RES (1)..(1): Xaa is C or S
XEEVIMRHKRLLLVRGNDYYLMSTASTKVP

SEQ ID NO: 84301 - protein, 35 aa, Artificial Sequence; identical to SEQ ID NO: 32370
  Cyclic GFR-binding peptide
  MOD_RES (32)..(33): Xaa is C or S

SEQ ID NO: 84302 - protein, 27 aa, Artificial Sequence
  Cyclic GFR-binding peptide
  MOD_RES (27)..(27): Xaa is C or S
GYHYKLIIQQKDNKYLMSIPSMKTPTX

SEQ ID NO: 84303 - protein, 32 aa, Artificial Sequence; identical to SEQ ID NO: 32373
  Cyclic GFR-binding peptide
  MOD_RES (32)..(32): Xaa is C or S

SEQ ID NO: 84304 - protein, 36 aa, Artificial Sequence; identical to SEQ ID NO: 32372
  Cyclic GFR-binding peptide
  MOD_RES (1)..(32)..(33): Xaa is C or S

SEQ ID NO: 84305 - protein, 28 aa, Artificial Sequence
  Cyclic GFR-binding peptide
  MOD_RES (27)..(28): Xaa is C or S
MYHYKLLLVRGNDKYLMSIPSTKVPAXX

SEQ ID NO: 84306 - protein, 32 aa, Artificial Sequence
  Cyclic GFR-binding peptide
  MOD_RES (2)..(4): Xaa is C or S
LXGXEEVIMYHYKLLLVRGNDKYLMSIPSTKV

SEQ ID NO: 84307 - protein, 20 aa, Artificial Sequence
  Cyclic GFR-binding peptide
PIKGYVVNKNEDFYLINIPS

SEQ ID NO: 84308 - protein, 23 aa, Artificial Sequence
  Cyclic GFR-binding peptide
TMNPIKGYVVNKNEDFYLINIPS

SEQ ID NO: 84309 - protein, 33 aa, Artificial Sequence; identical to SEQ ID NO: 32375
  Cyclic GFR-binding peptide
  MOD_RES (31)..(32): Xaa is C or S

SEQ ID NO: 84310 - protein, 27 aa, Artificial Sequence
  Cyclic GFR-binding peptide
  MOD_RES (2)..(2): Xaa is C or S
KXSRVIMPIKGYVKPKRGVFYLINIPS

SEQ ID NO: 84311 - protein, 34 aa, Artificial Sequence
  Cyclic GFR-binding peptide
  MOD_RES (28)..(29): Xaa is C or S
MGYHYKLIIQQKDNKYLMSIPSMKTPTXXPGASG

SEQ ID NO: 84312 - protein, 21 aa, Artificial Sequence
  Cyclic GFR-binding peptide
NPIKGYVVNKNEDFYLINIPS

SEQ ID NO: 84313 - protein, 31 aa, Artificial Sequence
  Cyclic GFR-binding peptide
  MOD_RES (2)..(4): Xaa is C or S
SXGXRDVVMGRHKRLIIQQKDNYYLMSTASM

SEQ ID NO: 84314 - protein, 29 aa, Artificial Sequence
  Cyclic GFR-binding peptide
EEVIMRHKRLLLVRGNDYYLMSTASTKVP

SEQ ID NO: 84315 - protein, 22 aa, Artificial Sequence
  Cyclic GFR-binding peptide
DRHKRLVVNNAADYYLISTASL

SEQ ID NO: 84316 - protein, 39 aa, Artificial Sequence; identical to SEQ ID NO: 32379
  Cyclic GFR-binding peptide
  MOD_RES (2)..(34)..(35): Xaa is C or S

SEQ ID NO: 84317 - protein, 28 aa, Artificial Sequence
  Cyclic GFR-binding peptide
TMNPIKGYVVNKNEDFYLINIPSMKEPV

SEQ ID NO: 84318 - protein, 20 aa, Artificial Sequence
  Cyclic GFR-binding peptide
PIKGYIKPTKGIFYLINIPS

SEQ ID NO: 84319 - protein, 31 aa, Artificial Sequence
  Cyclic GFR-binding peptide
  MOD_RES (29)..(30): Xaa is C or S
VMGYHYKLIIQQKDNKYLMSIPSMKTPTXXP

SEQ ID NO: 84320 - protein, 25 aa, Artificial Sequence
  Cyclic GFR-binding peptide
SKVVMPIKGYVKPTRGVFYLINIPS

SEQ ID NO: 84321 - protein, 38 aa, Artificial Sequence; identical to SEQ ID NO: 32383
  Cyclic GFR-binding peptide
  MOD_RES (1)..(33)..(34): Xaa is C or S

SEQ ID NO: 84322 - protein, 33 aa, Artificial Sequence; identical to SEQ ID NO: 32385
  Cyclic GFR-binding peptide
  MOD_RES (2)..(33): Xaa is C or S

SEQ ID NO: 84323 - protein, 36 aa, Artificial Sequence; identical to SEQ ID NO: 32387
  Cyclic GFR-binding peptide
  MOD_RES (1)..(33)..(34): Xaa is C or S

SEQ ID NO: 84324 - protein, 41 aa, Artificial Sequence; identical to SEQ ID NO: 32388
  Cyclic GFR-binding peptide
  MOD_RES (2)..(4)..(35)..(36): Xaa is C or S

SEQ ID NO: 84325 - protein, 30 aa, Artificial Sequence
  Cyclic GFR-binding peptide
  MOD_RES (28)..(29): Xaa is C or S
MNEYKFKVVNKNEDLYLISIPEMKEPVXXP

SEQ ID NO: 84326 - protein, 35 aa, Artificial Sequence
  Cyclic GFR-binding peptide
  MOD_RES (30)..(31): Xaa is C or S
EVIMRHKRLLLVRGNDYYLMSTASTKVPAXXTSPV

SEQ ID NO: 84327 - protein, 34 aa, Artificial Sequence; identical to SEQ ID NO: 32389
  Cyclic GFR-binding peptide
  MOD_RES (31)..(32): Xaa is C or S

SEQ ID NO: 84328 - protein, 32 aa, Artificial Sequence
  Cyclic GFR-binding peptide
  MOD_RES (2)..(4): Xaa is C or S
LXGXEEVIMEYKFKLLVRGNDLYLMSIPETKV

SEQ ID NO: 84329 - protein, 30 aa, Artificial Sequence
  Cyclic GFR-binding peptide
SEVVMDEYKFKVVNNASDLYLISIPELRTP

SEQ ID NO: 84330 - protein, 33 aa, Artificial Sequence
  Cyclic GFR-binding peptide
  MOD_RES (1)..(3): Xaa is C or S
XAXSEVTMNYHYKLVVNKNEDKYLISIPSMKEP

SEQ ID NO: 84331 - protein, 31 aa, Artificial Sequence
  Cyclic GFR-binding peptide
  MOD_RES (30)..(31): Xaa is C or S
KVVMPIKGYVKPTRGVFYLINIPSLDQPVXX

SEQ ID NO: 84332 - protein, 33 aa, Artificial Sequence
  Cyclic GFR-binding peptide
  MOD_RES (27)..(28): Xaa is C or S
MPIKGYVKPTRGVFYLINIPSLDQPVXXPSASA

SEQ ID NO: 84333 - protein, 40 aa, Artificial Sequence; identical to SEQ ID NO: 32392
  Cyclic GFR-binding peptide
  MOD_RES (1)..(3)..(35)..(36): Xaa is C or S

SEQ ID NO: 84334 - protein, 38 aa, Artificial Sequence; identical to SEQ ID NO: 32393
  Cyclic GFR-binding peptide
  MOD_RES (2)..(33)..(34): Xaa is C or S

SEQ ID NO: 84335 - protein, 33 aa, Artificial Sequence
  Cyclic GFR-binding peptide
  MOD_RES (28)..(29): Xaa is C or S
IMPIKGYVKPKRGVFYLINIPSLAQPVXXPAAS

SEQ ID NO: 84336 - protein, 23 aa, Artificial Sequence
  Cyclic GFR-binding peptide
MGRHKRLYTVVGKDYYLISTASL

SEQ ID NO: 84337 - protein, 26 aa, Artificial Sequence
  Cyclic GFR-binding peptide
EVTMNEYKFKVVNKNEDLYLISIPEM

SEQ ID NO: 84338 - protein, 32 aa, Artificial Sequence; identical to SEQ ID NO: 32394
  Cyclic GFR-binding peptide
  MOD_RES (31)..(32): Xaa is C or S

SEQ ID NO: 84339 - protein, 37 aa, Artificial Sequence; identical to SEQ ID NO: 32396
  Cyclic GFR-binding peptide
  MOD_RES (1)..(33)..(34): Xaa is C or S

SEQ ID NO: 84340 - protein, 30 aa, Artificial Sequence
  Cyclic GFR-binding peptide
  MOD_RES (30)..(30): Xaa is C or S
VTMNPIKGYVVNKNEDFYLINIPSMKEPVX

SEQ ID NO: 84341 - protein, 33 aa, Artificial Sequence; identical to SEQ ID NO: 32397
  Cyclic GFR-binding peptide
  MOD_RES (1)..(33): Xaa is C or S

SEQ ID NO: 84342 - protein, 32 aa, Artificial Sequence
  Cyclic GFR-binding peptide
  MOD_RES (30)..(31): Xaa is C or S
VVMDYHYKLVVNNASDKYLISIPSLRTPVXXT

SEQ ID NO: 84343 - protein, 27 aa, Artificial Sequence
  Cyclic GFR-binding peptide
VMDEYKFKVVNNASDLYLISIPELRTP

SEQ ID NO: 84344 - protein, 31 aa, Artificial Sequence
  Cyclic GFR-binding peptide
  MOD_RES (26)..(27): Xaa is C or S
EYKFKIIQQKDNLYLMSIPEMKTPTXXPGAS

SEQ ID NO: 84345 - protein, 24 aa, Artificial Sequence
  Cyclic GFR-binding peptide
MPIKGYIKPTKGIFYLINIPSLDQ

SEQ ID NO: 84346 - protein, 34 aa, Artificial Sequence
  Cyclic GFR-binding peptide
  MOD_RES (29)..(30): Xaa is C or S
VIMYHYKLLLVRGNDKYLMSIPSTKVPAXXTSPV

SEQ ID NO: 84347 - protein, 30 aa, Artificial Sequence
  Cyclic GFR-binding peptide
  MOD_RES (1)..(3): Xaa is C or S
XAXSEVTMNRHKRLVVNKNEDYYLISTASM

SEQ ID NO: 84348 - protein, 30 aa, Artificial Sequence
  Cyclic GFR-binding peptide
  MOD_RES (2)..(4): Xaa is C or S
RXGXSEVVMDYHYKLVVNNASDKYLISIPS

SEQ ID NO: 84349 - protein, 25 aa, Artificial Sequence
  Cyclic GFR-binding peptide
MPIKGYVKPKRGVFYLINIPSLAQP

SEQ ID NO: 84350 - protein, 24 aa, Artificial Sequence
  Cyclic GFR-binding peptide
IMRHKRLLLVRGNDYYLMSTASTK

SEQ ID NO: 84351 - protein, 34 aa, Artificial Sequence; identical to SEQ ID NO: 32400
  Cyclic GFR-binding peptide
  MOD_RES (1)..(33)..(34): Xaa is C or S

SEQ ID NO: 84352 - protein, 30 aa, Artificial Sequence
  Cyclic GFR-binding peptide
  MOD_RES (1)..(1): Xaa is C or S
XSRVIMPIKGYVKPKRGVFYLINIPSLAQP

SEQ ID NO: 84353 - protein, 29 aa, Artificial Sequence
  Cyclic GFR-binding peptide
EVVMDRHKRLVVNNASDYYLISTASLRTP

SEQ ID NO: 84354 - protein, 30 aa, Artificial Sequence; identical to SEQ ID NO: 32401
  Cyclic GFR-binding peptide

SEQ ID NO: 84355 - protein, 36 aa, Artificial Sequence; identical to SEQ ID NO: 32403
  Cyclic GFR-binding peptide
  MOD_RES (1)..(33)..(34): Xaa is C or S

SEQ ID NO: 84356 - protein, 31 aa, Artificial Sequence
  Cyclic GFR-binding peptide
  MOD_RES (29)..(30): Xaa is C or S
AMGRHKRLYTVVGKDYYLISTASLKTPVXXA

SEQ ID NO: 84357 - protein, 31 aa, Artificial Sequence
  Cyclic GFR-binding peptide
  MOD_RES (2)..(4): Xaa is C or S
RXAXSEVTMNRYKKLVVNKNEDFYLISIANM

SEQ ID NO: 84358 - protein, 32 aa, Artificial Sequence
  Cyclic GFR-binding peptide
  MOD_RES (27)..(28): Xaa is C or S
DEYKFKVVNNASDLYLISIPELRTPVXXTPPT

SEQ ID NO: 84359 - protein, 37 aa, Artificial Sequence; identical to SEQ ID NO: 32404
  Cyclic GFR-binding peptide
  MOD_RES (1)..(3)..(34)..(35): Xaa is C or S

SEQ ID NO: 84360 - protein, 27 aa, Artificial Sequence
  Cyclic GFR-binding peptide
  MOD_RES (26)..(27): Xaa is C or S
RHKRLVVNNAADYYLISTASLRAPVXX

SEQ ID NO: 84361 - protein, 27 aa, Artificial Sequence
  Cyclic GFR-binding peptide
  MOD_RES (2)..(2): Xaa is C or S
GXEEVIMYHYKLLLVRGNDKYLMSIPS

SEQ ID NO: 84362 - protein, 40 aa, Artificial Sequence; identical to SEQ ID NO: 32406
  Cyclic GFR-binding peptide
  MOD_RES (1)..(3)..(35)..(36): Xaa is C or S

SEQ ID NO: 84363 - protein, 22 aa, Artificial Sequence
  Cyclic GFR-binding peptide
PIKGYVKPTRGVFYLINIPSLD

SEQ ID NO: 84364 - protein, 21 aa, Artificial Sequence
  Cyclic GFR-binding peptide
NYHYKLVVNKNEDKYLISIPS

SEQ ID NO: 84365 - protein, 33 aa, Artificial Sequence; identical to SEQ ID NO: 32408
  Cyclic GFR-binding peptide
  MOD_RES (1)..(33): Xaa is C or S

SEQ ID NO: 84366 - protein, 39 aa, Artificial Sequence; identical to SEQ ID NO: 32412
  Cyclic GFR-binding peptide
  MOD_RES (2)..(34)..(35): Xaa is C or S

SEQ ID NO: 84367 - protein, 33 aa, Artificial Sequence; identical to SEQ ID NO: 32413
  Cyclic GFR-binding peptide
  MOD_RES (1)..(3): Xaa is C or S

SEQ ID NO: 84368 - protein, 23 aa, Artificial Sequence
  Cyclic GFR-binding peptide
EYKFKIIQQKDNLYLMSIPEMKT

SEQ ID NO: 84369 - protein, 33 aa, Artificial Sequence; identical to SEQ ID NO: 32414
  Cyclic GFR-binding peptide
  MOD_RES (1)..(3): Xaa is C or S

SEQ ID NO: 84370 - protein, 37 aa, Artificial Sequence; identical to SEQ ID NO: 32415
  Cyclic GFR-binding peptide
  MOD_RES (1)..(3)..(35)..(36): Xaa is C or S

SEQ ID NO: 84371 - protein, 34 aa, Artificial Sequence; identical to SEQ ID NO: 32416
  Cyclic GFR-binding peptide
  MOD_RES (2)..(33)..(34): Xaa is C or S

SEQ ID NO: 84372 - protein, 28 aa, Artificial Sequence
  Cyclic GFR-binding peptide
SVAMGRHKRLYTVVGKDYYLISTASLKT

SEQ ID NO: 84373 - protein, 31 aa, Artificial Sequence
  Cyclic GFR-binding peptide
  MOD_RES (2)..(4): Xaa is C or S
RXGXAEVVMDRHKRLVVNNAADYYLISTASL

SEQ ID NO: 84374 - protein, 31 aa, Artificial Sequence
  Cyclic GFR-binding peptide
  MOD_RES (1)..(3): Xaa is C or S
XGXRDVVMGRHKRLIIQQKDNYYLMSTASMK

SEQ ID NO: 84375 - protein, 30 aa, Artificial Sequence
  Cyclic GFR-binding peptide
  MOD_RES (2)..(4): Xaa is C or S
SXKXSRVIMPIKGYVKPKRGVFYLINIPSL

SEQ ID NO: 84376 - protein, 30 aa, Artificial Sequence; identical to SEQ ID NO: 32419
  Cyclic GFR-binding peptide

SEQ ID NO: 84377 - protein, 38 aa, Artificial Sequence; identical to SEQ ID NO: 32420
  Cyclic GFR-binding peptide
  MOD_RES (32)..(33): Xaa is C or S

SEQ ID NO: 84378 - protein, 22 aa, Artificial Sequence
  Cyclic GFR-binding peptide
MDEYKFKVVNNASDLYLISIPE

SEQ ID NO: 84379 - protein, 30 aa, Artificial Sequence
  Cyclic GFR-binding peptide
  MOD_RES (29)..(30): Xaa is C or S
TMNRYKKLVVNKNEDFYLISIANMKEPVXX

SEQ ID NO: 84380 - protein, 39 aa, Artificial Sequence; identical to SEQ ID NO: 32421
  Cyclic GFR-binding peptide
  MOD_RES (2)..(33)..(34): Xaa is C or S

SEQ ID NO: 84381 - protein, 36 aa, Artificial Sequence
  Cyclic GFR-binding peptide
  MOD_RES (30)..(31): Xaa is C or S
VVMNYHYKLIVNSSDDKYLVSIPSLKTPAXXPKPVH

SEQ ID NO: 84382 - protein, 25 aa, Artificial Sequence
  Cyclic GFR-binding peptide
VVMDRHKRLVVNNASDYYLISTASL

SEQ ID NO: 84383 - protein, 34 aa, Artificial Sequence
  Cyclic GFR-binding peptide
  MOD_RES (30)..(31): Xaa is C or S
VVMDYHYKLVVNNASDKYLISIPSLRTPVXXTPP

SEQ ID NO: 84384 - protein, 39 aa, Artificial Sequence; identical to SEQ ID NO: 32424
  Cyclic GFR-binding peptide
  MOD_RES (1)..(3)..(35)..(36): Xaa is C or S

SEQ ID NO: 84385 - protein, 34 aa, Artificial Sequence
  Cyclic GFR-binding peptide
  MOD_RES (29)..(30): Xaa is C or S
TMNYHYKLVVNKNEDKYLISIPSMKEPVXXPEPI

SEQ ID NO: 84386 - protein, 26 aa, Artificial Sequence
  Cyclic GFR-binding peptide
GYHYKLIIQQKDNKYLMSIPSMKTPT

SEQ ID NO: 84387 - protein, 26 aa, Artificial Sequence
  Cyclic GFR-binding peptide
  MOD_RES (26)..(26): Xaa is C or S
YHYKLVVNKNEDKYLISIPSMKEPVX

SEQ ID NO: 84388 - protein, 25 aa, Artificial Sequence
  Cyclic GFR-binding peptide
PIKGYVVNKNEDFYLINIPSMKEPV

SEQ ID NO: 84389 - protein, 27 aa, Artificial Sequence
  Cyclic GFR-binding peptide
VMDRHKRLVVNNAADYYLISTASLRAP

SEQ ID NO: 84390 - protein, 36 aa, Artificial Sequence; identical to SEQ ID NO: 32427
  Cyclic GFR-binding peptide
  MOD_RES (32)..(33): Xaa is C or S

SEQ ID NO: 84391 - protein, 28 aa, Artificial Sequence
  Cyclic GFR-binding peptide
  MOD_RES (27)..(28): Xaa is C or S
NRHKRLVVNKNEDYYLISTASMKEPVXX

SEQ ID NO: 84392 - protein, 20 aa, Artificial Sequence
  Cyclic GFR-binding peptide
RHKRLYTVVGKDYYLISTAS

SEQ ID NO: 84393 - protein, 34 aa, Artificial Sequence; identical to SEQ ID NO: 32428
  Cyclic GFR-binding peptide
  MOD_RES (1)..(3)..(34): Xaa is C or S

SEQ ID NO: 84394 - protein, 33 aa, Artificial Sequence
  Cyclic GFR-binding peptide
  MOD_RES (1)..(3): Xaa is C or S
XAXSEVTMNEYKFKVVNKNEDLYLISIPEMKEP

SEQ ID NO: 84395 - protein, 27 aa, Artificial Sequence
  Cyclic GFR-binding peptide
  MOD_RES (1)..(1): Xaa is C or S
XRDVVMGYHYKLIIQQKDNKYLMSIPS

SEQ ID NO: 84396 - protein, 26 aa, Artificial Sequence
  Cyclic GFR-binding peptide
VTMNEYKFKVVNKNEDLYLISIPEMK

SEQ ID NO: 84397 - protein, 29 aa, Artificial Sequence
  Cyclic GFR-binding peptide
  MOD_RES (2)..(4): Xaa is C or S
LXGXEEVIMYHYKLLLVRGNDKYLMSIPS

SEQ ID NO: 84398 - protein, 29 aa, Artificial Sequence
  Cyclic GFR-binding peptide
SKVVMPIKGYVKPTRGVFYLINIPSLDQP

SEQ ID NO: 84399 - protein, 42 aa, Artificial Sequence; identical to SEQ ID NO: 32430
  Cyclic GFR-binding peptide
  MOD_RES (2)..(4)..(36)..(37): Xaa is C or S

SEQ ID NO: 84400 - protein, 36 aa, Artificial Sequence; identical to SEQ ID NO: 32431
  Cyclic GFR-binding peptide
  MOD_RES (2)..(4)..(36): Xaa is C or S

SEQ ID NO: 84401 - protein, 36 aa, Artificial Sequence
  Cyclic GFR-binding peptide
  MOD_RES (30)..(31): Xaa is C or S
VTMNRYKKLVVNKNEDFYLISIANMKEPVXXPEPIG

SEQ ID NO: 84402 - protein, 24 aa, Artificial Sequence
  Cyclic GFR-binding peptide
EVIMYHYKLLLVRGNDKYLMSIPS

SEQ ID NO: 84403 - protein, 35 aa, Artificial Sequence; identical to SEQ ID NO: 32433
  Cyclic GFR-binding peptide
  MOD_RES (1)..(3)..(35): Xaa is C or S

SEQ ID NO: 84404 - protein, 24 aa, Artificial Sequence
  Cyclic GFR-binding peptide
RHKRLVVNNAADYYLISTASLRAP

SEQ ID NO: 84405 - protein, 39 aa, Artificial Sequence; identical to SEQ ID NO: 32434
  Cyclic GFR-binding peptide
  MOD_RES (2)..(34)..(35): Xaa is C or S

SEQ ID NO: 84406 - protein, 26 aa, Artificial Sequence
  Cyclic GFR-binding peptide
TMNRYKKLVVNKNEDFYLISIANMKE

SEQ ID NO: 84407 - protein, 31 aa, Artificial Sequence
  Cyclic GFR-binding peptide
  MOD_RES (27)..(28): Xaa is C or S
MPIKGYVKPKRGVFYLINIPSLAQPVXXPAA

SEQ ID NO: 84408 - protein, 30 aa, Artificial Sequence
  Cyclic GFR-binding peptide
  MOD_RES (29)..(30): Xaa is C or S
VMGEYKFKIIQQKDNLYLMSIPEMKTPTXX

SEQ ID NO: 84409 - protein, 29 aa, Artificial Sequence
  Cyclic GFR-binding peptide
VTMNPIKGYVVNKNEDFYLINIPSMKEPV

SEQ ID NO: 84410 - protein, 40 aa, Artificial Sequence; identical to SEQ ID NO: 32435
  Cyclic GFR-binding peptide
  MOD_RES (1)..(3)..(35)..(36): Xaa is C or S

SEQ ID NO: 84411 - protein, 27 aa, Artificial Sequence
  Cyclic GFR-binding peptide
EVVMDRHKRLVVNNASDYYLISTASLR

SEQ ID NO: 84412 - protein, 26 aa, Artificial Sequence
  Cyclic GFR-binding peptide
  MOD_RES (26)..(26): Xaa is C or S
RHKRLVVNNAADYYLISTASLRAPVX

SEQ ID NO: 84413 - protein, 30 aa, Artificial Sequence
  Cyclic GFR-binding peptide
  MOD_RES (26)..(27): Xaa is C or S
EYKFKIIQQKDNLYLMSIPEMKTPTXXPGA

SEQ ID NO: 84414 - protein, 24 aa, Artificial Sequence
  Cyclic GFR-binding peptide
YHYKLVVNKNEDKYLISIPSMKEP

SEQ ID NO: 84415 - protein, 30 aa, Artificial Sequence
  Cyclic GFR-binding peptide
  MOD_RES (27)..(28): Xaa is C or S
MRHKRLLLVRGNDYYLMSTASTKVPAXXTS

SEQ ID NO: 84416 - protein, 32 aa, Artificial Sequence
  Cyclic GFR-binding peptide
  MOD_RES (28)..(29): Xaa is C or S
MGEYKFKIIQQKDNLYLMSIPEMKTPTXXPGA

SEQ ID NO: 84417 - protein, 32 aa, Artificial Sequence
  Cyclic GFR-binding peptide
  MOD_RES (2)..(2): Xaa is C or S
AXSEVTMNYHYKLVVNKNEDKYLISIPSMKEP

SEQ ID NO: 84418 - protein, 35 aa, Artificial Sequence; identical to SEQ ID NO: 32437
  Cyclic GFR-binding peptide
  MOD_RES (32)..(33): Xaa is C or S

SEQ ID NO: 84419 - protein, 31 aa, Artificial Sequence
  Cyclic GFR-binding peptide
  MOD_RES (1)..(3): Xaa is C or S
XGXSEVVMDRHKRLVVNNASDYYLISTASLR

SEQ ID NO: 84420 - protein, 22 aa, Artificial Sequence
  Cyclic GFR-binding peptide
MNRHKRLVVNKNEDYYLISTAS

SEQ ID NO: 84421 - protein, 32 aa, Artificial Sequence; identical to SEQ ID NO: 32444
  Cyclic GFR-binding peptide
  MOD_RES (31)..(32): Xaa is C or S

SEQ ID NO: 84422 - protein, 26 aa, Artificial Sequence
  Cyclic GFR-binding peptide
SEVVMDRHKRLVVNNASDYYLISTAS

SEQ ID NO: 84423 - protein, 31 aa, Artificial Sequence
  Cyclic GFR-binding peptide
  MOD_RES (26)..(27): Xaa is C or S
RYKKLVVNKNEDFYLISIANMKEPVXXPEPI

SEQ ID NO: 84424 - protein, 32 aa, Artificial Sequence; identical to SEQ ID NO: 32446
  Cyclic GFR-binding peptide
  MOD_RES (31)..(32): Xaa is C or S

SEQ ID NO: 84425 - protein, 36 aa, Artificial Sequence
  Cyclic GFR-binding peptide
  MOD_RES (30)..(31): Xaa is C or S
VVMDRHKRLVVNNASDYYLISTASLRTPVXXTPPTS

SEQ ID NO: 84426 - protein, 30 aa, Artificial Sequence
  Cyclic GFR-binding peptide
  MOD_RES (2)..(2): Xaa is C or S
AXSEVTMNYHYKLVVNKNEDKYLISIPSMK

SEQ ID NO: 84427 - protein, 23 aa, Artificial Sequence
  Cyclic GFR-binding peptide
YHYKLIIQQKDNKYLMSIPSMKT

SEQ ID NO: 84428 - protein, 31 aa, Artificial Sequence; identical to SEQ ID NO: 32448
  Cyclic GFR-binding peptide
  MOD_RES (31)..(31): Xaa is C or S

SEQ ID NO: 84429 - protein, 31 aa, Artificial Sequence; identical to SEQ ID NO: 32450
  Cyclic GFR-binding peptide
  MOD_RES (1)..(1): Xaa is C or S

SEQ ID NO: 84430 - protein, 32 aa, Artificial Sequence; identical to SEQ ID NO: 32449
  Cyclic GFR-binding peptide
  MOD_RES (1)..(32): Xaa is C or S

SEQ ID NO: 84431 - protein, 25 aa, Artificial Sequence
  Cyclic GFR-binding peptide
MNRYKKLVVNKNEDFYLISIANMKE

SEQ ID NO: 84432 - protein, 21 aa, Artificial Sequence
  Cyclic GFR-binding peptide
GRHKRLIIQQKDNYYLMSTAS

SEQ ID NO: 84433 - protein, 26 aa, Artificial Sequence
  Cyclic GFR-binding peptide
SEVTMNYHYKLVVNKNEDKYLISIPS

SEQ ID NO: 84434 - protein, 28 aa, Artificial Sequence
  Cyclic GFR-binding peptide
ESVAMGRHKRLYTVVGKDYYLISTASLK

SEQ ID NO: 84435 - protein, 36 aa, Artificial Sequence; identical to SEQ ID NO: 32452
  Cyclic GFR-binding peptide
  MOD_RES (1)..(3)..(35)..(36): Xaa is C or S

SEQ ID NO: 84436 - protein, 26 aa, Artificial Sequence
  Cyclic GFR-binding peptide
  MOD_RES (26)..(26): Xaa is C or S
RHKRLVVNNASDYYLISTASLRTPVX

SEQ ID NO: 84437 - protein, 31 aa, Artificial Sequence; identical to SEQ ID NO: 32454
  Cyclic GFR-binding peptide
  MOD_RES (31)..(31): Xaa is C or S

SEQ ID NO: 84438 - protein, 38 aa, Artificial Sequence; identical to SEQ ID NO: 32455
  Cyclic GFR-binding peptide
  MOD_RES (1)..(3)..(34)..(35): Xaa is C or S

SEQ ID NO: 84439 - protein, 30 aa, Artificial Sequence
  Cyclic GFR-binding peptide
  MOD_RES (1)..(1): Xaa is C or S
XRDVVMGRHKRLIIQQKDNYYLMSTASMKT

SEQ ID NO: 84440 - protein, 34 aa, Artificial Sequence; identical to SEQ ID NO: 32457
  Cyclic GFR-binding peptide
  MOD_RES (1)..(3): Xaa is C or S

SEQ ID NO: 84441 - protein, 27 aa, Artificial Sequence
  Cyclic GFR-binding peptide
KVIMPIKGYIKPTKGIFYLINIPSLDQ

SEQ ID NO: 84442 - protein, 40 aa, Artificial Sequence; identical to SEQ ID NO: 32458
  Cyclic GFR-binding peptide
  MOD_RES (1)..(3)..(34)..(35): Xaa is C or S

SEQ ID NO: 84443 - protein, 37 aa, Artificial Sequence; identical to SEQ ID NO: 32460
  Cyclic GFR-binding peptide
  MOD_RES (2)..(4)..(36)..(37): Xaa is C or S

SEQ ID NO: 84444 - protein, 39 aa, Artificial Sequence; identical to SEQ ID NO: 32461
  Cyclic GFR-binding peptide
  MOD_RES (1)..(3)..(34)..(35): Xaa is C or S

SEQ ID NO: 84445 - protein, 34 aa, Artificial Sequence
  Cyclic GFR-binding peptide
  MOD_RES (2)..(4): Xaa is C or S
RXAXSEVTMNRYKKLVVNKNEDFYLISIANMKEP

SEQ ID NO: 84446 - protein, 32 aa, Artificial Sequence
  Cyclic GFR-binding peptide
  MOD_RES (2)..(4): Xaa is C or S
RXAXSEVTMNPIKGYVVNKNEDFYLINIPSMK

SEQ ID NO: 84447 - protein, 34 aa, Artificial Sequence; identical to SEQ ID NO: 32464
  Cyclic GFR-binding peptide
  MOD_RES (32)..(33): Xaa is C or S

SEQ ID NO: 84448 - protein, 29 aa, Artificial Sequence
  Cyclic GFR-binding peptide
  MOD_RES (27)..(28): Xaa is C or S
GYHYKLIIQQKDNKYLMSIPSMKTPTXXP

SEQ ID NO: 84449 - protein, 34 aa, Artificial Sequence
  Cyclic GFR-binding peptide
  MOD_RES (28)..(29): Xaa is C or S
MNPIKGYVVNKNEDFYLINIPSMKEPVXXPEPIG

SEQ ID NO: 84450 - protein, 30 aa, Artificial Sequence
  Cyclic GFR-binding peptide
  MOD_RES (2)..(4): Xaa is C or S
RXAXSEVTMNRYKKLVVNKNEDFYLISIAN

SEQ ID NO: 84451 - protein, 35 aa, Artificial Sequence
  Cyclic GFR-binding peptide
  MOD_RES (30)..(31): Xaa is C or S
VVMGYHYKLIIQQKDNKYLMSIPSMKTPTXXPGAS

SEQ ID NO: 84452 - protein, 40 aa, Artificial Sequence; identical to SEQ ID NO: 32465
  Cyclic GFR-binding peptide
  MOD_RES (1)..(3)..(35)..(36): Xaa is C or S

SEQ ID NO: 84453 - protein, 23 aa, Artificial Sequence
  Cyclic GFR-binding peptide
MDRHKRLVVNNASDYYLISTASL

SEQ ID NO: 84454 - protein, 28 aa, Artificial Sequence
  Cyclic GFR-binding peptide
VVMGEYKFKIIQQKDNLYLMSIPEMKTP

SEQ ID NO: 84455 - protein, 33 aa, Artificial Sequence
  Cyclic GFR-binding peptide
  MOD_RES (2)..(4): Xaa is C or S
RXGXSEVVMDYHYKLVVNNASDKYLISIPSLRT

SEQ ID NO: 84456 - protein, 28 aa, Artificial Sequence
  Cyclic GFR-binding peptide
  MOD_RES (28)..(28): Xaa is C or S
MNRHKRLVVNKNEDYYLISTASMKEPVX

SEQ ID NO: 84457 - protein, 24 aa, Artificial Sequence
  Cyclic GFR-binding peptide
NEYKFKVVNKNEDLYLISIPEMKE

SEQ ID NO: 84458 - protein, 37 aa, Artificial Sequence; identical to SEQ ID NO: 32466
  Cyclic GFR-binding peptide
  MOD_RES (2)..(33)..(34): Xaa is C or S

SEQ ID NO: 84459 - protein, 25 aa, Artificial Sequence
  Cyclic GFR-binding peptide
YHYKLVVNKNEDKYLISIPSMKEPV

SEQ ID NO: 84460 - protein, 22 aa, Artificial Sequence
  Cyclic GFR-binding peptide
NEYKFKVVNKNEDLYLISIPEM

SEQ ID NO: 84461 - protein, 35 aa, Artificial Sequence
  Cyclic GFR-binding peptide
  MOD_RES (29)..(30): Xaa is C or S
VMGRHKRLIIQQKDNYYLMSTASMKTPTXXPGASG

SEQ ID NO: 84462 - protein, 32 aa, Artificial Sequence; identical to SEQ ID NO: 32468
  Cyclic GFR-binding peptide
  MOD_RES (31)..(32): Xaa is C or S

SEQ ID NO: 84463 - protein, 32 aa, Artificial Sequence
  Cyclic GFR-binding peptide
  MOD_RES (28)..(29): Xaa is C or S
MNPIKGYVVNKNEDFYLINIPSMKEPVXXPEP

SEQ ID NO: 84464 - protein, 27 aa, Artificial Sequence
  Cyclic GFR-binding peptide
SEVTMNEYKFKVVNKNEDLYLISIPEM

SEQ ID NO: 84465 - protein, 22 aa, Artificial Sequence
  Cyclic GFR-binding peptide
MGRHKRLIIQQKDNYYLMSTAS

SEQ ID NO: 84466 - protein, 22 aa, Artificial Sequence
  Cyclic GFR-binding peptide
EYKFKLLVRGNDLYLMSIPETK

SEQ ID NO: 84467 - protein, 33 aa, Artificial Sequence
  Cyclic GFR-binding peptide
  MOD_RES (28)..(29): Xaa is C or S
MDRHKRLVVNNAADYYLISTASLRAPVXXSAPA

SEQ ID NO: 84468 - protein, 27 aa, Artificial Sequence
  Cyclic GFR-binding peptide
SEVVMDRHKRLVVNNASDYYLISTASL

SEQ ID NO: 84469 - protein, 35 aa, Artificial Sequence; identical to SEQ ID NO: 32470
  Cyclic GFR-binding peptide
  MOD_RES (2)..(34)..(35): Xaa is C or S

SEQ ID NO: 84470 - protein, 26 aa, Artificial Sequence
  Cyclic GFR-binding peptide
MNPIKGYVVNKNEDFYLINIPSMKEP

SEQ ID NO: 84471 - protein, 30 aa, Artificial Sequence
  Cyclic GFR-binding peptide
  MOD_RES (1)..(3): Xaa is C or S
XGXEEVIMYHYKLLLVRGNDKYLMSIPSTK

SEQ ID NO: 84472 - protein, 30 aa, Artificial Sequence
  Cyclic GFR-binding peptide
  MOD_RES (29)..(30): Xaa is C or S
VMDRHKRLVVNNASDYYLISTASLRTPVXX

SEQ ID NO: 84473 - protein, 29 aa, Artificial Sequence
  Cyclic GFR-binding peptide
  MOD_RES (29)..(29): Xaa is C or S
VVMPIKGYVKPTRGVFYLINIPSLDQPVX

SEQ ID NO: 84474 - protein, 39 aa, Artificial Sequence; identical to SEQ ID NO: 32472
  Cyclic GFR-binding peptide
  MOD_RES (1)..(3)..(35)..(36): Xaa is C or S

SEQ ID NO: 84475 - protein, 29 aa, Artificial Sequence
  Cyclic GFR-binding peptide
VVMGRHKRLIIQQKDNYYLMSTASMKTPT

SEQ ID NO: 84476 - protein, 38 aa, Artificial Sequence; identical to SEQ ID NO: 32474
  Cyclic GFR-binding peptide
  MOD_RES (2)..(4)..(36)..(37): Xaa is C or S

SEQ ID NO: 84477 - protein, 25 aa, Artificial Sequence
  Cyclic GFR-binding peptide
VTMNPIKGYVVNKNEDFYLINIPSM

SEQ ID NO: 84478 - protein, 30 aa, Artificial Sequence
  Cyclic GFR-binding peptide
  MOD_RES (1)..(1): Xaa is C or S
XSEVTMNYHYKLVVNKNEDKYLISIPSMKE

SEQ ID NO: 84479 - protein, 33 aa, Artificial Sequence
  Cyclic GFR-binding peptide
  MOD_RES (30)..(31): Xaa is C or S
VVMGYHYKLIIQQKDNKYLMSIPSMKTPTXXPG

SEQ ID NO: 84480 - protein, 23 aa, Artificial Sequence
  Cyclic GFR-binding peptide
VIMPIKGYIKPTKGIFYLINIPS

SEQ ID NO: 84481 - protein, 27 aa, Artificial Sequence
  Cyclic GFR-binding peptide
  MOD_RES (27)..(27): Xaa is C or S
DRHKRLVVNNASDYYLISTASLRTPVX

SEQ ID NO: 84482 - protein, 31 aa, Artificial Sequence; identical to SEQ ID NO: 32478
  Cyclic GFR-binding peptide
  MOD_RES (31)..(31): Xaa is C or S

SEQ ID NO: 84483 - protein, 30 aa, Artificial Sequence
  Cyclic GFR-binding peptide
  MOD_RES (30)..(30): Xaa is C or S
RVIMPIKGYVKPKRGVFYLINIPSLAQPVX

SEQ ID NO: 84484 - protein, 22 aa, Artificial Sequence
  Cyclic GFR-binding peptide
IMEYKFKLLVRGNDLYLMSIPE

SEQ ID NO: 84485 - protein, 25 aa, Artificial Sequence
  Cyclic GFR-binding peptide
RYKKLVVNKNEDFYLISIANMKEPV

SEQ ID NO: 84486 - protein, 30 aa, Artificial Sequence
  Cyclic GFR-binding peptide
  MOD_RES (2)..(4): Xaa is C or S
RXAXSEVTMNPIKGYVVNKNEDFYLINIPS

SEQ ID NO: 84487 - protein, 27 aa, Artificial Sequence
  Cyclic GFR-binding peptide
  MOD_RES (26)..(27): Xaa is C or S
YHYKLLLVRGNDKYLMSIPSTKVPAXX

SEQ ID NO: 84488 - protein, 33 aa, Artificial Sequence
  Cyclic GFR-binding peptide
  MOD_RES (1)..(3): Xaa is C or S
XGXRDVVMGYHYKLIIQQKDNKYLMSIPSMKTP

SEQ ID NO: 84489 - protein, 35 aa, Artificial Sequence
  Cyclic GFR-binding peptide
  MOD_RES (29)..(30): Xaa is C or S
VMNEYKFKIVNSSDDLYLVSIPELKTPAXXPKPVH

SEQ ID NO: 84490 - protein, 39 aa, Artificial Sequence; identical to SEQ ID NO: 32482
  Cyclic GFR-binding peptide
  MOD_RES (1)..(3)..(35)..(36): Xaa is C or S

SEQ ID NO: 84491 - protein, 33 aa, Artificial Sequence
  Cyclic GFR-binding peptide
  MOD_RES (29)..(30): Xaa is C or S
TMNEYKFKVVNKNEDLYLISIPEMKEPVXXPEP

SEQ ID NO: 84492 - protein, 31 aa, Artificial Sequence
  Cyclic GFR-binding peptide
  MOD_RES (28)..(29): Xaa is C or S
IMPIKGYIKPTKGIFYLINIPSLDQSVXXPS

SEQ ID NO: 84493 - protein, 27 aa, Artificial Sequence
  Cyclic GFR-binding peptide
  MOD_RES (26)..(27): Xaa is C or S
EYKFKVVNKNEDLYLISIPEMKEPVXX

SEQ ID NO: 84494 - protein, 34 aa, Artificial Sequence
  Cyclic GFR-binding peptide
  MOD_RES (2)..(4): Xaa is C or S
RXAXSEVTMNPIKGYVVNKNEDFYLINIPSMKEP

SEQ ID NO: 84495 - protein, 33 aa, Artificial Sequence; identical to SEQ ID NO: 32484
  Cyclic GFR-binding peptide
  MOD_RES (31)..(32): Xaa is C or S

SEQ ID NO: 84496 - protein, 20 aa, Artificial Sequence
  Cyclic GFR-binding peptide
EYKFKVVNKNEDLYLISIPE

SEQ ID NO: 84497 - protein, 39 aa, Artificial Sequence; identical to SEQ ID NO: 32486
  Cyclic GFR-binding peptide
  MOD_RES (2)..(4)..(36)..(37): Xaa is C or S

SEQ ID NO: 84498 - protein, 35 aa, Artificial Sequence
  Cyclic GFR-binding peptide
  MOD_RES (29)..(30): Xaa is C or S
TMNRYKKLVVNKNEDFYLISIANMKEPVXXPEPIG

SEQ ID NO: 84499 - protein, 22 aa, Artificial Sequence
  Cyclic GFR-binding peptide
MGYHYKLIIQQKDNKYLMSIPS

SEQ ID NO: 84500 - protein, 25 aa, Artificial Sequence
  Cyclic GFR-binding peptide
MRHKRLLLVRGNDYYLMSTASTKVP

SEQ ID NO: 84501 - protein, 32 aa, Artificial Sequence
  Cyclic GFR-binding peptide
  MOD_RES (30)..(31): Xaa is C or S
VTMNYHYKLVVNKNEDKYLISIPSMKEPVXXP

SEQ ID NO: 84502 - protein, 37 aa, Artificial Sequence; identical to SEQ ID NO: 32491
  Cyclic GFR-binding peptide
  MOD_RES (2)..(34)..(35): Xaa is C or S

SEQ ID NO: 84503 - protein, 27 aa, Artificial Sequence
  Cyclic GFR-binding peptide
EEVIMEYKFKLLVRGNDLYLMSIPETK

SEQ ID NO: 84504 - protein, 27 aa, Artificial Sequence
  Cyclic GFR-binding peptide
SEVTMNRYKKLVVNKNEDFYLISIANM

SEQ ID NO: 84505 - protein, 30 aa, Artificial Sequence
  Cyclic GFR-binding peptide
  MOD_RES (26)..(27): Xaa is C or S
RHKRLIIQQKDNYYLMSTASMKTPTXXPGA

SEQ ID NO: 84506 - protein, 24 aa, Artificial Sequence
  Cyclic GFR-binding peptide
VMDRHKRLVVNNAADYYLISTASL

SEQ ID NO: 84507 - protein, 32 aa, Artificial Sequence
  Cyclic GFR-binding peptide
  MOD_RES (2)..(4): Xaa is C or S
RXGXSEVVMDRHKRLVVNNASDYYLISTASLR

SEQ ID NO: 84508 - protein, 37 aa, Artificial Sequence; identical to SEQ ID NO: 32494
  Cyclic GFR-binding peptide
  MOD_RES (32)..(33): Xaa is C or S

SEQ ID NO: 84509 - protein, 25 aa, Artificial Sequence
  Cyclic GFR-binding peptide
NEYKFKVVNKNEDLYLISIPEMKEP

SEQ ID NO: 84510 - protein, 32 aa, Artificial Sequence
  Cyclic GFR-binding peptide
  MOD_RES (2)..(4): Xaa is C or S
RXAXSEVTMNRYKKLVVNKNEDFYLISIANMK

SEQ ID NO: 84511 - protein, 34 aa, Artificial Sequence
  Cyclic GFR-binding peptide
  MOD_RES (29)..(30): Xaa is C or S
TMNPIKGYVVNKNEDFYLINIPSMKEPVXXPEPI

SEQ ID NO: 84512 - protein, 30 aa, Artificial Sequence
  Cyclic GFR-binding peptide
  MOD_RES (1)..(1): Xaa is C or S
XAEVVMDRHKRLVVNNAADYYLISTASLRA

SEQ ID NO: 84513 - protein, 29 aa, Artificial Sequence
  Cyclic GFR-binding peptide
  MOD_RES (1)..(3): Xaa is C or S
XGXESVAMGRHKRLYTVVGKDYYLISTAS

SEQ ID NO: 84514 - protein, 35 aa, Artificial Sequence; identical to SEQ ID NO: 32499
  Cyclic GFR-binding peptide
  MOD_RES (2)..(4): Xaa is C or S

SEQ ID NO: 84515 - protein, 37 aa, Artificial Sequence; identical to SEQ ID NO: 32500
  Cyclic GFR-binding peptide
  MOD_RES (2)..(4)..(35)..(36): Xaa is C or S

SEQ ID NO: 84516 - protein, 35 aa, Artificial Sequence; identical to SEQ ID NO: 32501
  Cyclic GFR-binding peptide
  MOD_RES (2)..(4): Xaa is C or S

SEQ ID NO: 84517 - protein, 31 aa, Artificial Sequence
  Cyclic GFR-binding peptide
  MOD_RES (30)..(31): Xaa is C or S
EVIMRHKRLLLVRGNDYYLMSTASTKVPAXX

SEQ ID NO: 84518 - protein, 23 aa, Artificial Sequence
  Cyclic GFR-binding peptide
AMGRHKRLYTVVGKDYYLISTAS

SEQ ID NO: 84519 - protein, 32 aa, Artificial Sequence
  Cyclic GFR-binding peptide
  MOD_RES (2)..(2): Xaa is C or S
GXSEVVMDRHKRLVVNNASDYYLISTASLRTP

SEQ ID NO: 84520 - protein, 41 aa, Artificial Sequence; identical to SEQ ID NO: 32502
  Cyclic GFR-binding peptide
  MOD_RES (2)..(4)..(36)..(37): Xaa is C or S

SEQ ID NO: 84521 - protein, 20 aa, Artificial Sequence
  Cyclic GFR-binding peptide
RHKRLVVNNASDYYLISTAS

SEQ ID NO: 84522 - protein, 40 aa, Artificial Sequence; identical to SEQ ID NO: 32505
  Cyclic GFR-binding peptide
  MOD_RES (2)..(4)..(36)..(37): Xaa is C or S

SEQ ID NO: 84523 - protein, 24 aa, Artificial Sequence
  Cyclic GFR-binding peptide
MRHKRLLLVRGNDYYLMSTASTKV

SEQ ID NO: 84524 - protein, 31 aa, Artificial Sequence
  Cyclic GFR-binding peptide
  MOD_RES (1)..(3): Xaa is C or S
XAXSEVTMNPIKGYVVNKNEDFYLINIPSMK

SEQ ID NO: 84525 - protein, 33 aa, Artificial Sequence; identical to SEQ ID NO: 32506
  Cyclic GFR-binding peptide
  MOD_RES (2)..(33): Xaa is C or S

SEQ ID NO: 84526 - protein, 34 aa, Artificial Sequence
  Cyclic GFR-binding peptide
  MOD_RES (30)..(31): Xaa is C or S
VTMNYHYKLVVNKNEDKYLISIPSMKEPVXXPEP

SEQ ID NO: 84527 - protein, 35 aa, Artificial Sequence; identical to SEQ ID NO: 32508
  Cyclic GFR-binding peptide
  MOD_RES (1)..(33)..(34): Xaa is C or S

SEQ ID NO: 84528 - protein, 32 aa, Artificial Sequence
  Cyclic GFR-binding peptide
  MOD_RES (2)..(4): Xaa is C or S
SXKXSRVIMPIKGYVKPKRGVFYLINIPSLAQ

SEQ ID NO: 84529 - protein, 38 aa, Artificial Sequence; identical to SEQ ID NO: 32509
  Cyclic GFR-binding peptide
  MOD_RES (2)..(4)..(35)..(36): Xaa is C or S

SEQ ID NO: 84530 - protein, 29 aa, Artificial Sequence
  Cyclic GFR-binding peptide
  MOD_RES (27)..(28): Xaa is C or S
NRHKRLVVNKNEDYYLISTASMKEPVXXP

SEQ ID NO: 84531 - protein, 41 aa, Artificial Sequence; identical to SEQ ID NO: 32510
  Cyclic GFR-binding peptide
  MOD_RES (2)..(4)..(35)..(36): Xaa is C or S

SEQ ID NO: 84532 - protein, 27 aa, Artificial Sequence
  Cyclic GFR-binding peptide
  MOD_RES (26)..(27): Xaa is C or S
EYKFKVVNNASDLYLISIPELRTPVXX

SEQ ID NO: 84533 - protein, 36 aa, Artificial Sequence; identical to SEQ ID NO: 32511
  Cyclic GFR-binding peptide
  MOD_RES (32)..(33): Xaa is C or S

SEQ ID NO: 84534 - protein, 38 aa, Artificial Sequence; identical to SEQ ID NO: 32512
  Cyclic GFR-binding peptide
  MOD_RES (1)..(32)..(33): Xaa is C or S

SEQ ID NO: 84535 - protein, 29 aa, Artificial Sequence
  Cyclic GFR-binding peptide
  MOD_RES (2)..(2): Xaa is C or S
AXSEVTMNYHYKLVVNKNEDKYLISIPSM

SEQ ID NO: 84536 - protein, 31 aa, Artificial Sequence
  Cyclic GFR-binding peptide
  MOD_RES (2)..(2): Xaa is C or S
AXSEVTMNRYKKLVVNKNEDFYLISIANMKE

SEQ ID NO: 84537 - protein, 21 aa, Artificial Sequence
  Cyclic GFR-binding peptide
PIKGYIKPTKGIFYLINIPSL

SEQ ID NO: 84538 - protein, 23 aa, Artificial Sequence
  Cyclic GFR-binding peptide
NPIKGYVVNKNEDFYLINIPSMK

SEQ ID NO: 84539 - protein, 32 aa, Artificial Sequence
  Cyclic GFR-binding peptide
  MOD_RES (27)..(28): Xaa is C or S
GEYKFKIIQQKDNLYLMSIPEMKTPTXXPGAS

SEQ ID NO: 84540 - protein, 40 aa, Artificial Sequence; identical to SEQ ID NO: 32514
  Cyclic GFR-binding peptide
  MOD_RES (1)..(3)..(35)..(36): Xaa is C or S

SEQ ID NO: 84541 - protein, 26 aa, Artificial Sequence
  Cyclic GFR-binding peptide
EVTMNYHYKLVVNKNEDKYLISIPSM

SEQ ID NO: 84542 - protein, 38 aa, Artificial Sequence; identical to SEQ ID NO: 32517
  Cyclic GFR-binding peptide
  MOD_RES (1)..(32)..(33): Xaa is C or S

SEQ ID NO: 84543 - protein, 33 aa, Artificial Sequence
  Cyclic GFR-binding peptide
  MOD_RES (30)..(31): Xaa is C or S
VAMGRHKRLYTVVGKDYYLISTASLKTPVXXAK

SEQ ID NO: 84544 - protein, 32 aa, Artificial Sequence; identical to SEQ ID NO: 32519
  Cyclic GFR-binding peptide
  MOD_RES (1)..(1): Xaa is C or S

SEQ ID NO: 84545 - protein, 32 aa, Artificial Sequence
  Cyclic GFR-binding peptide
  MOD_RES (27)..(28): Xaa is C or S
GYHYKLIIQQKDNKYLMSIPSMKTPTXXPGAS

SEQ ID NO: 84546 - protein, 31 aa, Artificial Sequence
  Cyclic GFR-binding peptide
  MOD_RES (26)..(27): Xaa is C or S
EYKFKLLVRGNDLYLMSIPETKVPAXXTSPV

SEQ ID NO: 84547 - protein, 28 aa, Artificial Sequence
  Cyclic GFR-binding peptide
EVIMEYKFKLLVRGNDLYLMSIPETKVP

SEQ ID NO: 84548 - protein, 40 aa, Artificial Sequence; identical to SEQ ID NO: 32520
  Cyclic GFR-binding peptide
  MOD_RES (1)..(3)..(34)..(35): Xaa is C or S

SEQ ID NO: 84549 - protein, 36 aa, Artificial Sequence; identical to SEQ ID NO: 32521
  Cyclic GFR-binding peptide
  MOD_RES (1)..(33)..(34): Xaa is C or S

SEQ ID NO: 84550 - protein, 28 aa, Artificial Sequence
  Cyclic GFR-binding peptide
  MOD_RES (26)..(27): Xaa is C or S
RHKRLVVNNASDYYLISTASLRTPVXXT

SEQ ID NO: 84551 - protein, 32 aa, Artificial Sequence
  Cyclic GFR-binding peptide
  MOD_RES (27)..(28): Xaa is C or S
GRHKRLYTVVGKDYYLISTASLKTPVXXAKSA

SEQ ID NO: 84552 - protein, 23 aa, Artificial Sequence
  Cyclic GFR-binding peptide
GYHYKLIIQQKDNKYLMSIPSMK

SEQ ID NO: 84553 - protein, 27 aa, Artificial Sequence
  Cyclic GFR-binding peptide
VTMNYHYKLVVNKNEDKYLISIPSMKE

SEQ ID NO: 84554 - protein, 32 aa, Artificial Sequence; identical to SEQ ID NO: 32525
  Cyclic GFR-binding peptide
  MOD_RES (32)..(32): Xaa is C or S

SEQ ID NO: 84555 - protein, 33 aa, Artificial Sequence; identical to SEQ ID NO: 32526
  Cyclic GFR-binding peptide
  MOD_RES (1)..(32)..(33): Xaa is C or S

SEQ ID NO: 84556 - protein, 23 aa, Artificial Sequence
  Cyclic GFR-binding peptide
GEYKFKIIQQKDNLYLMSIPEMK

SEQ ID NO: 84557 - protein, 32 aa, Artificial Sequence; identical to SEQ ID NO: 32527
  Cyclic GFR-binding peptide
  MOD_RES (31)..(32): Xaa is C or S

SEQ ID NO: 84558 - protein, 25 aa, Artificial Sequence
  Cyclic GFR-binding peptide
IMPIKGYVKPKRGVFYLINIPSLAQ

SEQ ID NO: 84559 - protein, 36 aa, Artificial Sequence; identical to SEQ ID NO: 32529
  Cyclic GFR-binding peptide
  MOD_RES (2)..(34)..(35): Xaa is C or S

SEQ ID NO: 84560 - protein, 34 aa, Artificial Sequence
  Cyclic GFR-binding peptide
  MOD_RES (30)..(31): Xaa is C or S
VTMNRHKRLVVNKNEDYYLISTASMKEPVXXPEP

SEQ ID NO: 84561 - protein, 26 aa, Artificial Sequence
  Cyclic GFR-binding peptide
MDRHKRLVVNNAADYYLISTASLRAP

SEQ ID NO: 84562 - protein, 30 aa, Artificial Sequence
  Cyclic GFR-binding peptide
  MOD_RES (2)..(4): Xaa is C or S
RXGXESVAMGRHKRLYTVVGKDYYLISTAS

SEQ ID NO: 84563 - protein, 35 aa, Artificial Sequence
  Cyclic GFR-binding peptide
  MOD_RES (29)..(30): Xaa is C or S
VMGYHYKLIIQQKDNKYLMSIPSMKTPTXXPGASG

SEQ ID NO: 84564 - protein, 38 aa, Artificial Sequence; identical to SEQ ID NO: 32531
  Cyclic GFR-binding peptide
  MOD_RES (2)..(4)..(36)..(37): Xaa is C or S

SEQ ID NO: 84565 - protein, 31 aa, Artificial Sequence
  Cyclic GFR-binding peptide
  MOD_RES (29)..(30): Xaa is C or S
VIMYHYKLLLVRGNDKYLMSIPSTKVPAXXT

SEQ ID NO: 84566 - protein, 37 aa, Artificial Sequence; identical to SEQ ID NO: 32532
  Cyclic GFR-binding peptide
  MOD_RES (31)..(32): Xaa is C or S

SEQ ID NO: 84567 - protein, 33 aa, Artificial Sequence; identical to SEQ ID NO: 32534
  Cyclic GFR-binding peptide
  MOD_RES (1)..(32)..(33): Xaa is C or S

SEQ ID NO: 84568 - protein, 20 aa, Artificial Sequence
  Cyclic GFR-binding peptide
EYKFKVVNNASDLYLISIPE

SEQ ID NO: 84569 - protein, 26 aa, Artificial Sequence
  Cyclic GFR-binding peptide
  MOD_RES (26)..(26): Xaa is C or S
RHKRLVVNKNEDYYLISTASMKEPVX

SEQ ID NO: 84570 - protein, 32 aa, Artificial Sequence
  Cyclic GFR-binding peptide
  MOD_RES (29)..(30): Xaa is C or S
VIMRHKRLLLVRGNDYYLMSTASTKVPAXXTS

SEQ ID NO: 84571 - protein, 21 aa, Artificial Sequence
  Cyclic GFR-binding peptide
EYKFKVVNNASDLYLISIPEL

SEQ ID NO: 84572 - protein, 38 aa, Artificial Sequence; identical to SEQ ID NO: 32536
  Cyclic GFR-binding peptide
  MOD_RES (32)..(33): Xaa is C or S

SEQ ID NO: 84573 - protein, 39 aa, Artificial Sequence; identical to SEQ ID NO: 32537
  Cyclic GFR-binding peptide
  MOD_RES (2)..(4)..(35)..(36): Xaa is C or S

SEQ ID NO: 84574 - protein, 32 aa, Artificial Sequence
  Cyclic GFR-binding peptide
  MOD_RES (29)..(30): Xaa is C or S
VIMYHYKLLLVRGNDKYLMSIPSTKVPAXXTS

SEQ ID NO: 84575 - protein, 38 aa, Artificial Sequence; identical to SEQ ID NO: 32538
  Cyclic GFR-binding peptide
  MOD_RES (2)..(34)..(35): Xaa is C or S

SEQ ID NO: 84576 - protein, 30 aa, Artificial Sequence
  Cyclic GFR-binding peptide
  MOD_RES (1)..(1): Xaa is C or S
XSEVVMDEYKFKVVNNASDLYLISIPELRT

SEQ ID NO: 84577 - protein, 33 aa, Artificial Sequence
  Cyclic GFR-binding peptide
  MOD_RES (27)..(28): Xaa is C or S
MPIKGYIKPTKGIFYLINIPSLDQSVXXPSASA

SEQ ID NO: 84578 - protein, 30 aa, Artificial Sequence
  Cyclic GFR-binding peptide
SEVTMNPIKGYVVNKNEDFYLINIPSMKEP

SEQ ID NO: 84579 - protein, 25 aa, Artificial Sequence
  Cyclic GFR-binding peptide
EYKFKIIQQKDNLYLMSIPEMKTPT

SEQ ID NO: 84580 - protein, 33 aa, Artificial Sequence
  Cyclic GFR-binding peptide
  MOD_RES (27)..(28): Xaa is C or S
MPIKGYVKPKRGVFYLINIPSLAQPVXXPAASA

SEQ ID NO: 84581 - protein, 39 aa, Artificial Sequence; identical to SEQ ID NO: 32540
  Cyclic GFR-binding peptide
  MOD_RES (2)..(4)..(35)..(36): Xaa is C or S

SEQ ID NO: 84582 - protein, 34 aa, Artificial Sequence
  Cyclic GFR-binding peptide
  MOD_RES (29)..(30): Xaa is C or S
VIMPIKGYIKPTKGIFYLINIPSLDQSVXXPSAS

SEQ ID NO: 84583 - protein, 37 aa, Artificial Sequence; identical to SEQ ID NO: 32541
  Cyclic GFR-binding peptide
  MOD_RES (1)..(33)..(34): Xaa is C or S

SEQ ID NO: 84584 - protein, 30 aa, Artificial Sequence
  Cyclic GFR-binding peptide
  MOD_RES (2)..(4): Xaa is C or S
LXGXEEVIMYHYKLLLVRGNDKYLMSIPST

SEQ ID NO: 84585 - protein, 27 aa, Artificial Sequence
  Cyclic GFR-binding peptide
EEVIMRHKRLLLVRGNDYYLMSTASTK

SEQ ID NO: 84586 - protein, 36 aa, Artificial Sequence; identical to SEQ ID NO: 32542
  Cyclic GFR-binding peptide
  MOD_RES (2)..(34)..(35): Xaa is C or S

SEQ ID NO: 84587 - protein, 33 aa, Artificial Sequence
  Cyclic GFR-binding peptide
  MOD_RES (30)..(31): Xaa is C or S
VVMGRHKRLIIQQKDNYYLMSTASMKTPTXXPG

SEQ ID NO: 84588 - protein, 34 aa, Artificial Sequence; identical to SEQ ID NO: 32544
  Cyclic GFR-binding peptide
  MOD_RES (2)..(34): Xaa is C or S

SEQ ID NO: 84589 - protein, 29 aa, Artificial Sequence
  Cyclic GFR-binding peptide
VVMGYHYKLIIQQKDNKYLMSIPSMKTPT

SEQ ID NO: 84590 - protein, 25 aa, Artificial Sequence
  Cyclic GFR-binding peptide
KVIMPIKGYIKPTKGIFYLINIPSL

SEQ ID NO: 84591 - protein, 31 aa, Artificial Sequence; identical to SEQ ID NO: 32545
  Cyclic GFR-binding peptide
  MOD_RES (31)..(31): Xaa is C or S

SEQ ID NO: 84592 - protein, 32 aa, Artificial Sequence
  Cyclic GFR-binding peptide
  MOD_RES (2)..(4): Xaa is C or S
RXGXESVAMGRHKRLYTVVGKDYYLISTASLK

SEQ ID NO: 84593 - protein, 25 aa, Artificial Sequence
  Cyclic GFR-binding peptide
PIKGYVKPKRGVFYLINIPSLAQPV

SEQ ID NO: 84594 - protein, 22 aa, Artificial Sequence
  Cyclic GFR-binding peptide
MNRYKKLVVNKNEDFYLISIAN

SEQ ID NO: 84595 - protein, 32 aa, Artificial Sequence
  Cyclic GFR-binding peptide
  MOD_RES (28)..(29): Xaa is C or S
IMPIKGYVKPKRGVFYLINIPSLAQPVXXPAA

SEQ ID NO: 84596 - protein, 30 aa, Artificial Sequence
  Cyclic GFR-binding peptide
  MOD_RES (2)..(4): Xaa is C or S
RXGXSEVVMDEYKFKVVNNASDLYLISIPE

SEQ ID NO: 84597 - protein, 27 aa, Artificial Sequence
  Cyclic GFR-binding peptide
VIMPIKGYIKPTKGIFYLINIPSLDQS

SEQ ID NO: 84598 - protein, 26 aa, Artificial Sequence
  Cyclic GFR-binding peptide
VVMPIKGYVKPTRGVFYLINIPSLDQ

SEQ ID NO: 84599 - protein, 31 aa, Artificial Sequence
  Cyclic GFR-binding peptide
  MOD_RES (29)..(30): Xaa is C or S
VIMPIKGYVKPKRGVFYLINIPSLAQPVXXP

SEQ ID NO: 84600 - protein, 29 aa, Artificial Sequence
  Cyclic GFR-binding peptide
  MOD_RES (27)..(28): Xaa is C or S
MYHYKLLLVRGNDKYLMSIPSTKVPAXXT

SEQ ID NO: 84601 - protein, 38 aa, Artificial Sequence; identical to SEQ ID NO: 32551
  Cyclic GFR-binding peptide
  MOD_RES (32)..(33): Xaa is C or S

SEQ ID NO: 84602 - protein, 27 aa, Artificial Sequence
  Cyclic GFR-binding peptide
VVMDRHKRLVVNNAADYYLISTASLRA

SEQ ID NO: 84603 - protein, 20 aa, Artificial Sequence
  Cyclic GFR-binding peptide
RYKKLVVNKNEDFYLISIAN

SEQ ID NO: 84604 - protein, 39 aa, Artificial Sequence; identical to SEQ ID NO: 32552
  Cyclic GFR-binding peptide
  MOD_RES (2)..(4)..(36)..(37): Xaa is C or S

SEQ ID NO: 84605 - protein, 28 aa, Artificial Sequence
  Cyclic GFR-binding peptide
  MOD_RES (28)..(28): Xaa is C or S
MNYHYKLVVNKNEDKYLISIPSMKEPVX

SEQ ID NO: 84606 - protein, 38 aa, Artificial Sequence; identical to SEQ ID NO: 32554
  Cyclic GFR-binding peptide
  MOD_RES (2)..(4)..(35)..(36): Xaa is C or S

SEQ ID NO: 84607 - protein, 28 aa, Artificial Sequence
  Cyclic GFR-binding peptide
  MOD_RES (28)..(28): Xaa is C or S
MGRHKRLYTVVGKDYYLISTASLKTPVX

SEQ ID NO: 84608 - protein, 36 aa, Artificial Sequence; identical to SEQ ID NO: 32558
  Cyclic GFR-binding peptide
  MOD_RES (2)..(4)..(35)..(36): Xaa is C or S

SEQ ID NO: 84609 - protein, 34 aa, Artificial Sequence; identical to SEQ ID NO: 32561
  Cyclic GFR-binding peptide
  MOD_RES (32)..(33): Xaa is C or S

SEQ ID NO: 84610 - protein, 39 aa, Artificial Sequence; identical to SEQ ID NO: 32562
  Cyclic GFR-binding peptide
  MOD_RES (1)..(33)..(34): Xaa is C or S

SEQ ID NO: 84611 - protein, 40 aa, Artificial Sequence; identical to SEQ ID NO: 32563
  Cyclic GFR-binding peptide
  MOD_RES (1)..(3)..(35)..(36): Xaa is C or S

SEQ ID NO: 84612 - protein, 34 aa, Artificial Sequence; identical to SEQ ID NO: 32564
  Cyclic GFR-binding peptide
  MOD_RES (2)..(34): Xaa is C or S

SEQ ID NO: 84613 - protein, 29 aa, Artificial Sequence
  Cyclic GFR-binding peptide
  MOD_RES (27)..(28): Xaa is C or S
MPIKGYVKPKRGVFYLINIPSLAQPVXXP

SEQ ID NO: 84614 - protein, 32 aa, Artificial Sequence
  Cyclic GFR-binding peptide
  MOD_RES (26)..(27): Xaa is C or S
RHKRLVVNKNEDYYLISTASMKEPVXXPEPIG

SEQ ID NO: 84615 - protein, 32 aa, Artificial Sequence; identical to SEQ ID NO: 32565
  Cyclic GFR-binding peptide
  MOD_RES (31)..(32): Xaa is C or S

SEQ ID NO: 84616 - protein, 31 aa, Artificial Sequence
  Cyclic GFR-binding peptide
  MOD_RES (28)..(29): Xaa is C or S
IMPIKGYVKPKRGVFYLINIPSLAQPVXXPA

SEQ ID NO: 84617 - protein, 35 aa, Artificial Sequence; identical to SEQ ID NO: 32566
  Cyclic GFR-binding peptide
  MOD_RES (1)..(33)..(34): Xaa is C or S

SEQ ID NO: 84618 - protein, 39 aa, Artificial Sequence; identical to SEQ ID NO: 32567
  Cyclic GFR-binding peptide
  MOD_RES (2)..(34)..(35): Xaa is C or S

SEQ ID NO: 84619 - protein, 34 aa, Artificial Sequence; identical to SEQ ID NO: 32568
  Cyclic GFR-binding peptide
  MOD_RES (31)..(32): Xaa is C or S

SEQ ID NO: 84620 - protein, 32 aa, Artificial Sequence; identical to SEQ ID NO: 32569
  Cyclic GFR-binding peptide
  MOD_RES (2)..(2): Xaa is C or S

SEQ ID NO: 84621 - protein, 32 aa, Artificial Sequence; identical to SEQ ID NO: 32570
  Cyclic GFR-binding peptide
  MOD_RES (31)..(32): Xaa is C or S

SEQ ID NO: 84622 - protein, 35 aa, Artificial Sequence
  Cyclic GFR-binding peptide
  MOD_RES (30)..(31): Xaa is C or S
VVMGRHKRLIIQQKDNYYLMSTASMKTPTXXPGAS

SEQ ID NO: 84623 - protein, 33 aa, Artificial Sequence
  Cyclic GFR-binding peptide
  MOD_RES (29)..(30): Xaa is C or S
TMNYHYKLVVNKNEDKYLISIPSMKEPVXXPEP

SEQ ID NO: 84624 - protein, 30 aa, Artificial Sequence
  Cyclic GFR-binding peptide
  MOD_RES (27)..(28): Xaa is C or S
GRHKRLIIQQKDNYYLMSTASMKTPTXXPG

SEQ ID NO: 84625 - protein, 25 aa, Artificial Sequence
  Cyclic GFR-binding peptide
VMPIKGYVKPTRGVFYLINIPSLDQ

SEQ ID NO: 84626 - protein, 27 aa, Artificial Sequence
  Cyclic GFR-binding peptide
  MOD_RES (1)..(1): Xaa is C or S
XSEVVMDYHYKLVVNNASDKYLISIPS

SEQ ID NO: 84627 - protein, 23 aa, Artificial Sequence
  Cyclic GFR-binding peptide
NRYKKLVVNKNEDFYLISIANMK

SEQ ID NO: 84628 - protein, 41 aa, Artificial Sequence; identical to SEQ ID NO: 32574
  Cyclic GFR-binding peptide
  MOD_RES (2)..(4)..(36)..(37): Xaa is C or S

SEQ ID NO: 84629 - protein, 32 aa, Artificial Sequence
  Cyclic GFR-binding peptide
  MOD_RES (26)..(27): Xaa is C or S
EYKFKLLVRGNDLYLMSIPETKVPAXXTSPVR

SEQ ID NO: 84630 - protein, 24 aa, Artificial Sequence
  Cyclic GFR-binding peptide
VMGYHYKLIIQQKDNKYLMSIPSM

SEQ ID NO: 84631 - protein, 35 aa, Artificial Sequence; identical to SEQ ID NO: 32575
  Cyclic GFR-binding peptide
  MOD_RES (2)..(4)..(35): Xaa is C or S

SEQ ID NO: 84632 - protein, 27 aa, Artificial Sequence
  Cyclic GFR-binding peptide
TMNEYKFKVVNKNEDLYLISIPEMKEP

SEQ ID NO: 84633 - protein, 28 aa, Artificial Sequence
  Cyclic GFR-binding peptide
  MOD_RES (28)..(28): Xaa is C or S
MDEYKFKVVNNASDLYLISIPELRTPVX

SEQ ID NO: 84634 - protein, 29 aa, Artificial Sequence
  Cyclic GFR-binding peptide
  MOD_RES (1)..(3): Xaa is C or S
XAXSEVTMNEYKFKVVNKNEDLYLISIPE

SEQ ID NO: 84635 - protein, 27 aa, Artificial Sequence
  Cyclic GFR-binding peptide
  MOD_RES (27)..(27): Xaa is C or S
DRHKRLVVNNAADYYLISTASLRAPVX

SEQ ID NO: 84636 - protein, 29 aa, Artificial Sequence
  Cyclic GFR-binding peptide
  MOD_RES (1)..(1): Xaa is C or S
XESVAMGRHKRLYTVVGKDYYLISTASLK

SEQ ID NO: 84637 - protein, 39 aa, Artificial Sequence; identical to SEQ ID NO: 32577
  Cyclic GFR-binding peptide
  MOD_RES (2)..(4)..(36)..(37): Xaa is C or S

SEQ ID NO: 84638 - protein, 29 aa, Artificial Sequence
  Cyclic GFR-binding peptide
  MOD_RES (26)..(27): Xaa is C or S
EYKFKVVNKNEDLYLISIPEMKEPVXXPE

SEQ ID NO: 84639 - protein, 31 aa, Artificial Sequence
  Cyclic GFR-binding peptide
  MOD_RES (26)..(27): Xaa is C or S
PIKGYVKPKRGVFYLINIPSLAQPVXXPAAS

SEQ ID NO: 84640 - protein, 31 aa, Artificial Sequence
  Cyclic GFR-binding peptide
  MOD_RES (1)..(3): Xaa is C or S
XGXRDVVMGEYKFKIIQQKDNLYLMSIPEMK

SEQ ID NO: 84641 - protein, 32 aa, Artificial Sequence
  Cyclic GFR-binding peptide
  MOD_RES (1)..(3): Xaa is C or S
XKXSRVIMPIKGYVKPKRGVFYLINIPSLAQP

SEQ ID NO: 84642 - protein, 35 aa, Artificial Sequence; identical to SEQ ID NO: 32578
  Cyclic GFR-binding peptide
  MOD_RES (1)..(3)..(35): Xaa is C or S

SEQ ID NO: 84643 - protein, 30 aa, Artificial Sequence
  Cyclic GFR-binding peptide
  MOD_RES (27)..(28): Xaa is C or S
NRHKRLVVNKNEDYYLISTASMKEPVXXPE

SEQ ID NO: 84644 - protein, 29 aa, Artificial Sequence
  Cyclic GFR-binding peptide
  MOD_RES (2)..(2): Xaa is C or S
KXSRVIMPIKGYVKPKRGVFYLINIPSLA

SEQ ID NO: 84645 - protein, 33 aa, Artificial Sequence; identical to SEQ ID NO: 32580
  Cyclic GFR-binding peptide
  MOD_RES (2)..(2): Xaa is C or S

SEQ ID NO: 84646 - protein, 36 aa, Artificial Sequence; identical to SEQ ID NO: 32579
  Cyclic GFR-binding peptide
  MOD_RES (1)..(33)..(34): Xaa is C or S

SEQ ID NO: 84647 - protein, 30 aa, Artificial Sequence
  Cyclic GFR-binding peptide
  MOD_RES (29)..(30): Xaa is C or S
TMNPIKGYVVNKNEDFYLINIPSMKEPVXX

SEQ ID NO: 84648 - protein, 30 aa, Artificial Sequence
  Cyclic GFR-binding peptide
  MOD_RES (2)..(2): Xaa is C or S
GXRDVVMGRHKRLIIQQKDNYYLMSTASMK

SEQ ID NO: 84649 - protein, 32 aa, Artificial Sequence
  Cyclic GFR-binding peptide
  MOD_RES (26)..(27): Xaa is C or S
YHYKLVVNNASDKYLISIPSLRTPVXXTPPTS

SEQ ID NO: 84650 - protein, 28 aa, Artificial Sequence
  Cyclic GFR-binding peptide
  MOD_RES (1)..(1): Xaa is C or S
XRDVVMGYHYKLIIQQKDNKYLMSIPSM

SEQ ID NO: 84651 - protein, 30 aa, Artificial Sequence
  Cyclic GFR-binding peptide
  MOD_RES (26)..(27): Xaa is C or S
RHKRLLLVRGNDYYLMSTASTKVPAXXTSP

SEQ ID NO: 84652 - protein, 32 aa, Artificial Sequence
  Cyclic GFR-binding peptide
  MOD_RES (29)..(30): Xaa is C or S
VIMPIKGYVKPKRGVFYLINIPSLAQPVXXPA

SEQ ID NO: 84653 - protein, 30 aa, Artificial Sequence
  Cyclic GFR-binding peptide
  MOD_RES (2)..(2): Xaa is C or S
KXSRVIMPIKGYVKPKRGVFYLINIPSLAQ

SEQ ID NO: 84654 - protein, 30 aa, Artificial Sequence
  Cyclic GFR-binding peptide
  MOD_RES (28)..(29): Xaa is C or S
MDYHYKLVVNNASDKYLISIPSLRTPVXXT

SEQ ID NO: 84655 - protein, 24 aa, Artificial Sequence
  Cyclic GFR-binding peptide
VVMDEYKFKVVNNASDLYLISIPE

SEQ ID NO: 84656 - protein, 27 aa, Artificial Sequence
  Cyclic GFR-binding peptide
SEVTMNPIKGYVVNKNEDFYLINIPSM

SEQ ID NO: 84657 - protein, 32 aa, Artificial Sequence
  Cyclic GFR-binding peptide
  MOD_RES (29)..(30): Xaa is C or S
TMNYHYKLVVNKNEDKYLISIPSMKEPVXXPE

SEQ ID NO: 84658 - protein, 28 aa, Artificial Sequence
  Cyclic GFR-binding peptide
VIMEYKFKLLVRGNDLYLMSIPETKVPA

SEQ ID NO: 84659 - protein, 35 aa, Artificial Sequence
  Cyclic GFR-binding peptide
  MOD_RES (29)..(30): Xaa is C or S
VMNYHYKLIVNSSDDKYLVSIPSLKTPAXXPKPVH

SEQ ID NO: 84660 - protein, 29 aa, Artificial Sequence
  Cyclic GFR-binding peptide
  MOD_RES (28)..(29): Xaa is C or S
MNEYKFKVVNKNEDLYLISIPEMKEPVXX

SEQ ID NO: 84661 - protein, 25 aa, Artificial Sequence
  Cyclic GFR-binding peptide
EEVIMYHYKLLLVRGNDKYLMSIPS

SEQ ID NO: 84662 - protein, 33 aa, Artificial Sequence; identical to SEQ ID NO: 32585
  Cyclic GFR-binding peptide
  MOD_RES (31)..(32): Xaa is C or S

SEQ ID NO: 84663 - protein, 33 aa, Artificial Sequence; identical to SEQ ID NO: 32586
  Cyclic GFR-binding peptide
  MOD_RES (32)..(33): Xaa is C or S

SEQ ID NO: 84664 - protein, 31 aa, Artificial Sequence
  Cyclic GFR-binding peptide
  MOD_RES (28)..(29): Xaa is C or S
IMEYKFKLLVRGNDLYLMSIPETKVPAXXTS

SEQ ID NO: 84665 - protein, 35 aa, Artificial Sequence; identical to SEQ ID NO: 21081
  Cyclic GFR-binding peptide
  MOD_RES (2)..(4): Xaa is C or S

SEQ ID NO: 84666 - protein, 34 aa, Artificial Sequence; identical to SEQ ID NO: 32587
  Cyclic GFR-binding peptide
  MOD_RES (31)..(32): Xaa is C or S

SEQ ID NO: 84667 - protein, 32 aa, Artificial Sequence
  Cyclic GFR-binding peptide
  MOD_RES (2)..(4): Xaa is C or S
RXGXAEVVMDRHKRLVVNNAADYYLISTASLR

SEQ ID NO: 84668 - protein, 27 aa, Artificial Sequence
  Cyclic GFR-binding peptide
IMPIKGYVKPKRGVFYLINIPSLAQPV

SEQ ID NO: 84669 - protein, 30 aa, Artificial Sequence
  Cyclic GFR-binding peptide
  MOD_RES (27)..(28): Xaa is C or S
NRYKKLVVNKNEDFYLISIANMKEPVXXPE

SEQ ID NO: 84670 - protein, 30 aa, Artificial Sequence
  Cyclic GFR-binding peptide
  MOD_RES (1)..(3): Xaa is C or S
XAXSEVTMNEYKFKVVNKNEDLYLISIPEM

SEQ ID NO: 84671 - protein, 38 aa, Artificial Sequence; identical to SEQ ID NO: 32589
  Cyclic GFR-binding peptide
  MOD_RES (1)..(32)..(33): Xaa is C or S

SEQ ID NO: 84672 - protein, 33 aa, Artificial Sequence; identical to SEQ ID NO: 32590
  Cyclic GFR-binding peptide
  MOD_RES (2)..(2): Xaa is C or S

SEQ ID NO: 84673 - protein, 37 aa, Artificial Sequence; identical to SEQ ID NO: 32592
  Cyclic GFR-binding peptide
  MOD_RES (2)..(33)..(34): Xaa is C or S

SEQ ID NO: 84674 - protein, 22 aa, Artificial Sequence
  Cyclic GFR-binding peptide
GRHKRLYTVVGKDYYLISTASL

SEQ ID NO: 84675 - protein, 27 aa, Artificial Sequence
  Cyclic GFR-binding peptide
VTMNRYKKLVVNKNEDFYLISIANMKE

SEQ ID NO: 84676 - protein, 29 aa, Artificial Sequence
  Cyclic GFR-binding peptide
  MOD_RES (26)..(27): Xaa is C or S
PIKGYIKPTKGIFYLINIPSLDQSVXXPS

SEQ ID NO: 84677 - protein, 30 aa, Artificial Sequence
  Cyclic GFR-binding peptide
  MOD_RES (28)..(29): Xaa is C or S
MNYHYKLVVNKNEDKYLISIPSMKEPVXXP

SEQ ID NO: 84678 - protein, 31 aa, Artificial Sequence; identical to SEQ ID NO: 32595
  Cyclic GFR-binding peptide
  MOD_RES (1)..(1): Xaa is C or S

SEQ ID NO: 84679 - protein, 35 aa, Artificial Sequence; identical to SEQ ID NO: 32596
  Cyclic GFR-binding peptide
  MOD_RES (31)..(32): Xaa is C or S

SEQ ID NO: 84680 - protein, 32 aa, Artificial Sequence
  Cyclic GFR-binding peptide
  MOD_RES (30)..(31): Xaa is C or S
VTMNRHKRLVVNKNEDYYLISTASMKEPVXXP

SEQ ID NO: 84681 - protein, 33 aa, Artificial Sequence
  Cyclic GFR-binding peptide
  MOD_RES (27)..(28): Xaa is C or S
NEYKFKVVNKNEDLYLISIPEMKEPVXXPEPIG

SEQ ID NO: 84682 - protein, 32 aa, Artificial Sequence; identical to SEQ ID NO: 32597
  Cyclic GFR-binding peptide
  MOD_RES (32)..(32): Xaa is C or S

SEQ ID NO: 84683 - protein, 24 aa, Artificial Sequence
  Cyclic GFR-binding peptide
VAMGRHKRLYTVVGKDYYLISTAS

SEQ ID NO: 84684 - protein, 24 aa, Artificial Sequence
  Cyclic GFR-binding peptide
EYKFKVVNNASDLYLISIPELRTP

SEQ ID NO: 84685 - protein, 24 aa, Artificial Sequence
  Cyclic GFR-binding peptide
YHYKLLLVRGNDKYLMSIPSTKVP

SEQ ID NO: 84686 - protein, 31 aa, Artificial Sequence
  Cyclic GFR-binding peptide
  MOD_RES (2)..(2): Xaa is C or S
GXAEVVMDRHKRLVVNNAADYYLISTASLRA

SEQ ID NO: 84687 - protein, 25 aa, Artificial Sequence
  Cyclic GFR-binding peptide
EVIMEYKFKLLVRGNDLYLMSIPET

SEQ ID NO: 84688 - protein, 36 aa, Artificial Sequence; identical to SEQ ID NO: 32602
  Cyclic GFR-binding peptide
  MOD_RES (2)..(4)..(36): Xaa is C or S

SEQ ID NO: 84689 - protein, 22 aa, Artificial Sequence
  Cyclic GFR-binding peptide
RHKRLVVNNAADYYLISTASLR

SEQ ID NO: 84690 - protein, 21 aa, Artificial Sequence
  Cyclic GFR-binding peptide
EYKFKIIQQKDNLYLMSIPEM

SEQ ID NO: 84691 - protein, 33 aa, Artificial Sequence; identical to SEQ ID NO: 32604
  Cyclic GFR-binding peptide
  MOD_RES (2)..(2): Xaa is C or S

SEQ ID NO: 84692 - protein, 33 aa, Artificial Sequence
  Cyclic GFR-binding peptide
  MOD_RES (30)..(31): Xaa is C or S
VTMNRYKKLVVNKNEDFYLISIANMKEPVXXPE

SEQ ID NO: 84693 - protein, 21 aa, Artificial Sequence
  Cyclic GFR-binding peptide
YHYKLLLVRGNDKYLMSIPST

SEQ ID NO: 84694 - protein, 31 aa, Artificial Sequence; identical to SEQ ID NO: 32607
  Cyclic GFR-binding peptide

SEQ ID NO: 84695 - protein, 24 aa, Artificial Sequence
  Cyclic GFR-binding peptide
PIKGYVVNKNEDFYLINIPSMKEP

SEQ ID NO: 84696 - protein, 38 aa, Artificial Sequence; identical to SEQ ID NO: 32609
  Cyclic GFR-binding peptide
  MOD_RES (2)..(4)..(36)..(37): Xaa is C or S

SEQ ID NO: 84697 - protein, 32 aa, Artificial Sequence
  Cyclic GFR-binding peptide
  MOD_RES (26)..(27): Xaa is C or S
YHYKLLLVRGNDKYLMSIPSTKVPAXXTSPVR

SEQ ID NO: 84698 - protein, 37 aa, Artificial Sequence; identical to SEQ ID NO: 32613
  Cyclic GFR-binding peptide
  MOD_RES (2)..(4)..(36)..(37): Xaa is C or S

SEQ ID NO: 84699 - protein, 31 aa, Artificial Sequence; identical to SEQ ID NO: 32614
  Cyclic GFR-binding peptide

SEQ ID NO: 84700 - protein, 35 aa, Artificial Sequence; identical to SEQ ID NO: 32616
  Cyclic GFR-binding peptide
  MOD_RES (31)..(32): Xaa is C or S

SEQ ID NO: 84701 - protein, 31 aa, Artificial Sequence
  Cyclic GFR-binding peptide
  MOD_RES (28)..(29): Xaa is C or S
MDRHKRLVVNNAADYYLISTASLRAPVXXSA

SEQ ID NO: 84702 - protein, 33 aa, Artificial Sequence
  Cyclic GFR-binding peptide
  MOD_RES (2)..(4): Xaa is C or S
SXGXRDVVMGRHKRLIIQQKDNYYLMSTASMKT

SEQ ID NO: 84703 - protein, 31 aa, Artificial Sequence
  Cyclic GFR-binding peptide
  MOD_RES (30)..(31): Xaa is C or S
EVIMYHYKLLLVRGNDKYLMSIPSTKVPAXX

SEQ ID NO: 84704 - protein, 27 aa, Artificial Sequence
  Cyclic GFR-binding peptide
  MOD_RES (1)..(1): Xaa is C or S
XRDVVMGRHKRLIIQQKDNYYLMSTAS

SEQ ID NO: 84705 - protein, 34 aa, Artificial Sequence; identical to SEQ ID NO: 32617
  Cyclic GFR-binding peptide
  MOD_RES (31)..(32): Xaa is C or S

SEQ ID NO: 84706 - protein, 31 aa, Artificial Sequence
  Cyclic GFR-binding peptide
  MOD_RES (2)..(4): Xaa is C or S
SXGXRDVVMGEYKFKIIQQKDNLYLMSIPEM

SEQ ID NO: 84707 - protein, 24 aa, Artificial Sequence
  Cyclic GFR-binding peptide
VMPIKGYVKPTRGVFYLINIPSLD

SEQ ID NO: 84708 - protein, 31 aa, Artificial Sequence
  Cyclic GFR-binding peptide
  MOD_RES (2)..(2): Xaa is C or S
AXSEVTMNEYKFKVVNKNEDLYLISIPEMKE

SEQ ID NO: 84709 - protein, 26 aa, Artificial Sequence
  Cyclic GFR-binding peptide
EVTMNRHKRLVVNKNEDYYLISTASM

SEQ ID NO: 84710 - protein, 32 aa, Artificial Sequence
  Cyclic GFR-binding peptide
  MOD_RES (28)..(29): Xaa is C or S
MGYHYKLIIQQKDNKYLMSIPSMKTPTXXPGA

SEQ ID NO: 84711 - protein, 32 aa, Artificial Sequence
  Cyclic GFR-binding peptide
  MOD_RES (1)..(3): Xaa is C or S
XAXSEVTMNRYKKLVVNKNEDFYLISIANMKE

SEQ ID NO: 84712 - protein, 30 aa, Artificial Sequence
  Cyclic GFR-binding peptide
  MOD_RES (1)..(3): Xaa is C or S
XGXESVAMGRHKRLYTVVGKDYYLISTASL

SEQ ID NO: 84713 - protein, 29 aa, Artificial Sequence
  Cyclic GFR-binding peptide
VVMDEYKFKVVNNASDLYLISIPELRTPV

SEQ ID NO: 84714 - protein, 27 aa, Artificial Sequence
  Cyclic GFR-binding peptide
EVVMDRHKRLVVNNAADYYLISTASLR

SEQ ID NO: 84715 - protein, 29 aa, Artificial Sequence
  Cyclic GFR-binding peptide
  MOD_RES (28)..(29): Xaa is C or S
MDRHKRLVVNNASDYYLISTASLRTPVXX

SEQ ID NO: 84716 - protein, 30 aa, Artificial Sequence
  Cyclic GFR-binding peptide
  MOD_RES (2)..(2): Xaa is C or S
AXSEVTMNEYKFKVVNKNEDLYLISIPEMK

SEQ ID NO: 84717 - protein, 40 aa, Artificial Sequence; identical to SEQ ID NO: 32621
  Cyclic GFR-binding peptide
  MOD_RES (2)..(4)..(36)..(37): Xaa is C or S

SEQ ID NO: 84718 - protein, 30 aa, Artificial Sequence
  Cyclic GFR-binding peptide
  MOD_RES (29)..(30): Xaa is C or S
VMDYHYKLVVNNASDKYLISIPSLRTPVXX

SEQ ID NO: 84719 - protein, 40 aa, Artificial Sequence; identical to SEQ ID NO: 32622
  Cyclic GFR-binding peptide
  MOD_RES (2)..(4)..(35)..(36): Xaa is C or S

SEQ ID NO: 84720 - protein, 33 aa, Artificial Sequence
  Cyclic GFR-binding peptide
  MOD_RES (29)..(30): Xaa is C or S
TMNRHKRLVVNKNEDYYLISTASMKEPVXXPEP

SEQ ID NO: 84721 - protein, 32 aa, Artificial Sequence
  Cyclic GFR-binding peptide
  MOD_RES (1)..(3): Xaa is C or S
XGXRDVVMGRHKRLIIQQKDNYYLMSTASMKT

SEQ ID NO: 84722 - protein, 25 aa, Artificial Sequence
  Cyclic GFR-binding peptide
VVMDRHKRLVVNNAADYYLISTASL

SEQ ID NO: 84723 - protein, 32 aa, Artificial Sequence; identical to SEQ ID NO: 32625
  Cyclic GFR-binding peptide
  MOD_RES (32)..(32): Xaa is C or S

SEQ ID NO: 84724 - protein, 34 aa, Artificial Sequence
  Cyclic GFR-binding peptide
  MOD_RES (28)..(29): Xaa is C or S
MGRHKRLYTVVGKDYYLISTASLKTPVXXAKSAK

SEQ ID NO: 84725 - protein, 28 aa, Artificial Sequence
  Cyclic GFR-binding peptide
RDVVMGEYKFKIIQQKDNLYLMSIPEMK

SEQ ID NO: 84726 - protein, 33 aa, Artificial Sequence; identical to SEQ ID NO: 32628
  Cyclic GFR-binding peptide
  MOD_RES (2)..(2): Xaa is C or S

SEQ ID NO: 84727 - protein, 33 aa, Artificial Sequence
  Cyclic GFR-binding peptide
  MOD_RES (2)..(4): Xaa is C or S
SXKXSKVIMPIKGYIKPTKGIFYLINIPSLDQS

SEQ ID NO: 84728 - protein, 32 aa, Artificial Sequence
  Cyclic GFR-binding peptide
  MOD_RES (29)..(30): Xaa is C or S
VIMEYKFKLLVRGNDLYLMSIPETKVPAXXTS

SEQ ID NO: 84729 - protein, 31 aa, Artificial Sequence
  Cyclic GFR-binding peptide
  MOD_RES (2)..(4): Xaa is C or S
RXAXSEVTMNEYKFKVVNKNEDLYLISIPEM

SEQ ID NO: 84730 - protein, 32 aa, Artificial Sequence
  Cyclic GFR-binding peptide
  MOD_RES (2)..(2): Xaa is C or S
GXRDVVMGYHYKLIIQQKDNKYLMSIPSMKTP

SEQ ID NO: 84731 - protein, 34 aa, Artificial Sequence
  Cyclic GFR-binding peptide
  MOD_RES (29)..(30): Xaa is C or S
VMDYHYKLVVNNASDKYLISIPSLRTPVXXTPPT

SEQ ID NO: 84732 - protein, 27 aa, Artificial Sequence
  Cyclic GFR-binding peptide
  MOD_RES (26)..(27): Xaa is C or S
RYKKLVVNKNEDFYLISIANMKEPVXX

SEQ ID NO: 84733 - protein, 37 aa, Artificial Sequence; identical to SEQ ID NO: 32630
  Cyclic GFR-binding peptide
  MOD_RES (1)..(3)..(35)..(36): Xaa is C or S

SEQ ID NO: 84734 - protein, 33 aa, Artificial Sequence; identical to SEQ ID NO: 32631
  Cyclic GFR-binding peptide
  MOD_RES (1)..(32)..(33): Xaa is C or S

SEQ ID NO: 84735 - protein, 20 aa, Artificial Sequence
  Cyclic GFR-binding peptide
PIKGYVKPKRGVFYLINIPS

SEQ ID NO: 84736 - protein, 28 aa, Artificial Sequence
  Cyclic GFR-binding peptide
AMGRHKRLYTVVGKDYYLISTASLKTPV

SEQ ID NO: 84737 - protein, 36 aa, Artificial Sequence; identical to SEQ ID NO: 32632
  Cyclic GFR-binding peptide
  MOD_RES (2)..(4)..(36): Xaa is C or S

SEQ ID NO: 84738 - protein, 28 aa, Artificial Sequence
  Cyclic GFR-binding peptide
SKVIMPIKGYIKPTKGIFYLINIPSLDQ

SEQ ID NO: 84739 - protein, 36 aa, Artificial Sequence; identical to SEQ ID NO: 32635
  Cyclic GFR-binding peptide
  MOD_RES (2)..(4)..(35)..(36): Xaa is C or S

SEQ ID NO: 84740 - protein, 31 aa, Artificial Sequence
  Cyclic GFR-binding peptide
  MOD_RES (28)..(29): Xaa is C or S
MNRHKRLVVNKNEDYYLISTASMKEPVXXPE

SEQ ID NO: 84741 - protein, 35 aa, Artificial Sequence
  Cyclic GFR-binding peptide
  MOD_RES (29)..(30): Xaa is C or S
VMNRHKRLIVNSSDDYYLVSTASLKTPAXXPKPVH

SEQ ID NO: 84742 - protein, 35 aa, Artificial Sequence; identical to SEQ ID NO: 32636
  Cyclic GFR-binding peptide
  MOD_RES (2)..(34)..(35): Xaa is C or S

SEQ ID NO: 84743 - protein, 35 aa, Artificial Sequence; identical to SEQ ID NO: 32637
  Cyclic GFR-binding peptide
  MOD_RES (31)..(32): Xaa is C or S

SEQ ID NO: 84744 - protein, 32 aa, Artificial Sequence; identical to SEQ ID NO: 32639
  Cyclic GFR-binding peptide
  MOD_RES (31)..(32): Xaa is C or S

SEQ ID NO: 84745 - protein, 26 aa, Artificial Sequence
  Cyclic GFR-binding peptide
VVMDYHYKLVVNNASDKYLISIPSLR

SEQ ID NO: 84746 - protein, 35 aa, Artificial Sequence; identical to SEQ ID NO: 32640
  Cyclic GFR-binding peptide
  MOD_RES (31)..(32): Xaa is C or S

SEQ ID NO: 84747 - protein, 30 aa, Artificial Sequence
  Cyclic GFR-binding peptide
  MOD_RES (1)..(1): Xaa is C or S
XSEVVMDRHKRLVVNNASDYYLISTASLRT

SEQ ID NO: 84748 - protein, 36 aa, Artificial Sequence; identical to SEQ ID NO: 32641
  Cyclic GFR-binding peptide
  MOD_RES (2)..(4)..(36): Xaa is C or S

SEQ ID NO: 84749 - protein, 24 aa, Artificial Sequence
  Cyclic GFR-binding peptide
RHKRLIIQQKDNYYLMSTASMKTP

SEQ ID NO: 84750 - protein, 22 aa, Artificial Sequence
  Cyclic GFR-binding peptide
NYHYKLVVNKNEDKYLISIPSM

SEQ ID NO: 84751 - protein, 31 aa, Artificial Sequence
  Cyclic GFR-binding peptide
  MOD_RES (30)..(31): Xaa is C or S
VVMDYHYKLVVNNASDKYLISIPSLRTPVXX

SEQ ID NO: 84752 - protein, 20 aa, Artificial Sequence
  Cyclic GFR-binding peptide
YHYKLIIQQKDNKYLMSIPS

SEQ ID NO: 84753 - protein, 32 aa, Artificial Sequence
  Cyclic GFR-binding peptide
  MOD_RES (29)..(30): Xaa is C or S
TMNRHKRLVVNKNEDYYLISTASMKEPVXXPE

SEQ ID NO: 84754 - protein, 36 aa, Artificial Sequence
  Cyclic GFR-binding peptide
  MOD_RES (30)..(31): Xaa is C or S
EVIMEYKFKLLVRGNDLYLMSIPETKVPAXXTSPVR

SEQ ID NO: 84755 - protein, 21 aa, Artificial Sequence
  Cyclic GFR-binding peptide
EYKFKLLVRGNDLYLMSIPET

SEQ ID NO: 84756 - protein, 28 aa, Artificial Sequence
  Cyclic GFR-binding peptide
  MOD_RES (27)..(28): Xaa is C or S
GRHKRLYTVVGKDYYLISTASLKTPVXX

SEQ ID NO: 84757 - protein, 31 aa, Artificial Sequence
  Cyclic GFR-binding peptide
  MOD_RES (30)..(31): Xaa is C or S
VVMDRHKRLVVNNASDYYLISTASLRTPVXX

SEQ ID NO: 84758 - protein, 30 aa, Artificial Sequence
  Cyclic GFR-binding peptide
  MOD_RES (29)..(30): Xaa is C or S
VMDEYKFKVVNNASDLYLISIPELRTPVXX

SEQ ID NO: 84759 - protein, 23 aa, Artificial Sequence
  Cyclic GFR-binding peptide
NRHKRLVVNKNEDYYLISTASMK

SEQ ID NO: 84760 - protein, 33 aa, Artificial Sequence
  Cyclic GFR-binding peptide
  MOD_RES (28)..(29): Xaa is C or S
VMPIKGYVKPTRGVFYLINIPSLDQPVXXPSAS

SEQ ID NO: 84761 - protein, 27 aa, Artificial Sequence
  Cyclic GFR-binding peptide
MNEYKFKVVNKNEDLYLISIPEMKEPV

SEQ ID NO: 84762 - protein, 29 aa, Artificial Sequence
  Cyclic GFR-binding peptide
  MOD_RES (27)..(28): Xaa is C or S
NRYKKLVVNKNEDFYLISIANMKEPVXXP

SEQ ID NO: 84763 - protein, 28 aa, Artificial Sequence
  Cyclic GFR-binding peptide
VIMRHKRLLLVRGNDYYLMSTASTKVPA

SEQ ID NO: 84764 - protein, 37 aa, Artificial Sequence; identical to SEQ ID NO: 32646
  Cyclic GFR-binding peptide
  MOD_RES (1)..(3)..(35)..(36): Xaa is C or S

SEQ ID NO: 84765 - protein, 35 aa, Artificial Sequence; identical to SEQ ID NO: 32647
  Cyclic GFR-binding peptide
  MOD_RES (2)..(34)..(35): Xaa is C or S

SEQ ID NO: 84766 - protein, 29 aa, Artificial Sequence
  Cyclic GFR-binding peptide
  MOD_RES (2)..(4): Xaa is C or S
LXGXEEVIMRHKRLLLVRGNDYYLMSTAS

SEQ ID NO: 84767 - protein, 29 aa, Artificial Sequence
  Cyclic GFR-binding peptide
  MOD_RES (27)..(28): Xaa is C or S
GEYKFKIIQQKDNLYLMSIPEMKTPTXXP

SEQ ID NO: 84768 - protein, 28 aa, Artificial Sequence
  Cyclic GFR-binding peptide
VIMPIKGYVKPKRGVFYLINIPSLAQPV

SEQ ID NO: 84769 - protein, 35 aa, Artificial Sequence; identical to SEQ ID NO: 32649
  Cyclic GFR-binding peptide
  MOD_RES (2)..(4): Xaa is C or S

SEQ ID NO: 84770 - protein, 25 aa, Artificial Sequence
  Cyclic GFR-binding peptide
SKVIMPIKGYIKPTKGIFYLINIPS

SEQ ID NO: 84771 - protein, 33 aa, Artificial Sequence
  Cyclic GFR-binding peptide
  MOD_RES (30)..(31): Xaa is C or S
KVVMPIKGYVKPTRGVFYLINIPSLDQPVXXPS

SEQ ID NO: 84772 - protein, 35 aa, Artificial Sequence; identical to SEQ ID NO: 32651
  Cyclic GFR-binding peptide
  MOD_RES (31)..(32): Xaa is C or S

SEQ ID NO: 84773 - protein, 36 aa, Artificial Sequence; identical to SEQ ID NO: 32652
  Cyclic GFR-binding peptide
  MOD_RES (32)..(33): Xaa is C or S

SEQ ID NO: 84774 - protein, 33 aa, Artificial Sequence; identical to SEQ ID NO: 32653
  Cyclic GFR-binding peptide
  MOD_RES (1)..(32)..(33): Xaa is C or S

SEQ ID NO: 84775 - protein, 26 aa, Artificial Sequence
  Cyclic GFR-binding peptide
VVMGEYKFKIIQQKDNLYLMSIPEMK

SEQ ID NO: 84776 - protein, 32 aa, Artificial Sequence; identical to SEQ ID NO: 32655
  Cyclic GFR-binding peptide
  MOD_RES (32)..(32): Xaa is C or S

SEQ ID NO: 84777 - protein, 29 aa, Artificial Sequence
  Cyclic GFR-binding peptide
  MOD_RES (1)..(3): Xaa is C or S
XGXRDVVMGEYKFKIIQQKDNLYLMSIPE

SEQ ID NO: 84778 - protein, 35 aa, Artificial Sequence; identical to SEQ ID NO: 21390
  Cyclic GFR-binding peptide
  MOD_RES (2)..(4): Xaa is C or S

SEQ ID NO: 84779 - protein, 34 aa, Artificial Sequence; identical to SEQ ID NO: 32657
  Cyclic GFR-binding peptide
  MOD_RES (31)..(32): Xaa is C or S

SEQ ID NO: 84780 - protein, 31 aa, Artificial Sequence
  Cyclic GFR-binding peptide
  MOD_RES (27)..(28): Xaa is C or S
DRHKRLVVNNASDYYLISTASLRTPVXXTPP

SEQ ID NO: 84781 - protein, 28 aa, Artificial Sequence
  Cyclic GFR-binding peptide
  MOD_RES (2)..(2): Xaa is C or S
GXEEVIMYHYKLLLVRGNDKYLMSIPST

SEQ ID NO: 84782 - protein, 37 aa, Artificial Sequence; identical to SEQ ID NO: 32662
  Cyclic GFR-binding peptide
  MOD_RES (32)..(33): Xaa is C or S

SEQ ID NO: 84783 - protein, 31 aa, Artificial Sequence; identical to SEQ ID NO: 32663
  Cyclic GFR-binding peptide

SEQ ID NO: 84784 - protein, 36 aa, Artificial Sequence; identical to SEQ ID NO: 32665
  Cyclic GFR-binding peptide
  MOD_RES (1)..(3)..(35)..(36): Xaa is C or S

SEQ ID NO: 84785 - protein, 34 aa, Artificial Sequence
  Cyclic GFR-binding peptide
  MOD_RES (30)..(31): Xaa is C or S
VTMNRYKKLVVNKNEDFYLISIANMKEPVXXPEP

SEQ ID NO: 84786 - protein, 24 aa, Artificial Sequence
  Cyclic GFR-binding peptide
NYHYKLVVNKNEDKYLISIPSMKE

SEQ ID NO: 84787 - protein, 33 aa, Artificial Sequence; identical to SEQ ID NO: 32667
  Cyclic GFR-binding peptide
  MOD_RES (1)..(33): Xaa is C or S

SEQ ID NO: 84788 - protein, 28 aa, Artificial Sequence
  Cyclic GFR-binding peptide
  MOD_RES (26)..(27): Xaa is C or S
PIKGYVKPTRGVFYLINIPSLDQPVXXP

SEQ ID NO: 84789 - protein, 25 aa, Artificial Sequence
  Cyclic GFR-binding peptide
EEVIMRHKRLLLVRGNDYYLMSTAS

SEQ ID NO: 84790 - protein, 34 aa, Artificial Sequence; identical to SEQ ID NO: 32668
  Cyclic GFR-binding peptide
  MOD_RES (1)..(33)..(34): Xaa is C or S

SEQ ID NO: 84791 - protein, 36 aa, Artificial Sequence; identical to SEQ ID NO: 32670
  Cyclic GFR-binding peptide
  MOD_RES (1)..(3)..(35)..(36): Xaa is C or S

SEQ ID NO: 84792 - protein, 25 aa, Artificial Sequence
  Cyclic GFR-binding peptide
YHYKLLLVRGNDKYLMSIPSTKVPA

SEQ ID NO: 84793 - protein, 25 aa, Artificial Sequence
  Cyclic GFR-binding peptide
NYHYKLVVNKNEDKYLISIPSMKEP

SEQ ID NO: 84794 - protein, 25 aa, Artificial Sequence
  Cyclic GFR-binding peptide
EYKFKVVNKNEDLYLISIPEMKEPV

SEQ ID NO: 84795 - protein, 22 aa, Artificial Sequence
  Cyclic GFR-binding peptide
MRHKRLLLVRGNDYYLMSTAST

SEQ ID NO: 84796 - protein, 26 aa, Artificial Sequence
  Cyclic GFR-binding peptide
TMNPIKGYVVNKNEDFYLINIPSMKE

SEQ ID NO: 84797 - protein, 33 aa, Artificial Sequence; identical to SEQ ID NO: 32674
  Cyclic GFR-binding peptide
  MOD_RES (32)..(33): Xaa is C or S

SEQ ID NO: 84798 - protein, 30 aa, Artificial Sequence
  Cyclic GFR-binding peptide
  MOD_RES (26)..(27): Xaa is C or S
PIKGYVKPTRGVFYLINIPSLDQPVXXPSA

SEQ ID NO: 84799 - protein, 31 aa, Artificial Sequence
  Cyclic GFR-binding peptide
  MOD_RES (30)..(31): Xaa is C or S
VTMNEYKFKVVNKNEDLYLISIPEMKEPVXX

SEQ ID NO: 84800 - protein, 29 aa, Artificial Sequence
  Cyclic GFR-binding peptide
  MOD_RES (27)..(28): Xaa is C or S
DRHKRLVVNNAADYYLISTASLRAPVXXS

SEQ ID NO: 84801 - protein, 20 aa, Artificial Sequence
  Cyclic GFR-binding peptide
RHKRLLLVRGNDYYLMSTAS

SEQ ID NO: 84802 - protein, 29 aa, Artificial Sequence
  Cyclic GFR-binding peptide
  MOD_RES (1)..(3): Xaa is C or S
XGXEEVIMRHKRLLLVRGNDYYLMSTAST

SEQ ID NO: 84803 - protein, 33 aa, Artificial Sequence
  Cyclic GFR-binding peptide
  MOD_RES (30)..(31): Xaa is C or S
VTMNYHYKLVVNKNEDKYLISIPSMKEPVXXPE

SEQ ID NO: 84804 - protein, 41 aa, Artificial Sequence; identical to SEQ ID NO: 32680
  Cyclic GFR-binding peptide
  MOD_RES (1)..(3)..(35)..(36): Xaa is C or S

SEQ ID NO: 84805 - protein, 34 aa, Artificial Sequence
  Cyclic GFR-binding peptide
  MOD_RES (29)..(30): Xaa is C or S
VMDRHKRLVVNNASDYYLISTASLRTPVXXTPPT

SEQ ID NO: 84806 - protein, 25 aa, Artificial Sequence
  Cyclic GFR-binding peptide
IMYHYKLLLVRGNDKYLMSIPSTKV

SEQ ID NO: 84807 - protein, 36 aa, Artificial Sequence; identical to SEQ ID NO: 32684
  Cyclic GFR-binding peptide
  MOD_RES (31)..(32): Xaa is C or S

SEQ ID NO: 84808 - protein, 28 aa, Artificial Sequence
  Cyclic GFR-binding peptide
  MOD_RES (28)..(28): Xaa is C or S
MDRHKRLVVNNAADYYLISTASLRAPVX

SEQ ID NO: 84809 - protein, 29 aa, Artificial Sequence
  Cyclic GFR-binding peptide
SEVTMNRHKRLVVNKNEDYYLISTASMKE

SEQ ID NO: 84810 - protein, 37 aa, Artificial Sequence; identical to SEQ ID NO: 32685
  Cyclic GFR-binding peptide
  MOD_RES (2)..(34)..(35): Xaa is C or S

SEQ ID NO: 84811 - protein, 30 aa, Artificial Sequence
  Cyclic GFR-binding peptide
  MOD_RES (30)..(30): Xaa is C or S
VVMDYHYKLVVNNASDKYLISIPSLRTPVX

SEQ ID NO: 84812 - protein, 30 aa, Artificial Sequence
  Cyclic GFR-binding peptide
SEVTMNYHYKLVVNKNEDKYLISIPSMKEP

SEQ ID NO: 84813 - protein, 28 aa, Artificial Sequence
  Cyclic GFR-binding peptide
  MOD_RES (2)..(2): Xaa is C or S
AXSEVTMNPIKGYVVNKNEDFYLINIPS

SEQ ID NO: 84814 - protein, 37 aa, Artificial Sequence; identical to SEQ ID NO: 32687
  Cyclic GFR-binding peptide
  MOD_RES (31)..(32): Xaa is C or S

SEQ ID NO: 84815 - protein, 36 aa, Artificial Sequence; identical to SEQ ID NO: 32688
  Cyclic GFR-binding peptide
  MOD_RES (2)..(4)..(36): Xaa is C or S

SEQ ID NO: 84816 - protein, 30 aa, Artificial Sequence
  Cyclic GFR-binding peptide
  MOD_RES (29)..(30): Xaa is C or S
VVMPIKGYVKPTRGVFYLINIPSLDQPVXX

SEQ ID NO: 84817 - protein, 22 aa, Artificial Sequence
  Cyclic GFR-binding peptide
MDRHKRLVVNNASDYYLISTAS

SEQ ID NO: 84818 - protein, 40 aa, Artificial Sequence; identical to SEQ ID NO: 32691
  Cyclic GFR-binding peptide
  MOD_RES (1)..(3)..(35)..(36): Xaa is C or S

SEQ ID NO: 84819 - protein, 26 aa, Artificial Sequence
  Cyclic GFR-binding peptide
EVVMDYHYKLVVNNASDKYLISIPSL

SEQ ID NO: 84820 - protein, 40 aa, Artificial Sequence; identical to SEQ ID NO: 32693
  Cyclic GFR-binding peptide
  MOD_RES (2)..(34)..(35): Xaa is C or S

SEQ ID NO: 84821 - protein, 37 aa, Artificial Sequence; identical to SEQ ID NO: 32695
  Cyclic GFR-binding peptide
  MOD_RES (1)..(33)..(34): Xaa is C or S

SEQ ID NO: 84822 - protein, 35 aa, Artificial Sequence; identical to SEQ ID NO: 32696
  Cyclic GFR-binding peptide
  MOD_RES (2)..(4)..(35): Xaa is C or S

SEQ ID NO: 84823 - protein, 31 aa, Artificial Sequence
  Cyclic GFR-binding peptide
  MOD_RES (26)..(27): Xaa is C or S
YHYKLVVNNASDKYLISIPSLRTPVXXTPPT

SEQ ID NO: 84824 - protein, 25 aa, Artificial Sequence
  Cyclic GFR-binding peptide
EVTMNEYKFKVVNKNEDLYLISIPE

SEQ ID NO: 84825 - protein, 31 aa, Artificial Sequence
  Cyclic GFR-binding peptide
  MOD_RES (2)..(4): Xaa is C or S
SXKXSRVIMPIKGYVKPKRGVFYLINIPSLA

SEQ ID NO: 84826 - protein, 41 aa, Artificial Sequence; identical to SEQ ID NO: 32699
  Cyclic GFR-binding peptide
  MOD_RES (1)..(3)..(35)..(36): Xaa is C or S

SEQ ID NO: 84827 - protein, 34 aa, Artificial Sequence; identical to SEQ ID NO: 32700
  Cyclic GFR-binding peptide
  MOD_RES (31)..(32): Xaa is C or S

SEQ ID NO: 84828 - protein, 34 aa, Artificial Sequence
  Cyclic GFR-binding peptide
  MOD_RES (29)..(30): Xaa is C or S
VMGEYKFKIIQQKDNLYLMSIPEMKTPTXXPGAS

SEQ ID NO: 84829 - protein, 35 aa, Artificial Sequence; identical to SEQ ID NO: 32701
  Cyclic GFR-binding peptide
  MOD_RES (1)..(33)..(34): Xaa is C or S

SEQ ID NO: 84830 - protein, 31 aa, Artificial Sequence
  Cyclic GFR-binding peptide
  MOD_RES (2)..(4): Xaa is C or S
LXGXEEVIMEYKFKLLVRGNDLYLMSIPETK

SEQ ID NO: 84831 - protein, 40 aa, Artificial Sequence; identical to SEQ ID NO: 32702
  Cyclic GFR-binding peptide
  MOD_RES (1)..(3)..(35)..(36): Xaa is C or S

SEQ ID NO: 84832 - protein, 36 aa, Artificial Sequence; identical to SEQ ID NO: 32703
  Cyclic GFR-binding peptide
  MOD_RES (2)..(34)..(35): Xaa is C or S

SEQ ID NO: 84833 - protein, 23 aa, Artificial Sequence
  Cyclic GFR-binding peptide
RHKRLLLVRGNDYYLMSTASTKV

SEQ ID NO: 84834 - protein, 32 aa, Artificial Sequence
  Cyclic GFR-binding peptide
  MOD_RES (1)..(3): Xaa is C or S
XGXRDVVMGYHYKLIIQQKDNKYLMSIPSMKT

SEQ ID NO: 84835 - protein, 22 aa, Artificial Sequence
  Cyclic GFR-binding peptide
RHKRLVVNKNEDYYLISTASMK

SEQ ID NO: 84836 - protein, 30 aa, Artificial Sequence
  Cyclic GFR-binding peptide
  MOD_RES (30)..(30): Xaa is C or S
EVIMRHKRLLLVRGNDYYLMSTASTKVPAX

SEQ ID NO: 84837 - protein, 40 aa, Artificial Sequence; identical to SEQ ID NO: 32704
  Cyclic GFR-binding peptide
  MOD_RES (1)..(3)..(35)..(36): Xaa is C or S

SEQ ID NO: 84838 - protein, 33 aa, Artificial Sequence; identical to SEQ ID NO: 32705
  Cyclic GFR-binding peptide
  MOD_RES (2)..(2): Xaa is C or S

SEQ ID NO: 84839 - protein, 31 aa, Artificial Sequence
  Cyclic GFR-binding peptide
  MOD_RES (2)..(4): Xaa is C or S
LXGXEEVIMYHYKLLLVRGNDKYLMSIPSTK

SEQ ID NO: 84840 - protein, 37 aa, Artificial Sequence; identical to SEQ ID NO: 32707
  Cyclic GFR-binding peptide
  MOD_RES (1)..(33)..(34): Xaa is C or S

SEQ ID NO: 84841 - protein, 39 aa, Artificial Sequence; identical to SEQ ID NO: 32708
  Cyclic GFR-binding peptide
  MOD_RES (2)..(34)..(35): Xaa is C or S

SEQ ID NO: 84842 - protein, 32 aa, Artificial Sequence
  Cyclic GFR-binding peptide
  MOD_RES (1)..(3): Xaa is C or S
XGXRDVVMGEYKFKIIQQKDNLYLMSIPEMKT

SEQ ID NO: 84843 - protein, 25 aa, Artificial Sequence
  Cyclic GFR-binding peptide
GRHKRLIIQQKDNYYLMSTASMKTP

SEQ ID NO: 84844 - protein, 27 aa, Artificial Sequence
  Cyclic GFR-binding peptide
EVIMYHYKLLLVRGNDKYLMSIPSTKV

SEQ ID NO: 84845 - protein, 36 aa, Artificial Sequence; identical to SEQ ID NO: 32709
  Cyclic GFR-binding peptide
  MOD_RES (2)..(4)..(35)..(36): Xaa is C or S

SEQ ID NO: 84846 - protein, 36 aa, Artificial Sequence; identical to SEQ ID NO: 32710
  Cyclic GFR-binding peptide
  MOD_RES (2)..(34)..(35): Xaa is C or S

SEQ ID NO: 84847 - protein, 40 aa, Artificial Sequence; identical to SEQ ID NO: 32711
  Cyclic GFR-binding peptide
  MOD_RES (2)..(4)..(36)..(37): Xaa is C or S

SEQ ID NO: 84848 - protein, 28 aa, Artificial Sequence
  Cyclic GFR-binding peptide
  MOD_RES (27)..(28): Xaa is C or S
MRHKRLLLVRGNDYYLMSTASTKVPAXX

SEQ ID NO: 84849 - protein, 35 aa, Artificial Sequence; identical to SEQ ID NO: 32712
  Cyclic GFR-binding peptide
  MOD_RES (31)..(32): Xaa is C or S

SEQ ID NO: 84850 - protein, 31 aa, Artificial Sequence; identical to SEQ ID NO: 32715
  Cyclic GFR-binding peptide
  MOD_RES (1)..(1): Xaa is C or S

SEQ ID NO: 84851 - protein, 28 aa, Artificial Sequence
  Cyclic GFR-binding peptide
  MOD_RES (1)..(1): Xaa is C or S
XAEVVMDRHKRLVVNNAADYYLISTASL

SEQ ID NO: 84852 - protein, 23 aa, Artificial Sequence
  Cyclic GFR-binding peptide
TMNEYKFKVVNKNEDLYLISIPE

SEQ ID NO: 84853 - protein, 27 aa, Artificial Sequence
  Cyclic GFR-binding peptide
VTMNRHKRLVVNKNEDYYLISTASMKE

SEQ ID NO: 84854 - protein, 41 aa, Artificial Sequence; identical to SEQ ID NO: 32716
  Cyclic GFR-binding peptide
  MOD_RES (2)..(4)..(36)..(37): Xaa is C or S

SEQ ID NO: 84855 - protein, 30 aa, Artificial Sequence
  Cyclic GFR-binding peptide
  MOD_RES (30)..(30): Xaa is C or S
VTMNRHKRLVVNKNEDYYLISTASMKEPVX

SEQ ID NO: 84856 - protein, 24 aa, Artificial Sequence
  Cyclic GFR-binding peptide
VMDEYKFKVVNNASDLYLISIPEL

SEQ ID NO: 84857 - protein, 25 aa, Artificial Sequence
  Cyclic GFR-binding peptide
YHYKLIIQQKDNKYLMSIPSMKTPT

SEQ ID NO: 84858 - protein, 29 aa, Artificial Sequence
  Cyclic GFR-binding peptide
  MOD_RES (1)..(3): Xaa is C or S
XGXRDVVMGYHYKLIIQQKDNKYLMSIPS

SEQ ID NO: 84859 - protein, 26 aa, Artificial Sequence
  Cyclic GFR-binding peptide
  MOD_RES (26)..(26): Xaa is C or S
RHKRLYTVVGKDYYLISTASLKTPVX

SEQ ID NO: 84860 - protein, 39 aa, Artificial Sequence; identical to SEQ ID NO: 32720
  Cyclic GFR-binding peptide
  MOD_RES (1)..(3)..(35)..(36): Xaa is C or S

SEQ ID NO: 84861 - protein, 39 aa, Artificial Sequence; identical to SEQ ID NO: 32721
  Cyclic GFR-binding peptide
  MOD_RES (2)..(34)..(35): Xaa is C or S

SEQ ID NO: 84862 - protein, 32 aa, Artificial Sequence
  Cyclic GFR-binding peptide
  MOD_RES (29)..(30): Xaa is C or S
TMNEYKFKVVNKNEDLYLISIPEMKEPVXXPE

SEQ ID NO: 84863 - protein, 33 aa, Artificial Sequence; identical to SEQ ID NO: 32723
  Cyclic GFR-binding peptide
  MOD_RES (31)..(32): Xaa is C or S

SEQ ID NO: 84864 - protein, 35 aa, Artificial Sequence
  Cyclic GFR-binding peptide
  MOD_RES (30)..(31): Xaa is C or S
VTMNYHYKLVVNKNEDKYLISIPSMKEPVXXPEPI

SEQ ID NO: 84865 - protein, 28 aa, Artificial Sequence
  Cyclic GFR-binding peptide
  MOD_RES (1)..(3): Xaa is C or S
XGXEEVIMEYKFKLLVRGNDLYLMSIPE

SEQ ID NO: 84866 - protein, 23 aa, Artificial Sequence
  Cyclic GFR-binding peptide
VMPIKGYVKPTRGVFYLINIPSL

SEQ ID NO: 84867 - protein, 33 aa, Artificial Sequence
  Cyclic GFR-binding peptide
  MOD_RES (29)..(30): Xaa is C or S
VIMEYKFKLLVRGNDLYLMSIPETKVPAXXTSP

SEQ ID NO: 84868 - protein, 34 aa, Artificial Sequence
  Cyclic GFR-binding peptide
  MOD_RES (28)..(29): Xaa is C or S
MDEYKFKVVNNASDLYLISIPELRTPVXXTPPTS

SEQ ID NO: 84869 - protein, 38 aa, Artificial Sequence; identical to SEQ ID NO: 32727
  Cyclic GFR-binding peptide
  MOD_RES (1)..(3)..(34)..(35): Xaa is C or S

SEQ ID NO: 84870 - protein, 27 aa, Artificial Sequence
  Cyclic GFR-binding peptide
  MOD_RES (1)..(1): Xaa is C or S
XSEVTMNPIKGYVVNKNEDFYLINIPS

SEQ ID NO: 84871 - protein, 36 aa, Artificial Sequence; identical to SEQ ID NO: 20673
  Cyclic GFR-binding peptide
  MOD_RES (2)..(4): Xaa is C or S

SEQ ID NO: 84872 - protein, 36 aa, Artificial Sequence; identical to SEQ ID NO: 32729
  Cyclic GFR-binding peptide
  MOD_RES (2)..(33)..(34): Xaa is C or S

SEQ ID NO: 84873 - protein, 37 aa, Artificial Sequence; identical to SEQ ID NO: 32730
  Cyclic GFR-binding peptide
  MOD_RES (1)..(33)..(34): Xaa is C or S

SEQ ID NO: 84874 - protein, 26 aa, Artificial Sequence
  Cyclic GFR-binding peptide
SEVTMNPIKGYVVNKNEDFYLINIPS

SEQ ID NO: 84875 - protein, 33 aa, Artificial Sequence
  Cyclic GFR-binding peptide
  MOD_RES (28)..(29): Xaa is C or S
IMEYKFKLLVRGNDLYLMSIPETKVPAXXTSPV

SEQ ID NO: 84876 - protein, 27 aa, Artificial Sequence
  Cyclic GFR-binding peptide
  MOD_RES (26)..(27): Xaa is C or S
YHYKLVVNNASDKYLISIPSLRTPVXX

SEQ ID NO: 84877 - protein, 32 aa, Artificial Sequence; identical to SEQ ID NO: 32731
  Cyclic GFR-binding peptide
  MOD_RES (1)..(1): Xaa is C or S

SEQ ID NO: 84878 - protein, 24 aa, Artificial Sequence
  Cyclic GFR-binding peptide
TMNRHKRLVVNKNEDYYLISTASM

SEQ ID NO: 84879 - protein, 22 aa, Artificial Sequence
  Cyclic GFR-binding peptide
MNEYKFKVVNKNEDLYLISIPE

SEQ ID NO: 84880 - protein, 30 aa, Artificial Sequence
  Cyclic GFR-binding peptide
  MOD_RES (28)..(29): Xaa is C or S
MGRHKRLIIQQKDNYYLMSTASMKTPTXXP

SEQ ID NO: 84881 - protein, 26 aa, Artificial Sequence
  Cyclic GFR-binding peptide
VMGEYKFKIIQQKDNLYLMSIPEMKT

SEQ ID NO: 84882 - protein, 30 aa, Artificial Sequence
  Cyclic GFR-binding peptide
  MOD_RES (1)..(3): Xaa is C or S
XGXRDVVMGYHYKLIIQQKDNKYLMSIPSM

SEQ ID NO: 84883 - protein, 42 aa, Artificial Sequence; identical to SEQ ID NO: 32732
  Cyclic GFR-binding peptide
  MOD_RES (2)..(4)..(36)..(37): Xaa is C or S

SEQ ID NO: 84884 - protein, 20 aa, Artificial Sequence
  Cyclic GFR-binding peptide
RHKRLIIQQKDNYYLMSTAS

SEQ ID NO: 84885 - protein, 35 aa, Artificial Sequence
  Cyclic GFR-binding peptide
  MOD_RES (30)..(31): Xaa is C or S
RVIMPIKGYVKPKRGVFYLINIPSLAQPVXXPAAS

SEQ ID NO: 84886 - protein, 35 aa, Artificial Sequence; identical to SEQ ID NO: 32733
  Cyclic GFR-binding peptide
  MOD_RES (32)..(33): Xaa is C or S

SEQ ID NO: 84887 - protein, 29 aa, Artificial Sequence
  Cyclic GFR-binding peptide
  MOD_RES (1)..(1): Xaa is C or S
XSEVTMNRYKKLVVNKNEDFYLISIANMK

SEQ ID NO: 84888 - protein, 28 aa, Artificial Sequence
  Cyclic GFR-binding peptide
  MOD_RES (1)..(1): Xaa is C or S
XSEVTMNPIKGYVVNKNEDFYLINIPSM

SEQ ID NO: 84889 - protein, 34 aa, Artificial Sequence
  Cyclic GFR-binding peptide
  MOD_RES (29)..(30): Xaa is C or S
AMGRHKRLYTVVGKDYYLISTASLKTPVXXAKSA

SEQ ID NO: 84890 - protein, 36 aa, Artificial Sequence; identical to SEQ ID NO: 32734
  Cyclic GFR-binding peptide
  MOD_RES (31)..(32): Xaa is C or S

SEQ ID NO: 84891 - protein, 35 aa, Artificial Sequence; identical to SEQ ID NO: 32735
  Cyclic GFR-binding peptide
  MOD_RES (31)..(32): Xaa is C or S

SEQ ID NO: 84892 - protein, 28 aa, Artificial Sequence
  Cyclic GFR-binding peptide
  MOD_RES (27)..(28): Xaa is C or S
DYHYKLVVNNASDKYLISIPSLRTPVXX

SEQ ID NO: 84893 - protein, 27 aa, Artificial Sequence
  Cyclic GFR-binding peptide
EVTMNRYKKLVVNKNEDFYLISIANMK

SEQ ID NO: 84894 - protein, 33 aa, Artificial Sequence
  Cyclic GFR-binding peptide
  MOD_RES (1)..(3): Xaa is C or S
XAXSEVTMNRYKKLVVNKNEDFYLISIANMKEP

SEQ ID NO: 84895 - protein, 37 aa, Artificial Sequence; identical to SEQ ID NO: 32739
  Cyclic GFR-binding peptide
  MOD_RES (32)..(33): Xaa is C or S

SEQ ID NO: 84896 - protein, 29 aa, Artificial Sequence
  Cyclic GFR-binding peptide
EVIMEYKFKLLVRGNDLYLMSIPETKVPA

SEQ ID NO: 84897 - protein, 35 aa, Artificial Sequence; identical to SEQ ID NO: 32741
  Cyclic GFR-binding peptide
  MOD_RES (1)..(3)..(35): Xaa is C or S

SEQ ID NO: 84898 - protein, 29 aa, Artificial Sequence
  Cyclic GFR-binding peptide
  MOD_RES (29)..(29): Xaa is C or S
VMDYHYKLVVNNASDKYLISIPSLRTPVX

SEQ ID NO: 84899 - protein, 34 aa, Artificial Sequence
  Cyclic GFR-binding peptide
  MOD_RES (30)..(31): Xaa is C or S
VVMDEYKFKVVNNASDLYLISIPELRTPVXXTPP

SEQ ID NO: 84900 - protein, 21 aa, Artificial Sequence
  Cyclic GFR-binding peptide
DRHKRLVVNNASDYYLISTAS

SEQ ID NO: 84901 - protein, 34 aa, Artificial Sequence; identical to SEQ ID NO: 32742
  Cyclic GFR-binding peptide
  MOD_RES (31)..(32): Xaa is C or S

SEQ ID NO: 84902 - protein, 31 aa, Artificial Sequence
  Cyclic GFR-binding peptide
  MOD_RES (26)..(27): Xaa is C or S
RHKRLYTVVGKDYYLISTASLKTPVXXAKSA

SEQ ID NO: 84903 - protein, 30 aa, Artificial Sequence
  Cyclic GFR-binding peptide
  MOD_RES (1)..(1): Xaa is C or S
XSKVVMPIKGYVKPTRGVFYLINIPSLDQP

SEQ ID NO: 84904 - protein, 32 aa, Artificial Sequence
  Cyclic GFR-binding peptide
  MOD_RES (26)..(27): Xaa is C or S
EYKFKIVNSSDDLYLVSIPELKTPAXXPKPVH

SEQ ID NO: 84905 - protein, 33 aa, Artificial Sequence; identical to SEQ ID NO: 32746
  Cyclic GFR-binding peptide
  MOD_RES (31)..(32): Xaa is C or S

SEQ ID NO: 84906 - protein, 32 aa, Artificial Sequence
  Cyclic GFR-binding peptide
  MOD_RES (30)..(31): Xaa is C or S
VAMGRHKRLYTVVGKDYYLISTASLKTPVXXA

SEQ ID NO: 84907 - protein, 37 aa, Artificial Sequence; identical to SEQ ID NO: 32749
  Cyclic GFR-binding peptide
  MOD_RES (1)..(32)..(33): Xaa is C or S

SEQ ID NO: 84908 - protein, 28 aa, Artificial Sequence
  Cyclic GFR-binding peptide
KVVMPIKGYVKPTRGVFYLINIPSLDQP

SEQ ID NO: 84909 - protein, 29 aa, Artificial Sequence
  Cyclic GFR-binding peptide
  MOD_RES (1)..(3): Xaa is C or S
XKXSRVIMPIKGYVKPKRGVFYLINIPSL

SEQ ID NO: 84910 - protein, 39 aa, Artificial Sequence; identical to SEQ ID NO: 32751
  Cyclic GFR-binding peptide
  MOD_RES (2)..(34)..(35): Xaa is C or S

SEQ ID NO: 84911 - protein, 32 aa, Artificial Sequence
  Cyclic GFR-binding peptide
  MOD_RES (28)..(29): Xaa is C or S
MGRHKRLYTVVGKDYYLISTASLKTPVXXAKS

SEQ ID NO: 84912 - protein, 38 aa, Artificial Sequence; identical to SEQ ID NO: 32752
  Cyclic GFR-binding peptide
  MOD_RES (2)..(34)..(35): Xaa is C or S

SEQ ID NO: 84913 - protein, 29 aa, Artificial Sequence
  Cyclic GFR-binding peptide
  MOD_RES (26)..(27): Xaa is C or S
YHYKLVVNKNEDKYLISIPSMKEPVXXPE

SEQ ID NO: 84914 - protein, 34 aa, Artificial Sequence; identical to SEQ ID NO: 32753
  Cyclic GFR-binding peptide
  MOD_RES (2)..(33)..(34): Xaa is C or S

SEQ ID NO: 84915 - protein, 28 aa, Artificial Sequence
  Cyclic GFR-binding peptide
AEVVMDRHKRLVVNNAADYYLISTASLR

SEQ ID NO: 84916 - protein, 36 aa, Artificial Sequence; identical to SEQ ID NO: 32754
  Cyclic GFR-binding peptide
  MOD_RES (1)..(3)..(35)..(36): Xaa is C or S

SEQ ID NO: 84917 - protein, 32 aa, Artificial Sequence
  Cyclic GFR-binding peptide
  MOD_RES (28)..(29): Xaa is C or S
IMRHKRLLLVRGNDYYLMSTASTKVPAXXTSP

SEQ ID NO: 84918 - protein, 35 aa, Artificial Sequence; identical to SEQ ID NO: 32755
  Cyclic GFR-binding peptide
  MOD_RES (31)..(32): Xaa is C or S

SEQ ID NO: 84919 - protein, 25 aa, Artificial Sequence
  Cyclic GFR-binding peptide
VVMGRHKRLIIQQKDNYYLMSTASM

SEQ ID NO: 84920 - protein, 25 aa, Artificial Sequence
  Cyclic GFR-binding peptide
DRHKRLVVNNASDYYLISTASLRTP

SEQ ID NO: 84921 - protein, 30 aa, Artificial Sequence
  Cyclic GFR-binding peptide
  MOD_RES (2)..(4): Xaa is C or S
RXGXAEVVMDRHKRLVVNNAADYYLISTAS

SEQ ID NO: 84922 - protein, 32 aa, Artificial Sequence
  Cyclic GFR-binding peptide
  MOD_RES (28)..(29): Xaa is C or S
IMYHYKLLLVRGNDKYLMSIPSTKVPAXXTSP

SEQ ID NO: 84923 - protein, 33 aa, Artificial Sequence; identical to SEQ ID NO: 32759
  Cyclic GFR-binding peptide
  MOD_RES (2)..(33): Xaa is C or S

SEQ ID NO: 84924 - protein, 29 aa, Artificial Sequence
  Cyclic GFR-binding peptide
  MOD_RES (26)..(27): Xaa is C or S
YHYKLIIQQKDNKYLMSIPSMKTPTXXPG

SEQ ID NO: 84925 - protein, 32 aa, Artificial Sequence
  Cyclic GFR-binding peptide
  MOD_RES (26)..(27): Xaa is C or S
RHKRLYTVVGKDYYLISTASLKTPVXXAKSAK

SEQ ID NO: 84926 - protein, 34 aa, Artificial Sequence
  Cyclic GFR-binding peptide
  MOD_RES (28)..(29): Xaa is C or S
VMPIKGYVKPTRGVFYLINIPSLDQPVXXPSASA

SEQ ID NO: 84927 - protein, 25 aa, Artificial Sequence
  Cyclic GFR-binding peptide
EVTMNRHKRLVVNKNEDYYLISTAS

SEQ ID NO: 84928 - protein, 37 aa, Artificial Sequence; identical to SEQ ID NO: 32760
  Cyclic GFR-binding peptide
  MOD_RES (2)..(33)..(34): Xaa is C or S

SEQ ID NO: 84929 - protein, 35 aa, Artificial Sequence; identical to SEQ ID NO: 32761
  Cyclic GFR-binding peptide
  MOD_RES (1)..(33)..(34): Xaa is C or S

SEQ ID NO: 84930 - protein, 28 aa, Artificial Sequence
  Cyclic GFR-binding peptide
VMGYHYKLIIQQKDNKYLMSIPSMKTPT

SEQ ID NO: 84931 - protein, 32 aa, Artificial Sequence
  Cyclic GFR-binding peptide
  MOD_RES (28)..(29): Xaa is C or S
MNRHKRLVVNKNEDYYLISTASMKEPVXXPEP

SEQ ID NO: 84932 - protein, 32 aa, Artificial Sequence
  Cyclic GFR-binding peptide
  MOD_RES (28)..(29): Xaa is C or S
MNYHYKLVVNKNEDKYLISIPSMKEPVXXPEP

SEQ ID NO: 84933 - protein, 27 aa, Artificial Sequence
  Cyclic GFR-binding peptide
VVMGYHYKLIIQQKDNKYLMSIPSMKT

SEQ ID NO: 84934 - protein, 31 aa, Artificial Sequence
  Cyclic GFR-binding peptide
  MOD_RES (30)..(31): Xaa is C or S
RVIMPIKGYVKPKRGVFYLINIPSLAQPVXX

SEQ ID NO: 84935 - protein, 32 aa, Artificial Sequence
  Cyclic GFR-binding peptide
  MOD_RES (28)..(29): Xaa is C or S
MDEYKFKVVNNASDLYLISIPELRTPVXXTPP

SEQ ID NO: 84936 - protein, 37 aa, Artificial Sequence; identical to SEQ ID NO: 32765
  Cyclic GFR-binding peptide
  MOD_RES (1)..(32)..(33): Xaa is C or S

SEQ ID NO: 84937 - protein, 24 aa, Artificial Sequence
  Cyclic GFR-binding peptide
IMEYKFKLLVRGNDLYLMSIPETK

SEQ ID NO: 84938 - protein, 27 aa, Artificial Sequence
  Cyclic GFR-binding peptide
  MOD_RES (26)..(27): Xaa is C or S
EYKFKLLVRGNDLYLMSIPETKVPAXX

SEQ ID NO: 84939 - protein, 33 aa, Artificial Sequence; identical to SEQ ID NO: 32766
  Cyclic GFR-binding peptide
  MOD_RES (31)..(32): Xaa is C or S

SEQ ID NO: 84940 - protein, 22 aa, Artificial Sequence
  Cyclic GFR-binding peptide
YHYKLLLVRGNDKYLMSIPSTK

SEQ ID NO: 84941 - protein, 40 aa, Artificial Sequence; identical to SEQ ID NO: 32767
  Cyclic GFR-binding peptide
  MOD_RES (1)..(3)..(34)..(35): Xaa is C or S

SEQ ID NO: 84942 - protein, 33 aa, Artificial Sequence
  Cyclic GFR-binding peptide
  MOD_RES (27)..(28): Xaa is C or S
MEYKFKLLVRGNDLYLMSIPETKVPAXXTSPVR

SEQ ID NO: 84943 - protein, 32 aa, Artificial Sequence
  Cyclic GFR-binding peptide
  MOD_RES (26)..(27): Xaa is C or S
PIKGYVVNKNEDFYLINIPSMKEPVXXPEPIG

SEQ ID NO: 84944 - protein, 24 aa, Artificial Sequence
  Cyclic GFR-binding peptide
IMPIKGYVKPKRGVFYLINIPSLA

SEQ ID NO: 84945 - protein, 27 aa, Artificial Sequence
  Cyclic GFR-binding peptide
  MOD_RES (1)..(1): Xaa is C or S
XSEVTMNYHYKLVVNKNEDKYLISIPS

SEQ ID NO: 84946 - protein, 20 aa, Artificial Sequence
  Cyclic GFR-binding peptide
YHYKLVVNKNEDKYLISIPS

SEQ ID NO: 84947 - protein, 24 aa, Artificial Sequence
  Cyclic GFR-binding peptide
MDRHKRLVVNNASDYYLISTASLR

SEQ ID NO: 84948 - protein, 34 aa, Artificial Sequence; identical to SEQ ID NO: 32774
  Cyclic GFR-binding peptide
  MOD_RES (1)..(32)..(33): Xaa is C or S

SEQ ID NO: 84949 - protein, 26 aa, Artificial Sequence
  Cyclic GFR-binding peptide
MDEYKFKVVNNASDLYLISIPELRTP

SEQ ID NO: 84950 - protein, 38 aa, Artificial Sequence; identical to SEQ ID NO: 32775
  Cyclic GFR-binding peptide
  MOD_RES (1)..(32)..(33): Xaa is C or S

SEQ ID NO: 84951 - protein, 32 aa, Artificial Sequence
  Cyclic GFR-binding peptide
  MOD_RES (28)..(29): Xaa is C or S
IMPIKGYIKPTKGIFYLINIPSLDQSVXXPSA

SEQ ID NO: 84952 - protein, 33 aa, Artificial Sequence
  Cyclic GFR-binding peptide
  MOD_RES (29)..(30): Xaa is C or S
VIMRHKRLLLVRGNDYYLMSTASTKVPAXXTSP

SEQ ID NO: 84953 - protein, 31 aa, Artificial Sequence
  Cyclic GFR-binding peptide
  MOD_RES (27)..(28): Xaa is C or S
MRHKRLLLVRGNDYYLMSTASTKVPAXXTSP

SEQ ID NO: 84954 - protein, 40 aa, Artificial Sequence; identical to SEQ ID NO: 32776
  Cyclic GFR-binding peptide
  MOD_RES (2)..(4)..(36)..(37): Xaa is C or S

SEQ ID NO: 84955 - protein, 28 aa, Artificial Sequence
  Cyclic GFR-binding peptide
  MOD_RES (27)..(28): Xaa is C or S
NRYKKLVVNKNEDFYLISIANMKEPVXX

SEQ ID NO: 84956 - protein, 38 aa, Artificial Sequence; identical to SEQ ID NO: 32779
  Cyclic GFR-binding peptide
  MOD_RES (1)..(3)..(35)..(36): Xaa is C or S

SEQ ID NO: 84957 - protein, 28 aa, Artificial Sequence
  Cyclic GFR-binding peptide
  MOD_RES (2)..(2): Xaa is C or S
AXSEVTMNRHKRLVVNKNEDYYLISTAS

SEQ ID NO: 84958 - protein, 42 aa, Artificial Sequence; identical to SEQ ID NO: 32780
  Cyclic GFR-binding peptide
  MOD_RES (2)..(4)..(36)..(37): Xaa is C or S

SEQ ID NO: 84959 - protein, 32 aa, Artificial Sequence
  Cyclic GFR-binding peptide
  MOD_RES (2)..(2): Xaa is C or S
GXRDVVMGEYKFKIIQQKDNLYLMSIPEMKTP

SEQ ID NO: 84960 - protein, 27 aa, Artificial Sequence
  Cyclic GFR-binding peptide
TMNYHYKLVVNKNEDKYLISIPSMKEP

SEQ ID NO: 84961 - protein, 26 aa, Artificial Sequence
  Cyclic GFR-binding peptide
  MOD_RES (26)..(26): Xaa is C or S
RHKRLLLVRGNDYYLMSTASTKVPAX

SEQ ID NO: 84962 - protein, 32 aa, Artificial Sequence
  Cyclic GFR-binding peptide
  MOD_RES (30)..(31): Xaa is C or S
KVIMPIKGYIKPTKGIFYLINIPSLDQSVXXP

SEQ ID NO: 84963 - protein, 34 aa, Artificial Sequence
  Cyclic GFR-binding peptide
  MOD_RES (29)..(30): Xaa is C or S
VMDEYKFKVVNNASDLYLISIPELRTPVXXTPPT

SEQ ID NO: 84964 - protein, 34 aa, Artificial Sequence; identical to SEQ ID NO: 32781
  Cyclic GFR-binding peptide
  MOD_RES (2)..(34): Xaa is C or S

SEQ ID NO: 84965 - protein, 28 aa, Artificial Sequence
  Cyclic GFR-binding peptide
  MOD_RES (27)..(28): Xaa is C or S
DEYKFKVVNNASDLYLISIPELRTPVXX

SEQ ID NO: 84966 - protein, 35 aa, Artificial Sequence
  Cyclic GFR-binding peptide
  MOD_RES (30)..(31): Xaa is C or S
VVMDEYKFKVVNNASDLYLISIPELRTPVXXTPPT

SEQ ID NO: 84967 - protein, 28 aa, Artificial Sequence
  Cyclic GFR-binding peptide
VTMNYHYKLVVNKNEDKYLISIPSMKEP

SEQ ID NO: 84968 - protein, 30 aa, Artificial Sequence
  Cyclic GFR-binding peptide
  MOD_RES (1)..(3): Xaa is C or S
XGXRDVVMGEYKFKIIQQKDNLYLMSIPEM

SEQ ID NO: 84969 - protein, 35 aa, Artificial Sequence; identical to SEQ ID NO: 20950
  Cyclic GFR-binding peptide
  MOD_RES (2)..(4): Xaa is C or S

SEQ ID NO: 84970 - protein, 28 aa, Artificial Sequence
  Cyclic GFR-binding peptide
  MOD_RES (27)..(28): Xaa is C or S
GRHKRLIIQQKDNYYLMSTASMKTPTXX

SEQ ID NO: 84971 - protein, 24 aa, Artificial Sequence
  Cyclic GFR-binding peptide
RVIMPIKGYVKPKRGVFYLINIPS

SEQ ID NO: 84972 - protein, 38 aa, Artificial Sequence; identical to SEQ ID NO: 32784
  Cyclic GFR-binding peptide
  MOD_RES (2)..(4)..(35)..(36): Xaa is C or S

SEQ ID NO: 84973 - protein, 36 aa, Artificial Sequence; identical to SEQ ID NO: 32785
  Cyclic GFR-binding peptide
  MOD_RES (31)..(32): Xaa is C or S

SEQ ID NO: 84974 - protein, 25 aa, Artificial Sequence
  Cyclic GFR-binding peptide
EVTMNRYKKLVVNKNEDFYLISIAN

SEQ ID NO: 84975 - protein, 28 aa, Artificial Sequence
  Cyclic GFR-binding peptide
  MOD_RES (2)..(2): Xaa is C or S
AXSEVTMNEYKFKVVNKNEDLYLISIPE

SEQ ID NO: 84976 - protein, 31 aa, Artificial Sequence
  Cyclic GFR-binding peptide
  MOD_RES (2)..(2): Xaa is C or S
AXSEVTMNYHYKLVVNKNEDKYLISIPSMKE

SEQ ID NO: 84977 - protein, 27 aa, Artificial Sequence
  Cyclic GFR-binding peptide
EEVIMYHYKLLLVRGNDKYLMSIPSTK

SEQ ID NO: 84978 - protein, 28 aa, Artificial Sequence
  Cyclic GFR-binding peptide
  MOD_RES (28)..(28): Xaa is C or S
MGRHKRLIIQQKDNYYLMSTASMKTPTX

SEQ ID NO: 84979 - protein, 25 aa, Artificial Sequence
  Cyclic GFR-binding peptide
VVMGEYKFKIIQQKDNLYLMSIPEM

SEQ ID NO: 84980 - protein, 33 aa, Artificial Sequence
  Cyclic GFR-binding peptide
  MOD_RES (27)..(28): Xaa is C or S
MYHYKLLLVRGNDKYLMSIPSTKVPAXXTSPVR

SEQ ID NO: 84981 - protein, 29 aa, Artificial Sequence
  Cyclic GFR-binding peptide
  MOD_RES (29)..(29): Xaa is C or S
TMNYHYKLVVNKNEDKYLISIPSMKEPVX

SEQ ID NO: 84982 - protein, 33 aa, Artificial Sequence
  Cyclic GFR-binding peptide
  MOD_RES (28)..(29): Xaa is C or S
MDRHKRLVVNNASDYYLISTASLRTPVXXTPPT

SEQ ID NO: 84983 - protein, 34 aa, Artificial Sequence; identical to SEQ ID NO: 32791
  Cyclic GFR-binding peptide
  MOD_RES (2)..(34): Xaa is C or S

SEQ ID NO: 84984 - protein, 26 aa, Artificial Sequence
  Cyclic GFR-binding peptide
VIMYHYKLLLVRGNDKYLMSIPSTKV

SEQ ID NO: 84985 - protein, 30 aa, Artificial Sequence
  Cyclic GFR-binding peptide
SEVTMNEYKFKVVNKNEDLYLISIPEMKEP

SEQ ID NO: 84986 - protein, 36 aa, Artificial Sequence
  Cyclic GFR-binding peptide
  MOD_RES (30)..(31): Xaa is C or S
VVMDRHKRLVVNNAADYYLISTASLRAPVXXSAPAA

SEQ ID NO: 84987 - protein, 30 aa, Artificial Sequence
  Cyclic GFR-binding peptide
  MOD_RES (1)..(3): Xaa is C or S
XGXRDVVMGRHKRLIIQQKDNYYLMSTASM

SEQ ID NO: 84988 - protein, 29 aa, Artificial Sequence
  Cyclic GFR-binding peptide
  MOD_RES (2)..(2): Xaa is C or S
GXRDVVMGEYKFKIIQQKDNLYLMSIPEM

SEQ ID NO: 84989 - protein, 24 aa, Artificial Sequence
  Cyclic GFR-binding peptide
TMNEYKFKVVNKNEDLYLISIPEM

SEQ ID NO: 84990 - protein, 38 aa, Artificial Sequence; identical to SEQ ID NO: 32794
  Cyclic GFR-binding peptide
  MOD_RES (2)..(4)..(36)..(37): Xaa is C or S

SEQ ID NO: 84991 - protein, 30 aa, Artificial Sequence
  Cyclic GFR-binding peptide
  MOD_RES (2)..(4): Xaa is C or S
RXGXSEVVMDRHKRLVVNNASDYYLISTAS

SEQ ID NO: 84992 - protein, 35 aa, Artificial Sequence
  Cyclic GFR-binding peptide
  MOD_RES (30)..(31): Xaa is C or S
VTMNRYKKLVVNKNEDFYLISIANMKEPVXXPEPI

SEQ ID NO: 84993 - protein, 33 aa, Artificial Sequence
  Cyclic GFR-binding peptide
  MOD_RES (29)..(30): Xaa is C or S
VVMPIKGYVKPTRGVFYLINIPSLDQPVXXPSA

SEQ ID NO: 84994 - protein, 30 aa, Artificial Sequence
  Cyclic GFR-binding peptide
  MOD_RES (2)..(2): Xaa is C or S
AXSEVTMNRYKKLVVNKNEDFYLISIANMK

SEQ ID NO: 84995 - protein, 28 aa, Artificial Sequence
  Cyclic GFR-binding peptide
  MOD_RES (2)..(2): Xaa is C or S
KXSKVVMPIKGYVKPTRGVFYLINIPSL

SEQ ID NO: 84996 - protein, 26 aa, Artificial Sequence
  Cyclic GFR-binding peptide
KVVMPIKGYVKPTRGVFYLINIPSLD

SEQ ID NO: 84997 - protein, 27 aa, Artificial Sequence
  Cyclic GFR-binding peptide
  MOD_RES (27)..(27): Xaa is C or S
NEYKFKVVNKNEDLYLISIPEMKEPVX

SEQ ID NO: 84998 - protein, 20 aa, Artificial Sequence
  Cyclic GFR-binding peptide
EYKFKIIQQKDNLYLMSIPE

SEQ ID NO: 84999 - protein, 32 aa, Artificial Sequence
  Cyclic GFR-binding peptide
  MOD_RES (30)..(31): Xaa is C or S
VVMDEYKFKVVNNASDLYLISIPELRTPVXXT

SEQ ID NO: 85000 - protein, 25 aa, Artificial Sequence
  Cyclic GFR-binding peptide
EVTMNYHYKLVVNKNEDKYLISIPS

SEQ ID NO: 85001 - protein, 27 aa, Artificial Sequence
  Cyclic GFR-binding peptide
  MOD_RES (27)..(27): Xaa is C or S
NYHYKLVVNKNEDKYLISIPSMKEPVX

SEQ ID NO: 85002 - protein, 35 aa, Artificial Sequence; identical to SEQ ID NO: 32797
  Cyclic GFR-binding peptide
  MOD_RES (2)..(4)..(35): Xaa is C or S

SEQ ID NO: 85003 - protein, 37 aa, Artificial Sequence; identical to SEQ ID NO: 32799
  Cyclic GFR-binding peptide
  MOD_RES (1)..(3)..(35)..(36): Xaa is C or S

SEQ ID NO: 85004 - protein, 31 aa, Artificial Sequence
  Cyclic GFR-binding peptide
  MOD_RES (2)..(2): Xaa is C or S
GXEEVIMYHYKLLLVRGNDKYLMSIPSTKVP

SEQ ID NO: 85005 - protein, 30 aa, Artificial Sequence
  Cyclic GFR-binding peptide
  MOD_RES (28)..(29): Xaa is C or S
MDRHKRLVVNNASDYYLISTASLRTPVXXT

SEQ ID NO: 85006 - protein, 25 aa, Artificial Sequence
  Cyclic GFR-binding peptide
SRVIMPIKGYVKPKRGVFYLINIPS

SEQ ID NO: 85007 - protein, 35 aa, Artificial Sequence
  Cyclic GFR-binding peptide
  MOD_RES (29)..(30): Xaa is C or S
AMGRHKRLYTVVGKDYYLISTASLKTPVXXAKSAK

SEQ ID NO: 85008 - protein, 33 aa, Artificial Sequence; identical to SEQ ID NO: 32800
  Cyclic GFR-binding peptide
  MOD_RES (2)..(2): Xaa is C or S

SEQ ID NO: 85009 - protein, 35 aa, Artificial Sequence
  Cyclic GFR-binding peptide
  MOD_RES (29)..(30): Xaa is C or S
VMGEYKFKIIQQKDNLYLMSIPEMKTPTXXPGASG

SEQ ID NO: 85010 - protein, 37 aa, Artificial Sequence; identical to SEQ ID NO: 32801
  Cyclic GFR-binding peptide
  MOD_RES (2)..(4)..(36)..(37): Xaa is C or S

SEQ ID NO: 85011 - protein, 34 aa, Artificial Sequence
  Cyclic GFR-binding peptide
  MOD_RES (28)..(29): Xaa is C or S
MNRHKRLVVNKNEDYYLISTASMKEPVXXPEPIG

SEQ ID NO: 85012 - protein, 35 aa, Artificial Sequence; identical to SEQ ID NO: 32802
  Cyclic GFR-binding peptide
  MOD_RES (1)..(3)..(35): Xaa is C or S

SEQ ID NO: 85013 - protein, 39 aa, Artificial Sequence; identical to SEQ ID NO: 32804
  Cyclic GFR-binding peptide
  MOD_RES (1)..(33)..(34): Xaa is C or S

SEQ ID NO: 85014 - protein, 39 aa, Artificial Sequence; identical to SEQ ID NO: 32805
  Cyclic GFR-binding peptide
  MOD_RES (1)..(3)..(34)..(35): Xaa is C or S

SEQ ID NO: 85015 - protein, 34 aa, Artificial Sequence; identical to SEQ ID NO: 32806
  Cyclic GFR-binding peptide
  MOD_RES (1)..(3): Xaa is C or S

SEQ ID NO: 85016 - protein, 38 aa, Artificial Sequence; identical to SEQ ID NO: 32807
  Cyclic GFR-binding peptide
  MOD_RES (32)..(33): Xaa is C or S

SEQ ID NO: 85017 - protein, 36 aa, Artificial Sequence; identical to SEQ ID NO: 32808
  Cyclic GFR-binding peptide
  MOD_RES (2)..(34)..(35): Xaa is C or S

SEQ ID NO: 85018 - protein, 30 aa, Artificial Sequence
  Cyclic GFR-binding peptide
  MOD_RES (27)..(28): Xaa is C or S
MYHYKLLLVRGNDKYLMSIPSTKVPAXXTS

SEQ ID NO: 85019 - protein, 31 aa, Artificial Sequence
  Cyclic GFR-binding peptide
  MOD_RES (30)..(31): Xaa is C or S
VTMNPIKGYVVNKNEDFYLINIPSMKEPVXX

SEQ ID NO: 85020 - protein, 36 aa, Artificial Sequence; identical to SEQ ID NO: 32809
  Cyclic GFR-binding peptide
  MOD_RES (1)..(3)..(34)..(35): Xaa is C or S

SEQ ID NO: 85021 - protein, 26 aa, Artificial Sequence
  Cyclic GFR-binding peptide
SEVTMNRYKKLVVNKNEDFYLISIAN

SEQ ID NO: 85022 - protein, 28 aa, Artificial Sequence
  Cyclic GFR-binding peptide
  MOD_RES (27)..(28): Xaa is C or S
NPIKGYVVNKNEDFYLINIPSMKEPVXX

SEQ ID NO: 85023 - protein, 31 aa, Artificial Sequence; identical to SEQ ID NO: 32812
  Cyclic GFR-binding peptide

SEQ ID NO: 85024 - protein, 29 aa, Artificial Sequence
  Cyclic GFR-binding peptide
  MOD_RES (26)..(27): Xaa is C or S
RHKRLVVNNASDYYLISTASLRTPVXXTP

SEQ ID NO: 85025 - protein, 36 aa, Artificial Sequence; identical to SEQ ID NO: 32813
  Cyclic GFR-binding peptide
  MOD_RES (2)..(34)..(35): Xaa is C or S

SEQ ID NO: 85026 - protein, 30 aa, Artificial Sequence
  Cyclic GFR-binding peptide
AEVVMDRHKRLVVNNAADYYLISTASLRAP

SEQ ID NO: 85027 - protein, 23 aa, Artificial Sequence
  Cyclic GFR-binding peptide
IMRHKRLLLVRGNDYYLMSTAST

SEQ ID NO: 85028 - protein, 36 aa, Artificial Sequence; identical to SEQ ID NO: 32814
  Cyclic GFR-binding peptide
  MOD_RES (2)..(34)..(35): Xaa is C or S

SEQ ID NO: 85029 - protein, 35 aa, Artificial Sequence; identical to SEQ ID NO: 21132
  Cyclic GFR-binding peptide
  MOD_RES (2)..(4): Xaa is C or S

SEQ ID NO: 85030 - protein, 33 aa, Artificial Sequence; identical to SEQ ID NO: 32815
  Cyclic GFR-binding peptide
  MOD_RES (32)..(33): Xaa is C or S

SEQ ID NO: 85031 - protein, 34 aa, Artificial Sequence; identical to SEQ ID NO: 32816
  Cyclic GFR-binding peptide
  MOD_RES (2)..(33)..(34): Xaa is C or S

SEQ ID NO: 85032 - protein, 32 aa, Artificial Sequence
  Cyclic GFR-binding peptide
  MOD_RES (1)..(3): Xaa is C or S
XAXSEVTMNYHYKLVVNKNEDKYLISIPSMKE

SEQ ID NO: 85033 - protein, 36 aa, Artificial Sequence; identical to SEQ ID NO: 32818
  Cyclic GFR-binding peptide
  MOD_RES (32)..(33): Xaa is C or S

SEQ ID NO: 85034 - protein, 35 aa, Artificial Sequence; identical to SEQ ID NO: 32819
  Cyclic GFR-binding peptide
  MOD_RES (2)..(4): Xaa is C or S

SEQ ID NO: 85035 - protein, 40 aa, Artificial Sequence; identical to SEQ ID NO: 32820
  Cyclic GFR-binding peptide
  MOD_RES (1)..(3)..(34)..(35): Xaa is C or S

SEQ ID NO: 85036 - protein, 20 aa, Artificial Sequence
  Cyclic GFR-binding peptide
PIKGYVVNKNEDFYLINIPS

SEQ ID NO: 85037 - protein, 22 aa, Artificial Sequence
  Cyclic GFR-binding peptide
MPIKGYVKPKRGVFYLINIPSL

SEQ ID NO: 85038 - protein, 36 aa, Artificial Sequence; identical to SEQ ID NO: 32821
  Cyclic GFR-binding peptide
  MOD_RES (32)..(33): Xaa is C or S

SEQ ID NO: 85039 - protein, 30 aa, Artificial Sequence
  Cyclic GFR-binding peptide
  MOD_RES (30)..(30): Xaa is C or S
KVVMPIKGYVKPTRGVFYLINIPSLDQPVX

SEQ ID NO: 85040 - protein, 32 aa, Artificial Sequence
  Cyclic GFR-binding peptide
  MOD_RES (28)..(29): Xaa is C or S
MGRHKRLIIQQKDNYYLMSTASMKTPTXXPGA

SEQ ID NO: 85041 - protein, 34 aa, Artificial Sequence; identical to SEQ ID NO: 32822
  Cyclic GFR-binding peptide
  MOD_RES (2)..(4): Xaa is C or S

SEQ ID NO: 85042 - protein, 35 aa, Artificial Sequence
  Cyclic GFR-binding peptide
  MOD_RES (30)..(31): Xaa is C or S
KVVMPIKGYVKPTRGVFYLINIPSLDQPVXXPSAS

SEQ ID NO: 85043 - protein, 28 aa, Artificial Sequence
  Cyclic GFR-binding peptide
VMDYHYKLVVNNASDKYLISIPSLRTPV

SEQ ID NO: 85044 - protein, 30 aa, Artificial Sequence
  Cyclic GFR-binding peptide
  MOD_RES (29)..(30): Xaa is C or S
VMGYHYKLIIQQKDNKYLMSIPSMKTPTXX

SEQ ID NO: 85045 - protein, 42 aa, Artificial Sequence; identical to SEQ ID NO: 32823
  Cyclic GFR-binding peptide
  MOD_RES (2)..(4)..(36)..(37): Xaa is C or S

SEQ ID NO: 85046 - protein, 30 aa, Artificial Sequence; identical to SEQ ID NO: 32824
  Cyclic GFR-binding peptide

SEQ ID NO: 85047 - protein, 29 aa, Artificial Sequence
  Cyclic GFR-binding peptide
  MOD_RES (27)..(28): Xaa is C or S
MEYKFKLLVRGNDLYLMSIPETKVPAXXT

SEQ ID NO: 85048 - protein, 24 aa, Artificial Sequence
  Cyclic GFR-binding peptide
GRHKRLIIQQKDNYYLMSTASMKT

SEQ ID NO: 85049 - protein, 32 aa, Artificial Sequence
  Cyclic GFR-binding peptide
  MOD_RES (2)..(4): Xaa is C or S
RXGXSEVVMDEYKFKVVNNASDLYLISIPELR

SEQ ID NO: 85050 - protein, 23 aa, Artificial Sequence
  Cyclic GFR-binding peptide
MNRYKKLVVNKNEDFYLISIANM

SEQ ID NO: 85051 - protein, 34 aa, Artificial Sequence
  Cyclic GFR-binding peptide
  MOD_RES (29)..(30): Xaa is C or S
TMNRYKKLVVNKNEDFYLISIANMKEPVXXPEPI

SEQ ID NO: 85052 - protein, 31 aa, Artificial Sequence
  Cyclic GFR-binding peptide
  MOD_RES (1)..(1): Xaa is C or S
XESVAMGRHKRLYTVVGKDYYLISTASLKTP

SEQ ID NO: 85053 - protein, 32 aa, Artificial Sequence
  Cyclic GFR-binding peptide
  MOD_RES (2)..(2): Xaa is C or S
GXSEVVMDEYKFKVVNNASDLYLISIPELRTP

SEQ ID NO: 85054 - protein, 28 aa, Artificial Sequence
  Cyclic GFR-binding peptide
EVVMDRHKRLVVNNAADYYLISTASLRA

SEQ ID NO: 85055 - protein, 34 aa, Artificial Sequence; identical to SEQ ID NO: 32827
  Cyclic GFR-binding peptide
  MOD_RES (31)..(32): Xaa is C or S

SEQ ID NO: 85056 - protein, 33 aa, Artificial Sequence
  Cyclic GFR-binding peptide
  MOD_RES (2)..(4): Xaa is C or S
SXGXRDVVMGEYKFKIIQQKDNLYLMSIPEMKT

SEQ ID NO: 85057 - protein, 30 aa, Artificial Sequence
  Cyclic GFR-binding peptide
  MOD_RES (28)..(29): Xaa is C or S
MNRHKRLVVNKNEDYYLISTASMKEPVXXP

SEQ ID NO: 85058 - protein, 35 aa, Artificial Sequence; identical to SEQ ID NO: 32828
  Cyclic GFR-binding peptide
  MOD_RES (32)..(33): Xaa is C or S

SEQ ID NO: 85059 - protein, 34 aa, Artificial Sequence; identical to SEQ ID NO: 32829
  Cyclic GFR-binding peptide
  MOD_RES (32)..(33): Xaa is C or S

SEQ ID NO: 85060 - protein, 29 aa, Artificial Sequence
  Cyclic GFR-binding peptide
SRVIMPIKGYVKPKRGVFYLINIPSLAQP

SEQ ID NO: 85061 - protein, 32 aa, Artificial Sequence
  Cyclic GFR-binding peptide
  MOD_RES (1)..(3): Xaa is C or S
XGXEEVIMEYKFKLLVRGNDLYLMSIPETKVP

SEQ ID NO: 85062 - protein, 36 aa, Artificial Sequence; identical to SEQ ID NO: 32830
  Cyclic GFR-binding peptide
  MOD_RES (1)..(3)..(34)..(35): Xaa is C or S

SEQ ID NO: 85063 - protein, 34 aa, Artificial Sequence
  Cyclic GFR-binding peptide
  MOD_RES (2)..(4): Xaa is C or S
RXGXSEVVMDYHYKLVVNNASDKYLISIPSLRTP

SEQ ID NO: 85064 - protein, 29 aa, Artificial Sequence
  Cyclic GFR-binding peptide
  MOD_RES (28)..(29): Xaa is C or S
MDYHYKLVVNNASDKYLISIPSLRTPVXX

SEQ ID NO: 85065 - protein, 26 aa, Artificial Sequence
  Cyclic GFR-binding peptide
VMGRHKRLIIQQKDNYYLMSTASMKT

SEQ ID NO: 85066 - protein, 26 aa, Artificial Sequence
  Cyclic GFR-binding peptide
MNYHYKLVVNKNEDKYLISIPSMKEP

SEQ ID NO: 85067 - protein, 29 aa, Artificial Sequence
  Cyclic GFR-binding peptide
  MOD_RES (26)..(27): Xaa is C or S
PIKGYVVNKNEDFYLINIPSMKEPVXXPE

SEQ ID NO: 85068 - protein, 27 aa, Artificial Sequence
  Cyclic GFR-binding peptide
MGRHKRLIIQQKDNYYLMSTASMKTPT

SEQ ID NO: 85069 - protein, 36 aa, Artificial Sequence; identical to SEQ ID NO: 32831
  Cyclic GFR-binding peptide
  MOD_RES (1)..(3)..(34)..(35): Xaa is C or S

SEQ ID NO: 85070 - protein, 28 aa, Artificial Sequence
  Cyclic GFR-binding peptide
  MOD_RES (2)..(2): Xaa is C or S
GXSEVVMDYHYKLVVNNASDKYLISIPS

SEQ ID NO: 85071 - protein, 30 aa, Artificial Sequence
  Cyclic GFR-binding peptide
  MOD_RES (27)..(28): Xaa is C or S
MEYKFKLLVRGNDLYLMSIPETKVPAXXTS

SEQ ID NO: 85072 - protein, 34 aa, Artificial Sequence
  Cyclic GFR-binding peptide
  MOD_RES (29)..(30): Xaa is C or S
VMGRHKRLIIQQKDNYYLMSTASMKTPTXXPGAS

SEQ ID NO: 85073 - protein, 32 aa, Artificial Sequence
  Cyclic GFR-binding peptide
  MOD_RES (30)..(31): Xaa is C or S
VVMDRHKRLVVNNASDYYLISTASLRTPVXXT

SEQ ID NO: 85074 - protein, 28 aa, Artificial Sequence
  Cyclic GFR-binding peptide
RDVVMGYHYKLIIQQKDNKYLMSIPSMK

SEQ ID NO: 85075 - protein, 35 aa, Artificial Sequence; identical to SEQ ID NO: 32833
  Cyclic GFR-binding peptide
  MOD_RES (2)..(4)..(35): Xaa is C or S

SEQ ID NO: 85076 - protein, 31 aa, Artificial Sequence
  Cyclic GFR-binding peptide
  MOD_RES (28)..(29): Xaa is C or S
MNYHYKLVVNKNEDKYLISIPSMKEPVXXPE

SEQ ID NO: 85077 - protein, 34 aa, Artificial Sequence; identical to SEQ ID NO: 32835
  Cyclic GFR-binding peptide
  MOD_RES (1)..(33)..(34): Xaa is C or S

SEQ ID NO: 85078 - protein, 31 aa, Artificial Sequence; identical to SEQ ID NO: 32836
  Cyclic GFR-binding peptide
  MOD_RES (1)..(1): Xaa is C or S

SEQ ID NO: 85079 - protein, 26 aa, Artificial Sequence
  Cyclic GFR-binding peptide
NEYKFKVVNKNEDLYLISIPEMKEPV

SEQ ID NO: 85080 - protein, 31 aa, Artificial Sequence
  Cyclic GFR-binding peptide
  MOD_RES (2)..(4): Xaa is C or S
LXGXEEVIMRHKRLLLVRGNDYYLMSTASTK

SEQ ID NO: 85081 - protein, 38 aa, Artificial Sequence; identical to SEQ ID NO: 32841
  Cyclic GFR-binding peptide
  MOD_RES (1)..(3)..(35)..(36): Xaa is C or S

SEQ ID NO: 85082 - protein, 31 aa, Artificial Sequence
  Cyclic GFR-binding peptide
  MOD_RES (27)..(28): Xaa is C or S
NPIKGYVVNKNEDFYLINIPSMKEPVXXPEP

SEQ ID NO: 85083 - protein, 29 aa, Artificial Sequence
  Cyclic GFR-binding peptide
  MOD_RES (28)..(29): Xaa is C or S
MNRYKKLVVNKNEDFYLISIANMKEPVXX

SEQ ID NO: 85084 - protein, 36 aa, Artificial Sequence; identical to SEQ ID NO: 32845
  Cyclic GFR-binding peptide
  MOD_RES (2)..(4)..(36): Xaa is C or S

SEQ ID NO: 85085 - protein, 36 aa, Artificial Sequence
  Cyclic GFR-binding peptide
  MOD_RES (30)..(31): Xaa is C or S
VVMDYHYKLVVNNASDKYLISIPSLRTPVXXTPPTS

SEQ ID NO: 85086 - protein, 28 aa, Artificial Sequence
  Cyclic GFR-binding peptide
  MOD_RES (2)..(2): Xaa is C or S
AXSEVTMNRYKKLVVNKNEDFYLISIAN

SEQ ID NO: 85087 - protein, 29 aa, Artificial Sequence
  Cyclic GFR-binding peptide
SEVVMDYHYKLVVNNASDKYLISIPSLRT

SEQ ID NO: 85088 - protein, 32 aa, Artificial Sequence; identical to SEQ ID NO: 32846
  Cyclic GFR-binding peptide
  MOD_RES (32)..(32): Xaa is C or S

SEQ ID NO: 85089 - protein, 32 aa, Artificial Sequence; identical to SEQ ID NO: 32847
  Cyclic GFR-binding peptide
  MOD_RES (32)..(32): Xaa is C or S

SEQ ID NO: 85090 - protein, 37 aa, Artificial Sequence; identical to SEQ ID NO: 32848
  Cyclic GFR-binding peptide
  MOD_RES (31)..(32): Xaa is C or S

SEQ ID NO: 85091 - protein, 26 aa, Artificial Sequence
  Cyclic GFR-binding peptide
TMNYHYKLVVNKNEDKYLISIPSMKE

SEQ ID NO: 85092 - protein, 35 aa, Artificial Sequence; identical to SEQ ID NO: 32849
  Cyclic GFR-binding peptide
  MOD_RES (1)..(3)..(35): Xaa is C or S

SEQ ID NO: 85093 - protein, 39 aa, Artificial Sequence; identical to SEQ ID NO: 32850
  Cyclic GFR-binding peptide
  MOD_RES (1)..(3)..(35)..(36): Xaa is C or S

SEQ ID NO: 85094 - protein, 28 aa, Artificial Sequence
  Cyclic GFR-binding peptide
  MOD_RES (2)..(2): Xaa is C or S
KXSKVIMPIKGYIKPTKGIFYLINIPSL

SEQ ID NO: 85095 - protein, 34 aa, Artificial Sequence; identical to SEQ ID NO: 32851
  Cyclic GFR-binding peptide
  MOD_RES (1)..(33)..(34): Xaa is C or S

SEQ ID NO: 85096 - protein, 33 aa, Artificial Sequence; identical to SEQ ID NO: 32852
  Cyclic GFR-binding peptide
  MOD_RES (31)..(32): Xaa is C or S

SEQ ID NO: 85097 - protein, 27 aa, Artificial Sequence
  Cyclic GFR-binding peptide
IMEYKFKLLVRGNDLYLMSIPETKVPA

SEQ ID NO: 85098 - protein, 33 aa, Artificial Sequence
  Cyclic GFR-binding peptide
  MOD_RES (27)..(28): Xaa is C or S
GRHKRLIIQQKDNYYLMSTASMKTPTXXPGASG

SEQ ID NO: 85099 - protein, 26 aa, Artificial Sequence
  Cyclic GFR-binding peptide
MGEYKFKIIQQKDNLYLMSIPEMKTP

SEQ ID NO: 85100 - protein, 24 aa, Artificial Sequence
  Cyclic GFR-binding peptide
MNPIKGYVVNKNEDFYLINIPSMK

SEQ ID NO: 85101 - protein, 40 aa, Artificial Sequence; identical to SEQ ID NO: 32857
  Cyclic GFR-binding peptide
  MOD_RES (1)..(3)..(35)..(36): Xaa is C or S

SEQ ID NO: 85102 - protein, 32 aa, Artificial Sequence
  Cyclic GFR-binding peptide
  MOD_RES (30)..(31): Xaa is C or S
VTMNRYKKLVVNKNEDFYLISIANMKEPVXXP

SEQ ID NO: 85103 - protein, 33 aa, Artificial Sequence; identical to SEQ ID NO: 32859
  Cyclic GFR-binding peptide
  MOD_RES (1)..(33): Xaa is C or S

SEQ ID NO: 85104 - protein, 26 aa, Artificial Sequence
  Cyclic GFR-binding peptide
GRHKRLIIQQKDNYYLMSTASMKTPT

SEQ ID NO: 85105 - protein, 29 aa, Artificial Sequence
  Cyclic GFR-binding peptide
  MOD_RES (27)..(28): Xaa is C or S
DRHKRLVVNNASDYYLISTASLRTPVXXT

SEQ ID NO: 85106 - protein, 26 aa, Artificial Sequence
  Cyclic GFR-binding peptide
DYHYKLVVNNASDKYLISIPSLRTPV

SEQ ID NO: 85107 - protein, 33 aa, Artificial Sequence; identical to SEQ ID NO: 32860
  Cyclic GFR-binding peptide
  MOD_RES (1)..(33): Xaa is C or S

SEQ ID NO: 85108 - protein, 25 aa, Artificial Sequence
  Cyclic GFR-binding peptide
YHYKLVVNNASDKYLISIPSLRTPV

SEQ ID NO: 85109 - protein, 29 aa, Artificial Sequence
  Cyclic GFR-binding peptide
  MOD_RES (26)..(27): Xaa is C or S
EYKFKLLVRGNDLYLMSIPETKVPAXXTS

SEQ ID NO: 85110 - protein, 29 aa, Artificial Sequence
  Cyclic GFR-binding peptide
  MOD_RES (28)..(29): Xaa is C or S
IMEYKFKLLVRGNDLYLMSIPETKVPAXX

SEQ ID NO: 85111 - protein, 25 aa, Artificial Sequence
  Cyclic GFR-binding peptide
AMGRHKRLYTVVGKDYYLISTASLK

SEQ ID NO: 85112 - protein, 21 aa, Artificial Sequence
  Cyclic GFR-binding peptide
PIKGYVVNKNEDFYLINIPSM

SEQ ID NO: 85113 - protein, 29 aa, Artificial Sequence
  Cyclic GFR-binding peptide
SVAMGRHKRLYTVVGKDYYLISTASLKTP

SEQ ID NO: 85114 - protein, 30 aa, Artificial Sequence
  Cyclic GFR-binding peptide
  MOD_RES (30)..(30): Xaa is C or S
VVMDRHKRLVVNNAADYYLISTASLRAPVX

SEQ ID NO: 85115 - protein, 22 aa, Artificial Sequence
  Cyclic GFR-binding peptide
VMPIKGYVKPTRGVFYLINIPS

SEQ ID NO: 85116 - protein, 34 aa, Artificial Sequence
  Cyclic GFR-binding peptide
  MOD_RES (28)..(29): Xaa is C or S
IMRHKRLLLVRGNDYYLMSTASTKVPAXXTSPVR

SEQ ID NO: 85117 - protein, 27 aa, Artificial Sequence
  Cyclic GFR-binding peptide
MNRYKKLVVNKNEDFYLISIANMKEPV

SEQ ID NO: 85118 - protein, 36 aa, Artificial Sequence; identical to SEQ ID NO: 32863
  Cyclic GFR-binding peptide
  MOD_RES (31)..(32): Xaa is C or S

SEQ ID NO: 85119 - protein, 31 aa, Artificial Sequence
  Cyclic GFR-binding peptide
  MOD_RES (2)..(4): Xaa is C or S
RXAXSEVTMNRHKRLVVNKNEDYYLISTASM

SEQ ID NO: 85120 - protein, 31 aa, Artificial Sequence
  Cyclic GFR-binding peptide
  MOD_RES (26)..(27): Xaa is C or S
EYKFKVVNNASDLYLISIPELRTPVXXTPPT

SEQ ID NO: 85121 - protein, 30 aa, Artificial Sequence
  Cyclic GFR-binding peptide
  MOD_RES (28)..(29): Xaa is C or S
MGRHKRLYTVVGKDYYLISTASLKTPVXXA

SEQ ID NO: 85122 - protein, 29 aa, Artificial Sequence
  Cyclic GFR-binding peptide
VVMDRHKRLVVNNAADYYLISTASLRAPV

SEQ ID NO: 85123 - protein, 37 aa, Artificial Sequence; identical to SEQ ID NO: 32869
  Cyclic GFR-binding peptide
  MOD_RES (32)..(33): Xaa is C or S

SEQ ID NO: 85124 - protein, 25 aa, Artificial Sequence
  Cyclic GFR-binding peptide
VMGEYKFKIIQQKDNLYLMSIPEMK

SEQ ID NO: 85125 - protein, 34 aa, Artificial Sequence
  Cyclic GFR-binding peptide
  MOD_RES (2)..(4): Xaa is C or S
RXGXESVAMGRHKRLYTVVGKDYYLISTASLKTP

SEQ ID NO: 85126 - protein, 23 aa, Artificial Sequence
  Cyclic GFR-binding peptide
MPIKGYIKPTKGIFYLINIPSLD

SEQ ID NO: 85127 - protein, 40 aa, Artificial Sequence; identical to SEQ ID NO: 32870
  Cyclic GFR-binding peptide
  MOD_RES (2)..(34)..(35): Xaa is C or S

SEQ ID NO: 85128 - protein, 34 aa, Artificial Sequence; identical to SEQ ID NO: 32871
  Cyclic GFR-binding peptide
  MOD_RES (1)..(3): Xaa is C or S

SEQ ID NO: 85129 - protein, 28 aa, Artificial Sequence
  Cyclic GFR-binding peptide
  MOD_RES (28)..(28): Xaa is C or S
IMEYKFKLLVRGNDLYLMSIPETKVPAX

SEQ ID NO: 85130 - protein, 41 aa, Artificial Sequence; identical to SEQ ID NO: 32873
  Cyclic GFR-binding peptide
  MOD_RES (2)..(4)..(35)..(36): Xaa is C or S

SEQ ID NO: 85131 - protein, 25 aa, Artificial Sequence
  Cyclic GFR-binding peptide
VVMDYHYKLVVNNASDKYLISIPSL

SEQ ID NO: 85132 - protein, 29 aa, Artificial Sequence
  Cyclic GFR-binding peptide
  MOD_RES (27)..(28): Xaa is C or S
NPIKGYVVNKNEDFYLINIPSMKEPVXXP

SEQ ID NO: 85133 - protein, 40 aa, Artificial Sequence; identical to SEQ ID NO: 32874
  Cyclic GFR-binding peptide
  MOD_RES (2)..(34)..(35): Xaa is C or S

SEQ ID NO: 85134 - protein, 27 aa, Artificial Sequence
  Cyclic GFR-binding peptide
SEVTMNYHYKLVVNKNEDKYLISIPSM

SEQ ID NO: 85135 - protein, 20 aa, Artificial Sequence
  Cyclic GFR-binding peptide
PIKGYVKPKRGVFYLINIPS

SEQ ID NO: 85136 - protein, 24 aa, Artificial Sequence
  Cyclic GFR-binding peptide
EVIMRHKRLLLVRGNDYYLMSTAS

SEQ ID NO: 85137 - protein, 35 aa, Artificial Sequence; identical to SEQ ID NO: 32876
  Cyclic GFR-binding peptide
  MOD_RES (31)..(32): Xaa is C or S

SEQ ID NO: 85138 - protein, 26 aa, Artificial Sequence
  Cyclic GFR-binding peptide
EVVMDRHKRLVVNNAADYYLISTASL

SEQ ID NO: 85139 - protein, 26 aa, Artificial Sequence
  Cyclic GFR-binding peptide
EVTMNPIKGYVVNKNEDFYLINIPSM

SEQ ID NO: 85140 - protein, 27 aa, Artificial Sequence
  Cyclic GFR-binding peptide
MDYHYKLVVNNASDKYLISIPSLRTPV

SEQ ID NO: 85141 - protein, 38 aa, Artificial Sequence; identical to SEQ ID NO: 32878
  Cyclic GFR-binding peptide
  MOD_RES (1)..(3)..(34)..(35): Xaa is C or S

SEQ ID NO: 85142 - protein, 32 aa, Artificial Sequence
  Cyclic GFR-binding peptide
  MOD_RES (30)..(31): Xaa is C or S
VVMGEYKFKIIQQKDNLYLMSIPEMKTPTXXP

SEQ ID NO: 85143 - protein, 25 aa, Artificial Sequence
  Cyclic GFR-binding peptide
EYKFKVVNNASDLYLISIPELRTPV

SEQ ID NO: 85144 - protein, 40 aa, Artificial Sequence; identical to SEQ ID NO: 32881
  Cyclic GFR-binding peptide
  MOD_RES (2)..(34)..(35): Xaa is C or S

SEQ ID NO: 85145 - protein, 29 aa, Artificial Sequence
  Cyclic GFR-binding peptide
  MOD_RES (2)..(2): Xaa is C or S
GXRDVVMGRHKRLIIQQKDNYYLMSTASM

SEQ ID NO: 85146 - protein, 24 aa, Artificial Sequence
  Cyclic GFR-binding peptide
MGRHKRLIIQQKDNYYLMSTASMK

SEQ ID NO: 85147 - protein, 29 aa, Artificial Sequence
  Cyclic GFR-binding peptide
  MOD_RES (26)..(27): Xaa is C or S
YHYKLLLVRGNDKYLMSIPSTKVPAXXTS

SEQ ID NO: 85148 - protein, 31 aa, Artificial Sequence
  Cyclic GFR-binding peptide
  MOD_RES (2)..(2): Xaa is C or S
KXSKVVMPIKGYVKPTRGVFYLINIPSLDQP

SEQ ID NO: 85149 - protein, 33 aa, Artificial Sequence
  Cyclic GFR-binding peptide
  MOD_RES (28)..(29): Xaa is C or S
MNYHYKLVVNKNEDKYLISIPSMKEPVXXPEPI

SEQ ID NO: 85150 - protein, 31 aa, Artificial Sequence
  Cyclic GFR-binding peptide
  MOD_RES (27)..(28): Xaa is C or S
NRYKKLVVNKNEDFYLISIANMKEPVXXPEP

SEQ ID NO: 85151 - protein, 30 aa, Artificial Sequence
  Cyclic GFR-binding peptide
  MOD_RES (2)..(4): Xaa is C or S
SXGXRDVVMGEYKFKIIQQKDNLYLMSIPE

SEQ ID NO: 85152 - protein, 29 aa, Artificial Sequence
  Cyclic GFR-binding peptide
  MOD_RES (27)..(28): Xaa is C or S
MRHKRLLLVRGNDYYLMSTASTKVPAXXT

SEQ ID NO: 85153 - protein, 34 aa, Artificial Sequence; identical to SEQ ID NO: 32884
  Cyclic GFR-binding peptide
  MOD_RES (1)..(3): Xaa is C or S

SEQ ID NO: 85154 - protein, 30 aa, Artificial Sequence
  Cyclic GFR-binding peptide
  MOD_RES (2)..(2): Xaa is C or S
AXSEVTMNRHKRLVVNKNEDYYLISTASMK

SEQ ID NO: 85155 - protein, 38 aa, Artificial Sequence; identical to SEQ ID NO: 32887
  Cyclic GFR-binding peptide
  MOD_RES (32)..(33): Xaa is C or S

SEQ ID NO: 85156 - protein, 28 aa, Artificial Sequence
  Cyclic GFR-binding peptide
KVIMPIKGYIKPTKGIFYLINIPSLDQS

SEQ ID NO: 85157 - protein, 35 aa, Artificial Sequence
  Cyclic GFR-binding peptide
  MOD_RES (30)..(31): Xaa is C or S
VVMDYHYKLVVNNASDKYLISIPSLRTPVXXTPPT

SEQ ID NO: 85158 - protein, 23 aa, Artificial Sequence
  Cyclic GFR-binding peptide
EYKFKLLVRGNDLYLMSIPETKV

SEQ ID NO: 85159 - protein, 32 aa, Artificial Sequence
  Cyclic GFR-binding peptide
  MOD_RES (27)..(28): Xaa is C or S
MPIKGYVKPKRGVFYLINIPSLAQPVXXPAAS

SEQ ID NO: 85160 - protein, 30 aa, Artificial Sequence
  Cyclic GFR-binding peptide
  MOD_RES (1)..(1): Xaa is C or S
XSKVIMPIKGYIKPTKGIFYLINIPSLDQS

SEQ ID NO: 85161 - protein, 23 aa, Artificial Sequence
  Cyclic GFR-binding peptide
IMEYKFKLLVRGNDLYLMSIPET

SEQ ID NO: 85162 - protein, 30 aa, Artificial Sequence
  Cyclic GFR-binding peptide
  MOD_RES (28)..(29): Xaa is C or S
MNPIKGYVVNKNEDFYLINIPSMKEPVXXP

SEQ ID NO: 85163 - protein, 23 aa, Artificial Sequence
  Cyclic GFR-binding peptide
RHKRLVVNNAADYYLISTASLRA

SEQ ID NO: 85164 - protein, 29 aa, Artificial Sequence
  Cyclic GFR-binding peptide
SEVTMNEYKFKVVNKNEDLYLISIPEMKE

SEQ ID NO: 85165 - protein, 24 aa, Artificial Sequence
  Cyclic GFR-binding peptide
MNRHKRLVVNKNEDYYLISTASMK

SEQ ID NO: 85166 - protein, 28 aa, Artificial Sequence
  Cyclic GFR-binding peptide
  MOD_RES (26)..(27): Xaa is C or S
EYKFKLLVRGNDLYLMSIPETKVPAXXT

SEQ ID NO: 85167 - protein, 25 aa, Artificial Sequence
  Cyclic GFR-binding peptide
MNYHYKLVVNKNEDKYLISIPSMKE

SEQ ID NO: 85168 - protein, 29 aa, Artificial Sequence
  Cyclic GFR-binding peptide
  MOD_RES (1)..(3): Xaa is C or S
XGXEEVIMYHYKLLLVRGNDKYLMSIPST

SEQ ID NO: 85169 - protein, 25 aa, Artificial Sequence
  Cyclic GFR-binding peptide
MDRHKRLVVNNASDYYLISTASLRT

SEQ ID NO: 85170 - protein, 31 aa, Artificial Sequence
  Cyclic GFR-binding peptide
  MOD_RES (28)..(29): Xaa is C or S
MDYHYKLVVNNASDKYLISIPSLRTPVXXTP

SEQ ID NO: 85171 - protein, 34 aa, Artificial Sequence
  Cyclic GFR-binding peptide
  MOD_RES (28)..(29): Xaa is C or S
MNRYKKLVVNKNEDFYLISIANMKEPVXXPEPIG

SEQ ID NO: 85172 - protein, 36 aa, Artificial Sequence; identical to SEQ ID NO: 32898
  Cyclic GFR-binding peptide
  MOD_RES (31)..(32): Xaa is C or S

SEQ ID NO: 85173 - protein, 28 aa, Artificial Sequence
  Cyclic GFR-binding peptide
  MOD_RES (26)..(27): Xaa is C or S
PIKGYVKPKRGVFYLINIPSLAQPVXXP

SEQ ID NO: 85174 - protein, 37 aa, Artificial Sequence; identical to SEQ ID NO: 32899
  Cyclic GFR-binding peptide
  MOD_RES (31)..(32): Xaa is C or S

SEQ ID NO: 85175 - protein, 26 aa, Artificial Sequence
  Cyclic GFR-binding peptide
MYHYKLLLVRGNDKYLMSIPSTKVPA

SEQ ID NO: 85176 - protein, 24 aa, Artificial Sequence
  Cyclic GFR-binding peptide
MPIKGYVKPKRGVFYLINIPSLAQ

SEQ ID NO: 85177 - protein, 41 aa, Artificial Sequence; identical to SEQ ID NO: 32902
  Cyclic GFR-binding peptide
  MOD_RES (2)..(4)..(35)..(36): Xaa is C or S

SEQ ID NO: 85178 - protein, 23 aa, Artificial Sequence
  Cyclic GFR-binding peptide
VMGYHYKLIIQQKDNKYLMSIPS

SEQ ID NO: 85179 - protein, 40 aa, Artificial Sequence; identical to SEQ ID NO: 32903
  Cyclic GFR-binding peptide
  MOD_RES (2)..(4)..(36)..(37): Xaa is C or S

SEQ ID NO: 85180 - protein, 30 aa, Artificial Sequence
  Cyclic GFR-binding peptide
  MOD_RES (2)..(2): Xaa is C or S
GXESVAMGRHKRLYTVVGKDYYLISTASLK

SEQ ID NO: 85181 - protein, 35 aa, Artificial Sequence; identical to SEQ ID NO: 32906
  Cyclic GFR-binding peptide
  MOD_RES (31)..(32): Xaa is C or S

SEQ ID NO: 85182 - protein, 31 aa, Artificial Sequence
  Cyclic GFR-binding peptide
  MOD_RES (2)..(2): Xaa is C or S
AXSEVTMNPIKGYVVNKNEDFYLINIPSMKE

SEQ ID NO: 85183 - protein, 29 aa, Artificial Sequence
  Cyclic GFR-binding peptide
EVTMNYHYKLVVNKNEDKYLISIPSMKEP

SEQ ID NO: 85184 - protein, 33 aa, Artificial Sequence
  Cyclic GFR-binding peptide
  MOD_RES (1)..(3): Xaa is C or S
XGXESVAMGRHKRLYTVVGKDYYLISTASLKTP

SEQ ID NO: 85185 - protein, 28 aa, Artificial Sequence
  Cyclic GFR-binding peptide
VTMNRYKKLVVNKNEDFYLISIANMKEP

SEQ ID NO: 85186 - protein, 22 aa, Artificial Sequence
  Cyclic GFR-binding peptide
RHKRLIIQQKDNYYLMSTASMK

SEQ ID NO: 85187 - protein, 33 aa, Artificial Sequence
  Cyclic GFR-binding peptide
  MOD_RES (1)..(3): Xaa is C or S
XGXRDVVMGEYKFKIIQQKDNLYLMSIPEMKTP

SEQ ID NO: 85188 - protein, 33 aa, Artificial Sequence
  Cyclic GFR-binding peptide
  MOD_RES (28)..(29): Xaa is C or S
MNRHKRLVVNKNEDYYLISTASMKEPVXXPEPI

SEQ ID NO: 85189 - protein, 33 aa, Artificial Sequence
  Cyclic GFR-binding peptide
  MOD_RES (2)..(4): Xaa is C or S
RXGXESVAMGRHKRLYTVVGKDYYLISTASLKT

SEQ ID NO: 85190 - protein, 35 aa, Artificial Sequence; identical to SEQ ID NO: 32909
  Cyclic GFR-binding peptide
  MOD_RES (1)..(3)..(35): Xaa is C or S

SEQ ID NO: 85191 - protein, 34 aa, Artificial Sequence
  Cyclic GFR-binding peptide
  MOD_RES (2)..(4): Xaa is C or S
RXAXSEVTMNEYKFKVVNKNEDLYLISIPEMKEP

SEQ ID NO: 85192 - protein, 33 aa, Artificial Sequence
  Cyclic GFR-binding peptide
  MOD_RES (28)..(29): Xaa is C or S
MGYHYKLIIQQKDNKYLMSIPSMKTPTXXPGAS

SEQ ID NO: 85193 - protein, 23 aa, Artificial Sequence
  Cyclic GFR-binding peptide
DEYKFKVVNNASDLYLISIPELR

SEQ ID NO: 85194 - protein, 35 aa, Artificial Sequence; identical to SEQ ID NO: 32911
  Cyclic GFR-binding peptide
  MOD_RES (2)..(34)..(35): Xaa is C or S

SEQ ID NO: 85195 - protein, 27 aa, Artificial Sequence
  Cyclic GFR-binding peptide
MGEYKFKIIQQKDNLYLMSIPEMKTPT

SEQ ID NO: 85196 - protein, 22 aa, Artificial Sequence
  Cyclic GFR-binding peptide
EYKFKVVNNASDLYLISIPELR

SEQ ID NO: 85197 - protein, 38 aa, Artificial Sequence; identical to SEQ ID NO: 32912
  Cyclic GFR-binding peptide
  MOD_RES (1)..(3)..(35)..(36): Xaa is C or S

SEQ ID NO: 85198 - protein, 25 aa, Artificial Sequence
  Cyclic GFR-binding peptide
VMGRHKRLIIQQKDNYYLMSTASMK

SEQ ID NO: 85199 - protein, 40 aa, Artificial Sequence; identical to SEQ ID NO: 32913
  Cyclic GFR-binding peptide
  MOD_RES (1)..(3)..(35)..(36): Xaa is C or S

SEQ ID NO: 85200 - protein, 39 aa, Artificial Sequence; identical to SEQ ID NO: 32915
  Cyclic GFR-binding peptide
  MOD_RES (1)..(33)..(34): Xaa is C or S

SEQ ID NO: 85201 - protein, 29 aa, Artificial Sequence
  Cyclic GFR-binding peptide
  MOD_RES (2)..(2): Xaa is C or S
AXSEVTMNEYKFKVVNKNEDLYLISIPEM

SEQ ID NO: 85202 - protein, 30 aa, Artificial Sequence
  Cyclic GFR-binding peptide
  MOD_RES (1)..(1): Xaa is C or S
XSEVVMDYHYKLVVNNASDKYLISIPSLRT

SEQ ID NO: 85203 - protein, 35 aa, Artificial Sequence; identical to SEQ ID NO: 32917
  Cyclic GFR-binding peptide
  MOD_RES (1)..(32)..(33): Xaa is C or S

SEQ ID NO: 85204 - protein, 38 aa, Artificial Sequence; identical to SEQ ID NO: 32918
  Cyclic GFR-binding peptide
  MOD_RES (2)..(4)..(35)..(36): Xaa is C or S

SEQ ID NO: 85205 - protein, 33 aa, Artificial Sequence; identical to SEQ ID NO: 32919
  Cyclic GFR-binding peptide
  MOD_RES (31)..(32): Xaa is C or S

SEQ ID NO: 85206 - protein, 33 aa, Artificial Sequence
  Cyclic GFR-binding peptide
  MOD_RES (28)..(29): Xaa is C or S
MDEYKFKVVNNASDLYLISIPELRTPVXXTPPT

SEQ ID NO: 85207 - protein, 30 aa, Artificial Sequence
  Cyclic GFR-binding peptide
  MOD_RES (2)..(4): Xaa is C or S
RXAXSEVTMNEYKFKVVNKNEDLYLISIPE

SEQ ID NO: 85208 - protein, 28 aa, Artificial Sequence
  Cyclic GFR-binding peptide
  MOD_RES (2)..(2): Xaa is C or S
GXEEVIMRHKRLLLVRGNDYYLMSTAST

SEQ ID NO: 85209 - protein, 26 aa, Artificial Sequence
  Cyclic GFR-binding peptide
  MOD_RES (26)..(26): Xaa is C or S
EYKFKLLVRGNDLYLMSIPETKVPAX

SEQ ID NO: 85210 - protein, 37 aa, Artificial Sequence; identical to SEQ ID NO: 32923
  Cyclic GFR-binding peptide
  MOD_RES (1)..(3)..(35)..(36): Xaa is C or S

SEQ ID NO: 85211 - protein, 24 aa, Artificial Sequence
  Cyclic GFR-binding peptide
VVMDRHKRLVVNNASDYYLISTAS

SEQ ID NO: 85212 - protein, 27 aa, Artificial Sequence
  Cyclic GFR-binding peptide
  MOD_RES (1)..(1): Xaa is C or S
XEEVIMEYKFKLLVRGNDLYLMSIPET

SEQ ID NO: 85213 - protein, 20 aa, Artificial Sequence
  Cyclic GFR-binding peptide
EYKFKLLVRGNDLYLMSIPE

SEQ ID NO: 85214 - protein, 27 aa, Artificial Sequence
  Cyclic GFR-binding peptide
RVIMPIKGYVKPKRGVFYLINIPSLAQ

SEQ ID NO: 85215 - protein, 35 aa, Artificial Sequence; identical to SEQ ID NO: 32925
  Cyclic GFR-binding peptide
  MOD_RES (2)..(33)..(34): Xaa is C or S

SEQ ID NO: 85216 - protein, 39 aa, Artificial Sequence; identical to SEQ ID NO: 32926
  Cyclic GFR-binding peptide
  MOD_RES (2)..(34)..(35): Xaa is C or S

SEQ ID NO: 85217 - protein, 39 aa, Artificial Sequence; identical to SEQ ID NO: 32927
  Cyclic GFR-binding peptide
  MOD_RES (2)..(33)..(34): Xaa is C or S

SEQ ID NO: 85218 - protein, 29 aa, Artificial Sequence
  Cyclic GFR-binding peptide
SEVTMNRYKKLVVNKNEDFYLISIANMKE

SEQ ID NO: 85219 - protein, 22 aa, Artificial Sequence
  Cyclic GFR-binding peptide
YHYKLIIQQKDNKYLMSIPSMK

SEQ ID NO: 85220 - protein, 29 aa, Artificial Sequence
  Cyclic GFR-binding peptide
DVVMGYHYKLIIQQKDNKYLMSIPSMKTP

SEQ ID NO: 85221 - protein, 31 aa, Artificial Sequence
  Cyclic GFR-binding peptide
  MOD_RES (30)..(31): Xaa is C or S
VTMNYHYKLVVNKNEDKYLISIPSMKEPVXX

SEQ ID NO: 85222 - protein, 40 aa, Artificial Sequence; identical to SEQ ID NO: 32930
  Cyclic GFR-binding peptide
  MOD_RES (1)..(3)..(35)..(36): Xaa is C or S

SEQ ID NO: 85223 - protein, 38 aa, Artificial Sequence; identical to SEQ ID NO: 32932
  Cyclic GFR-binding peptide
  MOD_RES (1)..(33)..(34): Xaa is C or S

SEQ ID NO: 85224 - protein, 28 aa, Artificial Sequence
  Cyclic GFR-binding peptide
EVTMNYHYKLVVNKNEDKYLISIPSMKE

SEQ ID NO: 85225 - protein, 30 aa, Artificial Sequence
  Cyclic GFR-binding peptide
  MOD_RES (26)..(27): Xaa is C or S
RHKRLYTVVGKDYYLISTASLKTPVXXAKS

SEQ ID NO: 85226 - protein, 31 aa, Artificial Sequence
  Cyclic GFR-binding peptide
  MOD_RES (1)..(3): Xaa is C or S
XGXAEVVMDRHKRLVVNNAADYYLISTASLR

SEQ ID NO: 85227 - protein, 28 aa, Artificial Sequence
  Cyclic GFR-binding peptide
RDVVMGRHKRLIIQQKDNYYLMSTASMK

SEQ ID NO: 85228 - protein, 32 aa, Artificial Sequence
  Cyclic GFR-binding peptide
  MOD_RES (26)..(27): Xaa is C or S
EYKFKIIQQKDNLYLMSIPEMKTPTXXPGASG

SEQ ID NO: 85229 - protein, 26 aa, Artificial Sequence
  Cyclic GFR-binding peptide
VTMNPIKGYVVNKNEDFYLINIPSMK

SEQ ID NO: 85230 - protein, 29 aa, Artificial Sequence
  Cyclic GFR-binding peptide
  MOD_RES (1)..(1): Xaa is C or S
XSKVVMPIKGYVKPTRGVFYLINIPSLDQ

SEQ ID NO: 85231 - protein, 36 aa, Artificial Sequence; identical to SEQ ID NO: 32935
  Cyclic GFR-binding peptide
  MOD_RES (2)..(33)..(34): Xaa is C or S

SEQ ID NO: 85232 - protein, 28 aa, Artificial Sequence
  Cyclic GFR-binding peptide
SKVVMPIKGYVKPTRGVFYLINIPSLDQ

SEQ ID NO: 85233 - protein, 37 aa, Artificial Sequence; identical to SEQ ID NO: 32936
  Cyclic GFR-binding peptide
  MOD_RES (31)..(32): Xaa is C or S

SEQ ID NO: 85234 - protein, 32 aa, Artificial Sequence
  Cyclic GFR-binding peptide
  MOD_RES (1)..(3): Xaa is C or S
XKXSKVVMPIKGYVKPTRGVFYLINIPSLDQP

SEQ ID NO: 85235 - protein, 39 aa, Artificial Sequence; identical to SEQ ID NO: 32938
  Cyclic GFR-binding peptide
  MOD_RES (1)..(3)..(35)..(36): Xaa is C or S

SEQ ID NO: 85236 - protein, 29 aa, Artificial Sequence
  Cyclic GFR-binding peptide
  MOD_RES (27)..(28): Xaa is C or S
MPIKGYIKPTKGIFYLINIPSLDQSVXXP

SEQ ID NO: 85237 - protein, 26 aa, Artificial Sequence
  Cyclic GFR-binding peptide
ESVAMGRHKRLYTVVGKDYYLISTAS

SEQ ID NO: 85238 - protein, 30 aa, Artificial Sequence
  Cyclic GFR-binding peptide
  MOD_RES (2)..(4): Xaa is C or S
SXGXRDVVMGYHYKLIIQQKDNKYLMSIPS

SEQ ID NO: 85239 - protein, 35 aa, Artificial Sequence; identical to SEQ ID NO: 32939
  Cyclic GFR-binding peptide
  MOD_RES (2)..(4)..(35): Xaa is C or S

SEQ ID NO: 85240 - protein, 30 aa, Artificial Sequence
  Cyclic GFR-binding peptide
  MOD_RES (2)..(4): Xaa is C or S
SXKXSKVIMPIKGYIKPTKGIFYLINIPSL

SEQ ID NO: 85241 - protein, 29 aa, Artificial Sequence
  Cyclic GFR-binding peptide
  MOD_RES (2)..(4): Xaa is C or S
SXKXSKVVMPIKGYVKPTRGVFYLINIPS

SEQ ID NO: 85242 - protein, 36 aa, Artificial Sequence; identical to SEQ ID NO: 32941
  Cyclic GFR-binding peptide
  MOD_RES (1)..(3)..(35)..(36): Xaa is C or S

SEQ ID NO: 85243 - protein, 31 aa, Artificial Sequence; identical to SEQ ID NO: 32942
  Cyclic GFR-binding peptide
  MOD_RES (31)..(31): Xaa is C or S

SEQ ID NO: 85244 - protein, 24 aa, Artificial Sequence
  Cyclic GFR-binding peptide
VMDYHYKLVVNNASDKYLISIPSL

SEQ ID NO: 85245 - protein, 34 aa, Artificial Sequence; identical to SEQ ID NO: 32943
  Cyclic GFR-binding peptide
  MOD_RES (32)..(33): Xaa is C or S

SEQ ID NO: 85246 - protein, 28 aa, Artificial Sequence
  Cyclic GFR-binding peptide
  MOD_RES (28)..(28): Xaa is C or S
IMPIKGYIKPTKGIFYLINIPSLDQSVX

SEQ ID NO: 85247 - protein, 32 aa, Artificial Sequence
  Cyclic GFR-binding peptide
  MOD_RES (30)..(31): Xaa is C or S
EVIMYHYKLLLVRGNDKYLMSIPSTKVPAXXT

SEQ ID NO: 85248 - protein, 26 aa, Artificial Sequence
  Cyclic GFR-binding peptide
IMRHKRLLLVRGNDYYLMSTASTKVP

SEQ ID NO: 85249 - protein, 35 aa, Artificial Sequence; identical to SEQ ID NO: 32945
  Cyclic GFR-binding peptide
  MOD_RES (1)..(33)..(34): Xaa is C or S

SEQ ID NO: 85250 - protein, 29 aa, Artificial Sequence
  Cyclic GFR-binding peptide
  MOD_RES (29)..(29): Xaa is C or S
TMNRHKRLVVNKNEDYYLISTASMKEPVX

SEQ ID NO: 85251 - protein, 26 aa, Artificial Sequence
  Cyclic GFR-binding peptide
VVMDRHKRLVVNNAADYYLISTASLR

SEQ ID NO: 85252 - protein, 30 aa, Artificial Sequence
  Cyclic GFR-binding peptide
  MOD_RES (2)..(4): Xaa is C or S
LXGXEEVIMEYKFKLLVRGNDLYLMSIPET

SEQ ID NO: 85253 - protein, 32 aa, Artificial Sequence
  Cyclic GFR-binding peptide
  MOD_RES (2)..(4): Xaa is C or S
SXGXRDVVMGYHYKLIIQQKDNKYLMSIPSMK

SEQ ID NO: 85254 - protein, 39 aa, Artificial Sequence; identical to SEQ ID NO: 32949
  Cyclic GFR-binding peptide
  MOD_RES (1)..(3)..(34)..(35): Xaa is C or S

SEQ ID NO: 85255 - protein, 30 aa, Artificial Sequence
  Cyclic GFR-binding peptide
  MOD_RES (26)..(27): Xaa is C or S
YHYKLVVNNASDKYLISIPSLRTPVXXTPP

SEQ ID NO: 85256 - protein, 41 aa, Artificial Sequence; identical to SEQ ID NO: 32952
  Cyclic GFR-binding peptide
  MOD_RES (2)..(4)..(36)..(37): Xaa is C or S

SEQ ID NO: 85257 - protein, 32 aa, Artificial Sequence
  Cyclic GFR-binding peptide
  MOD_RES (30)..(31): Xaa is C or S
KVVMPIKGYVKPTRGVFYLINIPSLDQPVXXP

SEQ ID NO: 85258 - protein, 29 aa, Artificial Sequence
  Cyclic GFR-binding peptide
  MOD_RES (1)..(3): Xaa is C or S
XKXSKVIMPIKGYIKPTKGIFYLINIPSL

SEQ ID NO: 85259 - protein, 27 aa, Artificial Sequence
  Cyclic GFR-binding peptide
EVIMEYKFKLLVRGNDLYLMSIPETKV

SEQ ID NO: 85260 - protein, 39 aa, Artificial Sequence; identical to SEQ ID NO: 32955
  Cyclic GFR-binding peptide
  MOD_RES (2)..(34)..(35): Xaa is C or S

SEQ ID NO: 85261 - protein, 32 aa, Artificial Sequence
  Cyclic GFR-binding peptide
  MOD_RES (2)..(4): Xaa is C or S
RXAXSEVTMNEYKFKVVNKNEDLYLISIPEMK

SEQ ID NO: 85262 - protein, 28 aa, Artificial Sequence
  Cyclic GFR-binding peptide
VVMDRHKRLVVNNASDYYLISTASLRTP

SEQ ID NO: 85263 - protein, 35 aa, Artificial Sequence; identical to SEQ ID NO: 32957
  Cyclic GFR-binding peptide
  MOD_RES (1)..(3)..(35): Xaa is C or S

SEQ ID NO: 85264 - protein, 33 aa, Artificial Sequence
  Cyclic GFR-binding peptide
  MOD_RES (27)..(28): Xaa is C or S
DYHYKLVVNNASDKYLISIPSLRTPVXXTPPTS

SEQ ID NO: 85265 - protein, 28 aa, Artificial Sequence
  Cyclic GFR-binding peptide
  MOD_RES (1)..(1): Xaa is C or S
XESVAMGRHKRLYTVVGKDYYLISTASL

SEQ ID NO: 85266 - protein, 33 aa, Artificial Sequence; identical to SEQ ID NO: 32959
  Cyclic GFR-binding peptide
  MOD_RES (2)..(2): Xaa is C or S

SEQ ID NO: 85267 - protein, 37 aa, Artificial Sequence; identical to SEQ ID NO: 32960
  Cyclic GFR-binding peptide
  MOD_RES (2)..(4)..(35)..(36): Xaa is C or S

SEQ ID NO: 85268 - protein, 34 aa, Artificial Sequence
  Cyclic GFR-binding peptide
  MOD_RES (29)..(30): Xaa is C or S
VVMPIKGYVKPTRGVFYLINIPSLDQPVXXPSAS

SEQ ID NO: 85269 - protein, 27 aa, Artificial Sequence
  Cyclic GFR-binding peptide
  MOD_RES (1)..(1): Xaa is C or S
XSEVVMDRHKRLVVNNASDYYLISTAS

SEQ ID NO: 85270 - protein, 30 aa, Artificial Sequence
  Cyclic GFR-binding peptide
SEVVMDRHKRLVVNNASDYYLISTASLRTP

SEQ ID NO: 85271 - protein, 26 aa, Artificial Sequence
  Cyclic GFR-binding peptide
VTMNRYKKLVVNKNEDFYLISIANMK

SEQ ID NO: 85272 - protein, 31 aa, Artificial Sequence
  Cyclic GFR-binding peptide
  MOD_RES (29)..(30): Xaa is C or S
TMNRYKKLVVNKNEDFYLISIANMKEPVXXP

SEQ ID NO: 85273 - protein, 34 aa, Artificial Sequence; identical to SEQ ID NO: 32962
  Cyclic GFR-binding peptide
  MOD_RES (32)..(33): Xaa is C or S

SEQ ID NO: 85274 - protein, 25 aa, Artificial Sequence
  Cyclic GFR-binding peptide
MGRHKRLYTVVGKDYYLISTASLKT

SEQ ID NO: 85275 - protein, 28 aa, Artificial Sequence
  Cyclic GFR-binding peptide
  MOD_RES (2)..(2): Xaa is C or S
GXRDVVMGEYKFKIIQQKDNLYLMSIPE

SEQ ID NO: 85276 - protein, 32 aa, Artificial Sequence
  Cyclic GFR-binding peptide
  MOD_RES (2)..(4): Xaa is C or S
RXAXSEVTMNYHYKLVVNKNEDKYLISIPSMK

SEQ ID NO: 85277 - protein, 41 aa, Artificial Sequence; identical to SEQ ID NO: 32964
  Cyclic GFR-binding peptide
  MOD_RES (2)..(4)..(36)..(37): Xaa is C or S

SEQ ID NO: 85278 - protein, 24 aa, Artificial Sequence
  Cyclic GFR-binding peptide
GEYKFKIIQQKDNLYLMSIPEMKT

SEQ ID NO: 85279 - protein, 29 aa, Artificial Sequence
  Cyclic GFR-binding peptide
  MOD_RES (1)..(3): Xaa is C or S
XAXSEVTMNRHKRLVVNKNEDYYLISTAS

SEQ ID NO: 85280 - protein, 36 aa, Artificial Sequence
  Cyclic GFR-binding peptide
  MOD_RES (30)..(31): Xaa is C or S
VTMNEYKFKVVNKNEDLYLISIPEMKEPVXXPEPIG

SEQ ID NO: 85281 - protein, 33 aa, Artificial Sequence; identical to SEQ ID NO: 32966
  Cyclic GFR-binding peptide
  MOD_RES (31)..(32): Xaa is C or S

SEQ ID NO: 85282 - protein, 24 aa, Artificial Sequence
  Cyclic GFR-binding peptide
RHKRLVVNNASDYYLISTASLRTP

SEQ ID NO: 85283 - protein, 20 aa, Artificial Sequence
  Cyclic GFR-binding peptide
PIKGYVKPTRGVFYLINIPS

SEQ ID NO: 85284 - protein, 29 aa, Artificial Sequence
  Cyclic GFR-binding peptide
EVTMNRHKRLVVNKNEDYYLISTASMKEP

SEQ ID NO: 85285 - protein, 25 aa, Artificial Sequence
  Cyclic GFR-binding peptide
KVVMPIKGYVKPTRGVFYLINIPSL

SEQ ID NO: 85286 - protein, 40 aa, Artificial Sequence; identical to SEQ ID NO: 32967
  Cyclic GFR-binding peptide
  MOD_RES (2)..(4)..(36)..(37): Xaa is C or S

SEQ ID NO: 85287 - protein, 29 aa, Artificial Sequence
  Cyclic GFR-binding peptide
DVVMGEYKFKIIQQKDNLYLMSIPEMKTP

SEQ ID NO: 85288 - protein, 32 aa, Artificial Sequence
  Cyclic GFR-binding peptide
  MOD_RES (27)..(28): Xaa is C or S
GRHKRLIIQQKDNYYLMSTASMKTPTXXPGAS

SEQ ID NO: 85289 - protein, 28 aa, Artificial Sequence
  Cyclic GFR-binding peptide
VTMNPIKGYVVNKNEDFYLINIPSMKEP

SEQ ID NO: 85290 - protein, 30 aa, Artificial Sequence
  Cyclic GFR-binding peptide
  MOD_RES (1)..(1): Xaa is C or S
XSEVTMNPIKGYVVNKNEDFYLINIPSMKE

SEQ ID NO: 85291 - protein, 38 aa, Artificial Sequence; identical to SEQ ID NO: 32971
  Cyclic GFR-binding peptide
  MOD_RES (1)..(33)..(34): Xaa is C or S

SEQ ID NO: 85292 - protein, 35 aa, Artificial Sequence; identical to SEQ ID NO: 32970
  Cyclic GFR-binding peptide
  MOD_RES (1)..(32)..(33): Xaa is C or S

SEQ ID NO: 85293 - protein, 26 aa, Artificial Sequence
  Cyclic GFR-binding peptide
NYHYKLVVNKNEDKYLISIPSMKEPV

SEQ ID NO: 85294 - protein, 35 aa, Artificial Sequence; identical to SEQ ID NO: 32973
  Cyclic GFR-binding peptide
  MOD_RES (32)..(33): Xaa is C or S

SEQ ID NO: 85295 - protein, 31 aa, Artificial Sequence
  Cyclic GFR-binding peptide
  MOD_RES (27)..(28): Xaa is C or S
NRHKRLVVNKNEDYYLISTASMKEPVXXPEP

SEQ ID NO: 85296 - protein, 25 aa, Artificial Sequence
  Cyclic GFR-binding peptide
VIMYHYKLLLVRGNDKYLMSIPSTK

SEQ ID NO: 85297 - protein, 27 aa, Artificial Sequence
  Cyclic GFR-binding peptide
  MOD_RES (27)..(27): Xaa is C or S
MYHYKLLLVRGNDKYLMSIPSTKVPAX

SEQ ID NO: 85298 - protein, 29 aa, Artificial Sequence
  Cyclic GFR-binding peptide
  MOD_RES (27)..(28): Xaa is C or S
NEYKFKVVNKNEDLYLISIPEMKEPVXXP

SEQ ID NO: 85299 - protein, 41 aa, Artificial Sequence; identical to SEQ ID NO: 32975
  Cyclic GFR-binding peptide
  MOD_RES (1)..(3)..(35)..(36): Xaa is C or S

SEQ ID NO: 85300 - protein, 25 aa, Artificial Sequence
  Cyclic GFR-binding peptide
NRYKKLVVNKNEDFYLISIANMKEP

SEQ ID NO: 85301 - protein, 29 aa, Artificial Sequence
  Cyclic GFR-binding peptide
  MOD_RES (28)..(29): Xaa is C or S
IMPIKGYIKPTKGIFYLINIPSLDQSVXX

SEQ ID NO: 85302 - protein, 33 aa, Artificial Sequence; identical to SEQ ID NO: 32977
  Cyclic GFR-binding peptide
  MOD_RES (1)..(33): Xaa is C or S

SEQ ID NO: 85303 - protein, 37 aa, Artificial Sequence; identical to SEQ ID NO: 32978
  Cyclic GFR-binding peptide
  MOD_RES (2)..(34)..(35): Xaa is C or S

SEQ ID NO: 85304 - protein, 27 aa, Artificial Sequence
  Cyclic GFR-binding peptide
VIMYHYKLLLVRGNDKYLMSIPSTKVP

SEQ ID NO: 85305 - protein, 38 aa, Artificial Sequence; identical to SEQ ID NO: 32979
  Cyclic GFR-binding peptide
  MOD_RES (1)..(32)..(33): Xaa is C or S

SEQ ID NO: 85306 - protein, 41 aa, Artificial Sequence; identical to SEQ ID NO: 32980
  Cyclic GFR-binding peptide
  MOD_RES (1)..(3)..(35)..(36): Xaa is C or S

SEQ ID NO: 85307 - protein, 39 aa, Artificial Sequence; identical to SEQ ID NO: 32981
  Cyclic GFR-binding peptide
  MOD_RES (2)..(4)..(36)..(37): Xaa is C or S

SEQ ID NO: 85308 - protein, 30 aa, Artificial Sequence
  Cyclic GFR-binding peptide
  MOD_RES (1)..(1): Xaa is C or S
XSEVTMNEYKFKVVNKNEDLYLISIPEMKE

SEQ ID NO: 85309 - protein, 25 aa, Artificial Sequence
  Cyclic GFR-binding peptide
MGYHYKLIIQQKDNKYLMSIPSMKT

SEQ ID NO: 85310 - protein, 41 aa, Artificial Sequence; identical to SEQ ID NO: 32982
  Cyclic GFR-binding peptide
  MOD_RES (1)..(3)..(35)..(36): Xaa is C or S

SEQ ID NO: 85311 - protein, 29 aa, Artificial Sequence
  Cyclic GFR-binding peptide
  MOD_RES (29)..(29): Xaa is C or S
VMGYHYKLIIQQKDNKYLMSIPSMKTPTX

SEQ ID NO: 85312 - protein, 34 aa, Artificial Sequence; identical to SEQ ID NO: 32984
  Cyclic GFR-binding peptide
  MOD_RES (1)..(33)..(34): Xaa is C or S

SEQ ID NO: 85313 - protein, 31 aa, Artificial Sequence; identical to SEQ ID NO: 32985
  Cyclic GFR-binding peptide
  MOD_RES (31)..(31): Xaa is C or S

SEQ ID NO: 85314 - protein, 31 aa, Artificial Sequence
  Cyclic GFR-binding peptide
  MOD_RES (29)..(30): Xaa is C or S
VMGEYKFKIIQQKDNLYLMSIPEMKTPTXXP

SEQ ID NO: 85315 - protein, 29 aa, Artificial Sequence
  Cyclic GFR-binding peptide
  MOD_RES (1)..(3): Xaa is C or S
XAXSEVTMNPIKGYVVNKNEDFYLINIPS

SEQ ID NO: 85316 - protein, 29 aa, Artificial Sequence
  Cyclic GFR-binding peptide
  MOD_RES (2)..(2): Xaa is C or S
AXSEVTMNRYKKLVVNKNEDFYLISIANM

SEQ ID NO: 85317 - protein, 29 aa, Artificial Sequence
  Cyclic GFR-binding peptide
  MOD_RES (28)..(29): Xaa is C or S
VMPIKGYVKPTRGVFYLINIPSLDQPVXX

SEQ ID NO: 85318 - protein, 32 aa, Artificial Sequence; identical to SEQ ID NO: 32988
  Cyclic GFR-binding peptide
  MOD_RES (1)..(1): Xaa is C or S

SEQ ID NO: 85319 - protein, 36 aa, Artificial Sequence; identical to SEQ ID NO: 32990
  Cyclic GFR-binding peptide
  MOD_RES (31)..(32): Xaa is C or S

SEQ ID NO: 85320 - protein, 34 aa, Artificial Sequence; identical to SEQ ID NO: 32989
  Cyclic GFR-binding peptide
  MOD_RES (31)..(32): Xaa is C or S

SEQ ID NO: 85321 - protein, 35 aa, Artificial Sequence; identical to SEQ ID NO: 32991
  Cyclic GFR-binding peptide
  MOD_RES (1)..(3)..(35): Xaa is C or S

SEQ ID NO: 85322 - protein, 25 aa, Artificial Sequence
  Cyclic GFR-binding peptide
IMPIKGYIKPTKGIFYLINIPSLDQ

SEQ ID NO: 85323 - protein, 30 aa, Artificial Sequence
  Cyclic GFR-binding peptide
  MOD_RES (27)..(28): Xaa is C or S
GEYKFKIIQQKDNLYLMSIPEMKTPTXXPG

SEQ ID NO: 85324 - protein, 32 aa, Artificial Sequence
  Cyclic GFR-binding peptide
  MOD_RES (2)..(4): Xaa is C or S
RXGXSEVVMDYHYKLVVNNASDKYLISIPSLR

SEQ ID NO: 85325 - protein, 30 aa, Artificial Sequence
  Cyclic GFR-binding peptide
  MOD_RES (29)..(30): Xaa is C or S
VIMEYKFKLLVRGNDLYLMSIPETKVPAXX

SEQ ID NO: 85326 - protein, 42 aa, Artificial Sequence; identical to SEQ ID NO: 32995
  Cyclic GFR-binding peptide
  MOD_RES (2)..(4)..(36)..(37): Xaa is C or S

SEQ ID NO: 85327 - protein, 28 aa, Artificial Sequence
  Cyclic GFR-binding peptide
  MOD_RES (27)..(28): Xaa is C or S
MPIKGYVKPKRGVFYLINIPSLAQPVXX

SEQ ID NO: 85328 - protein, 36 aa, Artificial Sequence; identical to SEQ ID NO: 32996
  Cyclic GFR-binding peptide
  MOD_RES (2)..(4)..(35)..(36): Xaa is C or S

SEQ ID NO: 85329 - protein, 36 aa, Artificial Sequence; identical to SEQ ID NO: 32997
  Cyclic GFR-binding peptide
  MOD_RES (2)..(4)..(36): Xaa is C or S

SEQ ID NO: 85330 - protein, 23 aa, Artificial Sequence
  Cyclic GFR-binding peptide
TMNYHYKLVVNKNEDKYLISIPS

SEQ ID NO: 85331 - protein, 37 aa, Artificial Sequence; identical to SEQ ID NO: 32998
  Cyclic GFR-binding peptide
  MOD_RES (31)..(32): Xaa is C or S

SEQ ID NO: 85332 - protein, 30 aa, Artificial Sequence
  Cyclic GFR-binding peptide
  MOD_RES (26)..(27): Xaa is C or S
EYKFKVVNNASDLYLISIPELRTPVXXTPP

SEQ ID NO: 85333 - protein, 38 aa, Artificial Sequence; identical to SEQ ID NO: 33000
  Cyclic GFR-binding peptide
  MOD_RES (1)..(33)..(34): Xaa is C or S

SEQ ID NO: 85334 - protein, 29 aa, Artificial Sequence
  Cyclic GFR-binding peptide
  MOD_RES (29)..(29): Xaa is C or S
VIMPIKGYIKPTKGIFYLINIPSLDQSVX

SEQ ID NO: 85335 - protein, 28 aa, Artificial Sequence
  Cyclic GFR-binding peptide
  MOD_RES (1)..(3): Xaa is C or S
XKXSKVVMPIKGYVKPTRGVFYLINIPS

SEQ ID NO: 85336 - protein, 32 aa, Artificial Sequence; identical to SEQ ID NO: 33002
  Cyclic GFR-binding peptide
  MOD_RES (1)..(1): Xaa is C or S

SEQ ID NO: 85337 - protein, 30 aa, Artificial Sequence
  Cyclic GFR-binding peptide
  MOD_RES (29)..(30): Xaa is C or S
VMDRHKRLVVNNAADYYLISTASLRAPVXX

SEQ ID NO: 85338 - protein, 34 aa, Artificial Sequence; identical to SEQ ID NO: 33003
  Cyclic GFR-binding peptide
  MOD_RES (1)..(33)..(34): Xaa is C or S

SEQ ID NO: 85339 - protein, 41 aa, Artificial Sequence; identical to SEQ ID NO: 33004
  Cyclic GFR-binding peptide
  MOD_RES (2)..(4)..(36)..(37): Xaa is C or S

SEQ ID NO: 85340 - protein, 31 aa, Artificial Sequence; identical to SEQ ID NO: 33005
  Cyclic GFR-binding peptide
  MOD_RES (31)..(31): Xaa is C or S

SEQ ID NO: 85341 - protein, 33 aa, Artificial Sequence; identical to SEQ ID NO: 33006
  Cyclic GFR-binding peptide
  MOD_RES (32)..(33): Xaa is C or S

SEQ ID NO: 85342 - protein, 24 aa, Artificial Sequence
  Cyclic GFR-binding peptide
VMDRHKRLVVNNASDYYLISTASL

SEQ ID NO: 85343 - protein, 37 aa, Artificial Sequence; identical to SEQ ID NO: 33009
  Cyclic GFR-binding peptide
  MOD_RES (2)..(34)..(35): Xaa is C or S

SEQ ID NO: 85344 - protein, 30 aa, Artificial Sequence
  Cyclic GFR-binding peptide
  MOD_RES (30)..(30): Xaa is C or S
VTMNEYKFKVVNKNEDLYLISIPEMKEPVX

SEQ ID NO: 85345 - protein, 33 aa, Artificial Sequence
  Cyclic GFR-binding peptide
  MOD_RES (29)..(30): Xaa is C or S
VMGRHKRLIIQQKDNYYLMSTASMKTPTXXPGA

SEQ ID NO: 85346 - protein, 35 aa, Artificial Sequence
  Cyclic GFR-binding peptide
  MOD_RES (30)..(31): Xaa is C or S
VVMDRHKRLVVNNASDYYLISTASLRTPVXXTPPT

SEQ ID NO: 85347 - protein, 28 aa, Artificial Sequence
  Cyclic GFR-binding peptide
EVTMNEYKFKVVNKNEDLYLISIPEMKE

SEQ ID NO: 85348 - protein, 33 aa, Artificial Sequence
  Cyclic GFR-binding peptide
  MOD_RES (27)..(28): Xaa is C or S
DRHKRLVVNNAADYYLISTASLRAPVXXSAPAA

SEQ ID NO: 85349 - protein, 34 aa, Artificial Sequence; identical to SEQ ID NO: 33010
  Cyclic GFR-binding peptide
  MOD_RES (1)..(32)..(33): Xaa is C or S

SEQ ID NO: 85350 - protein, 32 aa, Artificial Sequence
  Cyclic GFR-binding peptide
  MOD_RES (27)..(28): Xaa is C or S
NPIKGYVVNKNEDFYLINIPSMKEPVXXPEPI

SEQ ID NO: 85351 - protein, 41 aa, Artificial Sequence; identical to SEQ ID NO: 33011
  Cyclic GFR-binding peptide
  MOD_RES (1)..(3)..(35)..(36): Xaa is C or S

SEQ ID NO: 85352 - protein, 22 aa, Artificial Sequence
  Cyclic GFR-binding peptide
NRHKRLVVNKNEDYYLISTASM

SEQ ID NO: 85353 - protein, 27 aa, Artificial Sequence
  Cyclic GFR-binding peptide
VVMDEYKFKVVNNASDLYLISIPELRT

SEQ ID NO: 85354 - protein, 38 aa, Artificial Sequence; identical to SEQ ID NO: 33012
  Cyclic GFR-binding peptide
  MOD_RES (1)..(33)..(34): Xaa is C or S

SEQ ID NO: 85355 - protein, 27 aa, Artificial Sequence
  Cyclic GFR-binding peptide
DVVMGYHYKLIIQQKDNKYLMSIPSMK

SEQ ID NO: 85356 - protein, 23 aa, Artificial Sequence
  Cyclic GFR-binding peptide
VIMPIKGYVKPKRGVFYLINIPS

SEQ ID NO: 85357 - protein, 28 aa, Artificial Sequence
  Cyclic GFR-binding peptide
  MOD_RES (28)..(28): Xaa is C or S
VMPIKGYVKPTRGVFYLINIPSLDQPVX

SEQ ID NO: 85358 - protein, 34 aa, Artificial Sequence
  Cyclic GFR-binding peptide
  MOD_RES (28)..(29): Xaa is C or S
MDRHKRLVVNNAADYYLISTASLRAPVXXSAPAA

SEQ ID NO: 85359 - protein, 36 aa, Artificial Sequence; identical to SEQ ID NO: 33014
  Cyclic GFR-binding peptide
  MOD_RES (1)..(33)..(34): Xaa is C or S

SEQ ID NO: 85360 - protein, 30 aa, Artificial Sequence
  Cyclic GFR-binding peptide
  MOD_RES (1)..(3): Xaa is C or S
XAXSEVTMNYHYKLVVNKNEDKYLISIPSM

SEQ ID NO: 85361 - protein, 41 aa, Artificial Sequence; identical to SEQ ID NO: 33016
  Cyclic GFR-binding peptide
  MOD_RES (1)..(3)..(35)..(36): Xaa is C or S

SEQ ID NO: 85362 - protein, 27 aa, Artificial Sequence
  Cyclic GFR-binding peptide
  MOD_RES (1)..(1): Xaa is C or S
XSEVTMNRHKRLVVNKNEDYYLISTAS

SEQ ID NO: 85363 - protein, 27 aa, Artificial Sequence
  Cyclic GFR-binding peptide
  MOD_RES (26)..(27): Xaa is C or S
PIKGYIKPTKGIFYLINIPSLDQSVXX

SEQ ID NO: 85364 - protein, 35 aa, Artificial Sequence; identical to SEQ ID NO: 33018
  Cyclic GFR-binding peptide
  MOD_RES (32)..(33): Xaa is C or S

SEQ ID NO: 85365 - protein, 40 aa, Artificial Sequence; identical to SEQ ID NO: 33019
  Cyclic GFR-binding peptide
  MOD_RES (2)..(34)..(35): Xaa is C or S

SEQ ID NO: 85366 - protein, 30 aa, Artificial Sequence
  Cyclic GFR-binding peptide
  MOD_RES (27)..(28): Xaa is C or S
GRHKRLYTVVGKDYYLISTASLKTPVXXAK

SEQ ID NO: 85367 - protein, 30 aa, Artificial Sequence
  Cyclic GFR-binding peptide
  MOD_RES (26)..(27): Xaa is C or S
RHKRLVVNNASDYYLISTASLRTPVXXTPP

SEQ ID NO: 85368 - protein, 24 aa, Artificial Sequence
  Cyclic GFR-binding peptide
VVMDYHYKLVVNNASDKYLISIPS

SEQ ID NO: 85369 - protein, 36 aa, Artificial Sequence; identical to SEQ ID NO: 33023
  Cyclic GFR-binding peptide
  MOD_RES (31)..(32): Xaa is C or S

SEQ ID NO: 85370 - protein, 34 aa, Artificial Sequence; identical to SEQ ID NO: 33024
  Cyclic GFR-binding peptide
  MOD_RES (2)..(34): Xaa is C or S

SEQ ID NO: 85371 - protein, 29 aa, Artificial Sequence
  Cyclic GFR-binding peptide
  MOD_RES (29)..(29): Xaa is C or S
TMNRYKKLVVNKNEDFYLISIANMKEPVX

SEQ ID NO: 85372 - protein, 28 aa, Artificial Sequence
  Cyclic GFR-binding peptide
VMGRHKRLIIQQKDNYYLMSTASMKTPT

SEQ ID NO: 85373 - protein, 33 aa, Artificial Sequence; identical to SEQ ID NO: 33025
  Cyclic GFR-binding peptide
  MOD_RES (31)..(32): Xaa is C or S

SEQ ID NO: 85374 - protein, 25 aa, Artificial Sequence
  Cyclic GFR-binding peptide
NRHKRLVVNKNEDYYLISTASMKEP

SEQ ID NO: 85375 - protein, 27 aa, Artificial Sequence
  Cyclic GFR-binding peptide
SKVVMPIKGYVKPTRGVFYLINIPSLD

SEQ ID NO: 85376 - protein, 24 aa, Artificial Sequence
  Cyclic GFR-binding peptide
MNEYKFKVVNKNEDLYLISIPEMK

SEQ ID NO: 85377 - protein, 22 aa, Artificial Sequence
  Cyclic GFR-binding peptide
MYHYKLLLVRGNDKYLMSIPST

SEQ ID NO: 85378 - protein, 32 aa, Artificial Sequence
  Cyclic GFR-binding peptide
  MOD_RES (29)..(30): Xaa is C or S
TMNRYKKLVVNKNEDFYLISIANMKEPVXXPE

SEQ ID NO: 85379 - protein, 37 aa, Artificial Sequence; identical to SEQ ID NO: 33027
  Cyclic GFR-binding peptide
  MOD_RES (2)..(4)..(35)..(36): Xaa is C or S

SEQ ID NO: 85380 - protein, 31 aa, Artificial Sequence
  Cyclic GFR-binding peptide
  MOD_RES (28)..(29): Xaa is C or S
MNEYKFKVVNKNEDLYLISIPEMKEPVXXPE

SEQ ID NO: 85381 - protein, 31 aa, Artificial Sequence
  Cyclic GFR-binding peptide
  MOD_RES (29)..(30): Xaa is C or S
VMDRHKRLVVNNAADYYLISTASLRAPVXXS

SEQ ID NO: 85382 - protein, 39 aa, Artificial Sequence; identical to SEQ ID NO: 33028
  Cyclic GFR-binding peptide
  MOD_RES (2)..(33)..(34): Xaa is C or S

SEQ ID NO: 85383 - protein, 36 aa, Artificial Sequence; identical to SEQ ID NO: 33029
  Cyclic GFR-binding peptide
  MOD_RES (1)..(3)..(35)..(36): Xaa is C or S

SEQ ID NO: 85384 - protein, 32 aa, Artificial Sequence; identical to SEQ ID NO: 33031
  Cyclic GFR-binding peptide
  MOD_RES (2)..(2): Xaa is C or S

SEQ ID NO: 85385 - protein, 32 aa, Artificial Sequence
  Cyclic GFR-binding peptide
  MOD_RES (29)..(30): Xaa is C or S
VMDRHKRLVVNNASDYYLISTASLRTPVXXTP

SEQ ID NO: 85386 - protein, 28 aa, Artificial Sequence
  Cyclic GFR-binding peptide
  MOD_RES (26)..(27): Xaa is C or S
EYKFKVVNKNEDLYLISIPEMKEPVXXP

SEQ ID NO: 85387 - protein, 38 aa, Artificial Sequence; identical to SEQ ID NO: 33032
  Cyclic GFR-binding peptide
  MOD_RES (2)..(4)..(36)..(37): Xaa is C or S

SEQ ID NO: 85388 - protein, 34 aa, Artificial Sequence
  Cyclic GFR-binding peptide
  MOD_RES (2)..(4): Xaa is C or S
RXGXSEVVMDEYKFKVVNNASDLYLISIPELRTP

SEQ ID NO: 85389 - protein, 35 aa, Artificial Sequence
  Cyclic GFR-binding peptide
  MOD_RES (29)..(30): Xaa is C or S
VIMPIKGYIKPTKGIFYLINIPSLDQSVXXPSASA

SEQ ID NO: 85390 - protein, 28 aa, Artificial Sequence
  Cyclic GFR-binding peptide
  MOD_RES (26)..(27): Xaa is C or S
YHYKLVVNKNEDKYLISIPSMKEPVXXP

SEQ ID NO: 85391 - protein, 34 aa, Artificial Sequence; identical to SEQ ID NO: 33034
  Cyclic GFR-binding peptide
  MOD_RES (31)..(32): Xaa is C or S

SEQ ID NO: 85392 - protein, 29 aa, Artificial Sequence
  Cyclic GFR-binding peptide
  MOD_RES (1)..(1): Xaa is C or S
XEEVIMYHYKLLLVRGNDKYLMSIPSTKV

SEQ ID NO: 85393 - protein, 32 aa, Artificial Sequence
  Cyclic GFR-binding peptide
  MOD_RES (30)..(31): Xaa is C or S
RVIMPIKGYVKPKRGVFYLINIPSLAQPVXXP

SEQ ID NO: 85394 - protein, 37 aa, Artificial Sequence; identical to SEQ ID NO: 33037
  Cyclic GFR-binding peptide
  MOD_RES (2)..(34)..(35): Xaa is C or S

SEQ ID NO: 85395 - protein, 24 aa, Artificial Sequence
  Cyclic GFR-binding peptide
DRHKRLVVNNASDYYLISTASLRT

SEQ ID NO: 85396 - protein, 22 aa, Artificial Sequence
  Cyclic GFR-binding peptide
MPIKGYIKPTKGIFYLINIPSL

SEQ ID NO: 85397 - protein, 26 aa, Artificial Sequence
  Cyclic GFR-binding peptide
MDRHKRLVVNNASDYYLISTASLRTP

SEQ ID NO: 85398 - protein, 30 aa, Artificial Sequence
  Cyclic GFR-binding peptide
  MOD_RES (28)..(29): Xaa is C or S
IMEYKFKLLVRGNDLYLMSIPETKVPAXXT

SEQ ID NO: 85399 - protein, 29 aa, Artificial Sequence
  Cyclic GFR-binding peptide
VTMNEYKFKVVNKNEDLYLISIPEMKEPV

SEQ ID NO: 85400 - protein, 34 aa, Artificial Sequence; identical to SEQ ID NO: 33043
  Cyclic GFR-binding peptide
  MOD_RES (2)..(34): Xaa is C or S

SEQ ID NO: 85401 - protein, 29 aa, Artificial Sequence
  Cyclic GFR-binding peptide
EVTMNPIKGYVVNKNEDFYLINIPSMKEP

SEQ ID NO: 85402 - protein, 30 aa, Artificial Sequence; identical to SEQ ID NO: 33045
  Cyclic GFR-binding peptide

SEQ ID NO: 85403 - protein, 23 aa, Artificial Sequence
  Cyclic GFR-binding peptide
MEYKFKLLVRGNDLYLMSIPETK

SEQ ID NO: 85404 - protein, 31 aa, Artificial Sequence
  Cyclic GFR-binding peptide
  MOD_RES (1)..(3): Xaa is C or S
XKXSRVIMPIKGYVKPKRGVFYLINIPSLAQ

SEQ ID NO: 85405 - protein, 22 aa, Artificial Sequence
  Cyclic GFR-binding peptide
GRHKRLIIQQKDNYYLMSTASM

SEQ ID NO: 85406 - protein, 26 aa, Artificial Sequence
  Cyclic GFR-binding peptide
DVVMGYHYKLIIQQKDNKYLMSIPSM

SEQ ID NO: 85407 - protein, 30 aa, Artificial Sequence
  Cyclic GFR-binding peptide
  MOD_RES (28)..(29): Xaa is C or S
MDRHKRLVVNNAADYYLISTASLRAPVXXS

SEQ ID NO: 85408 - protein, 23 aa, Artificial Sequence
  Cyclic GFR-binding peptide
VMDYHYKLVVNNASDKYLISIPS

SEQ ID NO: 85409 - protein, 42 aa, Artificial Sequence; identical to SEQ ID NO: 33049
  Cyclic GFR-binding peptide
  MOD_RES (2)..(4)..(36)..(37): Xaa is C or S

SEQ ID NO: 85410 - protein, 32 aa, Artificial Sequence
  Cyclic GFR-binding peptide
  MOD_RES (2)..(2): Xaa is C or S
AXSEVTMNEYKFKVVNKNEDLYLISIPEMKEP

SEQ ID NO: 85411 - protein, 20 aa, Artificial Sequence
  Cyclic GFR-binding peptide
RHKRLVVNNASDYYLISTAS

SEQ ID NO: 85412 - protein, 37 aa, Artificial Sequence; identical to SEQ ID NO: 33051
  Cyclic GFR-binding peptide
  MOD_RES (2)..(34)..(35): Xaa is C or S

SEQ ID NO: 85413 - protein, 34 aa, Artificial Sequence
  Cyclic GFR-binding peptide
  MOD_RES (28)..(29): Xaa is C or S
MGRHKRLIIQQKDNYYLMSTASMKTPTXXPGASG

SEQ ID NO: 85414 - protein, 23 aa, Artificial Sequence
  Cyclic GFR-binding peptide
VMDRHKRLVVNNASDYYLISTAS

SEQ ID NO: 85415 - protein, 33 aa, Artificial Sequence
  Cyclic GFR-binding peptide
  MOD_RES (1)..(3): Xaa is C or S
XAXSEVTMNRHKRLVVNKNEDYYLISTASMKEP

SEQ ID NO: 85416 - protein, 25 aa, Artificial Sequence
  Cyclic GFR-binding peptide
MDEYKFKVVNNASDLYLISIPELRT

SEQ ID NO: 85417 - protein, 36 aa, Artificial Sequence; identical to SEQ ID NO: 33052
  Cyclic GFR-binding peptide
  MOD_RES (1)..(33)..(34): Xaa is C or S

SEQ ID NO: 85418 - protein, 30 aa, Artificial Sequence
  Cyclic GFR-binding peptide
  MOD_RES (1)..(1): Xaa is C or S
XSEVTMNRHKRLVVNKNEDYYLISTASMKE

SEQ ID NO: 85419 - protein, 21 aa, Artificial Sequence
  Cyclic GFR-binding peptide
MPIKGYVKPKRGVFYLINIPS

SEQ ID NO: 85420 - protein, 24 aa, Artificial Sequence
  Cyclic GFR-binding peptide
IMYHYKLLLVRGNDKYLMSIPSTK

SEQ ID NO: 85421 - protein, 31 aa, Artificial Sequence
  Cyclic GFR-binding peptide
  MOD_RES (1)..(3): Xaa is C or S
XAXSEVTMNEYKFKVVNKNEDLYLISIPEMK

SEQ ID NO: 85422 - protein, 26 aa, Artificial Sequence
  Cyclic GFR-binding peptide
VVMGRHKRLIIQQKDNYYLMSTASMK

SEQ ID NO: 85423 - protein, 34 aa, Artificial Sequence; identical to SEQ ID NO: 33054
  Cyclic GFR-binding peptide
  MOD_RES (1)..(3): Xaa is C or S

SEQ ID NO: 85424 - protein, 25 aa, Artificial Sequence
  Cyclic GFR-binding peptide
EYKFKLLVRGNDLYLMSIPETKVPA

SEQ ID NO: 85425 - protein, 29 aa, Artificial Sequence
  Cyclic GFR-binding peptide
VAMGRHKRLYTVVGKDYYLISTASLKTPV

SEQ ID NO: 85426 - protein, 29 aa, Artificial Sequence
  Cyclic GFR-binding peptide
RDVVMGYHYKLIIQQKDNKYLMSIPSMKT

SEQ ID NO: 85427 - protein, 37 aa, Artificial Sequence; identical to SEQ ID NO: 33055
  Cyclic GFR-binding peptide
  MOD_RES (2)..(4)..(36)..(37): Xaa is C or S

SEQ ID NO: 85428 - protein, 23 aa, Artificial Sequence
  Cyclic GFR-binding peptide
DRHKRLVVNNAADYYLISTASLR

SEQ ID NO: 85429 - protein, 31 aa, Artificial Sequence
  Cyclic GFR-binding peptide
  MOD_RES (27)..(28): Xaa is C or S
DEYKFKVVNNASDLYLISIPELRTPVXXTPP

SEQ ID NO: 85430 - protein, 27 aa, Artificial Sequence
  Cyclic GFR-binding peptide
VIMEYKFKLLVRGNDLYLMSIPETKVP

SEQ ID NO: 85431 - protein, 31 aa, Artificial Sequence
  Cyclic GFR-binding peptide
  MOD_RES (2)..(2): Xaa is C or S
AXSEVTMNRHKRLVVNKNEDYYLISTASMKE

SEQ ID NO: 85432 - protein, 25 aa, Artificial Sequence
  Cyclic GFR-binding peptide
TMNYHYKLVVNKNEDKYLISIPSMK

SEQ ID NO: 85433 - protein, 36 aa, Artificial Sequence; identical to SEQ ID NO: 33057
  Cyclic GFR-binding peptide
  MOD_RES (31)..(32): Xaa is C or S

SEQ ID NO: 85434 - protein, 27 aa, Artificial Sequence
  Cyclic GFR-binding peptide
VMGEYKFKIIQQKDNLYLMSIPEMKTP

SEQ ID NO: 85435 - protein, 30 aa, Artificial Sequence
  Cyclic GFR-binding peptide
RDVVMGEYKFKIIQQKDNLYLMSIPEMKTP

SEQ ID NO: 85436 - protein, 33 aa, Artificial Sequence
  Cyclic GFR-binding peptide
  MOD_RES (29)..(30): Xaa is C or S
VMGYHYKLIIQQKDNKYLMSIPSMKTPTXXPGA

SEQ ID NO: 85437 - protein, 29 aa, Artificial Sequence
  Cyclic GFR-binding peptide
SEVVMDEYKFKVVNNASDLYLISIPELRT

SEQ ID NO: 85438 - protein, 30 aa, Artificial Sequence
  Cyclic GFR-binding peptide
  MOD_RES (2)..(4): Xaa is C or S
RXAXSEVTMNYHYKLVVNKNEDKYLISIPS

SEQ ID NO: 85439 - protein, 21 aa, Artificial Sequence
  Cyclic GFR-binding peptide
MEYKFKLLVRGNDLYLMSIPE

SEQ ID NO: 85440 - protein, 36 aa, Artificial Sequence
  Cyclic GFR-binding peptide
  MOD_RES (30)..(31): Xaa is C or S
VVMGYHYKLIIQQKDNKYLMSIPSMKTPTXXPGASG

SEQ ID NO: 85441 - protein, 34 aa, Artificial Sequence; identical to SEQ ID NO: 33065
  Cyclic GFR-binding peptide
  MOD_RES (32)..(33): Xaa is C or S

SEQ ID NO: 85442 - protein, 31 aa, Artificial Sequence
  Cyclic GFR-binding peptide
  MOD_RES (2)..(4): Xaa is C or S
RXGXESVAMGRHKRLYTVVGKDYYLISTASL

SEQ ID NO: 85443 - protein, 32 aa, Artificial Sequence
  Cyclic GFR-binding peptide
  MOD_RES (1)..(3): Xaa is C or S
XGXEEVIMYHYKLLLVRGNDKYLMSIPSTKVP

SEQ ID NO: 85444 - protein, 31 aa, Artificial Sequence; identical to SEQ ID NO: 33069
  Cyclic GFR-binding peptide

SEQ ID NO: 85445 - protein, 29 aa, Artificial Sequence
  Cyclic GFR-binding peptide
  MOD_RES (1)..(1): Xaa is C or S
XSEVTMNYHYKLVVNKNEDKYLISIPSMK

SEQ ID NO: 85446 - protein, 33 aa, Artificial Sequence
  Cyclic GFR-binding peptide
  MOD_RES (1)..(3): Xaa is C or S
XAXSEVTMNPIKGYVVNKNEDFYLINIPSMKEP

SEQ ID NO: 85447 - protein, 28 aa, Artificial Sequence
  Cyclic GFR-binding peptide
  MOD_RES (1)..(3): Xaa is C or S
XGXEEVIMYHYKLLLVRGNDKYLMSIPS

SEQ ID NO: 85448 - protein, 29 aa, Artificial Sequence
  Cyclic GFR-binding peptide
DVVMGRHKRLIIQQKDNYYLMSTASMKTP

SEQ ID NO: 85449 - protein, 34 aa, Artificial Sequence
  Cyclic GFR-binding peptide
  MOD_RES (28)..(29): Xaa is C or S
IMYHYKLLLVRGNDKYLMSIPSTKVPAXXTSPVR

SEQ ID NO: 85450 - protein, 23 aa, Artificial Sequence
  Cyclic GFR-binding peptide
MPIKGYVKPTRGVFYLINIPSLD

SEQ ID NO: 85451 - protein, 22 aa, Artificial Sequence
  Cyclic GFR-binding peptide
DRHKRLVVNNASDYYLISTASL

SEQ ID NO: 85452 - protein, 39 aa, Artificial Sequence; identical to SEQ ID NO: 33074
  Cyclic GFR-binding peptide
  MOD_RES (2)..(33)..(34): Xaa is C or S

SEQ ID NO: 85453 - protein, 38 aa, Artificial Sequence; identical to SEQ ID NO: 33075
  Cyclic GFR-binding peptide
  MOD_RES (1)..(33)..(34): Xaa is C or S

SEQ ID NO: 85454 - protein, 36 aa, Artificial Sequence
  Cyclic GFR-binding peptide
  MOD_RES (30)..(31): Xaa is C or S
KVVMPIKGYVKPTRGVFYLINIPSLDQPVXXPSASA

SEQ ID NO: 85455 - protein, 31 aa, Artificial Sequence
  Cyclic GFR-binding peptide
  MOD_RES (2)..(4): Xaa is C or S
RXGXSEVVMDEYKFKVVNNASDLYLISIPEL

SEQ ID NO: 85456 - protein, 30 aa, Artificial Sequence; identical to SEQ ID NO: 1941
  Cyclic GFR-binding peptide

SEQ ID NO: 85457 - protein, 38 aa, Artificial Sequence; identical to SEQ ID NO: 33077
  Cyclic GFR-binding peptide
  MOD_RES (2)..(4)..(36)..(37): Xaa is C or S

SEQ ID NO: 85458 - protein, 32 aa, Artificial Sequence
  Cyclic GFR-binding peptide
  MOD_RES (26)..(27): Xaa is C or S
YHYKLIIQQKDNKYLMSIPSMKTPTXXPGASG

SEQ ID NO: 85459 - protein, 31 aa, Artificial Sequence
  Cyclic GFR-binding peptide
  MOD_RES (1)..(3): Xaa is C or S
XGXRDVVMGYHYKLIIQQKDNKYLMSIPSMK

SEQ ID NO: 85460 - protein, 20 aa, Artificial Sequence
  Cyclic GFR-binding peptide
EYKFKIIQQKDNLYLMSIPE

SEQ ID NO: 85461 - protein, 38 aa, Artificial Sequence; identical to SEQ ID NO: 33082
  Cyclic GFR-binding peptide
  MOD_RES (2)..(34)..(35): Xaa is C or S

SEQ ID NO: 85462 - protein, 34 aa, Artificial Sequence
  Cyclic GFR-binding peptide
  MOD_RES (30)..(31): Xaa is C or S
VVMGRHKRLIIQQKDNYYLMSTASMKTPTXXPGA

SEQ ID NO: 85463 - protein, 29 aa, Artificial Sequence
  Cyclic GFR-binding peptide
EVTMNEYKFKVVNKNEDLYLISIPEMKEP

SEQ ID NO: 85464 - protein, 35 aa, Artificial Sequence; identical to SEQ ID NO: 33083
  Cyclic GFR-binding peptide
  MOD_RES (2)..(34)..(35): Xaa is C or S

SEQ ID NO: 85465 - protein, 28 aa, Artificial Sequence
  Cyclic GFR-binding peptide
VIMYHYKLLLVRGNDKYLMSIPSTKVPA

SEQ ID NO: 85466 - protein, 32 aa, Artificial Sequence; identical to SEQ ID NO: 33084
  Cyclic GFR-binding peptide
  MOD_RES (32)..(32): Xaa is C or S

SEQ ID NO: 85467 - protein, 27 aa, Artificial Sequence
  Cyclic GFR-binding peptide
SEVVMDYHYKLVVNNASDKYLISIPSL

SEQ ID NO: 85468 - protein, 30 aa, Artificial Sequence
  Cyclic GFR-binding peptide
  MOD_RES (27)..(28): Xaa is C or S
NEYKFKVVNKNEDLYLISIPEMKEPVXXPE

SEQ ID NO: 85469 - protein, 32 aa, Artificial Sequence
  Cyclic GFR-binding peptide
  MOD_RES (2)..(4): Xaa is C or S
SXGXRDVVMGEYKFKIIQQKDNLYLMSIPEMK

SEQ ID NO: 85470 - protein, 34 aa, Artificial Sequence; identical to SEQ ID NO: 33087
  Cyclic GFR-binding peptide
  MOD_RES (1)..(32)..(33): Xaa is C or S

SEQ ID NO: 85471 - protein, 38 aa, Artificial Sequence; identical to SEQ ID NO: 33088
  Cyclic GFR-binding peptide
  MOD_RES (32)..(33): Xaa is C or S

SEQ ID NO: 85472 - protein, 21 aa, Artificial Sequence
  Cyclic GFR-binding peptide
MPIKGYVKPTRGVFYLINIPS

SEQ ID NO: 85473 - protein, 33 aa, Artificial Sequence; identical to SEQ ID NO: 33089
  Cyclic GFR-binding peptide
  MOD_RES (1)..(33): Xaa is C or S

SEQ ID NO: 85474 - protein, 24 aa, Artificial Sequence
  Cyclic GFR-binding peptide
YHYKLVVNNASDKYLISIPSLRTP

SEQ ID NO: 85475 - protein, 40 aa, Artificial Sequence; identical to SEQ ID NO: 33091
  Cyclic GFR-binding peptide
  MOD_RES (2)..(34)..(35): Xaa is C or S

SEQ ID NO: 85476 - protein, 31 aa, Artificial Sequence; identical to SEQ ID NO: 33093
  Cyclic GFR-binding peptide

SEQ ID NO: 85477 - protein, 36 aa, Artificial Sequence; identical to SEQ ID NO: 33092
  Cyclic GFR-binding peptide
  MOD_RES (32)..(33): Xaa is C or S

SEQ ID NO: 85478 - protein, 26 aa, Artificial Sequence
  Cyclic GFR-binding peptide
RDVVMGRHKRLIIQQKDNYYLMSTAS

SEQ ID NO: 85479 - protein, 25 aa, Artificial Sequence
  Cyclic GFR-binding peptide
TMNRHKRLVVNKNEDYYLISTASMK

SEQ ID NO: 85480 - protein, 31 aa, Artificial Sequence
  Cyclic GFR-binding peptide
  MOD_RES (2)..(4): Xaa is C or S
RXAXSEVTMNPIKGYVVNKNEDFYLINIPSM

SEQ ID NO: 85481 - protein, 39 aa, Artificial Sequence; identical to SEQ ID NO: 33094
  Cyclic GFR-binding peptide
  MOD_RES (1)..(33)..(34): Xaa is C or S

SEQ ID NO: 85482 - protein, 30 aa, Artificial Sequence
  Cyclic GFR-binding peptide
  MOD_RES (1)..(3): Xaa is C or S
XKXSRVIMPIKGYVKPKRGVFYLINIPSLA

SEQ ID NO: 85483 - protein, 36 aa, Artificial Sequence; identical to SEQ ID NO: 33095
  Cyclic GFR-binding peptide
  MOD_RES (2)..(4)..(36): Xaa is C or S

SEQ ID NO: 85484 - protein, 26 aa, Artificial Sequence
  Cyclic GFR-binding peptide
DVVMGEYKFKIIQQKDNLYLMSIPEM

SEQ ID NO: 85485 - protein, 39 aa, Artificial Sequence; identical to SEQ ID NO: 33096
  Cyclic GFR-binding peptide
  MOD_RES (1)..(3)..(35)..(36): Xaa is C or S

SEQ ID NO: 85486 - protein, 27 aa, Artificial Sequence
  Cyclic GFR-binding peptide
  MOD_RES (1)..(1): Xaa is C or S
XRDVVMGEYKFKIIQQKDNLYLMSIPE

SEQ ID NO: 85487 - protein, 31 aa, Artificial Sequence
  Cyclic GFR-binding peptide
  MOD_RES (1)..(3): Xaa is C or S
XGXSEVVMDYHYKLVVNNASDKYLISIPSLR

SEQ ID NO: 85488 - protein, 24 aa, Artificial Sequence
  Cyclic GFR-binding peptide
VVMGEYKFKIIQQKDNLYLMSIPE

SEQ ID NO: 85489 - protein, 40 aa, Artificial Sequence; identical to SEQ ID NO: 33099
  Cyclic GFR-binding peptide
  MOD_RES (2)..(4)..(35)..(36): Xaa is C or S

SEQ ID NO: 85490 - protein, 23 aa, Artificial Sequence
  Cyclic GFR-binding peptide
NEYKFKVVNKNEDLYLISIPEMK

SEQ ID NO: 85491 - protein, 28 aa, Artificial Sequence
  Cyclic GFR-binding peptide
SEVVMDYHYKLVVNNASDKYLISIPSLR

SEQ ID NO: 85492 - protein, 37 aa, Artificial Sequence; identical to SEQ ID NO: 33101
  Cyclic GFR-binding peptide
  MOD_RES (1)..(3)..(34)..(35): Xaa is C or S

SEQ ID NO: 85493 - protein, 36 aa, Artificial Sequence; identical to SEQ ID NO: 33102
  Cyclic GFR-binding peptide
  MOD_RES (31)..(32): Xaa is C or S

SEQ ID NO: 85494 - protein, 28 aa, Artificial Sequence
  Cyclic GFR-binding peptide
  MOD_RES (1)..(3): Xaa is C or S
XKXSRVIMPIKGYVKPKRGVFYLINIPS

SEQ ID NO: 85495 - protein, 24 aa, Artificial Sequence
  Cyclic GFR-binding peptide
VVMDRHKRLVVNNAADYYLISTAS

SEQ ID NO: 85496 - protein, 23 aa, Artificial Sequence
  Cyclic GFR-binding peptide
MGRHKRLIIQQKDNYYLMSTASM

SEQ ID NO: 85497 - protein, 36 aa, Artificial Sequence; identical to SEQ ID NO: 33105
  Cyclic GFR-binding peptide
  MOD_RES (32)..(33): Xaa is C or S

SEQ ID NO: 85498 - protein, 26 aa, Artificial Sequence
  Cyclic GFR-binding peptide
VTMNRHKRLVVNKNEDYYLISTASMK

SEQ ID NO: 85499 - protein, 34 aa, Artificial Sequence; identical to SEQ ID NO: 33107
  Cyclic GFR-binding peptide
  MOD_RES (1)..(3): Xaa is C or S

SEQ ID NO: 85500 - protein, 27 aa, Artificial Sequence
  Cyclic GFR-binding peptide
TMNPIKGYVVNKNEDFYLINIPSMKEP

SEQ ID NO: 85501 - protein, 27 aa, Artificial Sequence
  Cyclic GFR-binding peptide
IMPIKGYIKPTKGIFYLINIPSLDQSV

SEQ ID NO: 85502 - protein, 29 aa, Artificial Sequence
  Cyclic GFR-binding peptide
  MOD_RES (29)..(29): Xaa is C or S
VMDRHKRLVVNNASDYYLISTASLRTPVX

SEQ ID NO: 85503 - protein, 23 aa, Artificial Sequence
  Cyclic GFR-binding peptide
MRHKRLLLVRGNDYYLMSTASTK

SEQ ID NO: 85504 - protein, 36 aa, Artificial Sequence; identical to SEQ ID NO: 33109
  Cyclic GFR-binding peptide
  MOD_RES (1)..(32)..(33): Xaa is C or S

SEQ ID NO: 85505 - protein, 30 aa, Artificial Sequence
  Cyclic GFR-binding peptide
  MOD_RES (1)..(3): Xaa is C or S
XGXEEVIMRHKRLLLVRGNDYYLMSTASTK

SEQ ID NO: 85506 - protein, 28 aa, Artificial Sequence
  Cyclic GFR-binding peptide
SEVTMNYHYKLVVNKNEDKYLISIPSMK

SEQ ID NO: 85507 - protein, 36 aa, Artificial Sequence; identical to SEQ ID NO: 33111
  Cyclic GFR-binding peptide
  MOD_RES (1)..(3)..(35)..(36): Xaa is C or S

SEQ ID NO: 85508 - protein, 22 aa, Artificial Sequence
  Cyclic GFR-binding peptide
EYKFKIIQQKDNLYLMSIPEMK

SEQ ID NO: 85509 - protein, 33 aa, Artificial Sequence
  Cyclic GFR-binding peptide
  MOD_RES (30)..(31): Xaa is C or S
RVIMPIKGYVKPKRGVFYLINIPSLAQPVXXPA

SEQ ID NO: 85510 - protein, 37 aa, Artificial Sequence; identical to SEQ ID NO: 33112
  Cyclic GFR-binding peptide
  MOD_RES (31)..(32): Xaa is C or S

SEQ ID NO: 85511 - protein, 34 aa, Artificial Sequence; identical to SEQ ID NO: 33113
  Cyclic GFR-binding peptide
  MOD_RES (1)..(3): Xaa is C or S

SEQ ID NO: 85512 - protein, 27 aa, Artificial Sequence
  Cyclic GFR-binding peptide
SRVIMPIKGYVKPKRGVFYLINIPSLA

SEQ ID NO: 85513 - protein, 30 aa, Artificial Sequence; identical to SEQ ID NO: 33115
  Cyclic GFR-binding peptide

SEQ ID NO: 85514 - protein, 32 aa, Artificial Sequence
  Cyclic GFR-binding peptide
  MOD_RES (2)..(4): Xaa is C or S
LXGXEEVIMRHKRLLLVRGNDYYLMSTASTKV

SEQ ID NO: 85515 - protein, 20 aa, Artificial Sequence
  Cyclic GFR-binding peptide
YHYKLVVNNASDKYLISIPS

SEQ ID NO: 85516 - protein, 30 aa, Artificial Sequence
  Cyclic GFR-binding peptide
  MOD_RES (1)..(3): Xaa is C or S
XGXSEVVMDYHYKLVVNNASDKYLISIPSL

SEQ ID NO: 85517 - protein, 31 aa, Artificial Sequence
  Cyclic GFR-binding peptide
  MOD_RES (1)..(1): Xaa is C or S
XSEVVMDYHYKLVVNNASDKYLISIPSLRTP

SEQ ID NO: 85518 - protein, 35 aa, Artificial Sequence; identical to SEQ ID NO: 33117
  Cyclic GFR-binding peptide
  MOD_RES (2)..(33)..(34): Xaa is C or S

SEQ ID NO: 85519 - protein, 26 aa, Artificial Sequence
  Cyclic GFR-binding peptide
  MOD_RES (1)..(1): Xaa is C or S
XSKVIMPIKGYIKPTKGIFYLINIPS

SEQ ID NO: 85520 - protein, 31 aa, Artificial Sequence; identical to SEQ ID NO: 33119
  Cyclic GFR-binding peptide
  MOD_RES (31)..(31): Xaa is C or S

SEQ ID NO: 85521 - protein, 33 aa, Artificial Sequence; identical to SEQ ID NO: 33120
  Cyclic GFR-binding peptide
  MOD_RES (2)..(2): Xaa is C or S

SEQ ID NO: 85522 - protein, 34 aa, Artificial Sequence; identical to SEQ ID NO: 33121
  Cyclic GFR-binding peptide
  MOD_RES (1)..(33)..(34): Xaa is C or S

SEQ ID NO: 85523 - protein, 38 aa, Artificial Sequence; identical to SEQ ID NO: 33123
  Cyclic GFR-binding peptide
  MOD_RES (1)..(33)..(34): Xaa is C or S

SEQ ID NO: 85524 - protein, 35 aa, Artificial Sequence; identical to SEQ ID NO: 33124
  Cyclic GFR-binding peptide
  MOD_RES (2)..(4): Xaa is C or S

SEQ ID NO: 85525 - protein, 28 aa, Artificial Sequence
  Cyclic GFR-binding peptide
  MOD_RES (27)..(28): Xaa is C or S
DRHKRLVVNNASDYYLISTASLRTPVXX

SEQ ID NO: 85526 - protein, 31 aa, Artificial Sequence
  Cyclic GFR-binding peptide
  MOD_RES (30)..(31): Xaa is C or S
VVMGYHYKLIIQQKDNKYLMSIPSMKTPTXX

SEQ ID NO: 85527 - protein, 29 aa, Artificial Sequence
  Cyclic GFR-binding peptide
  MOD_RES (28)..(29): Xaa is C or S
MGEYKFKIIQQKDNLYLMSIPEMKTPTXX

SEQ ID NO: 85528 - protein, 41 aa, Artificial Sequence; identical to SEQ ID NO: 33127
  Cyclic GFR-binding peptide
  MOD_RES (2)..(4)..(36)..(37): Xaa is C or S

SEQ ID NO: 85529 - protein, 35 aa, Artificial Sequence; identical to SEQ ID NO: 33128
  Cyclic GFR-binding peptide
  MOD_RES (2)..(4): Xaa is C or S

SEQ ID NO: 85530 - protein, 25 aa, Artificial Sequence
  Cyclic GFR-binding peptide
DVVMGEYKFKIIQQKDNLYLMSIPE

SEQ ID NO: 85531 - protein, 21 aa, Artificial Sequence
  Cyclic GFR-binding peptide
NRYKKLVVNKNEDFYLISIAN

SEQ ID NO: 85532 - protein, 39 aa, Artificial Sequence; identical to SEQ ID NO: 33130
  Cyclic GFR-binding peptide
  MOD_RES (1)..(3)..(34)..(35): Xaa is C or S

SEQ ID NO: 85533 - protein, 31 aa, Artificial Sequence; identical to SEQ ID NO: 33131
  Cyclic GFR-binding peptide
  MOD_RES (31)..(31): Xaa is C or S

SEQ ID NO: 85534 - protein, 38 aa, Artificial Sequence; identical to SEQ ID NO: 33133
  Cyclic GFR-binding peptide
  MOD_RES (1)..(3)..(35)..(36): Xaa is C or S

SEQ ID NO: 85535 - protein, 30 aa, Artificial Sequence
  Cyclic GFR-binding peptide
  MOD_RES (28)..(29): Xaa is C or S
VMPIKGYVKPTRGVFYLINIPSLDQPVXXP

SEQ ID NO: 85536 - protein, 26 aa, Artificial Sequence
  Cyclic GFR-binding peptide
RVIMPIKGYVKPKRGVFYLINIPSLA

SEQ ID NO: 85537 - protein, 31 aa, Artificial Sequence
  Cyclic GFR-binding peptide
  MOD_RES (27)..(28): Xaa is C or S
MEYKFKLLVRGNDLYLMSIPETKVPAXXTSP

SEQ ID NO: 85538 - protein, 28 aa, Artificial Sequence
  Cyclic GFR-binding peptide
  MOD_RES (28)..(28): Xaa is C or S
MGEYKFKIIQQKDNLYLMSIPEMKTPTX

SEQ ID NO: 85539 - protein, 29 aa, Artificial Sequence
  Cyclic GFR-binding peptide
  MOD_RES (2)..(4): Xaa is C or S
SXKXSRVIMPIKGYVKPKRGVFYLINIPS

SEQ ID NO: 85540 - protein, 35 aa, Artificial Sequence; identical to SEQ ID NO: 33135
  Cyclic GFR-binding peptide
  MOD_RES (1)..(33)..(34): Xaa is C or S

SEQ ID NO: 85541 - protein, 37 aa, Artificial Sequence; identical to SEQ ID NO: 33138
  Cyclic GFR-binding peptide
  MOD_RES (2)..(4)..(35)..(36): Xaa is C or S

SEQ ID NO: 85542 - protein, 29 aa, Artificial Sequence
  Cyclic GFR-binding peptide
  MOD_RES (2)..(2): Xaa is C or S
GXSEVVMDEYKFKVVNNASDLYLISIPEL

SEQ ID NO: 85543 - protein, 27 aa, Artificial Sequence
  Cyclic GFR-binding peptide
  MOD_RES (1)..(1): Xaa is C or S
XSEVTMNEYKFKVVNKNEDLYLISIPE

SEQ ID NO: 85544 - protein, 34 aa, Artificial Sequence; identical to SEQ ID NO: 33139
  Cyclic GFR-binding peptide
  MOD_RES (2)..(4): Xaa is C or S

SEQ ID NO: 85545 - protein, 30 aa, Artificial Sequence
  Cyclic GFR-binding peptide
  MOD_RES (28)..(29): Xaa is C or S
IMPIKGYIKPTKGIFYLINIPSLDQSVXXP

SEQ ID NO: 85546 - protein, 24 aa, Artificial Sequence
  Cyclic GFR-binding peptide
PIKGYIKPTKGIFYLINIPSLDQS

SEQ ID NO: 85547 - protein, 39 aa, Artificial Sequence; identical to SEQ ID NO: 33140
  Cyclic GFR-binding peptide
  MOD_RES (1)..(3)..(35)..(36): Xaa is C or S

SEQ ID NO: 85548 - protein, 32 aa, Artificial Sequence
  Cyclic GFR-binding peptide
  MOD_RES (29)..(30): Xaa is C or S
VMDYHYKLVVNNASDKYLISIPSLRTPVXXTP

SEQ ID NO: 85549 - protein, 27 aa, Artificial Sequence
  Cyclic GFR-binding peptide
VVMGRHKRLIIQQKDNYYLMSTASMKT

SEQ ID NO: 85550 - protein, 38 aa, Artificial Sequence; identical to SEQ ID NO: 33141
  Cyclic GFR-binding peptide
  MOD_RES (1)..(3)..(35)..(36): Xaa is C or S

SEQ ID NO: 85551 - protein, 31 aa, Artificial Sequence
  Cyclic GFR-binding peptide
  MOD_RES (29)..(30): Xaa is C or S
TMNYHYKLVVNKNEDKYLISIPSMKEPVXXP

SEQ ID NO: 85552 - protein, 35 aa, Artificial Sequence
  Cyclic GFR-binding peptide
  MOD_RES (30)..(31): Xaa is C or S
EVIMEYKFKLLVRGNDLYLMSIPETKVPAXXTSPV

SEQ ID NO: 85553 - protein, 26 aa, Artificial Sequence
  Cyclic GFR-binding peptide
EVTMNRYKKLVVNKNEDFYLISIANM

SEQ ID NO: 85554 - protein, 37 aa, Artificial Sequence; identical to SEQ ID NO: 33143
  Cyclic GFR-binding peptide
  MOD_RES (31)..(32): Xaa is C or S

SEQ ID NO: 85555 - protein, 31 aa, Artificial Sequence
  Cyclic GFR-binding peptide
  MOD_RES (28)..(29): Xaa is C or S
MGRHKRLIIQQKDNYYLMSTASMKTPTXXPG

SEQ ID NO: 85556 - protein, 32 aa, Artificial Sequence
  Cyclic GFR-binding peptide
  MOD_RES (1)..(3): Xaa is C or S
XGXAEVVMDRHKRLVVNNAADYYLISTASLRA

SEQ ID NO: 85557 - protein, 25 aa, Artificial Sequence
  Cyclic GFR-binding peptide
TMNRYKKLVVNKNEDFYLISIANMK

SEQ ID NO: 85558 - protein, 31 aa, Artificial Sequence
  Cyclic GFR-binding peptide
  MOD_RES (1)..(1): Xaa is C or S
XRDVVMGRHKRLIIQQKDNYYLMSTASMKTP

SEQ ID NO: 85559 - protein, 33 aa, Artificial Sequence; identical to SEQ ID NO: 33144
  Cyclic GFR-binding peptide
  MOD_RES (1)..(33): Xaa is C or S

SEQ ID NO: 85560 - protein, 29 aa, Artificial Sequence
  Cyclic GFR-binding peptide
  MOD_RES (1)..(1): Xaa is C or S
XRDVVMGYHYKLIIQQKDNKYLMSIPSMK

SEQ ID NO: 85561 - protein, 20 aa, Artificial Sequence
  Cyclic GFR-binding peptide
YHYKLLLVRGNDKYLMSIPS

SEQ ID NO: 85562 - protein, 32 aa, Artificial Sequence; identical to SEQ ID NO: 33145
  Cyclic GFR-binding peptide
  MOD_RES (1)..(1): Xaa is C or S

SEQ ID NO: 85563 - protein, 35 aa, Artificial Sequence; identical to SEQ ID NO: 33146
  Cyclic GFR-binding peptide
  MOD_RES (31)..(32): Xaa is C or S

SEQ ID NO: 85564 - protein, 28 aa, Artificial Sequence
  Cyclic GFR-binding peptide
TMNEYKFKVVNKNEDLYLISIPEMKEPV

SEQ ID NO: 85565 - protein, 29 aa, Artificial Sequence
  Cyclic GFR-binding peptide
  MOD_RES (1)..(1): Xaa is C or S
XAEVVMDRHKRLVVNNAADYYLISTASLR

SEQ ID NO: 85566 - protein, 41 aa, Artificial Sequence; identical to SEQ ID NO: 33150
  Cyclic GFR-binding peptide
  MOD_RES (2)..(4)..(36)..(37): Xaa is C or S

SEQ ID NO: 85567 - protein, 30 aa, Artificial Sequence
  Cyclic GFR-binding peptide
  MOD_RES (1)..(3): Xaa is C or S
XGXSEVVMDEYKFKVVNNASDLYLISIPEL

SEQ ID NO: 85568 - protein, 31 aa, Artificial Sequence
  Cyclic GFR-binding peptide
  MOD_RES (1)..(3): Xaa is C or S
XKXSKVIMPIKGYIKPTKGIFYLINIPSLDQ

SEQ ID NO: 85569 - protein, 32 aa, Artificial Sequence
  Cyclic GFR-binding peptide
  MOD_RES (29)..(30): Xaa is C or S
VVMPIKGYVKPTRGVFYLINIPSLDQPVXXPS

SEQ ID NO: 85570 - protein, 34 aa, Artificial Sequence
  Cyclic GFR-binding peptide
  MOD_RES (2)..(4): Xaa is C or S
RXAXSEVTMNRHKRLVVNKNEDYYLISTASMKEP

SEQ ID NO: 85571 - protein, 38 aa, Artificial Sequence; identical to SEQ ID NO: 33152
  Cyclic GFR-binding peptide
  MOD_RES (32)..(33): Xaa is C or S

SEQ ID NO: 85572 - protein, 27 aa, Artificial Sequence
  Cyclic GFR-binding peptide
VMPIKGYVKPTRGVFYLINIPSLDQPV

SEQ ID NO: 85573 - protein, 22 aa, Artificial Sequence
  Cyclic GFR-binding peptide
NPIKGYVVNKNEDFYLINIPSM

SEQ ID NO: 85574 - protein, 29 aa, Artificial Sequence
  Cyclic GFR-binding peptide
  MOD_RES (29)..(29): Xaa is C or S
VMGEYKFKIIQQKDNLYLMSIPEMKTPTX

SEQ ID NO: 85575 - protein, 26 aa, Artificial Sequence
  Cyclic GFR-binding peptide
  MOD_RES (26)..(26): Xaa is C or S
PIKGYIKPTKGIFYLINIPSLDQSVX

SEQ ID NO: 85576 - protein, 24 aa, Artificial Sequence
  Cyclic GFR-binding peptide
TMNYHYKLVVNKNEDKYLISIPSM

SEQ ID NO: 85577 - protein, 25 aa, Artificial Sequence
  Cyclic GFR-binding peptide
SVAMGRHKRLYTVVGKDYYLISTAS

SEQ ID NO: 85578 - protein, 28 aa, Artificial Sequence
  Cyclic GFR-binding peptide
  MOD_RES (26)..(27): Xaa is C or S
RHKRLLLVRGNDYYLMSTASTKVPAXXT

SEQ ID NO: 85579 - protein, 32 aa, Artificial Sequence
  Cyclic GFR-binding peptide
  MOD_RES (29)..(30): Xaa is C or S
AMGRHKRLYTVVGKDYYLISTASLKTPVXXAK

SEQ ID NO: 85580 - protein, 39 aa, Artificial Sequence; identical to SEQ ID NO: 33159
  Cyclic GFR-binding peptide
  MOD_RES (1)..(33)..(34): Xaa is C or S

SEQ ID NO: 85581 - protein, 22 aa, Artificial Sequence
  Cyclic GFR-binding peptide
MDYHYKLVVNNASDKYLISIPS

SEQ ID NO: 85582 - protein, 35 aa, Artificial Sequence
  Cyclic GFR-binding peptide
  MOD_RES (29)..(30): Xaa is C or S
VMDEYKFKVVNNASDLYLISIPELRTPVXXTPPTS

SEQ ID NO: 85583 - protein, 39 aa, Artificial Sequence; identical to SEQ ID NO: 33161
  Cyclic GFR-binding peptide
  MOD_RES (2)..(4)..(35)..(36): Xaa is C or S

SEQ ID NO: 85584 - protein, 24 aa, Artificial Sequence
  Cyclic GFR-binding peptide
VIMYHYKLLLVRGNDKYLMSIPST

SEQ ID NO: 85585 - protein, 40 aa, Artificial Sequence; identical to SEQ ID NO: 33162
  Cyclic GFR-binding peptide
  MOD_RES (2)..(4)..(36)..(37): Xaa is C or S

SEQ ID NO: 85586 - protein, 26 aa, Artificial Sequence
  Cyclic GFR-binding peptide
VMDEYKFKVVNNASDLYLISIPELRT

SEQ ID NO: 85587 - protein, 31 aa, Artificial Sequence
  Cyclic GFR-binding peptide
  MOD_RES (27)..(28): Xaa is C or S
GYHYKLIIQQKDNKYLMSIPSMKTPTXXPGA

SEQ ID NO: 85588 - protein, 32 aa, Artificial Sequence; identical to SEQ ID NO: 33163
  Cyclic GFR-binding peptide
  MOD_RES (1)..(1): Xaa is C or S

SEQ ID NO: 85589 - protein, 25 aa, Artificial Sequence
  Cyclic GFR-binding peptide
EVIMYHYKLLLVRGNDKYLMSIPST

SEQ ID NO: 85590 - protein, 29 aa, Artificial Sequence
  Cyclic GFR-binding peptide
  MOD_RES (28)..(29): Xaa is C or S
IMRHKRLLLVRGNDYYLMSTASTKVPAXX

SEQ ID NO: 85591 - protein, 24 aa, Artificial Sequence
  Cyclic GFR-binding peptide
VMGRHKRLIIQQKDNYYLMSTASM

SEQ ID NO: 85592 - protein, 20 aa, Artificial Sequence
  Cyclic GFR-binding peptide
EYKFKVVNNASDLYLISIPE

SEQ ID NO: 85593 - protein, 34 aa, Artificial Sequence; identical to SEQ ID NO: 33164
  Cyclic GFR-binding peptide
  MOD_RES (1)..(3)..(34): Xaa is C or S

SEQ ID NO: 85594 - protein, 25 aa, Artificial Sequence
  Cyclic GFR-binding peptide
VTMNEYKFKVVNKNEDLYLISIPEM

SEQ ID NO: 85595 - protein, 39 aa, Artificial Sequence; identical to SEQ ID NO: 33165
  Cyclic GFR-binding peptide
  MOD_RES (2)..(33)..(34): Xaa is C or S

SEQ ID NO: 85596 - protein, 33 aa, Artificial Sequence
  Cyclic GFR-binding peptide
  MOD_RES (30)..(31): Xaa is C or S
VVMGEYKFKIIQQKDNLYLMSIPEMKTPTXXPG

SEQ ID NO: 85597 - protein, 31 aa, Artificial Sequence
  Cyclic GFR-binding peptide
  MOD_RES (30)..(31): Xaa is C or S
VVMDRHKRLVVNNAADYYLISTASLRAPVXX

SEQ ID NO: 85598 - protein, 34 aa, Artificial Sequence
  Cyclic GFR-binding peptide
  MOD_RES (28)..(29): Xaa is C or S
MNEYKFKVVNKNEDLYLISIPEMKEPVXXPEPIG

SEQ ID NO: 85599 - protein, 37 aa, Artificial Sequence; identical to SEQ ID NO: 33166
  Cyclic GFR-binding peptide
  MOD_RES (2)..(4)..(36)..(37): Xaa is C or S

SEQ ID NO: 85600 - protein, 38 aa, Artificial Sequence; identical to SEQ ID NO: 33168
  Cyclic GFR-binding peptide
  MOD_RES (2)..(4)..(36)..(37): Xaa is C or S

SEQ ID NO: 85601 - protein, 29 aa, Artificial Sequence
  Cyclic GFR-binding peptide
  MOD_RES (1)..(1): Xaa is C or S
XEEVIMRHKRLLLVRGNDYYLMSTASTKV

SEQ ID NO: 85602 - protein, 33 aa, Artificial Sequence; identical to SEQ ID NO: 33170
  Cyclic GFR-binding peptide
  MOD_RES (2)..(2): Xaa is C or S

SEQ ID NO: 85603 - protein, 26 aa, Artificial Sequence
  Cyclic GFR-binding peptide
VMDRHKRLVVNNAADYYLISTASLRA

SEQ ID NO: 85604 - protein, 37 aa, Artificial Sequence; identical to SEQ ID NO: 33171
  Cyclic GFR-binding peptide
  MOD_RES (1)..(32)..(33): Xaa is C or S

SEQ ID NO: 85605 - protein, 25 aa, Artificial Sequence
  Cyclic GFR-binding peptide
PIKGYVKPTRGVFYLINIPSLDQPV

SEQ ID NO: 85606 - protein, 36 aa, Artificial Sequence
  Cyclic GFR-binding peptide
  MOD_RES (30)..(31): Xaa is C or S
RVIMPIKGYVKPKRGVFYLINIPSLAQPVXXPAASA

SEQ ID NO: 85607 - protein, 33 aa, Artificial Sequence
  Cyclic GFR-binding peptide
  MOD_RES (27)..(28): Xaa is C or S
NYHYKLVVNKNEDKYLISIPSMKEPVXXPEPIG

SEQ ID NO: 85608 - protein, 26 aa, Artificial Sequence
  Cyclic GFR-binding peptide
EEVIMYHYKLLLVRGNDKYLMSIPST

SEQ ID NO: 85609 - protein, 25 aa, Artificial Sequence
  Cyclic GFR-binding peptide
RHKRLLLVRGNDYYLMSTASTKVPA

SEQ ID NO: 85610 - protein, 28 aa, Artificial Sequence
  Cyclic GFR-binding peptide
  MOD_RES (2)..(2): Xaa is C or S
GXESVAMGRHKRLYTVVGKDYYLISTAS

SEQ ID NO: 85611 - protein, 30 aa, Artificial Sequence
  Cyclic GFR-binding peptide
  MOD_RES (27)..(28): Xaa is C or S
DYHYKLVVNNASDKYLISIPSLRTPVXXTP

SEQ ID NO: 85612 - protein, 32 aa, Artificial Sequence
  Cyclic GFR-binding peptide
  MOD_RES (26)..(27): Xaa is C or S
PIKGYVKPKRGVFYLINIPSLAQPVXXPAASA

SEQ ID NO: 85613 - protein, 32 aa, Artificial Sequence
  Cyclic GFR-binding peptide
  MOD_RES (26)..(27): Xaa is C or S
RHKRLIIQQKDNYYLMSTASMKTPTXXPGASG

SEQ ID NO: 85614 - protein, 32 aa, Artificial Sequence; identical to SEQ ID NO: 33176
  Cyclic GFR-binding peptide
  MOD_RES (31)..(32): Xaa is C or S

SEQ ID NO: 85615 - protein, 31 aa, Artificial Sequence; identical to SEQ ID NO: 33177
  Cyclic GFR-binding peptide
  MOD_RES (31)..(31): Xaa is C or S

SEQ ID NO: 85616 - protein, 37 aa, Artificial Sequence; identical to SEQ ID NO: 33178
  Cyclic GFR-binding peptide
  MOD_RES (2)..(34)..(35): Xaa is C or S

SEQ ID NO: 85617 - protein, 27 aa, Artificial Sequence
  Cyclic GFR-binding peptide
RDVVMGYHYKLIIQQKDNKYLMSIPSM

SEQ ID NO: 85618 - protein, 38 aa, Artificial Sequence; identical to SEQ ID NO: 33183
  Cyclic GFR-binding peptide
  MOD_RES (1)..(3)..(35)..(36): Xaa is C or S

SEQ ID NO: 85619 - protein, 35 aa, Artificial Sequence
  Cyclic GFR-binding peptide
  MOD_RES (29)..(30): Xaa is C or S
TMNYHYKLVVNKNEDKYLISIPSMKEPVXXPEPIG

SEQ ID NO: 85620 - protein, 28 aa, Artificial Sequence
  Cyclic GFR-binding peptide
  MOD_RES (2)..(2): Xaa is C or S
GXRDVVMGRHKRLIIQQKDNYYLMSTAS

SEQ ID NO: 85621 - protein, 32 aa, Artificial Sequence
  Cyclic GFR-binding peptide
  MOD_RES (30)..(31): Xaa is C or S
EVIMRHKRLLLVRGNDYYLMSTASTKVPAXXT

SEQ ID NO: 85622 - protein, 33 aa, Artificial Sequence
  Cyclic GFR-binding peptide
  MOD_RES (2)..(4): Xaa is C or S
RXAXSEVTMNPIKGYVVNKNEDFYLINIPSMKE

SEQ ID NO: 85623 - protein, 29 aa, Artificial Sequence
  Cyclic GFR-binding peptide
  MOD_RES (28)..(29): Xaa is C or S
MNPIKGYVVNKNEDFYLINIPSMKEPVXX

SEQ ID NO: 85624 - protein, 32 aa, Artificial Sequence; identical to SEQ ID NO: 33188
  Cyclic GFR-binding peptide
  MOD_RES (31)..(32): Xaa is C or S

SEQ ID NO: 85625 - protein, 27 aa, Artificial Sequence
  Cyclic GFR-binding peptide
DVVMGEYKFKIIQQKDNLYLMSIPEMK

SEQ ID NO: 85626 - protein, 28 aa, Artificial Sequence
  Cyclic GFR-binding peptide
  MOD_RES (2)..(2): Xaa is C or S
KXSRVIMPIKGYVKPKRGVFYLINIPSL

SEQ ID NO: 85627 - protein, 34 aa, Artificial Sequence; identical to SEQ ID NO: 33189
  Cyclic GFR-binding peptide
  MOD_RES (31)..(32): Xaa is C or S

SEQ ID NO: 85628 - protein, 32 aa, Artificial Sequence; identical to SEQ ID NO: 33190
  Cyclic GFR-binding peptide
  MOD_RES (1)..(1): Xaa is C or S

SEQ ID NO: 85629 - protein, 30 aa, Artificial Sequence
  Cyclic GFR-binding peptide
  MOD_RES (27)..(28): Xaa is C or S
DRHKRLVVNNAADYYLISTASLRAPVXXSA

SEQ ID NO: 85630 - protein, 30 aa, Artificial Sequence; identical to SEQ ID NO: 33191
  Cyclic GFR-binding peptide

SEQ ID NO: 85631 - protein, 22 aa, Artificial Sequence
  Cyclic GFR-binding peptide
PIKGYIKPTKGIFYLINIPSLD

SEQ ID NO: 85632 - protein, 35 aa, Artificial Sequence; identical to SEQ ID NO: 33193
  Cyclic GFR-binding peptide
  MOD_RES (32)..(33): Xaa is C or S

SEQ ID NO: 85633 - protein, 22 aa, Artificial Sequence
  Cyclic GFR-binding peptide
RHKRLVVNNASDYYLISTASLR

SEQ ID NO: 85634 - protein, 33 aa, Artificial Sequence; identical to SEQ ID NO: 33195
  Cyclic GFR-binding peptide
  MOD_RES (2)..(2): Xaa is C or S

SEQ ID NO: 85635 - protein, 34 aa, Artificial Sequence
  Cyclic GFR-binding peptide
  MOD_RES (30)..(31): Xaa is C or S
KVIMPIKGYIKPTKGIFYLINIPSLDQSVXXPSA

SEQ ID NO: 85636 - protein, 27 aa, Artificial Sequence
  Cyclic GFR-binding peptide
  MOD_RES (1)..(1): Xaa is C or S
XSRVIMPIKGYVKPKRGVFYLINIPSL

SEQ ID NO: 85637 - protein, 33 aa, Artificial Sequence
  Cyclic GFR-binding peptide
  MOD_RES (2)..(4): Xaa is C or S
SXKXSRVIMPIKGYVKPKRGVFYLINIPSLAQP

SEQ ID NO: 85638 - protein, 23 aa, Artificial Sequence
  Cyclic GFR-binding peptide
RHKRLVVNKNEDYYLISTASMKE

SEQ ID NO: 85639 - protein, 32 aa, Artificial Sequence
  Cyclic GFR-binding peptide
  MOD_RES (2)..(4): Xaa is C or S
SXKXSKVIMPIKGYIKPTKGIFYLINIPSLDQ

SEQ ID NO: 85640 - protein, 28 aa, Artificial Sequence
  Cyclic GFR-binding peptide
  MOD_RES (26)..(27): Xaa is C or S
YHYKLLLVRGNDKYLMSIPSTKVPAXXT

SEQ ID NO: 85641 - protein, 41 aa, Artificial Sequence; identical to SEQ ID NO: 33198
  Cyclic GFR-binding peptide
  MOD_RES (2)..(4)..(36)..(37): Xaa is C or S

SEQ ID NO: 85642 - protein, 35 aa, Artificial Sequence; identical to SEQ ID NO: 33199
  Cyclic GFR-binding peptide
  MOD_RES (2)..(33)..(34): Xaa is C or S

SEQ ID NO: 85643 - protein, 33 aa, Artificial Sequence; identical to SEQ ID NO: 33200
  Cyclic GFR-binding peptide
  MOD_RES (2)..(2): Xaa is C or S

SEQ ID NO: 85644 - protein, 28 aa, Artificial Sequence
  Cyclic GFR-binding peptide
  MOD_RES (1)..(1): Xaa is C or S
XSEVTMNYHYKLVVNKNEDKYLISIPSM

SEQ ID NO: 85645 - protein, 34 aa, Artificial Sequence
  Cyclic GFR-binding peptide
  MOD_RES (28)..(29): Xaa is C or S
MGEYKFKIIQQKDNLYLMSIPEMKTPTXXPGASG

SEQ ID NO: 85646 - protein, 24 aa, Artificial Sequence
  Cyclic GFR-binding peptide
DRHKRLVVNNAADYYLISTASLRA

SEQ ID NO: 85647 - protein, 40 aa, Artificial Sequence; identical to SEQ ID NO: 33204
  Cyclic GFR-binding peptide
  MOD_RES (2)..(4)..(36)..(37): Xaa is C or S

SEQ ID NO: 85648 - protein, 37 aa, Artificial Sequence; identical to SEQ ID NO: 33206
  Cyclic GFR-binding peptide
  MOD_RES (31)..(32): Xaa is C or S

SEQ ID NO: 85649 - protein, 34 aa, Artificial Sequence
  Cyclic GFR-binding peptide
  MOD_RES (2)..(4): Xaa is C or S
RXGXAEVVMDRHKRLVVNNAADYYLISTASLRAP

SEQ ID NO: 85650 - protein, 30 aa, Artificial Sequence
  Cyclic GFR-binding peptide
  MOD_RES (1)..(1): Xaa is C or S
XRDVVMGEYKFKIIQQKDNLYLMSIPEMKT

SEQ ID NO: 85651 - protein, 34 aa, Artificial Sequence
  Cyclic GFR-binding peptide
  MOD_RES (30)..(31): Xaa is C or S
VAMGRHKRLYTVVGKDYYLISTASLKTPVXXAKS

SEQ ID NO: 85652 - protein, 31 aa, Artificial Sequence
  Cyclic GFR-binding peptide
  MOD_RES (27)..(28): Xaa is C or S
GRHKRLYTVVGKDYYLISTASLKTPVXXAKS

SEQ ID NO: 85653 - protein, 39 aa, Artificial Sequence; identical to SEQ ID NO: 33208
  Cyclic GFR-binding peptide
  MOD_RES (2)..(4)..(35)..(36): Xaa is C or S

SEQ ID NO: 85654 - protein, 27 aa, Artificial Sequence
  Cyclic GFR-binding peptide
  MOD_RES (27)..(27): Xaa is C or S
GEYKFKIIQQKDNLYLMSIPEMKTPTX

SEQ ID NO: 85655 - protein, 28 aa, Artificial Sequence
  Cyclic GFR-binding peptide
VTMNRHKRLVVNKNEDYYLISTASMKEP

SEQ ID NO: 85656 - protein, 27 aa, Artificial Sequence
  Cyclic GFR-binding peptide
TMNRHKRLVVNKNEDYYLISTASMKEP

SEQ ID NO: 85657 - protein, 31 aa, Artificial Sequence
  Cyclic GFR-binding peptide
  MOD_RES (30)..(31): Xaa is C or S
EVIMEYKFKLLVRGNDLYLMSIPETKVPAXX

SEQ ID NO: 85658 - protein, 28 aa, Artificial Sequence
  Cyclic GFR-binding peptide
  MOD_RES (26)..(27): Xaa is C or S
RHKRLVVNKNEDYYLISTASMKEPVXXP

SEQ ID NO: 85659 - protein, 34 aa, Artificial Sequence; identical to SEQ ID NO: 33210
  Cyclic GFR-binding peptide
  MOD_RES (2)..(4): Xaa is C or S

SEQ ID NO: 85660 - protein, 28 aa, Artificial Sequence
  Cyclic GFR-binding peptide
VVMGYHYKLIIQQKDNKYLMSIPSMKTP

SEQ ID NO: 85661 - protein, 35 aa, Artificial Sequence
  Cyclic GFR-binding peptide
  MOD_RES (29)..(30): Xaa is C or S
VVMPIKGYVKPTRGVFYLINIPSLDQPVXXPSASA

SEQ ID NO: 85662 - protein, 20 aa, Artificial Sequence
  Cyclic GFR-binding peptide
RHKRLVVNNAADYYLISTAS

SEQ ID NO: 85663 - protein, 24 aa, Artificial Sequence
  Cyclic GFR-binding peptide
MDYHYKLVVNNASDKYLISIPSLR

SEQ ID NO: 85664 - protein, 30 aa, Artificial Sequence
  Cyclic GFR-binding peptide
  MOD_RES (2)..(4): Xaa is C or S
SXGXRDVVMGRHKRLIIQQKDNYYLMSTAS

SEQ ID NO: 85665 - protein, 35 aa, Artificial Sequence; identical to SEQ ID NO: 33211
  Cyclic GFR-binding peptide
  MOD_RES (2)..(4)..(35): Xaa is C or S

SEQ ID NO: 85666 - protein, 37 aa, Artificial Sequence; identical to SEQ ID NO: 33213
  Cyclic GFR-binding peptide
  MOD_RES (2)..(4)..(36)..(37): Xaa is C or S

SEQ ID NO: 85667 - protein, 31 aa, Artificial Sequence
  Cyclic GFR-binding peptide
  MOD_RES (1)..(3): Xaa is C or S
XAXSEVTMNRYKKLVVNKNEDFYLISIANMK

SEQ ID NO: 85668 - protein, 28 aa, Artificial Sequence
  Cyclic GFR-binding peptide
  MOD_RES (28)..(28): Xaa is C or S
MNPIKGYVVNKNEDFYLINIPSMKEPVX

SEQ ID NO: 85669 - protein, 26 aa, Artificial Sequence
  Cyclic GFR-binding peptide
SVAMGRHKRLYTVVGKDYYLISTASL

SEQ ID NO: 85670 - protein, 34 aa, Artificial Sequence; identical to SEQ ID NO: 33216
  Cyclic GFR-binding peptide
  MOD_RES (31)..(32): Xaa is C or S

SEQ ID NO: 85671 - protein, 24 aa, Artificial Sequence
  Cyclic GFR-binding peptide
VIMPIKGYIKPTKGIFYLINIPSL

SEQ ID NO: 85672 - protein, 28 aa, Artificial Sequence
  Cyclic GFR-binding peptide
  MOD_RES (1)..(1): Xaa is C or S
XSEVTMNRYKKLVVNKNEDFYLISIANM

SEQ ID NO: 85673 - protein, 24 aa, Artificial Sequence
  Cyclic GFR-binding peptide
MGEYKFKIIQQKDNLYLMSIPEMK

SEQ ID NO: 85674 - protein, 28 aa, Artificial Sequence
  Cyclic GFR-binding peptide
SEVTMNEYKFKVVNKNEDLYLISIPEMK

SEQ ID NO: 85675 - protein, 29 aa, Artificial Sequence
  Cyclic GFR-binding peptide
ESVAMGRHKRLYTVVGKDYYLISTASLKT

SEQ ID NO: 85676 - protein, 28 aa, Artificial Sequence
  Cyclic GFR-binding peptide
  MOD_RES (27)..(28): Xaa is C or S
DRHKRLVVNNAADYYLISTASLRAPVXX

SEQ ID NO: 85677 - protein, 23 aa, Artificial Sequence
  Cyclic GFR-binding peptide
MNPIKGYVVNKNEDFYLINIPSM

SEQ ID NO: 85678 - protein, 28 aa, Artificial Sequence
  Cyclic GFR-binding peptide
  MOD_RES (26)..(27): Xaa is C or S
YHYKLIIQQKDNKYLMSIPSMKTPTXXP

SEQ ID NO: 85679 - protein, 27 aa, Artificial Sequence
  Cyclic GFR-binding peptide
  MOD_RES (27)..(27): Xaa is C or S
MPIKGYIKPTKGIFYLINIPSLDQSVX

SEQ ID NO: 85680 - protein, 38 aa, Artificial Sequence; identical to SEQ ID NO: 33219
  Cyclic GFR-binding peptide
  MOD_RES (2)..(4)..(36)..(37): Xaa is C or S

SEQ ID NO: 85681 - protein, 33 aa, Artificial Sequence; identical to SEQ ID NO: 33220
  Cyclic GFR-binding peptide
  MOD_RES (1)..(33): Xaa is C or S

SEQ ID NO: 85682 - protein, 28 aa, Artificial Sequence
  Cyclic GFR-binding peptide
  MOD_RES (27)..(28): Xaa is C or S
GYHYKLIIQQKDNKYLMSIPSMKTPTXX

SEQ ID NO: 85683 - protein, 41 aa, Artificial Sequence; identical to SEQ ID NO: 33221
  Cyclic GFR-binding peptide
  MOD_RES (2)..(4)..(36)..(37): Xaa is C or S

SEQ ID NO: 85684 - protein, 35 aa, Artificial Sequence; identical to SEQ ID NO: 33223
  Cyclic GFR-binding peptide
  MOD_RES (31)..(32): Xaa is C or S

SEQ ID NO: 85685 - protein, 26 aa, Artificial Sequence
  Cyclic GFR-binding peptide
VMGYHYKLIIQQKDNKYLMSIPSMKT

SEQ ID NO: 85686 - protein, 33 aa, Artificial Sequence
  Cyclic GFR-binding peptide
  MOD_RES (27)..(28): Xaa is C or S
NEYKFKIVNSSDDLYLVSIPELKTPAXXPKPVH

SEQ ID NO: 85687 - protein, 38 aa, Artificial Sequence; identical to SEQ ID NO: 33225
  Cyclic GFR-binding peptide
  MOD_RES (32)..(33): Xaa is C or S

SEQ ID NO: 85688 - protein, 38 aa, Artificial Sequence; identical to SEQ ID NO: 33226
  Cyclic GFR-binding peptide
  MOD_RES (1)..(33)..(34): Xaa is C or S

SEQ ID NO: 85689 - protein, 28 aa, Artificial Sequence
  Cyclic GFR-binding peptide
  MOD_RES (27)..(28): Xaa is C or S
MEYKFKLLVRGNDLYLMSIPETKVPAXX

SEQ ID NO: 85690 - protein, 31 aa, Artificial Sequence
  Cyclic GFR-binding peptide
  MOD_RES (1)..(3): Xaa is C or S
XGXESVAMGRHKRLYTVVGKDYYLISTASLK

SEQ ID NO: 85691 - protein, 28 aa, Artificial Sequence
  Cyclic GFR-binding peptide
VMDRHKRLVVNNAADYYLISTASLRAPV

SEQ ID NO: 85692 - protein, 29 aa, Artificial Sequence
  Cyclic GFR-binding peptide
EVVMDRHKRLVVNNAADYYLISTASLRAP

SEQ ID NO: 85693 - protein, 29 aa, Artificial Sequence
  Cyclic GFR-binding peptide
  MOD_RES (29)..(29): Xaa is C or S
TMNPIKGYVVNKNEDFYLINIPSMKEPVX

SEQ ID NO: 85694 - protein, 38 aa, Artificial Sequence; identical to SEQ ID NO: 33229
  Cyclic GFR-binding peptide
  MOD_RES (32)..(33): Xaa is C or S

SEQ ID NO: 85695 - protein, 31 aa, Artificial Sequence; identical to SEQ ID NO: 33230
  Cyclic GFR-binding peptide
  MOD_RES (1)..(1): Xaa is C or S

SEQ ID NO: 85696 - protein, 34 aa, Artificial Sequence
  Cyclic GFR-binding peptide
  MOD_RES (29)..(30): Xaa is C or S
VMGYHYKLIIQQKDNKYLMSIPSMKTPTXXPGAS

SEQ ID NO: 85697 - protein, 24 aa, Artificial Sequence
  Cyclic GFR-binding peptide
PIKGYVKPTRGVFYLINIPSLDQP

SEQ ID NO: 85698 - protein, 27 aa, Artificial Sequence
  Cyclic GFR-binding peptide
ESVAMGRHKRLYTVVGKDYYLISTASL

SEQ ID NO: 85699 - protein, 27 aa, Artificial Sequence
  Cyclic GFR-binding peptide
VAMGRHKRLYTVVGKDYYLISTASLKT

SEQ ID NO: 85700 - protein, 30 aa, Artificial Sequence
  Cyclic GFR-binding peptide
  MOD_RES (30)..(30): Xaa is C or S
VVMGEYKFKIIQQKDNLYLMSIPEMKTPTX

SEQ ID NO: 85701 - protein, 23 aa, Artificial Sequence
  Cyclic GFR-binding peptide
RYKKLVVNKNEDFYLISIANMKE

SEQ ID NO: 85702 - protein, 33 aa, Artificial Sequence; identical to SEQ ID NO: 33237
  Cyclic GFR-binding peptide
  MOD_RES (2)..(2): Xaa is C or S

SEQ ID NO: 85703 - protein, 35 aa, Artificial Sequence; identical to SEQ ID NO: 21085
  Cyclic GFR-binding peptide
  MOD_RES (2)..(4): Xaa is C or S

SEQ ID NO: 85704 - protein, 30 aa, Artificial Sequence; identical to SEQ ID NO: 33238
  Cyclic GFR-binding peptide

SEQ ID NO: 85705 - protein, 39 aa, Artificial Sequence; identical to SEQ ID NO: 33240
  Cyclic GFR-binding peptide
  MOD_RES (2)..(4)..(36)..(37): Xaa is C or S

SEQ ID NO: 85706 - protein, 26 aa, Artificial Sequence
  Cyclic GFR-binding peptide
DVVMGRHKRLIIQQKDNYYLMSTASM

SEQ ID NO: 85707 - protein, 39 aa, Artificial Sequence; identical to SEQ ID NO: 33242
  Cyclic GFR-binding peptide
  MOD_RES (1)..(33)..(34): Xaa is C or S

SEQ ID NO: 85708 - protein, 36 aa, Artificial Sequence
  Cyclic GFR-binding peptide
  MOD_RES (30)..(31): Xaa is C or S
VVMDEYKFKVVNNASDLYLISIPELRTPVXXTPPTS

SEQ ID NO: 85709 - protein, 30 aa, Artificial Sequence; identical to SEQ ID NO: 33244
  Cyclic GFR-binding peptide

SEQ ID NO: 85710 - protein, 31 aa, Artificial Sequence
  Cyclic GFR-binding peptide
  MOD_RES (2)..(2): Xaa is C or S
GXSEVVMDRHKRLVVNNASDYYLISTASLRT

SEQ ID NO: 85711 - protein, 21 aa, Artificial Sequence
  Cyclic GFR-binding peptide
NEYKFKVVNKNEDLYLISIPE

SEQ ID NO: 85712 - protein, 39 aa, Artificial Sequence; identical to SEQ ID NO: 33246
  Cyclic GFR-binding peptide
  MOD_RES (1)..(33)..(34): Xaa is C or S

SEQ ID NO: 85713 - protein, 29 aa, Artificial Sequence
  Cyclic GFR-binding peptide
  MOD_RES (1)..(1): Xaa is C or S
XSRVIMPIKGYVKPKRGVFYLINIPSLAQ

SEQ ID NO: 85714 - protein, 42 aa, Artificial Sequence; identical to SEQ ID NO: 33247
  Cyclic GFR-binding peptide
  MOD_RES (2)..(4)..(36)..(37): Xaa is C or S

SEQ ID NO: 85715 - protein, 35 aa, Artificial Sequence
  Cyclic GFR-binding peptide
  MOD_RES (29)..(30): Xaa is C or S
VIMEYKFKLLVRGNDLYLMSIPETKVPAXXTSPVR

SEQ ID NO: 85716 - protein, 34 aa, Artificial Sequence; identical to SEQ ID NO: 33248
  Cyclic GFR-binding peptide
  MOD_RES (31)..(32): Xaa is C or S

SEQ ID NO: 85717 - protein, 29 aa, Artificial Sequence
  Cyclic GFR-binding peptide
SKVIMPIKGYIKPTKGIFYLINIPSLDQS

SEQ ID NO: 85718 - protein, 33 aa, Artificial Sequence
  Cyclic GFR-binding peptide
  MOD_RES (1)..(3): Xaa is C or S
XGXSEVVMDEYKFKVVNNASDLYLISIPELRTP

SEQ ID NO: 85719 - protein, 25 aa, Artificial Sequence
  Cyclic GFR-binding peptide
VVMGYHYKLIIQQKDNKYLMSIPSM

SEQ ID NO: 85720 - protein, 30 aa, Artificial Sequence
  Cyclic GFR-binding peptide
  MOD_RES (29)..(30): Xaa is C or S
VMGRHKRLIIQQKDNYYLMSTASMKTPTXX

SEQ ID NO: 85721 - protein, 32 aa, Artificial Sequence; identical to SEQ ID NO: 33249
  Cyclic GFR-binding peptide
  MOD_RES (31)..(32): Xaa is C or S

SEQ ID NO: 85722 - protein, 38 aa, Artificial Sequence; identical to SEQ ID NO: 33250
  Cyclic GFR-binding peptide
  MOD_RES (2)..(34)..(35): Xaa is C or S

SEQ ID NO: 85723 - protein, 31 aa, Artificial Sequence; identical to SEQ ID NO: 33252
  Cyclic GFR-binding peptide
  MOD_RES (31)..(31): Xaa is C or S

SEQ ID NO: 85724 - protein, 35 aa, Artificial Sequence; identical to SEQ ID NO: 33254
  Cyclic GFR-binding peptide
  MOD_RES (2)..(4): Xaa is C or S

SEQ ID NO: 85725 - protein, 41 aa, Artificial Sequence; identical to SEQ ID NO: 33255
  Cyclic GFR-binding peptide
  MOD_RES (2)..(4)..(36)..(37): Xaa is C or S

SEQ ID NO: 85726 - protein, 33 aa, Artificial Sequence; identical to SEQ ID NO: 33256
  Cyclic GFR-binding peptide
  MOD_RES (1)..(3): Xaa is C or S

SEQ ID NO: 85727 - protein, 34 aa, Artificial Sequence; identical to SEQ ID NO: 33257
  Cyclic GFR-binding peptide
  MOD_RES (1)..(32)..(33): Xaa is C or S

SEQ ID NO: 85728 - protein, 29 aa, Artificial Sequence
  Cyclic GFR-binding peptide
VVMGEYKFKIIQQKDNLYLMSIPEMKTPT

SEQ ID NO: 85729 - protein, 29 aa, Artificial Sequence
  Cyclic GFR-binding peptide
  MOD_RES (2)..(2): Xaa is C or S
GXSEVVMDRHKRLVVNNASDYYLISTASL

SEQ ID NO: 85730 - protein, 27 aa, Artificial Sequence
  Cyclic GFR-binding peptide
VMDRHKRLVVNNASDYYLISTASLRTP

SEQ ID NO: 85731 - protein, 37 aa, Artificial Sequence; identical to SEQ ID NO: 33260
  Cyclic GFR-binding peptide
  MOD_RES (32)..(33): Xaa is C or S

SEQ ID NO: 85732 - protein, 28 aa, Artificial Sequence
  Cyclic GFR-binding peptide
  MOD_RES (26)..(27): Xaa is C or S
EYKFKIIQQKDNLYLMSIPEMKTPTXXP

SEQ ID NO: 85733 - protein, 20 aa, Artificial Sequence
  Cyclic GFR-binding peptide
YHYKLIIQQKDNKYLMSIPS

SEQ ID NO: 85734 - protein, 35 aa, Artificial Sequence
  Cyclic GFR-binding peptide
  MOD_RES (30)..(31): Xaa is C or S
VTMNRHKRLVVNKNEDYYLISTASMKEPVXXPEPI

SEQ ID NO: 85735 - protein, 24 aa, Artificial Sequence
  Cyclic GFR-binding peptide
MNRYKKLVVNKNEDFYLISIANMK

SEQ ID NO: 85736 - protein, 28 aa, Artificial Sequence
  Cyclic GFR-binding peptide
  MOD_RES (28)..(28): Xaa is C or S
IMRHKRLLLVRGNDYYLMSTASTKVPAX

SEQ ID NO: 85737 - protein, 26 aa, Artificial Sequence
  Cyclic GFR-binding peptide
SEVVMDEYKFKVVNNASDLYLISIPE

SEQ ID NO: 85738 - protein, 25 aa, Artificial Sequence
  Cyclic GFR-binding peptide
GYHYKLIIQQKDNKYLMSIPSMKTP

SEQ ID NO: 85739 - protein, 31 aa, Artificial Sequence
  Cyclic GFR-binding peptide
  MOD_RES (1)..(1): Xaa is C or S
XSEVTMNRHKRLVVNKNEDYYLISTASMKEP

SEQ ID NO: 85740 - protein, 28 aa, Artificial Sequence
  Cyclic GFR-binding peptide
  MOD_RES (1)..(1): Xaa is C or S
XSRVIMPIKGYVKPKRGVFYLINIPSLA

SEQ ID NO: 85741 - protein, 34 aa, Artificial Sequence
  Cyclic GFR-binding peptide
  MOD_RES (2)..(4): Xaa is C or S
RXGXSEVVMDRHKRLVVNNASDYYLISTASLRTP

SEQ ID NO: 85742 - protein, 33 aa, Artificial Sequence; identical to SEQ ID NO: 33263
  Cyclic GFR-binding peptide
  MOD_RES (1)..(33): Xaa is C or S

SEQ ID NO: 85743 - protein, 28 aa, Artificial Sequence
  Cyclic GFR-binding peptide
  MOD_RES (27)..(28): Xaa is C or S
MPIKGYVKPTRGVFYLINIPSLDQPVXX

SEQ ID NO: 85744 - protein, 29 aa, Artificial Sequence
  Cyclic GFR-binding peptide
  MOD_RES (1)..(3): Xaa is C or S
XGXRDVVMGRHKRLIIQQKDNYYLMSTAS

SEQ ID NO: 85745 - protein, 36 aa, Artificial Sequence; identical to SEQ ID NO: 33264
  Cyclic GFR-binding peptide
  MOD_RES (1)..(33)..(34): Xaa is C or S

SEQ ID NO: 85746 - protein, 38 aa, Artificial Sequence; identical to SEQ ID NO: 33265
  Cyclic GFR-binding peptide
  MOD_RES (32)..(33): Xaa is C or S

SEQ ID NO: 85747 - protein, 28 aa, Artificial Sequence
  Cyclic GFR-binding peptide
  MOD_RES (2)..(2): Xaa is C or S
AXSEVTMNYHYKLVVNKNEDKYLISIPS

SEQ ID NO: 85748 - protein, 33 aa, Artificial Sequence
  Cyclic GFR-binding peptide
  MOD_RES (29)..(30): Xaa is C or S
AMGRHKRLYTVVGKDYYLISTASLKTPVXXAKS

SEQ ID NO: 85749 - protein, 34 aa, Artificial Sequence; identical to SEQ ID NO: 33266
  Cyclic GFR-binding peptide
  MOD_RES (1)..(33)..(34): Xaa is C or S

SEQ ID NO: 85750 - protein, 38 aa, Artificial Sequence; identical to SEQ ID NO: 33267
  Cyclic GFR-binding peptide
  MOD_RES (1)..(3)..(35)..(36): Xaa is C or S

SEQ ID NO: 85751 - protein, 33 aa, Artificial Sequence
  Cyclic GFR-binding peptide
  MOD_RES (27)..(28): Xaa is C or S
GEYKFKIIQQKDNLYLMSIPEMKTPTXXPGASG

SEQ ID NO: 85752 - protein, 35 aa, Artificial Sequence; identical to SEQ ID NO: 33269
  Cyclic GFR-binding peptide
  MOD_RES (2)..(34)..(35): Xaa is C or S

SEQ ID NO: 85753 - protein, 26 aa, Artificial Sequence
  Cyclic GFR-binding peptide
VIMRHKRLLLVRGNDYYLMSTASTKV

SEQ ID NO: 85754 - protein, 27 aa, Artificial Sequence
  Cyclic GFR-binding peptide
KVVMPIKGYVKPTRGVFYLINIPSLDQ

SEQ ID NO: 85755 - protein, 37 aa, Artificial Sequence; identical to SEQ ID NO: 33270
  Cyclic GFR-binding peptide
  MOD_RES (1)..(3)..(34)..(35): Xaa is C or S

SEQ ID NO: 85756 - protein, 35 aa, Artificial Sequence; identical to SEQ ID NO: 33273
  Cyclic GFR-binding peptide
  MOD_RES (31)..(32): Xaa is C or S

SEQ ID NO: 85757 - protein, 28 aa, Artificial Sequence
  Cyclic GFR-binding peptide
RVIMPIKGYVKPKRGVFYLINIPSLAQP

SEQ ID NO: 85758 - protein, 30 aa, Artificial Sequence; identical to SEQ ID NO: 33274
  Cyclic GFR-binding peptide

SEQ ID NO: 85759 - protein, 25 aa, Artificial Sequence
  Cyclic GFR-binding peptide
EVTMNPIKGYVVNKNEDFYLINIPS

SEQ ID NO: 85760 - protein, 30 aa, Artificial Sequence
  Cyclic GFR-binding peptide
  MOD_RES (1)..(3): Xaa is C or S
XGXEEVIMEYKFKLLVRGNDLYLMSIPETK

SEQ ID NO: 85761 - protein, 42 aa, Artificial Sequence; identical to SEQ ID NO: 33278
  Cyclic GFR-binding peptide
  MOD_RES (2)..(4)..(36)..(37): Xaa is C or S

SEQ ID NO: 85762 - protein, 35 aa, Artificial Sequence; identical to SEQ ID NO: 33279
  Cyclic GFR-binding peptide
  MOD_RES (2)..(34)..(35): Xaa is C or S

SEQ ID NO: 85763 - protein, 26 aa, Artificial Sequence
  Cyclic GFR-binding peptide
EEVIMEYKFKLLVRGNDLYLMSIPET

SEQ ID NO: 85764 - protein, 26 aa, Artificial Sequence
  Cyclic GFR-binding peptide
VIMPIKGYVKPKRGVFYLINIPSLAQ

SEQ ID NO: 85765 - protein, 37 aa, Artificial Sequence; identical to SEQ ID NO: 33282
  Cyclic GFR-binding peptide
  MOD_RES (31)..(32): Xaa is C or S

SEQ ID NO: 85766 - protein, 35 aa, Artificial Sequence; identical to SEQ ID NO: 33283
  Cyclic GFR-binding peptide
  MOD_RES (31)..(32): Xaa is C or S

SEQ ID NO: 85767 - protein, 22 aa, Artificial Sequence
  Cyclic GFR-binding peptide
PIKGYVKPKRGVFYLINIPSLA

SEQ ID NO: 85768 - protein, 24 aa, Artificial Sequence
  Cyclic GFR-binding peptide
VIMPIKGYVKPKRGVFYLINIPSL

SEQ ID NO: 85769 - protein, 39 aa, Artificial Sequence; identical to SEQ ID NO: 33284
  Cyclic GFR-binding peptide
  MOD_RES (1)..(33)..(34): Xaa is C or S

SEQ ID NO: 85770 - protein, 42 aa, Artificial Sequence; identical to SEQ ID NO: 33286
  Cyclic GFR-binding peptide
  MOD_RES (2)..(4)..(36)..(37): Xaa is C or S

SEQ ID NO: 85771 - protein, 34 aa, Artificial Sequence; identical to SEQ ID NO: 33287
  Cyclic GFR-binding peptide
  MOD_RES (2)..(4): Xaa is C or S

SEQ ID NO: 85772 - protein, 31 aa, Artificial Sequence
  Cyclic GFR-binding peptide
  MOD_RES (29)..(30): Xaa is C or S
VIMEYKFKLLVRGNDLYLMSIPETKVPAXXT

SEQ ID NO: 85773 - protein, 38 aa, Artificial Sequence; identical to SEQ ID NO: 33290
  Cyclic GFR-binding peptide
  MOD_RES (2)..(4)..(36)..(37): Xaa is C or S

SEQ ID NO: 85774 - protein, 25 aa, Artificial Sequence
  Cyclic GFR-binding peptide
VVMDEYKFKVVNNASDLYLISIPEL

SEQ ID NO: 85775 - protein, 31 aa, Artificial Sequence; identical to SEQ ID NO: 33294
  Cyclic GFR-binding peptide
  MOD_RES (31)..(31): Xaa is C or S

SEQ ID NO: 85776 - protein, 23 aa, Artificial Sequence
  Cyclic GFR-binding peptide
VMGRHKRLIIQQKDNYYLMSTAS

SEQ ID NO: 85777 - protein, 32 aa, Artificial Sequence
  Cyclic GFR-binding peptide
  MOD_RES (27)..(28): Xaa is C or S
DYHYKLVVNNASDKYLISIPSLRTPVXXTPPT

SEQ ID NO: 85778 - protein, 28 aa, Artificial Sequence
  Cyclic GFR-binding peptide
  MOD_RES (1)..(1): Xaa is C or S
XSEVVMDYHYKLVVNNASDKYLISIPSL

SEQ ID NO: 85779 - protein, 28 aa, Artificial Sequence
  Cyclic GFR-binding peptide
  MOD_RES (26)..(27): Xaa is C or S
RHKRLIIQQKDNYYLMSTASMKTPTXXP

SEQ ID NO: 85780 - protein, 39 aa, Artificial Sequence; identical to SEQ ID NO: 33297
  Cyclic GFR-binding peptide
  MOD_RES (1)..(33)..(34): Xaa is C or S

SEQ ID NO: 85781 - protein, 29 aa, Artificial Sequence
  Cyclic GFR-binding peptide
  MOD_RES (2)..(2): Xaa is C or S
AXSEVTMNRHKRLVVNKNEDYYLISTASM

SEQ ID NO: 85782 - protein, 37 aa, Artificial Sequence; identical to SEQ ID NO: 33299
  Cyclic GFR-binding peptide
  MOD_RES (1)..(33)..(34): Xaa is C or S

SEQ ID NO: 85783 - protein, 34 aa, Artificial Sequence; identical to SEQ ID NO: 33301
  Cyclic GFR-binding peptide
  MOD_RES (1)..(32)..(33): Xaa is C or S

SEQ ID NO: 85784 - protein, 32 aa, Artificial Sequence; identical to SEQ ID NO: 33302
  Cyclic GFR-binding peptide
  MOD_RES (1)..(32): Xaa is C or S

SEQ ID NO: 85785 - protein, 26 aa, Artificial Sequence
  Cyclic GFR-binding peptide
  MOD_RES (26)..(26): Xaa is C or S
PIKGYVKPTRGVFYLINIPSLDQPVX

SEQ ID NO: 85786 - protein, 33 aa, Artificial Sequence; identical to SEQ ID NO: 33304
  Cyclic GFR-binding peptide
  MOD_RES (31)..(32): Xaa is C or S

SEQ ID NO: 85787 - protein, 28 aa, Artificial Sequence
  Cyclic GFR-binding peptide
SEVVMDEYKFKVVNNASDLYLISIPELR

SEQ ID NO: 85788 - protein, 21 aa, Artificial Sequence
  Cyclic GFR-binding peptide
DEYKFKVVNNASDLYLISIPE

SEQ ID NO: 85789 - protein, 27 aa, Artificial Sequence
  Cyclic GFR-binding peptide
  MOD_RES (27)..(27): Xaa is C or S
NRHKRLVVNKNEDYYLISTASMKEPVX

SEQ ID NO: 85790 - protein, 33 aa, Artificial Sequence
  Cyclic GFR-binding peptide
  MOD_RES (27)..(28): Xaa is C or S
NPIKGYVVNKNEDFYLINIPSMKEPVXXPEPIG

SEQ ID NO: 85791 - protein, 42 aa, Artificial Sequence; identical to SEQ ID NO: 33307
  Cyclic GFR-binding peptide
  MOD_RES (2)..(4)..(36)..(37): Xaa is C or S

SEQ ID NO: 85792 - protein, 26 aa, Artificial Sequence
  Cyclic GFR-binding peptide
IMEYKFKLLVRGNDLYLMSIPETKVP

SEQ ID NO: 85793 - protein, 31 aa, Artificial Sequence
  Cyclic GFR-binding peptide
  MOD_RES (1)..(1): Xaa is C or S
XSEVTMNEYKFKVVNKNEDLYLISIPEMKEP

SEQ ID NO: 85794 - protein, 29 aa, Artificial Sequence
  Cyclic GFR-binding peptide
  MOD_RES (27)..(28): Xaa is C or S
DYHYKLVVNNASDKYLISIPSLRTPVXXT

SEQ ID NO: 85795 - protein, 35 aa, Artificial Sequence; identical to SEQ ID NO: 33308
  Cyclic GFR-binding peptide
  MOD_RES (1)..(3)..(35): Xaa is C or S

SEQ ID NO: 85796 - protein, 32 aa, Artificial Sequence
  Cyclic GFR-binding peptide
  MOD_RES (29)..(30): Xaa is C or S
TMNPIKGYVVNKNEDFYLINIPSMKEPVXXPE

SEQ ID NO: 85797 - protein, 30 aa, Artificial Sequence
  Cyclic GFR-binding peptide
  MOD_RES (29)..(30): Xaa is C or S
TMNEYKFKVVNKNEDLYLISIPEMKEPVXX

SEQ ID NO: 85798 - protein, 26 aa, Artificial Sequence
  Cyclic GFR-binding peptide
MGRHKRLYTVVGKDYYLISTASLKTP

SEQ ID NO: 85799 - protein, 37 aa, Artificial Sequence; identical to SEQ ID NO: 33311
  Cyclic GFR-binding peptide
  MOD_RES (32)..(33): Xaa is C or S

SEQ ID NO: 85800 - protein, 27 aa, Artificial Sequence
  Cyclic GFR-binding peptide
SKVIMPIKGYIKPTKGIFYLINIPSLD

SEQ ID NO: 85801 - protein, 26 aa, Artificial Sequence
  Cyclic GFR-binding peptide
TMNEYKFKVVNKNEDLYLISIPEMKE

SEQ ID NO: 85802 - protein, 30 aa, Artificial Sequence
  Cyclic GFR-binding peptide
  MOD_RES (29)..(30): Xaa is C or S
VIMPIKGYVKPKRGVFYLINIPSLAQPVXX

SEQ ID NO: 85803 - protein, 39 aa, Artificial Sequence; identical to SEQ ID NO: 33312
  Cyclic GFR-binding peptide
  MOD_RES (1)..(3)..(35)..(36): Xaa is C or S

SEQ ID NO: 85804 - protein, 28 aa, Artificial Sequence
  Cyclic GFR-binding peptide
SRVIMPIKGYVKPKRGVFYLINIPSLAQ

SEQ ID NO: 85805 - protein, 22 aa, Artificial Sequence
  Cyclic GFR-binding peptide
YHYKLVVNNASDKYLISIPSLR

SEQ ID NO: 85806 - protein, 31 aa, Artificial Sequence
  Cyclic GFR-binding peptide
  MOD_RES (1)..(1): Xaa is C or S
XRDVVMGEYKFKIIQQKDNLYLMSIPEMKTP

SEQ ID NO: 85807 - protein, 32 aa, Artificial Sequence
  Cyclic GFR-binding peptide
  MOD_RES (2)..(4): Xaa is C or S
SXGXRDVVMGRHKRLIIQQKDNYYLMSTASMK

SEQ ID NO: 85808 - protein, 33 aa, Artificial Sequence
  Cyclic GFR-binding peptide
  MOD_RES (1)..(3): Xaa is C or S
XGXSEVVMDYHYKLVVNNASDKYLISIPSLRTP

SEQ ID NO: 85809 - protein, 20 aa, Artificial Sequence
  Cyclic GFR-binding peptide
RHKRLVVNNAADYYLISTAS

SEQ ID NO: 85810 - protein, 29 aa, Artificial Sequence
  Cyclic GFR-binding peptide
SEVTMNYHYKLVVNKNEDKYLISIPSMKE

SEQ ID NO: 85811 - protein, 31 aa, Artificial Sequence
  Cyclic GFR-binding peptide
  MOD_RES (2)..(4): Xaa is C or S
SXKXSKVVMPIKGYVKPTRGVFYLINIPSLD

SEQ ID NO: 85812 - protein, 28 aa, Artificial Sequence
  Cyclic GFR-binding peptide
VMDEYKFKVVNNASDLYLISIPELRTPV

SEQ ID NO: 85813 - protein, 27 aa, Artificial Sequence
  Cyclic GFR-binding peptide
SEVVMDEYKFKVVNNASDLYLISIPEL

SEQ ID NO: 85814 - protein, 23 aa, Artificial Sequence
  Cyclic GFR-binding peptide
MDYHYKLVVNNASDKYLISIPSL

SEQ ID NO: 85815 - protein, 32 aa, Artificial Sequence; identical to SEQ ID NO: 33313
  Cyclic GFR-binding peptide
  MOD_RES (1)..(1): Xaa is C or S

SEQ ID NO: 85816 - protein, 31 aa, Artificial Sequence
  Cyclic GFR-binding peptide
  MOD_RES (2)..(4): Xaa is C or S
RXGXSEVVMDRHKRLVVNNASDYYLISTASL

SEQ ID NO: 85817 - protein, 35 aa, Artificial Sequence; identical to SEQ ID NO: 33314
  Cyclic GFR-binding peptide
  MOD_RES (2)..(34)..(35): Xaa is C or S

SEQ ID NO: 85818 - protein, 28 aa, Artificial Sequence
  Cyclic GFR-binding peptide
  MOD_RES (26)..(27): Xaa is C or S
RYKKLVVNKNEDFYLISIANMKEPVXXP

SEQ ID NO: 85819 - protein, 33 aa, Artificial Sequence
  Cyclic GFR-binding peptide
  MOD_RES (30)..(31): Xaa is C or S
VVMDRHKRLVVNNASDYYLISTASLRTPVXXTP

SEQ ID NO: 85820 - protein, 31 aa, Artificial Sequence
  Cyclic GFR-binding peptide
  MOD_RES (2)..(2): Xaa is C or S
GXRDVVMGRHKRLIIQQKDNYYLMSTASMKT

SEQ ID NO: 85821 - protein, 26 aa, Artificial Sequence
  Cyclic GFR-binding peptide
MPIKGYIKPTKGIFYLINIPSLDQSV

SEQ ID NO: 85822 - protein, 26 aa, Artificial Sequence
  Cyclic GFR-binding peptide
SEVTMNEYKFKVVNKNEDLYLISIPE

SEQ ID NO: 85823 - protein, 39 aa, Artificial Sequence; identical to SEQ ID NO: 33320
  Cyclic GFR-binding peptide
  MOD_RES (2)..(33)..(34): Xaa is C or S

SEQ ID NO: 85824 - protein, 27 aa, Artificial Sequence
  Cyclic GFR-binding peptide
  MOD_RES (26)..(27): Xaa is C or S
PIKGYVKPTRGVFYLINIPSLDQPVXX

SEQ ID NO: 85825 - protein, 35 aa, Artificial Sequence; identical to SEQ ID NO: 33321
  Cyclic GFR-binding peptide
  MOD_RES (2)..(34)..(35): Xaa is C or S

SEQ ID NO: 85826 - protein, 31 aa, Artificial Sequence
  Cyclic GFR-binding peptide
  MOD_RES (2)..(2): Xaa is C or S
GXRDVVMGEYKFKIIQQKDNLYLMSIPEMKT

SEQ ID NO: 85827 - protein, 36 aa, Artificial Sequence; identical to SEQ ID NO: 33322
  Cyclic GFR-binding peptide
  MOD_RES (31)..(32): Xaa is C or S

SEQ ID NO: 85828 - protein, 25 aa, Artificial Sequence
  Cyclic GFR-binding peptide
PIKGYIKPTKGIFYLINIPSLDQSV

SEQ ID NO: 85829 - protein, 35 aa, Artificial Sequence
  Cyclic GFR-binding peptide
  MOD_RES (5)..(6): Xaa is C or S
IPEPXXVPEKMEPISILYLDENKNVVKFKYENMTV

SEQ ID NO: 85830 - protein, 32 aa, Artificial Sequence
  Cyclic GFR-binding peptide
  MOD_RES (4)..(5): Xaa is C or S
PPTXXVPTRLSPISILYKDSANNVVLKYHYDM

SEQ ID NO: 85831 - protein, 36 aa, Artificial Sequence; identical to SEQ ID NO: 33325
  Cyclic GFR-binding peptide
  MOD_RES (5)..(6): Xaa is C or S

SEQ ID NO: 85832 - protein, 31 aa, Artificial Sequence; identical to SEQ ID NO: 33324
  Cyclic GFR-binding peptide
  MOD_RES (1)..(1): Xaa is C or S

SEQ ID NO: 85833 - protein, 32 aa, Artificial Sequence; identical to SEQ ID NO: 33326
  Cyclic GFR-binding peptide
  MOD_RES (1)..(2): Xaa is C or S

SEQ ID NO: 85834 - protein, 28 aa, Artificial Sequence
  Cyclic GFR-binding peptide
  MOD_RES (2)..(3): Xaa is C or S
TXXVPTRLSPISILYKDSANNVVLKYHY

SEQ ID NO: 85835 - protein, 39 aa, Artificial Sequence; identical to SEQ ID NO: 33328
  Cyclic GFR-binding peptide
  MOD_RES (6)..(7)..(39): Xaa is C or S

SEQ ID NO: 85836 - protein, 29 aa, Artificial Sequence
  Cyclic GFR-binding peptide
  MOD_RES (27)..(29): Xaa is C or S
SPISILYKDSANNVVLKYHYDMVVESXGX

SEQ ID NO: 85837 - protein, 32 aa, Artificial Sequence
  Cyclic GFR-binding peptide
  MOD_RES (4)..(5): Xaa is C or S
PPTXXVPTRLSATSILYYDSANNVVLRKHRDM

SEQ ID NO: 85838 - protein, 33 aa, Artificial Sequence; identical to SEQ ID NO: 33329
  Cyclic GFR-binding peptide
  MOD_RES (1)..(33): Xaa is C or S

SEQ ID NO: 85839 - protein, 32 aa, Artificial Sequence; identical to SEQ ID NO: 33330
  Cyclic GFR-binding peptide
  MOD_RES (1)..(1): Xaa is C or S

SEQ ID NO: 85840 - protein, 33 aa, Artificial Sequence
  Cyclic GFR-binding peptide
  MOD_RES (4)..(5): Xaa is C or S
PPTXXVPTRLSPISILYKDSANNVVLKYHYDMV

SEQ ID NO: 85841 - protein, 23 aa, Artificial Sequence
  Cyclic GFR-binding peptide
TRLEPISILYLDSANNVVKFKYE

SEQ ID NO: 85842 - protein, 33 aa, Artificial Sequence; identical to SEQ ID NO: 33331
  Cyclic GFR-binding peptide
  MOD_RES (1)..(2)..(33): Xaa is C or S

SEQ ID NO: 85843 - protein, 29 aa, Artificial Sequence
  Cyclic GFR-binding peptide
VPQALSPINILYFVGRKPKVYGKIPMIVR

SEQ ID NO: 85844 - protein, 33 aa, Artificial Sequence
  Cyclic GFR-binding peptide
  MOD_RES (31)..(33): Xaa is C or S
PARLSATSILYYDAANNVVLRKHRDMVVEAXGX

SEQ ID NO: 85845 - protein, 34 aa, Artificial Sequence; identical to SEQ ID NO: 33336
  Cyclic GFR-binding peptide
  MOD_RES (2)..(3)..(34): Xaa is C or S

SEQ ID NO: 85846 - protein, 37 aa, Artificial Sequence; identical to SEQ ID NO: 33337
  Cyclic GFR-binding peptide
  MOD_RES (5)..(6): Xaa is C or S

SEQ ID NO: 85847 - protein, 29 aa, Artificial Sequence
  Cyclic GFR-binding peptide
PTRLSPISILYKDSANNVVLKYHYDMVVE

SEQ ID NO: 85848 - protein, 35 aa, Artificial Sequence; identical to SEQ ID NO: 33338
  Cyclic GFR-binding peptide
  MOD_RES (3)..(4): Xaa is C or S

SEQ ID NO: 85849 - protein, 35 aa, Artificial Sequence
  Cyclic GFR-binding peptide
  MOD_RES (6)..(7): Xaa is C or S
RVPSTXXAPVKTSATSMLYYDNGRVLLLRKHRMIV

SEQ ID NO: 85850 - protein, 37 aa, Artificial Sequence; identical to SEQ ID NO: 33339
  Cyclic GFR-binding peptide
  MOD_RES (6)..(7): Xaa is C or S

SEQ ID NO: 85851 - protein, 26 aa, Artificial Sequence
  Cyclic GFR-binding peptide
VPEKMNAISILYFDENKNVVLKKYRN

SEQ ID NO: 85852 - protein, 30 aa, Artificial Sequence; identical to SEQ ID NO: 33342
  Cyclic GFR-binding peptide

SEQ ID NO: 85853 - protein, 34 aa, Artificial Sequence; identical to SEQ ID NO: 33343
  Cyclic GFR-binding peptide
  MOD_RES (3)..(4): Xaa is C or S

SEQ ID NO: 85854 - protein, 37 aa, Artificial Sequence; identical to SEQ ID NO: 33344
  Cyclic GFR-binding peptide
  MOD_RES (5)..(6): Xaa is C or S

SEQ ID NO: 85855 - protein, 26 aa, Artificial Sequence
  Cyclic GFR-binding peptide
SPISILYKDSANNVVLKYHYDMVVES

SEQ ID NO: 85856 - protein, 33 aa, Artificial Sequence; identical to SEQ ID NO: 33349
  Cyclic GFR-binding peptide
  MOD_RES (1)..(2): Xaa is C or S

SEQ ID NO: 85857 - protein, 27 aa, Artificial Sequence
  Cyclic GFR-binding peptide
  MOD_RES (1)..(2): Xaa is C or S
XXAPVKTSATSMLYYDNGRVLLLRKHR

SEQ ID NO: 85858 - protein, 28 aa, Artificial Sequence
  Cyclic GFR-binding peptide
  MOD_RES (1)..(1): Xaa is C or S
XVPTRLSPISILYKDSANNVVLKYHYDM

SEQ ID NO: 85859 - protein, 28 aa, Artificial Sequence
  Cyclic GFR-binding peptide
  MOD_RES (1)..(1): Xaa is C or S
XVPTRLSATSILYYDSANNVVLRKHRDM

SEQ ID NO: 85860 - protein, 24 aa, Artificial Sequence
  Cyclic GFR-binding peptide
SATSMLYYNDKQQIILRKHRGMVV

SEQ ID NO: 85861 - protein, 20 aa, Artificial Sequence
  Cyclic GFR-binding peptide
SPISILYKDSANNVVLKYHY

SEQ ID NO: 85862 - protein, 28 aa, Artificial Sequence
  Cyclic GFR-binding peptide
TRLSPISILYKDSANNVVLKYHYDMVVE

SEQ ID NO: 85863 - protein, 37 aa, Artificial Sequence; identical to SEQ ID NO: 33354
  Cyclic GFR-binding peptide
  MOD_RES (4)..(5)..(36): Xaa is C or S

SEQ ID NO: 85864 - protein, 27 aa, Artificial Sequence
  Cyclic GFR-binding peptide
VPEKMSPINILYFDENKNVVYGKIPNM

SEQ ID NO: 85865 - protein, 24 aa, Artificial Sequence
  Cyclic GFR-binding peptide
EPISILYLDENKNVVKFKYENMTV

SEQ ID NO: 85866 - protein, 26 aa, Artificial Sequence
  Cyclic GFR-binding peptide
  MOD_RES (1)..(1): Xaa is C or S
XTPTKMEPISMLYLNDKQQIIKFKYE

SEQ ID NO: 85867 - protein, 28 aa, Artificial Sequence
  Cyclic GFR-binding peptide
  MOD_RES (2)..(3): Xaa is C or S
SXXVPARLSATSILYYDAANNVVLRKHR

SEQ ID NO: 85868 - protein, 34 aa, Artificial Sequence; identical to SEQ ID NO: 33355
  Cyclic GFR-binding peptide
  MOD_RES (1)..(2)..(34): Xaa is C or S

SEQ ID NO: 85869 - protein, 22 aa, Artificial Sequence
  Cyclic GFR-binding peptide
LSPISILYKDSANNVVLKYHYD

SEQ ID NO: 85870 - protein, 31 aa, Artificial Sequence; identical to SEQ ID NO: 33356
  Cyclic GFR-binding peptide
  MOD_RES (1)..(1): Xaa is C or S

SEQ ID NO: 85871 - protein, 30 aa, Artificial Sequence
  Cyclic GFR-binding peptide
  MOD_RES (1)..(1): Xaa is C or S
XVPTRLEPISILYLDSANNVVKFKYEDMVV

SEQ ID NO: 85872 - protein, 20 aa, Artificial Sequence
  Cyclic GFR-binding peptide
SATSMLYYNDKQQIILRKHR

SEQ ID NO: 85873 - protein, 42 aa, Artificial Sequence; identical to SEQ ID NO: 33357
  Cyclic GFR-binding peptide
  MOD_RES (6)..(7)..(39)..(41): Xaa is C or S

SEQ ID NO: 85874 - protein, 34 aa, Artificial Sequence; identical to SEQ ID NO: 33358
  Cyclic GFR-binding peptide
  MOD_RES (1)..(32)..(34): Xaa is C or S

SEQ ID NO: 85875 - protein, 38 aa, Artificial Sequence; identical to SEQ ID NO: 33359
  Cyclic GFR-binding peptide
  MOD_RES (3)..(4)..(36)..(38): Xaa is C or S

SEQ ID NO: 85876 - protein, 40 aa, Artificial Sequence; identical to SEQ ID NO: 33360
  Cyclic GFR-binding peptide
  MOD_RES (6)..(7)..(39): Xaa is C or S

SEQ ID NO: 85877 - protein, 37 aa, Artificial Sequence; identical to SEQ ID NO: 33362
  Cyclic GFR-binding peptide
  MOD_RES (1)..(2)..(34)..(36): Xaa is C or S

SEQ ID NO: 85878 - protein, 30 aa, Artificial Sequence
  Cyclic GFR-binding peptide
  MOD_RES (30)..(30): Xaa is C or S
PVKTSPISMLYKDNGRVLLLKYHYMIVEEX

SEQ ID NO: 85879 - protein, 37 aa, Artificial Sequence; identical to SEQ ID NO: 33363
  Cyclic GFR-binding peptide
  MOD_RES (2)..(3)..(35)..(37): Xaa is C or S

SEQ ID NO: 85880 - protein, 31 aa, Artificial Sequence
  Cyclic GFR-binding peptide
  MOD_RES (28)..(30): Xaa is C or S
MSPISILYKDENKNVVLKYHYNMTVESXAXR

SEQ ID NO: 85881 - protein, 34 aa, Artificial Sequence; identical to SEQ ID NO: 33364
  Cyclic GFR-binding peptide
  MOD_RES (1)..(32)..(34): Xaa is C or S

SEQ ID NO: 85882 - protein, 27 aa, Artificial Sequence
  Cyclic GFR-binding peptide
APVKTSATSMLYYDNGRVLLLRKHRMI

SEQ ID NO: 85883 - protein, 36 aa, Artificial Sequence; identical to SEQ ID NO: 33365
  Cyclic GFR-binding peptide
  MOD_RES (4)..(5)..(36): Xaa is C or S

SEQ ID NO: 85884 - protein, 38 aa, Artificial Sequence; identical to SEQ ID NO: 33366
  Cyclic GFR-binding peptide
  MOD_RES (6)..(7): Xaa is C or S

SEQ ID NO: 85885 - protein, 40 aa, Artificial Sequence; identical to SEQ ID NO: 33367
  Cyclic GFR-binding peptide
  MOD_RES (6)..(7)..(39): Xaa is C or S

SEQ ID NO: 85886 - protein, 33 aa, Artificial Sequence
  Cyclic GFR-binding peptide
  MOD_RES (3)..(4): Xaa is C or S
STXXAPVKTSPISMLYKDNGRVLLLKYHYMIVE

SEQ ID NO: 85887 - protein, 34 aa, Artificial Sequence; identical to SEQ ID NO: 33368
  Cyclic GFR-binding peptide
  MOD_RES (2)..(3): Xaa is C or S

SEQ ID NO: 85888 - protein, 36 aa, Artificial Sequence; identical to SEQ ID NO: 33369
  Cyclic GFR-binding peptide
  MOD_RES (1)..(33)..(35): Xaa is C or S

SEQ ID NO: 85889 - protein, 25 aa, Artificial Sequence
  Cyclic GFR-binding peptide
RLSPISILYKDSANNVVLKYHYDMV

SEQ ID NO: 85890 - protein, 27 aa, Artificial Sequence
  Cyclic GFR-binding peptide
  MOD_RES (1)..(1): Xaa is C or S
XAPVKTSATSMLYYDNGRVLLLRKHRM

SEQ ID NO: 85891 - protein, 27 aa, Artificial Sequence
  Cyclic GFR-binding peptide
  MOD_RES (27)..(27): Xaa is C or S
LSPINILYFVGRTPKVYGKIPMVVKSX

SEQ ID NO: 85892 - protein, 31 aa, Artificial Sequence
  Cyclic GFR-binding peptide
  MOD_RES (29)..(31): Xaa is C or S
RLEPISILYLDSANNVVKFKYEDMVVESXGX

SEQ ID NO: 85893 - protein, 34 aa, Artificial Sequence; identical to SEQ ID NO: 33371
  Cyclic GFR-binding peptide
  MOD_RES (31)..(33): Xaa is C or S

SEQ ID NO: 85894 - protein, 27 aa, Artificial Sequence
  Cyclic GFR-binding peptide
PTRLSPISILYKDSANNVVLKYHYDMV

SEQ ID NO: 85895 - protein, 32 aa, Artificial Sequence
  Cyclic GFR-binding peptide
  MOD_RES (3)..(4): Xaa is C or S
GPXXTPTKMSATSMLYYNDKQQIILRKHRGMV

SEQ ID NO: 85896 - protein, 24 aa, Artificial Sequence
  Cyclic GFR-binding peptide
EPISMLYLDNGRVLLKFKYEMIVE

SEQ ID NO: 85897 - protein, 34 aa, Artificial Sequence; identical to SEQ ID NO: 33373
  Cyclic GFR-binding peptide
  MOD_RES (32)..(34): Xaa is C or S

SEQ ID NO: 85898 - protein, 25 aa, Artificial Sequence
  Cyclic GFR-binding peptide
RLSATSILYYDSANNVVLRKHRDMV

SEQ ID NO: 85899 - protein, 37 aa, Artificial Sequence; identical to SEQ ID NO: 33374
  Cyclic GFR-binding peptide
  MOD_RES (3)..(4)..(36): Xaa is C or S

SEQ ID NO: 85900 - protein, 23 aa, Artificial Sequence
  Cyclic GFR-binding peptide
TKMSATSMLYYNDKQQIILRKHR

SEQ ID NO: 85901 - protein, 37 aa, Artificial Sequence; identical to SEQ ID NO: 33375
  Cyclic GFR-binding peptide
  MOD_RES (1)..(2)..(34)..(36): Xaa is C or S

SEQ ID NO: 85902 - protein, 33 aa, Artificial Sequence
  Cyclic GFR-binding peptide
  MOD_RES (30)..(32): Xaa is C or S
PVKTSATSMLYYDNGRVLLLRKHRMIVEEXGXL

SEQ ID NO: 85903 - protein, 27 aa, Artificial Sequence
  Cyclic GFR-binding peptide
PEKMNAISILYFDENKNVVLKKYRNMT

SEQ ID NO: 85904 - protein, 37 aa, Artificial Sequence; identical to SEQ ID NO: 33376
  Cyclic GFR-binding peptide
  MOD_RES (3)..(4)..(35)..(37): Xaa is C or S

SEQ ID NO: 85905 - protein, 31 aa, Artificial Sequence
  Cyclic GFR-binding peptide
  MOD_RES (29)..(31): Xaa is C or S
QDLSPINILYFVGRTPKVYGKIPMVVKSXKX

SEQ ID NO: 85906 - protein, 38 aa, Artificial Sequence; identical to SEQ ID NO: 33377
  Cyclic GFR-binding peptide
  MOD_RES (3)..(4)..(36)..(38): Xaa is C or S

SEQ ID NO: 85907 - protein, 28 aa, Artificial Sequence
  Cyclic GFR-binding peptide
  MOD_RES (2)..(3): Xaa is C or S
PXXVSQDLSPINILYFIGKTPKIYGKIP

SEQ ID NO: 85908 - protein, 31 aa, Artificial Sequence
  Cyclic GFR-binding peptide
  MOD_RES (29)..(31): Xaa is C or S
VKTSPISMLYKDNGRVLLLKYHYMIVEEXGX

SEQ ID NO: 85909 - protein, 36 aa, Artificial Sequence; identical to SEQ ID NO: 33382
  Cyclic GFR-binding peptide
  MOD_RES (5)..(6): Xaa is C or S

SEQ ID NO: 85910 - protein, 37 aa, Artificial Sequence; identical to SEQ ID NO: 33381
  Cyclic GFR-binding peptide
  MOD_RES (3)..(4)..(35)..(37): Xaa is C or S

SEQ ID NO: 85911 - protein, 26 aa, Artificial Sequence
  Cyclic GFR-binding peptide
TPTKMEPISMLYLNDKQQIIKFKYEG

SEQ ID NO: 85912 - protein, 30 aa, Artificial Sequence
  Cyclic GFR-binding peptide
  MOD_RES (2)..(3): Xaa is C or S
PXXVPEKMNAISILYFDENKNVVLKKYRNM

SEQ ID NO: 85913 - protein, 31 aa, Artificial Sequence
  Cyclic GFR-binding peptide
  MOD_RES (3)..(4): Xaa is C or S
EPXXVPEKMNAISILYFDENKNVVLKKYRNM

SEQ ID NO: 85914 - protein, 35 aa, Artificial Sequence; identical to SEQ ID NO: 33383
  Cyclic GFR-binding peptide
  MOD_RES (2)..(3)..(35): Xaa is C or S

SEQ ID NO: 85915 - protein, 36 aa, Artificial Sequence; identical to SEQ ID NO: 33384
  Cyclic GFR-binding peptide
  MOD_RES (2)..(3)..(35): Xaa is C or S

SEQ ID NO: 85916 - protein, 31 aa, Artificial Sequence
  Cyclic GFR-binding peptide
  MOD_RES (3)..(4): Xaa is C or S
SPXXVPQDLSPINILYFVGRTPKVYGKIPMV

SEQ ID NO: 85917 - protein, 29 aa, Artificial Sequence
  Cyclic GFR-binding peptide
  MOD_RES (27)..(29): Xaa is C or S
SATSILYYDAANNVVLRKHRDMVVEAXGX

SEQ ID NO: 85918 - protein, 31 aa, Artificial Sequence; identical to SEQ ID NO: 33385
  Cyclic GFR-binding peptide
  MOD_RES (1)..(1): Xaa is C or S

SEQ ID NO: 85919 - protein, 29 aa, Artificial Sequence
  Cyclic GFR-binding peptide
  MOD_RES (2)..(3): Xaa is C or S
TXXVPTRLEPISILYLDSANNVVKFKYED

SEQ ID NO: 85920 - protein, 24 aa, Artificial Sequence
  Cyclic GFR-binding peptide
SPINILYFIGKTPKIYGKIPMIVK

SEQ ID NO: 85921 - protein, 31 aa, Artificial Sequence
  Cyclic GFR-binding peptide
  MOD_RES (30)..(30): Xaa is C or S
TRLEPISILYLDSANNVVKFKYEDMVVESXG

SEQ ID NO: 85922 - protein, 24 aa, Artificial Sequence
  Cyclic GFR-binding peptide
QDLSPINILYFVGRTPKVYGKIPM

SEQ ID NO: 85923 - protein, 28 aa, Artificial Sequence
  Cyclic GFR-binding peptide
PTRLEPISILYLDSANNVVKFKYEDMVV

SEQ ID NO: 85924 - protein, 32 aa, Artificial Sequence
  Cyclic GFR-binding peptide
  MOD_RES (31)..(31): Xaa is C or S
PEKMSATSILYYDENKNVVLRKHRNMTVESXA

SEQ ID NO: 85925 - protein, 26 aa, Artificial Sequence
  Cyclic GFR-binding peptide
VPQALSPINILYFVGRKPKVYGKIPM

SEQ ID NO: 85926 - protein, 37 aa, Artificial Sequence; identical to SEQ ID NO: 33387
  Cyclic GFR-binding peptide
  MOD_RES (4)..(5)..(37): Xaa is C or S

SEQ ID NO: 85927 - protein, 38 aa, Artificial Sequence; identical to SEQ ID NO: 33388
  Cyclic GFR-binding peptide
  MOD_RES (5)..(6)..(38): Xaa is C or S

SEQ ID NO: 85928 - protein, 31 aa, Artificial Sequence
  Cyclic GFR-binding peptide
  MOD_RES (30)..(30): Xaa is C or S
PQALSPINILYFVGRKPKVYGKIPMIVRSXK

SEQ ID NO: 85929 - protein, 27 aa, Artificial Sequence
  Cyclic GFR-binding peptide
KMSPINILYFDENKNVVYGKIPNMTVE

SEQ ID NO: 85930 - protein, 29 aa, Artificial Sequence
  Cyclic GFR-binding peptide
  MOD_RES (28)..(28): Xaa is C or S
DLSPINILYFIGKTPKIYGKIPMIVKSXK

SEQ ID NO: 85931 - protein, 30 aa, Artificial Sequence
  Cyclic GFR-binding peptide
  MOD_RES (3)..(4): Xaa is C or S
SPXXVPQDLSPINILYFVGRTPKVYGKIPM

SEQ ID NO: 85932 - protein, 35 aa, Artificial Sequence
  Cyclic GFR-binding peptide
  MOD_RES (6)..(7): Xaa is C or S
RVPSTXXAPVKTSPISMLYKDNGRVLLLKYHYMIV

SEQ ID NO: 85933 - protein, 34 aa, Artificial Sequence; identical to SEQ ID NO: 33393
  Cyclic GFR-binding peptide
  MOD_RES (1)..(2)..(34): Xaa is C or S

SEQ ID NO: 85934 - protein, 30 aa, Artificial Sequence
  Cyclic GFR-binding peptide
  MOD_RES (1)..(1): Xaa is C or S
XTPTKMSATSMLYYNDKQQIILRKHRGMVV

SEQ ID NO: 85935 - protein, 22 aa, Artificial Sequence
  Cyclic GFR-binding peptide
KLSATSILYYDKGVVTYLRKHR

SEQ ID NO: 85936 - protein, 26 aa, Artificial Sequence
  Cyclic GFR-binding peptide
APVKTSATSMLYYDNGRVLLLRKHRM

SEQ ID NO: 85937 - protein, 30 aa, Artificial Sequence
  Cyclic GFR-binding peptide
  MOD_RES (1)..(1): Xaa is C or S
XTPTKMSPISMLYKNDKQQIILKYHYGMVV

SEQ ID NO: 85938 - protein, 27 aa, Artificial Sequence
  Cyclic GFR-binding peptide
MEPISMLYLNDKQQIIKFKYEGMVVDR

SEQ ID NO: 85939 - protein, 26 aa, Artificial Sequence
  Cyclic GFR-binding peptide
SPISMLYKNDKQQIILKYHYGMVVDR

SEQ ID NO: 85940 - protein, 39 aa, Artificial Sequence; identical to SEQ ID NO: 33395
  Cyclic GFR-binding peptide
  MOD_RES (6)..(7)..(39): Xaa is C or S

SEQ ID NO: 85941 - protein, 29 aa, Artificial Sequence
  Cyclic GFR-binding peptide
  MOD_RES (3)..(4): Xaa is C or S
SPXXVPQDLSPINILYFVGRTPKVYGKIP

SEQ ID NO: 85942 - protein, 32 aa, Artificial Sequence
  Cyclic GFR-binding peptide
  MOD_RES (3)..(4): Xaa is C or S
GPXXTPTKMEPISMLYLNDKQQIIKFKYEGMV

SEQ ID NO: 85943 - protein, 29 aa, Artificial Sequence
  Cyclic GFR-binding peptide
  MOD_RES (1)..(2): Xaa is C or S
XXVPEKMSATSILYYDENKNVVLRKHRNM

SEQ ID NO: 85944 - protein, 26 aa, Artificial Sequence
  Cyclic GFR-binding peptide
VPEKMSATSILYYDENKNVVLRKHRN

SEQ ID NO: 85945 - protein, 32 aa, Artificial Sequence; identical to SEQ ID NO: 33396
  Cyclic GFR-binding peptide
  MOD_RES (1)..(2): Xaa is C or S

SEQ ID NO: 85946 - protein, 24 aa, Artificial Sequence
  Cyclic GFR-binding peptide
TRLEPISILYLDSANNVVKFKYED

SEQ ID NO: 85947 - protein, 29 aa, Artificial Sequence
  Cyclic GFR-binding peptide
  MOD_RES (3)..(4): Xaa is C or S
STXXAPVKTSATSMLYYDNGRVLLLRKHR

SEQ ID NO: 85948 - protein, 36 aa, Artificial Sequence; identical to SEQ ID NO: 33398
  Cyclic GFR-binding peptide
  MOD_RES (5)..(6): Xaa is C or S

SEQ ID NO: 85949 - protein, 34 aa, Artificial Sequence
  Cyclic GFR-binding peptide
  MOD_RES (6)..(7): Xaa is C or S
ASAAPXXVPQALSPINILYFVGRKPKVYGKIPMI

SEQ ID NO: 85950 - protein, 28 aa, Artificial Sequence
  Cyclic GFR-binding peptide
  MOD_RES (27)..(27): Xaa is C or S
SATSILYYDSANNVVLRKHRDMVVESXG

SEQ ID NO: 85951 - protein, 30 aa, Artificial Sequence
  Cyclic GFR-binding peptide
  MOD_RES (30)..(30): Xaa is C or S
PVKTEPISMLYLDNGRVLLKFKYEMIVEEX

SEQ ID NO: 85952 - protein, 40 aa, Artificial Sequence; identical to SEQ ID NO: 33402
  Cyclic GFR-binding peptide
  MOD_RES (6)..(7)..(39): Xaa is C or S

SEQ ID NO: 85953 - protein, 41 aa, Artificial Sequence; identical to SEQ ID NO: 33403
  Cyclic GFR-binding peptide
  MOD_RES (6)..(7)..(39)..(41): Xaa is C or S

SEQ ID NO: 85954 - protein, 35 aa, Artificial Sequence; identical to SEQ ID NO: 33404
  Cyclic GFR-binding peptide
  MOD_RES (3)..(4)..(35): Xaa is C or S

SEQ ID NO: 85955 - protein, 29 aa, Artificial Sequence
  Cyclic GFR-binding peptide
  MOD_RES (27)..(29): Xaa is C or S
TEPISMLYLDNGRVLLKFKYEMIVEEXGX

SEQ ID NO: 85956 - protein, 39 aa, Artificial Sequence; identical to SEQ ID NO: 33406
  Cyclic GFR-binding peptide
  MOD_RES (5)..(6)..(38): Xaa is C or S

SEQ ID NO: 85957 - protein, 31 aa, Artificial Sequence
  Cyclic GFR-binding peptide
  MOD_RES (4)..(5): Xaa is C or S
PEPXXVPEKMEPISILYLDENKNVVKFKYEN

SEQ ID NO: 85958 - protein, 27 aa, Artificial Sequence
  Cyclic GFR-binding peptide
  MOD_RES (1)..(1): Xaa is C or S
XVPEKMNAISILYFDENKNVVLKKYRN

SEQ ID NO: 85959 - protein, 28 aa, Artificial Sequence
  Cyclic GFR-binding peptide
  MOD_RES (28)..(28): Xaa is C or S
MSATSILYYDENKNVVLRKHRNMTVESX

SEQ ID NO: 85960 - protein, 29 aa, Artificial Sequence
  Cyclic GFR-binding peptide
  MOD_RES (1)..(2): Xaa is C or S
XXVPEKMSPISILYKDENKNVVLKYHYNM

SEQ ID NO: 85961 - protein, 34 aa, Artificial Sequence; identical to SEQ ID NO: 33408
  Cyclic GFR-binding peptide
  MOD_RES (2)..(3): Xaa is C or S

SEQ ID NO: 85962 - protein, 40 aa, Artificial Sequence; identical to SEQ ID NO: 33410
  Cyclic GFR-binding peptide
  MOD_RES (5)..(6)..(37)..(39): Xaa is C or S

SEQ ID NO: 85963 - protein, 28 aa, Artificial Sequence
  Cyclic GFR-binding peptide
  MOD_RES (27)..(27): Xaa is C or S
SPISMLYKNDKQQIILKYHYGMVVDRXG

SEQ ID NO: 85964 - protein, 38 aa, Artificial Sequence; identical to SEQ ID NO: 33411
  Cyclic GFR-binding peptide
  MOD_RES (5)..(6)..(37): Xaa is C or S

SEQ ID NO: 85965 - protein, 39 aa, Artificial Sequence; identical to SEQ ID NO: 33412
  Cyclic GFR-binding peptide
  MOD_RES (6)..(7)..(39): Xaa is C or S

SEQ ID NO: 85966 - protein, 31 aa, Artificial Sequence
  Cyclic GFR-binding peptide
  MOD_RES (4)..(5): Xaa is C or S
PEPXXVPEKMSPISILYKDENKNVVLKYHYN

SEQ ID NO: 85967 - protein, 32 aa, Artificial Sequence; identical to SEQ ID NO: 33414
  Cyclic GFR-binding peptide
  MOD_RES (1)..(1): Xaa is C or S

SEQ ID NO: 85968 - protein, 33 aa, Artificial Sequence
  Cyclic GFR-binding peptide
  MOD_RES (3)..(4): Xaa is C or S
EPXXVPEKMEPISILYLDENKNVVKFKYENMTV

SEQ ID NO: 85969 - protein, 32 aa, Artificial Sequence
  Cyclic GFR-binding peptide
  MOD_RES (6)..(7): Xaa is C or S
AAPASXXVPARLSATSILYYDAANNVVLRKHR

SEQ ID NO: 85970 - protein, 23 aa, Artificial Sequence
  Cyclic GFR-binding peptide
EKMEPISILYLDENKNVVKFKYE

SEQ ID NO: 85971 - protein, 30 aa, Artificial Sequence; identical to SEQ ID NO: 33416
  Cyclic GFR-binding peptide

SEQ ID NO: 85972 - protein, 38 aa, Artificial Sequence; identical to SEQ ID NO: 33417
  Cyclic GFR-binding peptide
  MOD_RES (5)..(6)..(38): Xaa is C or S

SEQ ID NO: 85973 - protein, 28 aa, Artificial Sequence
  Cyclic GFR-binding peptide
KMSPINILYFDENKNVVYGKIPNMTVES

SEQ ID NO: 85974 - protein, 39 aa, Artificial Sequence; identical to SEQ ID NO: 33418
  Cyclic GFR-binding peptide
  MOD_RES (4)..(5)..(37)..(39): Xaa is C or S

SEQ ID NO: 85975 - protein, 30 aa, Artificial Sequence
  Cyclic GFR-binding peptide
  MOD_RES (4)..(5): Xaa is C or S
PSTXXAPVKTSPISMLYKDNGRVLLLKYHY

SEQ ID NO: 85976 - protein, 25 aa, Artificial Sequence
  Cyclic GFR-binding peptide
PTRLEPISILYLDSANNVVKFKYED

SEQ ID NO: 85977 - protein, 38 aa, Artificial Sequence; identical to SEQ ID NO: 33419
  Cyclic GFR-binding peptide
  MOD_RES (2)..(3)..(35)..(37): Xaa is C or S

SEQ ID NO: 85978 - protein, 30 aa, Artificial Sequence
  Cyclic GFR-binding peptide
  MOD_RES (29)..(29): Xaa is C or S
QDLSPINILYFVGRTPKVYGKIPMVVKSXK

SEQ ID NO: 85979 - protein, 35 aa, Artificial Sequence; identical to SEQ ID NO: 33421
  Cyclic GFR-binding peptide
  MOD_RES (1)..(2)..(33)..(35): Xaa is C or S

SEQ ID NO: 85980 - protein, 25 aa, Artificial Sequence
  Cyclic GFR-binding peptide
SQDLSPINILYFIGKTPKIYGKIPM

SEQ ID NO: 85981 - protein, 27 aa, Artificial Sequence
  Cyclic GFR-binding peptide
EKMSPINILYFDENKNVVYGKIPNMTV

SEQ ID NO: 85982 - protein, 35 aa, Artificial Sequence; identical to SEQ ID NO: 33422
  Cyclic GFR-binding peptide
  MOD_RES (32)..(34): Xaa is C or S

SEQ ID NO: 85983 - protein, 33 aa, Artificial Sequence
  Cyclic GFR-binding peptide
  MOD_RES (6)..(7): Xaa is C or S
RVPSTXXAPVKTSATSMLYYDNGRVLLLRKHRM

SEQ ID NO: 85984 - protein, 36 aa, Artificial Sequence; identical to SEQ ID NO: 33424
  Cyclic GFR-binding peptide
  MOD_RES (1)..(2)..(34)..(36): Xaa is C or S

SEQ ID NO: 85985 - protein, 36 aa, Artificial Sequence; identical to SEQ ID NO: 33425
  Cyclic GFR-binding peptide
  MOD_RES (1)..(33)..(35): Xaa is C or S

SEQ ID NO: 85986 - protein, 31 aa, Artificial Sequence
  Cyclic GFR-binding peptide
  MOD_RES (29)..(31): Xaa is C or S
KMSPISILYKDENKNVVLKYHYNMTVESXAX

SEQ ID NO: 85987 - protein, 36 aa, Artificial Sequence; identical to SEQ ID NO: 33427
  Cyclic GFR-binding peptide
  MOD_RES (1)..(2)..(34)..(36): Xaa is C or S

SEQ ID NO: 85988 - protein, 38 aa, Artificial Sequence; identical to SEQ ID NO: 33428
  Cyclic GFR-binding peptide
  MOD_RES (4)..(5)..(37): Xaa is C or S

SEQ ID NO: 85989 - protein, 35 aa, Artificial Sequence; identical to SEQ ID NO: 33429
  Cyclic GFR-binding peptide
  MOD_RES (3)..(4): Xaa is C or S

SEQ ID NO: 85990 - protein, 27 aa, Artificial Sequence
  Cyclic GFR-binding peptide
  MOD_RES (1)..(1): Xaa is C or S
XVPEKMSPINILYFDENKNVVYGKIPN

SEQ ID NO: 85991 - protein, 36 aa, Artificial Sequence; identical to SEQ ID NO: 33431
  Cyclic GFR-binding peptide
  MOD_RES (4)..(5)..(36): Xaa is C or S

SEQ ID NO: 85992 - protein, 30 aa, Artificial Sequence
  Cyclic GFR-binding peptide
  MOD_RES (2)..(3): Xaa is C or S
PXXTPTKMEPISMLYLNDKQQIIKFKYEGM

SEQ ID NO: 85993 - protein, 31 aa, Artificial Sequence
  Cyclic GFR-binding peptide
  MOD_RES (2)..(3): Xaa is C or S
TXXVPTRLEPISILYLDSANNVVKFKYEDMV

SEQ ID NO: 85994 - protein, 30 aa, Artificial Sequence
  Cyclic GFR-binding peptide
  MOD_RES (4)..(5): Xaa is C or S
PEPXXVPEKMSPINILYFDENKNVVYGKIP

SEQ ID NO: 85995 - protein, 29 aa, Artificial Sequence
  Cyclic GFR-binding peptide
APVKTSPISMLYKDNGRVLLLKYHYMIVE

SEQ ID NO: 85996 - protein, 31 aa, Artificial Sequence; identical to SEQ ID NO: 33436
  Cyclic GFR-binding peptide
  MOD_RES (31)..(31): Xaa is C or S

SEQ ID NO: 85997 - protein, 37 aa, Artificial Sequence; identical to SEQ ID NO: 33438
  Cyclic GFR-binding peptide
  MOD_RES (3)..(4)..(36): Xaa is C or S

SEQ ID NO: 85998 - protein, 33 aa, Artificial Sequence
  Cyclic GFR-binding peptide
  MOD_RES (4)..(5): Xaa is C or S
PASXXVPARLSATSILYYDAANNVVLRKHRDMV

SEQ ID NO: 85999 - protein, 38 aa, Artificial Sequence; identical to SEQ ID NO: 33440
  Cyclic GFR-binding peptide
  MOD_RES (3)..(4)..(36)..(38): Xaa is C or S

SEQ ID NO: 86000 - protein, 24 aa, Artificial Sequence
  Cyclic GFR-binding peptide
SPISMLYKNDKQQIILKYHYGMVV

SEQ ID NO: 86001 - protein, 23 aa, Artificial Sequence
  Cyclic GFR-binding peptide
EPISMLYLDNGRVLLKFKYEMIV

SEQ ID NO: 86002 - protein, 35 aa, Artificial Sequence; identical to SEQ ID NO: 33447
  Cyclic GFR-binding peptide
  MOD_RES (2)..(3)..(35): Xaa is C or S

SEQ ID NO: 86003 - protein, 28 aa, Artificial Sequence
  Cyclic GFR-binding peptide
  MOD_RES (28)..(28): Xaa is C or S
LSATSILYYDSANNVVLRKHRDMVVESX

SEQ ID NO: 86004 - protein, 29 aa, Artificial Sequence
  Cyclic GFR-binding peptide
  MOD_RES (1)..(1): Xaa is C or S
XAPVKTEPISMLYLDNGRVLLKFKYEMIV

SEQ ID NO: 86005 - protein, 30 aa, Artificial Sequence
  Cyclic GFR-binding peptide
  MOD_RES (29)..(29): Xaa is C or S
VKTSATSMLYYDNGRVLLLRKHRMIVEEXG

SEQ ID NO: 86006 - protein, 30 aa, Artificial Sequence
  Cyclic GFR-binding peptide
  MOD_RES (4)..(5): Xaa is C or S
AAPXXVPQALSPINILYFVGRKPKVYGKIP

SEQ ID NO: 86007 - protein, 37 aa, Artificial Sequence; identical to SEQ ID NO: 33450
  Cyclic GFR-binding peptide
  MOD_RES (6)..(7): Xaa is C or S

SEQ ID NO: 86008 - protein, 25 aa, Artificial Sequence
  Cyclic GFR-binding peptide
SPISMLYKNDKQQIILKYHYGMVVD

SEQ ID NO: 86009 - protein, 40 aa, Artificial Sequence; identical to SEQ ID NO: 33451
  Cyclic GFR-binding peptide
  MOD_RES (6)..(7)..(39): Xaa is C or S

SEQ ID NO: 86010 - protein, 25 aa, Artificial Sequence
  Cyclic GFR-binding peptide
PTRLSPISILYKDSANNVVLKYHYD

SEQ ID NO: 86011 - protein, 33 aa, Artificial Sequence; identical to SEQ ID NO: 33452
  Cyclic GFR-binding peptide
  MOD_RES (31)..(33): Xaa is C or S

SEQ ID NO: 86012 - protein, 26 aa, Artificial Sequence
  Cyclic GFR-binding peptide
  MOD_RES (1)..(1): Xaa is C or S
XVPEKMNAISILYFDENKNVVLKKYR

SEQ ID NO: 86013 - protein, 28 aa, Artificial Sequence
  Cyclic GFR-binding peptide
VPEKMSPISILYKDENKNVVLKYHYNMT

SEQ ID NO: 86014 - protein, 34 aa, Artificial Sequence
  Cyclic GFR-binding peptide
  MOD_RES (31)..(33): Xaa is C or S
PTKMSPISMLYKNDKQQIILKYHYGMVVDRXGXS

SEQ ID NO: 86015 - protein, 25 aa, Artificial Sequence
  Cyclic GFR-binding peptide
RLEPISILYLDSANNVVKFKYEDMV

SEQ ID NO: 86016 - protein, 29 aa, Artificial Sequence
  Cyclic GFR-binding peptide
  MOD_RES (28)..(28): Xaa is C or S
KTSATSMLYYDNGRVLLLRKHRMIVEEXG

SEQ ID NO: 86017 - protein, 37 aa, Artificial Sequence; identical to SEQ ID NO: 33456
  Cyclic GFR-binding peptide
  MOD_RES (5)..(6): Xaa is C or S

SEQ ID NO: 86018 - protein, 31 aa, Artificial Sequence
  Cyclic GFR-binding peptide
  MOD_RES (1)..(2): Xaa is C or S
XXTPTKMSATSMLYYNDKQQIILRKHRGMVV

SEQ ID NO: 86019 - protein, 33 aa, Artificial Sequence
  Cyclic GFR-binding peptide
  MOD_RES (5)..(6): Xaa is C or S
VPSTXXAPVKTSATSMLYYDNGRVLLLRKHRMI

SEQ ID NO: 86020 - protein, 29 aa, Artificial Sequence
  Cyclic GFR-binding peptide
  MOD_RES (1)..(2): Xaa is C or S
XXVPTKLSATSILYYDKGVVTYLRKHRGM

SEQ ID NO: 86021 - protein, 30 aa, Artificial Sequence
  Cyclic GFR-binding peptide
  MOD_RES (30)..(30): Xaa is C or S
TKLSATSILYYDKGVVTYLRKHRGMAVSEX

SEQ ID NO: 86022 - protein, 26 aa, Artificial Sequence
  Cyclic GFR-binding peptide
TSATSMLYYDNGRVLLLRKHRMIVEE

SEQ ID NO: 86023 - protein, 36 aa, Artificial Sequence
  Cyclic GFR-binding peptide
  MOD_RES (6)..(7): Xaa is C or S
RVPSTXXAPVKTSPISMLYKDNGRVLLLKYHYMIVE

SEQ ID NO: 86024 - protein, 30 aa, Artificial Sequence
  Cyclic GFR-binding peptide
  MOD_RES (29)..(29): Xaa is C or S
RLEPISILYLDSANNVVKFKYEDMVVESXG

SEQ ID NO: 86025 - protein, 36 aa, Artificial Sequence; identical to SEQ ID NO: 33461
  Cyclic GFR-binding peptide
  MOD_RES (2)..(3)..(34)..(36): Xaa is C or S

SEQ ID NO: 86026 - protein, 37 aa, Artificial Sequence; identical to SEQ ID NO: 33462
  Cyclic GFR-binding peptide
  MOD_RES (5)..(6): Xaa is C or S

SEQ ID NO: 86027 - protein, 24 aa, Artificial Sequence
  Cyclic GFR-binding peptide
LSATSILYYDKGVVTYLRKHRGMA

SEQ ID NO: 86028 - protein, 34 aa, Artificial Sequence; identical to SEQ ID NO: 33463
  Cyclic GFR-binding peptide
  MOD_RES (32)..(34): Xaa is C or S

SEQ ID NO: 86029 - protein, 41 aa, Artificial Sequence; identical to SEQ ID NO: 33465
  Cyclic GFR-binding peptide
  MOD_RES (6)..(7)..(39)..(41): Xaa is C or S

SEQ ID NO: 86030 - protein, 41 aa, Artificial Sequence; identical to SEQ ID NO: 33467
  Cyclic GFR-binding peptide
  MOD_RES (6)..(7)..(39)..(41): Xaa is C or S

SEQ ID NO: 86031 - protein, 33 aa, Artificial Sequence
  Cyclic GFR-binding peptide
  MOD_RES (3)..(4): Xaa is C or S
EPXXVPEKMSPINILYFDENKNVVYGKIPNMTV

SEQ ID NO: 86032 - protein, 37 aa, Artificial Sequence; identical to SEQ ID NO: 33469
  Cyclic GFR-binding peptide
  MOD_RES (5)..(6): Xaa is C or S

SEQ ID NO: 86033 - protein, 38 aa, Artificial Sequence; identical to SEQ ID NO: 33471
  Cyclic GFR-binding peptide
  MOD_RES (5)..(6)..(38): Xaa is C or S

SEQ ID NO: 86034 - protein, 28 aa, Artificial Sequence
  Cyclic GFR-binding peptide
TRLEPISILYLDSANNVVKFKYEDMVVE

SEQ ID NO: 86035 - protein, 30 aa, Artificial Sequence
  Cyclic GFR-binding peptide
  MOD_RES (1)..(2): Xaa is C or S
XXVSQDLSPINILYFIGKTPKIYGKIPMIV

SEQ ID NO: 86036 - protein, 21 aa, Artificial Sequence
  Cyclic GFR-binding peptide
SATSILYYDAANNVVLRKHRD

SEQ ID NO: 86037 - protein, 36 aa, Artificial Sequence; identical to SEQ ID NO: 33474
  Cyclic GFR-binding peptide
  MOD_RES (5)..(6): Xaa is C or S

SEQ ID NO: 86038 - protein, 30 aa, Artificial Sequence; identical to SEQ ID NO: 33475
  Cyclic GFR-binding peptide

SEQ ID NO: 86039 - protein, 35 aa, Artificial Sequence
  Cyclic GFR-binding peptide
  MOD_RES (6)..(7): Xaa is C or S
ASAAPXXVPQALSPINILYFVGRKPKVYGKIPMIV

SEQ ID NO: 86040 - protein, 36 aa, Artificial Sequence
  Cyclic GFR-binding peptide
  MOD_RES (6)..(7): Xaa is C or S
GSAGPXXTPTKMEPISMLYLNDKQQIIKFKYEGMVV

SEQ ID NO: 86041 - protein, 36 aa, Artificial Sequence; identical to SEQ ID NO: 33476
  Cyclic GFR-binding peptide
  MOD_RES (4)..(5): Xaa is C or S

SEQ ID NO: 86042 - protein, 31 aa, Artificial Sequence; identical to SEQ ID NO: 33477
  Cyclic GFR-binding peptide
  MOD_RES (1)..(1): Xaa is C or S

SEQ ID NO: 86043 - protein, 23 aa, Artificial Sequence
  Cyclic GFR-binding peptide
NAISILYFDENKNVVLKKYRNMT

SEQ ID NO: 86044 - protein, 27 aa, Artificial Sequence
  Cyclic GFR-binding peptide
  MOD_RES (26)..(26): Xaa is C or S
SPINILYFIGKTPKIYGKIPMIVKSXK

SEQ ID NO: 86045 - protein, 27 aa, Artificial Sequence
  Cyclic GFR-binding peptide
  MOD_RES (26)..(26): Xaa is C or S
SATSMLYYDNGRVLLLRKHRMIVEEXG

SEQ ID NO: 86046 - protein, 36 aa, Artificial Sequence; identical to SEQ ID NO: 33480
  Cyclic GFR-binding peptide
  MOD_RES (4)..(5)..(36): Xaa is C or S

SEQ ID NO: 86047 - protein, 29 aa, Artificial Sequence
  Cyclic GFR-binding peptide
  MOD_RES (3)..(4): Xaa is C or S
GPXXTPTKMSATSMLYYNDKQQIILRKHR

SEQ ID NO: 86048 - protein, 26 aa, Artificial Sequence
  Cyclic GFR-binding peptide
PEKMEPISILYLDENKNVVKFKYENM

SEQ ID NO: 86049 - protein, 26 aa, Artificial Sequence
  Cyclic GFR-binding peptide
LSPINILYFVGRKPKVYGKIPMIVRS

SEQ ID NO: 86050 - protein, 30 aa, Artificial Sequence
  Cyclic GFR-binding peptide
  MOD_RES (3)..(4): Xaa is C or S
SPXXVSQDLSPINILYFIGKTPKIYGKIPM

SEQ ID NO: 86051 - protein, 25 aa, Artificial Sequence
  Cyclic GFR-binding peptide
MSPISILYKDENKNVVLKYHYNMTV

SEQ ID NO: 86052 - protein, 32 aa, Artificial Sequence
  Cyclic GFR-binding peptide
  MOD_RES (30)..(32): Xaa is C or S
EKMSPINILYFDENKNVVYGKIPNMTVESXAX

SEQ ID NO: 86053 - protein, 35 aa, Artificial Sequence; identical to SEQ ID NO: 33482
  Cyclic GFR-binding peptide
  MOD_RES (1)..(33)..(35): Xaa is C or S

SEQ ID NO: 86054 - protein, 32 aa, Artificial Sequence
  Cyclic GFR-binding peptide
  MOD_RES (4)..(5): Xaa is C or S
PEPXXVPEKMEPISILYLDENKNVVKFKYENM

SEQ ID NO: 86055 - protein, 34 aa, Artificial Sequence
  Cyclic GFR-binding peptide
  MOD_RES (4)..(5): Xaa is C or S
PEPXXVPEKMSPINILYFDENKNVVYGKIPNMTV

SEQ ID NO: 86056 - protein, 35 aa, Artificial Sequence; identical to SEQ ID NO: 33483
  Cyclic GFR-binding peptide
  MOD_RES (1)..(33)..(35): Xaa is C or S

SEQ ID NO: 86057 - protein, 32 aa, Artificial Sequence
  Cyclic GFR-binding peptide
  MOD_RES (3)..(4): Xaa is C or S
GPXXTPTKMSPISMLYKNDKQQIILKYHYGMV

SEQ ID NO: 86058 - protein, 33 aa, Artificial Sequence
  Cyclic GFR-binding peptide
  MOD_RES (5)..(6): Xaa is C or S
IPEPXXVPEKMSPINILYFDENKNVVYGKIPNM

SEQ ID NO: 86059 - protein, 32 aa, Artificial Sequence
  Cyclic GFR-binding peptide
  MOD_RES (5)..(6): Xaa is C or S
IPEPXXVPEKMEPISILYLDENKNVVKFKYEN

SEQ ID NO: 86060 - protein, 23 aa, Artificial Sequence
  Cyclic GFR-binding peptide
LEPISILYLDSANNVVKFKYEDM

SEQ ID NO: 86061 - protein, 33 aa, Artificial Sequence
  Cyclic GFR-binding peptide
  MOD_RES (4)..(5): Xaa is C or S
PPTXXVPTRLSATSILYYDSANNVVLRKHRDMV

SEQ ID NO: 86062 - protein, 24 aa, Artificial Sequence
  Cyclic GFR-binding peptide
TRLSPISILYKDSANNVVLKYHYD

SEQ ID NO: 86063 - protein, 30 aa, Artificial Sequence
  Cyclic GFR-binding peptide
  MOD_RES (4)..(5): Xaa is C or S
PSTXXAPVKTEPISMLYLDNGRVLLKFKYE

SEQ ID NO: 86064 - protein, 29 aa, Artificial Sequence
  Cyclic GFR-binding peptide
  MOD_RES (28)..(28): Xaa is C or S
LSATSILYYDKGVVTYLRKHRGMAVSEXG

SEQ ID NO: 86065 - protein, 26 aa, Artificial Sequence
  Cyclic GFR-binding peptide
VPTKLSATSILYYDKGVVTYLRKHRG

SEQ ID NO: 86066 - protein, 40 aa, Artificial Sequence; identical to SEQ ID NO: 33490
  Cyclic GFR-binding peptide
  MOD_RES (4)..(5)..(37)..(39): Xaa is C or S

SEQ ID NO: 86067 - protein, 29 aa, Artificial Sequence
  Cyclic GFR-binding peptide
PTRLEPISILYLDSANNVVKFKYEDMVVE

SEQ ID NO: 86068 - protein, 24 aa, Artificial Sequence
  Cyclic GFR-binding peptide
PTKMSPISMLYKNDKQQIILKYHY

SEQ ID NO: 86069 - protein, 21 aa, Artificial Sequence
  Cyclic GFR-binding peptide
LSPINILYFVGRKPKVYGKIP

SEQ ID NO: 86070 - protein, 35 aa, Artificial Sequence; identical to SEQ ID NO: 33498
  Cyclic GFR-binding peptide
  MOD_RES (1)..(2)..(34): Xaa is C or S

SEQ ID NO: 86071 - protein, 28 aa, Artificial Sequence
  Cyclic GFR-binding peptide
  MOD_RES (1)..(1): Xaa is C or S
XVPEKMEPISILYLDENKNVVKFKYENM

SEQ ID NO: 86072 - protein, 23 aa, Artificial Sequence
  Cyclic GFR-binding peptide
EKMSPISILYKDENKNVVLKYHY

SEQ ID NO: 86073 - protein, 24 aa, Artificial Sequence
  Cyclic GFR-binding peptide
RLSATSILYYDAANNVVLRKHRDM

SEQ ID NO: 86074 - protein, 34 aa, Artificial Sequence
  Cyclic GFR-binding peptide
  MOD_RES (6)..(7): Xaa is C or S
HVPKPXXAPTKLSATSVLYYDDSSNVILRKHRNM

SEQ ID NO: 86075 - protein, 35 aa, Artificial Sequence
  Cyclic GFR-binding peptide
  MOD_RES (5)..(6): Xaa is C or S
SASPXXVSQDLSPINILYFIGKTPKIYGKIPMIVK

SEQ ID NO: 86076 - protein, 31 aa, Artificial Sequence
  Cyclic GFR-binding peptide
  MOD_RES (5)..(6): Xaa is C or S
IPEPXXVPEKMEPISILYLDENKNVVKFKYE

SEQ ID NO: 86077 - protein, 21 aa, Artificial Sequence
  Cyclic GFR-binding peptide
SATSMLYYDNGRVLLLRKHRM

SEQ ID NO: 86078 - protein, 42 aa, Artificial Sequence; identical to SEQ ID NO: 33500
  Cyclic GFR-binding peptide
  MOD_RES (6)..(7)..(39)..(41): Xaa is C or S

SEQ ID NO: 86079 - protein, 32 aa, Artificial Sequence
  Cyclic GFR-binding peptide
  MOD_RES (6)..(7): Xaa is C or S
STPPTXXVPTRLSATSILYYDSANNVVLRKHR

SEQ ID NO: 86080 - protein, 29 aa, Artificial Sequence
  Cyclic GFR-binding peptide
  MOD_RES (1)..(1): Xaa is C or S
XVPTKLSATSILYYDKGVVTYLRKHRGMA

SEQ ID NO: 86081 - protein, 25 aa, Artificial Sequence
  Cyclic GFR-binding peptide
VPEKMSATSILYYDENKNVVLRKHR

SEQ ID NO: 86082 - protein, 27 aa, Artificial Sequence
  Cyclic GFR-binding peptide
VPARLSATSILYYDAANNVVLRKHRDM

SEQ ID NO: 86083 - protein, 35 aa, Artificial Sequence; identical to SEQ ID NO: 33502
  Cyclic GFR-binding peptide
  MOD_RES (2)..(3)..(34): Xaa is C or S

SEQ ID NO: 86084 - protein, 25 aa, Artificial Sequence
  Cyclic GFR-binding peptide
PQDLSPINILYFVGRTPKVYGKIPM

SEQ ID NO: 86085 - protein, 34 aa, Artificial Sequence; identical to SEQ ID NO: 33503
  Cyclic GFR-binding peptide
  MOD_RES (2)..(3): Xaa is C or S

SEQ ID NO: 86086 - protein, 36 aa, Artificial Sequence; identical to SEQ ID NO: 33504
  Cyclic GFR-binding peptide
  MOD_RES (5)..(6): Xaa is C or S

SEQ ID NO: 86087 - protein, 29 aa, Artificial Sequence
  Cyclic GFR-binding peptide
  MOD_RES (29)..(29): Xaa is C or S
RLSATSILYYDSANNVVLRKHRDMVVESX

SEQ ID NO: 86088 - protein, 32 aa, Artificial Sequence
  Cyclic GFR-binding peptide
  MOD_RES (6)..(7): Xaa is C or S
GIPEPXXVPEKMNAISILYFDENKNVVLKKYR

SEQ ID NO: 86089 - protein, 24 aa, Artificial Sequence
  Cyclic GFR-binding peptide
PTKMEPISMLYLNDKQQIIKFKYE

SEQ ID NO: 86090 - protein, 29 aa, Artificial Sequence
  Cyclic GFR-binding peptide
  MOD_RES (1)..(2): Xaa is C or S
XXVPARLSATSILYYDAANNVVLRKHRDM

SEQ ID NO: 86091 - protein, 20 aa, Artificial Sequence
  Cyclic GFR-binding peptide
SATSILYYDENKNVVLRKHR

SEQ ID NO: 86092 - protein, 34 aa, Artificial Sequence; identical to SEQ ID NO: 33507
  Cyclic GFR-binding peptide
  MOD_RES (1)..(33): Xaa is C or S

SEQ ID NO: 86093 - protein, 32 aa, Artificial Sequence
  Cyclic GFR-binding peptide
  MOD_RES (30)..(32): Xaa is C or S
TRLSATSILYYDSANNVVLRKHRDMVVESXGX

SEQ ID NO: 86094 - protein, 29 aa, Artificial Sequence
  Cyclic GFR-binding peptide
  MOD_RES (28)..(28): Xaa is C or S
LSATSILYYDAANNVVLRKHRDMVVEAXG

SEQ ID NO: 86095 - protein, 31 aa, Artificial Sequence
  Cyclic GFR-binding peptide
  MOD_RES (4)..(5): Xaa is C or S
ASPXXVSQDLSPINILYFIGKTPKIYGKIPM

SEQ ID NO: 86096 - protein, 38 aa, Artificial Sequence; identical to SEQ ID NO: 33509
  Cyclic GFR-binding peptide
  MOD_RES (3)..(4)..(35)..(37): Xaa is C or S

SEQ ID NO: 86097 - protein, 26 aa, Artificial Sequence
  Cyclic GFR-binding peptide
  MOD_RES (1)..(1): Xaa is C or S
XVPTRLSPISILYKDSANNVVLKYHY

SEQ ID NO: 86098 - protein, 26 aa, Artificial Sequence
  Cyclic GFR-binding peptide
RLEPISILYLDSANNVVKFKYEDMVV

SEQ ID NO: 86099 - protein, 32 aa, Artificial Sequence
  Cyclic GFR-binding peptide
  MOD_RES (30)..(32): Xaa is C or S
PVKTSATSMLYYDNGRVLLLRKHRMIVEEXGX

SEQ ID NO: 86100 - protein, 26 aa, Artificial Sequence
  Cyclic GFR-binding peptide
KTSATSMLYYDNGRVLLLRKHRMIVE

SEQ ID NO: 86101 - protein, 33 aa, Artificial Sequence
  Cyclic GFR-binding peptide
  MOD_RES (4)..(5): Xaa is C or S
PEPXXVPEKMNAISILYFDENKNVVLKKYRNMT

SEQ ID NO: 86102 - protein, 38 aa, Artificial Sequence; identical to SEQ ID NO: 33512
  Cyclic GFR-binding peptide
  MOD_RES (4)..(5)..(37): Xaa is C or S

SEQ ID NO: 86103 - protein, 27 aa, Artificial Sequence
  Cyclic GFR-binding peptide
APVKTSPISMLYKDNGRVLLLKYHYMI

SEQ ID NO: 86104 - protein, 26 aa, Artificial Sequence
  Cyclic GFR-binding peptide
KMSPISMLYKNDKQQIILKYHYGMVV

SEQ ID NO: 86105 - protein, 33 aa, Artificial Sequence
  Cyclic GFR-binding peptide
  MOD_RES (3)..(4): Xaa is C or S
STXXAPVKTSATSMLYYDNGRVLLLRKHRMIVE

SEQ ID NO: 86106 - protein, 40 aa, Artificial Sequence; identical to SEQ ID NO: 33516
  Cyclic GFR-binding peptide
  MOD_RES (4)..(5)..(37)..(39): Xaa is C or S

SEQ ID NO: 86107 - protein, 26 aa, Artificial Sequence
  Cyclic GFR-binding peptide
SATSILYYDAANNVVLRKHRDMVVEA

SEQ ID NO: 86108 - protein, 29 aa, Artificial Sequence
  Cyclic GFR-binding peptide
  MOD_RES (1)..(2): Xaa is C or S
XXVPTRLEPISILYLDSANNVVKFKYEDM

SEQ ID NO: 86109 - protein, 27 aa, Artificial Sequence
  Cyclic GFR-binding peptide
  MOD_RES (1)..(1): Xaa is C or S
XVPTKLSATSILYYDKGVVTYLRKHRG

SEQ ID NO: 86110 - protein, 35 aa, Artificial Sequence; identical to SEQ ID NO: 33518
  Cyclic GFR-binding peptide
  MOD_RES (1)..(33)..(35): Xaa is C or S

SEQ ID NO: 86111 - protein, 31 aa, Artificial Sequence
  Cyclic GFR-binding peptide
  MOD_RES (31)..(31): Xaa is C or S
PTKMSPISMLYKNDKQQIILKYHYGMVVDRX

SEQ ID NO: 86112 - protein, 34 aa, Artificial Sequence
  Cyclic GFR-binding peptide
  MOD_RES (4)..(5): Xaa is C or S
PSTXXAPVKTSATSMLYYDNGRVLLLRKHRMIVE

SEQ ID NO: 86113 - protein, 33 aa, Artificial Sequence
  Cyclic GFR-binding peptide
  MOD_RES (4)..(5): Xaa is C or S
PPTXXVPTRLEPISILYLDSANNVVKFKYEDMV

SEQ ID NO: 86114 - protein, 29 aa, Artificial Sequence
  Cyclic GFR-binding peptide
  MOD_RES (29)..(29): Xaa is C or S
KMSATSMLYYNDKQQIILRKHRGMVVDRX

SEQ ID NO: 86115 - protein, 29 aa, Artificial Sequence
  Cyclic GFR-binding peptide
  MOD_RES (1)..(1): Xaa is C or S
XAPVKTSPISMLYKDNGRVLLLKYHYMIV

SEQ ID NO: 86116 - protein, 33 aa, Artificial Sequence
  Cyclic GFR-binding peptide
  MOD_RES (30)..(32): Xaa is C or S
TRLEPISILYLDSANNVVKFKYEDMVVESXGXR

SEQ ID NO: 86117 - protein, 37 aa, Artificial Sequence; identical to SEQ ID NO: 33519
  Cyclic GFR-binding peptide
  MOD_RES (6)..(7): Xaa is C or S

SEQ ID NO: 86118 - protein, 31 aa, Artificial Sequence
  Cyclic GFR-binding peptide
  MOD_RES (31)..(31): Xaa is C or S
PEKMSPISILYKDENKNVVLKYHYNMTVESX

SEQ ID NO: 86119 - protein, 32 aa, Artificial Sequence
  Cyclic GFR-binding peptide
  MOD_RES (5)..(6): Xaa is C or S
APASXXVPARLSATSILYYDAANNVVLRKHRD

SEQ ID NO: 86120 - protein, 23 aa, Artificial Sequence
  Cyclic GFR-binding peptide
SATSMLYYDNGRVLLLRKHRMIV

SEQ ID NO: 86121 - protein, 26 aa, Artificial Sequence
  Cyclic GFR-binding peptide
QDLSPINILYFIGKTPKIYGKIPMIV

SEQ ID NO: 86122 - protein, 21 aa, Artificial Sequence
  Cyclic GFR-binding peptide
LSATSILYYDKGVVTYLRKHR

SEQ ID NO: 86123 - protein, 29 aa, Artificial Sequence
  Cyclic GFR-binding peptide
VPTRLSPISILYKDSANNVVLKYHYDMVV

SEQ ID NO: 86124 - protein, 29 aa, Artificial Sequence
  Cyclic GFR-binding peptide
  MOD_RES (1)..(1): Xaa is C or S
XAPVKTSATSMLYYDNGRVLLLRKHRMIV

SEQ ID NO: 86125 - protein, 30 aa, Artificial Sequence; identical to SEQ ID NO: 33520
  Cyclic GFR-binding peptide

SEQ ID NO: 86126 - protein, 33 aa, Artificial Sequence
  Cyclic GFR-binding peptide
  MOD_RES (5)..(6): Xaa is C or S
SASPXXVSQDLSPINILYFIGKTPKIYGKIPMI

SEQ ID NO: 86127 - protein, 35 aa, Artificial Sequence; identical to SEQ ID NO: 33521
  Cyclic GFR-binding peptide
  MOD_RES (1)..(2)..(33)..(35): Xaa is C or S

SEQ ID NO: 86128 - protein, 29 aa, Artificial Sequence
  Cyclic GFR-binding peptide
  MOD_RES (28)..(28): Xaa is C or S
MSPINILYFDENKNVVYGKIPNMTVESXA

SEQ ID NO: 86129 - protein, 34 aa, Artificial Sequence; identical to SEQ ID NO: 33523
  Cyclic GFR-binding peptide
  MOD_RES (1)..(2)..(34): Xaa is C or S

SEQ ID NO: 86130 - protein, 21 aa, Artificial Sequence
  Cyclic GFR-binding peptide
TSATSMLYYDNGRVLLLRKHR

SEQ ID NO: 86131 - protein, 28 aa, Artificial Sequence
  Cyclic GFR-binding peptide
  MOD_RES (26)..(28): Xaa is C or S
SATSMLYYDNGRVLLLRKHRMIVEEXGX

SEQ ID NO: 86132 - protein, 27 aa, Artificial Sequence
  Cyclic GFR-binding peptide
  MOD_RES (27)..(27): Xaa is C or S
LSPINILYFIGKTPKIYGKIPMIVKSX

SEQ ID NO: 86133 - protein, 27 aa, Artificial Sequence
  Cyclic GFR-binding peptide
  MOD_RES (26)..(26): Xaa is C or S
EPISMLYLDNGRVLLKFKYEMIVEEXG

SEQ ID NO: 86134 - protein, 38 aa, Artificial Sequence; identical to SEQ ID NO: 33528
  Cyclic GFR-binding peptide
  MOD_RES (2)..(3)..(35)..(37): Xaa is C or S

SEQ ID NO: 86135 - protein, 38 aa, Artificial Sequence; identical to SEQ ID NO: 33529
  Cyclic GFR-binding peptide
  MOD_RES (4)..(5)..(37): Xaa is C or S

SEQ ID NO: 86136 - protein, 34 aa, Artificial Sequence
  Cyclic GFR-binding peptide
  MOD_RES (6)..(7): Xaa is C or S
STPPTXXVPTRLSATSILYYDSANNVVLRKHRDM

SEQ ID NO: 86137 - protein, 31 aa, Artificial Sequence; identical to SEQ ID NO: 33532
  Cyclic GFR-binding peptide

SEQ ID NO: 86138 - protein, 23 aa, Artificial Sequence
  Cyclic GFR-binding peptide
QALSPINILYFVGRKPKVYGKIP

SEQ ID NO: 86139 - protein, 32 aa, Artificial Sequence
  Cyclic GFR-binding peptide
  MOD_RES (31)..(31): Xaa is C or S
PTRLSPISILYKDSANNVVLKYHYDMVVESXG

SEQ ID NO: 86140 - protein, 23 aa, Artificial Sequence
  Cyclic GFR-binding peptide
LSPINILYFIGKTPKIYGKIPMI

SEQ ID NO: 86141 - protein, 27 aa, Artificial Sequence
  Cyclic GFR-binding peptide
  MOD_RES (1)..(1): Xaa is C or S
XVPQALSPINILYFVGRKPKVYGKIPM

SEQ ID NO: 86142 - protein, 30 aa, Artificial Sequence
  Cyclic GFR-binding peptide
PTRLSPISILYKDSANNVVLKYHYDMVVES

SEQ ID NO: 86143 - protein, 20 aa, Artificial Sequence
  Cyclic GFR-binding peptide
EPISILYLDENKNVVKFKYE

SEQ ID NO: 86144 - protein, 32 aa, Artificial Sequence
  Cyclic GFR-binding peptide
  MOD_RES (5)..(6): Xaa is C or S
IPEPXXVPEKMSPISILYKDENKNVVLKYHYN

SEQ ID NO: 86145 - protein, 22 aa, Artificial Sequence
  Cyclic GFR-binding peptide
LEPISILYLDSANNVVKFKYED

SEQ ID NO: 86146 - protein, 37 aa, Artificial Sequence; identical to SEQ ID NO: 33535
  Cyclic GFR-binding peptide
  MOD_RES (4)..(5)..(37): Xaa is C or S

SEQ ID NO: 86147 - protein, 22 aa, Artificial Sequence
  Cyclic GFR-binding peptide
SPISILYKDENKNVVLKYHYNM

SEQ ID NO: 86148 - protein, 33 aa, Artificial Sequence
  Cyclic GFR-binding peptide
  MOD_RES (30)..(32): Xaa is C or S
TKMSPISMLYKNDKQQIILKYHYGMVVDRXGXS

SEQ ID NO: 86149 - protein, 29 aa, Artificial Sequence
  Cyclic GFR-binding peptide
  MOD_RES (29)..(29): Xaa is C or S
RLSPISILYKDSANNVVLKYHYDMVVESX

SEQ ID NO: 86150 - protein, 32 aa, Artificial Sequence; identical to SEQ ID NO: 33537
  Cyclic GFR-binding peptide
  MOD_RES (1)..(1): Xaa is C or S

SEQ ID NO: 86151 - protein, 31 aa, Artificial Sequence
  Cyclic GFR-binding peptide
  MOD_RES (29)..(31): Xaa is C or S
KMSATSILYYDENKNVVLRKHRNMTVESXAX

SEQ ID NO: 86152 - protein, 39 aa, Artificial Sequence; identical to SEQ ID NO: 33538
  Cyclic GFR-binding peptide
  MOD_RES (3)..(4)..(36)..(38): Xaa is C or S

SEQ ID NO: 86153 - protein, 30 aa, Artificial Sequence; identical to SEQ ID NO: 33539
  Cyclic GFR-binding peptide

SEQ ID NO: 86154 - protein, 31 aa, Artificial Sequence
  Cyclic GFR-binding peptide
  MOD_RES (1)..(2): Xaa is C or S
XXVSQDLSPINILYFIGKTPKIYGKIPMIVK

SEQ ID NO: 86155 - protein, 29 aa, Artificial Sequence
  Cyclic GFR-binding peptide
VPEKMSATSILYYDENKNVVLRKHRNMTV

SEQ ID NO: 86156 - protein, 28 aa, Artificial Sequence
  Cyclic GFR-binding peptide
  MOD_RES (28)..(28): Xaa is C or S
DLSPINILYFVGRTPKVYGKIPMVVKSX

SEQ ID NO: 86157 - protein, 32 aa, Artificial Sequence
  Cyclic GFR-binding peptide
  MOD_RES (31)..(31): Xaa is C or S
PARLSATSILYYDAANNVVLRKHRDMVVEAXG

SEQ ID NO: 86158 - protein, 22 aa, Artificial Sequence
  Cyclic GFR-binding peptide
MEPISMLYLNDKQQIIKFKYEG

SEQ ID NO: 86159 - protein, 26 aa, Artificial Sequence
  Cyclic GFR-binding peptide
  MOD_RES (1)..(1): Xaa is C or S
XVPTRLEPISILYLDSANNVVKFKYE

SEQ ID NO: 86160 - protein, 26 aa, Artificial Sequence
  Cyclic GFR-binding peptide
  MOD_RES (26)..(26): Xaa is C or S
SPISMLYKDNGRVLLLKYHYMIVEEX

SEQ ID NO: 86161 - protein, 37 aa, Artificial Sequence; identical to SEQ ID NO: 33541
  Cyclic GFR-binding peptide
  MOD_RES (3)..(4)..(36): Xaa is C or S

SEQ ID NO: 86162 - protein, 30 aa, Artificial Sequence
  Cyclic GFR-binding peptide
  MOD_RES (3)..(4): Xaa is C or S
PTXXVPTRLSATSILYYDSANNVVLRKHRD

SEQ ID NO: 86163 - protein, 21 aa, Artificial Sequence
  Cyclic GFR-binding peptide
SATSILYYDENKNVVLRKHRN

SEQ ID NO: 86164 - protein, 31 aa, Artificial Sequence
  Cyclic GFR-binding peptide
  MOD_RES (1)..(2): Xaa is C or S
XXVPTRLEPISILYLDSANNVVKFKYEDMVV

SEQ ID NO: 86165 - protein, 30 aa, Artificial Sequence
  Cyclic GFR-binding peptide
  MOD_RES (29)..(29): Xaa is C or S
VKTEPISMLYLDNGRVLLKFKYEMIVEEXG

SEQ ID NO: 86166 - protein, 36 aa, Artificial Sequence
  Cyclic GFR-binding peptide
  MOD_RES (6)..(7): Xaa is C or S
RVPSTXXAPVKTSATSMLYYDNGRVLLLRKHRMIVE

SEQ ID NO: 86167 - protein, 38 aa, Artificial Sequence; identical to SEQ ID NO: 33544
  Cyclic GFR-binding peptide
  MOD_RES (6)..(7)..(38): Xaa is C or S

SEQ ID NO: 86168 - protein, 37 aa, Artificial Sequence; identical to SEQ ID NO: 33545
  Cyclic GFR-binding peptide
  MOD_RES (3)..(4)..(36): Xaa is C or S

SEQ ID NO: 86169 - protein, 25 aa, Artificial Sequence
  Cyclic GFR-binding peptide
PTKLSATSILYYDKGVVTYLRKHRG

SEQ ID NO: 86170 - protein, 33 aa, Artificial Sequence; identical to SEQ ID NO: 33546
  Cyclic GFR-binding peptide
  MOD_RES (1)..(2): Xaa is C or S

SEQ ID NO: 86171 - protein, 25 aa, Artificial Sequence
  Cyclic GFR-binding peptide
SATSILYYDAANNVVLRKHRDMVVE

SEQ ID NO: 86172 - protein, 30 aa, Artificial Sequence
  Cyclic GFR-binding peptide
  MOD_RES (29)..(29): Xaa is C or S
RLSATSILYYDAANNVVLRKHRDMVVEAXG

SEQ ID NO: 86173 - protein, 25 aa, Artificial Sequence
  Cyclic GFR-binding peptide
ARLSATSILYYDAANNVVLRKHRDM

SEQ ID NO: 86174 - protein, 27 aa, Artificial Sequence
  Cyclic GFR-binding peptide
KMEPISILYLDENKNVVKFKYENMTVE

SEQ ID NO: 86175 - protein, 41 aa, Artificial Sequence; identical to SEQ ID NO: 33550
  Cyclic GFR-binding peptide
  MOD_RES (6)..(7)..(39)..(41): Xaa is C or S

SEQ ID NO: 86176 - protein, 31 aa, Artificial Sequence
  Cyclic GFR-binding peptide
  MOD_RES (31)..(31): Xaa is C or S
PARLSATSILYYDAANNVVLRKHRDMVVEAX

SEQ ID NO: 86177 - protein, 28 aa, Artificial Sequence
  Cyclic GFR-binding peptide
  MOD_RES (28)..(28): Xaa is C or S
KTEPISMLYLDNGRVLLKFKYEMIVEEX

SEQ ID NO: 86178 - protein, 35 aa, Artificial Sequence; identical to SEQ ID NO: 21538
  Cyclic GFR-binding peptide
  MOD_RES (32)..(34): Xaa is C or S

SEQ ID NO: 86179 - protein, 34 aa, Artificial Sequence; identical to SEQ ID NO: 33552
  Cyclic GFR-binding peptide
  MOD_RES (3)..(4): Xaa is C or S

SEQ ID NO: 86180 - protein, 35 aa, Artificial Sequence; identical to SEQ ID NO: 33553
  Cyclic GFR-binding peptide
  MOD_RES (2)..(3)..(35): Xaa is C or S

SEQ ID NO: 86181 - protein, 28 aa, Artificial Sequence
  Cyclic GFR-binding peptide
  MOD_RES (28)..(28): Xaa is C or S
LEPISILYLDSANNVVKFKYEDMVVESX

SEQ ID NO: 86182 - protein, 36 aa, Artificial Sequence; identical to SEQ ID NO: 33555
  Cyclic GFR-binding peptide
  MOD_RES (1)..(2)..(34)..(36): Xaa is C or S

SEQ ID NO: 86183 - protein, 31 aa, Artificial Sequence
  Cyclic GFR-binding peptide
  MOD_RES (2)..(3): Xaa is C or S
PXXVPEKMSPINILYFDENKNVVYGKIPNMT

SEQ ID NO: 86184 - protein, 34 aa, Artificial Sequence
  Cyclic GFR-binding peptide
  MOD_RES (4)..(5): Xaa is C or S
PPTXXVPTRLSATSILYYDSANNVVLRKHRDMVV

SEQ ID NO: 86185 - protein, 38 aa, Artificial Sequence; identical to SEQ ID NO: 33556
  Cyclic GFR-binding peptide
  MOD_RES (4)..(5)..(36)..(38): Xaa is C or S

SEQ ID NO: 86186 - protein, 30 aa, Artificial Sequence
  Cyclic GFR-binding peptide
  MOD_RES (4)..(5): Xaa is C or S
ASPXXVSQDLSPINILYFIGKTPKIYGKIP

SEQ ID NO: 86187 - protein, 36 aa, Artificial Sequence; identical to SEQ ID NO: 33560
  Cyclic GFR-binding peptide
  MOD_RES (1)..(33)..(35): Xaa is C or S

SEQ ID NO: 86188 - protein, 33 aa, Artificial Sequence; identical to SEQ ID NO: 33561
  Cyclic GFR-binding peptide
  MOD_RES (2)..(3): Xaa is C or S

SEQ ID NO: 86189 - protein, 34 aa, Artificial Sequence; identical to SEQ ID NO: 33562
  Cyclic GFR-binding peptide
  MOD_RES (1)..(33): Xaa is C or S

SEQ ID NO: 86190 - protein, 37 aa, Artificial Sequence; identical to SEQ ID NO: 33563
  Cyclic GFR-binding peptide
  MOD_RES (5)..(6): Xaa is C or S

SEQ ID NO: 86191 - protein, 30 aa, Artificial Sequence
  Cyclic GFR-binding peptide
  MOD_RES (1)..(1): Xaa is C or S
XVPTKLSATSILYYDKGVVTYLRKHRGMAV

SEQ ID NO: 86192 - protein, 35 aa, Artificial Sequence; identical to SEQ ID NO: 33564
  Cyclic GFR-binding peptide
  MOD_RES (3)..(4): Xaa is C or S

SEQ ID NO: 86193 - protein, 36 aa, Artificial Sequence; identical to SEQ ID NO: 33565
  Cyclic GFR-binding peptide
  MOD_RES (3)..(4)..(36): Xaa is C or S

SEQ ID NO: 86194 - protein, 24 aa, Artificial Sequence
  Cyclic GFR-binding peptide
TKLSATSILYYDKGVVTYLRKHRG

SEQ ID NO: 86195 - protein, 24 aa, Artificial Sequence
  Cyclic GFR-binding peptide
EKMSPINILYFDENKNVVYGKIPN

SEQ ID NO: 86196 - protein, 30 aa, Artificial Sequence
  Cyclic GFR-binding peptide
  MOD_RES (29)..(29): Xaa is C or S
RLSPISILYKDSANNVVLKYHYDMVVESXG

SEQ ID NO: 86197 - protein, 32 aa, Artificial Sequence
  Cyclic GFR-binding peptide
  MOD_RES (29)..(31): Xaa is C or S
KMSATSILYYDENKNVVLRKHRNMTVESXAXR

SEQ ID NO: 86198 - protein, 24 aa, Artificial Sequence
  Cyclic GFR-binding peptide
KLSATSILYYDKGVVTYLRKHRGM

SEQ ID NO: 86199 - protein, 34 aa, Artificial Sequence; identical to SEQ ID NO: 33566
  Cyclic GFR-binding peptide
  MOD_RES (1)..(2)..(33): Xaa is C or S

SEQ ID NO: 86200 - protein, 22 aa, Artificial Sequence
  Cyclic GFR-binding peptide
MSPISMLYKNDKQQIILKYHYG

SEQ ID NO: 86201 - protein, 27 aa, Artificial Sequence
  Cyclic GFR-binding peptide
  MOD_RES (26)..(26): Xaa is C or S
SPINILYFVGRTPKVYGKIPMVVKSXK

SEQ ID NO: 86202 - protein, 23 aa, Artificial Sequence
  Cyclic GFR-binding peptide
QDLSPINILYFIGKTPKIYGKIP

SEQ ID NO: 86203 - protein, 28 aa, Artificial Sequence
  Cyclic GFR-binding peptide
  MOD_RES (2)..(3): Xaa is C or S
AXXVPTKLSATSILYYDKGVVTYLRKHR

SEQ ID NO: 86204 - protein, 33 aa, Artificial Sequence; identical to SEQ ID NO: 33569
  Cyclic GFR-binding peptide
  MOD_RES (1)..(2): Xaa is C or S

SEQ ID NO: 86205 - protein, 34 aa, Artificial Sequence; identical to SEQ ID NO: 33570
  Cyclic GFR-binding peptide
  MOD_RES (1)..(33): Xaa is C or S

SEQ ID NO: 86206 - protein, 30 aa, Artificial Sequence
  Cyclic GFR-binding peptide
  MOD_RES (28)..(30): Xaa is C or S
LSATSILYYDAANNVVLRKHRDMVVEAXGX

SEQ ID NO: 86207 - protein, 23 aa, Artificial Sequence
  Cyclic GFR-binding peptide
MSATSILYYDENKNVVLRKHRNM

SEQ ID NO: 86208 - protein, 26 aa, Artificial Sequence
  Cyclic GFR-binding peptide
PTKMSPISMLYKNDKQQIILKYHYGM

SEQ ID NO: 86209 - protein, 35 aa, Artificial Sequence; identical to SEQ ID NO: 33572
  Cyclic GFR-binding peptide
  MOD_RES (32)..(34): Xaa is C or S

SEQ ID NO: 86210 - protein, 31 aa, Artificial Sequence
  Cyclic GFR-binding peptide
  MOD_RES (3)..(4): Xaa is C or S
STXXAPVKTSATSMLYYDNGRVLLLRKHRMI

SEQ ID NO: 86211 - protein, 34 aa, Artificial Sequence; identical to SEQ ID NO: 33573
  Cyclic GFR-binding peptide
  MOD_RES (1)..(33): Xaa is C or S

SEQ ID NO: 86212 - protein, 25 aa, Artificial Sequence
  Cyclic GFR-binding peptide
PEKMSPINILYFDENKNVVYGKIPN

SEQ ID NO: 86213 - protein, 30 aa, Artificial Sequence
  Cyclic GFR-binding peptide
  MOD_RES (27)..(29): Xaa is C or S
SATSILYYDENKNVVLRKHRNMTVESXAXR

SEQ ID NO: 86214 - protein, 39 aa, Artificial Sequence; identical to SEQ ID NO: 33575
  Cyclic GFR-binding peptide
  MOD_RES (4)..(5)..(37)..(39): Xaa is C or S

SEQ ID NO: 86215 - protein, 32 aa, Artificial Sequence; identical to SEQ ID NO: 33576
  Cyclic GFR-binding peptide
  MOD_RES (1)..(2): Xaa is C or S

SEQ ID NO: 86216 - protein, 29 aa, Artificial Sequence
  Cyclic GFR-binding peptide
  MOD_RES (28)..(28): Xaa is C or S
KTEPISMLYLDNGRVLLKFKYEMIVEEXG

SEQ ID NO: 86217 - protein, 23 aa, Artificial Sequence
  Cyclic GFR-binding peptide
MSPISILYKDENKNVVLKYHYNM

SEQ ID NO: 86218 - protein, 38 aa, Artificial Sequence; identical to SEQ ID NO: 33578
  Cyclic GFR-binding peptide
  MOD_RES (2)..(3)..(35)..(37): Xaa is C or S

SEQ ID NO: 86219 - protein, 37 aa, Artificial Sequence; identical to SEQ ID NO: 33579
  Cyclic GFR-binding peptide
  MOD_RES (1)..(2)..(34)..(36): Xaa is C or S

SEQ ID NO: 86220 - protein, 22 aa, Artificial Sequence
  Cyclic GFR-binding peptide
KTSATSMLYYDNGRVLLLRKHR

SEQ ID NO: 86221 - protein, 32 aa, Artificial Sequence; identical to SEQ ID NO: 33580
  Cyclic GFR-binding peptide
  MOD_RES (1)..(32): Xaa is C or S

SEQ ID NO: 86222 - protein, 27 aa, Artificial Sequence
  Cyclic GFR-binding peptide
EKMEPISILYLDENKNVVKFKYENMTV

SEQ ID NO: 86223 - protein, 20 aa, Artificial Sequence
  Cyclic GFR-binding peptide
SPINILYFIGKTPKIYGKIP

SEQ ID NO: 86224 - protein, 30 aa, Artificial Sequence; identical to SEQ ID NO: 878
  Cyclic GFR-binding peptide

SEQ ID NO: 86225 - protein, 33 aa, Artificial Sequence
  Cyclic GFR-binding peptide
  MOD_RES (4)..(5): Xaa is C or S
AAPXXVPQALSPINILYFVGRKPKVYGKIPMIV

SEQ ID NO: 86226 - protein, 22 aa, Artificial Sequence
  Cyclic GFR-binding peptide
SPINILYFIGKTPKIYGKIPMI

SEQ ID NO: 86227 - protein, 34 aa, Artificial Sequence; identical to SEQ ID NO: 33587
  Cyclic GFR-binding peptide
  MOD_RES (3)..(4): Xaa is C or S

SEQ ID NO: 86228 - protein, 27 aa, Artificial Sequence
  Cyclic GFR-binding peptide
KMSATSMLYYNDKQQIILRKHRGMVVD

SEQ ID NO: 86229 - protein, 40 aa, Artificial Sequence; identical to SEQ ID NO: 33590
  Cyclic GFR-binding peptide
  MOD_RES (6)..(7)..(39): Xaa is C or S

SEQ ID NO: 86230 - protein, 30 aa, Artificial Sequence
  Cyclic GFR-binding peptide
  MOD_RES (1)..(2): Xaa is C or S
XXAPVKTSPISMLYKDNGRVLLLKYHYMIV

SEQ ID NO: 86231 - protein, 31 aa, Artificial Sequence
  Cyclic GFR-binding peptide
  MOD_RES (30)..(30): Xaa is C or S
TKMSPISMLYKNDKQQIILKYHYGMVVDRXG

SEQ ID NO: 86232 - protein, 28 aa, Artificial Sequence
  Cyclic GFR-binding peptide
VPQDLSPINILYFVGRTPKVYGKIPMVV

SEQ ID NO: 86233 - protein, 31 aa, Artificial Sequence
  Cyclic GFR-binding peptide
  MOD_RES (28)..(30): Xaa is C or S
LSPISILYKDSANNVVLKYHYDMVVESXGXR

SEQ ID NO: 86234 - protein, 30 aa, Artificial Sequence
  Cyclic GFR-binding peptide
  MOD_RES (29)..(29): Xaa is C or S
VKTSPISMLYKDNGRVLLLKYHYMIVEEXG

SEQ ID NO: 86235 - protein, 24 aa, Artificial Sequence
  Cyclic GFR-binding peptide
TSATSMLYYDNGRVLLLRKHRMIV

SEQ ID NO: 86236 - protein, 23 aa, Artificial Sequence
  Cyclic GFR-binding peptide
ALSPINILYFVGRKPKVYGKIPM

SEQ ID NO: 86237 - protein, 28 aa, Artificial Sequence
  Cyclic GFR-binding peptide
PTKLSATSILYYDKGVVTYLRKHRGMAV

SEQ ID NO: 86238 - protein, 31 aa, Artificial Sequence
  Cyclic GFR-binding peptide
  MOD_RES (5)..(6): Xaa is C or S
TPPTXXVPTRLSATSILYYDSANNVVLRKHR

SEQ ID NO: 86239 - protein, 40 aa, Artificial Sequence; identical to SEQ ID NO: 33594
  Cyclic GFR-binding peptide
  MOD_RES (5)..(6)..(37)..(39): Xaa is C or S

SEQ ID NO: 86240 - protein, 38 aa, Artificial Sequence; identical to SEQ ID NO: 33598
  Cyclic GFR-binding peptide
  MOD_RES (4)..(5)..(37): Xaa is C or S

SEQ ID NO: 86241 - protein, 22 aa, Artificial Sequence
  Cyclic GFR-binding peptide
SATSMLYYDNGRVLLLRKHRMI

SEQ ID NO: 86242 - protein, 22 aa, Artificial Sequence
  Cyclic GFR-binding peptide
KMSPISILYKDENKNVVLKYHY

SEQ ID NO: 86243 - protein, 22 aa, Artificial Sequence
  Cyclic GFR-binding peptide
SPISMLYKDNGRVLLLKYHYMI

SEQ ID NO: 86244 - protein, 29 aa, Artificial Sequence
  Cyclic GFR-binding peptide
  MOD_RES (1)..(2): Xaa is C or S
XXAPVKTSPISMLYKDNGRVLLLKYHYMI

SEQ ID NO: 86245 - protein, 36 aa, Artificial Sequence; identical to SEQ ID NO: 33601
  Cyclic GFR-binding peptide
  MOD_RES (3)..(4)..(35): Xaa is C or S

SEQ ID NO: 86246 - protein, 31 aa, Artificial Sequence; identical to SEQ ID NO: 33605
  Cyclic GFR-binding peptide

SEQ ID NO: 86247 - protein, 26 aa, Artificial Sequence
  Cyclic GFR-binding peptide
VPEKMSPINILYFDENKNVVYGKIPN

SEQ ID NO: 86248 - protein, 27 aa, Artificial Sequence
  Cyclic GFR-binding peptide
  MOD_RES (1)..(2): Xaa is C or S
XXVPTRLSATSILYYDSANNVVLRKHR

SEQ ID NO: 86249 - protein, 23 aa, Artificial Sequence
  Cyclic GFR-binding peptide
VKTSPISMLYKDNGRVLLLKYHY

SEQ ID NO: 86250 - protein, 39 aa, Artificial Sequence; identical to SEQ ID NO: 33606
  Cyclic GFR-binding peptide
  MOD_RES (5)..(6)..(38): Xaa is C or S

SEQ ID NO: 86251 - protein, 35 aa, Artificial Sequence
  Cyclic GFR-binding peptide
  MOD_RES (5)..(6): Xaa is C or S
IPEPXXVPEKMSPINILYFDENKNVVYGKIPNMTV

SEQ ID NO: 86252 - protein, 27 aa, Artificial Sequence
  Cyclic GFR-binding peptide
VPTRLEPISILYLDSANNVVKFKYEDM

SEQ ID NO: 86253 - protein, 28 aa, Artificial Sequence
  Cyclic GFR-binding peptide
  MOD_RES (2)..(3): Xaa is C or S
TXXVPTRLEPISILYLDSANNVVKFKYE

SEQ ID NO: 86254 - protein, 25 aa, Artificial Sequence
  Cyclic GFR-binding peptide
TSATSMLYYDNGRVLLLRKHRMIVE

SEQ ID NO: 86255 - protein, 25 aa, Artificial Sequence
  Cyclic GFR-binding peptide
KTEPISMLYLDNGRVLLKFKYEMIV

SEQ ID NO: 86256 - protein, 41 aa, Artificial Sequence; identical to SEQ ID NO: 33608
  Cyclic GFR-binding peptide
  MOD_RES (6)..(7)..(38)..(40): Xaa is C or S

SEQ ID NO: 86257 - protein, 31 aa, Artificial Sequence
  Cyclic GFR-binding peptide
  MOD_RES (29)..(31): Xaa is C or S
VKTSATSMLYYDNGRVLLLRKHRMIVEEXGX

SEQ ID NO: 86258 - protein, 26 aa, Artificial Sequence
  Cyclic GFR-binding peptide
LSPINILYFIGKTPKIYGKIPMIVKS

SEQ ID NO: 86259 - protein, 35 aa, Artificial Sequence
  Cyclic GFR-binding peptide
  MOD_RES (5)..(6): Xaa is C or S
SAGPXXTPTKMEPISMLYLNDKQQIIKFKYEGMVV

SEQ ID NO: 86260 - protein, 32 aa, Artificial Sequence; identical to SEQ ID NO: 33610
  Cyclic GFR-binding peptide
  MOD_RES (32)..(32): Xaa is C or S

SEQ ID NO: 86261 - protein, 26 aa, Artificial Sequence
  Cyclic GFR-binding peptide
  MOD_RES (26)..(26): Xaa is C or S
EPISMLYLDNGRVLLKFKYEMIVEEX

SEQ ID NO: 86262 - protein, 31 aa, Artificial Sequence
  Cyclic GFR-binding peptide
  MOD_RES (5)..(6): Xaa is C or S
IPEPXXVPEKMSPINILYFDENKNVVYGKIP

SEQ ID NO: 86263 - protein, 26 aa, Artificial Sequence
  Cyclic GFR-binding peptide
KLSATSILYYDKGVVTYLRKHRGMAV

SEQ ID NO: 86264 - protein, 20 aa, Artificial Sequence
  Cyclic GFR-binding peptide
SPINILYFVGRTPKVYGKIP

SEQ ID NO: 86265 - protein, 37 aa, Artificial Sequence; identical to SEQ ID NO: 33613
  Cyclic GFR-binding peptide
  MOD_RES (5)..(6): Xaa is C or S

SEQ ID NO: 86266 - protein, 23 aa, Artificial Sequence
  Cyclic GFR-binding peptide
SATSILYYDAANNVVLRKHRDMV

SEQ ID NO: 86267 - protein, 27 aa, Artificial Sequence
  Cyclic GFR-binding peptide
VPEKMSPISILYKDENKNVVLKYHYNM

SEQ ID NO: 86268 - protein, 33 aa, Artificial Sequence; identical to SEQ ID NO: 33614
  Cyclic GFR-binding peptide
  MOD_RES (1)..(32): Xaa is C or S

SEQ ID NO: 86269 - protein, 27 aa, Artificial Sequence
  Cyclic GFR-binding peptide
KMSATSILYYDENKNVVLRKHRNMTVE

SEQ ID NO: 86270 - protein, 27 aa, Artificial Sequence
  Cyclic GFR-binding peptide
TRLSPISILYKDSANNVVLKYHYDMVV

SEQ ID NO: 86271 - protein, 36 aa, Artificial Sequence; identical to SEQ ID NO: 33617
  Cyclic GFR-binding peptide
  MOD_RES (5)..(6): Xaa is C or S

SEQ ID NO: 86272 - protein, 31 aa, Artificial Sequence; identical to SEQ ID NO: 33618
  Cyclic GFR-binding peptide

SEQ ID NO: 86273 - protein, 37 aa, Artificial Sequence; identical to SEQ ID NO: 33619
  Cyclic GFR-binding peptide
  MOD_RES (4)..(5)..(37): Xaa is C or S

SEQ ID NO: 86274 - protein, 39 aa, Artificial Sequence; identical to SEQ ID NO: 33620
  Cyclic GFR-binding peptide
  MOD_RES (5)..(6)..(38): Xaa is C or S

SEQ ID NO: 86275 - protein, 33 aa, Artificial Sequence
  Cyclic GFR-binding peptide
  MOD_RES (30)..(32): Xaa is C or S
PQDLSPINILYFVGRTPKVYGKIPMVVKSXKXS

SEQ ID NO: 86276 - protein, 36 aa, Artificial Sequence; identical to SEQ ID NO: 33624
  Cyclic GFR-binding peptide
  MOD_RES (4)..(5)..(36): Xaa is C or S

SEQ ID NO: 86277 - protein, 33 aa, Artificial Sequence; identical to SEQ ID NO: 33626
  Cyclic GFR-binding peptide
  MOD_RES (1)..(33): Xaa is C or S

SEQ ID NO: 86278 - protein, 37 aa, Artificial Sequence; identical to SEQ ID NO: 33627
  Cyclic GFR-binding peptide
  MOD_RES (6)..(7): Xaa is C or S

SEQ ID NO: 86279 - protein, 25 aa, Artificial Sequence
  Cyclic GFR-binding peptide
EKMSPINILYFDENKNVVYGKIPNM

SEQ ID NO: 86280 - protein, 28 aa, Artificial Sequence
  Cyclic GFR-binding peptide
VKTSATSMLYYDNGRVLLLRKHRMIVEE

SEQ ID NO: 86281 - protein, 42 aa, Artificial Sequence; identical to SEQ ID NO: 33629
  Cyclic GFR-binding peptide
  MOD_RES (6)..(7)..(39)..(41): Xaa is C or S

SEQ ID NO: 86282 - protein, 25 aa, Artificial Sequence
  Cyclic GFR-binding peptide
TPTKMSATSMLYYNDKQQIILRKHR

SEQ ID NO: 86283 - protein, 25 aa, Artificial Sequence
  Cyclic GFR-binding peptide
SATSMLYYNDKQQIILRKHRGMVVD

SEQ ID NO: 86284 - protein, 25 aa, Artificial Sequence
  Cyclic GFR-binding peptide
SATSILYYDSANNVVLRKHRDMVVE

SEQ ID NO: 86285 - protein, 34 aa, Artificial Sequence
  Cyclic GFR-binding peptide
  MOD_RES (4)..(5): Xaa is C or S
PEPXXVPEKMEPISILYLDENKNVVKFKYENMTV

SEQ ID NO: 86286 - protein, 36 aa, Artificial Sequence; identical to SEQ ID NO: 33632
  Cyclic GFR-binding peptide
  MOD_RES (4)..(5): Xaa is C or S

SEQ ID NO: 86287 - protein, 31 aa, Artificial Sequence
  Cyclic GFR-binding peptide
  MOD_RES (1)..(2): Xaa is C or S
XXVPEKMNAISILYFDENKNVVLKKYRNMTV

SEQ ID NO: 86288 - protein, 32 aa, Artificial Sequence
  Cyclic GFR-binding peptide
  MOD_RES (4)..(5): Xaa is C or S
ASPXXVPQDLSPINILYFVGRTPKVYGKIPMV

SEQ ID NO: 86289 - protein, 27 aa, Artificial Sequence
  Cyclic GFR-binding peptide
  MOD_RES (27)..(27): Xaa is C or S
NAISILYFDENKNVVLKKYRNMTVESX

SEQ ID NO: 86290 - protein, 37 aa, Artificial Sequence; identical to SEQ ID NO: 33633
  Cyclic GFR-binding peptide
  MOD_RES (2)..(3)..(35)..(37): Xaa is C or S

SEQ ID NO: 86291 - protein, 32 aa, Artificial Sequence
  Cyclic GFR-binding peptide
  MOD_RES (5)..(6): Xaa is C or S
SASPXXVPQDLSPINILYFVGRTPKVYGKIPM

SEQ ID NO: 86292 - protein, 37 aa, Artificial Sequence; identical to SEQ ID NO: 33634
  Cyclic GFR-binding peptide
  MOD_RES (4)..(5)..(36): Xaa is C or S

SEQ ID NO: 86293 - protein, 23 aa, Artificial Sequence
  Cyclic GFR-binding peptide
KTSPISMLYKDNGRVLLLKYHYM

SEQ ID NO: 86294 - protein, 35 aa, Artificial Sequence; identical to SEQ ID NO: 33636
  Cyclic GFR-binding peptide
  MOD_RES (4)..(5): Xaa is C or S

SEQ ID NO: 86295 - protein, 32 aa, Artificial Sequence; identical to SEQ ID NO: 33637
  Cyclic GFR-binding peptide
  MOD_RES (31)..(31): Xaa is C or S

SEQ ID NO: 86296 - protein, 33 aa, Artificial Sequence
  Cyclic GFR-binding peptide
  MOD_RES (5)..(6): Xaa is C or S
VPSTXXAPVKTSPISMLYKDNGRVLLLKYHYMI

SEQ ID NO: 86297 - protein, 34 aa, Artificial Sequence
  Cyclic GFR-binding peptide
  MOD_RES (6)..(7): Xaa is C or S
ASASPXXVSQDLSPINILYFIGKTPKIYGKIPMI

SEQ ID NO: 86298 - protein, 33 aa, Artificial Sequence; identical to SEQ ID NO: 33641
  Cyclic GFR-binding peptide
  MOD_RES (2)..(3): Xaa is C or S

SEQ ID NO: 86299 - protein, 39 aa, Artificial Sequence; identical to SEQ ID NO: 33642
  Cyclic GFR-binding peptide
  MOD_RES (3)..(4)..(36)..(38): Xaa is C or S

SEQ ID NO: 86300 - protein, 27 aa, Artificial Sequence
  Cyclic GFR-binding peptide
VPEKMSATSILYYDENKNVVLRKHRNM

SEQ ID NO: 86301 - protein, 36 aa, Artificial Sequence; identical to SEQ ID NO: 33643
  Cyclic GFR-binding peptide
  MOD_RES (2)..(3)..(35): Xaa is C or S

SEQ ID NO: 86302 - protein, 34 aa, Artificial Sequence
  Cyclic GFR-binding peptide
  MOD_RES (5)..(6): Xaa is C or S
VPSTXXAPVKTEPISMLYLDNGRVLLKFKYEMIV

SEQ ID NO: 86303 - protein, 35 aa, Artificial Sequence; identical to SEQ ID NO: 33644
  Cyclic GFR-binding peptide
  MOD_RES (3)..(4)..(35): Xaa is C or S

SEQ ID NO: 86304 - protein, 29 aa, Artificial Sequence
  Cyclic GFR-binding peptide
APVKTSATSMLYYDNGRVLLLRKHRMIVE

SEQ ID NO: 86305 - protein, 33 aa, Artificial Sequence
  Cyclic GFR-binding peptide
  MOD_RES (6)..(7): Xaa is C or S
GIPEPXXVPEKMSATSILYYDENKNVVLRKHRN

SEQ ID NO: 86306 - protein, 29 aa, Artificial Sequence
  Cyclic GFR-binding peptide
  MOD_RES (27)..(29): Xaa is C or S
SATSILYYDSANNVVLRKHRDMVVESXGX

SEQ ID NO: 86307 - protein, 24 aa, Artificial Sequence
  Cyclic GFR-binding peptide
TEPISMLYLDNGRVLLKFKYEMIV

SEQ ID NO: 86308 - protein, 35 aa, Artificial Sequence; identical to SEQ ID NO: 33649
  Cyclic GFR-binding peptide
  MOD_RES (4)..(5): Xaa is C or S

SEQ ID NO: 86309 - protein, 40 aa, Artificial Sequence; identical to SEQ ID NO: 33650
  Cyclic GFR-binding peptide
  MOD_RES (6)..(7)..(38)..(40): Xaa is C or S

SEQ ID NO: 86310 - protein, 32 aa, Artificial Sequence
  Cyclic GFR-binding peptide
  MOD_RES (3)..(4): Xaa is C or S
ASXXVPARLSATSILYYDAANNVVLRKHRDMV

SEQ ID NO: 86311 - protein, 27 aa, Artificial Sequence
  Cyclic GFR-binding peptide
  MOD_RES (27)..(27): Xaa is C or S
SATSILYYDAANNVVLRKHRDMVVEAX

SEQ ID NO: 86312 - protein, 36 aa, Artificial Sequence
  Cyclic GFR-binding peptide
  MOD_RES (6)..(7): Xaa is C or S
GIPEPXXVPEKMSATSILYYDENKNVVLRKHRNMTV

SEQ ID NO: 86313 - protein, 33 aa, Artificial Sequence
  Cyclic GFR-binding peptide
  MOD_RES (6)..(7): Xaa is C or S
STPPTXXVPTRLSATSILYYDSANNVVLRKHRD

SEQ ID NO: 86314 - protein, 40 aa, Artificial Sequence; identical to SEQ ID NO: 33653
  Cyclic GFR-binding peptide
  MOD_RES (6)..(7)..(38)..(40): Xaa is C or S

SEQ ID NO: 86315 - protein, 23 aa, Artificial Sequence
  Cyclic GFR-binding peptide
EKMSPINILYFDENKNVVYGKIP

SEQ ID NO: 86316 - protein, 31 aa, Artificial Sequence
  Cyclic GFR-binding peptide
  MOD_RES (30)..(30): Xaa is C or S
SQDLSPINILYFIGKTPKIYGKIPMIVKSXK

SEQ ID NO: 86317 - protein, 31 aa, Artificial Sequence
  Cyclic GFR-binding peptide
  MOD_RES (4)..(5): Xaa is C or S
ASPXXVPQDLSPINILYFVGRTPKVYGKIPM

SEQ ID NO: 86318 - protein, 34 aa, Artificial Sequence; identical to SEQ ID NO: 33660
  Cyclic GFR-binding peptide
  MOD_RES (3)..(4): Xaa is C or S

SEQ ID NO: 86319 - protein, 34 aa, Artificial Sequence; identical to SEQ ID NO: 33661
  Cyclic GFR-binding peptide
  MOD_RES (1)..(33): Xaa is C or S

SEQ ID NO: 86320 - protein, 36 aa, Artificial Sequence
  Cyclic GFR-binding peptide
  MOD_RES (6)..(7): Xaa is C or S
HVPKPXXAPTKLEPISVLYLDDSSNVIKFKYENMVV

SEQ ID NO: 86321 - protein, 28 aa, Artificial Sequence
  Cyclic GFR-binding peptide
  MOD_RES (1)..(2): Xaa is C or S
XXVPEKMSPISILYKDENKNVVLKYHYN

SEQ ID NO: 86322 - protein, 30 aa, Artificial Sequence
  Cyclic GFR-binding peptide
  MOD_RES (1)..(2): Xaa is C or S
XXVPEKMSPISILYKDENKNVVLKYHYNMT

SEQ ID NO: 86323 - protein, 30 aa, Artificial Sequence
  Cyclic GFR-binding peptide
  MOD_RES (29)..(29): Xaa is C or S
KMSPISMLYKNDKQQIILKYHYGMVVDRXG

SEQ ID NO: 86324 - protein, 27 aa, Artificial Sequence
  Cyclic GFR-binding peptide
KMSPISILYKDENKNVVLKYHYNMTVE

SEQ ID NO: 86325 - protein, 32 aa, Artificial Sequence
  Cyclic GFR-binding peptide
  MOD_RES (6)..(7): Xaa is C or S
RVPSTXXAPVKTSATSMLYYDNGRVLLLRKHR

SEQ ID NO: 86326 - protein, 33 aa, Artificial Sequence; identical to SEQ ID NO: 33666
  Cyclic GFR-binding peptide
  MOD_RES (1)..(2): Xaa is C or S

SEQ ID NO: 86327 - protein, 28 aa, Artificial Sequence
  Cyclic GFR-binding peptide
  MOD_RES (27)..(27): Xaa is C or S
TEPISMLYLDNGRVLLKFKYEMIVEEXG

SEQ ID NO: 86328 - protein, 34 aa, Artificial Sequence; identical to SEQ ID NO: 33668
  Cyclic GFR-binding peptide
  MOD_RES (1)..(33): Xaa is C or S

SEQ ID NO: 86329 - protein, 26 aa, Artificial Sequence
  Cyclic GFR-binding peptide
TKLSATSILYYDKGVVTYLRKHRGMA

SEQ ID NO: 86330 - protein, 37 aa, Artificial Sequence; identical to SEQ ID NO: 33671
  Cyclic GFR-binding peptide
  MOD_RES (1)..(2)..(34)..(36): Xaa is C or S

SEQ ID NO: 86331 - protein, 36 aa, Artificial Sequence; identical to SEQ ID NO: 33672
  Cyclic GFR-binding peptide
  MOD_RES (3)..(4)..(36): Xaa is C or S

SEQ ID NO: 86332 - protein, 34 aa, Artificial Sequence
  Cyclic GFR-binding peptide
  MOD_RES (5)..(6): Xaa is C or S
IPEPXXVPEKMEPISILYLDENKNVVKFKYENMT

SEQ ID NO: 86333 - protein, 31 aa, Artificial Sequence
  Cyclic GFR-binding peptide
  MOD_RES (29)..(31): Xaa is C or S
VKTEPISMLYLDNGRVLLKFKYEMIVEEXGX

SEQ ID NO: 86334 - protein, 21 aa, Artificial Sequence
  Cyclic GFR-binding peptide
LSPINILYFVGRTPKVYGKIP

SEQ ID NO: 86335 - protein, 35 aa, Artificial Sequence; identical to SEQ ID NO: 33674
  Cyclic GFR-binding peptide
  MOD_RES (1)..(2)..(34): Xaa is C or S

SEQ ID NO: 86336 - protein, 31 aa, Artificial Sequence
  Cyclic GFR-binding peptide
  MOD_RES (2)..(3): Xaa is C or S
PXXVPEKMEPISILYLDENKNVVKFKYENMT

SEQ ID NO: 86337 - protein, 34 aa, Artificial Sequence
  Cyclic GFR-binding peptide
  MOD_RES (5)..(6): Xaa is C or S
VPSTXXAPVKTSATSMLYYDNGRVLLLRKHRMIV

SEQ ID NO: 86338 - protein, 25 aa, Artificial Sequence
  Cyclic GFR-binding peptide
PVKTEPISMLYLDNGRVLLKFKYEM

SEQ ID NO: 86339 - protein, 32 aa, Artificial Sequence
  Cyclic GFR-binding peptide
  MOD_RES (31)..(31): Xaa is C or S
PEKMSPINILYFDENKNVVYGKIPNMTVESXA

SEQ ID NO: 86340 - protein, 41 aa, Artificial Sequence; identical to SEQ ID NO: 33675
  Cyclic GFR-binding peptide
  MOD_RES (6)..(7)..(38)..(40): Xaa is C or S

SEQ ID NO: 86341 - protein, 22 aa, Artificial Sequence
  Cyclic GFR-binding peptide
KMNAISILYFDENKNVVLKKYR

SEQ ID NO: 86342 - protein, 26 aa, Artificial Sequence
  Cyclic GFR-binding peptide
PQALSPINILYFVGRKPKVYGKIPMI

SEQ ID NO: 86343 - protein, 21 aa, Artificial Sequence
  Cyclic GFR-binding peptide
EPISMLYLNDKQQIIKFKYEG

SEQ ID NO: 86344 - protein, 25 aa, Artificial Sequence
  Cyclic GFR-binding peptide
KTSATSMLYYDNGRVLLLRKHRMIV

SEQ ID NO: 86345 - protein, 33 aa, Artificial Sequence; identical to SEQ ID NO: 33679
  Cyclic GFR-binding peptide
  MOD_RES (2)..(3): Xaa is C or S

SEQ ID NO: 86346 - protein, 35 aa, Artificial Sequence
  Cyclic GFR-binding peptide
  MOD_RES (6)..(7): Xaa is C or S
GIPEPXXVPEKMSATSILYYDENKNVVLRKHRNMT

SEQ ID NO: 86347 - protein, 28 aa, Artificial Sequence
  Cyclic GFR-binding peptide
  MOD_RES (28)..(28): Xaa is C or S
DLSPINILYFIGKTPKIYGKIPMIVKSX

SEQ ID NO: 86348 - protein, 32 aa, Artificial Sequence
  Cyclic GFR-binding peptide
  MOD_RES (2)..(3): Xaa is C or S
PXXTPTKMSATSMLYYNDKQQIILRKHRGMVV

SEQ ID NO: 86349 - protein, 33 aa, Artificial Sequence
  Cyclic GFR-binding peptide
  MOD_RES (4)..(5): Xaa is C or S
PEPXXVPEKMSPINILYFDENKNVVYGKIPNMT

SEQ ID NO: 86350 - protein, 25 aa, Artificial Sequence
  Cyclic GFR-binding peptide
LSPINILYFVGRKPKVYGKIPMIVR

SEQ ID NO: 86351 - protein, 28 aa, Artificial Sequence
  Cyclic GFR-binding peptide
  MOD_RES (2)..(3): Xaa is C or S
PXXVPEKMSPINILYFDENKNVVYGKIP

SEQ ID NO: 86352 - protein, 31 aa, Artificial Sequence
  Cyclic GFR-binding peptide
  MOD_RES (3)..(4): Xaa is C or S
GPXXTPTKMEPISMLYLNDKQQIIKFKYEGM

SEQ ID NO: 86353 - protein, 33 aa, Artificial Sequence
  Cyclic GFR-binding peptide
  MOD_RES (5)..(6): Xaa is C or S
IPEPXXVPEKMNAISILYFDENKNVVLKKYRNM

SEQ ID NO: 86354 - protein, 40 aa, Artificial Sequence; identical to SEQ ID NO: 33682
  Cyclic GFR-binding peptide
  MOD_RES (4)..(5)..(37)..(39): Xaa is C or S

SEQ ID NO: 86355 - protein, 28 aa, Artificial Sequence
  Cyclic GFR-binding peptide
EKMNAISILYFDENKNVVLKKYRNMTVE

SEQ ID NO: 86356 - protein, 29 aa, Artificial Sequence
  Cyclic GFR-binding peptide
  MOD_RES (28)..(28): Xaa is C or S
DLSPINILYFVGRTPKVYGKIPMVVKSXK

SEQ ID NO: 86357 - protein, 30 aa, Artificial Sequence
  Cyclic GFR-binding peptide
  MOD_RES (29)..(29): Xaa is C or S
QDLSPINILYFIGKTPKIYGKIPMIVKSXK

SEQ ID NO: 86358 - protein, 24 aa, Artificial Sequence
  Cyclic GFR-binding peptide
VKTSPISMLYKDNGRVLLLKYHYM

SEQ ID NO: 86359 - protein, 39 aa, Artificial Sequence; identical to SEQ ID NO: 33686
  Cyclic GFR-binding peptide
  MOD_RES (3)..(4)..(36)..(38): Xaa is C or S

SEQ ID NO: 86360 - protein, 32 aa, Artificial Sequence
  Cyclic GFR-binding peptide
  MOD_RES (6)..(7): Xaa is C or S
GIPEPXXVPEKMSPISILYKDENKNVVLKYHY

SEQ ID NO: 86361 - protein, 36 aa, Artificial Sequence; identical to SEQ ID NO: 33687
  Cyclic GFR-binding peptide
  MOD_RES (2)..(3)..(34)..(36): Xaa is C or S

SEQ ID NO: 86362 - protein, 20 aa, Artificial Sequence
  Cyclic GFR-binding peptide
EPISMLYLDNGRVLLKFKYE

SEQ ID NO: 86363 - protein, 26 aa, Artificial Sequence
  Cyclic GFR-binding peptide
  MOD_RES (1)..(1): Xaa is C or S
XAPVKTSPISMLYKDNGRVLLLKYHY

SEQ ID NO: 86364 - protein, 28 aa, Artificial Sequence
  Cyclic GFR-binding peptide
VKTEPISMLYLDNGRVLLKFKYEMIVEE

SEQ ID NO: 86365 - protein, 28 aa, Artificial Sequence
  Cyclic GFR-binding peptide
  MOD_RES (1)..(2): Xaa is C or S
XXVPEKMEPISILYLDENKNVVKFKYEN

SEQ ID NO: 86366 - protein, 30 aa, Artificial Sequence
  Cyclic GFR-binding peptide
  MOD_RES (28)..(30): Xaa is C or S
MNAISILYFDENKNVVLKKYRNMTVESXAX

SEQ ID NO: 86367 - protein, 35 aa, Artificial Sequence; identical to SEQ ID NO: 33693
  Cyclic GFR-binding peptide
  MOD_RES (1)..(2)..(33)..(35): Xaa is C or S

SEQ ID NO: 86368 - protein, 25 aa, Artificial Sequence
  Cyclic GFR-binding peptide
VPTRLSATSILYYDSANNVVLRKHR

SEQ ID NO: 86369 - protein, 29 aa, Artificial Sequence
  Cyclic GFR-binding peptide
VPQDLSPINILYFVGRTPKVYGKIPMVVK

SEQ ID NO: 86370 - protein, 25 aa, Artificial Sequence
  Cyclic GFR-binding peptide
EPISILYLDSANNVVKFKYEDMVVE

SEQ ID NO: 86371 - protein, 32 aa, Artificial Sequence
  Cyclic GFR-binding peptide
  MOD_RES (6)..(7): Xaa is C or S
GIPEPXXVPEKMEPISILYLDENKNVVKFKYE

SEQ ID NO: 86372 - protein, 25 aa, Artificial Sequence
  Cyclic GFR-binding peptide
PVKTSPISMLYKDNGRVLLLKYHYM

SEQ ID NO: 86373 - protein, 30 aa, Artificial Sequence
  Cyclic GFR-binding peptide
  MOD_RES (1)..(1): Xaa is C or S
XAPVKTEPISMLYLDNGRVLLKFKYEMIVE

SEQ ID NO: 86374 - protein, 23 aa, Artificial Sequence
  Cyclic GFR-binding peptide
MEPISMLYLNDKQQIIKFKYEGM

SEQ ID NO: 86375 - protein, 25 aa, Artificial Sequence
  Cyclic GFR-binding peptide
VKTEPISMLYLDNGRVLLKFKYEMI

SEQ ID NO: 86376 - protein, 26 aa, Artificial Sequence
  Cyclic GFR-binding peptide
  MOD_RES (26)..(26): Xaa is C or S
SPINILYFVGRKPKVYGKIPMIVRSX

SEQ ID NO: 86377 - protein, 29 aa, Artificial Sequence
  Cyclic GFR-binding peptide
  MOD_RES (1)..(2): Xaa is C or S
XXTPTKMSATSMLYYNDKQQIILRKHRGM

SEQ ID NO: 86378 - protein, 37 aa, Artificial Sequence; identical to SEQ ID NO: 33694
  Cyclic GFR-binding peptide
  MOD_RES (2)..(3)..(35)..(37): Xaa is C or S

SEQ ID NO: 86379 - protein, 21 aa, Artificial Sequence
  Cyclic GFR-binding peptide
SPISMLYKNDKQQIILKYHYG

SEQ ID NO: 86380 - protein, 23 aa, Artificial Sequence
  Cyclic GFR-binding peptide
LSPINILYFVGRKPKVYGKIPMI

SEQ ID NO: 86381 - protein, 36 aa, Artificial Sequence; identical to SEQ ID NO: 33695
  Cyclic GFR-binding peptide
  MOD_RES (3)..(4)..(35): Xaa is C or S

SEQ ID NO: 86382 - protein, 36 aa, Artificial Sequence; identical to SEQ ID NO: 33696
  Cyclic GFR-binding peptide
  MOD_RES (4)..(5): Xaa is C or S

SEQ ID NO: 86383 - protein, 37 aa, Artificial Sequence; identical to SEQ ID NO: 33697
  Cyclic GFR-binding peptide
  MOD_RES (4)..(5)..(37): Xaa is C or S

SEQ ID NO: 86384 - protein, 26 aa, Artificial Sequence
  Cyclic GFR-binding peptide
PTRLSPISILYKDSANNVVLKYHYDM

SEQ ID NO: 86385 - protein, 25 aa, Artificial Sequence
  Cyclic GFR-binding peptide
MNAISILYFDENKNVVLKKYRNMTV

SEQ ID NO: 86386 - protein, 33 aa, Artificial Sequence
  Cyclic GFR-binding peptide
  MOD_RES (3)..(4): Xaa is C or S
ASXXVPARLSATSILYYDAANNVVLRKHRDMVV

SEQ ID NO: 86387 - protein, 32 aa, Artificial Sequence; identical to SEQ ID NO: 33698
  Cyclic GFR-binding peptide
  MOD_RES (1)..(2): Xaa is C or S

SEQ ID NO: 86388 - protein, 32 aa, Artificial Sequence
  Cyclic GFR-binding peptide
  MOD_RES (30)..(32): Xaa is C or S
TRLEPISILYLDSANNVVKFKYEDMVVESXGX

SEQ ID NO: 86389 - protein, 28 aa, Artificial Sequence
  Cyclic GFR-binding peptide
EKMSATSILYYDENKNVVLRKHRNMTVE

SEQ ID NO: 86390 - protein, 32 aa, Artificial Sequence
  Cyclic GFR-binding peptide
  MOD_RES (2)..(3): Xaa is C or S
PXXVPEKMSPINILYFDENKNVVYGKIPNMTV

SEQ ID NO: 86391 - protein, 34 aa, Artificial Sequence
  Cyclic GFR-binding peptide
  MOD_RES (6)..(7): Xaa is C or S
HVPKPXXAPTKLSPISVLYKDDSSNVILKYHYNM

SEQ ID NO: 86392 - protein, 26 aa, Artificial Sequence
  Cyclic GFR-binding peptide
KMSPISILYKDENKNVVLKYHYNMTV

SEQ ID NO: 86393 - protein, 36 aa, Artificial Sequence; identical to SEQ ID NO: 33699
  Cyclic GFR-binding peptide
  MOD_RES (5)..(6): Xaa is C or S

SEQ ID NO: 86394 - protein, 33 aa, Artificial Sequence
  Cyclic GFR-binding peptide
  MOD_RES (30)..(32): Xaa is C or S
PVKTSPISMLYKDNGRVLLLKYHYMIVEEXGXL

SEQ ID NO: 86395 - protein, 36 aa, Artificial Sequence; identical to SEQ ID NO: 33702
  Cyclic GFR-binding peptide
  MOD_RES (3)..(4)..(35): Xaa is C or S

SEQ ID NO: 86396 - protein, 32 aa, Artificial Sequence
  Cyclic GFR-binding peptide
  MOD_RES (31)..(31): Xaa is C or S
PTKLSATSILYYDKGVVTYLRKHRGMAVSEXG

SEQ ID NO: 86397 - protein, 31 aa, Artificial Sequence
  Cyclic GFR-binding peptide
  MOD_RES (2)..(3): Xaa is C or S
TXXVPTRLSATSILYYDSANNVVLRKHRDMV

SEQ ID NO: 86398 - protein, 28 aa, Artificial Sequence
  Cyclic GFR-binding peptide
  MOD_RES (28)..(28): Xaa is C or S
MSATSMLYYNDKQQIILRKHRGMVVDRX

SEQ ID NO: 86399 - protein, 27 aa, Artificial Sequence
  Cyclic GFR-binding peptide
PQDLSPINILYFVGRTPKVYGKIPMVV

SEQ ID NO: 86400 - protein, 31 aa, Artificial Sequence
  Cyclic GFR-binding peptide
  MOD_RES (31)..(31): Xaa is C or S
PTRLSATSILYYDSANNVVLRKHRDMVVESX

SEQ ID NO: 86401 - protein, 27 aa, Artificial Sequence
  Cyclic GFR-binding peptide
  MOD_RES (27)..(27): Xaa is C or S
EPISILYLDSANNVVKFKYEDMVVESX

SEQ ID NO: 86402 - protein, 32 aa, Artificial Sequence
  Cyclic GFR-binding peptide
  MOD_RES (5)..(6): Xaa is C or S
SASPXXVSQDLSPINILYFIGKTPKIYGKIPM

SEQ ID NO: 86403 - protein, 30 aa, Artificial Sequence
  Cyclic GFR-binding peptide
PTKMSPISMLYKNDKQQIILKYHYGMVVDR

SEQ ID NO: 86404 - protein, 29 aa, Artificial Sequence
  Cyclic GFR-binding peptide
  MOD_RES (27)..(29): Xaa is C or S
LSPINILYFVGRTPKVYGKIPMVVKSXKX

SEQ ID NO: 86405 - protein, 30 aa, Artificial Sequence
  Cyclic GFR-binding peptide
  MOD_RES (1)..(2): Xaa is C or S
XXVPTKLSATSILYYDKGVVTYLRKHRGMA

SEQ ID NO: 86406 - protein, 36 aa, Artificial Sequence; identical to SEQ ID NO: 33704
  Cyclic GFR-binding peptide
  MOD_RES (3)..(4)..(36): Xaa is C or S

SEQ ID NO: 86407 - protein, 40 aa, Artificial Sequence; identical to SEQ ID NO: 33705
  Cyclic GFR-binding peptide
  MOD_RES (4)..(5)..(37)..(39): Xaa is C or S

SEQ ID NO: 86408 - protein, 28 aa, Artificial Sequence
  Cyclic GFR-binding peptide
TRLSATSILYYDSANNVVLRKHRDMVVE

SEQ ID NO: 86409 - protein, 29 aa, Artificial Sequence
  Cyclic GFR-binding peptide
TKMEPISMLYLNDKQQIIKFKYEGMVVDR

SEQ ID NO: 86410 - protein, 29 aa, Artificial Sequence
  Cyclic GFR-binding peptide
  MOD_RES (29)..(29): Xaa is C or S
VKTEPISMLYLDNGRVLLKFKYEMIVEEX

SEQ ID NO: 86411 - protein, 37 aa, Artificial Sequence; identical to SEQ ID NO: 33707
  Cyclic GFR-binding peptide
  MOD_RES (2)..(3)..(35)..(37): Xaa is C or S

SEQ ID NO: 86412 - protein, 27 aa, Artificial Sequence
  Cyclic GFR-binding peptide
MSATSMLYYNDKQQIILRKHRGMVVDR

SEQ ID NO: 86413 - protein, 35 aa, Artificial Sequence
  Cyclic GFR-binding peptide
  MOD_RES (5)..(6): Xaa is C or S
VPSTXXAPVKTSPISMLYKDNGRVLLLKYHYMIVE

SEQ ID NO: 86414 - protein, 33 aa, Artificial Sequence
  Cyclic GFR-binding peptide
  MOD_RES (30)..(32): Xaa is C or S
TRLSATSILYYDSANNVVLRKHRDMVVESXGXR

SEQ ID NO: 86415 - protein, 29 aa, Artificial Sequence
  Cyclic GFR-binding peptide
TKMSATSMLYYNDKQQIILRKHRGMVVDR

SEQ ID NO: 86416 - protein, 41 aa, Artificial Sequence; identical to SEQ ID NO: 33710
  Cyclic GFR-binding peptide
  MOD_RES (6)..(7)..(39)..(41): Xaa is C or S

SEQ ID NO: 86417 - protein, 26 aa, Artificial Sequence
  Cyclic GFR-binding peptide
DLSPINILYFIGKTPKIYGKIPMIVK

SEQ ID NO: 86418 - protein, 35 aa, Artificial Sequence; identical to SEQ ID NO: 33711
  Cyclic GFR-binding peptide
  MOD_RES (32)..(34): Xaa is C or S

SEQ ID NO: 86419 - protein, 37 aa, Artificial Sequence; identical to SEQ ID NO: 33712
  Cyclic GFR-binding peptide
  MOD_RES (1)..(2)..(34)..(36): Xaa is C or S

SEQ ID NO: 86420 - protein, 32 aa, Artificial Sequence
  Cyclic GFR-binding peptide
  MOD_RES (4)..(5): Xaa is C or S
PEPXXVPEKMNAISILYFDENKNVVLKKYRNM

SEQ ID NO: 86421 - protein, 35 aa, Artificial Sequence
  Cyclic GFR-binding peptide
  MOD_RES (6)..(7): Xaa is C or S
GIPEPXXVPEKMEPISILYLDENKNVVKFKYENMT

SEQ ID NO: 86422 - protein, 31 aa, Artificial Sequence
  Cyclic GFR-binding peptide
  MOD_RES (2)..(3): Xaa is C or S
PXXVPEKMSATSILYYDENKNVVLRKHRNMT

SEQ ID NO: 86423 - protein, 25 aa, Artificial Sequence
  Cyclic GFR-binding peptide
KMSPINILYFDENKNVVYGKIPNMT

SEQ ID NO: 86424 - protein, 28 aa, Artificial Sequence
  Cyclic GFR-binding peptide
  MOD_RES (27)..(27): Xaa is C or S
SATSILYYDAANNVVLRKHRDMVVEAXG

SEQ ID NO: 86425 - protein, 37 aa, Artificial Sequence; identical to SEQ ID NO: 33714
  Cyclic GFR-binding peptide
  MOD_RES (4)..(5)..(37): Xaa is C or S

SEQ ID NO: 86426 - protein, 24 aa, Artificial Sequence
  Cyclic GFR-binding peptide
VKTEPISMLYLDNGRVLLKFKYEM

SEQ ID NO: 86427 - protein, 31 aa, Artificial Sequence
  Cyclic GFR-binding peptide
  MOD_RES (31)..(31): Xaa is C or S
PEKMSPINILYFDENKNVVYGKIPNMTVESX

SEQ ID NO: 86428 - protein, 31 aa, Artificial Sequence
  Cyclic GFR-binding peptide
  MOD_RES (3)..(4): Xaa is C or S
STXXAPVKTSPISMLYKDNGRVLLLKYHYMI

SEQ ID NO: 86429 - protein, 35 aa, Artificial Sequence; identical to SEQ ID NO: 33717
  Cyclic GFR-binding peptide
  MOD_RES (2)..(3)..(35): Xaa is C or S

SEQ ID NO: 86430 - protein, 36 aa, Artificial Sequence; identical to SEQ ID NO: 33718
  Cyclic GFR-binding peptide
  MOD_RES (4)..(5): Xaa is C or S

SEQ ID NO: 86431 - protein, 41 aa, Artificial Sequence; identical to SEQ ID NO: 33719
  Cyclic GFR-binding peptide
  MOD_RES (6)..(7)..(39)..(41): Xaa is C or S

SEQ ID NO: 86432 - protein, 21 aa, Artificial Sequence
  Cyclic GFR-binding peptide
SPINILYFIGKTPKIYGKIPM

SEQ ID NO: 86433 - protein, 27 aa, Artificial Sequence
  Cyclic GFR-binding peptide
  MOD_RES (1)..(1): Xaa is C or S
XVPTRLSPISILYKDSANNVVLKYHYD

SEQ ID NO: 86434 - protein, 33 aa, Artificial Sequence
  Cyclic GFR-binding peptide
  MOD_RES (3)..(4): Xaa is C or S
SPXXVSQDLSPINILYFIGKTPKIYGKIPMIVK

SEQ ID NO: 86435 - protein, 34 aa, Artificial Sequence
  Cyclic GFR-binding peptide
  MOD_RES (5)..(6): Xaa is C or S
IPEPXXVPEKMSATSILYYDENKNVVLRKHRNMT

SEQ ID NO: 86436 - protein, 30 aa, Artificial Sequence
  Cyclic GFR-binding peptide
  MOD_RES (3)..(4): Xaa is C or S
APXXVPQALSPINILYFVGRKPKVYGKIPM

SEQ ID NO: 86437 - protein, 32 aa, Artificial Sequence; identical to SEQ ID NO: 33722
  Cyclic GFR-binding peptide
  MOD_RES (32)..(32): Xaa is C or S

SEQ ID NO: 86438 - protein, 33 aa, Artificial Sequence
  Cyclic GFR-binding peptide
  MOD_RES (3)..(4): Xaa is C or S
PTXXVPTRLSPISILYKDSANNVVLKYHYDMVV

SEQ ID NO: 86439 - protein, 36 aa, Artificial Sequence; identical to SEQ ID NO: 33723
  Cyclic GFR-binding peptide
  MOD_RES (1)..(2)..(34)..(36): Xaa is C or S

SEQ ID NO: 86440 - protein, 34 aa, Artificial Sequence
  Cyclic GFR-binding peptide
  MOD_RES (5)..(6): Xaa is C or S
APASXXVPARLSATSILYYDAANNVVLRKHRDMV

SEQ ID NO: 86441 - protein, 27 aa, Artificial Sequence
  Cyclic GFR-binding peptide
KLSATSILYYDKGVVTYLRKHRGMAVS

SEQ ID NO: 86442 - protein, 31 aa, Artificial Sequence
  Cyclic GFR-binding peptide
  MOD_RES (3)..(4): Xaa is C or S
PTXXVPTRLEPISILYLDSANNVVKFKYEDM

SEQ ID NO: 86443 - protein, 28 aa, Artificial Sequence
  Cyclic GFR-binding peptide
  MOD_RES (1)..(1): Xaa is C or S
XVPEKMNAISILYFDENKNVVLKKYRNM

SEQ ID NO: 86444 - protein, 37 aa, Artificial Sequence; identical to SEQ ID NO: 33727
  Cyclic GFR-binding peptide
  MOD_RES (6)..(7): Xaa is C or S

SEQ ID NO: 86445 - protein, 35 aa, Artificial Sequence; identical to SEQ ID NO: 33729
  Cyclic GFR-binding peptide
  MOD_RES (1)..(2)..(33)..(35): Xaa is C or S

SEQ ID NO: 86446 - protein, 39 aa, Artificial Sequence; identical to SEQ ID NO: 33730
  Cyclic GFR-binding peptide
  MOD_RES (4)..(5)..(36)..(38): Xaa is C or S

SEQ ID NO: 86447 - protein, 32 aa, Artificial Sequence
  Cyclic GFR-binding peptide
  MOD_RES (30)..(32): Xaa is C or S
EKMEPISILYLDENKNVVKFKYENMTVESXAX

SEQ ID NO: 86448 - protein, 29 aa, Artificial Sequence
  Cyclic GFR-binding peptide
  MOD_RES (3)..(4): Xaa is C or S
PTXXVPTRLEPISILYLDSANNVVKFKYE

SEQ ID NO: 86449 - protein, 32 aa, Artificial Sequence
  Cyclic GFR-binding peptide
  MOD_RES (31)..(31): Xaa is C or S
PEKMNAISILYFDENKNVVLKKYRNMTVESXA

SEQ ID NO: 86450 - protein, 28 aa, Artificial Sequence
  Cyclic GFR-binding peptide
KMNAISILYFDENKNVVLKKYRNMTVES

SEQ ID NO: 86451 - protein, 36 aa, Artificial Sequence
  Cyclic GFR-binding peptide
  MOD_RES (6)..(7): Xaa is C or S
ASASPXXVSQDLSPINILYFIGKTPKIYGKIPMIVK

SEQ ID NO: 86452 - protein, 25 aa, Artificial Sequence
  Cyclic GFR-binding peptide
LSATSILYYDKGVVTYLRKHRGMAV

SEQ ID NO: 86453 - protein, 36 aa, Artificial Sequence
  Cyclic GFR-binding peptide
  MOD_RES (6)..(7): Xaa is C or S
HVPKPXXAPTKLSATSVLYYDDSSNVILRKHRNMVV

SEQ ID NO: 86454 - protein, 32 aa, Artificial Sequence
  Cyclic GFR-binding peptide
  MOD_RES (30)..(32): Xaa is C or S
TRLSPISILYKDSANNVVLKYHYDMVVESXGX

SEQ ID NO: 86455 - protein, 40 aa, Artificial Sequence; identical to SEQ ID NO: 33735
  Cyclic GFR-binding peptide
  MOD_RES (6)..(7)..(39): Xaa is C or S

SEQ ID NO: 86456 - protein, 30 aa, Artificial Sequence
  Cyclic GFR-binding peptide
  MOD_RES (28)..(30): Xaa is C or S
DLSPINILYFIGKTPKIYGKIPMIVKSXKX

SEQ ID NO: 86457 - protein, 34 aa, Artificial Sequence
  Cyclic GFR-binding peptide
  MOD_RES (6)..(7): Xaa is C or S
STPPTXXVPTRLSPISILYKDSANNVVLKYHYDM

SEQ ID NO: 86458 - protein, 32 aa, Artificial Sequence
  Cyclic GFR-binding peptide
  MOD_RES (3)..(4): Xaa is C or S
SPXXVSQDLSPINILYFIGKTPKIYGKIPMIV

SEQ ID NO: 86459 - protein, 31 aa, Artificial Sequence
  Cyclic GFR-binding peptide
  MOD_RES (28)..(30): Xaa is C or S
MSPISMLYKNDKQQIILKYHYGMVVDRXGXS

SEQ ID NO: 86460 - protein, 30 aa, Artificial Sequence
  Cyclic GFR-binding peptide
  MOD_RES (2)..(3): Xaa is C or S
TXXAPVKTSPISMLYKDNGRVLLLKYHYMI

SEQ ID NO: 86461 - protein, 29 aa, Artificial Sequence
  Cyclic GFR-binding peptide
  MOD_RES (3)..(4): Xaa is C or S
PTXXVPTRLSPISILYKDSANNVVLKYHY

SEQ ID NO: 86462 - protein, 42 aa, Artificial Sequence; identical to SEQ ID NO: 33740
  Cyclic GFR-binding peptide
  MOD_RES (6)..(7)..(39)..(41): Xaa is C or S

SEQ ID NO: 86463 - protein, 35 aa, Artificial Sequence; identical to SEQ ID NO: 33743
  Cyclic GFR-binding peptide
  MOD_RES (1)..(2)..(33)..(35): Xaa is C or S

SEQ ID NO: 86464 - protein, 33 aa, Artificial Sequence; identical to SEQ ID NO: 33744
  Cyclic GFR-binding peptide
  MOD_RES (2)..(3): Xaa is C or S

SEQ ID NO: 86465 - protein, 25 aa, Artificial Sequence
  Cyclic GFR-binding peptide
SPISILYKDSANNVVLKYHYDMVVE

SEQ ID NO: 86466 - protein, 31 aa, Artificial Sequence
  Cyclic GFR-binding peptide
  MOD_RES (31)..(31): Xaa is C or S
PTRLEPISILYLDSANNVVKFKYEDMVVESX

SEQ ID NO: 86467 - protein, 32 aa, Artificial Sequence
  Cyclic GFR-binding peptide
  MOD_RES (5)..(6): Xaa is C or S
VPSTXXAPVKTSPISMLYKDNGRVLLLKYHYM

SEQ ID NO: 86468 - protein, 29 aa, Artificial Sequence
  Cyclic GFR-binding peptide
  MOD_RES (29)..(29): Xaa is C or S
KMSPINILYFDENKNVVYGKIPNMTVESX

SEQ ID NO: 86469 - protein, 33 aa, Artificial Sequence
  Cyclic GFR-binding peptide
  MOD_RES (30)..(32): Xaa is C or S
PVKTEPISMLYLDNGRVLLKFKYEMIVEEXGXL

SEQ ID NO: 86470 - protein, 26 aa, Artificial Sequence
  Cyclic GFR-binding peptide
  MOD_RES (26)..(26): Xaa is C or S
SPINILYFVGRTPKVYGKIPMVVKSX

SEQ ID NO: 86471 - protein, 28 aa, Artificial Sequence
  Cyclic GFR-binding peptide
VKTSPISMLYKDNGRVLLLKYHYMIVEE

SEQ ID NO: 86472 - protein, 24 aa, Artificial Sequence
  Cyclic GFR-binding peptide
MNAISILYFDENKNVVLKKYRNMT

SEQ ID NO: 86473 - protein, 32 aa, Artificial Sequence
  Cyclic GFR-binding peptide
  MOD_RES (5)..(6): Xaa is C or S
TPPTXXVPTRLSATSILYYDSANNVVLRKHRD

SEQ ID NO: 86474 - protein, 28 aa, Artificial Sequence
  Cyclic GFR-binding peptide
  MOD_RES (28)..(28): Xaa is C or S
MEPISMLYLNDKQQIIKFKYEGMVVDRX

SEQ ID NO: 86475 - protein, 32 aa, Artificial Sequence
  Cyclic GFR-binding peptide
  MOD_RES (5)..(6): Xaa is C or S
IPEPXXVPEKMSATSILYYDENKNVVLRKHRN

SEQ ID NO: 86476 - protein, 35 aa, Artificial Sequence; identical to SEQ ID NO: 33758
  Cyclic GFR-binding peptide
  MOD_RES (2)..(3)..(34): Xaa is C or S

SEQ ID NO: 86477 - protein, 39 aa, Artificial Sequence; identical to SEQ ID NO: 33759
  Cyclic GFR-binding peptide
  MOD_RES (3)..(4)..(36)..(38): Xaa is C or S

SEQ ID NO: 86478 - protein, 28 aa, Artificial Sequence
  Cyclic GFR-binding peptide
VPTRLSATSILYYDSANNVVLRKHRDMV

SEQ ID NO: 86479 - protein, 39 aa, Artificial Sequence; identical to SEQ ID NO: 33760
  Cyclic GFR-binding peptide
  MOD_RES (6)..(7)..(39): Xaa is C or S

SEQ ID NO: 86480 - protein, 40 aa, Artificial Sequence; identical to SEQ ID NO: 33761
  Cyclic GFR-binding peptide
  MOD_RES (6)..(7)..(39): Xaa is C or S

SEQ ID NO: 86481 - protein, 25 aa, Artificial Sequence
  Cyclic GFR-binding peptide
EKMSATSILYYDENKNVVLRKHRNM

SEQ ID NO: 86482 - protein, 24 aa, Artificial Sequence
  Cyclic GFR-binding peptide
KMSPISILYKDENKNVVLKYHYNM

SEQ ID NO: 86483 - protein, 31 aa, Artificial Sequence
  Cyclic GFR-binding peptide
  MOD_RES (3)..(4): Xaa is C or S
PTXXVPTRLSATSILYYDSANNVVLRKHRDM

SEQ ID NO: 86484 - protein, 25 aa, Artificial Sequence
  Cyclic GFR-binding peptide
TRLSPISILYKDSANNVVLKYHYDM

SEQ ID NO: 86485 - protein, 36 aa, Artificial Sequence; identical to SEQ ID NO: 33763
  Cyclic GFR-binding peptide
  MOD_RES (3)..(4)..(36): Xaa is C or S

SEQ ID NO: 86486 - protein, 36 aa, Artificial Sequence; identical to SEQ ID NO: 33764
  Cyclic GFR-binding peptide
  MOD_RES (4)..(5): Xaa is C or S

SEQ ID NO: 86487 - protein, 40 aa, Artificial Sequence; identical to SEQ ID NO: 33765
  Cyclic GFR-binding peptide
  MOD_RES (4)..(5)..(37)..(39): Xaa is C or S

SEQ ID NO: 86488 - protein, 30 aa, Artificial Sequence
  Cyclic GFR-binding peptide
  MOD_RES (29)..(29): Xaa is C or S
RLSATSILYYDSANNVVLRKHRDMVVESXG

SEQ ID NO: 86489 - protein, 32 aa, Artificial Sequence; identical to SEQ ID NO: 33769
  Cyclic GFR-binding peptide
  MOD_RES (1)..(32): Xaa is C or S

SEQ ID NO: 86490 - protein, 36 aa, Artificial Sequence; identical to SEQ ID NO: 33773
  Cyclic GFR-binding peptide
  MOD_RES (2)..(3)..(35): Xaa is C or S

SEQ ID NO: 86491 - protein, 38 aa, Artificial Sequence; identical to SEQ ID NO: 33774
  Cyclic GFR-binding peptide
  MOD_RES (5)..(6)..(37): Xaa is C or S

SEQ ID NO: 86492 - protein, 36 aa, Artificial Sequence; identical to SEQ ID NO: 33775
  Cyclic GFR-binding peptide
  MOD_RES (5)..(6): Xaa is C or S

SEQ ID NO: 86493 - protein, 34 aa, Artificial Sequence; identical to SEQ ID NO: 33777
  Cyclic GFR-binding peptide
  MOD_RES (32)..(34): Xaa is C or S

SEQ ID NO: 86494 - protein, 36 aa, Artificial Sequence; identical to SEQ ID NO: 33778
  Cyclic GFR-binding peptide
  MOD_RES (2)..(3)..(35): Xaa is C or S

SEQ ID NO: 86495 - protein, 32 aa, Artificial Sequence; identical to SEQ ID NO: 33779
  Cyclic GFR-binding peptide
  MOD_RES (1)..(2): Xaa is C or S

SEQ ID NO: 86496 - protein, 29 aa, Artificial Sequence
  Cyclic GFR-binding peptide
  MOD_RES (2)..(3): Xaa is C or S
PXXVPEKMSPISILYKDENKNVVLKYHYN

SEQ ID NO: 86497 - protein, 39 aa, Artificial Sequence; identical to SEQ ID NO: 33780
  Cyclic GFR-binding peptide
  MOD_RES (5)..(6)..(38): Xaa is C or S

SEQ ID NO: 86498 - protein, 33 aa, Artificial Sequence; identical to SEQ ID NO: 33781
  Cyclic GFR-binding peptide
  MOD_RES (2)..(3): Xaa is C or S

SEQ ID NO: 86499 - protein, 36 aa, Artificial Sequence; identical to SEQ ID NO: 33782
  Cyclic GFR-binding peptide
  MOD_RES (5)..(6): Xaa is C or S

SEQ ID NO: 86500 - protein, 33 aa, Artificial Sequence
  Cyclic GFR-binding peptide
  MOD_RES (6)..(7): Xaa is C or S
STPPTXXVPTRLEPISILYLDSANNVVKFKYED

SEQ ID NO: 86501 - protein, 33 aa, Artificial Sequence; identical to SEQ ID NO: 33783
  Cyclic GFR-binding peptide
  MOD_RES (1)..(2): Xaa is C or S

SEQ ID NO: 86502 - protein, 23 aa, Artificial Sequence
  Cyclic GFR-binding peptide
TKLSATSILYYDKGVVTYLRKHR

SEQ ID NO: 86503 - protein, 26 aa, Artificial Sequence
  Cyclic GFR-binding peptide
VPTRLEPISILYLDSANNVVKFKYED

SEQ ID NO: 86504 - protein, 22 aa, Artificial Sequence
  Cyclic GFR-binding peptide
KMEPISILYLDENKNVVKFKYE

SEQ ID NO: 86505 - protein, 36 aa, Artificial Sequence; identical to SEQ ID NO: 33784
  Cyclic GFR-binding peptide
  MOD_RES (1)..(2)..(33)..(35): Xaa is C or S

SEQ ID NO: 86506 - protein, 25 aa, Artificial Sequence
  Cyclic GFR-binding peptide
DLSPINILYFIGKTPKIYGKIPMIV

SEQ ID NO: 86507 - protein, 27 aa, Artificial Sequence
  Cyclic GFR-binding peptide
LSATSILYYDAANNVVLRKHRDMVVEA

SEQ ID NO: 86508 - protein, 31 aa, Artificial Sequence
  Cyclic GFR-binding peptide
  MOD_RES (3)..(4): Xaa is C or S
EPXXVPEKMSPINILYFDENKNVVYGKIPNM

SEQ ID NO: 86509 - protein, 27 aa, Artificial Sequence
  Cyclic GFR-binding peptide
  MOD_RES (1)..(2): Xaa is C or S
XXTPTKMSPISMLYKNDKQQIILKYHY

SEQ ID NO: 86510 - protein, 27 aa, Artificial Sequence
  Cyclic GFR-binding peptide
  MOD_RES (1)..(1): Xaa is C or S
XTPTKMSATSMLYYNDKQQIILRKHRG

SEQ ID NO: 86511 - protein, 26 aa, Artificial Sequence
  Cyclic GFR-binding peptide
VPQDLSPINILYFVGRTPKVYGKIPM

SEQ ID NO: 86512 - protein, 36 aa, Artificial Sequence; identical to SEQ ID NO: 33785
  Cyclic GFR-binding peptide
  MOD_RES (1)..(2)..(34)..(36): Xaa is C or S

SEQ ID NO: 86513 - protein, 34 aa, Artificial Sequence; identical to SEQ ID NO: 33786
  Cyclic GFR-binding peptide
  MOD_RES (1)..(2)..(33): Xaa is C or S

SEQ ID NO: 86514 - protein, 29 aa, Artificial Sequence
  Cyclic GFR-binding peptide
  MOD_RES (2)..(3): Xaa is C or S
PXXVPQDLSPINILYFVGRTPKVYGKIPM

SEQ ID NO: 86515 - protein, 34 aa, Artificial Sequence; identical to SEQ ID NO: 33787
  Cyclic GFR-binding peptide
  MOD_RES (2)..(3): Xaa is C or S

SEQ ID NO: 86516 - protein, 34 aa, Artificial Sequence; identical to SEQ ID NO: 33788
  Cyclic GFR-binding peptide
  MOD_RES (1)..(2)..(34): Xaa is C or S

SEQ ID NO: 86517 - protein, 24 aa, Artificial Sequence
  Cyclic GFR-binding peptide
SPINILYFVGRTPKVYGKIPMVVK

SEQ ID NO: 86518 - protein, 30 aa, Artificial Sequence
  Cyclic GFR-binding peptide
  MOD_RES (4)..(5): Xaa is C or S
PASXXVPARLSATSILYYDAANNVVLRKHR

SEQ ID NO: 86519 - protein, 37 aa, Artificial Sequence; identical to SEQ ID NO: 33789
  Cyclic GFR-binding peptide
  MOD_RES (6)..(7): Xaa is C or S

SEQ ID NO: 86520 - protein, 30 aa, Artificial Sequence
  Cyclic GFR-binding peptide
  MOD_RES (4)..(5): Xaa is C or S
PEPXXVPEKMNAISILYFDENKNVVLKKYR

SEQ ID NO: 86521 - protein, 20 aa, Artificial Sequence
  Cyclic GFR-binding peptide
SPISILYKDENKNVVLKYHY

SEQ ID NO: 86522 - protein, 39 aa, Artificial Sequence; identical to SEQ ID NO: 33795
  Cyclic GFR-binding peptide
  MOD_RES (5)..(6)..(37)..(39): Xaa is C or S

SEQ ID NO: 86523 - protein, 27 aa, Artificial Sequence
  Cyclic GFR-binding peptide
PTKMSPISMLYKNDKQQIILKYHYGMV

SEQ ID NO: 86524 - protein, 28 aa, Artificial Sequence
  Cyclic GFR-binding peptide
PVKTSATSMLYYDNGRVLLLRKHRMIVE

SEQ ID NO: 86525 - protein, 33 aa, Artificial Sequence
  Cyclic GFR-binding peptide
  MOD_RES (4)..(5): Xaa is C or S
AGPXXTPTKMEPISMLYLNDKQQIIKFKYEGMV

SEQ ID NO: 86526 - protein, 27 aa, Artificial Sequence
  Cyclic GFR-binding peptide
  MOD_RES (1)..(2): Xaa is C or S
XXVPTKLSATSILYYDKGVVTYLRKHR

SEQ ID NO: 86527 - protein, 38 aa, Artificial Sequence; identical to SEQ ID NO: 33799
  Cyclic GFR-binding peptide
  MOD_RES (5)..(6)..(38): Xaa is C or S

SEQ ID NO: 86528 - protein, 29 aa, Artificial Sequence
  Cyclic GFR-binding peptide
ARLSATSILYYDAANNVVLRKHRDMVVEA

SEQ ID NO: 86529 - protein, 29 aa, Artificial Sequence
  Cyclic GFR-binding peptide
  MOD_RES (1)..(1): Xaa is C or S
XVPEKMEPISILYLDENKNVVKFKYENMT

SEQ ID NO: 86530 - protein, 32 aa, Artificial Sequence; identical to SEQ ID NO: 33800
  Cyclic GFR-binding peptide
  MOD_RES (1)..(2): Xaa is C or S

SEQ ID NO: 86531 - protein, 21 aa, Artificial Sequence
  Cyclic GFR-binding peptide
MNAISILYFDENKNVVLKKYR

SEQ ID NO: 86532 - protein, 30 aa, Artificial Sequence
  Cyclic GFR-binding peptide
  MOD_RES (1)..(1): Xaa is C or S
XVPEKMNAISILYFDENKNVVLKKYRNMTV

SEQ ID NO: 86533 - protein, 30 aa, Artificial Sequence
  Cyclic GFR-binding peptide
  MOD_RES (30)..(30): Xaa is C or S
EKMNAISILYFDENKNVVLKKYRNMTVESX

SEQ ID NO: 86534 - protein, 29 aa, Artificial Sequence
  Cyclic GFR-binding peptide
  MOD_RES (27)..(29): Xaa is C or S
EPISILYLDSANNVVKFKYEDMVVESXGX

SEQ ID NO: 86535 - protein, 26 aa, Artificial Sequence
  Cyclic GFR-binding peptide
PEKMNAISILYFDENKNVVLKKYRNM

SEQ ID NO: 86536 - protein, 28 aa, Artificial Sequence
  Cyclic GFR-binding peptide
TKMSATSMLYYNDKQQIILRKHRGMVVD

SEQ ID NO: 86537 - protein, 23 aa, Artificial Sequence
  Cyclic GFR-binding peptide
LSATSILYYDAANNVVLRKHRDM

SEQ ID NO: 86538 - protein, 24 aa, Artificial Sequence
  Cyclic GFR-binding peptide
RLEPISILYLDSANNVVKFKYEDM

SEQ ID NO: 86539 - protein, 33 aa, Artificial Sequence
  Cyclic GFR-binding peptide
  MOD_RES (30)..(32): Xaa is C or S
ARLSATSILYYDAANNVVLRKHRDMVVEAXGXR

SEQ ID NO: 86540 - protein, 25 aa, Artificial Sequence
  Cyclic GFR-binding peptide
KMSPISMLYKNDKQQIILKYHYGMV

SEQ ID NO: 86541 - protein, 30 aa, Artificial Sequence
  Cyclic GFR-binding peptide
  MOD_RES (4)..(5): Xaa is C or S
PEPXXVPEKMSPISILYKDENKNVVLKYHY

SEQ ID NO: 86542 - protein, 33 aa, Artificial Sequence
  Cyclic GFR-binding peptide
  MOD_RES (6)..(7): Xaa is C or S
HVPKPXXAPTKLSATSVLYYDDSSNVILRKHRN

SEQ ID NO: 86543 - protein, 38 aa, Artificial Sequence; identical to SEQ ID NO: 33806
  Cyclic GFR-binding peptide
  MOD_RES (3)..(4)..(36)..(38): Xaa is C or S

SEQ ID NO: 86544 - protein, 30 aa, Artificial Sequence
  Cyclic GFR-binding peptide
  MOD_RES (3)..(4): Xaa is C or S
GPXXTPTKMSPISMLYKNDKQQIILKYHYG

SEQ ID NO: 86545 - protein, 33 aa, Artificial Sequence
  Cyclic GFR-binding peptide
  MOD_RES (5)..(6): Xaa is C or S
SAGPXXTPTKMSATSMLYYNDKQQIILRKHRGM

SEQ ID NO: 86546 - protein, 32 aa, Artificial Sequence; identical to SEQ ID NO: 33810
  Cyclic GFR-binding peptide
  MOD_RES (1)..(2): Xaa is C or S

SEQ ID NO: 86547 - protein, 28 aa, Artificial Sequence
  Cyclic GFR-binding peptide
  MOD_RES (1)..(1): Xaa is C or S
XVPQALSPINILYFVGRKPKVYGKIPMI

SEQ ID NO: 86548 - protein, 31 aa, Artificial Sequence
  Cyclic GFR-binding peptide
  MOD_RES (2)..(3): Xaa is C or S
PXXTPTKMSATSMLYYNDKQQIILRKHRGMV

SEQ ID NO: 86549 - protein, 37 aa, Artificial Sequence; identical to SEQ ID NO: 33817
  Cyclic GFR-binding peptide
  MOD_RES (6)..(7): Xaa is C or S

SEQ ID NO: 86550 - protein, 32 aa, Artificial Sequence
  Cyclic GFR-binding peptide
  MOD_RES (5)..(6): Xaa is C or S
VPSTXXAPVKTEPISMLYLDNGRVLLKFKYEM

SEQ ID NO: 86551 - protein, 28 aa, Artificial Sequence
  Cyclic GFR-binding peptide
PARLSATSILYYDAANNVVLRKHRDMVV

SEQ ID NO: 86552 - protein, 22 aa, Artificial Sequence
  Cyclic GFR-binding peptide
SPINILYFVGRKPKVYGKIPMI

SEQ ID NO: 86553 - protein, 41 aa, Artificial Sequence; identical to SEQ ID NO: 33820
  Cyclic GFR-binding peptide
  MOD_RES (5)..(6)..(38)..(40): Xaa is C or S

SEQ ID NO: 86554 - protein, 24 aa, Artificial Sequence
  Cyclic GFR-binding peptide
EKMNAISILYFDENKNVVLKKYRN

SEQ ID NO: 86555 - protein, 31 aa, Artificial Sequence
  Cyclic GFR-binding peptide
  MOD_RES (1)..(2): Xaa is C or S
XXTPTKMEPISMLYLNDKQQIIKFKYEGMVV

SEQ ID NO: 86556 - protein, 24 aa, Artificial Sequence
  Cyclic GFR-binding peptide
SATSILYYDENKNVVLRKHRNMTV

SEQ ID NO: 86557 - protein, 36 aa, Artificial Sequence; identical to SEQ ID NO: 33822
  Cyclic GFR-binding peptide
  MOD_RES (1)..(2)..(34)..(36): Xaa is C or S

SEQ ID NO: 86558 - protein, 32 aa, Artificial Sequence
  Cyclic GFR-binding peptide
  MOD_RES (6)..(7): Xaa is C or S
HVPKPXXAPTKLSATSVLYYDDSSNVILRKHR

SEQ ID NO: 86559 - protein, 33 aa, Artificial Sequence; identical to SEQ ID NO: 33823
  Cyclic GFR-binding peptide
  MOD_RES (32)..(32): Xaa is C or S

SEQ ID NO: 86560 - protein, 34 aa, Artificial Sequence; identical to SEQ ID NO: 33824
  Cyclic GFR-binding peptide
  MOD_RES (1)..(2)..(34): Xaa is C or S

SEQ ID NO: 86561 - protein, 30 aa, Artificial Sequence
  Cyclic GFR-binding peptide
  MOD_RES (4)..(5): Xaa is C or S
PEPXXVPEKMSATSILYYDENKNVVLRKHR

SEQ ID NO: 86562 - protein, 36 aa, Artificial Sequence; identical to SEQ ID NO: 33825
  Cyclic GFR-binding peptide
  MOD_RES (4)..(5): Xaa is C or S

SEQ ID NO: 86563 - protein, 37 aa, Artificial Sequence; identical to SEQ ID NO: 33827
  Cyclic GFR-binding peptide
  MOD_RES (2)..(3)..(35)..(37): Xaa is C or S

SEQ ID NO: 86564 - protein, 26 aa, Artificial Sequence
  Cyclic GFR-binding peptide
PVKTSPISMLYKDNGRVLLLKYHYMI

SEQ ID NO: 86565 - protein, 23 aa, Artificial Sequence
  Cyclic GFR-binding peptide
RLSPISILYKDSANNVVLKYHYD

SEQ ID NO: 86566 - protein, 30 aa, Artificial Sequence
  Cyclic GFR-binding peptide
  MOD_RES (29)..(29): Xaa is C or S
KMSPINILYFDENKNVVYGKIPNMTVESXA

SEQ ID NO: 86567 - protein, 37 aa, Artificial Sequence; identical to SEQ ID NO: 33830
  Cyclic GFR-binding peptide
  MOD_RES (2)..(3)..(34)..(36): Xaa is C or S

SEQ ID NO: 86568 - protein, 27 aa, Artificial Sequence
  Cyclic GFR-binding peptide
  MOD_RES (1)..(1): Xaa is C or S
XVPTRLEPISILYLDSANNVVKFKYED

SEQ ID NO: 86569 - protein, 29 aa, Artificial Sequence
  Cyclic GFR-binding peptide
PVKTEPISMLYLDNGRVLLKFKYEMIVEE

SEQ ID NO: 86570 - protein, 28 aa, Artificial Sequence
  Cyclic GFR-binding peptide
TKMEPISMLYLNDKQQIIKFKYEGMVVD

SEQ ID NO: 86571 - protein, 30 aa, Artificial Sequence
  Cyclic GFR-binding peptide
  MOD_RES (30)..(30): Xaa is C or S
TKMSPISMLYKNDKQQIILKYHYGMVVDRX

SEQ ID NO: 86572 - protein, 41 aa, Artificial Sequence; identical to SEQ ID NO: 33832
  Cyclic GFR-binding peptide
  MOD_RES (5)..(6)..(38)..(40): Xaa is C or S

SEQ ID NO: 86573 - protein, 27 aa, Artificial Sequence
  Cyclic GFR-binding peptide
VPTKLSATSILYYDKGVVTYLRKHRGM

SEQ ID NO: 86574 - protein, 30 aa, Artificial Sequence
  Cyclic GFR-binding peptide
  MOD_RES (1)..(1): Xaa is C or S
XVSQDLSPINILYFIGKTPKIYGKIPMIVK

SEQ ID NO: 86575 - protein, 26 aa, Artificial Sequence
  Cyclic GFR-binding peptide
EPISMLYLNDKQQIIKFKYEGMVVDR

SEQ ID NO: 86576 - protein, 32 aa, Artificial Sequence
  Cyclic GFR-binding peptide
  MOD_RES (29)..(31): Xaa is C or S
QDLSPINILYFVGRTPKVYGKIPMVVKSXKXS

SEQ ID NO: 86577 - protein, 35 aa, Artificial Sequence
  Cyclic GFR-binding peptide
  MOD_RES (5)..(6): Xaa is C or S
ASKAXXVPTKLSATSILYYDKGVVTYLRKHRGMAV

SEQ ID NO: 86578 - protein, 34 aa, Artificial Sequence; identical to SEQ ID NO: 33833
  Cyclic GFR-binding peptide
  MOD_RES (1)..(33): Xaa is C or S

SEQ ID NO: 86579 - protein, 29 aa, Artificial Sequence
  Cyclic GFR-binding peptide
VPEKMNAISILYFDENKNVVLKKYRNMTV

SEQ ID NO: 86580 - protein, 36 aa, Artificial Sequence
  Cyclic GFR-binding peptide
  MOD_RES (6)..(7): Xaa is C or S
KASKAXXVPTKLSATSILYYDKGVVTYLRKHRGMAV

SEQ ID NO: 86581 - protein, 35 aa, Artificial Sequence
  Cyclic GFR-binding peptide
  MOD_RES (5)..(6): Xaa is C or S
APASXXVPARLSATSILYYDAANNVVLRKHRDMVV

SEQ ID NO: 86582 - protein, 22 aa, Artificial Sequence
  Cyclic GFR-binding peptide
MNAISILYFDENKNVVLKKYRN

SEQ ID NO: 86583 - protein, 41 aa, Artificial Sequence; identical to SEQ ID NO: 33840
  Cyclic GFR-binding peptide
  MOD_RES (6)..(7)..(39)..(41): Xaa is C or S

SEQ ID NO: 86584 - protein, 28 aa, Artificial Sequence
  Cyclic GFR-binding peptide
PTKMSATSMLYYNDKQQIILRKHRGMVV

SEQ ID NO: 86585 - protein, 31 aa, Artificial Sequence
  Cyclic GFR-binding peptide
  MOD_RES (30)..(30): Xaa is C or S
PVKTEPISMLYLDNGRVLLKFKYEMIVEEXG

SEQ ID NO: 86586 - protein, 29 aa, Artificial Sequence
  Cyclic GFR-binding peptide
EKMSPINILYFDENKNVVYGKIPNMTVES

SEQ ID NO: 86587 - protein, 37 aa, Artificial Sequence; identical to SEQ ID NO: 33843
  Cyclic GFR-binding peptide
  MOD_RES (6)..(7): Xaa is C or S

SEQ ID NO: 86588 - protein, 33 aa, Artificial Sequence; identical to SEQ ID NO: 33844
  Cyclic GFR-binding peptide
  MOD_RES (1)..(32): Xaa is C or S

SEQ ID NO: 86589 - protein, 32 aa, Artificial Sequence
  Cyclic GFR-binding peptide
  MOD_RES (5)..(6): Xaa is C or S
IPEPXXVPEKMNAISILYFDENKNVVLKKYRN

SEQ ID NO: 86590 - protein, 29 aa, Artificial Sequence
  Cyclic GFR-binding peptide
  MOD_RES (3)..(4): Xaa is C or S
GPXXTPTKMEPISMLYLNDKQQIIKFKYE

SEQ ID NO: 86591 - protein, 34 aa, Artificial Sequence
  Cyclic GFR-binding peptide
  MOD_RES (4)..(5): Xaa is C or S
ASPXXVPQDLSPINILYFVGRTPKVYGKIPMVVK

SEQ ID NO: 86592 - protein, 37 aa, Artificial Sequence; identical to SEQ ID NO: 33846
  Cyclic GFR-binding peptide
  MOD_RES (5)..(6)..(37): Xaa is C or S

SEQ ID NO: 86593 - protein, 29 aa, Artificial Sequence
  Cyclic GFR-binding peptide
  MOD_RES (27)..(29): Xaa is C or S
SPISILYKDENKNVVLKYHYNMTVESXAX

SEQ ID NO: 86594 - protein, 34 aa, Artificial Sequence
  Cyclic GFR-binding peptide
  MOD_RES (31)..(33): Xaa is C or S
PTKMSATSMLYYNDKQQIILRKHRGMVVDRXGXS

SEQ ID NO: 86595 - protein, 33 aa, Artificial Sequence; identical to SEQ ID NO: 33847
  Cyclic GFR-binding peptide
  MOD_RES (1)..(2): Xaa is C or S

SEQ ID NO: 86596 - protein, 26 aa, Artificial Sequence
  Cyclic GFR-binding peptide
APVKTEPISMLYLDNGRVLLKFKYEM

SEQ ID NO: 86597 - protein, 33 aa, Artificial Sequence; identical to SEQ ID NO: 33848
  Cyclic GFR-binding peptide
  MOD_RES (1)..(33): Xaa is C or S

SEQ ID NO: 86598 - protein, 27 aa, Artificial Sequence
  Cyclic GFR-binding peptide
PVKTSATSMLYYDNGRVLLLRKHRMIV

SEQ ID NO: 86599 - protein, 31 aa, Artificial Sequence
  Cyclic GFR-binding peptide
  MOD_RES (1)..(2): Xaa is C or S
XXVPTKLSATSILYYDKGVVTYLRKHRGMAV

SEQ ID NO: 86600 - protein, 33 aa, Artificial Sequence
  Cyclic GFR-binding peptide
  MOD_RES (6)..(7): Xaa is C or S
KASKAXXVPTKLSATSILYYDKGVVTYLRKHRG

SEQ ID NO: 86601 - protein, 39 aa, Artificial Sequence; identical to SEQ ID NO: 33849
  Cyclic GFR-binding peptide
  MOD_RES (6)..(7)..(39): Xaa is C or S

SEQ ID NO: 86602 - protein, 31 aa, Artificial Sequence; identical to SEQ ID NO: 33850
  Cyclic GFR-binding peptide
  MOD_RES (1)..(1): Xaa is C or S

SEQ ID NO: 86603 - protein, 33 aa, Artificial Sequence
  Cyclic GFR-binding peptide
  MOD_RES (30)..(32): Xaa is C or S
EKMSATSILYYDENKNVVLRKHRNMTVESXAXR

SEQ ID NO: 86604 - protein, 38 aa, Artificial Sequence; identical to SEQ ID NO: 33851
  Cyclic GFR-binding peptide
  MOD_RES (6)..(7): Xaa is C or S

SEQ ID NO: 86605 - protein, 25 aa, Artificial Sequence
  Cyclic GFR-binding peptide
PTKMEPISMLYLNDKQQIIKFKYEG

SEQ ID NO: 86606 - protein, 25 aa, Artificial Sequence
  Cyclic GFR-binding peptide
TKMSATSMLYYNDKQQIILRKHRGM

SEQ ID NO: 86607 - protein, 20 aa, Artificial Sequence
  Cyclic GFR-binding peptide
SATSMLYYDNGRVLLLRKHR

SEQ ID NO: 86608 - protein, 38 aa, Artificial Sequence; identical to SEQ ID NO: 33854
  Cyclic GFR-binding peptide
  MOD_RES (4)..(5)..(37): Xaa is C or S

SEQ ID NO: 86609 - protein, 21 aa, Artificial Sequence
  Cyclic GFR-binding peptide
LSATSILYYDAANNVVLRKHR

SEQ ID NO: 86610 - protein, 35 aa, Artificial Sequence
  Cyclic GFR-binding peptide
  MOD_RES (6)..(7): Xaa is C or S
STPPTXXVPTRLSPISILYKDSANNVVLKYHYDMV

SEQ ID NO: 86611 - protein, 37 aa, Artificial Sequence; identical to SEQ ID NO: 33857
  Cyclic GFR-binding peptide
  MOD_RES (6)..(7): Xaa is C or S

SEQ ID NO: 86612 - protein, 31 aa, Artificial Sequence
  Cyclic GFR-binding peptide
  MOD_RES (5)..(6): Xaa is C or S
SASPXXVSQDLSPINILYFIGKTPKIYGKIP

SEQ ID NO: 86613 - protein, 34 aa, Artificial Sequence
  Cyclic GFR-binding peptide
  MOD_RES (31)..(33): Xaa is C or S
PEKMSPISILYKDENKNVVLKYHYNMTVESXAXR

SEQ ID NO: 86614 - protein, 32 aa, Artificial Sequence
  Cyclic GFR-binding peptide
  MOD_RES (31)..(31): Xaa is C or S
PTKMSATSMLYYNDKQQIILRKHRGMVVDRXG

SEQ ID NO: 86615 - protein, 38 aa, Artificial Sequence; identical to SEQ ID NO: 33859
  Cyclic GFR-binding peptide
  MOD_RES (4)..(5)..(37): Xaa is C or S

SEQ ID NO: 86616 - protein, 30 aa, Artificial Sequence
  Cyclic GFR-binding peptide
PEKMSATSILYYDENKNVVLRKHRNMTVES

SEQ ID NO: 86617 - protein, 37 aa, Artificial Sequence; identical to SEQ ID NO: 33860
  Cyclic GFR-binding peptide
  MOD_RES (2)..(3)..(35)..(37): Xaa is C or S

SEQ ID NO: 86618 - protein, 23 aa, Artificial Sequence
  Cyclic GFR-binding peptide
EPISILYLDSANNVVKFKYEDMV

SEQ ID NO: 86619 - protein, 31 aa, Artificial Sequence
  Cyclic GFR-binding peptide
  MOD_RES (30)..(30): Xaa is C or S
TRLSPISILYKDSANNVVLKYHYDMVVESXG

SEQ ID NO: 86620 - protein, 38 aa, Artificial Sequence; identical to SEQ ID NO: 33861
  Cyclic GFR-binding peptide
  MOD_RES (4)..(5)..(37): Xaa is C or S

SEQ ID NO: 86621 - protein, 28 aa, Artificial Sequence
  Cyclic GFR-binding peptide
  MOD_RES (26)..(28): Xaa is C or S
SPINILYFIGKTPKIYGKIPMIVKSXKX

SEQ ID NO: 86622 - protein, 32 aa, Artificial Sequence; identical to SEQ ID NO: 33862
  Cyclic GFR-binding peptide
  MOD_RES (1)..(32): Xaa is C or S

SEQ ID NO: 86623 - protein, 20 aa, Artificial Sequence
  Cyclic GFR-binding peptide
SPISMLYKDNGRVLLLKYHY

SEQ ID NO: 86624 - protein, 36 aa, Artificial Sequence; identical to SEQ ID NO: 33866
  Cyclic GFR-binding peptide
  MOD_RES (2)..(3)..(34)..(36): Xaa is C or S

SEQ ID NO: 86625 - protein, 28 aa, Artificial Sequence
  Cyclic GFR-binding peptide
  MOD_RES (1)..(1): Xaa is C or S
XTPTKMSPISMLYKNDKQQIILKYHYGM

SEQ ID NO: 86626 - protein, 26 aa, Artificial Sequence
  Cyclic GFR-binding peptide
LEPISILYLDSANNVVKFKYEDMVVE

SEQ ID NO: 86627 - protein, 35 aa, Artificial Sequence; identical to SEQ ID NO: 33869
  Cyclic GFR-binding peptide
  MOD_RES (2)..(3)..(35): Xaa is C or S

SEQ ID NO: 86628 - protein, 33 aa, Artificial Sequence; identical to SEQ ID NO: 33870
  Cyclic GFR-binding peptide
  MOD_RES (1)..(32): Xaa is C or S

SEQ ID NO: 86629 - protein, 40 aa, Artificial Sequence; identical to SEQ ID NO: 33872
  Cyclic GFR-binding peptide
  MOD_RES (6)..(7)..(39): Xaa is C or S

SEQ ID NO: 86630 - protein, 31 aa, Artificial Sequence; identical to SEQ ID NO: 33873
  Cyclic GFR-binding peptide
  MOD_RES (1)..(1): Xaa is C or S

SEQ ID NO: 86631 - protein, 33 aa, Artificial Sequence
  Cyclic GFR-binding peptide
  MOD_RES (5)..(6): Xaa is C or S
TPPTXXVPTRLSPISILYKDSANNVVLKYHYDM

SEQ ID NO: 86632 - protein, 30 aa, Artificial Sequence
  Cyclic GFR-binding peptide
  MOD_RES (1)..(1): Xaa is C or S
XVPTRLSATSILYYDSANNVVLRKHRDMVV

SEQ ID NO: 86633 - protein, 32 aa, Artificial Sequence
  Cyclic GFR-binding peptide
  MOD_RES (30)..(32): Xaa is C or S
SQDLSPINILYFIGKTPKIYGKIPMIVKSXKX

SEQ ID NO: 86634 - protein, 34 aa, Artificial Sequence
  Cyclic GFR-binding peptide
  MOD_RES (4)..(5): Xaa is C or S
PSTXXAPVKTEPISMLYLDNGRVLLKFKYEMIVE

SEQ ID NO: 86635 - protein, 28 aa, Artificial Sequence
  Cyclic GFR-binding peptide
VSQDLSPINILYFIGKTPKIYGKIPMIV

SEQ ID NO: 86636 - protein, 33 aa, Artificial Sequence
  Cyclic GFR-binding peptide
  MOD_RES (4)..(5): Xaa is C or S
PSTXXAPVKTSPISMLYKDNGRVLLLKYHYMIV

SEQ ID NO: 86637 - protein, 31 aa, Artificial Sequence
  Cyclic GFR-binding peptide
  MOD_RES (5)..(6): Xaa is C or S
IPEPXXVPEKMSATSILYYDENKNVVLRKHR

SEQ ID NO: 86638 - protein, 32 aa, Artificial Sequence
  Cyclic GFR-binding peptide
  MOD_RES (4)..(5): Xaa is C or S
PSTXXAPVKTEPISMLYLDNGRVLLKFKYEMI

SEQ ID NO: 86639 - protein, 27 aa, Artificial Sequence
  Cyclic GFR-binding peptide
TKMEPISMLYLNDKQQIIKFKYEGMVV

SEQ ID NO: 86640 - protein, 30 aa, Artificial Sequence
  Cyclic GFR-binding peptide
  MOD_RES (2)..(3): Xaa is C or S
PXXVPQALSPINILYFVGRKPKVYGKIPMI

SEQ ID NO: 86641 - protein, 35 aa, Artificial Sequence; identical to SEQ ID NO: 33879
  Cyclic GFR-binding peptide
  MOD_RES (32)..(34): Xaa is C or S

SEQ ID NO: 86642 - protein, 30 aa, Artificial Sequence
  Cyclic GFR-binding peptide
  MOD_RES (28)..(30): Xaa is C or S
DLSPINILYFVGRTPKVYGKIPMVVKSXKX

SEQ ID NO: 86643 - protein, 21 aa, Artificial Sequence
  Cyclic GFR-binding peptide
MEPISILYLDENKNVVKFKYE

SEQ ID NO: 86644 - protein, 40 aa, Artificial Sequence; identical to SEQ ID NO: 33880
  Cyclic GFR-binding peptide
  MOD_RES (5)..(6)..(37)..(39): Xaa is C or S

SEQ ID NO: 86645 - protein, 38 aa, Artificial Sequence; identical to SEQ ID NO: 33881
  Cyclic GFR-binding peptide
  MOD_RES (3)..(4)..(35)..(37): Xaa is C or S

SEQ ID NO: 86646 - protein, 28 aa, Artificial Sequence
  Cyclic GFR-binding peptide
  MOD_RES (1)..(2): Xaa is C or S
XXTPTKMEPISMLYLNDKQQIIKFKYEG

SEQ ID NO: 86647 - protein, 35 aa, Artificial Sequence; identical to SEQ ID NO: 33884
  Cyclic GFR-binding peptide
  MOD_RES (1)..(33)..(35): Xaa is C or S

SEQ ID NO: 86648 - protein, 32 aa, Artificial Sequence; identical to SEQ ID NO: 33887
  Cyclic GFR-binding peptide
  MOD_RES (31)..(31): Xaa is C or S

SEQ ID NO: 86649 - protein, 31 aa, Artificial Sequence
  Cyclic GFR-binding peptide
  MOD_RES (4)..(5): Xaa is C or S
AGPXXTPTKMSATSMLYYNDKQQIILRKHRG

SEQ ID NO: 86650 - protein, 21 aa, Artificial Sequence
  Cyclic GFR-binding peptide
MSATSILYYDENKNVVLRKHR

SEQ ID NO: 86651 - protein, 21 aa, Artificial Sequence
  Cyclic GFR-binding peptide
MSATSMLYYNDKQQIILRKHR

SEQ ID NO: 86652 - protein, 35 aa, Artificial Sequence; identical to SEQ ID NO: 33888
  Cyclic GFR-binding peptide
  MOD_RES (3)..(4)..(35): Xaa is C or S

SEQ ID NO: 86653 - protein, 33 aa, Artificial Sequence; identical to SEQ ID NO: 33890
  Cyclic GFR-binding peptide
  MOD_RES (2)..(3): Xaa is C or S

SEQ ID NO: 86654 - protein, 24 aa, Artificial Sequence
  Cyclic GFR-binding peptide
PTKLSATSILYYDKGVVTYLRKHR

SEQ ID NO: 86655 - protein, 21 aa, Artificial Sequence
  Cyclic GFR-binding peptide
SPISMLYKDNGRVLLLKYHYM

SEQ ID NO: 86656 - protein, 28 aa, Artificial Sequence
  Cyclic GFR-binding peptide
KMSATSILYYDENKNVVLRKHRNMTVES

SEQ ID NO: 86657 - protein, 36 aa, Artificial Sequence; identical to SEQ ID NO: 33893
  Cyclic GFR-binding peptide
  MOD_RES (2)..(3)..(35): Xaa is C or S

SEQ ID NO: 86658 - protein, 27 aa, Artificial Sequence
  Cyclic GFR-binding peptide
PTKMSATSMLYYNDKQQIILRKHRGMV

SEQ ID NO: 86659 - protein, 37 aa, Artificial Sequence; identical to SEQ ID NO: 33894
  Cyclic GFR-binding peptide
  MOD_RES (3)..(4)..(36): Xaa is C or S

SEQ ID NO: 86660 - protein, 28 aa, Artificial Sequence
  Cyclic GFR-binding peptide
PEKMEPISILYLDENKNVVKFKYENMTV

SEQ ID NO: 86661 - protein, 39 aa, Artificial Sequence; identical to SEQ ID NO: 33897
  Cyclic GFR-binding peptide
  MOD_RES (6)..(7)..(39): Xaa is C or S

SEQ ID NO: 86662 - protein, 39 aa, Artificial Sequence; identical to SEQ ID NO: 33901
  Cyclic GFR-binding peptide
  MOD_RES (3)..(4)..(36)..(38): Xaa is C or S

SEQ ID NO: 86663 - protein, 35 aa, Artificial Sequence; identical to SEQ ID NO: 33902
  Cyclic GFR-binding peptide
  MOD_RES (3)..(4)..(35): Xaa is C or S

SEQ ID NO: 86664 - protein, 20 aa, Artificial Sequence
  Cyclic GFR-binding peptide
SATSILYYDENKNVVLRKHR

SEQ ID NO: 86665 - protein, 25 aa, Artificial Sequence
  Cyclic GFR-binding peptide
EKMEPISILYLDENKNVVKFKYENM

SEQ ID NO: 86666 - protein, 29 aa, Artificial Sequence
  Cyclic GFR-binding peptide
  MOD_RES (1)..(2): Xaa is C or S
XXVPQALSPINILYFVGRKPKVYGKIPMI

SEQ ID NO: 86667 - protein, 31 aa, Artificial Sequence
  Cyclic GFR-binding peptide
  MOD_RES (5)..(6): Xaa is C or S
SASPXXVPQDLSPINILYFVGRTPKVYGKIP

SEQ ID NO: 86668 - protein, 40 aa, Artificial Sequence; identical to SEQ ID NO: 33905
  Cyclic GFR-binding peptide
  MOD_RES (6)..(7)..(39): Xaa is C or S

SEQ ID NO: 86669 - protein, 36 aa, Artificial Sequence; identical to SEQ ID NO: 33906
  Cyclic GFR-binding peptide
  MOD_RES (3)..(4)..(36): Xaa is C or S

SEQ ID NO: 86670 - protein, 34 aa, Artificial Sequence
  Cyclic GFR-binding peptide
  MOD_RES (6)..(7): Xaa is C or S
GIPEPXXVPEKMSPISILYKDENKNVVLKYHYNM

SEQ ID NO: 86671 - protein, 21 aa, Artificial Sequence
  Cyclic GFR-binding peptide
MSPISILYKDENKNVVLKYHY

SEQ ID NO: 86672 - protein, 23 aa, Artificial Sequence
  Cyclic GFR-binding peptide
TSPISMLYKDNGRVLLLKYHYMI

SEQ ID NO: 86673 - protein, 39 aa, Artificial Sequence; identical to SEQ ID NO: 33911
  Cyclic GFR-binding peptide
  MOD_RES (3)..(4)..(36)..(38): Xaa is C or S

SEQ ID NO: 86674 - protein, 32 aa, Artificial Sequence
  Cyclic GFR-binding peptide
  MOD_RES (4)..(5): Xaa is C or S
PASXXVPARLSATSILYYDAANNVVLRKHRDM

SEQ ID NO: 86675 - protein, 32 aa, Artificial Sequence
  Cyclic GFR-binding peptide
  MOD_RES (6)..(7): Xaa is C or S
ASASPXXVPQDLSPINILYFVGRTPKVYGKIP

SEQ ID NO: 86676 - protein, 26 aa, Artificial Sequence
  Cyclic GFR-binding peptide
  MOD_RES (1)..(1): Xaa is C or S
XVPEKMSPINILYFDENKNVVYGKIP

SEQ ID NO: 86677 - protein, 31 aa, Artificial Sequence; identical to SEQ ID NO: 33912
  Cyclic GFR-binding peptide

SEQ ID NO: 86678 - protein, 36 aa, Artificial Sequence; identical to SEQ ID NO: 33914
  Cyclic GFR-binding peptide
  MOD_RES (2)..(3)..(35): Xaa is C or S

SEQ ID NO: 86679 - protein, 33 aa, Artificial Sequence; identical to SEQ ID NO: 33915
  Cyclic GFR-binding peptide
  MOD_RES (2)..(3): Xaa is C or S

SEQ ID NO: 86680 - protein, 38 aa, Artificial Sequence; identical to SEQ ID NO: 33913
  Cyclic GFR-binding peptide
  MOD_RES (4)..(5)..(36)..(38): Xaa is C or S

SEQ ID NO: 86681 - protein, 25 aa, Artificial Sequence
  Cyclic GFR-binding peptide
VPARLSATSILYYDAANNVVLRKHR

SEQ ID NO: 86682 - protein, 29 aa, Artificial Sequence
  Cyclic GFR-binding peptide
  MOD_RES (29)..(29): Xaa is C or S
KMEPISMLYLNDKQQIIKFKYEGMVVDRX

SEQ ID NO: 86683 - protein, 29 aa, Artificial Sequence
  Cyclic GFR-binding peptide
VSQDLSPINILYFIGKTPKIYGKIPMIVK

SEQ ID NO: 86684 - protein, 26 aa, Artificial Sequence
  Cyclic GFR-binding peptide
KTEPISMLYLDNGRVLLKFKYEMIVE

SEQ ID NO: 86685 - protein, 28 aa, Artificial Sequence
  Cyclic GFR-binding peptide
PVKTSPISMLYKDNGRVLLLKYHYMIVE

SEQ ID NO: 86686 - protein, 35 aa, Artificial Sequence; identical to SEQ ID NO: 33916
  Cyclic GFR-binding peptide
  MOD_RES (32)..(34): Xaa is C or S

SEQ ID NO: 86687 - protein, 40 aa, Artificial Sequence; identical to SEQ ID NO: 33920
  Cyclic GFR-binding peptide
  MOD_RES (6)..(7)..(39): Xaa is C or S

SEQ ID NO: 86688 - protein, 35 aa, Artificial Sequence; identical to SEQ ID NO: 22196
  Cyclic GFR-binding peptide
  MOD_RES (32)..(34): Xaa is C or S

SEQ ID NO: 86689 - protein, 32 aa, Artificial Sequence
  Cyclic GFR-binding peptide
  MOD_RES (6)..(7): Xaa is C or S
HVPKPXXAPTKLSPISVLYKDDSSNVILKYHY

SEQ ID NO: 86690 - protein, 26 aa, Artificial Sequence
  Cyclic GFR-binding peptide
LSPINILYFVGRTPKVYGKIPMVVKS

SEQ ID NO: 86691 - protein, 25 aa, Artificial Sequence
  Cyclic GFR-binding peptide
DLSPINILYFVGRTPKVYGKIPMVV

SEQ ID NO: 86692 - protein, 37 aa, Artificial Sequence; identical to SEQ ID NO: 33922
  Cyclic GFR-binding peptide
  MOD_RES (2)..(3)..(34)..(36): Xaa is C or S

SEQ ID NO: 86693 - protein, 37 aa, Artificial Sequence; identical to SEQ ID NO: 33923
  Cyclic GFR-binding peptide
  MOD_RES (5)..(6)..(37): Xaa is C or S

SEQ ID NO: 86694 - protein, 32 aa, Artificial Sequence
  Cyclic GFR-binding peptide
  MOD_RES (30)..(32): Xaa is C or S
EKMSATSILYYDENKNVVLRKHRNMTVESXAX

SEQ ID NO: 86695 - protein, 33 aa, Artificial Sequence; identical to SEQ ID NO: 33924
  Cyclic GFR-binding peptide
  MOD_RES (1)..(2)..(33): Xaa is C or S

SEQ ID NO: 86696 - protein, 23 aa, Artificial Sequence
  Cyclic GFR-binding peptide
KMSPISILYKDENKNVVLKYHYN

SEQ ID NO: 86697 - protein, 28 aa, Artificial Sequence
  Cyclic GFR-binding peptide
VPEKMNAISILYFDENKNVVLKKYRNMT

SEQ ID NO: 86698 - protein, 26 aa, Artificial Sequence
  Cyclic GFR-binding peptide
LSATSILYYDSANNVVLRKHRDMVVE

SEQ ID NO: 86699 - protein, 33 aa, Artificial Sequence; identical to SEQ ID NO: 33925
  Cyclic GFR-binding peptide
  MOD_RES (31)..(33): Xaa is C or S

SEQ ID NO: 86700 - protein, 28 aa, Artificial Sequence
  Cyclic GFR-binding peptide
  MOD_RES (1)..(1): Xaa is C or S
XAPVKTSPISMLYKDNGRVLLLKYHYMI

SEQ ID NO: 86701 - protein, 32 aa, Artificial Sequence; identical to SEQ ID NO: 33927
  Cyclic GFR-binding peptide
  MOD_RES (1)..(2): Xaa is C or S

SEQ ID NO: 86702 - protein, 34 aa, Artificial Sequence; identical to SEQ ID NO: 33926
  Cyclic GFR-binding peptide
  MOD_RES (32)..(34): Xaa is C or S

SEQ ID NO: 86703 - protein, 26 aa, Artificial Sequence
  Cyclic GFR-binding peptide
PQDLSPINILYFVGRTPKVYGKIPMV

SEQ ID NO: 86704 - protein, 27 aa, Artificial Sequence
  Cyclic GFR-binding peptide
TPTKMSPISMLYKNDKQQIILKYHYGM

SEQ ID NO: 86705 - protein, 29 aa, Artificial Sequence
  Cyclic GFR-binding peptide
  MOD_RES (28)..(28): Xaa is C or S
LSPISILYKDSANNVVLKYHYDMVVESXG

SEQ ID NO: 86706 - protein, 34 aa, Artificial Sequence
  Cyclic GFR-binding peptide
  MOD_RES (4)..(5): Xaa is C or S
AGPXXTPTKMEPISMLYLNDKQQIIKFKYEGMVV

SEQ ID NO: 86707 - protein, 23 aa, Artificial Sequence
  Cyclic GFR-binding peptide
SATSILYYDENKNVVLRKHRNMT

SEQ ID NO: 86708 - protein, 35 aa, Artificial Sequence
  Cyclic GFR-binding peptide
  MOD_RES (6)..(7): Xaa is C or S
GIPEPXXVPEKMSPINILYFDENKNVVYGKIPNMT

SEQ ID NO: 86709 - protein, 23 aa, Artificial Sequence
  Cyclic GFR-binding peptide
MEPISILYLDENKNVVKFKYENM

SEQ ID NO: 86710 - protein, 38 aa, Artificial Sequence; identical to SEQ ID NO: 33932
  Cyclic GFR-binding peptide
  MOD_RES (4)..(5)..(37): Xaa is C or S

SEQ ID NO: 86711 - protein, 27 aa, Artificial Sequence
  Cyclic GFR-binding peptide
  MOD_RES (1)..(2): Xaa is C or S
XXTPTKMSATSMLYYNDKQQIILRKHR

SEQ ID NO: 86712 - protein, 30 aa, Artificial Sequence
  Cyclic GFR-binding peptide
  MOD_RES (3)..(4): Xaa is C or S
EPXXVPEKMSPISILYKDENKNVVLKYHYN

SEQ ID NO: 86713 - protein, 28 aa, Artificial Sequence
  Cyclic GFR-binding peptide
EKMSPINILYFDENKNVVYGKIPNMTVE

SEQ ID NO: 86714 - protein, 34 aa, Artificial Sequence
  Cyclic GFR-binding peptide
  MOD_RES (5)..(6): Xaa is C or S
SAAPXXVPQALSPINILYFVGRKPKVYGKIPMIV

SEQ ID NO: 86715 - protein, 26 aa, Artificial Sequence
  Cyclic GFR-binding peptide
PEKMSATSILYYDENKNVVLRKHRNM

SEQ ID NO: 86716 - protein, 32 aa, Artificial Sequence; identical to SEQ ID NO: 33936
  Cyclic GFR-binding peptide
  MOD_RES (32)..(32): Xaa is C or S

SEQ ID NO: 86717 - protein, 29 aa, Artificial Sequence
  Cyclic GFR-binding peptide
  MOD_RES (29)..(29): Xaa is C or S
RLEPISILYLDSANNVVKFKYEDMVVESX

SEQ ID NO: 86718 - protein, 31 aa, Artificial Sequence
  Cyclic GFR-binding peptide
  MOD_RES (4)..(5): Xaa is C or S
PASXXVPARLSATSILYYDAANNVVLRKHRD

SEQ ID NO: 86719 - protein, 34 aa, Artificial Sequence
  Cyclic GFR-binding peptide
  MOD_RES (6)..(7): Xaa is C or S
HVPKPXXAPTKLEPISVLYLDDSSNVIKFKYENM

SEQ ID NO: 86720 - protein, 33 aa, Artificial Sequence; identical to SEQ ID NO: 33937
  Cyclic GFR-binding peptide
  MOD_RES (1)..(2): Xaa is C or S

SEQ ID NO: 86721 - protein, 23 aa, Artificial Sequence
  Cyclic GFR-binding peptide
QDLSPINILYFVGRTPKVYGKIP

SEQ ID NO: 86722 - protein, 32 aa, Artificial Sequence; identical to SEQ ID NO: 33938
  Cyclic GFR-binding peptide
  MOD_RES (1)..(32): Xaa is C or S

SEQ ID NO: 86723 - protein, 26 aa, Artificial Sequence
  Cyclic GFR-binding peptide
  MOD_RES (26)..(26): Xaa is C or S
SATSMLYYDNGRVLLLRKHRMIVEEX

SEQ ID NO: 86724 - protein, 22 aa, Artificial Sequence
  Cyclic GFR-binding peptide
SATSILYYDKGVVTYLRKHRGM

SEQ ID NO: 86725 - protein, 31 aa, Artificial Sequence
  Cyclic GFR-binding peptide
  MOD_RES (30)..(30): Xaa is C or S
PVKTSATSMLYYDNGRVLLLRKHRMIVEEXG

SEQ ID NO: 86726 - protein, 31 aa, Artificial Sequence
  Cyclic GFR-binding peptide
  MOD_RES (1)..(2): Xaa is C or S
XXVPEKMSATSILYYDENKNVVLRKHRNMTV

SEQ ID NO: 86727 - protein, 37 aa, Artificial Sequence; identical to SEQ ID NO: 33942
  Cyclic GFR-binding peptide
  MOD_RES (1)..(2)..(34)..(36): Xaa is C or S

SEQ ID NO: 86728 - protein, 27 aa, Artificial Sequence
  Cyclic GFR-binding peptide
PTKLSATSILYYDKGVVTYLRKHRGMA

SEQ ID NO: 86729 - protein, 36 aa, Artificial Sequence; identical to SEQ ID NO: 33943
  Cyclic GFR-binding peptide
  MOD_RES (3)..(4)..(35): Xaa is C or S

SEQ ID NO: 86730 - protein, 27 aa, Artificial Sequence
  Cyclic GFR-binding peptide
PQALSPINILYFVGRKPKVYGKIPMIV

SEQ ID NO: 86731 - protein, 26 aa, Artificial Sequence
  Cyclic GFR-binding peptide
KTSPISMLYKDNGRVLLLKYHYMIVE

SEQ ID NO: 86732 - protein, 30 aa, Artificial Sequence
  Cyclic GFR-binding peptide
  MOD_RES (28)..(30): Xaa is C or S
LSATSILYYDSANNVVLRKHRDMVVESXGX

SEQ ID NO: 86733 - protein, 29 aa, Artificial Sequence
  Cyclic GFR-binding peptide
  MOD_RES (1)..(2): Xaa is C or S
XXTPTKMSPISMLYKNDKQQIILKYHYGM

SEQ ID NO: 86734 - protein, 31 aa, Artificial Sequence
  Cyclic GFR-binding peptide
  MOD_RES (5)..(6): Xaa is C or S
IPEPXXVPEKMSPISILYKDENKNVVLKYHY

SEQ ID NO: 86735 - protein, 34 aa, Artificial Sequence; identical to SEQ ID NO: 33945
  Cyclic GFR-binding peptide
  MOD_RES (2)..(3): Xaa is C or S

SEQ ID NO: 86736 - protein, 29 aa, Artificial Sequence
  Cyclic GFR-binding peptide
  MOD_RES (29)..(29): Xaa is C or S
QDLSPINILYFIGKTPKIYGKIPMIVKSX

SEQ ID NO: 86737 - protein, 31 aa, Artificial Sequence
  Cyclic GFR-binding peptide
  MOD_RES (3)..(4): Xaa is C or S
GPXXTPTKMSPISMLYKNDKQQIILKYHYGM

SEQ ID NO: 86738 - protein, 22 aa, Artificial Sequence
  Cyclic GFR-binding peptide
TEPISMLYLDNGRVLLKFKYEM

SEQ ID NO: 86739 - protein, 28 aa, Artificial Sequence
  Cyclic GFR-binding peptide
TKMSPISMLYKNDKQQIILKYHYGMVVD

SEQ ID NO: 86740 - protein, 29 aa, Artificial Sequence
  Cyclic GFR-binding peptide
  MOD_RES (2)..(3): Xaa is C or S
PXXTPTKMSATSMLYYNDKQQIILRKHRG

SEQ ID NO: 86741 - protein, 39 aa, Artificial Sequence; identical to SEQ ID NO: 33949
  Cyclic GFR-binding peptide
  MOD_RES (4)..(5)..(37)..(39): Xaa is C or S

SEQ ID NO: 86742 - protein, 38 aa, Artificial Sequence; identical to SEQ ID NO: 33950
  Cyclic GFR-binding peptide
  MOD_RES (6)..(7): Xaa is C or S

SEQ ID NO: 86743 - protein, 30 aa, Artificial Sequence
  Cyclic GFR-binding peptide
  MOD_RES (1)..(1): Xaa is C or S
XVPEKMSPISILYKDENKNVVLKYHYNMTV

SEQ ID NO: 86744 - protein, 35 aa, Artificial Sequence; identical to SEQ ID NO: 33953
  Cyclic GFR-binding peptide
  MOD_RES (3)..(4): Xaa is C or S

SEQ ID NO: 86745 - protein, 24 aa, Artificial Sequence
  Cyclic GFR-binding peptide
KMSPISMLYKNDKQQIILKYHYGM

SEQ ID NO: 86746 - protein, 24 aa, Artificial Sequence
  Cyclic GFR-binding peptide
LSPINILYFVGRTPKVYGKIPMVV

SEQ ID NO: 86747 - protein, 29 aa, Artificial Sequence
  Cyclic GFR-binding peptide
VPTRLSATSILYYDSANNVVLRKHRDMVV

SEQ ID NO: 86748 - protein, 33 aa, Artificial Sequence
  Cyclic GFR-binding peptide
  MOD_RES (31)..(33): Xaa is C or S
PTRLSATSILYYDSANNVVLRKHRDMVVESXGX

SEQ ID NO: 86749 - protein, 25 aa, Artificial Sequence
  Cyclic GFR-binding peptide
RLSATSILYYDAANNVVLRKHRDMV

SEQ ID NO: 86750 - protein, 34 aa, Artificial Sequence
  Cyclic GFR-binding peptide
  MOD_RES (4)..(5): Xaa is C or S
AGPXXTPTKMSPISMLYKNDKQQIILKYHYGMVV

SEQ ID NO: 86751 - protein, 41 aa, Artificial Sequence; identical to SEQ ID NO: 33956
  Cyclic GFR-binding peptide
  MOD_RES (6)..(7)..(39)..(41): Xaa is C or S

SEQ ID NO: 86752 - protein, 28 aa, Artificial Sequence
  Cyclic GFR-binding peptide
TPTKMEPISMLYLNDKQQIIKFKYEGMV

SEQ ID NO: 86753 - protein, 24 aa, Artificial Sequence
  Cyclic GFR-binding peptide
EKMSATSILYYDENKNVVLRKHRN

SEQ ID NO: 86754 - protein, 27 aa, Artificial Sequence
  Cyclic GFR-binding peptide
  MOD_RES (27)..(27): Xaa is C or S
TSATSMLYYDNGRVLLLRKHRMIVEEX

SEQ ID NO: 86755 - protein, 24 aa, Artificial Sequence
  Cyclic GFR-binding peptide
PEKMNAISILYFDENKNVVLKKYR

SEQ ID NO: 86756 - protein, 27 aa, Artificial Sequence
  Cyclic GFR-binding peptide
VPTRLSATSILYYDSANNVVLRKHRDM

SEQ ID NO: 86757 - protein, 34 aa, Artificial Sequence; identical to SEQ ID NO: 33959
  Cyclic GFR-binding peptide
  MOD_RES (32)..(34): Xaa is C or S

SEQ ID NO: 86758 - protein, 31 aa, Artificial Sequence
  Cyclic GFR-binding peptide
  MOD_RES (31)..(31): Xaa is C or S
PEKMNAISILYFDENKNVVLKKYRNMTVESX

SEQ ID NO: 86759 - protein, 35 aa, Artificial Sequence; identical to SEQ ID NO: 33961
  Cyclic GFR-binding peptide
  MOD_RES (3)..(4): Xaa is C or S

SEQ ID NO: 86760 - protein, 38 aa, Artificial Sequence; identical to SEQ ID NO: 33962
  Cyclic GFR-binding peptide
  MOD_RES (5)..(6)..(37): Xaa is C or S

SEQ ID NO: 86761 - protein, 23 aa, Artificial Sequence
  Cyclic GFR-binding peptide
SPISMLYKDNGRVLLLKYHYMIV

SEQ ID NO: 86762 - protein, 33 aa, Artificial Sequence
  Cyclic GFR-binding peptide
  MOD_RES (6)..(7): Xaa is C or S
GIPEPXXVPEKMNAISILYFDENKNVVLKKYRN

SEQ ID NO: 86763 - protein, 34 aa, Artificial Sequence; identical to SEQ ID NO: 33963
  Cyclic GFR-binding peptide
  MOD_RES (2)..(3): Xaa is C or S

SEQ ID NO: 86764 - protein, 35 aa, Artificial Sequence; identical to SEQ ID NO: 33966
  Cyclic GFR-binding peptide
  MOD_RES (1)..(2)..(33)..(35): Xaa is C or S

SEQ ID NO: 86765 - protein, 31 aa, Artificial Sequence
  Cyclic GFR-binding peptide
  MOD_RES (2)..(3): Xaa is C or S
PXXVSQDLSPINILYFIGKTPKIYGKIPMIV

SEQ ID NO: 86766 - protein, 21 aa, Artificial Sequence
  Cyclic GFR-binding peptide
MSPISMLYKNDKQQIILKYHY

SEQ ID NO: 86767 - protein, 33 aa, Artificial Sequence
  Cyclic GFR-binding peptide
  MOD_RES (5)..(6): Xaa is C or S
ASKAXXVPTKLSATSILYYDKGVVTYLRKHRGM

SEQ ID NO: 86768 - protein, 27 aa, Artificial Sequence
  Cyclic GFR-binding peptide
  MOD_RES (27)..(27): Xaa is C or S
TSPISMLYKDNGRVLLLKYHYMIVEEX

SEQ ID NO: 86769 - protein, 26 aa, Artificial Sequence
  Cyclic GFR-binding peptide
TRLSATSILYYDSANNVVLRKHRDMV

SEQ ID NO: 86770 - protein, 37 aa, Artificial Sequence; identical to SEQ ID NO: 33970
  Cyclic GFR-binding peptide
  MOD_RES (3)..(4)..(35)..(37): Xaa is C or S

SEQ ID NO: 86771 - protein, 35 aa, Artificial Sequence; identical to SEQ ID NO: 33972
  Cyclic GFR-binding peptide
  MOD_RES (32)..(34): Xaa is C or S

SEQ ID NO: 86772 - protein, 33 aa, Artificial Sequence
  Cyclic GFR-binding peptide
  MOD_RES (3)..(4): Xaa is C or S
STXXAPVKTEPISMLYLDNGRVLLKFKYEMIVE

SEQ ID NO: 86773 - protein, 34 aa, Artificial Sequence
  Cyclic GFR-binding peptide
  MOD_RES (4)..(5): Xaa is C or S
AAPXXVPQALSPINILYFVGRKPKVYGKIPMIVR

SEQ ID NO: 86774 - protein, 30 aa, Artificial Sequence
  Cyclic GFR-binding peptide
  MOD_RES (2)..(3): Xaa is C or S
TXXAPVKTSATSMLYYDNGRVLLLRKHRMI

SEQ ID NO: 86775 - protein, 36 aa, Artificial Sequence
  Cyclic GFR-binding peptide
  MOD_RES (6)..(7): Xaa is C or S
GSAGPXXTPTKMSATSMLYYNDKQQIILRKHRGMVV

SEQ ID NO: 86776 - protein, 31 aa, Artificial Sequence
  Cyclic GFR-binding peptide
  MOD_RES (4)..(5): Xaa is C or S
PPTXXVPTRLSPISILYKDSANNVVLKYHYD

SEQ ID NO: 86777 - protein, 39 aa, Artificial Sequence; identical to SEQ ID NO: 33977
  Cyclic GFR-binding peptide
  MOD_RES (6)..(7)..(39): Xaa is C or S

SEQ ID NO: 86778 - protein, 32 aa, Artificial Sequence
  Cyclic GFR-binding peptide
  MOD_RES (3)..(4): Xaa is C or S
PTXXVPTRLEPISILYLDSANNVVKFKYEDMV

SEQ ID NO: 86779 - protein, 26 aa, Artificial Sequence
  Cyclic GFR-binding peptide
RLSATSILYYDSANNVVLRKHRDMVV

SEQ ID NO: 86780 - protein, 24 aa, Artificial Sequence
  Cyclic GFR-binding peptide
MSPINILYFDENKNVVYGKIPNMT

SEQ ID NO: 86781 - protein, 32 aa, Artificial Sequence
  Cyclic GFR-binding peptide
  MOD_RES (6)..(7): Xaa is C or S
STPPTXXVPTRLEPISILYLDSANNVVKFKYE

SEQ ID NO: 86782 - protein, 22 aa, Artificial Sequence
  Cyclic GFR-binding peptide
SPINILYFDENKNVVYGKIPNM

SEQ ID NO: 86783 - protein, 26 aa, Artificial Sequence
  Cyclic GFR-binding peptide
TRLSPISILYKDSANNVVLKYHYDMV

SEQ ID NO: 86784 - protein, 35 aa, Artificial Sequence; identical to SEQ ID NO: 33980
  Cyclic GFR-binding peptide
  MOD_RES (4)..(5): Xaa is C or S

SEQ ID NO: 86785 - protein, 20 aa, Artificial Sequence
  Cyclic GFR-binding peptide
SATSILYYDKGVVTYLRKHR

SEQ ID NO: 86786 - protein, 23 aa, Artificial Sequence
  Cyclic GFR-binding peptide
MSPISMLYKNDKQQIILKYHYGM

SEQ ID NO: 86787 - protein, 34 aa, Artificial Sequence
  Cyclic GFR-binding peptide
  MOD_RES (4)..(5): Xaa is C or S
PSTXXAPVKTSPISMLYKDNGRVLLLKYHYMIVE

SEQ ID NO: 86788 - protein, 29 aa, Artificial Sequence
  Cyclic GFR-binding peptide
  MOD_RES (3)..(4): Xaa is C or S
EPXXVPEKMSATSILYYDENKNVVLRKHR

SEQ ID NO: 86789 - protein, 29 aa, Artificial Sequence
  Cyclic GFR-binding peptide
VPEKMSPISILYKDENKNVVLKYHYNMTV

SEQ ID NO: 86790 - protein, 25 aa, Artificial Sequence
  Cyclic GFR-binding peptide
VKTSATSMLYYDNGRVLLLRKHRMI

SEQ ID NO: 86791 - protein, 22 aa, Artificial Sequence
  Cyclic GFR-binding peptide
SATSILYYDAANNVVLRKHRDM

SEQ ID NO: 86792 - protein, 31 aa, Artificial Sequence; identical to SEQ ID NO: 33983
  Cyclic GFR-binding peptide

SEQ ID NO: 86793 - protein, 34 aa, Artificial Sequence; identical to SEQ ID NO: 33984
  Cyclic GFR-binding peptide
  MOD_RES (3)..(4): Xaa is C or S

SEQ ID NO: 86794 - protein, 23 aa, Artificial Sequence
  Cyclic GFR-binding peptide
TRLSATSILYYDSANNVVLRKHR

SEQ ID NO: 86795 - protein, 31 aa, Artificial Sequence
  Cyclic GFR-binding peptide
  MOD_RES (4)..(5): Xaa is C or S
PSTXXAPVKTSPISMLYKDNGRVLLLKYHYM

SEQ ID NO: 86796 - protein, 38 aa, Artificial Sequence; identical to SEQ ID NO: 33988
  Cyclic GFR-binding peptide
  MOD_RES (3)..(4)..(36)..(38): Xaa is C or S

SEQ ID NO: 86797 - protein, 42 aa, Artificial Sequence; identical to SEQ ID NO: 33992
  Cyclic GFR-binding peptide
  MOD_RES (6)..(7)..(39)..(41): Xaa is C or S

SEQ ID NO: 86798 - protein, 26 aa, Artificial Sequence
  Cyclic GFR-binding peptide
  MOD_RES (1)..(1): Xaa is C or S
XTPTKMSATSMLYYNDKQQIILRKHR

SEQ ID NO: 86799 - protein, 33 aa, Artificial Sequence; identical to SEQ ID NO: 33996
  Cyclic GFR-binding peptide
  MOD_RES (1)..(2): Xaa is C or S

SEQ ID NO: 86800 - protein, 26 aa, Artificial Sequence
  Cyclic GFR-binding peptide
SQDLSPINILYFIGKTPKIYGKIPMI

SEQ ID NO: 86801 - protein, 29 aa, Artificial Sequence
  Cyclic GFR-binding peptide
  MOD_RES (3)..(4): Xaa is C or S
EPXXVPEKMNAISILYFDENKNVVLKKYR

SEQ ID NO: 86802 - protein, 27 aa, Artificial Sequence
  Cyclic GFR-binding peptide
  MOD_RES (1)..(2): Xaa is C or S
XXVPEKMSPINILYFDENKNVVYGKIP

SEQ ID NO: 86803 - protein, 30 aa, Artificial Sequence
  Cyclic GFR-binding peptide
  MOD_RES (27)..(29): Xaa is C or S
LSPINILYFVGRTPKVYGKIPMVVKSXKXS

SEQ ID NO: 86804 - protein, 30 aa, Artificial Sequence
  Cyclic GFR-binding peptide
  MOD_RES (2)..(3): Xaa is C or S
TXXVPTRLEPISILYLDSANNVVKFKYEDM

SEQ ID NO: 86805 - protein, 30 aa, Artificial Sequence
  Cyclic GFR-binding peptide
PTKLSATSILYYDKGVVTYLRKHRGMAVSE

SEQ ID NO: 86806 - protein, 38 aa, Artificial Sequence; identical to SEQ ID NO: 34001
  Cyclic GFR-binding peptide
  MOD_RES (6)..(7): Xaa is C or S

SEQ ID NO: 86807 - protein, 21 aa, Artificial Sequence
  Cyclic GFR-binding peptide
SPISILYKDSANNVVLKYHYD

SEQ ID NO: 86808 - protein, 41 aa, Artificial Sequence; identical to SEQ ID NO: 34004
  Cyclic GFR-binding peptide
  MOD_RES (6)..(7)..(39)..(41): Xaa is C or S

SEQ ID NO: 86809 - protein, 24 aa, Artificial Sequence
  Cyclic GFR-binding peptide
MEPISMLYLNDKQQIIKFKYEGMV

SEQ ID NO: 86810 - protein, 35 aa, Artificial Sequence; identical to SEQ ID NO: 34005
  Cyclic GFR-binding peptide
  MOD_RES (4)..(5): Xaa is C or S

SEQ ID NO: 86811 - protein, 29 aa, Artificial Sequence
  Cyclic GFR-binding peptide
  MOD_RES (3)..(4): Xaa is C or S
ASXXVPARLSATSILYYDAANNVVLRKHR

SEQ ID NO: 86812 - protein, 39 aa, Artificial Sequence; identical to SEQ ID NO: 34006
  Cyclic GFR-binding peptide
  MOD_RES (4)..(5)..(37)..(39): Xaa is C or S

SEQ ID NO: 86813 - protein, 27 aa, Artificial Sequence
  Cyclic GFR-binding peptide
MSATSILYYDENKNVVLRKHRNMTVES

SEQ ID NO: 86814 - protein, 38 aa, Artificial Sequence; identical to SEQ ID NO: 34007
  Cyclic GFR-binding peptide
  MOD_RES (5)..(6)..(38): Xaa is C or S

SEQ ID NO: 86815 - protein, 26 aa, Artificial Sequence
  Cyclic GFR-binding peptide
VKTEPISMLYLDNGRVLLKFKYEMIV

SEQ ID NO: 86816 - protein, 32 aa, Artificial Sequence
  Cyclic GFR-binding peptide
  MOD_RES (30)..(32): Xaa is C or S
TKLSATSILYYDKGVVTYLRKHRGMAVSEXGX

SEQ ID NO: 86817 - protein, 30 aa, Artificial Sequence
  Cyclic GFR-binding peptide
  MOD_RES (27)..(29): Xaa is C or S
TSATSMLYYDNGRVLLLRKHRMIVEEXGXL

SEQ ID NO: 86818 - protein, 30 aa, Artificial Sequence
  Cyclic GFR-binding peptide
  MOD_RES (29)..(29): Xaa is C or S
KMEPISMLYLNDKQQIIKFKYEGMVVDRXG

SEQ ID NO: 86819 - protein, 34 aa, Artificial Sequence; identical to SEQ ID NO: 34010
  Cyclic GFR-binding peptide
  MOD_RES (1)..(2)..(33): Xaa is C or S

SEQ ID NO: 86820 - protein, 33 aa, Artificial Sequence
  Cyclic GFR-binding peptide
  MOD_RES (4)..(5): Xaa is C or S
ASPXXVSQDLSPINILYFIGKTPKIYGKIPMIV

SEQ ID NO: 86821 - protein, 29 aa, Artificial Sequence
  Cyclic GFR-binding peptide
PVKTSPISMLYKDNGRVLLLKYHYMIVEE

SEQ ID NO: 86822 - protein, 22 aa, Artificial Sequence
  Cyclic GFR-binding peptide
LSPINILYFVGRTPKVYGKIPM

SEQ ID NO: 86823 - protein, 38 aa, Artificial Sequence; identical to SEQ ID NO: 34012
  Cyclic GFR-binding peptide
  MOD_RES (2)..(3)..(35)..(37): Xaa is C or S

SEQ ID NO: 86824 - protein, 32 aa, Artificial Sequence; identical to SEQ ID NO: 34013
  Cyclic GFR-binding peptide
  MOD_RES (1)..(1): Xaa is C or S

SEQ ID NO: 86825 - protein, 29 aa, Artificial Sequence
  Cyclic GFR-binding peptide
  MOD_RES (28)..(28): Xaa is C or S
MSPISMLYKNDKQQIILKYHYGMVVDRXG

SEQ ID NO: 86826 - protein, 34 aa, Artificial Sequence; identical to SEQ ID NO: 34015
  Cyclic GFR-binding peptide
  MOD_RES (1)..(32)..(34): Xaa is C or S

SEQ ID NO: 86827 - protein, 37 aa, Artificial Sequence; identical to SEQ ID NO: 34016
  Cyclic GFR-binding peptide
  MOD_RES (5)..(6)..(37): Xaa is C or S

SEQ ID NO: 86828 - protein, 37 aa, Artificial Sequence; identical to SEQ ID NO: 34018
  Cyclic GFR-binding peptide
  MOD_RES (2)..(3)..(35)..(37): Xaa is C or S

SEQ ID NO: 86829 - protein, 25 aa, Artificial Sequence
  Cyclic GFR-binding peptide
KMEPISILYLDENKNVVKFKYENMT

SEQ ID NO: 86830 - protein, 26 aa, Artificial Sequence
  Cyclic GFR-binding peptide
PTKMSATSMLYYNDKQQIILRKHRGM

SEQ ID NO: 86831 - protein, 29 aa, Artificial Sequence
  Cyclic GFR-binding peptide
  MOD_RES (29)..(29): Xaa is C or S
KMSATSILYYDENKNVVLRKHRNMTVESX

SEQ ID NO: 86832 - protein, 21 aa, Artificial Sequence
  Cyclic GFR-binding peptide
LSATSILYYDSANNVVLRKHR

SEQ ID NO: 86833 - protein, 29 aa, Artificial Sequence
  Cyclic GFR-binding peptide
  MOD_RES (26)..(28): Xaa is C or S
SPINILYFIGKTPKIYGKIPMIVKSXKXS

SEQ ID NO: 86834 - protein, 35 aa, Artificial Sequence; identical to SEQ ID NO: 34021
  Cyclic GFR-binding peptide
  MOD_RES (2)..(3)..(35): Xaa is C or S

SEQ ID NO: 86835 - protein, 33 aa, Artificial Sequence
  Cyclic GFR-binding peptide
  MOD_RES (31)..(33): Xaa is C or S
PTKMSATSMLYYNDKQQIILRKHRGMVVDRXGX

SEQ ID NO: 86836 - protein, 29 aa, Artificial Sequence
  Cyclic GFR-binding peptide
  MOD_RES (1)..(1): Xaa is C or S
XVPQALSPINILYFVGRKPKVYGKIPMIV

SEQ ID NO: 86837 - protein, 38 aa, Artificial Sequence; identical to SEQ ID NO: 34023
  Cyclic GFR-binding peptide
  MOD_RES (5)..(6)..(37): Xaa is C or S

SEQ ID NO: 86838 - protein, 25 aa, Artificial Sequence
  Cyclic GFR-binding peptide
MSATSILYYDENKNVVLRKHRNMTV

SEQ ID NO: 86839 - protein, 39 aa, Artificial Sequence; identical to SEQ ID NO: 34024
  Cyclic GFR-binding peptide
  MOD_RES (4)..(5)..(36)..(38): Xaa is C or S

SEQ ID NO: 86840 - protein, 26 aa, Artificial Sequence
  Cyclic GFR-binding peptide
VPARLSATSILYYDAANNVVLRKHRD

SEQ ID NO: 86841 - protein, 27 aa, Artificial Sequence
  Cyclic GFR-binding peptide
  MOD_RES (1)..(2): Xaa is C or S
XXVPEKMSPISILYKDENKNVVLKYHY

SEQ ID NO: 86842 - protein, 29 aa, Artificial Sequence
  Cyclic GFR-binding peptide
  MOD_RES (3)..(4): Xaa is C or S
APXXVPQALSPINILYFVGRKPKVYGKIP

SEQ ID NO: 86843 - protein, 26 aa, Artificial Sequence
  Cyclic GFR-binding peptide
  MOD_RES (1)..(1): Xaa is C or S
XVPEKMEPISILYLDENKNVVKFKYE

SEQ ID NO: 86844 - protein, 33 aa, Artificial Sequence; identical to SEQ ID NO: 34026
  Cyclic GFR-binding peptide
  MOD_RES (1)..(2): Xaa is C or S

SEQ ID NO: 86845 - protein, 37 aa, Artificial Sequence; identical to SEQ ID NO: 34027
  Cyclic GFR-binding peptide
  MOD_RES (4)..(5)..(36): Xaa is C or S

SEQ ID NO: 86846 - protein, 31 aa, Artificial Sequence
  Cyclic GFR-binding peptide
  MOD_RES (5)..(6): Xaa is C or S
APASXXVPARLSATSILYYDAANNVVLRKHR

SEQ ID NO: 86847 - protein, 29 aa, Artificial Sequence
  Cyclic GFR-binding peptide
  MOD_RES (28)..(28): Xaa is C or S
KTSPISMLYKDNGRVLLLKYHYMIVEEXG

SEQ ID NO: 86848 - protein, 30 aa, Artificial Sequence
  Cyclic GFR-binding peptide
PTKMSATSMLYYNDKQQIILRKHRGMVVDR

SEQ ID NO: 86849 - protein, 25 aa, Artificial Sequence
  Cyclic GFR-binding peptide
TKMEPISMLYLNDKQQIIKFKYEGM

SEQ ID NO: 86850 - protein, 34 aa, Artificial Sequence; identical to SEQ ID NO: 34030
  Cyclic GFR-binding peptide
  MOD_RES (1)..(32)..(34): Xaa is C or S

SEQ ID NO: 86851 - protein, 31 aa, Artificial Sequence; identical to SEQ ID NO: 34031
  Cyclic GFR-binding peptide

SEQ ID NO: 86852 - protein, 39 aa, Artificial Sequence; identical to SEQ ID NO: 34032
  Cyclic GFR-binding peptide
  MOD_RES (3)..(4)..(36)..(38): Xaa is C or S

SEQ ID NO: 86853 - protein, 32 aa, Artificial Sequence
  Cyclic GFR-binding peptide
  MOD_RES (2)..(3): Xaa is C or S
PXXTPTKMSPISMLYKNDKQQIILKYHYGMVV

SEQ ID NO: 86854 - protein, 26 aa, Artificial Sequence
  Cyclic GFR-binding peptide
  MOD_RES (1)..(1): Xaa is C or S
XVPQALSPINILYFVGRKPKVYGKIP

SEQ ID NO: 86855 - protein, 23 aa, Artificial Sequence
  Cyclic GFR-binding peptide
TRLSPISILYKDSANNVVLKYHY

SEQ ID NO: 86856 - protein, 38 aa, Artificial Sequence; identical to SEQ ID NO: 34037
  Cyclic GFR-binding peptide
  MOD_RES (6)..(7): Xaa is C or S

SEQ ID NO: 86857 - protein, 23 aa, Artificial Sequence
  Cyclic GFR-binding peptide
SPINILYFVGRTPKVYGKIPMVV

SEQ ID NO: 86858 - protein, 22 aa, Artificial Sequence
  Cyclic GFR-binding peptide
KMSPINILYFDENKNVVYGKIP

SEQ ID NO: 86859 - protein, 34 aa, Artificial Sequence; identical to SEQ ID NO: 21715
  Cyclic GFR-binding peptide
  MOD_RES (31)..(33): Xaa is C or S

SEQ ID NO: 86860 - protein, 31 aa, Artificial Sequence
  Cyclic GFR-binding peptide
  MOD_RES (5)..(6): Xaa is C or S
VPSTXXAPVKTSATSMLYYDNGRVLLLRKHR

SEQ ID NO: 86861 - protein, 30 aa, Artificial Sequence
  Cyclic GFR-binding peptide
  MOD_RES (1)..(2): Xaa is C or S
XXAPVKTSATSMLYYDNGRVLLLRKHRMIV

SEQ ID NO: 86862 - protein, 24 aa, Artificial Sequence
  Cyclic GFR-binding peptide
PQALSPINILYFVGRKPKVYGKIP

SEQ ID NO: 86863 - protein, 33 aa, Artificial Sequence
  Cyclic GFR-binding peptide
  MOD_RES (6)..(7): Xaa is C or S
GSAGPXXTPTKMSPISMLYKNDKQQIILKYHYG

SEQ ID NO: 86864 - protein, 31 aa, Artificial Sequence
  Cyclic GFR-binding peptide
  MOD_RES (2)..(3): Xaa is C or S
TXXVPTRLSPISILYKDSANNVVLKYHYDMV

SEQ ID NO: 86865 - protein, 27 aa, Artificial Sequence
  Cyclic GFR-binding peptide
  MOD_RES (1)..(2): Xaa is C or S
XXTPTKMEPISMLYLNDKQQIIKFKYE

SEQ ID NO: 86866 - protein, 30 aa, Artificial Sequence
  Cyclic GFR-binding peptide
  MOD_RES (2)..(3): Xaa is C or S
PXXTPTKMSPISMLYKNDKQQIILKYHYGM

SEQ ID NO: 86867 - protein, 30 aa, Artificial Sequence; identical to SEQ ID NO: 34044
  Cyclic GFR-binding peptide

SEQ ID NO: 86868 - protein, 32 aa, Artificial Sequence; identical to SEQ ID NO: 34045
  Cyclic GFR-binding peptide
  MOD_RES (1)..(1): Xaa is C or S

SEQ ID NO: 86869 - protein, 28 aa, Artificial Sequence
  Cyclic GFR-binding peptide
VPEKMSATSILYYDENKNVVLRKHRNMT

SEQ ID NO: 86870 - protein, 33 aa, Artificial Sequence
  Cyclic GFR-binding peptide
  MOD_RES (30)..(32): Xaa is C or S
EKMNAISILYFDENKNVVLKKYRNMTVESXAXR

SEQ ID NO: 86871 - protein, 33 aa, Artificial Sequence
  Cyclic GFR-binding peptide
  MOD_RES (5)..(6): Xaa is C or S
SAGPXXTPTKMEPISMLYLNDKQQIIKFKYEGM

SEQ ID NO: 86872 - protein, 35 aa, Artificial Sequence; identical to SEQ ID NO: 34047
  Cyclic GFR-binding peptide
  MOD_RES (4)..(5): Xaa is C or S

SEQ ID NO: 86873 - protein, 29 aa, Artificial Sequence
  Cyclic GFR-binding peptide
TRLSATSILYYDSANNVVLRKHRDMVVES

SEQ ID NO: 86874 - protein, 24 aa, Artificial Sequence
  Cyclic GFR-binding peptide
SPISILYKDENKNVVLKYHYNMTV

SEQ ID NO: 86875 - protein, 27 aa, Artificial Sequence
  Cyclic GFR-binding peptide
TRLSATSILYYDSANNVVLRKHRDMVV

SEQ ID NO: 86876 - protein, 28 aa, Artificial Sequence
  Cyclic GFR-binding peptide
  MOD_RES (28)..(28): Xaa is C or S
KTSPISMLYKDNGRVLLLKYHYMIVEEX

SEQ ID NO: 86877 - protein, 31 aa, Artificial Sequence
  Cyclic GFR-binding peptide
  MOD_RES (30)..(30): Xaa is C or S
TKLSATSILYYDKGVVTYLRKHRGMAVSEXG

SEQ ID NO: 86878 - protein, 27 aa, Artificial Sequence
  Cyclic GFR-binding peptide
RLSPISILYKDSANNVVLKYHYDMVVE

SEQ ID NO: 86879 - protein, 33 aa, Artificial Sequence; identical to SEQ ID NO: 34052
  Cyclic GFR-binding peptide
  MOD_RES (2)..(3): Xaa is C or S

SEQ ID NO: 86880 - protein, 37 aa, Artificial Sequence; identical to SEQ ID NO: 34053
  Cyclic GFR-binding peptide
  MOD_RES (4)..(5)..(37): Xaa is C or S

SEQ ID NO: 86881 - protein, 30 aa, Artificial Sequence
  Cyclic GFR-binding peptide
  MOD_RES (1)..(2): Xaa is C or S
XXVPEKMSATSILYYDENKNVVLRKHRNMT

SEQ ID NO: 86882 - protein, 42 aa, Artificial Sequence; identical to SEQ ID NO: 34054
  Cyclic GFR-binding peptide
  MOD_RES (6)..(7)..(39)..(41): Xaa is C or S

SEQ ID NO: 86883 - protein, 28 aa, Artificial Sequence
  Cyclic GFR-binding peptide
RLSATSILYYDSANNVVLRKHRDMVVES

SEQ ID NO: 86884 - protein, 30 aa, Artificial Sequence; identical to SEQ ID NO: 34057
  Cyclic GFR-binding peptide

SEQ ID NO: 86885 - protein, 38 aa, Artificial Sequence; identical to SEQ ID NO: 34058
  Cyclic GFR-binding peptide
  MOD_RES (4)..(5)..(36)..(38): Xaa is C or S

SEQ ID NO: 86886 - protein, 23 aa, Artificial Sequence
  Cyclic GFR-binding peptide
KLSATSILYYDKGVVTYLRKHRG

SEQ ID NO: 86887 - protein, 24 aa, Artificial Sequence
  Cyclic GFR-binding peptide
SPINILYFDENKNVVYGKIPNMTV

SEQ ID NO: 86888 - protein, 28 aa, Artificial Sequence
  Cyclic GFR-binding peptide
  MOD_RES (27)..(27): Xaa is C or S
EPISILYLDSANNVVKFKYEDMVVESXG

SEQ ID NO: 86889 - protein, 25 aa, Artificial Sequence
  Cyclic GFR-binding peptide
EPISMLYLDNGRVLLKFKYEMIVEE

SEQ ID NO: 86890 - protein, 32 aa, Artificial Sequence; identical to SEQ ID NO: 34060
  Cyclic GFR-binding peptide
  MOD_RES (31)..(31): Xaa is C or S

SEQ ID NO: 86891 - protein, 37 aa, Artificial Sequence; identical to SEQ ID NO: 34061
  Cyclic GFR-binding peptide
  MOD_RES (2)..(3)..(35)..(37): Xaa is C or S

SEQ ID NO: 86892 - protein, 30 aa, Artificial Sequence
  Cyclic GFR-binding peptide
  MOD_RES (4)..(5): Xaa is C or S
PEPXXVPEKMEPISILYLDENKNVVKFKYE

SEQ ID NO: 86893 - protein, 28 aa, Artificial Sequence
  Cyclic GFR-binding peptide
  MOD_RES (28)..(28): Xaa is C or S
MEPISILYLDENKNVVKFKYENMTVESX

SEQ ID NO: 86894 - protein, 27 aa, Artificial Sequence
  Cyclic GFR-binding peptide
RLEPISILYLDSANNVVKFKYEDMVVE

SEQ ID NO: 86895 - protein, 32 aa, Artificial Sequence
  Cyclic GFR-binding peptide
  MOD_RES (2)..(3): Xaa is C or S
SXXVPARLSATSILYYDAANNVVLRKHRDMVV

SEQ ID NO: 86896 - protein, 31 aa, Artificial Sequence; identical to SEQ ID NO: 34062
  Cyclic GFR-binding peptide

SEQ ID NO: 86897 - protein, 21 aa, Artificial Sequence
  Cyclic GFR-binding peptide
LSPISILYKDSANNVVLKYHY

SEQ ID NO: 86898 - protein, 33 aa, Artificial Sequence; identical to SEQ ID NO: 34064
  Cyclic GFR-binding peptide
  MOD_RES (31)..(33): Xaa is C or S

SEQ ID NO: 86899 - protein, 31 aa, Artificial Sequence
  Cyclic GFR-binding peptide
  MOD_RES (5)..(6): Xaa is C or S
SAGPXXTPTKMSATSMLYYNDKQQIILRKHR

SEQ ID NO: 86900 - protein, 29 aa, Artificial Sequence
  Cyclic GFR-binding peptide
  MOD_RES (27)..(29): Xaa is C or S
NAISILYFDENKNVVLKKYRNMTVESXAX

SEQ ID NO: 86901 - protein, 37 aa, Artificial Sequence; identical to SEQ ID NO: 34066
  Cyclic GFR-binding peptide
  MOD_RES (6)..(7): Xaa is C or S

SEQ ID NO: 86902 - protein, 25 aa, Artificial Sequence
  Cyclic GFR-binding peptide
PARLSATSILYYDAANNVVLRKHRD

SEQ ID NO: 86903 - protein, 32 aa, Artificial Sequence
  Cyclic GFR-binding peptide
  MOD_RES (6)..(7): Xaa is C or S
ASASPXXVSQDLSPINILYFIGKTPKIYGKIP

SEQ ID NO: 86904 - protein, 38 aa, Artificial Sequence; identical to SEQ ID NO: 34067
  Cyclic GFR-binding peptide
  MOD_RES (5)..(6)..(37): Xaa is C or S

SEQ ID NO: 86905 - protein, 27 aa, Artificial Sequence
  Cyclic GFR-binding peptide
  MOD_RES (1)..(2): Xaa is C or S
XXVPEKMSATSILYYDENKNVVLRKHR

SEQ ID NO: 86906 - protein, 33 aa, Artificial Sequence
  Cyclic GFR-binding peptide
  MOD_RES (5)..(6): Xaa is C or S
IPEPXXVPEKMEPISILYLDENKNVVKFKYENM

SEQ ID NO: 86907 - protein, 36 aa, Artificial Sequence
  Cyclic GFR-binding peptide
  MOD_RES (6)..(7): Xaa is C or S
GIPEPXXVPEKMSPISILYKDENKNVVLKYHYNMTV

SEQ ID NO: 86908 - protein, 32 aa, Artificial Sequence
  Cyclic GFR-binding peptide
  MOD_RES (2)..(3): Xaa is C or S
TXXAPVKTEPISMLYLDNGRVLLKFKYEMIVE

SEQ ID NO: 86909 - protein, 33 aa, Artificial Sequence
  Cyclic GFR-binding peptide
  MOD_RES (30)..(32): Xaa is C or S
EKMEPISILYLDENKNVVKFKYENMTVESXAXR

SEQ ID NO: 86910 - protein, 24 aa, Artificial Sequence
  Cyclic GFR-binding peptide
PVKTEPISMLYLDNGRVLLKFKYE

SEQ ID NO: 86911 - protein, 23 aa, Artificial Sequence
  Cyclic GFR-binding peptide
KMSATSMLYYNDKQQIILRKHRG

SEQ ID NO: 86912 - protein, 32 aa, Artificial Sequence; identical to SEQ ID NO: 34070
  Cyclic GFR-binding peptide
  MOD_RES (32)..(32): Xaa is C or S

SEQ ID NO: 86913 - protein, 27 aa, Artificial Sequence
  Cyclic GFR-binding peptide
VKTSATSMLYYDNGRVLLLRKHRMIVE

SEQ ID NO: 86914 - protein, 35 aa, Artificial Sequence; identical to SEQ ID NO: 34073
  Cyclic GFR-binding peptide
  MOD_RES (1)..(2)..(34): Xaa is C or S

SEQ ID NO: 86915 - protein, 31 aa, Artificial Sequence
  Cyclic GFR-binding peptide
  MOD_RES (5)..(6): Xaa is C or S
VPSTXXAPVKTSPISMLYKDNGRVLLLKYHY

SEQ ID NO: 86916 - protein, 20 aa, Artificial Sequence
  Cyclic GFR-binding peptide
NAISILYFDENKNVVLKKYR

SEQ ID NO: 86917 - protein, 34 aa, Artificial Sequence
  Cyclic GFR-binding peptide
  MOD_RES (31)..(33): Xaa is C or S
PTKMEPISMLYLNDKQQIIKFKYEGMVVDRXGXS

SEQ ID NO: 86918 - protein, 34 aa, Artificial Sequence; identical to SEQ ID NO: 34076
  Cyclic GFR-binding peptide
  MOD_RES (3)..(4): Xaa is C or S

SEQ ID NO: 86919 - protein, 36 aa, Artificial Sequence; identical to SEQ ID NO: 34077
  Cyclic GFR-binding peptide
  MOD_RES (1)..(33)..(35): Xaa is C or S

SEQ ID NO: 86920 - protein, 38 aa, Artificial Sequence; identical to SEQ ID NO: 34078
  Cyclic GFR-binding peptide
  MOD_RES (3)..(4)..(36)..(38): Xaa is C or S

SEQ ID NO: 86921 - protein, 37 aa, Artificial Sequence; identical to SEQ ID NO: 34080
  Cyclic GFR-binding peptide
  MOD_RES (4)..(5)..(37): Xaa is C or S

SEQ ID NO: 86922 - protein, 36 aa, Artificial Sequence; identical to SEQ ID NO: 34082
  Cyclic GFR-binding peptide
  MOD_RES (3)..(4)..(36): Xaa is C or S

SEQ ID NO: 86923 - protein, 32 aa, Artificial Sequence
  Cyclic GFR-binding peptide
  MOD_RES (2)..(3): Xaa is C or S
PXXVPEKMEPISILYLDENKNVVKFKYENMTV

SEQ ID NO: 86924 - protein, 24 aa, Artificial Sequence
  Cyclic GFR-binding peptide
DLSPINILYFIGKTPKIYGKIPMI

SEQ ID NO: 86925 - protein, 22 aa, Artificial Sequence
  Cyclic GFR-binding peptide
EPISMLYLNDKQQIIKFKYEGM

SEQ ID NO: 86926 - protein, 25 aa, Artificial Sequence
  Cyclic GFR-binding peptide
VPTKLSATSILYYDKGVVTYLRKHR

SEQ ID NO: 86927 - protein, 21 aa, Artificial Sequence
  Cyclic GFR-binding peptide
SATSILYYDKGVVTYLRKHRG

SEQ ID NO: 86928 - protein, 37 aa, Artificial Sequence; identical to SEQ ID NO: 34083
  Cyclic GFR-binding peptide
  MOD_RES (1)..(2)..(34)..(36): Xaa is C or S

SEQ ID NO: 86929 - protein, 34 aa, Artificial Sequence
  Cyclic GFR-binding peptide
  MOD_RES (4)..(5): Xaa is C or S
PASXXVPARLSATSILYYDAANNVVLRKHRDMVV

SEQ ID NO: 86930 - protein, 35 aa, Artificial Sequence
  Cyclic GFR-binding peptide
  MOD_RES (6)..(7): Xaa is C or S
STPPTXXVPTRLSATSILYYDSANNVVLRKHRDMV

SEQ ID NO: 86931 - protein, 36 aa, Artificial Sequence; identical to SEQ ID NO: 34085
  Cyclic GFR-binding peptide
  MOD_RES (1)..(2)..(33)..(35): Xaa is C or S

SEQ ID NO: 86932 - protein, 39 aa, Artificial Sequence; identical to SEQ ID NO: 34086
  Cyclic GFR-binding peptide
  MOD_RES (5)..(6)..(37)..(39): Xaa is C or S

SEQ ID NO: 86933 - protein, 28 aa, Artificial Sequence
  Cyclic GFR-binding peptide
PTRLSPISILYKDSANNVVLKYHYDMVV

SEQ ID NO: 86934 - protein, 23 aa, Artificial Sequence
  Cyclic GFR-binding peptide
RLSATSILYYDSANNVVLRKHRD

SEQ ID NO: 86935 - protein, 39 aa, Artificial Sequence; identical to SEQ ID NO: 34087
  Cyclic GFR-binding peptide
  MOD_RES (3)..(4)..(36)..(38): Xaa is C or S

SEQ ID NO: 86936 - protein, 29 aa, Artificial Sequence
  Cyclic GFR-binding peptide
  MOD_RES (1)..(1): Xaa is C or S
XTPTKMSATSMLYYNDKQQIILRKHRGMV

SEQ ID NO: 86937 - protein, 35 aa, Artificial Sequence; identical to SEQ ID NO: 34089
  Cyclic GFR-binding peptide
  MOD_RES (3)..(4): Xaa is C or S

SEQ ID NO: 86938 - protein, 29 aa, Artificial Sequence
  Cyclic GFR-binding peptide
PEKMNAISILYFDENKNVVLKKYRNMTVE

SEQ ID NO: 86939 - protein, 30 aa, Artificial Sequence
  Cyclic GFR-binding peptide
  MOD_RES (3)..(4): Xaa is C or S
EPXXVPEKMSPINILYFDENKNVVYGKIPN

SEQ ID NO: 86940 - protein, 31 aa, Artificial Sequence
  Cyclic GFR-binding peptide
  MOD_RES (4)..(5): Xaa is C or S
AGPXXTPTKMEPISMLYLNDKQQIIKFKYEG

SEQ ID NO: 86941 - protein, 34 aa, Artificial Sequence; identical to SEQ ID NO: 34090
  Cyclic GFR-binding peptide
  MOD_RES (2)..(3): Xaa is C or S

SEQ ID NO: 86942 - protein, 26 aa, Artificial Sequence
  Cyclic GFR-binding peptide
  MOD_RES (1)..(1): Xaa is C or S
XTPTKMSPISMLYKNDKQQIILKYHY

SEQ ID NO: 86943 - protein, 24 aa, Artificial Sequence
  Cyclic GFR-binding peptide
PEKMSATSILYYDENKNVVLRKHR

SEQ ID NO: 86944 - protein, 33 aa, Artificial Sequence
  Cyclic GFR-binding peptide
  MOD_RES (3)..(4): Xaa is C or S
PTXXVPTRLEPISILYLDSANNVVKFKYEDMVV

SEQ ID NO: 86945 - protein, 35 aa, Artificial Sequence; identical to SEQ ID NO: 34093
  Cyclic GFR-binding peptide
  MOD_RES (1)..(2)..(34): Xaa is C or S

SEQ ID NO: 86946 - protein, 31 aa, Artificial Sequence
  Cyclic GFR-binding peptide
  MOD_RES (5)..(6): Xaa is C or S
SAGPXXTPTKMSPISMLYKNDKQQIILKYHY

SEQ ID NO: 86947 - protein, 40 aa, Artificial Sequence; identical to SEQ ID NO: 34096
  Cyclic GFR-binding peptide
  MOD_RES (5)..(6)..(37)..(39): Xaa is C or S

SEQ ID NO: 86948 - protein, 24 aa, Artificial Sequence
  Cyclic GFR-binding peptide
PEKMEPISILYLDENKNVVKFKYE

SEQ ID NO: 86949 - protein, 27 aa, Artificial Sequence
  Cyclic GFR-binding peptide
  MOD_RES (27)..(27): Xaa is C or S
SATSILYYDKGVVTYLRKHRGMAVSEX

SEQ ID NO: 86950 - protein, 36 aa, Artificial Sequence; identical to SEQ ID NO: 34099
  Cyclic GFR-binding peptide
  MOD_RES (1)..(33)..(35): Xaa is C or S

SEQ ID NO: 86951 - protein, 30 aa, Artificial Sequence
  Cyclic GFR-binding peptide
  MOD_RES (28)..(30): Xaa is C or S
MSPINILYFDENKNVVYGKIPNMTVESXAX

SEQ ID NO: 86952 - protein, 33 aa, Artificial Sequence
  Cyclic GFR-binding peptide
  MOD_RES (3)..(4): Xaa is C or S
EPXXVPEKMSATSILYYDENKNVVLRKHRNMTV

SEQ ID NO: 86953 - protein, 26 aa, Artificial Sequence
  Cyclic GFR-binding peptide
VPTRLSATSILYYDSANNVVLRKHRD

SEQ ID NO: 86954 - protein, 33 aa, Artificial Sequence
  Cyclic GFR-binding peptide
  MOD_RES (30)..(32): Xaa is C or S
EKMSPISILYKDENKNVVLKYHYNMTVESXAXR

SEQ ID NO: 86955 - protein, 29 aa, Artificial Sequence
  Cyclic GFR-binding peptide
  MOD_RES (29)..(29): Xaa is C or S
KMEPISILYLDENKNVVKFKYENMTVESX

SEQ ID NO: 86956 - protein, 35 aa, Artificial Sequence; identical to SEQ ID NO: 34100
  Cyclic GFR-binding peptide
  MOD_RES (2)..(3)..(35): Xaa is C or S

SEQ ID NO: 86957 - protein, 38 aa, Artificial Sequence; identical to SEQ ID NO: 34101
  Cyclic GFR-binding peptide
  MOD_RES (4)..(5)..(37): Xaa is C or S

SEQ ID NO: 86958 - protein, 27 aa, Artificial Sequence
  Cyclic GFR-binding peptide
  MOD_RES (1)..(1): Xaa is C or S
XAPVKTEPISMLYLDNGRVLLKFKYEM

SEQ ID NO: 86959 - protein, 31 aa, Artificial Sequence
  Cyclic GFR-binding peptide
  MOD_RES (28)..(30): Xaa is C or S
DLSPINILYFIGKTPKIYGKIPMIVKSXKXS

SEQ ID NO: 86960 - protein, 24 aa, Artificial Sequence
  Cyclic GFR-binding peptide
NAISILYFDENKNVVLKKYRNMTV

SEQ ID NO: 86961 - protein, 29 aa, Artificial Sequence
  Cyclic GFR-binding peptide
  MOD_RES (2)..(3): Xaa is C or S
AXXVPTKLSATSILYYDKGVVTYLRKHRG

SEQ ID NO: 86962 - protein, 29 aa, Artificial Sequence
  Cyclic GFR-binding peptide
  MOD_RES (1)..(1): Xaa is C or S
XVPARLSATSILYYDAANNVVLRKHRDMV

SEQ ID NO: 86963 - protein, 37 aa, Artificial Sequence; identical to SEQ ID NO: 34106
  Cyclic GFR-binding peptide
  MOD_RES (6)..(7): Xaa is C or S

SEQ ID NO: 86964 - protein, 38 aa, Artificial Sequence; identical to SEQ ID NO: 34108
  Cyclic GFR-binding peptide
  MOD_RES (6)..(7): Xaa is C or S

SEQ ID NO: 86965 - protein, 26 aa, Artificial Sequence
  Cyclic GFR-binding peptide
SATSILYYDENKNVVLRKHRNMTVES

SEQ ID NO: 86966 - protein, 32 aa, Artificial Sequence; identical to SEQ ID NO: 34110
  Cyclic GFR-binding peptide
  MOD_RES (32)..(32): Xaa is C or S

SEQ ID NO: 86967 - protein, 40 aa, Artificial Sequence; identical to SEQ ID NO: 34111
  Cyclic GFR-binding peptide
  MOD_RES (5)..(6)..(38)..(40): Xaa is C or S

SEQ ID NO: 86968 - protein, 28 aa, Artificial Sequence
  Cyclic GFR-binding peptide
  MOD_RES (28)..(28): Xaa is C or S
KTSATSMLYYDNGRVLLLRKHRMIVEEX

SEQ ID NO: 86969 - protein, 28 aa, Artificial Sequence
  Cyclic GFR-binding peptide
  MOD_RES (1)..(2): Xaa is C or S
XXVSQDLSPINILYFIGKTPKIYGKIPM

SEQ ID NO: 86970 - protein, 35 aa, Artificial Sequence; identical to SEQ ID NO: 34112
  Cyclic GFR-binding peptide
  MOD_RES (2)..(3)..(34): Xaa is C or S

SEQ ID NO: 86971 - protein, 31 aa, Artificial Sequence; identical to SEQ ID NO: 34114
  Cyclic GFR-binding peptide
  MOD_RES (1)..(1): Xaa is C or S

SEQ ID NO: 86972 - protein, 30 aa, Artificial Sequence
  Cyclic GFR-binding peptide
  MOD_RES (1)..(1): Xaa is C or S
XAPVKTSPISMLYKDNGRVLLLKYHYMIVE

SEQ ID NO: 86973 - protein, 36 aa, Artificial Sequence
  Cyclic GFR-binding peptide
  MOD_RES (6)..(7): Xaa is C or S
GIPEPXXVPEKMSPINILYFDENKNVVYGKIPNMTV

SEQ ID NO: 86974 - protein, 32 aa, Artificial Sequence; identical to SEQ ID NO: 34118
  Cyclic GFR-binding peptide
  MOD_RES (31)..(31): Xaa is C or S

SEQ ID NO: 86975 - protein, 29 aa, Artificial Sequence
  Cyclic GFR-binding peptide
  MOD_RES (3)..(4): Xaa is C or S
KAXXVPTKLSATSILYYDKGVVTYLRKHR

SEQ ID NO: 86976 - protein, 34 aa, Artificial Sequence
  Cyclic GFR-binding peptide
  MOD_RES (6)..(7): Xaa is C or S
RVPSTXXAPVKTEPISMLYLDNGRVLLKFKYEMI

SEQ ID NO: 86977 - protein, 27 aa, Artificial Sequence
  Cyclic GFR-binding peptide
  MOD_RES (1)..(2): Xaa is C or S
XXVPQALSPINILYFVGRKPKVYGKIP

SEQ ID NO: 86978 - protein, 24 aa, Artificial Sequence
  Cyclic GFR-binding peptide
TKMSPISMLYKNDKQQIILKYHYG

SEQ ID NO: 86979 - protein, 31 aa, Artificial Sequence
  Cyclic GFR-binding peptide
  MOD_RES (2)..(3): Xaa is C or S
PXXVPQDLSPINILYFVGRTPKVYGKIPMVV

SEQ ID NO: 86980 - protein, 30 aa, Artificial Sequence; identical to SEQ ID NO: 34119
  Cyclic GFR-binding peptide

SEQ ID NO: 86981 - protein, 30 aa, Artificial Sequence
  Cyclic GFR-binding peptide
  MOD_RES (4)..(5): Xaa is C or S
AGPXXTPTKMSPISMLYKNDKQQIILKYHY

SEQ ID NO: 86982 - protein, 32 aa, Artificial Sequence
  Cyclic GFR-binding peptide
  MOD_RES (5)..(6): Xaa is C or S
VPSTXXAPVKTSATSMLYYDNGRVLLLRKHRM

SEQ ID NO: 86983 - protein, 24 aa, Artificial Sequence
  Cyclic GFR-binding peptide
PVKTSATSMLYYDNGRVLLLRKHR

SEQ ID NO: 86984 - protein, 31 aa, Artificial Sequence
  Cyclic GFR-binding peptide
  MOD_RES (3)..(4): Xaa is C or S
KAXXVPTKLSATSILYYDKGVVTYLRKHRGM

SEQ ID NO: 86985 - protein, 37 aa, Artificial Sequence; identical to SEQ ID NO: 34121
  Cyclic GFR-binding peptide
  MOD_RES (6)..(7): Xaa is C or S

SEQ ID NO: 86986 - protein, 25 aa, Artificial Sequence
  Cyclic GFR-binding peptide
ALSPINILYFVGRKPKVYGKIPMIV

SEQ ID NO: 86987 - protein, 34 aa, Artificial Sequence; identical to SEQ ID NO: 34123
  Cyclic GFR-binding peptide
  MOD_RES (32)..(34): Xaa is C or S

SEQ ID NO: 86988 - protein, 31 aa, Artificial Sequence
  Cyclic GFR-binding peptide
  MOD_RES (2)..(3): Xaa is C or S
TXXAPVKTSATSMLYYDNGRVLLLRKHRMIV

SEQ ID NO: 86989 - protein, 27 aa, Artificial Sequence
  Cyclic GFR-binding peptide
  MOD_RES (1)..(1): Xaa is C or S
XVPQDLSPINILYFVGRTPKVYGKIPM

SEQ ID NO: 86990 - protein, 29 aa, Artificial Sequence
  Cyclic GFR-binding peptide
  MOD_RES (1)..(1): Xaa is C or S
XVPTRLEPISILYLDSANNVVKFKYEDMV

SEQ ID NO: 86991 - protein, 29 aa, Artificial Sequence
  Cyclic GFR-binding peptide
  MOD_RES (26)..(28): Xaa is C or S
EPISMLYLDNGRVLLKFKYEMIVEEXGXL

SEQ ID NO: 86992 - protein, 34 aa, Artificial Sequence; identical to SEQ ID NO: 34127
  Cyclic GFR-binding peptide
  MOD_RES (31)..(33): Xaa is C or S

SEQ ID NO: 86993 - protein, 23 aa, Artificial Sequence
  Cyclic GFR-binding peptide
EPISMLYLNDKQQIIKFKYEGMV

SEQ ID NO: 86994 - protein, 30 aa, Artificial Sequence
  Cyclic GFR-binding peptide
PEKMNAISILYFDENKNVVLKKYRNMTVES

SEQ ID NO: 86995 - protein, 30 aa, Artificial Sequence
  Cyclic GFR-binding peptide
  MOD_RES (3)..(4): Xaa is C or S
PTXXVPTRLEPISILYLDSANNVVKFKYED

SEQ ID NO: 86996 - protein, 37 aa, Artificial Sequence; identical to SEQ ID NO: 34128
  Cyclic GFR-binding peptide
  MOD_RES (3)..(4)..(36): Xaa is C or S

SEQ ID NO: 86997 - protein, 26 aa, Artificial Sequence
  Cyclic GFR-binding peptide
EKMSATSILYYDENKNVVLRKHRNMT

SEQ ID NO: 86998 - protein, 35 aa, Artificial Sequence
  Cyclic GFR-binding peptide
  MOD_RES (6)..(7): Xaa is C or S
AAPASXXVPARLSATSILYYDAANNVVLRKHRDMV

SEQ ID NO: 86999 - protein, 33 aa, Artificial Sequence
  Cyclic GFR-binding peptide
  MOD_RES (6)..(7): Xaa is C or S
HVPKPXXAPTKLSPISVLYKDDSSNVILKYHYN

SEQ ID NO: 87000 - protein, 30 aa, Artificial Sequence
  Cyclic GFR-binding peptide
  MOD_RES (30)..(30): Xaa is C or S
PVKTSATSMLYYDNGRVLLLRKHRMIVEEX

SEQ ID NO: 87001 - protein, 35 aa, Artificial Sequence; identical to SEQ ID NO: 34133
  Cyclic GFR-binding peptide
  MOD_RES (3)..(4): Xaa is C or S

SEQ ID NO: 87002 - protein, 27 aa, Artificial Sequence
  Cyclic GFR-binding peptide
  MOD_RES (1)..(1): Xaa is C or S
XTPTKMSPISMLYKNDKQQIILKYHYG

SEQ ID NO: 87003 - protein, 32 aa, Artificial Sequence; identical to SEQ ID NO: 34136
  Cyclic GFR-binding peptide
  MOD_RES (1)..(1): Xaa is C or S

SEQ ID NO: 87004 - protein, 36 aa, Artificial Sequence; identical to SEQ ID NO: 34135
  Cyclic GFR-binding peptide
  MOD_RES (4)..(5)..(36): Xaa is C or S

SEQ ID NO: 87005 - protein, 28 aa, Artificial Sequence
  Cyclic GFR-binding peptide
  MOD_RES (1)..(2): Xaa is C or S
XXAPVKTSPISMLYKDNGRVLLLKYHYM

SEQ ID NO: 87006 - protein, 32 aa, Artificial Sequence
  Cyclic GFR-binding peptide
  MOD_RES (29)..(31): Xaa is C or S
VKTSPISMLYKDNGRVLLLKYHYMIVEEXGXL

SEQ ID NO: 87007 - protein, 20 aa, Artificial Sequence
  Cyclic GFR-binding peptide
SPINILYFDENKNVVYGKIP

SEQ ID NO: 87008 - protein, 23 aa, Artificial Sequence
  Cyclic GFR-binding peptide
SPINILYFDENKNVVYGKIPNMT

SEQ ID NO: 87009 - protein, 33 aa, Artificial Sequence; identical to SEQ ID NO: 34138
  Cyclic GFR-binding peptide
  MOD_RES (2)..(3): Xaa is C or S

SEQ ID NO: 87010 - protein, 27 aa, Artificial Sequence
  Cyclic GFR-binding peptide
  MOD_RES (26)..(26): Xaa is C or S
SPINILYFVGRKPKVYGKIPMIVRSXK

SEQ ID NO: 87011 - protein, 34 aa, Artificial Sequence
  Cyclic GFR-binding peptide
  MOD_RES (6)..(7): Xaa is C or S
GSAGPXXTPTKMSPISMLYKNDKQQIILKYHYGM

SEQ ID NO: 87012 - protein, 21 aa, Artificial Sequence
  Cyclic GFR-binding peptide
SPINILYFDENKNVVYGKIPN

SEQ ID NO: 87013 - protein, 31 aa, Artificial Sequence
  Cyclic GFR-binding peptide
  MOD_RES (28)..(30): Xaa is C or S
MSATSMLYYNDKQQIILRKHRGMVVDRXGXS

SEQ ID NO: 87014 - protein, 29 aa, Artificial Sequence
  Cyclic GFR-binding peptide
PVKTSATSMLYYDNGRVLLLRKHRMIVEE

SEQ ID NO: 87015 - protein, 22 aa, Artificial Sequence
  Cyclic GFR-binding peptide
LSATSILYYDAANNVVLRKHRD

SEQ ID NO: 87016 - protein, 39 aa, Artificial Sequence; identical to SEQ ID NO: 34142
  Cyclic GFR-binding peptide
  MOD_RES (5)..(6)..(38): Xaa is C or S

SEQ ID NO: 87017 - protein, 28 aa, Artificial Sequence
  Cyclic GFR-binding peptide
VPEKMSPINILYFDENKNVVYGKIPNMT

SEQ ID NO: 87018 - protein, 20 aa, Artificial Sequence
  Cyclic GFR-binding peptide
SPINILYFIGKTPKIYGKIP

SEQ ID NO: 87019 - protein, 31 aa, Artificial Sequence
  Cyclic GFR-binding peptide
  MOD_RES (2)..(3): Xaa is C or S
PXXTPTKMSPISMLYKNDKQQIILKYHYGMV

SEQ ID NO: 87020 - protein, 25 aa, Artificial Sequence
  Cyclic GFR-binding peptide
SPINILYFVGRTPKVYGKIPMVVKS

SEQ ID NO: 87021 - protein, 38 aa, Artificial Sequence; identical to SEQ ID NO: 34146
  Cyclic GFR-binding peptide
  MOD_RES (5)..(6)..(38): Xaa is C or S

SEQ ID NO: 87022 - protein, 33 aa, Artificial Sequence; identical to SEQ ID NO: 34148
  Cyclic GFR-binding peptide
  MOD_RES (1)..(32): Xaa is C or S

SEQ ID NO: 87023 - protein, 36 aa, Artificial Sequence; identical to SEQ ID NO: 34150
  Cyclic GFR-binding peptide
  MOD_RES (3)..(4)..(36): Xaa is C or S

SEQ ID NO: 87024 - protein, 41 aa, Artificial Sequence; identical to SEQ ID NO: 34151
  Cyclic GFR-binding peptide
  MOD_RES (6)..(7)..(38)..(40): Xaa is C or S

SEQ ID NO: 87025 - protein, 30 aa, Artificial Sequence
  Cyclic GFR-binding peptide
  MOD_RES (2)..(3): Xaa is C or S
PXXVPEKMEPISILYLDENKNVVKFKYENM

SEQ ID NO: 87026 - protein, 35 aa, Artificial Sequence
  Cyclic GFR-binding peptide
  MOD_RES (5)..(6): Xaa is C or S
VPSTXXAPVKTSATSMLYYDNGRVLLLRKHRMIVE

SEQ ID NO: 87027 - protein, 34 aa, Artificial Sequence; identical to SEQ ID NO: 34152
  Cyclic GFR-binding peptide
  MOD_RES (3)..(4): Xaa is C or S

SEQ ID NO: 87028 - protein, 32 aa, Artificial Sequence
  Cyclic GFR-binding peptide
  MOD_RES (29)..(31): Xaa is C or S
VKTEPISMLYLDNGRVLLKFKYEMIVEEXGXL

SEQ ID NO: 87029 - protein, 30 aa, Artificial Sequence
  Cyclic GFR-binding peptide
PTRLEPISILYLDSANNVVKFKYEDMVVES

SEQ ID NO: 87030 - protein, 33 aa, Artificial Sequence
  Cyclic GFR-binding peptide
  MOD_RES (31)..(33): Xaa is C or S
PEKMSPISILYKDENKNVVLKYHYNMTVESXAX

SEQ ID NO: 87031 - protein, 31 aa, Artificial Sequence
  Cyclic GFR-binding peptide
  MOD_RES (1)..(2): Xaa is C or S
XXVPQDLSPINILYFVGRTPKVYGKIPMVVK

SEQ ID NO: 87032 - protein, 33 aa, Artificial Sequence
  Cyclic GFR-binding peptide
  MOD_RES (6)..(7): Xaa is C or S
ASASPXXVPQDLSPINILYFVGRTPKVYGKIPM

SEQ ID NO: 87033 - protein, 40 aa, Artificial Sequence; identical to SEQ ID NO: 34155
  Cyclic GFR-binding peptide
  MOD_RES (5)..(6)..(38)..(40): Xaa is C or S

SEQ ID NO: 87034 - protein, 38 aa, Artificial Sequence; identical to SEQ ID NO: 34156
  Cyclic GFR-binding peptide
  MOD_RES (5)..(6)..(37): Xaa is C or S

SEQ ID NO: 87035 - protein, 33 aa, Artificial Sequence
  Cyclic GFR-binding peptide
  MOD_RES (5)..(6): Xaa is C or S
SAAPXXVPQALSPINILYFVGRKPKVYGKIPMI

SEQ ID NO: 87036 - protein, 23 aa, Artificial Sequence
  Cyclic GFR-binding peptide
LSATSILYYDKGVVTYLRKHRGM

SEQ ID NO: 87037 - protein, 26 aa, Artificial Sequence
  Cyclic GFR-binding peptide
MEPISILYLDENKNVVKFKYENMTVE

SEQ ID NO: 87038 - protein, 32 aa, Artificial Sequence; identical to SEQ ID NO: 34157
  Cyclic GFR-binding peptide
  MOD_RES (1)..(2): Xaa is C or S

SEQ ID NO: 87039 - protein, 37 aa, Artificial Sequence; identical to SEQ ID NO: 34159
  Cyclic GFR-binding peptide
  MOD_RES (4)..(5)..(37): Xaa is C or S

SEQ ID NO: 87040 - protein, 30 aa, Artificial Sequence
  Cyclic GFR-binding peptide
  MOD_RES (1)..(1): Xaa is C or S
XVPEKMSPINILYFDENKNVVYGKIPNMTV

SEQ ID NO: 87041 - protein, 33 aa, Artificial Sequence; identical to SEQ ID NO: 34160
  Cyclic GFR-binding peptide
  MOD_RES (1)..(33): Xaa is C or S

SEQ ID NO: 87042 - protein, 32 aa, Artificial Sequence
  Cyclic GFR-binding peptide
  MOD_RES (2)..(3): Xaa is C or S
TXXVPTRLSPISILYKDSANNVVLKYHYDMVV

SEQ ID NO: 87043 - protein, 27 aa, Artificial Sequence
  Cyclic GFR-binding peptide
PTRLEPISILYLDSANNVVKFKYEDMV

SEQ ID NO: 87044 - protein, 31 aa, Artificial Sequence
  Cyclic GFR-binding peptide
  MOD_RES (5)..(6): Xaa is C or S
SAGPXXTPTKMEPISMLYLNDKQQIIKFKYE

SEQ ID NO: 87045 - protein, 24 aa, Artificial Sequence
  Cyclic GFR-binding peptide
QDLSPINILYFIGKTPKIYGKIPM

SEQ ID NO: 87046 - protein, 34 aa, Artificial Sequence
  Cyclic GFR-binding peptide
  MOD_RES (5)..(6): Xaa is C or S
VPSTXXAPVKTSPISMLYKDNGRVLLLKYHYMIV

SEQ ID NO: 87047 - protein, 30 aa, Artificial Sequence
  Cyclic GFR-binding peptide
  MOD_RES (28)..(30): Xaa is C or S
MSATSILYYDENKNVVLRKHRNMTVESXAX

SEQ ID NO: 87048 - protein, 30 aa, Artificial Sequence
  Cyclic GFR-binding peptide
  MOD_RES (27)..(29): Xaa is C or S
SPISILYKDSANNVVLKYHYDMVVESXGXR

SEQ ID NO: 87049 - protein, 25 aa, Artificial Sequence
  Cyclic GFR-binding peptide
PQALSPINILYFVGRKPKVYGKIPM

SEQ ID NO: 87050 - protein, 24 aa, Artificial Sequence
  Cyclic GFR-binding peptide
KTSATSMLYYDNGRVLLLRKHRMI

SEQ ID NO: 87051 - protein, 34 aa, Artificial Sequence; identical to SEQ ID NO: 34163
  Cyclic GFR-binding peptide
  MOD_RES (1)..(2)..(34): Xaa is C or S

SEQ ID NO: 87052 - protein, 30 aa, Artificial Sequence
  Cyclic GFR-binding peptide
  MOD_RES (30)..(30): Xaa is C or S
PQALSPINILYFVGRKPKVYGKIPMIVRSX

SEQ ID NO: 87053 - protein, 29 aa, Artificial Sequence
  Cyclic GFR-binding peptide
PTRLSATSILYYDSANNVVLRKHRDMVVE

SEQ ID NO: 87054 - protein, 30 aa, Artificial Sequence; identical to SEQ ID NO: 34164
  Cyclic GFR-binding peptide

SEQ ID NO: 87055 - protein, 36 aa, Artificial Sequence; identical to SEQ ID NO: 34166
  Cyclic GFR-binding peptide
  MOD_RES (3)..(4)..(36): Xaa is C or S

SEQ ID NO: 87056 - protein, 31 aa, Artificial Sequence
  Cyclic GFR-binding peptide
  MOD_RES (2)..(3): Xaa is C or S
AXXVPTKLSATSILYYDKGVVTYLRKHRGMA

SEQ ID NO: 87057 - protein, 31 aa, Artificial Sequence
  Cyclic GFR-binding peptide
  MOD_RES (28)..(30): Xaa is C or S
MNAISILYFDENKNVVLKKYRNMTVESXAXR

SEQ ID NO: 87058 - protein, 32 aa, Artificial Sequence
  Cyclic GFR-binding peptide
  MOD_RES (5)..(6): Xaa is C or S
TPPTXXVPTRLEPISILYLDSANNVVKFKYED

SEQ ID NO: 87059 - protein, 37 aa, Artificial Sequence; identical to SEQ ID NO: 34167
  Cyclic GFR-binding peptide
  MOD_RES (3)..(4)..(35)..(37): Xaa is C or S

SEQ ID NO: 87060 - protein, 27 aa, Artificial Sequence
  Cyclic GFR-binding peptide
  MOD_RES (1)..(2): Xaa is C or S
XXVPARLSATSILYYDAANNVVLRKHR

SEQ ID NO: 87061 - protein, 27 aa, Artificial Sequence
  Cyclic GFR-binding peptide
  MOD_RES (26)..(26): Xaa is C or S
SPISMLYKDNGRVLLLKYHYMIVEEXG

SEQ ID NO: 87062 - protein, 40 aa, Artificial Sequence; identical to SEQ ID NO: 34169
  Cyclic GFR-binding peptide
  MOD_RES (5)..(6)..(38)..(40): Xaa is C or S

SEQ ID NO: 87063 - protein, 22 aa, Artificial Sequence
  Cyclic GFR-binding peptide
DLSPINILYFVGRTPKVYGKIP

SEQ ID NO: 87064 - protein, 21 aa, Artificial Sequence
  Cyclic GFR-binding peptide
SPISILYKDENKNVVLKYHYN

SEQ ID NO: 87065 - protein, 33 aa, Artificial Sequence; identical to SEQ ID NO: 34171
  Cyclic GFR-binding peptide
  MOD_RES (1)..(33): Xaa is C or S

SEQ ID NO: 87066 - protein, 39 aa, Artificial Sequence; identical to SEQ ID NO: 34175
  Cyclic GFR-binding peptide
  MOD_RES (5)..(6)..(38): Xaa is C or S

SEQ ID NO: 87067 - protein, 33 aa, Artificial Sequence; identical to SEQ ID NO: 34176
  Cyclic GFR-binding peptide
  MOD_RES (31)..(33): Xaa is C or S

SEQ ID NO: 87068 - protein, 23 aa, Artificial Sequence
  Cyclic GFR-binding peptide
TKMEPISMLYLNDKQQIIKFKYE

SEQ ID NO: 87069 - protein, 33 aa, Artificial Sequence; identical to SEQ ID NO: 34177
  Cyclic GFR-binding peptide
  MOD_RES (31)..(33): Xaa is C or S

SEQ ID NO: 87070 - protein, 37 aa, Artificial Sequence; identical to SEQ ID NO: 34178
  Cyclic GFR-binding peptide
  MOD_RES (2)..(3)..(35)..(37): Xaa is C or S

SEQ ID NO: 87071 - protein, 34 aa, Artificial Sequence; identical to SEQ ID NO: 34179
  Cyclic GFR-binding peptide
  MOD_RES (1)..(2)..(33): Xaa is C or S

SEQ ID NO: 87072 - protein, 28 aa, Artificial Sequence
  Cyclic GFR-binding peptide
TKLSATSILYYDKGVVTYLRKHRGMAVS

SEQ ID NO: 87073 - protein, 31 aa, Artificial Sequence
  Cyclic GFR-binding peptide
  MOD_RES (28)..(30): Xaa is C or S
LSATSILYYDAANNVVLRKHRDMVVEAXGXR

SEQ ID NO: 87074 - protein, 31 aa, Artificial Sequence
  Cyclic GFR-binding peptide
  MOD_RES (29)..(31): Xaa is C or S
KMSATSMLYYNDKQQIILRKHRGMVVDRXGX

SEQ ID NO: 87075 - protein, 30 aa, Artificial Sequence
  Cyclic GFR-binding peptide
  MOD_RES (27)..(29): Xaa is C or S
LSPINILYFVGRKPKVYGKIPMIVRSXKXS

SEQ ID NO: 87076 - protein, 30 aa, Artificial Sequence; identical to SEQ ID NO: 34182
  Cyclic GFR-binding peptide

SEQ ID NO: 87077 - protein, 38 aa, Artificial Sequence; identical to SEQ ID NO: 34183
  Cyclic GFR-binding peptide
  MOD_RES (6)..(7): Xaa is C or S

SEQ ID NO: 87078 - protein, 22 aa, Artificial Sequence
  Cyclic GFR-binding peptide
EPISILYLDSANNVVKFKYEDM

SEQ ID NO: 87079 - protein, 30 aa, Artificial Sequence
  Cyclic GFR-binding peptide
  MOD_RES (1)..(2): Xaa is C or S
XXVPEKMNAISILYFDENKNVVLKKYRNMT

SEQ ID NO: 87080 - protein, 39 aa, Artificial Sequence; identical to SEQ ID NO: 34184
  Cyclic GFR-binding peptide
  MOD_RES (6)..(7)..(38): Xaa is C or S

SEQ ID NO: 87081 - protein, 36 aa, Artificial Sequence
  Cyclic GFR-binding peptide
  MOD_RES (6)..(7): Xaa is C or S
HVPKPXXAPTKLSPISVLYKDDSSNVILKYHYNMVV

SEQ ID NO: 87082 - protein, 25 aa, Artificial Sequence
  Cyclic GFR-binding peptide
LSATSILYYDSANNVVLRKHRDMVV

SEQ ID NO: 87083 - protein, 34 aa, Artificial Sequence
  Cyclic GFR-binding peptide
  MOD_RES (4)..(5): Xaa is C or S
PPTXXVPTRLSPISILYKDSANNVVLKYHYDMVV

SEQ ID NO: 87084 - protein, 39 aa, Artificial Sequence; identical to SEQ ID NO: 34187
  Cyclic GFR-binding peptide
  MOD_RES (4)..(5)..(37)..(39): Xaa is C or S

SEQ ID NO: 87085 - protein, 34 aa, Artificial Sequence
  Cyclic GFR-binding peptide
  MOD_RES (5)..(6): Xaa is C or S
IPEPXXVPEKMSPISILYKDENKNVVLKYHYNMT

SEQ ID NO: 87086 - protein, 26 aa, Artificial Sequence
  Cyclic GFR-binding peptide
TPTKMSPISMLYKNDKQQIILKYHYG

SEQ ID NO: 87087 - protein, 26 aa, Artificial Sequence
  Cyclic GFR-binding peptide
  MOD_RES (1)..(1): Xaa is C or S
XVPEKMSPISILYKDENKNVVLKYHY

SEQ ID NO: 87088 - protein, 25 aa, Artificial Sequence
  Cyclic GFR-binding peptide
VPEKMSPINILYFDENKNVVYGKIP

SEQ ID NO: 87089 - protein, 27 aa, Artificial Sequence
  Cyclic GFR-binding peptide
PARLSATSILYYDAANNVVLRKHRDMV

SEQ ID NO: 87090 - protein, 36 aa, Artificial Sequence; identical to SEQ ID NO: 34190
  Cyclic GFR-binding peptide
  MOD_RES (4)..(5): Xaa is C or S

SEQ ID NO: 87091 - protein, 28 aa, Artificial Sequence
  Cyclic GFR-binding peptide
  MOD_RES (1)..(2): Xaa is C or S
XXVPEKMSATSILYYDENKNVVLRKHRN

SEQ ID NO: 87092 - protein, 20 aa, Artificial Sequence
  Cyclic GFR-binding peptide
SATSILYYDKGVVTYLRKHR

SEQ ID NO: 87093 - protein, 34 aa, Artificial Sequence; identical to SEQ ID NO: 34191
  Cyclic GFR-binding peptide
  MOD_RES (1)..(32)..(34): Xaa is C or S

SEQ ID NO: 87094 - protein, 33 aa, Artificial Sequence
  Cyclic GFR-binding peptide
  MOD_RES (31)..(33): Xaa is C or S
PEKMEPISILYLDENKNVVKFKYENMTVESXAX

SEQ ID NO: 87095 - protein, 27 aa, Artificial Sequence
  Cyclic GFR-binding peptide
  MOD_RES (27)..(27): Xaa is C or S
SPISMLYKNDKQQIILKYHYGMVVDRX

SEQ ID NO: 87096 - protein, 26 aa, Artificial Sequence
  Cyclic GFR-binding peptide
KMEPISILYLDENKNVVKFKYENMTV

SEQ ID NO: 87097 - protein, 29 aa, Artificial Sequence
  Cyclic GFR-binding peptide
  MOD_RES (26)..(28): Xaa is C or S
SPISMLYKDNGRVLLLKYHYMIVEEXGXL

SEQ ID NO: 87098 - protein, 29 aa, Artificial Sequence
  Cyclic GFR-binding peptide
PQDLSPINILYFVGRTPKVYGKIPMVVKS

SEQ ID NO: 87099 - protein, 42 aa, Artificial Sequence; identical to SEQ ID NO: 34193
  Cyclic GFR-binding peptide
  MOD_RES (6)..(7)..(39)..(41): Xaa is C or S

SEQ ID NO: 87100 - protein, 36 aa, Artificial Sequence; identical to SEQ ID NO: 34194
  Cyclic GFR-binding peptide
  MOD_RES (1)..(33)..(35): Xaa is C or S

SEQ ID NO: 87101 - protein, 36 aa, Artificial Sequence
  Cyclic GFR-binding peptide
  MOD_RES (6)..(7): Xaa is C or S
GIPEPXXVPEKMNAISILYFDENKNVVLKKYRNMTV

SEQ ID NO: 87102 - protein, 24 aa, Artificial Sequence
  Cyclic GFR-binding peptide
SPISMLYKDNGRVLLLKYHYMIVE

SEQ ID NO: 87103 - protein, 35 aa, Artificial Sequence; identical to SEQ ID NO: 34196
  Cyclic GFR-binding peptide
  MOD_RES (1)..(33)..(35): Xaa is C or S

SEQ ID NO: 87104 - protein, 24 aa, Artificial Sequence
  Cyclic GFR-binding peptide
PARLSATSILYYDAANNVVLRKHR

SEQ ID NO: 87105 - protein, 39 aa, Artificial Sequence; identical to SEQ ID NO: 34197
  Cyclic GFR-binding peptide
  MOD_RES (5)..(6)..(38): Xaa is C or S

SEQ ID NO: 87106 - protein, 26 aa, Artificial Sequence
  Cyclic GFR-binding peptide
EKMNAISILYFDENKNVVLKKYRNMT

SEQ ID NO: 87107 - protein, 31 aa, Artificial Sequence
  Cyclic GFR-binding peptide
  MOD_RES (4)..(5): Xaa is C or S
AAPXXVPQALSPINILYFVGRKPKVYGKIPM

SEQ ID NO: 87108 - protein, 30 aa, Artificial Sequence
  Cyclic GFR-binding peptide
  MOD_RES (1)..(2): Xaa is C or S
XXTPTKMEPISMLYLNDKQQIIKFKYEGMV

SEQ ID NO: 87109 - protein, 29 aa, Artificial Sequence
  Cyclic GFR-binding peptide
VPEKMSPINILYFDENKNVVYGKIPNMTV

SEQ ID NO: 87110 - protein, 40 aa, Artificial Sequence; identical to SEQ ID NO: 34198
  Cyclic GFR-binding peptide
  MOD_RES (5)..(6)..(38)..(40): Xaa is C or S

SEQ ID NO: 87111 - protein, 27 aa, Artificial Sequence
  Cyclic GFR-binding peptide
RLSATSILYYDSANNVVLRKHRDMVVE

SEQ ID NO: 87112 - protein, 26 aa, Artificial Sequence
  Cyclic GFR-binding peptide
  MOD_RES (1)..(1): Xaa is C or S
XVPARLSATSILYYDAANNVVLRKHR

SEQ ID NO: 87113 - protein, 30 aa, Artificial Sequence
  Cyclic GFR-binding peptide
  MOD_RES (4)..(5): Xaa is C or S
AGPXXTPTKMEPISMLYLNDKQQIIKFKYE

SEQ ID NO: 87114 - protein, 24 aa, Artificial Sequence
  Cyclic GFR-binding peptide
PEKMSPISILYKDENKNVVLKYHY

SEQ ID NO: 87115 - protein, 30 aa, Artificial Sequence
  Cyclic GFR-binding peptide
  MOD_RES (3)..(4): Xaa is C or S
STXXAPVKTSATSMLYYDNGRVLLLRKHRM

SEQ ID NO: 87116 - protein, 32 aa, Artificial Sequence
  Cyclic GFR-binding peptide
  MOD_RES (4)..(5): Xaa is C or S
AGPXXTPTKMEPISMLYLNDKQQIIKFKYEGM

SEQ ID NO: 87117 - protein, 32 aa, Artificial Sequence
  Cyclic GFR-binding peptide
  MOD_RES (31)..(31): Xaa is C or S
PEKMSPISILYKDENKNVVLKYHYNMTVESXA

SEQ ID NO: 87118 - protein, 35 aa, Artificial Sequence; identical to SEQ ID NO: 34200
  Cyclic GFR-binding peptide
  MOD_RES (3)..(4): Xaa is C or S

SEQ ID NO: 87119 - protein, 31 aa, Artificial Sequence
  Cyclic GFR-binding peptide
  MOD_RES (29)..(31): Xaa is C or S
RLSATSILYYDSANNVVLRKHRDMVVESXGX

SEQ ID NO: 87120 - protein, 22 aa, Artificial Sequence
  Cyclic GFR-binding peptide
SATSILYYDENKNVVLRKHRNM

SEQ ID NO: 87121 - protein, 32 aa, Artificial Sequence; identical to SEQ ID NO: 34207
  Cyclic GFR-binding peptide
  MOD_RES (1)..(2): Xaa is C or S

SEQ ID NO: 87122 - protein, 26 aa, Artificial Sequence
  Cyclic GFR-binding peptide
SATSILYYDSANNVVLRKHRDMVVES

SEQ ID NO: 87123 - protein, 31 aa, Artificial Sequence
  Cyclic GFR-binding peptide
  MOD_RES (5)..(6): Xaa is C or S
IPEPXXVPEKMNAISILYFDENKNVVLKKYR

SEQ ID NO: 87124 - protein, 32 aa, Artificial Sequence; identical to SEQ ID NO: 34209
  Cyclic GFR-binding peptide
  MOD_RES (1)..(2): Xaa is C or S

SEQ ID NO: 87125 - protein, 36 aa, Artificial Sequence
  Cyclic GFR-binding peptide
  MOD_RES (6)..(7): Xaa is C or S
STPPTXXVPTRLSATSILYYDSANNVVLRKHRDMVV

SEQ ID NO: 87126 - protein, 30 aa, Artificial Sequence
  Cyclic GFR-binding peptide
  MOD_RES (29)..(29): Xaa is C or S
KMSPISILYKDENKNVVLKYHYNMTVESXA

SEQ ID NO: 87127 - protein, 23 aa, Artificial Sequence
  Cyclic GFR-binding peptide
TKMSPISMLYKNDKQQIILKYHY

SEQ ID NO: 87128 - protein, 31 aa, Artificial Sequence; identical to SEQ ID NO: 34211
  Cyclic GFR-binding peptide
  MOD_RES (1)..(1): Xaa is C or S

SEQ ID NO: 87129 - protein, 31 aa, Artificial Sequence; identical to SEQ ID NO: 34213
  Cyclic GFR-binding peptide
  MOD_RES (31)..(31): Xaa is C or S

SEQ ID NO: 87130 - protein, 32 aa, Artificial Sequence; identical to SEQ ID NO: 34212
  Cyclic GFR-binding peptide
  MOD_RES (1)..(32): Xaa is C or S

SEQ ID NO: 87131 - protein, 25 aa, Artificial Sequence
  Cyclic GFR-binding peptide
EKMNAISILYFDENKNVVLKKYRNM

SEQ ID NO: 87132 - protein, 21 aa, Artificial Sequence
  Cyclic GFR-binding peptide
SATSMLYYNDKQQIILRKHRG

SEQ ID NO: 87133 - protein, 26 aa, Artificial Sequence
  Cyclic GFR-binding peptide
SPISILYKDENKNVVLKYHYNMTVES

SEQ ID NO: 87134 - protein, 28 aa, Artificial Sequence
  Cyclic GFR-binding peptide
KLSATSILYYDKGVVTYLRKHRGMAVSE

SEQ ID NO: 87135 - protein, 36 aa, Artificial Sequence; identical to SEQ ID NO: 34215
  Cyclic GFR-binding peptide
  MOD_RES (1)..(2)..(34)..(36): Xaa is C or S

SEQ ID NO: 87136 - protein, 26 aa, Artificial Sequence
  Cyclic GFR-binding peptide
  MOD_RES (1)..(1): Xaa is C or S
XVPTRLSATSILYYDSANNVVLRKHR

SEQ ID NO: 87137 - protein, 31 aa, Artificial Sequence; identical to SEQ ID NO: 34217
  Cyclic GFR-binding peptide
  MOD_RES (1)..(1): Xaa is C or S

SEQ ID NO: 87138 - protein, 38 aa, Artificial Sequence; identical to SEQ ID NO: 34218
  Cyclic GFR-binding peptide
  MOD_RES (4)..(5)..(36)..(38): Xaa is C or S

SEQ ID NO: 87139 - protein, 30 aa, Artificial Sequence
  Cyclic GFR-binding peptide
  MOD_RES (30)..(30): Xaa is C or S
TKMSATSMLYYNDKQQIILRKHRGMVVDRX

SEQ ID NO: 87140 - protein, 34 aa, Artificial Sequence; identical to SEQ ID NO: 34220
  Cyclic GFR-binding peptide
  MOD_RES (32)..(34): Xaa is C or S

SEQ ID NO: 87141 - protein, 27 aa, Artificial Sequence
  Cyclic GFR-binding peptide
QDLSPINILYFIGKTPKIYGKIPMIVK

SEQ ID NO: 87142 - protein, 40 aa, Artificial Sequence; identical to SEQ ID NO: 34221
  Cyclic GFR-binding peptide
  MOD_RES (6)..(7)..(38)..(40): Xaa is C or S

SEQ ID NO: 87143 - protein, 37 aa, Artificial Sequence; identical to SEQ ID NO: 34223
  Cyclic GFR-binding peptide
  MOD_RES (1)..(2)..(34)..(36): Xaa is C or S

SEQ ID NO: 87144 - protein, 39 aa, Artificial Sequence; identical to SEQ ID NO: 34224
  Cyclic GFR-binding peptide
  MOD_RES (5)..(6)..(37)..(39): Xaa is C or S

SEQ ID NO: 87145 - protein, 34 aa, Artificial Sequence
  Cyclic GFR-binding peptide
  MOD_RES (31)..(33): Xaa is C or S
PEKMNAISILYFDENKNVVLKKYRNMTVESXAXR

SEQ ID NO: 87146 - protein, 32 aa, Artificial Sequence
  Cyclic GFR-binding peptide
  MOD_RES (29)..(31): Xaa is C or S
KMSPINILYFDENKNVVYGKIPNMTVESXAXR

SEQ ID NO: 87147 - protein, 34 aa, Artificial Sequence; identical to SEQ ID NO: 34227
  Cyclic GFR-binding peptide
  MOD_RES (2)..(3): Xaa is C or S

SEQ ID NO: 87148 - protein, 29 aa, Artificial Sequence
  Cyclic GFR-binding peptide
  MOD_RES (2)..(3): Xaa is C or S
PXXTPTKMSPISMLYKNDKQQIILKYHYG

SEQ ID NO: 87149 - protein, 34 aa, Artificial Sequence
  Cyclic GFR-binding peptide
  MOD_RES (6)..(7): Xaa is C or S
GIPEPXXVPEKMSPINILYFDENKNVVYGKIPNM

SEQ ID NO: 87150 - protein, 30 aa, Artificial Sequence
  Cyclic GFR-binding peptide
  MOD_RES (27)..(29): Xaa is C or S
NAISILYFDENKNVVLKKYRNMTVESXAXR

SEQ ID NO: 87151 - protein, 35 aa, Artificial Sequence
  Cyclic GFR-binding peptide
  MOD_RES (5)..(6): Xaa is C or S
SAGPXXTPTKMSPISMLYKNDKQQIILKYHYGMVV

SEQ ID NO: 87152 - protein, 40 aa, Artificial Sequence; identical to SEQ ID NO: 34228
  Cyclic GFR-binding peptide
  MOD_RES (5)..(6)..(38)..(40): Xaa is C or S

SEQ ID NO: 87153 - protein, 23 aa, Artificial Sequence
  Cyclic GFR-binding peptide
LSATSILYYDSANNVVLRKHRDM

SEQ ID NO: 87154 - protein, 28 aa, Artificial Sequence
  Cyclic GFR-binding peptide
PTKMEPISMLYLNDKQQIIKFKYEGMVV

SEQ ID NO: 87155 - protein, 33 aa, Artificial Sequence
  Cyclic GFR-binding peptide
  MOD_RES (30)..(32): Xaa is C or S
TRLSPISILYKDSANNVVLKYHYDMVVESXGXR

SEQ ID NO: 87156 - protein, 28 aa, Artificial Sequence
  Cyclic GFR-binding peptide
  MOD_RES (1)..(1): Xaa is C or S
XVPEKMSATSILYYDENKNVVLRKHRNM

SEQ ID NO: 87157 - protein, 24 aa, Artificial Sequence
  Cyclic GFR-binding peptide
EKMEPISILYLDENKNVVKFKYEN

SEQ ID NO: 87158 - protein, 37 aa, Artificial Sequence; identical to SEQ ID NO: 34229
  Cyclic GFR-binding peptide
  MOD_RES (4)..(5)..(36): Xaa is C or S

SEQ ID NO: 87159 - protein, 25 aa, Artificial Sequence
  Cyclic GFR-binding peptide
VPEKMSPISILYKDENKNVVLKYHY

SEQ ID NO: 87160 - protein, 22 aa, Artificial Sequence
  Cyclic GFR-binding peptide
MEPISILYLDENKNVVKFKYEN

SEQ ID NO: 87161 - protein, 35 aa, Artificial Sequence
  Cyclic GFR-binding peptide
  MOD_RES (6)..(7): Xaa is C or S
GSAGPXXTPTKMSATSMLYYNDKQQIILRKHRGMV

SEQ ID NO: 87162 - protein, 32 aa, Artificial Sequence; identical to SEQ ID NO: 34231
  Cyclic GFR-binding peptide
  MOD_RES (1)..(2): Xaa is C or S

SEQ ID NO: 87163 - protein, 32 aa, Artificial Sequence
  Cyclic GFR-binding peptide
  MOD_RES (4)..(5): Xaa is C or S
PEPXXVPEKMSPINILYFDENKNVVYGKIPNM

SEQ ID NO: 87164 - protein, 27 aa, Artificial Sequence
  Cyclic GFR-binding peptide
MEPISILYLDENKNVVKFKYENMTVES

SEQ ID NO: 87165 - protein, 22 aa, Artificial Sequence
  Cyclic GFR-binding peptide
SATSMLYYNDKQQIILRKHRGM

SEQ ID NO: 87166 - protein, 22 aa, Artificial Sequence
  Cyclic GFR-binding peptide
KTEPISMLYLDNGRVLLKFKYE

SEQ ID NO: 87167 - protein, 33 aa, Artificial Sequence
  Cyclic GFR-binding peptide
  MOD_RES (5)..(6): Xaa is C or S
APASXXVPARLSATSILYYDAANNVVLRKHRDM

SEQ ID NO: 87168 - protein, 27 aa, Artificial Sequence
  Cyclic GFR-binding peptide
LSATSILYYDSANNVVLRKHRDMVVES

SEQ ID NO: 87169 - protein, 35 aa, Artificial Sequence; identical to SEQ ID NO: 34233
  Cyclic GFR-binding peptide
  MOD_RES (1)..(2)..(34): Xaa is C or S

SEQ ID NO: 87170 - protein, 26 aa, Artificial Sequence
  Cyclic GFR-binding peptide
PEKMSPINILYFDENKNVVYGKIPNM

SEQ ID NO: 87171 - protein, 30 aa, Artificial Sequence
  Cyclic GFR-binding peptide
  MOD_RES (28)..(30): Xaa is C or S
KTSPISMLYKDNGRVLLLKYHYMIVEEXGX

SEQ ID NO: 87172 - protein, 30 aa, Artificial Sequence
  Cyclic GFR-binding peptide
  MOD_RES (1)..(2): Xaa is C or S
XXVPTRLSATSILYYDSANNVVLRKHRDMV

SEQ ID NO: 87173 - protein, 29 aa, Artificial Sequence
  Cyclic GFR-binding peptide
  MOD_RES (1)..(1): Xaa is C or S
XVPQDLSPINILYFVGRTPKVYGKIPMVV

SEQ ID NO: 87174 - protein, 39 aa, Artificial Sequence; identical to SEQ ID NO: 34235
  Cyclic GFR-binding peptide
  MOD_RES (4)..(5)..(37)..(39): Xaa is C or S

SEQ ID NO: 87175 - protein, 29 aa, Artificial Sequence
  Cyclic GFR-binding peptide
TPTKMSATSMLYYNDKQQIILRKHRGMVV

SEQ ID NO: 87176 - protein, 38 aa, Artificial Sequence; identical to SEQ ID NO: 34237
  Cyclic GFR-binding peptide
  MOD_RES (2)..(3)..(35)..(37): Xaa is C or S

SEQ ID NO: 87177 - protein, 25 aa, Artificial Sequence
  Cyclic GFR-binding peptide
MSPINILYFDENKNVVYGKIPNMTV

SEQ ID NO: 87178 - protein, 30 aa, Artificial Sequence
  Cyclic GFR-binding peptide
  MOD_RES (30)..(30): Xaa is C or S
EKMSPISILYKDENKNVVLKYHYNMTVESX

SEQ ID NO: 87179 - protein, 33 aa, Artificial Sequence
  Cyclic GFR-binding peptide
  MOD_RES (3)..(4): Xaa is C or S
GPXXTPTKMSPISMLYKNDKQQIILKYHYGMVV

SEQ ID NO: 87180 - protein, 23 aa, Artificial Sequence
  Cyclic GFR-binding peptide
SPINILYFIGKTPKIYGKIPMIV

SEQ ID NO: 87181 - protein, 27 aa, Artificial Sequence
  Cyclic GFR-binding peptide
  MOD_RES (1)..(1): Xaa is C or S
XVPTRLSATSILYYDSANNVVLRKHRD

SEQ ID NO: 87182 - protein, 31 aa, Artificial Sequence; identical to SEQ ID NO: 34241
  Cyclic GFR-binding peptide
  MOD_RES (1)..(1): Xaa is C or S

SEQ ID NO: 87183 - protein, 30 aa, Artificial Sequence
  Cyclic GFR-binding peptide
  MOD_RES (1)..(1): Xaa is C or S
XVPQALSPINILYFVGRKPKVYGKIPMIVR

SEQ ID NO: 87184 - protein, 22 aa, Artificial Sequence
  Cyclic GFR-binding peptide
EPISMLYLDNGRVLLKFKYEMI

SEQ ID NO: 87185 - protein, 25 aa, Artificial Sequence
  Cyclic GFR-binding peptide
VPEKMNAISILYFDENKNVVLKKYR

SEQ ID NO: 87186 - protein, 30 aa, Artificial Sequence
  Cyclic GFR-binding peptide
  MOD_RES (27)..(29): Xaa is C or S
SPINILYFDENKNVVYGKIPNMTVESXAXR

SEQ ID NO: 87187 - protein, 27 aa, Artificial Sequence
  Cyclic GFR-binding peptide
  MOD_RES (1)..(2): Xaa is C or S
XXAPVKTSPISMLYKDNGRVLLLKYHY

SEQ ID NO: 87188 - protein, 33 aa, Artificial Sequence
  Cyclic GFR-binding peptide
  MOD_RES (31)..(33): Xaa is C or S
PTKMSPISMLYKNDKQQIILKYHYGMVVDRXGX

SEQ ID NO: 87189 - protein, 35 aa, Artificial Sequence
  Cyclic GFR-binding peptide
  MOD_RES (6)..(7): Xaa is C or S
HVPKPXXAPTKLEPISVLYLDDSSNVIKFKYENMV

SEQ ID NO: 87190 - protein, 39 aa, Artificial Sequence; identical to SEQ ID NO: 34245
  Cyclic GFR-binding peptide
  MOD_RES (4)..(5)..(37)..(39): Xaa is C or S

SEQ ID NO: 87191 - protein, 33 aa, Artificial Sequence
  Cyclic GFR-binding peptide
  MOD_RES (4)..(5): Xaa is C or S
PEPXXVPEKMEPISILYLDENKNVVKFKYENMT

SEQ ID NO: 87192 - protein, 31 aa, Artificial Sequence
  Cyclic GFR-binding peptide
  MOD_RES (3)..(4): Xaa is C or S
SPXXVSQDLSPINILYFIGKTPKIYGKIPMI

SEQ ID NO: 87193 - protein, 27 aa, Artificial Sequence
  Cyclic GFR-binding peptide
  MOD_RES (1)..(2): Xaa is C or S
XXVPEKMEPISILYLDENKNVVKFKYE

SEQ ID NO: 87194 - protein, 34 aa, Artificial Sequence
  Cyclic GFR-binding peptide
  MOD_RES (31)..(33): Xaa is C or S
PEKMSPINILYFDENKNVVYGKIPNMTVESXAXR

SEQ ID NO: 87195 - protein, 33 aa, Artificial Sequence; identical to SEQ ID NO: 34247
  Cyclic GFR-binding peptide
  MOD_RES (2)..(3): Xaa is C or S

SEQ ID NO: 87196 - protein, 20 aa, Artificial Sequence
  Cyclic GFR-binding peptide
EPISILYLDENKNVVKFKYE

SEQ ID NO: 87197 - protein, 39 aa, Artificial Sequence; identical to SEQ ID NO: 34249
  Cyclic GFR-binding peptide
  MOD_RES (3)..(4)..(36)..(38): Xaa is C or S

SEQ ID NO: 87198 - protein, 35 aa, Artificial Sequence
  Cyclic GFR-binding peptide
  MOD_RES (6)..(7): Xaa is C or S
GIPEPXXVPEKMNAISILYFDENKNVVLKKYRNMT

SEQ ID NO: 87199 - protein, 22 aa, Artificial Sequence
  Cyclic GFR-binding peptide
SPISMLYKNDKQQIILKYHYGM

SEQ ID NO: 87200 - protein, 25 aa, Artificial Sequence
  Cyclic GFR-binding peptide
PVKTSATSMLYYDNGRVLLLRKHRM

SEQ ID NO: 87201 - protein, 32 aa, Artificial Sequence
  Cyclic GFR-binding peptide
  MOD_RES (2)..(3): Xaa is C or S
PXXVPEKMSPISILYKDENKNVVLKYHYNMTV

SEQ ID NO: 87202 - protein, 37 aa, Artificial Sequence; identical to SEQ ID NO: 34254
  Cyclic GFR-binding peptide
  MOD_RES (3)..(4)..(36): Xaa is C or S

SEQ ID NO: 87203 - protein, 27 aa, Artificial Sequence
  Cyclic GFR-binding peptide
KTEPISMLYLDNGRVLLKFKYEMIVEE

SEQ ID NO: 87204 - protein, 27 aa, Artificial Sequence
  Cyclic GFR-binding peptide
MNAISILYFDENKNVVLKKYRNMTVES

SEQ ID NO: 87205 - protein, 30 aa, Artificial Sequence
  Cyclic GFR-binding peptide
  MOD_RES (4)..(5): Xaa is C or S
AGPXXTPTKMSATSMLYYNDKQQIILRKHR

SEQ ID NO: 87206 - protein, 24 aa, Artificial Sequence
  Cyclic GFR-binding peptide
LSATSILYYDAANNVVLRKHRDMV

SEQ ID NO: 87207 - protein, 32 aa, Artificial Sequence
  Cyclic GFR-binding peptide
  MOD_RES (29)..(31): Xaa is C or S
RLSATSILYYDSANNVVLRKHRDMVVESXGXR

SEQ ID NO: 87208 - protein, 37 aa, Artificial Sequence; identical to SEQ ID NO: 34257
  Cyclic GFR-binding peptide
  MOD_RES (5)..(6): Xaa is C or S

SEQ ID NO: 87209 - protein, 25 aa, Artificial Sequence
  Cyclic GFR-binding peptide
PEKMEPISILYLDENKNVVKFKYEN

SEQ ID NO: 87210 - protein, 32 aa, Artificial Sequence
  Cyclic GFR-binding peptide
  MOD_RES (29)..(31): Xaa is C or S
KMNAISILYFDENKNVVLKKYRNMTVESXAXR

SEQ ID NO: 87211 - protein, 34 aa, Artificial Sequence
  Cyclic GFR-binding peptide
  MOD_RES (5)..(6): Xaa is C or S
IPEPXXVPEKMSPINILYFDENKNVVYGKIPNMT

SEQ ID NO: 87212 - protein, 30 aa, Artificial Sequence
  Cyclic GFR-binding peptide
  MOD_RES (30)..(30): Xaa is C or S
ARLSATSILYYDAANNVVLRKHRDMVVEAX

SEQ ID NO: 87213 - protein, 29 aa, Artificial Sequence
  Cyclic GFR-binding peptide
  MOD_RES (27)..(29): Xaa is C or S
SATSILYYDKGVVTYLRKHRGMAVSEXGX

SEQ ID NO: 87214 - protein, 35 aa, Artificial Sequence; identical to SEQ ID NO: 34262
  Cyclic GFR-binding peptide
  MOD_RES (32)..(34): Xaa is C or S

SEQ ID NO: 87215 - protein, 37 aa, Artificial Sequence; identical to SEQ ID NO: 34263
  Cyclic GFR-binding peptide
  MOD_RES (2)..(3)..(34)..(36): Xaa is C or S

SEQ ID NO: 87216 - protein, 35 aa, Artificial Sequence; identical to SEQ ID NO: 34264
  Cyclic GFR-binding peptide
  MOD_RES (32)..(34): Xaa is C or S

SEQ ID NO: 87217 - protein, 31 aa, Artificial Sequence
  Cyclic GFR-binding peptide
  MOD_RES (1)..(2): Xaa is C or S
XXAPVKTSATSMLYYDNGRVLLLRKHRMIVE

SEQ ID NO: 87218 - protein, 23 aa, Artificial Sequence
  Cyclic GFR-binding peptide
SATSILYYDKGVVTYLRKHRGMA

SEQ ID NO: 87219 - protein, 32 aa, Artificial Sequence
  Cyclic GFR-binding peptide
  MOD_RES (31)..(31): Xaa is C or S
PTRLSATSILYYDSANNVVLRKHRDMVVESXG

SEQ ID NO: 87220 - protein, 41 aa, Artificial Sequence; identical to SEQ ID NO: 34265
  Cyclic GFR-binding peptide
  MOD_RES (5)..(6)..(38)..(40): Xaa is C or S

SEQ ID NO: 87221 - protein, 20 aa, Artificial Sequence
  Cyclic GFR-binding peptide
SATSILYYDSANNVVLRKHR

SEQ ID NO: 87222 - protein, 40 aa, Artificial Sequence; identical to SEQ ID NO: 34268
  Cyclic GFR-binding peptide
  MOD_RES (4)..(5)..(37)..(39): Xaa is C or S

SEQ ID NO: 87223 - protein, 24 aa, Artificial Sequence
  Cyclic GFR-binding peptide
VKTSATSMLYYDNGRVLLLRKHRM

SEQ ID NO: 87224 - protein, 31 aa, Artificial Sequence
  Cyclic GFR-binding peptide
  MOD_RES (29)..(31): Xaa is C or S
KMSPINILYFDENKNVVYGKIPNMTVESXAX

SEQ ID NO: 87225 - protein, 33 aa, Artificial Sequence; identical to SEQ ID NO: 34269
  Cyclic GFR-binding peptide
  MOD_RES (1)..(32): Xaa is C or S

SEQ ID NO: 87226 - protein, 34 aa, Artificial Sequence
  Cyclic GFR-binding peptide
  MOD_RES (4)..(5): Xaa is C or S
PEPXXVPEKMSPISILYKDENKNVVLKYHYNMTV

SEQ ID NO: 87227 - protein, 35 aa, Artificial Sequence; identical to SEQ ID NO: 34271
  Cyclic GFR-binding peptide
  MOD_RES (2)..(3)..(35): Xaa is C or S

SEQ ID NO: 87228 - protein, 32 aa, Artificial Sequence
  Cyclic GFR-binding peptide
  MOD_RES (29)..(31): Xaa is C or S
QALSPINILYFVGRKPKVYGKIPMIVRSXKXS

SEQ ID NO: 87229 - protein, 38 aa, Artificial Sequence; identical to SEQ ID NO: 34272
  Cyclic GFR-binding peptide
  MOD_RES (3)..(4)..(35)..(37): Xaa is C or S

SEQ ID NO: 87230 - protein, 29 aa, Artificial Sequence
  Cyclic GFR-binding peptide
  MOD_RES (2)..(3): Xaa is C or S
PXXVPEKMSATSILYYDENKNVVLRKHRN

SEQ ID NO: 87231 - protein, 41 aa, Artificial Sequence; identical to SEQ ID NO: 34273
  Cyclic GFR-binding peptide
  MOD_RES (6)..(7)..(38)..(40): Xaa is C or S

SEQ ID NO: 87232 - protein, 27 aa, Artificial Sequence
  Cyclic GFR-binding peptide
  MOD_RES (1)..(2): Xaa is C or S
XXVPTRLEPISILYLDSANNVVKFKYE

SEQ ID NO: 87233 - protein, 36 aa, Artificial Sequence; identical to SEQ ID NO: 34274
  Cyclic GFR-binding peptide
  MOD_RES (4)..(5): Xaa is C or S

SEQ ID NO: 87234 - protein, 38 aa, Artificial Sequence; identical to SEQ ID NO: 34275
  Cyclic GFR-binding peptide
  MOD_RES (6)..(7)..(38): Xaa is C or S

SEQ ID NO: 87235 - protein, 29 aa, Artificial Sequence
  Cyclic GFR-binding peptide
  MOD_RES (28)..(28): Xaa is C or S
MSPISILYKDENKNVVLKYHYNMTVESXA

SEQ ID NO: 87236 - protein, 31 aa, Artificial Sequence
  Cyclic GFR-binding peptide
  MOD_RES (30)..(30): Xaa is C or S
EKMNAISILYFDENKNVVLKKYRNMTVESXA

SEQ ID NO: 87237 - protein, 21 aa, Artificial Sequence
  Cyclic GFR-binding peptide
LSPINILYFIGKTPKIYGKIP

SEQ ID NO: 87238 - protein, 23 aa, Artificial Sequence
  Cyclic GFR-binding peptide
KMSPINILYFDENKNVVYGKIPN

SEQ ID NO: 87239 - protein, 32 aa, Artificial Sequence
  Cyclic GFR-binding peptide
  MOD_RES (5)..(6): Xaa is C or S
SAGPXXTPTKMEPISMLYLNDKQQIIKFKYEG

SEQ ID NO: 87240 - protein, 40 aa, Artificial Sequence; identical to SEQ ID NO: 34277
  Cyclic GFR-binding peptide
  MOD_RES (5)..(6)..(38)..(40): Xaa is C or S

SEQ ID NO: 87241 - protein, 26 aa, Artificial Sequence
  Cyclic GFR-binding peptide
MSPISILYKDENKNVVLKYHYNMTVE

SEQ ID NO: 87242 - protein, 38 aa, Artificial Sequence; identical to SEQ ID NO: 34280
  Cyclic GFR-binding peptide
  MOD_RES (6)..(7)..(38): Xaa is C or S

SEQ ID NO: 87243 - protein, 33 aa, Artificial Sequence
  Cyclic GFR-binding peptide
  MOD_RES (3)..(4): Xaa is C or S
KAXXVPTKLSATSILYYDKGVVTYLRKHRGMAV

SEQ ID NO: 87244 - protein, 32 aa, Artificial Sequence; identical to SEQ ID NO: 34282
  Cyclic GFR-binding peptide
  MOD_RES (32)..(32): Xaa is C or S

SEQ ID NO: 87245 - protein, 32 aa, Artificial Sequence
  Cyclic GFR-binding peptide
  MOD_RES (5)..(6): Xaa is C or S
SAGPXXTPTKMSPISMLYKNDKQQIILKYHYG

SEQ ID NO: 87246 - protein, 31 aa, Artificial Sequence
  Cyclic GFR-binding peptide
  MOD_RES (5)..(6): Xaa is C or S
VPSTXXAPVKTEPISMLYLDNGRVLLKFKYE

SEQ ID NO: 87247 - protein, 28 aa, Artificial Sequence
  Cyclic GFR-binding peptide
PVKTEPISMLYLDNGRVLLKFKYEMIVE

SEQ ID NO: 87248 - protein, 40 aa, Artificial Sequence; identical to SEQ ID NO: 34283
  Cyclic GFR-binding peptide
  MOD_RES (6)..(7)..(38)..(40): Xaa is C or S

SEQ ID NO: 87249 - protein, 36 aa, Artificial Sequence; identical to SEQ ID NO: 34284
  Cyclic GFR-binding peptide
  MOD_RES (3)..(4)..(36): Xaa is C or S

SEQ ID NO: 87250 - protein, 28 aa, Artificial Sequence
  Cyclic GFR-binding peptide
  MOD_RES (2)..(3): Xaa is C or S
TXXVPTRLSATSILYYDSANNVVLRKHR

SEQ ID NO: 87251 - protein, 32 aa, Artificial Sequence
  Cyclic GFR-binding peptide
  MOD_RES (5)..(6): Xaa is C or S
ASKAXXVPTKLSATSILYYDKGVVTYLRKHRG

SEQ ID NO: 87252 - protein, 23 aa, Artificial Sequence
  Cyclic GFR-binding peptide
KMSPISMLYKNDKQQIILKYHYG

SEQ ID NO: 87253 - protein, 27 aa, Artificial Sequence
  Cyclic GFR-binding peptide
EKMSPISILYKDENKNVVLKYHYNMTV

SEQ ID NO: 87254 - protein, 32 aa, Artificial Sequence; identical to SEQ ID NO: 34288
  Cyclic GFR-binding peptide
  MOD_RES (1)..(1): Xaa is C or S

SEQ ID NO: 87255 - protein, 33 aa, Artificial Sequence; identical to SEQ ID NO: 34289
  Cyclic GFR-binding peptide
  MOD_RES (1)..(2)..(33): Xaa is C or S

SEQ ID NO: 87256 - protein, 23 aa, Artificial Sequence
  Cyclic GFR-binding peptide
KMEPISMLYLNDKQQIIKFKYEG

SEQ ID NO: 87257 - protein, 32 aa, Artificial Sequence; identical to SEQ ID NO: 34290
  Cyclic GFR-binding peptide
  MOD_RES (1)..(2): Xaa is C or S

SEQ ID NO: 87258 - protein, 25 aa, Artificial Sequence
  Cyclic GFR-binding peptide
QALSPINILYFVGRKPKVYGKIPMI

SEQ ID NO: 87259 - protein, 36 aa, Artificial Sequence; identical to SEQ ID NO: 34292
  Cyclic GFR-binding peptide
  MOD_RES (2)..(3)..(35): Xaa is C or S

SEQ ID NO: 87260 - protein, 34 aa, Artificial Sequence
  Cyclic GFR-binding peptide
  MOD_RES (4)..(5): Xaa is C or S
PEPXXVPEKMSATSILYYDENKNVVLRKHRNMTV

SEQ ID NO: 87261 - protein, 26 aa, Artificial Sequence
  Cyclic GFR-binding peptide
PARLSATSILYYDAANNVVLRKHRDM

SEQ ID NO: 87262 - protein, 30 aa, Artificial Sequence
  Cyclic GFR-binding peptide
  MOD_RES (27)..(29): Xaa is C or S
SATSILYYDKGVVTYLRKHRGMAVSEXGXR

SEQ ID NO: 87263 - protein, 35 aa, Artificial Sequence
  Cyclic GFR-binding peptide
  MOD_RES (6)..(7): Xaa is C or S
GSAGPXXTPTKMSPISMLYKNDKQQIILKYHYGMV

SEQ ID NO: 87264 - protein, 38 aa, Artificial Sequence; identical to SEQ ID NO: 34294
  Cyclic GFR-binding peptide
  MOD_RES (2)..(3)..(35)..(37): Xaa is C or S

SEQ ID NO: 87265 - protein, 31 aa, Artificial Sequence
  Cyclic GFR-binding peptide
  MOD_RES (2)..(3): Xaa is C or S
TXXAPVKTSPISMLYKDNGRVLLLKYHYMIV

SEQ ID NO: 87266 - protein, 37 aa, Artificial Sequence; identical to SEQ ID NO: 34295
  Cyclic GFR-binding peptide
  MOD_RES (6)..(7): Xaa is C or S

SEQ ID NO: 87267 - protein, 33 aa, Artificial Sequence; identical to SEQ ID NO: 34297
  Cyclic GFR-binding peptide
  MOD_RES (1)..(2)..(33): Xaa is C or S

SEQ ID NO: 87268 - protein, 20 aa, Artificial Sequence
  Cyclic GFR-binding peptide
EPISILYLDSANNVVKFKYE

SEQ ID NO: 87269 - protein, 26 aa, Artificial Sequence
  Cyclic GFR-binding peptide
  MOD_RES (1)..(1): Xaa is C or S
XVPEKMSATSILYYDENKNVVLRKHR

SEQ ID NO: 87270 - protein, 32 aa, Artificial Sequence
  Cyclic GFR-binding peptide
  MOD_RES (3)..(4): Xaa is C or S
STXXAPVKTSATSMLYYDNGRVLLLRKHRMIV

SEQ ID NO: 87271 - protein, 21 aa, Artificial Sequence
  Cyclic GFR-binding peptide
LEPISILYLDSANNVVKFKYE

SEQ ID NO: 87272 - protein, 38 aa, Artificial Sequence; identical to SEQ ID NO: 34299
  Cyclic GFR-binding peptide
  MOD_RES (6)..(7): Xaa is C or S

SEQ ID NO: 87273 - protein, 39 aa, Artificial Sequence; identical to SEQ ID NO: 34300
  Cyclic GFR-binding peptide
  MOD_RES (4)..(5)..(36)..(38): Xaa is C or S

SEQ ID NO: 87274 - protein, 32 aa, Artificial Sequence
  Cyclic GFR-binding peptide
  MOD_RES (3)..(4): Xaa is C or S
STXXAPVKTSPISMLYKDNGRVLLLKYHYMIV

SEQ ID NO: 87275 - protein, 38 aa, Artificial Sequence; identical to SEQ ID NO: 34301
  Cyclic GFR-binding peptide
  MOD_RES (4)..(5)..(37): Xaa is C or S

SEQ ID NO: 87276 - protein, 30 aa, Artificial Sequence
  Cyclic GFR-binding peptide
  MOD_RES (30)..(30): Xaa is C or S
TRLEPISILYLDSANNVVKFKYEDMVVESX

SEQ ID NO: 87277 - protein, 33 aa, Artificial Sequence
  Cyclic GFR-binding peptide
  MOD_RES (6)..(7): Xaa is C or S
ASASPXXVSQDLSPINILYFIGKTPKIYGKIPM

SEQ ID NO: 87278 - protein, 30 aa, Artificial Sequence
  Cyclic GFR-binding peptide
PEKMSPINILYFDENKNVVYGKIPNMTVES

SEQ ID NO: 87279 - protein, 25 aa, Artificial Sequence
  Cyclic GFR-binding peptide
TPTKMEPISMLYLNDKQQIIKFKYE

SEQ ID NO: 87280 - protein, 33 aa, Artificial Sequence
  Cyclic GFR-binding peptide
  MOD_RES (6)..(7): Xaa is C or S
ASAAPXXVPQALSPINILYFVGRKPKVYGKIPM

SEQ ID NO: 87281 - protein, 39 aa, Artificial Sequence; identical to SEQ ID NO: 34303
  Cyclic GFR-binding peptide
  MOD_RES (4)..(5)..(36)..(38): Xaa is C or S

SEQ ID NO: 87282 - protein, 34 aa, Artificial Sequence
  Cyclic GFR-binding peptide
  MOD_RES (5)..(6): Xaa is C or S
SASPXXVSQDLSPINILYFIGKTPKIYGKIPMIV

SEQ ID NO: 87283 - protein, 37 aa, Artificial Sequence; identical to SEQ ID NO: 34304
  Cyclic GFR-binding peptide
  MOD_RES (4)..(5)..(37): Xaa is C or S

SEQ ID NO: 87284 - protein, 30 aa, Artificial Sequence
  Cyclic GFR-binding peptide
  MOD_RES (27)..(29): Xaa is C or S
TSPISMLYKDNGRVLLLKYHYMIVEEXGXL

SEQ ID NO: 87285 - protein, 27 aa, Artificial Sequence
  Cyclic GFR-binding peptide
KTSATSMLYYDNGRVLLLRKHRMIVEE

SEQ ID NO: 87286 - protein, 36 aa, Artificial Sequence; identical to SEQ ID NO: 34305
  Cyclic GFR-binding peptide
  MOD_RES (2)..(3)..(35): Xaa is C or S

SEQ ID NO: 87287 - protein, 33 aa, Artificial Sequence
  Cyclic GFR-binding peptide
  MOD_RES (3)..(4): Xaa is C or S
GPXXTPTKMSATSMLYYNDKQQIILRKHRGMVV

SEQ ID NO: 87288 - protein, 34 aa, Artificial Sequence; identical to SEQ ID NO: 34307
  Cyclic GFR-binding peptide
  MOD_RES (1)..(33): Xaa is C or S

SEQ ID NO: 87289 - protein, 29 aa, Artificial Sequence
  Cyclic GFR-binding peptide
TPTKMSPISMLYKNDKQQIILKYHYGMVV

SEQ ID NO: 87290 - protein, 25 aa, Artificial Sequence
  Cyclic GFR-binding peptide
LSPINILYFIGKTPKIYGKIPMIVK

SEQ ID NO: 87291 - protein, 31 aa, Artificial Sequence; identical to SEQ ID NO: 34308
  Cyclic GFR-binding peptide
  MOD_RES (1)..(1): Xaa is C or S

SEQ ID NO: 87292 - protein, 32 aa, Artificial Sequence
  Cyclic GFR-binding peptide
  MOD_RES (29)..(31): Xaa is C or S
KLSATSILYYDKGVVTYLRKHRGMAVSEXGXR

SEQ ID NO: 87293 - protein, 25 aa, Artificial Sequence
  Cyclic GFR-binding peptide
VPQALSPINILYFVGRKPKVYGKIP

SEQ ID NO: 87294 - protein, 22 aa, Artificial Sequence
  Cyclic GFR-binding peptide
NAISILYFDENKNVVLKKYRNM

SEQ ID NO: 87295 - protein, 32 aa, Artificial Sequence
  Cyclic GFR-binding peptide
  MOD_RES (4)..(5): Xaa is C or S
AAPXXVPQALSPINILYFVGRKPKVYGKIPMI

SEQ ID NO: 87296 - protein, 30 aa, Artificial Sequence
  Cyclic GFR-binding peptide
  MOD_RES (27)..(29): Xaa is C or S
EPISILYLDSANNVVKFKYEDMVVESXGXR

SEQ ID NO: 87297 - protein, 27 aa, Artificial Sequence
  Cyclic GFR-binding peptide
SQDLSPINILYFIGKTPKIYGKIPMIV

SEQ ID NO: 87298 - protein, 26 aa, Artificial Sequence
  Cyclic GFR-binding peptide
QDLSPINILYFVGRTPKVYGKIPMVV

SEQ ID NO: 87299 - protein, 31 aa, Artificial Sequence
  Cyclic GFR-binding peptide
  MOD_RES (2)..(3): Xaa is C or S
PXXVPQALSPINILYFVGRKPKVYGKIPMIV

SEQ ID NO: 87300 - protein, 29 aa, Artificial Sequence
  Cyclic GFR-binding peptide
  MOD_RES (2)..(3): Xaa is C or S
TXXAPVKTSPISMLYKDNGRVLLLKYHYM

SEQ ID NO: 87301 - protein, 38 aa, Artificial Sequence; identical to SEQ ID NO: 34314
  Cyclic GFR-binding peptide
  MOD_RES (6)..(7): Xaa is C or S

SEQ ID NO: 87302 - protein, 27 aa, Artificial Sequence
  Cyclic GFR-binding peptide
ARLSATSILYYDAANNVVLRKHRDMVV

SEQ ID NO: 87303 - protein, 20 aa, Artificial Sequence
  Cyclic GFR-binding peptide
NAISILYFDENKNVVLKKYR

SEQ ID NO: 87304 - protein, 39 aa, Artificial Sequence; identical to SEQ ID NO: 34315
  Cyclic GFR-binding peptide
  MOD_RES (3)..(4)..(36)..(38): Xaa is C or S

SEQ ID NO: 87305 - protein, 28 aa, Artificial Sequence
  Cyclic GFR-binding peptide
  MOD_RES (1)..(1): Xaa is C or S
XVPEKMSPISILYKDENKNVVLKYHYNM

SEQ ID NO: 87306 - protein, 38 aa, Artificial Sequence; identical to SEQ ID NO: 34317
  Cyclic GFR-binding peptide
  MOD_RES (3)..(4)..(35)..(37): Xaa is C or S

SEQ ID NO: 87307 - protein, 28 aa, Artificial Sequence
  Cyclic GFR-binding peptide
  MOD_RES (1)..(1): Xaa is C or S
XVPTKLSATSILYYDKGVVTYLRKHRGM

SEQ ID NO: 87308 - protein, 36 aa, Artificial Sequence; identical to SEQ ID NO: 34321
  Cyclic GFR-binding peptide
  MOD_RES (1)..(2)..(33)..(35): Xaa is C or S

SEQ ID NO: 87309 - protein, 34 aa, Artificial Sequence; identical to SEQ ID NO: 34324
  Cyclic GFR-binding peptide
  MOD_RES (2)..(3): Xaa is C or S

SEQ ID NO: 87310 - protein, 39 aa, Artificial Sequence; identical to SEQ ID NO: 34325
  Cyclic GFR-binding peptide
  MOD_RES (6)..(7)..(39): Xaa is C or S

SEQ ID NO: 87311 - protein, 40 aa, Artificial Sequence; identical to SEQ ID NO: 34326
  Cyclic GFR-binding peptide
  MOD_RES (5)..(6)..(38)..(40): Xaa is C or S

SEQ ID NO: 87312 - protein, 34 aa, Artificial Sequence; identical to SEQ ID NO: 34327
  Cyclic GFR-binding peptide
  MOD_RES (1)..(33): Xaa is C or S

SEQ ID NO: 87313 - protein, 29 aa, Artificial Sequence
  Cyclic GFR-binding peptide
  MOD_RES (2)..(3): Xaa is C or S
PXXVPQALSPINILYFVGRKPKVYGKIPM

SEQ ID NO: 87314 - protein, 32 aa, Artificial Sequence
  Cyclic GFR-binding peptide
  MOD_RES (6)..(7): Xaa is C or S
GIPEPXXVPEKMSATSILYYDENKNVVLRKHR

SEQ ID NO: 87315 - protein, 32 aa, Artificial Sequence; identical to SEQ ID NO: 34328
  Cyclic GFR-binding peptide
  MOD_RES (1)..(2): Xaa is C or S

SEQ ID NO: 87316 - protein, 31 aa, Artificial Sequence
  Cyclic GFR-binding peptide
  MOD_RES (3)..(4): Xaa is C or S
APXXVPQALSPINILYFVGRKPKVYGKIPMI

SEQ ID NO: 87317 - protein, 35 aa, Artificial Sequence; identical to SEQ ID NO: 34329
  Cyclic GFR-binding peptide
  MOD_RES (2)..(3)..(35): Xaa is C or S

SEQ ID NO: 87318 - protein, 39 aa, Artificial Sequence; identical to SEQ ID NO: 34330
  Cyclic GFR-binding peptide
  MOD_RES (5)..(6)..(38): Xaa is C or S

SEQ ID NO: 87319 - protein, 34 aa, Artificial Sequence; identical to SEQ ID NO: 34331
  Cyclic GFR-binding peptide
  MOD_RES (3)..(4): Xaa is C or S

SEQ ID NO: 87320 - protein, 32 aa, Artificial Sequence; identical to SEQ ID NO: 34332
  Cyclic GFR-binding peptide
  MOD_RES (31)..(31): Xaa is C or S

SEQ ID NO: 87321 - protein, 32 aa, Artificial Sequence; identical to SEQ ID NO: 34333
  Cyclic GFR-binding peptide
  MOD_RES (1)..(2): Xaa is C or S

SEQ ID NO: 87322 - protein, 35 aa, Artificial Sequence
  Cyclic GFR-binding peptide
  MOD_RES (5)..(6): Xaa is C or S
SAGPXXTPTKMSATSMLYYNDKQQIILRKHRGMVV

SEQ ID NO: 87323 - protein, 33 aa, Artificial Sequence
  Cyclic GFR-binding peptide
  MOD_RES (4)..(5): Xaa is C or S
PEPXXVPEKMSPISILYKDENKNVVLKYHYNMT

SEQ ID NO: 87324 - protein, 30 aa, Artificial Sequence
  Cyclic GFR-binding peptide
  MOD_RES (3)..(4): Xaa is C or S
GPXXTPTKMSATSMLYYNDKQQIILRKHRG

SEQ ID NO: 87325 - protein, 25 aa, Artificial Sequence
  Cyclic GFR-binding peptide
QDLSPINILYFVGRTPKVYGKIPMV

SEQ ID NO: 87326 - protein, 27 aa, Artificial Sequence
  Cyclic GFR-binding peptide
  MOD_RES (27)..(27): Xaa is C or S
SPISILYKDSANNVVLKYHYDMVVESX

SEQ ID NO: 87327 - protein, 23 aa, Artificial Sequence
  Cyclic GFR-binding peptide
KMNAISILYFDENKNVVLKKYRN

SEQ ID NO: 87328 - protein, 41 aa, Artificial Sequence; identical to SEQ ID NO: 34337
  Cyclic GFR-binding peptide
  MOD_RES (5)..(6)..(38)..(40): Xaa is C or S

SEQ ID NO: 87329 - protein, 32 aa, Artificial Sequence
  Cyclic GFR-binding peptide
  MOD_RES (6)..(7): Xaa is C or S
RVPSTXXAPVKTEPISMLYLDNGRVLLKFKYE

SEQ ID NO: 87330 - protein, 24 aa, Artificial Sequence
  Cyclic GFR-binding peptide
MSPISMLYKNDKQQIILKYHYGMV

SEQ ID NO: 87331 - protein, 35 aa, Artificial Sequence; identical to SEQ ID NO: 34338
  Cyclic GFR-binding peptide
  MOD_RES (1)..(32)..(34): Xaa is C or S

SEQ ID NO: 87332 - protein, 27 aa, Artificial Sequence
  Cyclic GFR-binding peptide
PEKMEPISILYLDENKNVVKFKYENMT

SEQ ID NO: 87333 - protein, 28 aa, Artificial Sequence
  Cyclic GFR-binding peptide
  MOD_RES (1)..(1): Xaa is C or S
XVPTRLEPISILYLDSANNVVKFKYEDM

SEQ ID NO: 87334 - protein, 29 aa, Artificial Sequence
  Cyclic GFR-binding peptide
  MOD_RES (27)..(29): Xaa is C or S
EPISILYLDENKNVVKFKYENMTVESXAX

SEQ ID NO: 87335 - protein, 27 aa, Artificial Sequence
  Cyclic GFR-binding peptide
  MOD_RES (1)..(1): Xaa is C or S
XVPARLSATSILYYDAANNVVLRKHRD

SEQ ID NO: 87336 - protein, 29 aa, Artificial Sequence
  Cyclic GFR-binding peptide
  MOD_RES (29)..(29): Xaa is C or S
KLSATSILYYDKGVVTYLRKHRGMAVSEX

SEQ ID NO: 87337 - protein, 39 aa, Artificial Sequence; identical to SEQ ID NO: 34340
  Cyclic GFR-binding peptide
  MOD_RES (3)..(4)..(36)..(38): Xaa is C or S

SEQ ID NO: 87338 - protein, 29 aa, Artificial Sequence
  Cyclic GFR-binding peptide
  MOD_RES (3)..(4): Xaa is C or S
EPXXVPEKMEPISILYLDENKNVVKFKYE

SEQ ID NO: 87339 - protein, 31 aa, Artificial Sequence
  Cyclic GFR-binding peptide
  MOD_RES (5)..(6): Xaa is C or S
SAAPXXVPQALSPINILYFVGRKPKVYGKIP

SEQ ID NO: 87340 - protein, 31 aa, Artificial Sequence
  Cyclic GFR-binding peptide
  MOD_RES (29)..(31): Xaa is C or S
KMEPISMLYLNDKQQIIKFKYEGMVVDRXGX

SEQ ID NO: 87341 - protein, 32 aa, Artificial Sequence
  Cyclic GFR-binding peptide
  MOD_RES (30)..(32): Xaa is C or S
PQALSPINILYFVGRKPKVYGKIPMIVRSXKX

SEQ ID NO: 87342 - protein, 35 aa, Artificial Sequence; identical to SEQ ID NO: 34341
  Cyclic GFR-binding peptide
  MOD_RES (1)..(33)..(35): Xaa is C or S

SEQ ID NO: 87343 - protein, 30 aa, Artificial Sequence
  Cyclic GFR-binding peptide
  MOD_RES (3)..(4): Xaa is C or S
EPXXVPEKMSATSILYYDENKNVVLRKHRN

SEQ ID NO: 87344 - protein, 29 aa, Artificial Sequence
  Cyclic GFR-binding peptide
  MOD_RES (28)..(28): Xaa is C or S
ALSPINILYFVGRKPKVYGKIPMIVRSXK

SEQ ID NO: 87345 - protein, 33 aa, Artificial Sequence; identical to SEQ ID NO: 34343
  Cyclic GFR-binding peptide
  MOD_RES (32)..(32): Xaa is C or S

SEQ ID NO: 87346 - protein, 36 aa, Artificial Sequence; identical to SEQ ID NO: 34342
  Cyclic GFR-binding peptide
  MOD_RES (3)..(4)..(36): Xaa is C or S

SEQ ID NO: 87347 - protein, 30 aa, Artificial Sequence
  Cyclic GFR-binding peptide
  MOD_RES (1)..(2): Xaa is C or S
XXVPEKMSPINILYFDENKNVVYGKIPNMT

SEQ ID NO: 87348 - protein, 30 aa, Artificial Sequence
  Cyclic GFR-binding peptide
  MOD_RES (29)..(29): Xaa is C or S
KMSATSMLYYNDKQQIILRKHRGMVVDRXG

SEQ ID NO: 87349 - protein, 32 aa, Artificial Sequence
  Cyclic GFR-binding peptide
  MOD_RES (6)..(7): Xaa is C or S
STPPTXXVPTRLSPISILYKDSANNVVLKYHY

SEQ ID NO: 87350 - protein, 28 aa, Artificial Sequence
  Cyclic GFR-binding peptide
  MOD_RES (28)..(28): Xaa is C or S
MSPISMLYKNDKQQIILKYHYGMVVDRX

SEQ ID NO: 87351 - protein, 30 aa, Artificial Sequence
  Cyclic GFR-binding peptide
  MOD_RES (4)..(5): Xaa is C or S
PSTXXAPVKTSATSMLYYDNGRVLLLRKHR

SEQ ID NO: 87352 - protein, 32 aa, Artificial Sequence
  Cyclic GFR-binding peptide
  MOD_RES (3)..(4): Xaa is C or S
APXXVPQALSPINILYFVGRKPKVYGKIPMIV

SEQ ID NO: 87353 - protein, 30 aa, Artificial Sequence
  Cyclic GFR-binding peptide
  MOD_RES (29)..(29): Xaa is C or S
QALSPINILYFVGRKPKVYGKIPMIVRSXK

SEQ ID NO: 87354 - protein, 30 aa, Artificial Sequence
  Cyclic GFR-binding peptide
  MOD_RES (2)..(3): Xaa is C or S
TXXVPTRLSPISILYKDSANNVVLKYHYDM

SEQ ID NO: 87355 - protein, 24 aa, Artificial Sequence
  Cyclic GFR-binding peptide
EPISILYLDSANNVVKFKYEDMVV

SEQ ID NO: 87356 - protein, 27 aa, Artificial Sequence
  Cyclic GFR-binding peptide
MSPINILYFDENKNVVYGKIPNMTVES

SEQ ID NO: 87357 - protein, 32 aa, Artificial Sequence
  Cyclic GFR-binding peptide
  MOD_RES (3)..(4): Xaa is C or S
EPXXVPEKMSPISILYKDENKNVVLKYHYNMT

SEQ ID NO: 87358 - protein, 28 aa, Artificial Sequence
  Cyclic GFR-binding peptide
APVKTEPISMLYLDNGRVLLKFKYEMIV

SEQ ID NO: 87359 - protein, 35 aa, Artificial Sequence
  Cyclic GFR-binding peptide
  MOD_RES (6)..(7): Xaa is C or S
HVPKPXXAPTKLSPISVLYKDDSSNVILKYHYNMV

SEQ ID NO: 87360 - protein, 29 aa, Artificial Sequence
  Cyclic GFR-binding peptide
  MOD_RES (1)..(2): Xaa is C or S
XXVPEKMEPISILYLDENKNVVKFKYENM

SEQ ID NO: 87361 - protein, 25 aa, Artificial Sequence
  Cyclic GFR-binding peptide
SPISMLYKDNGRVLLLKYHYMIVEE

SEQ ID NO: 87362 - protein, 33 aa, Artificial Sequence; identical to SEQ ID NO: 34348
  Cyclic GFR-binding peptide
  MOD_RES (2)..(3): Xaa is C or S

SEQ ID NO: 87363 - protein, 33 aa, Artificial Sequence; identical to SEQ ID NO: 34349
  Cyclic GFR-binding peptide
  MOD_RES (1)..(2): Xaa is C or S

SEQ ID NO: 87364 - protein, 31 aa, Artificial Sequence
  Cyclic GFR-binding peptide
  MOD_RES (3)..(4): Xaa is C or S
STXXAPVKTEPISMLYLDNGRVLLKFKYEMI

SEQ ID NO: 87365 - protein, 35 aa, Artificial Sequence; identical to SEQ ID NO: 22092
  Cyclic GFR-binding peptide
  MOD_RES (32)..(34): Xaa is C or S

SEQ ID NO: 87366 - protein, 34 aa, Artificial Sequence; identical to SEQ ID NO: 34350
  Cyclic GFR-binding peptide
  MOD_RES (3)..(4): Xaa is C or S

SEQ ID NO: 87367 - protein, 32 aa, Artificial Sequence
  Cyclic GFR-binding peptide
  MOD_RES (29)..(31): Xaa is C or S
RLSATSILYYDAANNVVLRKHRDMVVEAXGXR

SEQ ID NO: 87368 - protein, 27 aa, Artificial Sequence
  Cyclic GFR-binding peptide
VPQALSPINILYFVGRKPKVYGKIPMI

SEQ ID NO: 87369 - protein, 30 aa, Artificial Sequence
  Cyclic GFR-binding peptide
  MOD_RES (3)..(4): Xaa is C or S
EPXXVPEKMNAISILYFDENKNVVLKKYRN

SEQ ID NO: 87370 - protein, 30 aa, Artificial Sequence
  Cyclic GFR-binding peptide
  MOD_RES (28)..(30): Xaa is C or S
MEPISILYLDENKNVVKFKYENMTVESXAX

SEQ ID NO: 87371 - protein, 38 aa, Artificial Sequence; identical to SEQ ID NO: 34352
  Cyclic GFR-binding peptide
  MOD_RES (6)..(7)..(38): Xaa is C or S

SEQ ID NO: 87372 - protein, 33 aa, Artificial Sequence; identical to SEQ ID NO: 34353
  Cyclic GFR-binding peptide
  MOD_RES (32)..(32): Xaa is C or S

SEQ ID NO: 87373 - protein, 37 aa, Artificial Sequence; identical to SEQ ID NO: 34355
  Cyclic GFR-binding peptide
  MOD_RES (4)..(5)..(36): Xaa is C or S

SEQ ID NO: 87374 - protein, 22 aa, Artificial Sequence
  Cyclic GFR-binding peptide
LSATSILYYDKGVVTYLRKHRG

SEQ ID NO: 87375 - protein, 27 aa, Artificial Sequence
  Cyclic GFR-binding peptide
EKMNAISILYFDENKNVVLKKYRNMTV

SEQ ID NO: 87376 - protein, 29 aa, Artificial Sequence
  Cyclic GFR-binding peptide
  MOD_RES (3)..(4): Xaa is C or S
SPXXVSQDLSPINILYFIGKTPKIYGKIP

SEQ ID NO: 87377 - protein, 30 aa, Artificial Sequence
  Cyclic GFR-binding peptide
  MOD_RES (2)..(3): Xaa is C or S
PXXVPEKMSPISILYKDENKNVVLKYHYNM

SEQ ID NO: 87378 - protein, 31 aa, Artificial Sequence; identical to SEQ ID NO: 34358
  Cyclic GFR-binding peptide
  MOD_RES (31)..(31): Xaa is C or S

SEQ ID NO: 87379 - protein, 35 aa, Artificial Sequence; identical to SEQ ID NO: 34359
  Cyclic GFR-binding peptide
  MOD_RES (4)..(5): Xaa is C or S

SEQ ID NO: 87380 - protein, 32 aa, Artificial Sequence
  Cyclic GFR-binding peptide
  MOD_RES (2)..(3): Xaa is C or S
PXXVPEKMSATSILYYDENKNVVLRKHRNMTV

SEQ ID NO: 87381 - protein, 33 aa, Artificial Sequence
  Cyclic GFR-binding peptide
  MOD_RES (6)..(7): Xaa is C or S
GIPEPXXVPEKMEPISILYLDENKNVVKFKYEN

SEQ ID NO: 87382 - protein, 32 aa, Artificial Sequence; identical to SEQ ID NO: 34360
  Cyclic GFR-binding peptide
  MOD_RES (1)..(1): Xaa is C or S

SEQ ID NO: 87383 - protein, 24 aa, Artificial Sequence
  Cyclic GFR-binding peptide
SATSILYYDKGVVTYLRKHRGMAV

SEQ ID NO: 87384 - protein, 24 aa, Artificial Sequence
  Cyclic GFR-binding peptide
PTRLEPISILYLDSANNVVKFKYE

SEQ ID NO: 87385 - protein, 24 aa, Artificial Sequence
  Cyclic GFR-binding peptide
PVKTSPISMLYKDNGRVLLLKYHY

SEQ ID NO: 87386 - protein, 31 aa, Artificial Sequence
  Cyclic GFR-binding peptide
  MOD_RES (30)..(30): Xaa is C or S
ARLSATSILYYDAANNVVLRKHRDMVVEAXG

SEQ ID NO: 87387 - protein, 25 aa, Artificial Sequence
  Cyclic GFR-binding peptide
TEPISMLYLDNGRVLLKFKYEMIVE

SEQ ID NO: 87388 - protein, 36 aa, Artificial Sequence; identical to SEQ ID NO: 34365
  Cyclic GFR-binding peptide
  MOD_RES (1)..(33)..(35): Xaa is C or S

SEQ ID NO: 87389 - protein, 22 aa, Artificial Sequence
  Cyclic GFR-binding peptide
RLSATSILYYDAANNVVLRKHR

SEQ ID NO: 87390 - protein, 21 aa, Artificial Sequence
  Cyclic GFR-binding peptide
MEPISMLYLNDKQQIIKFKYE

SEQ ID NO: 87391 - protein, 33 aa, Artificial Sequence; identical to SEQ ID NO: 34367
  Cyclic GFR-binding peptide
  MOD_RES (32)..(32): Xaa is C or S

SEQ ID NO: 87392 - protein, 33 aa, Artificial Sequence
  Cyclic GFR-binding peptide
  MOD_RES (3)..(4): Xaa is C or S
EPXXVPEKMNAISILYFDENKNVVLKKYRNMTV

SEQ ID NO: 87393 - protein, 21 aa, Artificial Sequence
  Cyclic GFR-binding peptide
TSPISMLYKDNGRVLLLKYHY

SEQ ID NO: 87394 - protein, 31 aa, Artificial Sequence; identical to SEQ ID NO: 34370
  Cyclic GFR-binding peptide

SEQ ID NO: 87395 - protein, 24 aa, Artificial Sequence
  Cyclic GFR-binding peptide
PEKMSPINILYFDENKNVVYGKIP

SEQ ID NO: 87396 - protein, 38 aa, Artificial Sequence; identical to SEQ ID NO: 34372
  Cyclic GFR-binding peptide
  MOD_RES (2)..(3)..(35)..(37): Xaa is C or S

SEQ ID NO: 87397 - protein, 32 aa, Artificial Sequence
  Cyclic GFR-binding peptide
  MOD_RES (6)..(7): Xaa is C or S
RVPSTXXAPVKTSPISMLYKDNGRVLLLKYHY

SEQ ID NO: 87398 - protein, 37 aa, Artificial Sequence; identical to SEQ ID NO: 34376
  Cyclic GFR-binding peptide
  MOD_RES (1)..(2)..(34)..(36): Xaa is C or S

SEQ ID NO: 87399 - protein, 31 aa, Artificial Sequence; identical to SEQ ID NO: 34377
  Cyclic GFR-binding peptide

SEQ ID NO: 87400 - protein, 35 aa, Artificial Sequence; identical to SEQ ID NO: 34379
  Cyclic GFR-binding peptide
  MOD_RES (4)..(5): Xaa is C or S

SEQ ID NO: 87401 - protein, 31 aa, Artificial Sequence
  Cyclic GFR-binding peptide
  MOD_RES (3)..(4): Xaa is C or S
ASXXVPARLSATSILYYDAANNVVLRKHRDM

SEQ ID NO: 87402 - protein, 33 aa, Artificial Sequence
  Cyclic GFR-binding peptide
  MOD_RES (30)..(32): Xaa is C or S
TKMSATSMLYYNDKQQIILRKHRGMVVDRXGXS

SEQ ID NO: 87403 - protein, 31 aa, Artificial Sequence
  Cyclic GFR-binding peptide
  MOD_RES (1)..(2): Xaa is C or S
XXAPVKTSPISMLYKDNGRVLLLKYHYMIVE

SEQ ID NO: 87404 - protein, 27 aa, Artificial Sequence
  Cyclic GFR-binding peptide
  MOD_RES (27)..(27): Xaa is C or S
SATSMLYYNDKQQIILRKHRGMVVDRX

SEQ ID NO: 87405 - protein, 34 aa, Artificial Sequence; identical to SEQ ID NO: 34380
  Cyclic GFR-binding peptide
  MOD_RES (3)..(4): Xaa is C or S

SEQ ID NO: 87406 - protein, 31 aa, Artificial Sequence
  Cyclic GFR-binding peptide
  MOD_RES (28)..(30): Xaa is C or S
MEPISMLYLNDKQQIIKFKYEGMVVDRXGXS

SEQ ID NO: 87407 - protein, 24 aa, Artificial Sequence
  Cyclic GFR-binding peptide
DLSPINILYFVGRTPKVYGKIPMV

SEQ ID NO: 87408 - protein, 31 aa, Artificial Sequence
  Cyclic GFR-binding peptide
  MOD_RES (30)..(30): Xaa is C or S
EKMEPISILYLDENKNVVKFKYENMTVESXA

SEQ ID NO: 87409 - protein, 26 aa, Artificial Sequence
  Cyclic GFR-binding peptide
MSATSILYYDENKNVVLRKHRNMTVE

SEQ ID NO: 87410 - protein, 32 aa, Artificial Sequence
  Cyclic GFR-binding peptide
  MOD_RES (4)..(5): Xaa is C or S
AGPXXTPTKMSPISMLYKNDKQQIILKYHYGM

SEQ ID NO: 87411 - protein, 32 aa, Artificial Sequence
  Cyclic GFR-binding peptide
  MOD_RES (30)..(32): Xaa is C or S
EKMNAISILYFDENKNVVLKKYRNMTVESXAX

SEQ ID NO: 87412 - protein, 30 aa, Artificial Sequence
  Cyclic GFR-binding peptide
  MOD_RES (28)..(30): Xaa is C or S
LSATSILYYDKGVVTYLRKHRGMAVSEXGX

SEQ ID NO: 87413 - protein, 29 aa, Artificial Sequence
  Cyclic GFR-binding peptide
VPTRLEPISILYLDSANNVVKFKYEDMVV

SEQ ID NO: 87414 - protein, 27 aa, Artificial Sequence
  Cyclic GFR-binding peptide
RLSATSILYYDAANNVVLRKHRDMVVE

SEQ ID NO: 87415 - protein, 29 aa, Artificial Sequence
  Cyclic GFR-binding peptide
  MOD_RES (1)..(2): Xaa is C or S
XXVPTRLSATSILYYDSANNVVLRKHRDM

SEQ ID NO: 87416 - protein, 30 aa, Artificial Sequence
  Cyclic GFR-binding peptide
  MOD_RES (29)..(29): Xaa is C or S
KMEPISILYLDENKNVVKFKYENMTVESXA

SEQ ID NO: 87417 - protein, 40 aa, Artificial Sequence; identical to SEQ ID NO: 34384
  Cyclic GFR-binding peptide
  MOD_RES (4)..(5)..(37)..(39): Xaa is C or S

SEQ ID NO: 87418 - protein, 30 aa, Artificial Sequence
  Cyclic GFR-binding peptide
  MOD_RES (1)..(2): Xaa is C or S
XXVPTRLSPISILYKDSANNVVLKYHYDMV

SEQ ID NO: 87419 - protein, 40 aa, Artificial Sequence; identical to SEQ ID NO: 34385
  Cyclic GFR-binding peptide
  MOD_RES (5)..(6)..(37)..(39): Xaa is C or S

SEQ ID NO: 87420 - protein, 33 aa, Artificial Sequence
  Cyclic GFR-binding peptide
  MOD_RES (4)..(5): Xaa is C or S
PEPXXVPEKMSATSILYYDENKNVVLRKHRNMT

SEQ ID NO: 87421 - protein, 32 aa, Artificial Sequence
  Cyclic GFR-binding peptide
  MOD_RES (30)..(32): Xaa is C or S
TKMSATSMLYYNDKQQIILRKHRGMVVDRXGX

SEQ ID NO: 87422 - protein, 25 aa, Artificial Sequence
  Cyclic GFR-binding peptide
LSATSILYYDAANNVVLRKHRDMVV

SEQ ID NO: 87423 - protein, 32 aa, Artificial Sequence; identical to SEQ ID NO: 34388
  Cyclic GFR-binding peptide
  MOD_RES (1)..(1): Xaa is C or S

SEQ ID NO: 87424 - protein, 34 aa, Artificial Sequence
  Cyclic GFR-binding peptide
  MOD_RES (6)..(7): Xaa is C or S
KASKAXXVPTKLSATSILYYDKGVVTYLRKHRGM

SEQ ID NO: 87425 - protein, 28 aa, Artificial Sequence
  Cyclic GFR-binding peptide
KMEPISMLYLNDKQQIIKFKYEGMVVDR

SEQ ID NO: 87426 - protein, 33 aa, Artificial Sequence; identical to SEQ ID NO: 34391
  Cyclic GFR-binding peptide
  MOD_RES (32)..(32): Xaa is C or S

SEQ ID NO: 87427 - protein, 33 aa, Artificial Sequence
  Cyclic GFR-binding peptide
  MOD_RES (30)..(32): Xaa is C or S
SQDLSPINILYFIGKTPKIYGKIPMIVKSXKXS

SEQ ID NO: 87428 - protein, 32 aa, Artificial Sequence
  Cyclic GFR-binding peptide
  MOD_RES (3)..(4): Xaa is C or S
STXXAPVKTEPISMLYLDNGRVLLKFKYEMIV

SEQ ID NO: 87429 - protein, 31 aa, Artificial Sequence
  Cyclic GFR-binding peptide
  MOD_RES (28)..(30): Xaa is C or S
MEPISILYLDENKNVVKFKYENMTVESXAXR

SEQ ID NO: 87430 - protein, 32 aa, Artificial Sequence
  Cyclic GFR-binding peptide
  MOD_RES (31)..(31): Xaa is C or S
PTKMSPISMLYKNDKQQIILKYHYGMVVDRXG

SEQ ID NO: 87431 - protein, 34 aa, Artificial Sequence
  Cyclic GFR-binding peptide
  MOD_RES (5)..(6): Xaa is C or S
TPPTXXVPTRLSPISILYKDSANNVVLKYHYDMV

SEQ ID NO: 87432 - protein, 27 aa, Artificial Sequence
  Cyclic GFR-binding peptide
  MOD_RES (1)..(2): Xaa is C or S
XXVPEKMNAISILYFDENKNVVLKKYR

SEQ ID NO: 87433 - protein, 37 aa, Artificial Sequence; identical to SEQ ID NO: 34393
  Cyclic GFR-binding peptide
  MOD_RES (2)..(3)..(35)..(37): Xaa is C or S

SEQ ID NO: 87434 - protein, 33 aa, Artificial Sequence; identical to SEQ ID NO: 34394
  Cyclic GFR-binding peptide
  MOD_RES (1)..(2)..(33): Xaa is C or S

SEQ ID NO: 87435 - protein, 20 aa, Artificial Sequence
  Cyclic GFR-binding peptide
SPINILYFVGRKPKVYGKIP

SEQ ID NO: 87436 - protein, 28 aa, Artificial Sequence
  Cyclic GFR-binding peptide
VPTKLSATSILYYDKGVVTYLRKHRGMA

SEQ ID NO: 87437 - protein, 36 aa, Artificial Sequence; identical to SEQ ID NO: 34395
  Cyclic GFR-binding peptide
  MOD_RES (1)..(33)..(35): Xaa is C or S

SEQ ID NO: 87438 - protein, 28 aa, Artificial Sequence
  Cyclic GFR-binding peptide
QDLSPINILYFIGKTPKIYGKIPMIVKS

SEQ ID NO: 87439 - protein, 36 aa, Artificial Sequence; identical to SEQ ID NO: 34398
  Cyclic GFR-binding peptide
  MOD_RES (1)..(2)..(33)..(35): Xaa is C or S

SEQ ID NO: 87440 - protein, 31 aa, Artificial Sequence
  Cyclic GFR-binding peptide
  MOD_RES (3)..(4): Xaa is C or S
EPXXVPEKMSATSILYYDENKNVVLRKHRNM

SEQ ID NO: 87441 - protein, 35 aa, Artificial Sequence
  Cyclic GFR-binding peptide
  MOD_RES (6)..(7): Xaa is C or S
HVPKPXXAPTKLSATSVLYYDDSSNVILRKHRNMV

SEQ ID NO: 87442 - protein, 35 aa, Artificial Sequence; identical to SEQ ID NO: 34399
  Cyclic GFR-binding peptide
  MOD_RES (1)..(2)..(34): Xaa is C or S

SEQ ID NO: 87443 - protein, 35 aa, Artificial Sequence; identical to SEQ ID NO: 34400
  Cyclic GFR-binding peptide
  MOD_RES (4)..(5): Xaa is C or S

SEQ ID NO: 87444 - protein, 32 aa, Artificial Sequence; identical to SEQ ID NO: 34402
  Cyclic GFR-binding peptide
  MOD_RES (1)..(2): Xaa is C or S

SEQ ID NO: 87445 - protein, 26 aa, Artificial Sequence
  Cyclic GFR-binding peptide
RLSPISILYKDSANNVVLKYHYDMVV

SEQ ID NO: 87446 - protein, 35 aa, Artificial Sequence; identical to SEQ ID NO: 34403
  Cyclic GFR-binding peptide
  MOD_RES (4)..(5): Xaa is C or S

SEQ ID NO: 87447 - protein, 30 aa, Artificial Sequence
  Cyclic GFR-binding peptide
  MOD_RES (30)..(30): Xaa is C or S
TRLSATSILYYDSANNVVLRKHRDMVVESX

SEQ ID NO: 87448 - protein, 36 aa, Artificial Sequence; identical to SEQ ID NO: 34404
  Cyclic GFR-binding peptide
  MOD_RES (1)..(33)..(35): Xaa is C or S

SEQ ID NO: 87449 - protein, 24 aa, Artificial Sequence
  Cyclic GFR-binding peptide
PTKMSATSMLYYNDKQQIILRKHR

SEQ ID NO: 87450 - protein, 22 aa, Artificial Sequence
  Cyclic GFR-binding peptide
MSPISILYKDENKNVVLKYHYN

SEQ ID NO: 87451 - protein, 31 aa, Artificial Sequence
  Cyclic GFR-binding peptide
  MOD_RES (1)..(2): Xaa is C or S
XXVPTRLSPISILYKDSANNVVLKYHYDMVV

SEQ ID NO: 87452 - protein, 20 aa, Artificial Sequence
  Cyclic GFR-binding peptide
SPISMLYKNDKQQIILKYHY

SEQ ID NO: 87453 - protein, 32 aa, Artificial Sequence
  Cyclic GFR-binding peptide
  MOD_RES (3)..(4): Xaa is C or S
EPXXVPEKMSATSILYYDENKNVVLRKHRNMT

SEQ ID NO: 87454 - protein, 36 aa, Artificial Sequence
  Cyclic GFR-binding peptide
  MOD_RES (6)..(7): Xaa is C or S
RVPSTXXAPVKTEPISMLYLDNGRVLLKFKYEMIVE

SEQ ID NO: 87455 - protein, 21 aa, Artificial Sequence
  Cyclic GFR-binding peptide
TEPISMLYLDNGRVLLKFKYE

SEQ ID NO: 87456 - protein, 28 aa, Artificial Sequence
  Cyclic GFR-binding peptide
  MOD_RES (1)..(2): Xaa is C or S
XXVPTKLSATSILYYDKGVVTYLRKHRG

SEQ ID NO: 87457 - protein, 31 aa, Artificial Sequence
  Cyclic GFR-binding peptide
  MOD_RES (1)..(2): Xaa is C or S
XXVPTRLSATSILYYDSANNVVLRKHRDMVV

SEQ ID NO: 87458 - protein, 30 aa, Artificial Sequence
  Cyclic GFR-binding peptide
  MOD_RES (1)..(2): Xaa is C or S
XXVPTRLEPISILYLDSANNVVKFKYEDMV

SEQ ID NO: 87459 - protein, 23 aa, Artificial Sequence
  Cyclic GFR-binding peptide
KMSATSILYYDENKNVVLRKHRN

SEQ ID NO: 87460 - protein, 33 aa, Artificial Sequence
  Cyclic GFR-binding peptide
  MOD_RES (5)..(6): Xaa is C or S
SASPXXVPQDLSPINILYFVGRTPKVYGKIPMV

SEQ ID NO: 87461 - protein, 27 aa, Artificial Sequence
  Cyclic GFR-binding peptide
VPEKMEPISILYLDENKNVVKFKYENM

SEQ ID NO: 87462 - protein, 29 aa, Artificial Sequence
  Cyclic GFR-binding peptide
  MOD_RES (2)..(3): Xaa is C or S
PXXVPEKMNAISILYFDENKNVVLKKYRN

SEQ ID NO: 87463 - protein, 28 aa, Artificial Sequence
  Cyclic GFR-binding peptide
APVKTSATSMLYYDNGRVLLLRKHRMIV

SEQ ID NO: 87464 - protein, 37 aa, Artificial Sequence; identical to SEQ ID NO: 34409
  Cyclic GFR-binding peptide
  MOD_RES (2)..(3)..(35)..(37): Xaa is C or S

SEQ ID NO: 87465 - protein, 35 aa, Artificial Sequence; identical to SEQ ID NO: 34410
  Cyclic GFR-binding peptide
  MOD_RES (1)..(2)..(34): Xaa is C or S

SEQ ID NO: 87466 - protein, 29 aa, Artificial Sequence
  Cyclic GFR-binding peptide
  MOD_RES (26)..(28): Xaa is C or S
SATSMLYYDNGRVLLLRKHRMIVEEXGXL

SEQ ID NO: 87467 - protein, 29 aa, Artificial Sequence
  Cyclic GFR-binding peptide
  MOD_RES (2)..(3): Xaa is C or S
PXXTPTKMEPISMLYLNDKQQIIKFKYEG

SEQ ID NO: 87468 - protein, 28 aa, Artificial Sequence
  Cyclic GFR-binding peptide
VPQALSPINILYFVGRKPKVYGKIPMIV

SEQ ID NO: 87469 - protein, 35 aa, Artificial Sequence; identical to SEQ ID NO: 34412
  Cyclic GFR-binding peptide
  MOD_RES (32)..(34): Xaa is C or S

SEQ ID NO: 87470 - protein, 25 aa, Artificial Sequence
  Cyclic GFR-binding peptide
SPINILYFIGKTPKIYGKIPMIVKS

SEQ ID NO: 87471 - protein, 33 aa, Artificial Sequence
  Cyclic GFR-binding peptide
  MOD_RES (3)..(4): Xaa is C or S
SPXXVPQDLSPINILYFVGRTPKVYGKIPMVVK

SEQ ID NO: 87472 - protein, 35 aa, Artificial Sequence; identical to SEQ ID NO: 34414
  Cyclic GFR-binding peptide
  MOD_RES (4)..(5): Xaa is C or S

SEQ ID NO: 87473 - protein, 36 aa, Artificial Sequence; identical to SEQ ID NO: 34415
  Cyclic GFR-binding peptide
  MOD_RES (4)..(5): Xaa is C or S

SEQ ID NO: 87474 - protein, 33 aa, Artificial Sequence; identical to SEQ ID NO: 34416
  Cyclic GFR-binding peptide
  MOD_RES (1)..(2)..(33): Xaa is C or S

SEQ ID NO: 87475 - protein, 26 aa, Artificial Sequence
  Cyclic GFR-binding peptide
KMEPISMLYLNDKQQIIKFKYEGMVV

SEQ ID NO: 87476 - protein, 32 aa, Artificial Sequence; identical to SEQ ID NO: 34418
  Cyclic GFR-binding peptide
  MOD_RES (1)..(1): Xaa is C or S

SEQ ID NO: 87477 - protein, 29 aa, Artificial Sequence
  Cyclic GFR-binding peptide
  MOD_RES (27)..(29): Xaa is C or S
EPISMLYLNDKQQIIKFKYEGMVVDRXGX

SEQ ID NO: 87478 - protein, 35 aa, Artificial Sequence; identical to SEQ ID NO: 22401
  Cyclic GFR-binding peptide
  MOD_RES (32)..(34): Xaa is C or S

SEQ ID NO: 87479 - protein, 34 aa, Artificial Sequence; identical to SEQ ID NO: 34420
  Cyclic GFR-binding peptide
  MOD_RES (3)..(4): Xaa is C or S

SEQ ID NO: 87480 - protein, 31 aa, Artificial Sequence
  Cyclic GFR-binding peptide
  MOD_RES (4)..(5): Xaa is C or S
PPTXXVPTRLSATSILYYDSANNVVLRKHRD

SEQ ID NO: 87481 - protein, 28 aa, Artificial Sequence
  Cyclic GFR-binding peptide
  MOD_RES (27)..(27): Xaa is C or S
TSPISMLYKDNGRVLLLKYHYMIVEEXG

SEQ ID NO: 87482 - protein, 37 aa, Artificial Sequence; identical to SEQ ID NO: 34425
  Cyclic GFR-binding peptide
  MOD_RES (5)..(6): Xaa is C or S

SEQ ID NO: 87483 - protein, 31 aa, Artificial Sequence; identical to SEQ ID NO: 34426
  Cyclic GFR-binding peptide

SEQ ID NO: 87484 - protein, 36 aa, Artificial Sequence; identical to SEQ ID NO: 34428
  Cyclic GFR-binding peptide
  MOD_RES (1)..(2)..(34)..(36): Xaa is C or S

SEQ ID NO: 87485 - protein, 34 aa, Artificial Sequence
  Cyclic GFR-binding peptide
  MOD_RES (4)..(5): Xaa is C or S
PEPXXVPEKMNAISILYFDENKNVVLKKYRNMTV

SEQ ID NO: 87486 - protein, 24 aa, Artificial Sequence
  Cyclic GFR-binding peptide
EKMSPISILYKDENKNVVLKYHYN

SEQ ID NO: 87487 - protein, 33 aa, Artificial Sequence; identical to SEQ ID NO: 34430
  Cyclic GFR-binding peptide
  MOD_RES (1)..(33): Xaa is C or S

SEQ ID NO: 87488 - protein, 28 aa, Artificial Sequence
  Cyclic GFR-binding peptide
  MOD_RES (2)..(3): Xaa is C or S
PXXVPQDLSPINILYFVGRTPKVYGKIP

SEQ ID NO: 87489 - protein, 25 aa, Artificial Sequence
  Cyclic GFR-binding peptide
SATSMLYYDNGRVLLLRKHRMIVEE

SEQ ID NO: 87490 - protein, 34 aa, Artificial Sequence; identical to SEQ ID NO: 34431
  Cyclic GFR-binding peptide
  MOD_RES (1)..(2)..(34): Xaa is C or S

SEQ ID NO: 87491 - protein, 36 aa, Artificial Sequence; identical to SEQ ID NO: 34433
  Cyclic GFR-binding peptide
  MOD_RES (1)..(2)..(34)..(36): Xaa is C or S

SEQ ID NO: 87492 - protein, 25 aa, Artificial Sequence
  Cyclic GFR-binding peptide
APVKTSPISMLYKDNGRVLLLKYHY

SEQ ID NO: 87493 - protein, 25 aa, Artificial Sequence
  Cyclic GFR-binding peptide
PEKMSPISILYKDENKNVVLKYHYN

SEQ ID NO: 87494 - protein, 25 aa, Artificial Sequence
  Cyclic GFR-binding peptide
VPEKMEPISILYLDENKNVVKFKYE

SEQ ID NO: 87495 - protein, 22 aa, Artificial Sequence
  Cyclic GFR-binding peptide
TSATSMLYYDNGRVLLLRKHRM

SEQ ID NO: 87496 - protein, 26 aa, Artificial Sequence
  Cyclic GFR-binding peptide
EKMSPINILYFDENKNVVYGKIPNMT

SEQ ID NO: 87497 - protein, 33 aa, Artificial Sequence; identical to SEQ ID NO: 34437
  Cyclic GFR-binding peptide
  MOD_RES (1)..(2): Xaa is C or S

SEQ ID NO: 87498 - protein, 30 aa, Artificial Sequence
  Cyclic GFR-binding peptide
  MOD_RES (4)..(5): Xaa is C or S
ASPXXVPQDLSPINILYFVGRTPKVYGKIP

SEQ ID NO: 87499 - protein, 31 aa, Artificial Sequence
  Cyclic GFR-binding peptide
  MOD_RES (1)..(2): Xaa is C or S
XXVPEKMEPISILYLDENKNVVKFKYENMTV

SEQ ID NO: 87500 - protein, 29 aa, Artificial Sequence
  Cyclic GFR-binding peptide
  MOD_RES (2)..(3): Xaa is C or S
SXXVPARLSATSILYYDAANNVVLRKHRD

SEQ ID NO: 87501 - protein, 20 aa, Artificial Sequence
  Cyclic GFR-binding peptide
SATSMLYYDNGRVLLLRKHR

SEQ ID NO: 87502 - protein, 29 aa, Artificial Sequence
  Cyclic GFR-binding peptide
  MOD_RES (27)..(29): Xaa is C or S
TSATSMLYYDNGRVLLLRKHRMIVEEXGX

SEQ ID NO: 87503 - protein, 33 aa, Artificial Sequence
  Cyclic GFR-binding peptide
  MOD_RES (3)..(4): Xaa is C or S
EPXXVPEKMSPISILYKDENKNVVLKYHYNMTV

SEQ ID NO: 87504 - protein, 41 aa, Artificial Sequence; identical to SEQ ID NO: 34443
  Cyclic GFR-binding peptide
  MOD_RES (6)..(7)..(39)..(41): Xaa is C or S

SEQ ID NO: 87505 - protein, 34 aa, Artificial Sequence
  Cyclic GFR-binding peptide
  MOD_RES (5)..(6): Xaa is C or S
TPPTXXVPTRLSATSILYYDSANNVVLRKHRDMV

SEQ ID NO: 87506 - protein, 25 aa, Artificial Sequence
  Cyclic GFR-binding peptide
VKTSPISMLYKDNGRVLLLKYHYMI

SEQ ID NO: 87507 - protein, 36 aa, Artificial Sequence; identical to SEQ ID NO: 34447
  Cyclic GFR-binding peptide
  MOD_RES (5)..(6): Xaa is C or S

SEQ ID NO: 87508 - protein, 28 aa, Artificial Sequence
  Cyclic GFR-binding peptide
  MOD_RES (1)..(1): Xaa is C or S
XVPARLSATSILYYDAANNVVLRKHRDM

SEQ ID NO: 87509 - protein, 29 aa, Artificial Sequence
  Cyclic GFR-binding peptide
EKMSATSILYYDENKNVVLRKHRNMTVES

SEQ ID NO: 87510 - protein, 37 aa, Artificial Sequence; identical to SEQ ID NO: 34448
  Cyclic GFR-binding peptide
  MOD_RES (3)..(4)..(36): Xaa is C or S

SEQ ID NO: 87511 - protein, 30 aa, Artificial Sequence
  Cyclic GFR-binding peptide
  MOD_RES (1)..(1): Xaa is C or S
XVPTRLSPISILYKDSANNVVLKYHYDMVV

SEQ ID NO: 87512 - protein, 30 aa, Artificial Sequence
  Cyclic GFR-binding peptide
PEKMSPISILYKDENKNVVLKYHYNMTVES

SEQ ID NO: 87513 - protein, 28 aa, Artificial Sequence
  Cyclic GFR-binding peptide
  MOD_RES (27)..(27): Xaa is C or S
SPINILYFDENKNVVYGKIPNMTVESXA

SEQ ID NO: 87514 - protein, 37 aa, Artificial Sequence; identical to SEQ ID NO: 34450
  Cyclic GFR-binding peptide
  MOD_RES (6)..(7): Xaa is C or S

SEQ ID NO: 87515 - protein, 36 aa, Artificial Sequence; identical to SEQ ID NO: 34451
  Cyclic GFR-binding peptide
  MOD_RES (1)..(33)..(35): Xaa is C or S

SEQ ID NO: 87516 - protein, 30 aa, Artificial Sequence
  Cyclic GFR-binding peptide
  MOD_RES (1)..(2): Xaa is C or S
XXVPQDLSPINILYFVGRTPKVYGKIPMVV

SEQ ID NO: 87517 - protein, 22 aa, Artificial Sequence
  Cyclic GFR-binding peptide
SATSILYYDSANNVVLRKHRDM

SEQ ID NO: 87518 - protein, 40 aa, Artificial Sequence; identical to SEQ ID NO: 34454
  Cyclic GFR-binding peptide
  MOD_RES (5)..(6)..(38)..(40): Xaa is C or S

SEQ ID NO: 87519 - protein, 26 aa, Artificial Sequence
  Cyclic GFR-binding peptide
LSPISILYKDSANNVVLKYHYDMVVE

SEQ ID NO: 87520 - protein, 40 aa, Artificial Sequence; identical to SEQ ID NO: 34456
  Cyclic GFR-binding peptide
  MOD_RES (6)..(7)..(39): Xaa is C or S

SEQ ID NO: 87521 - protein, 37 aa, Artificial Sequence; identical to SEQ ID NO: 34458
  Cyclic GFR-binding peptide
  MOD_RES (4)..(5)..(37): Xaa is C or S

SEQ ID NO: 87522 - protein, 35 aa, Artificial Sequence; identical to SEQ ID NO: 34459
  Cyclic GFR-binding peptide
  MOD_RES (1)..(32)..(34): Xaa is C or S

SEQ ID NO: 87523 - protein, 31 aa, Artificial Sequence
  Cyclic GFR-binding peptide
  MOD_RES (5)..(6): Xaa is C or S
TPPTXXVPTRLSPISILYKDSANNVVLKYHY

SEQ ID NO: 87524 - protein, 25 aa, Artificial Sequence
  Cyclic GFR-binding peptide
EPISILYLDENKNVVKFKYENMTVE

SEQ ID NO: 87525 - protein, 31 aa, Artificial Sequence
  Cyclic GFR-binding peptide
  MOD_RES (28)..(30): Xaa is C or S
ALSPINILYFVGRKPKVYGKIPMIVRSXKXS

SEQ ID NO: 87526 - protein, 41 aa, Artificial Sequence; identical to SEQ ID NO: 34462
  Cyclic GFR-binding peptide
  MOD_RES (6)..(7)..(39)..(41): Xaa is C or S

SEQ ID NO: 87527 - protein, 34 aa, Artificial Sequence; identical to SEQ ID NO: 34463
  Cyclic GFR-binding peptide
  MOD_RES (3)..(4): Xaa is C or S

SEQ ID NO: 87528 - protein, 34 aa, Artificial Sequence
  Cyclic GFR-binding peptide
  MOD_RES (5)..(6): Xaa is C or S
SAGPXXTPTKMEPISMLYLNDKQQIIKFKYEGMV

SEQ ID NO: 87529 - protein, 35 aa, Artificial Sequence; identical to SEQ ID NO: 34464
  Cyclic GFR-binding peptide
  MOD_RES (2)..(3)..(35): Xaa is C or S

SEQ ID NO: 87530 - protein, 31 aa, Artificial Sequence
  Cyclic GFR-binding peptide
  MOD_RES (28)..(30): Xaa is C or S
KTEPISMLYLDNGRVLLKFKYEMIVEEXGXL

SEQ ID NO: 87531 - protein, 40 aa, Artificial Sequence; identical to SEQ ID NO: 34465
  Cyclic GFR-binding peptide
  MOD_RES (5)..(6)..(38)..(40): Xaa is C or S

SEQ ID NO: 87532 - protein, 36 aa, Artificial Sequence; identical to SEQ ID NO: 34466
  Cyclic GFR-binding peptide
  MOD_RES (2)..(3)..(35): Xaa is C or S

SEQ ID NO: 87533 - protein, 23 aa, Artificial Sequence
  Cyclic GFR-binding peptide
VKTSATSMLYYDNGRVLLLRKHR

SEQ ID NO: 87534 - protein, 32 aa, Artificial Sequence
  Cyclic GFR-binding peptide
  MOD_RES (30)..(32): Xaa is C or S
TKMSPISMLYKNDKQQIILKYHYGMVVDRXGX

SEQ ID NO: 87535 - protein, 22 aa, Artificial Sequence
  Cyclic GFR-binding peptide
KMSATSILYYDENKNVVLRKHR

SEQ ID NO: 87536 - protein, 30 aa, Artificial Sequence
  Cyclic GFR-binding peptide
  MOD_RES (1)..(1): Xaa is C or S
XAPVKTSATSMLYYDNGRVLLLRKHRMIVE

SEQ ID NO: 87537 - protein, 40 aa, Artificial Sequence; identical to SEQ ID NO: 34467
  Cyclic GFR-binding peptide
  MOD_RES (5)..(6)..(38)..(40): Xaa is C or S

SEQ ID NO: 87538 - protein, 33 aa, Artificial Sequence; identical to SEQ ID NO: 34468
  Cyclic GFR-binding peptide
  MOD_RES (32)..(32): Xaa is C or S

SEQ ID NO: 87539 - protein, 31 aa, Artificial Sequence
  Cyclic GFR-binding peptide
  MOD_RES (28)..(30): Xaa is C or S
KTSPISMLYKDNGRVLLLKYHYMIVEEXGXL

SEQ ID NO: 87540 - protein, 37 aa, Artificial Sequence; identical to SEQ ID NO: 34470
  Cyclic GFR-binding peptide
  MOD_RES (4)..(5)..(37): Xaa is C or S

SEQ ID NO: 87541 - protein, 39 aa, Artificial Sequence; identical to SEQ ID NO: 34471
  Cyclic GFR-binding peptide
  MOD_RES (5)..(6)..(38): Xaa is C or S

SEQ ID NO: 87542 - protein, 32 aa, Artificial Sequence
  Cyclic GFR-binding peptide
  MOD_RES (30)..(32): Xaa is C or S
TKMEPISMLYLNDKQQIIKFKYEGMVVDRXGX

SEQ ID NO: 87543 - protein, 25 aa, Artificial Sequence
  Cyclic GFR-binding peptide
PTKMSATSMLYYNDKQQIILRKHRG

SEQ ID NO: 87544 - protein, 27 aa, Artificial Sequence
  Cyclic GFR-binding peptide
VKTSPISMLYKDNGRVLLLKYHYMIVE

SEQ ID NO: 87545 - protein, 36 aa, Artificial Sequence; identical to SEQ ID NO: 34472
  Cyclic GFR-binding peptide
  MOD_RES (1)..(2)..(33)..(35): Xaa is C or S

SEQ ID NO: 87546 - protein, 36 aa, Artificial Sequence; identical to SEQ ID NO: 34473
  Cyclic GFR-binding peptide
  MOD_RES (2)..(3)..(35): Xaa is C or S

SEQ ID NO: 87547 - protein, 40 aa, Artificial Sequence; identical to SEQ ID NO: 34474
  Cyclic GFR-binding peptide
  MOD_RES (4)..(5)..(37)..(39): Xaa is C or S

SEQ ID NO: 87548 - protein, 28 aa, Artificial Sequence
  Cyclic GFR-binding peptide
  MOD_RES (1)..(2): Xaa is C or S
XXAPVKTSATSMLYYDNGRVLLLRKHRM

SEQ ID NO: 87549 - protein, 35 aa, Artificial Sequence; identical to SEQ ID NO: 34475
  Cyclic GFR-binding peptide
  MOD_RES (4)..(5): Xaa is C or S

SEQ ID NO: 87550 - protein, 31 aa, Artificial Sequence; identical to SEQ ID NO: 34478
  Cyclic GFR-binding peptide
  MOD_RES (31)..(31): Xaa is C or S

SEQ ID NO: 87551 - protein, 28 aa, Artificial Sequence
  Cyclic GFR-binding peptide
  MOD_RES (28)..(28): Xaa is C or S
LSATSILYYDAANNVVLRKHRDMVVEAX

SEQ ID NO: 87552 - protein, 23 aa, Artificial Sequence
  Cyclic GFR-binding peptide
EPISILYLDENKNVVKFKYENMT

SEQ ID NO: 87553 - protein, 27 aa, Artificial Sequence
  Cyclic GFR-binding peptide
EKMSATSILYYDENKNVVLRKHRNMTV

SEQ ID NO: 87554 - protein, 41 aa, Artificial Sequence; identical to SEQ ID NO: 34479
  Cyclic GFR-binding peptide
  MOD_RES (5)..(6)..(38)..(40): Xaa is C or S

SEQ ID NO: 87555 - protein, 30 aa, Artificial Sequence
  Cyclic GFR-binding peptide
  MOD_RES (1)..(1): Xaa is C or S
XVPEKMSATSILYYDENKNVVLRKHRNMTV

SEQ ID NO: 87556 - protein, 24 aa, Artificial Sequence
  Cyclic GFR-binding peptide
LEPISILYLDSANNVVKFKYEDMV

SEQ ID NO: 87557 - protein, 25 aa, Artificial Sequence
  Cyclic GFR-binding peptide
TPTKMSPISMLYKNDKQQIILKYHY

SEQ ID NO: 87558 - protein, 29 aa, Artificial Sequence
  Cyclic GFR-binding peptide
  MOD_RES (27)..(29): Xaa is C or S
SPISMLYKNDKQQIILKYHYGMVVDRXGX

SEQ ID NO: 87559 - protein, 26 aa, Artificial Sequence
  Cyclic GFR-binding peptide
  MOD_RES (1)..(1): Xaa is C or S
XVPTKLSATSILYYDKGVVTYLRKHR

SEQ ID NO: 87560 - protein, 39 aa, Artificial Sequence; identical to SEQ ID NO: 34483
  Cyclic GFR-binding peptide
  MOD_RES (4)..(5)..(37)..(39): Xaa is C or S

SEQ ID NO: 87561 - protein, 39 aa, Artificial Sequence; identical to SEQ ID NO: 34484
  Cyclic GFR-binding peptide
  MOD_RES (5)..(6)..(38): Xaa is C or S

SEQ ID NO: 87562 - protein, 32 aa, Artificial Sequence
  Cyclic GFR-binding peptide
  MOD_RES (3)..(4): Xaa is C or S
EPXXVPEKMEPISILYLDENKNVVKFKYENMT

SEQ ID NO: 87563 - protein, 33 aa, Artificial Sequence; identical to SEQ ID NO: 34486
  Cyclic GFR-binding peptide
  MOD_RES (2)..(3): Xaa is C or S

SEQ ID NO: 87564 - protein, 35 aa, Artificial Sequence
  Cyclic GFR-binding peptide
  MOD_RES (5)..(6): Xaa is C or S
IPEPXXVPEKMSPISILYKDENKNVVLKYHYNMTV

SEQ ID NO: 87565 - protein, 28 aa, Artificial Sequence
  Cyclic GFR-binding peptide
  MOD_RES (26)..(28): Xaa is C or S
EPISMLYLDNGRVLLKFKYEMIVEEXGX

SEQ ID NO: 87566 - protein, 23 aa, Artificial Sequence
  Cyclic GFR-binding peptide
LSPINILYFVGRTPKVYGKIPMV

SEQ ID NO: 87567 - protein, 33 aa, Artificial Sequence
  Cyclic GFR-binding peptide
  MOD_RES (4)..(5): Xaa is C or S
PSTXXAPVKTEPISMLYLDNGRVLLKFKYEMIV

SEQ ID NO: 87568 - protein, 34 aa, Artificial Sequence
  Cyclic GFR-binding peptide
  MOD_RES (6)..(7): Xaa is C or S
STPPTXXVPTRLEPISILYLDSANNVVKFKYEDM

SEQ ID NO: 87569 - protein, 38 aa, Artificial Sequence; identical to SEQ ID NO: 34490
  Cyclic GFR-binding peptide
  MOD_RES (4)..(5)..(36)..(38): Xaa is C or S

SEQ ID NO: 87570 - protein, 27 aa, Artificial Sequence
  Cyclic GFR-binding peptide
  MOD_RES (27)..(27): Xaa is C or S
SPINILYFDENKNVVYGKIPNMTVESX

SEQ ID NO: 87571 - protein, 36 aa, Artificial Sequence; identical to SEQ ID NO: 21681
  Cyclic GFR-binding peptide
  MOD_RES (33)..(35): Xaa is C or S

SEQ ID NO: 87572 - protein, 36 aa, Artificial Sequence; identical to SEQ ID NO: 34492
  Cyclic GFR-binding peptide
  MOD_RES (3)..(4)..(35): Xaa is C or S

SEQ ID NO: 87573 - protein, 37 aa, Artificial Sequence; identical to SEQ ID NO: 34493
  Cyclic GFR-binding peptide
  MOD_RES (4)..(5)..(37): Xaa is C or S

SEQ ID NO: 87574 - protein, 26 aa, Artificial Sequence
  Cyclic GFR-binding peptide
SPINILYFDENKNVVYGKIPNMTVES

SEQ ID NO: 87575 - protein, 33 aa, Artificial Sequence
  Cyclic GFR-binding peptide
  MOD_RES (5)..(6): Xaa is C or S
VPSTXXAPVKTEPISMLYLDNGRVLLKFKYEMI

SEQ ID NO: 87576 - protein, 27 aa, Artificial Sequence
  Cyclic GFR-binding peptide
  MOD_RES (1)..(2): Xaa is C or S
XXVPTRLSPISILYKDSANNVVLKYHY

SEQ ID NO: 87577 - protein, 32 aa, Artificial Sequence; identical to SEQ ID NO: 34494
  Cyclic GFR-binding peptide
  MOD_RES (32)..(32): Xaa is C or S

SEQ ID NO: 87578 - protein, 24 aa, Artificial Sequence
  Cyclic GFR-binding peptide
MSATSILYYDENKNVVLRKHRNMT

SEQ ID NO: 87579 - protein, 22 aa, Artificial Sequence
  Cyclic GFR-binding peptide
EPISILYLDENKNVVKFKYENM

SEQ ID NO: 87580 - protein, 30 aa, Artificial Sequence
  Cyclic GFR-binding peptide
  MOD_RES (2)..(3): Xaa is C or S
PXXTPTKMSATSMLYYNDKQQIILRKHRGM

SEQ ID NO: 87581 - protein, 26 aa, Artificial Sequence
  Cyclic GFR-binding peptide
TKMEPISMLYLNDKQQIIKFKYEGMV

SEQ ID NO: 87582 - protein, 30 aa, Artificial Sequence
  Cyclic GFR-binding peptide
  MOD_RES (28)..(30): Xaa is C or S
MSPISMLYKNDKQQIILKYHYGMVVDRXGX

SEQ ID NO: 87583 - protein, 42 aa, Artificial Sequence; identical to SEQ ID NO: 34495
  Cyclic GFR-binding peptide
  MOD_RES (6)..(7)..(39)..(41): Xaa is C or S

SEQ ID NO: 87584 - protein, 20 aa, Artificial Sequence
  Cyclic GFR-binding peptide
SATSMLYYNDKQQIILRKHR

SEQ ID NO: 87585 - protein, 35 aa, Artificial Sequence
  Cyclic GFR-binding peptide
  MOD_RES (5)..(6): Xaa is C or S
SAAPXXVPQALSPINILYFVGRKPKVYGKIPMIVR

SEQ ID NO: 87586 - protein, 35 aa, Artificial Sequence; identical to SEQ ID NO: 34496
  Cyclic GFR-binding peptide
  MOD_RES (3)..(4): Xaa is C or S

SEQ ID NO: 87587 - protein, 29 aa, Artificial Sequence
  Cyclic GFR-binding peptide
  MOD_RES (29)..(29): Xaa is C or S
KMNAISILYFDENKNVVLKKYRNMTVESX

SEQ ID NO: 87588 - protein, 28 aa, Artificial Sequence
  Cyclic GFR-binding peptide
  MOD_RES (28)..(28): Xaa is C or S
MSPINILYFDENKNVVYGKIPNMTVESX

SEQ ID NO: 87589 - protein, 34 aa, Artificial Sequence
  Cyclic GFR-binding peptide
  MOD_RES (5)..(6): Xaa is C or S
ASKAXXVPTKLSATSILYYDKGVVTYLRKHRGMA

SEQ ID NO: 87590 - protein, 36 aa, Artificial Sequence; identical to SEQ ID NO: 34497
  Cyclic GFR-binding peptide
  MOD_RES (5)..(6): Xaa is C or S

SEQ ID NO: 87591 - protein, 35 aa, Artificial Sequence; identical to SEQ ID NO: 34498
  Cyclic GFR-binding peptide
  MOD_RES (4)..(5): Xaa is C or S

SEQ ID NO: 87592 - protein, 28 aa, Artificial Sequence
  Cyclic GFR-binding peptide
  MOD_RES (1)..(2): Xaa is C or S
XXVPTRLSPISILYKDSANNVVLKYHYD

SEQ ID NO: 87593 - protein, 27 aa, Artificial Sequence
  Cyclic GFR-binding peptide
KMNAISILYFDENKNVVLKKYRNMTVE

SEQ ID NO: 87594 - protein, 33 aa, Artificial Sequence
  Cyclic GFR-binding peptide
  MOD_RES (31)..(33): Xaa is C or S
PEKMNAISILYFDENKNVVLKKYRNMTVESXAX

SEQ ID NO: 87595 - protein, 37 aa, Artificial Sequence; identical to SEQ ID NO: 34502
  Cyclic GFR-binding peptide
  MOD_RES (5)..(6): Xaa is C or S

SEQ ID NO: 87596 - protein, 29 aa, Artificial Sequence
  Cyclic GFR-binding peptide
APVKTEPISMLYLDNGRVLLKFKYEMIVE

SEQ ID NO: 87597 - protein, 35 aa, Artificial Sequence; identical to SEQ ID NO: 34504
  Cyclic GFR-binding peptide
  MOD_RES (1)..(33)..(35): Xaa is C or S

SEQ ID NO: 87598 - protein, 29 aa, Artificial Sequence
  Cyclic GFR-binding peptide
  MOD_RES (1)..(1): Xaa is C or S
XVPTRLSPISILYKDSANNVVLKYHYDMV

SEQ ID NO: 87599 - protein, 34 aa, Artificial Sequence
  Cyclic GFR-binding peptide
  MOD_RES (4)..(5): Xaa is C or S
PPTXXVPTRLEPISILYLDSANNVVKFKYEDMVV

SEQ ID NO: 87600 - protein, 21 aa, Artificial Sequence
  Cyclic GFR-binding peptide
SATSILYYDSANNVVLRKHRD

SEQ ID NO: 87601 - protein, 34 aa, Artificial Sequence; identical to SEQ ID NO: 34505
  Cyclic GFR-binding peptide
  MOD_RES (3)..(4): Xaa is C or S

SEQ ID NO: 87602 - protein, 31 aa, Artificial Sequence
  Cyclic GFR-binding peptide
  MOD_RES (5)..(6): Xaa is C or S
ASKAXXVPTKLSATSILYYDKGVVTYLRKHR

SEQ ID NO: 87603 - protein, 30 aa, Artificial Sequence
  Cyclic GFR-binding peptide
  MOD_RES (30)..(30): Xaa is C or S
PQDLSPINILYFVGRTPKVYGKIPMVVKSX

SEQ ID NO: 87604 - protein, 32 aa, Artificial Sequence
  Cyclic GFR-binding peptide
  MOD_RES (6)..(7): Xaa is C or S
HVPKPXXAPTKLEPISVLYLDDSSNVIKFKYE

SEQ ID NO: 87605 - protein, 33 aa, Artificial Sequence; identical to SEQ ID NO: 34509
  Cyclic GFR-binding peptide
  MOD_RES (2)..(3): Xaa is C or S

SEQ ID NO: 87606 - protein, 32 aa, Artificial Sequence
  Cyclic GFR-binding peptide
  MOD_RES (2)..(3): Xaa is C or S
AXXVPTKLSATSILYYDKGVVTYLRKHRGMAV

SEQ ID NO: 87607 - protein, 37 aa, Artificial Sequence; identical to SEQ ID NO: 34512
  Cyclic GFR-binding peptide
  MOD_RES (5)..(6)..(37): Xaa is C or S

SEQ ID NO: 87608 - protein, 28 aa, Artificial Sequence
  Cyclic GFR-binding peptide
PQDLSPINILYFVGRTPKVYGKIPMVVK

SEQ ID NO: 87609 - protein, 29 aa, Artificial Sequence
  Cyclic GFR-binding peptide
  MOD_RES (27)..(29): Xaa is C or S
LSPINILYFVGRKPKVYGKIPMIVRSXKX

SEQ ID NO: 87610 - protein, 39 aa, Artificial Sequence; identical to SEQ ID NO: 34514
  Cyclic GFR-binding peptide
  MOD_RES (5)..(6)..(38): Xaa is C or S

SEQ ID NO: 87611 - protein, 32 aa, Artificial Sequence
  Cyclic GFR-binding peptide
  MOD_RES (4)..(5): Xaa is C or S
SKAXXVPTKLSATSILYYDKGVVTYLRKHRGM

SEQ ID NO: 87612 - protein, 38 aa, Artificial Sequence; identical to SEQ ID NO: 34515
  Cyclic GFR-binding peptide
  MOD_RES (4)..(5)..(37): Xaa is C or S

SEQ ID NO: 87613 - protein, 29 aa, Artificial Sequence
  Cyclic GFR-binding peptide
  MOD_RES (3)..(4): Xaa is C or S
EPXXVPEKMSPISILYKDENKNVVLKYHY

SEQ ID NO: 87614 - protein, 34 aa, Artificial Sequence; identical to SEQ ID NO: 34516
  Cyclic GFR-binding peptide
  MOD_RES (1)..(2)..(33): Xaa is C or S

SEQ ID NO: 87615 - protein, 28 aa, Artificial Sequence
  Cyclic GFR-binding peptide
RLSATSILYYDAANNVVLRKHRDMVVEA

SEQ ID NO: 87616 - protein, 36 aa, Artificial Sequence; identical to SEQ ID NO: 34517
  Cyclic GFR-binding peptide
  MOD_RES (1)..(2)..(34)..(36): Xaa is C or S

SEQ ID NO: 87617 - protein, 32 aa, Artificial Sequence
  Cyclic GFR-binding peptide
  MOD_RES (4)..(5): Xaa is C or S
PSTXXAPVKTSATSMLYYDNGRVLLLRKHRMI

SEQ ID NO: 87618 - protein, 35 aa, Artificial Sequence; identical to SEQ ID NO: 34518
  Cyclic GFR-binding peptide
  MOD_RES (4)..(5): Xaa is C or S

SEQ ID NO: 87619 - protein, 25 aa, Artificial Sequence
  Cyclic GFR-binding peptide
MSATSMLYYNDKQQIILRKHRGMVV

SEQ ID NO: 87620 - protein, 25 aa, Artificial Sequence
  Cyclic GFR-binding peptide
PTRLSATSILYYDSANNVVLRKHRD

SEQ ID NO: 87621 - protein, 30 aa, Artificial Sequence
  Cyclic GFR-binding peptide
  MOD_RES (27)..(29): Xaa is C or S
SATSILYYDAANNVVLRKHRDMVVEAXGXR

SEQ ID NO: 87622 - protein, 32 aa, Artificial Sequence
  Cyclic GFR-binding peptide
  MOD_RES (4)..(5): Xaa is C or S
PSTXXAPVKTSPISMLYKDNGRVLLLKYHYMI

SEQ ID NO: 87623 - protein, 33 aa, Artificial Sequence; identical to SEQ ID NO: 34522
  Cyclic GFR-binding peptide
  MOD_RES (1)..(32): Xaa is C or S

SEQ ID NO: 87624 - protein, 29 aa, Artificial Sequence
  Cyclic GFR-binding peptide
  MOD_RES (3)..(4): Xaa is C or S
GPXXTPTKMSPISMLYKNDKQQIILKYHY

SEQ ID NO: 87625 - protein, 32 aa, Artificial Sequence
  Cyclic GFR-binding peptide
  MOD_RES (6)..(7): Xaa is C or S
KASKAXXVPTKLSATSILYYDKGVVTYLRKHR

SEQ ID NO: 87626 - protein, 34 aa, Artificial Sequence
  Cyclic GFR-binding peptide
  MOD_RES (6)..(7): Xaa is C or S
ASASPXXVPQDLSPINILYFVGRTPKVYGKIPMV

SEQ ID NO: 87627 - protein, 25 aa, Artificial Sequence
  Cyclic GFR-binding peptide
SATSILYYDENKNVVLRKHRNMTVE

SEQ ID NO: 87628 - protein, 37 aa, Artificial Sequence; identical to SEQ ID NO: 34523
  Cyclic GFR-binding peptide
  MOD_RES (4)..(5)..(36): Xaa is C or S

SEQ ID NO: 87629 - protein, 35 aa, Artificial Sequence; identical to SEQ ID NO: 34524
  Cyclic GFR-binding peptide
  MOD_RES (2)..(3)..(35): Xaa is C or S

SEQ ID NO: 87630 - protein, 28 aa, Artificial Sequence
  Cyclic GFR-binding peptide
TPTKMSPISMLYKNDKQQIILKYHYGMV

SEQ ID NO: 87631 - protein, 32 aa, Artificial Sequence
  Cyclic GFR-binding peptide
  MOD_RES (4)..(5): Xaa is C or S
PEPXXVPEKMSATSILYYDENKNVVLRKHRNM

SEQ ID NO: 87632 - protein, 32 aa, Artificial Sequence
  Cyclic GFR-binding peptide
  MOD_RES (4)..(5): Xaa is C or S
PEPXXVPEKMSPISILYKDENKNVVLKYHYNM

SEQ ID NO: 87633 - protein, 27 aa, Artificial Sequence
  Cyclic GFR-binding peptide
TKMSPISMLYKNDKQQIILKYHYGMVV

SEQ ID NO: 87634 - protein, 31 aa, Artificial Sequence
  Cyclic GFR-binding peptide
  MOD_RES (1)..(2): Xaa is C or S
XXVPQALSPINILYFVGRKPKVYGKIPMIVR

SEQ ID NO: 87635 - protein, 32 aa, Artificial Sequence
  Cyclic GFR-binding peptide
  MOD_RES (4)..(5): Xaa is C or S
PPTXXVPTRLEPISILYLDSANNVVKFKYEDM

SEQ ID NO: 87636 - protein, 37 aa, Artificial Sequence; identical to SEQ ID NO: 34528
  Cyclic GFR-binding peptide
  MOD_RES (5)..(6)..(37): Xaa is C or S

SEQ ID NO: 87637 - protein, 24 aa, Artificial Sequence
  Cyclic GFR-binding peptide
KTEPISMLYLDNGRVLLKFKYEMI

SEQ ID NO: 87638 - protein, 27 aa, Artificial Sequence
  Cyclic GFR-binding peptide
  MOD_RES (1)..(2): Xaa is C or S
XXAPVKTEPISMLYLDNGRVLLKFKYE

SEQ ID NO: 87639 - protein, 33 aa, Artificial Sequence; identical to SEQ ID NO: 34529
  Cyclic GFR-binding peptide
  MOD_RES (2)..(3): Xaa is C or S

SEQ ID NO: 87640 - protein, 22 aa, Artificial Sequence
  Cyclic GFR-binding peptide
KTSPISMLYKDNGRVLLLKYHY

SEQ ID NO: 87641 - protein, 40 aa, Artificial Sequence; identical to SEQ ID NO: 34530
  Cyclic GFR-binding peptide
  MOD_RES (6)..(7)..(38)..(40): Xaa is C or S

SEQ ID NO: 87642 - protein, 33 aa, Artificial Sequence
  Cyclic GFR-binding peptide
  MOD_RES (6)..(7): Xaa is C or S
RVPSTXXAPVKTEPISMLYLDNGRVLLKFKYEM

SEQ ID NO: 87643 - protein, 32 aa, Artificial Sequence
  Cyclic GFR-binding peptide
  MOD_RES (6)..(7): Xaa is C or S
GIPEPXXVPEKMSPINILYFDENKNVVYGKIP

SEQ ID NO: 87644 - protein, 24 aa, Artificial Sequence
  Cyclic GFR-binding peptide
ALSPINILYFVGRKPKVYGKIPMI

SEQ ID NO: 87645 - protein, 27 aa, Artificial Sequence
  Cyclic GFR-binding peptide
  MOD_RES (27)..(27): Xaa is C or S
SPISILYKDENKNVVLKYHYNMTVESX

SEQ ID NO: 87646 - protein, 20 aa, Artificial Sequence
  Cyclic GFR-binding peptide
SPISILYKDENKNVVLKYHY

SEQ ID NO: 87647 - protein, 24 aa, Artificial Sequence
  Cyclic GFR-binding peptide
RLSATSILYYDSANNVVLRKHRDM

SEQ ID NO: 87648 - protein, 34 aa, Artificial Sequence; identical to SEQ ID NO: 34537
  Cyclic GFR-binding peptide
  MOD_RES (2)..(3)..(34): Xaa is C or S

SEQ ID NO: 87649 - protein, 26 aa, Artificial Sequence
  Cyclic GFR-binding peptide
PTRLEPISILYLDSANNVVKFKYEDM

SEQ ID NO: 87650 - protein, 38 aa, Artificial Sequence; identical to SEQ ID NO: 34538
  Cyclic GFR-binding peptide
  MOD_RES (6)..(7)..(38): Xaa is C or S

SEQ ID NO: 87651 - protein, 32 aa, Artificial Sequence
  Cyclic GFR-binding peptide
  MOD_RES (4)..(5): Xaa is C or S
ASPXXVSQDLSPINILYFIGKTPKIYGKIPMI

SEQ ID NO: 87652 - protein, 33 aa, Artificial Sequence
  Cyclic GFR-binding peptide
  MOD_RES (4)..(5): Xaa is C or S
PSTXXAPVKTSATSMLYYDNGRVLLLRKHRMIV

SEQ ID NO: 87653 - protein, 31 aa, Artificial Sequence
  Cyclic GFR-binding peptide
  MOD_RES (4)..(5): Xaa is C or S
PSTXXAPVKTSATSMLYYDNGRVLLLRKHRM

SEQ ID NO: 87654 - protein, 40 aa, Artificial Sequence; identical to SEQ ID NO: 34539
  Cyclic GFR-binding peptide
  MOD_RES (4)..(5)..(37)..(39): Xaa is C or S

SEQ ID NO: 87655 - protein, 28 aa, Artificial Sequence
  Cyclic GFR-binding peptide
  MOD_RES (1)..(2): Xaa is C or S
XXVPEKMNAISILYFDENKNVVLKKYRN

SEQ ID NO: 87656 - protein, 38 aa, Artificial Sequence; identical to SEQ ID NO: 34542
  Cyclic GFR-binding peptide
  MOD_RES (3)..(4)..(36)..(38): Xaa is C or S

SEQ ID NO: 87657 - protein, 28 aa, Artificial Sequence
  Cyclic GFR-binding peptide
  MOD_RES (27)..(27): Xaa is C or S
SATSILYYDENKNVVLRKHRNMTVESXA

SEQ ID NO: 87658 - protein, 42 aa, Artificial Sequence; identical to SEQ ID NO: 34543
  Cyclic GFR-binding peptide
  MOD_RES (6)..(7)..(39)..(41): Xaa is C or S

SEQ ID NO: 87659 - protein, 32 aa, Artificial Sequence
  Cyclic GFR-binding peptide
  MOD_RES (31)..(31): Xaa is C or S
PTKMEPISMLYLNDKQQIIKFKYEGMVVDRXG

SEQ ID NO: 87660 - protein, 27 aa, Artificial Sequence
  Cyclic GFR-binding peptide
PEKMSPISILYKDENKNVVLKYHYNMT

SEQ ID NO: 87661 - protein, 26 aa, Artificial Sequence
  Cyclic GFR-binding peptide
  MOD_RES (1)..(1): Xaa is C or S
XAPVKTSATSMLYYDNGRVLLLRKHR

SEQ ID NO: 87662 - protein, 32 aa, Artificial Sequence
  Cyclic GFR-binding peptide
  MOD_RES (2)..(3): Xaa is C or S
PXXVSQDLSPINILYFIGKTPKIYGKIPMIVK

SEQ ID NO: 87663 - protein, 34 aa, Artificial Sequence
  Cyclic GFR-binding peptide
  MOD_RES (5)..(6): Xaa is C or S
TPPTXXVPTRLEPISILYLDSANNVVKFKYEDMV

SEQ ID NO: 87664 - protein, 34 aa, Artificial Sequence; identical to SEQ ID NO: 34544
  Cyclic GFR-binding peptide
  MOD_RES (1)..(33): Xaa is C or S

SEQ ID NO: 87665 - protein, 28 aa, Artificial Sequence
  Cyclic GFR-binding peptide
  MOD_RES (1)..(2): Xaa is C or S
XXVPTRLEPISILYLDSANNVVKFKYED

SEQ ID NO: 87666 - protein, 35 aa, Artificial Sequence
  Cyclic GFR-binding peptide
  MOD_RES (5)..(6): Xaa is C or S
TPPTXXVPTRLEPISILYLDSANNVVKFKYEDMVV

SEQ ID NO: 87667 - protein, 28 aa, Artificial Sequence
  Cyclic GFR-binding peptide
PEKMSPISILYKDENKNVVLKYHYNMTV

SEQ ID NO: 87668 - protein, 30 aa, Artificial Sequence
  Cyclic GFR-binding peptide
  MOD_RES (28)..(30): Xaa is C or S
MEPISMLYLNDKQQIIKFKYEGMVVDRXGX

SEQ ID NO: 87669 - protein, 35 aa, Artificial Sequence; identical to SEQ ID NO: 21960
  Cyclic GFR-binding peptide
  MOD_RES (32)..(34): Xaa is C or S

SEQ ID NO: 87670 - protein, 28 aa, Artificial Sequence
  Cyclic GFR-binding peptide
  MOD_RES (1)..(2): Xaa is C or S
XXTPTKMSATSMLYYNDKQQIILRKHRG

SEQ ID NO: 87671 - protein, 24 aa, Artificial Sequence
  Cyclic GFR-binding peptide
SPINILYFVGRKPKVYGKIPMIVR

SEQ ID NO: 87672 - protein, 38 aa, Artificial Sequence; identical to SEQ ID NO: 34547
  Cyclic GFR-binding peptide
  MOD_RES (3)..(4)..(35)..(37): Xaa is C or S

SEQ ID NO: 87673 - protein, 36 aa, Artificial Sequence; identical to SEQ ID NO: 34548
  Cyclic GFR-binding peptide
  MOD_RES (5)..(6): Xaa is C or S

SEQ ID NO: 87674 - protein, 25 aa, Artificial Sequence
  Cyclic GFR-binding peptide
NAISILYFDENKNVVLKKYRNMTVE

SEQ ID NO: 87675 - protein, 28 aa, Artificial Sequence
  Cyclic GFR-binding peptide
  MOD_RES (27)..(27): Xaa is C or S
EPISILYLDENKNVVKFKYENMTVESXA

SEQ ID NO: 87676 - protein, 31 aa, Artificial Sequence
  Cyclic GFR-binding peptide
  MOD_RES (30)..(30): Xaa is C or S
EKMSPISILYKDENKNVVLKYHYNMTVESXA

SEQ ID NO: 87677 - protein, 27 aa, Artificial Sequence
  Cyclic GFR-binding peptide
KTSPISMLYKDNGRVLLLKYHYMIVEE

SEQ ID NO: 87678 - protein, 28 aa, Artificial Sequence
  Cyclic GFR-binding peptide
  MOD_RES (1)..(1): Xaa is C or S
XTPTKMSATSMLYYNDKQQIILRKHRGM

SEQ ID NO: 87679 - protein, 25 aa, Artificial Sequence
  Cyclic GFR-binding peptide
MEPISMLYLNDKQQIIKFKYEGMVV

SEQ ID NO: 87680 - protein, 33 aa, Artificial Sequence
  Cyclic GFR-binding peptide
  MOD_RES (6)..(7): Xaa is C or S
RVPSTXXAPVKTSPISMLYKDNGRVLLLKYHYM

SEQ ID NO: 87681 - protein, 29 aa, Artificial Sequence
  Cyclic GFR-binding peptide
  MOD_RES (1)..(1): Xaa is C or S
XVPEKMSPISILYKDENKNVVLKYHYNMT

SEQ ID NO: 87682 - protein, 33 aa, Artificial Sequence
  Cyclic GFR-binding peptide
  MOD_RES (5)..(6): Xaa is C or S
TPPTXXVPTRLSATSILYYDSANNVVLRKHRDM

SEQ ID NO: 87683 - protein, 34 aa, Artificial Sequence; identical to SEQ ID NO: 34554
  Cyclic GFR-binding peptide
  MOD_RES (1)..(33): Xaa is C or S

SEQ ID NO: 87684 - protein, 26 aa, Artificial Sequence
  Cyclic GFR-binding peptide
VKTSPISMLYKDNGRVLLLKYHYMIV

SEQ ID NO: 87685 - protein, 30 aa, Artificial Sequence
  Cyclic GFR-binding peptide
PEKMEPISILYLDENKNVVKFKYENMTVES

SEQ ID NO: 87686 - protein, 36 aa, Artificial Sequence
  Cyclic GFR-binding peptide
  MOD_RES (6)..(7): Xaa is C or S
AAPASXXVPARLSATSILYYDAANNVVLRKHRDMVV

SEQ ID NO: 87687 - protein, 30 aa, Artificial Sequence
  Cyclic GFR-binding peptide
  MOD_RES (28)..(30): Xaa is C or S
MSATSMLYYNDKQQIILRKHRGMVVDRXGX

SEQ ID NO: 87688 - protein, 29 aa, Artificial Sequence
  Cyclic GFR-binding peptide
  MOD_RES (28)..(28): Xaa is C or S
MEPISMLYLNDKQQIIKFKYEGMVVDRXG

SEQ ID NO: 87689 - protein, 24 aa, Artificial Sequence
  Cyclic GFR-binding peptide
MEPISILYLDENKNVVKFKYENMT

SEQ ID NO: 87690 - protein, 38 aa, Artificial Sequence; identical to SEQ ID NO: 34557
  Cyclic GFR-binding peptide
  MOD_RES (2)..(3)..(35)..(37): Xaa is C or S

SEQ ID NO: 87691 - protein, 30 aa, Artificial Sequence
  Cyclic GFR-binding peptide
  MOD_RES (27)..(29): Xaa is C or S
SATSILYYDSANNVVLRKHRDMVVESXGXR

SEQ ID NO: 87692 - protein, 35 aa, Artificial Sequence
  Cyclic GFR-binding peptide
  MOD_RES (5)..(6): Xaa is C or S
IPEPXXVPEKMNAISILYFDENKNVVLKKYRNMTV

SEQ ID NO: 87693 - protein, 33 aa, Artificial Sequence
  Cyclic GFR-binding peptide
  MOD_RES (4)..(5): Xaa is C or S
ASPXXVPQDLSPINILYFVGRTPKVYGKIPMVV

SEQ ID NO: 87694 - protein, 30 aa, Artificial Sequence
  Cyclic GFR-binding peptide
  MOD_RES (29)..(29): Xaa is C or S
KMNAISILYFDENKNVVLKKYRNMTVESXA

SEQ ID NO: 87695 - protein, 28 aa, Artificial Sequence
  Cyclic GFR-binding peptide
  MOD_RES (27)..(27): Xaa is C or S
LSPINILYFVGRTPKVYGKIPMVVKSXK

SEQ ID NO: 87696 - protein, 26 aa, Artificial Sequence
  Cyclic GFR-binding peptide
DLSPINILYFVGRTPKVYGKIPMVVK

SEQ ID NO: 87697 - protein, 27 aa, Artificial Sequence
  Cyclic GFR-binding peptide
  MOD_RES (1)..(1): Xaa is C or S
XVPEKMEPISILYLDENKNVVKFKYEN

SEQ ID NO: 87698 - protein, 20 aa, Artificial Sequence
  Cyclic GFR-binding peptide
EPISMLYLNDKQQIIKFKYE

SEQ ID NO: 87699 - protein, 32 aa, Artificial Sequence
  Cyclic GFR-binding peptide
  MOD_RES (2)..(3): Xaa is C or S
TXXVPTRLEPISILYLDSANNVVKFKYEDMVV

SEQ ID NO: 87700 - protein, 25 aa, Artificial Sequence
  Cyclic GFR-binding peptide
SPISILYKDENKNVVLKYHYNMTVE

SEQ ID NO: 87701 - protein, 27 aa, Artificial Sequence
  Cyclic GFR-binding peptide
  MOD_RES (1)..(1): Xaa is C or S
XVPEKMSPISILYKDENKNVVLKYHYN

SEQ ID NO: 87702 - protein, 35 aa, Artificial Sequence; identical to SEQ ID NO: 34560
  Cyclic GFR-binding peptide
  MOD_RES (1)..(32)..(34): Xaa is C or S

SEQ ID NO: 87703 - protein, 37 aa, Artificial Sequence; identical to SEQ ID NO: 34562
  Cyclic GFR-binding peptide
  MOD_RES (2)..(3)..(35)..(37): Xaa is C or S

SEQ ID NO: 87704 - protein, 31 aa, Artificial Sequence
  Cyclic GFR-binding peptide
  MOD_RES (30)..(30): Xaa is C or S
PVKTSPISMLYKDNGRVLLLKYHYMIVEEXG

SEQ ID NO: 87705 - protein, 30 aa, Artificial Sequence
  Cyclic GFR-binding peptide
  MOD_RES (2)..(3): Xaa is C or S
TXXVPTRLSATSILYYDSANNVVLRKHRDM

SEQ ID NO: 87706 - protein, 25 aa, Artificial Sequence
  Cyclic GFR-binding peptide
SPINILYFVGRKPKVYGKIPMIVRS

SEQ ID NO: 87707 - protein, 35 aa, Artificial Sequence
  Cyclic GFR-binding peptide
  MOD_RES (6)..(7): Xaa is C or S
KASKAXXVPTKLSATSILYYDKGVVTYLRKHRGMA

SEQ ID NO: 87708 - protein, 33 aa, Artificial Sequence; identical to SEQ ID NO: 34563
  Cyclic GFR-binding peptide
  MOD_RES (32)..(32): Xaa is C or S

SEQ ID NO: 87709 - protein, 35 aa, Artificial Sequence
  Cyclic GFR-binding peptide
  MOD_RES (6)..(7): Xaa is C or S
GSAGPXXTPTKMEPISMLYLNDKQQIIKFKYEGMV

SEQ ID NO: 87710 - protein, 37 aa, Artificial Sequence; identical to SEQ ID NO: 34564
  Cyclic GFR-binding peptide
  MOD_RES (1)..(2)..(34)..(36): Xaa is C or S

SEQ ID NO: 87711 - protein, 34 aa, Artificial Sequence
  Cyclic GFR-binding peptide
  MOD_RES (6)..(7): Xaa is C or S
GIPEPXXVPEKMSATSILYYDENKNVVLRKHRNM

SEQ ID NO: 87712 - protein, 35 aa, Artificial Sequence; identical to SEQ ID NO: 34565
  Cyclic GFR-binding peptide
  MOD_RES (1)..(33)..(35): Xaa is C or S

SEQ ID NO: 87713 - protein, 39 aa, Artificial Sequence; identical to SEQ ID NO: 34567
  Cyclic GFR-binding peptide
  MOD_RES (6)..(7)..(39): Xaa is C or S

SEQ ID NO: 87714 - protein, 39 aa, Artificial Sequence; identical to SEQ ID NO: 34568
  Cyclic GFR-binding peptide
  MOD_RES (5)..(6)..(37)..(39): Xaa is C or S

SEQ ID NO: 87715 - protein, 34 aa, Artificial Sequence; identical to SEQ ID NO: 34569
  Cyclic GFR-binding peptide
  MOD_RES (32)..(34): Xaa is C or S

SEQ ID NO: 87716 - protein, 38 aa, Artificial Sequence; identical to SEQ ID NO: 34570
  Cyclic GFR-binding peptide
  MOD_RES (6)..(7): Xaa is C or S

SEQ ID NO: 87717 - protein, 36 aa, Artificial Sequence; identical to SEQ ID NO: 34571
  Cyclic GFR-binding peptide
  MOD_RES (2)..(3)..(35): Xaa is C or S

SEQ ID NO: 87718 - protein, 30 aa, Artificial Sequence
  Cyclic GFR-binding peptide
  MOD_RES (3)..(4): Xaa is C or S
STXXAPVKTSPISMLYKDNGRVLLLKYHYM

SEQ ID NO: 87719 - protein, 31 aa, Artificial Sequence
  Cyclic GFR-binding peptide
  MOD_RES (1)..(2): Xaa is C or S
XXVPEKMSPINILYFDENKNVVYGKIPNMTV

SEQ ID NO: 87720 - protein, 36 aa, Artificial Sequence; identical to SEQ ID NO: 34572
  Cyclic GFR-binding peptide
  MOD_RES (2)..(3)..(34)..(36): Xaa is C or S

SEQ ID NO: 87721 - protein, 26 aa, Artificial Sequence
  Cyclic GFR-binding peptide
NAISILYFDENKNVVLKKYRNMTVES

SEQ ID NO: 87722 - protein, 28 aa, Artificial Sequence
  Cyclic GFR-binding peptide
  MOD_RES (1)..(2): Xaa is C or S
XXVPEKMSPINILYFDENKNVVYGKIPN

SEQ ID NO: 87723 - protein, 31 aa, Artificial Sequence; identical to SEQ ID NO: 34575
  Cyclic GFR-binding peptide

SEQ ID NO: 87724 - protein, 29 aa, Artificial Sequence
  Cyclic GFR-binding peptide
  MOD_RES (3)..(4): Xaa is C or S
PTXXVPTRLSATSILYYDSANNVVLRKHR

SEQ ID NO: 87725 - protein, 36 aa, Artificial Sequence; identical to SEQ ID NO: 34576
  Cyclic GFR-binding peptide
  MOD_RES (2)..(3)..(35): Xaa is C or S

SEQ ID NO: 87726 - protein, 30 aa, Artificial Sequence
  Cyclic GFR-binding peptide
PARLSATSILYYDAANNVVLRKHRDMVVEA

SEQ ID NO: 87727 - protein, 23 aa, Artificial Sequence
  Cyclic GFR-binding peptide
TSATSMLYYDNGRVLLLRKHRMI

SEQ ID NO: 87728 - protein, 36 aa, Artificial Sequence; identical to SEQ ID NO: 34577
  Cyclic GFR-binding peptide
  MOD_RES (2)..(3)..(35): Xaa is C or S

SEQ ID NO: 87729 - protein, 35 aa, Artificial Sequence; identical to SEQ ID NO: 22144
  Cyclic GFR-binding peptide
  MOD_RES (32)..(34): Xaa is C or S

SEQ ID NO: 87730 - protein, 33 aa, Artificial Sequence; identical to SEQ ID NO: 34578
  Cyclic GFR-binding peptide
  MOD_RES (1)..(2): Xaa is C or S

SEQ ID NO: 87731 - protein, 34 aa, Artificial Sequence; identical to SEQ ID NO: 34579
  Cyclic GFR-binding peptide
  MOD_RES (1)..(2)..(33): Xaa is C or S

SEQ ID NO: 87732 - protein, 32 aa, Artificial Sequence
  Cyclic GFR-binding peptide
  MOD_RES (30)..(32): Xaa is C or S
EKMSPISILYKDENKNVVLKYHYNMTVESXAX

SEQ ID NO: 87733 - protein, 36 aa, Artificial Sequence; identical to SEQ ID NO: 34581
  Cyclic GFR-binding peptide
  MOD_RES (4)..(5): Xaa is C or S

SEQ ID NO: 87734 - protein, 35 aa, Artificial Sequence; identical to SEQ ID NO: 34582
  Cyclic GFR-binding peptide
  MOD_RES (32)..(34): Xaa is C or S

SEQ ID NO: 87735 - protein, 40 aa, Artificial Sequence; identical to SEQ ID NO: 34583
  Cyclic GFR-binding peptide
  MOD_RES (6)..(7)..(38)..(40): Xaa is C or S

SEQ ID NO: 87736 - protein, 20 aa, Artificial Sequence
  Cyclic GFR-binding peptide
SPINILYFDENKNVVYGKIP

SEQ ID NO: 87737 - protein, 22 aa, Artificial Sequence
  Cyclic GFR-binding peptide
LSPINILYFVGRKPKVYGKIPM

SEQ ID NO: 87738 - protein, 36 aa, Artificial Sequence; identical to SEQ ID NO: 34584
  Cyclic GFR-binding peptide
  MOD_RES (4)..(5): Xaa is C or S

SEQ ID NO: 87739 - protein, 30 aa, Artificial Sequence
  Cyclic GFR-binding peptide
  MOD_RES (1)..(1): Xaa is C or S
XVPQDLSPINILYFVGRTPKVYGKIPMVVK

SEQ ID NO: 87740 - protein, 32 aa, Artificial Sequence
  Cyclic GFR-binding peptide
  MOD_RES (4)..(5): Xaa is C or S
AGPXXTPTKMSATSMLYYNDKQQIILRKHRGM

SEQ ID NO: 87741 - protein, 34 aa, Artificial Sequence; identical to SEQ ID NO: 34585
  Cyclic GFR-binding peptide
  MOD_RES (31)..(33): Xaa is C or S

SEQ ID NO: 87742 - protein, 35 aa, Artificial Sequence
  Cyclic GFR-binding peptide
  MOD_RES (5)..(6): Xaa is C or S
SASPXXVPQDLSPINILYFVGRTPKVYGKIPMVVK

SEQ ID NO: 87743 - protein, 28 aa, Artificial Sequence
  Cyclic GFR-binding peptide
VPTRLSPISILYKDSANNVVLKYHYDMV

SEQ ID NO: 87744 - protein, 30 aa, Artificial Sequence
  Cyclic GFR-binding peptide
  MOD_RES (1)..(2): Xaa is C or S
XXTPTKMSPISMLYKNDKQQIILKYHYGMV

SEQ ID NO: 87745 - protein, 42 aa, Artificial Sequence; identical to SEQ ID NO: 34586
  Cyclic GFR-binding peptide
  MOD_RES (6)..(7)..(39)..(41): Xaa is C or S

SEQ ID NO: 87746 - protein, 30 aa, Artificial Sequence; identical to SEQ ID NO: 34587
  Cyclic GFR-binding peptide

SEQ ID NO: 87747 - protein, 29 aa, Artificial Sequence
  Cyclic GFR-binding peptide
  MOD_RES (2)..(3): Xaa is C or S
TXXAPVKTEPISMLYLDNGRVLLKFKYEM

SEQ ID NO: 87748 - protein, 24 aa, Artificial Sequence
  Cyclic GFR-binding peptide
TKMSATSMLYYNDKQQIILRKHRG

SEQ ID NO: 87749 - protein, 32 aa, Artificial Sequence
  Cyclic GFR-binding peptide
  MOD_RES (29)..(31): Xaa is C or S
RLEPISILYLDSANNVVKFKYEDMVVESXGXR

SEQ ID NO: 87750 - protein, 23 aa, Artificial Sequence
  Cyclic GFR-binding peptide
MNAISILYFDENKNVVLKKYRNM

SEQ ID NO: 87751 - protein, 34 aa, Artificial Sequence
  Cyclic GFR-binding peptide
  MOD_RES (5)..(6): Xaa is C or S
IPEPXXVPEKMNAISILYFDENKNVVLKKYRNMT

SEQ ID NO: 87752 - protein, 31 aa, Artificial Sequence
  Cyclic GFR-binding peptide
  MOD_RES (31)..(31): Xaa is C or S
PTKLSATSILYYDKGVVTYLRKHRGMAVSEX

SEQ ID NO: 87753 - protein, 32 aa, Artificial Sequence
  Cyclic GFR-binding peptide
  MOD_RES (31)..(31): Xaa is C or S
PTRLEPISILYLDSANNVVKFKYEDMVVESXG

SEQ ID NO: 87754 - protein, 28 aa, Artificial Sequence
  Cyclic GFR-binding peptide
ARLSATSILYYDAANNVVLRKHRDMVVE

SEQ ID NO: 87755 - protein, 34 aa, Artificial Sequence; identical to SEQ ID NO: 34590
  Cyclic GFR-binding peptide
  MOD_RES (3)..(4): Xaa is C or S

SEQ ID NO: 87756 - protein, 33 aa, Artificial Sequence
  Cyclic GFR-binding peptide
  MOD_RES (30)..(32): Xaa is C or S
TKMEPISMLYLNDKQQIIKFKYEGMVVDRXGXS

SEQ ID NO: 87757 - protein, 30 aa, Artificial Sequence
  Cyclic GFR-binding peptide
  MOD_RES (2)..(3): Xaa is C or S
PXXVPEKMSATSILYYDENKNVVLRKHRNM

SEQ ID NO: 87758 - protein, 35 aa, Artificial Sequence; identical to SEQ ID NO: 34591
  Cyclic GFR-binding peptide
  MOD_RES (3)..(4): Xaa is C or S

SEQ ID NO: 87759 - protein, 34 aa, Artificial Sequence; identical to SEQ ID NO: 34592
  Cyclic GFR-binding peptide
  MOD_RES (2)..(3): Xaa is C or S

SEQ ID NO: 87760 - protein, 29 aa, Artificial Sequence
  Cyclic GFR-binding peptide
PQALSPINILYFVGRKPKVYGKIPMIVRS

SEQ ID NO: 87761 - protein, 32 aa, Artificial Sequence
  Cyclic GFR-binding peptide
  MOD_RES (30)..(32): Xaa is C or S
PVKTEPISMLYLDNGRVLLKFKYEMIVEEXGX

SEQ ID NO: 87762 - protein, 36 aa, Artificial Sequence; identical to SEQ ID NO: 34593
  Cyclic GFR-binding peptide
  MOD_RES (2)..(3)..(34)..(36): Xaa is C or S

SEQ ID NO: 87763 - protein, 34 aa, Artificial Sequence
  Cyclic GFR-binding peptide
  MOD_RES (31)..(33): Xaa is C or S
PTRLSPISILYKDSANNVVLKYHYDMVVESXGXR

SEQ ID NO: 87764 - protein, 29 aa, Artificial Sequence
  Cyclic GFR-binding peptide
  MOD_RES (1)..(2): Xaa is C or S
XXVPTRLSPISILYKDSANNVVLKYHYDM

SEQ ID NO: 87765 - protein, 26 aa, Artificial Sequence
  Cyclic GFR-binding peptide
TKMSATSMLYYNDKQQIILRKHRGMV

SEQ ID NO: 87766 - protein, 26 aa, Artificial Sequence
  Cyclic GFR-binding peptide
PEKMSPISILYKDENKNVVLKYHYNM

SEQ ID NO: 87767 - protein, 29 aa, Artificial Sequence
  Cyclic GFR-binding peptide
  MOD_RES (3)..(4): Xaa is C or S
EPXXVPEKMSPINILYFDENKNVVYGKIP

SEQ ID NO: 87768 - protein, 27 aa, Artificial Sequence
  Cyclic GFR-binding peptide
TPTKMSATSMLYYNDKQQIILRKHRGM

SEQ ID NO: 87769 - protein, 36 aa, Artificial Sequence; identical to SEQ ID NO: 34594
  Cyclic GFR-binding peptide
  MOD_RES (2)..(3)..(34)..(36): Xaa is C or S

SEQ ID NO: 87770 - protein, 28 aa, Artificial Sequence
  Cyclic GFR-binding peptide
  MOD_RES (27)..(27): Xaa is C or S
SPISILYKDSANNVVLKYHYDMVVESXG

SEQ ID NO: 87771 - protein, 30 aa, Artificial Sequence
  Cyclic GFR-binding peptide
  MOD_RES (3)..(4): Xaa is C or S
STXXAPVKTEPISMLYLDNGRVLLKFKYEM

SEQ ID NO: 87772 - protein, 34 aa, Artificial Sequence
  Cyclic GFR-binding peptide
  MOD_RES (5)..(6): Xaa is C or S
SAGPXXTPTKMSATSMLYYNDKQQIILRKHRGMV

SEQ ID NO: 87773 - protein, 32 aa, Artificial Sequence
  Cyclic GFR-binding peptide
  MOD_RES (2)..(3): Xaa is C or S
TXXVPTRLSATSILYYDSANNVVLRKHRDMVV

SEQ ID NO: 87774 - protein, 28 aa, Artificial Sequence
  Cyclic GFR-binding peptide
KMSPISMLYKNDKQQIILKYHYGMVVDR

SEQ ID NO: 87775 - protein, 35 aa, Artificial Sequence; identical to SEQ ID NO: 34596
  Cyclic GFR-binding peptide
  MOD_RES (1)..(32)..(34): Xaa is C or S

SEQ ID NO: 87776 - protein, 31 aa, Artificial Sequence
  Cyclic GFR-binding peptide
  MOD_RES (3)..(4): Xaa is C or S
EPXXVPEKMSPISILYKDENKNVVLKYHYNM

SEQ ID NO: 87777 - protein, 34 aa, Artificial Sequence; identical to SEQ ID NO: 34598
  Cyclic GFR-binding peptide
  MOD_RES (1)..(2)..(34): Xaa is C or S

SEQ ID NO: 87778 - protein, 31 aa, Artificial Sequence; identical to SEQ ID NO: 34599
  Cyclic GFR-binding peptide
  MOD_RES (31)..(31): Xaa is C or S

SEQ ID NO: 87779 - protein, 26 aa, Artificial Sequence
  Cyclic GFR-binding peptide
VPEKMEPISILYLDENKNVVKFKYEN

SEQ ID NO: 87780 - protein, 31 aa, Artificial Sequence
  Cyclic GFR-binding peptide
  MOD_RES (28)..(30): Xaa is C or S
KTSATSMLYYDNGRVLLLRKHRMIVEEXGXL

SEQ ID NO: 87781 - protein, 38 aa, Artificial Sequence; identical to SEQ ID NO: 34604
  Cyclic GFR-binding peptide
  MOD_RES (3)..(4)..(36)..(38): Xaa is C or S

SEQ ID NO: 87782 - protein, 31 aa, Artificial Sequence
  Cyclic GFR-binding peptide
  MOD_RES (4)..(5): Xaa is C or S
PEPXXVPEKMSPINILYFDENKNVVYGKIPN

SEQ ID NO: 87783 - protein, 29 aa, Artificial Sequence
  Cyclic GFR-binding peptide
  MOD_RES (1)..(2): Xaa is C or S
XXVPEKMNAISILYFDENKNVVLKKYRNM

SEQ ID NO: 87784 - protein, 36 aa, Artificial Sequence; identical to SEQ ID NO: 34608
  Cyclic GFR-binding peptide
  MOD_RES (1)..(33)..(35): Xaa is C or S

SEQ ID NO: 87785 - protein, 36 aa, Artificial Sequence
  Cyclic GFR-binding peptide
  MOD_RES (6)..(7): Xaa is C or S
STPPTXXVPTRLSPISILYKDSANNVVLKYHYDMVV

SEQ ID NO: 87786 - protein, 28 aa, Artificial Sequence
  Cyclic GFR-binding peptide
  MOD_RES (27)..(27): Xaa is C or S
NAISILYFDENKNVVLKKYRNMTVESXA

SEQ ID NO: 87787 - protein, 29 aa, Artificial Sequence
  Cyclic GFR-binding peptide
TRLSPISILYKDSANNVVLKYHYDMVVES

SEQ ID NO: 87788 - protein, 32 aa, Artificial Sequence; identical to SEQ ID NO: 34609
  Cyclic GFR-binding peptide
  MOD_RES (1)..(1): Xaa is C or S

SEQ ID NO: 87789 - protein, 32 aa, Artificial Sequence; identical to SEQ ID NO: 34610
  Cyclic GFR-binding peptide
  MOD_RES (1)..(1): Xaa is C or S

SEQ ID NO: 87790 - protein, 37 aa, Artificial Sequence; identical to SEQ ID NO: 34611
  Cyclic GFR-binding peptide
  MOD_RES (6)..(7): Xaa is C or S

SEQ ID NO: 87791 - protein, 26 aa, Artificial Sequence
  Cyclic GFR-binding peptide
EKMSPISILYKDENKNVVLKYHYNMT

SEQ ID NO: 87792 - protein, 35 aa, Artificial Sequence; identical to SEQ ID NO: 34612
  Cyclic GFR-binding peptide
  MOD_RES (1)..(33)..(35): Xaa is C or S

SEQ ID NO: 87793 - protein, 39 aa, Artificial Sequence; identical to SEQ ID NO: 34613
  Cyclic GFR-binding peptide
  MOD_RES (4)..(5)..(37)..(39): Xaa is C or S

SEQ ID NO: 87794 - protein, 28 aa, Artificial Sequence
  Cyclic GFR-binding peptide
  MOD_RES (27)..(27): Xaa is C or S
LSPINILYFIGKTPKIYGKIPMIVKSXK

SEQ ID NO: 87795 - protein, 34 aa, Artificial Sequence; identical to SEQ ID NO: 34614
  Cyclic GFR-binding peptide
  MOD_RES (1)..(2)..(34): Xaa is C or S

SEQ ID NO: 87796 - protein, 33 aa, Artificial Sequence; identical to SEQ ID NO: 34615
  Cyclic GFR-binding peptide
  MOD_RES (2)..(3): Xaa is C or S

SEQ ID NO: 87797 - protein, 27 aa, Artificial Sequence
  Cyclic GFR-binding peptide
APVKTEPISMLYLDNGRVLLKFKYEMI

SEQ ID NO: 87798 - protein, 33 aa, Artificial Sequence
  Cyclic GFR-binding peptide
  MOD_RES (6)..(7): Xaa is C or S
GSAGPXXTPTKMSATSMLYYNDKQQIILRKHRG

SEQ ID NO: 87799 - protein, 26 aa, Artificial Sequence
  Cyclic GFR-binding peptide
PTKMEPISMLYLNDKQQIIKFKYEGM

SEQ ID NO: 87800 - protein, 24 aa, Artificial Sequence
  Cyclic GFR-binding peptide
KMSPINILYFDENKNVVYGKIPNM

SEQ ID NO: 87801 - protein, 40 aa, Artificial Sequence; identical to SEQ ID NO: 34620
  Cyclic GFR-binding peptide
  MOD_RES (5)..(6)..(38)..(40): Xaa is C or S

SEQ ID NO: 87802 - protein, 32 aa, Artificial Sequence
  Cyclic GFR-binding peptide
  MOD_RES (2)..(3): Xaa is C or S
PXXVPEKMNAISILYFDENKNVVLKKYRNMTV

SEQ ID NO: 87803 - protein, 33 aa, Artificial Sequence; identical to SEQ ID NO: 34622
  Cyclic GFR-binding peptide
  MOD_RES (1)..(33): Xaa is C or S

SEQ ID NO: 87804 - protein, 26 aa, Artificial Sequence
  Cyclic GFR-binding peptide
TPTKMSATSMLYYNDKQQIILRKHRG

SEQ ID NO: 87805 - protein, 29 aa, Artificial Sequence
  Cyclic GFR-binding peptide
  MOD_RES (2)..(3): Xaa is C or S
TXXVPTRLSATSILYYDSANNVVLRKHRD

SEQ ID NO: 87806 - protein, 26 aa, Artificial Sequence
  Cyclic GFR-binding peptide
VPTRLSPISILYKDSANNVVLKYHYD

SEQ ID NO: 87807 - protein, 33 aa, Artificial Sequence; identical to SEQ ID NO: 34623
  Cyclic GFR-binding peptide
  MOD_RES (1)..(33): Xaa is C or S

SEQ ID NO: 87808 - protein, 25 aa, Artificial Sequence
  Cyclic GFR-binding peptide
VPTRLSPISILYKDSANNVVLKYHY

SEQ ID NO: 87809 - protein, 29 aa, Artificial Sequence
  Cyclic GFR-binding peptide
  MOD_RES (3)..(4): Xaa is C or S
STXXAPVKTEPISMLYLDNGRVLLKFKYE

SEQ ID NO: 87810 - protein, 29 aa, Artificial Sequence
  Cyclic GFR-binding peptide
  MOD_RES (1)..(2): Xaa is C or S
XXAPVKTEPISMLYLDNGRVLLKFKYEMI

SEQ ID NO: 87811 - protein, 25 aa, Artificial Sequence
  Cyclic GFR-binding peptide
KLSATSILYYDKGVVTYLRKHRGMA

SEQ ID NO: 87812 - protein, 21 aa, Artificial Sequence
  Cyclic GFR-binding peptide
MSPINILYFDENKNVVYGKIP

SEQ ID NO: 87813 - protein, 29 aa, Artificial Sequence
  Cyclic GFR-binding peptide
PTKLSATSILYYDKGVVTYLRKHRGMAVS

SEQ ID NO: 87814 - protein, 30 aa, Artificial Sequence
  Cyclic GFR-binding peptide
  MOD_RES (1)..(1): Xaa is C or S
XVPARLSATSILYYDAANNVVLRKHRDMVV

SEQ ID NO: 87815 - protein, 22 aa, Artificial Sequence
  Cyclic GFR-binding peptide
SPINILYFVGRTPKVYGKIPMV

SEQ ID NO: 87816 - protein, 34 aa, Artificial Sequence
  Cyclic GFR-binding peptide
  MOD_RES (6)..(7): Xaa is C or S
RVPSTXXAPVKTSATSMLYYDNGRVLLLRKHRMI

SEQ ID NO: 87817 - protein, 27 aa, Artificial Sequence
  Cyclic GFR-binding peptide
VPEKMNAISILYFDENKNVVLKKYRNM

SEQ ID NO: 87818 - protein, 36 aa, Artificial Sequence; identical to SEQ ID NO: 34626
  Cyclic GFR-binding peptide
  MOD_RES (5)..(6): Xaa is C or S

SEQ ID NO: 87819 - protein, 31 aa, Artificial Sequence
  Cyclic GFR-binding peptide
  MOD_RES (28)..(30): Xaa is C or S
MSATSILYYDENKNVVLRKHRNMTVESXAXR

SEQ ID NO: 87820 - protein, 31 aa, Artificial Sequence
  Cyclic GFR-binding peptide
  MOD_RES (5)..(6): Xaa is C or S
TPPTXXVPTRLEPISILYLDSANNVVKFKYE

SEQ ID NO: 87821 - protein, 30 aa, Artificial Sequence
  Cyclic GFR-binding peptide
  MOD_RES (2)..(3): Xaa is C or S
AXXVPTKLSATSILYYDKGVVTYLRKHRGM

SEQ ID NO: 87822 - protein, 29 aa, Artificial Sequence
  Cyclic GFR-binding peptide
VPARLSATSILYYDAANNVVLRKHRDMVV

SEQ ID NO: 87823 - protein, 37 aa, Artificial Sequence; identical to SEQ ID NO: 34632
  Cyclic GFR-binding peptide
  MOD_RES (5)..(6): Xaa is C or S

SEQ ID NO: 87824 - protein, 25 aa, Artificial Sequence
  Cyclic GFR-binding peptide
KMEPISMLYLNDKQQIIKFKYEGMV

SEQ ID NO: 87825 - protein, 34 aa, Artificial Sequence
  Cyclic GFR-binding peptide
  MOD_RES (31)..(33): Xaa is C or S
PTKLSATSILYYDKGVVTYLRKHRGMAVSEXGXR

SEQ ID NO: 87826 - protein, 23 aa, Artificial Sequence
  Cyclic GFR-binding peptide
DLSPINILYFIGKTPKIYGKIPM

SEQ ID NO: 87827 - protein, 40 aa, Artificial Sequence; identical to SEQ ID NO: 34633
  Cyclic GFR-binding peptide
  MOD_RES (6)..(7)..(39): Xaa is C or S

SEQ ID NO: 87828 - protein, 34 aa, Artificial Sequence; identical to SEQ ID NO: 34634
  Cyclic GFR-binding peptide
  MOD_RES (32)..(34): Xaa is C or S

SEQ ID NO: 87829 - protein, 28 aa, Artificial Sequence
  Cyclic GFR-binding peptide
  MOD_RES (1)..(1): Xaa is C or S
XAPVKTEPISMLYLDNGRVLLKFKYEMI

SEQ ID NO: 87830 - protein, 41 aa, Artificial Sequence; identical to SEQ ID NO: 34636
  Cyclic GFR-binding peptide
  MOD_RES (6)..(7)..(38)..(40): Xaa is C or S

SEQ ID NO: 87831 - protein, 25 aa, Artificial Sequence
  Cyclic GFR-binding peptide
LSPISILYKDSANNVVLKYHYDMVV

SEQ ID NO: 87832 - protein, 29 aa, Artificial Sequence
  Cyclic GFR-binding peptide
  MOD_RES (2)..(3): Xaa is C or S
PXXVPEKMSPINILYFDENKNVVYGKIPN

SEQ ID NO: 87833 - protein, 40 aa, Artificial Sequence; identical to SEQ ID NO: 34637
  Cyclic GFR-binding peptide
  MOD_RES (6)..(7)..(39): Xaa is C or S

SEQ ID NO: 87834 - protein, 27 aa, Artificial Sequence
  Cyclic GFR-binding peptide
MSPISILYKDENKNVVLKYHYNMTVES

SEQ ID NO: 87835 - protein, 20 aa, Artificial Sequence
  Cyclic GFR-binding peptide
SPINILYFVGRKPKVYGKIP

SEQ ID NO: 87836 - protein, 24 aa, Artificial Sequence
  Cyclic GFR-binding peptide
SATSMLYYDNGRVLLLRKHRMIVE

SEQ ID NO: 87837 - protein, 35 aa, Artificial Sequence; identical to SEQ ID NO: 34639
  Cyclic GFR-binding peptide
  MOD_RES (4)..(5): Xaa is C or S

SEQ ID NO: 87838 - protein, 26 aa, Artificial Sequence
  Cyclic GFR-binding peptide
LSATSILYYDAANNVVLRKHRDMVVE

SEQ ID NO: 87839 - protein, 26 aa, Artificial Sequence
  Cyclic GFR-binding peptide
MSPINILYFDENKNVVYGKIPNMTVE

SEQ ID NO: 87840 - protein, 27 aa, Artificial Sequence
  Cyclic GFR-binding peptide
VPTRLSPISILYKDSANNVVLKYHYDM

SEQ ID NO: 87841 - protein, 38 aa, Artificial Sequence; identical to SEQ ID NO: 34641
  Cyclic GFR-binding peptide
  MOD_RES (4)..(5)..(36)..(38): Xaa is C or S

SEQ ID NO: 87842 - protein, 32 aa, Artificial Sequence
  Cyclic GFR-binding peptide
  MOD_RES (2)..(3): Xaa is C or S
PXXTPTKMEPISMLYLNDKQQIIKFKYEGMVV

SEQ ID NO: 87843 - protein, 25 aa, Artificial Sequence
  Cyclic GFR-binding peptide
VPTRLEPISILYLDSANNVVKFKYE

SEQ ID NO: 87844 - protein, 40 aa, Artificial Sequence; identical to SEQ ID NO: 34644
  Cyclic GFR-binding peptide
  MOD_RES (6)..(7)..(39): Xaa is C or S

SEQ ID NO: 87845 - protein, 29 aa, Artificial Sequence
  Cyclic GFR-binding peptide
  MOD_RES (28)..(28): Xaa is C or S
MSATSMLYYNDKQQIILRKHRGMVVDRXG

SEQ ID NO: 87846 - protein, 24 aa, Artificial Sequence
  Cyclic GFR-binding peptide
KMSATSMLYYNDKQQIILRKHRGM

SEQ ID NO: 87847 - protein, 29 aa, Artificial Sequence
  Cyclic GFR-binding peptide
  MOD_RES (3)..(4): Xaa is C or S
STXXAPVKTSPISMLYKDNGRVLLLKYHY

SEQ ID NO: 87848 - protein, 31 aa, Artificial Sequence
  Cyclic GFR-binding peptide
  MOD_RES (30)..(30): Xaa is C or S
PQDLSPINILYFVGRTPKVYGKIPMVVKSXK

SEQ ID NO: 87849 - protein, 33 aa, Artificial Sequence
  Cyclic GFR-binding peptide
  MOD_RES (5)..(6): Xaa is C or S
IPEPXXVPEKMSPISILYKDENKNVVLKYHYNM

SEQ ID NO: 87850 - protein, 31 aa, Artificial Sequence
  Cyclic GFR-binding peptide
  MOD_RES (4)..(5): Xaa is C or S
PEPXXVPEKMNAISILYFDENKNVVLKKYRN

SEQ ID NO: 87851 - protein, 30 aa, Artificial Sequence
  Cyclic GFR-binding peptide
  MOD_RES (27)..(29): Xaa is C or S
EPISMLYLNDKQQIIKFKYEGMVVDRXGXS

SEQ ID NO: 87852 - protein, 29 aa, Artificial Sequence
  Cyclic GFR-binding peptide
  MOD_RES (2)..(3): Xaa is C or S
TXXAPVKTSATSMLYYDNGRVLLLRKHRM

SEQ ID NO: 87853 - protein, 34 aa, Artificial Sequence; identical to SEQ ID NO: 34647
  Cyclic GFR-binding peptide
  MOD_RES (32)..(34): Xaa is C or S

SEQ ID NO: 87854 - protein, 30 aa, Artificial Sequence
  Cyclic GFR-binding peptide
  MOD_RES (29)..(29): Xaa is C or S
KMSATSILYYDENKNVVLRKHRNMTVESXA

SEQ ID NO: 87855 - protein, 38 aa, Artificial Sequence; identical to SEQ ID NO: 34650
  Cyclic GFR-binding peptide
  MOD_RES (6)..(7): Xaa is C or S

SEQ ID NO: 87856 - protein, 28 aa, Artificial Sequence
  Cyclic GFR-binding peptide
SQDLSPINILYFIGKTPKIYGKIPMIVK

SEQ ID NO: 87857 - protein, 35 aa, Artificial Sequence
  Cyclic GFR-binding peptide
  MOD_RES (5)..(6): Xaa is C or S
TPPTXXVPTRLSPISILYKDSANNVVLKYHYDMVV

SEQ ID NO: 87858 - protein, 23 aa, Artificial Sequence
  Cyclic GFR-binding peptide
VKTEPISMLYLDNGRVLLKFKYE

SEQ ID NO: 87859 - protein, 32 aa, Artificial Sequence
  Cyclic GFR-binding peptide
  MOD_RES (5)..(6): Xaa is C or S
SAAPXXVPQALSPINILYFVGRKPKVYGKIPM

SEQ ID NO: 87860 - protein, 30 aa, Artificial Sequence
  Cyclic GFR-binding peptide
  MOD_RES (30)..(30): Xaa is C or S
SQDLSPINILYFIGKTPKIYGKIPMIVKSX

SEQ ID NO: 87861 - protein, 23 aa, Artificial Sequence
  Cyclic GFR-binding peptide
TEPISMLYLDNGRVLLKFKYEMI

SEQ ID NO: 87862 - protein, 30 aa, Artificial Sequence
  Cyclic GFR-binding peptide
  MOD_RES (2)..(3): Xaa is C or S
PXXVPEKMSPINILYFDENKNVVYGKIPNM

SEQ ID NO: 87863 - protein, 23 aa, Artificial Sequence
  Cyclic GFR-binding peptide
ARLSATSILYYDAANNVVLRKHR

SEQ ID NO: 87864 - protein, 29 aa, Artificial Sequence
  Cyclic GFR-binding peptide
EKMEPISILYLDENKNVVKFKYENMTVES

SEQ ID NO: 87865 - protein, 24 aa, Artificial Sequence
  Cyclic GFR-binding peptide
KMSATSILYYDENKNVVLRKHRNM

SEQ ID NO: 87866 - protein, 28 aa, Artificial Sequence
  Cyclic GFR-binding peptide
  MOD_RES (2)..(3): Xaa is C or S
TXXAPVKTEPISMLYLDNGRVLLKFKYE

SEQ ID NO: 87867 - protein, 25 aa, Artificial Sequence
  Cyclic GFR-binding peptide
EKMSPISILYKDENKNVVLKYHYNM

SEQ ID NO: 87868 - protein, 29 aa, Artificial Sequence
  Cyclic GFR-binding peptide
  MOD_RES (27)..(29): Xaa is C or S
TSPISMLYKDNGRVLLLKYHYMIVEEXGX

SEQ ID NO: 87869 - protein, 25 aa, Artificial Sequence
  Cyclic GFR-binding peptide
TRLSATSILYYDSANNVVLRKHRDM

SEQ ID NO: 87870 - protein, 31 aa, Artificial Sequence
  Cyclic GFR-binding peptide
  MOD_RES (3)..(4): Xaa is C or S
PTXXVPTRLSPISILYKDSANNVVLKYHYDM

SEQ ID NO: 87871 - protein, 34 aa, Artificial Sequence
  Cyclic GFR-binding peptide
  MOD_RES (6)..(7): Xaa is C or S
GIPEPXXVPEKMNAISILYFDENKNVVLKKYRNM

SEQ ID NO: 87872 - protein, 36 aa, Artificial Sequence; identical to SEQ ID NO: 34661
  Cyclic GFR-binding peptide
  MOD_RES (5)..(6): Xaa is C or S

SEQ ID NO: 87873 - protein, 28 aa, Artificial Sequence
  Cyclic GFR-binding peptide
  MOD_RES (2)..(3): Xaa is C or S
PXXVPQALSPINILYFVGRKPKVYGKIP

SEQ ID NO: 87874 - protein, 37 aa, Artificial Sequence; identical to SEQ ID NO: 34662
  Cyclic GFR-binding peptide
  MOD_RES (6)..(7): Xaa is C or S

SEQ ID NO: 87875 - protein, 26 aa, Artificial Sequence
  Cyclic GFR-binding peptide
APVKTSPISMLYKDNGRVLLLKYHYM

SEQ ID NO: 87876 - protein, 24 aa, Artificial Sequence
  Cyclic GFR-binding peptide
QALSPINILYFVGRKPKVYGKIPM

SEQ ID NO: 87877 - protein, 41 aa, Artificial Sequence; identical to SEQ ID NO: 34665
  Cyclic GFR-binding peptide
  MOD_RES (6)..(7)..(38)..(40): Xaa is C or S

SEQ ID NO: 87878 - protein, 23 aa, Artificial Sequence
  Cyclic GFR-binding peptide
SPISMLYKNDKQQIILKYHYGMV

SEQ ID NO: 87879 - protein, 40 aa, Artificial Sequence; identical to SEQ ID NO: 34666
  Cyclic GFR-binding peptide
  MOD_RES (4)..(5)..(37)..(39): Xaa is C or S

SEQ ID NO: 87880 - protein, 30 aa, Artificial Sequence
  Cyclic GFR-binding peptide
  MOD_RES (29)..(29): Xaa is C or S
KLSATSILYYDKGVVTYLRKHRGMAVSEXG

SEQ ID NO: 87881 - protein, 35 aa, Artificial Sequence; identical to SEQ ID NO: 34669
  Cyclic GFR-binding peptide
  MOD_RES (4)..(5): Xaa is C or S

SEQ ID NO: 87882 - protein, 31 aa, Artificial Sequence
  Cyclic GFR-binding peptide
  MOD_RES (30)..(30): Xaa is C or S
EKMSPINILYFDENKNVVYGKIPNMTVESXA

SEQ ID NO: 87883 - protein, 29 aa, Artificial Sequence
  Cyclic GFR-binding peptide
PEKMSPISILYKDENKNVVLKYHYNMTVE

SEQ ID NO: 87884 - protein, 33 aa, Artificial Sequence
  Cyclic GFR-binding peptide
  MOD_RES (31)..(33): Xaa is C or S
PTKLSATSILYYDKGVVTYLRKHRGMAVSEXGX

SEQ ID NO: 87885 - protein, 28 aa, Artificial Sequence
  Cyclic GFR-binding peptide
PEKMNAISILYFDENKNVVLKKYRNMTV

SEQ ID NO: 87886 - protein, 22 aa, Artificial Sequence
  Cyclic GFR-binding peptide
KMSATSMLYYNDKQQIILRKHR

SEQ ID NO: 87887 - protein, 33 aa, Artificial Sequence
  Cyclic GFR-binding peptide
  MOD_RES (31)..(33): Xaa is C or S
PTKMEPISMLYLNDKQQIIKFKYEGMVVDRXGX

SEQ ID NO: 87888 - protein, 33 aa, Artificial Sequence
  Cyclic GFR-binding peptide
  MOD_RES (5)..(6): Xaa is C or S
IPEPXXVPEKMSATSILYYDENKNVVLRKHRNM

SEQ ID NO: 87889 - protein, 33 aa, Artificial Sequence
  Cyclic GFR-binding peptide
  MOD_RES (30)..(32): Xaa is C or S
TKLSATSILYYDKGVVTYLRKHRGMAVSEXGXR

SEQ ID NO: 87890 - protein, 35 aa, Artificial Sequence; identical to SEQ ID NO: 34672
  Cyclic GFR-binding peptide
  MOD_RES (1)..(33)..(35): Xaa is C or S

SEQ ID NO: 87891 - protein, 34 aa, Artificial Sequence
  Cyclic GFR-binding peptide
  MOD_RES (31)..(33): Xaa is C or S
PEKMEPISILYLDENKNVVKFKYENMTVESXAXR

SEQ ID NO: 87892 - protein, 33 aa, Artificial Sequence
  Cyclic GFR-binding peptide
  MOD_RES (5)..(6): Xaa is C or S
SAGPXXTPTKMSPISMLYKNDKQQIILKYHYGM

SEQ ID NO: 87893 - protein, 23 aa, Artificial Sequence
  Cyclic GFR-binding peptide
RLEPISILYLDSANNVVKFKYED

SEQ ID NO: 87894 - protein, 35 aa, Artificial Sequence; identical to SEQ ID NO: 34674
  Cyclic GFR-binding peptide
  MOD_RES (1)..(2)..(34): Xaa is C or S

SEQ ID NO: 87895 - protein, 27 aa, Artificial Sequence
  Cyclic GFR-binding peptide
TPTKMEPISMLYLNDKQQIIKFKYEGM

SEQ ID NO: 87896 - protein, 22 aa, Artificial Sequence
  Cyclic GFR-binding peptide
RLEPISILYLDSANNVVKFKYE

SEQ ID NO: 87897 - protein, 38 aa, Artificial Sequence; identical to SEQ ID NO: 34675
  Cyclic GFR-binding peptide
  MOD_RES (3)..(4)..(36)..(38): Xaa is C or S

SEQ ID NO: 87898 - protein, 25 aa, Artificial Sequence
  Cyclic GFR-binding peptide
KMSATSMLYYNDKQQIILRKHRGMV

SEQ ID NO: 87899 - protein, 40 aa, Artificial Sequence; identical to SEQ ID NO: 34676
  Cyclic GFR-binding peptide
  MOD_RES (5)..(6)..(38)..(40): Xaa is C or S

SEQ ID NO: 87900 - protein, 39 aa, Artificial Sequence; identical to SEQ ID NO: 34678
  Cyclic GFR-binding peptide
  MOD_RES (6)..(7)..(39): Xaa is C or S

SEQ ID NO: 87901 - protein, 29 aa, Artificial Sequence
  Cyclic GFR-binding peptide
  MOD_RES (28)..(28): Xaa is C or S
MEPISILYLDENKNVVKFKYENMTVESXA

SEQ ID NO: 87902 - protein, 30 aa, Artificial Sequence
  Cyclic GFR-binding peptide
  MOD_RES (30)..(30): Xaa is C or S
TRLSPISILYKDSANNVVLKYHYDMVVESX

SEQ ID NO: 87903 - protein, 35 aa, Artificial Sequence; identical to SEQ ID NO: 34680
  Cyclic GFR-binding peptide
  MOD_RES (3)..(4)..(35): Xaa is C or S

SEQ ID NO: 87904 - protein, 38 aa, Artificial Sequence; identical to SEQ ID NO: 34681
  Cyclic GFR-binding peptide
  MOD_RES (3)..(4)..(35)..(37): Xaa is C or S

SEQ ID NO: 87905 - protein, 33 aa, Artificial Sequence; identical to SEQ ID NO: 34682
  Cyclic GFR-binding peptide
  MOD_RES (2)..(3): Xaa is C or S

SEQ ID NO: 87906 - protein, 33 aa, Artificial Sequence
  Cyclic GFR-binding peptide
  MOD_RES (5)..(6): Xaa is C or S
TPPTXXVPTRLEPISILYLDSANNVVKFKYEDM

SEQ ID NO: 87907 - protein, 30 aa, Artificial Sequence
  Cyclic GFR-binding peptide
  MOD_RES (27)..(29): Xaa is C or S
EPISILYLDENKNVVKFKYENMTVESXAXR

SEQ ID NO: 87908 - protein, 28 aa, Artificial Sequence
  Cyclic GFR-binding peptide
  MOD_RES (27)..(27): Xaa is C or S
TSATSMLYYDNGRVLLLRKHRMIVEEXG

SEQ ID NO: 87909 - protein, 26 aa, Artificial Sequence
  Cyclic GFR-binding peptide
  MOD_RES (1)..(1): Xaa is C or S
XAPVKTEPISMLYLDNGRVLLKFKYE

SEQ ID NO: 87910 - protein, 37 aa, Artificial Sequence; identical to SEQ ID NO: 34686
  Cyclic GFR-binding peptide
  MOD_RES (2)..(3)..(35)..(37): Xaa is C or S

SEQ ID NO: 87911 - protein, 24 aa, Artificial Sequence
  Cyclic GFR-binding peptide
SATSILYYDSANNVVLRKHRDMVV

SEQ ID NO: 87912 - protein, 27 aa, Artificial Sequence
  Cyclic GFR-binding peptide
  MOD_RES (27)..(27): Xaa is C or S
TEPISMLYLDNGRVLLKFKYEMIVEEX

SEQ ID NO: 87913 - protein, 20 aa, Artificial Sequence
  Cyclic GFR-binding peptide
EPISMLYLDNGRVLLKFKYE

SEQ ID NO: 87914 - protein, 27 aa, Artificial Sequence
  Cyclic GFR-binding peptide
QALSPINILYFVGRKPKVYGKIPMIVR

SEQ ID NO: 87915 - protein, 35 aa, Artificial Sequence; identical to SEQ ID NO: 34688
  Cyclic GFR-binding peptide
  MOD_RES (2)..(3)..(34): Xaa is C or S

SEQ ID NO: 87916 - protein, 39 aa, Artificial Sequence; identical to SEQ ID NO: 34689
  Cyclic GFR-binding peptide
  MOD_RES (5)..(6)..(38): Xaa is C or S

SEQ ID NO: 87917 - protein, 39 aa, Artificial Sequence; identical to SEQ ID NO: 34690
  Cyclic GFR-binding peptide
  MOD_RES (6)..(7)..(38): Xaa is C or S

SEQ ID NO: 87918 - protein, 29 aa, Artificial Sequence
  Cyclic GFR-binding peptide
EKMNAISILYFDENKNVVLKKYRNMTVES

SEQ ID NO: 87919 - protein, 22 aa, Artificial Sequence
  Cyclic GFR-binding peptide
KMSPISMLYKNDKQQIILKYHY

SEQ ID NO: 87920 - protein, 29 aa, Artificial Sequence
  Cyclic GFR-binding peptide
PTKMSPISMLYKNDKQQIILKYHYGMVVD

SEQ ID NO: 87921 - protein, 31 aa, Artificial Sequence
  Cyclic GFR-binding peptide
  MOD_RES (1)..(2): Xaa is C or S
XXVPEKMSPISILYKDENKNVVLKYHYNMTV

SEQ ID NO: 87922 - protein, 40 aa, Artificial Sequence; identical to SEQ ID NO: 34693
  Cyclic GFR-binding peptide
  MOD_RES (5)..(6)..(38)..(40): Xaa is C or S

SEQ ID NO: 87923 - protein, 38 aa, Artificial Sequence; identical to SEQ ID NO: 34695
  Cyclic GFR-binding peptide
  MOD_RES (5)..(6)..(38): Xaa is C or S

SEQ ID NO: 87924 - protein, 28 aa, Artificial Sequence
  Cyclic GFR-binding peptide
EKMSPISILYKDENKNVVLKYHYNMTVE

SEQ ID NO: 87925 - protein, 30 aa, Artificial Sequence
  Cyclic GFR-binding peptide
  MOD_RES (4)..(5): Xaa is C or S
SKAXXVPTKLSATSILYYDKGVVTYLRKHR

SEQ ID NO: 87926 - protein, 31 aa, Artificial Sequence
  Cyclic GFR-binding peptide
  MOD_RES (29)..(31): Xaa is C or S
RLSATSILYYDAANNVVLRKHRDMVVEAXGX

SEQ ID NO: 87927 - protein, 28 aa, Artificial Sequence
  Cyclic GFR-binding peptide
KMSATSMLYYNDKQQIILRKHRGMVVDR

SEQ ID NO: 87928 - protein, 32 aa, Artificial Sequence
  Cyclic GFR-binding peptide
  MOD_RES (6)..(7): Xaa is C or S
GSAGPXXTPTKMEPISMLYLNDKQQIIKFKYE

SEQ ID NO: 87929 - protein, 26 aa, Artificial Sequence
  Cyclic GFR-binding peptide
KMSPINILYFDENKNVVYGKIPNMTV

SEQ ID NO: 87930 - protein, 29 aa, Artificial Sequence
  Cyclic GFR-binding peptide
  MOD_RES (29)..(29): Xaa is C or S
QDLSPINILYFVGRTPKVYGKIPMVVKSX

SEQ ID NO: 87931 - protein, 36 aa, Artificial Sequence; identical to SEQ ID NO: 34698
  Cyclic GFR-binding peptide
  MOD_RES (3)..(4)..(35): Xaa is C or S

SEQ ID NO: 87932 - protein, 28 aa, Artificial Sequence
  Cyclic GFR-binding peptide
QDLSPINILYFVGRTPKVYGKIPMVVKS

SEQ ID NO: 87933 - protein, 37 aa, Artificial Sequence; identical to SEQ ID NO: 34699
  Cyclic GFR-binding peptide
  MOD_RES (6)..(7): Xaa is C or S

SEQ ID NO: 87934 - protein, 32 aa, Artificial Sequence
  Cyclic GFR-binding peptide
  MOD_RES (30)..(32): Xaa is C or S
PQDLSPINILYFVGRTPKVYGKIPMVVKSXKX

SEQ ID NO: 87935 - protein, 39 aa, Artificial Sequence; identical to SEQ ID NO: 34701
  Cyclic GFR-binding peptide
  MOD_RES (4)..(5)..(37)..(39): Xaa is C or S

SEQ ID NO: 87936 - protein, 29 aa, Artificial Sequence
  Cyclic GFR-binding peptide
  MOD_RES (2)..(3): Xaa is C or S
PXXVSQDLSPINILYFIGKTPKIYGKIPM

SEQ ID NO: 87937 - protein, 26 aa, Artificial Sequence
  Cyclic GFR-binding peptide
SATSILYYDKGVVTYLRKHRGMAVSE

SEQ ID NO: 87938 - protein, 30 aa, Artificial Sequence
  Cyclic GFR-binding peptide
  MOD_RES (27)..(29): Xaa is C or S
SPISMLYKNDKQQIILKYHYGMVVDRXGXS

SEQ ID NO: 87939 - protein, 35 aa, Artificial Sequence; identical to SEQ ID NO: 34702
  Cyclic GFR-binding peptide
  MOD_RES (1)..(32)..(34): Xaa is C or S

SEQ ID NO: 87940 - protein, 30 aa, Artificial Sequence
  Cyclic GFR-binding peptide
  MOD_RES (27)..(29): Xaa is C or S
LSPINILYFIGKTPKIYGKIPMIVKSXKXS

SEQ ID NO: 87941 - protein, 29 aa, Artificial Sequence
  Cyclic GFR-binding peptide
  MOD_RES (26)..(28): Xaa is C or S
SPINILYFVGRTPKVYGKIPMVVKSXKXS

SEQ ID NO: 87942 - protein, 36 aa, Artificial Sequence; identical to SEQ ID NO: 34704
  Cyclic GFR-binding peptide
  MOD_RES (1)..(2)..(34)..(36): Xaa is C or S

SEQ ID NO: 87943 - protein, 31 aa, Artificial Sequence; identical to SEQ ID NO: 34705
  Cyclic GFR-binding peptide
  MOD_RES (1)..(1): Xaa is C or S

SEQ ID NO: 87944 - protein, 24 aa, Artificial Sequence
  Cyclic GFR-binding peptide
LSPISILYKDSANNVVLKYHYDMV

SEQ ID NO: 87945 - protein, 34 aa, Artificial Sequence; identical to SEQ ID NO: 34706
  Cyclic GFR-binding peptide
  MOD_RES (2)..(3): Xaa is C or S

SEQ ID NO: 87946 - protein, 28 aa, Artificial Sequence
  Cyclic GFR-binding peptide
  MOD_RES (1)..(1): Xaa is C or S
XVSQDLSPINILYFIGKTPKIYGKIPMI

SEQ ID NO: 87947 - protein, 32 aa, Artificial Sequence
  Cyclic GFR-binding peptide
  MOD_RES (2)..(3): Xaa is C or S
TXXAPVKTSPISMLYKDNGRVLLLKYHYMIVE

SEQ ID NO: 87948 - protein, 26 aa, Artificial Sequence
  Cyclic GFR-binding peptide
PVKTSATSMLYYDNGRVLLLRKHRMI

SEQ ID NO: 87949 - protein, 35 aa, Artificial Sequence; identical to SEQ ID NO: 34708
  Cyclic GFR-binding peptide
  MOD_RES (2)..(3)..(35): Xaa is C or S

SEQ ID NO: 87950 - protein, 29 aa, Artificial Sequence
  Cyclic GFR-binding peptide
  MOD_RES (1)..(1): Xaa is C or S
XVPEKMSATSILYYDENKNVVLRKHRNMT

SEQ ID NO: 87951 - protein, 26 aa, Artificial Sequence
  Cyclic GFR-binding peptide
RLSATSILYYDAANNVVLRKHRDMVV

SEQ ID NO: 87952 - protein, 30 aa, Artificial Sequence
  Cyclic GFR-binding peptide
  MOD_RES (27)..(29): Xaa is C or S
TEPISMLYLDNGRVLLKFKYEMIVEEXGXL

SEQ ID NO: 87953 - protein, 32 aa, Artificial Sequence
  Cyclic GFR-binding peptide
  MOD_RES (29)..(31): Xaa is C or S
KMSPISMLYKNDKQQIILKYHYGMVVDRXGXS

SEQ ID NO: 87954 - protein, 39 aa, Artificial Sequence; identical to SEQ ID NO: 34712
  Cyclic GFR-binding peptide
  MOD_RES (5)..(6)..(37)..(39): Xaa is C or S

SEQ ID NO: 87955 - protein, 30 aa, Artificial Sequence
  Cyclic GFR-binding peptide
  MOD_RES (4)..(5): Xaa is C or S
PPTXXVPTRLSPISILYKDSANNVVLKYHY

SEQ ID NO: 87956 - protein, 41 aa, Artificial Sequence; identical to SEQ ID NO: 34715
  Cyclic GFR-binding peptide
  MOD_RES (5)..(6)..(38)..(40): Xaa is C or S

SEQ ID NO: 87957 - protein, 32 aa, Artificial Sequence
  Cyclic GFR-binding peptide
  MOD_RES (2)..(3): Xaa is C or S
PXXVPQDLSPINILYFVGRTPKVYGKIPMVVK

SEQ ID NO: 87958 - protein, 29 aa, Artificial Sequence
  Cyclic GFR-binding peptide
  MOD_RES (27)..(29): Xaa is C or S
LSPINILYFIGKTPKIYGKIPMIVKSXKX

SEQ ID NO: 87959 - protein, 27 aa, Artificial Sequence
  Cyclic GFR-binding peptide
VKTEPISMLYLDNGRVLLKFKYEMIVE

SEQ ID NO: 87960 - protein, 39 aa, Artificial Sequence; identical to SEQ ID NO: 34718
  Cyclic GFR-binding peptide
  MOD_RES (5)..(6)..(38): Xaa is C or S

SEQ ID NO: 87961 - protein, 32 aa, Artificial Sequence
  Cyclic GFR-binding peptide
  MOD_RES (29)..(31): Xaa is C or S
KMEPISILYLDENKNVVKFKYENMTVESXAXR

SEQ ID NO: 87962 - protein, 28 aa, Artificial Sequence
  Cyclic GFR-binding peptide
PTRLSATSILYYDSANNVVLRKHRDMVV

SEQ ID NO: 87963 - protein, 35 aa, Artificial Sequence; identical to SEQ ID NO: 34720
  Cyclic GFR-binding peptide
  MOD_RES (1)..(33)..(35): Xaa is C or S

SEQ ID NO: 87964 - protein, 33 aa, Artificial Sequence
  Cyclic GFR-binding peptide
  MOD_RES (6)..(7): Xaa is C or S
STPPTXXVPTRLSPISILYKDSANNVVLKYHYD

SEQ ID NO: 87965 - protein, 28 aa, Artificial Sequence
  Cyclic GFR-binding peptide
  MOD_RES (28)..(28): Xaa is C or S
LSATSILYYDKGVVTYLRKHRGMAVSEX

SEQ ID NO: 87966 - protein, 33 aa, Artificial Sequence; identical to SEQ ID NO: 34722
  Cyclic GFR-binding peptide
  MOD_RES (32)..(32): Xaa is C or S

SEQ ID NO: 87967 - protein, 37 aa, Artificial Sequence; identical to SEQ ID NO: 34723
  Cyclic GFR-binding peptide
  MOD_RES (2)..(3)..(34)..(36): Xaa is C or S

SEQ ID NO: 87968 - protein, 34 aa, Artificial Sequence
  Cyclic GFR-binding peptide
  MOD_RES (5)..(6): Xaa is C or S
SASPXXVPQDLSPINILYFVGRTPKVYGKIPMVV

SEQ ID NO: 87969 - protein, 27 aa, Artificial Sequence
  Cyclic GFR-binding peptide
  MOD_RES (27)..(27): Xaa is C or S
SATSILYYDSANNVVLRKHRDMVVESX

SEQ ID NO: 87970 - protein, 30 aa, Artificial Sequence
  Cyclic GFR-binding peptide
PTRLSATSILYYDSANNVVLRKHRDMVVES

SEQ ID NO: 87971 - protein, 26 aa, Artificial Sequence
  Cyclic GFR-binding peptide
KMNAISILYFDENKNVVLKKYRNMTV

SEQ ID NO: 87972 - protein, 31 aa, Artificial Sequence
  Cyclic GFR-binding peptide
  MOD_RES (2)..(3): Xaa is C or S
PXXVPEKMNAISILYFDENKNVVLKKYRNMT

SEQ ID NO: 87973 - protein, 34 aa, Artificial Sequence; identical to SEQ ID NO: 34725
  Cyclic GFR-binding peptide
  MOD_RES (2)..(3): Xaa is C or S

SEQ ID NO: 87974 - protein, 25 aa, Artificial Sequence
  Cyclic GFR-binding peptide
TKLSATSILYYDKGVVTYLRKHRGM

SEQ ID NO: 87975 - protein, 28 aa, Artificial Sequence
  Cyclic GFR-binding peptide
  MOD_RES (27)..(27): Xaa is C or S
EPISMLYLNDKQQIIKFKYEGMVVDRXG

SEQ ID NO: 87976 - protein, 32 aa, Artificial Sequence
  Cyclic GFR-binding peptide
  MOD_RES (29)..(31): Xaa is C or S
KMSPISILYKDENKNVVLKYHYNMTVESXAXR

SEQ ID NO: 87977 - protein, 41 aa, Artificial Sequence; identical to SEQ ID NO: 34727
  Cyclic GFR-binding peptide
  MOD_RES (5)..(6)..(38)..(40): Xaa is C or S

SEQ ID NO: 87978 - protein, 24 aa, Artificial Sequence
  Cyclic GFR-binding peptide
TKMEPISMLYLNDKQQIIKFKYEG

SEQ ID NO: 87979 - protein, 29 aa, Artificial Sequence
  Cyclic GFR-binding peptide
  MOD_RES (27)..(29): Xaa is C or S
SATSILYYDENKNVVLRKHRNMTVESXAX

SEQ ID NO: 87980 - protein, 36 aa, Artificial Sequence
  Cyclic GFR-binding peptide
  MOD_RES (6)..(7): Xaa is C or S
GIPEPXXVPEKMEPISILYLDENKNVVKFKYENMTV

SEQ ID NO: 87981 - protein, 33 aa, Artificial Sequence; identical to SEQ ID NO: 34729
  Cyclic GFR-binding peptide
  MOD_RES (2)..(3): Xaa is C or S

SEQ ID NO: 87982 - protein, 24 aa, Artificial Sequence
  Cyclic GFR-binding peptide
PTRLSATSILYYDSANNVVLRKHR

SEQ ID NO: 87983 - protein, 20 aa, Artificial Sequence
  Cyclic GFR-binding peptide
SPINILYFVGRTPKVYGKIP

SEQ ID NO: 87984 - protein, 29 aa, Artificial Sequence
  Cyclic GFR-binding peptide
PEKMSATSILYYDENKNVVLRKHRNMTVE

SEQ ID NO: 87985 - protein, 25 aa, Artificial Sequence
  Cyclic GFR-binding peptide
LSPINILYFVGRTPKVYGKIPMVVK

SEQ ID NO: 87986 - protein, 40 aa, Artificial Sequence; identical to SEQ ID NO: 34730
  Cyclic GFR-binding peptide
  MOD_RES (4)..(5)..(37)..(39): Xaa is C or S

SEQ ID NO: 87987 - protein, 29 aa, Artificial Sequence
  Cyclic GFR-binding peptide
PTKMEPISMLYLNDKQQIIKFKYEGMVVD

SEQ ID NO: 87988 - protein, 32 aa, Artificial Sequence
  Cyclic GFR-binding peptide
  MOD_RES (5)..(6): Xaa is C or S
SAGPXXTPTKMSATSMLYYNDKQQIILRKHRG

SEQ ID NO: 87989 - protein, 28 aa, Artificial Sequence
  Cyclic GFR-binding peptide
PEKMSPINILYFDENKNVVYGKIPNMTV

SEQ ID NO: 87990 - protein, 30 aa, Artificial Sequence
  Cyclic GFR-binding peptide
  MOD_RES (30)..(30): Xaa is C or S
EKMSPINILYFDENKNVVYGKIPNMTVESX

SEQ ID NO: 87991 - protein, 38 aa, Artificial Sequence; identical to SEQ ID NO: 34734
  Cyclic GFR-binding peptide
  MOD_RES (5)..(6)..(38): Xaa is C or S

SEQ ID NO: 87992 - protein, 35 aa, Artificial Sequence; identical to SEQ ID NO: 34733
  Cyclic GFR-binding peptide
  MOD_RES (3)..(4)..(35): Xaa is C or S

SEQ ID NO: 87993 - protein, 26 aa, Artificial Sequence
  Cyclic GFR-binding peptide
VPEKMSPISILYKDENKNVVLKYHYN

SEQ ID NO: 87994 - protein, 35 aa, Artificial Sequence; identical to SEQ ID NO: 34736
  Cyclic GFR-binding peptide
  MOD_RES (3)..(4): Xaa is C or S

SEQ ID NO: 87995 - protein, 31 aa, Artificial Sequence
  Cyclic GFR-binding peptide
  MOD_RES (4)..(5): Xaa is C or S
PEPXXVPEKMSATSILYYDENKNVVLRKHRN

SEQ ID NO: 87996 - protein, 25 aa, Artificial Sequence
  Cyclic GFR-binding peptide
KTSPISMLYKDNGRVLLLKYHYMIV

SEQ ID NO: 87997 - protein, 27 aa, Artificial Sequence
  Cyclic GFR-binding peptide
  MOD_RES (1)..(1): Xaa is C or S
XAPVKTSPISMLYKDNGRVLLLKYHYM

SEQ ID NO: 87998 - protein, 29 aa, Artificial Sequence
  Cyclic GFR-binding peptide
  MOD_RES (2)..(3): Xaa is C or S
PXXVPEKMEPISILYLDENKNVVKFKYEN

SEQ ID NO: 87999 - protein, 41 aa, Artificial Sequence; identical to SEQ ID NO: 34738
  Cyclic GFR-binding peptide
  MOD_RES (6)..(7)..(39)..(41): Xaa is C or S

SEQ ID NO: 88000 - protein, 25 aa, Artificial Sequence
  Cyclic GFR-binding peptide
PEKMNAISILYFDENKNVVLKKYRN

SEQ ID NO: 88001 - protein, 29 aa, Artificial Sequence
  Cyclic GFR-binding peptide
  MOD_RES (1)..(2): Xaa is C or S
XXVSQDLSPINILYFIGKTPKIYGKIPMI

SEQ ID NO: 88002 - protein, 33 aa, Artificial Sequence; identical to SEQ ID NO: 34740
  Cyclic GFR-binding peptide
  MOD_RES (1)..(33): Xaa is C or S

SEQ ID NO: 88003 - protein, 37 aa, Artificial Sequence; identical to SEQ ID NO: 34741
  Cyclic GFR-binding peptide
  MOD_RES (3)..(4)..(36): Xaa is C or S

SEQ ID NO: 88004 - protein, 27 aa, Artificial Sequence
  Cyclic GFR-binding peptide
PVKTSPISMLYKDNGRVLLLKYHYMIV

SEQ ID NO: 88005 - protein, 38 aa, Artificial Sequence; identical to SEQ ID NO: 34742
  Cyclic GFR-binding peptide
  MOD_RES (6)..(7)..(38): Xaa is C or S

SEQ ID NO: 88006 - protein, 41 aa, Artificial Sequence; identical to SEQ ID NO: 34743
  Cyclic GFR-binding peptide
  MOD_RES (6)..(7)..(39)..(41): Xaa is C or S

SEQ ID NO: 88007 - protein, 39 aa, Artificial Sequence; identical to SEQ ID NO: 34744
  Cyclic GFR-binding peptide
  MOD_RES (3)..(4)..(36)..(38): Xaa is C or S

SEQ ID NO: 88008 - protein, 30 aa, Artificial Sequence
  Cyclic GFR-binding peptide
  MOD_RES (30)..(30): Xaa is C or S
EKMEPISILYLDENKNVVKFKYENMTVESX

SEQ ID NO: 88009 - protein, 25 aa, Artificial Sequence
  Cyclic GFR-binding peptide
TKMSPISMLYKNDKQQIILKYHYGM

SEQ ID NO: 88010 - protein, 41 aa, Artificial Sequence; identical to SEQ ID NO: 34745
  Cyclic GFR-binding peptide
  MOD_RES (6)..(7)..(39)..(41): Xaa is C or S

SEQ ID NO: 88011 - protein, 29 aa, Artificial Sequence
  Cyclic GFR-binding peptide
  MOD_RES (1)..(1): Xaa is C or S
XTPTKMSPISMLYKNDKQQIILKYHYGMV

SEQ ID NO: 88012 - protein, 34 aa, Artificial Sequence; identical to SEQ ID NO: 34747
  Cyclic GFR-binding peptide
  MOD_RES (1)..(2)..(34): Xaa is C or S

SEQ ID NO: 88013 - protein, 31 aa, Artificial Sequence; identical to SEQ ID NO: 34748
  Cyclic GFR-binding peptide
  MOD_RES (1)..(1): Xaa is C or S

SEQ ID NO: 88014 - protein, 31 aa, Artificial Sequence
  Cyclic GFR-binding peptide
  MOD_RES (2)..(3): Xaa is C or S
PXXTPTKMEPISMLYLNDKQQIIKFKYEGMV

SEQ ID NO: 88015 - protein, 29 aa, Artificial Sequence
  Cyclic GFR-binding peptide
  MOD_RES (27)..(29): Xaa is C or S
SPINILYFDENKNVVYGKIPNMTVESXAX

SEQ ID NO: 88016 - protein, 29 aa, Artificial Sequence
  Cyclic GFR-binding peptide
  MOD_RES (28)..(28): Xaa is C or S
MNAISILYFDENKNVVLKKYRNMTVESXA

SEQ ID NO: 88017 - protein, 29 aa, Artificial Sequence
  Cyclic GFR-binding peptide
  MOD_RES (1)..(2): Xaa is C or S
XXVPQDLSPINILYFVGRTPKVYGKIPMV

SEQ ID NO: 88018 - protein, 32 aa, Artificial Sequence; identical to SEQ ID NO: 34751
  Cyclic GFR-binding peptide
  MOD_RES (32)..(32): Xaa is C or S

SEQ ID NO: 88019 - protein, 36 aa, Artificial Sequence; identical to SEQ ID NO: 34753
  Cyclic GFR-binding peptide
  MOD_RES (5)..(6): Xaa is C or S

SEQ ID NO: 88020 - protein, 34 aa, Artificial Sequence; identical to SEQ ID NO: 34752
  Cyclic GFR-binding peptide
  MOD_RES (3)..(4): Xaa is C or S

SEQ ID NO: 88021 - protein, 35 aa, Artificial Sequence; identical to SEQ ID NO: 34754
  Cyclic GFR-binding peptide
  MOD_RES (1)..(33)..(35): Xaa is C or S

SEQ ID NO: 88022 - protein, 25 aa, Artificial Sequence
  Cyclic GFR-binding peptide
QDLSPINILYFIGKTPKIYGKIPMI

SEQ ID NO: 88023 - protein, 30 aa, Artificial Sequence
  Cyclic GFR-binding peptide
  MOD_RES (3)..(4): Xaa is C or S
GPXXTPTKMEPISMLYLNDKQQIIKFKYEG

SEQ ID NO: 88024 - protein, 32 aa, Artificial Sequence
  Cyclic GFR-binding peptide
  MOD_RES (29)..(31): Xaa is C or S
RLSPISILYKDSANNVVLKYHYDMVVESXGXR

SEQ ID NO: 88025 - protein, 30 aa, Artificial Sequence
  Cyclic GFR-binding peptide
  MOD_RES (1)..(2): Xaa is C or S
XXAPVKTEPISMLYLDNGRVLLKFKYEMIV

SEQ ID NO: 88026 - protein, 42 aa, Artificial Sequence; identical to SEQ ID NO: 34758
  Cyclic GFR-binding peptide
  MOD_RES (6)..(7)..(39)..(41): Xaa is C or S

SEQ ID NO: 88027 - protein, 28 aa, Artificial Sequence
  Cyclic GFR-binding peptide
  MOD_RES (1)..(2): Xaa is C or S
XXVPQALSPINILYFVGRKPKVYGKIPM

SEQ ID NO: 88028 - protein, 36 aa, Artificial Sequence; identical to SEQ ID NO: 34759
  Cyclic GFR-binding peptide
  MOD_RES (1)..(2)..(33)..(35): Xaa is C or S

SEQ ID NO: 88029 - protein, 36 aa, Artificial Sequence; identical to SEQ ID NO: 34760
  Cyclic GFR-binding peptide
  MOD_RES (1)..(33)..(35): Xaa is C or S

SEQ ID NO: 88030 - protein, 23 aa, Artificial Sequence
  Cyclic GFR-binding peptide
SPISILYKDENKNVVLKYHYNMT

SEQ ID NO: 88031 - protein, 37 aa, Artificial Sequence; identical to SEQ ID NO: 34761
  Cyclic GFR-binding peptide
  MOD_RES (6)..(7): Xaa is C or S

SEQ ID NO: 88032 - protein, 30 aa, Artificial Sequence
  Cyclic GFR-binding peptide
  MOD_RES (4)..(5): Xaa is C or S
PPTXXVPTRLEPISILYLDSANNVVKFKYE

SEQ ID NO: 88033 - protein, 38 aa, Artificial Sequence; identical to SEQ ID NO: 34763
  Cyclic GFR-binding peptide
  MOD_RES (5)..(6)..(38): Xaa is C or S

SEQ ID NO: 88034 - protein, 29 aa, Artificial Sequence
  Cyclic GFR-binding peptide
  MOD_RES (1)..(1): Xaa is C or S
XVSQDLSPINILYFIGKTPKIYGKIPMIV

SEQ ID NO: 88035 - protein, 28 aa, Artificial Sequence
  Cyclic GFR-binding peptide
  MOD_RES (26)..(28): Xaa is C or S
SPINILYFVGRTPKVYGKIPMVVKSXKX

SEQ ID NO: 88036 - protein, 32 aa, Artificial Sequence; identical to SEQ ID NO: 34765
  Cyclic GFR-binding peptide
  MOD_RES (32)..(32): Xaa is C or S

SEQ ID NO: 88037 - protein, 30 aa, Artificial Sequence
  Cyclic GFR-binding peptide
  MOD_RES (1)..(2): Xaa is C or S
XXVPARLSATSILYYDAANNVVLRKHRDMV

SEQ ID NO: 88038 - protein, 34 aa, Artificial Sequence; identical to SEQ ID NO: 34766
  Cyclic GFR-binding peptide
  MOD_RES (1)..(2)..(34): Xaa is C or S

SEQ ID NO: 88039 - protein, 41 aa, Artificial Sequence; identical to SEQ ID NO: 34767
  Cyclic GFR-binding peptide
  MOD_RES (5)..(6)..(38)..(40): Xaa is C or S

SEQ ID NO: 88040 - protein, 31 aa, Artificial Sequence; identical to SEQ ID NO: 34768
  Cyclic GFR-binding peptide
  MOD_RES (1)..(1): Xaa is C or S

SEQ ID NO: 88041 - protein, 33 aa, Artificial Sequence; identical to SEQ ID NO: 34769
  Cyclic GFR-binding peptide
  MOD_RES (1)..(2): Xaa is C or S

SEQ ID NO: 88042 - protein, 24 aa, Artificial Sequence
  Cyclic GFR-binding peptide
LSATSILYYDSANNVVLRKHRDMV

SEQ ID NO: 88043 - protein, 37 aa, Artificial Sequence; identical to SEQ ID NO: 34772
  Cyclic GFR-binding peptide
  MOD_RES (3)..(4)..(36): Xaa is C or S

SEQ ID NO: 88044 - protein, 30 aa, Artificial Sequence
  Cyclic GFR-binding peptide
  MOD_RES (1)..(1): Xaa is C or S
XVPEKMEPISILYLDENKNVVKFKYENMTV

SEQ ID NO: 88045 - protein, 33 aa, Artificial Sequence
  Cyclic GFR-binding peptide
  MOD_RES (4)..(5): Xaa is C or S
AGPXXTPTKMSATSMLYYNDKQQIILRKHRGMV

SEQ ID NO: 88046 - protein, 35 aa, Artificial Sequence
  Cyclic GFR-binding peptide
  MOD_RES (5)..(6): Xaa is C or S
TPPTXXVPTRLSATSILYYDSANNVVLRKHRDMVV

SEQ ID NO: 88047 - protein, 28 aa, Artificial Sequence
  Cyclic GFR-binding peptide
EKMEPISILYLDENKNVVKFKYENMTVE

SEQ ID NO: 88048 - protein, 33 aa, Artificial Sequence
  Cyclic GFR-binding peptide
  MOD_RES (6)..(7): Xaa is C or S
AAPASXXVPARLSATSILYYDAANNVVLRKHRD

SEQ ID NO: 88049 - protein, 34 aa, Artificial Sequence; identical to SEQ ID NO: 34773
  Cyclic GFR-binding peptide
  MOD_RES (2)..(3)..(34): Xaa is C or S

SEQ ID NO: 88050 - protein, 32 aa, Artificial Sequence
  Cyclic GFR-binding peptide
  MOD_RES (5)..(6): Xaa is C or S
IPEPXXVPEKMSPINILYFDENKNVVYGKIPN

SEQ ID NO: 88051 - protein, 41 aa, Artificial Sequence; identical to SEQ ID NO: 34774
  Cyclic GFR-binding peptide
  MOD_RES (6)..(7)..(39)..(41): Xaa is C or S

SEQ ID NO: 88052 - protein, 22 aa, Artificial Sequence
  Cyclic GFR-binding peptide
MSATSILYYDENKNVVLRKHRN

SEQ ID NO: 88053 - protein, 27 aa, Artificial Sequence
  Cyclic GFR-binding peptide
TRLEPISILYLDSANNVVKFKYEDMVV

SEQ ID NO: 88054 - protein, 38 aa, Artificial Sequence; identical to SEQ ID NO: 34775
  Cyclic GFR-binding peptide
  MOD_RES (5)..(6)..(38): Xaa is C or S

SEQ ID NO: 88055 - protein, 27 aa, Artificial Sequence
  Cyclic GFR-binding peptide
KMSPISMLYKNDKQQIILKYHYGMVVD

SEQ ID NO: 88056 - protein, 23 aa, Artificial Sequence
  Cyclic GFR-binding peptide
SPINILYFVGRKPKVYGKIPMIV

SEQ ID NO: 88057 - protein, 28 aa, Artificial Sequence
  Cyclic GFR-binding peptide
  MOD_RES (1)..(1): Xaa is C or S
XVPQDLSPINILYFVGRTPKVYGKIPMV

SEQ ID NO: 88058 - protein, 34 aa, Artificial Sequence
  Cyclic GFR-binding peptide
  MOD_RES (6)..(7): Xaa is C or S
AAPASXXVPARLSATSILYYDAANNVVLRKHRDM

SEQ ID NO: 88059 - protein, 36 aa, Artificial Sequence; identical to SEQ ID NO: 34777
  Cyclic GFR-binding peptide
  MOD_RES (3)..(4)..(36): Xaa is C or S

SEQ ID NO: 88060 - protein, 30 aa, Artificial Sequence
  Cyclic GFR-binding peptide
  MOD_RES (28)..(30): Xaa is C or S
MSPISILYKDENKNVVLKYHYNMTVESXAX

SEQ ID NO: 88061 - protein, 41 aa, Artificial Sequence; identical to SEQ ID NO: 34779
  Cyclic GFR-binding peptide
  MOD_RES (6)..(7)..(39)..(41): Xaa is C or S

SEQ ID NO: 88062 - protein, 27 aa, Artificial Sequence
  Cyclic GFR-binding peptide
  MOD_RES (27)..(27): Xaa is C or S
SATSILYYDENKNVVLRKHRNMTVESX

SEQ ID NO: 88063 - protein, 27 aa, Artificial Sequence
  Cyclic GFR-binding peptide
  MOD_RES (1)..(2): Xaa is C or S
XXVSQDLSPINILYFIGKTPKIYGKIP

SEQ ID NO: 88064 - protein, 35 aa, Artificial Sequence; identical to SEQ ID NO: 34781
  Cyclic GFR-binding peptide
  MOD_RES (3)..(4): Xaa is C or S

SEQ ID NO: 88065 - protein, 40 aa, Artificial Sequence; identical to SEQ ID NO: 34782
  Cyclic GFR-binding peptide
  MOD_RES (6)..(7)..(39): Xaa is C or S

SEQ ID NO: 88066 - protein, 30 aa, Artificial Sequence
  Cyclic GFR-binding peptide
  MOD_RES (3)..(4): Xaa is C or S
KAXXVPTKLSATSILYYDKGVVTYLRKHRG

SEQ ID NO: 88067 - protein, 30 aa, Artificial Sequence
  Cyclic GFR-binding peptide
  MOD_RES (4)..(5): Xaa is C or S
PPTXXVPTRLSATSILYYDSANNVVLRKHR

SEQ ID NO: 88068 - protein, 24 aa, Artificial Sequence
  Cyclic GFR-binding peptide
SPISILYKDSANNVVLKYHYDMVV

SEQ ID NO: 88069 - protein, 36 aa, Artificial Sequence; identical to SEQ ID NO: 34786
  Cyclic GFR-binding peptide
  MOD_RES (5)..(6): Xaa is C or S

SEQ ID NO: 88070 - protein, 34 aa, Artificial Sequence; identical to SEQ ID NO: 34787
  Cyclic GFR-binding peptide
  MOD_RES (1)..(33): Xaa is C or S

SEQ ID NO: 88071 - protein, 29 aa, Artificial Sequence
  Cyclic GFR-binding peptide
  MOD_RES (1)..(1): Xaa is C or S
XVPEKMNAISILYFDENKNVVLKKYRNMT

SEQ ID NO: 88072 - protein, 28 aa, Artificial Sequence
  Cyclic GFR-binding peptide
TPTKMSATSMLYYNDKQQIILRKHRGMV

SEQ ID NO: 88073 - protein, 33 aa, Artificial Sequence; identical to SEQ ID NO: 34788
  Cyclic GFR-binding peptide
  MOD_RES (2)..(3): Xaa is C or S

SEQ ID NO: 88074 - protein, 25 aa, Artificial Sequence
  Cyclic GFR-binding peptide
PEKMSATSILYYDENKNVVLRKHRN

SEQ ID NO: 88075 - protein, 27 aa, Artificial Sequence
  Cyclic GFR-binding peptide
DLSPINILYFVGRTPKVYGKIPMVVKS

SEQ ID NO: 88076 - protein, 24 aa, Artificial Sequence
  Cyclic GFR-binding peptide
KMEPISILYLDENKNVVKFKYENM

SEQ ID NO: 88077 - protein, 22 aa, Artificial Sequence
  Cyclic GFR-binding peptide
TSPISMLYKDNGRVLLLKYHYM

SEQ ID NO: 88078 - protein, 32 aa, Artificial Sequence
  Cyclic GFR-binding peptide
  MOD_RES (3)..(4): Xaa is C or S
EPXXVPEKMNAISILYFDENKNVVLKKYRNMT

SEQ ID NO: 88079 - protein, 37 aa, Artificial Sequence; identical to SEQ ID NO: 34790
  Cyclic GFR-binding peptide
  MOD_RES (2)..(3)..(34)..(36): Xaa is C or S

SEQ ID NO: 88080 - protein, 31 aa, Artificial Sequence
  Cyclic GFR-binding peptide
  MOD_RES (3)..(4): Xaa is C or S
EPXXVPEKMEPISILYLDENKNVVKFKYENM

SEQ ID NO: 88081 - protein, 31 aa, Artificial Sequence
  Cyclic GFR-binding peptide
  MOD_RES (2)..(3): Xaa is C or S
SXXVPARLSATSILYYDAANNVVLRKHRDMV

SEQ ID NO: 88082 - protein, 39 aa, Artificial Sequence; identical to SEQ ID NO: 34791
  Cyclic GFR-binding peptide
  MOD_RES (6)..(7)..(38): Xaa is C or S

SEQ ID NO: 88083 - protein, 36 aa, Artificial Sequence; identical to SEQ ID NO: 34792
  Cyclic GFR-binding peptide
  MOD_RES (1)..(2)..(34)..(36): Xaa is C or S

SEQ ID NO: 88084 - protein, 32 aa, Artificial Sequence; identical to SEQ ID NO: 34794
  Cyclic GFR-binding peptide
  MOD_RES (31)..(31): Xaa is C or S

SEQ ID NO: 88085 - protein, 32 aa, Artificial Sequence
  Cyclic GFR-binding peptide
  MOD_RES (3)..(4): Xaa is C or S
PTXXVPTRLSATSILYYDSANNVVLRKHRDMV

SEQ ID NO: 88086 - protein, 28 aa, Artificial Sequence
  Cyclic GFR-binding peptide
  MOD_RES (2)..(3): Xaa is C or S
PXXVPEKMEPISILYLDENKNVVKFKYE

SEQ ID NO: 88087 - protein, 38 aa, Artificial Sequence; identical to SEQ ID NO: 34795
  Cyclic GFR-binding peptide
  MOD_RES (2)..(3)..(35)..(37): Xaa is C or S

SEQ ID NO: 88088 - protein, 34 aa, Artificial Sequence
  Cyclic GFR-binding peptide
  MOD_RES (31)..(33): Xaa is C or S
PTRLEPISILYLDSANNVVKFKYEDMVVESXGXR

SEQ ID NO: 88089 - protein, 35 aa, Artificial Sequence
  Cyclic GFR-binding peptide
  MOD_RES (6)..(7): Xaa is C or S
ASASPXXVSQDLSPINILYFIGKTPKIYGKIPMIV

SEQ ID NO: 88090 - protein, 28 aa, Artificial Sequence
  Cyclic GFR-binding peptide
  MOD_RES (2)..(3): Xaa is C or S
PXXVPEKMSPISILYKDENKNVVLKYHY

SEQ ID NO: 88091 - protein, 34 aa, Artificial Sequence; identical to SEQ ID NO: 34797
  Cyclic GFR-binding peptide
  MOD_RES (3)..(4): Xaa is C or S

SEQ ID NO: 88092 - protein, 29 aa, Artificial Sequence
  Cyclic GFR-binding peptide
  MOD_RES (29)..(29): Xaa is C or S
VKTSPISMLYKDNGRVLLLKYHYMIVEEX

SEQ ID NO: 88093 - protein, 32 aa, Artificial Sequence
  Cyclic GFR-binding peptide
  MOD_RES (2)..(3): Xaa is C or S
PXXVPQALSPINILYFVGRKPKVYGKIPMIVR

SEQ ID NO: 88094 - protein, 37 aa, Artificial Sequence; identical to SEQ ID NO: 34800
  Cyclic GFR-binding peptide
  MOD_RES (3)..(4)..(36): Xaa is C or S

SEQ ID NO: 88095 - protein, 24 aa, Artificial Sequence
  Cyclic GFR-binding peptide
TRLSATSILYYDSANNVVLRKHRD

SEQ ID NO: 88096 - protein, 22 aa, Artificial Sequence
  Cyclic GFR-binding peptide
LSPINILYFIGKTPKIYGKIPM

SEQ ID NO: 88097 - protein, 26 aa, Artificial Sequence
  Cyclic GFR-binding peptide
PTRLSATSILYYDSANNVVLRKHRDM

SEQ ID NO: 88098 - protein, 30 aa, Artificial Sequence
  Cyclic GFR-binding peptide
  MOD_RES (2)..(3): Xaa is C or S
TXXAPVKTEPISMLYLDNGRVLLKFKYEMI

SEQ ID NO: 88099 - protein, 29 aa, Artificial Sequence
  Cyclic GFR-binding peptide
VPEKMEPISILYLDENKNVVKFKYENMTV

SEQ ID NO: 88100 - protein, 34 aa, Artificial Sequence; identical to SEQ ID NO: 34806
  Cyclic GFR-binding peptide
  MOD_RES (1)..(33): Xaa is C or S

SEQ ID NO: 88101 - protein, 29 aa, Artificial Sequence
  Cyclic GFR-binding peptide
PEKMSPINILYFDENKNVVYGKIPNMTVE

SEQ ID NO: 88102 - protein, 30 aa, Artificial Sequence; identical to SEQ ID NO: 34808
  Cyclic GFR-binding peptide

SEQ ID NO: 88103 - protein, 23 aa, Artificial Sequence
  Cyclic GFR-binding peptide
KTEPISMLYLDNGRVLLKFKYEM

SEQ ID NO: 88104 - protein, 31 aa, Artificial Sequence
  Cyclic GFR-binding peptide
  MOD_RES (29)..(31): Xaa is C or S
QALSPINILYFVGRKPKVYGKIPMIVRSXKX

SEQ ID NO: 88105 - protein, 22 aa, Artificial Sequence
  Cyclic GFR-binding peptide
MSATSMLYYNDKQQIILRKHRG

SEQ ID NO: 88106 - protein, 26 aa, Artificial Sequence
  Cyclic GFR-binding peptide
MSPISMLYKNDKQQIILKYHYGMVVD

SEQ ID NO: 88107 - protein, 30 aa, Artificial Sequence
  Cyclic GFR-binding peptide
  MOD_RES (2)..(3): Xaa is C or S
SXXVPARLSATSILYYDAANNVVLRKHRDM

SEQ ID NO: 88108 - protein, 23 aa, Artificial Sequence
  Cyclic GFR-binding peptide
SPISILYKDSANNVVLKYHYDMV

SEQ ID NO: 88109 - protein, 42 aa, Artificial Sequence; identical to SEQ ID NO: 34812
  Cyclic GFR-binding peptide
  MOD_RES (6)..(7)..(39)..(41): Xaa is C or S

SEQ ID NO: 88110 - protein, 32 aa, Artificial Sequence
  Cyclic GFR-binding peptide
  MOD_RES (31)..(31): Xaa is C or S
PEKMEPISILYLDENKNVVKFKYENMTVESXA

SEQ ID NO: 88111 - protein, 20 aa, Artificial Sequence
  Cyclic GFR-binding peptide
SATSILYYDSANNVVLRKHR

SEQ ID NO: 88112 - protein, 37 aa, Artificial Sequence; identical to SEQ ID NO: 34814
  Cyclic GFR-binding peptide
  MOD_RES (3)..(4)..(36): Xaa is C or S

SEQ ID NO: 88113 - protein, 34 aa, Artificial Sequence
  Cyclic GFR-binding peptide
  MOD_RES (6)..(7): Xaa is C or S
GSAGPXXTPTKMSATSMLYYNDKQQIILRKHRGM

SEQ ID NO: 88114 - protein, 23 aa, Artificial Sequence
  Cyclic GFR-binding peptide
SATSILYYDSANNVVLRKHRDMV

SEQ ID NO: 88115 - protein, 33 aa, Artificial Sequence
  Cyclic GFR-binding peptide
  MOD_RES (31)..(33): Xaa is C or S
PEKMSATSILYYDENKNVVLRKHRNMTVESXAX

SEQ ID NO: 88116 - protein, 25 aa, Artificial Sequence
  Cyclic GFR-binding peptide
TRLEPISILYLDSANNVVKFKYEDM

SEQ ID NO: 88117 - protein, 36 aa, Artificial Sequence; identical to SEQ ID NO: 34815
  Cyclic GFR-binding peptide
  MOD_RES (3)..(4)..(36): Xaa is C or S

SEQ ID NO: 88118 - protein, 30 aa, Artificial Sequence
  Cyclic GFR-binding peptide
  MOD_RES (30)..(30): Xaa is C or S
EKMSATSILYYDENKNVVLRKHRNMTVESX

SEQ ID NO: 88119 - protein, 21 aa, Artificial Sequence
  Cyclic GFR-binding peptide
SPINILYFVGRKPKVYGKIPM

SEQ ID NO: 88120 - protein, 24 aa, Artificial Sequence
  Cyclic GFR-binding peptide
KTSPISMLYKDNGRVLLLKYHYMI

SEQ ID NO: 88121 - protein, 31 aa, Artificial Sequence
  Cyclic GFR-binding peptide
  MOD_RES (29)..(31): Xaa is C or S
KMEPISILYLDENKNVVKFKYENMTVESXAX

SEQ ID NO: 88122 - protein, 26 aa, Artificial Sequence
  Cyclic GFR-binding peptide
KMSATSMLYYNDKQQIILRKHRGMVV

SEQ ID NO: 88123 - protein, 34 aa, Artificial Sequence; identical to SEQ ID NO: 34817
  Cyclic GFR-binding peptide
  MOD_RES (32)..(34): Xaa is C or S

SEQ ID NO: 88124 - protein, 25 aa, Artificial Sequence
  Cyclic GFR-binding peptide
APVKTEPISMLYLDNGRVLLKFKYE

SEQ ID NO: 88125 - protein, 29 aa, Artificial Sequence
  Cyclic GFR-binding peptide
VPTKLSATSILYYDKGVVTYLRKHRGMAV

SEQ ID NO: 88126 - protein, 29 aa, Artificial Sequence
  Cyclic GFR-binding peptide
TKMSPISMLYKNDKQQIILKYHYGMVVDR

SEQ ID NO: 88127 - protein, 37 aa, Artificial Sequence; identical to SEQ ID NO: 34818
  Cyclic GFR-binding peptide
  MOD_RES (1)..(2)..(34)..(36): Xaa is C or S

SEQ ID NO: 88128 - protein, 23 aa, Artificial Sequence
  Cyclic GFR-binding peptide
RLSATSILYYDAANNVVLRKHRD

SEQ ID NO: 88129 - protein, 31 aa, Artificial Sequence
  Cyclic GFR-binding peptide
  MOD_RES (4)..(5): Xaa is C or S
PPTXXVPTRLEPISILYLDSANNVVKFKYED

SEQ ID NO: 88130 - protein, 27 aa, Artificial Sequence
  Cyclic GFR-binding peptide
PVKTEPISMLYLDNGRVLLKFKYEMIV

SEQ ID NO: 88131 - protein, 31 aa, Artificial Sequence
  Cyclic GFR-binding peptide
  MOD_RES (30)..(30): Xaa is C or S
EKMSATSILYYDENKNVVLRKHRNMTVESXA

SEQ ID NO: 88132 - protein, 25 aa, Artificial Sequence
  Cyclic GFR-binding peptide
KMSPISILYKDENKNVVLKYHYNMT

SEQ ID NO: 88133 - protein, 36 aa, Artificial Sequence; identical to SEQ ID NO: 34820
  Cyclic GFR-binding peptide
  MOD_RES (5)..(6): Xaa is C or S

SEQ ID NO: 88134 - protein, 27 aa, Artificial Sequence
  Cyclic GFR-binding peptide
PTKMEPISMLYLNDKQQIIKFKYEGMV

SEQ ID NO: 88135 - protein, 30 aa, Artificial Sequence
  Cyclic GFR-binding peptide
PTKMEPISMLYLNDKQQIIKFKYEGMVVDR

SEQ ID NO: 88136 - protein, 33 aa, Artificial Sequence
  Cyclic GFR-binding peptide
  MOD_RES (4)..(5): Xaa is C or S
AGPXXTPTKMSPISMLYKNDKQQIILKYHYGMV

SEQ ID NO: 88137 - protein, 29 aa, Artificial Sequence
  Cyclic GFR-binding peptide
TRLEPISILYLDSANNVVKFKYEDMVVES

SEQ ID NO: 88138 - protein, 30 aa, Artificial Sequence
  Cyclic GFR-binding peptide
  MOD_RES (27)..(29): Xaa is C or S
SPISILYKDENKNVVLKYHYNMTVESXAXR

SEQ ID NO: 88139 - protein, 21 aa, Artificial Sequence
  Cyclic GFR-binding peptide
EPISMLYLDNGRVLLKFKYEM

SEQ ID NO: 88140 - protein, 36 aa, Artificial Sequence
  Cyclic GFR-binding peptide
  MOD_RES (6)..(7): Xaa is C or S
GSAGPXXTPTKMSPISMLYKNDKQQIILKYHYGMVV

SEQ ID NO: 88141 - protein, 34 aa, Artificial Sequence; identical to SEQ ID NO: 34828
  Cyclic GFR-binding peptide
  MOD_RES (2)..(3): Xaa is C or S

SEQ ID NO: 88142 - protein, 31 aa, Artificial Sequence
  Cyclic GFR-binding peptide
  MOD_RES (28)..(30): Xaa is C or S
LSATSILYYDKGVVTYLRKHRGMAVSEXGXR

SEQ ID NO: 88143 - protein, 32 aa, Artificial Sequence
  Cyclic GFR-binding peptide
  MOD_RES (30)..(32): Xaa is C or S
PVKTSPISMLYKDNGRVLLLKYHYMIVEEXGX

SEQ ID NO: 88144 - protein, 31 aa, Artificial Sequence; identical to SEQ ID NO: 34832
  Cyclic GFR-binding peptide

SEQ ID NO: 88145 - protein, 29 aa, Artificial Sequence
  Cyclic GFR-binding peptide
  MOD_RES (29)..(29): Xaa is C or S
KMSPISILYKDENKNVVLKYHYNMTVESX

SEQ ID NO: 88146 - protein, 33 aa, Artificial Sequence
  Cyclic GFR-binding peptide
  MOD_RES (31)..(33): Xaa is C or S
PEKMSPINILYFDENKNVVYGKIPNMTVESXAX

SEQ ID NO: 88147 - protein, 28 aa, Artificial Sequence
  Cyclic GFR-binding peptide
  MOD_RES (26)..(28): Xaa is C or S
SPISMLYKDNGRVLLLKYHYMIVEEXGX

SEQ ID NO: 88148 - protein, 29 aa, Artificial Sequence
  Cyclic GFR-binding peptide
PTKMSATSMLYYNDKQQIILRKHRGMVVD

SEQ ID NO: 88149 - protein, 34 aa, Artificial Sequence
  Cyclic GFR-binding peptide
  MOD_RES (6)..(7): Xaa is C or S
RVPSTXXAPVKTSPISMLYKDNGRVLLLKYHYMI

SEQ ID NO: 88150 - protein, 23 aa, Artificial Sequence
  Cyclic GFR-binding peptide
DLSPINILYFVGRTPKVYGKIPM

SEQ ID NO: 88151 - protein, 22 aa, Artificial Sequence
  Cyclic GFR-binding peptide
LSATSILYYDSANNVVLRKHRD

SEQ ID NO: 88152 - protein, 39 aa, Artificial Sequence; identical to SEQ ID NO: 34837
  Cyclic GFR-binding peptide
  MOD_RES (6)..(7)..(38): Xaa is C or S

SEQ ID NO: 88153 - protein, 38 aa, Artificial Sequence; identical to SEQ ID NO: 34838
  Cyclic GFR-binding peptide
  MOD_RES (5)..(6)..(38): Xaa is C or S

SEQ ID NO: 88154 - protein, 36 aa, Artificial Sequence
  Cyclic GFR-binding peptide
  MOD_RES (6)..(7): Xaa is C or S
ASASPXXVPQDLSPINILYFVGRTPKVYGKIPMVVK

SEQ ID NO: 88155 - protein, 31 aa, Artificial Sequence
  Cyclic GFR-binding peptide
  MOD_RES (28)..(30): Xaa is C or S
LEPISILYLDSANNVVKFKYEDMVVESXGXR

SEQ ID NO: 88156 - protein, 30 aa, Artificial Sequence; identical to SEQ ID NO: 886
  Cyclic GFR-binding peptide

SEQ ID NO: 88157 - protein, 38 aa, Artificial Sequence; identical to SEQ ID NO: 34840
  Cyclic GFR-binding peptide
  MOD_RES (2)..(3)..(35)..(37): Xaa is C or S

SEQ ID NO: 88158 - protein, 32 aa, Artificial Sequence
  Cyclic GFR-binding peptide
  MOD_RES (6)..(7): Xaa is C or S
GSAGPXXTPTKMSPISMLYKNDKQQIILKYHY

SEQ ID NO: 88159 - protein, 31 aa, Artificial Sequence
  Cyclic GFR-binding peptide
  MOD_RES (29)..(31): Xaa is C or S
KMSPISMLYKNDKQQIILKYHYGMVVDRXGX

SEQ ID NO: 88160 - protein, 20 aa, Artificial Sequence
  Cyclic GFR-binding peptide
EPISMLYLNDKQQIIKFKYE

SEQ ID NO: 88161 - protein, 38 aa, Artificial Sequence; identical to SEQ ID NO: 34845
  Cyclic GFR-binding peptide
  MOD_RES (4)..(5)..(37): Xaa is C or S

SEQ ID NO: 88162 - protein, 34 aa, Artificial Sequence
  Cyclic GFR-binding peptide
  MOD_RES (4)..(5): Xaa is C or S
AGPXXTPTKMSATSMLYYNDKQQIILRKHRGMVV

SEQ ID NO: 88163 - protein, 29 aa, Artificial Sequence
  Cyclic GFR-binding peptide
PEKMEPISILYLDENKNVVKFKYENMTVE

SEQ ID NO: 88164 - protein, 35 aa, Artificial Sequence; identical to SEQ ID NO: 34846
  Cyclic GFR-binding peptide
  MOD_RES (1)..(2)..(34): Xaa is C or S

SEQ ID NO: 88165 - protein, 28 aa, Artificial Sequence
  Cyclic GFR-binding peptide
APVKTSPISMLYKDNGRVLLLKYHYMIV

SEQ ID NO: 88166 - protein, 32 aa, Artificial Sequence; identical to SEQ ID NO: 34847
  Cyclic GFR-binding peptide
  MOD_RES (1)..(1): Xaa is C or S

SEQ ID NO: 88167 - protein, 27 aa, Artificial Sequence
  Cyclic GFR-binding peptide
LSPISILYKDSANNVVLKYHYDMVVES

SEQ ID NO: 88168 - protein, 30 aa, Artificial Sequence
  Cyclic GFR-binding peptide
  MOD_RES (3)..(4): Xaa is C or S
EPXXVPEKMEPISILYLDENKNVVKFKYEN

SEQ ID NO: 88169 - protein, 32 aa, Artificial Sequence
  Cyclic GFR-binding peptide
  MOD_RES (29)..(31): Xaa is C or S
KMEPISMLYLNDKQQIIKFKYEGMVVDRXGXS

SEQ ID NO: 88170 - protein, 34 aa, Artificial Sequence; identical to SEQ ID NO: 34850
  Cyclic GFR-binding peptide
  MOD_RES (2)..(3)..(34): Xaa is C or S

SEQ ID NO: 88171 - protein, 38 aa, Artificial Sequence; identical to SEQ ID NO: 34851
  Cyclic GFR-binding peptide
  MOD_RES (6)..(7): Xaa is C or S

SEQ ID NO: 88172 - protein, 21 aa, Artificial Sequence
  Cyclic GFR-binding peptide
SPINILYFVGRTPKVYGKIPM

SEQ ID NO: 88173 - protein, 33 aa, Artificial Sequence; identical to SEQ ID NO: 34852
  Cyclic GFR-binding peptide
  MOD_RES (1)..(33): Xaa is C or S

SEQ ID NO: 88174 - protein, 24 aa, Artificial Sequence
  Cyclic GFR-binding peptide
PTRLSPISILYKDSANNVVLKYHY

SEQ ID NO: 88175 - protein, 40 aa, Artificial Sequence; identical to SEQ ID NO: 34854
  Cyclic GFR-binding peptide
  MOD_RES (6)..(7)..(39): Xaa is C or S

SEQ ID NO: 88176 - protein, 31 aa, Artificial Sequence; identical to SEQ ID NO: 34855
  Cyclic GFR-binding peptide

SEQ ID NO: 88177 - protein, 36 aa, Artificial Sequence
  Cyclic GFR-binding peptide
  MOD_RES (4)..(5): Xaa is C or S
PEPXXVPEKMNAISILYFDENKNVVLKKYRNMTVES

SEQ ID NO: 88178 - protein, 26 aa, Artificial Sequence
  Cyclic GFR-binding peptide
SATSMLYYNDKQQIILRKHRGMVVDR

SEQ ID NO: 88179 - protein, 25 aa, Artificial Sequence
  Cyclic GFR-binding peptide
KMSATSILYYDENKNVVLRKHRNMT

SEQ ID NO: 88180 - protein, 31 aa, Artificial Sequence
  Cyclic GFR-binding peptide
  MOD_RES (28)..(30): Xaa is C or S
MSPINILYFDENKNVVYGKIPNMTVESXAXR

SEQ ID NO: 88181 - protein, 39 aa, Artificial Sequence; identical to SEQ ID NO: 34856
  Cyclic GFR-binding peptide
  MOD_RES (6)..(7)..(39): Xaa is C or S

SEQ ID NO: 88182 - protein, 30 aa, Artificial Sequence
  Cyclic GFR-binding peptide
  MOD_RES (28)..(30): Xaa is C or S
ALSPINILYFVGRKPKVYGKIPMIVRSXKX

SEQ ID NO: 88183 - protein, 36 aa, Artificial Sequence; identical to SEQ ID NO: 34857
  Cyclic GFR-binding peptide
  MOD_RES (1)..(33)..(35): Xaa is C or S

SEQ ID NO: 88184 - protein, 26 aa, Artificial Sequence
  Cyclic GFR-binding peptide
MEPISMLYLNDKQQIIKFKYEGMVVD

SEQ ID NO: 88185 - protein, 39 aa, Artificial Sequence; identical to SEQ ID NO: 34858
  Cyclic GFR-binding peptide
  MOD_RES (4)..(5)..(37)..(39): Xaa is C or S

SEQ ID NO: 88186 - protein, 27 aa, Artificial Sequence
  Cyclic GFR-binding peptide
  MOD_RES (27)..(27): Xaa is C or S
EPISMLYLNDKQQIIKFKYEGMVVDRX

SEQ ID NO: 88187 - protein, 31 aa, Artificial Sequence
  Cyclic GFR-binding peptide
  MOD_RES (29)..(31): Xaa is C or S
RLSPISILYKDSANNVVLKYHYDMVVESXGX

SEQ ID NO: 88188 - protein, 24 aa, Artificial Sequence
  Cyclic GFR-binding peptide
EPISMLYLNDKQQIIKFKYEGMVV

SEQ ID NO: 88189 - protein, 40 aa, Artificial Sequence; identical to SEQ ID NO: 34861
  Cyclic GFR-binding peptide
  MOD_RES (5)..(6)..(37)..(39): Xaa is C or S

SEQ ID NO: 88190 - protein, 23 aa, Artificial Sequence
  Cyclic GFR-binding peptide
KMEPISILYLDENKNVVKFKYEN

SEQ ID NO: 88191 - protein, 28 aa, Artificial Sequence
  Cyclic GFR-binding peptide
RLSPISILYKDSANNVVLKYHYDMVVES

SEQ ID NO: 88192 - protein, 37 aa, Artificial Sequence; identical to SEQ ID NO: 34863
  Cyclic GFR-binding peptide
  MOD_RES (3)..(4)..(35)..(37): Xaa is C or S

SEQ ID NO: 88193 - protein, 36 aa, Artificial Sequence; identical to SEQ ID NO: 34864
  Cyclic GFR-binding peptide
  MOD_RES (5)..(6): Xaa is C or S

SEQ ID NO: 88194 - protein, 28 aa, Artificial Sequence
  Cyclic GFR-binding peptide
  MOD_RES (26)..(28): Xaa is C or S
SPINILYFVGRKPKVYGKIPMIVRSXKX

SEQ ID NO: 88195 - protein, 24 aa, Artificial Sequence
  Cyclic GFR-binding peptide
SATSILYYDAANNVVLRKHRDMVV

SEQ ID NO: 88196 - protein, 23 aa, Artificial Sequence
  Cyclic GFR-binding peptide
MSATSMLYYNDKQQIILRKHRGM

SEQ ID NO: 88197 - protein, 36 aa, Artificial Sequence; identical to SEQ ID NO: 34867
  Cyclic GFR-binding peptide
  MOD_RES (4)..(5): Xaa is C or S

SEQ ID NO: 88198 - protein, 26 aa, Artificial Sequence
  Cyclic GFR-binding peptide
KMSATSILYYDENKNVVLRKHRNMTV

SEQ ID NO: 88199 - protein, 34 aa, Artificial Sequence; identical to SEQ ID NO: 34869
  Cyclic GFR-binding peptide
  MOD_RES (32)..(34): Xaa is C or S

SEQ ID NO: 88200 - protein, 27 aa, Artificial Sequence
  Cyclic GFR-binding peptide
PEKMSPINILYFDENKNVVYGKIPNMT

SEQ ID NO: 88201 - protein, 27 aa, Artificial Sequence
  Cyclic GFR-binding peptide
VSQDLSPINILYFIGKTPKIYGKIPMI

SEQ ID NO: 88202 - protein, 29 aa, Artificial Sequence
  Cyclic GFR-binding peptide
  MOD_RES (1)..(1): Xaa is C or S
XVPTRLSATSILYYDSANNVVLRKHRDMV

SEQ ID NO: 88203 - protein, 23 aa, Artificial Sequence
  Cyclic GFR-binding peptide
KTSATSMLYYDNGRVLLLRKHRM

SEQ ID NO: 88204 - protein, 36 aa, Artificial Sequence; identical to SEQ ID NO: 34871
  Cyclic GFR-binding peptide
  MOD_RES (4)..(5)..(36): Xaa is C or S

SEQ ID NO: 88205 - protein, 30 aa, Artificial Sequence
  Cyclic GFR-binding peptide
  MOD_RES (28)..(30): Xaa is C or S
KTSATSMLYYDNGRVLLLRKHRMIVEEXGX

SEQ ID NO: 88206 - protein, 28 aa, Artificial Sequence
  Cyclic GFR-binding peptide
KMSPISILYKDENKNVVLKYHYNMTVES

SEQ ID NO: 88207 - protein, 36 aa, Artificial Sequence; identical to SEQ ID NO: 34873
  Cyclic GFR-binding peptide
  MOD_RES (1)..(2)..(34)..(36): Xaa is C or S

SEQ ID NO: 88208 - protein, 22 aa, Artificial Sequence
  Cyclic GFR-binding peptide
KMEPISMLYLNDKQQIIKFKYE

SEQ ID NO: 88209 - protein, 33 aa, Artificial Sequence
  Cyclic GFR-binding peptide
  MOD_RES (3)..(4): Xaa is C or S
APXXVPQALSPINILYFVGRKPKVYGKIPMIVR

SEQ ID NO: 88210 - protein, 37 aa, Artificial Sequence; identical to SEQ ID NO: 34874
  Cyclic GFR-binding peptide
  MOD_RES (6)..(7): Xaa is C or S

SEQ ID NO: 88211 - protein, 34 aa, Artificial Sequence; identical to SEQ ID NO: 34875
  Cyclic GFR-binding peptide
  MOD_RES (32)..(34): Xaa is C or S

SEQ ID NO: 88212 - protein, 27 aa, Artificial Sequence
  Cyclic GFR-binding peptide
ALSPINILYFVGRKPKVYGKIPMIVRS

SEQ ID NO: 88213 - protein, 30 aa, Artificial Sequence; identical to SEQ ID NO: 34877
  Cyclic GFR-binding peptide

SEQ ID NO: 88214 - protein, 32 aa, Artificial Sequence
  Cyclic GFR-binding peptide
  MOD_RES (29)..(31): Xaa is C or S
VKTSATSMLYYDNGRVLLLRKHRMIVEEXGXL

SEQ ID NO: 88215 - protein, 20 aa, Artificial Sequence
  Cyclic GFR-binding peptide
SPISILYKDSANNVVLKYHY

SEQ ID NO: 88216 - protein, 30 aa, Artificial Sequence
  Cyclic GFR-binding peptide
  MOD_RES (28)..(30): Xaa is C or S
LSPISILYKDSANNVVLKYHYDMVVESXGX

SEQ ID NO: 88217 - protein, 31 aa, Artificial Sequence
  Cyclic GFR-binding peptide
  MOD_RES (31)..(31): Xaa is C or S
PTRLSPISILYKDSANNVVLKYHYDMVVESX

SEQ ID NO: 88218 - protein, 35 aa, Artificial Sequence; identical to SEQ ID NO: 34879
  Cyclic GFR-binding peptide
  MOD_RES (2)..(3)..(34): Xaa is C or S

SEQ ID NO: 88219 - protein, 26 aa, Artificial Sequence
  Cyclic GFR-binding peptide
  MOD_RES (26)..(26): Xaa is C or S
SPINILYFIGKTPKIYGKIPMIVKSX

SEQ ID NO: 88220 - protein, 31 aa, Artificial Sequence; identical to SEQ ID NO: 34881
  Cyclic GFR-binding peptide
  MOD_RES (1)..(1): Xaa is C or S

SEQ ID NO: 88221 - protein, 33 aa, Artificial Sequence; identical to SEQ ID NO: 34882
  Cyclic GFR-binding peptide
  MOD_RES (32)..(32): Xaa is C or S

SEQ ID NO: 88222 - protein, 34 aa, Artificial Sequence; identical to SEQ ID NO: 34883
  Cyclic GFR-binding peptide
  MOD_RES (1)..(2)..(34): Xaa is C or S

SEQ ID NO: 88223 - protein, 38 aa, Artificial Sequence; identical to SEQ ID NO: 34885
  Cyclic GFR-binding peptide
  MOD_RES (5)..(6)..(38): Xaa is C or S

SEQ ID NO: 88224 - protein, 35 aa, Artificial Sequence; identical to SEQ ID NO: 34886
  Cyclic GFR-binding peptide
  MOD_RES (32)..(34): Xaa is C or S

SEQ ID NO: 88225 - protein, 28 aa, Artificial Sequence
  Cyclic GFR-binding peptide
  MOD_RES (1)..(2): Xaa is C or S
XXVPTRLSATSILYYDSANNVVLRKHRD

SEQ ID NO: 88226 - protein, 31 aa, Artificial Sequence
  Cyclic GFR-binding peptide
  MOD_RES (1)..(2): Xaa is C or S
XXTPTKMSPISMLYKNDKQQIILKYHYGMVV

SEQ ID NO: 88227 - protein, 29 aa, Artificial Sequence
  Cyclic GFR-binding peptide
  MOD_RES (1)..(2): Xaa is C or S
XXTPTKMEPISMLYLNDKQQIIKFKYEGM

SEQ ID NO: 88228 - protein, 41 aa, Artificial Sequence; identical to SEQ ID NO: 34889
  Cyclic GFR-binding peptide
  MOD_RES (5)..(6)..(38)..(40): Xaa is C or S

SEQ ID NO: 88229 - protein, 35 aa, Artificial Sequence; identical to SEQ ID NO: 34890
  Cyclic GFR-binding peptide
  MOD_RES (32)..(34): Xaa is C or S

SEQ ID NO: 88230 - protein, 25 aa, Artificial Sequence
  Cyclic GFR-binding peptide
EPISMLYLNDKQQIIKFKYEGMVVD

SEQ ID NO: 88231 - protein, 21 aa, Artificial Sequence
  Cyclic GFR-binding peptide
NAISILYFDENKNVVLKKYRN

SEQ ID NO: 88232 - protein, 39 aa, Artificial Sequence; identical to SEQ ID NO: 34892
  Cyclic GFR-binding peptide
  MOD_RES (5)..(6)..(37)..(39): Xaa is C or S

SEQ ID NO: 88233 - protein, 31 aa, Artificial Sequence; identical to SEQ ID NO: 34893
  Cyclic GFR-binding peptide
  MOD_RES (1)..(1): Xaa is C or S

SEQ ID NO: 88234 - protein, 38 aa, Artificial Sequence; identical to SEQ ID NO: 34895
  Cyclic GFR-binding peptide
  MOD_RES (3)..(4)..(36)..(38): Xaa is C or S

SEQ ID NO: 88235 - protein, 30 aa, Artificial Sequence
  Cyclic GFR-binding peptide
  MOD_RES (2)..(3): Xaa is C or S
PXXVPQDLSPINILYFVGRTPKVYGKIPMV

SEQ ID NO: 88236 - protein, 26 aa, Artificial Sequence
  Cyclic GFR-binding peptide
ALSPINILYFVGRKPKVYGKIPMIVR

SEQ ID NO: 88237 - protein, 31 aa, Artificial Sequence
  Cyclic GFR-binding peptide
  MOD_RES (4)..(5): Xaa is C or S
PSTXXAPVKTEPISMLYLDNGRVLLKFKYEM

SEQ ID NO: 88238 - protein, 28 aa, Artificial Sequence
  Cyclic GFR-binding peptide
  MOD_RES (1)..(1): Xaa is C or S
XTPTKMEPISMLYLNDKQQIIKFKYEGM

SEQ ID NO: 88239 - protein, 29 aa, Artificial Sequence
  Cyclic GFR-binding peptide
  MOD_RES (26)..(28): Xaa is C or S
SPINILYFVGRKPKVYGKIPMIVRSXKXS

SEQ ID NO: 88240 - protein, 35 aa, Artificial Sequence; identical to SEQ ID NO: 34897
  Cyclic GFR-binding peptide
  MOD_RES (2)..(3)..(35): Xaa is C or S

SEQ ID NO: 88241 - protein, 37 aa, Artificial Sequence; identical to SEQ ID NO: 34900
  Cyclic GFR-binding peptide
  MOD_RES (2)..(3)..(34)..(36): Xaa is C or S

SEQ ID NO: 88242 - protein, 29 aa, Artificial Sequence
  Cyclic GFR-binding peptide
  MOD_RES (28)..(28): Xaa is C or S
LEPISILYLDSANNVVKFKYEDMVVESXG

SEQ ID NO: 88243 - protein, 27 aa, Artificial Sequence
  Cyclic GFR-binding peptide
  MOD_RES (27)..(27): Xaa is C or S
EPISILYLDENKNVVKFKYENMTVESX

SEQ ID NO: 88244 - protein, 34 aa, Artificial Sequence; identical to SEQ ID NO: 34901
  Cyclic GFR-binding peptide
  MOD_RES (31)..(33): Xaa is C or S

SEQ ID NO: 88245 - protein, 30 aa, Artificial Sequence
  Cyclic GFR-binding peptide
  MOD_RES (2)..(3): Xaa is C or S
PXXVSQDLSPINILYFIGKTPKIYGKIPMI

SEQ ID NO: 88246 - protein, 24 aa, Artificial Sequence
  Cyclic GFR-binding peptide
SQDLSPINILYFIGKTPKIYGKIP

SEQ ID NO: 88247 - protein, 39 aa, Artificial Sequence; identical to SEQ ID NO: 34902
  Cyclic GFR-binding peptide
  MOD_RES (4)..(5)..(37)..(39): Xaa is C or S

SEQ ID NO: 88248 - protein, 32 aa, Artificial Sequence
  Cyclic GFR-binding peptide
  MOD_RES (3)..(4): Xaa is C or S
PTXXVPTRLSPISILYKDSANNVVLKYHYDMV

SEQ ID NO: 88249 - protein, 27 aa, Artificial Sequence
  Cyclic GFR-binding peptide
TKMSATSMLYYNDKQQIILRKHRGMVV

SEQ ID NO: 88250 - protein, 38 aa, Artificial Sequence; identical to SEQ ID NO: 34903
  Cyclic GFR-binding peptide
  MOD_RES (3)..(4)..(36)..(38): Xaa is C or S

SEQ ID NO: 88251 - protein, 31 aa, Artificial Sequence
  Cyclic GFR-binding peptide
  MOD_RES (2)..(3): Xaa is C or S
PXXVPEKMSPISILYKDENKNVVLKYHYNMT

SEQ ID NO: 88252 - protein, 35 aa, Artificial Sequence
  Cyclic GFR-binding peptide
  MOD_RES (5)..(6): Xaa is C or S
VPSTXXAPVKTEPISMLYLDNGRVLLKFKYEMIVE

SEQ ID NO: 88253 - protein, 26 aa, Artificial Sequence
  Cyclic GFR-binding peptide
MNAISILYFDENKNVVLKKYRNMTVE

SEQ ID NO: 88254 - protein, 37 aa, Artificial Sequence; identical to SEQ ID NO: 34905
  Cyclic GFR-binding peptide
  MOD_RES (6)..(7): Xaa is C or S

SEQ ID NO: 88255 - protein, 31 aa, Artificial Sequence
  Cyclic GFR-binding peptide
  MOD_RES (3)..(4): Xaa is C or S
GPXXTPTKMSATSMLYYNDKQQIILRKHRGM

SEQ ID NO: 88256 - protein, 32 aa, Artificial Sequence
  Cyclic GFR-binding peptide
  MOD_RES (30)..(32): Xaa is C or S
ARLSATSILYYDAANNVVLRKHRDMVVEAXGX

SEQ ID NO: 88257 - protein, 25 aa, Artificial Sequence
  Cyclic GFR-binding peptide
KMNAISILYFDENKNVVLKKYRNMT

SEQ ID NO: 88258 - protein, 31 aa, Artificial Sequence
  Cyclic GFR-binding peptide
  MOD_RES (31)..(31): Xaa is C or S
PTKMSATSMLYYNDKQQIILRKHRGMVVDRX

SEQ ID NO: 88259 - protein, 33 aa, Artificial Sequence; identical to SEQ ID NO: 34906
  Cyclic GFR-binding peptide
  MOD_RES (1)..(33): Xaa is C or S

SEQ ID NO: 88260 - protein, 29 aa, Artificial Sequence
  Cyclic GFR-binding peptide
  MOD_RES (29)..(29): Xaa is C or S
KMSPISMLYKNDKQQIILKYHYGMVVDRX

SEQ ID NO: 88261 - protein, 20 aa, Artificial Sequence
  Cyclic GFR-binding peptide
SPISMLYKDNGRVLLLKYHY

SEQ ID NO: 88262 - protein, 32 aa, Artificial Sequence; identical to SEQ ID NO: 34907
  Cyclic GFR-binding peptide
  MOD_RES (32)..(32): Xaa is C or S

SEQ ID NO: 88263 - protein, 35 aa, Artificial Sequence; identical to SEQ ID NO: 34908
  Cyclic GFR-binding peptide
  MOD_RES (4)..(5): Xaa is C or S

SEQ ID NO: 88264 - protein, 28 aa, Artificial Sequence
  Cyclic GFR-binding peptide
VPEKMEPISILYLDENKNVVKFKYENMT

SEQ ID NO: 88265 - protein, 29 aa, Artificial Sequence
  Cyclic GFR-binding peptide
  MOD_RES (29)..(29): Xaa is C or S
RLSATSILYYDAANNVVLRKHRDMVVEAX

SEQ ID NO: 88266 - protein, 41 aa, Artificial Sequence; identical to SEQ ID NO: 34912
  Cyclic GFR-binding peptide
  MOD_RES (5)..(6)..(38)..(40): Xaa is C or S

SEQ ID NO: 88267 - protein, 30 aa, Artificial Sequence
  Cyclic GFR-binding peptide
  MOD_RES (28)..(30): Xaa is C or S
LEPISILYLDSANNVVKFKYEDMVVESXGX

SEQ ID NO: 88268 - protein, 31 aa, Artificial Sequence
  Cyclic GFR-binding peptide
  MOD_RES (29)..(31): Xaa is C or S
QDLSPINILYFIGKTPKIYGKIPMIVKSXKX

SEQ ID NO: 88269 - protein, 32 aa, Artificial Sequence
  Cyclic GFR-binding peptide
  MOD_RES (3)..(4): Xaa is C or S
SPXXVPQDLSPINILYFVGRTPKVYGKIPMVV

SEQ ID NO: 88270 - protein, 34 aa, Artificial Sequence
  Cyclic GFR-binding peptide
  MOD_RES (31)..(33): Xaa is C or S
PEKMSATSILYYDENKNVVLRKHRNMTVESXAXR

SEQ ID NO: 88271 - protein, 38 aa, Artificial Sequence; identical to SEQ ID NO: 34914
  Cyclic GFR-binding peptide
  MOD_RES (6)..(7): Xaa is C or S

SEQ ID NO: 88272 - protein, 27 aa, Artificial Sequence
  Cyclic GFR-binding peptide
VPQDLSPINILYFVGRTPKVYGKIPMV

SEQ ID NO: 88273 - protein, 22 aa, Artificial Sequence
  Cyclic GFR-binding peptide
MSPINILYFDENKNVVYGKIPN

SEQ ID NO: 88274 - protein, 29 aa, Artificial Sequence
  Cyclic GFR-binding peptide
  MOD_RES (1)..(1): Xaa is C or S
XTPTKMEPISMLYLNDKQQIIKFKYEGMV

SEQ ID NO: 88275 - protein, 26 aa, Artificial Sequence
  Cyclic GFR-binding peptide
  MOD_RES (1)..(1): Xaa is C or S
XVSQDLSPINILYFIGKTPKIYGKIP

SEQ ID NO: 88276 - protein, 24 aa, Artificial Sequence
  Cyclic GFR-binding peptide
MSPISILYKDENKNVVLKYHYNMT

SEQ ID NO: 88277 - protein, 25 aa, Artificial Sequence
  Cyclic GFR-binding peptide
SATSILYYDKGVVTYLRKHRGMAVS

SEQ ID NO: 88278 - protein, 28 aa, Artificial Sequence
  Cyclic GFR-binding peptide
  MOD_RES (2)..(3): Xaa is C or S
TXXAPVKTSATSMLYYDNGRVLLLRKHR

SEQ ID NO: 88279 - protein, 32 aa, Artificial Sequence
  Cyclic GFR-binding peptide
  MOD_RES (3)..(4): Xaa is C or S
KAXXVPTKLSATSILYYDKGVVTYLRKHRGMA

SEQ ID NO: 88280 - protein, 39 aa, Artificial Sequence; identical to SEQ ID NO: 34921
  Cyclic GFR-binding peptide
  MOD_RES (6)..(7)..(39): Xaa is C or S

SEQ ID NO: 88281 - protein, 22 aa, Artificial Sequence
  Cyclic GFR-binding peptide
SPISILYKDSANNVVLKYHYDM

SEQ ID NO: 88282 - protein, 35 aa, Artificial Sequence
  Cyclic GFR-binding peptide
  MOD_RES (6)..(7): Xaa is C or S
STPPTXXVPTRLEPISILYLDSANNVVKFKYEDMV

SEQ ID NO: 88283 - protein, 39 aa, Artificial Sequence; identical to SEQ ID NO: 34923
  Cyclic GFR-binding peptide
  MOD_RES (4)..(5)..(36)..(38): Xaa is C or S

SEQ ID NO: 88284 - protein, 24 aa, Artificial Sequence
  Cyclic GFR-binding peptide
TSPISMLYKDNGRVLLLKYHYMIV

SEQ ID NO: 88285 - protein, 40 aa, Artificial Sequence; identical to SEQ ID NO: 34924
  Cyclic GFR-binding peptide
  MOD_RES (4)..(5)..(37)..(39): Xaa is C or S

SEQ ID NO: 88286 - protein, 26 aa, Artificial Sequence
  Cyclic GFR-binding peptide
TRLEPISILYLDSANNVVKFKYEDMV

SEQ ID NO: 88287 - protein, 31 aa, Artificial Sequence
  Cyclic GFR-binding peptide
  MOD_RES (4)..(5): Xaa is C or S
AGPXXTPTKMSPISMLYKNDKQQIILKYHYG

SEQ ID NO: 88288 - protein, 32 aa, Artificial Sequence; identical to SEQ ID NO: 34925
  Cyclic GFR-binding peptide
  MOD_RES (32)..(32): Xaa is C or S

SEQ ID NO: 88289 - protein, 25 aa, Artificial Sequence
  Cyclic GFR-binding peptide
TSPISMLYKDNGRVLLLKYHYMIVE

SEQ ID NO: 88290 - protein, 29 aa, Artificial Sequence
  Cyclic GFR-binding peptide
  MOD_RES (1)..(2): Xaa is C or S
XXAPVKTSATSMLYYDNGRVLLLRKHRMI

SEQ ID NO: 88291 - protein, 24 aa, Artificial Sequence
  Cyclic GFR-binding peptide
MSATSMLYYNDKQQIILRKHRGMV

SEQ ID NO: 88292 - protein, 20 aa, Artificial Sequence
  Cyclic GFR-binding peptide
EPISILYLDSANNVVKFKYE

SEQ ID NO: 88293 - protein, 34 aa, Artificial Sequence; identical to SEQ ID NO: 34926
  Cyclic GFR-binding peptide
  MOD_RES (1)..(32)..(34): Xaa is C or S

SEQ ID NO: 88294 - protein, 25 aa, Artificial Sequence
  Cyclic GFR-binding peptide
MEPISILYLDENKNVVKFKYENMTV

SEQ ID NO: 88295 - protein, 39 aa, Artificial Sequence; identical to SEQ ID NO: 34927
  Cyclic GFR-binding peptide
  MOD_RES (6)..(7)..(38): Xaa is C or S

SEQ ID NO: 88296 - protein, 33 aa, Artificial Sequence
  Cyclic GFR-binding peptide
  MOD_RES (3)..(4): Xaa is C or S
GPXXTPTKMEPISMLYLNDKQQIIKFKYEGMVV

SEQ ID NO: 88297 - protein, 31 aa, Artificial Sequence
  Cyclic GFR-binding peptide
  MOD_RES (1)..(2): Xaa is C or S
XXVPARLSATSILYYDAANNVVLRKHRDMVV

SEQ ID NO: 88298 - protein, 34 aa, Artificial Sequence
  Cyclic GFR-binding peptide
  MOD_RES (6)..(7): Xaa is C or S
GIPEPXXVPEKMEPISILYLDENKNVVKFKYENM

SEQ ID NO: 88299 - protein, 37 aa, Artificial Sequence; identical to SEQ ID NO: 34928
  Cyclic GFR-binding peptide
  MOD_RES (1)..(2)..(34)..(36): Xaa is C or S

SEQ ID NO: 88300 - protein, 38 aa, Artificial Sequence; identical to SEQ ID NO: 34930
  Cyclic GFR-binding peptide
  MOD_RES (2)..(3)..(35)..(37): Xaa is C or S

SEQ ID NO: 88301 - protein, 29 aa, Artificial Sequence
  Cyclic GFR-binding peptide
  MOD_RES (29)..(29): Xaa is C or S
VKTSATSMLYYDNGRVLLLRKHRMIVEEX

SEQ ID NO: 88302 - protein, 33 aa, Artificial Sequence; identical to SEQ ID NO: 34932
  Cyclic GFR-binding peptide
  MOD_RES (32)..(32): Xaa is C or S

SEQ ID NO: 88303 - protein, 26 aa, Artificial Sequence
  Cyclic GFR-binding peptide
ARLSATSILYYDAANNVVLRKHRDMV

SEQ ID NO: 88304 - protein, 37 aa, Artificial Sequence; identical to SEQ ID NO: 34933
  Cyclic GFR-binding peptide
  MOD_RES (5)..(6)..(37): Xaa is C or S

SEQ ID NO: 88305 - protein, 25 aa, Artificial Sequence
  Cyclic GFR-binding peptide
VPQDLSPINILYFVGRTPKVYGKIP

SEQ ID NO: 88306 - protein, 36 aa, Artificial Sequence
  Cyclic GFR-binding peptide
  MOD_RES (6)..(7): Xaa is C or S
ASAAPXXVPQALSPINILYFVGRKPKVYGKIPMIVR

SEQ ID NO: 88307 - protein, 33 aa, Artificial Sequence
  Cyclic GFR-binding peptide
  MOD_RES (6)..(7): Xaa is C or S
GIPEPXXVPEKMSPISILYKDENKNVVLKYHYN

SEQ ID NO: 88308 - protein, 26 aa, Artificial Sequence
  Cyclic GFR-binding peptide
TSPISMLYKDNGRVLLLKYHYMIVEE

SEQ ID NO: 88309 - protein, 25 aa, Artificial Sequence
  Cyclic GFR-binding peptide
APVKTSATSMLYYDNGRVLLLRKHR

SEQ ID NO: 88310 - protein, 28 aa, Artificial Sequence
  Cyclic GFR-binding peptide
  MOD_RES (27)..(27): Xaa is C or S
SATSILYYDKGVVTYLRKHRGMAVSEXG

SEQ ID NO: 88311 - protein, 30 aa, Artificial Sequence
  Cyclic GFR-binding peptide
  MOD_RES (3)..(4): Xaa is C or S
PTXXVPTRLSPISILYKDSANNVVLKYHYD

SEQ ID NO: 88312 - protein, 32 aa, Artificial Sequence
  Cyclic GFR-binding peptide
  MOD_RES (6)..(7): Xaa is C or S
ASAAPXXVPQALSPINILYFVGRKPKVYGKIP

SEQ ID NO: 88313 - protein, 32 aa, Artificial Sequence
  Cyclic GFR-binding peptide
  MOD_RES (6)..(7): Xaa is C or S
GSAGPXXTPTKMSATSMLYYNDKQQIILRKHR

SEQ ID NO: 88314 - protein, 32 aa, Artificial Sequence; identical to SEQ ID NO: 34938
  Cyclic GFR-binding peptide
  MOD_RES (1)..(2): Xaa is C or S

SEQ ID NO: 88315 - protein, 31 aa, Artificial Sequence; identical to SEQ ID NO: 34939
  Cyclic GFR-binding peptide
  MOD_RES (1)..(1): Xaa is C or S

SEQ ID NO: 88316 - protein, 37 aa, Artificial Sequence; identical to SEQ ID NO: 34940
  Cyclic GFR-binding peptide
  MOD_RES (3)..(4)..(36): Xaa is C or S

SEQ ID NO: 88317 - protein, 27 aa, Artificial Sequence
  Cyclic GFR-binding peptide
MSPISMLYKNDKQQIILKYHYGMVVDR

SEQ ID NO: 88318 - protein, 38 aa, Artificial Sequence; identical to SEQ ID NO: 34945
  Cyclic GFR-binding peptide
  MOD_RES (3)..(4)..(36)..(38): Xaa is C or S

SEQ ID NO: 88319 - protein, 35 aa, Artificial Sequence
  Cyclic GFR-binding peptide
  MOD_RES (6)..(7): Xaa is C or S
GIPEPXXVPEKMSPISILYKDENKNVVLKYHYNMT

SEQ ID NO: 88320 - protein, 28 aa, Artificial Sequence
  Cyclic GFR-binding peptide
  MOD_RES (27)..(27): Xaa is C or S
SATSMLYYNDKQQIILRKHRGMVVDRXG

SEQ ID NO: 88321 - protein, 32 aa, Artificial Sequence
  Cyclic GFR-binding peptide
  MOD_RES (2)..(3): Xaa is C or S
TXXAPVKTSATSMLYYDNGRVLLLRKHRMIVE

SEQ ID NO: 88322 - protein, 33 aa, Artificial Sequence
  Cyclic GFR-binding peptide
  MOD_RES (30)..(32): Xaa is C or S
EKMSPINILYFDENKNVVYGKIPNMTVESXAXR

SEQ ID NO: 88323 - protein, 29 aa, Artificial Sequence
  Cyclic GFR-binding peptide
  MOD_RES (1)..(2): Xaa is C or S
XXVPEKMSPINILYFDENKNVVYGKIPNM

SEQ ID NO: 88324 - protein, 32 aa, Artificial Sequence; identical to SEQ ID NO: 34950
  Cyclic GFR-binding peptide
  MOD_RES (1)..(2): Xaa is C or S

SEQ ID NO: 88325 - protein, 27 aa, Artificial Sequence
  Cyclic GFR-binding peptide
KMEPISMLYLNDKQQIIKFKYEGMVVD

SEQ ID NO: 88326 - protein, 28 aa, Artificial Sequence
  Cyclic GFR-binding peptide
  MOD_RES (27)..(27): Xaa is C or S
LSPINILYFVGRKPKVYGKIPMIVRSXK

SEQ ID NO: 88327 - protein, 34 aa, Artificial Sequence; identical to SEQ ID NO: 34951
  Cyclic GFR-binding peptide
  MOD_RES (3)..(4): Xaa is C or S

SEQ ID NO: 88328 - protein, 32 aa, Artificial Sequence; identical to SEQ ID NO: 34952
  Cyclic GFR-binding peptide
  MOD_RES (32)..(32): Xaa is C or S

SEQ ID NO: 88329 - protein, 30 aa, Artificial Sequence
  Cyclic GFR-binding peptide
  MOD_RES (3)..(4): Xaa is C or S
ASXXVPARLSATSILYYDAANNVVLRKHRD

SEQ ID NO: 88330 - protein, 30 aa, Artificial Sequence; identical to SEQ ID NO: 34953
  Cyclic GFR-binding peptide

SEQ ID NO: 88331 - protein, 22 aa, Artificial Sequence
  Cyclic GFR-binding peptide
DLSPINILYFIGKTPKIYGKIP

SEQ ID NO: 88332 - protein, 35 aa, Artificial Sequence; identical to SEQ ID NO: 34955
  Cyclic GFR-binding peptide
  MOD_RES (3)..(4): Xaa is C or S

SEQ ID NO: 88333 - protein, 22 aa, Artificial Sequence
  Cyclic GFR-binding peptide
RLSATSILYYDSANNVVLRKHR

SEQ ID NO: 88334 - protein, 33 aa, Artificial Sequence; identical to SEQ ID NO: 34957
  Cyclic GFR-binding peptide
  MOD_RES (32)..(32): Xaa is C or S

SEQ ID NO: 88335 - protein, 34 aa, Artificial Sequence
  Cyclic GFR-binding peptide
  MOD_RES (4)..(5): Xaa is C or S
ASPXXVSQDLSPINILYFIGKTPKIYGKIPMIVK

SEQ ID NO: 88336 - protein, 27 aa, Artificial Sequence
  Cyclic GFR-binding peptide
  MOD_RES (27)..(27): Xaa is C or S
LSPINILYFVGRKPKVYGKIPMIVRSX

SEQ ID NO: 88337 - protein, 33 aa, Artificial Sequence
  Cyclic GFR-binding peptide
  MOD_RES (30)..(32): Xaa is C or S
PQALSPINILYFVGRKPKVYGKIPMIVRSXKXS

SEQ ID NO: 88338 - protein, 23 aa, Artificial Sequence
  Cyclic GFR-binding peptide
EKMSATSILYYDENKNVVLRKHR

SEQ ID NO: 88339 - protein, 32 aa, Artificial Sequence
  Cyclic GFR-binding peptide
  MOD_RES (29)..(31): Xaa is C or S
QDLSPINILYFIGKTPKIYGKIPMIVKSXKXS

SEQ ID NO: 88340 - protein, 28 aa, Artificial Sequence
  Cyclic GFR-binding peptide
  MOD_RES (2)..(3): Xaa is C or S
TXXAPVKTSPISMLYKDNGRVLLLKYHY

SEQ ID NO: 88341 - protein, 41 aa, Artificial Sequence; identical to SEQ ID NO: 34960
  Cyclic GFR-binding peptide
  MOD_RES (5)..(6)..(38)..(40): Xaa is C or S

SEQ ID NO: 88342 - protein, 35 aa, Artificial Sequence; identical to SEQ ID NO: 34961
  Cyclic GFR-binding peptide
  MOD_RES (2)..(3)..(34): Xaa is C or S

SEQ ID NO: 88343 - protein, 33 aa, Artificial Sequence; identical to SEQ ID NO: 34962
  Cyclic GFR-binding peptide
  MOD_RES (32)..(32): Xaa is C or S

SEQ ID NO: 88344 - protein, 28 aa, Artificial Sequence
  Cyclic GFR-binding peptide
  MOD_RES (28)..(28): Xaa is C or S
MSPISILYKDENKNVVLKYHYNMTVESX

SEQ ID NO: 88345 - protein, 34 aa, Artificial Sequence
  Cyclic GFR-binding peptide
  MOD_RES (6)..(7): Xaa is C or S
GSAGPXXTPTKMEPISMLYLNDKQQIIKFKYEGM

SEQ ID NO: 88346 - protein, 24 aa, Artificial Sequence
  Cyclic GFR-binding peptide
ARLSATSILYYDAANNVVLRKHRD

SEQ ID NO: 88347 - protein, 40 aa, Artificial Sequence; identical to SEQ ID NO: 34966
  Cyclic GFR-binding peptide
  MOD_RES (4)..(5)..(37)..(39): Xaa is C or S

SEQ ID NO: 88348 - protein, 37 aa, Artificial Sequence; identical to SEQ ID NO: 34968
  Cyclic GFR-binding peptide
  MOD_RES (6)..(7): Xaa is C or S

SEQ ID NO: 88349 - protein, 34 aa, Artificial Sequence
  Cyclic GFR-binding peptide
  MOD_RES (31)..(33): Xaa is C or S
PARLSATSILYYDAANNVVLRKHRDMVVEAXGXR

SEQ ID NO: 88350 - protein, 30 aa, Artificial Sequence
  Cyclic GFR-binding peptide
  MOD_RES (30)..(30): Xaa is C or S
TKMEPISMLYLNDKQQIIKFKYEGMVVDRX

SEQ ID NO: 88351 - protein, 34 aa, Artificial Sequence
  Cyclic GFR-binding peptide
  MOD_RES (4)..(5): Xaa is C or S
SKAXXVPTKLSATSILYYDKGVVTYLRKHRGMAV

SEQ ID NO: 88352 - protein, 31 aa, Artificial Sequence
  Cyclic GFR-binding peptide
  MOD_RES (4)..(5): Xaa is C or S
SKAXXVPTKLSATSILYYDKGVVTYLRKHRG

SEQ ID NO: 88353 - protein, 39 aa, Artificial Sequence; identical to SEQ ID NO: 34970
  Cyclic GFR-binding peptide
  MOD_RES (4)..(5)..(36)..(38): Xaa is C or S

SEQ ID NO: 88354 - protein, 27 aa, Artificial Sequence
  Cyclic GFR-binding peptide
  MOD_RES (1)..(1): Xaa is C or S
XTPTKMEPISMLYLNDKQQIIKFKYEG

SEQ ID NO: 88355 - protein, 28 aa, Artificial Sequence
  Cyclic GFR-binding peptide
PEKMSATSILYYDENKNVVLRKHRNMTV

SEQ ID NO: 88356 - protein, 27 aa, Artificial Sequence
  Cyclic GFR-binding peptide
PEKMSATSILYYDENKNVVLRKHRNMT

SEQ ID NO: 88357 - protein, 31 aa, Artificial Sequence
  Cyclic GFR-binding peptide
  MOD_RES (1)..(2): Xaa is C or S
XXAPVKTEPISMLYLDNGRVLLKFKYEMIVE

SEQ ID NO: 88358 - protein, 28 aa, Artificial Sequence
  Cyclic GFR-binding peptide
  MOD_RES (2)..(3): Xaa is C or S
PXXVPEKMSATSILYYDENKNVVLRKHR

SEQ ID NO: 88359 - protein, 34 aa, Artificial Sequence; identical to SEQ ID NO: 34972
  Cyclic GFR-binding peptide
  MOD_RES (31)..(33): Xaa is C or S

SEQ ID NO: 88360 - protein, 28 aa, Artificial Sequence
  Cyclic GFR-binding peptide
PTKMSPISMLYKNDKQQIILKYHYGMVV

SEQ ID NO: 88361 - protein, 35 aa, Artificial Sequence
  Cyclic GFR-binding peptide
  MOD_RES (6)..(7): Xaa is C or S
ASASPXXVPQDLSPINILYFVGRTPKVYGKIPMVV

SEQ ID NO: 88362 - protein, 20 aa, Artificial Sequence
  Cyclic GFR-binding peptide
SATSILYYDAANNVVLRKHR

SEQ ID NO: 88363 - protein, 24 aa, Artificial Sequence
  Cyclic GFR-binding peptide
RLSPISILYKDSANNVVLKYHYDM

SEQ ID NO: 88364 - protein, 30 aa, Artificial Sequence
  Cyclic GFR-binding peptide
  MOD_RES (27)..(29): Xaa is C or S
SATSMLYYNDKQQIILRKHRGMVVDRXGXS

SEQ ID NO: 88365 - protein, 35 aa, Artificial Sequence; identical to SEQ ID NO: 34973
  Cyclic GFR-binding peptide
  MOD_RES (1)..(32)..(34): Xaa is C or S

SEQ ID NO: 88366 - protein, 37 aa, Artificial Sequence; identical to SEQ ID NO: 34975
  Cyclic GFR-binding peptide
  MOD_RES (1)..(2)..(34)..(36): Xaa is C or S

SEQ ID NO: 88367 - protein, 31 aa, Artificial Sequence
  Cyclic GFR-binding peptide
  MOD_RES (29)..(31): Xaa is C or S
KMNAISILYFDENKNVVLKKYRNMTVESXAX

SEQ ID NO: 88368 - protein, 28 aa, Artificial Sequence
  Cyclic GFR-binding peptide
  MOD_RES (1)..(1): Xaa is C or S
XVPEKMSPINILYFDENKNVVYGKIPNM

SEQ ID NO: 88369 - protein, 26 aa, Artificial Sequence
  Cyclic GFR-binding peptide
LSATSILYYDKGVVTYLRKHRGMAVS

SEQ ID NO: 88370 - protein, 34 aa, Artificial Sequence; identical to SEQ ID NO: 34978
  Cyclic GFR-binding peptide
  MOD_RES (3)..(4): Xaa is C or S

SEQ ID NO: 88371 - protein, 24 aa, Artificial Sequence
  Cyclic GFR-binding peptide
LSPINILYFIGKTPKIYGKIPMIV

SEQ ID NO: 88372 - protein, 28 aa, Artificial Sequence
  Cyclic GFR-binding peptide
  MOD_RES (28)..(28): Xaa is C or S
MNAISILYFDENKNVVLKKYRNMTVESX

SEQ ID NO: 88373 - protein, 24 aa, Artificial Sequence
  Cyclic GFR-binding peptide
KMEPISMLYLNDKQQIIKFKYEGM

SEQ ID NO: 88374 - protein, 28 aa, Artificial Sequence
  Cyclic GFR-binding peptide
KMEPISILYLDENKNVVKFKYENMTVES

SEQ ID NO: 88375 - protein, 29 aa, Artificial Sequence
  Cyclic GFR-binding peptide
TKLSATSILYYDKGVVTYLRKHRGMAVSE

SEQ ID NO: 88376 - protein, 28 aa, Artificial Sequence
  Cyclic GFR-binding peptide
  MOD_RES (1)..(2): Xaa is C or S
XXVPARLSATSILYYDAANNVVLRKHRD

SEQ ID NO: 88377 - protein, 23 aa, Artificial Sequence
  Cyclic GFR-binding peptide
MSPINILYFDENKNVVYGKIPNM

SEQ ID NO: 88378 - protein, 28 aa, Artificial Sequence
  Cyclic GFR-binding peptide
  MOD_RES (2)..(3): Xaa is C or S
PXXTPTKMSPISMLYKNDKQQIILKYHY

SEQ ID NO: 88379 - protein, 27 aa, Artificial Sequence
  Cyclic GFR-binding peptide
  MOD_RES (1)..(1): Xaa is C or S
XVSQDLSPINILYFIGKTPKIYGKIPM

SEQ ID NO: 88380 - protein, 38 aa, Artificial Sequence; identical to SEQ ID NO: 34981
  Cyclic GFR-binding peptide
  MOD_RES (2)..(3)..(35)..(37): Xaa is C or S

SEQ ID NO: 88381 - protein, 33 aa, Artificial Sequence; identical to SEQ ID NO: 34982
  Cyclic GFR-binding peptide
  MOD_RES (1)..(33): Xaa is C or S

SEQ ID NO: 88382 - protein, 28 aa, Artificial Sequence
  Cyclic GFR-binding peptide
  MOD_RES (1)..(2): Xaa is C or S
XXTPTKMSPISMLYKNDKQQIILKYHYG

SEQ ID NO: 88383 - protein, 41 aa, Artificial Sequence; identical to SEQ ID NO: 34983
  Cyclic GFR-binding peptide
  MOD_RES (5)..(6)..(38)..(40): Xaa is C or S

SEQ ID NO: 88384 - protein, 35 aa, Artificial Sequence; identical to SEQ ID NO: 34985
  Cyclic GFR-binding peptide
  MOD_RES (4)..(5): Xaa is C or S

SEQ ID NO: 88385 - protein, 26 aa, Artificial Sequence
  Cyclic GFR-binding peptide
TKMSPISMLYKNDKQQIILKYHYGMV

SEQ ID NO: 88386 - protein, 33 aa, Artificial Sequence
  Cyclic GFR-binding peptide
  MOD_RES (6)..(7): Xaa is C or S
HVPKPXXAPTKLEPISVLYLDDSSNVIKFKYEN

SEQ ID NO: 88387 - protein, 38 aa, Artificial Sequence; identical to SEQ ID NO: 34987
  Cyclic GFR-binding peptide
  MOD_RES (6)..(7): Xaa is C or S

SEQ ID NO: 88388 - protein, 38 aa, Artificial Sequence; identical to SEQ ID NO: 34988
  Cyclic GFR-binding peptide
  MOD_RES (5)..(6)..(38): Xaa is C or S

SEQ ID NO: 88389 - protein, 28 aa, Artificial Sequence
  Cyclic GFR-binding peptide
  MOD_RES (1)..(2): Xaa is C or S
XXAPVKTEPISMLYLDNGRVLLKFKYEM

SEQ ID NO: 88390 - protein, 31 aa, Artificial Sequence
  Cyclic GFR-binding peptide
  MOD_RES (29)..(31): Xaa is C or S
KLSATSILYYDKGVVTYLRKHRGMAVSEXGX

SEQ ID NO: 88391 - protein, 28 aa, Artificial Sequence
  Cyclic GFR-binding peptide
VPARLSATSILYYDAANNVVLRKHRDMV

SEQ ID NO: 88392 - protein, 29 aa, Artificial Sequence
  Cyclic GFR-binding peptide
PARLSATSILYYDAANNVVLRKHRDMVVE

SEQ ID NO: 88393 - protein, 29 aa, Artificial Sequence
  Cyclic GFR-binding peptide
  MOD_RES (1)..(1): Xaa is C or S
XVPEKMSPINILYFDENKNVVYGKIPNMT

SEQ ID NO: 88394 - protein, 38 aa, Artificial Sequence; identical to SEQ ID NO: 34991
  Cyclic GFR-binding peptide
  MOD_RES (6)..(7): Xaa is C or S

SEQ ID NO: 88395 - protein, 31 aa, Artificial Sequence; identical to SEQ ID NO: 34992
  Cyclic GFR-binding peptide
  MOD_RES (31)..(31): Xaa is C or S

SEQ ID NO: 88396 - protein, 34 aa, Artificial Sequence
  Cyclic GFR-binding peptide
  MOD_RES (5)..(6): Xaa is C or S
SAGPXXTPTKMSPISMLYKNDKQQIILKYHYGMV

SEQ ID NO: 88397 - protein, 24 aa, Artificial Sequence
  Cyclic GFR-binding peptide
PQDLSPINILYFVGRTPKVYGKIP

SEQ ID NO: 88398 - protein, 27 aa, Artificial Sequence
  Cyclic GFR-binding peptide
LSATSILYYDKGVVTYLRKHRGMAVSE

SEQ ID NO: 88399 - protein, 27 aa, Artificial Sequence
  Cyclic GFR-binding peptide
TKLSATSILYYDKGVVTYLRKHRGMAV

SEQ ID NO: 88400 - protein, 30 aa, Artificial Sequence
  Cyclic GFR-binding peptide
  MOD_RES (1)..(1): Xaa is C or S
XTPTKMEPISMLYLNDKQQIIKFKYEGMVV

SEQ ID NO: 88401 - protein, 23 aa, Artificial Sequence
  Cyclic GFR-binding peptide
EKMNAISILYFDENKNVVLKKYR

SEQ ID NO: 88402 - protein, 33 aa, Artificial Sequence; identical to SEQ ID NO: 34999
  Cyclic GFR-binding peptide
  MOD_RES (32)..(32): Xaa is C or S

SEQ ID NO: 88403 - protein, 35 aa, Artificial Sequence; identical to SEQ ID NO: 22096
  Cyclic GFR-binding peptide
  MOD_RES (32)..(34): Xaa is C or S

SEQ ID NO: 88404 - protein, 30 aa, Artificial Sequence; identical to SEQ ID NO: 35000
  Cyclic GFR-binding peptide

SEQ ID NO: 88405 - protein, 39 aa, Artificial Sequence; identical to SEQ ID NO: 35002
  Cyclic GFR-binding peptide
  MOD_RES (3)..(4)..(36)..(38): Xaa is C or S

SEQ ID NO: 88406 - protein, 26 aa, Artificial Sequence
  Cyclic GFR-binding peptide
MSATSMLYYNDKQQIILRKHRGMVVD

SEQ ID NO: 88407 - protein, 39 aa, Artificial Sequence; identical to SEQ ID NO: 35004
  Cyclic GFR-binding peptide
  MOD_RES (6)..(7)..(39): Xaa is C or S

SEQ ID NO: 88408 - protein, 36 aa, Artificial Sequence
  Cyclic GFR-binding peptide
  MOD_RES (6)..(7): Xaa is C or S
STPPTXXVPTRLEPISILYLDSANNVVKFKYEDMVV

SEQ ID NO: 88409 - protein, 30 aa, Artificial Sequence; identical to SEQ ID NO: 35006
  Cyclic GFR-binding peptide

SEQ ID NO: 88410 - protein, 31 aa, Artificial Sequence
  Cyclic GFR-binding peptide
  MOD_RES (30)..(30): Xaa is C or S
TRLSATSILYYDSANNVVLRKHRDMVVESXG

SEQ ID NO: 88411 - protein, 21 aa, Artificial Sequence
  Cyclic GFR-binding peptide
EPISILYLDENKNVVKFKYEN

SEQ ID NO: 88412 - protein, 39 aa, Artificial Sequence; identical to SEQ ID NO: 35008
  Cyclic GFR-binding peptide
  MOD_RES (6)..(7)..(39): Xaa is C or S

SEQ ID NO: 88413 - protein, 29 aa, Artificial Sequence
  Cyclic GFR-binding peptide
  MOD_RES (29)..(29): Xaa is C or S
QALSPINILYFVGRKPKVYGKIPMIVRSX

SEQ ID NO: 88414 - protein, 42 aa, Artificial Sequence; identical to SEQ ID NO: 35009
  Cyclic GFR-binding peptide
  MOD_RES (6)..(7)..(39)..(41): Xaa is C or S

SEQ ID NO: 88415 - protein, 35 aa, Artificial Sequence
  Cyclic GFR-binding peptide
  MOD_RES (6)..(7): Xaa is C or S
RVPSTXXAPVKTEPISMLYLDNGRVLLKFKYEMIV

SEQ ID NO: 88416 - protein, 34 aa, Artificial Sequence; identical to SEQ ID NO: 35010
  Cyclic GFR-binding peptide
  MOD_RES (3)..(4): Xaa is C or S

SEQ ID NO: 88417 - protein, 29 aa, Artificial Sequence
  Cyclic GFR-binding peptide
SQDLSPINILYFIGKTPKIYGKIPMIVKS

SEQ ID NO: 88418 - protein, 33 aa, Artificial Sequence
  Cyclic GFR-binding peptide
  MOD_RES (31)..(33): Xaa is C or S
PTRLEPISILYLDSANNVVKFKYEDMVVESXGX

SEQ ID NO: 88419 - protein, 25 aa, Artificial Sequence
  Cyclic GFR-binding peptide
MSPISMLYKNDKQQIILKYHYGMVV

SEQ ID NO: 88420 - protein, 30 aa, Artificial Sequence
  Cyclic GFR-binding peptide
  MOD_RES (1)..(2): Xaa is C or S
XXTPTKMSATSMLYYNDKQQIILRKHRGMV

SEQ ID NO: 88421 - protein, 32 aa, Artificial Sequence; identical to SEQ ID NO: 35011
  Cyclic GFR-binding peptide
  MOD_RES (1)..(2): Xaa is C or S

SEQ ID NO: 88422 - protein, 38 aa, Artificial Sequence; identical to SEQ ID NO: 35012
  Cyclic GFR-binding peptide
  MOD_RES (4)..(5)..(37): Xaa is C or S

SEQ ID NO: 88423 - protein, 31 aa, Artificial Sequence; identical to SEQ ID NO: 35014
  Cyclic GFR-binding peptide
  MOD_RES (1)..(1): Xaa is C or S

SEQ ID NO: 88424 - protein, 35 aa, Artificial Sequence; identical to SEQ ID NO: 35016
  Cyclic GFR-binding peptide
  MOD_RES (32)..(34): Xaa is C or S

SEQ ID NO: 88425 - protein, 41 aa, Artificial Sequence; identical to SEQ ID NO: 35017
  Cyclic GFR-binding peptide
  MOD_RES (5)..(6)..(38)..(40): Xaa is C or S

SEQ ID NO: 88426 - protein, 33 aa, Artificial Sequence; identical to SEQ ID NO: 35018
  Cyclic GFR-binding peptide
  MOD_RES (31)..(33): Xaa is C or S

SEQ ID NO: 88427 - protein, 34 aa, Artificial Sequence; identical to SEQ ID NO: 35019
  Cyclic GFR-binding peptide
  MOD_RES (2)..(3)..(34): Xaa is C or S

SEQ ID NO: 88428 - protein, 29 aa, Artificial Sequence
  Cyclic GFR-binding peptide
TPTKMEPISMLYLNDKQQIIKFKYEGMVV

SEQ ID NO: 88429 - protein, 29 aa, Artificial Sequence
  Cyclic GFR-binding peptide
  MOD_RES (28)..(28): Xaa is C or S
LSATSILYYDSANNVVLRKHRDMVVESXG

SEQ ID NO: 88430 - protein, 27 aa, Artificial Sequence
  Cyclic GFR-binding peptide
PTRLSATSILYYDSANNVVLRKHRDMV

SEQ ID NO: 88431 - protein, 37 aa, Artificial Sequence; identical to SEQ ID NO: 35022
  Cyclic GFR-binding peptide
  MOD_RES (5)..(6): Xaa is C or S

SEQ ID NO: 88432 - protein, 28 aa, Artificial Sequence
  Cyclic GFR-binding peptide
  MOD_RES (2)..(3): Xaa is C or S
PXXTPTKMEPISMLYLNDKQQIIKFKYE

SEQ ID NO: 88433 - protein, 20 aa, Artificial Sequence
  Cyclic GFR-binding peptide
SPISMLYKNDKQQIILKYHY

SEQ ID NO: 88434 - protein, 35 aa, Artificial Sequence
  Cyclic GFR-binding peptide
  MOD_RES (5)..(6): Xaa is C or S
IPEPXXVPEKMSATSILYYDENKNVVLRKHRNMTV

SEQ ID NO: 88435 - protein, 24 aa, Artificial Sequence
  Cyclic GFR-binding peptide
KMNAISILYFDENKNVVLKKYRNM

SEQ ID NO: 88436 - protein, 28 aa, Artificial Sequence
  Cyclic GFR-binding peptide
  MOD_RES (1)..(1): Xaa is C or S
XAPVKTSATSMLYYDNGRVLLLRKHRMI

SEQ ID NO: 88437 - protein, 26 aa, Artificial Sequence
  Cyclic GFR-binding peptide
EPISILYLDSANNVVKFKYEDMVVES

SEQ ID NO: 88438 - protein, 25 aa, Artificial Sequence
  Cyclic GFR-binding peptide
PTKMSPISMLYKNDKQQIILKYHYG

SEQ ID NO: 88439 - protein, 31 aa, Artificial Sequence
  Cyclic GFR-binding peptide
  MOD_RES (31)..(31): Xaa is C or S
PEKMSATSILYYDENKNVVLRKHRNMTVESX

SEQ ID NO: 88440 - protein, 28 aa, Artificial Sequence
  Cyclic GFR-binding peptide
  MOD_RES (28)..(28): Xaa is C or S
ALSPINILYFVGRKPKVYGKIPMIVRSX

SEQ ID NO: 88441 - protein, 34 aa, Artificial Sequence
  Cyclic GFR-binding peptide
  MOD_RES (31)..(33): Xaa is C or S
PTRLSATSILYYDSANNVVLRKHRDMVVESXGXR

SEQ ID NO: 88442 - protein, 33 aa, Artificial Sequence; identical to SEQ ID NO: 35025
  Cyclic GFR-binding peptide
  MOD_RES (1)..(33): Xaa is C or S

SEQ ID NO: 88443 - protein, 28 aa, Artificial Sequence
  Cyclic GFR-binding peptide
  MOD_RES (1)..(2): Xaa is C or S
XXVPQDLSPINILYFVGRTPKVYGKIPM

SEQ ID NO: 88444 - protein, 29 aa, Artificial Sequence
  Cyclic GFR-binding peptide
  MOD_RES (27)..(29): Xaa is C or S
SATSMLYYNDKQQIILRKHRGMVVDRXGX

SEQ ID NO: 88445 - protein, 36 aa, Artificial Sequence; identical to SEQ ID NO: 35026
  Cyclic GFR-binding peptide
  MOD_RES (3)..(4)..(36): Xaa is C or S

SEQ ID NO: 88446 - protein, 38 aa, Artificial Sequence; identical to SEQ ID NO: 35027
  Cyclic GFR-binding peptide
  MOD_RES (6)..(7): Xaa is C or S

SEQ ID NO: 88447 - protein, 28 aa, Artificial Sequence
  Cyclic GFR-binding peptide
  MOD_RES (27)..(27): Xaa is C or S
SPISILYKDENKNVVLKYHYNMTVESXA

SEQ ID NO: 88448 - protein, 33 aa, Artificial Sequence
  Cyclic GFR-binding peptide
  MOD_RES (4)..(5): Xaa is C or S
SKAXXVPTKLSATSILYYDKGVVTYLRKHRGMA

SEQ ID NO: 88449 - protein, 34 aa, Artificial Sequence; identical to SEQ ID NO: 35028
  Cyclic GFR-binding peptide
  MOD_RES (1)..(2)..(34): Xaa is C or S

SEQ ID NO: 88450 - protein, 38 aa, Artificial Sequence; identical to SEQ ID NO: 35029
  Cyclic GFR-binding peptide
  MOD_RES (3)..(4)..(36)..(38): Xaa is C or S

SEQ ID NO: 88451 - protein, 33 aa, Artificial Sequence
  Cyclic GFR-binding peptide
  MOD_RES (6)..(7): Xaa is C or S
GSAGPXXTPTKMEPISMLYLNDKQQIIKFKYEG

SEQ ID NO: 88452 - protein, 35 aa, Artificial Sequence; identical to SEQ ID NO: 35031
  Cyclic GFR-binding peptide
  MOD_RES (1)..(2)..(34): Xaa is C or S

SEQ ID NO: 88453 - protein, 26 aa, Artificial Sequence
  Cyclic GFR-binding peptide
VKTSATSMLYYDNGRVLLLRKHRMIV

SEQ ID NO: 88454 - protein, 27 aa, Artificial Sequence
  Cyclic GFR-binding peptide
QDLSPINILYFVGRTPKVYGKIPMVVK

SEQ ID NO: 88455 - protein, 37 aa, Artificial Sequence; identical to SEQ ID NO: 35032
  Cyclic GFR-binding peptide
  MOD_RES (3)..(4)..(35)..(37): Xaa is C or S

SEQ ID NO: 88456 - protein, 35 aa, Artificial Sequence; identical to SEQ ID NO: 35035
  Cyclic GFR-binding peptide
  MOD_RES (4)..(5): Xaa is C or S

SEQ ID NO: 88457 - protein, 28 aa, Artificial Sequence
  Cyclic GFR-binding peptide
PQALSPINILYFVGRKPKVYGKIPMIVR

SEQ ID NO: 88458 - protein, 30 aa, Artificial Sequence; identical to SEQ ID NO: 35036
  Cyclic GFR-binding peptide

SEQ ID NO: 88459 - protein, 25 aa, Artificial Sequence
  Cyclic GFR-binding peptide
SPINILYFDENKNVVYGKIPNMTVE

SEQ ID NO: 88460 - protein, 30 aa, Artificial Sequence
  Cyclic GFR-binding peptide
  MOD_RES (28)..(30): Xaa is C or S
KTEPISMLYLDNGRVLLKFKYEMIVEEXGX

SEQ ID NO: 88461 - protein, 42 aa, Artificial Sequence; identical to SEQ ID NO: 35040
  Cyclic GFR-binding peptide
  MOD_RES (6)..(7)..(39)..(41): Xaa is C or S

SEQ ID NO: 88462 - protein, 35 aa, Artificial Sequence; identical to SEQ ID NO: 35041
  Cyclic GFR-binding peptide
  MOD_RES (1)..(2)..(34): Xaa is C or S

SEQ ID NO: 88463 - protein, 26 aa, Artificial Sequence
  Cyclic GFR-binding peptide
TEPISMLYLDNGRVLLKFKYEMIVEE

SEQ ID NO: 88464 - protein, 26 aa, Artificial Sequence
  Cyclic GFR-binding peptide
QALSPINILYFVGRKPKVYGKIPMIV

SEQ ID NO: 88465 - protein, 37 aa, Artificial Sequence; identical to SEQ ID NO: 35044
  Cyclic GFR-binding peptide
  MOD_RES (6)..(7): Xaa is C or S

SEQ ID NO: 88466 - protein, 35 aa, Artificial Sequence; identical to SEQ ID NO: 35045
  Cyclic GFR-binding peptide
  MOD_RES (4)..(5): Xaa is C or S

SEQ ID NO: 88467 - protein, 22 aa, Artificial Sequence
  Cyclic GFR-binding peptide
ALSPINILYFVGRKPKVYGKIP

SEQ ID NO: 88468 - protein, 24 aa, Artificial Sequence
  Cyclic GFR-binding peptide
LSPINILYFVGRKPKVYGKIPMIV

SEQ ID NO: 88469 - protein, 39 aa, Artificial Sequence; identical to SEQ ID NO: 35046
  Cyclic GFR-binding peptide
  MOD_RES (6)..(7)..(39): Xaa is C or S

SEQ ID NO: 88470 - protein, 42 aa, Artificial Sequence; identical to SEQ ID NO: 35048
  Cyclic GFR-binding peptide
  MOD_RES (6)..(7)..(39)..(41): Xaa is C or S

SEQ ID NO: 88471 - protein, 34 aa, Artificial Sequence; identical to SEQ ID NO: 35049
  Cyclic GFR-binding peptide
  MOD_RES (31)..(33): Xaa is C or S

SEQ ID NO: 88472 - protein, 31 aa, Artificial Sequence
  Cyclic GFR-binding peptide
  MOD_RES (2)..(3): Xaa is C or S
TXXAPVKTEPISMLYLDNGRVLLKFKYEMIV

SEQ ID NO: 88473 - protein, 38 aa, Artificial Sequence; identical to SEQ ID NO: 35052
  Cyclic GFR-binding peptide
  MOD_RES (2)..(3)..(35)..(37): Xaa is C or S

SEQ ID NO: 88474 - protein, 25 aa, Artificial Sequence
  Cyclic GFR-binding peptide
LEPISILYLDSANNVVKFKYEDMVV

SEQ ID NO: 88475 - protein, 31 aa, Artificial Sequence; identical to SEQ ID NO: 35056
  Cyclic GFR-binding peptide
  MOD_RES (1)..(1): Xaa is C or S

SEQ ID NO: 88476 - protein, 23 aa, Artificial Sequence
  Cyclic GFR-binding peptide
SATSMLYYNDKQQIILRKHRGMV

SEQ ID NO: 88477 - protein, 32 aa, Artificial Sequence
  Cyclic GFR-binding peptide
  MOD_RES (5)..(6): Xaa is C or S
TPPTXXVPTRLSPISILYKDSANNVVLKYHYD

SEQ ID NO: 88478 - protein, 28 aa, Artificial Sequence
  Cyclic GFR-binding peptide
  MOD_RES (28)..(28): Xaa is C or S
LSPISILYKDSANNVVLKYHYDMVVESX

SEQ ID NO: 88479 - protein, 28 aa, Artificial Sequence
  Cyclic GFR-binding peptide
  MOD_RES (2)..(3): Xaa is C or S
PXXTPTKMSATSMLYYNDKQQIILRKHR

SEQ ID NO: 88480 - protein, 39 aa, Artificial Sequence; identical to SEQ ID NO: 35059
  Cyclic GFR-binding peptide
  MOD_RES (6)..(7)..(39): Xaa is C or S

SEQ ID NO: 88481 - protein, 29 aa, Artificial Sequence
  Cyclic GFR-binding peptide
  MOD_RES (28)..(28): Xaa is C or S
MSATSILYYDENKNVVLRKHRNMTVESXA

SEQ ID NO: 88482 - protein, 37 aa, Artificial Sequence; identical to SEQ ID NO: 35061
  Cyclic GFR-binding peptide
  MOD_RES (4)..(5)..(37): Xaa is C or S

SEQ ID NO: 88483 - protein, 34 aa, Artificial Sequence; identical to SEQ ID NO: 35063
  Cyclic GFR-binding peptide
  MOD_RES (2)..(3)..(34): Xaa is C or S

SEQ ID NO: 88484 - protein, 32 aa, Artificial Sequence; identical to SEQ ID NO: 35064
  Cyclic GFR-binding peptide
  MOD_RES (1)..(32): Xaa is C or S

SEQ ID NO: 88485 - protein, 26 aa, Artificial Sequence
  Cyclic GFR-binding peptide
  MOD_RES (1)..(1): Xaa is C or S
XVPQDLSPINILYFVGRTPKVYGKIP

SEQ ID NO: 88486 - protein, 33 aa, Artificial Sequence; identical to SEQ ID NO: 35066
  Cyclic GFR-binding peptide
  MOD_RES (2)..(3): Xaa is C or S

SEQ ID NO: 88487 - protein, 28 aa, Artificial Sequence
  Cyclic GFR-binding peptide
RLEPISILYLDSANNVVKFKYEDMVVES

SEQ ID NO: 88488 - protein, 21 aa, Artificial Sequence
  Cyclic GFR-binding peptide
EPISILYLDSANNVVKFKYED

SEQ ID NO: 88489 - protein, 27 aa, Artificial Sequence
  Cyclic GFR-binding peptide
  MOD_RES (1)..(1): Xaa is C or S
XVPEKMSATSILYYDENKNVVLRKHRN

SEQ ID NO: 88490 - protein, 33 aa, Artificial Sequence
  Cyclic GFR-binding peptide
  MOD_RES (6)..(7): Xaa is C or S
GIPEPXXVPEKMSPINILYFDENKNVVYGKIPN

SEQ ID NO: 88491 - protein, 42 aa, Artificial Sequence; identical to SEQ ID NO: 35069
  Cyclic GFR-binding peptide
  MOD_RES (6)..(7)..(39)..(41): Xaa is C or S

SEQ ID NO: 88492 - protein, 26 aa, Artificial Sequence
  Cyclic GFR-binding peptide
PVKTEPISMLYLDNGRVLLKFKYEMI

SEQ ID NO: 88493 - protein, 31 aa, Artificial Sequence
  Cyclic GFR-binding peptide
  MOD_RES (31)..(31): Xaa is C or S
PEKMEPISILYLDENKNVVKFKYENMTVESX

SEQ ID NO: 88494 - protein, 29 aa, Artificial Sequence
  Cyclic GFR-binding peptide
  MOD_RES (2)..(3): Xaa is C or S
TXXVPTRLSPISILYKDSANNVVLKYHYD

SEQ ID NO: 88495 - protein, 35 aa, Artificial Sequence; identical to SEQ ID NO: 35070
  Cyclic GFR-binding peptide
  MOD_RES (1)..(33)..(35): Xaa is C or S

SEQ ID NO: 88496 - protein, 32 aa, Artificial Sequence
  Cyclic GFR-binding peptide
  MOD_RES (3)..(4): Xaa is C or S
EPXXVPEKMSPINILYFDENKNVVYGKIPNMT

SEQ ID NO: 88497 - protein, 30 aa, Artificial Sequence
  Cyclic GFR-binding peptide
  MOD_RES (1)..(2): Xaa is C or S
XXVPEKMEPISILYLDENKNVVKFKYENMT

SEQ ID NO: 88498 - protein, 26 aa, Artificial Sequence
  Cyclic GFR-binding peptide
PTKLSATSILYYDKGVVTYLRKHRGM

SEQ ID NO: 88499 - protein, 37 aa, Artificial Sequence; identical to SEQ ID NO: 35073
  Cyclic GFR-binding peptide
  MOD_RES (5)..(6): Xaa is C or S

SEQ ID NO: 88500 - protein, 27 aa, Artificial Sequence
  Cyclic GFR-binding peptide
DLSPINILYFIGKTPKIYGKIPMIVKS

SEQ ID NO: 88501 - protein, 26 aa, Artificial Sequence
  Cyclic GFR-binding peptide
EKMEPISILYLDENKNVVKFKYENMT

SEQ ID NO: 88502 - protein, 30 aa, Artificial Sequence
  Cyclic GFR-binding peptide
  MOD_RES (1)..(2): Xaa is C or S
XXVPQALSPINILYFVGRKPKVYGKIPMIV

SEQ ID NO: 88503 - protein, 39 aa, Artificial Sequence; identical to SEQ ID NO: 35074
  Cyclic GFR-binding peptide
  MOD_RES (4)..(5)..(37)..(39): Xaa is C or S

SEQ ID NO: 88504 - protein, 28 aa, Artificial Sequence
  Cyclic GFR-binding peptide
QALSPINILYFVGRKPKVYGKIPMIVRS

SEQ ID NO: 88505 - protein, 22 aa, Artificial Sequence
  Cyclic GFR-binding peptide
RLSPISILYKDSANNVVLKYHY

SEQ ID NO: 88506 - protein, 31 aa, Artificial Sequence
  Cyclic GFR-binding peptide
  MOD_RES (31)..(31): Xaa is C or S
PTKMEPISMLYLNDKQQIIKFKYEGMVVDRX

SEQ ID NO: 88507 - protein, 32 aa, Artificial Sequence
  Cyclic GFR-binding peptide
  MOD_RES (29)..(31): Xaa is C or S
KMSATSMLYYNDKQQIILRKHRGMVVDRXGXS

SEQ ID NO: 88508 - protein, 33 aa, Artificial Sequence
  Cyclic GFR-binding peptide
  MOD_RES (31)..(33): Xaa is C or S
PTRLSPISILYKDSANNVVLKYHYDMVVESXGX

SEQ ID NO: 88509 - protein, 20 aa, Artificial Sequence
  Cyclic GFR-binding peptide
SATSILYYDAANNVVLRKHR

SEQ ID NO: 88510 - protein, 29 aa, Artificial Sequence
  Cyclic GFR-binding peptide
EKMSPISILYKDENKNVVLKYHYNMTVES

SEQ ID NO: 88511 - protein, 31 aa, Artificial Sequence
  Cyclic GFR-binding peptide
  MOD_RES (28)..(30): Xaa is C or S
DLSPINILYFVGRTPKVYGKIPMVVKSXKXS

SEQ ID NO: 88512 - protein, 28 aa, Artificial Sequence
  Cyclic GFR-binding peptide
VPTRLEPISILYLDSANNVVKFKYEDMV

SEQ ID NO: 88513 - protein, 27 aa, Artificial Sequence
  Cyclic GFR-binding peptide
LEPISILYLDSANNVVKFKYEDMVVES

SEQ ID NO: 88514 - protein, 23 aa, Artificial Sequence
  Cyclic GFR-binding peptide
LSPISILYKDSANNVVLKYHYDM

SEQ ID NO: 88515 - protein, 32 aa, Artificial Sequence; identical to SEQ ID NO: 35075
  Cyclic GFR-binding peptide
  MOD_RES (32)..(32): Xaa is C or S

SEQ ID NO: 88516 - protein, 31 aa, Artificial Sequence
  Cyclic GFR-binding peptide
  MOD_RES (28)..(30): Xaa is C or S
LSATSILYYDSANNVVLRKHRDMVVESXGXR

SEQ ID NO: 88517 - protein, 35 aa, Artificial Sequence; identical to SEQ ID NO: 35076
  Cyclic GFR-binding peptide
  MOD_RES (1)..(2)..(34): Xaa is C or S

SEQ ID NO: 88518 - protein, 28 aa, Artificial Sequence
  Cyclic GFR-binding peptide
  MOD_RES (2)..(3): Xaa is C or S
PXXVPEKMNAISILYFDENKNVVLKKYR

SEQ ID NO: 88519 - protein, 33 aa, Artificial Sequence
  Cyclic GFR-binding peptide
  MOD_RES (3)..(4): Xaa is C or S
PTXXVPTRLSATSILYYDSANNVVLRKHRDMVV

SEQ ID NO: 88520 - protein, 31 aa, Artificial Sequence
  Cyclic GFR-binding peptide
  MOD_RES (30)..(30): Xaa is C or S
TKMSATSMLYYNDKQQIILRKHRGMVVDRXG

SEQ ID NO: 88521 - protein, 26 aa, Artificial Sequence
  Cyclic GFR-binding peptide
VSQDLSPINILYFIGKTPKIYGKIPM

SEQ ID NO: 88522 - protein, 26 aa, Artificial Sequence
  Cyclic GFR-binding peptide
EPISILYLDENKNVVKFKYENMTVES

SEQ ID NO: 88523 - protein, 39 aa, Artificial Sequence; identical to SEQ ID NO: 35082
  Cyclic GFR-binding peptide
  MOD_RES (6)..(7)..(38): Xaa is C or S

SEQ ID NO: 88524 - protein, 27 aa, Artificial Sequence
  Cyclic GFR-binding peptide
  MOD_RES (1)..(2): Xaa is C or S
XXVPQDLSPINILYFVGRTPKVYGKIP

SEQ ID NO: 88525 - protein, 35 aa, Artificial Sequence; identical to SEQ ID NO: 35083
  Cyclic GFR-binding peptide
  MOD_RES (1)..(2)..(34): Xaa is C or S

SEQ ID NO: 88526 - protein, 31 aa, Artificial Sequence
  Cyclic GFR-binding peptide
  MOD_RES (30)..(30): Xaa is C or S
TKMEPISMLYLNDKQQIIKFKYEGMVVDRXG

SEQ ID NO: 88527 - protein, 36 aa, Artificial Sequence; identical to SEQ ID NO: 35084
  Cyclic GFR-binding peptide
  MOD_RES (5)..(6): Xaa is C or S

SEQ ID NO: 88528 - protein, 25 aa, Artificial Sequence
  Cyclic GFR-binding peptide
VSQDLSPINILYFIGKTPKIYGKIP

SEQ ID NO: 88529 - protein, 32 aa, Artificial Sequence
  Cyclic GFR-binding peptide
  MOD_RES (1)..(3): Xaa is C or S
XGXEEVIMSMEGILLVRGNDMIQMTINSTKVP

SEQ ID NO: 88530 - protein, 27 aa, Artificial Sequence
  Cyclic GFR-binding peptide
RDVVMGSMEGIIIQQKDNMIQMTINSM

SEQ ID NO: 88531 - protein, 35 aa, Artificial Sequence; identical to SEQ ID NO: 35087
  Cyclic GFR-binding peptide
  MOD_RES (31)..(32): Xaa is C or S

SEQ ID NO: 88532 - protein, 37 aa, Artificial Sequence; identical to SEQ ID NO: 35089
  Cyclic GFR-binding peptide
  MOD_RES (32)..(33): Xaa is C or S

SEQ ID NO: 88533 - protein, 20 aa, Artificial Sequence
  Cyclic GFR-binding peptide
SMEGILLVRGNDMIQMTINS

SEQ ID NO: 88534 - protein, 24 aa, Artificial Sequence
  Cyclic GFR-binding peptide
VVMDSMEGIVVNNAADMIQITINS

SEQ ID NO: 88535 - protein, 34 aa, Artificial Sequence; identical to SEQ ID NO: 35095
  Cyclic GFR-binding peptide
  MOD_RES (31)..(32): Xaa is C or S

SEQ ID NO: 88536 - protein, 34 aa, Artificial Sequence
  Cyclic GFR-binding peptide
  MOD_RES (29)..(30): Xaa is C or S
VMDSMEGIVVNNASDMIQITINSLRTPVXXTPPT

SEQ ID NO: 88537 - protein, 27 aa, Artificial Sequence
  Cyclic GFR-binding peptide
  MOD_RES (26)..(27): Xaa is C or S
SMEGLVVNNAADMIQITINSLRAPVXX

SEQ ID NO: 88538 - protein, 21 aa, Artificial Sequence
  Cyclic GFR-binding peptide
DSMEGIVVNNAADMIQITINS

SEQ ID NO: 88539 - protein, 23 aa, Artificial Sequence
  Cyclic GFR-binding peptide
MDSMEGLVVNNASDMIQITINSL

SEQ ID NO: 88540 - protein, 31 aa, Artificial Sequence; identical to SEQ ID NO: 35101
  Cyclic GFR-binding peptide

SEQ ID NO: 88541 - protein, 35 aa, Artificial Sequence; identical to SEQ ID NO: 35100
  Cyclic GFR-binding peptide
  MOD_RES (32)..(33): Xaa is C or S

SEQ ID NO: 88542 - protein, 26 aa, Artificial Sequence
  Cyclic GFR-binding peptide
SRVVMNSMEGLIVNSSDDMIQVTINS

SEQ ID NO: 88543 - protein, 25 aa, Artificial Sequence
  Cyclic GFR-binding peptide
KVIMSMEGLIKPTKGIMIQITINSL

SEQ ID NO: 88544 - protein, 39 aa, Artificial Sequence; identical to SEQ ID NO: 35104
  Cyclic GFR-binding peptide
  MOD_RES (2)..(4)..(35)..(36): Xaa is C or S

SEQ ID NO: 88545 - protein, 28 aa, Artificial Sequence
  Cyclic GFR-binding peptide
  MOD_RES (27)..(28): Xaa is C or S
MSMEGLIKPTKGIMIQITINSLDQSVXX

SEQ ID NO: 88546 - protein, 33 aa, Artificial Sequence
  Cyclic GFR-binding peptide
  MOD_RES (2)..(4): Xaa is C or S
SXKXSRVIMSMEGLVKPKRGVMIQITINSLAQP

SEQ ID NO: 88547 - protein, 34 aa, Artificial Sequence; identical to SEQ ID NO: 35108
  Cyclic GFR-binding peptide
  MOD_RES (1)..(3): Xaa is C or S

SEQ ID NO: 88548 - protein, 23 aa, Artificial Sequence
  Cyclic GFR-binding peptide
SMEGLVKPKRGVMIQITINSLAQ

SEQ ID NO: 88549 - protein, 30 aa, Artificial Sequence
  Cyclic GFR-binding peptide
  MOD_RES (27)..(28): Xaa is C or S
GSMEGIIIQQKDNMIQMTINSMKTPTXXPG

SEQ ID NO: 88550 - protein, 31 aa, Artificial Sequence
  Cyclic GFR-binding peptide
  MOD_RES (26)..(27): Xaa is C or S
SMEGIVVNNASDMIQITINSLRTPVXXTPPT

SEQ ID NO: 88551 - protein, 30 aa, Artificial Sequence
  Cyclic GFR-binding peptide
  MOD_RES (30)..(30): Xaa is C or S
RVIMSMEGLVKPKRGVMIQITINSLAQPVX

SEQ ID NO: 88552 - protein, 33 aa, Artificial Sequence
  Cyclic GFR-binding peptide
  MOD_RES (27)..(28): Xaa is C or S
MSMEGLLLVRGNDMIQMTINSTKVPAXXTSPVR

SEQ ID NO: 88553 - protein, 32 aa, Artificial Sequence
  Cyclic GFR-binding peptide
  MOD_RES (1)..(3): Xaa is C or S
XGXSRVVMNSMEGLIVNSSDDMIQVTINSLKT

SEQ ID NO: 88554 - protein, 26 aa, Artificial Sequence
  Cyclic GFR-binding peptide
DSMEGIVVNNASDMIQITINSLRTPV

SEQ ID NO: 88555 - protein, 35 aa, Artificial Sequence; identical to SEQ ID NO: 35112
  Cyclic GFR-binding peptide
  MOD_RES (1)..(3)..(34)..(35): Xaa is C or S

SEQ ID NO: 88556 - protein, 30 aa, Artificial Sequence
  Cyclic GFR-binding peptide
  MOD_RES (27)..(28): Xaa is C or S
MSMEGLVKPKRGVMIQITINSLAQPVXXPA

SEQ ID NO: 88557 - protein, 41 aa, Artificial Sequence; identical to SEQ ID NO: 35113
  Cyclic GFR-binding peptide
  MOD_RES (1)..(3)..(35)..(36): Xaa is C or S

SEQ ID NO: 88558 - protein, 33 aa, Artificial Sequence
  Cyclic GFR-binding peptide
  MOD_RES (27)..(28): Xaa is C or S
DSMEGIVVNNASDMIQITINSLRTPVXXTPPTS

SEQ ID NO: 88559 - protein, 26 aa, Artificial Sequence
  Cyclic GFR-binding peptide
EEVIMSMEGLLLVRGNDMIQMTINST

SEQ ID NO: 88560 - protein, 38 aa, Artificial Sequence; identical to SEQ ID NO: 35119
  Cyclic GFR-binding peptide
  MOD_RES (2)..(33)..(34): Xaa is C or S

SEQ ID NO: 88561 - protein, 30 aa, Artificial Sequence
  Cyclic GFR-binding peptide
  MOD_RES (1)..(3): Xaa is C or S
XGXEEVIMSMEGLLLVRGNDMIQMTINSTK

SEQ ID NO: 88562 - protein, 32 aa, Artificial Sequence
  Cyclic GFR-binding peptide
  MOD_RES (28)..(29): Xaa is C or S
MDSMEGLVVNNASDMIQITINSLRTPVXXTPP

SEQ ID NO: 88563 - protein, 36 aa, Artificial Sequence; identical to SEQ ID NO: 35129
  Cyclic GFR-binding peptide
  MOD_RES (31)..(32): Xaa is C or S

SEQ ID NO: 88564 - protein, 35 aa, Artificial Sequence; identical to SEQ ID NO: 35130
  Cyclic GFR-binding peptide
  MOD_RES (1)..(32)..(33): Xaa is C or S

SEQ ID NO: 88565 - protein, 28 aa, Artificial Sequence
  Cyclic GFR-binding peptide
  MOD_RES (1)..(1): Xaa is C or S
XEEVIMSMEGILLVRGNDMIQMTINSTK

SEQ ID NO: 88566 - protein, 23 aa, Artificial Sequence
  Cyclic GFR-binding peptide
DSMEGIVVNNASDMIQITINSLR

SEQ ID NO: 88567 - protein, 27 aa, Artificial Sequence
  Cyclic GFR-binding peptide
KVIMSMEGLIKPTKGIMIQITINSLDQ

SEQ ID NO: 88568 - protein, 27 aa, Artificial Sequence
  Cyclic GFR-binding peptide
SKVVMSMEGLVKPTRGVMIQITINSLD

SEQ ID NO: 88569 - protein, 27 aa, Artificial Sequence
  Cyclic GFR-binding peptide
  MOD_RES (27)..(27): Xaa is C or S
MSMEGLLLVRGNDMIQMTINSTKVPAX

SEQ ID NO: 88570 - protein, 33 aa, Artificial Sequence
  Cyclic GFR-binding peptide
  MOD_RES (27)..(28): Xaa is C or S
MSMEGLVKPKRGVMIQITINSLAQPVXXPAASA

SEQ ID NO: 88571 - protein, 22 aa, Artificial Sequence
  Cyclic GFR-binding peptide
MGSMEGLIIQQKDNMIQMTINS

SEQ ID NO: 88572 - protein, 36 aa, Artificial Sequence; identical to SEQ ID NO: 35144
  Cyclic GFR-binding peptide
  MOD_RES (2)..(34)..(35): Xaa is C or S

SEQ ID NO: 88573 - protein, 33 aa, Artificial Sequence; identical to SEQ ID NO: 35150
  Cyclic GFR-binding peptide
  MOD_RES (31)..(32): Xaa is C or S

SEQ ID NO: 88574 - protein, 33 aa, Artificial Sequence
  Cyclic GFR-binding peptide
  MOD_RES (28)..(29): Xaa is C or S
MDSMEGLVVNNAADMIQITINSLRAPVXXSAPA

SEQ ID NO: 88575 - protein, 40 aa, Artificial Sequence; identical to SEQ ID NO: 35151
  Cyclic GFR-binding peptide
  MOD_RES (1)..(3)..(35)..(36): Xaa is C or S

SEQ ID NO: 88576 - protein, 29 aa, Artificial Sequence
  Cyclic GFR-binding peptide
  MOD_RES (26)..(27): Xaa is C or S
SMEGLVKPTRGVMIQITINSLDQPVXXPS

SEQ ID NO: 88577 - protein, 32 aa, Artificial Sequence; identical to SEQ ID NO: 35159
  Cyclic GFR-binding peptide
  MOD_RES (31)..(32): Xaa is C or S

SEQ ID NO: 88578 - protein, 38 aa, Artificial Sequence; identical to SEQ ID NO: 35162
  Cyclic GFR-binding peptide
  MOD_RES (32)..(33): Xaa is C or S

SEQ ID NO: 88579 - protein, 41 aa, Artificial Sequence; identical to SEQ ID NO: 35163
  Cyclic GFR-binding peptide
  MOD_RES (1)..(3)..(35)..(36): Xaa is C or S

SEQ ID NO: 88580 - protein, 27 aa, Artificial Sequence
  Cyclic GFR-binding peptide
IMSMEGLLLVRGNDMIQMTINSTKVPA

SEQ ID NO: 88581 - protein, 29 aa, Artificial Sequence
  Cyclic GFR-binding peptide
  MOD_RES (1)..(1): Xaa is C or S
XSKVIMSMEGLIKPTKGIMIQITINSLDQ

SEQ ID NO: 88582 - protein, 30 aa, Artificial Sequence
  Cyclic GFR-binding peptide
  MOD_RES (2)..(2): Xaa is C or S
GXAEVVMDSMEGLVVNNAADMIQITINSLR

SEQ ID NO: 88583 - protein, 34 aa, Artificial Sequence; identical to SEQ ID NO: 35165
  Cyclic GFR-binding peptide
  MOD_RES (1)..(3)..(34): Xaa is C or S

SEQ ID NO: 88584 - protein, 20 aa, Artificial Sequence
  Cyclic GFR-binding peptide
SMEGIIIQQKDNMIQMTINS

SEQ ID NO: 88585 - protein, 34 aa, Artificial Sequence; identical to SEQ ID NO: 35169
  Cyclic GFR-binding peptide
  MOD_RES (1)..(3): Xaa is C or S

SEQ ID NO: 88586 - protein, 32 aa, Artificial Sequence; identical to SEQ ID NO: 35171
  Cyclic GFR-binding peptide
  MOD_RES (1)..(1): Xaa is C or S

SEQ ID NO: 88587 - protein, 36 aa, Artificial Sequence; identical to SEQ ID NO: 35172
  Cyclic GFR-binding peptide
  MOD_RES (1)..(33)..(34): Xaa is C or S

SEQ ID NO: 88588 - protein, 32 aa, Artificial Sequence
  Cyclic GFR-binding peptide
  MOD_RES (1)..(3): Xaa is C or S
XGXSEVVMDSMEGIVVNNASDMIQITINSLRT

SEQ ID NO: 88589 - protein, 34 aa, Artificial Sequence
  Cyclic GFR-binding peptide
  MOD_RES (2)..(4): Xaa is C or S
HXGXSRVVMNSMEGLIVNSSDDMIQVTINSLKTP

SEQ ID NO: 88590 - protein, 29 aa, Artificial Sequence
  Cyclic GFR-binding peptide
EVIMSMEGLLLVRGNDMIQMTINSTKVPA

SEQ ID NO: 88591 - protein, 22 aa, Artificial Sequence
  Cyclic GFR-binding peptide
MSMEGLLLVRGNDMIQMTINST

SEQ ID NO: 88592 - protein, 29 aa, Artificial Sequence
  Cyclic GFR-binding peptide
  MOD_RES (28)..(29): Xaa is C or S
MGSMEGIIIQQKDNMIQMTINSMKTPTXX

SEQ ID NO: 88593 - protein, 23 aa, Artificial Sequence
  Cyclic GFR-binding peptide
IMSMEGLVKPKRGVMIQITINSL

SEQ ID NO: 88594 - protein, 36 aa, Artificial Sequence; identical to SEQ ID NO: 35177
  Cyclic GFR-binding peptide
  MOD_RES (2)..(4)..(36): Xaa is C or S

SEQ ID NO: 88595 - protein, 30 aa, Artificial Sequence
  Cyclic GFR-binding peptide
  MOD_RES (29)..(30): Xaa is C or S
VIMSMEGILLVRGNDMIQMTINSTKVPAXX

SEQ ID NO: 88596 - protein, 35 aa, Artificial Sequence; identical to SEQ ID NO: 35180
  Cyclic GFR-binding peptide
  MOD_RES (2)..(4): Xaa is C or S

SEQ ID NO: 88597 - protein, 24 aa, Artificial Sequence
  Cyclic GFR-binding peptide
VIMSMEGILLVRGNDMIQMTINST

SEQ ID NO: 88598 - protein, 29 aa, Artificial Sequence
  Cyclic GFR-binding peptide
  MOD_RES (29)..(29): Xaa is C or S
VMDSMEGLVVNNASDMIQITINSLRTPVX

SEQ ID NO: 88599 - protein, 41 aa, Artificial Sequence; identical to SEQ ID NO: 35183
  Cyclic GFR-binding peptide
  MOD_RES (1)..(3)..(35)..(36): Xaa is C or S

SEQ ID NO: 88600 - protein, 34 aa, Artificial Sequence
  Cyclic GFR-binding peptide
  MOD_RES (2)..(4): Xaa is C or S
SXGXRDVVMGSMEGIIIQQKDNMIQMTINSMKTP

SEQ ID NO: 88601 - protein, 28 aa, Artificial Sequence
  Cyclic GFR-binding peptide
  MOD_RES (28)..(28): Xaa is C or S
MDSMEGLVVNNASDMIQITINSLRTPVX

SEQ ID NO: 88602 - protein, 30 aa, Artificial Sequence
  Cyclic GFR-binding peptide
  MOD_RES (27)..(28): Xaa is C or S
MSMEGLLLVRGNDMIQMTINSTKVPAXXTS

SEQ ID NO: 88603 - protein, 37 aa, Artificial Sequence; identical to SEQ ID NO: 35189
  Cyclic GFR-binding peptide
  MOD_RES (1)..(32)..(33): Xaa is C or S

SEQ ID NO: 88604 - protein, 33 aa, Artificial Sequence
  Cyclic GFR-binding peptide
  MOD_RES (29)..(30): Xaa is C or S
VIMSMEGLLLVRGNDMIQMTINSTKVPAXXTSP

SEQ ID NO: 88605 - protein, 37 aa, Artificial Sequence; identical to SEQ ID NO: 35193
  Cyclic GFR-binding peptide
  MOD_RES (31)..(32): Xaa is C or S

SEQ ID NO: 88606 - protein, 28 aa, Artificial Sequence
  Cyclic GFR-binding peptide
  MOD_RES (2)..(2): Xaa is C or S
GXSRVVMNSMEGLIVNSSDDMIQVTINS

SEQ ID NO: 88607 - protein, 36 aa, Artificial Sequence
  Cyclic GFR-binding peptide
  MOD_RES (30)..(31): Xaa is C or S
EVIMSMEGLLLVRGNDMIQMTINSTKVPAXXTSPVR

SEQ ID NO: 88608 - protein, 26 aa, Artificial Sequence
  Cyclic GFR-binding peptide
VIMSMEGLVKPKRGVMIQITINSLAQ

SEQ ID NO: 88609 - protein, 25 aa, Artificial Sequence
  Cyclic GFR-binding peptide
DVVMGSMEGIIIQQKDNMIQMTINS

SEQ ID NO: 88610 - protein, 26 aa, Artificial Sequence
  Cyclic GFR-binding peptide
VMDSMEGLVVNNASDMIQITINSLRT

SEQ ID NO: 88611 - protein, 32 aa, Artificial Sequence
  Cyclic GFR-binding peptide
  MOD_RES (27)..(28): Xaa is C or S
MSMEGILLVRGNDMIQMTINSTKVPAXXTSPV

SEQ ID NO: 88612 - protein, 24 aa, Artificial Sequence
  Cyclic GFR-binding peptide
IMSMEGILLVRGNDMIQMTINSTK

SEQ ID NO: 88613 - protein, 30 aa, Artificial Sequence
  Cyclic GFR-binding peptide
  MOD_RES (2)..(4): Xaa is C or S
RXGXSEVVMDSMEGIVVNNASDMIQITINS

SEQ ID NO: 88614 - protein, 39 aa, Artificial Sequence; identical to SEQ ID NO: 35199
  Cyclic GFR-binding peptide
  MOD_RES (2)..(4)..(36)..(37): Xaa is C or S

SEQ ID NO: 88615 - protein, 40 aa, Artificial Sequence; identical to SEQ ID NO: 35203
  Cyclic GFR-binding peptide
  MOD_RES (2)..(34)..(35): Xaa is C or S

SEQ ID NO: 88616 - protein, 32 aa, Artificial Sequence
  Cyclic GFR-binding peptide
  MOD_RES (2)..(2): Xaa is C or S
GXRDVVMGSMEGIIIQQKDNMIQMTINSMKTP

SEQ ID NO: 88617 - protein, 23 aa, Artificial Sequence
  Cyclic GFR-binding peptide
VVMSMEGLVKPTRGVMIQITINS

SEQ ID NO: 88618 - protein, 37 aa, Artificial Sequence; identical to SEQ ID NO: 35210
  Cyclic GFR-binding peptide
  MOD_RES (1)..(3)..(35)..(36): Xaa is C or S

SEQ ID NO: 88619 - protein, 35 aa, Artificial Sequence; identical to SEQ ID NO: 35212
  Cyclic GFR-binding peptide
  MOD_RES (31)..(32): Xaa is C or S

SEQ ID NO: 88620 - protein, 38 aa, Artificial Sequence; identical to SEQ ID NO: 35213
  Cyclic GFR-binding peptide
  MOD_RES (2)..(4)..(36)..(37): Xaa is C or S

SEQ ID NO: 88621 - protein, 38 aa, Artificial Sequence; identical to SEQ ID NO: 35214
  Cyclic GFR-binding peptide
  MOD_RES (1)..(32)..(33): Xaa is C or S

SEQ ID NO: 88622 - protein, 27 aa, Artificial Sequence
  Cyclic GFR-binding peptide
VMDSMEGLVVNNAADMIQITINSLRAP

SEQ ID NO: 88623 - protein, 32 aa, Artificial Sequence
  Cyclic GFR-binding peptide
  MOD_RES (30)..(31): Xaa is C or S
VVMNSMEGLIVNSSDDMIQVTINSLKTPAXXP

SEQ ID NO: 88624 - protein, 30 aa, Artificial Sequence
  Cyclic GFR-binding peptide
  MOD_RES (28)..(29): Xaa is C or S
MDSMEGIVVNNAADMIQITINSLRAPVXXS

SEQ ID NO: 88625 - protein, 41 aa, Artificial Sequence; identical to SEQ ID NO: 35218
  Cyclic GFR-binding peptide
  MOD_RES (1)..(3)..(35)..(36): Xaa is C or S

SEQ ID NO: 88626 - protein, 27 aa, Artificial Sequence
  Cyclic GFR-binding peptide
VVMGSMEGIIIQQKDNMIQMTINSMKT

SEQ ID NO: 88627 - protein, 34 aa, Artificial Sequence; identical to SEQ ID NO: 35221
  Cyclic GFR-binding peptide
  MOD_RES (2)..(4): Xaa is C or S

SEQ ID NO: 88628 - protein, 37 aa, Artificial Sequence; identical to SEQ ID NO: 35223
  Cyclic GFR-binding peptide
  MOD_RES (32)..(33): Xaa is C or S

SEQ ID NO: 88629 - protein, 34 aa, Artificial Sequence
  Cyclic GFR-binding peptide
  MOD_RES (30)..(31): Xaa is C or S
VVMDSMEGLVVNNAADMIQITINSLRAPVXXSAP

SEQ ID NO: 88630 - protein, 24 aa, Artificial Sequence
  Cyclic GFR-binding peptide
VMGSMEGIIIQQKDNMIQMTINSM

SEQ ID NO: 88631 - protein, 35 aa, Artificial Sequence
  Cyclic GFR-binding peptide
  MOD_RES (30)..(31): Xaa is C or S
EVIMSMEGLLLVRGNDMIQMTINSTKVPAXXTSPV

SEQ ID NO: 88632 - protein, 32 aa, Artificial Sequence; identical to SEQ ID NO: 35227
  Cyclic GFR-binding peptide
  MOD_RES (31)..(32): Xaa is C or S

SEQ ID NO: 88633 - protein, 37 aa, Artificial Sequence; identical to SEQ ID NO: 35229
  Cyclic GFR-binding peptide
  MOD_RES (1)..(3)..(35)..(36): Xaa is C or S

SEQ ID NO: 88634 - protein, 32 aa, Artificial Sequence
  Cyclic GFR-binding peptide
  MOD_RES (28)..(29): Xaa is C or S
MNSMEGLIVNSSDDMIQVTINSLKTPAXXPKP

SEQ ID NO: 88635 - protein, 37 aa, Artificial Sequence; identical to SEQ ID NO: 35231
  Cyclic GFR-binding peptide
  MOD_RES (1)..(32)..(33): Xaa is C or S

SEQ ID NO: 88636 - protein, 22 aa, Artificial Sequence
  Cyclic GFR-binding peptide
SMEGIVVNNASDMIQITINSLR

SEQ ID NO: 88637 - protein, 29 aa, Artificial Sequence
  Cyclic GFR-binding peptide
  MOD_RES (27)..(28): Xaa is C or S
DSMEGIVVNNAADMIQITINSLRAPVXXS

SEQ ID NO: 88638 - protein, 29 aa, Artificial Sequence
  Cyclic GFR-binding peptide
  MOD_RES (29)..(29): Xaa is C or S
VIMSMEGLVKPKRGVMIQITINSLAQPVX

SEQ ID NO: 88639 - protein, 22 aa, Artificial Sequence
  Cyclic GFR-binding peptide
MSMEGLVKPKRGVMIQITINSL

SEQ ID NO: 88640 - protein, 27 aa, Artificial Sequence
  Cyclic GFR-binding peptide
  MOD_RES (1)..(1): Xaa is C or S
XEEVIMSMEGLLLVRGNDMIQMTINST

SEQ ID NO: 88641 - protein, 41 aa, Artificial Sequence; identical to SEQ ID NO: 35233
  Cyclic GFR-binding peptide
  MOD_RES (2)..(4)..(36)..(37): Xaa is C or S

SEQ ID NO: 88642 - protein, 31 aa, Artificial Sequence
  Cyclic GFR-binding peptide
  MOD_RES (27)..(28): Xaa is C or S
MSMEGLIKPTKGIMIQITINSLDQSVXXPSA

SEQ ID NO: 88643 - protein, 39 aa, Artificial Sequence; identical to SEQ ID NO: 35236
  Cyclic GFR-binding peptide
  MOD_RES (1)..(3)..(35)..(36): Xaa is C or S

SEQ ID NO: 88644 - protein, 40 aa, Artificial Sequence; identical to SEQ ID NO: 35241
  Cyclic GFR-binding peptide
  MOD_RES (2)..(4)..(36)..(37): Xaa is C or S

SEQ ID NO: 88645 - protein, 32 aa, Artificial Sequence; identical to SEQ ID NO: 35242
  Cyclic GFR-binding peptide
  MOD_RES (32)..(32): Xaa is C or S

SEQ ID NO: 88646 - protein, 24 aa, Artificial Sequence
  Cyclic GFR-binding peptide
KVIMSMEGLIKPTKGIMIQITINS

SEQ ID NO: 88647 - protein, 37 aa, Artificial Sequence; identical to SEQ ID NO: 35243
  Cyclic GFR-binding peptide
  MOD_RES (1)..(33)..(34): Xaa is C or S

SEQ ID NO: 88648 - protein, 25 aa, Artificial Sequence
  Cyclic GFR-binding peptide
MSMEGLIKPTKGIMIQITINSLDQS

SEQ ID NO: 88649 - protein, 30 aa, Artificial Sequence
  Cyclic GFR-binding peptide
  MOD_RES (26)..(27): Xaa is C or S
SMEGLIVNSSDDMIQVTINSLKTPAXXPKP

SEQ ID NO: 88650 - protein, 37 aa, Artificial Sequence; identical to SEQ ID NO: 35249
  Cyclic GFR-binding peptide
  MOD_RES (1)..(3)..(35)..(36): Xaa is C or S

SEQ ID NO: 88651 - protein, 32 aa, Artificial Sequence
  Cyclic GFR-binding peptide
  MOD_RES (29)..(30): Xaa is C or S
VMDSMEGIVVNNAADMIQITINSLRAPVXXSA

SEQ ID NO: 88652 - protein, 35 aa, Artificial Sequence; identical to SEQ ID NO: 35250
  Cyclic GFR-binding peptide
  MOD_RES (2)..(34)..(35): Xaa is C or S

SEQ ID NO: 88653 - protein, 33 aa, Artificial Sequence
  Cyclic GFR-binding peptide
  MOD_RES (1)..(3): Xaa is C or S
XGXAEVVMDSMEGIVVNNAADMIQITINSLRAP

SEQ ID NO: 88654 - protein, 35 aa, Artificial Sequence; identical to SEQ ID NO: 35252
  Cyclic GFR-binding peptide
  MOD_RES (2)..(4)..(35): Xaa is C or S

SEQ ID NO: 88655 - protein, 26 aa, Artificial Sequence
  Cyclic GFR-binding peptide
  MOD_RES (26)..(26): Xaa is C or S
SMEGILLVRGNDMIQMTINSTKVPAX

SEQ ID NO: 88656 - protein, 33 aa, Artificial Sequence; identical to SEQ ID NO: 35254
  Cyclic GFR-binding peptide
  MOD_RES (32)..(33): Xaa is C or S

SEQ ID NO: 88657 - protein, 21 aa, Artificial Sequence
  Cyclic GFR-binding peptide
MSMEGILLVRGNDMIQMTINS

SEQ ID NO: 88658 - protein, 28 aa, Artificial Sequence
  Cyclic GFR-binding peptide
RVIMSMEGLVKPKRGVMIQITINSLAQP

SEQ ID NO: 88659 - protein, 34 aa, Artificial Sequence; identical to SEQ ID NO: 35255
  Cyclic GFR-binding peptide
  MOD_RES (31)..(32): Xaa is C or S

SEQ ID NO: 88660 - protein, 39 aa, Artificial Sequence; identical to SEQ ID NO: 35257
  Cyclic GFR-binding peptide
  MOD_RES (2)..(4)..(35)..(36): Xaa is C or S

SEQ ID NO: 88661 - protein, 30 aa, Artificial Sequence
  Cyclic GFR-binding peptide
  MOD_RES (1)..(3): Xaa is C or S
XGXSRVVMNSMEGLIVNSSDDMIQVTINSL

SEQ ID NO: 88662 - protein, 34 aa, Artificial Sequence
  Cyclic GFR-binding peptide
  MOD_RES (28)..(29): Xaa is C or S
MDSMEGLVVNNASDMIQITINSLRTPVXXTPPTS

SEQ ID NO: 88663 - protein, 29 aa, Artificial Sequence
  Cyclic GFR-binding peptide
SKVVMSMEGLVKPTRGVMIQITINSLDQP

SEQ ID NO: 88664 - protein, 29 aa, Artificial Sequence
  Cyclic GFR-binding peptide
  MOD_RES (1)..(3): Xaa is C or S
XGXEEVIMSMEGILLVRGNDMIQMTINST

SEQ ID NO: 88665 - protein, 29 aa, Artificial Sequence
  Cyclic GFR-binding peptide
  MOD_RES (28)..(29): Xaa is C or S
IMSMEGLVKPKRGVMIQITINSLAQPVXX

SEQ ID NO: 88666 - protein, 26 aa, Artificial Sequence
  Cyclic GFR-binding peptide
AEVVMDSMEGLVVNNAADMIQITINS

SEQ ID NO: 88667 - protein, 31 aa, Artificial Sequence
  Cyclic GFR-binding peptide
  MOD_RES (27)..(28): Xaa is C or S
DSMEGIVVNNASDMIQITINSLRTPVXXTPP

SEQ ID NO: 88668 - protein, 30 aa, Artificial Sequence
  Cyclic GFR-binding peptide
  MOD_RES (29)..(30): Xaa is C or S
VMNSMEGLIVNSSDDMIQVTINSLKTPAXX

SEQ ID NO: 88669 - protein, 30 aa, Artificial Sequence
  Cyclic GFR-binding peptide
  MOD_RES (1)..(3): Xaa is C or S
XKXSKVVMSMEGLVKPTRGVMIQITINSLD

SEQ ID NO: 88670 - protein, 36 aa, Artificial Sequence; identical to SEQ ID NO: 35262
  Cyclic GFR-binding peptide
  MOD_RES (2)..(4)..(36): Xaa is C or S

SEQ ID NO: 88671 - protein, 32 aa, Artificial Sequence; identical to SEQ ID NO: 35263
  Cyclic GFR-binding peptide
  MOD_RES (31)..(32): Xaa is C or S

SEQ ID NO: 88672 - protein, 37 aa, Artificial Sequence; identical to SEQ ID NO: 35266
  Cyclic GFR-binding peptide
  MOD_RES (31)..(32): Xaa is C or S

SEQ ID NO: 88673 - protein, 32 aa, Artificial Sequence
  Cyclic GFR-binding peptide
  MOD_RES (26)..(27): Xaa is C or S
SMEGIIIQQKDNMIQMTINSMKTPTXXPGASG

SEQ ID NO: 88674 - protein, 36 aa, Artificial Sequence; identical to SEQ ID NO: 35272
  Cyclic GFR-binding peptide
  MOD_RES (32)..(33): Xaa is C or S

SEQ ID NO: 88675 - protein, 33 aa, Artificial Sequence; identical to SEQ ID NO: 35274
  Cyclic GFR-binding peptide
  MOD_RES (2)..(2): Xaa is C or S

SEQ ID NO: 88676 - protein, 32 aa, Artificial Sequence; identical to SEQ ID NO: 35275
  Cyclic GFR-binding peptide
  MOD_RES (2)..(2): Xaa is C or S

SEQ ID NO: 88677 - protein, 34 aa, Artificial Sequence; identical to SEQ ID NO: 35276
  Cyclic GFR-binding peptide
  MOD_RES (31)..(32): Xaa is C or S

SEQ ID NO: 88678 - protein, 25 aa, Artificial Sequence
  Cyclic GFR-binding peptide
VVMGSMEGIIIQQKDNMIQMTINSM

SEQ ID NO: 88679 - protein, 38 aa, Artificial Sequence; identical to SEQ ID NO: 35283
  Cyclic GFR-binding peptide
  MOD_RES (2)..(4)..(36)..(37): Xaa is C or S

SEQ ID NO: 88680 - protein, 24 aa, Artificial Sequence
  Cyclic GFR-binding peptide
VMNSMEGLIVNSSDDMIQVTINSL

SEQ ID NO: 88681 - protein, 26 aa, Artificial Sequence
  Cyclic GFR-binding peptide
VMSMEGLVKPTRGVMIQITINSLDQP

SEQ ID NO: 88682 - protein, 26 aa, Artificial Sequence
  Cyclic GFR-binding peptide
  MOD_RES (1)..(1): Xaa is C or S
XEEVIMSMEGILLVRGNDMIQMTINS

SEQ ID NO: 88683 - protein, 31 aa, Artificial Sequence
  Cyclic GFR-binding peptide
  MOD_RES (30)..(31): Xaa is C or S
KVVMSMEGLVKPTRGVMIQITINSLDQPVXX

SEQ ID NO: 88684 - protein, 28 aa, Artificial Sequence
  Cyclic GFR-binding peptide
  MOD_RES (26)..(27): Xaa is C or S
SMEGLIKPTKGIMIQITINSLDQSVXXP

SEQ ID NO: 88685 - protein, 36 aa, Artificial Sequence; identical to SEQ ID NO: 35285
  Cyclic GFR-binding peptide
  MOD_RES (32)..(33): Xaa is C or S

SEQ ID NO: 88686 - protein, 31 aa, Artificial Sequence; identical to SEQ ID NO: 35292
  Cyclic GFR-binding peptide
  MOD_RES (31)..(31): Xaa is C or S

SEQ ID NO: 88687 - protein, 37 aa, Artificial Sequence; identical to SEQ ID NO: 35293
  Cyclic GFR-binding peptide
  MOD_RES (31)..(32): Xaa is C or S

SEQ ID NO: 88688 - protein, 30 aa, Artificial Sequence
  Cyclic GFR-binding peptide
  MOD_RES (28)..(29): Xaa is C or S
MDSMEGLVVNNASDMIQITINSLRTPVXXT

SEQ ID NO: 88689 - protein, 21 aa, Artificial Sequence
  Cyclic GFR-binding peptide
GSMEGLIIQQKDNMIQMTINS

SEQ ID NO: 88690 - protein, 28 aa, Artificial Sequence
  Cyclic GFR-binding peptide
  MOD_RES (1)..(3): Xaa is C or S
XKXSKVIMSMEGLIKPTKGIMIQITINS

SEQ ID NO: 88691 - protein, 29 aa, Artificial Sequence
  Cyclic GFR-binding peptide
  MOD_RES (2)..(2): Xaa is C or S
KXSRVIMSMEGLVKPKRGVMIQITINSLA

SEQ ID NO: 88692 - protein, 25 aa, Artificial Sequence
  Cyclic GFR-binding peptide
SMEGILLVRGNDMIQMTINSTKVPA

SEQ ID NO: 88693 - protein, 29 aa, Artificial Sequence
  Cyclic GFR-binding peptide
VVMDSMEGLVVNNASDMIQITINSLRTPV

SEQ ID NO: 88694 - protein, 37 aa, Artificial Sequence; identical to SEQ ID NO: 35311
  Cyclic GFR-binding peptide
  MOD_RES (1)..(33)..(34): Xaa is C or S

SEQ ID NO: 88695 - protein, 34 aa, Artificial Sequence; identical to SEQ ID NO: 35312
  Cyclic GFR-binding peptide
  MOD_RES (2)..(34): Xaa is C or S

SEQ ID NO: 88696 - protein, 28 aa, Artificial Sequence
  Cyclic GFR-binding peptide
  MOD_RES (1)..(1): Xaa is C or S
XSRVIMSMEGLVKPKRGVMIQITINSLA

SEQ ID NO: 88697 - protein, 20 aa, Artificial Sequence
  Cyclic GFR-binding peptide
SMEGLVKPKRGVMIQITINS

SEQ ID NO: 88698 - protein, 35 aa, Artificial Sequence; identical to SEQ ID NO: 35317
  Cyclic GFR-binding peptide
  MOD_RES (1)..(33)..(34): Xaa is C or S

SEQ ID NO: 88699 - protein, 34 aa, Artificial Sequence
  Cyclic GFR-binding peptide
  MOD_RES (30)..(31): Xaa is C or S
VVMDSMEGLVVNNASDMIQITINSLRTPVXXTPP

SEQ ID NO: 88700 - protein, 33 aa, Artificial Sequence
  Cyclic GFR-binding peptide
  MOD_RES (29)..(30): Xaa is C or S
VMNSMEGLIVNSSDDMIQVTINSLKTPAXXPKP

SEQ ID NO: 88701 - protein, 24 aa, Artificial Sequence
  Cyclic GFR-binding peptide
MSMEGLLLVRGNDMIQMTINSTKV

SEQ ID NO: 88702 - protein, 36 aa, Artificial Sequence; identical to SEQ ID NO: 35323
  Cyclic GFR-binding peptide
  MOD_RES (32)..(33): Xaa is C or S

SEQ ID NO: 88703 - protein, 38 aa, Artificial Sequence; identical to SEQ ID NO: 35325
  Cyclic GFR-binding peptide
  MOD_RES (2)..(33)..(34): Xaa is C or S

SEQ ID NO: 88704 - protein, 29 aa, Artificial Sequence
  Cyclic GFR-binding peptide
KVVMSMEGLVKPTRGVMIQITINSLDQPV

SEQ ID NO: 88705 - protein, 31 aa, Artificial Sequence
  Cyclic GFR-binding peptide
  MOD_RES (26)..(27): Xaa is C or S
SMEGIVVNNAADMIQITINSLRAPVXXSAPA

SEQ ID NO: 88706 - protein, 24 aa, Artificial Sequence
  Cyclic GFR-binding peptide
SMEGLIVNSSDDMIQVTINSLKTP

SEQ ID NO: 88707 - protein, 33 aa, Artificial Sequence
  Cyclic GFR-binding peptide
  MOD_RES (2)..(4): Xaa is C or S
LXGXEEVIMSMEGILLVRGNDMIQMTINSTKVP

SEQ ID NO: 88708 - protein, 34 aa, Artificial Sequence
  Cyclic GFR-binding peptide
  MOD_RES (29)..(30): Xaa is C or S
VMGSMEGLIIQQKDNMIQMTINSMKTPTXXPGAS

SEQ ID NO: 88709 - protein, 28 aa, Artificial Sequence
  Cyclic GFR-binding peptide
  MOD_RES (28)..(28): Xaa is C or S
MGSMEGIIIQQKDNMIQMTINSMKTPTX

SEQ ID NO: 88710 - protein, 31 aa, Artificial Sequence
  Cyclic GFR-binding peptide
  MOD_RES (26)..(27): Xaa is C or S
SMEGLVKPKRGVMIQITINSLAQPVXXPAAS

SEQ ID NO: 88711 - protein, 27 aa, Artificial Sequence
  Cyclic GFR-binding peptide
MDSMEGLVVNNAADMIQITINSLRAPV

SEQ ID NO: 88712 - protein, 37 aa, Artificial Sequence; identical to SEQ ID NO: 35335
  Cyclic GFR-binding peptide
  MOD_RES (2)..(4)..(36)..(37): Xaa is C or S

SEQ ID NO: 88713 - protein, 25 aa, Artificial Sequence
  Cyclic GFR-binding peptide
MSMEGLLLVRGNDMIQMTINSTKVP

SEQ ID NO: 88714 - protein, 25 aa, Artificial Sequence
  Cyclic GFR-binding peptide
MDSMEGIVVNNASDMIQITINSLRT

SEQ ID NO: 88715 - protein, 29 aa, Artificial Sequence
  Cyclic GFR-binding peptide
  MOD_RES (2)..(2): Xaa is C or S
GXSRVVMNSMEGLIVNSSDDMIQVTINSL

SEQ ID NO: 88716 - protein, 36 aa, Artificial Sequence; identical to SEQ ID NO: 35341
  Cyclic GFR-binding peptide
  MOD_RES (31)..(32): Xaa is C or S

SEQ ID NO: 88717 - protein, 32 aa, Artificial Sequence
  Cyclic GFR-binding peptide
  MOD_RES (30)..(31): Xaa is C or S
EVIMSMEGILLVRGNDMIQMTINSTKVPAXXT

SEQ ID NO: 88718 - protein, 33 aa, Artificial Sequence; identical to SEQ ID NO: 35345
  Cyclic GFR-binding peptide
  MOD_RES (32)..(33): Xaa is C or S

SEQ ID NO: 88719 - protein, 40 aa, Artificial Sequence; identical to SEQ ID NO: 35346
  Cyclic GFR-binding peptide
  MOD_RES (1)..(3)..(34)..(35): Xaa is C or S

SEQ ID NO: 88720 - protein, 31 aa, Artificial Sequence
  Cyclic GFR-binding peptide
  MOD_RES (1)..(3): Xaa is C or S
XGXEEVIMSMEGLLLVRGNDMIQMTINSTKV

SEQ ID NO: 88721 - protein, 30 aa, Artificial Sequence
  Cyclic GFR-binding peptide
AEVVMDSMEGLVVNNAADMIQITINSLRAP

SEQ ID NO: 88722 - protein, 35 aa, Artificial Sequence; identical to SEQ ID NO: 35347
  Cyclic GFR-binding peptide
  MOD_RES (2)..(4): Xaa is C or S

SEQ ID NO: 88723 - protein, 31 aa, Artificial Sequence
  Cyclic GFR-binding peptide
  MOD_RES (30)..(31): Xaa is C or S
VVMGSMEGIIIQQKDNMIQMTINSMKTPTXX

SEQ ID NO: 88724 - protein, 34 aa, Artificial Sequence; identical to SEQ ID NO: 35352
  Cyclic GFR-binding peptide
  MOD_RES (31)..(32): Xaa is C or S

SEQ ID NO: 88725 - protein, 27 aa, Artificial Sequence
  Cyclic GFR-binding peptide
EVIMSMEGILLVRGNDMIQMTINSTKV

SEQ ID NO: 88726 - protein, 29 aa, Artificial Sequence
  Cyclic GFR-binding peptide
RDVVMGSMEGLIIQQKDNMIQMTINSMKT

SEQ ID NO: 88727 - protein, 27 aa, Artificial Sequence
  Cyclic GFR-binding peptide
EVVMDSMEGIVVNNAADMIQITINSLR

SEQ ID NO: 88728 - protein, 33 aa, Artificial Sequence
  Cyclic GFR-binding peptide
  MOD_RES (2)..(4): Xaa is C or S
SXGXRDVVMGSMEGLIIQQKDNMIQMTINSMKT

SEQ ID NO: 88729 - protein, 31 aa, Artificial Sequence; identical to SEQ ID NO: 35360
  Cyclic GFR-binding peptide
  MOD_RES (31)..(31): Xaa is C or S

SEQ ID NO: 88730 - protein, 27 aa, Artificial Sequence
  Cyclic GFR-binding peptide
MDSMEGIVVNNASDMIQITINSLRTPV

SEQ ID NO: 88731 - protein, 30 aa, Artificial Sequence
  Cyclic GFR-binding peptide
  MOD_RES (28)..(29): Xaa is C or S
IMSMEGILLVRGNDMIQMTINSTKVPAXXT

SEQ ID NO: 88732 - protein, 36 aa, Artificial Sequence; identical to SEQ ID NO: 35364
  Cyclic GFR-binding peptide
  MOD_RES (2)..(4)..(36): Xaa is C or S

SEQ ID NO: 88733 - protein, 33 aa, Artificial Sequence
  Cyclic GFR-binding peptide
  MOD_RES (28)..(29): Xaa is C or S
MNSMEGLIVNSSDDMIQVTINSLKTPAXXPKPV

SEQ ID NO: 88734 - protein, 36 aa, Artificial Sequence; identical to SEQ ID NO: 35365
  Cyclic GFR-binding peptide
  MOD_RES (1)..(3)..(35)..(36): Xaa is C or S

SEQ ID NO: 88735 - protein, 34 aa, Artificial Sequence
  Cyclic GFR-binding peptide
  MOD_RES (29)..(30): Xaa is C or S
VIMSMEGLIKPTKGIMIQITINSLDQSVXXPSAS

SEQ ID NO: 88736 - protein, 30 aa, Artificial Sequence
  Cyclic GFR-binding peptide
  MOD_RES (30)..(30): Xaa is C or S
KVVMSMEGLVKPTRGVMIQITINSLDQPVX

SEQ ID NO: 88737 - protein, 35 aa, Artificial Sequence; identical to SEQ ID NO: 35369
  Cyclic GFR-binding peptide
  MOD_RES (1)..(3)..(35): Xaa is C or S

SEQ ID NO: 88738 - protein, 36 aa, Artificial Sequence; identical to SEQ ID NO: 35371
  Cyclic GFR-binding peptide
  MOD_RES (1)..(3)..(34)..(35): Xaa is C or S

SEQ ID NO: 88739 - protein, 38 aa, Artificial Sequence; identical to SEQ ID NO: 35372
  Cyclic GFR-binding peptide
  MOD_RES (2)..(34)..(35): Xaa is C or S

SEQ ID NO: 88740 - protein, 33 aa, Artificial Sequence; identical to SEQ ID NO: 35373
  Cyclic GFR-binding peptide
  MOD_RES (1)..(3): Xaa is C or S

SEQ ID NO: 88741 - protein, 36 aa, Artificial Sequence; identical to SEQ ID NO: 35374
  Cyclic GFR-binding peptide
  MOD_RES (31)..(32): Xaa is C or S

SEQ ID NO: 88742 - protein, 29 aa, Artificial Sequence
  Cyclic GFR-binding peptide
  MOD_RES (27)..(28): Xaa is C or S
MSMEGLVKPKRGVMIQITINSLAQPVXXP

SEQ ID NO: 88743 - protein, 29 aa, Artificial Sequence
  Cyclic GFR-binding peptide
  MOD_RES (26)..(27): Xaa is C or S
SMEGLIKPTKGIMIQITINSLDQSVXXPS

SEQ ID NO: 88744 - protein, 23 aa, Artificial Sequence
  Cyclic GFR-binding peptide
MNSMEGLIVNSSDDMIQVTINSL

SEQ ID NO: 88745 - protein, 36 aa, Artificial Sequence
  Cyclic GFR-binding peptide
  MOD_RES (30)..(31): Xaa is C or S
VVMDSMEGLVVNNAADMIQITINSLRAPVXXSAPAA

SEQ ID NO: 88746 - protein, 40 aa, Artificial Sequence; identical to SEQ ID NO: 35382
  Cyclic GFR-binding peptide
  MOD_RES (2)..(34)..(35): Xaa is C or S

SEQ ID NO: 88747 - protein, 30 aa, Artificial Sequence
  Cyclic GFR-binding peptide
SEVVMDSMEGIVVNNASDMIQITINSLRTP

SEQ ID NO: 88748 - protein, 39 aa, Artificial Sequence; identical to SEQ ID NO: 35385
  Cyclic GFR-binding peptide
  MOD_RES (2)..(33)..(34): Xaa is C or S

SEQ ID NO: 88749 - protein, 20 aa, Artificial Sequence
  Cyclic GFR-binding peptide
SMEGLVVNNASDMIQITINS

SEQ ID NO: 88750 - protein, 37 aa, Artificial Sequence; identical to SEQ ID NO: 35386
  Cyclic GFR-binding peptide
  MOD_RES (31)..(32): Xaa is C or S

SEQ ID NO: 88751 - protein, 36 aa, Artificial Sequence; identical to SEQ ID NO: 35388
  Cyclic GFR-binding peptide
  MOD_RES (1)..(3)..(35)..(36): Xaa is C or S

SEQ ID NO: 88752 - protein, 42 aa, Artificial Sequence; identical to SEQ ID NO: 35390
  Cyclic GFR-binding peptide
  MOD_RES (2)..(4)..(36)..(37): Xaa is C or S

SEQ ID NO: 88753 - protein, 28 aa, Artificial Sequence
  Cyclic GFR-binding peptide
VMGSMEGIIIQQKDNMIQMTINSMKTPT

SEQ ID NO: 88754 - protein, 22 aa, Artificial Sequence
  Cyclic GFR-binding peptide
SMEGIVVNNAADMIQITINSLR

SEQ ID NO: 88755 - protein, 31 aa, Artificial Sequence
  Cyclic GFR-binding peptide
  MOD_RES (28)..(29): Xaa is C or S
IMSMEGILLVRGNDMIQMTINSTKVPAXXTS

SEQ ID NO: 88756 - protein, 32 aa, Artificial Sequence
  Cyclic GFR-binding peptide
  MOD_RES (30)..(31): Xaa is C or S
VVMGSMEGLIIQQKDNMIQMTINSMKTPTXXP

SEQ ID NO: 88757 - protein, 38 aa, Artificial Sequence; identical to SEQ ID NO: 35412
  Cyclic GFR-binding peptide
  MOD_RES (1)..(33)..(34): Xaa is C or S

SEQ ID NO: 88758 - protein, 39 aa, Artificial Sequence; identical to SEQ ID NO: 35416
  Cyclic GFR-binding peptide
  MOD_RES (2)..(4)..(35)..(36): Xaa is C or S

SEQ ID NO: 88759 - protein, 34 aa, Artificial Sequence
  Cyclic GFR-binding peptide
  MOD_RES (28)..(29): Xaa is C or S
IMSMEGILLVRGNDMIQMTINSTKVPAXXTSPVR

SEQ ID NO: 88760 - protein, 27 aa, Artificial Sequence
  Cyclic GFR-binding peptide
  MOD_RES (26)..(27): Xaa is C or S
SMEGLIVNSSDDMIQVTINSLKTPAXX

SEQ ID NO: 88761 - protein, 22 aa, Artificial Sequence
  Cyclic GFR-binding peptide
SMEGLVVNNASDMIQITINSLR

SEQ ID NO: 88762 - protein, 30 aa, Artificial Sequence; identical to SEQ ID NO: 35419
  Cyclic GFR-binding peptide

SEQ ID NO: 88763 - protein, 31 aa, Artificial Sequence
  Cyclic GFR-binding peptide
  MOD_RES (26)..(27): Xaa is C or S
SMEGLIVNSSDDMIQVTINSLKTPAXXPKPV

SEQ ID NO: 88764 - protein, 37 aa, Artificial Sequence; identical to SEQ ID NO: 35420
  Cyclic GFR-binding peptide
  MOD_RES (1)..(33)..(34): Xaa is C or S

SEQ ID NO: 88765 - protein, 41 aa, Artificial Sequence; identical to SEQ ID NO: 35422
  Cyclic GFR-binding peptide
  MOD_RES (2)..(4)..(35)..(36): Xaa is C or S

SEQ ID NO: 88766 - protein, 35 aa, Artificial Sequence; identical to SEQ ID NO: 35425
  Cyclic GFR-binding peptide
  MOD_RES (1)..(33)..(34): Xaa is C or S

SEQ ID NO: 88767 - protein, 39 aa, Artificial Sequence; identical to SEQ ID NO: 35424
  Cyclic GFR-binding peptide
  MOD_RES (1)..(3)..(34)..(35): Xaa is C or S

SEQ ID NO: 88768 - protein, 25 aa, Artificial Sequence
  Cyclic GFR-binding peptide
SMEGLVKPKRGVMIQITINSLAQPV

SEQ ID NO: 88769 - protein, 35 aa, Artificial Sequence
  Cyclic GFR-binding peptide
  MOD_RES (30)..(31): Xaa is C or S
VVMDSMEGIVVNNASDMIQITINSLRTPVXXTPPT

SEQ ID NO: 88770 - protein, 40 aa, Artificial Sequence; identical to SEQ ID NO: 35427
  Cyclic GFR-binding peptide
  MOD_RES (2)..(4)..(35)..(36): Xaa is C or S

SEQ ID NO: 88771 - protein, 28 aa, Artificial Sequence
  Cyclic GFR-binding peptide
SEVVMDSMEGIVVNNASDMIQITINSLR

SEQ ID NO: 88772 - protein, 29 aa, Artificial Sequence
  Cyclic GFR-binding peptide
  MOD_RES (1)..(3): Xaa is C or S
XGXRDVVMGSMEGIIIQQKDNMIQMTINS

SEQ ID NO: 88773 - protein, 30 aa, Artificial Sequence
  Cyclic GFR-binding peptide
  MOD_RES (26)..(27): Xaa is C or S
SMEGLVKPTRGVMIQITINSLDQPVXXPSA

SEQ ID NO: 88774 - protein, 32 aa, Artificial Sequence
  Cyclic GFR-binding peptide
  MOD_RES (26)..(27): Xaa is C or S
SMEGLIVNSSDDMIQVTINSLKTPAXXPKPVH

SEQ ID NO: 88775 - protein, 33 aa, Artificial Sequence
  Cyclic GFR-binding peptide
  MOD_RES (29)..(30): Xaa is C or S
VMGSMEGIIIQQKDNMIQMTINSMKTPTXXPGA

SEQ ID NO: 88776 - protein, 34 aa, Artificial Sequence; identical to SEQ ID NO: 35432
  Cyclic GFR-binding peptide
  MOD_RES (32)..(33): Xaa is C or S

SEQ ID NO: 88777 - protein, 35 aa, Artificial Sequence; identical to SEQ ID NO: 35434
  Cyclic GFR-binding peptide
  MOD_RES (2)..(4): Xaa is C or S

SEQ ID NO: 88778 - protein, 34 aa, Artificial Sequence; identical to SEQ ID NO: 35435
  Cyclic GFR-binding peptide
  MOD_RES (1)..(33)..(34): Xaa is C or S

SEQ ID NO: 88779 - protein, 30 aa, Artificial Sequence
  Cyclic GFR-binding peptide
  MOD_RES (26)..(27): Xaa is C or S
SMEGLVKPKRGVMIQITINSLAQPVXXPAA

SEQ ID NO: 88780 - protein, 29 aa, Artificial Sequence
  Cyclic GFR-binding peptide
  MOD_RES (1)..(3): Xaa is C or S
XKXSKVIMSMEGLIKPTKGIMIQITINSL

SEQ ID NO: 88781 - protein, 35 aa, Artificial Sequence
  Cyclic GFR-binding peptide
  MOD_RES (30)..(31): Xaa is C or S
KVIMSMEGLIKPTKGIMIQITINSLDQSVXXPSAS

SEQ ID NO: 88782 - protein, 38 aa, Artificial Sequence; identical to SEQ ID NO: 35439
  Cyclic GFR-binding peptide
  MOD_RES (1)..(3)..(35)..(36): Xaa is C or S

SEQ ID NO: 88783 - protein, 31 aa, Artificial Sequence
  Cyclic GFR-binding peptide
  MOD_RES (1)..(3): Xaa is C or S
XGXAEVVMDSMEGLVVNNAADMIQITINSLR

SEQ ID NO: 88784 - protein, 28 aa, Artificial Sequence
  Cyclic GFR-binding peptide
  MOD_RES (28)..(28): Xaa is C or S
IMSMEGLVKPKRGVMIQITINSLAQPVX

SEQ ID NO: 88785 - protein, 29 aa, Artificial Sequence
  Cyclic GFR-binding peptide
  MOD_RES (29)..(29): Xaa is C or S
VVMSMEGLVKPTRGVMIQITINSLDQPVX

SEQ ID NO: 88786 - protein, 34 aa, Artificial Sequence; identical to SEQ ID NO: 35446
  Cyclic GFR-binding peptide
  MOD_RES (32)..(33): Xaa is C or S

SEQ ID NO: 88787 - protein, 26 aa, Artificial Sequence
  Cyclic GFR-binding peptide
AEVVMDSMEGIVVNNAADMIQITINS

SEQ ID NO: 88788 - protein, 34 aa, Artificial Sequence
  Cyclic GFR-binding peptide
  MOD_RES (28)..(29): Xaa is C or S
MNSMEGLIVNSSDDMIQVTINSLKTPAXXPKPVH

SEQ ID NO: 88789 - protein, 29 aa, Artificial Sequence
  Cyclic GFR-binding peptide
AEVVMDSMEGIVVNNAADMIQITINSLRA

SEQ ID NO: 88790 - protein, 32 aa, Artificial Sequence
  Cyclic GFR-binding peptide
  MOD_RES (29)..(30): Xaa is C or S
VMDSMEGIVVNNASDMIQITINSLRTPVXXTP

SEQ ID NO: 88791 - protein, 32 aa, Artificial Sequence
  Cyclic GFR-binding peptide
  MOD_RES (26)..(27): Xaa is C or S
SMEGIVVNNASDMIQITINSLRTPVXXTPPTS

SEQ ID NO: 88792 - protein, 26 aa, Artificial Sequence
  Cyclic GFR-binding peptide
EVIMSMEGILLVRGNDMIQMTINSTK

SEQ ID NO: 88793 - protein, 27 aa, Artificial Sequence
  Cyclic GFR-binding peptide
  MOD_RES (27)..(27): Xaa is C or S
DSMEGIVVNNASDMIQITINSLRTPVX

SEQ ID NO: 88794 - protein, 28 aa, Artificial Sequence
  Cyclic GFR-binding peptide
SKVVMSMEGLVKPTRGVMIQITINSLDQ

SEQ ID NO: 88795 - protein, 32 aa, Artificial Sequence
  Cyclic GFR-binding peptide
  MOD_RES (27)..(28): Xaa is C or S
MSMEGLLLVRGNDMIQMTINSTKVPAXXTSPV

SEQ ID NO: 88796 - protein, 33 aa, Artificial Sequence; identical to SEQ ID NO: 35464
  Cyclic GFR-binding peptide
  MOD_RES (2)..(2): Xaa is C or S

SEQ ID NO: 88797 - protein, 24 aa, Artificial Sequence
  Cyclic GFR-binding peptide
MDSMEGLVVNNAADMIQITINSLR

SEQ ID NO: 88798 - protein, 32 aa, Artificial Sequence; identical to SEQ ID NO: 35467
  Cyclic GFR-binding peptide
  MOD_RES (31)..(32): Xaa is C or S

SEQ ID NO: 88799 - protein, 29 aa, Artificial Sequence
  Cyclic GFR-binding peptide
  MOD_RES (2)..(4): Xaa is C or S
SXKXSKVIMSMEGLIKPTKGIMIQITINS

SEQ ID NO: 88800 - protein, 34 aa, Artificial Sequence; identical to SEQ ID NO: 35469
  Cyclic GFR-binding peptide
  MOD_RES (2)..(4): Xaa is C or S

SEQ ID NO: 88801 - protein, 26 aa, Artificial Sequence
  Cyclic GFR-binding peptide
DSMEGLVVNNASDMIQITINSLRTPV

SEQ ID NO: 88802 - protein, 33 aa, Artificial Sequence
  Cyclic GFR-binding peptide
  MOD_RES (2)..(4): Xaa is C or S
RXGXSEVVMDSMEGIVVNNASDMIQITINSLRT

SEQ ID NO: 88803 - protein, 33 aa, Artificial Sequence
  Cyclic GFR-binding peptide
  MOD_RES (29)..(30): Xaa is C or S
VIMSMEGLVKPKRGVMIQITINSLAQPVXXPAA

SEQ ID NO: 88804 - protein, 40 aa, Artificial Sequence; identical to SEQ ID NO: 35474
  Cyclic GFR-binding peptide
  MOD_RES (2)..(34)..(35): Xaa is C or S

SEQ ID NO: 88805 - protein, 31 aa, Artificial Sequence
  Cyclic GFR-binding peptide
  MOD_RES (29)..(30): Xaa is C or S
VMDSMEGIVVNNAADMIQITINSLRAPVXXS

SEQ ID NO: 88806 - protein, 35 aa, Artificial Sequence
  Cyclic GFR-binding peptide
  MOD_RES (29)..(30): Xaa is C or S
VMDSMEGLVVNNASDMIQITINSLRTPVXXTPPTS

SEQ ID NO: 88807 - protein, 23 aa, Artificial Sequence
  Cyclic GFR-binding peptide
SMEGLIVNSSDDMIQVTINSLKT

SEQ ID NO: 88808 - protein, 42 aa, Artificial Sequence; identical to SEQ ID NO: 35479
  Cyclic GFR-binding peptide
  MOD_RES (2)..(4)..(36)..(37): Xaa is C or S

SEQ ID NO: 88809 - protein, 29 aa, Artificial Sequence
  Cyclic GFR-binding peptide
  MOD_RES (2)..(2): Xaa is C or S
KXSKVIMSMEGLIKPTKGIMIQITINSLD

SEQ ID NO: 88810 - protein, 29 aa, Artificial Sequence
  Cyclic GFR-binding peptide
  MOD_RES (28)..(29): Xaa is C or S
MDSMEGLVVNNASDMIQITINSLRTPVXX

SEQ ID NO: 88811 - protein, 29 aa, Artificial Sequence
  Cyclic GFR-binding peptide
  MOD_RES (2)..(2): Xaa is C or S
GXRDVVMGSMEGIIIQQKDNMIQMTINSM

SEQ ID NO: 88812 - protein, 34 aa, Artificial Sequence; identical to SEQ ID NO: 35491
  Cyclic GFR-binding peptide
  MOD_RES (32)..(33): Xaa is C or S

SEQ ID NO: 88813 - protein, 39 aa, Artificial Sequence; identical to SEQ ID NO: 35493
  Cyclic GFR-binding peptide
  MOD_RES (2)..(4)..(36)..(37): Xaa is C or S

SEQ ID NO: 88814 - protein, 40 aa, Artificial Sequence; identical to SEQ ID NO: 35494
  Cyclic GFR-binding peptide
  MOD_RES (2)..(34)..(35): Xaa is C or S

SEQ ID NO: 88815 - protein, 21 aa, Artificial Sequence
  Cyclic GFR-binding peptide
NSMEGLIVNSSDDMIQVTINS

SEQ ID NO: 88816 - protein, 36 aa, Artificial Sequence; identical to SEQ ID NO: 35497
  Cyclic GFR-binding peptide
  MOD_RES (1)..(3)..(34)..(35): Xaa is C or S

SEQ ID NO: 88817 - protein, 29 aa, Artificial Sequence
  Cyclic GFR-binding peptide
  MOD_RES (26)..(27): Xaa is C or S
SMEGLVVNNASDMIQITINSLRTPVXXTP

SEQ ID NO: 88818 - protein, 37 aa, Artificial Sequence; identical to SEQ ID NO: 35499
  Cyclic GFR-binding peptide
  MOD_RES (2)..(4)..(36)..(37): Xaa is C or S

SEQ ID NO: 88819 - protein, 27 aa, Artificial Sequence
  Cyclic GFR-binding peptide
  MOD_RES (1)..(1): Xaa is C or S
XSRVIMSMEGLVKPKRGVMIQITINSL

SEQ ID NO: 88820 - protein, 26 aa, Artificial Sequence
  Cyclic GFR-binding peptide
VMDSMEGIVVNNAADMIQITINSLRA

SEQ ID NO: 88821 - protein, 37 aa, Artificial Sequence; identical to SEQ ID NO: 35500
  Cyclic GFR-binding peptide
  MOD_RES (2)..(4)..(36)..(37): Xaa is C or S

SEQ ID NO: 88822 - protein, 28 aa, Artificial Sequence
  Cyclic GFR-binding peptide
  MOD_RES (26)..(27): Xaa is C or S
SMEGLLLVRGNDMIQMTINSTKVPAXXT

SEQ ID NO: 88823 - protein, 37 aa, Artificial Sequence; identical to SEQ ID NO: 35507
  Cyclic GFR-binding peptide
  MOD_RES (31)..(32): Xaa is C or S

SEQ ID NO: 88824 - protein, 35 aa, Artificial Sequence
  Cyclic GFR-binding peptide
  MOD_RES (29)..(30): Xaa is C or S
VIMSMEGLIKPTKGIMIQITINSLDQSVXXPSASA

SEQ ID NO: 88825 - protein, 39 aa, Artificial Sequence; identical to SEQ ID NO: 35511
  Cyclic GFR-binding peptide
  MOD_RES (1)..(3)..(35)..(36): Xaa is C or S

SEQ ID NO: 88826 - protein, 28 aa, Artificial Sequence
  Cyclic GFR-binding peptide
  MOD_RES (1)..(1): Xaa is C or S
XSRVVMNSMEGLIVNSSDDMIQVTINSL

SEQ ID NO: 88827 - protein, 25 aa, Artificial Sequence
  Cyclic GFR-binding peptide
SMEGLIVNSSDDMIQVTINSLKTPA

SEQ ID NO: 88828 - protein, 23 aa, Artificial Sequence
  Cyclic GFR-binding peptide
MDSMEGIVVNNAADMIQITINSL

SEQ ID NO: 88829 - protein, 23 aa, Artificial Sequence
  Cyclic GFR-binding peptide
VIMSMEGLLLVRGNDMIQMTINS

SEQ ID NO: 88830 - protein, 23 aa, Artificial Sequence
  Cyclic GFR-binding peptide
MSMEGILLVRGNDMIQMTINSTK

SEQ ID NO: 88831 - protein, 30 aa, Artificial Sequence
  Cyclic GFR-binding peptide
  MOD_RES (30)..(30): Xaa is C or S
VVMGSMEGLIIQQKDNMIQMTINSMKTPTX

SEQ ID NO: 88832 - protein, 31 aa, Artificial Sequence
  Cyclic GFR-binding peptide
  MOD_RES (30)..(31): Xaa is C or S
VVMDSMEGLVVNNAADMIQITINSLRAPVXX

SEQ ID NO: 88833 - protein, 33 aa, Artificial Sequence; identical to SEQ ID NO: 35514
  Cyclic GFR-binding peptide
  MOD_RES (31)..(32): Xaa is C or S

SEQ ID NO: 88834 - protein, 27 aa, Artificial Sequence
  Cyclic GFR-binding peptide
  MOD_RES (27)..(27): Xaa is C or S
DSMEGLVVNNASDMIQITINSLRTPVX

SEQ ID NO: 88835 - protein, 30 aa, Artificial Sequence
  Cyclic GFR-binding peptide
  MOD_RES (2)..(2): Xaa is C or S
KXSRVIMSMEGLVKPKRGVMIQITINSLAQ

SEQ ID NO: 88836 - protein, 33 aa, Artificial Sequence
  Cyclic GFR-binding peptide
  MOD_RES (2)..(4): Xaa is C or S
RXGXAEVVMDSMEGIVVNNAADMIQITINSLRA

SEQ ID NO: 88837 - protein, 22 aa, Artificial Sequence
  Cyclic GFR-binding peptide
IMSMEGLIKPTKGIMIQITINS

SEQ ID NO: 88838 - protein, 28 aa, Artificial Sequence
  Cyclic GFR-binding peptide
VIMSMEGLLLVRGNDMIQMTINSTKVPA

SEQ ID NO: 88839 - protein, 37 aa, Artificial Sequence; identical to SEQ ID NO: 35522
  Cyclic GFR-binding peptide
  MOD_RES (2)..(33)..(34): Xaa is C or S

SEQ ID NO: 88840 - protein, 21 aa, Artificial Sequence
  Cyclic GFR-binding peptide
SMEGLVKPKRGVMIQITINSL

SEQ ID NO: 88841 - protein, 25 aa, Artificial Sequence
  Cyclic GFR-binding peptide
VVMDSMEGIVVNNAADMIQITINSL

SEQ ID NO: 88842 - protein, 41 aa, Artificial Sequence; identical to SEQ ID NO: 35525
  Cyclic GFR-binding peptide
  MOD_RES (2)..(4)..(36)..(37): Xaa is C or S

SEQ ID NO: 88843 - protein, 35 aa, Artificial Sequence; identical to SEQ ID NO: 35526
  Cyclic GFR-binding peptide
  MOD_RES (32)..(33): Xaa is C or S

SEQ ID NO: 88844 - protein, 25 aa, Artificial Sequence
  Cyclic GFR-binding peptide
EEVIMSMEGILLVRGNDMIQMTINS

SEQ ID NO: 88845 - protein, 29 aa, Artificial Sequence
  Cyclic GFR-binding peptide
  MOD_RES (26)..(27): Xaa is C or S
SMEGIIIQQKDNMIQMTINSMKTPTXXPG

SEQ ID NO: 88846 - protein, 26 aa, Artificial Sequence
  Cyclic GFR-binding peptide
SKVVMSMEGLVKPTRGVMIQITINSL

SEQ ID NO: 88847 - protein, 24 aa, Artificial Sequence
  Cyclic GFR-binding peptide
VIMSMEGLIKPTKGIMIQITINSL

SEQ ID NO: 88848 - protein, 24 aa, Artificial Sequence
  Cyclic GFR-binding peptide
GSMEGIIIQQKDNMIQMTINSMKT

SEQ ID NO: 88849 - protein, 24 aa, Artificial Sequence
  Cyclic GFR-binding peptide
MSMEGLIKPTKGIMIQITINSLDQ

SEQ ID NO: 88850 - protein, 31 aa, Artificial Sequence
  Cyclic GFR-binding peptide
  MOD_RES (2)..(4): Xaa is C or S
SXGXRDVVMGSMEGIIIQQKDNMIQMTINSM

SEQ ID NO: 88851 - protein, 33 aa, Artificial Sequence
  Cyclic GFR-binding peptide
  MOD_RES (29)..(30): Xaa is C or S
VMDSMEGLVVNNAADMIQITINSLRAPVXXSAP

SEQ ID NO: 88852 - protein, 27 aa, Artificial Sequence
  Cyclic GFR-binding peptide
VVMDSMEGIVVNNASDMIQITINSLRT

SEQ ID NO: 88853 - protein, 36 aa, Artificial Sequence
  Cyclic GFR-binding peptide
  MOD_RES (30)..(31): Xaa is C or S
VVMGSMEGIIIQQKDNMIQMTINSMKTPTXXPGASG

SEQ ID NO: 88854 - protein, 32 aa, Artificial Sequence
  Cyclic GFR-binding peptide
  MOD_RES (28)..(29): Xaa is C or S
IMSMEGLIKPTKGIMIQITINSLDQSVXXPSA

SEQ ID NO: 88855 - protein, 28 aa, Artificial Sequence
  Cyclic GFR-binding peptide
  MOD_RES (27)..(28): Xaa is C or S
DSMEGLVVNNASDMIQITINSLRTPVXX

SEQ ID NO: 88856 - protein, 31 aa, Artificial Sequence
  Cyclic GFR-binding peptide
  MOD_RES (1)..(3): Xaa is C or S
XGXRDVVMGSMEGLIIQQKDNMIQMTINSMK

SEQ ID NO: 88857 - protein, 32 aa, Artificial Sequence
  Cyclic GFR-binding peptide
  MOD_RES (28)..(29): Xaa is C or S
IMSMEGLLLVRGNDMIQMTINSTKVPAXXTSP

SEQ ID NO: 88858 - protein, 35 aa, Artificial Sequence; identical to SEQ ID NO: 35530
  Cyclic GFR-binding peptide
  MOD_RES (32)..(33): Xaa is C or S

SEQ ID NO: 88859 - protein, 31 aa, Artificial Sequence
  Cyclic GFR-binding peptide
  MOD_RES (2)..(2): Xaa is C or S
GXSEVVMDSMEGLVVNNASDMIQITINSLRT

SEQ ID NO: 88860 - protein, 22 aa, Artificial Sequence
  Cyclic GFR-binding peptide
IMSMEGLLLVRGNDMIQMTINS

SEQ ID NO: 88861 - protein, 23 aa, Artificial Sequence
  Cyclic GFR-binding peptide
VMDSMEGIVVNNASDMIQITINS

SEQ ID NO: 88862 - protein, 35 aa, Artificial Sequence; identical to SEQ ID NO: 35540
  Cyclic GFR-binding peptide
  MOD_RES (2)..(33)..(34): Xaa is C or S

SEQ ID NO: 88863 - protein, 29 aa, Artificial Sequence
  Cyclic GFR-binding peptide
  MOD_RES (29)..(29): Xaa is C or S
VMNSMEGLIVNSSDDMIQVTINSLKTPAX

SEQ ID NO: 88864 - protein, 31 aa, Artificial Sequence; identical to SEQ ID NO: 35542
  Cyclic GFR-binding peptide

SEQ ID NO: 88865 - protein, 36 aa, Artificial Sequence; identical to SEQ ID NO: 35544
  Cyclic GFR-binding peptide
  MOD_RES (2)..(34)..(35): Xaa is C or S

SEQ ID NO: 88866 - protein, 33 aa, Artificial Sequence; identical to SEQ ID NO: 35551
  Cyclic GFR-binding peptide
  MOD_RES (31)..(32): Xaa is C or S

SEQ ID NO: 88867 - protein, 37 aa, Artificial Sequence; identical to SEQ ID NO: 35552
  Cyclic GFR-binding peptide
  MOD_RES (1)..(33)..(34): Xaa is C or S

SEQ ID NO: 88868 - protein, 33 aa, Artificial Sequence
  Cyclic GFR-binding peptide
  MOD_RES (27)..(28): Xaa is C or S
MSMEGLVKPTRGVMIQITINSLDQPVXXPSASA

SEQ ID NO: 88869 - protein, 40 aa, Artificial Sequence; identical to SEQ ID NO: 35558
  Cyclic GFR-binding peptide
  MOD_RES (2)..(4)..(36)..(37): Xaa is C or S

SEQ ID NO: 88870 - protein, 28 aa, Artificial Sequence
  Cyclic GFR-binding peptide
  MOD_RES (27)..(28): Xaa is C or S
MSMEGLVKPTRGVMIQITINSLDQPVXX

SEQ ID NO: 88871 - protein, 20 aa, Artificial Sequence
  Cyclic GFR-binding peptide
SMEGLVKPKRGVMIQITINS

SEQ ID NO: 88872 - protein, 29 aa, Artificial Sequence
  Cyclic GFR-binding peptide
  MOD_RES (29)..(29): Xaa is C or S
VIMSMEGILLVRGNDMIQMTINSTKVPAX

SEQ ID NO: 88873 - protein, 33 aa, Artificial Sequence; identical to SEQ ID NO: 35563
  Cyclic GFR-binding peptide
  MOD_RES (31)..(32): Xaa is C or S

SEQ ID NO: 88874 - protein, 34 aa, Artificial Sequence
  Cyclic GFR-binding peptide
  MOD_RES (30)..(31): Xaa is C or S
EVIMSMEGILLVRGNDMIQMTINSTKVPAXXTSP

SEQ ID NO: 88875 - protein, 22 aa, Artificial Sequence
  Cyclic GFR-binding peptide
SMEGLIIQQKDNMIQMTINSMK

SEQ ID NO: 88876 - protein, 23 aa, Artificial Sequence
  Cyclic GFR-binding peptide
VMDSMEGLVVNNAADMIQITINS

SEQ ID NO: 88877 - protein, 38 aa, Artificial Sequence; identical to SEQ ID NO: 35566
  Cyclic GFR-binding peptide
  MOD_RES (1)..(33)..(34): Xaa is C or S

SEQ ID NO: 88878 - protein, 32 aa, Artificial Sequence; identical to SEQ ID NO: 35569
  Cyclic GFR-binding peptide
  MOD_RES (31)..(32): Xaa is C or S

SEQ ID NO: 88879 - protein, 38 aa, Artificial Sequence; identical to SEQ ID NO: 35571
  Cyclic GFR-binding peptide
  MOD_RES (2)..(4)..(36)..(37): Xaa is C or S

SEQ ID NO: 88880 - protein, 30 aa, Artificial Sequence
  Cyclic GFR-binding peptide
  MOD_RES (1)..(3): Xaa is C or S
XKXSKVIMSMEGLIKPTKGIMIQITINSLD

SEQ ID NO: 88881 - protein, 22 aa, Artificial Sequence
  Cyclic GFR-binding peptide
IMSMEGILLVRGNDMIQMTINS

SEQ ID NO: 88882 - protein, 35 aa, Artificial Sequence; identical to SEQ ID NO: 35572
  Cyclic GFR-binding peptide
  MOD_RES (1)..(3)..(35): Xaa is C or S

SEQ ID NO: 88883 - protein, 25 aa, Artificial Sequence
  Cyclic GFR-binding peptide
VMDSMEGIVVNNAADMIQITINSLR

SEQ ID NO: 88884 - protein, 34 aa, Artificial Sequence; identical to SEQ ID NO: 35575
  Cyclic GFR-binding peptide
  MOD_RES (2)..(34): Xaa is C or S

SEQ ID NO: 88885 - protein, 30 aa, Artificial Sequence
  Cyclic GFR-binding peptide
  MOD_RES (2)..(4): Xaa is C or S
RXGXAEVVMDSMEGIVVNNAADMIQITINS

SEQ ID NO: 88886 - protein, 34 aa, Artificial Sequence; identical to SEQ ID NO: 35577
  Cyclic GFR-binding peptide
  MOD_RES (1)..(3): Xaa is C or S

SEQ ID NO: 88887 - protein, 33 aa, Artificial Sequence
  Cyclic GFR-binding peptide
  MOD_RES (27)..(28): Xaa is C or S
MSMEGILLVRGNDMIQMTINSTKVPAXXTSPVR

SEQ ID NO: 88888 - protein, 28 aa, Artificial Sequence
  Cyclic GFR-binding peptide
  MOD_RES (27)..(28): Xaa is C or S
GSMEGIIIQQKDNMIQMTINSMKTPTXX

SEQ ID NO: 88889 - protein, 24 aa, Artificial Sequence
  Cyclic GFR-binding peptide
SMEGLVVNNAADMIQITINSLRAP

SEQ ID NO: 88890 - protein, 38 aa, Artificial Sequence; identical to SEQ ID NO: 35582
  Cyclic GFR-binding peptide
  MOD_RES (1)..(3)..(34)..(35): Xaa is C or S

SEQ ID NO: 88891 - protein, 24 aa, Artificial Sequence
  Cyclic GFR-binding peptide
RVIMSMEGLVKPKRGVMIQITINS

SEQ ID NO: 88892 - protein, 29 aa, Artificial Sequence
  Cyclic GFR-binding peptide
RVIMSMEGLVKPKRGVMIQITINSLAQPV

SEQ ID NO: 88893 - protein, 30 aa, Artificial Sequence
  Cyclic GFR-binding peptide
  MOD_RES (26)..(27): Xaa is C or S
SMEGIVVNNASDMIQITINSLRTPVXXTPP

SEQ ID NO: 88894 - protein, 40 aa, Artificial Sequence; identical to SEQ ID NO: 35584
  Cyclic GFR-binding peptide
  MOD_RES (2)..(4)..(36)..(37): Xaa is C or S

SEQ ID NO: 88895 - protein, 31 aa, Artificial Sequence
  Cyclic GFR-binding peptide
  MOD_RES (2)..(4): Xaa is C or S
LXGXEEVIMSMEGILLVRGNDMIQMTINSTK

SEQ ID NO: 88896 - protein, 29 aa, Artificial Sequence
  Cyclic GFR-binding peptide
  MOD_RES (26)..(27): Xaa is C or S
SMEGLIVNSSDDMIQVTINSLKTPAXXPK

SEQ ID NO: 88897 - protein, 24 aa, Artificial Sequence
  Cyclic GFR-binding peptide
GSMEGLIIQQKDNMIQMTINSMKT

SEQ ID NO: 88898 - protein, 36 aa, Artificial Sequence; identical to SEQ ID NO: 35591
  Cyclic GFR-binding peptide
  MOD_RES (1)..(3)..(34)..(35): Xaa is C or S

SEQ ID NO: 88899 - protein, 36 aa, Artificial Sequence; identical to SEQ ID NO: 35593
  Cyclic GFR-binding peptide
  MOD_RES (1)..(33)..(34): Xaa is C or S

SEQ ID NO: 88900 - protein, 32 aa, Artificial Sequence; identical to SEQ ID NO: 35595
  Cyclic GFR-binding peptide
  MOD_RES (1)..(32): Xaa is C or S

SEQ ID NO: 88901 - protein, 31 aa, Artificial Sequence
  Cyclic GFR-binding peptide
  MOD_RES (29)..(30): Xaa is C or S
VIMSMEGLVKPKRGVMIQITINSLAQPVXXP

SEQ ID NO: 88902 - protein, 33 aa, Artificial Sequence; identical to SEQ ID NO: 35597
  Cyclic GFR-binding peptide
  MOD_RES (1)..(32)..(33): Xaa is C or S

SEQ ID NO: 88903 - protein, 28 aa, Artificial Sequence
  Cyclic GFR-binding peptide
  MOD_RES (26)..(27): Xaa is C or S
SMEGLVKPTRGVMIQITINSLDQPVXXP

SEQ ID NO: 88904 - protein, 25 aa, Artificial Sequence
  Cyclic GFR-binding peptide
GSMEGIIIQQKDNMIQMTINSMKTP

SEQ ID NO: 88905 - protein, 31 aa, Artificial Sequence; identical to SEQ ID NO: 35598
  Cyclic GFR-binding peptide

SEQ ID NO: 88906 - protein, 39 aa, Artificial Sequence; identical to SEQ ID NO: 35600
  Cyclic GFR-binding peptide
  MOD_RES (1)..(33)..(34): Xaa is C or S

SEQ ID NO: 88907 - protein, 26 aa, Artificial Sequence
  Cyclic GFR-binding peptide
IMSMEGLVKPKRGVMIQITINSLAQP

SEQ ID NO: 88908 - protein, 25 aa, Artificial Sequence
  Cyclic GFR-binding peptide
EVVMDSMEGIVVNNAADMIQITINS

SEQ ID NO: 88909 - protein, 31 aa, Artificial Sequence
  Cyclic GFR-binding peptide
  MOD_RES (2)..(4): Xaa is C or S
SXKXSRVIMSMEGLVKPKRGVMIQITINSLA

SEQ ID NO: 88910 - protein, 30 aa, Artificial Sequence
  Cyclic GFR-binding peptide
  MOD_RES (30)..(30): Xaa is C or S
EVIMSMEGLLLVRGNDMIQMTINSTKVPAX

SEQ ID NO: 88911 - protein, 30 aa, Artificial Sequence
  Cyclic GFR-binding peptide
  MOD_RES (29)..(30): Xaa is C or S
VMDSMEGLVVNNAADMIQITINSLRAPVXX

SEQ ID NO: 88912 - protein, 30 aa, Artificial Sequence
  Cyclic GFR-binding peptide
  MOD_RES (1)..(3): Xaa is C or S
XGXRDVVMGSMEGIIIQQKDNMIQMTINSM

SEQ ID NO: 88913 - protein, 37 aa, Artificial Sequence; identical to SEQ ID NO: 35613
  Cyclic GFR-binding peptide
  MOD_RES (31)..(32): Xaa is C or S

SEQ ID NO: 88914 - protein, 32 aa, Artificial Sequence
  Cyclic GFR-binding peptide
  MOD_RES (2)..(4): Xaa is C or S
RXGXSEVVMDSMEGLVVNNASDMIQITINSLR

SEQ ID NO: 88915 - protein, 37 aa, Artificial Sequence; identical to SEQ ID NO: 35616
  Cyclic GFR-binding peptide
  MOD_RES (2)..(4)..(36)..(37): Xaa is C or S

SEQ ID NO: 88916 - protein, 36 aa, Artificial Sequence; identical to SEQ ID NO: 35619
  Cyclic GFR-binding peptide
  MOD_RES (2)..(34)..(35): Xaa is C or S

SEQ ID NO: 88917 - protein, 29 aa, Artificial Sequence
  Cyclic GFR-binding peptide
  MOD_RES (2)..(2): Xaa is C or S
GXRDVVMGSMEGLIIQQKDNMIQMTINSM

SEQ ID NO: 88918 - protein, 33 aa, Artificial Sequence
  Cyclic GFR-binding peptide
  MOD_RES (29)..(30): Xaa is C or S
VVMSMEGLVKPTRGVMIQITINSLDQPVXXPSA

SEQ ID NO: 88919 - protein, 35 aa, Artificial Sequence; identical to SEQ ID NO: 35625
  Cyclic GFR-binding peptide
  MOD_RES (31)..(32): Xaa is C or S

SEQ ID NO: 88920 - protein, 23 aa, Artificial Sequence
  Cyclic GFR-binding peptide
SMEGILLVRGNDMIQMTINSTKV

SEQ ID NO: 88921 - protein, 34 aa, Artificial Sequence
  Cyclic GFR-binding peptide
  MOD_RES (30)..(31): Xaa is C or S
VVMGSMEGIIIQQKDNMIQMTINSMKTPTXXPGA

SEQ ID NO: 88922 - protein, 27 aa, Artificial Sequence
  Cyclic GFR-binding peptide
DVVMGSMEGLIIQQKDNMIQMTINSMK

SEQ ID NO: 88923 - protein, 26 aa, Artificial Sequence
  Cyclic GFR-binding peptide
EVVMDSMEGIVVNNASDMIQITINSL

SEQ ID NO: 88924 - protein, 34 aa, Artificial Sequence
  Cyclic GFR-binding peptide
  MOD_RES (2)..(4): Xaa is C or S
RXGXSEVVMDSMEGIVVNNASDMIQITINSLRTP

SEQ ID NO: 88925 - protein, 37 aa, Artificial Sequence; identical to SEQ ID NO: 35632
  Cyclic GFR-binding peptide
  MOD_RES (2)..(33)..(34): Xaa is C or S

SEQ ID NO: 88926 - protein, 40 aa, Artificial Sequence; identical to SEQ ID NO: 35634
  Cyclic GFR-binding peptide
  MOD_RES (1)..(3)..(35)..(36): Xaa is C or S

SEQ ID NO: 88927 - protein, 22 aa, Artificial Sequence
  Cyclic GFR-binding peptide
DSMEGLVVNNAADMIQITINSL

SEQ ID NO: 88928 - protein, 34 aa, Artificial Sequence; identical to SEQ ID NO: 35637
  Cyclic GFR-binding peptide
  MOD_RES (31)..(32): Xaa is C or S

SEQ ID NO: 88929 - protein, 32 aa, Artificial Sequence
  Cyclic GFR-binding peptide
  MOD_RES (28)..(29): Xaa is C or S
VMSMEGLVKPTRGVMIQITINSLDQPVXXPSA

SEQ ID NO: 88930 - protein, 26 aa, Artificial Sequence
  Cyclic GFR-binding peptide
  MOD_RES (1)..(1): Xaa is C or S
XSKVIMSMEGLIKPTKGIMIQITINS

SEQ ID NO: 88931 - protein, 33 aa, Artificial Sequence
  Cyclic GFR-binding peptide
  MOD_RES (27)..(28): Xaa is C or S
DSMEGIVVNNAADMIQITINSLRAPVXXSAPAA

SEQ ID NO: 88932 - protein, 25 aa, Artificial Sequence
  Cyclic GFR-binding peptide
GSMEGLIIQQKDNMIQMTINSMKTP

SEQ ID NO: 88933 - protein, 28 aa, Artificial Sequence
  Cyclic GFR-binding peptide
  MOD_RES (28)..(28): Xaa is C or S
IMSMEGILLVRGNDMIQMTINSTKVPAX

SEQ ID NO: 88934 - protein, 32 aa, Artificial Sequence
  Cyclic GFR-binding peptide
  MOD_RES (29)..(30): Xaa is C or S
VIMSMEGLLLVRGNDMIQMTINSTKVPAXXTS

SEQ ID NO: 88935 - protein, 24 aa, Artificial Sequence
  Cyclic GFR-binding peptide
VVMGSMEGLIIQQKDNMIQMTINS

SEQ ID NO: 88936 - protein, 32 aa, Artificial Sequence
  Cyclic GFR-binding peptide
  MOD_RES (29)..(30): Xaa is C or S
VMNSMEGLIVNSSDDMIQVTINSLKTPAXXPK

SEQ ID NO: 88937 - protein, 28 aa, Artificial Sequence
  Cyclic GFR-binding peptide
VMDSMEGIVVNNASDMIQITINSLRTPV

SEQ ID NO: 88938 - protein, 37 aa, Artificial Sequence; identical to SEQ ID NO: 35644
  Cyclic GFR-binding peptide
  MOD_RES (2)..(4)..(35)..(36): Xaa is C or S

SEQ ID NO: 88939 - protein, 31 aa, Artificial Sequence
  Cyclic GFR-binding peptide
  MOD_RES (27)..(28): Xaa is C or S
MSMEGLVKPKRGVMIQITINSLAQPVXXPAA

SEQ ID NO: 88940 - protein, 39 aa, Artificial Sequence; identical to SEQ ID NO: 35647
  Cyclic GFR-binding peptide
  MOD_RES (2)..(34)..(35): Xaa is C or S

SEQ ID NO: 88941 - protein, 33 aa, Artificial Sequence
  Cyclic GFR-binding peptide
  MOD_RES (1)..(3): Xaa is C or S
XGXSRVVMNSMEGLIVNSSDDMIQVTINSLKTP

SEQ ID NO: 88942 - protein, 32 aa, Artificial Sequence; identical to SEQ ID NO: 35655
  Cyclic GFR-binding peptide
  MOD_RES (1)..(1): Xaa is C or S

SEQ ID NO: 88943 - protein, 31 aa, Artificial Sequence; identical to SEQ ID NO: 35654
  Cyclic GFR-binding peptide
  MOD_RES (31)..(31): Xaa is C or S

SEQ ID NO: 88944 - protein, 40 aa, Artificial Sequence; identical to SEQ ID NO: 35656
  Cyclic GFR-binding peptide
  MOD_RES (1)..(3)..(35)..(36): Xaa is C or S

SEQ ID NO: 88945 - protein, 23 aa, Artificial Sequence
  Cyclic GFR-binding peptide
SMEGLIKPTKGIMIQITINSLDQ

SEQ ID NO: 88946 - protein, 39 aa, Artificial Sequence; identical to SEQ ID NO: 35658
  Cyclic GFR-binding peptide
  MOD_RES (2)..(4)..(36)..(37): Xaa is C or S

SEQ ID NO: 88947 - protein, 34 aa, Artificial Sequence; identical to SEQ ID NO: 35659
  Cyclic GFR-binding peptide
  MOD_RES (31)..(32): Xaa is C or S

SEQ ID NO: 88948 - protein, 26 aa, Artificial Sequence
  Cyclic GFR-binding peptide
DSMEGLVVNNAADMIQITINSLRAPV

SEQ ID NO: 88949 - protein, 20 aa, Artificial Sequence
  Cyclic GFR-binding peptide
SMEGLIKPTKGIMIQITINS

SEQ ID NO: 88950 - protein, 24 aa, Artificial Sequence
  Cyclic GFR-binding peptide
VMDSMEGIVVNNAADMIQITINSL

SEQ ID NO: 88951 - protein, 33 aa, Artificial Sequence; identical to SEQ ID NO: 35662
  Cyclic GFR-binding peptide
  MOD_RES (1)..(33): Xaa is C or S

SEQ ID NO: 88952 - protein, 22 aa, Artificial Sequence
  Cyclic GFR-binding peptide
MDSMEGLVVNNAADMIQITINS

SEQ ID NO: 88953 - protein, 30 aa, Artificial Sequence
  Cyclic GFR-binding peptide
  MOD_RES (2)..(4): Xaa is C or S
SXKXSRVIMSMEGLVKPKRGVMIQITINSL

SEQ ID NO: 88954 - protein, 25 aa, Artificial Sequence
  Cyclic GFR-binding peptide
VIMSMEGLVKPKRGVMIQITINSLA

SEQ ID NO: 88955 - protein, 37 aa, Artificial Sequence; identical to SEQ ID NO: 35668
  Cyclic GFR-binding peptide
  MOD_RES (1)..(3)..(34)..(35): Xaa is C or S

SEQ ID NO: 88956 - protein, 38 aa, Artificial Sequence; identical to SEQ ID NO: 35669
  Cyclic GFR-binding peptide
  MOD_RES (1)..(3)..(35)..(36): Xaa is C or S

SEQ ID NO: 88957 - protein, 22 aa, Artificial Sequence
  Cyclic GFR-binding peptide
MDSMEGLVVNNASDMIQITINS

SEQ ID NO: 88958 - protein, 27 aa, Artificial Sequence
  Cyclic GFR-binding peptide
  MOD_RES (27)..(27): Xaa is C or S
MSMEGLIKPTKGIMIQITINSLDQSVX

SEQ ID NO: 88959 - protein, 30 aa, Artificial Sequence
  Cyclic GFR-binding peptide
  MOD_RES (2)..(2): Xaa is C or S
GXEEVIMSMEGILLVRGNDMIQMTINSTKV

SEQ ID NO: 88960 - protein, 33 aa, Artificial Sequence; identical to SEQ ID NO: 35675
  Cyclic GFR-binding peptide
  MOD_RES (31)..(32): Xaa is C or S

SEQ ID NO: 88961 - protein, 26 aa, Artificial Sequence
  Cyclic GFR-binding peptide
RVIMSMEGLVKPKRGVMIQITINSLA

SEQ ID NO: 88962 - protein, 31 aa, Artificial Sequence
  Cyclic GFR-binding peptide
  MOD_RES (1)..(1): Xaa is C or S
XSRVVMNSMEGLIVNSSDDMIQVTINSLKTP

SEQ ID NO: 88963 - protein, 34 aa, Artificial Sequence
  Cyclic GFR-binding peptide
  MOD_RES (30)..(31): Xaa is C or S
KVIMSMEGLIKPTKGIMIQITINSLDQSVXXPSA

SEQ ID NO: 88964 - protein, 39 aa, Artificial Sequence; identical to SEQ ID NO: 35680
  Cyclic GFR-binding peptide
  MOD_RES (1)..(33)..(34): Xaa is C or S

SEQ ID NO: 88965 - protein, 38 aa, Artificial Sequence; identical to SEQ ID NO: 35682
  Cyclic GFR-binding peptide
  MOD_RES (2)..(33)..(34): Xaa is C or S

SEQ ID NO: 88966 - protein, 33 aa, Artificial Sequence; identical to SEQ ID NO: 35684
  Cyclic GFR-binding peptide
  MOD_RES (1)..(32)..(33): Xaa is C or S

SEQ ID NO: 88967 - protein, 36 aa, Artificial Sequence; identical to SEQ ID NO: 35687
  Cyclic GFR-binding peptide
  MOD_RES (31)..(32): Xaa is C or S

SEQ ID NO: 88968 - protein, 26 aa, Artificial Sequence
  Cyclic GFR-binding peptide
SRVIMSMEGLVKPKRGVMIQITINSL

SEQ ID NO: 88969 - protein, 24 aa, Artificial Sequence
  Cyclic GFR-binding peptide
VVMSMEGLVKPTRGVMIQITINSL

SEQ ID NO: 88970 - protein, 23 aa, Artificial Sequence
  Cyclic GFR-binding peptide
SMEGIVVNNAADMIQITINSLRA

SEQ ID NO: 88971 - protein, 22 aa, Artificial Sequence
  Cyclic GFR-binding peptide
GSMEGIIIQQKDNMIQMTINSM

SEQ ID NO: 88972 - protein, 40 aa, Artificial Sequence; identical to SEQ ID NO: 35692
  Cyclic GFR-binding peptide
  MOD_RES (2)..(4)..(35)..(36): Xaa is C or S

SEQ ID NO: 88973 - protein, 30 aa, Artificial Sequence
  Cyclic GFR-binding peptide
  MOD_RES (30)..(30): Xaa is C or S
VVMDSMEGIVVNNAADMIQITINSLRAPVX

SEQ ID NO: 88974 - protein, 36 aa, Artificial Sequence; identical to SEQ ID NO: 35695
  Cyclic GFR-binding peptide
  MOD_RES (31)..(32): Xaa is C or S

SEQ ID NO: 88975 - protein, 27 aa, Artificial Sequence
  Cyclic GFR-binding peptide
  MOD_RES (1)..(1): Xaa is C or S
XAEVVMDSMEGIVVNNAADMIQITINS

SEQ ID NO: 88976 - protein, 39 aa, Artificial Sequence; identical to SEQ ID NO: 35698
  Cyclic GFR-binding peptide
  MOD_RES (1)..(3)..(34)..(35): Xaa is C or S

SEQ ID NO: 88977 - protein, 38 aa, Artificial Sequence; identical to SEQ ID NO: 35701
  Cyclic GFR-binding peptide
  MOD_RES (2)..(4)..(36)..(37): Xaa is C or S

SEQ ID NO: 88978 - protein, 35 aa, Artificial Sequence; identical to SEQ ID NO: 35702
  Cyclic GFR-binding peptide
  MOD_RES (2)..(33)..(34): Xaa is C or S

SEQ ID NO: 88979 - protein, 30 aa, Artificial Sequence
  Cyclic GFR-binding peptide
  MOD_RES (28)..(29): Xaa is C or S
MGSMEGLIIQQKDNMIQMTINSMKTPTXXP

SEQ ID NO: 88980 - protein, 29 aa, Artificial Sequence
  Cyclic GFR-binding peptide
EVVMDSMEGIVVNNAADMIQITINSLRAP

SEQ ID NO: 88981 - protein, 37 aa, Artificial Sequence; identical to SEQ ID NO: 35704
  Cyclic GFR-binding peptide
  MOD_RES (2)..(33)..(34): Xaa is C or S

SEQ ID NO: 88982 - protein, 32 aa, Artificial Sequence; identical to SEQ ID NO: 35706
  Cyclic GFR-binding peptide
  MOD_RES (32)..(32): Xaa is C or S

SEQ ID NO: 88983 - protein, 39 aa, Artificial Sequence; identical to SEQ ID NO: 35707
  Cyclic GFR-binding peptide
  MOD_RES (1)..(3)..(34)..(35): Xaa is C or S

SEQ ID NO: 88984 - protein, 33 aa, Artificial Sequence
  Cyclic GFR-binding peptide
  MOD_RES (30)..(31): Xaa is C or S
RVIMSMEGLVKPKRGVMIQITINSLAQPVXXPA

SEQ ID NO: 88985 - protein, 30 aa, Artificial Sequence
  Cyclic GFR-binding peptide
  MOD_RES (29)..(30): Xaa is C or S
VIMSMEGLIKPTKGIMIQITINSLDQSVXX

SEQ ID NO: 88986 - protein, 30 aa, Artificial Sequence
  Cyclic GFR-binding peptide
SRVVMNSMEGLIVNSSDDMIQVTINSLKTP

SEQ ID NO: 88987 - protein, 28 aa, Artificial Sequence
  Cyclic GFR-binding peptide
EVIMSMEGILLVRGNDMIQMTINSTKVP

SEQ ID NO: 88988 - protein, 39 aa, Artificial Sequence; identical to SEQ ID NO: 35714
  Cyclic GFR-binding peptide
  MOD_RES (1)..(33)..(34): Xaa is C or S

SEQ ID NO: 88989 - protein, 31 aa, Artificial Sequence; identical to SEQ ID NO: 35717
  Cyclic GFR-binding peptide
  MOD_RES (31)..(31): Xaa is C or S

SEQ ID NO: 88990 - protein, 28 aa, Artificial Sequence
  Cyclic GFR-binding peptide
  MOD_RES (1)..(1): Xaa is C or S
XEEVIMSMEGLLLVRGNDMIQMTINSTK

SEQ ID NO: 88991 - protein, 22 aa, Artificial Sequence
  Cyclic GFR-binding peptide
SMEGIIIQQKDNMIQMTINSMK

SEQ ID NO: 88992 - protein, 24 aa, Artificial Sequence
  Cyclic GFR-binding peptide
VVMNSMEGLIVNSSDDMIQVTINS

SEQ ID NO: 88993 - protein, 35 aa, Artificial Sequence
  Cyclic GFR-binding peptide
  MOD_RES (29)..(30): Xaa is C or S
VIMSMEGLLLVRGNDMIQMTINSTKVPAXXTSPVR

SEQ ID NO: 88994 - protein, 40 aa, Artificial Sequence; identical to SEQ ID NO: 35721
  Cyclic GFR-binding peptide
  MOD_RES (1)..(3)..(34)..(35): Xaa is C or S

SEQ ID NO: 88995 - protein, 32 aa, Artificial Sequence; identical to SEQ ID NO: 35723
  Cyclic GFR-binding peptide
  MOD_RES (31)..(32): Xaa is C or S

SEQ ID NO: 88996 - protein, 40 aa, Artificial Sequence; identical to SEQ ID NO: 35725
  Cyclic GFR-binding peptide
  MOD_RES (1)..(3)..(34)..(35): Xaa is C or S

SEQ ID NO: 88997 - protein, 28 aa, Artificial Sequence
  Cyclic GFR-binding peptide
  MOD_RES (2)..(2): Xaa is C or S
GXAEVVMDSMEGIVVNNAADMIQITINS

SEQ ID NO: 88998 - protein, 33 aa, Artificial Sequence; identical to SEQ ID NO: 35731
  Cyclic GFR-binding peptide
  MOD_RES (1)..(33): Xaa is C or S

SEQ ID NO: 88999 - protein, 25 aa, Artificial Sequence
  Cyclic GFR-binding peptide
SMEGLLLVRGNDMIQMTINSTKVPA

SEQ ID NO: 89000 - protein, 34 aa, Artificial Sequence
  Cyclic GFR-binding peptide
  MOD_RES (2)..(4): Xaa is C or S
SXGXRDVVMGSMEGLIIQQKDNMIQMTINSMKTP

SEQ ID NO: 89001 - protein, 33 aa, Artificial Sequence
  Cyclic GFR-binding peptide
  MOD_RES (1)..(3): Xaa is C or S
XGXSEVVMDSMEGIVVNNASDMIQITINSLRTP

SEQ ID NO: 89002 - protein, 29 aa, Artificial Sequence
  Cyclic GFR-binding peptide
  MOD_RES (2)..(2): Xaa is C or S
GXSEVVMDSMEGLVVNNASDMIQITINSL

SEQ ID NO: 89003 - protein, 30 aa, Artificial Sequence
  Cyclic GFR-binding peptide
  MOD_RES (27)..(28): Xaa is C or S
MSMEGLIKPTKGIMIQITINSLDQSVXXPS

SEQ ID NO: 89004 - protein, 33 aa, Artificial Sequence; identical to SEQ ID NO: 35760
  Cyclic GFR-binding peptide
  MOD_RES (31)..(32): Xaa is C or S

SEQ ID NO: 89005 - protein, 36 aa, Artificial Sequence; identical to SEQ ID NO: 35763
  Cyclic GFR-binding peptide
  MOD_RES (2)..(4)..(36): Xaa is C or S

SEQ ID NO: 89006 - protein, 35 aa, Artificial Sequence
  Cyclic GFR-binding peptide
  MOD_RES (30)..(31): Xaa is C or S
VVMNSMEGLIVNSSDDMIQVTINSLKTPAXXPKPV

SEQ ID NO: 89007 - protein, 32 aa, Artificial Sequence
  Cyclic GFR-binding peptide
  MOD_RES (27)..(28): Xaa is C or S
MSMEGLVKPTRGVMIQITINSLDQPVXXPSAS

SEQ ID NO: 89008 - protein, 28 aa, Artificial Sequence
  Cyclic GFR-binding peptide
  MOD_RES (27)..(28): Xaa is C or S
GSMEGLIIQQKDNMIQMTINSMKTPTXX

SEQ ID NO: 89009 - protein, 30 aa, Artificial Sequence
  Cyclic GFR-binding peptide
  MOD_RES (2)..(4): Xaa is C or S
LXGXEEVIMSMEGILLVRGNDMIQMTINST

SEQ ID NO: 89010 - protein, 33 aa, Artificial Sequence
  Cyclic GFR-binding peptide
  MOD_RES (30)..(31): Xaa is C or S
VVMDSMEGLVVNNASDMIQITINSLRTPVXXTP

SEQ ID NO: 89011 - protein, 31 aa, Artificial Sequence
  Cyclic GFR-binding peptide
  MOD_RES (26)..(27): Xaa is C or S
SMEGLVVNNASDMIQITINSLRTPVXXTPPT

SEQ ID NO: 89012 - protein, 40 aa, Artificial Sequence; identical to SEQ ID NO: 35772
  Cyclic GFR-binding peptide
  MOD_RES (2)..(4)..(35)..(36): Xaa is C or S

SEQ ID NO: 89013 - protein, 33 aa, Artificial Sequence; identical to SEQ ID NO: 35773
  Cyclic GFR-binding peptide
  MOD_RES (1)..(3): Xaa is C or S

SEQ ID NO: 89014 - protein, 33 aa, Artificial Sequence
  Cyclic GFR-binding peptide
  MOD_RES (27)..(28): Xaa is C or S
MSMEGLIKPTKGIMIQITINSLDQSVXXPSASA

SEQ ID NO: 89015 - protein, 29 aa, Artificial Sequence
  Cyclic GFR-binding peptide
  MOD_RES (26)..(27): Xaa is C or S
SMEGLIIQQKDNMIQMTINSMKTPTXXPG

SEQ ID NO: 89016 - protein, 29 aa, Artificial Sequence
  Cyclic GFR-binding peptide
  MOD_RES (2)..(4): Xaa is C or S
SXKXSKVVMSMEGLVKPTRGVMIQITINS

SEQ ID NO: 89017 - protein, 42 aa, Artificial Sequence; identical to SEQ ID NO: 35778
  Cyclic GFR-binding peptide
  MOD_RES (2)..(4)..(36)..(37): Xaa is C or S

SEQ ID NO: 89018 - protein, 30 aa, Artificial Sequence
  Cyclic GFR-binding peptide
  MOD_RES (27)..(28): Xaa is C or S
DSMEGLVVNNAADMIQITINSLRAPVXXSA

SEQ ID NO: 89019 - protein, 37 aa, Artificial Sequence; identical to SEQ ID NO: 35780
  Cyclic GFR-binding peptide
  MOD_RES (32)..(33): Xaa is C or S

SEQ ID NO: 89020 - protein, 25 aa, Artificial Sequence
  Cyclic GFR-binding peptide
VMDSMEGLVVNNAADMIQITINSLR

SEQ ID NO: 89021 - protein, 32 aa, Artificial Sequence; identical to SEQ ID NO: 35784
  Cyclic GFR-binding peptide
  MOD_RES (1)..(1): Xaa is C or S

SEQ ID NO: 89022 - protein, 38 aa, Artificial Sequence; identical to SEQ ID NO: 35786
  Cyclic GFR-binding peptide
  MOD_RES (32)..(33): Xaa is C or S

SEQ ID NO: 89023 - protein, 30 aa, Artificial Sequence
  Cyclic GFR-binding peptide
  MOD_RES (30)..(30): Xaa is C or S
VVMNSMEGLIVNSSDDMIQVTINSLKTPAX

SEQ ID NO: 89024 - protein, 28 aa, Artificial Sequence
  Cyclic GFR-binding peptide
VVMDSMEGIVVNNAADMIQITINSLRAP

SEQ ID NO: 89025 - protein, 36 aa, Artificial Sequence; identical to SEQ ID NO: 35792
  Cyclic GFR-binding peptide
  MOD_RES (32)..(33): Xaa is C or S

SEQ ID NO: 89026 - protein, 30 aa, Artificial Sequence
  Cyclic GFR-binding peptide
  MOD_RES (29)..(30): Xaa is C or S
VIMSMEGLVKPKRGVMIQITINSLAQPVXX

SEQ ID NO: 89027 - protein, 31 aa, Artificial Sequence
  Cyclic GFR-binding peptide
  MOD_RES (29)..(30): Xaa is C or S
VVMSMEGLVKPTRGVMIQITINSLDQPVXXP

SEQ ID NO: 89028 - protein, 34 aa, Artificial Sequence; identical to SEQ ID NO: 35793
  Cyclic GFR-binding peptide
  MOD_RES (2)..(4): Xaa is C or S

SEQ ID NO: 89029 - protein, 27 aa, Artificial Sequence
  Cyclic GFR-binding peptide
EVVMDSMEGLVVNNAADMIQITINSLR

SEQ ID NO: 89030 - protein, 31 aa, Artificial Sequence
  Cyclic GFR-binding peptide
  MOD_RES (2)..(2): Xaa is C or S
GXEEVIMSMEGLLLVRGNDMIQMTINSTKVP

SEQ ID NO: 89031 - protein, 28 aa, Artificial Sequence
  Cyclic GFR-binding peptide
VVMDSMEGLVVNNAADMIQITINSLRAP

SEQ ID NO: 89032 - protein, 37 aa, Artificial Sequence; identical to SEQ ID NO: 35801
  Cyclic GFR-binding peptide
  MOD_RES (1)..(33)..(34): Xaa is C or S

SEQ ID NO: 89033 - protein, 31 aa, Artificial Sequence
  Cyclic GFR-binding peptide
  MOD_RES (2)..(4): Xaa is C or S
SXGXRDVVMGSMEGLIIQQKDNMIQMTINSM

SEQ ID NO: 89034 - protein, 37 aa, Artificial Sequence; identical to SEQ ID NO: 35803
  Cyclic GFR-binding peptide
  MOD_RES (2)..(4)..(36)..(37): Xaa is C or S

SEQ ID NO: 89035 - protein, 32 aa, Artificial Sequence
  Cyclic GFR-binding peptide
  MOD_RES (27)..(28): Xaa is C or S
DSMEGLVVNNAADMIQITINSLRAPVXXSAPA

SEQ ID NO: 89036 - protein, 39 aa, Artificial Sequence; identical to SEQ ID NO: 35807
  Cyclic GFR-binding peptide
  MOD_RES (1)..(3)..(35)..(36): Xaa is C or S

SEQ ID NO: 89037 - protein, 33 aa, Artificial Sequence
  Cyclic GFR-binding peptide
  MOD_RES (27)..(28): Xaa is C or S
GSMEGIIIQQKDNMIQMTINSMKTPTXXPGASG

SEQ ID NO: 89038 - protein, 33 aa, Artificial Sequence; identical to SEQ ID NO: 35809
  Cyclic GFR-binding peptide
  MOD_RES (32)..(33): Xaa is C or S

SEQ ID NO: 89039 - protein, 31 aa, Artificial Sequence
  Cyclic GFR-binding peptide
  MOD_RES (1)..(1): Xaa is C or S
XRDVVMGSMEGIIIQQKDNMIQMTINSMKTP

SEQ ID NO: 89040 - protein, 21 aa, Artificial Sequence
  Cyclic GFR-binding peptide
DSMEGIVVNNASDMIQITINS

SEQ ID NO: 89041 - protein, 29 aa, Artificial Sequence
  Cyclic GFR-binding peptide
  MOD_RES (29)..(29): Xaa is C or S
VIMSMEGLLLVRGNDMIQMTINSTKVPAX

SEQ ID NO: 89042 - protein, 35 aa, Artificial Sequence
  Cyclic GFR-binding peptide
  MOD_RES (30)..(31): Xaa is C or S
VVMDSMEGIVVNNAADMIQITINSLRAPVXXSAPA

SEQ ID NO: 89043 - protein, 26 aa, Artificial Sequence
  Cyclic GFR-binding peptide
MGSMEGIIIQQKDNMIQMTINSMKTP

SEQ ID NO: 89044 - protein, 39 aa, Artificial Sequence; identical to SEQ ID NO: 35815
  Cyclic GFR-binding peptide
  MOD_RES (1)..(3)..(34)..(35): Xaa is C or S

SEQ ID NO: 89045 - protein, 27 aa, Artificial Sequence
  Cyclic GFR-binding peptide
  MOD_RES (26)..(27): Xaa is C or S
SMEGIVVNNAADMIQITINSLRAPVXX

SEQ ID NO: 89046 - protein, 22 aa, Artificial Sequence
  Cyclic GFR-binding peptide
MSMEGLVKPTRGVMIQITINSL

SEQ ID NO: 89047 - protein, 20 aa, Artificial Sequence
  Cyclic GFR-binding peptide
SMEGILLVRGNDMIQMTINS

SEQ ID NO: 89048 - protein, 30 aa, Artificial Sequence
  Cyclic GFR-binding peptide
  MOD_RES (27)..(28): Xaa is C or S
MSMEGLVKPTRGVMIQITINSLDQPVXXPS

SEQ ID NO: 89049 - protein, 28 aa, Artificial Sequence
  Cyclic GFR-binding peptide
SKVIMSMEGLIKPTKGIMIQITINSLDQ

SEQ ID NO: 89050 - protein, 29 aa, Artificial Sequence
  Cyclic GFR-binding peptide
SKVIMSMEGLIKPTKGIMIQITINSLDQS

SEQ ID NO: 89051 - protein, 28 aa, Artificial Sequence
  Cyclic GFR-binding peptide
VMGSMEGLIIQQKDNMIQMTINSMKTPT

SEQ ID NO: 89052 - protein, 22 aa, Artificial Sequence
  Cyclic GFR-binding peptide
MSMEGILLVRGNDMIQMTINST

SEQ ID NO: 89053 - protein, 30 aa, Artificial Sequence
  Cyclic GFR-binding peptide
  MOD_RES (26)..(27): Xaa is C or S
SMEGIIIQQKDNMIQMTINSMKTPTXXPGA

SEQ ID NO: 89054 - protein, 27 aa, Artificial Sequence
  Cyclic GFR-binding peptide
MDSMEGIVVNNAADMIQITINSLRAPV

SEQ ID NO: 89055 - protein, 35 aa, Artificial Sequence; identical to SEQ ID NO: 35827
  Cyclic GFR-binding peptide
  MOD_RES (1)..(32)..(33): Xaa is C or S

SEQ ID NO: 89056 - protein, 29 aa, Artificial Sequence
  Cyclic GFR-binding peptide
SEVVMDSMEGLVVNNASDMIQITINSLRT

SEQ ID NO: 89057 - protein, 30 aa, Artificial Sequence; identical to SEQ ID NO: 35828
  Cyclic GFR-binding peptide

SEQ ID NO: 89058 - protein, 33 aa, Artificial Sequence; identical to SEQ ID NO: 35829
  Cyclic GFR-binding peptide
  MOD_RES (1)..(32)..(33): Xaa is C or S

SEQ ID NO: 89059 - protein, 34 aa, Artificial Sequence; identical to SEQ ID NO: 35830
  Cyclic GFR-binding peptide
  MOD_RES (31)..(32): Xaa is C or S

SEQ ID NO: 89060 - protein, 38 aa, Artificial Sequence; identical to SEQ ID NO: 35831
  Cyclic GFR-binding peptide
  MOD_RES (2)..(4)..(35)..(36): Xaa is C or S

SEQ ID NO: 89061 - protein, 27 aa, Artificial Sequence
  Cyclic GFR-binding peptide
RDVVMGSMEGLIIQQKDNMIQMTINSM

SEQ ID NO: 89062 - protein, 33 aa, Artificial Sequence
  Cyclic GFR-binding peptide
  MOD_RES (29)..(30): Xaa is C or S
VMDSMEGIVVNNASDMIQITINSLRTPVXXTPP

SEQ ID NO: 89063 - protein, 41 aa, Artificial Sequence; identical to SEQ ID NO: 35833
  Cyclic GFR-binding peptide
  MOD_RES (2)..(4)..(36)..(37): Xaa is C or S

SEQ ID NO: 89064 - protein, 33 aa, Artificial Sequence
  Cyclic GFR-binding peptide
  MOD_RES (30)..(31): Xaa is C or S
VVMDSMEGIVVNNAADMIQITINSLRAPVXXSA

SEQ ID NO: 89065 - protein, 22 aa, Artificial Sequence
  Cyclic GFR-binding peptide
SMEGLIVNSSDDMIQVTINSLK

SEQ ID NO: 89066 - protein, 30 aa, Artificial Sequence
  Cyclic GFR-binding peptide
  MOD_RES (1)..(1): Xaa is C or S
XSRVIMSMEGLVKPKRGVMIQITINSLAQP

SEQ ID NO: 89067 - protein, 28 aa, Artificial Sequence
  Cyclic GFR-binding peptide
VVMDSMEGIVVNNASDMIQITINSLRTP

SEQ ID NO: 89068 - protein, 40 aa, Artificial Sequence; identical to SEQ ID NO: 35838
  Cyclic GFR-binding peptide
  MOD_RES (2)..(4)..(36)..(37): Xaa is C or S

SEQ ID NO: 89069 - protein, 27 aa, Artificial Sequence
  Cyclic GFR-binding peptide
  MOD_RES (1)..(1): Xaa is C or S
XSKVVMSMEGLVKPTRGVMIQITINSL

SEQ ID NO: 89070 - protein, 38 aa, Artificial Sequence; identical to SEQ ID NO: 35840
  Cyclic GFR-binding peptide
  MOD_RES (2)..(4)..(35)..(36): Xaa is C or S

SEQ ID NO: 89071 - protein, 36 aa, Artificial Sequence; identical to SEQ ID NO: 35841
  Cyclic GFR-binding peptide
  MOD_RES (2)..(4)..(35)..(36): Xaa is C or S

SEQ ID NO: 89072 - protein, 37 aa, Artificial Sequence; identical to SEQ ID NO: 35843
  Cyclic GFR-binding peptide
  MOD_RES (1)..(3)..(34)..(35): Xaa is C or S

SEQ ID NO: 89073 - protein, 23 aa, Artificial Sequence
  Cyclic GFR-binding peptide
IMSMEGLLLVRGNDMIQMTINST

SEQ ID NO: 89074 - protein, 28 aa, Artificial Sequence
  Cyclic GFR-binding peptide
  MOD_RES (1)..(3): Xaa is C or S
XGXEEVIMSMEGILLVRGNDMIQMTINS

SEQ ID NO: 89075 - protein, 32 aa, Artificial Sequence; identical to SEQ ID NO: 35845
  Cyclic GFR-binding peptide
  MOD_RES (32)..(32): Xaa is C or S

SEQ ID NO: 89076 - protein, 36 aa, Artificial Sequence; identical to SEQ ID NO: 35846
  Cyclic GFR-binding peptide
  MOD_RES (2)..(4)..(35)..(36): Xaa is C or S

SEQ ID NO: 89077 - protein, 34 aa, Artificial Sequence; identical to SEQ ID NO: 35847
  Cyclic GFR-binding peptide
  MOD_RES (1)..(33)..(34): Xaa is C or S

SEQ ID NO: 89078 - protein, 36 aa, Artificial Sequence; identical to SEQ ID NO: 35850
  Cyclic GFR-binding peptide
  MOD_RES (31)..(32): Xaa is C or S

SEQ ID NO: 89079 - protein, 24 aa, Artificial Sequence
  Cyclic GFR-binding peptide
SMEGLLLVRGNDMIQMTINSTKVP

SEQ ID NO: 89080 - protein, 26 aa, Artificial Sequence
  Cyclic GFR-binding peptide
VVMNSMEGLIVNSSDDMIQVTINSLK

SEQ ID NO: 89081 - protein, 37 aa, Artificial Sequence; identical to SEQ ID NO: 35854
  Cyclic GFR-binding peptide
  MOD_RES (32)..(33): Xaa is C or S

SEQ ID NO: 89082 - protein, 29 aa, Artificial Sequence
  Cyclic GFR-binding peptide
  MOD_RES (1)..(3): Xaa is C or S
XGXSEVVMDSMEGLVVNNASDMIQITINS

SEQ ID NO: 89083 - protein, 28 aa, Artificial Sequence
  Cyclic GFR-binding peptide
VVMGSMEGIIIQQKDNMIQMTINSMKTP

SEQ ID NO: 89084 - protein, 26 aa, Artificial Sequence
  Cyclic GFR-binding peptide
EEVIMSMEGILLVRGNDMIQMTINST

SEQ ID NO: 89085 - protein, 32 aa, Artificial Sequence
  Cyclic GFR-binding peptide
  MOD_RES (29)..(30): Xaa is C or S
VIMSMEGILLVRGNDMIQMTINSTKVPAXXTS

SEQ ID NO: 89086 - protein, 35 aa, Artificial Sequence; identical to SEQ ID NO: 35863
  Cyclic GFR-binding peptide
  MOD_RES (1)..(33)..(34): Xaa is C or S

SEQ ID NO: 89087 - protein, 28 aa, Artificial Sequence
  Cyclic GFR-binding peptide
RDVVMGSMEGLIIQQKDNMIQMTINSMK

SEQ ID NO: 89088 - protein, 30 aa, Artificial Sequence
  Cyclic GFR-binding peptide
  MOD_RES (26)..(27): Xaa is C or S
SMEGLIKPTKGIMIQITINSLDQSVXXPSA

SEQ ID NO: 89089 - protein, 29 aa, Artificial Sequence
  Cyclic GFR-binding peptide
  MOD_RES (1)..(1): Xaa is C or S
XSEVVMDSMEGIVVNNASDMIQITINSLR

SEQ ID NO: 89090 - protein, 25 aa, Artificial Sequence
  Cyclic GFR-binding peptide
NSMEGLIVNSSDDMIQVTINSLKTP

SEQ ID NO: 89091 - protein, 24 aa, Artificial Sequence
  Cyclic GFR-binding peptide
VMDSMEGLVVNNAADMIQITINSL

SEQ ID NO: 89092 - protein, 28 aa, Artificial Sequence
  Cyclic GFR-binding peptide
EVIMSMEGLLLVRGNDMIQMTINSTKVP

SEQ ID NO: 89093 - protein, 39 aa, Artificial Sequence; identical to SEQ ID NO: 35875
  Cyclic GFR-binding peptide
  MOD_RES (1)..(3)..(35)..(36): Xaa is C or S

SEQ ID NO: 89094 - protein, 28 aa, Artificial Sequence
  Cyclic GFR-binding peptide
VMDSMEGLVVNNASDMIQITINSLRTPV

SEQ ID NO: 89095 - protein, 32 aa, Artificial Sequence
  Cyclic GFR-binding peptide
  MOD_RES (2)..(4): Xaa is C or S
LXGXEEVIMSMEGILLVRGNDMIQMTINSTKV

SEQ ID NO: 89096 - protein, 33 aa, Artificial Sequence
  Cyclic GFR-binding peptide
  MOD_RES (29)..(30): Xaa is C or S
VMDSMEGLVVNNASDMIQITINSLRTPVXXTPP

SEQ ID NO: 89097 - protein, 25 aa, Artificial Sequence
  Cyclic GFR-binding peptide
SKVVMSMEGLVKPTRGVMIQITINS

SEQ ID NO: 89098 - protein, 33 aa, Artificial Sequence
  Cyclic GFR-binding peptide
  MOD_RES (29)..(30): Xaa is C or S
VMDSMEGIVVNNAADMIQITINSLRAPVXXSAP

SEQ ID NO: 89099 - protein, 26 aa, Artificial Sequence
  Cyclic GFR-binding peptide
  MOD_RES (26)..(26): Xaa is C or S
SMEGLIVNSSDDMIQVTINSLKTPAX

SEQ ID NO: 89100 - protein, 28 aa, Artificial Sequence
  Cyclic GFR-binding peptide
  MOD_RES (28)..(28): Xaa is C or S
MDSMEGIVVNNAADMIQITINSLRAPVX

SEQ ID NO: 89101 - protein, 28 aa, Artificial Sequence
  Cyclic GFR-binding peptide
RDVVMGSMEGIIIQQKDNMIQMTINSMK

SEQ ID NO: 89102 - protein, 40 aa, Artificial Sequence; identical to SEQ ID NO: 35885
  Cyclic GFR-binding peptide
  MOD_RES (2)..(34)..(35): Xaa is C or S

SEQ ID NO: 89103 - protein, 27 aa, Artificial Sequence
  Cyclic GFR-binding peptide
SEVVMDSMEGIVVNNASDMIQITINSL

SEQ ID NO: 89104 - protein, 30 aa, Artificial Sequence
  Cyclic GFR-binding peptide
  MOD_RES (2)..(2): Xaa is C or S
KXSKVVMSMEGLVKPTRGVMIQITINSLDQ

SEQ ID NO: 89105 - protein, 32 aa, Artificial Sequence
  Cyclic GFR-binding peptide
  MOD_RES (2)..(4): Xaa is C or S
SXKXSRVIMSMEGLVKPKRGVMIQITINSLAQ

SEQ ID NO: 89106 - protein, 34 aa, Artificial Sequence
  Cyclic GFR-binding peptide
  MOD_RES (28)..(29): Xaa is C or S
IMSMEGLLLVRGNDMIQMTINSTKVPAXXTSPVR

SEQ ID NO: 89107 - protein, 37 aa, Artificial Sequence; identical to SEQ ID NO: 35887
  Cyclic GFR-binding peptide
  MOD_RES (2)..(4)..(35)..(36): Xaa is C or S

SEQ ID NO: 89108 - protein, 37 aa, Artificial Sequence; identical to SEQ ID NO: 35888
  Cyclic GFR-binding peptide
  MOD_RES (31)..(32): Xaa is C or S

SEQ ID NO: 89109 - protein, 30 aa, Artificial Sequence
  Cyclic GFR-binding peptide
  MOD_RES (2)..(2): Xaa is C or S
GXAEVVMDSMEGIVVNNAADMIQITINSLR

SEQ ID NO: 89110 - protein, 23 aa, Artificial Sequence
  Cyclic GFR-binding peptide
DSMEGIVVNNAADMIQITINSLR

SEQ ID NO: 89111 - protein, 35 aa, Artificial Sequence
  Cyclic GFR-binding peptide
  MOD_RES (30)..(31): Xaa is C or S
VVMGSMEGLIIQQKDNMIQMTINSMKTPTXXPGAS

SEQ ID NO: 89112 - protein, 29 aa, Artificial Sequence
  Cyclic GFR-binding peptide
VVMNSMEGLIVNSSDDMIQVTINSLKTPA

SEQ ID NO: 89113 - protein, 37 aa, Artificial Sequence; identical to SEQ ID NO: 35895
  Cyclic GFR-binding peptide
  MOD_RES (2)..(34)..(35): Xaa is C or S

SEQ ID NO: 89114 - protein, 34 aa, Artificial Sequence; identical to SEQ ID NO: 35897
  Cyclic GFR-binding peptide
  MOD_RES (31)..(32): Xaa is C or S

SEQ ID NO: 89115 - protein, 35 aa, Artificial Sequence; identical to SEQ ID NO: 35898
  Cyclic GFR-binding peptide
  MOD_RES (1)..(3)..(34)..(35): Xaa is C or S

SEQ ID NO: 89116 - protein, 20 aa, Artificial Sequence
  Cyclic GFR-binding peptide
SMEGLVVNNAADMIQITINS

SEQ ID NO: 89117 - protein, 30 aa, Artificial Sequence
  Cyclic GFR-binding peptide
  MOD_RES (2)..(4): Xaa is C or S
LXGXEEVIMSMEGLLLVRGNDMIQMTINST

SEQ ID NO: 89118 - protein, 23 aa, Artificial Sequence
  Cyclic GFR-binding peptide
SMEGIIIQQKDNMIQMTINSMKT

SEQ ID NO: 89119 - protein, 38 aa, Artificial Sequence; identical to SEQ ID NO: 35901
  Cyclic GFR-binding peptide
  MOD_RES (2)..(4)..(35)..(36): Xaa is C or S

SEQ ID NO: 89120 - protein, 21 aa, Artificial Sequence
  Cyclic GFR-binding peptide
SMEGLVVNNAADMIQITINSL

SEQ ID NO: 89121 - protein, 38 aa, Artificial Sequence; identical to SEQ ID NO: 35902
  Cyclic GFR-binding peptide
  MOD_RES (2)..(34)..(35): Xaa is C or S

SEQ ID NO: 89122 - protein, 25 aa, Artificial Sequence
  Cyclic GFR-binding peptide
MDSMEGLVVNNAADMIQITINSLRA

SEQ ID NO: 89123 - protein, 39 aa, Artificial Sequence; identical to SEQ ID NO: 35903
  Cyclic GFR-binding peptide
  MOD_RES (1)..(33)..(34): Xaa is C or S

SEQ ID NO: 89124 - protein, 35 aa, Artificial Sequence
  Cyclic GFR-binding peptide
  MOD_RES (29)..(30): Xaa is C or S
VIMSMEGILLVRGNDMIQMTINSTKVPAXXTSPVR

SEQ ID NO: 89125 - protein, 27 aa, Artificial Sequence
  Cyclic GFR-binding peptide
MGSMEGLIIQQKDNMIQMTINSMKTPT

SEQ ID NO: 89126 - protein, 32 aa, Artificial Sequence
  Cyclic GFR-binding peptide
  MOD_RES (2)..(2): Xaa is C or S
GXAEVVMDSMEGIVVNNAADMIQITINSLRAP

SEQ ID NO: 89127 - protein, 30 aa, Artificial Sequence
  Cyclic GFR-binding peptide
  MOD_RES (28)..(29): Xaa is C or S
MNSMEGLIVNSSDDMIQVTINSLKTPAXXP

SEQ ID NO: 89128 - protein, 34 aa, Artificial Sequence; identical to SEQ ID NO: 35905
  Cyclic GFR-binding peptide
  MOD_RES (1)..(32)..(33): Xaa is C or S

SEQ ID NO: 89129 - protein, 36 aa, Artificial Sequence; identical to SEQ ID NO: 35907
  Cyclic GFR-binding peptide
  MOD_RES (1)..(32)..(33): Xaa is C or S

SEQ ID NO: 89130 - protein, 27 aa, Artificial Sequence
  Cyclic GFR-binding peptide
VIMSMEGILLVRGNDMIQMTINSTKVP

SEQ ID NO: 89131 - protein, 30 aa, Artificial Sequence
  Cyclic GFR-binding peptide
  MOD_RES (29)..(30): Xaa is C or S
VMGSMEGLIIQQKDNMIQMTINSMKTPTXX

SEQ ID NO: 89132 - protein, 29 aa, Artificial Sequence
  Cyclic GFR-binding peptide
RVVMNSMEGLIVNSSDDMIQVTINSLKTP

SEQ ID NO: 89133 - protein, 23 aa, Artificial Sequence
  Cyclic GFR-binding peptide
MGSMEGIIIQQKDNMIQMTINSM

SEQ ID NO: 89134 - protein, 40 aa, Artificial Sequence; identical to SEQ ID NO: 35912
  Cyclic GFR-binding peptide
  MOD_RES (2)..(4)..(36)..(37): Xaa is C or S

SEQ ID NO: 89135 - protein, 35 aa, Artificial Sequence
  Cyclic GFR-binding peptide
  MOD_RES (29)..(30): Xaa is C or S
VMDSMEGLVVNNAADMIQITINSLRAPVXXSAPAA

SEQ ID NO: 89136 - protein, 36 aa, Artificial Sequence
  Cyclic GFR-binding peptide
  MOD_RES (30)..(31): Xaa is C or S
VVMDSMEGIVVNNAADMIQITINSLRAPVXXSAPAA

SEQ ID NO: 89137 - protein, 32 aa, Artificial Sequence; identical to SEQ ID NO: 35914
  Cyclic GFR-binding peptide
  MOD_RES (31)..(32): Xaa is C or S

SEQ ID NO: 89138 - protein, 24 aa, Artificial Sequence
  Cyclic GFR-binding peptide
SMEGILLVRGNDMIQMTINSTKVP

SEQ ID NO: 89139 - protein, 31 aa, Artificial Sequence
  Cyclic GFR-binding peptide
  MOD_RES (1)..(3): Xaa is C or S
XGXSRVVMNSMEGLIVNSSDDMIQVTINSLK

SEQ ID NO: 89140 - protein, 36 aa, Artificial Sequence; identical to SEQ ID NO: 35918
  Cyclic GFR-binding peptide
  MOD_RES (2)..(4)..(36): Xaa is C or S

SEQ ID NO: 89141 - protein, 34 aa, Artificial Sequence; identical to SEQ ID NO: 35920
  Cyclic GFR-binding peptide
  MOD_RES (31)..(32): Xaa is C or S

SEQ ID NO: 89142 - protein, 30 aa, Artificial Sequence; identical to SEQ ID NO: 35923
  Cyclic GFR-binding peptide

SEQ ID NO: 89143 - protein, 26 aa, Artificial Sequence
  Cyclic GFR-binding peptide
  MOD_RES (26)..(26): Xaa is C or S
SMEGLLLVRGNDMIQMTINSTKVPAX

SEQ ID NO: 89144 - protein, 29 aa, Artificial Sequence
  Cyclic GFR-binding peptide
  MOD_RES (1)..(1): Xaa is C or S
XAEVVMDSMEGLVVNNAADMIQITINSLR

SEQ ID NO: 89145 - protein, 27 aa, Artificial Sequence
  Cyclic GFR-binding peptide
VIMSMEGLLLVRGNDMIQMTINSTKVP

SEQ ID NO: 89146 - protein, 28 aa, Artificial Sequence
  Cyclic GFR-binding peptide
  MOD_RES (2)..(2): Xaa is C or S
KXSKVIMSMEGLIKPTKGIMIQITINSL

SEQ ID NO: 89147 - protein, 29 aa, Artificial Sequence
  Cyclic GFR-binding peptide
  MOD_RES (1)..(3): Xaa is C or S
XGXSEVVMDSMEGIVVNNASDMIQITINS

SEQ ID NO: 89148 - protein, 30 aa, Artificial Sequence
  Cyclic GFR-binding peptide
  MOD_RES (1)..(3): Xaa is C or S
XGXSEVVMDSMEGIVVNNASDMIQITINSL

SEQ ID NO: 89149 - protein, 29 aa, Artificial Sequence
  Cyclic GFR-binding peptide
  MOD_RES (1)..(1): Xaa is C or S
XAEVVMDSMEGIVVNNAADMIQITINSLR

SEQ ID NO: 89150 - protein, 35 aa, Artificial Sequence; identical to SEQ ID NO: 35927
  Cyclic GFR-binding peptide
  MOD_RES (31)..(32): Xaa is C or S

SEQ ID NO: 89151 - protein, 38 aa, Artificial Sequence; identical to SEQ ID NO: 35928
  Cyclic GFR-binding peptide
  MOD_RES (32)..(33): Xaa is C or S

SEQ ID NO: 89152 - protein, 30 aa, Artificial Sequence; identical to SEQ ID NO: 2161
  Cyclic GFR-binding peptide

SEQ ID NO: 89153 - protein, 29 aa, Artificial Sequence
  Cyclic GFR-binding peptide
  MOD_RES (27)..(28): Xaa is C or S
MSMEGLIKPTKGIMIQITINSLDQSVXXP

SEQ ID NO: 89154 - protein, 26 aa, Artificial Sequence
  Cyclic GFR-binding peptide
EVVMDSMEGLVVNNAADMIQITINSL

SEQ ID NO: 89155 - protein, 30 aa, Artificial Sequence
  Cyclic GFR-binding peptide
  MOD_RES (1)..(1): Xaa is C or S
XRDVVMGSMEGIIIQQKDNMIQMTINSMKT

SEQ ID NO: 89156 - protein, 32 aa, Artificial Sequence
  Cyclic GFR-binding peptide
  MOD_RES (30)..(31): Xaa is C or S
VVMGSMEGIIIQQKDNMIQMTINSMKTPTXXP

SEQ ID NO: 89157 - protein, 35 aa, Artificial Sequence; identical to SEQ ID NO: 35934
  Cyclic GFR-binding peptide
  MOD_RES (1)..(3)..(35): Xaa is C or S

SEQ ID NO: 89158 - protein, 36 aa, Artificial Sequence; identical to SEQ ID NO: 35939
  Cyclic GFR-binding peptide
  MOD_RES (31)..(32): Xaa is C or S

SEQ ID NO: 89159 - protein, 42 aa, Artificial Sequence; identical to SEQ ID NO: 35940
  Cyclic GFR-binding peptide
  MOD_RES (2)..(4)..(36)..(37): Xaa is C or S

SEQ ID NO: 89160 - protein, 33 aa, Artificial Sequence
  Cyclic GFR-binding peptide
  MOD_RES (28)..(29): Xaa is C or S
MDSMEGIVVNNAADMIQITINSLRAPVXXSAPA

SEQ ID NO: 89161 - protein, 32 aa, Artificial Sequence
  Cyclic GFR-binding peptide
  MOD_RES (26)..(27): Xaa is C or S
SMEGLIIQQKDNMIQMTINSMKTPTXXPGASG

SEQ ID NO: 89162 - protein, 31 aa, Artificial Sequence
  Cyclic GFR-binding peptide
  MOD_RES (29)..(30): Xaa is C or S
VIMSMEGILLVRGNDMIQMTINSTKVPAXXT

SEQ ID NO: 89163 - protein, 25 aa, Artificial Sequence
  Cyclic GFR-binding peptide
IMSMEGLIKPTKGIMIQITINSLDQ

SEQ ID NO: 89164 - protein, 32 aa, Artificial Sequence
  Cyclic GFR-binding peptide
  MOD_RES (26)..(27): Xaa is C or S
SMEGLVVNNASDMIQITINSLRTPVXXTPPTS

SEQ ID NO: 89165 - protein, 30 aa, Artificial Sequence
  Cyclic GFR-binding peptide
  MOD_RES (27)..(28): Xaa is C or S
DSMEGIVVNNASDMIQITINSLRTPVXXTP

SEQ ID NO: 89166 - protein, 38 aa, Artificial Sequence; identical to SEQ ID NO: 35951
  Cyclic GFR-binding peptide
  MOD_RES (1)..(32)..(33): Xaa is C or S

SEQ ID NO: 89167 - protein, 27 aa, Artificial Sequence
  Cyclic GFR-binding peptide
VMDSMEGIVVNNASDMIQITINSLRTP

SEQ ID NO: 89168 - protein, 31 aa, Artificial Sequence; identical to SEQ ID NO: 35954
  Cyclic GFR-binding peptide
  MOD_RES (1)..(1): Xaa is C or S

SEQ ID NO: 89169 - protein, 28 aa, Artificial Sequence
  Cyclic GFR-binding peptide
  MOD_RES (26)..(27): Xaa is C or S
SMEGIIIQQKDNMIQMTINSMKTPTXXP

SEQ ID NO: 89170 - protein, 31 aa, Artificial Sequence
  Cyclic GFR-binding peptide
  MOD_RES (28)..(29): Xaa is C or S
MGSMEGIIIQQKDNMIQMTINSMKTPTXXPG

SEQ ID NO: 89171 - protein, 29 aa, Artificial Sequence
  Cyclic GFR-binding peptide
  MOD_RES (27)..(28): Xaa is C or S
GSMEGLIIQQKDNMIQMTINSMKTPTXXP

SEQ ID NO: 89172 - protein, 22 aa, Artificial Sequence
  Cyclic GFR-binding peptide
MNSMEGLIVNSSDDMIQVTINS

SEQ ID NO: 89173 - protein, 21 aa, Artificial Sequence
  Cyclic GFR-binding peptide
SMEGIVVNNAADMIQITINSL

SEQ ID NO: 89174 - protein, 24 aa, Artificial Sequence
  Cyclic GFR-binding peptide
SMEGIVVNNAADMIQITINSLRAP

SEQ ID NO: 89175 - protein, 38 aa, Artificial Sequence; identical to SEQ ID NO: 35963
  Cyclic GFR-binding peptide
  MOD_RES (2)..(4)..(35)..(36): Xaa is C or S

SEQ ID NO: 89176 - protein, 28 aa, Artificial Sequence
  Cyclic GFR-binding peptide
  MOD_RES (27)..(28): Xaa is C or S
MSMEGILLVRGNDMIQMTINSTKVPAXX

SEQ ID NO: 89177 - protein, 29 aa, Artificial Sequence
  Cyclic GFR-binding peptide
KVIMSMEGLIKPTKGIMIQITINSLDQSV

SEQ ID NO: 89178 - protein, 33 aa, Artificial Sequence
  Cyclic GFR-binding peptide
  MOD_RES (28)..(29): Xaa is C or S
MDSMEGLVVNNASDMIQITINSLRTPVXXTPPT

SEQ ID NO: 89179 - protein, 23 aa, Artificial Sequence
  Cyclic GFR-binding peptide
VMGSMEGLIIQQKDNMIQMTINS

SEQ ID NO: 89180 - protein, 36 aa, Artificial Sequence; identical to SEQ ID NO: 35968
  Cyclic GFR-binding peptide
  MOD_RES (2)..(33)..(34): Xaa is C or S

SEQ ID NO: 89181 - protein, 37 aa, Artificial Sequence; identical to SEQ ID NO: 35969
  Cyclic GFR-binding peptide
  MOD_RES (31)..(32): Xaa is C or S

SEQ ID NO: 89182 - protein, 33 aa, Artificial Sequence; identical to SEQ ID NO: 35970
  Cyclic GFR-binding peptide
  MOD_RES (2)..(2): Xaa is C or S

SEQ ID NO: 89183 - protein, 34 aa, Artificial Sequence; identical to SEQ ID NO: 35973
  Cyclic GFR-binding peptide
  MOD_RES (1)..(3): Xaa is C or S

SEQ ID NO: 89184 - protein, 28 aa, Artificial Sequence
  Cyclic GFR-binding peptide
  MOD_RES (28)..(28): Xaa is C or S
MGSMEGLIIQQKDNMIQMTINSMKTPTX

SEQ ID NO: 89185 - protein, 25 aa, Artificial Sequence
  Cyclic GFR-binding peptide
IMSMEGILLVRGNDMIQMTINSTKV

SEQ ID NO: 89186 - protein, 29 aa, Artificial Sequence
  Cyclic GFR-binding peptide
  MOD_RES (29)..(29): Xaa is C or S
VMDSMEGIVVNNAADMIQITINSLRAPVX

SEQ ID NO: 89187 - protein, 37 aa, Artificial Sequence; identical to SEQ ID NO: 35978
  Cyclic GFR-binding peptide
  MOD_RES (1)..(3)..(34)..(35): Xaa is C or S

SEQ ID NO: 89188 - protein, 33 aa, Artificial Sequence
  Cyclic GFR-binding peptide
  MOD_RES (2)..(4): Xaa is C or S
SXKXSKVVMSMEGLVKPTRGVMIQITINSLDQP

SEQ ID NO: 89189 - protein, 27 aa, Artificial Sequence
  Cyclic GFR-binding peptide
EVVMDSMEGIVVNNASDMIQITINSLR

SEQ ID NO: 89190 - protein, 29 aa, Artificial Sequence
  Cyclic GFR-binding peptide
EVVMDSMEGIVVNNASDMIQITINSLRTP

SEQ ID NO: 89191 - protein, 36 aa, Artificial Sequence; identical to SEQ ID NO: 35981
  Cyclic GFR-binding peptide
  MOD_RES (2)..(33)..(34): Xaa is C or S

SEQ ID NO: 89192 - protein, 31 aa, Artificial Sequence
  Cyclic GFR-binding peptide
  MOD_RES (26)..(27): Xaa is C or S
SMEGLVVNNAADMIQITINSLRAPVXXSAPA

SEQ ID NO: 89193 - protein, 32 aa, Artificial Sequence
  Cyclic GFR-binding peptide
  MOD_RES (2)..(4): Xaa is C or S
SXGXRDVVMGSMEGLIIQQKDNMIQMTINSMK

SEQ ID NO: 89194 - protein, 35 aa, Artificial Sequence; identical to SEQ ID NO: 35983
  Cyclic GFR-binding peptide
  MOD_RES (31)..(32): Xaa is C or S

SEQ ID NO: 89195 - protein, 21 aa, Artificial Sequence
  Cyclic GFR-binding peptide
DSMEGLVVNNAADMIQITINS

SEQ ID NO: 89196 - protein, 31 aa, Artificial Sequence; identical to SEQ ID NO: 35984
  Cyclic GFR-binding peptide

SEQ ID NO: 89197 - protein, 26 aa, Artificial Sequence
  Cyclic GFR-binding peptide
RDVVMGSMEGLIIQQKDNMIQMTINS

SEQ ID NO: 89198 - protein, 23 aa, Artificial Sequence
  Cyclic GFR-binding peptide
SMEGLLLVRGNDMIQMTINSTKV

SEQ ID NO: 89199 - protein, 29 aa, Artificial Sequence
  Cyclic GFR-binding peptide
  MOD_RES (29)..(29): Xaa is C or S
VMDSMEGLVVNNAADMIQITINSLRAPVX

SEQ ID NO: 89200 - protein, 33 aa, Artificial Sequence
  Cyclic GFR-binding peptide
  MOD_RES (30)..(31): Xaa is C or S
VVMGSMEGLIIQQKDNMIQMTINSMKTPTXXPG

SEQ ID NO: 89201 - protein, 40 aa, Artificial Sequence; identical to SEQ ID NO: 35994
  Cyclic GFR-binding peptide
  MOD_RES (2)..(4)..(35)..(36): Xaa is C or S

SEQ ID NO: 89202 - protein, 32 aa, Artificial Sequence; identical to SEQ ID NO: 35995
  Cyclic GFR-binding peptide
  MOD_RES (1)..(1): Xaa is C or S

SEQ ID NO: 89203 - protein, 32 aa, Artificial Sequence
  Cyclic GFR-binding peptide
  MOD_RES (28)..(29): Xaa is C or S
MGSMEGLIIQQKDNMIQMTINSMKTPTXXPGA

SEQ ID NO: 89204 - protein, 21 aa, Artificial Sequence
  Cyclic GFR-binding peptide
SMEGLIKPTKGIMIQITINSL

SEQ ID NO: 89205 - protein, 27 aa, Artificial Sequence
  Cyclic GFR-binding peptide
EEVIMSMEGLLLVRGNDMIQMTINSTK

SEQ ID NO: 89206 - protein, 33 aa, Artificial Sequence
  Cyclic GFR-binding peptide
  MOD_RES (1)..(3): Xaa is C or S
XGXRDVVMGSMEGIIIQQKDNMIQMTINSMKTP

SEQ ID NO: 89207 - protein, 22 aa, Artificial Sequence
  Cyclic GFR-binding peptide
SMEGLVVNNAADMIQITINSLR

SEQ ID NO: 89208 - protein, 31 aa, Artificial Sequence
  Cyclic GFR-binding peptide
  MOD_RES (28)..(29): Xaa is C or S
MDSMEGIVVNNASDMIQITINSLRTPVXXTP

SEQ ID NO: 89209 - protein, 37 aa, Artificial Sequence; identical to SEQ ID NO: 35999
  Cyclic GFR-binding peptide
  MOD_RES (1)..(3)..(35)..(36): Xaa is C or S

SEQ ID NO: 89210 - protein, 33 aa, Artificial Sequence
  Cyclic GFR-binding peptide
  MOD_RES (30)..(31): Xaa is C or S
EVIMSMEGLLLVRGNDMIQMTINSTKVPAXXTS

SEQ ID NO: 89211 - protein, 26 aa, Artificial Sequence
  Cyclic GFR-binding peptide
  MOD_RES (1)..(1): Xaa is C or S
XEEVIMSMEGLLLVRGNDMIQMTINS

SEQ ID NO: 89212 - protein, 26 aa, Artificial Sequence
  Cyclic GFR-binding peptide
SEVVMDSMEGIVVNNASDMIQITINS

SEQ ID NO: 89213 - protein, 27 aa, Artificial Sequence
  Cyclic GFR-binding peptide
  MOD_RES (27)..(27): Xaa is C or S
DSMEGLVVNNAADMIQITINSLRAPVX

SEQ ID NO: 89214 - protein, 28 aa, Artificial Sequence
  Cyclic GFR-binding peptide
  MOD_RES (27)..(28): Xaa is C or S
DSMEGLVVNNAADMIQITINSLRAPVXX

SEQ ID NO: 89215 - protein, 32 aa, Artificial Sequence
  Cyclic GFR-binding peptide
  MOD_RES (2)..(4): Xaa is C or S
HXGXSRVVMNSMEGLIVNSSDDMIQVTINSLK

SEQ ID NO: 89216 - protein, 33 aa, Artificial Sequence; identical to SEQ ID NO: 36007
  Cyclic GFR-binding peptide
  MOD_RES (1)..(32)..(33): Xaa is C or S

SEQ ID NO: 89217 - protein, 31 aa, Artificial Sequence; identical to SEQ ID NO: 36010
  Cyclic GFR-binding peptide
  MOD_RES (1)..(1): Xaa is C or S

SEQ ID NO: 89218 - protein, 32 aa, Artificial Sequence; identical to SEQ ID NO: 36011
  Cyclic GFR-binding peptide
  MOD_RES (1)..(32): Xaa is C or S

SEQ ID NO: 89219 - protein, 23 aa, Artificial Sequence
  Cyclic GFR-binding peptide
DSMEGLVVNNASDMIQITINSLR

SEQ ID NO: 89220 - protein, 38 aa, Artificial Sequence; identical to SEQ ID NO: 36013
  Cyclic GFR-binding peptide
  MOD_RES (2)..(34)..(35): Xaa is C or S

SEQ ID NO: 89221 - protein, 37 aa, Artificial Sequence; identical to SEQ ID NO: 36014
  Cyclic GFR-binding peptide
  MOD_RES (2)..(4)..(35)..(36): Xaa is C or S

SEQ ID NO: 89222 - protein, 21 aa, Artificial Sequence
  Cyclic GFR-binding peptide
MSMEGLVKPKRGVMIQITINS

SEQ ID NO: 89223 - protein, 31 aa, Artificial Sequence
  Cyclic GFR-binding peptide
  MOD_RES (27)..(28): Xaa is C or S
NSMEGLIVNSSDDMIQVTINSLKTPAXXPKP

SEQ ID NO: 89224 - protein, 27 aa, Artificial Sequence
  Cyclic GFR-binding peptide
  MOD_RES (27)..(27): Xaa is C or S
MSMEGILLVRGNDMIQMTINSTKVPAX

SEQ ID NO: 89225 - protein, 31 aa, Artificial Sequence
  Cyclic GFR-binding peptide
  MOD_RES (28)..(29): Xaa is C or S
MDSMEGLVVNNAADMIQITINSLRAPVXXSA

SEQ ID NO: 89226 - protein, 29 aa, Artificial Sequence
  Cyclic GFR-binding peptide
  MOD_RES (28)..(29): Xaa is C or S
MGSMEGLIIQQKDNMIQMTINSMKTPTXX

SEQ ID NO: 89227 - protein, 34 aa, Artificial Sequence
  Cyclic GFR-binding peptide
  MOD_RES (28)..(29): Xaa is C or S
MGSMEGLIIQQKDNMIQMTINSMKTPTXXPGASG

SEQ ID NO: 89228 - protein, 42 aa, Artificial Sequence; identical to SEQ ID NO: 36020
  Cyclic GFR-binding peptide
  MOD_RES (2)..(4)..(36)..(37): Xaa is C or S

SEQ ID NO: 89229 - protein, 30 aa, Artificial Sequence
  Cyclic GFR-binding peptide
  MOD_RES (1)..(1): Xaa is C or S
XRDVVMGSMEGLIIQQKDNMIQMTINSMKT

SEQ ID NO: 89230 - protein, 32 aa, Artificial Sequence
  Cyclic GFR-binding peptide
  MOD_RES (28)..(29): Xaa is C or S
MDSMEGIVVNNASDMIQITINSLRTPVXXTPP

SEQ ID NO: 89231 - protein, 32 aa, Artificial Sequence
  Cyclic GFR-binding peptide
  MOD_RES (2)..(4): Xaa is C or S
LXGXEEVIMSMEGLLLVRGNDMIQMTINSTKV

SEQ ID NO: 89232 - protein, 23 aa, Artificial Sequence
  Cyclic GFR-binding peptide
SMEGLVVNNAADMIQITINSLRA

SEQ ID NO: 89233 - protein, 28 aa, Artificial Sequence
  Cyclic GFR-binding peptide
VMDSMEGLVVNNAADMIQITINSLRAPV

SEQ ID NO: 89234 - protein, 29 aa, Artificial Sequence
  Cyclic GFR-binding peptide
  MOD_RES (29)..(29): Xaa is C or S
VMGSMEGLIIQQKDNMIQMTINSMKTPTX

SEQ ID NO: 89235 - protein, 31 aa, Artificial Sequence
  Cyclic GFR-binding peptide
  MOD_RES (2)..(4): Xaa is C or S
RXGXSEVVMDSMEGLVVNNASDMIQITINSL

SEQ ID NO: 89236 - protein, 30 aa, Artificial Sequence
  Cyclic GFR-binding peptide
  MOD_RES (29)..(30): Xaa is C or S
VMGSMEGIIIQQKDNMIQMTINSMKTPTXX

SEQ ID NO: 89237 - protein, 35 aa, Artificial Sequence; identical to SEQ ID NO: 36027
  Cyclic GFR-binding peptide
  MOD_RES (31)..(32): Xaa is C or S

SEQ ID NO: 89238 - protein, 36 aa, Artificial Sequence; identical to SEQ ID NO: 36030
  Cyclic GFR-binding peptide
  MOD_RES (1)..(3)..(35)..(36): Xaa is C or S

SEQ ID NO: 89239 - protein, 30 aa, Artificial Sequence
  Cyclic GFR-binding peptide
  MOD_RES (2)..(4): Xaa is C or S
SXGXRDVVMGSMEGLIIQQKDNMIQMTINS

SEQ ID NO: 89240 - protein, 28 aa, Artificial Sequence
  Cyclic GFR-binding peptide
VVMNSMEGLIVNSSDDMIQVTINSLKTP

SEQ ID NO: 89241 - protein, 38 aa, Artificial Sequence; identical to SEQ ID NO: 36033
  Cyclic GFR-binding peptide
  MOD_RES (1)..(3)..(34)..(35): Xaa is C or S

SEQ ID NO: 89242 - protein, 30 aa, Artificial Sequence
  Cyclic GFR-binding peptide
  MOD_RES (1)..(1): Xaa is C or S
XSRVVMNSMEGLIVNSSDDMIQVTINSLKT

SEQ ID NO: 89243 - protein, 29 aa, Artificial Sequence
  Cyclic GFR-binding peptide
  MOD_RES (2)..(2): Xaa is C or S
KXSKVVMSMEGLVKPTRGVMIQITINSLD

SEQ ID NO: 89244 - protein, 28 aa, Artificial Sequence
  Cyclic GFR-binding peptide
  MOD_RES (2)..(2): Xaa is C or S
KXSKVVMSMEGLVKPTRGVMIQITINSL

SEQ ID NO: 89245 - protein, 26 aa, Artificial Sequence
  Cyclic GFR-binding peptide
MDSMEGIVVNNASDMIQITINSLRTP

SEQ ID NO: 89246 - protein, 38 aa, Artificial Sequence; identical to SEQ ID NO: 36039
  Cyclic GFR-binding peptide
  MOD_RES (1)..(33)..(34): Xaa is C or S

SEQ ID NO: 89247 - protein, 32 aa, Artificial Sequence
  Cyclic GFR-binding peptide
  MOD_RES (30)..(31): Xaa is C or S
VVMDSMEGIVVNNASDMIQITINSLRTPVXXT

SEQ ID NO: 89248 - protein, 26 aa, Artificial Sequence
  Cyclic GFR-binding peptide
VIMSMEGILLVRGNDMIQMTINSTKV

SEQ ID NO: 89249 - protein, 35 aa, Artificial Sequence
  Cyclic GFR-binding peptide
  MOD_RES (29)..(30): Xaa is C or S
VVMSMEGLVKPTRGVMIQITINSLDQPVXXPSASA

SEQ ID NO: 89250 - protein, 32 aa, Artificial Sequence; identical to SEQ ID NO: 36045
  Cyclic GFR-binding peptide
  MOD_RES (1)..(1): Xaa is C or S

SEQ ID NO: 89251 - protein, 32 aa, Artificial Sequence; identical to SEQ ID NO: 36046
  Cyclic GFR-binding peptide
  MOD_RES (31)..(32): Xaa is C or S

SEQ ID NO: 89252 - protein, 20 aa, Artificial Sequence
  Cyclic GFR-binding peptide
SMEGLIKPTKGIMIQITINS

SEQ ID NO: 89253 - protein, 31 aa, Artificial Sequence
  Cyclic GFR-binding peptide
  MOD_RES (2)..(2): Xaa is C or S
GXEEVIMSMEGILLVRGNDMIQMTINSTKVP

SEQ ID NO: 89254 - protein, 34 aa, Artificial Sequence; identical to SEQ ID NO: 36047
  Cyclic GFR-binding peptide
  MOD_RES (32)..(33): Xaa is C or S

SEQ ID NO: 89255 - protein, 28 aa, Artificial Sequence
  Cyclic GFR-binding peptide
EVVMDSMEGLVVNNASDMIQITINSLRT

SEQ ID NO: 89256 - protein, 20 aa, Artificial Sequence
  Cyclic GFR-binding peptide
SMEGLIVNSSDDMIQVTINS

SEQ ID NO: 89257 - protein, 31 aa, Artificial Sequence
  Cyclic GFR-binding peptide
  MOD_RES (2)..(4): Xaa is C or S
HXGXSRVVMNSMEGLIVNSSDDMIQVTINSL

SEQ ID NO: 89258 - protein, 26 aa, Artificial Sequence
  Cyclic GFR-binding peptide
VVMDSMEGIVVNNAADMIQITINSLR

SEQ ID NO: 89259 - protein, 29 aa, Artificial Sequence
  Cyclic GFR-binding peptide
  MOD_RES (1)..(1): Xaa is C or S
XSRVIMSMEGLVKPKRGVMIQITINSLAQ

SEQ ID NO: 89260 - protein, 37 aa, Artificial Sequence; identical to SEQ ID NO: 36055
  Cyclic GFR-binding peptide
  MOD_RES (2)..(34)..(35): Xaa is C or S

SEQ ID NO: 89261 - protein, 32 aa, Artificial Sequence; identical to SEQ ID NO: 36061
  Cyclic GFR-binding peptide
  MOD_RES (1)..(32): Xaa is C or S

SEQ ID NO: 89262 - protein, 31 aa, Artificial Sequence; identical to SEQ ID NO: 36064
  Cyclic GFR-binding peptide
  MOD_RES (1)..(1): Xaa is C or S

SEQ ID NO: 89263 - protein, 40 aa, Artificial Sequence; identical to SEQ ID NO: 36067
  Cyclic GFR-binding peptide
  MOD_RES (1)..(3)..(35)..(36): Xaa is C or S

SEQ ID NO: 89264 - protein, 31 aa, Artificial Sequence
  Cyclic GFR-binding peptide
  MOD_RES (27)..(28): Xaa is C or S
DSMEGLVVNNASDMIQITINSLRTPVXXTPP

SEQ ID NO: 89265 - protein, 30 aa, Artificial Sequence
  Cyclic GFR-binding peptide
  MOD_RES (26)..(27): Xaa is C or S
SMEGLLLVRGNDMIQMTINSTKVPAXXTSP

SEQ ID NO: 89266 - protein, 34 aa, Artificial Sequence
  Cyclic GFR-binding peptide
  MOD_RES (30)..(31): Xaa is C or S
KVVMSMEGLVKPTRGVMIQITINSLDQPVXXPSA

SEQ ID NO: 89267 - protein, 31 aa, Artificial Sequence
  Cyclic GFR-binding peptide
  MOD_RES (30)..(31): Xaa is C or S
VVMDSMEGLVVNNASDMIQITINSLRTPVXX

SEQ ID NO: 89268 - protein, 33 aa, Artificial Sequence; identical to SEQ ID NO: 36076
  Cyclic GFR-binding peptide
  MOD_RES (1)..(33): Xaa is C or S

SEQ ID NO: 89269 - protein, 38 aa, Artificial Sequence; identical to SEQ ID NO: 36078
  Cyclic GFR-binding peptide
  MOD_RES (1)..(3)..(35)..(36): Xaa is C or S

SEQ ID NO: 89270 - protein, 29 aa, Artificial Sequence
  Cyclic GFR-binding peptide
  MOD_RES (2)..(4): Xaa is C or S
LXGXEEVIMSMEGILLVRGNDMIQMTINS

SEQ ID NO: 89271 - protein, 21 aa, Artificial Sequence
  Cyclic GFR-binding peptide
SMEGLLLVRGNDMIQMTINST

SEQ ID NO: 89272 - protein, 24 aa, Artificial Sequence
  Cyclic GFR-binding peptide
DSMEGIVVNNASDMIQITINSLRT

SEQ ID NO: 89273 - protein, 34 aa, Artificial Sequence; identical to SEQ ID NO: 36079
  Cyclic GFR-binding peptide
  MOD_RES (1)..(33)..(34): Xaa is C or S

SEQ ID NO: 89274 - protein, 27 aa, Artificial Sequence
  Cyclic GFR-binding peptide
KVVMSMEGLVKPTRGVMIQITINSLDQ

SEQ ID NO: 89275 - protein, 36 aa, Artificial Sequence; identical to SEQ ID NO: 36080
  Cyclic GFR-binding peptide
  MOD_RES (2)..(4)..(36): Xaa is C or S

SEQ ID NO: 89276 - protein, 29 aa, Artificial Sequence
  Cyclic GFR-binding peptide
  MOD_RES (2)..(4): Xaa is C or S
LXGXEEVIMSMEGLLLVRGNDMIQMTINS

SEQ ID NO: 89277 - protein, 36 aa, Artificial Sequence; identical to SEQ ID NO: 36084
  Cyclic GFR-binding peptide
  MOD_RES (1)..(32)..(33): Xaa is C or S

SEQ ID NO: 89278 - protein, 23 aa, Artificial Sequence
  Cyclic GFR-binding peptide
VMGSMEGIIIQQKDNMIQMTINS

SEQ ID NO: 89279 - protein, 33 aa, Artificial Sequence
  Cyclic GFR-binding peptide
  MOD_RES (29)..(30): Xaa is C or S
VIMSMEGLIKPTKGIMIQITINSLDQSVXXPSA

SEQ ID NO: 89280 - protein, 30 aa, Artificial Sequence
  Cyclic GFR-binding peptide
  MOD_RES (1)..(3): Xaa is C or S
XKXSRVIMSMEGLVKPKRGVMIQITINSLA

SEQ ID NO: 89281 - protein, 24 aa, Artificial Sequence
  Cyclic GFR-binding peptide
EVIMSMEGILLVRGNDMIQMTINS

SEQ ID NO: 89282 - protein, 31 aa, Artificial Sequence
  Cyclic GFR-binding peptide
  MOD_RES (2)..(4): Xaa is C or S
RXGXAEVVMDSMEGLVVNNAADMIQITINSL

SEQ ID NO: 89283 - protein, 30 aa, Artificial Sequence; identical to SEQ ID NO: 2164
  Cyclic GFR-binding peptide

SEQ ID NO: 89284 - protein, 33 aa, Artificial Sequence; identical to SEQ ID NO: 36100
  Cyclic GFR-binding peptide
  MOD_RES (32)..(33): Xaa is C or S

SEQ ID NO: 89285 - protein, 33 aa, Artificial Sequence
  Cyclic GFR-binding peptide
  MOD_RES (1)..(3): Xaa is C or S
XGXRDVVMGSMEGLIIQQKDNMIQMTINSMKTP

SEQ ID NO: 89286 - protein, 28 aa, Artificial Sequence
  Cyclic GFR-binding peptide
  MOD_RES (26)..(27): Xaa is C or S
SMEGIVVNNAADMIQITINSLRAPVXXS

SEQ ID NO: 89287 - protein, 38 aa, Artificial Sequence; identical to SEQ ID NO: 36102
  Cyclic GFR-binding peptide
  MOD_RES (1)..(33)..(34): Xaa is C or S

SEQ ID NO: 89288 - protein, 36 aa, Artificial Sequence; identical to SEQ ID NO: 36104
  Cyclic GFR-binding peptide
  MOD_RES (2)..(4)..(35)..(36): Xaa is C or S

SEQ ID NO: 89289 - protein, 26 aa, Artificial Sequence
  Cyclic GFR-binding peptide
IMSMEGLLLVRGNDMIQMTINSTKVP

SEQ ID NO: 89290 - protein, 29 aa, Artificial Sequence
  Cyclic GFR-binding peptide
  MOD_RES (28)..(29): Xaa is C or S
IMSMEGILLVRGNDMIQMTINSTKVPAXX

SEQ ID NO: 89291 - protein, 35 aa, Artificial Sequence
  Cyclic GFR-binding peptide
  MOD_RES (29)..(30): Xaa is C or S
VMDSMEGIVVNNAADMIQITINSLRAPVXXSAPAA

SEQ ID NO: 89292 - protein, 26 aa, Artificial Sequence
  Cyclic GFR-binding peptide
MDSMEGIVVNNAADMIQITINSLRAP

SEQ ID NO: 89293 - protein, 30 aa, Artificial Sequence
  Cyclic GFR-binding peptide
  MOD_RES (26)..(27): Xaa is C or S
SMEGLVVNNASDMIQITINSLRTPVXXTPP

SEQ ID NO: 89294 - protein, 24 aa, Artificial Sequence
  Cyclic GFR-binding peptide
MSMEGLVKPTRGVMIQITINSLDQ

SEQ ID NO: 89295 - protein, 24 aa, Artificial Sequence
  Cyclic GFR-binding peptide
MDSMEGLVVNNASDMIQITINSLR

SEQ ID NO: 89296 - protein, 35 aa, Artificial Sequence
  Cyclic GFR-binding peptide
  MOD_RES (29)..(30): Xaa is C or S
VIMSMEGLVKPKRGVMIQITINSLAQPVXXPAASA

SEQ ID NO: 89297 - protein, 32 aa, Artificial Sequence; identical to SEQ ID NO: 36108
  Cyclic GFR-binding peptide
  MOD_RES (1)..(32): Xaa is C or S

SEQ ID NO: 89298 - protein, 25 aa, Artificial Sequence
  Cyclic GFR-binding peptide
MSMEGLVKPTRGVMIQITINSLDQP

SEQ ID NO: 89299 - protein, 27 aa, Artificial Sequence
  Cyclic GFR-binding peptide
VVMGSMEGLIIQQKDNMIQMTINSMKT

SEQ ID NO: 89300 - protein, 31 aa, Artificial Sequence
  Cyclic GFR-binding peptide
  MOD_RES (28)..(29): Xaa is C or S
IMSMEGLVKPKRGVMIQITINSLAQPVXXPA

SEQ ID NO: 89301 - protein, 31 aa, Artificial Sequence
  Cyclic GFR-binding peptide
  MOD_RES (27)..(28): Xaa is C or S
MSMEGILLVRGNDMIQMTINSTKVPAXXTSP

SEQ ID NO: 89302 - protein, 34 aa, Artificial Sequence; identical to SEQ ID NO: 36114
  Cyclic GFR-binding peptide
  MOD_RES (1)..(33)..(34): Xaa is C or S

SEQ ID NO: 89303 - protein, 34 aa, Artificial Sequence; identical to SEQ ID NO: 36116
  Cyclic GFR-binding peptide
  MOD_RES (1)..(33)..(34): Xaa is C or S

SEQ ID NO: 89304 - protein, 32 aa, Artificial Sequence
  Cyclic GFR-binding peptide
  MOD_RES (30)..(31): Xaa is C or S
VVMDSMEGLVVNNAADMIQITINSLRAPVXXS

SEQ ID NO: 89305 - protein, 33 aa, Artificial Sequence; identical to SEQ ID NO: 36117
  Cyclic GFR-binding peptide
  MOD_RES (1)..(33): Xaa is C or S

SEQ ID NO: 89306 - protein, 22 aa, Artificial Sequence
  Cyclic GFR-binding peptide
IMSMEGLVKPKRGVMIQITINS

SEQ ID NO: 89307 - protein, 33 aa, Artificial Sequence; identical to SEQ ID NO: 36122
  Cyclic GFR-binding peptide
  MOD_RES (1)..(33): Xaa is C or S

SEQ ID NO: 89308 - protein, 32 aa, Artificial Sequence; identical to SEQ ID NO: 36125
  Cyclic GFR-binding peptide
  MOD_RES (1)..(1): Xaa is C or S

SEQ ID NO: 89309 - protein, 39 aa, Artificial Sequence; identical to SEQ ID NO: 36126
  Cyclic GFR-binding peptide
  MOD_RES (1)..(3)..(35)..(36): Xaa is C or S

SEQ ID NO: 89310 - protein, 39 aa, Artificial Sequence; identical to SEQ ID NO: 36127
  Cyclic GFR-binding peptide
  MOD_RES (2)..(4)..(36)..(37): Xaa is C or S

SEQ ID NO: 89311 - protein, 30 aa, Artificial Sequence
  Cyclic GFR-binding peptide
  MOD_RES (27)..(28): Xaa is C or S
GSMEGLIIQQKDNMIQMTINSMKTPTXXPG

SEQ ID NO: 89312 - protein, 25 aa, Artificial Sequence
  Cyclic GFR-binding peptide
MGSMEGLIIQQKDNMIQMTINSMKT

SEQ ID NO: 89313 - protein, 33 aa, Artificial Sequence
  Cyclic GFR-binding peptide
  MOD_RES (28)..(29): Xaa is C or S
IMSMEGILLVRGNDMIQMTINSTKVPAXXTSPV

SEQ ID NO: 89314 - protein, 31 aa, Artificial Sequence
  Cyclic GFR-binding peptide
  MOD_RES (27)..(28): Xaa is C or S
GSMEGIIIQQKDNMIQMTINSMKTPTXXPGA

SEQ ID NO: 89315 - protein, 28 aa, Artificial Sequence
  Cyclic GFR-binding peptide
  MOD_RES (26)..(27): Xaa is C or S
SMEGILLVRGNDMIQMTINSTKVPAXXT

SEQ ID NO: 89316 - protein, 37 aa, Artificial Sequence; identical to SEQ ID NO: 36132
  Cyclic GFR-binding peptide
  MOD_RES (32)..(33): Xaa is C or S

SEQ ID NO: 89317 - protein, 25 aa, Artificial Sequence
  Cyclic GFR-binding peptide
VMSMEGLVKPTRGVMIQITINSLDQ

SEQ ID NO: 89318 - protein, 38 aa, Artificial Sequence; identical to SEQ ID NO: 36134
  Cyclic GFR-binding peptide
  MOD_RES (32)..(33): Xaa is C or S

SEQ ID NO: 89319 - protein, 36 aa, Artificial Sequence
  Cyclic GFR-binding peptide
  MOD_RES (30)..(31): Xaa is C or S
VVMNSMEGIIVNSSDDMIQVTINSLKTPAXXPKPVH

SEQ ID NO: 89320 - protein, 30 aa, Artificial Sequence
  Cyclic GFR-binding peptide
  MOD_RES (2)..(2): Xaa is C or S
KXSKVIMSMEGLIKPTKGIMIQITINSLDQ

SEQ ID NO: 89321 - protein, 38 aa, Artificial Sequence; identical to SEQ ID NO: 36137
  Cyclic GFR-binding peptide
  MOD_RES (2)..(4)..(36)..(37): Xaa is C or S

SEQ ID NO: 89322 - protein, 34 aa, Artificial Sequence; identical to SEQ ID NO: 36140
  Cyclic GFR-binding peptide
  MOD_RES (1)..(33)..(34): Xaa is C or S

SEQ ID NO: 89323 - protein, 29 aa, Artificial Sequence
  Cyclic GFR-binding peptide
VVMDSMEGIVVNNAADMIQITINSLRAPV

SEQ ID NO: 89324 - protein, 33 aa, Artificial Sequence; identical to SEQ ID NO: 36145
  Cyclic GFR-binding peptide
  MOD_RES (1)..(33): Xaa is C or S

SEQ ID NO: 89325 - protein, 30 aa, Artificial Sequence
  Cyclic GFR-binding peptide
  MOD_RES (29)..(30): Xaa is C or S
VIMSMEGLLLVRGNDMIQMTINSTKVPAXX

SEQ ID NO: 89326 - protein, 33 aa, Artificial Sequence
  Cyclic GFR-binding peptide
  MOD_RES (1)..(3): Xaa is C or S
XGXSEVVMDSMEGLVVNNASDMIQITINSLRTP

SEQ ID NO: 89327 - protein, 37 aa, Artificial Sequence; identical to SEQ ID NO: 36146
  Cyclic GFR-binding peptide
  MOD_RES (1)..(3)..(34)..(35): Xaa is C or S

SEQ ID NO: 89328 - protein, 35 aa, Artificial Sequence; identical to SEQ ID NO: 36149
  Cyclic GFR-binding peptide
  MOD_RES (2)..(4): Xaa is C or S

SEQ ID NO: 89329 - protein, 25 aa, Artificial Sequence
  Cyclic GFR-binding peptide
KVVMSMEGLVKPTRGVMIQITINSL

SEQ ID NO: 89330 - protein, 34 aa, Artificial Sequence
  Cyclic GFR-binding peptide
  MOD_RES (28)..(29): Xaa is C or S
IMSMEGLIKPTKGIMIQITINSLDQSVXXPSASA

SEQ ID NO: 89331 - protein, 27 aa, Artificial Sequence
  Cyclic GFR-binding peptide
VIMSMEGLIKPTKGIMIQITINSLDQS

SEQ ID NO: 89332 - protein, 29 aa, Artificial Sequence
  Cyclic GFR-binding peptide
  MOD_RES (1)..(1): Xaa is C or S
XEEVIMSMEGLLLVRGNDMIQMTINSTKV

SEQ ID NO: 89333 - protein, 24 aa, Artificial Sequence
  Cyclic GFR-binding peptide
VVMDSMEGLVVNNASDMIQITINS

SEQ ID NO: 89334 - protein, 27 aa, Artificial Sequence
  Cyclic GFR-binding peptide
VVMDSMEGLVVNNASDMIQITINSLRT

SEQ ID NO: 89335 - protein, 25 aa, Artificial Sequence
  Cyclic GFR-binding peptide
VVMNSMEGLIVNSSDDMIQVTINSL

SEQ ID NO: 89336 - protein, 27 aa, Artificial Sequence
  Cyclic GFR-binding peptide
VMDSMEGIVVNNAADMIQITINSLRAP

SEQ ID NO: 89337 - protein, 29 aa, Artificial Sequence
  Cyclic GFR-binding peptide
EEVIMSMEGILLVRGNDMIQMTINSTKVP

SEQ ID NO: 89338 - protein, 26 aa, Artificial Sequence
  Cyclic GFR-binding peptide
MSMEGILLVRGNDMIQMTINSTKVPA

SEQ ID NO: 89339 - protein, 28 aa, Artificial Sequence
  Cyclic GFR-binding peptide
VIMSMEGLIKPTKGIMIQITINSLDQSV

SEQ ID NO: 89340 - protein, 33 aa, Artificial Sequence
  Cyclic GFR-binding peptide
  MOD_RES (2)..(4): Xaa is C or S
SXGXRDVVMGSMEGIIIQQKDNMIQMTINSMKT

SEQ ID NO: 89341 - protein, 25 aa, Artificial Sequence
  Cyclic GFR-binding peptide
DSMEGIVVNNASDMIQITINSLRTP

SEQ ID NO: 89342 - protein, 30 aa, Artificial Sequence
  Cyclic GFR-binding peptide
  MOD_RES (1)..(3): Xaa is C or S
XGXSEVVMDSMEGLVVNNASDMIQITINSL

SEQ ID NO: 89343 - protein, 39 aa, Artificial Sequence; identical to SEQ ID NO: 36162
  Cyclic GFR-binding peptide
  MOD_RES (1)..(3)..(35)..(36): Xaa is C or S

SEQ ID NO: 89344 - protein, 34 aa, Artificial Sequence
  Cyclic GFR-binding peptide
  MOD_RES (28)..(29): Xaa is C or S
VMSMEGLVKPTRGVMIQITINSLDQPVXXPSASA

SEQ ID NO: 89345 - protein, 37 aa, Artificial Sequence; identical to SEQ ID NO: 36167
  Cyclic GFR-binding peptide
  MOD_RES (31)..(32): Xaa is C or S

SEQ ID NO: 89346 - protein, 28 aa, Artificial Sequence
  Cyclic GFR-binding peptide
VMDSMEGIVVNNAADMIQITINSLRAPV

SEQ ID NO: 89347 - protein, 31 aa, Artificial Sequence
  Cyclic GFR-binding peptide
  MOD_RES (2)..(2): Xaa is C or S
KXSKVVMSMEGLVKPTRGVMIQITINSLDQP

SEQ ID NO: 89348 - protein, 37 aa, Artificial Sequence; identical to SEQ ID NO: 35092
  Cyclic GFR-binding peptide
  MOD_RES (31)..(32): Xaa is C or S

SEQ ID NO: 89349 - protein, 30 aa, Artificial Sequence
  Cyclic GFR-binding peptide
  MOD_RES (28)..(29): Xaa is C or S
MDSMEGIVVNNASDMIQITINSLRTPVXXT

SEQ ID NO: 89350 - protein, 27 aa, Artificial Sequence
  Cyclic GFR-binding peptide
  MOD_RES (27)..(27): Xaa is C or S
GSMEGLIIQQKDNMIQMTINSMKTPTX

SEQ ID NO: 89351 - protein, 29 aa, Artificial Sequence
  Cyclic GFR-binding peptide
  MOD_RES (1)..(3): Xaa is C or S
XGXRDVVMGSMEGLIIQQKDNMIQMTINS

SEQ ID NO: 89352 - protein, 29 aa, Artificial Sequence
  Cyclic GFR-binding peptide
  MOD_RES (29)..(29): Xaa is C or S
VMDSMEGIVVNNASDMIQITINSLRTPVX

SEQ ID NO: 89353 - protein, 29 aa, Artificial Sequence
  Cyclic GFR-binding peptide
SEVVMDSMEGIVVNNASDMIQITINSLRT

SEQ ID NO: 89354 - protein, 31 aa, Artificial Sequence; identical to SEQ ID NO: 35103
  Cyclic GFR-binding peptide
  MOD_RES (31)..(31): Xaa is C or S

SEQ ID NO: 89355 - protein, 23 aa, Artificial Sequence
  Cyclic GFR-binding peptide
MDSMEGLVVNNAADMIQITINSL

SEQ ID NO: 89356 - protein, 28 aa, Artificial Sequence
  Cyclic GFR-binding peptide
  MOD_RES (26)..(27): Xaa is C or S
SMEGLIVNSSDDMIQVTINSLKTPAXXP

SEQ ID NO: 89357 - protein, 29 aa, Artificial Sequence
  Cyclic GFR-binding peptide
  MOD_RES (2)..(2): Xaa is C or S
GXEEVIMSMEGLLLVRGNDMIQMTINSTK

SEQ ID NO: 89358 - protein, 30 aa, Artificial Sequence; identical to SEQ ID NO: 35105
  Cyclic GFR-binding peptide

SEQ ID NO: 89359 - protein, 28 aa, Artificial Sequence
  Cyclic GFR-binding peptide
EVVMDSMEGLVVNNAADMIQITINSLRA

SEQ ID NO: 89360 - protein, 36 aa, Artificial Sequence; identical to SEQ ID NO: 35106
  Cyclic GFR-binding peptide
  MOD_RES (2)..(4)..(35)..(36): Xaa is C or S

SEQ ID NO: 89361 - protein, 35 aa, Artificial Sequence; identical to SEQ ID NO: 35107
  Cyclic GFR-binding peptide
  MOD_RES (1)..(32)..(33): Xaa is C or S

SEQ ID NO: 89362 - protein, 32 aa, Artificial Sequence; identical to SEQ ID NO: 35111
  Cyclic GFR-binding peptide
  MOD_RES (1)..(1): Xaa is C or S

SEQ ID NO: 89363 - protein, 26 aa, Artificial Sequence
  Cyclic GFR-binding peptide
DVVMGSMEGIIIQQKDNMIQMTINSM

SEQ ID NO: 89364 - protein, 27 aa, Artificial Sequence
  Cyclic GFR-binding peptide
  MOD_RES (26)..(27): Xaa is C or S
SMEGLVKPTRGVMIQITINSLDQPVXX

SEQ ID NO: 89365 - protein, 29 aa, Artificial Sequence
  Cyclic GFR-binding peptide
  MOD_RES (2)..(4): Xaa is C or S
SXKXSRVIMSMEGLVKPKRGVMIQITINS

SEQ ID NO: 89366 - protein, 36 aa, Artificial Sequence; identical to SEQ ID NO: 35114
  Cyclic GFR-binding peptide
  MOD_RES (1)..(3)..(35)..(36): Xaa is C or S

SEQ ID NO: 89367 - protein, 25 aa, Artificial Sequence
  Cyclic GFR-binding peptide
MNSMEGLIVNSSDDMIQVTINSLKT

SEQ ID NO: 89368 - protein, 29 aa, Artificial Sequence
  Cyclic GFR-binding peptide
  MOD_RES (26)..(27): Xaa is C or S
SMEGIVVNNAADMIQITINSLRAPVXXSA

SEQ ID NO: 89369 - protein, 25 aa, Artificial Sequence
  Cyclic GFR-binding peptide
MDSMEGLVVNNASDMIQITINSLRT

SEQ ID NO: 89370 - protein, 37 aa, Artificial Sequence; identical to SEQ ID NO: 35117
  Cyclic GFR-binding peptide
  MOD_RES (2)..(4)..(35)..(36): Xaa is C or S

SEQ ID NO: 89371 - protein, 29 aa, Artificial Sequence
  Cyclic GFR-binding peptide
EVIMSMEGILLVRGNDMIQMTINSTKVPA

SEQ ID NO: 89372 - protein, 32 aa, Artificial Sequence
  Cyclic GFR-binding peptide
  MOD_RES (27)..(28): Xaa is C or S
NSMEGLIVNSSDDMIQVTINSLKTPAXXPKPV

SEQ ID NO: 89373 - protein, 34 aa, Artificial Sequence; identical to SEQ ID NO: 35125
  Cyclic GFR-binding peptide
  MOD_RES (1)..(3)..(34): Xaa is C or S

SEQ ID NO: 89374 - protein, 41 aa, Artificial Sequence; identical to SEQ ID NO: 35127
  Cyclic GFR-binding peptide
  MOD_RES (2)..(4)..(36)..(37): Xaa is C or S

SEQ ID NO: 89375 - protein, 35 aa, Artificial Sequence; identical to SEQ ID NO: 35128
  Cyclic GFR-binding peptide
  MOD_RES (1)..(3)..(34)..(35): Xaa is C or S

SEQ ID NO: 89376 - protein, 23 aa, Artificial Sequence
  Cyclic GFR-binding peptide
DSMEGLVVNNAADMIQITINSLR

SEQ ID NO: 89377 - protein, 28 aa, Artificial Sequence
  Cyclic GFR-binding peptide
  MOD_RES (2)..(2): Xaa is C or S
GXSEVVMDSMEGIVVNNASDMIQITINS

SEQ ID NO: 89378 - protein, 35 aa, Artificial Sequence; identical to SEQ ID NO: 35132
  Cyclic GFR-binding peptide
  MOD_RES (1)..(3)..(35): Xaa is C or S

SEQ ID NO: 89379 - protein, 28 aa, Artificial Sequence
  Cyclic GFR-binding peptide
  MOD_RES (1)..(1): Xaa is C or S
XSEVVMDSMEGLVVNNASDMIQITINSL

SEQ ID NO: 89380 - protein, 29 aa, Artificial Sequence
  Cyclic GFR-binding peptide
  MOD_RES (1)..(3): Xaa is C or S
XGXEEVIMSMEGLLLVRGNDMIQMTINST

SEQ ID NO: 89381 - protein, 29 aa, Artificial Sequence
  Cyclic GFR-binding peptide
  MOD_RES (1)..(3): Xaa is C or S
XKXSRVIMSMEGLVKPKRGVMIQITINSL

SEQ ID NO: 89382 - protein, 24 aa, Artificial Sequence
  Cyclic GFR-binding peptide
KVVMSMEGLVKPTRGVMIQITINS

SEQ ID NO: 89383 - protein, 31 aa, Artificial Sequence
  Cyclic GFR-binding peptide
  MOD_RES (28)..(29): Xaa is C or S
MDSMEGLVVNNASDMIQITINSLRTPVXXTP

SEQ ID NO: 89384 - protein, 39 aa, Artificial Sequence; identical to SEQ ID NO: 35147
  Cyclic GFR-binding peptide
  MOD_RES (2)..(34)..(35): Xaa is C or S

SEQ ID NO: 89385 - protein, 35 aa, Artificial Sequence; identical to SEQ ID NO: 35148
  Cyclic GFR-binding peptide
  MOD_RES (1)..(3)..(35): Xaa is C or S

SEQ ID NO: 89386 - protein, 39 aa, Artificial Sequence; identical to SEQ ID NO: 35149
  Cyclic GFR-binding peptide
  MOD_RES (2)..(34)..(35): Xaa is C or S

SEQ ID NO: 89387 - protein, 30 aa, Artificial Sequence; identical to SEQ ID NO: 35152
  Cyclic GFR-binding peptide

SEQ ID NO: 89388 - protein, 29 aa, Artificial Sequence
  Cyclic GFR-binding peptide
  MOD_RES (27)..(28): Xaa is C or S
MSMEGLLLVRGNDMIQMTINSTKVPAXXT

SEQ ID NO: 89389 - protein, 35 aa, Artificial Sequence; identical to SEQ ID NO: 35154
  Cyclic GFR-binding peptide
  MOD_RES (2)..(34)..(35): Xaa is C or S

SEQ ID NO: 89390 - protein, 23 aa, Artificial Sequence
  Cyclic GFR-binding peptide
SMEGIVVNNASDMIQITINSLRT

SEQ ID NO: 89391 - protein, 26 aa, Artificial Sequence
  Cyclic GFR-binding peptide
VMGSMEGLIIQQKDNMIQMTINSMKT

SEQ ID NO: 89392 - protein, 24 aa, Artificial Sequence
  Cyclic GFR-binding peptide
VMGSMEGLIIQQKDNMIQMTINSM

SEQ ID NO: 89393 - protein, 28 aa, Artificial Sequence
  Cyclic GFR-binding peptide
  MOD_RES (26)..(27): Xaa is C or S
SMEGLVVNNASDMIQITINSLRTPVXXT

SEQ ID NO: 89394 - protein, 38 aa, Artificial Sequence; identical to SEQ ID NO: 35161
  Cyclic GFR-binding peptide
  MOD_RES (2)..(4)..(36)..(37): Xaa is C or S

SEQ ID NO: 89395 - protein, 30 aa, Artificial Sequence
  Cyclic GFR-binding peptide
  MOD_RES (1)..(1): Xaa is C or S
XSKVVMSMEGLVKPTRGVMIQITINSLDQP

SEQ ID NO: 89396 - protein, 31 aa, Artificial Sequence
  Cyclic GFR-binding peptide
  MOD_RES (1)..(3): Xaa is C or S
XGXAEVVMDSMEGIVVNNAADMIQITINSLR

SEQ ID NO: 89397 - protein, 24 aa, Artificial Sequence
  Cyclic GFR-binding peptide
VMSMEGLVKPTRGVMIQITINSLD

SEQ ID NO: 89398 - protein, 34 aa, Artificial Sequence
  Cyclic GFR-binding peptide
  MOD_RES (30)..(31): Xaa is C or S
EVIMSMEGLLLVRGNDMIQMTINSTKVPAXXTSP

SEQ ID NO: 89399 - protein, 28 aa, Artificial Sequence
  Cyclic GFR-binding peptide
SRVVMNSMEGLIVNSSDDMIQVTINSLK

SEQ ID NO: 89400 - protein, 29 aa, Artificial Sequence
  Cyclic GFR-binding peptide
  MOD_RES (29)..(29): Xaa is C or S
VIMSMEGLIKPTKGIMIQITINSLDQSVX

SEQ ID NO: 89401 - protein, 25 aa, Artificial Sequence
  Cyclic GFR-binding peptide
EVVMDSMEGLVVNNASDMIQITINS

SEQ ID NO: 89402 - protein, 28 aa, Artificial Sequence
  Cyclic GFR-binding peptide
EEVIMSMEGLLLVRGNDMIQMTINSTKV

SEQ ID NO: 89403 - protein, 38 aa, Artificial Sequence; identical to SEQ ID NO: 35173
  Cyclic GFR-binding peptide
  MOD_RES (1)..(3)..(35)..(36): Xaa is C or S

SEQ ID NO: 89404 - protein, 28 aa, Artificial Sequence
  Cyclic GFR-binding peptide
  MOD_RES (2)..(2): Xaa is C or S
GXRDVVMGSMEGLIIQQKDNMIQMTINS

SEQ ID NO: 89405 - protein, 30 aa, Artificial Sequence
  Cyclic GFR-binding peptide
  MOD_RES (30)..(30): Xaa is C or S
EVIMSMEGILLVRGNDMIQMTINSTKVPAX

SEQ ID NO: 89406 - protein, 27 aa, Artificial Sequence
  Cyclic GFR-binding peptide
  MOD_RES (2)..(2): Xaa is C or S
GXEEVIMSMEGLLLVRGNDMIQMTINS

SEQ ID NO: 89407 - protein, 32 aa, Artificial Sequence
  Cyclic GFR-binding peptide
  MOD_RES (29)..(30): Xaa is C or S
VMDSMEGLVVNNAADMIQITINSLRAPVXXSA

SEQ ID NO: 89408 - protein, 27 aa, Artificial Sequence
  Cyclic GFR-binding peptide
  MOD_RES (26)..(27): Xaa is C or S
SMEGIVVNNASDMIQITINSLRTPVXX

SEQ ID NO: 89409 - protein, 40 aa, Artificial Sequence; identical to SEQ ID NO: 35174
  Cyclic GFR-binding peptide
  MOD_RES (1)..(3)..(35)..(36): Xaa is C or S

SEQ ID NO: 89410 - protein, 26 aa, Artificial Sequence
  Cyclic GFR-binding peptide
SEVVMDSMEGLVVNNASDMIQITINS

SEQ ID NO: 89411 - protein, 38 aa, Artificial Sequence; identical to SEQ ID NO: 35175
  Cyclic GFR-binding peptide
  MOD_RES (2)..(34)..(35): Xaa is C or S

SEQ ID NO: 89412 - protein, 35 aa, Artificial Sequence; identical to SEQ ID NO: 35176
  Cyclic GFR-binding peptide
  MOD_RES (1)..(3)..(35): Xaa is C or S

SEQ ID NO: 89413 - protein, 25 aa, Artificial Sequence
  Cyclic GFR-binding peptide
SMEGLVVNNASDMIQITINSLRTPV

SEQ ID NO: 89414 - protein, 32 aa, Artificial Sequence
  Cyclic GFR-binding peptide
  MOD_RES (2)..(2): Xaa is C or S
GXAEVVMDSMEGLVVNNAADMIQITINSLRAP

SEQ ID NO: 89415 - protein, 31 aa, Artificial Sequence
  Cyclic GFR-binding peptide
  MOD_RES (1)..(3): Xaa is C or S
XKXSKVIMSMEGLIKPTKGIMIQITINSLDQ

SEQ ID NO: 89416 - protein, 23 aa, Artificial Sequence
  Cyclic GFR-binding peptide
SMEGLIIQQKDNMIQMTINSMKT

SEQ ID NO: 89417 - protein, 33 aa, Artificial Sequence
  Cyclic GFR-binding peptide
  MOD_RES (28)..(29): Xaa is C or S
MGSMEGLIIQQKDNMIQMTINSMKTPTXXPGAS

SEQ ID NO: 89418 - protein, 39 aa, Artificial Sequence; identical to SEQ ID NO: 35186
  Cyclic GFR-binding peptide
  MOD_RES (1)..(33)..(34): Xaa is C or S

SEQ ID NO: 89419 - protein, 30 aa, Artificial Sequence
  Cyclic GFR-binding peptide
  MOD_RES (2)..(4): Xaa is C or S
SXKXSKVVMSMEGLVKPTRGVMIQITINSL

SEQ ID NO: 89420 - protein, 20 aa, Artificial Sequence
  Cyclic GFR-binding peptide
SMEGIVVNNAADMIQITINS

SEQ ID NO: 89421 - protein, 36 aa, Artificial Sequence; identical to SEQ ID NO: 35188
  Cyclic GFR-binding peptide
  MOD_RES (1)..(33)..(34): Xaa is C or S

SEQ ID NO: 89422 - protein, 26 aa, Artificial Sequence
  Cyclic GFR-binding peptide
  MOD_RES (26)..(26): Xaa is C or S
SMEGIVVNNAADMIQITINSLRAPVX

SEQ ID NO: 89423 - protein, 25 aa, Artificial Sequence
  Cyclic GFR-binding peptide
RVVMNSMEGLIVNSSDDMIQVTINS

SEQ ID NO: 89424 - protein, 29 aa, Artificial Sequence
  Cyclic GFR-binding peptide
EVVMDSMEGLVVNNAADMIQITINSLRAP

SEQ ID NO: 89425 - protein, 35 aa, Artificial Sequence; identical to SEQ ID NO: 35192
  Cyclic GFR-binding peptide
  MOD_RES (32)..(33): Xaa is C or S

SEQ ID NO: 89426 - protein, 34 aa, Artificial Sequence
  Cyclic GFR-binding peptide
  MOD_RES (30)..(31): Xaa is C or S
VVMDSMEGIVVNNASDMIQITINSLRTPVXXTPP

SEQ ID NO: 89427 - protein, 30 aa, Artificial Sequence
  Cyclic GFR-binding peptide
  MOD_RES (1)..(3): Xaa is C or S
XGXRDVVMGSMEGLIIQQKDNMIQMTINSM

SEQ ID NO: 89428 - protein, 20 aa, Artificial Sequence
  Cyclic GFR-binding peptide
SMEGLVVNNASDMIQITINS

SEQ ID NO: 89429 - protein, 39 aa, Artificial Sequence; identical to SEQ ID NO: 35204
  Cyclic GFR-binding peptide
  MOD_RES (1)..(33)..(34): Xaa is C or S

SEQ ID NO: 89430 - protein, 38 aa, Artificial Sequence; identical to SEQ ID NO: 35206
  Cyclic GFR-binding peptide
  MOD_RES (1)..(3)..(34)..(35): Xaa is C or S

SEQ ID NO: 89431 - protein, 36 aa, Artificial Sequence; identical to SEQ ID NO: 35207
  Cyclic GFR-binding peptide
  MOD_RES (1)..(3)..(35)..(36): Xaa is C or S

SEQ ID NO: 89432 - protein, 31 aa, Artificial Sequence
  Cyclic GFR-binding peptide
  MOD_RES (30)..(31): Xaa is C or S
VVMNSMEGLIVNSSDDMIQVTINSLKTPAXX

SEQ ID NO: 89433 - protein, 28 aa, Artificial Sequence
  Cyclic GFR-binding peptide
  MOD_RES (27)..(28): Xaa is C or S
MSMEGLVKPKRGVMIQITINSLAQPVXX

SEQ ID NO: 89434 - protein, 36 aa, Artificial Sequence; identical to SEQ ID NO: 35208
  Cyclic GFR-binding peptide
  MOD_RES (1)..(33)..(34): Xaa is C or S

SEQ ID NO: 89435 - protein, 35 aa, Artificial Sequence; identical to SEQ ID NO: 35209
  Cyclic GFR-binding peptide
  MOD_RES (31)..(32): Xaa is C or S

SEQ ID NO: 89436 - protein, 27 aa, Artificial Sequence
  Cyclic GFR-binding peptide
  MOD_RES (1)..(1): Xaa is C or S
XSKVIMSMEGLIKPTKGIMIQITINSL

SEQ ID NO: 89437 - protein, 28 aa, Artificial Sequence
  Cyclic GFR-binding peptide
VMNSMEGLIVNSSDDMIQVTINSLKTPA

SEQ ID NO: 89438 - protein, 32 aa, Artificial Sequence
  Cyclic GFR-binding peptide
  MOD_RES (30)..(31): Xaa is C or S
VVMDSMEGLVVNNASDMIQITINSLRTPVXXT

SEQ ID NO: 89439 - protein, 34 aa, Artificial Sequence
  Cyclic GFR-binding peptide
  MOD_RES (28)..(29): Xaa is C or S
MNSMEGIIVNSSDDMIQVTINSLKTPAXXPKPVH

SEQ ID NO: 89440 - protein, 31 aa, Artificial Sequence
  Cyclic GFR-binding peptide
  MOD_RES (1)..(1): Xaa is C or S
XSEVVMDSMEGLVVNNASDMIQITINSLRTP

SEQ ID NO: 89441 - protein, 34 aa, Artificial Sequence
  Cyclic GFR-binding peptide
  MOD_RES (30)..(31): Xaa is C or S
VVMGSMEGLIIQQKDNMIQMTINSMKTPTXXPGA

SEQ ID NO: 89442 - protein, 31 aa, Artificial Sequence
  Cyclic GFR-binding peptide
  MOD_RES (1)..(3): Xaa is C or S
XGXRDVVMGSMEGIIIQQKDNMIQMTINSMK

SEQ ID NO: 89443 - protein, 25 aa, Artificial Sequence
  Cyclic GFR-binding peptide
VVMSMEGLVKPTRGVMIQITINSLD

SEQ ID NO: 89444 - protein, 34 aa, Artificial Sequence; identical to SEQ ID NO: 35219
  Cyclic GFR-binding peptide
  MOD_RES (1)..(3)..(34): Xaa is C or S

SEQ ID NO: 89445 - protein, 24 aa, Artificial Sequence
  Cyclic GFR-binding peptide
VVMDSMEGLVVNNAADMIQITINS

SEQ ID NO: 89446 - protein, 27 aa, Artificial Sequence
  Cyclic GFR-binding peptide
  MOD_RES (1)..(1): Xaa is C or S
XRDVVMGSMEGLIIQQKDNMIQMTINS

SEQ ID NO: 89447 - protein, 42 aa, Artificial Sequence; identical to SEQ ID NO: 35225
  Cyclic GFR-binding peptide
  MOD_RES (2)..(4)..(36)..(37): Xaa is C or S

SEQ ID NO: 89448 - protein, 29 aa, Artificial Sequence
  Cyclic GFR-binding peptide
SRVIMSMEGLVKPKRGVMIQITINSLAQP

SEQ ID NO: 89449 - protein, 27 aa, Artificial Sequence
  Cyclic GFR-binding peptide
RVIMSMEGLVKPKRGVMIQITINSLAQ

SEQ ID NO: 89450 - protein, 29 aa, Artificial Sequence
  Cyclic GFR-binding peptide
  MOD_RES (27)..(28): Xaa is C or S
DSMEGIVVNNASDMIQITINSLRTPVXXT

SEQ ID NO: 89451 - protein, 26 aa, Artificial Sequence
  Cyclic GFR-binding peptide
GSMEGIIIQQKDNMIQMTINSMKTPT

SEQ ID NO: 89452 - protein, 27 aa, Artificial Sequence
  Cyclic GFR-binding peptide
IMSMEGILLVRGNDMIQMTINSTKVPA

SEQ ID NO: 89453 - protein, 30 aa, Artificial Sequence
  Cyclic GFR-binding peptide
  MOD_RES (30)..(30): Xaa is C or S
KVIMSMEGLIKPTKGIMIQITINSLDQSVX

SEQ ID NO: 89454 - protein, 34 aa, Artificial Sequence; identical to SEQ ID NO: 35239
  Cyclic GFR-binding peptide
  MOD_RES (1)..(33)..(34): Xaa is C or S

SEQ ID NO: 89455 - protein, 27 aa, Artificial Sequence
  Cyclic GFR-binding peptide
  MOD_RES (26)..(27): Xaa is C or S
SMEGLLLVRGNDMIQMTINSTKVPAXX

SEQ ID NO: 89456 - protein, 32 aa, Artificial Sequence
  Cyclic GFR-binding peptide
  MOD_RES (27)..(28): Xaa is C or S
DSMEGLVVNNASDMIQITINSLRTPVXXTPPT

SEQ ID NO: 89457 - protein, 41 aa, Artificial Sequence; identical to SEQ ID NO: 35245
  Cyclic GFR-binding peptide
  MOD_RES (2)..(4)..(35)..(36): Xaa is C or S

SEQ ID NO: 89458 - protein, 22 aa, Artificial Sequence
  Cyclic GFR-binding peptide
DSMEGIVVNNASDMIQITINSL

SEQ ID NO: 89459 - protein, 31 aa, Artificial Sequence
  Cyclic GFR-binding peptide
  MOD_RES (27)..(28): Xaa is C or S
DSMEGIVVNNAADMIQITINSLRAPVXXSAP

SEQ ID NO: 89460 - protein, 36 aa, Artificial Sequence
  Cyclic GFR-binding peptide
  MOD_RES (30)..(31): Xaa is C or S
VVMDSMEGLVVNNASDMIQITINSLRTPVXXTPPTS

SEQ ID NO: 89461 - protein, 25 aa, Artificial Sequence
  Cyclic GFR-binding peptide
MSMEGLVKPKRGVMIQITINSLAQP

SEQ ID NO: 89462 - protein, 31 aa, Artificial Sequence
  Cyclic GFR-binding peptide
  MOD_RES (1)..(1): Xaa is C or S
XRDVVMGSMEGLIIQQKDNMIQMTINSMKTP

SEQ ID NO: 89463 - protein, 20 aa, Artificial Sequence
  Cyclic GFR-binding peptide
SMEGLVKPTRGVMIQITINS

SEQ ID NO: 89464 - protein, 32 aa, Artificial Sequence
  Cyclic GFR-binding peptide
  MOD_RES (30)..(31): Xaa is C or S
EVIMSMEGLLLVRGNDMIQMTINSTKVPAXXT

SEQ ID NO: 89465 - protein, 27 aa, Artificial Sequence
  Cyclic GFR-binding peptide
VIMSMEGLVKPKRGVMIQITINSLAQP

SEQ ID NO: 89466 - protein, 33 aa, Artificial Sequence; identical to SEQ ID NO: 35261
  Cyclic GFR-binding peptide
  MOD_RES (2)..(2): Xaa is C or S

SEQ ID NO: 89467 - protein, 26 aa, Artificial Sequence
  Cyclic GFR-binding peptide
  MOD_RES (26)..(26): Xaa is C or S
SMEGLVVNNASDMIQITINSLRTPVX

SEQ ID NO: 89468 - protein, 27 aa, Artificial Sequence
  Cyclic GFR-binding peptide
SKVIMSMEGLIKPTKGIMIQITINSLD

SEQ ID NO: 89469 - protein, 32 aa, Artificial Sequence
  Cyclic GFR-binding peptide
  MOD_RES (29)..(30): Xaa is C or S
VVMSMEGLVKPTRGVMIQITINSLDQPVXXPS

SEQ ID NO: 89470 - protein, 36 aa, Artificial Sequence; identical to SEQ ID NO: 35268
  Cyclic GFR-binding peptide
  MOD_RES (31)..(32): Xaa is C or S

SEQ ID NO: 89471 - protein, 36 aa, Artificial Sequence; identical to SEQ ID NO: 35269
  Cyclic GFR-binding peptide
  MOD_RES (1)..(32)..(33): Xaa is C or S

SEQ ID NO: 89472 - protein, 31 aa, Artificial Sequence
  Cyclic GFR-binding peptide
  MOD_RES (26)..(27): Xaa is C or S
SMEGLIKPTKGIMIQITINSLDQSVXXPSAS

SEQ ID NO: 89473 - protein, 28 aa, Artificial Sequence
  Cyclic GFR-binding peptide
SRVIMSMEGLVKPKRGVMIQITINSLAQ

SEQ ID NO: 89474 - protein, 23 aa, Artificial Sequence
  Cyclic GFR-binding peptide
VMDSMEGIVVNNAADMIQITINS

SEQ ID NO: 89475 - protein, 35 aa, Artificial Sequence; identical to SEQ ID NO: 35278
  Cyclic GFR-binding peptide
  MOD_RES (2)..(34)..(35): Xaa is C or S

SEQ ID NO: 89476 - protein, 22 aa, Artificial Sequence
  Cyclic GFR-binding peptide
DSMEGLVVNNASDMIQITINSL

SEQ ID NO: 89477 - protein, 30 aa, Artificial Sequence
  Cyclic GFR-binding peptide
  MOD_RES (1)..(1): Xaa is C or S
XEEVIMSMEGLLLVRGNDMIQMTINSTKVP

SEQ ID NO: 89478 - protein, 31 aa, Artificial Sequence
  Cyclic GFR-binding peptide
  MOD_RES (2)..(4): Xaa is C or S
RXGXAEVVMDSMEGIVVNNAADMIQITINSL

SEQ ID NO: 89479 - protein, 29 aa, Artificial Sequence
  Cyclic GFR-binding peptide
  MOD_RES (1)..(3): Xaa is C or S
XGXAEVVMDSMEGLVVNNAADMIQITINS

SEQ ID NO: 89480 - protein, 23 aa, Artificial Sequence
  Cyclic GFR-binding peptide
VIMSMEGLVKPKRGVMIQITINS

SEQ ID NO: 89481 - protein, 31 aa, Artificial Sequence; identical to SEQ ID NO: 35284
  Cyclic GFR-binding peptide

SEQ ID NO: 89482 - protein, 24 aa, Artificial Sequence
  Cyclic GFR-binding peptide
IMSMEGLLLVRGNDMIQMTINSTK

SEQ ID NO: 89483 - protein, 37 aa, Artificial Sequence; identical to SEQ ID NO: 35287
  Cyclic GFR-binding peptide
  MOD_RES (1)..(32)..(33): Xaa is C or S

SEQ ID NO: 89484 - protein, 31 aa, Artificial Sequence
  Cyclic GFR-binding peptide
  MOD_RES (2)..(2): Xaa is C or S
KXSKVIMSMEGLIKPTKGIMIQITINSLDQS

SEQ ID NO: 89485 - protein, 38 aa, Artificial Sequence; identical to SEQ ID NO: 35290
  Cyclic GFR-binding peptide
  MOD_RES (1)..(3)..(35)..(36): Xaa is C or S

SEQ ID NO: 89486 - protein, 39 aa, Artificial Sequence; identical to SEQ ID NO: 35294
  Cyclic GFR-binding peptide
  MOD_RES (1)..(33)..(34): Xaa is C or S

SEQ ID NO: 89487 - protein, 25 aa, Artificial Sequence
  Cyclic GFR-binding peptide
VVMGSMEGLIIQQKDNMIQMTINSM

SEQ ID NO: 89488 - protein, 32 aa, Artificial Sequence
  Cyclic GFR-binding peptide
  MOD_RES (26)..(27): Xaa is C or S
SMEGLVKPTRGVMIQITINSLDQPVXXPSASA

SEQ ID NO: 89489 - protein, 27 aa, Artificial Sequence
  Cyclic GFR-binding peptide
RVVMNSMEGLIVNSSDDMIQVTINSLK

SEQ ID NO: 89490 - protein, 25 aa, Artificial Sequence
  Cyclic GFR-binding peptide
EVIMSMEGILLVRGNDMIQMTINST

SEQ ID NO: 89491 - protein, 30 aa, Artificial Sequence
  Cyclic GFR-binding peptide
RDVVMGSMEGLIIQQKDNMIQMTINSMKTP

SEQ ID NO: 89492 - protein, 32 aa, Artificial Sequence; identical to SEQ ID NO: 35302
  Cyclic GFR-binding peptide
  MOD_RES (32)..(32): Xaa is C or S

SEQ ID NO: 89493 - protein, 32 aa, Artificial Sequence; identical to SEQ ID NO: 35305
  Cyclic GFR-binding peptide
  MOD_RES (2)..(2): Xaa is C or S

SEQ ID NO: 89494 - protein, 28 aa, Artificial Sequence
  Cyclic GFR-binding peptide
  MOD_RES (27)..(28): Xaa is C or S
NSMEGLIVNSSDDMIQVTINSLKTPAXX

SEQ ID NO: 89495 - protein, 35 aa, Artificial Sequence; identical to SEQ ID NO: 35308
  Cyclic GFR-binding peptide
  MOD_RES (2)..(33)..(34): Xaa is C or S

SEQ ID NO: 89496 - protein, 33 aa, Artificial Sequence; identical to SEQ ID NO: 35309
  Cyclic GFR-binding peptide
  MOD_RES (31)..(32): Xaa is C or S

SEQ ID NO: 89497 - protein, 28 aa, Artificial Sequence
  Cyclic GFR-binding peptide
  MOD_RES (2)..(2): Xaa is C or S
GXEEVIMSMEGILLVRGNDMIQMTINST

SEQ ID NO: 89498 - protein, 32 aa, Artificial Sequence
  Cyclic GFR-binding peptide
  MOD_RES (27)..(28): Xaa is C or S
DSMEGIVVNNASDMIQITINSLRTPVXXTPPT

SEQ ID NO: 89499 - protein, 37 aa, Artificial Sequence; identical to SEQ ID NO: 35314
  Cyclic GFR-binding peptide
  MOD_RES (2)..(34)..(35): Xaa is C or S

SEQ ID NO: 89500 - protein, 32 aa, Artificial Sequence
  Cyclic GFR-binding peptide
  MOD_RES (2)..(4): Xaa is C or S
RXGXAEVVMDSMEGIVVNNAADMIQITINSLR

SEQ ID NO: 89501 - protein, 33 aa, Artificial Sequence; identical to SEQ ID NO: 35316
  Cyclic GFR-binding peptide
  MOD_RES (2)..(33): Xaa is C or S

SEQ ID NO: 89502 - protein, 23 aa, Artificial Sequence
  Cyclic GFR-binding peptide
MDSMEGIVVNNASDMIQITINSL

SEQ ID NO: 89503 - protein, 34 aa, Artificial Sequence; identical to SEQ ID NO: 35319
  Cyclic GFR-binding peptide
  MOD_RES (1)..(32)..(33): Xaa is C or S

SEQ ID NO: 89504 - protein, 21 aa, Artificial Sequence
  Cyclic GFR-binding peptide
SMEGLVKPTRGVMIQITINSL

SEQ ID NO: 89505 - protein, 33 aa, Artificial Sequence; identical to SEQ ID NO: 35320
  Cyclic GFR-binding peptide
  MOD_RES (32)..(33): Xaa is C or S

SEQ ID NO: 89506 - protein, 39 aa, Artificial Sequence; identical to SEQ ID NO: 35321
  Cyclic GFR-binding peptide
  MOD_RES (2)..(4)..(36)..(37): Xaa is C or S

SEQ ID NO: 89507 - protein, 29 aa, Artificial Sequence
  Cyclic GFR-binding peptide
  MOD_RES (29)..(29): Xaa is C or S
VMGSMEGIIIQQKDNMIQMTINSMKTPTX

SEQ ID NO: 89508 - protein, 29 aa, Artificial Sequence
  Cyclic GFR-binding peptide
  MOD_RES (1)..(1): Xaa is C or S
XSEVVMDSMEGLVVNNASDMIQITINSLR

SEQ ID NO: 89509 - protein, 37 aa, Artificial Sequence; identical to SEQ ID NO: 35324
  Cyclic GFR-binding peptide
  MOD_RES (2)..(4)..(36)..(37): Xaa is C or S

SEQ ID NO: 89510 - protein, 31 aa, Artificial Sequence
  Cyclic GFR-binding peptide
  MOD_RES (26)..(27): Xaa is C or S
SMEGIIIQQKDNMIQMTINSMKTPTXXPGAS

SEQ ID NO: 89511 - protein, 31 aa, Artificial Sequence
  Cyclic GFR-binding peptide
  MOD_RES (2)..(2): Xaa is C or S
GXSRVVMNSMEGLIVNSSDDMIQVTINSLKT

SEQ ID NO: 89512 - protein, 26 aa, Artificial Sequence
  Cyclic GFR-binding peptide
EVIMSMEGLLLVRGNDMIQMTINSTK

SEQ ID NO: 89513 - protein, 26 aa, Artificial Sequence
  Cyclic GFR-binding peptide
VIMSMEGLLLVRGNDMIQMTINSTKV

SEQ ID NO: 89514 - protein, 27 aa, Artificial Sequence
  Cyclic GFR-binding peptide
  MOD_RES (26)..(27): Xaa is C or S
SMEGLIKPTKGIMIQITINSLDQSVXX

SEQ ID NO: 89515 - protein, 28 aa, Artificial Sequence
  Cyclic GFR-binding peptide
  MOD_RES (1)..(3): Xaa is C or S
XKXSRVIMSMEGLVKPKRGVMIQITINS

SEQ ID NO: 89516 - protein, 30 aa, Artificial Sequence
  Cyclic GFR-binding peptide
  MOD_RES (28)..(29): Xaa is C or S
IMSMEGLLLVRGNDMIQMTINSTKVPAXXT

SEQ ID NO: 89517 - protein, 41 aa, Artificial Sequence; identical to SEQ ID NO: 35329
  Cyclic GFR-binding peptide
  MOD_RES (2)..(4)..(36)..(37): Xaa is C or S

SEQ ID NO: 89518 - protein, 33 aa, Artificial Sequence; identical to SEQ ID NO: 35330
  Cyclic GFR-binding peptide
  MOD_RES (1)..(33): Xaa is C or S

SEQ ID NO: 89519 - protein, 39 aa, Artificial Sequence; identical to SEQ ID NO: 35331
  Cyclic GFR-binding peptide
  MOD_RES (2)..(4)..(35)..(36): Xaa is C or S

SEQ ID NO: 89520 - protein, 33 aa, Artificial Sequence
  Cyclic GFR-binding peptide
  MOD_RES (29)..(30): Xaa is C or S
VIMSMEGILLVRGNDMIQMTINSTKVPAXXTSP

SEQ ID NO: 89521 - protein, 32 aa, Artificial Sequence
  Cyclic GFR-binding peptide
  MOD_RES (2)..(4): Xaa is C or S
RXGXSEVVMDSMEGIVVNNASDMIQITINSLR

SEQ ID NO: 89522 - protein, 32 aa, Artificial Sequence
  Cyclic GFR-binding peptide
  MOD_RES (26)..(27): Xaa is C or S
SMEGLLLVRGNDMIQMTINSTKVPAXXTSPVR

SEQ ID NO: 89523 - protein, 35 aa, Artificial Sequence; identical to SEQ ID NO: 35332
  Cyclic GFR-binding peptide
  MOD_RES (1)..(33)..(34): Xaa is C or S

SEQ ID NO: 89524 - protein, 34 aa, Artificial Sequence
  Cyclic GFR-binding peptide
  MOD_RES (30)..(31): Xaa is C or S
VVMDSMEGIVVNNAADMIQITINSLRAPVXXSAP

SEQ ID NO: 89525 - protein, 27 aa, Artificial Sequence
  Cyclic GFR-binding peptide
  MOD_RES (2)..(2): Xaa is C or S
KXSKVVMSMEGLVKPTRGVMIQITINS

SEQ ID NO: 89526 - protein, 26 aa, Artificial Sequence
  Cyclic GFR-binding peptide
VIMSMEGLIKPTKGIMIQITINSLDQ

SEQ ID NO: 89527 - protein, 33 aa, Artificial Sequence
  Cyclic GFR-binding peptide
  MOD_RES (28)..(29): Xaa is C or S
IMSMEGLIKPTKGIMIQITINSLDQSVXXPSAS

SEQ ID NO: 89528 - protein, 38 aa, Artificial Sequence; identical to SEQ ID NO: 35343
  Cyclic GFR-binding peptide
  MOD_RES (32)..(33): Xaa is C or S

SEQ ID NO: 89529 - protein, 36 aa, Artificial Sequence; identical to SEQ ID NO: 35344
  Cyclic GFR-binding peptide
  MOD_RES (31)..(32): Xaa is C or S

SEQ ID NO: 89530 - protein, 29 aa, Artificial Sequence
  Cyclic GFR-binding peptide
  MOD_RES (27)..(28): Xaa is C or S
GSMEGIIIQQKDNMIQMTINSMKTPTXXP

SEQ ID NO: 89531 - protein, 33 aa, Artificial Sequence; identical to SEQ ID NO: 35348
  Cyclic GFR-binding peptide
  MOD_RES (31)..(32): Xaa is C or S

SEQ ID NO: 89532 - protein, 24 aa, Artificial Sequence
  Cyclic GFR-binding peptide
MGSMEGLIIQQKDNMIQMTINSMK

SEQ ID NO: 89533 - protein, 24 aa, Artificial Sequence
  Cyclic GFR-binding peptide
VMDSMEGIVVNNASDMIQITINSL

SEQ ID NO: 89534 - protein, 39 aa, Artificial Sequence; identical to SEQ ID NO: 35351
  Cyclic GFR-binding peptide
  MOD_RES (1)..(3)..(35)..(36): Xaa is C or S

SEQ ID NO: 89535 - protein, 33 aa, Artificial Sequence
  Cyclic GFR-binding peptide
  MOD_RES (28)..(29): Xaa is C or S
VMSMEGLVKPTRGVMIQITINSLDQPVXXPSAS

SEQ ID NO: 89536 - protein, 26 aa, Artificial Sequence
  Cyclic GFR-binding peptide
MSMEGLVKPTRGVMIQITINSLDQPV

SEQ ID NO: 89537 - protein, 22 aa, Artificial Sequence
  Cyclic GFR-binding peptide
GSMEGLIIQQKDNMIQMTINSM

SEQ ID NO: 89538 - protein, 32 aa, Artificial Sequence; identical to SEQ ID NO: 35357
  Cyclic GFR-binding peptide
  MOD_RES (31)..(32): Xaa is C or S

SEQ ID NO: 89539 - protein, 34 aa, Artificial Sequence; identical to SEQ ID NO: 35358
  Cyclic GFR-binding peptide
  MOD_RES (2)..(33)..(34): Xaa is C or S

SEQ ID NO: 89540 - protein, 36 aa, Artificial Sequence; identical to SEQ ID NO: 35359
  Cyclic GFR-binding peptide
  MOD_RES (1)..(3)..(35)..(36): Xaa is C or S

SEQ ID NO: 89541 - protein, 27 aa, Artificial Sequence
  Cyclic GFR-binding peptide
  MOD_RES (1)..(1): Xaa is C or S
XSRVVMNSMEGLIVNSSDDMIQVTINS

SEQ ID NO: 89542 - protein, 34 aa, Artificial Sequence
  Cyclic GFR-binding peptide
  MOD_RES (28)..(29): Xaa is C or S
MDSMEGIVVNNASDMIQITINSLRTPVXXTPPTS

SEQ ID NO: 89543 - protein, 29 aa, Artificial Sequence
  Cyclic GFR-binding peptide
  MOD_RES (1)..(1): Xaa is C or S
XRDVVMGSMEGLIIQQKDNMIQMTINSMK

SEQ ID NO: 89544 - protein, 34 aa, Artificial Sequence
  Cyclic GFR-binding peptide
  MOD_RES (2)..(4): Xaa is C or S
RXGXSEVVMDSMEGLVVNNASDMIQITINSLRTP

SEQ ID NO: 89545 - protein, 35 aa, Artificial Sequence; identical to SEQ ID NO: 35361
  Cyclic GFR-binding peptide
  MOD_RES (2)..(4)..(35): Xaa is C or S

SEQ ID NO: 89546 - protein, 41 aa, Artificial Sequence
  Cyclic GFR-binding peptide
  MOD_RES (1)..(3)..(35)..(36): Xaa is C or S
XGXSRVVMNSMEGIIVNSSDDMIQVTINSLKTPAXXPKPVH

SEQ ID NO: 89547 - protein, 36 aa, Artificial Sequence; identical to SEQ ID NO: 35366
  Cyclic GFR-binding peptide
  MOD_RES (2)..(33)..(34): Xaa is C or S

SEQ ID NO: 89548 - protein, 30 aa, Artificial Sequence
  Cyclic GFR-binding peptide
  MOD_RES (28)..(29): Xaa is C or S
IMSMEGLIKPTKGIMIQITINSLDQSVXXP

SEQ ID NO: 89549 - protein, 35 aa, Artificial Sequence
  Cyclic GFR-binding peptide
  MOD_RES (30)..(31): Xaa is C or S
VVMGSMEGIIIQQKDNMIQMTINSMKTPTXXPGAS

SEQ ID NO: 89550 - protein, 23 aa, Artificial Sequence
  Cyclic GFR-binding peptide
VMSMEGLVKPTRGVMIQITINSL

SEQ ID NO: 89551 - protein, 35 aa, Artificial Sequence; identical to SEQ ID NO: 35381
  Cyclic GFR-binding peptide
  MOD_RES (31)..(32): Xaa is C or S

SEQ ID NO: 89552 - protein, 30 aa, Artificial Sequence
  Cyclic GFR-binding peptide
  MOD_RES (29)..(30): Xaa is C or S
VMDSMEGIVVNNAADMIQITINSLRAPVXX

SEQ ID NO: 89553 - protein, 34 aa, Artificial Sequence
  Cyclic GFR-binding peptide
  MOD_RES (2)..(4): Xaa is C or S
RXGXAEVVMDSMEGLVVNNAADMIQITINSLRAP

SEQ ID NO: 89554 - protein, 34 aa, Artificial Sequence
  Cyclic GFR-binding peptide
  MOD_RES (2)..(4): Xaa is C or S
RXGXAEVVMDSMEGIVVNNAADMIQITINSLRAP

SEQ ID NO: 89555 - protein, 27 aa, Artificial Sequence
  Cyclic GFR-binding peptide
SRVIMSMEGLVKPKRGVMIQITINSLA

SEQ ID NO: 89556 - protein, 27 aa, Artificial Sequence
  Cyclic GFR-binding peptide
AEVVMDSMEGLVVNNAADMIQITINSL

SEQ ID NO: 89557 - protein, 34 aa, Artificial Sequence; identical to SEQ ID NO: 35389
  Cyclic GFR-binding peptide
  MOD_RES (31)..(32): Xaa is C or S

SEQ ID NO: 89558 - protein, 39 aa, Artificial Sequence; identical to SEQ ID NO: 35391
  Cyclic GFR-binding peptide
  MOD_RES (2)..(33)..(34): Xaa is C or S

SEQ ID NO: 89559 - protein, 20 aa, Artificial Sequence
  Cyclic GFR-binding peptide
SMEGIVVNNASDMIQITINS

SEQ ID NO: 89560 - protein, 37 aa, Artificial Sequence; identical to SEQ ID NO: 35393
  Cyclic GFR-binding peptide
  MOD_RES (32)..(33): Xaa is C or S

SEQ ID NO: 89561 - protein, 36 aa, Artificial Sequence; identical to SEQ ID NO: 35395
  Cyclic GFR-binding peptide
  MOD_RES (2)..(34)..(35): Xaa is C or S

SEQ ID NO: 89562 - protein, 31 aa, Artificial Sequence; identical to SEQ ID NO: 35399
  Cyclic GFR-binding peptide
  MOD_RES (31)..(31): Xaa is C or S

SEQ ID NO: 89563 - protein, 36 aa, Artificial Sequence; identical to SEQ ID NO: 35404
  Cyclic GFR-binding peptide
  MOD_RES (31)..(32): Xaa is C or S

SEQ ID NO: 89564 - protein, 25 aa, Artificial Sequence
  Cyclic GFR-binding peptide
EVVMDSMEGLVVNNAADMIQITINS

SEQ ID NO: 89565 - protein, 31 aa, Artificial Sequence
  Cyclic GFR-binding peptide
  MOD_RES (28)..(29): Xaa is C or S
IMSMEGLIKPTKGIMIQITINSLDQSVXXPS

SEQ ID NO: 89566 - protein, 32 aa, Artificial Sequence; identical to SEQ ID NO: 35405
  Cyclic GFR-binding peptide
  MOD_RES (32)..(32): Xaa is C or S

SEQ ID NO: 89567 - protein, 30 aa, Artificial Sequence
  Cyclic GFR-binding peptide
RDVVMGSMEGIIIQQKDNMIQMTINSMKTP

SEQ ID NO: 89568 - protein, 35 aa, Artificial Sequence
  Cyclic GFR-binding peptide
  MOD_RES (29)..(30): Xaa is C or S
VMDSMEGIVVNNASDMIQITINSLRTPVXXTPPTS

SEQ ID NO: 89569 - protein, 34 aa, Artificial Sequence; identical to SEQ ID NO: 35406
  Cyclic GFR-binding peptide
  MOD_RES (1)..(3): Xaa is C or S

SEQ ID NO: 89570 - protein, 37 aa, Artificial Sequence; identical to SEQ ID NO: 35409
  Cyclic GFR-binding peptide
  MOD_RES (1)..(3)..(35)..(36): Xaa is C or S

SEQ ID NO: 89571 - protein, 38 aa, Artificial Sequence; identical to SEQ ID NO: 35410
  Cyclic GFR-binding peptide
  MOD_RES (1)..(33)..(34): Xaa is C or S

SEQ ID NO: 89572 - protein, 34 aa, Artificial Sequence; identical to SEQ ID NO: 35411
  Cyclic GFR-binding peptide
  MOD_RES (31)..(32): Xaa is C or S

SEQ ID NO: 89573 - protein, 27 aa, Artificial Sequence
  Cyclic GFR-binding peptide
VMDSMEGLVVNNASDMIQITINSLRTP

SEQ ID NO: 89574 - protein, 30 aa, Artificial Sequence
  Cyclic GFR-binding peptide
  MOD_RES (26)..(27): Xaa is C or S
SMEGILLVRGNDMIQMTINSTKVPAXXTSP

SEQ ID NO: 89575 - protein, 22 aa, Artificial Sequence
  Cyclic GFR-binding peptide
VMSMEGLVKPTRGVMIQITINS

SEQ ID NO: 89576 - protein, 29 aa, Artificial Sequence
  Cyclic GFR-binding peptide
DVVMGSMEGIIIQQKDNMIQMTINSMKTP

SEQ ID NO: 89577 - protein, 29 aa, Artificial Sequence
  Cyclic GFR-binding peptide
  MOD_RES (28)..(29): Xaa is C or S
MDSMEGIVVNNAADMIQITINSLRAPVXX

SEQ ID NO: 89578 - protein, 34 aa, Artificial Sequence
  Cyclic GFR-binding peptide
  MOD_RES (28)..(29): Xaa is C or S
MDSMEGLVVNNAADMIQITINSLRAPVXXSAPAA

SEQ ID NO: 89579 - protein, 24 aa, Artificial Sequence
  Cyclic GFR-binding peptide
DSMEGIVVNNAADMIQITINSLRA

SEQ ID NO: 89580 - protein, 26 aa, Artificial Sequence
  Cyclic GFR-binding peptide
RDVVMGSMEGIIIQQKDNMIQMTINS

SEQ ID NO: 89581 - protein, 34 aa, Artificial Sequence; identical to SEQ ID NO: 35430
  Cyclic GFR-binding peptide
  MOD_RES (2)..(34): Xaa is C or S

SEQ ID NO: 89582 - protein, 31 aa, Artificial Sequence
  Cyclic GFR-binding peptide
  MOD_RES (29)..(30): Xaa is C or S
VMNSMEGLIVNSSDDMIQVTINSLKTPAXXP

SEQ ID NO: 89583 - protein, 36 aa, Artificial Sequence; identical to SEQ ID NO: 35431
  Cyclic GFR-binding peptide
  MOD_RES (1)..(3)..(34)..(35): Xaa is C or S

SEQ ID NO: 89584 - protein, 33 aa, Artificial Sequence
  Cyclic GFR-binding peptide
  MOD_RES (30)..(31): Xaa is C or S
VVMNSMEGLIVNSSDDMIQVTINSLKTPAXXPK

SEQ ID NO: 89585 - protein, 29 aa, Artificial Sequence
  Cyclic GFR-binding peptide
  MOD_RES (1)..(3): Xaa is C or S
XKXSKVVMSMEGLVKPTRGVMIQITINSL

SEQ ID NO: 89586 - protein, 32 aa, Artificial Sequence
  Cyclic GFR-binding peptide
  MOD_RES (28)..(29): Xaa is C or S
IMSMEGILLVRGNDMIQMTINSTKVPAXXTSP

SEQ ID NO: 89587 - protein, 28 aa, Artificial Sequence
  Cyclic GFR-binding peptide
  MOD_RES (28)..(28): Xaa is C or S
MDSMEGIVVNNASDMIQITINSLRTPVX

SEQ ID NO: 89588 - protein, 31 aa, Artificial Sequence
  Cyclic GFR-binding peptide
  MOD_RES (26)..(27): Xaa is C or S
SMEGLIIQQKDNMIQMTINSMKTPTXXPGAS

SEQ ID NO: 89589 - protein, 35 aa, Artificial Sequence; identical to SEQ ID NO: 35433
  Cyclic GFR-binding peptide
  MOD_RES (2)..(4): Xaa is C or S

SEQ ID NO: 89590 - protein, 24 aa, Artificial Sequence
  Cyclic GFR-binding peptide
NSMEGLIVNSSDDMIQVTINSLKT

SEQ ID NO: 89591 - protein, 33 aa, Artificial Sequence
  Cyclic GFR-binding peptide
  MOD_RES (27)..(28): Xaa is C or S
NSMEGIIVNSSDDMIQVTINSLKTPAXXPKPVH

SEQ ID NO: 89592 - protein, 36 aa, Artificial Sequence
  Cyclic GFR-binding peptide
  MOD_RES (30)..(31): Xaa is C or S
KVVMSMEGLVKPTRGVMIQITINSLDQPVXXPSASA

SEQ ID NO: 89593 - protein, 31 aa, Artificial Sequence; identical to SEQ ID NO: 35437
  Cyclic GFR-binding peptide
  MOD_RES (31)..(31): Xaa is C or S

SEQ ID NO: 89594 - protein, 35 aa, Artificial Sequence; identical to SEQ ID NO: 35438
  Cyclic GFR-binding peptide
  MOD_RES (1)..(33)..(34): Xaa is C or S

SEQ ID NO: 89595 - protein, 35 aa, Artificial Sequence
  Cyclic GFR-binding peptide
  MOD_RES (30)..(31): Xaa is C or S
VVMDSMEGLVVNNASDMIQITINSLRTPVXXTPPT

SEQ ID NO: 89596 - protein, 34 aa, Artificial Sequence; identical to SEQ ID NO: 35440
  Cyclic GFR-binding peptide
  MOD_RES (1)..(32)..(33): Xaa is C or S

SEQ ID NO: 89597 - protein, 36 aa, Artificial Sequence; identical to SEQ ID NO: 35444
  Cyclic GFR-binding peptide
  MOD_RES (31)..(32): Xaa is C or S

SEQ ID NO: 89598 - protein, 37 aa, Artificial Sequence; identical to SEQ ID NO: 35445
  Cyclic GFR-binding peptide
  MOD_RES (31)..(32): Xaa is C or S

SEQ ID NO: 89599 - protein, 34 aa, Artificial Sequence
  Cyclic GFR-binding peptide
  MOD_RES (30)..(31): Xaa is C or S
RVIMSMEGLVKPKRGVMIQITINSLAQPVXXPAA

SEQ ID NO: 89600 - protein, 32 aa, Artificial Sequence
  Cyclic GFR-binding peptide
  MOD_RES (2)..(4): Xaa is C or S
SXGXRDVVMGSMEGIIIQQKDNMIQMTINSMK

SEQ ID NO: 89601 - protein, 24 aa, Artificial Sequence
  Cyclic GFR-binding peptide
MNSMEGLIVNSSDDMIQVTINSLK

SEQ ID NO: 89602 - protein, 33 aa, Artificial Sequence
  Cyclic GFR-binding peptide
  MOD_RES (28)..(29): Xaa is C or S
IMSMEGLVKPKRGVMIQITINSLAQPVXXPAAS

SEQ ID NO: 89603 - protein, 35 aa, Artificial Sequence; identical to SEQ ID NO: 35447
  Cyclic GFR-binding peptide
  MOD_RES (2)..(34)..(35): Xaa is C or S

SEQ ID NO: 89604 - protein, 25 aa, Artificial Sequence
  Cyclic GFR-binding peptide
DVVMGSMEGLIIQQKDNMIQMTINS

SEQ ID NO: 89605 - protein, 27 aa, Artificial Sequence
  Cyclic GFR-binding peptide
EVIMSMEGLLLVRGNDMIQMTINSTKV

SEQ ID NO: 89606 - protein, 33 aa, Artificial Sequence
  Cyclic GFR-binding peptide
  MOD_RES (29)..(30): Xaa is C or S
VMGSMEGLIIQQKDNMIQMTINSMKTPTXXPGA

SEQ ID NO: 89607 - protein, 26 aa, Artificial Sequence
  Cyclic GFR-binding peptide
GSMEGLIIQQKDNMIQMTINSMKTPT

SEQ ID NO: 89608 - protein, 32 aa, Artificial Sequence; identical to SEQ ID NO: 35450
  Cyclic GFR-binding peptide
  MOD_RES (32)..(32): Xaa is C or S

SEQ ID NO: 89609 - protein, 34 aa, Artificial Sequence; identical to SEQ ID NO: 35451
  Cyclic GFR-binding peptide
  MOD_RES (1)..(3)..(34): Xaa is C or S

SEQ ID NO: 89610 - protein, 32 aa, Artificial Sequence
  Cyclic GFR-binding peptide
  MOD_RES (2)..(2): Xaa is C or S
GXSEVVMDSMEGLVVNNASDMIQITINSLRTP

SEQ ID NO: 89611 - protein, 31 aa, Artificial Sequence
  Cyclic GFR-binding peptide
  MOD_RES (29)..(30): Xaa is C or S
VIMSMEGLLLVRGNDMIQMTINSTKVPAXXT

SEQ ID NO: 89612 - protein, 27 aa, Artificial Sequence
  Cyclic GFR-binding peptide
VMNSMEGLIVNSSDDMIQVTINSLKTP

SEQ ID NO: 89613 - protein, 27 aa, Artificial Sequence
  Cyclic GFR-binding peptide
  MOD_RES (27)..(27): Xaa is C or S
NSMEGLIVNSSDDMIQVTINSLKTPAX

SEQ ID NO: 89614 - protein, 41 aa, Artificial Sequence; identical to SEQ ID NO: 35458
  Cyclic GFR-binding peptide
  MOD_RES (2)..(4)..(35)..(36): Xaa is C or S

SEQ ID NO: 89615 - protein, 26 aa, Artificial Sequence
  Cyclic GFR-binding peptide
MSMEGLIKPTKGIMIQITINSLDQSV

SEQ ID NO: 89616 - protein, 28 aa, Artificial Sequence
  Cyclic GFR-binding peptide
VVMSMEGLVKPTRGVMIQITINSLDQPV

SEQ ID NO: 89617 - protein, 25 aa, Artificial Sequence
  Cyclic GFR-binding peptide
VVMDSMEGLVVNNASDMIQITINSL

SEQ ID NO: 89618 - protein, 29 aa, Artificial Sequence
  Cyclic GFR-binding peptide
  MOD_RES (26)..(27): Xaa is C or S
SMEGLLLVRGNDMIQMTINSTKVPAXXTS

SEQ ID NO: 89619 - protein, 31 aa, Artificial Sequence
  Cyclic GFR-binding peptide
  MOD_RES (30)..(31): Xaa is C or S
VVMGSMEGLIIQQKDNMIQMTINSMKTPTXX

SEQ ID NO: 89620 - protein, 33 aa, Artificial Sequence; identical to SEQ ID NO: 35470
  Cyclic GFR-binding peptide
  MOD_RES (31)..(32): Xaa is C or S

SEQ ID NO: 89621 - protein, 29 aa, Artificial Sequence
  Cyclic GFR-binding peptide
VVMDSMEGIVVNNASDMIQITINSLRTPV

SEQ ID NO: 89622 - protein, 28 aa, Artificial Sequence
  Cyclic GFR-binding peptide
  MOD_RES (28)..(28): Xaa is C or S
MNSMEGLIVNSSDDMIQVTINSLKTPAX

SEQ ID NO: 89623 - protein, 24 aa, Artificial Sequence
  Cyclic GFR-binding peptide
VIMSMEGLVKPKRGVMIQITINSL

SEQ ID NO: 89624 - protein, 32 aa, Artificial Sequence
  Cyclic GFR-binding peptide
  MOD_RES (30)..(31): Xaa is C or S
KVVMSMEGLVKPTRGVMIQITINSLDQPVXXP

SEQ ID NO: 89625 - protein, 24 aa, Artificial Sequence
  Cyclic GFR-binding peptide
SMEGIIIQQKDNMIQMTINSMKTP

SEQ ID NO: 89626 - protein, 31 aa, Artificial Sequence
  Cyclic GFR-binding peptide
  MOD_RES (2)..(2): Xaa is C or S
GXRDVVMGSMEGIIIQQKDNMIQMTINSMKT

SEQ ID NO: 89627 - protein, 25 aa, Artificial Sequence
  Cyclic GFR-binding peptide
EEVIMSMEGLLLVRGNDMIQMTINS

SEQ ID NO: 89628 - protein, 33 aa, Artificial Sequence; identical to SEQ ID NO: 35478
  Cyclic GFR-binding peptide
  MOD_RES (1)..(3): Xaa is C or S

SEQ ID NO: 89629 - protein, 33 aa, Artificial Sequence; identical to SEQ ID NO: 35480
  Cyclic GFR-binding peptide
  MOD_RES (1)..(3): Xaa is C or S

SEQ ID NO: 89630 - protein, 31 aa, Artificial Sequence
  Cyclic GFR-binding peptide
  MOD_RES (26)..(27): Xaa is C or S
SMEGLVKPTRGVMIQITINSLDQPVXXPSAS

SEQ ID NO: 89631 - protein, 39 aa, Artificial Sequence; identical to SEQ ID NO: 35482
  Cyclic GFR-binding peptide
  MOD_RES (2)..(33)..(34): Xaa is C or S

SEQ ID NO: 89632 - protein, 38 aa, Artificial Sequence; identical to SEQ ID NO: 35483
  Cyclic GFR-binding peptide
  MOD_RES (1)..(33)..(34): Xaa is C or S

SEQ ID NO: 89633 - protein, 30 aa, Artificial Sequence
  Cyclic GFR-binding peptide
  MOD_RES (1)..(1): Xaa is C or S
XAEVVMDSMEGLVVNNAADMIQITINSLRA

SEQ ID NO: 89634 - protein, 21 aa, Artificial Sequence
  Cyclic GFR-binding peptide
MSMEGLIKPTKGIMIQITINS

SEQ ID NO: 89635 - protein, 29 aa, Artificial Sequence
  Cyclic GFR-binding peptide
  MOD_RES (28)..(29): Xaa is C or S
MDSMEGIVVNNASDMIQITINSLRTPVXX

SEQ ID NO: 89636 - protein, 32 aa, Artificial Sequence; identical to SEQ ID NO: 35486
  Cyclic GFR-binding peptide
  MOD_RES (2)..(2): Xaa is C or S

SEQ ID NO: 89637 - protein, 31 aa, Artificial Sequence; identical to SEQ ID NO: 35488
  Cyclic GFR-binding peptide
  MOD_RES (31)..(31): Xaa is C or S

SEQ ID NO: 89638 - protein, 30 aa, Artificial Sequence
  Cyclic GFR-binding peptide
  MOD_RES (30)..(30): Xaa is C or S
VVMDSMEGIVVNNASDMIQITINSLRTPVX

SEQ ID NO: 89639 - protein, 20 aa, Artificial Sequence
  Cyclic GFR-binding peptide
SMEGLVVNNAADMIQITINS

SEQ ID NO: 89640 - protein, 24 aa, Artificial Sequence
  Cyclic GFR-binding peptide
SMEGLIKPTKGIMIQITINSLDQS

SEQ ID NO: 89641 - protein, 31 aa, Artificial Sequence; identical to SEQ ID NO: 35492
  Cyclic GFR-binding peptide

SEQ ID NO: 89642 - protein, 37 aa, Artificial Sequence; identical to SEQ ID NO: 35495
  Cyclic GFR-binding peptide
  MOD_RES (1)..(33)..(34): Xaa is C or S

SEQ ID NO: 89643 - protein, 35 aa, Artificial Sequence; identical to SEQ ID NO: 35496
  Cyclic GFR-binding peptide
  MOD_RES (32)..(33): Xaa is C or S

SEQ ID NO: 89644 - protein, 32 aa, Artificial Sequence
  Cyclic GFR-binding peptide
  MOD_RES (30)..(31): Xaa is C or S
VVMDSMEGIVVNNAADMIQITINSLRAPVXXS

SEQ ID NO: 89645 - protein, 28 aa, Artificial Sequence
  Cyclic GFR-binding peptide
  MOD_RES (26)..(27): Xaa is C or S
SMEGLVVNNAADMIQITINSLRAPVXXS

SEQ ID NO: 89646 - protein, 32 aa, Artificial Sequence
  Cyclic GFR-binding peptide
  MOD_RES (26)..(27): Xaa is C or S
SMEGLIKPTKGIMIQITINSLDQSVXXPSASA

SEQ ID NO: 89647 - protein, 38 aa, Artificial Sequence; identical to SEQ ID NO: 35498
  Cyclic GFR-binding peptide
  MOD_RES (32)..(33): Xaa is C or S

SEQ ID NO: 89648 - protein, 31 aa, Artificial Sequence
  Cyclic GFR-binding peptide
  MOD_RES (2)..(4): Xaa is C or S
RXGXSEVVMDSMEGIVVNNASDMIQITINSL

SEQ ID NO: 89649 - protein, 30 aa, Artificial Sequence
  Cyclic GFR-binding peptide
  MOD_RES (28)..(29): Xaa is C or S
VMSMEGLVKPTRGVMIQITINSLDQPVXXP

SEQ ID NO: 89650 - protein, 30 aa, Artificial Sequence
  Cyclic GFR-binding peptide
  MOD_RES (26)..(27): Xaa is C or S
SMEGLIIQQKDNMIQMTINSMKTPTXXPGA

SEQ ID NO: 89651 - protein, 35 aa, Artificial Sequence; identical to SEQ ID NO: 35501
  Cyclic GFR-binding peptide
  MOD_RES (1)..(33)..(34): Xaa is C or S

SEQ ID NO: 89652 - protein, 29 aa, Artificial Sequence
  Cyclic GFR-binding peptide
  MOD_RES (27)..(28): Xaa is C or S
MSMEGLVKPTRGVMIQITINSLDQPVXXP

SEQ ID NO: 89653 - protein, 21 aa, Artificial Sequence
  Cyclic GFR-binding peptide
SMEGILLVRGNDMIQMTINST

SEQ ID NO: 89654 - protein, 36 aa, Artificial Sequence; identical to SEQ ID NO: 35503
  Cyclic GFR-binding peptide
  MOD_RES (1)..(32)..(33): Xaa is C or S

SEQ ID NO: 89655 - protein, 35 aa, Artificial Sequence; identical to SEQ ID NO: 35506
  Cyclic GFR-binding peptide
  MOD_RES (1)..(33)..(34): Xaa is C or S

SEQ ID NO: 89656 - protein, 35 aa, Artificial Sequence; identical to SEQ ID NO: 35508
  Cyclic GFR-binding peptide
  MOD_RES (2)..(34)..(35): Xaa is C or S

SEQ ID NO: 89657 - protein, 36 aa, Artificial Sequence; identical to SEQ ID NO: 35509
  Cyclic GFR-binding peptide
  MOD_RES (1)..(3)..(34)..(35): Xaa is C or S

SEQ ID NO: 89658 - protein, 40 aa, Artificial Sequence; identical to SEQ ID NO: 35510
  Cyclic GFR-binding peptide
  MOD_RES (1)..(3)..(34)..(35): Xaa is C or S

SEQ ID NO: 89659 - protein, 32 aa, Artificial Sequence
  Cyclic GFR-binding peptide
  MOD_RES (1)..(3): Xaa is C or S
XGXAEVVMDSMEGLVVNNAADMIQITINSLRA

SEQ ID NO: 89660 - protein, 32 aa, Artificial Sequence
  Cyclic GFR-binding peptide
  MOD_RES (28)..(29): Xaa is C or S
MDSMEGLVVNNAADMIQITINSLRAPVXXSAP

SEQ ID NO: 89661 - protein, 34 aa, Artificial Sequence; identical to SEQ ID NO: 35512
  Cyclic GFR-binding peptide
  MOD_RES (1)..(32)..(33): Xaa is C or S

SEQ ID NO: 89662 - protein, 33 aa, Artificial Sequence
  Cyclic GFR-binding peptide
  MOD_RES (1)..(3): Xaa is C or S
XGXAEVVMDSMEGLVVNNAADMIQITINSLRAP

SEQ ID NO: 89663 - protein, 28 aa, Artificial Sequence
  Cyclic GFR-binding peptide
AEVVMDSMEGLVVNNAADMIQITINSLR

SEQ ID NO: 89664 - protein, 25 aa, Artificial Sequence
  Cyclic GFR-binding peptide
IMSMEGLVKPKRGVMIQITINSLAQ

SEQ ID NO: 89665 - protein, 30 aa, Artificial Sequence
  Cyclic GFR-binding peptide
  MOD_RES (2)..(4): Xaa is C or S
SXKXSKVIMSMEGLIKPTKGIMIQITINSL

SEQ ID NO: 89666 - protein, 24 aa, Artificial Sequence
  Cyclic GFR-binding peptide
MSMEGLVKPKRGVMIQITINSLAQ

SEQ ID NO: 89667 - protein, 32 aa, Artificial Sequence
  Cyclic GFR-binding peptide
  MOD_RES (30)..(31): Xaa is C or S
RVIMSMEGLVKPKRGVMIQITINSLAQPVXXP

SEQ ID NO: 89668 - protein, 25 aa, Artificial Sequence
  Cyclic GFR-binding peptide
DSMEGIVVNNAADMIQITINSLRAP

SEQ ID NO: 89669 - protein, 29 aa, Artificial Sequence
  Cyclic GFR-binding peptide
  MOD_RES (1)..(3): Xaa is C or S
XGXSRVVMNSMEGLIVNSSDDMIQVTINS

SEQ ID NO: 89670 - protein, 22 aa, Artificial Sequence
  Cyclic GFR-binding peptide
SMEGLLLVRGNDMIQMTINSTK

SEQ ID NO: 89671 - protein, 34 aa, Artificial Sequence; identical to SEQ ID NO: 35521
  Cyclic GFR-binding peptide
  MOD_RES (1)..(3): Xaa is C or S

SEQ ID NO: 89672 - protein, 21 aa, Artificial Sequence
  Cyclic GFR-binding peptide
SMEGIVVNNASDMIQITINSL

SEQ ID NO: 89673 - protein, 23 aa, Artificial Sequence
  Cyclic GFR-binding peptide
MSMEGLIKPTKGIMIQITINSLD

SEQ ID NO: 89674 - protein, 26 aa, Artificial Sequence
  Cyclic GFR-binding peptide
  MOD_RES (26)..(26): Xaa is C or S
SMEGLVVNNAADMIQITINSLRAPVX

SEQ ID NO: 89675 - protein, 27 aa, Artificial Sequence
  Cyclic GFR-binding peptide
VVMDSMEGLVVNNAADMIQITINSLRA

SEQ ID NO: 89676 - protein, 32 aa, Artificial Sequence
  Cyclic GFR-binding peptide
  MOD_RES (27)..(28): Xaa is C or S
GSMEGLIIQQKDNMIQMTINSMKTPTXXPGAS

SEQ ID NO: 89677 - protein, 31 aa, Artificial Sequence
  Cyclic GFR-binding peptide
  MOD_RES (30)..(31): Xaa is C or S
VVMDSMEGIVVNNASDMIQITINSLRTPVXX

SEQ ID NO: 89678 - protein, 35 aa, Artificial Sequence; identical to SEQ ID NO: 35527
  Cyclic GFR-binding peptide
  MOD_RES (2)..(33)..(34): Xaa is C or S

SEQ ID NO: 89679 - protein, 34 aa, Artificial Sequence
  Cyclic GFR-binding peptide
  MOD_RES (30)..(31): Xaa is C or S
VVMNSMEGLIVNSSDDMIQVTINSLKTPAXXPKP

SEQ ID NO: 89680 - protein, 31 aa, Artificial Sequence
  Cyclic GFR-binding peptide
  MOD_RES (2)..(2): Xaa is C or S
GXRDVVMGSMEGLIIQQKDNMIQMTINSMKT

SEQ ID NO: 89681 - protein, 26 aa, Artificial Sequence
  Cyclic GFR-binding peptide
EVVMDSMEGLVVNNASDMIQITINSL

SEQ ID NO: 89682 - protein, 31 aa, Artificial Sequence
  Cyclic GFR-binding peptide
  MOD_RES (2)..(4): Xaa is C or S
LXGXEEVIMSMEGLLLVRGNDMIQMTINSTK

SEQ ID NO: 89683 - protein, 23 aa, Artificial Sequence
  Cyclic GFR-binding peptide
GSMEGLIIQQKDNMIQMTINSMK

SEQ ID NO: 89684 - protein, 29 aa, Artificial Sequence
  Cyclic GFR-binding peptide
  MOD_RES (1)..(1): Xaa is C or S
XEEVIMSMEGILLVRGNDMIQMTINSTKV

SEQ ID NO: 89685 - protein, 38 aa, Artificial Sequence; identical to SEQ ID NO: 35532
  Cyclic GFR-binding peptide
  MOD_RES (32)..(33): Xaa is C or S

SEQ ID NO: 89686 - protein, 28 aa, Artificial Sequence
  Cyclic GFR-binding peptide
  MOD_RES (26)..(27): Xaa is C or S
SMEGLVKPKRGVMIQITINSLAQPVXXP

SEQ ID NO: 89687 - protein, 31 aa, Artificial Sequence
  Cyclic GFR-binding peptide
  MOD_RES (1)..(3): Xaa is C or S
XGXSEVVMDSMEGLVVNNASDMIQITINSLR

SEQ ID NO: 89688 - protein, 35 aa, Artificial Sequence; identical to SEQ ID NO: 35536
  Cyclic GFR-binding peptide
  MOD_RES (31)..(32): Xaa is C or S

SEQ ID NO: 89689 - protein, 38 aa, Artificial Sequence; identical to SEQ ID NO: 35538
  Cyclic GFR-binding peptide
  MOD_RES (1)..(32)..(33): Xaa is C or S

SEQ ID NO: 89690 - protein, 37 aa, Artificial Sequence; identical to SEQ ID NO: 35539
  Cyclic GFR-binding peptide
  MOD_RES (1)..(3)..(35)..(36): Xaa is C or S

SEQ ID NO: 89691 - protein, 32 aa, Artificial Sequence
  Cyclic GFR-binding peptide
  MOD_RES (29)..(30): Xaa is C or S
VIMSMEGLVKPKRGVMIQITINSLAQPVXXPA

SEQ ID NO: 89692 - protein, 36 aa, Artificial Sequence; identical to SEQ ID NO: 35541
  Cyclic GFR-binding peptide
  MOD_RES (1)..(33)..(34): Xaa is C or S

SEQ ID NO: 89693 - protein, 35 aa, Artificial Sequence
  Cyclic GFR-binding peptide
  MOD_RES (29)..(30): Xaa is C or S
VMNSMEGIIVNSSDDMIQVTINSLKTPAXXPKPVH

SEQ ID NO: 89694 - protein, 26 aa, Artificial Sequence
  Cyclic GFR-binding peptide
VMDSMEGIVVNNASDMIQITINSLRT

SEQ ID NO: 89695 - protein, 29 aa, Artificial Sequence
  Cyclic GFR-binding peptide
  MOD_RES (28)..(29): Xaa is C or S
MNSMEGLIVNSSDDMIQVTINSLKTPAXX

SEQ ID NO: 89696 - protein, 24 aa, Artificial Sequence
  Cyclic GFR-binding peptide
IMSMEGLVKPKRGVMIQITINSLA

SEQ ID NO: 89697 - protein, 31 aa, Artificial Sequence; identical to SEQ ID NO: 35548
  Cyclic GFR-binding peptide
  MOD_RES (1)..(1): Xaa is C or S

SEQ ID NO: 89698 - protein, 38 aa, Artificial Sequence; identical to SEQ ID NO: 35549
  Cyclic GFR-binding peptide
  MOD_RES (2)..(33)..(34): Xaa is C or S

SEQ ID NO: 89699 - protein, 35 aa, Artificial Sequence
  Cyclic GFR-binding peptide
  MOD_RES (29)..(30): Xaa is C or S
VMGSMEGLIIQQKDNMIQMTINSMKTPTXXPGASG

SEQ ID NO: 89700 - protein, 25 aa, Artificial Sequence
  Cyclic GFR-binding peptide
VIMSMEGLIKPTKGIMIQITINSLD

SEQ ID NO: 89701 - protein, 28 aa, Artificial Sequence
  Cyclic GFR-binding peptide
  MOD_RES (1)..(3): Xaa is C or S
XGXEEVIMSMEGLLLVRGNDMIQMTINS

SEQ ID NO: 89702 - protein, 23 aa, Artificial Sequence
  Cyclic GFR-binding peptide
SMEGLVKPTRGVMIQITINSLDQ

SEQ ID NO: 89703 - protein, 41 aa, Artificial Sequence; identical to SEQ ID NO: 35555
  Cyclic GFR-binding peptide
  MOD_RES (2)..(4)..(36)..(37): Xaa is C or S

SEQ ID NO: 89704 - protein, 20 aa, Artificial Sequence
  Cyclic GFR-binding peptide
SMEGLLLVRGNDMIQMTINS

SEQ ID NO: 89705 - protein, 31 aa, Artificial Sequence
  Cyclic GFR-binding peptide
  MOD_RES (29)..(30): Xaa is C or S
VMDSMEGLVVNNAADMIQITINSLRAPVXXS

SEQ ID NO: 89706 - protein, 26 aa, Artificial Sequence
  Cyclic GFR-binding peptide
MNSMEGLIVNSSDDMIQVTINSLKTP

SEQ ID NO: 89707 - protein, 31 aa, Artificial Sequence
  Cyclic GFR-binding peptide
  MOD_RES (1)..(3): Xaa is C or S
XGXSEVVMDSMEGIVVNNASDMIQITINSLR

SEQ ID NO: 89708 - protein, 29 aa, Artificial Sequence
  Cyclic GFR-binding peptide
DVVMGSMEGLIIQQKDNMIQMTINSMKTP

SEQ ID NO: 89709 - protein, 29 aa, Artificial Sequence
  Cyclic GFR-binding peptide
  MOD_RES (27)..(28): Xaa is C or S
DSMEGLVVNNASDMIQITINSLRTPVXXT

SEQ ID NO: 89710 - protein, 41 aa, Artificial Sequence; identical to SEQ ID NO: 35564
  Cyclic GFR-binding peptide
  MOD_RES (1)..(3)..(35)..(36): Xaa is C or S

SEQ ID NO: 89711 - protein, 31 aa, Artificial Sequence
  Cyclic GFR-binding peptide
  MOD_RES (28)..(29): Xaa is C or S
VMSMEGLVKPTRGVMIQITINSLDQPVXXPS

SEQ ID NO: 89712 - protein, 30 aa, Artificial Sequence
  Cyclic GFR-binding peptide
  MOD_RES (1)..(3): Xaa is C or S
XGXEEVIMSMEGILLVRGNDMIQMTINSTK

SEQ ID NO: 89713 - protein, 28 aa, Artificial Sequence
  Cyclic GFR-binding peptide
  MOD_RES (2)..(2): Xaa is C or S
GXAEVVMDSMEGLVVNNAADMIQITINS

SEQ ID NO: 89714 - protein, 33 aa, Artificial Sequence
  Cyclic GFR-binding peptide
  MOD_RES (2)..(4): Xaa is C or S
HXGXSRVVMNSMEGLIVNSSDDMIQVTINSLKT

SEQ ID NO: 89715 - protein, 36 aa, Artificial Sequence; identical to SEQ ID NO: 35570
  Cyclic GFR-binding peptide
  MOD_RES (2)..(33)..(34): Xaa is C or S

SEQ ID NO: 89716 - protein, 23 aa, Artificial Sequence
  Cyclic GFR-binding peptide
VMDSMEGLVVNNASDMIQITINS

SEQ ID NO: 89717 - protein, 28 aa, Artificial Sequence
  Cyclic GFR-binding peptide
VIMSMEGILLVRGNDMIQMTINSTKVPA

SEQ ID NO: 89718 - protein, 35 aa, Artificial Sequence; identical to SEQ ID NO: 35576
  Cyclic GFR-binding peptide
  MOD_RES (2)..(4)..(35): Xaa is C or S

SEQ ID NO: 89719 - protein, 28 aa, Artificial Sequence
  Cyclic GFR-binding peptide
  MOD_RES (27)..(28): Xaa is C or S
DSMEGIVVNNASDMIQITINSLRTPVXX

SEQ ID NO: 89720 - protein, 28 aa, Artificial Sequence
  Cyclic GFR-binding peptide
  MOD_RES (26)..(27): Xaa is C or S
SMEGLIIQQKDNMIQMTINSMKTPTXXP

SEQ ID NO: 89721 - protein, 33 aa, Artificial Sequence
  Cyclic GFR-binding peptide
  MOD_RES (30)..(31): Xaa is C or S
EVIMSMEGILLVRGNDMIQMTINSTKVPAXXTS

SEQ ID NO: 89722 - protein, 40 aa, Artificial Sequence; identical to SEQ ID NO: 35579
  Cyclic GFR-binding peptide
  MOD_RES (1)..(3)..(35)..(36): Xaa is C or S

SEQ ID NO: 89723 - protein, 35 aa, Artificial Sequence; identical to SEQ ID NO: 35580
  Cyclic GFR-binding peptide
  MOD_RES (32)..(33): Xaa is C or S

SEQ ID NO: 89724 - protein, 20 aa, Artificial Sequence
  Cyclic GFR-binding peptide
SMEGIVVNNASDMIQITINS

SEQ ID NO: 89725 - protein, 34 aa, Artificial Sequence
  Cyclic GFR-binding peptide
  MOD_RES (29)..(30): Xaa is C or S
VMDSMEGLVVNNASDMIQITINSLRTPVXXTPPT

SEQ ID NO: 89726 - protein, 28 aa, Artificial Sequence
  Cyclic GFR-binding peptide
DVVMGSMEGIIIQQKDNMIQMTINSMKT

SEQ ID NO: 89727 - protein, 32 aa, Artificial Sequence
  Cyclic GFR-binding peptide
  MOD_RES (1)..(3): Xaa is C or S
XGXEEVIMSMEGLLLVRGNDMIQMTINSTKVP

SEQ ID NO: 89728 - protein, 32 aa, Artificial Sequence; identical to SEQ ID NO: 35589
  Cyclic GFR-binding peptide
  MOD_RES (31)..(32): Xaa is C or S

SEQ ID NO: 89729 - protein, 26 aa, Artificial Sequence
  Cyclic GFR-binding peptide
RVVMNSMEGLIVNSSDDMIQVTINSL

SEQ ID NO: 89730 - protein, 32 aa, Artificial Sequence
  Cyclic GFR-binding peptide
  MOD_RES (2)..(4): Xaa is C or S
RXGXAEVVMDSMEGLVVNNAADMIQITINSLR

SEQ ID NO: 89731 - protein, 39 aa, Artificial Sequence; identical to SEQ ID NO: 35594
  Cyclic GFR-binding peptide
  MOD_RES (2)..(34)..(35): Xaa is C or S

SEQ ID NO: 89732 - protein, 28 aa, Artificial Sequence
  Cyclic GFR-binding peptide
  MOD_RES (1)..(1): Xaa is C or S
XSKVVMSMEGLVKPTRGVMIQITINSLD

SEQ ID NO: 89733 - protein, 28 aa, Artificial Sequence
  Cyclic GFR-binding peptide
KVIMSMEGLIKPTKGIMIQITINSLDQS

SEQ ID NO: 89734 - protein, 29 aa, Artificial Sequence
  Cyclic GFR-binding peptide
  MOD_RES (2)..(2): Xaa is C or S
GXSEVVMDSMEGIVVNNASDMIQITINSL

SEQ ID NO: 89735 - protein, 36 aa, Artificial Sequence
  Cyclic GFR-binding peptide
  MOD_RES (30)..(31): Xaa is C or S
RVIMSMEGLVKPKRGVMIQITINSLAQPVXXPAASA

SEQ ID NO: 89736 - protein, 30 aa, Artificial Sequence
  Cyclic GFR-binding peptide
  MOD_RES (2)..(2): Xaa is C or S
GXSRVVMNSMEGLIVNSSDDMIQVTINSLK

SEQ ID NO: 89737 - protein, 34 aa, Artificial Sequence; identical to SEQ ID NO: 35599
  Cyclic GFR-binding peptide
  MOD_RES (2)..(4): Xaa is C or S

SEQ ID NO: 89738 - protein, 38 aa, Artificial Sequence; identical to SEQ ID NO: 35601
  Cyclic GFR-binding peptide
  MOD_RES (1)..(3)..(34)..(35): Xaa is C or S

SEQ ID NO: 89739 - protein, 23 aa, Artificial Sequence
  Cyclic GFR-binding peptide
GSMEGIIIQQKDNMIQMTINSMK

SEQ ID NO: 89740 - protein, 35 aa, Artificial Sequence; identical to SEQ ID NO: 35603
  Cyclic GFR-binding peptide
  MOD_RES (2)..(34)..(35): Xaa is C or S

SEQ ID NO: 89741 - protein, 20 aa, Artificial Sequence
  Cyclic GFR-binding peptide
SMEGLIIQQKDNMIQMTINS

SEQ ID NO: 89742 - protein, 33 aa, Artificial Sequence; identical to SEQ ID NO: 35605
  Cyclic GFR-binding peptide
  MOD_RES (1)..(3): Xaa is C or S

SEQ ID NO: 89743 - protein, 41 aa, Artificial Sequence; identical to SEQ ID NO: 35607
  Cyclic GFR-binding peptide
  MOD_RES (2)..(4)..(35)..(36): Xaa is C or S

SEQ ID NO: 89744 - protein, 31 aa, Artificial Sequence
  Cyclic GFR-binding peptide
  MOD_RES (26)..(27): Xaa is C or S
SMEGILLVRGNDMIQMTINSTKVPAXXTSPV

SEQ ID NO: 89745 - protein, 42 aa, Artificial Sequence; identical to SEQ ID NO: 35609
  Cyclic GFR-binding peptide
  MOD_RES (2)..(4)..(36)..(37): Xaa is C or S

SEQ ID NO: 89746 - protein, 26 aa, Artificial Sequence
  Cyclic GFR-binding peptide
VMDSMEGLVVNNAADMIQITINSLRA

SEQ ID NO: 89747 - protein, 37 aa, Artificial Sequence; identical to SEQ ID NO: 35614
  Cyclic GFR-binding peptide
  MOD_RES (32)..(33): Xaa is C or S

SEQ ID NO: 89748 - protein, 31 aa, Artificial Sequence
  Cyclic GFR-binding peptide
  MOD_RES (2)..(4): Xaa is C or S
SXKXSKVIMSMEGLIKPTKGIMIQITINSLD

SEQ ID NO: 89749 - protein, 30 aa, Artificial Sequence
  Cyclic GFR-binding peptide
  MOD_RES (2)..(2): Xaa is C or S
GXEEVIMSMEGLLLVRGNDMIQMTINSTKV

SEQ ID NO: 89750 - protein, 41 aa, Artificial Sequence; identical to SEQ ID NO: 35621
  Cyclic GFR-binding peptide
  MOD_RES (1)..(3)..(35)..(36): Xaa is C or S

SEQ ID NO: 89751 - protein, 26 aa, Artificial Sequence
  Cyclic GFR-binding peptide
VVMDSMEGLVVNNAADMIQITINSLR

SEQ ID NO: 89752 - protein, 24 aa, Artificial Sequence
  Cyclic GFR-binding peptide
VIMSMEGLLLVRGNDMIQMTINST

SEQ ID NO: 89753 - protein, 27 aa, Artificial Sequence
  Cyclic GFR-binding peptide
  MOD_RES (27)..(27): Xaa is C or S
GSMEGIIIQQKDNMIQMTINSMKTPTX

SEQ ID NO: 89754 - protein, 28 aa, Artificial Sequence
  Cyclic GFR-binding peptide
DVVMGSMEGLIIQQKDNMIQMTINSMKT

SEQ ID NO: 89755 - protein, 27 aa, Artificial Sequence
  Cyclic GFR-binding peptide
  MOD_RES (2)..(2): Xaa is C or S
KXSKVIMSMEGLIKPTKGIMIQITINS

SEQ ID NO: 89756 - protein, 32 aa, Artificial Sequence
  Cyclic GFR-binding peptide
  MOD_RES (27)..(28): Xaa is C or S
GSMEGIIIQQKDNMIQMTINSMKTPTXXPGAS

SEQ ID NO: 89757 - protein, 26 aa, Artificial Sequence
  Cyclic GFR-binding peptide
VVMDSMEGIVVNNASDMIQITINSLR

SEQ ID NO: 89758 - protein, 25 aa, Artificial Sequence
  Cyclic GFR-binding peptide
SMEGIVVNNAADMIQITINSLRAPV

SEQ ID NO: 89759 - protein, 38 aa, Artificial Sequence; identical to SEQ ID NO: 35624
  Cyclic GFR-binding peptide
  MOD_RES (2)..(33)..(34): Xaa is C or S

SEQ ID NO: 89760 - protein, 23 aa, Artificial Sequence
  Cyclic GFR-binding peptide
VIMSMEGILLVRGNDMIQMTINS

SEQ ID NO: 89761 - protein, 35 aa, Artificial Sequence; identical to SEQ ID NO: 35626
  Cyclic GFR-binding peptide
  MOD_RES (1)..(3)..(34)..(35): Xaa is C or S

SEQ ID NO: 89762 - protein, 32 aa, Artificial Sequence
  Cyclic GFR-binding peptide
  MOD_RES (2)..(2): Xaa is C or S
GXSEVVMDSMEGIVVNNASDMIQITINSLRTP

SEQ ID NO: 89763 - protein, 36 aa, Artificial Sequence; identical to SEQ ID NO: 35628
  Cyclic GFR-binding peptide
  MOD_RES (2)..(33)..(34): Xaa is C or S

SEQ ID NO: 89764 - protein, 33 aa, Artificial Sequence; identical to SEQ ID NO: 35629
  Cyclic GFR-binding peptide
  MOD_RES (32)..(33): Xaa is C or S

SEQ ID NO: 89765 - protein, 35 aa, Artificial Sequence; identical to SEQ ID NO: 35630
  Cyclic GFR-binding peptide
  MOD_RES (1)..(3)..(34)..(35): Xaa is C or S

SEQ ID NO: 89766 - protein, 31 aa, Artificial Sequence
  Cyclic GFR-binding peptide
  MOD_RES (1)..(3): Xaa is C or S
XGXEEVIMSMEGILLVRGNDMIQMTINSTKV

SEQ ID NO: 89767 - protein, 36 aa, Artificial Sequence
  Cyclic GFR-binding peptide
  MOD_RES (30)..(31): Xaa is C or S
EVIMSMEGILLVRGNDMIQMTINSTKVPAXXTSPVR

SEQ ID NO: 89768 - protein, 35 aa, Artificial Sequence; identical to SEQ ID NO: 35631
  Cyclic GFR-binding peptide
  MOD_RES (31)..(32): Xaa is C or S

SEQ ID NO: 89769 - protein, 27 aa, Artificial Sequence
  Cyclic GFR-binding peptide
DVVMGSMEGIIIQQKDNMIQMTINSMK

SEQ ID NO: 89770 - protein, 31 aa, Artificial Sequence
  Cyclic GFR-binding peptide
  MOD_RES (2)..(4): Xaa is C or S
SXKXSKVVMSMEGLVKPTRGVMIQITINSLD

SEQ ID NO: 89771 - protein, 26 aa, Artificial Sequence
  Cyclic GFR-binding peptide
VVMGSMEGIIIQQKDNMIQMTINSMK

SEQ ID NO: 89772 - protein, 40 aa, Artificial Sequence; identical to SEQ ID NO: 35635
  Cyclic GFR-binding peptide
  MOD_RES (2)..(34)..(35): Xaa is C or S

SEQ ID NO: 89773 - protein, 33 aa, Artificial Sequence
  Cyclic GFR-binding peptide
  MOD_RES (27)..(28): Xaa is C or S
NSMEGLIVNSSDDMIQVTINSLKTPAXXPKPVH

SEQ ID NO: 89774 - protein, 26 aa, Artificial Sequence
  Cyclic GFR-binding peptide
  MOD_RES (26)..(26): Xaa is C or S
SMEGIIIQQKDNMIQMTINSMKTPTX

SEQ ID NO: 89775 - protein, 27 aa, Artificial Sequence
  Cyclic GFR-binding peptide
  MOD_RES (1)..(1): Xaa is C or S
XAEVVMDSMEGLVVNNAADMIQITINS

SEQ ID NO: 89776 - protein, 26 aa, Artificial Sequence
  Cyclic GFR-binding peptide
NSMEGLIVNSSDDMIQVTINSLKTPA

SEQ ID NO: 89777 - protein, 27 aa, Artificial Sequence
  Cyclic GFR-binding peptide
  MOD_RES (1)..(1): Xaa is C or S
XRDVVMGSMEGIIIQQKDNMIQMTINS

SEQ ID NO: 89778 - protein, 24 aa, Artificial Sequence
  Cyclic GFR-binding peptide
MDSMEGIVVNNASDMIQITINSLR

SEQ ID NO: 89779 - protein, 28 aa, Artificial Sequence
  Cyclic GFR-binding peptide
  MOD_RES (27)..(28): Xaa is C or S
MSMEGLLLVRGNDMIQMTINSTKVPAXX

SEQ ID NO: 89780 - protein, 24 aa, Artificial Sequence
  Cyclic GFR-binding peptide
MDSMEGIVVNNAADMIQITINSLR

SEQ ID NO: 89781 - protein, 32 aa, Artificial Sequence
  Cyclic GFR-binding peptide
  MOD_RES (29)..(30): Xaa is C or S
VMGSMEGLIIQQKDNMIQMTINSMKTPTXXPG

SEQ ID NO: 89782 - protein, 34 aa, Artificial Sequence
  Cyclic GFR-binding peptide
  MOD_RES (28)..(29): Xaa is C or S
MDSMEGIVVNNAADMIQITINSLRAPVXXSAPAA

SEQ ID NO: 89783 - protein, 32 aa, Artificial Sequence; identical to SEQ ID NO: 35643
  Cyclic GFR-binding peptide
  MOD_RES (31)..(32): Xaa is C or S

SEQ ID NO: 89784 - protein, 36 aa, Artificial Sequence; identical to SEQ ID NO: 35646
  Cyclic GFR-binding peptide
  MOD_RES (32)..(33): Xaa is C or S

SEQ ID NO: 89785 - protein, 23 aa, Artificial Sequence
  Cyclic GFR-binding peptide
MGSMEGLIIQQKDNMIQMTINSM

SEQ ID NO: 89786 - protein, 35 aa, Artificial Sequence; identical to SEQ ID NO: 35648
  Cyclic GFR-binding peptide
  MOD_RES (2)..(34)..(35): Xaa is C or S

SEQ ID NO: 89787 - protein, 25 aa, Artificial Sequence
  Cyclic GFR-binding peptide
IMSMEGLLLVRGNDMIQMTINSTKV

SEQ ID NO: 89788 - protein, 30 aa, Artificial Sequence; identical to SEQ ID NO: 2183
  Cyclic GFR-binding peptide

SEQ ID NO: 89789 - protein, 30 aa, Artificial Sequence
  Cyclic GFR-binding peptide
  MOD_RES (29)..(30): Xaa is C or S
VMDSMEGIVVNNASDMIQITINSLRTPVXX

SEQ ID NO: 89790 - protein, 39 aa, Artificial Sequence; identical to SEQ ID NO: 35651
  Cyclic GFR-binding peptide
  MOD_RES (2)..(34)..(35): Xaa is C or S

SEQ ID NO: 89791 - protein, 32 aa, Artificial Sequence; identical to SEQ ID NO: 35652
  Cyclic GFR-binding peptide
  MOD_RES (1)..(32): Xaa is C or S

SEQ ID NO: 89792 - protein, 39 aa, Artificial Sequence; identical to SEQ ID NO: 35653
  Cyclic GFR-binding peptide
  MOD_RES (2)..(4)..(36)..(37): Xaa is C or S

SEQ ID NO: 89793 - protein, 24 aa, Artificial Sequence
  Cyclic GFR-binding peptide
VVMGSMEGIIIQQKDNMIQMTINS

SEQ ID NO: 89794 - protein, 37 aa, Artificial Sequence; identical to SEQ ID NO: 35657
  Cyclic GFR-binding peptide
  MOD_RES (1)..(3)..(35)..(36): Xaa is C or S

SEQ ID NO: 89795 - protein, 29 aa, Artificial Sequence
  Cyclic GFR-binding peptide
  MOD_RES (2)..(2): Xaa is C or S
GXEEVIMSMEGILLVRGNDMIQMTINSTK

SEQ ID NO: 89796 - protein, 27 aa, Artificial Sequence
  Cyclic GFR-binding peptide
  MOD_RES (26)..(27): Xaa is C or S
SMEGILLVRGNDMIQMTINSTKVPAXX

SEQ ID NO: 89797 - protein, 23 aa, Artificial Sequence
  Cyclic GFR-binding peptide
IMSMEGILLVRGNDMIQMTINST

SEQ ID NO: 89798 - protein, 31 aa, Artificial Sequence
  Cyclic GFR-binding peptide
  MOD_RES (29)..(30): Xaa is C or S
VMGSMEGIIIQQKDNMIQMTINSMKTPTXXP

SEQ ID NO: 89799 - protein, 28 aa, Artificial Sequence
  Cyclic GFR-binding peptide
  MOD_RES (27)..(28): Xaa is C or S
DSMEGIVVNNAADMIQITINSLRAPVXX

SEQ ID NO: 89800 - protein, 39 aa, Artificial Sequence; identical to SEQ ID NO: 35663
  Cyclic GFR-binding peptide
  MOD_RES (1)..(3)..(34)..(35): Xaa is C or S

SEQ ID NO: 89801 - protein, 39 aa, Artificial Sequence; identical to SEQ ID NO: 35664
  Cyclic GFR-binding peptide
  MOD_RES (2)..(34)..(35): Xaa is C or S

SEQ ID NO: 89802 - protein, 28 aa, Artificial Sequence
  Cyclic GFR-binding peptide
  MOD_RES (28)..(28): Xaa is C or S
MDSMEGLVVNNAADMIQITINSLRAPVX

SEQ ID NO: 89803 - protein, 23 aa, Artificial Sequence
  Cyclic GFR-binding peptide
VMNSMEGLIVNSSDDMIQVTINS

SEQ ID NO: 89804 - protein, 29 aa, Artificial Sequence
  Cyclic GFR-binding peptide
  MOD_RES (27)..(28): Xaa is C or S
NSMEGLIVNSSDDMIQVTINSLKTPAXXP

SEQ ID NO: 89805 - protein, 35 aa, Artificial Sequence
  Cyclic GFR-binding peptide
  MOD_RES (29)..(30): Xaa is C or S
VMNSMEGLIVNSSDDMIQVTINSLKTPAXXPKPVH

SEQ ID NO: 89806 - protein, 28 aa, Artificial Sequence
  Cyclic GFR-binding peptide
  MOD_RES (2)..(2): Xaa is C or S
GXRDVVMGSMEGIIIQQKDNMIQMTINS

SEQ ID NO: 89807 - protein, 26 aa, Artificial Sequence
  Cyclic GFR-binding peptide
  MOD_RES (26)..(26): Xaa is C or S
SMEGLVKPKRGVMIQITINSLAQPVX

SEQ ID NO: 89808 - protein, 35 aa, Artificial Sequence
  Cyclic GFR-binding peptide
  MOD_RES (29)..(30): Xaa is C or S
VMGSMEGIIIQQKDNMIQMTINSMKTPTXXPGASG

SEQ ID NO: 89809 - protein, 31 aa, Artificial Sequence
  Cyclic GFR-binding peptide
  MOD_RES (30)..(31): Xaa is C or S
KVIMSMEGLIKPTKGIMIQITINSLDQSVXX

SEQ ID NO: 89810 - protein, 30 aa, Artificial Sequence
  Cyclic GFR-binding peptide
  MOD_RES (30)..(30): Xaa is C or S
VVMDSMEGLVVNNAADMIQITINSLRAPVX

SEQ ID NO: 89811 - protein, 33 aa, Artificial Sequence; identical to SEQ ID NO: 35674
  Cyclic GFR-binding peptide
  MOD_RES (32)..(33): Xaa is C or S

SEQ ID NO: 89812 - protein, 32 aa, Artificial Sequence
  Cyclic GFR-binding peptide
  MOD_RES (28)..(29): Xaa is C or S
IMSMEGLVKPKRGVMIQITINSLAQPVXXPAA

SEQ ID NO: 89813 - protein, 25 aa, Artificial Sequence
  Cyclic GFR-binding peptide
SRVIMSMEGLVKPKRGVMIQITINS

SEQ ID NO: 89814 - protein, 31 aa, Artificial Sequence; identical to SEQ ID NO: 35678
  Cyclic GFR-binding peptide
  MOD_RES (31)..(31): Xaa is C or S

SEQ ID NO: 89815 - protein, 32 aa, Artificial Sequence
  Cyclic GFR-binding peptide
  MOD_RES (30)..(31): Xaa is C or S
KVIMSMEGLIKPTKGIMIQITINSLDQSVXXP

SEQ ID NO: 89816 - protein, 40 aa, Artificial Sequence; identical to SEQ ID NO: 35679
  Cyclic GFR-binding peptide
  MOD_RES (1)..(3)..(34)..(35): Xaa is C or S

SEQ ID NO: 89817 - protein, 29 aa, Artificial Sequence
  Cyclic GFR-binding peptide
VVMGSMEGLIIQQKDNMIQMTINSMKTPT

SEQ ID NO: 89818 - protein, 31 aa, Artificial Sequence
  Cyclic GFR-binding peptide
  MOD_RES (1)..(3): Xaa is C or S
XKXSKVVMSMEGLVKPTRGVMIQITINSLDQ

SEQ ID NO: 89819 - protein, 41 aa, Artificial Sequence; identical to SEQ ID NO: 35685
  Cyclic GFR-binding peptide
  MOD_RES (2)..(4)..(36)..(37): Xaa is C or S

SEQ ID NO: 89820 - protein, 29 aa, Artificial Sequence
  Cyclic GFR-binding peptide
  MOD_RES (26)..(27): Xaa is C or S
SMEGLVKPKRGVMIQITINSLAQPVXXPA

SEQ ID NO: 89821 - protein, 25 aa, Artificial Sequence
  Cyclic GFR-binding peptide
SKVIMSMEGLIKPTKGIMIQITINS

SEQ ID NO: 89822 - protein, 29 aa, Artificial Sequence
  Cyclic GFR-binding peptide
  MOD_RES (28)..(29): Xaa is C or S
VMSMEGLVKPTRGVMIQITINSLDQPVXX

SEQ ID NO: 89823 - protein, 22 aa, Artificial Sequence
  Cyclic GFR-binding peptide
DSMEGIVVNNAADMIQITINSL

SEQ ID NO: 89824 - protein, 25 aa, Artificial Sequence
  Cyclic GFR-binding peptide
DSMEGLVVNNASDMIQITINSLRTP

SEQ ID NO: 89825 - protein, 38 aa, Artificial Sequence; identical to SEQ ID NO: 35691
  Cyclic GFR-binding peptide
  MOD_RES (1)..(32)..(33): Xaa is C or S

SEQ ID NO: 89826 - protein, 31 aa, Artificial Sequence
  Cyclic GFR-binding peptide
  MOD_RES (2)..(2): Xaa is C or S
KXSRVIMSMEGLVKPKRGVMIQITINSLAQP

SEQ ID NO: 89827 - protein, 25 aa, Artificial Sequence
  Cyclic GFR-binding peptide
SMEGLIIQQKDNMIQMTINSMKTPT

SEQ ID NO: 89828 - protein, 29 aa, Artificial Sequence
  Cyclic GFR-binding peptide
  MOD_RES (2)..(2): Xaa is C or S
GXAEVVMDSMEGIVVNNAADMIQITINSL

SEQ ID NO: 89829 - protein, 27 aa, Artificial Sequence
  Cyclic GFR-binding peptide
VVMNSMEGLIVNSSDDMIQVTINSLKT

SEQ ID NO: 89830 - protein, 27 aa, Artificial Sequence
  Cyclic GFR-binding peptide
  MOD_RES (1)..(1): Xaa is C or S
XEEVIMSMEGILLVRGNDMIQMTINST

SEQ ID NO: 89831 - protein, 29 aa, Artificial Sequence
  Cyclic GFR-binding peptide
RDVVMGSMEGIIIQQKDNMIQMTINSMKT

SEQ ID NO: 89832 - protein, 35 aa, Artificial Sequence
  Cyclic GFR-binding peptide
  MOD_RES (30)..(31): Xaa is C or S
RVIMSMEGLVKPKRGVMIQITINSLAQPVXXPAAS

SEQ ID NO: 89833 - protein, 23 aa, Artificial Sequence
  Cyclic GFR-binding peptide
MSMEGLLLVRGNDMIQMTINSTK

SEQ ID NO: 89834 - protein, 34 aa, Artificial Sequence
  Cyclic GFR-binding peptide
  MOD_RES (29)..(30): Xaa is C or S
VVMSMEGLVKPTRGVMIQITINSLDQPVXXPSAS

SEQ ID NO: 89835 - protein, 21 aa, Artificial Sequence
  Cyclic GFR-binding peptide
SMEGLIVNSSDDMIQVTINSL

SEQ ID NO: 89836 - protein, 27 aa, Artificial Sequence
  Cyclic GFR-binding peptide
  MOD_RES (26)..(27): Xaa is C or S
SMEGIIIQQKDNMIQMTINSMKTPTXX

SEQ ID NO: 89837 - protein, 25 aa, Artificial Sequence
  Cyclic GFR-binding peptide
SMEGLVVNNAADMIQITINSLRAPV

SEQ ID NO: 89838 - protein, 27 aa, Artificial Sequence
  Cyclic GFR-binding peptide
IMSMEGLVKPKRGVMIQITINSLAQPV

SEQ ID NO: 89839 - protein, 27 aa, Artificial Sequence
  Cyclic GFR-binding peptide
  MOD_RES (2)..(2): Xaa is C or S
KXSRVIMSMEGLVKPKRGVMIQITINS

SEQ ID NO: 89840 - protein, 24 aa, Artificial Sequence
  Cyclic GFR-binding peptide
VVMDSMEGIVVNNASDMIQITINS

SEQ ID NO: 89841 - protein, 25 aa, Artificial Sequence
  Cyclic GFR-binding peptide
VMNSMEGLIVNSSDDMIQVTINSLK

SEQ ID NO: 89842 - protein, 21 aa, Artificial Sequence
  Cyclic GFR-binding peptide
MSMEGLLLVRGNDMIQMTINS

SEQ ID NO: 89843 - protein, 27 aa, Artificial Sequence
  Cyclic GFR-binding peptide
  MOD_RES (27)..(27): Xaa is C or S
MSMEGLVKPKRGVMIQITINSLAQPVX

SEQ ID NO: 89844 - protein, 25 aa, Artificial Sequence
  Cyclic GFR-binding peptide
VMGSMEGIIIQQKDNMIQMTINSMK

SEQ ID NO: 89845 - protein, 31 aa, Artificial Sequence
  Cyclic GFR-binding peptide
  MOD_RES (1)..(1): Xaa is C or S
XSEVVMDSMEGIVVNNASDMIQITINSLRTP

SEQ ID NO: 89846 - protein, 37 aa, Artificial Sequence; identical to SEQ ID NO: 35713
  Cyclic GFR-binding peptide
  MOD_RES (31)..(32): Xaa is C or S

SEQ ID NO: 89847 - protein, 37 aa, Artificial Sequence; identical to SEQ ID NO: 35715
  Cyclic GFR-binding peptide
  MOD_RES (1)..(33)..(34): Xaa is C or S

SEQ ID NO: 89848 - protein, 34 aa, Artificial Sequence
  Cyclic GFR-binding peptide
  MOD_RES (28)..(29): Xaa is C or S
IMSMEGLVKPKRGVMIQITINSLAQPVXXPAASA

SEQ ID NO: 89849 - protein, 36 aa, Artificial Sequence; identical to SEQ ID NO: 35718
  Cyclic GFR-binding peptide
  MOD_RES (32)..(33): Xaa is C or S

SEQ ID NO: 89850 - protein, 27 aa, Artificial Sequence
  Cyclic GFR-binding peptide
MNSMEGLIVNSSDDMIQVTINSLKTPA

SEQ ID NO: 89851 - protein, 27 aa, Artificial Sequence
  Cyclic GFR-binding peptide
EEVIMSMEGILLVRGNDMIQMTINSTK

SEQ ID NO: 89852 - protein, 36 aa, Artificial Sequence; identical to SEQ ID NO: 35720
  Cyclic GFR-binding peptide
  MOD_RES (2)..(4)..(36): Xaa is C or S

SEQ ID NO: 89853 - protein, 30 aa, Artificial Sequence
  Cyclic GFR-binding peptide
  MOD_RES (1)..(1): Xaa is C or S
XEEVIMSMEGILLVRGNDMIQMTINSTKVP

SEQ ID NO: 89854 - protein, 27 aa, Artificial Sequence
  Cyclic GFR-binding peptide
  MOD_RES (2)..(2): Xaa is C or S
GXEEVIMSMEGILLVRGNDMIQMTINS

SEQ ID NO: 89855 - protein, 26 aa, Artificial Sequence
  Cyclic GFR-binding peptide
SKVIMSMEGLIKPTKGIMIQITINSL

SEQ ID NO: 89856 - protein, 36 aa, Artificial Sequence; identical to SEQ ID NO: 35724
  Cyclic GFR-binding peptide
  MOD_RES (1)..(33)..(34): Xaa is C or S

SEQ ID NO: 89857 - protein, 32 aa, Artificial Sequence
  Cyclic GFR-binding peptide
  MOD_RES (28)..(29): Xaa is C or S
MDSMEGIVVNNAADMIQITINSLRAPVXXSAP

SEQ ID NO: 89858 - protein, 35 aa, Artificial Sequence; identical to SEQ ID NO: 35727
  Cyclic GFR-binding peptide
  MOD_RES (2)..(4): Xaa is C or S

SEQ ID NO: 89859 - protein, 36 aa, Artificial Sequence; identical to SEQ ID NO: 35730
  Cyclic GFR-binding peptide
  MOD_RES (2)..(34)..(35): Xaa is C or S

SEQ ID NO: 89860 - protein, 39 aa, Artificial Sequence; identical to SEQ ID NO: 35733
  Cyclic GFR-binding peptide
  MOD_RES (1)..(33)..(34): Xaa is C or S

SEQ ID NO: 89861 - protein, 28 aa, Artificial Sequence
  Cyclic GFR-binding peptide
  MOD_RES (26)..(27): Xaa is C or S
SMEGIVVNNASDMIQITINSLRTPVXXT

SEQ ID NO: 89862 - protein, 30 aa, Artificial Sequence
  Cyclic GFR-binding peptide
  MOD_RES (2)..(2): Xaa is C or S
GXSEVVMDSMEGLVVNNASDMIQITINSLR

SEQ ID NO: 89863 - protein, 29 aa, Artificial Sequence
  Cyclic GFR-binding peptide
VVMGSMEGIIIQQKDNMIQMTINSMKTPT

SEQ ID NO: 89864 - protein, 30 aa, Artificial Sequence
  Cyclic GFR-binding peptide
  MOD_RES (2)..(4): Xaa is C or S
RXGXSEVVMDSMEGLVVNNASDMIQITINS

SEQ ID NO: 89865 - protein, 33 aa, Artificial Sequence; identical to SEQ ID NO: 35745
  Cyclic GFR-binding peptide
  MOD_RES (2)..(33): Xaa is C or S

SEQ ID NO: 89866 - protein, 26 aa, Artificial Sequence
  Cyclic GFR-binding peptide
  MOD_RES (26)..(26): Xaa is C or S
SMEGLIKPTKGIMIQITINSLDQSVX

SEQ ID NO: 89867 - protein, 34 aa, Artificial Sequence; identical to SEQ ID NO: 35747
  Cyclic GFR-binding peptide
  MOD_RES (32)..(33): Xaa is C or S

SEQ ID NO: 89868 - protein, 22 aa, Artificial Sequence
  Cyclic GFR-binding peptide
SMEGLVKPTRGVMIQITINSLD

SEQ ID NO: 89869 - protein, 27 aa, Artificial Sequence
  Cyclic GFR-binding peptide
  MOD_RES (27)..(27): Xaa is C or S
MSMEGLVKPTRGVMIQITINSLDQPVX

SEQ ID NO: 89870 - protein, 32 aa, Artificial Sequence; identical to SEQ ID NO: 35748
  Cyclic GFR-binding peptide
  MOD_RES (2)..(2): Xaa is C or S

SEQ ID NO: 89871 - protein, 31 aa, Artificial Sequence
  Cyclic GFR-binding peptide
  MOD_RES (28)..(29): Xaa is C or S
MGSMEGLIIQQKDNMIQMTINSMKTPTXXPG

SEQ ID NO: 89872 - protein, 36 aa, Artificial Sequence; identical to SEQ ID NO: 35754
  Cyclic GFR-binding peptide
  MOD_RES (32)..(33): Xaa is C or S

SEQ ID NO: 89873 - protein, 27 aa, Artificial Sequence
  Cyclic GFR-binding peptide
VVMSMEGLVKPTRGVMIQITINSLDQP

SEQ ID NO: 89874 - protein, 32 aa, Artificial Sequence
  Cyclic GFR-binding peptide
  MOD_RES (1)..(3): Xaa is C or S
XKXSKVVMSMEGLVKPTRGVMIQITINSLDQP

SEQ ID NO: 89875 - protein, 33 aa, Artificial Sequence; identical to SEQ ID NO: 35757
  Cyclic GFR-binding peptide
  MOD_RES (2)..(33): Xaa is C or S

SEQ ID NO: 89876 - protein, 31 aa, Artificial Sequence
  Cyclic GFR-binding peptide
  MOD_RES (28)..(29): Xaa is C or S
IMSMEGLLLVRGNDMIQMTINSTKVPAXXTS

SEQ ID NO: 89877 - protein, 24 aa, Artificial Sequence
  Cyclic GFR-binding peptide
DSMEGLVVNNAADMIQITINSLRA

SEQ ID NO: 89878 - protein, 36 aa, Artificial Sequence
  Cyclic GFR-binding peptide
  MOD_RES (30)..(31): Xaa is C or S
VVMGSMEGLIIQQKDNMIQMTINSMKTPTXXPGASG

SEQ ID NO: 89879 - protein, 37 aa, Artificial Sequence; identical to SEQ ID NO: 35762
  Cyclic GFR-binding peptide
  MOD_RES (2)..(34)..(35): Xaa is C or S

SEQ ID NO: 89880 - protein, 36 aa, Artificial Sequence
  Cyclic GFR-binding peptide
  MOD_RES (30)..(31): Xaa is C or S
VVMNSMEGLIVNSSDDMIQVTINSLKTPAXXPKPVH

SEQ ID NO: 89881 - protein, 30 aa, Artificial Sequence
  Cyclic GFR-binding peptide
  MOD_RES (1)..(1): Xaa is C or S
XSKVIMSMEGLIKPTKGIMIQITINSLDQS

SEQ ID NO: 89882 - protein, 37 aa, Artificial Sequence; identical to SEQ ID NO: 35764
  Cyclic GFR-binding peptide
  MOD_RES (1)..(32)..(33): Xaa is C or S

SEQ ID NO: 89883 - protein, 29 aa, Artificial Sequence
  Cyclic GFR-binding peptide
VVMDSMEGLVVNNAADMIQITINSLRAPV

SEQ ID NO: 89884 - protein, 34 aa, Artificial Sequence; identical to SEQ ID NO: 35767
  Cyclic GFR-binding peptide
  MOD_RES (1)..(3)..(34): Xaa is C or S

SEQ ID NO: 89885 - protein, 30 aa, Artificial Sequence
  Cyclic GFR-binding peptide
  MOD_RES (27)..(28): Xaa is C or S
DSMEGLVVNNASDMIQITINSLRTPVXXTP

SEQ ID NO: 89886 - protein, 30 aa, Artificial Sequence
  Cyclic GFR-binding peptide
  MOD_RES (27)..(28): Xaa is C or S
NSMEGLIVNSSDDMIQVTINSLKTPAXXPK

SEQ ID NO: 89887 - protein, 26 aa, Artificial Sequence
  Cyclic GFR-binding peptide
MGSMEGLIIQQKDNMIQMTINSMKTP

SEQ ID NO: 89888 - protein, 35 aa, Artificial Sequence; identical to SEQ ID NO: 35774
  Cyclic GFR-binding peptide
  MOD_RES (1)..(32)..(33): Xaa is C or S

SEQ ID NO: 89889 - protein, 31 aa, Artificial Sequence
  Cyclic GFR-binding peptide
  MOD_RES (28)..(29): Xaa is C or S
MDSMEGIVVNNAADMIQITINSLRAPVXXSA

SEQ ID NO: 89890 - protein, 25 aa, Artificial Sequence
  Cyclic GFR-binding peptide
SMEGLVKPTRGVMIQITINSLDQPV

SEQ ID NO: 89891 - protein, 32 aa, Artificial Sequence
  Cyclic GFR-binding peptide
  MOD_RES (29)..(30): Xaa is C or S
VMGSMEGIIIQQKDNMIQMTINSMKTPTXXPG

SEQ ID NO: 89892 - protein, 25 aa, Artificial Sequence
  Cyclic GFR-binding peptide
VMDSMEGIVVNNASDMIQITINSLR

SEQ ID NO: 89893 - protein, 31 aa, Artificial Sequence
  Cyclic GFR-binding peptide
  MOD_RES (30)..(31): Xaa is C or S
RVIMSMEGLVKPKRGVMIQITINSLAQPVXX

SEQ ID NO: 89894 - protein, 34 aa, Artificial Sequence; identical to SEQ ID NO: 35779
  Cyclic GFR-binding peptide
  MOD_RES (2)..(33)..(34): Xaa is C or S

SEQ ID NO: 89895 - protein, 38 aa, Artificial Sequence; identical to SEQ ID NO: 35782
  Cyclic GFR-binding peptide
  MOD_RES (1)..(3)..(35)..(36): Xaa is C or S

SEQ ID NO: 89896 - protein, 22 aa, Artificial Sequence
  Cyclic GFR-binding peptide
MSMEGLIKPTKGIMIQITINSL

SEQ ID NO: 89897 - protein, 33 aa, Artificial Sequence
  Cyclic GFR-binding peptide
  MOD_RES (2)..(4): Xaa is C or S
RXGXAEVVMDSMEGLVVNNAADMIQITINSLRA

SEQ ID NO: 89898 - protein, 31 aa, Artificial Sequence
  Cyclic GFR-binding peptide
  MOD_RES (29)..(30): Xaa is C or S
VIMSMEGLIKPTKGIMIQITINSLDQSVXXP

SEQ ID NO: 89899 - protein, 30 aa, Artificial Sequence
  Cyclic GFR-binding peptide
  MOD_RES (28)..(29): Xaa is C or S
MGSMEGIIIQQKDNMIQMTINSMKTPTXXP

SEQ ID NO: 89900 - protein, 33 aa, Artificial Sequence; identical to SEQ ID NO: 35789
  Cyclic GFR-binding peptide
  MOD_RES (31)..(32): Xaa is C or S

SEQ ID NO: 89901 - protein, 37 aa, Artificial Sequence; identical to SEQ ID NO: 35790
  Cyclic GFR-binding peptide
  MOD_RES (2)..(33)..(34): Xaa is C or S

SEQ ID NO: 89902 - protein, 31 aa, Artificial Sequence
  Cyclic GFR-binding peptide
  MOD_RES (30)..(31): Xaa is C or S
EVIMSMEGILLVRGNDMIQMTINSTKVPAXX

SEQ ID NO: 89903 - protein, 29 aa, Artificial Sequence
  Cyclic GFR-binding peptide
  MOD_RES (26)..(27): Xaa is C or S
SMEGLVVNNAADMIQITINSLRAPVXXSA

SEQ ID NO: 89904 - protein, 27 aa, Artificial Sequence
  Cyclic GFR-binding peptide
AEVVMDSMEGIVVNNAADMIQITINSL

SEQ ID NO: 89905 - protein, 40 aa, Artificial Sequence; identical to SEQ ID NO: 35794
  Cyclic GFR-binding peptide
  MOD_RES (2)..(34)..(35): Xaa is C or S

SEQ ID NO: 89906 - protein, 38 aa, Artificial Sequence; identical to SEQ ID NO: 35795
  Cyclic GFR-binding peptide
  MOD_RES (1)..(3)..(34)..(35): Xaa is C or S

SEQ ID NO: 89907 - protein, 40 aa, Artificial Sequence; identical to SEQ ID NO: 35796
  Cyclic GFR-binding peptide
  MOD_RES (1)..(3)..(35)..(36): Xaa is C or S

SEQ ID NO: 89908 - protein, 35 aa, Artificial Sequence; identical to SEQ ID NO: 35797
  Cyclic GFR-binding peptide
  MOD_RES (1)..(32)..(33): Xaa is C or S

SEQ ID NO: 89909 - protein, 31 aa, Artificial Sequence; identical to SEQ ID NO: 35799
  Cyclic GFR-binding peptide

SEQ ID NO: 89910 - protein, 20 aa, Artificial Sequence
  Cyclic GFR-binding peptide
SMEGIIIQQKDNMIQMTINS

SEQ ID NO: 89911 - protein, 31 aa, Artificial Sequence; identical to SEQ ID NO: 35800
  Cyclic GFR-binding peptide
  MOD_RES (31)..(31): Xaa is C or S

SEQ ID NO: 89912 - protein, 33 aa, Artificial Sequence
  Cyclic GFR-binding peptide
  MOD_RES (30)..(31): Xaa is C or S
KVVMSMEGLVKPTRGVMIQITINSLDQPVXXPS

SEQ ID NO: 89913 - protein, 21 aa, Artificial Sequence
  Cyclic GFR-binding peptide
SMEGLIIQQKDNMIQMTINSM

SEQ ID NO: 89914 - protein, 34 aa, Artificial Sequence; identical to SEQ ID NO: 35805
  Cyclic GFR-binding peptide
  MOD_RES (2)..(34): Xaa is C or S

SEQ ID NO: 89915 - protein, 33 aa, Artificial Sequence
  Cyclic GFR-binding peptide
  MOD_RES (30)..(31): Xaa is C or S
VVMDSMEGLVVNNAADMIQITINSLRAPVXXSA

SEQ ID NO: 89916 - protein, 34 aa, Artificial Sequence; identical to SEQ ID NO: 35808
  Cyclic GFR-binding peptide
  MOD_RES (2)..(4): Xaa is C or S

SEQ ID NO: 89917 - protein, 28 aa, Artificial Sequence
  Cyclic GFR-binding peptide
VIMSMEGLVKPKRGVMIQITINSLAQPV

SEQ ID NO: 89918 - protein, 29 aa, Artificial Sequence
  Cyclic GFR-binding peptide
  MOD_RES (28)..(29): Xaa is C or S
MDSMEGLVVNNAADMIQITINSLRAPVXX

SEQ ID NO: 89919 - protein, 32 aa, Artificial Sequence
  Cyclic GFR-binding peptide
  MOD_RES (1)..(3): Xaa is C or S
XGXAEVVMDSMEGIVVNNAADMIQITINSLRA

SEQ ID NO: 89920 - protein, 31 aa, Artificial Sequence; identical to SEQ ID NO: 35812
  Cyclic GFR-binding peptide
  MOD_RES (1)..(1): Xaa is C or S

SEQ ID NO: 89921 - protein, 39 aa, Artificial Sequence; identical to SEQ ID NO: 35813
  Cyclic GFR-binding peptide
  MOD_RES (2)..(4)..(35)..(36): Xaa is C or S

SEQ ID NO: 89922 - protein, 30 aa, Artificial Sequence
  Cyclic GFR-binding peptide
  MOD_RES (26)..(27): Xaa is C or S
SMEGIVVNNAADMIQITINSLRAPVXXSAP

SEQ ID NO: 89923 - protein, 30 aa, Artificial Sequence
  Cyclic GFR-binding peptide
  MOD_RES (27)..(28): Xaa is C or S
MSMEGILLVRGNDMIQMTINSTKVPAXXTS

SEQ ID NO: 89924 - protein, 33 aa, Artificial Sequence
  Cyclic GFR-binding peptide
  MOD_RES (27)..(28): Xaa is C or S
GSMEGLIIQQKDNMIQMTINSMKTPTXXPGASG

SEQ ID NO: 89925 - protein, 36 aa, Artificial Sequence
  Cyclic GFR-binding peptide
  MOD_RES (30)..(31): Xaa is C or S
KVIMSMEGLIKPTKGIMIQITINSLDQSVXXPSASA

SEQ ID NO: 89926 - protein, 24 aa, Artificial Sequence
  Cyclic GFR-binding peptide
MSMEGILLVRGNDMIQMTINSTKV

SEQ ID NO: 89927 - protein, 24 aa, Artificial Sequence
  Cyclic GFR-binding peptide
SMEGLVVNNASDMIQITINSLRTP

SEQ ID NO: 89928 - protein, 36 aa, Artificial Sequence; identical to SEQ ID NO: 35824
  Cyclic GFR-binding peptide
  MOD_RES (31)..(32): Xaa is C or S

SEQ ID NO: 89929 - protein, 24 aa, Artificial Sequence
  Cyclic GFR-binding peptide
EVIMSMEGLLLVRGNDMIQMTINS

SEQ ID NO: 89930 - protein, 29 aa, Artificial Sequence
  Cyclic GFR-binding peptide
EVVMDSMEGLVVNNASDMIQITINSLRTP

SEQ ID NO: 89931 - protein, 30 aa, Artificial Sequence
  Cyclic GFR-binding peptide
  MOD_RES (1)..(1): Xaa is C or S
XAEVVMDSMEGIVVNNAADMIQITINSLRA

SEQ ID NO: 89932 - protein, 30 aa, Artificial Sequence
  Cyclic GFR-binding peptide
  MOD_RES (2)..(4): Xaa is C or S
HXGXSRVVMNSMEGLIVNSSDDMIQVTINS

SEQ ID NO: 89933 - protein, 37 aa, Artificial Sequence; identical to SEQ ID NO: 35826
  Cyclic GFR-binding peptide
  MOD_RES (1)..(32)..(33): Xaa is C or S

SEQ ID NO: 89934 - protein, 27 aa, Artificial Sequence
  Cyclic GFR-binding peptide
VVMDSMEGIVVNNAADMIQITINSLRA

SEQ ID NO: 89935 - protein, 23 aa, Artificial Sequence
  Cyclic GFR-binding peptide
IMSMEGLIKPTKGIMIQITINSL

SEQ ID NO: 89936 - protein, 28 aa, Artificial Sequence
  Cyclic GFR-binding peptide
RVVMNSMEGLIVNSSDDMIQVTINSLKT

SEQ ID NO: 89937 - protein, 32 aa, Artificial Sequence
  Cyclic GFR-binding peptide
  MOD_RES (26)..(27): Xaa is C or S
SMEGLVKPKRGVMIQITINSLAQPVXXPAASA

SEQ ID NO: 89938 - protein, 30 aa, Artificial Sequence
  Cyclic GFR-binding peptide
  MOD_RES (1)..(3): Xaa is C or S
XGXAEVVMDSMEGIVVNNAADMIQITINSL

SEQ ID NO: 89939 - protein, 28 aa, Artificial Sequence
  Cyclic GFR-binding peptide
  MOD_RES (1)..(1): Xaa is C or S
XRDVVMGSMEGIIIQQKDNMIQMTINSM

SEQ ID NO: 89940 - protein, 29 aa, Artificial Sequence
  Cyclic GFR-binding peptide
  MOD_RES (1)..(1): Xaa is C or S
XRDVVMGSMEGIIIQQKDNMIQMTINSMK

SEQ ID NO: 89941 - protein, 30 aa, Artificial Sequence
  Cyclic GFR-binding peptide
  MOD_RES (1)..(1): Xaa is C or S
XSEVVMDSMEGLVVNNASDMIQITINSLRT

SEQ ID NO: 89942 - protein, 25 aa, Artificial Sequence
  Cyclic GFR-binding peptide
DSMEGLVVNNAADMIQITINSLRAP

SEQ ID NO: 89943 - protein, 23 aa, Artificial Sequence
  Cyclic GFR-binding peptide
SMEGLVVNNASDMIQITINSLRT

SEQ ID NO: 89944 - protein, 32 aa, Artificial Sequence
  Cyclic GFR-binding peptide
  MOD_RES (2)..(4): Xaa is C or S
SXKXSKVVMSMEGLVKPTRGVMIQITINSLDQ

SEQ ID NO: 89945 - protein, 32 aa, Artificial Sequence
  Cyclic GFR-binding peptide
  MOD_RES (27)..(28): Xaa is C or S
MSMEGLIKPTKGIMIQITINSLDQSVXXPSAS

SEQ ID NO: 89946 - protein, 31 aa, Artificial Sequence
  Cyclic GFR-binding peptide
  MOD_RES (30)..(31): Xaa is C or S
EVIMSMEGLLLVRGNDMIQMTINSTKVPAXX

SEQ ID NO: 89947 - protein, 34 aa, Artificial Sequence; identical to SEQ ID NO: 35851
  Cyclic GFR-binding peptide
  MOD_RES (1)..(32)..(33): Xaa is C or S

SEQ ID NO: 89948 - protein, 25 aa, Artificial Sequence
  Cyclic GFR-binding peptide
SMEGIVVNNASDMIQITINSLRTPV

SEQ ID NO: 89949 - protein, 28 aa, Artificial Sequence
  Cyclic GFR-binding peptide
  MOD_RES (1)..(1): Xaa is C or S
XAEVVMDSMEGIVVNNAADMIQITINSL

SEQ ID NO: 89950 - protein, 27 aa, Artificial Sequence
  Cyclic GFR-binding peptide
VMGSMEGIIIQQKDNMIQMTINSMKTP

SEQ ID NO: 89951 - protein, 30 aa, Artificial Sequence
  Cyclic GFR-binding peptide
  MOD_RES (2)..(4): Xaa is C or S
RXGXAEVVMDSMEGLVVNNAADMIQITINS

SEQ ID NO: 89952 - protein, 26 aa, Artificial Sequence
  Cyclic GFR-binding peptide
DVVMGSMEGLIIQQKDNMIQMTINSM

SEQ ID NO: 89953 - protein, 23 aa, Artificial Sequence
  Cyclic GFR-binding peptide
MSMEGLVKPKRGVMIQITINSLA

SEQ ID NO: 89954 - protein, 32 aa, Artificial Sequence
  Cyclic GFR-binding peptide
  MOD_RES (27)..(28): Xaa is C or S
DSMEGIVVNNAADMIQITINSLRAPVXXSAPA

SEQ ID NO: 89955 - protein, 25 aa, Artificial Sequence
  Cyclic GFR-binding peptide
MDSMEGIVVNNAADMIQITINSLRA

SEQ ID NO: 89956 - protein, 21 aa, Artificial Sequence
  Cyclic GFR-binding peptide
DSMEGLVVNNASDMIQITINS

SEQ ID NO: 89957 - protein, 40 aa, Artificial Sequence; identical to SEQ ID NO: 35858
  Cyclic GFR-binding peptide
  MOD_RES (2)..(4)..(36)..(37): Xaa is C or S

SEQ ID NO: 89958 - protein, 38 aa, Artificial Sequence; identical to SEQ ID NO: 35859
  Cyclic GFR-binding peptide
  MOD_RES (1)..(3)..(35)..(36): Xaa is C or S

SEQ ID NO: 89959 - protein, 35 aa, Artificial Sequence; identical to SEQ ID NO: 35862
  Cyclic GFR-binding peptide
  MOD_RES (2)..(4): Xaa is C or S

SEQ ID NO: 89960 - protein, 26 aa, Artificial Sequence
  Cyclic GFR-binding peptide
  MOD_RES (26)..(26): Xaa is C or S
SMEGIVVNNASDMIQITINSLRTPVX

SEQ ID NO: 89961 - protein, 30 aa, Artificial Sequence
  Cyclic GFR-binding peptide
AEVVMDSMEGIVVNNAADMIQITINSLRAP

SEQ ID NO: 89962 - protein, 33 aa, Artificial Sequence; identical to SEQ ID NO: 35867
  Cyclic GFR-binding peptide
  MOD_RES (1)..(32)..(33): Xaa is C or S

SEQ ID NO: 89963 - protein, 36 aa, Artificial Sequence; identical to SEQ ID NO: 35869
  Cyclic GFR-binding peptide
  MOD_RES (1)..(33)..(34): Xaa is C or S

SEQ ID NO: 89964 - protein, 30 aa, Artificial Sequence
  Cyclic GFR-binding peptide
  MOD_RES (29)..(30): Xaa is C or S
VMDSMEGLVVNNASDMIQITINSLRTPVXX

SEQ ID NO: 89965 - protein, 33 aa, Artificial Sequence
  Cyclic GFR-binding peptide
  MOD_RES (28)..(29): Xaa is C or S
MDSMEGIVVNNASDMIQITINSLRTPVXXTPPT

SEQ ID NO: 89966 - protein, 35 aa, Artificial Sequence; identical to SEQ ID NO: 35873
  Cyclic GFR-binding peptide
  MOD_RES (32)..(33): Xaa is C or S

SEQ ID NO: 89967 - protein, 38 aa, Artificial Sequence; identical to SEQ ID NO: 35874
  Cyclic GFR-binding peptide
  MOD_RES (1)..(33)..(34): Xaa is C or S

SEQ ID NO: 89968 - protein, 27 aa, Artificial Sequence
  Cyclic GFR-binding peptide
MDSMEGLVVNNASDMIQITINSLRTPV

SEQ ID NO: 89969 - protein, 30 aa, Artificial Sequence; identical to SEQ ID NO: 35876
  Cyclic GFR-binding peptide

SEQ ID NO: 89970 - protein, 36 aa, Artificial Sequence; identical to SEQ ID NO: 35878
  Cyclic GFR-binding peptide
  MOD_RES (1)..(3)..(35)..(36): Xaa is C or S

SEQ ID NO: 89971 - protein, 27 aa, Artificial Sequence
  Cyclic GFR-binding peptide
MGSMEGIIIQQKDNMIQMTINSMKTPT

SEQ ID NO: 89972 - protein, 42 aa, Artificial Sequence; identical to SEQ ID NO: 35883
  Cyclic GFR-binding peptide
  MOD_RES (2)..(4)..(36)..(37): Xaa is C or S

SEQ ID NO: 89973 - protein, 32 aa, Artificial Sequence
  Cyclic GFR-binding peptide
  MOD_RES (26)..(27): Xaa is C or S
SMEGIVVNNAADMIQITINSLRAPVXXSAPAA

SEQ ID NO: 89974 - protein, 34 aa, Artificial Sequence; identical to SEQ ID NO: 35886
  Cyclic GFR-binding peptide
  MOD_RES (2)..(34): Xaa is C or S

SEQ ID NO: 89975 - protein, 27 aa, Artificial Sequence
  Cyclic GFR-binding peptide
  MOD_RES (26)..(27): Xaa is C or S
SMEGLVVNNASDMIQITINSLRTPVXX

SEQ ID NO: 89976 - protein, 28 aa, Artificial Sequence
  Cyclic GFR-binding peptide
  MOD_RES (2)..(2): Xaa is C or S
GXSEVVMDSMEGLVVNNASDMIQITINS

SEQ ID NO: 89977 - protein, 38 aa, Artificial Sequence; identical to SEQ ID NO: 35889
  Cyclic GFR-binding peptide
  MOD_RES (2)..(4)..(36)..(37): Xaa is C or S

SEQ ID NO: 89978 - protein, 25 aa, Artificial Sequence
  Cyclic GFR-binding peptide
VMDSMEGLVVNNASDMIQITINSLR

SEQ ID NO: 89979 - protein, 32 aa, Artificial Sequence
  Cyclic GFR-binding peptide
  MOD_RES (29)..(30): Xaa is C or S
VIMSMEGLIKPTKGIMIQITINSLDQSVXXPS

SEQ ID NO: 89980 - protein, 24 aa, Artificial Sequence
  Cyclic GFR-binding peptide
MGSMEGIIIQQKDNMIQMTINSMK

SEQ ID NO: 89981 - protein, 29 aa, Artificial Sequence
  Cyclic GFR-binding peptide
  MOD_RES (1)..(1): Xaa is C or S
XSKVVMSMEGLVKPTRGVMIQITINSLDQ

SEQ ID NO: 89982 - protein, 32 aa, Artificial Sequence; identical to SEQ ID NO: 35891
  Cyclic GFR-binding peptide
  MOD_RES (32)..(32): Xaa is C or S

SEQ ID NO: 89983 - protein, 36 aa, Artificial Sequence; identical to SEQ ID NO: 35893
  Cyclic GFR-binding peptide
  MOD_RES (2)..(34)..(35): Xaa is C or S

SEQ ID NO: 89984 - protein, 32 aa, Artificial Sequence
  Cyclic GFR-binding peptide
  MOD_RES (2)..(2): Xaa is C or S
GXRDVVMGSMEGLIIQQKDNMIQMTINSMKTP

SEQ ID NO: 89985 - protein, 36 aa, Artificial Sequence; identical to SEQ ID NO: 35900
  Cyclic GFR-binding peptide
  MOD_RES (1)..(32)..(33): Xaa is C or S

SEQ ID NO: 89986 - protein, 30 aa, Artificial Sequence
  Cyclic GFR-binding peptide
  MOD_RES (30)..(30): Xaa is C or S
VVMDSMEGLVVNNASDMIQITINSLRTPVX

SEQ ID NO: 89987 - protein, 28 aa, Artificial Sequence
  Cyclic GFR-binding peptide
  MOD_RES (1)..(1): Xaa is C or S
XSEVVMDSMEGIVVNNASDMIQITINSL

SEQ ID NO: 89988 - protein, 25 aa, Artificial Sequence
  Cyclic GFR-binding peptide
VMGSMEGLIIQQKDNMIQMTINSMK

SEQ ID NO: 89989 - protein, 31 aa, Artificial Sequence
  Cyclic GFR-binding peptide
  MOD_RES (2)..(2): Xaa is C or S
GXSEVVMDSMEGIVVNNASDMIQITINSLRT

SEQ ID NO: 89990 - protein, 22 aa, Artificial Sequence
  Cyclic GFR-binding peptide
MDSMEGIVVNNAADMIQITINS

SEQ ID NO: 89991 - protein, 33 aa, Artificial Sequence; identical to SEQ ID NO: 35906
  Cyclic GFR-binding peptide
  MOD_RES (31)..(32): Xaa is C or S

SEQ ID NO: 89992 - protein, 29 aa, Artificial Sequence
  Cyclic GFR-binding peptide
AEVVMDSMEGLVVNNAADMIQITINSLRA

SEQ ID NO: 89993 - protein, 26 aa, Artificial Sequence
  Cyclic GFR-binding peptide
  MOD_RES (1)..(1): Xaa is C or S
XSRVIMSMEGLVKPKRGVMIQITINS

SEQ ID NO: 89994 - protein, 29 aa, Artificial Sequence
  Cyclic GFR-binding peptide
  MOD_RES (26)..(27): Xaa is C or S
SMEGILLVRGNDMIQMTINSTKVPAXXTS

SEQ ID NO: 89995 - protein, 33 aa, Artificial Sequence
  Cyclic GFR-binding peptide
  MOD_RES (30)..(31): Xaa is C or S
VVMGSMEGIIIQQKDNMIQMTINSMKTPTXXPG

SEQ ID NO: 89996 - protein, 36 aa, Artificial Sequence; identical to SEQ ID NO: 35913
  Cyclic GFR-binding peptide
  MOD_RES (2)..(34)..(35): Xaa is C or S

SEQ ID NO: 89997 - protein, 27 aa, Artificial Sequence
  Cyclic GFR-binding peptide
VMGSMEGLIIQQKDNMIQMTINSMKTP

SEQ ID NO: 89998 - protein, 30 aa, Artificial Sequence
  Cyclic GFR-binding peptide
  MOD_RES (28)..(29): Xaa is C or S
MDSMEGLVVNNAADMIQITINSLRAPVXXS

SEQ ID NO: 89999 - protein, 32 aa, Artificial Sequence
  Cyclic GFR-binding peptide
  MOD_RES (29)..(30): Xaa is C or S
VMDSMEGLVVNNASDMIQITINSLRTPVXXTP

SEQ ID NO: 90000 - protein, 22 aa, Artificial Sequence
  Cyclic GFR-binding peptide
SMEGLIKPTKGIMIQITINSLD

SEQ ID NO: 90001 - protein, 38 aa, Artificial Sequence; identical to SEQ ID NO: 35922
  Cyclic GFR-binding peptide
  MOD_RES (32)..(33): Xaa is C or S

SEQ ID NO: 90002 - protein, 26 aa, Artificial Sequence
  Cyclic GFR-binding peptide
KVVMSMEGLVKPTRGVMIQITINSLD

SEQ ID NO: 90003 - protein, 33 aa, Artificial Sequence
  Cyclic GFR-binding peptide
  MOD_RES (2)..(4): Xaa is C or S
LXGXEEVIMSMEGLLLVRGNDMIQMTINSTKVP

SEQ ID NO: 90004 - protein, 34 aa, Artificial Sequence; identical to SEQ ID NO: 35925
  Cyclic GFR-binding peptide
  MOD_RES (2)..(34): Xaa is C or S

SEQ ID NO: 90005 - protein, 27 aa, Artificial Sequence
  Cyclic GFR-binding peptide
SEVVMDSMEGLVVNNASDMIQITINSL

SEQ ID NO: 90006 - protein, 31 aa, Artificial Sequence
  Cyclic GFR-binding peptide
  MOD_RES (26)..(27): Xaa is C or S
SMEGLLLVRGNDMIQMTINSTKVPAXXTSPV

SEQ ID NO: 90007 - protein, 24 aa, Artificial Sequence
  Cyclic GFR-binding peptide
SMEGLIIQQKDNMIQMTINSMKTP

SEQ ID NO: 90008 - protein, 29 aa, Artificial Sequence
  Cyclic GFR-binding peptide
  MOD_RES (27)..(28): Xaa is C or S
MSMEGILLVRGNDMIQMTINSTKVPAXXT

SEQ ID NO: 90009 - protein, 31 aa, Artificial Sequence
  Cyclic GFR-binding peptide
  MOD_RES (2)..(2): Xaa is C or S
GXAEVVMDSMEGLVVNNAADMIQITINSLRA

SEQ ID NO: 90010 - protein, 29 aa, Artificial Sequence
  Cyclic GFR-binding peptide
  MOD_RES (26)..(27): Xaa is C or S
SMEGIVVNNASDMIQITINSLRTPVXXTP

SEQ ID NO: 90011 - protein, 32 aa, Artificial Sequence
  Cyclic GFR-binding peptide
  MOD_RES (2)..(4): Xaa is C or S
SXKXSKVIMSMEGLIKPTKGIMIQITINSLDQ

SEQ ID NO: 90012 - protein, 31 aa, Artificial Sequence
  Cyclic GFR-binding peptide
  MOD_RES (1)..(1): Xaa is C or S
XAEVVMDSMEGIVVNNAADMIQITINSLRAP

SEQ ID NO: 90013 - protein, 31 aa, Artificial Sequence
  Cyclic GFR-binding peptide
  MOD_RES (1)..(1): Xaa is C or S
XAEVVMDSMEGLVVNNAADMIQITINSLRAP

SEQ ID NO: 90014 - protein, 24 aa, Artificial Sequence
  Cyclic GFR-binding peptide
SMEGIVVNNASDMIQITINSLRTP

SEQ ID NO: 90015 - protein, 33 aa, Artificial Sequence
  Cyclic GFR-binding peptide
  MOD_RES (30)..(31): Xaa is C or S
KVIMSMEGLIKPTKGIMIQITINSLDQSVXXPS

SEQ ID NO: 90016 - protein, 21 aa, Artificial Sequence
  Cyclic GFR-binding peptide
SMEGIIIQQKDNMIQMTINSM

SEQ ID NO: 90017 - protein, 26 aa, Artificial Sequence
  Cyclic GFR-binding peptide
  MOD_RES (1)..(1): Xaa is C or S
XSKVVMSMEGLVKPTRGVMIQITINS

SEQ ID NO: 90018 - protein, 20 aa, Artificial Sequence
  Cyclic GFR-binding peptide
SMEGIVVNNAADMIQITINS

SEQ ID NO: 90019 - protein, 41 aa, Artificial Sequence; identical to SEQ ID NO: 35942
  Cyclic GFR-binding peptide
  MOD_RES (1)..(3)..(35)..(36): Xaa is C or S

SEQ ID NO: 90020 - protein, 23 aa, Artificial Sequence
  Cyclic GFR-binding peptide
VIMSMEGLIKPTKGIMIQITINS

SEQ ID NO: 90021 - protein, 21 aa, Artificial Sequence
  Cyclic GFR-binding peptide
SMEGLVVNNASDMIQITINSL

SEQ ID NO: 90022 - protein, 39 aa, Artificial Sequence; identical to SEQ ID NO: 35948
  Cyclic GFR-binding peptide
  MOD_RES (2)..(33)..(34): Xaa is C or S

SEQ ID NO: 90023 - protein, 22 aa, Artificial Sequence
  Cyclic GFR-binding peptide
SMEGLVKPKRGVMIQITINSLA

SEQ ID NO: 90024 - protein, 30 aa, Artificial Sequence; identical to SEQ ID NO: 35952
  Cyclic GFR-binding peptide

SEQ ID NO: 90025 - protein, 30 aa, Artificial Sequence
  Cyclic GFR-binding peptide
  MOD_RES (2)..(2): Xaa is C or S
GXRDVVMGSMEGLIIQQKDNMIQMTINSMK

SEQ ID NO: 90026 - protein, 20 aa, Artificial Sequence
  Cyclic GFR-binding peptide
SMEGLIIQQKDNMIQMTINS

SEQ ID NO: 90027 - protein, 25 aa, Artificial Sequence
  Cyclic GFR-binding peptide
VIMSMEGLLLVRGNDMIQMTINSTK

SEQ ID NO: 90028 - protein, 25 aa, Artificial Sequence
  Cyclic GFR-binding peptide
VIMSMEGILLVRGNDMIQMTINSTK

SEQ ID NO: 90029 - protein, 32 aa, Artificial Sequence; identical to SEQ ID NO: 35958
  Cyclic GFR-binding peptide
  MOD_RES (31)..(32): Xaa is C or S

SEQ ID NO: 90030 - protein, 28 aa, Artificial Sequence
  Cyclic GFR-binding peptide
  MOD_RES (2)..(2): Xaa is C or S
KXSRVIMSMEGLVKPKRGVMIQITINSL

SEQ ID NO: 90031 - protein, 38 aa, Artificial Sequence; identical to SEQ ID NO: 35960
  Cyclic GFR-binding peptide
  MOD_RES (2)..(34)..(35): Xaa is C or S

SEQ ID NO: 90032 - protein, 26 aa, Artificial Sequence
  Cyclic GFR-binding peptide
MSMEGLVKPKRGVMIQITINSLAQPV

SEQ ID NO: 90033 - protein, 25 aa, Artificial Sequence
  Cyclic GFR-binding peptide
SMEGLIKPTKGIMIQITINSLDQSV

SEQ ID NO: 90034 - protein, 34 aa, Artificial Sequence; identical to SEQ ID NO: 35962
  Cyclic GFR-binding peptide
  MOD_RES (1)..(3): Xaa is C or S

SEQ ID NO: 90035 - protein, 23 aa, Artificial Sequence
  Cyclic GFR-binding peptide
NSMEGLIVNSSDDMIQVTINSLK

SEQ ID NO: 90036 - protein, 32 aa, Artificial Sequence
  Cyclic GFR-binding peptide
  MOD_RES (26)..(27): Xaa is C or S
SMEGLVVNNAADMIQITINSLRAPVXXSAPAA

SEQ ID NO: 90037 - protein, 25 aa, Artificial Sequence
  Cyclic GFR-binding peptide
MSMEGILLVRGNDMIQMTINSTKVP

SEQ ID NO: 90038 - protein, 26 aa, Artificial Sequence
  Cyclic GFR-binding peptide
MSMEGLLLVRGNDMIQMTINSTKVPA

SEQ ID NO: 90039 - protein, 28 aa, Artificial Sequence
  Cyclic GFR-binding peptide
AEVVMDSMEGIVVNNAADMIQITINSLR

SEQ ID NO: 90040 - protein, 30 aa, Artificial Sequence; identical to SEQ ID NO: 35971
  Cyclic GFR-binding peptide

SEQ ID NO: 90041 - protein, 39 aa, Artificial Sequence; identical to SEQ ID NO: 35974
  Cyclic GFR-binding peptide
  MOD_RES (2)..(33)..(34): Xaa is C or S

SEQ ID NO: 90042 - protein, 34 aa, Artificial Sequence
  Cyclic GFR-binding peptide
  MOD_RES (29)..(30): Xaa is C or S
VIMSMEGILLVRGNDMIQMTINSTKVPAXXTSPV

SEQ ID NO: 90043 - protein, 38 aa, Artificial Sequence; identical to SEQ ID NO: 35977
  Cyclic GFR-binding peptide
  MOD_RES (1)..(32)..(33): Xaa is C or S

SEQ ID NO: 90044 - protein, 21 aa, Artificial Sequence
  Cyclic GFR-binding peptide
GSMEGIIIQQKDNMIQMTINS

SEQ ID NO: 90045 - protein, 33 aa, Artificial Sequence
  Cyclic GFR-binding peptide
  MOD_RES (28)..(29): Xaa is C or S
IMSMEGLLLVRGNDMIQMTINSTKVPAXXTSPV

SEQ ID NO: 90046 - protein, 33 aa, Artificial Sequence; identical to SEQ ID NO: 35979
  Cyclic GFR-binding peptide
  MOD_RES (2)..(2): Xaa is C or S

SEQ ID NO: 90047 - protein, 32 aa, Artificial Sequence
  Cyclic GFR-binding peptide
  MOD_RES (26)..(27): Xaa is C or S
SMEGIIVNSSDDMIQVTINSLKTPAXXPKPVH

SEQ ID NO: 90048 - protein, 31 aa, Artificial Sequence
  Cyclic GFR-binding peptide
  MOD_RES (27)..(28): Xaa is C or S
MSMEGLVKPTRGVMIQITINSLDQPVXXPSA

SEQ ID NO: 90049 - protein, 26 aa, Artificial Sequence
  Cyclic GFR-binding peptide
IMSMEGLIKPTKGIMIQITINSLDQS

SEQ ID NO: 90050 - protein, 28 aa, Artificial Sequence
  Cyclic GFR-binding peptide
  MOD_RES (28)..(28): Xaa is C or S
IMSMEGLLLVRGNDMIQMTINSTKVPAX

SEQ ID NO: 90051 - protein, 27 aa, Artificial Sequence
  Cyclic GFR-binding peptide
  MOD_RES (1)..(1): Xaa is C or S
XSEVVMDSMEGLVVNNASDMIQITINS

SEQ ID NO: 90052 - protein, 38 aa, Artificial Sequence; identical to SEQ ID NO: 35986
  Cyclic GFR-binding peptide
  MOD_RES (2)..(34)..(35): Xaa is C or S

SEQ ID NO: 90053 - protein, 34 aa, Artificial Sequence
  Cyclic GFR-binding peptide
  MOD_RES (29)..(30): Xaa is C or S
VIMSMEGLVKPKRGVMIQITINSLAQPVXXPAAS

SEQ ID NO: 90054 - protein, 26 aa, Artificial Sequence
  Cyclic GFR-binding peptide
  MOD_RES (26)..(26): Xaa is C or S
SMEGLIIQQKDNMIQMTINSMKTPTX

SEQ ID NO: 90055 - protein, 31 aa, Artificial Sequence; identical to SEQ ID NO: 35990
  Cyclic GFR-binding peptide
  MOD_RES (31)..(31): Xaa is C or S

SEQ ID NO: 90056 - protein, 29 aa, Artificial Sequence
  Cyclic GFR-binding peptide
SRVVMNSMEGLIVNSSDDMIQVTINSLKT

SEQ ID NO: 90057 - protein, 28 aa, Artificial Sequence
  Cyclic GFR-binding peptide
  MOD_RES (2)..(2): Xaa is C or S
GXEEVIMSMEGLLLVRGNDMIQMTINST

SEQ ID NO: 90058 - protein, 28 aa, Artificial Sequence
  Cyclic GFR-binding peptide
VVMGSMEGLIIQQKDNMIQMTINSMKTP

SEQ ID NO: 90059 - protein, 33 aa, Artificial Sequence; identical to SEQ ID NO: 35991
  Cyclic GFR-binding peptide
  MOD_RES (2)..(2): Xaa is C or S

SEQ ID NO: 90060 - protein, 25 aa, Artificial Sequence
  Cyclic GFR-binding peptide
RVIMSMEGLVKPKRGVMIQITINSL

SEQ ID NO: 90061 - protein, 31 aa, Artificial Sequence
  Cyclic GFR-binding peptide
  MOD_RES (27)..(28): Xaa is C or S
DSMEGLVVNNAADMIQITINSLRAPVXXSAP

SEQ ID NO: 90062 - protein, 30 aa, Artificial Sequence
  Cyclic GFR-binding peptide
SEVVMDSMEGLVVNNASDMIQITINSLRTP

SEQ ID NO: 90063 - protein, 26 aa, Artificial Sequence
  Cyclic GFR-binding peptide
MDSMEGLVVNNASDMIQITINSLRTP

SEQ ID NO: 90064 - protein, 24 aa, Artificial Sequence
  Cyclic GFR-binding peptide
VMDSMEGLVVNNASDMIQITINSL

SEQ ID NO: 90065 - protein, 33 aa, Artificial Sequence
  Cyclic GFR-binding peptide
  MOD_RES (2)..(4): Xaa is C or S
RXGXSEVVMDSMEGLVVNNASDMIQITINSLRT

SEQ ID NO: 90066 - protein, 32 aa, Artificial Sequence
  Cyclic GFR-binding peptide
  MOD_RES (26)..(27): Xaa is C or S
SMEGILLVRGNDMIQMTINSTKVPAXXTSPVR

SEQ ID NO: 90067 - protein, 35 aa, Artificial Sequence; identical to SEQ ID NO: 36002
  Cyclic GFR-binding peptide
  MOD_RES (2)..(33)..(34): Xaa is C or S

SEQ ID NO: 90068 - protein, 30 aa, Artificial Sequence
  Cyclic GFR-binding peptide
  MOD_RES (1)..(3): Xaa is C or S
XGXAEVVMDSMEGLVVNNAADMIQITINSL

SEQ ID NO: 90069 - protein, 34 aa, Artificial Sequence; identical to SEQ ID NO: 36005
  Cyclic GFR-binding peptide
  MOD_RES (32)..(33): Xaa is C or S

SEQ ID NO: 90070 - protein, 34 aa, Artificial Sequence
  Cyclic GFR-binding peptide
  MOD_RES (29)..(30): Xaa is C or S
VMNSMEGLIVNSSDDMIQVTINSLKTPAXXPKPV

SEQ ID NO: 90071 - protein, 33 aa, Artificial Sequence; identical to SEQ ID NO: 36006
  Cyclic GFR-binding peptide
  MOD_RES (2)..(2): Xaa is C or S

SEQ ID NO: 90072 - protein, 31 aa, Artificial Sequence
  Cyclic GFR-binding peptide
  MOD_RES (29)..(30): Xaa is C or S
VMDSMEGIVVNNASDMIQITINSLRTPVXXT

SEQ ID NO: 90073 - protein, 32 aa, Artificial Sequence
  Cyclic GFR-binding peptide
  MOD_RES (1)..(3): Xaa is C or S
XGXRDVVMGSMEGIIIQQKDNMIQMTINSMKT

SEQ ID NO: 90074 - protein, 35 aa, Artificial Sequence; identical to SEQ ID NO: 36008
  Cyclic GFR-binding peptide
  MOD_RES (31)..(32): Xaa is C or S

SEQ ID NO: 90075 - protein, 22 aa, Artificial Sequence
  Cyclic GFR-binding peptide
MGSMEGIIIQQKDNMIQMTINS

SEQ ID NO: 90076 - protein, 28 aa, Artificial Sequence
  Cyclic GFR-binding peptide
  MOD_RES (1)..(1): Xaa is C or S
XAEVVMDSMEGLVVNNAADMIQITINSL

SEQ ID NO: 90077 - protein, 26 aa, Artificial Sequence
  Cyclic GFR-binding peptide
DSMEGIVVNNAADMIQITINSLRAPV

SEQ ID NO: 90078 - protein, 28 aa, Artificial Sequence
  Cyclic GFR-binding peptide
SEVVMDSMEGLVVNNASDMIQITINSLR

SEQ ID NO: 90079 - protein, 30 aa, Artificial Sequence
  Cyclic GFR-binding peptide
  MOD_RES (26)..(27): Xaa is C or S
SMEGLVVNNAADMIQITINSLRAPVXXSAP

SEQ ID NO: 90080 - protein, 25 aa, Artificial Sequence
  Cyclic GFR-binding peptide
EVVMDSMEGIVVNNASDMIQITINS

SEQ ID NO: 90081 - protein, 27 aa, Artificial Sequence
  Cyclic GFR-binding peptide
EVVMDSMEGLVVNNASDMIQITINSLR

SEQ ID NO: 90082 - protein, 26 aa, Artificial Sequence
  Cyclic GFR-binding peptide
VVMDSMEGLVVNNASDMIQITINSLR

SEQ ID NO: 90083 - protein, 28 aa, Artificial Sequence
  Cyclic GFR-binding peptide
EVVMDSMEGIVVNNASDMIQITINSLRT

SEQ ID NO: 90084 - protein, 31 aa, Artificial Sequence
  Cyclic GFR-binding peptide
  MOD_RES (1)..(3): Xaa is C or S
XKXSRVIMSMEGLVKPKRGVMIQITINSLAQ

SEQ ID NO: 90085 - protein, 39 aa, Artificial Sequence; identical to SEQ ID NO: 36022
  Cyclic GFR-binding peptide
  MOD_RES (2)..(4)..(36)..(37): Xaa is C or S

SEQ ID NO: 90086 - protein, 22 aa, Artificial Sequence
  Cyclic GFR-binding peptide
MDSMEGIVVNNASDMIQITINS

SEQ ID NO: 90087 - protein, 31 aa, Artificial Sequence
  Cyclic GFR-binding peptide
  MOD_RES (27)..(28): Xaa is C or S
MSMEGLLLVRGNDMIQMTINSTKVPAXXTSP

SEQ ID NO: 90088 - protein, 28 aa, Artificial Sequence
  Cyclic GFR-binding peptide
  MOD_RES (1)..(1): Xaa is C or S
XSKVIMSMEGLIKPTKGIMIQITINSLD

SEQ ID NO: 90089 - protein, 30 aa, Artificial Sequence
  Cyclic GFR-binding peptide
  MOD_RES (2)..(4): Xaa is C or S
SXGXRDVVMGSMEGIIIQQKDNMIQMTINS

SEQ ID NO: 90090 - protein, 26 aa, Artificial Sequence
  Cyclic GFR-binding peptide
EVVMDSMEGIVVNNAADMIQITINSL

SEQ ID NO: 90091 - protein, 30 aa, Artificial Sequence; identical to SEQ ID NO: 2180
  Cyclic GFR-binding peptide

SEQ ID NO: 90092 - protein, 34 aa, Artificial Sequence; identical to SEQ ID NO: 36029
  Cyclic GFR-binding peptide
  MOD_RES (2)..(33)..(34): Xaa is C or S

SEQ ID NO: 90093 - protein, 32 aa, Artificial Sequence
  Cyclic GFR-binding peptide
  MOD_RES (27)..(28): Xaa is C or S
MSMEGLVKPKRGVMIQITINSLAQPVXXPAAS

SEQ ID NO: 90094 - protein, 30 aa, Artificial Sequence
  Cyclic GFR-binding peptide
  MOD_RES (1)..(1): Xaa is C or S
XSEVVMDSMEGIVVNNASDMIQITINSLRT

SEQ ID NO: 90095 - protein, 33 aa, Artificial Sequence
  Cyclic GFR-binding peptide
  MOD_RES (27)..(28): Xaa is C or S
DSMEGLVVNNASDMIQITINSLRTPVXXTPPTS

SEQ ID NO: 90096 - protein, 28 aa, Artificial Sequence
  Cyclic GFR-binding peptide
  MOD_RES (1)..(1): Xaa is C or S
XRDVVMGSMEGLIIQQKDNMIQMTINSM

SEQ ID NO: 90097 - protein, 32 aa, Artificial Sequence
  Cyclic GFR-binding peptide
  MOD_RES (28)..(29): Xaa is C or S
MGSMEGIIIQQKDNMIQMTINSMKTPTXXPGA

SEQ ID NO: 90098 - protein, 34 aa, Artificial Sequence
  Cyclic GFR-binding peptide
  MOD_RES (28)..(29): Xaa is C or S
MGSMEGIIIQQKDNMIQMTINSMKTPTXXPGASG

SEQ ID NO: 90099 - protein, 29 aa, Artificial Sequence
  Cyclic GFR-binding peptide
  MOD_RES (27)..(28): Xaa is C or S
DSMEGLVVNNAADMIQITINSLRAPVXXS

SEQ ID NO: 90100 - protein, 27 aa, Artificial Sequence
  Cyclic GFR-binding peptide
  MOD_RES (1)..(1): Xaa is C or S
XSEVVMDSMEGIVVNNASDMIQITINS

SEQ ID NO: 90101 - protein, 34 aa, Artificial Sequence
  Cyclic GFR-binding peptide
  MOD_RES (29)..(30): Xaa is C or S
VMDSMEGLVVNNAADMIQITINSLRAPVXXSAPA

SEQ ID NO: 90102 - protein, 37 aa, Artificial Sequence; identical to SEQ ID NO: 36034
  Cyclic GFR-binding peptide
  MOD_RES (2)..(4)..(35)..(36): Xaa is C or S

SEQ ID NO: 90103 - protein, 34 aa, Artificial Sequence; identical to SEQ ID NO: 36035
  Cyclic GFR-binding peptide
  MOD_RES (31)..(32): Xaa is C or S

SEQ ID NO: 90104 - protein, 41 aa, Artificial Sequence; identical to SEQ ID NO: 36036
  Cyclic GFR-binding peptide
  MOD_RES (2)..(4)..(35)..(36): Xaa is C or S

SEQ ID NO: 90105 - protein, 32 aa, Artificial Sequence
  Cyclic GFR-binding peptide
  MOD_RES (1)..(3): Xaa is C or S
XKXSRVIMSMEGLVKPKRGVMIQITINSLAQP

SEQ ID NO: 90106 - protein, 32 aa, Artificial Sequence
  Cyclic GFR-binding peptide
  MOD_RES (1)..(3): Xaa is C or S
XKXSKVIMSMEGLIKPTKGIMIQITINSLDQS

SEQ ID NO: 90107 - protein, 34 aa, Artificial Sequence; identical to SEQ ID NO: 36038
  Cyclic GFR-binding peptide
  MOD_RES (32)..(33): Xaa is C or S

SEQ ID NO: 90108 - protein, 33 aa, Artificial Sequence
  Cyclic GFR-binding peptide
  MOD_RES (28)..(29): Xaa is C or S
MGSMEGIIIQQKDNMIQMTINSMKTPTXXPGAS

SEQ ID NO: 90109 - protein, 25 aa, Artificial Sequence
  Cyclic GFR-binding peptide
SMEGIIIQQKDNMIQMTINSMKTPT

SEQ ID NO: 90110 - protein, 26 aa, Artificial Sequence
  Cyclic GFR-binding peptide
VMGSMEGIIIQQKDNMIQMTINSMKT

SEQ ID NO: 90111 - protein, 22 aa, Artificial Sequence
  Cyclic GFR-binding peptide
NSMEGLIVNSSDDMIQVTINSL

SEQ ID NO: 90112 - protein, 25 aa, Artificial Sequence
  Cyclic GFR-binding peptide
VVMDSMEGLVVNNAADMIQITINSL

SEQ ID NO: 90113 - protein, 34 aa, Artificial Sequence; identical to SEQ ID NO: 36044
  Cyclic GFR-binding peptide
  MOD_RES (2)..(33)..(34): Xaa is C or S

SEQ ID NO: 90114 - protein, 21 aa, Artificial Sequence
  Cyclic GFR-binding peptide
MSMEGLVKPTRGVMIQITINS

SEQ ID NO: 90115 - protein, 34 aa, Artificial Sequence; identical to SEQ ID NO: 36048
  Cyclic GFR-binding peptide
  MOD_RES (2)..(33)..(34): Xaa is C or S

SEQ ID NO: 90116 - protein, 20 aa, Artificial Sequence
  Cyclic GFR-binding peptide
SMEGLIVNSSDDMIQVTINS

SEQ ID NO: 90117 - protein, 26 aa, Artificial Sequence
  Cyclic GFR-binding peptide
VVMGSMEGLIIQQKDNMIQMTINSMK

SEQ ID NO: 90118 - protein, 25 aa, Artificial Sequence
  Cyclic GFR-binding peptide
EVIMSMEGLLLVRGNDMIQMTINST

SEQ ID NO: 90119 - protein, 34 aa, Artificial Sequence
  Cyclic GFR-binding peptide
  MOD_RES (29)..(30): Xaa is C or S
VMGSMEGIIIQQKDNMIQMTINSMKTPTXXPGAS

SEQ ID NO: 90120 - protein, 29 aa, Artificial Sequence
  Cyclic GFR-binding peptide
  MOD_RES (1)..(3): Xaa is C or S
XGXAEVVMDSMEGIVVNNAADMIQITINS

SEQ ID NO: 90121 - protein, 33 aa, Artificial Sequence; identical to SEQ ID NO: 36056
  Cyclic GFR-binding peptide
  MOD_RES (31)..(32): Xaa is C or S

SEQ ID NO: 90122 - protein, 35 aa, Artificial Sequence
  Cyclic GFR-binding peptide
  MOD_RES (30)..(31): Xaa is C or S
EVIMSMEGILLVRGNDMIQMTINSTKVPAXXTSPV

SEQ ID NO: 90123 - protein, 37 aa, Artificial Sequence; identical to SEQ ID NO: 36058
  Cyclic GFR-binding peptide
  MOD_RES (2)..(34)..(35): Xaa is C or S

SEQ ID NO: 90124 - protein, 40 aa, Artificial Sequence; identical to SEQ ID NO: 36059
  Cyclic GFR-binding peptide
  MOD_RES (2)..(4)..(36)..(37): Xaa is C or S

SEQ ID NO: 90125 - protein, 29 aa, Artificial Sequence
  Cyclic GFR-binding peptide
  MOD_RES (28)..(29): Xaa is C or S
IMSMEGLLLVRGNDMIQMTINSTKVPAXX

SEQ ID NO: 90126 - protein, 30 aa, Artificial Sequence
  Cyclic GFR-binding peptide
  MOD_RES (30)..(30): Xaa is C or S
VVMGSMEGIIIQQKDNMIQMTINSMKTPTX

SEQ ID NO: 90127 - protein, 31 aa, Artificial Sequence
  Cyclic GFR-binding peptide
  MOD_RES (28)..(29): Xaa is C or S
MNSMEGLIVNSSDDMIQVTINSLKTPAXXPK

SEQ ID NO: 90128 - protein, 35 aa, Artificial Sequence
  Cyclic GFR-binding peptide
  MOD_RES (30)..(31): Xaa is C or S
VVMDSMEGLVVNNAADMIQITINSLRAPVXXSAPA

SEQ ID NO: 90129 - protein, 31 aa, Artificial Sequence
  Cyclic GFR-binding peptide
  MOD_RES (30)..(31): Xaa is C or S
VVMDSMEGIVVNNAADMIQITINSLRAPVXX

SEQ ID NO: 90130 - protein, 26 aa, Artificial Sequence
  Cyclic GFR-binding peptide
KVIMSMEGLIKPTKGIMIQITINSLD

SEQ ID NO: 90131 - protein, 24 aa, Artificial Sequence
  Cyclic GFR-binding peptide
DSMEGLVVNNASDMIQITINSLRT

SEQ ID NO: 90132 - protein, 37 aa, Artificial Sequence; identical to SEQ ID NO: 36069
  Cyclic GFR-binding peptide
  MOD_RES (2)..(34)..(35): Xaa is C or S

SEQ ID NO: 90133 - protein, 34 aa, Artificial Sequence; identical to SEQ ID NO: 36070
  Cyclic GFR-binding peptide
  MOD_RES (2)..(34): Xaa is C or S

SEQ ID NO: 90134 - protein, 26 aa, Artificial Sequence
  Cyclic GFR-binding peptide
MDSMEGLVVNNAADMIQITINSLRAP

SEQ ID NO: 90135 - protein, 37 aa, Artificial Sequence; identical to SEQ ID NO: 36074
  Cyclic GFR-binding peptide
  MOD_RES (2)..(33)..(34): Xaa is C or S

SEQ ID NO: 90136 - protein, 36 aa, Artificial Sequence
  Cyclic GFR-binding peptide
  MOD_RES (30)..(31): Xaa is C or S
VVMDSMEGIVVNNASDMIQITINSLRTPVXXTPPTS

SEQ ID NO: 90137 - protein, 35 aa, Artificial Sequence; identical to SEQ ID NO: 36075
  Cyclic GFR-binding peptide
  MOD_RES (2)..(4)..(35): Xaa is C or S

SEQ ID NO: 90138 - protein, 32 aa, Artificial Sequence
  Cyclic GFR-binding peptide
  MOD_RES (1)..(3): Xaa is C or S
XGXRDVVMGSMEGLIIQQKDNMIQMTINSMKT

SEQ ID NO: 90139 - protein, 26 aa, Artificial Sequence
  Cyclic GFR-binding peptide
IMSMEGILLVRGNDMIQMTINSTKVP

SEQ ID NO: 90140 - protein, 29 aa, Artificial Sequence
  Cyclic GFR-binding peptide
  MOD_RES (28)..(29): Xaa is C or S
IMSMEGLIKPTKGIMIQITINSLDQSVXX

SEQ ID NO: 90141 - protein, 27 aa, Artificial Sequence
  Cyclic GFR-binding peptide
SRVVMNSMEGLIVNSSDDMIQVTINSL

SEQ ID NO: 90142 - protein, 30 aa, Artificial Sequence
  Cyclic GFR-binding peptide
  MOD_RES (2)..(2): Xaa is C or S
GXSEVVMDSMEGIVVNNASDMIQITINSLR

SEQ ID NO: 90143 - protein, 28 aa, Artificial Sequence
  Cyclic GFR-binding peptide
EEVIMSMEGILLVRGNDMIQMTINSTKV

SEQ ID NO: 90144 - protein, 29 aa, Artificial Sequence
  Cyclic GFR-binding peptide
  MOD_RES (2)..(2): Xaa is C or S
GXAEVVMDSMEGLVVNNAADMIQITINSL

SEQ ID NO: 90145 - protein, 24 aa, Artificial Sequence
  Cyclic GFR-binding peptide
SMEGLVKPKRGVMIQITINSLAQP

SEQ ID NO: 90146 - protein, 27 aa, Artificial Sequence
  Cyclic GFR-binding peptide
VMSMEGLVKPTRGVMIQITINSLDQPV

SEQ ID NO: 90147 - protein, 37 aa, Artificial Sequence; identical to SEQ ID NO: 36085
  Cyclic GFR-binding peptide
  MOD_RES (2)..(34)..(35): Xaa is C or S

SEQ ID NO: 90148 - protein, 31 aa, Artificial Sequence; identical to SEQ ID NO: 36093
  Cyclic GFR-binding peptide
  MOD_RES (31)..(31): Xaa is C or S

SEQ ID NO: 90149 - protein, 33 aa, Artificial Sequence; identical to SEQ ID NO: 36096
  Cyclic GFR-binding peptide
  MOD_RES (2)..(33): Xaa is C or S

SEQ ID NO: 90150 - protein, 28 aa, Artificial Sequence
  Cyclic GFR-binding peptide
VVMDSMEGLVVNNASDMIQITINSLRTP

SEQ ID NO: 90151 - protein, 30 aa, Artificial Sequence
  Cyclic GFR-binding peptide
  MOD_RES (2)..(2): Xaa is C or S
GXRDVVMGSMEGIIIQQKDNMIQMTINSMK

SEQ ID NO: 90152 - protein, 30 aa, Artificial Sequence
  Cyclic GFR-binding peptide
  MOD_RES (27)..(28): Xaa is C or S
DSMEGIVVNNAADMIQITINSLRAPVXXSA

SEQ ID NO: 90153 - protein, 25 aa, Artificial Sequence
  Cyclic GFR-binding peptide
VVMDSMEGIVVNNASDMIQITINSL

SEQ ID NO: 90154 - protein, 35 aa, Artificial Sequence; identical to SEQ ID NO: 36105
  Cyclic GFR-binding peptide
  MOD_RES (2)..(4)..(35): Xaa is C or S

SEQ ID NO: 90155 - protein, 30 aa, Artificial Sequence
  Cyclic GFR-binding peptide
  MOD_RES (29)..(30): Xaa is C or S
VVMSMEGLVKPTRGVMIQITINSLDQPVXX

SEQ ID NO: 90156 - protein, 31 aa, Artificial Sequence
  Cyclic GFR-binding peptide
  MOD_RES (2)..(2): Xaa is C or S
GXAEVVMDSMEGIVVNNAADMIQITINSLRA

SEQ ID NO: 90157 - protein, 28 aa, Artificial Sequence
  Cyclic GFR-binding peptide
KVVMSMEGLVKPTRGVMIQITINSLDQP

SEQ ID NO: 90158 - protein, 29 aa, Artificial Sequence
  Cyclic GFR-binding peptide
  MOD_RES (1)..(1): Xaa is C or S
XSRVVMNSMEGLIVNSSDDMIQVTINSLK

SEQ ID NO: 90159 - protein, 20 aa, Artificial Sequence
  Cyclic GFR-binding peptide
SMEGLVKPTRGVMIQITINS

SEQ ID NO: 90160 - protein, 34 aa, Artificial Sequence
  Cyclic GFR-binding peptide
  MOD_RES (29)..(30): Xaa is C or S
VMDSMEGIVVNNAADMIQITINSLRAPVXXSAPA

SEQ ID NO: 90161 - protein, 34 aa, Artificial Sequence
  Cyclic GFR-binding peptide
  MOD_RES (29)..(30): Xaa is C or S
VIMSMEGLLLVRGNDMIQMTINSTKVPAXXTSPV

SEQ ID NO: 90162 - protein, 38 aa, Artificial Sequence; identical to SEQ ID NO: 36110
  Cyclic GFR-binding peptide
  MOD_RES (2)..(4)..(35)..(36): Xaa is C or S

SEQ ID NO: 90163 - protein, 28 aa, Artificial Sequence
  Cyclic GFR-binding peptide
  MOD_RES (1)..(3): Xaa is C or S
XKXSKVVMSMEGLVKPTRGVMIQITINS

SEQ ID NO: 90164 - protein, 31 aa, Artificial Sequence
  Cyclic GFR-binding peptide
  MOD_RES (29)..(30): Xaa is C or S
VMGSMEGLIIQQKDNMIQMTINSMKTPTXXP

SEQ ID NO: 90165 - protein, 39 aa, Artificial Sequence; identical to SEQ ID NO: 36113
  Cyclic GFR-binding peptide
  MOD_RES (2)..(34)..(35): Xaa is C or S

SEQ ID NO: 90166 - protein, 33 aa, Artificial Sequence
  Cyclic GFR-binding peptide
  MOD_RES (27)..(28): Xaa is C or S
DSMEGLVVNNAADMIQITINSLRAPVXXSAPAA

SEQ ID NO: 90167 - protein, 28 aa, Artificial Sequence
  Cyclic GFR-binding peptide
  MOD_RES (28)..(28): Xaa is C or S
IMSMEGLIKPTKGIMIQITINSLDQSVX

SEQ ID NO: 90168 - protein, 37 aa, Artificial Sequence; identical to SEQ ID NO: 36118
  Cyclic GFR-binding peptide
  MOD_RES (2)..(4)..(36)..(37): Xaa is C or S

SEQ ID NO: 90169 - protein, 35 aa, Artificial Sequence
  Cyclic GFR-binding peptide
  MOD_RES (30)..(31): Xaa is C or S
KVVMSMEGLVKPTRGVMIQITINSLDQPVXXPSAS

SEQ ID NO: 90170 - protein, 27 aa, Artificial Sequence
  Cyclic GFR-binding peptide
  MOD_RES (26)..(27): Xaa is C or S
SMEGLIIQQKDNMIQMTINSMKTPTXX

SEQ ID NO: 90171 - protein, 37 aa, Artificial Sequence; identical to SEQ ID NO: 36123
  Cyclic GFR-binding peptide
  MOD_RES (1)..(3)..(34)..(35): Xaa is C or S

SEQ ID NO: 90172 - protein, 36 aa, Artificial Sequence; identical to SEQ ID NO: 36129
  Cyclic GFR-binding peptide
  MOD_RES (2)..(4)..(35)..(36): Xaa is C or S

SEQ ID NO: 90173 - protein, 27 aa, Artificial Sequence
  Cyclic GFR-binding peptide
  MOD_RES (27)..(27): Xaa is C or S
DSMEGIVVNNAADMIQITINSLRAPVX

SEQ ID NO: 90174 - protein, 26 aa, Artificial Sequence
  Cyclic GFR-binding peptide
VVMSMEGLVKPTRGVMIQITINSLDQ

SEQ ID NO: 90175 - protein, 31 aa, Artificial Sequence
  Cyclic GFR-binding peptide
  MOD_RES (27)..(28): Xaa is C or S
GSMEGLIIQQKDNMIQMTINSMKTPTXXPGA

SEQ ID NO: 90176 - protein, 27 aa, Artificial Sequence
  Cyclic GFR-binding peptide
IMSMEGLIKPTKGIMIQITINSLDQSV

SEQ ID NO: 90177 - protein, 24 aa, Artificial Sequence
  Cyclic GFR-binding peptide
SMEGLVKPTRGVMIQITINSLDQP

SEQ ID NO: 90178 - protein, 33 aa, Artificial Sequence
  Cyclic GFR-binding peptide
  MOD_RES (2)..(4): Xaa is C or S
SXKXSKVIMSMEGLIKPTKGIMIQITINSLDQS

SEQ ID NO: 90179 - protein, 26 aa, Artificial Sequence
  Cyclic GFR-binding peptide
  MOD_RES (26)..(26): Xaa is C or S
SMEGLVKPTRGVMIQITINSLDQPVX

SEQ ID NO: 90180 - protein, 33 aa, Artificial Sequence
  Cyclic GFR-binding peptide
  MOD_RES (30)..(31): Xaa is C or S
VVMDSMEGIVVNNASDMIQITINSLRTPVXXTP

SEQ ID NO: 90181 - protein, 35 aa, Artificial Sequence; identical to SEQ ID NO: 36141
  Cyclic GFR-binding peptide
  MOD_RES (1)..(3)..(35): Xaa is C or S

SEQ ID NO: 90182 - protein, 40 aa, Artificial Sequence; identical to SEQ ID NO: 36142
  Cyclic GFR-binding peptide
  MOD_RES (2)..(34)..(35): Xaa is C or S

SEQ ID NO: 90183 - protein, 38 aa, Artificial Sequence; identical to SEQ ID NO: 36143
  Cyclic GFR-binding peptide
  MOD_RES (2)..(34)..(35): Xaa is C or S

SEQ ID NO: 90184 - protein, 32 aa, Artificial Sequence
  Cyclic GFR-binding peptide
  MOD_RES (2)..(2): Xaa is C or S
GXSRVVMNSMEGLIVNSSDDMIQVTINSLKTP

SEQ ID NO: 90185 - protein, 22 aa, Artificial Sequence
  Cyclic GFR-binding peptide
SMEGILLVRGNDMIQMTINSTK

SEQ ID NO: 90186 - protein, 28 aa, Artificial Sequence
  Cyclic GFR-binding peptide
EVVMDSMEGIVVNNAADMIQITINSLRA

SEQ ID NO: 90187 - protein, 28 aa, Artificial Sequence
  Cyclic GFR-binding peptide
  MOD_RES (28)..(28): Xaa is C or S
VMSMEGLVKPTRGVMIQITINSLDQPVX

SEQ ID NO: 90188 - protein, 31 aa, Artificial Sequence
  Cyclic GFR-binding peptide
  MOD_RES (29)..(30): Xaa is C or S
VMDSMEGLVVNNASDMIQITINSLRTPVXXT

SEQ ID NO: 90189 - protein, 24 aa, Artificial Sequence
  Cyclic GFR-binding peptide
IMSMEGLIKPTKGIMIQITINSLD

SEQ ID NO: 90190 - protein, 30 aa, Artificial Sequence
  Cyclic GFR-binding peptide
  MOD_RES (28)..(29): Xaa is C or S
IMSMEGLVKPKRGVMIQITINSLAQPVXXP

SEQ ID NO: 90191 - protein, 29 aa, Artificial Sequence
  Cyclic GFR-binding peptide
EEVIMSMEGLLLVRGNDMIQMTINSTKVP

SEQ ID NO: 90192 - protein, 33 aa, Artificial Sequence; identical to SEQ ID NO: 36155
  Cyclic GFR-binding peptide
  MOD_RES (2)..(33): Xaa is C or S

SEQ ID NO: 90193 - protein, 40 aa, Artificial Sequence; identical to SEQ ID NO: 36156
  Cyclic GFR-binding peptide
  MOD_RES (2)..(4)..(35)..(36): Xaa is C or S

SEQ ID NO: 90194 - protein, 37 aa, Artificial Sequence; identical to SEQ ID NO: 36157
  Cyclic GFR-binding peptide
  MOD_RES (31)..(32): Xaa is C or S

SEQ ID NO: 90195 - protein, 26 aa, Artificial Sequence
  Cyclic GFR-binding peptide
VMNSMEGLIVNSSDDMIQVTINSLKT

SEQ ID NO: 90196 - protein, 32 aa, Artificial Sequence
  Cyclic GFR-binding peptide
  MOD_RES (1)..(3): Xaa is C or S
XGXSEVVMDSMEGLVVNNASDMIQITINSLRT

SEQ ID NO: 90197 - protein, 32 aa, Artificial Sequence; identical to SEQ ID NO: 36160
  Cyclic GFR-binding peptide
  MOD_RES (2)..(2): Xaa is C or S

SEQ ID NO: 90198 - protein, 23 aa, Artificial Sequence
  Cyclic GFR-binding peptide
MSMEGLVKPTRGVMIQITINSLD

SEQ ID NO: 90199 - protein, 20 aa, Artificial Sequence
  Cyclic GFR-binding peptide
SMEGLLLVRGNDMIQMTINS

SEQ ID NO: 90200 - protein, 27 aa, Artificial Sequence
  Cyclic GFR-binding peptide
  MOD_RES (26)..(27): Xaa is C or S
SMEGLVKPKRGVMIQITINSLAQPVXX

SEQ ID NO: 90201 - protein, 25 aa, Artificial Sequence
  Cyclic GFR-binding peptide
MGSMEGIIIQQKDNMIQMTINSMKT

SEQ ID NO: 90202 - protein, 35 aa, Artificial Sequence; identical to SEQ ID NO: 36165
  Cyclic GFR-binding peptide
  MOD_RES (31)..(32): Xaa is C or S

SEQ ID NO: 90203 - protein, 32 aa, Artificial Sequence
  Cyclic GFR-binding peptide
  MOD_RES (30)..(32): Xaa is C or S
PVKTSNITMQIMDNGRVLLIGEMSMIVEEXGX

SEQ ID NO: 90204 - protein, 27 aa, Artificial Sequence
  Cyclic GFR-binding peptide
MSNITMQIMNDKQQIIIGEMSGMVVDR

SEQ ID NO: 90205 - protein, 35 aa, Artificial Sequence; identical to SEQ ID NO: 36170
  Cyclic GFR-binding peptide
  MOD_RES (4)..(5): Xaa is C or S

SEQ ID NO: 90206 - protein, 37 aa, Artificial Sequence; identical to SEQ ID NO: 36172
  Cyclic GFR-binding peptide
  MOD_RES (5)..(6): Xaa is C or S

SEQ ID NO: 90207 - protein, 20 aa, Artificial Sequence
  Cyclic GFR-binding peptide
SNITMQIMDNGRVLLIGEMS

SEQ ID NO: 90208 - protein, 24 aa, Artificial Sequence
  Cyclic GFR-binding peptide
SNITIQIMDAANNVVIGEMSDMVV

SEQ ID NO: 90209 - protein, 34 aa, Artificial Sequence; identical to SEQ ID NO: 36178
  Cyclic GFR-binding peptide
  MOD_RES (3)..(4): Xaa is C or S

SEQ ID NO: 90210 - protein, 34 aa, Artificial Sequence
  Cyclic GFR-binding peptide
  MOD_RES (5)..(6): Xaa is C or S
TPPTXXVPTRLSNITIQIMDSANNVVIGEMSDMV

SEQ ID NO: 90211 - protein, 27 aa, Artificial Sequence
  Cyclic GFR-binding peptide
  MOD_RES (1)..(2): Xaa is C or S
XXVPARLSNITIQIMDAANNVVLGEMS

SEQ ID NO: 90212 - protein, 21 aa, Artificial Sequence
  Cyclic GFR-binding peptide
SNITIQIMDAANNVVIGEMSD

SEQ ID NO: 90213 - protein, 23 aa, Artificial Sequence
  Cyclic GFR-binding peptide
LSNITIQIMDSANNVVLGEMSDM

SEQ ID NO: 90214 - protein, 31 aa, Artificial Sequence; identical to SEQ ID NO: 36184
  Cyclic GFR-binding peptide

SEQ ID NO: 90215 - protein, 35 aa, Artificial Sequence; identical to SEQ ID NO: 36183
  Cyclic GFR-binding peptide
  MOD_RES (3)..(4): Xaa is C or S

SEQ ID NO: 90216 - protein, 26 aa, Artificial Sequence
  Cyclic GFR-binding peptide
SNITVQIMDDSSNVILGEMSNMVVRS

SEQ ID NO: 90217 - protein, 25 aa, Artificial Sequence
  Cyclic GFR-binding peptide
LSNITIQIMIGKTPKILGEMSMIVK

SEQ ID NO: 90218 - protein, 39 aa, Artificial Sequence; identical to SEQ ID NO: 36187
  Cyclic GFR-binding peptide
  MOD_RES (4)..(5)..(36)..(38): Xaa is C or S

SEQ ID NO: 90219 - protein, 28 aa, Artificial Sequence
  Cyclic GFR-binding peptide
  MOD_RES (1)..(2): Xaa is C or S
XXVSQDLSNITIQIMIGKTPKILGEMSM

SEQ ID NO: 90220 - protein, 33 aa, Artificial Sequence
  Cyclic GFR-binding peptide
  MOD_RES (30)..(32): Xaa is C or S
PQALSNITIQIMVGRKPKVLGEMSMIVRSXKXS

SEQ ID NO: 90221 - protein, 34 aa, Artificial Sequence; identical to SEQ ID NO: 36191
  Cyclic GFR-binding peptide
  MOD_RES (32)..(34): Xaa is C or S

SEQ ID NO: 90222 - protein, 23 aa, Artificial Sequence
  Cyclic GFR-binding peptide
QALSNITIQIMVGRKPKVLGEMS

SEQ ID NO: 90223 - protein, 30 aa, Artificial Sequence
  Cyclic GFR-binding peptide
  MOD_RES (3)..(4): Xaa is C or S
GPXXTPTKMSNITMQIMNDKQQIIIGEMSG

SEQ ID NO: 90224 - protein, 31 aa, Artificial Sequence
  Cyclic GFR-binding peptide
  MOD_RES (5)..(6): Xaa is C or S
TPPTXXVPTRLSNITIQIMDSANNVVIGEMS

SEQ ID NO: 90225 - protein, 30 aa, Artificial Sequence
  Cyclic GFR-binding peptide
  MOD_RES (1)..(1): Xaa is C or S
XVPQALSNITIQIMVGRKPKVLGEMSMIVR

SEQ ID NO: 90226 - protein, 33 aa, Artificial Sequence
  Cyclic GFR-binding peptide
  MOD_RES (6)..(7): Xaa is C or S
RVPSTXXAPVKTSNITMQIMDNGRVLLLGEMSM

SEQ ID NO: 90227 - protein, 32 aa, Artificial Sequence
  Cyclic GFR-binding peptide
  MOD_RES (30)..(32): Xaa is C or S
TKLSNITVQIMDDSSNVILGEMSNMVVRSXGX

SEQ ID NO: 90228 - protein, 26 aa, Artificial Sequence
  Cyclic GFR-binding peptide
VPTRLSNITIQIMDSANNVVIGEMSD

SEQ ID NO: 90229 - protein, 35 aa, Artificial Sequence; identical to SEQ ID NO: 36195
  Cyclic GFR-binding peptide
  MOD_RES (1)..(2)..(33)..(35): Xaa is C or S

SEQ ID NO: 90230 - protein, 30 aa, Artificial Sequence
  Cyclic GFR-binding peptide
  MOD_RES (3)..(4): Xaa is C or S
APXXVPQALSNITIQIMVGRKPKVLGEMSM

SEQ ID NO: 90231 - protein, 41 aa, Artificial Sequence; identical to SEQ ID NO: 36196
  Cyclic GFR-binding peptide
  MOD_RES (6)..(7)..(39)..(41): Xaa is C or S

SEQ ID NO: 90232 - protein, 33 aa, Artificial Sequence
  Cyclic GFR-binding peptide
  MOD_RES (6)..(7): Xaa is C or S
STPPTXXVPTRLSNITIQIMDSANNVVIGEMSD

SEQ ID NO: 90233 - protein, 26 aa, Artificial Sequence
  Cyclic GFR-binding peptide
TSNITMQIMDNGRVLLLGEMSMIVEE

SEQ ID NO: 90234 - protein, 38 aa, Artificial Sequence; identical to SEQ ID NO: 36202
  Cyclic GFR-binding peptide
  MOD_RES (5)..(6)..(37): Xaa is C or S

SEQ ID NO: 90235 - protein, 30 aa, Artificial Sequence
  Cyclic GFR-binding peptide
  MOD_RES (28)..(30): Xaa is C or S
KTSNITMQIMDNGRVLLLGEMSMIVEEXGX

SEQ ID NO: 90236 - protein, 32 aa, Artificial Sequence
  Cyclic GFR-binding peptide
  MOD_RES (4)..(5): Xaa is C or S
PPTXXVPTRLSNITIQIMDSANNVVLGEMSDM

SEQ ID NO: 90237 - protein, 36 aa, Artificial Sequence; identical to SEQ ID NO: 36212
  Cyclic GFR-binding peptide
  MOD_RES (5)..(6): Xaa is C or S

SEQ ID NO: 90238 - protein, 35 aa, Artificial Sequence; identical to SEQ ID NO: 36213
  Cyclic GFR-binding peptide
  MOD_RES (3)..(4)..(35): Xaa is C or S

SEQ ID NO: 90239 - protein, 28 aa, Artificial Sequence
  Cyclic GFR-binding peptide
  MOD_RES (28)..(28): Xaa is C or S
KTSNITMQIMDNGRVLLIGEMSMIVEEX

SEQ ID NO: 90240 - protein, 23 aa, Artificial Sequence
  Cyclic GFR-binding peptide
RLSNITIQIMDSANNVVIGEMSD

SEQ ID NO: 90241 - protein, 27 aa, Artificial Sequence
  Cyclic GFR-binding peptide
QDLSNITIQIMIGKTPKILGEMSMIVK

SEQ ID NO: 90242 - protein, 27 aa, Artificial Sequence
  Cyclic GFR-binding peptide
DLSNITIQIMVGRTPKVLGEMSMVVKS

SEQ ID NO: 90243 - protein, 27 aa, Artificial Sequence
  Cyclic GFR-binding peptide
  MOD_RES (1)..(1): Xaa is C or S
XAPVKTSNITMQIMDNGRVLLLGEMSM

SEQ ID NO: 90244 - protein, 33 aa, Artificial Sequence
  Cyclic GFR-binding peptide
  MOD_RES (6)..(7): Xaa is C or S
ASAAPXXVPQALSNITIQIMVGRKPKVLGEMSM

SEQ ID NO: 90245 - protein, 22 aa, Artificial Sequence
  Cyclic GFR-binding peptide
SNITMQIMNDKQQIILGEMSGM

SEQ ID NO: 90246 - protein, 36 aa, Artificial Sequence; identical to SEQ ID NO: 36227
  Cyclic GFR-binding peptide
  MOD_RES (2)..(3)..(35): Xaa is C or S

SEQ ID NO: 90247 - protein, 33 aa, Artificial Sequence; identical to SEQ ID NO: 36233
  Cyclic GFR-binding peptide
  MOD_RES (2)..(3): Xaa is C or S

SEQ ID NO: 90248 - protein, 33 aa, Artificial Sequence
  Cyclic GFR-binding peptide
  MOD_RES (5)..(6): Xaa is C or S
APASXXVPARLSNITIQIMDAANNVVLGEMSDM

SEQ ID NO: 90249 - protein, 40 aa, Artificial Sequence; identical to SEQ ID NO: 36234
  Cyclic GFR-binding peptide
  MOD_RES (5)..(6)..(38)..(40): Xaa is C or S

SEQ ID NO: 90250 - protein, 29 aa, Artificial Sequence
  Cyclic GFR-binding peptide
  MOD_RES (3)..(4): Xaa is C or S
SPXXVPQDLSNITIQIMVGRTPKVLGEMS

SEQ ID NO: 90251 - protein, 32 aa, Artificial Sequence; identical to SEQ ID NO: 36242
  Cyclic GFR-binding peptide
  MOD_RES (1)..(2): Xaa is C or S

SEQ ID NO: 90252 - protein, 38 aa, Artificial Sequence; identical to SEQ ID NO: 36245
  Cyclic GFR-binding peptide
  MOD_RES (6)..(7): Xaa is C or S

SEQ ID NO: 90253 - protein, 41 aa, Artificial Sequence; identical to SEQ ID NO: 36246
  Cyclic GFR-binding peptide
  MOD_RES (6)..(7)..(39)..(41): Xaa is C or S

SEQ ID NO: 90254 - protein, 27 aa, Artificial Sequence
  Cyclic GFR-binding peptide
APVKTSNITMQIMDNGRVLLLGEMSMI

SEQ ID NO: 90255 - protein, 29 aa, Artificial Sequence
  Cyclic GFR-binding peptide
  MOD_RES (29)..(29): Xaa is C or S
QDLSNITIQIMIGKTPKILGEMSMIVKSX

SEQ ID NO: 90256 - protein, 30 aa, Artificial Sequence
  Cyclic GFR-binding peptide
  MOD_RES (29)..(29): Xaa is C or S
RLSNITIQIMDAANNVVLGEMSDMVVEAXG

SEQ ID NO: 90257 - protein, 34 aa, Artificial Sequence; identical to SEQ ID NO: 36248
  Cyclic GFR-binding peptide
  MOD_RES (1)..(32)..(34): Xaa is C or S

SEQ ID NO: 90258 - protein, 20 aa, Artificial Sequence
  Cyclic GFR-binding peptide
SNITMQIMNDKQQIIIGEMS

SEQ ID NO: 90259 - protein, 34 aa, Artificial Sequence; identical to SEQ ID NO: 36252
  Cyclic GFR-binding peptide
  MOD_RES (32)..(34): Xaa is C or S

SEQ ID NO: 90260 - protein, 32 aa, Artificial Sequence; identical to SEQ ID NO: 36254
  Cyclic GFR-binding peptide
  MOD_RES (32)..(32): Xaa is C or S

SEQ ID NO: 90261 - protein, 36 aa, Artificial Sequence; identical to SEQ ID NO: 36255
  Cyclic GFR-binding peptide
  MOD_RES (3)..(4)..(36): Xaa is C or S

SEQ ID NO: 90262 - protein, 32 aa, Artificial Sequence
  Cyclic GFR-binding peptide
  MOD_RES (30)..(32): Xaa is C or S
TRLSNITIQIMDSANNVVIGEMSDMVVESXGX

SEQ ID NO: 90263 - protein, 34 aa, Artificial Sequence
  Cyclic GFR-binding peptide
  MOD_RES (31)..(33): Xaa is C or S
PTKLSNITVQIMDDSSNVILGEMSNMVVRSXGXH

SEQ ID NO: 90264 - protein, 29 aa, Artificial Sequence
  Cyclic GFR-binding peptide
APVKTSNITMQIMDNGRVLLLGEMSMIVE

SEQ ID NO: 90265 - protein, 22 aa, Artificial Sequence
  Cyclic GFR-binding peptide
TSNITMQIMDNGRVLLLGEMSM

SEQ ID NO: 90266 - protein, 29 aa, Artificial Sequence
  Cyclic GFR-binding peptide
  MOD_RES (1)..(2): Xaa is C or S
XXTPTKMSNITMQIMNDKQQIIIGEMSGM

SEQ ID NO: 90267 - protein, 23 aa, Artificial Sequence
  Cyclic GFR-binding peptide
LSNITIQIMVGRKPKVLGEMSMI

SEQ ID NO: 90268 - protein, 36 aa, Artificial Sequence; identical to SEQ ID NO: 36260
  Cyclic GFR-binding peptide
  MOD_RES (1)..(33)..(35): Xaa is C or S

SEQ ID NO: 90269 - protein, 30 aa, Artificial Sequence
  Cyclic GFR-binding peptide
  MOD_RES (1)..(2): Xaa is C or S
XXAPVKTSNITMQIMDNGRVLLIGEMSMIV

SEQ ID NO: 90270 - protein, 35 aa, Artificial Sequence; identical to SEQ ID NO: 36263
  Cyclic GFR-binding peptide
  MOD_RES (32)..(34): Xaa is C or S

SEQ ID NO: 90271 - protein, 24 aa, Artificial Sequence
  Cyclic GFR-binding peptide
TSNITMQIMDNGRVLLIGEMSMIV

SEQ ID NO: 90272 - protein, 29 aa, Artificial Sequence
  Cyclic GFR-binding peptide
  MOD_RES (1)..(1): Xaa is C or S
XVPTRLSNITIQIMDSANNVVLGEMSDMV

SEQ ID NO: 90273 - protein, 41 aa, Artificial Sequence; identical to SEQ ID NO: 36266
  Cyclic GFR-binding peptide
  MOD_RES (6)..(7)..(39)..(41): Xaa is C or S

SEQ ID NO: 90274 - protein, 34 aa, Artificial Sequence
  Cyclic GFR-binding peptide
  MOD_RES (31)..(33): Xaa is C or S
PTKMSNITMQIMNDKQQIIIGEMSGMVVDRXGXS

SEQ ID NO: 90275 - protein, 28 aa, Artificial Sequence
  Cyclic GFR-binding peptide
  MOD_RES (1)..(1): Xaa is C or S
XVPTRLSNITIQIMDSANNVVLGEMSDM

SEQ ID NO: 90276 - protein, 30 aa, Artificial Sequence
  Cyclic GFR-binding peptide
  MOD_RES (3)..(4): Xaa is C or S
STXXAPVKTSNITMQIMDNGRVLLLGEMSM

SEQ ID NO: 90277 - protein, 37 aa, Artificial Sequence; identical to SEQ ID NO: 36272
  Cyclic GFR-binding peptide
  MOD_RES (5)..(6)..(37): Xaa is C or S

SEQ ID NO: 90278 - protein, 33 aa, Artificial Sequence
  Cyclic GFR-binding peptide
  MOD_RES (4)..(5): Xaa is C or S
PSTXXAPVKTSNITMQIMDNGRVLLLGEMSMIV

SEQ ID NO: 90279 - protein, 37 aa, Artificial Sequence; identical to SEQ ID NO: 36276
  Cyclic GFR-binding peptide
  MOD_RES (6)..(7): Xaa is C or S

SEQ ID NO: 90280 - protein, 28 aa, Artificial Sequence
  Cyclic GFR-binding peptide
  MOD_RES (27)..(27): Xaa is C or S
SNITVQIMDDSSNVILGEMSNMVVRSXG

SEQ ID NO: 90281 - protein, 36 aa, Artificial Sequence
  Cyclic GFR-binding peptide
  MOD_RES (6)..(7): Xaa is C or S
RVPSTXXAPVKTSNITMQIMDNGRVLLLGEMSMIVE

SEQ ID NO: 90282 - protein, 26 aa, Artificial Sequence
  Cyclic GFR-binding peptide
QALSNITIQIMVGRKPKVLGEMSMIV

SEQ ID NO: 90283 - protein, 25 aa, Artificial Sequence
  Cyclic GFR-binding peptide
SNITMQIMNDKQQIIIGEMSGMVVD

SEQ ID NO: 90284 - protein, 26 aa, Artificial Sequence
  Cyclic GFR-binding peptide
TRLSNITIQIMDSANNVVLGEMSDMV

SEQ ID NO: 90285 - protein, 32 aa, Artificial Sequence
  Cyclic GFR-binding peptide
  MOD_RES (5)..(6): Xaa is C or S
VPSTXXAPVKTSNITMQIMDNGRVLLIGEMSM

SEQ ID NO: 90286 - protein, 24 aa, Artificial Sequence
  Cyclic GFR-binding peptide
KTSNITMQIMDNGRVLLIGEMSMI

SEQ ID NO: 90287 - protein, 30 aa, Artificial Sequence
  Cyclic GFR-binding peptide
  MOD_RES (27)..(29): Xaa is C or S
SNITIQIMDSANNVVIGEMSDMVVESXGXR

SEQ ID NO: 90288 - protein, 39 aa, Artificial Sequence; identical to SEQ ID NO: 36282
  Cyclic GFR-binding peptide
  MOD_RES (3)..(4)..(36)..(38): Xaa is C or S

SEQ ID NO: 90289 - protein, 40 aa, Artificial Sequence; identical to SEQ ID NO: 36286
  Cyclic GFR-binding peptide
  MOD_RES (6)..(7)..(39): Xaa is C or S

SEQ ID NO: 90290 - protein, 32 aa, Artificial Sequence
  Cyclic GFR-binding peptide
  MOD_RES (31)..(31): Xaa is C or S
PTKMSNITMQIMNDKQQIIIGEMSGMVVDRXG

SEQ ID NO: 90291 - protein, 23 aa, Artificial Sequence
  Cyclic GFR-binding peptide
SNITIQIMVGRTPKVLGEMSMVV

SEQ ID NO: 90292 - protein, 37 aa, Artificial Sequence; identical to SEQ ID NO: 36293
  Cyclic GFR-binding peptide
  MOD_RES (2)..(3)..(35)..(37): Xaa is C or S

SEQ ID NO: 90293 - protein, 35 aa, Artificial Sequence; identical to SEQ ID NO: 36295
  Cyclic GFR-binding peptide
  MOD_RES (4)..(5): Xaa is C or S

SEQ ID NO: 90294 - protein, 38 aa, Artificial Sequence; identical to SEQ ID NO: 36296
  Cyclic GFR-binding peptide
  MOD_RES (2)..(3)..(35)..(37): Xaa is C or S

SEQ ID NO: 90295 - protein, 38 aa, Artificial Sequence; identical to SEQ ID NO: 36297
  Cyclic GFR-binding peptide
  MOD_RES (6)..(7)..(38): Xaa is C or S

SEQ ID NO: 90296 - protein, 27 aa, Artificial Sequence
  Cyclic GFR-binding peptide
PARLSNITIQIMDAANNVVLGEMSDMV

SEQ ID NO: 90297 - protein, 32 aa, Artificial Sequence
  Cyclic GFR-binding peptide
  MOD_RES (2)..(3): Xaa is C or S
PXXAPTKLSNITVQIMDDSSNVILGEMSNMVV

SEQ ID NO: 90298 - protein, 30 aa, Artificial Sequence
  Cyclic GFR-binding peptide
  MOD_RES (2)..(3): Xaa is C or S
SXXVPARLSNITIQIMDAANNVVIGEMSDM

SEQ ID NO: 90299 - protein, 41 aa, Artificial Sequence; identical to SEQ ID NO: 36301
  Cyclic GFR-binding peptide
  MOD_RES (6)..(7)..(39)..(41): Xaa is C or S

SEQ ID NO: 90300 - protein, 27 aa, Artificial Sequence
  Cyclic GFR-binding peptide
TKMSNITMQIMNDKQQIIIGEMSGMVV

SEQ ID NO: 90301 - protein, 34 aa, Artificial Sequence; identical to SEQ ID NO: 36304
  Cyclic GFR-binding peptide
  MOD_RES (31)..(33): Xaa is C or S

SEQ ID NO: 90302 - protein, 37 aa, Artificial Sequence; identical to SEQ ID NO: 36306
  Cyclic GFR-binding peptide
  MOD_RES (5)..(6): Xaa is C or S

SEQ ID NO: 90303 - protein, 34 aa, Artificial Sequence
  Cyclic GFR-binding peptide
  MOD_RES (4)..(5): Xaa is C or S
PASXXVPARLSNITIQIMDAANNVVLGEMSDMVV

SEQ ID NO: 90304 - protein, 24 aa, Artificial Sequence
  Cyclic GFR-binding peptide
MSNITMQIMNDKQQIIIGEMSGMV

SEQ ID NO: 90305 - protein, 35 aa, Artificial Sequence
  Cyclic GFR-binding peptide
  MOD_RES (5)..(6): Xaa is C or S
VPSTXXAPVKTSNITMQIMDNGRVLLLGEMSMIVE

SEQ ID NO: 90306 - protein, 32 aa, Artificial Sequence; identical to SEQ ID NO: 36310
  Cyclic GFR-binding peptide
  MOD_RES (1)..(2): Xaa is C or S

SEQ ID NO: 90307 - protein, 37 aa, Artificial Sequence; identical to SEQ ID NO: 36312
  Cyclic GFR-binding peptide
  MOD_RES (2)..(3)..(35)..(37): Xaa is C or S

SEQ ID NO: 90308 - protein, 32 aa, Artificial Sequence
  Cyclic GFR-binding peptide
  MOD_RES (4)..(5): Xaa is C or S
PKPXXAPTKLSNITVQIMDDSSNVILGEMSNM

SEQ ID NO: 90309 - protein, 37 aa, Artificial Sequence; identical to SEQ ID NO: 36314
  Cyclic GFR-binding peptide
  MOD_RES (5)..(6)..(37): Xaa is C or S

SEQ ID NO: 90310 - protein, 22 aa, Artificial Sequence
  Cyclic GFR-binding peptide
RLSNITIQIMDSANNVVIGEMS

SEQ ID NO: 90311 - protein, 29 aa, Artificial Sequence
  Cyclic GFR-binding peptide
  MOD_RES (2)..(3): Xaa is C or S
SXXVPARLSNITIQIMDAANNVVIGEMSD

SEQ ID NO: 90312 - protein, 29 aa, Artificial Sequence
  Cyclic GFR-binding peptide
  MOD_RES (1)..(1): Xaa is C or S
XVPQALSNITIQIMVGRKPKVLGEMSMIV

SEQ ID NO: 90313 - protein, 22 aa, Artificial Sequence
  Cyclic GFR-binding peptide
LSNITIQIMVGRKPKVLGEMSM

SEQ ID NO: 90314 - protein, 27 aa, Artificial Sequence
  Cyclic GFR-binding peptide
  MOD_RES (27)..(27): Xaa is C or S
TSNITMQIMDNGRVLLLGEMSMIVEEX

SEQ ID NO: 90315 - protein, 41 aa, Artificial Sequence; identical to SEQ ID NO: 36316
  Cyclic GFR-binding peptide
  MOD_RES (5)..(6)..(38)..(40): Xaa is C or S

SEQ ID NO: 90316 - protein, 31 aa, Artificial Sequence
  Cyclic GFR-binding peptide
  MOD_RES (4)..(5): Xaa is C or S
ASPXXVSQDLSNITIQIMIGKTPKILGEMSM

SEQ ID NO: 90317 - protein, 39 aa, Artificial Sequence; identical to SEQ ID NO: 36319
  Cyclic GFR-binding peptide
  MOD_RES (4)..(5)..(37)..(39): Xaa is C or S

SEQ ID NO: 90318 - protein, 40 aa, Artificial Sequence; identical to SEQ ID NO: 36324
  Cyclic GFR-binding peptide
  MOD_RES (4)..(5)..(37)..(39): Xaa is C or S

SEQ ID NO: 90319 - protein, 32 aa, Artificial Sequence; identical to SEQ ID NO: 36325
  Cyclic GFR-binding peptide
  MOD_RES (1)..(1): Xaa is C or S

SEQ ID NO: 90320 - protein, 24 aa, Artificial Sequence
  Cyclic GFR-binding peptide
SNITIQIMIGKTPKILGEMSMIVK

SEQ ID NO: 90321 - protein, 37 aa, Artificial Sequence; identical to SEQ ID NO: 36326
  Cyclic GFR-binding peptide
  MOD_RES (4)..(5)..(37): Xaa is C or S

SEQ ID NO: 90322 - protein, 25 aa, Artificial Sequence
  Cyclic GFR-binding peptide
SQDLSNITIQIMIGKTPKILGEMSM

SEQ ID NO: 90323 - protein, 30 aa, Artificial Sequence
  Cyclic GFR-binding peptide
  MOD_RES (4)..(5): Xaa is C or S
PKPXXAPTKLSNITVQIMDDSSNVILGEMS

SEQ ID NO: 90324 - protein, 37 aa, Artificial Sequence; identical to SEQ ID NO: 36332
  Cyclic GFR-binding peptide
  MOD_RES (2)..(3)..(35)..(37): Xaa is C or S

SEQ ID NO: 90325 - protein, 32 aa, Artificial Sequence
  Cyclic GFR-binding peptide
  MOD_RES (3)..(4): Xaa is C or S
ASXXVPARLSNITIQIMDAANNVVIGEMSDMV

SEQ ID NO: 90326 - protein, 35 aa, Artificial Sequence; identical to SEQ ID NO: 36333
  Cyclic GFR-binding peptide
  MOD_RES (1)..(2)..(34): Xaa is C or S

SEQ ID NO: 90327 - protein, 33 aa, Artificial Sequence
  Cyclic GFR-binding peptide
  MOD_RES (31)..(33): Xaa is C or S
PARLSNITIQIMDAANNVVIGEMSDMVVEAXGX

SEQ ID NO: 90328 - protein, 35 aa, Artificial Sequence; identical to SEQ ID NO: 36335
  Cyclic GFR-binding peptide
  MOD_RES (1)..(32)..(34): Xaa is C or S

SEQ ID NO: 90329 - protein, 26 aa, Artificial Sequence
  Cyclic GFR-binding peptide
  MOD_RES (1)..(1): Xaa is C or S
XAPVKTSNITMQIMDNGRVLLIGEMS

SEQ ID NO: 90330 - protein, 33 aa, Artificial Sequence; identical to SEQ ID NO: 36337
  Cyclic GFR-binding peptide
  MOD_RES (1)..(2): Xaa is C or S

SEQ ID NO: 90331 - protein, 21 aa, Artificial Sequence
  Cyclic GFR-binding peptide
SNITMQIMDNGRVLLIGEMSM

SEQ ID NO: 90332 - protein, 28 aa, Artificial Sequence
  Cyclic GFR-binding peptide
PQALSNITIQIMVGRKPKVLGEMSMIVR

SEQ ID NO: 90333 - protein, 34 aa, Artificial Sequence; identical to SEQ ID NO: 36338
  Cyclic GFR-binding peptide
  MOD_RES (3)..(4): Xaa is C or S

SEQ ID NO: 90334 - protein, 39 aa, Artificial Sequence; identical to SEQ ID NO: 36340
  Cyclic GFR-binding peptide
  MOD_RES (4)..(5)..(36)..(38): Xaa is C or S

SEQ ID NO: 90335 - protein, 30 aa, Artificial Sequence
  Cyclic GFR-binding peptide
  MOD_RES (28)..(30): Xaa is C or S
LSNITVQIMDDSSNVILGEMSNMVVRSXGX

SEQ ID NO: 90336 - protein, 34 aa, Artificial Sequence
  Cyclic GFR-binding peptide
  MOD_RES (6)..(7): Xaa is C or S
STPPTXXVPTRLSNITIQIMDSANNVVLGEMSDM

SEQ ID NO: 90337 - protein, 29 aa, Artificial Sequence
  Cyclic GFR-binding peptide
PQDLSNITIQIMVGRTPKVLGEMSMVVKS

SEQ ID NO: 90338 - protein, 29 aa, Artificial Sequence
  Cyclic GFR-binding peptide
  MOD_RES (27)..(29): Xaa is C or S
TSNITMQIMDNGRVLLIGEMSMIVEEXGX

SEQ ID NO: 90339 - protein, 29 aa, Artificial Sequence
  Cyclic GFR-binding peptide
  MOD_RES (1)..(2): Xaa is C or S
XXVPQALSNITIQIMVGRKPKVLGEMSMI

SEQ ID NO: 90340 - protein, 26 aa, Artificial Sequence
  Cyclic GFR-binding peptide
SNITIQIMDAANNVVLGEMSDMVVEA

SEQ ID NO: 90341 - protein, 31 aa, Artificial Sequence
  Cyclic GFR-binding peptide
  MOD_RES (4)..(5): Xaa is C or S
PPTXXVPTRLSNITIQIMDSANNVVIGEMSD

SEQ ID NO: 90342 - protein, 30 aa, Artificial Sequence
  Cyclic GFR-binding peptide
  MOD_RES (1)..(2): Xaa is C or S
XXAPTKLSNITVQIMDDSSNVILGEMSNMV

SEQ ID NO: 90343 - protein, 30 aa, Artificial Sequence
  Cyclic GFR-binding peptide
  MOD_RES (28)..(30): Xaa is C or S
DLSNITIQIMVGRTPKVLGEMSMVVKSXKX

SEQ ID NO: 90344 - protein, 36 aa, Artificial Sequence; identical to SEQ ID NO: 36345
  Cyclic GFR-binding peptide
  MOD_RES (1)..(33)..(35): Xaa is C or S

SEQ ID NO: 90345 - protein, 32 aa, Artificial Sequence; identical to SEQ ID NO: 36346
  Cyclic GFR-binding peptide
  MOD_RES (1)..(2): Xaa is C or S

SEQ ID NO: 90346 - protein, 37 aa, Artificial Sequence; identical to SEQ ID NO: 36349
  Cyclic GFR-binding peptide
  MOD_RES (6)..(7): Xaa is C or S

SEQ ID NO: 90347 - protein, 32 aa, Artificial Sequence
  Cyclic GFR-binding peptide
  MOD_RES (6)..(7): Xaa is C or S
GSAGPXXTPTKMSNITMQIMNDKQQIIIGEMS

SEQ ID NO: 90348 - protein, 36 aa, Artificial Sequence; identical to SEQ ID NO: 36355
  Cyclic GFR-binding peptide
  MOD_RES (4)..(5): Xaa is C or S

SEQ ID NO: 90349 - protein, 33 aa, Artificial Sequence; identical to SEQ ID NO: 36357
  Cyclic GFR-binding peptide
  MOD_RES (32)..(32): Xaa is C or S

SEQ ID NO: 90350 - protein, 32 aa, Artificial Sequence; identical to SEQ ID NO: 36358
  Cyclic GFR-binding peptide
  MOD_RES (31)..(31): Xaa is C or S

SEQ ID NO: 90351 - protein, 34 aa, Artificial Sequence; identical to SEQ ID NO: 36359
  Cyclic GFR-binding peptide
  MOD_RES (3)..(4): Xaa is C or S

SEQ ID NO: 90352 - protein, 25 aa, Artificial Sequence
  Cyclic GFR-binding peptide
MSNITMQIMNDKQQIIIGEMSGMVV

SEQ ID NO: 90353 - protein, 38 aa, Artificial Sequence; identical to SEQ ID NO: 36366
  Cyclic GFR-binding peptide
  MOD_RES (2)..(3)..(35)..(37): Xaa is C or S

SEQ ID NO: 90354 - protein, 24 aa, Artificial Sequence
  Cyclic GFR-binding peptide
LSNITVQIMDDSSNVILGEMSNMV

SEQ ID NO: 90355 - protein, 26 aa, Artificial Sequence
  Cyclic GFR-binding peptide
PQDLSNITIQIMVGRTPKVLGEMSMV

SEQ ID NO: 90356 - protein, 26 aa, Artificial Sequence
  Cyclic GFR-binding peptide
  MOD_RES (26)..(26): Xaa is C or S
SNITMQIMDNGRVLLIGEMSMIVEEX

SEQ ID NO: 90357 - protein, 31 aa, Artificial Sequence
  Cyclic GFR-binding peptide
  MOD_RES (1)..(2): Xaa is C or S
XXVPQDLSNITIQIMVGRTPKVLGEMSMVVK

SEQ ID NO: 90358 - protein, 28 aa, Artificial Sequence
  Cyclic GFR-binding peptide
  MOD_RES (2)..(3): Xaa is C or S
PXXVSQDLSNITIQIMIGKTPKILGEMS

SEQ ID NO: 90359 - protein, 36 aa, Artificial Sequence; identical to SEQ ID NO: 36368
  Cyclic GFR-binding peptide
  MOD_RES (4)..(5): Xaa is C or S

SEQ ID NO: 90360 - protein, 31 aa, Artificial Sequence; identical to SEQ ID NO: 36375
  Cyclic GFR-binding peptide
  MOD_RES (1)..(1): Xaa is C or S

SEQ ID NO: 90361 - protein, 37 aa, Artificial Sequence; identical to SEQ ID NO: 36376
  Cyclic GFR-binding peptide
  MOD_RES (6)..(7): Xaa is C or S

SEQ ID NO: 90362 - protein, 30 aa, Artificial Sequence
  Cyclic GFR-binding peptide
  MOD_RES (2)..(3): Xaa is C or S
TXXVPTRLSNITIQIMDSANNVVLGEMSDM

SEQ ID NO: 90363 - protein, 21 aa, Artificial Sequence
  Cyclic GFR-binding peptide
SNITMQIMNDKQQIILGEMSG

SEQ ID NO: 90364 - protein, 28 aa, Artificial Sequence
  Cyclic GFR-binding peptide
  MOD_RES (26)..(28): Xaa is C or S
SNITIQIMIGKTPKILGEMSMIVKSXKX

SEQ ID NO: 90365 - protein, 29 aa, Artificial Sequence
  Cyclic GFR-binding peptide
  MOD_RES (28)..(28): Xaa is C or S
ALSNITIQIMVGRKPKVLGEMSMIVRSXK

SEQ ID NO: 90366 - protein, 25 aa, Artificial Sequence
  Cyclic GFR-binding peptide
APVKTSNITMQIMDNGRVLLIGEMS

SEQ ID NO: 90367 - protein, 29 aa, Artificial Sequence
  Cyclic GFR-binding peptide
VPTRLSNITIQIMDSANNVVLGEMSDMVV

SEQ ID NO: 90368 - protein, 37 aa, Artificial Sequence; identical to SEQ ID NO: 36394
  Cyclic GFR-binding peptide
  MOD_RES (4)..(5)..(37): Xaa is C or S

SEQ ID NO: 90369 - protein, 34 aa, Artificial Sequence; identical to SEQ ID NO: 36395
  Cyclic GFR-binding peptide
  MOD_RES (1)..(33): Xaa is C or S

SEQ ID NO: 90370 - protein, 28 aa, Artificial Sequence
  Cyclic GFR-binding peptide
  MOD_RES (28)..(28): Xaa is C or S
ALSNITIQIMVGRKPKVLGEMSMIVRSX

SEQ ID NO: 90371 - protein, 20 aa, Artificial Sequence
  Cyclic GFR-binding peptide
SNITIQIMVGRKPKVLGEMS

SEQ ID NO: 90372 - protein, 35 aa, Artificial Sequence; identical to SEQ ID NO: 36400
  Cyclic GFR-binding peptide
  MOD_RES (2)..(3)..(35): Xaa is C or S

SEQ ID NO: 90373 - protein, 34 aa, Artificial Sequence
  Cyclic GFR-binding peptide
  MOD_RES (4)..(5): Xaa is C or S
PPTXXVPTRLSNITIQIMDSANNVVLGEMSDMVV

SEQ ID NO: 90374 - protein, 33 aa, Artificial Sequence
  Cyclic GFR-binding peptide
  MOD_RES (4)..(5): Xaa is C or S
PKPXXAPTKLSNITVQIMDDSSNVILGEMSNMV

SEQ ID NO: 90375 - protein, 24 aa, Artificial Sequence
  Cyclic GFR-binding peptide
VKTSNITMQIMDNGRVLLLGEMSM

SEQ ID NO: 90376 - protein, 36 aa, Artificial Sequence; identical to SEQ ID NO: 36406
  Cyclic GFR-binding peptide
  MOD_RES (4)..(5): Xaa is C or S

SEQ ID NO: 90377 - protein, 38 aa, Artificial Sequence; identical to SEQ ID NO: 36408
  Cyclic GFR-binding peptide
  MOD_RES (5)..(6)..(37): Xaa is C or S

SEQ ID NO: 90378 - protein, 29 aa, Artificial Sequence
  Cyclic GFR-binding peptide
VPQDLSNITIQIMVGRTPKVLGEMSMVVK

SEQ ID NO: 90379 - protein, 31 aa, Artificial Sequence
  Cyclic GFR-binding peptide
  MOD_RES (5)..(6): Xaa is C or S
APASXXVPARLSNITIQIMDAANNVVIGEMS

SEQ ID NO: 90380 - protein, 24 aa, Artificial Sequence
  Cyclic GFR-binding peptide
PTKLSNITVQIMDDSSNVILGEMS

SEQ ID NO: 90381 - protein, 33 aa, Artificial Sequence
  Cyclic GFR-binding peptide
  MOD_RES (30)..(32): Xaa is C or S
PVKTSNITMQIMDNGRVLLIGEMSMIVEEXGXL

SEQ ID NO: 90382 - protein, 34 aa, Artificial Sequence
  Cyclic GFR-binding peptide
  MOD_RES (5)..(6): Xaa is C or S
SAGPXXTPTKMSNITMQIMNDKQQIILGEMSGMV

SEQ ID NO: 90383 - protein, 28 aa, Artificial Sequence
  Cyclic GFR-binding peptide
  MOD_RES (1)..(1): Xaa is C or S
XTPTKMSNITMQIMNDKQQIIIGEMSGM

SEQ ID NO: 90384 - protein, 31 aa, Artificial Sequence
  Cyclic GFR-binding peptide
  MOD_RES (5)..(6): Xaa is C or S
SAAPXXVPQALSNITIQIMVGRKPKVLGEMS

SEQ ID NO: 90385 - protein, 27 aa, Artificial Sequence
  Cyclic GFR-binding peptide
VPARLSNITIQIMDAANNVVLGEMSDM

SEQ ID NO: 90386 - protein, 37 aa, Artificial Sequence; identical to SEQ ID NO: 36418
  Cyclic GFR-binding peptide
  MOD_RES (1)..(2)..(34)..(36): Xaa is C or S

SEQ ID NO: 90387 - protein, 25 aa, Artificial Sequence
  Cyclic GFR-binding peptide
PVKTSNITMQIMDNGRVLLLGEMSM

SEQ ID NO: 90388 - protein, 25 aa, Artificial Sequence
  Cyclic GFR-binding peptide
TRLSNITIQIMDSANNVVIGEMSDM

SEQ ID NO: 90389 - protein, 29 aa, Artificial Sequence
  Cyclic GFR-binding peptide
  MOD_RES (28)..(28): Xaa is C or S
LSNITVQIMDDSSNVILGEMSNMVVRSXG

SEQ ID NO: 90390 - protein, 36 aa, Artificial Sequence; identical to SEQ ID NO: 36424
  Cyclic GFR-binding peptide
  MOD_RES (5)..(6): Xaa is C or S

SEQ ID NO: 90391 - protein, 32 aa, Artificial Sequence
  Cyclic GFR-binding peptide
  MOD_RES (2)..(3): Xaa is C or S
TXXAPVKTSNITMQIMDNGRVLLIGEMSMIVE

SEQ ID NO: 90392 - protein, 33 aa, Artificial Sequence; identical to SEQ ID NO: 36428
  Cyclic GFR-binding peptide
  MOD_RES (1)..(2): Xaa is C or S

SEQ ID NO: 90393 - protein, 40 aa, Artificial Sequence; identical to SEQ ID NO: 36429
  Cyclic GFR-binding peptide
  MOD_RES (6)..(7)..(38)..(40): Xaa is C or S

SEQ ID NO: 90394 - protein, 31 aa, Artificial Sequence
  Cyclic GFR-binding peptide
  MOD_RES (29)..(31): Xaa is C or S
VKTSNITMQIMDNGRVLLLGEMSMIVEEXGX

SEQ ID NO: 90395 - protein, 30 aa, Artificial Sequence
  Cyclic GFR-binding peptide
PARLSNITIQIMDAANNVVLGEMSDMVVEA

SEQ ID NO: 90396 - protein, 35 aa, Artificial Sequence; identical to SEQ ID NO: 36430
  Cyclic GFR-binding peptide
  MOD_RES (32)..(34): Xaa is C or S

SEQ ID NO: 90397 - protein, 31 aa, Artificial Sequence
  Cyclic GFR-binding peptide
  MOD_RES (1)..(2): Xaa is C or S
XXTPTKMSNITMQIMNDKQQIIIGEMSGMVV

SEQ ID NO: 90398 - protein, 34 aa, Artificial Sequence; identical to SEQ ID NO: 36435
  Cyclic GFR-binding peptide
  MOD_RES (3)..(4): Xaa is C or S

SEQ ID NO: 90399 - protein, 27 aa, Artificial Sequence
  Cyclic GFR-binding peptide
VKTSNITMQIMDNGRVLLIGEMSMIVE

SEQ ID NO: 90400 - protein, 29 aa, Artificial Sequence
  Cyclic GFR-binding peptide
TKMSNITMQIMNDKQQIILGEMSGMVVDR

SEQ ID NO: 90401 - protein, 27 aa, Artificial Sequence
  Cyclic GFR-binding peptide
RLSNITIQIMDAANNVVIGEMSDMVVE

SEQ ID NO: 90402 - protein, 33 aa, Artificial Sequence
  Cyclic GFR-binding peptide
  MOD_RES (30)..(32): Xaa is C or S
TKMSNITMQIMNDKQQIILGEMSGMVVDRXGXS

SEQ ID NO: 90403 - protein, 31 aa, Artificial Sequence; identical to SEQ ID NO: 36443
  Cyclic GFR-binding peptide
  MOD_RES (1)..(1): Xaa is C or S

SEQ ID NO: 90404 - protein, 27 aa, Artificial Sequence
  Cyclic GFR-binding peptide
VPTRLSNITIQIMDSANNVVIGEMSDM

SEQ ID NO: 90405 - protein, 30 aa, Artificial Sequence
  Cyclic GFR-binding peptide
  MOD_RES (2)..(3): Xaa is C or S
TXXAPVKTSNITMQIMDNGRVLLIGEMSMI

SEQ ID NO: 90406 - protein, 36 aa, Artificial Sequence; identical to SEQ ID NO: 36448
  Cyclic GFR-binding peptide
  MOD_RES (1)..(33)..(35): Xaa is C or S

SEQ ID NO: 90407 - protein, 33 aa, Artificial Sequence
  Cyclic GFR-binding peptide
  MOD_RES (5)..(6): Xaa is C or S
VPKPXXAPTKLSNITVQIMDDSSNVILGEMSNM

SEQ ID NO: 90408 - protein, 36 aa, Artificial Sequence; identical to SEQ ID NO: 36449
  Cyclic GFR-binding peptide
  MOD_RES (1)..(2)..(34)..(36): Xaa is C or S

SEQ ID NO: 90409 - protein, 34 aa, Artificial Sequence
  Cyclic GFR-binding peptide
  MOD_RES (5)..(6): Xaa is C or S
SASPXXVSQDLSNITIQIMIGKTPKILGEMSMIV

SEQ ID NO: 90410 - protein, 30 aa, Artificial Sequence
  Cyclic GFR-binding peptide
  MOD_RES (1)..(1): Xaa is C or S
XVPQDLSNITIQIMVGRTPKVLGEMSMVVK

SEQ ID NO: 90411 - protein, 35 aa, Artificial Sequence; identical to SEQ ID NO: 36453
  Cyclic GFR-binding peptide
  MOD_RES (1)..(33)..(35): Xaa is C or S

SEQ ID NO: 90412 - protein, 36 aa, Artificial Sequence; identical to SEQ ID NO: 36455
  Cyclic GFR-binding peptide
  MOD_RES (2)..(3)..(34)..(36): Xaa is C or S

SEQ ID NO: 90413 - protein, 38 aa, Artificial Sequence; identical to SEQ ID NO: 36456
  Cyclic GFR-binding peptide
  MOD_RES (4)..(5)..(37): Xaa is C or S

SEQ ID NO: 90414 - protein, 33 aa, Artificial Sequence; identical to SEQ ID NO: 36457
  Cyclic GFR-binding peptide
  MOD_RES (31)..(33): Xaa is C or S

SEQ ID NO: 90415 - protein, 36 aa, Artificial Sequence; identical to SEQ ID NO: 36458
  Cyclic GFR-binding peptide
  MOD_RES (5)..(6): Xaa is C or S

SEQ ID NO: 90416 - protein, 29 aa, Artificial Sequence
  Cyclic GFR-binding peptide
  MOD_RES (2)..(3): Xaa is C or S
PXXVPQALSNITIQIMVGRKPKVLGEMSM

SEQ ID NO: 90417 - protein, 29 aa, Artificial Sequence
  Cyclic GFR-binding peptide
  MOD_RES (3)..(4): Xaa is C or S
SPXXVSQDLSNITIQIMIGKTPKILGEMS

SEQ ID NO: 90418 - protein, 23 aa, Artificial Sequence
  Cyclic GFR-binding peptide
LSNITVQIMDDSSNVILGEMSNM

SEQ ID NO: 90419 - protein, 36 aa, Artificial Sequence
  Cyclic GFR-binding peptide
  MOD_RES (6)..(7): Xaa is C or S
AAPASXXVPARLSNITIQIMDAANNVVLGEMSDMVV

SEQ ID NO: 90420 - protein, 40 aa, Artificial Sequence; identical to SEQ ID NO: 36466
  Cyclic GFR-binding peptide
  MOD_RES (6)..(7)..(39): Xaa is C or S

SEQ ID NO: 90421 - protein, 30 aa, Artificial Sequence
  Cyclic GFR-binding peptide
PTRLSNITIQIMDSANNVVIGEMSDMVVES

SEQ ID NO: 90422 - protein, 39 aa, Artificial Sequence; identical to SEQ ID NO: 36469
  Cyclic GFR-binding peptide
  MOD_RES (6)..(7)..(38): Xaa is C or S

SEQ ID NO: 90423 - protein, 20 aa, Artificial Sequence
  Cyclic GFR-binding peptide
SNITIQIMDSANNVVLGEMS

SEQ ID NO: 90424 - protein, 37 aa, Artificial Sequence; identical to SEQ ID NO: 36470
  Cyclic GFR-binding peptide
  MOD_RES (6)..(7): Xaa is C or S

SEQ ID NO: 90425 - protein, 36 aa, Artificial Sequence; identical to SEQ ID NO: 36472
  Cyclic GFR-binding peptide
  MOD_RES (1)..(2)..(34)..(36): Xaa is C or S

SEQ ID NO: 90426 - protein, 42 aa, Artificial Sequence; identical to SEQ ID NO: 36474
  Cyclic GFR-binding peptide
  MOD_RES (6)..(7)..(39)..(41): Xaa is C or S

SEQ ID NO: 90427 - protein, 28 aa, Artificial Sequence
  Cyclic GFR-binding peptide
TPTKMSNITMQIMNDKQQIIIGEMSGMV

SEQ ID NO: 90428 - protein, 22 aa, Artificial Sequence
  Cyclic GFR-binding peptide
RLSNITIQIMDAANNVVIGEMS

SEQ ID NO: 90429 - protein, 31 aa, Artificial Sequence
  Cyclic GFR-binding peptide
  MOD_RES (3)..(4): Xaa is C or S
STXXAPVKTSNITMQIMDNGRVLLIGEMSMI

SEQ ID NO: 90430 - protein, 32 aa, Artificial Sequence
  Cyclic GFR-binding peptide
  MOD_RES (2)..(3): Xaa is C or S
PXXTPTKMSNITMQIMNDKQQIILGEMSGMVV

SEQ ID NO: 90431 - protein, 38 aa, Artificial Sequence; identical to SEQ ID NO: 36496
  Cyclic GFR-binding peptide
  MOD_RES (5)..(6)..(38): Xaa is C or S

SEQ ID NO: 90432 - protein, 39 aa, Artificial Sequence; identical to SEQ ID NO: 36500
  Cyclic GFR-binding peptide
  MOD_RES (4)..(5)..(36)..(38): Xaa is C or S

SEQ ID NO: 90433 - protein, 34 aa, Artificial Sequence
  Cyclic GFR-binding peptide
  MOD_RES (6)..(7): Xaa is C or S
RVPSTXXAPVKTSNITMQIMDNGRVLLIGEMSMI

SEQ ID NO: 90434 - protein, 27 aa, Artificial Sequence
  Cyclic GFR-binding peptide
  MOD_RES (1)..(2): Xaa is C or S
XXAPTKLSNITVQIMDDSSNVILGEMS

SEQ ID NO: 90435 - protein, 22 aa, Artificial Sequence
  Cyclic GFR-binding peptide
RLSNITIQIMDSANNVVLGEMS

SEQ ID NO: 90436 - protein, 30 aa, Artificial Sequence; identical to SEQ ID NO: 36503
  Cyclic GFR-binding peptide

SEQ ID NO: 90437 - protein, 31 aa, Artificial Sequence
  Cyclic GFR-binding peptide
  MOD_RES (5)..(6): Xaa is C or S
VPKPXXAPTKLSNITVQIMDDSSNVILGEMS

SEQ ID NO: 90438 - protein, 37 aa, Artificial Sequence; identical to SEQ ID NO: 36504
  Cyclic GFR-binding peptide
  MOD_RES (4)..(5)..(37): Xaa is C or S

SEQ ID NO: 90439 - protein, 41 aa, Artificial Sequence; identical to SEQ ID NO: 36506
  Cyclic GFR-binding peptide
  MOD_RES (6)..(7)..(38)..(40): Xaa is C or S

SEQ ID NO: 90440 - protein, 35 aa, Artificial Sequence; identical to SEQ ID NO: 36509
  Cyclic GFR-binding peptide
  MOD_RES (2)..(3)..(35): Xaa is C or S

SEQ ID NO: 90441 - protein, 39 aa, Artificial Sequence; identical to SEQ ID NO: 36508
  Cyclic GFR-binding peptide
  MOD_RES (5)..(6)..(37)..(39): Xaa is C or S

SEQ ID NO: 90442 - protein, 25 aa, Artificial Sequence
  Cyclic GFR-binding peptide
VPQALSNITIQIMVGRKPKVLGEMS

SEQ ID NO: 90443 - protein, 35 aa, Artificial Sequence
  Cyclic GFR-binding peptide
  MOD_RES (5)..(6): Xaa is C or S
TPPTXXVPTRLSNITIQIMDSANNVVIGEMSDMVV

SEQ ID NO: 90444 - protein, 40 aa, Artificial Sequence; identical to SEQ ID NO: 36511
  Cyclic GFR-binding peptide
  MOD_RES (5)..(6)..(37)..(39): Xaa is C or S

SEQ ID NO: 90445 - protein, 28 aa, Artificial Sequence
  Cyclic GFR-binding peptide
RLSNITIQIMDSANNVVIGEMSDMVVES

SEQ ID NO: 90446 - protein, 29 aa, Artificial Sequence
  Cyclic GFR-binding peptide
  MOD_RES (27)..(29): Xaa is C or S
SNITMQIMNDKQQIIIGEMSGMVVDRXGX

SEQ ID NO: 90447 - protein, 30 aa, Artificial Sequence
  Cyclic GFR-binding peptide
  MOD_RES (4)..(5): Xaa is C or S
ASPXXVPQDLSNITIQIMVGRTPKVLGEMS

SEQ ID NO: 90448 - protein, 32 aa, Artificial Sequence
  Cyclic GFR-binding peptide
  MOD_RES (6)..(7): Xaa is C or S
HVPKPXXAPTKLSNITVQIMDDSSNVILGEMS

SEQ ID NO: 90449 - protein, 33 aa, Artificial Sequence
  Cyclic GFR-binding peptide
  MOD_RES (4)..(5): Xaa is C or S
AGPXXTPTKMSNITMQIMNDKQQIIIGEMSGMV

SEQ ID NO: 90450 - protein, 34 aa, Artificial Sequence; identical to SEQ ID NO: 36516
  Cyclic GFR-binding peptide
  MOD_RES (2)..(3): Xaa is C or S

SEQ ID NO: 90451 - protein, 35 aa, Artificial Sequence; identical to SEQ ID NO: 36518
  Cyclic GFR-binding peptide
  MOD_RES (32)..(34): Xaa is C or S

SEQ ID NO: 90452 - protein, 34 aa, Artificial Sequence; identical to SEQ ID NO: 36519
  Cyclic GFR-binding peptide
  MOD_RES (1)..(2)..(34): Xaa is C or S

SEQ ID NO: 90453 - protein, 30 aa, Artificial Sequence
  Cyclic GFR-binding peptide
  MOD_RES (4)..(5): Xaa is C or S
AAPXXVPQALSNITIQIMVGRKPKVLGEMS

SEQ ID NO: 90454 - protein, 29 aa, Artificial Sequence
  Cyclic GFR-binding peptide
  MOD_RES (27)..(29): Xaa is C or S
LSNITIQIMIGKTPKILGEMSMIVKSXKX

SEQ ID NO: 90455 - protein, 35 aa, Artificial Sequence
  Cyclic GFR-binding peptide
  MOD_RES (5)..(6): Xaa is C or S
SASPXXVSQDLSNITIQIMIGKTPKILGEMSMIVK

SEQ ID NO: 90456 - protein, 38 aa, Artificial Sequence; identical to SEQ ID NO: 36523
  Cyclic GFR-binding peptide
  MOD_RES (3)..(4)..(36)..(38): Xaa is C or S

SEQ ID NO: 90457 - protein, 31 aa, Artificial Sequence
  Cyclic GFR-binding peptide
  MOD_RES (29)..(31): Xaa is C or S
RLSNITIQIMDAANNVVLGEMSDMVVEAXGX

SEQ ID NO: 90458 - protein, 28 aa, Artificial Sequence
  Cyclic GFR-binding peptide
  MOD_RES (1)..(1): Xaa is C or S
XVPQALSNITIQIMVGRKPKVLGEMSMI

SEQ ID NO: 90459 - protein, 29 aa, Artificial Sequence
  Cyclic GFR-binding peptide
  MOD_RES (1)..(1): Xaa is C or S
XVPQDLSNITIQIMVGRTPKVLGEMSMVV

SEQ ID NO: 90460 - protein, 34 aa, Artificial Sequence; identical to SEQ ID NO: 36530
  Cyclic GFR-binding peptide
  MOD_RES (2)..(3): Xaa is C or S

SEQ ID NO: 90461 - protein, 26 aa, Artificial Sequence
  Cyclic GFR-binding peptide
SNITIQIMDAANNVVIGEMSDMVVEA

SEQ ID NO: 90462 - protein, 34 aa, Artificial Sequence
  Cyclic GFR-binding peptide
  MOD_RES (6)..(7): Xaa is C or S
HVPKPXXAPTKLSNITVQIMDDSSNVILGEMSNM

SEQ ID NO: 90463 - protein, 29 aa, Artificial Sequence
  Cyclic GFR-binding peptide
ARLSNITIQIMDAANNVVIGEMSDMVVEA

SEQ ID NO: 90464 - protein, 32 aa, Artificial Sequence
  Cyclic GFR-binding peptide
  MOD_RES (3)..(4): Xaa is C or S
PTXXVPTRLSNITIQIMDSANNVVIGEMSDMV

SEQ ID NO: 90465 - protein, 32 aa, Artificial Sequence
  Cyclic GFR-binding peptide
  MOD_RES (6)..(7): Xaa is C or S
STPPTXXVPTRLSNITIQIMDSANNVVIGEMS

SEQ ID NO: 90466 - protein, 26 aa, Artificial Sequence
  Cyclic GFR-binding peptide
KTSNITMQIMDNGRVLLIGEMSMIVE

SEQ ID NO: 90467 - protein, 27 aa, Artificial Sequence
  Cyclic GFR-binding peptide
  MOD_RES (1)..(1): Xaa is C or S
XVPTRLSNITIQIMDSANNVVIGEMSD

SEQ ID NO: 90468 - protein, 28 aa, Artificial Sequence
  Cyclic GFR-binding peptide
QDLSNITIQIMVGRTPKVLGEMSMVVKS

SEQ ID NO: 90469 - protein, 32 aa, Artificial Sequence
  Cyclic GFR-binding peptide
  MOD_RES (5)..(6): Xaa is C or S
VPSTXXAPVKTSNITMQIMDNGRVLLLGEMSM

SEQ ID NO: 90470 - protein, 33 aa, Artificial Sequence; identical to SEQ ID NO: 36548
  Cyclic GFR-binding peptide
  MOD_RES (32)..(32): Xaa is C or S

SEQ ID NO: 90471 - protein, 24 aa, Artificial Sequence
  Cyclic GFR-binding peptide
RLSNITIQIMDAANNVVLGEMSDM

SEQ ID NO: 90472 - protein, 32 aa, Artificial Sequence; identical to SEQ ID NO: 36551
  Cyclic GFR-binding peptide
  MOD_RES (1)..(2): Xaa is C or S

SEQ ID NO: 90473 - protein, 29 aa, Artificial Sequence
  Cyclic GFR-binding peptide
  MOD_RES (26)..(28): Xaa is C or S
SNITIQIMIGKTPKILGEMSMIVKSXKXS

SEQ ID NO: 90474 - protein, 34 aa, Artificial Sequence; identical to SEQ ID NO: 36553
  Cyclic GFR-binding peptide
  MOD_RES (31)..(33): Xaa is C or S

SEQ ID NO: 90475 - protein, 26 aa, Artificial Sequence
  Cyclic GFR-binding peptide
VPTRLSNITIQIMDSANNVVLGEMSD

SEQ ID NO: 90476 - protein, 33 aa, Artificial Sequence
  Cyclic GFR-binding peptide
  MOD_RES (30)..(32): Xaa is C or S
TRLSNITIQIMDSANNVVIGEMSDMVVESXGXR

SEQ ID NO: 90477 - protein, 33 aa, Artificial Sequence
  Cyclic GFR-binding peptide
  MOD_RES (4)..(5): Xaa is C or S
AAPXXVPQALSNITIQIMVGRKPKVLGEMSMIV

SEQ ID NO: 90478 - protein, 40 aa, Artificial Sequence; identical to SEQ ID NO: 36558
  Cyclic GFR-binding peptide
  MOD_RES (6)..(7)..(39): Xaa is C or S

SEQ ID NO: 90479 - protein, 31 aa, Artificial Sequence
  Cyclic GFR-binding peptide
  MOD_RES (2)..(3): Xaa is C or S
SXXVPARLSNITIQIMDAANNVVIGEMSDMV

SEQ ID NO: 90480 - protein, 35 aa, Artificial Sequence
  Cyclic GFR-binding peptide
  MOD_RES (6)..(7): Xaa is C or S
STPPTXXVPTRLSNITIQIMDSANNVVLGEMSDMV

SEQ ID NO: 90481 - protein, 23 aa, Artificial Sequence
  Cyclic GFR-binding peptide
TKLSNITVQIMDDSSNVILGEMS

SEQ ID NO: 90482 - protein, 42 aa, Artificial Sequence; identical to SEQ ID NO: 36563
  Cyclic GFR-binding peptide
  MOD_RES (6)..(7)..(39)..(41): Xaa is C or S

SEQ ID NO: 90483 - protein, 29 aa, Artificial Sequence
  Cyclic GFR-binding peptide
  MOD_RES (28)..(28): Xaa is C or S
DLSNITIQIMIGKTPKILGEMSMIVKSXK

SEQ ID NO: 90484 - protein, 29 aa, Artificial Sequence
  Cyclic GFR-binding peptide
  MOD_RES (1)..(2): Xaa is C or S
XXVPTRLSNITIQIMDSANNVVLGEMSDM

SEQ ID NO: 90485 - protein, 29 aa, Artificial Sequence
  Cyclic GFR-binding peptide
  MOD_RES (28)..(28): Xaa is C or S
MSNITMQIMNDKQQIIIGEMSGMVVDRXG

SEQ ID NO: 90486 - protein, 34 aa, Artificial Sequence; identical to SEQ ID NO: 36575
  Cyclic GFR-binding peptide
  MOD_RES (2)..(3): Xaa is C or S

SEQ ID NO: 90487 - protein, 39 aa, Artificial Sequence; identical to SEQ ID NO: 36577
  Cyclic GFR-binding peptide
  MOD_RES (3)..(4)..(36)..(38): Xaa is C or S

SEQ ID NO: 90488 - protein, 40 aa, Artificial Sequence; identical to SEQ ID NO: 36578
  Cyclic GFR-binding peptide
  MOD_RES (6)..(7)..(39): Xaa is C or S

SEQ ID NO: 90489 - protein, 21 aa, Artificial Sequence
  Cyclic GFR-binding peptide
SNITVQIMDDSSNVILGEMSN

SEQ ID NO: 90490 - protein, 36 aa, Artificial Sequence; identical to SEQ ID NO: 36581
  Cyclic GFR-binding peptide
  MOD_RES (2)..(3)..(34)..(36): Xaa is C or S

SEQ ID NO: 90491 - protein, 29 aa, Artificial Sequence
  Cyclic GFR-binding peptide
  MOD_RES (3)..(4): Xaa is C or S
PTXXVPTRLSNITIQIMDSANNVVLGEMS

SEQ ID NO: 90492 - protein, 37 aa, Artificial Sequence; identical to SEQ ID NO: 36583
  Cyclic GFR-binding peptide
  MOD_RES (1)..(2)..(34)..(36): Xaa is C or S

SEQ ID NO: 90493 - protein, 27 aa, Artificial Sequence
  Cyclic GFR-binding peptide
  MOD_RES (27)..(27): Xaa is C or S
LSNITIQIMVGRKPKVLGEMSMIVRSX

SEQ ID NO: 90494 - protein, 26 aa, Artificial Sequence
  Cyclic GFR-binding peptide
ARLSNITIQIMDAANNVVIGEMSDMV

SEQ ID NO: 90495 - protein, 37 aa, Artificial Sequence; identical to SEQ ID NO: 36584
  Cyclic GFR-binding peptide
  MOD_RES (1)..(2)..(34)..(36): Xaa is C or S

SEQ ID NO: 90496 - protein, 28 aa, Artificial Sequence
  Cyclic GFR-binding peptide
  MOD_RES (2)..(3): Xaa is C or S
TXXAPVKTSNITMQIMDNGRVLLLGEMS

SEQ ID NO: 90497 - protein, 37 aa, Artificial Sequence; identical to SEQ ID NO: 36591
  Cyclic GFR-binding peptide
  MOD_RES (6)..(7): Xaa is C or S

SEQ ID NO: 90498 - protein, 35 aa, Artificial Sequence
  Cyclic GFR-binding peptide
  MOD_RES (6)..(7): Xaa is C or S
ASASPXXVSQDLSNITIQIMIGKTPKILGEMSMIV

SEQ ID NO: 90499 - protein, 39 aa, Artificial Sequence; identical to SEQ ID NO: 36595
  Cyclic GFR-binding peptide
  MOD_RES (4)..(5)..(37)..(39): Xaa is C or S

SEQ ID NO: 90500 - protein, 28 aa, Artificial Sequence
  Cyclic GFR-binding peptide
  MOD_RES (28)..(28): Xaa is C or S
LSNITVQIMDDSSNVILGEMSNMVVRSX

SEQ ID NO: 90501 - protein, 25 aa, Artificial Sequence
  Cyclic GFR-binding peptide
APTKLSNITVQIMDDSSNVILGEMS

SEQ ID NO: 90502 - protein, 23 aa, Artificial Sequence
  Cyclic GFR-binding peptide
LSNITIQIMDAANNVVIGEMSDM

SEQ ID NO: 90503 - protein, 23 aa, Artificial Sequence
  Cyclic GFR-binding peptide
SNITMQIMDNGRVLLLGEMSMIV

SEQ ID NO: 90504 - protein, 23 aa, Artificial Sequence
  Cyclic GFR-binding peptide
KTSNITMQIMDNGRVLLIGEMSM

SEQ ID NO: 90505 - protein, 30 aa, Artificial Sequence
  Cyclic GFR-binding peptide
  MOD_RES (1)..(1): Xaa is C or S
XTPTKMSNITMQIMNDKQQIILGEMSGMVV

SEQ ID NO: 90506 - protein, 31 aa, Artificial Sequence
  Cyclic GFR-binding peptide
  MOD_RES (1)..(2): Xaa is C or S
XXVPARLSNITIQIMDAANNVVLGEMSDMVV

SEQ ID NO: 90507 - protein, 33 aa, Artificial Sequence; identical to SEQ ID NO: 36598
  Cyclic GFR-binding peptide
  MOD_RES (2)..(3): Xaa is C or S

SEQ ID NO: 90508 - protein, 27 aa, Artificial Sequence
  Cyclic GFR-binding peptide
  MOD_RES (1)..(1): Xaa is C or S
XVPTRLSNITIQIMDSANNVVLGEMSD

SEQ ID NO: 90509 - protein, 30 aa, Artificial Sequence
  Cyclic GFR-binding peptide
  MOD_RES (29)..(29): Xaa is C or S
QALSNITIQIMVGRKPKVLGEMSMIVRSXK

SEQ ID NO: 90510 - protein, 33 aa, Artificial Sequence
  Cyclic GFR-binding peptide
  MOD_RES (30)..(32): Xaa is C or S
ARLSNITIQIMDAANNVVIGEMSDMVVEAXGXR

SEQ ID NO: 90511 - protein, 22 aa, Artificial Sequence
  Cyclic GFR-binding peptide
SNITIQIMIGKTPKILGEMSMI

SEQ ID NO: 90512 - protein, 28 aa, Artificial Sequence
  Cyclic GFR-binding peptide
APVKTSNITMQIMDNGRVLLLGEMSMIV

SEQ ID NO: 90513 - protein, 37 aa, Artificial Sequence; identical to SEQ ID NO: 36606
  Cyclic GFR-binding peptide
  MOD_RES (4)..(5)..(36): Xaa is C or S

SEQ ID NO: 90514 - protein, 21 aa, Artificial Sequence
  Cyclic GFR-binding peptide
LSNITIQIMVGRKPKVLGEMS

SEQ ID NO: 90515 - protein, 25 aa, Artificial Sequence
  Cyclic GFR-binding peptide
LSNITIQIMDAANNVVIGEMSDMVV

SEQ ID NO: 90516 - protein, 41 aa, Artificial Sequence; identical to SEQ ID NO: 36609
  Cyclic GFR-binding peptide
  MOD_RES (5)..(6)..(38)..(40): Xaa is C or S

SEQ ID NO: 90517 - protein, 35 aa, Artificial Sequence; identical to SEQ ID NO: 36610
  Cyclic GFR-binding peptide
  MOD_RES (3)..(4): Xaa is C or S

SEQ ID NO: 90518 - protein, 25 aa, Artificial Sequence
  Cyclic GFR-binding peptide
SNITMQIMDNGRVLLIGEMSMIVEE

SEQ ID NO: 90519 - protein, 29 aa, Artificial Sequence
  Cyclic GFR-binding peptide
  MOD_RES (3)..(4): Xaa is C or S
GPXXTPTKMSNITMQIMNDKQQIIIGEMS

SEQ ID NO: 90520 - protein, 26 aa, Artificial Sequence
  Cyclic GFR-binding peptide
LSNITIQIMVGRTPKVLGEMSMVVKS

SEQ ID NO: 90521 - protein, 24 aa, Artificial Sequence
  Cyclic GFR-binding peptide
LSNITIQIMIGKTPKILGEMSMIV

SEQ ID NO: 90522 - protein, 24 aa, Artificial Sequence
  Cyclic GFR-binding peptide
TKMSNITMQIMNDKQQIIIGEMSG

SEQ ID NO: 90523 - protein, 24 aa, Artificial Sequence
  Cyclic GFR-binding peptide
QDLSNITIQIMIGKTPKILGEMSM

SEQ ID NO: 90524 - protein, 31 aa, Artificial Sequence
  Cyclic GFR-binding peptide
  MOD_RES (28)..(30): Xaa is C or S
MSNITMQIMNDKQQIIIGEMSGMVVDRXGXS

SEQ ID NO: 90525 - protein, 33 aa, Artificial Sequence
  Cyclic GFR-binding peptide
  MOD_RES (4)..(5): Xaa is C or S
PASXXVPARLSNITIQIMDAANNVVLGEMSDMV

SEQ ID NO: 90526 - protein, 27 aa, Artificial Sequence
  Cyclic GFR-binding peptide
TRLSNITIQIMDSANNVVIGEMSDMVV

SEQ ID NO: 90527 - protein, 36 aa, Artificial Sequence
  Cyclic GFR-binding peptide
  MOD_RES (6)..(7): Xaa is C or S
GSAGPXXTPTKMSNITMQIMNDKQQIIIGEMSGMVV

SEQ ID NO: 90528 - protein, 32 aa, Artificial Sequence
  Cyclic GFR-binding peptide
  MOD_RES (4)..(5): Xaa is C or S
ASPXXVSQDLSNITIQIMIGKTPKILGEMSMI

SEQ ID NO: 90529 - protein, 28 aa, Artificial Sequence
  Cyclic GFR-binding peptide
  MOD_RES (1)..(2): Xaa is C or S
XXVPTRLSNITIQIMDSANNVVLGEMSD

SEQ ID NO: 90530 - protein, 31 aa, Artificial Sequence
  Cyclic GFR-binding peptide
  MOD_RES (29)..(31): Xaa is C or S
KMSNITMQIMNDKQQIILGEMSGMVVDRXGX

SEQ ID NO: 90531 - protein, 32 aa, Artificial Sequence
  Cyclic GFR-binding peptide
  MOD_RES (4)..(5): Xaa is C or S
PSTXXAPVKTSNITMQIMDNGRVLLLGEMSMI

SEQ ID NO: 90532 - protein, 35 aa, Artificial Sequence; identical to SEQ ID NO: 36614
  Cyclic GFR-binding peptide
  MOD_RES (3)..(4): Xaa is C or S

SEQ ID NO: 90533 - protein, 31 aa, Artificial Sequence
  Cyclic GFR-binding peptide
  MOD_RES (30)..(30): Xaa is C or S
TRLSNITIQIMDSANNVVLGEMSDMVVESXG

SEQ ID NO: 90534 - protein, 22 aa, Artificial Sequence
  Cyclic GFR-binding peptide
SNITMQIMDNGRVLLLGEMSMI

SEQ ID NO: 90535 - protein, 23 aa, Artificial Sequence
  Cyclic GFR-binding peptide
SNITIQIMDSANNVVIGEMSDMV

SEQ ID NO: 90536 - protein, 35 aa, Artificial Sequence; identical to SEQ ID NO: 36623
  Cyclic GFR-binding peptide
  MOD_RES (2)..(3)..(34): Xaa is C or S

SEQ ID NO: 90537 - protein, 29 aa, Artificial Sequence
  Cyclic GFR-binding peptide
  MOD_RES (1)..(1): Xaa is C or S
XAPTKLSNITVQIMDDSSNVILGEMSNMV

SEQ ID NO: 90538 - protein, 31 aa, Artificial Sequence; identical to SEQ ID NO: 36625
  Cyclic GFR-binding peptide

SEQ ID NO: 90539 - protein, 36 aa, Artificial Sequence; identical to SEQ ID NO: 36627
  Cyclic GFR-binding peptide
  MOD_RES (2)..(3)..(35): Xaa is C or S

SEQ ID NO: 90540 - protein, 33 aa, Artificial Sequence; identical to SEQ ID NO: 36634
  Cyclic GFR-binding peptide
  MOD_RES (2)..(3): Xaa is C or S

SEQ ID NO: 90541 - protein, 37 aa, Artificial Sequence; identical to SEQ ID NO: 36635
  Cyclic GFR-binding peptide
  MOD_RES (4)..(5)..(37): Xaa is C or S

SEQ ID NO: 90542 - protein, 33 aa, Artificial Sequence
  Cyclic GFR-binding peptide
  MOD_RES (6)..(7): Xaa is C or S
ASASPXXVPQDLSNITIQIMVGRTPKVLGEMSM

SEQ ID NO: 90543 - protein, 40 aa, Artificial Sequence; identical to SEQ ID NO: 36641
  Cyclic GFR-binding peptide
  MOD_RES (4)..(5)..(37)..(39): Xaa is C or S

SEQ ID NO: 90544 - protein, 28 aa, Artificial Sequence
  Cyclic GFR-binding peptide
  MOD_RES (1)..(2): Xaa is C or S
XXVPQDLSNITIQIMVGRTPKVLGEMSM

SEQ ID NO: 90545 - protein, 20 aa, Artificial Sequence
  Cyclic GFR-binding peptide
SNITIQIMVGRKPKVLGEMS

SEQ ID NO: 90546 - protein, 29 aa, Artificial Sequence
  Cyclic GFR-binding peptide
  MOD_RES (1)..(1): Xaa is C or S
XAPVKTSNITMQIMDNGRVLLIGEMSMIV

SEQ ID NO: 90547 - protein, 33 aa, Artificial Sequence; identical to SEQ ID NO: 36646
  Cyclic GFR-binding peptide
  MOD_RES (2)..(3): Xaa is C or S

SEQ ID NO: 90548 - protein, 34 aa, Artificial Sequence
  Cyclic GFR-binding peptide
  MOD_RES (4)..(5): Xaa is C or S
PSTXXAPVKTSNITMQIMDNGRVLLIGEMSMIVE

SEQ ID NO: 90549 - protein, 22 aa, Artificial Sequence
  Cyclic GFR-binding peptide
KMSNITMQIMNDKQQIILGEMS

SEQ ID NO: 90550 - protein, 23 aa, Artificial Sequence
  Cyclic GFR-binding peptide
SNITIQIMDAANNVVLGEMSDMV

SEQ ID NO: 90551 - protein, 38 aa, Artificial Sequence; identical to SEQ ID NO: 36649
  Cyclic GFR-binding peptide
  MOD_RES (5)..(6)..(38): Xaa is C or S

SEQ ID NO: 90552 - protein, 32 aa, Artificial Sequence; identical to SEQ ID NO: 36652
  Cyclic GFR-binding peptide
  MOD_RES (1)..(2): Xaa is C or S

SEQ ID NO: 90553 - protein, 38 aa, Artificial Sequence; identical to SEQ ID NO: 36654
  Cyclic GFR-binding peptide
  MOD_RES (2)..(3)..(35)..(37): Xaa is C or S

SEQ ID NO: 90554 - protein, 30 aa, Artificial Sequence
  Cyclic GFR-binding peptide
  MOD_RES (28)..(30): Xaa is C or S
DLSNITIQIMIGKTPKILGEMSMIVKSXKX

SEQ ID NO: 90555 - protein, 22 aa, Artificial Sequence
  Cyclic GFR-binding peptide
SNITMQIMDNGRVLLIGEMSMI

SEQ ID NO: 90556 - protein, 35 aa, Artificial Sequence; identical to SEQ ID NO: 36655
  Cyclic GFR-binding peptide
  MOD_RES (1)..(33)..(35): Xaa is C or S

SEQ ID NO: 90557 - protein, 25 aa, Artificial Sequence
  Cyclic GFR-binding peptide
RLSNITIQIMDAANNVVIGEMSDMV

SEQ ID NO: 90558 - protein, 34 aa, Artificial Sequence; identical to SEQ ID NO: 36658
  Cyclic GFR-binding peptide
  MOD_RES (1)..(33): Xaa is C or S

SEQ ID NO: 90559 - protein, 30 aa, Artificial Sequence
  Cyclic GFR-binding peptide
  MOD_RES (27)..(29): Xaa is C or S
SNITIQIMDAANNVVIGEMSDMVVEAXGXR

SEQ ID NO: 90560 - protein, 34 aa, Artificial Sequence; identical to SEQ ID NO: 36660
  Cyclic GFR-binding peptide
  MOD_RES (32)..(34): Xaa is C or S

SEQ ID NO: 90561 - protein, 33 aa, Artificial Sequence
  Cyclic GFR-binding peptide
  MOD_RES (6)..(7): Xaa is C or S
RVPSTXXAPVKTSNITMQIMDNGRVLLIGEMSM

SEQ ID NO: 90562 - protein, 28 aa, Artificial Sequence
  Cyclic GFR-binding peptide
  MOD_RES (1)..(2): Xaa is C or S
XXTPTKMSNITMQIMNDKQQIIIGEMSG

SEQ ID NO: 90563 - protein, 24 aa, Artificial Sequence
  Cyclic GFR-binding peptide
PARLSNITIQIMDAANNVVLGEMS

SEQ ID NO: 90564 - protein, 38 aa, Artificial Sequence; identical to SEQ ID NO: 36665
  Cyclic GFR-binding peptide
  MOD_RES (4)..(5)..(36)..(38): Xaa is C or S

SEQ ID NO: 90565 - protein, 24 aa, Artificial Sequence
  Cyclic GFR-binding peptide
SNITIQIMVGRKPKVLGEMSMIVR

SEQ ID NO: 90566 - protein, 29 aa, Artificial Sequence
  Cyclic GFR-binding peptide
VPQALSNITIQIMVGRKPKVLGEMSMIVR

SEQ ID NO: 90567 - protein, 30 aa, Artificial Sequence
  Cyclic GFR-binding peptide
  MOD_RES (4)..(5): Xaa is C or S
PPTXXVPTRLSNITIQIMDSANNVVIGEMS

SEQ ID NO: 90568 - protein, 40 aa, Artificial Sequence; identical to SEQ ID NO: 36667
  Cyclic GFR-binding peptide
  MOD_RES (4)..(5)..(37)..(39): Xaa is C or S

SEQ ID NO: 90569 - protein, 31 aa, Artificial Sequence
  Cyclic GFR-binding peptide
  MOD_RES (28)..(30): Xaa is C or S
KTSNITMQIMDNGRVLLIGEMSMIVEEXGXL

SEQ ID NO: 90570 - protein, 29 aa, Artificial Sequence
  Cyclic GFR-binding peptide
  MOD_RES (3)..(4): Xaa is C or S
KPXXAPTKLSNITVQIMDDSSNVILGEMS

SEQ ID NO: 90571 - protein, 24 aa, Artificial Sequence
  Cyclic GFR-binding peptide
TKMSNITMQIMNDKQQIILGEMSG

SEQ ID NO: 90572 - protein, 36 aa, Artificial Sequence; identical to SEQ ID NO: 36674
  Cyclic GFR-binding peptide
  MOD_RES (2)..(3)..(34)..(36): Xaa is C or S

SEQ ID NO: 90573 - protein, 36 aa, Artificial Sequence; identical to SEQ ID NO: 36676
  Cyclic GFR-binding peptide
  MOD_RES (3)..(4)..(36): Xaa is C or S

SEQ ID NO: 90574 - protein, 32 aa, Artificial Sequence; identical to SEQ ID NO: 36678
  Cyclic GFR-binding peptide
  MOD_RES (1)..(32): Xaa is C or S

SEQ ID NO: 90575 - protein, 31 aa, Artificial Sequence
  Cyclic GFR-binding peptide
  MOD_RES (2)..(3): Xaa is C or S
PXXVPQALSNITIQIMVGRKPKVLGEMSMIV

SEQ ID NO: 90576 - protein, 33 aa, Artificial Sequence; identical to SEQ ID NO: 36680
  Cyclic GFR-binding peptide
  MOD_RES (1)..(2)..(33): Xaa is C or S

SEQ ID NO: 90577 - protein, 28 aa, Artificial Sequence
  Cyclic GFR-binding peptide
  MOD_RES (2)..(3): Xaa is C or S
PXXVPQDLSNITIQIMVGRTPKVLGEMS

SEQ ID NO: 90578 - protein, 25 aa, Artificial Sequence
  Cyclic GFR-binding peptide
PTKMSNITMQIMNDKQQIIIGEMSG

SEQ ID NO: 90579 - protein, 31 aa, Artificial Sequence; identical to SEQ ID NO: 36681
  Cyclic GFR-binding peptide

SEQ ID NO: 90580 - protein, 39 aa, Artificial Sequence; identical to SEQ ID NO: 36683
  Cyclic GFR-binding peptide
  MOD_RES (6)..(7)..(39): Xaa is C or S

SEQ ID NO: 90581 - protein, 26 aa, Artificial Sequence
  Cyclic GFR-binding peptide
PQALSNITIQIMVGRKPKVLGEMSMI

SEQ ID NO: 90582 - protein, 25 aa, Artificial Sequence
  Cyclic GFR-binding peptide
SNITIQIMDAANNVVIGEMSDMVVE

SEQ ID NO: 90583 - protein, 31 aa, Artificial Sequence
  Cyclic GFR-binding peptide
  MOD_RES (28)..(30): Xaa is C or S
ALSNITIQIMVGRKPKVLGEMSMIVRSXKXS

SEQ ID NO: 90584 - protein, 30 aa, Artificial Sequence
  Cyclic GFR-binding peptide
  MOD_RES (1)..(1): Xaa is C or S
XAPVKTSNITMQIMDNGRVLLLGEMSMIVE

SEQ ID NO: 90585 - protein, 30 aa, Artificial Sequence
  Cyclic GFR-binding peptide
  MOD_RES (1)..(2): Xaa is C or S
XXVPARLSNITIQIMDAANNVVLGEMSDMV

SEQ ID NO: 90586 - protein, 30 aa, Artificial Sequence
  Cyclic GFR-binding peptide
  MOD_RES (28)..(30): Xaa is C or S
MSNITMQIMNDKQQIIIGEMSGMVVDRXGX

SEQ ID NO: 90587 - protein, 37 aa, Artificial Sequence; identical to SEQ ID NO: 36696
  Cyclic GFR-binding peptide
  MOD_RES (6)..(7): Xaa is C or S

SEQ ID NO: 90588 - protein, 32 aa, Artificial Sequence
  Cyclic GFR-binding peptide
  MOD_RES (29)..(31): Xaa is C or S
RLSNITIQIMDSANNVVLGEMSDMVVESXGXR

SEQ ID NO: 90589 - protein, 37 aa, Artificial Sequence; identical to SEQ ID NO: 36699
  Cyclic GFR-binding peptide
  MOD_RES (1)..(2)..(34)..(36): Xaa is C or S

SEQ ID NO: 90590 - protein, 36 aa, Artificial Sequence; identical to SEQ ID NO: 36702
  Cyclic GFR-binding peptide
  MOD_RES (2)..(3)..(35): Xaa is C or S

SEQ ID NO: 90591 - protein, 29 aa, Artificial Sequence
  Cyclic GFR-binding peptide
  MOD_RES (28)..(28): Xaa is C or S
MSNITMQIMNDKQQIILGEMSGMVVDRXG

SEQ ID NO: 90592 - protein, 33 aa, Artificial Sequence
  Cyclic GFR-binding peptide
  MOD_RES (4)..(5): Xaa is C or S
ASPXXVPQDLSNITIQIMVGRTPKVLGEMSMVV

SEQ ID NO: 90593 - protein, 35 aa, Artificial Sequence; identical to SEQ ID NO: 36708
  Cyclic GFR-binding peptide
  MOD_RES (4)..(5): Xaa is C or S

SEQ ID NO: 90594 - protein, 23 aa, Artificial Sequence
  Cyclic GFR-binding peptide
VKTSNITMQIMDNGRVLLIGEMS

SEQ ID NO: 90595 - protein, 34 aa, Artificial Sequence
  Cyclic GFR-binding peptide
  MOD_RES (4)..(5): Xaa is C or S
AGPXXTPTKMSNITMQIMNDKQQIIIGEMSGMVV

SEQ ID NO: 90596 - protein, 27 aa, Artificial Sequence
  Cyclic GFR-binding peptide
KMSNITMQIMNDKQQIILGEMSGMVVD

SEQ ID NO: 90597 - protein, 26 aa, Artificial Sequence
  Cyclic GFR-binding peptide
LSNITIQIMDSANNVVIGEMSDMVVE

SEQ ID NO: 90598 - protein, 34 aa, Artificial Sequence
  Cyclic GFR-binding peptide
  MOD_RES (31)..(33): Xaa is C or S
PTRLSNITIQIMDSANNVVIGEMSDMVVESXGXR

SEQ ID NO: 90599 - protein, 37 aa, Artificial Sequence; identical to SEQ ID NO: 36715
  Cyclic GFR-binding peptide
  MOD_RES (4)..(5)..(36): Xaa is C or S

SEQ ID NO: 90600 - protein, 40 aa, Artificial Sequence; identical to SEQ ID NO: 36717
  Cyclic GFR-binding peptide
  MOD_RES (5)..(6)..(38)..(40): Xaa is C or S

SEQ ID NO: 90601 - protein, 22 aa, Artificial Sequence
  Cyclic GFR-binding peptide
LSNITIQIMDAANNVVLGEMSD

SEQ ID NO: 90602 - protein, 34 aa, Artificial Sequence; identical to SEQ ID NO: 36720
  Cyclic GFR-binding peptide
  MOD_RES (3)..(4): Xaa is C or S

SEQ ID NO: 90603 - protein, 32 aa, Artificial Sequence
  Cyclic GFR-binding peptide
  MOD_RES (4)..(5): Xaa is C or S
ASPXXVPQDLSNITIQIMVGRTPKVLGEMSMV

SEQ ID NO: 90604 - protein, 26 aa, Artificial Sequence
  Cyclic GFR-binding peptide
  MOD_RES (26)..(26): Xaa is C or S
SNITIQIMIGKTPKILGEMSMIVKSX

SEQ ID NO: 90605 - protein, 33 aa, Artificial Sequence
  Cyclic GFR-binding peptide
  MOD_RES (6)..(7): Xaa is C or S
AAPASXXVPARLSNITIQIMDAANNVVIGEMSD

SEQ ID NO: 90606 - protein, 25 aa, Artificial Sequence
  Cyclic GFR-binding peptide
PTKMSNITMQIMNDKQQIILGEMSG

SEQ ID NO: 90607 - protein, 28 aa, Artificial Sequence
  Cyclic GFR-binding peptide
  MOD_RES (1)..(1): Xaa is C or S
XAPVKTSNITMQIMDNGRVLLIGEMSMI

SEQ ID NO: 90608 - protein, 32 aa, Artificial Sequence
  Cyclic GFR-binding peptide
  MOD_RES (3)..(4): Xaa is C or S
STXXAPVKTSNITMQIMDNGRVLLLGEMSMIV

SEQ ID NO: 90609 - protein, 24 aa, Artificial Sequence
  Cyclic GFR-binding peptide
SNITMQIMNDKQQIILGEMSGMVV

SEQ ID NO: 90610 - protein, 32 aa, Artificial Sequence
  Cyclic GFR-binding peptide
  MOD_RES (3)..(4): Xaa is C or S
KPXXAPTKLSNITVQIMDDSSNVILGEMSNMV

SEQ ID NO: 90611 - protein, 28 aa, Artificial Sequence
  Cyclic GFR-binding peptide
VPTRLSNITIQIMDSANNVVIGEMSDMV

SEQ ID NO: 90612 - protein, 37 aa, Artificial Sequence; identical to SEQ ID NO: 36727
  Cyclic GFR-binding peptide
  MOD_RES (2)..(3)..(34)..(36): Xaa is C or S

SEQ ID NO: 90613 - protein, 31 aa, Artificial Sequence
  Cyclic GFR-binding peptide
  MOD_RES (4)..(5): Xaa is C or S
AAPXXVPQALSNITIQIMVGRKPKVLGEMSM

SEQ ID NO: 90614 - protein, 39 aa, Artificial Sequence; identical to SEQ ID NO: 36730
  Cyclic GFR-binding peptide
  MOD_RES (5)..(6)..(38): Xaa is C or S

SEQ ID NO: 90615 - protein, 33 aa, Artificial Sequence
  Cyclic GFR-binding peptide
  MOD_RES (31)..(33): Xaa is C or S
PTKLSNITVQIMDDSSNVILGEMSNMVVRSXGX

SEQ ID NO: 90616 - protein, 32 aa, Artificial Sequence; identical to SEQ ID NO: 36738
  Cyclic GFR-binding peptide
  MOD_RES (32)..(32): Xaa is C or S

SEQ ID NO: 90617 - protein, 31 aa, Artificial Sequence; identical to SEQ ID NO: 36737
  Cyclic GFR-binding peptide
  MOD_RES (1)..(1): Xaa is C or S

SEQ ID NO: 90618 - protein, 40 aa, Artificial Sequence; identical to SEQ ID NO: 36739
  Cyclic GFR-binding peptide
  MOD_RES (5)..(6)..(38)..(40): Xaa is C or S

SEQ ID NO: 90619 - protein, 23 aa, Artificial Sequence
  Cyclic GFR-binding peptide
QDLSNITIQIMIGKTPKILGEMS

SEQ ID NO: 90620 - protein, 39 aa, Artificial Sequence; identical to SEQ ID NO: 36741
  Cyclic GFR-binding peptide
  MOD_RES (3)..(4)..(36)..(38): Xaa is C or S

SEQ ID NO: 90621 - protein, 34 aa, Artificial Sequence; identical to SEQ ID NO: 36742
  Cyclic GFR-binding peptide
  MOD_RES (3)..(4): Xaa is C or S

SEQ ID NO: 90622 - protein, 26 aa, Artificial Sequence
  Cyclic GFR-binding peptide
VPARLSNITIQIMDAANNVVLGEMSD

SEQ ID NO: 90623 - protein, 20 aa, Artificial Sequence
  Cyclic GFR-binding peptide
SNITIQIMIGKTPKILGEMS

SEQ ID NO: 90624 - protein, 24 aa, Artificial Sequence
  Cyclic GFR-binding peptide
LSNITIQIMDAANNVVIGEMSDMV

SEQ ID NO: 90625 - protein, 33 aa, Artificial Sequence; identical to SEQ ID NO: 36745
  Cyclic GFR-binding peptide
  MOD_RES (1)..(33): Xaa is C or S

SEQ ID NO: 90626 - protein, 22 aa, Artificial Sequence
  Cyclic GFR-binding peptide
SNITIQIMDAANNVVLGEMSDM

SEQ ID NO: 90627 - protein, 30 aa, Artificial Sequence
  Cyclic GFR-binding peptide
  MOD_RES (27)..(29): Xaa is C or S
LSNITIQIMVGRKPKVLGEMSMIVRSXKXS

SEQ ID NO: 90628 - protein, 25 aa, Artificial Sequence
  Cyclic GFR-binding peptide
ALSNITIQIMVGRKPKVLGEMSMIV

SEQ ID NO: 90629 - protein, 37 aa, Artificial Sequence; identical to SEQ ID NO: 36751
  Cyclic GFR-binding peptide
  MOD_RES (3)..(4)..(35)..(37): Xaa is C or S

SEQ ID NO: 90630 - protein, 38 aa, Artificial Sequence; identical to SEQ ID NO: 36752
  Cyclic GFR-binding peptide
  MOD_RES (3)..(4)..(36)..(38): Xaa is C or S

SEQ ID NO: 90631 - protein, 22 aa, Artificial Sequence
  Cyclic GFR-binding peptide
SNITIQIMDSANNVVLGEMSDM

SEQ ID NO: 90632 - protein, 27 aa, Artificial Sequence
  Cyclic GFR-binding peptide
  MOD_RES (1)..(1): Xaa is C or S
XVSQDLSNITIQIMIGKTPKILGEMSM

SEQ ID NO: 90633 - protein, 30 aa, Artificial Sequence
  Cyclic GFR-binding peptide
  MOD_RES (29)..(29): Xaa is C or S
VKTSNITMQIMDNGRVLLIGEMSMIVEEXG

SEQ ID NO: 90634 - protein, 33 aa, Artificial Sequence; identical to SEQ ID NO: 36758
  Cyclic GFR-binding peptide
  MOD_RES (2)..(3): Xaa is C or S

SEQ ID NO: 90635 - protein, 26 aa, Artificial Sequence
  Cyclic GFR-binding peptide
ALSNITIQIMVGRKPKVLGEMSMIVR

SEQ ID NO: 90636 - protein, 31 aa, Artificial Sequence
  Cyclic GFR-binding peptide
  MOD_RES (31)..(31): Xaa is C or S
PTKLSNITVQIMDDSSNVILGEMSNMVVRSX

SEQ ID NO: 90637 - protein, 34 aa, Artificial Sequence
  Cyclic GFR-binding peptide
  MOD_RES (4)..(5): Xaa is C or S
ASPXXVSQDLSNITIQIMIGKTPKILGEMSMIVK

SEQ ID NO: 90638 - protein, 39 aa, Artificial Sequence; identical to SEQ ID NO: 36763
  Cyclic GFR-binding peptide
  MOD_RES (6)..(7)..(39): Xaa is C or S

SEQ ID NO: 90639 - protein, 38 aa, Artificial Sequence; identical to SEQ ID NO: 36765
  Cyclic GFR-binding peptide
  MOD_RES (5)..(6)..(37): Xaa is C or S

SEQ ID NO: 90640 - protein, 33 aa, Artificial Sequence; identical to SEQ ID NO: 36767
  Cyclic GFR-binding peptide
  MOD_RES (1)..(2)..(33): Xaa is C or S

SEQ ID NO: 90641 - protein, 36 aa, Artificial Sequence; identical to SEQ ID NO: 36770
  Cyclic GFR-binding peptide
  MOD_RES (5)..(6): Xaa is C or S

SEQ ID NO: 90642 - protein, 26 aa, Artificial Sequence
  Cyclic GFR-binding peptide
LSNITIQIMVGRKPKVLGEMSMIVRS

SEQ ID NO: 90643 - protein, 24 aa, Artificial Sequence
  Cyclic GFR-binding peptide
LSNITIQIMVGRTPKVLGEMSMVV

SEQ ID NO: 90644 - protein, 23 aa, Artificial Sequence
  Cyclic GFR-binding peptide
ARLSNITIQIMDAANNVVIGEMS

SEQ ID NO: 90645 - protein, 22 aa, Artificial Sequence
  Cyclic GFR-binding peptide
MSNITMQIMNDKQQIIIGEMSG

SEQ ID NO: 90646 - protein, 40 aa, Artificial Sequence; identical to SEQ ID NO: 36775
  Cyclic GFR-binding peptide
  MOD_RES (5)..(6)..(37)..(39): Xaa is C or S

SEQ ID NO: 90647 - protein, 30 aa, Artificial Sequence
  Cyclic GFR-binding peptide
  MOD_RES (1)..(1): Xaa is C or S
XVPARLSNITIQIMDAANNVVIGEMSDMVV

SEQ ID NO: 90648 - protein, 36 aa, Artificial Sequence; identical to SEQ ID NO: 36778
  Cyclic GFR-binding peptide
  MOD_RES (5)..(6): Xaa is C or S

SEQ ID NO: 90649 - protein, 27 aa, Artificial Sequence
  Cyclic GFR-binding peptide
  MOD_RES (27)..(27): Xaa is C or S
SNITIQIMDAANNVVIGEMSDMVVEAX

SEQ ID NO: 90650 - protein, 39 aa, Artificial Sequence; identical to SEQ ID NO: 36781
  Cyclic GFR-binding peptide
  MOD_RES (5)..(6)..(37)..(39): Xaa is C or S

SEQ ID NO: 90651 - protein, 38 aa, Artificial Sequence; identical to SEQ ID NO: 36784
  Cyclic GFR-binding peptide
  MOD_RES (2)..(3)..(35)..(37): Xaa is C or S

SEQ ID NO: 90652 - protein, 35 aa, Artificial Sequence; identical to SEQ ID NO: 36785
  Cyclic GFR-binding peptide
  MOD_RES (2)..(3)..(34): Xaa is C or S

SEQ ID NO: 90653 - protein, 30 aa, Artificial Sequence
  Cyclic GFR-binding peptide
  MOD_RES (2)..(3): Xaa is C or S
PXXTPTKMSNITMQIMNDKQQIILGEMSGM

SEQ ID NO: 90654 - protein, 29 aa, Artificial Sequence
  Cyclic GFR-binding peptide
PARLSNITIQIMDAANNVVIGEMSDMVVE

SEQ ID NO: 90655 - protein, 37 aa, Artificial Sequence; identical to SEQ ID NO: 36787
  Cyclic GFR-binding peptide
  MOD_RES (4)..(5)..(36): Xaa is C or S

SEQ ID NO: 90656 - protein, 32 aa, Artificial Sequence; identical to SEQ ID NO: 36789
  Cyclic GFR-binding peptide
  MOD_RES (1)..(1): Xaa is C or S

SEQ ID NO: 90657 - protein, 39 aa, Artificial Sequence; identical to SEQ ID NO: 36790
  Cyclic GFR-binding peptide
  MOD_RES (5)..(6)..(37)..(39): Xaa is C or S

SEQ ID NO: 90658 - protein, 33 aa, Artificial Sequence
  Cyclic GFR-binding peptide
  MOD_RES (3)..(4): Xaa is C or S
APXXVPQALSNITIQIMVGRKPKVLGEMSMIVR

SEQ ID NO: 90659 - protein, 30 aa, Artificial Sequence
  Cyclic GFR-binding peptide
  MOD_RES (1)..(2): Xaa is C or S
XXVSQDLSNITIQIMIGKTPKILGEMSMIV

SEQ ID NO: 90660 - protein, 30 aa, Artificial Sequence
  Cyclic GFR-binding peptide
PTKLSNITVQIMDDSSNVILGEMSNMVVRS

SEQ ID NO: 90661 - protein, 28 aa, Artificial Sequence
  Cyclic GFR-binding peptide
PVKTSNITMQIMDNGRVLLIGEMSMIVE

SEQ ID NO: 90662 - protein, 39 aa, Artificial Sequence; identical to SEQ ID NO: 36797
  Cyclic GFR-binding peptide
  MOD_RES (6)..(7)..(39): Xaa is C or S

SEQ ID NO: 90663 - protein, 31 aa, Artificial Sequence; identical to SEQ ID NO: 36800
  Cyclic GFR-binding peptide
  MOD_RES (1)..(1): Xaa is C or S

SEQ ID NO: 90664 - protein, 28 aa, Artificial Sequence
  Cyclic GFR-binding peptide
  MOD_RES (28)..(28): Xaa is C or S
KTSNITMQIMDNGRVLLLGEMSMIVEEX

SEQ ID NO: 90665 - protein, 22 aa, Artificial Sequence
  Cyclic GFR-binding peptide
KMSNITMQIMNDKQQIIIGEMS

SEQ ID NO: 90666 - protein, 24 aa, Artificial Sequence
  Cyclic GFR-binding peptide
SNITVQIMDDSSNVILGEMSNMVV

SEQ ID NO: 90667 - protein, 35 aa, Artificial Sequence
  Cyclic GFR-binding peptide
  MOD_RES (6)..(7): Xaa is C or S
RVPSTXXAPVKTSNITMQIMDNGRVLLLGEMSMIV

SEQ ID NO: 90668 - protein, 40 aa, Artificial Sequence; identical to SEQ ID NO: 36804
  Cyclic GFR-binding peptide
  MOD_RES (6)..(7)..(38)..(40): Xaa is C or S

SEQ ID NO: 90669 - protein, 32 aa, Artificial Sequence; identical to SEQ ID NO: 36806
  Cyclic GFR-binding peptide
  MOD_RES (1)..(2): Xaa is C or S

SEQ ID NO: 90670 - protein, 40 aa, Artificial Sequence; identical to SEQ ID NO: 36808
  Cyclic GFR-binding peptide
  MOD_RES (6)..(7)..(38)..(40): Xaa is C or S

SEQ ID NO: 90671 - protein, 28 aa, Artificial Sequence
  Cyclic GFR-binding peptide
  MOD_RES (27)..(27): Xaa is C or S
SNITIQIMDAANNVVIGEMSDMVVEAXG

SEQ ID NO: 90672 - protein, 33 aa, Artificial Sequence; identical to SEQ ID NO: 36814
  Cyclic GFR-binding peptide
  MOD_RES (1)..(33): Xaa is C or S

SEQ ID NO: 90673 - protein, 25 aa, Artificial Sequence
  Cyclic GFR-binding peptide
APVKTSNITMQIMDNGRVLLLGEMS

SEQ ID NO: 90674 - protein, 34 aa, Artificial Sequence
  Cyclic GFR-binding peptide
  MOD_RES (31)..(33): Xaa is C or S
PTKMSNITMQIMNDKQQIILGEMSGMVVDRXGXS

SEQ ID NO: 90675 - protein, 33 aa, Artificial Sequence
  Cyclic GFR-binding peptide
  MOD_RES (31)..(33): Xaa is C or S
PTRLSNITIQIMDSANNVVIGEMSDMVVESXGX

SEQ ID NO: 90676 - protein, 29 aa, Artificial Sequence
  Cyclic GFR-binding peptide
  MOD_RES (28)..(28): Xaa is C or S
LSNITIQIMDSANNVVLGEMSDMVVESXG

SEQ ID NO: 90677 - protein, 30 aa, Artificial Sequence
  Cyclic GFR-binding peptide
  MOD_RES (3)..(4): Xaa is C or S
SPXXVSQDLSNITIQIMIGKTPKILGEMSM

SEQ ID NO: 90678 - protein, 33 aa, Artificial Sequence; identical to SEQ ID NO: 36843
  Cyclic GFR-binding peptide
  MOD_RES (2)..(3): Xaa is C or S

SEQ ID NO: 90679 - protein, 36 aa, Artificial Sequence; identical to SEQ ID NO: 36846
  Cyclic GFR-binding peptide
  MOD_RES (1)..(33)..(35): Xaa is C or S

SEQ ID NO: 90680 - protein, 35 aa, Artificial Sequence
  Cyclic GFR-binding peptide
  MOD_RES (5)..(6): Xaa is C or S
VPKPXXAPTKLSNITVQIMDDSSNVILGEMSNMVV

SEQ ID NO: 90681 - protein, 32 aa, Artificial Sequence
  Cyclic GFR-binding peptide
  MOD_RES (5)..(6): Xaa is C or S
SASPXXVPQDLSNITIQIMVGRTPKVLGEMSM

SEQ ID NO: 90682 - protein, 28 aa, Artificial Sequence
  Cyclic GFR-binding peptide
  MOD_RES (1)..(2): Xaa is C or S
XXTPTKMSNITMQIMNDKQQIILGEMSG

SEQ ID NO: 90683 - protein, 30 aa, Artificial Sequence
  Cyclic GFR-binding peptide
  MOD_RES (27)..(29): Xaa is C or S
TSNITMQIMDNGRVLLIGEMSMIVEEXGXL

SEQ ID NO: 90684 - protein, 33 aa, Artificial Sequence
  Cyclic GFR-binding peptide
  MOD_RES (3)..(4): Xaa is C or S
PTXXVPTRLSNITIQIMDSANNVVLGEMSDMVV

SEQ ID NO: 90685 - protein, 31 aa, Artificial Sequence
  Cyclic GFR-binding peptide
  MOD_RES (5)..(6): Xaa is C or S
TPPTXXVPTRLSNITIQIMDSANNVVLGEMS

SEQ ID NO: 90686 - protein, 40 aa, Artificial Sequence; identical to SEQ ID NO: 36855
  Cyclic GFR-binding peptide
  MOD_RES (5)..(6)..(37)..(39): Xaa is C or S

SEQ ID NO: 90687 - protein, 33 aa, Artificial Sequence; identical to SEQ ID NO: 36856
  Cyclic GFR-binding peptide
  MOD_RES (31)..(33): Xaa is C or S

SEQ ID NO: 90688 - protein, 33 aa, Artificial Sequence
  Cyclic GFR-binding peptide
  MOD_RES (6)..(7): Xaa is C or S
ASASPXXVSQDLSNITIQIMIGKTPKILGEMSM

SEQ ID NO: 90689 - protein, 29 aa, Artificial Sequence
  Cyclic GFR-binding peptide
  MOD_RES (3)..(4): Xaa is C or S
GPXXTPTKMSNITMQIMNDKQQIILGEMS

SEQ ID NO: 90690 - protein, 29 aa, Artificial Sequence
  Cyclic GFR-binding peptide
  MOD_RES (26)..(28): Xaa is C or S
SNITIQIMVGRTPKVLGEMSMVVKSXKXS

SEQ ID NO: 90691 - protein, 42 aa, Artificial Sequence; identical to SEQ ID NO: 36861
  Cyclic GFR-binding peptide
  MOD_RES (6)..(7)..(39)..(41): Xaa is C or S

SEQ ID NO: 90692 - protein, 30 aa, Artificial Sequence
  Cyclic GFR-binding peptide
  MOD_RES (3)..(4): Xaa is C or S
ASXXVPARLSNITIQIMDAANNVVLGEMSD

SEQ ID NO: 90693 - protein, 37 aa, Artificial Sequence; identical to SEQ ID NO: 36863
  Cyclic GFR-binding peptide
  MOD_RES (5)..(6): Xaa is C or S

SEQ ID NO: 90694 - protein, 25 aa, Artificial Sequence
  Cyclic GFR-binding peptide
RLSNITIQIMDAANNVVLGEMSDMV

SEQ ID NO: 90695 - protein, 32 aa, Artificial Sequence; identical to SEQ ID NO: 36867
  Cyclic GFR-binding peptide
  MOD_RES (32)..(32): Xaa is C or S

SEQ ID NO: 90696 - protein, 38 aa, Artificial Sequence; identical to SEQ ID NO: 36869
  Cyclic GFR-binding peptide
  MOD_RES (6)..(7): Xaa is C or S

SEQ ID NO: 90697 - protein, 30 aa, Artificial Sequence
  Cyclic GFR-binding peptide
  MOD_RES (1)..(1): Xaa is C or S
XAPTKLSNITVQIMDDSSNVILGEMSNMVV

SEQ ID NO: 90698 - protein, 28 aa, Artificial Sequence
  Cyclic GFR-binding peptide
PARLSNITIQIMDAANNVVIGEMSDMVV

SEQ ID NO: 90699 - protein, 36 aa, Artificial Sequence; identical to SEQ ID NO: 36875
  Cyclic GFR-binding peptide
  MOD_RES (4)..(5): Xaa is C or S

SEQ ID NO: 90700 - protein, 30 aa, Artificial Sequence
  Cyclic GFR-binding peptide
  MOD_RES (1)..(2): Xaa is C or S
XXVPQALSNITIQIMVGRKPKVLGEMSMIV

SEQ ID NO: 90701 - protein, 31 aa, Artificial Sequence
  Cyclic GFR-binding peptide
  MOD_RES (2)..(3): Xaa is C or S
PXXVPQDLSNITIQIMVGRTPKVLGEMSMVV

SEQ ID NO: 90702 - protein, 34 aa, Artificial Sequence; identical to SEQ ID NO: 36876
  Cyclic GFR-binding peptide
  MOD_RES (31)..(33): Xaa is C or S

SEQ ID NO: 90703 - protein, 27 aa, Artificial Sequence
  Cyclic GFR-binding peptide
RLSNITIQIMDAANNVVLGEMSDMVVE

SEQ ID NO: 90704 - protein, 31 aa, Artificial Sequence
  Cyclic GFR-binding peptide
  MOD_RES (30)..(30): Xaa is C or S
PVKTSNITMQIMDNGRVLLLGEMSMIVEEXG

SEQ ID NO: 90705 - protein, 28 aa, Artificial Sequence
  Cyclic GFR-binding peptide
PARLSNITIQIMDAANNVVLGEMSDMVV

SEQ ID NO: 90706 - protein, 37 aa, Artificial Sequence; identical to SEQ ID NO: 36884
  Cyclic GFR-binding peptide
  MOD_RES (4)..(5)..(37): Xaa is C or S

SEQ ID NO: 90707 - protein, 31 aa, Artificial Sequence
  Cyclic GFR-binding peptide
  MOD_RES (28)..(30): Xaa is C or S
MSNITMQIMNDKQQIILGEMSGMVVDRXGXS

SEQ ID NO: 90708 - protein, 37 aa, Artificial Sequence; identical to SEQ ID NO: 36886
  Cyclic GFR-binding peptide
  MOD_RES (1)..(2)..(34)..(36): Xaa is C or S

SEQ ID NO: 90709 - protein, 32 aa, Artificial Sequence
  Cyclic GFR-binding peptide
  MOD_RES (5)..(6): Xaa is C or S
APASXXVPARLSNITIQIMDAANNVVLGEMSD

SEQ ID NO: 90710 - protein, 39 aa, Artificial Sequence; identical to SEQ ID NO: 36890
  Cyclic GFR-binding peptide
  MOD_RES (4)..(5)..(37)..(39): Xaa is C or S

SEQ ID NO: 90711 - protein, 33 aa, Artificial Sequence
  Cyclic GFR-binding peptide
  MOD_RES (6)..(7): Xaa is C or S
GSAGPXXTPTKMSNITMQIMNDKQQIIIGEMSG

SEQ ID NO: 90712 - protein, 33 aa, Artificial Sequence; identical to SEQ ID NO: 36892
  Cyclic GFR-binding peptide
  MOD_RES (1)..(2): Xaa is C or S

SEQ ID NO: 90713 - protein, 31 aa, Artificial Sequence
  Cyclic GFR-binding peptide
  MOD_RES (31)..(31): Xaa is C or S
PTKMSNITMQIMNDKQQIIIGEMSGMVVDRX

SEQ ID NO: 90714 - protein, 21 aa, Artificial Sequence
  Cyclic GFR-binding peptide
SNITIQIMDSANNVVIGEMSD

SEQ ID NO: 90715 - protein, 29 aa, Artificial Sequence
  Cyclic GFR-binding peptide
  MOD_RES (1)..(1): Xaa is C or S
XAPVKTSNITMQIMDNGRVLLLGEMSMIV

SEQ ID NO: 90716 - protein, 35 aa, Artificial Sequence
  Cyclic GFR-binding peptide
  MOD_RES (5)..(6): Xaa is C or S
APASXXVPARLSNITIQIMDAANNVVIGEMSDMVV

SEQ ID NO: 90717 - protein, 26 aa, Artificial Sequence
  Cyclic GFR-binding peptide
PTKMSNITMQIMNDKQQIIIGEMSGM

SEQ ID NO: 90718 - protein, 39 aa, Artificial Sequence; identical to SEQ ID NO: 36898
  Cyclic GFR-binding peptide
  MOD_RES (5)..(6)..(37)..(39): Xaa is C or S

SEQ ID NO: 90719 - protein, 27 aa, Artificial Sequence
  Cyclic GFR-binding peptide
  MOD_RES (1)..(2): Xaa is C or S
XXVPARLSNITIQIMDAANNVVIGEMS

SEQ ID NO: 90720 - protein, 22 aa, Artificial Sequence
  Cyclic GFR-binding peptide
LSNITIQIMVGRTPKVLGEMSM

SEQ ID NO: 90721 - protein, 20 aa, Artificial Sequence
  Cyclic GFR-binding peptide
SNITMQIMDNGRVLLIGEMS

SEQ ID NO: 90722 - protein, 30 aa, Artificial Sequence
  Cyclic GFR-binding peptide
  MOD_RES (3)..(4): Xaa is C or S
SPXXVPQDLSNITIQIMVGRTPKVLGEMSM

SEQ ID NO: 90723 - protein, 28 aa, Artificial Sequence
  Cyclic GFR-binding peptide
QDLSNITIQIMIGKTPKILGEMSMIVKS

SEQ ID NO: 90724 - protein, 29 aa, Artificial Sequence
  Cyclic GFR-binding peptide
SQDLSNITIQIMIGKTPKILGEMSMIVKS

SEQ ID NO: 90725 - protein, 28 aa, Artificial Sequence
  Cyclic GFR-binding peptide
TPTKMSNITMQIMNDKQQIILGEMSGMV

SEQ ID NO: 90726 - protein, 22 aa, Artificial Sequence
  Cyclic GFR-binding peptide
TSNITMQIMDNGRVLLIGEMSM

SEQ ID NO: 90727 - protein, 30 aa, Artificial Sequence
  Cyclic GFR-binding peptide
  MOD_RES (4)..(5): Xaa is C or S
AGPXXTPTKMSNITMQIMNDKQQIIIGEMS

SEQ ID NO: 90728 - protein, 27 aa, Artificial Sequence
  Cyclic GFR-binding peptide
VPARLSNITIQIMDAANNVVIGEMSDM

SEQ ID NO: 90729 - protein, 35 aa, Artificial Sequence; identical to SEQ ID NO: 36910
  Cyclic GFR-binding peptide
  MOD_RES (3)..(4)..(35): Xaa is C or S

SEQ ID NO: 90730 - protein, 29 aa, Artificial Sequence
  Cyclic GFR-binding peptide
TRLSNITIQIMDSANNVVLGEMSDMVVES

SEQ ID NO: 90731 - protein, 30 aa, Artificial Sequence; identical to SEQ ID NO: 36911
  Cyclic GFR-binding peptide

SEQ ID NO: 90732 - protein, 33 aa, Artificial Sequence; identical to SEQ ID NO: 36912
  Cyclic GFR-binding peptide
  MOD_RES (1)..(2)..(33): Xaa is C or S

SEQ ID NO: 90733 - protein, 34 aa, Artificial Sequence; identical to SEQ ID NO: 36913
  Cyclic GFR-binding peptide
  MOD_RES (3)..(4): Xaa is C or S

SEQ ID NO: 90734 - protein, 38 aa, Artificial Sequence; identical to SEQ ID NO: 36914
  Cyclic GFR-binding peptide
  MOD_RES (3)..(4)..(35)..(37): Xaa is C or S

SEQ ID NO: 90735 - protein, 27 aa, Artificial Sequence
  Cyclic GFR-binding peptide
MSNITMQIMNDKQQIILGEMSGMVVDR

SEQ ID NO: 90736 - protein, 33 aa, Artificial Sequence
  Cyclic GFR-binding peptide
  MOD_RES (4)..(5): Xaa is C or S
PPTXXVPTRLSNITIQIMDSANNVVIGEMSDMV

SEQ ID NO: 90737 - protein, 41 aa, Artificial Sequence; identical to SEQ ID NO: 36916
  Cyclic GFR-binding peptide
  MOD_RES (5)..(6)..(38)..(40): Xaa is C or S

SEQ ID NO: 90738 - protein, 33 aa, Artificial Sequence
  Cyclic GFR-binding peptide
  MOD_RES (3)..(4): Xaa is C or S
ASXXVPARLSNITIQIMDAANNVVIGEMSDMVV

SEQ ID NO: 90739 - protein, 22 aa, Artificial Sequence
  Cyclic GFR-binding peptide
KLSNITVQIMDDSSNVILGEMS

SEQ ID NO: 90740 - protein, 30 aa, Artificial Sequence
  Cyclic GFR-binding peptide
  MOD_RES (30)..(30): Xaa is C or S
PQALSNITIQIMVGRKPKVLGEMSMIVRSX

SEQ ID NO: 90741 - protein, 28 aa, Artificial Sequence
  Cyclic GFR-binding peptide
PTRLSNITIQIMDSANNVVIGEMSDMVV

SEQ ID NO: 90742 - protein, 40 aa, Artificial Sequence; identical to SEQ ID NO: 36921
  Cyclic GFR-binding peptide
  MOD_RES (4)..(5)..(37)..(39): Xaa is C or S

SEQ ID NO: 90743 - protein, 27 aa, Artificial Sequence
  Cyclic GFR-binding peptide
  MOD_RES (27)..(27): Xaa is C or S
LSNITIQIMVGRTPKVLGEMSMVVKSX

SEQ ID NO: 90744 - protein, 38 aa, Artificial Sequence; identical to SEQ ID NO: 36923
  Cyclic GFR-binding peptide
  MOD_RES (3)..(4)..(35)..(37): Xaa is C or S

SEQ ID NO: 90745 - protein, 36 aa, Artificial Sequence; identical to SEQ ID NO: 36924
  Cyclic GFR-binding peptide
  MOD_RES (1)..(2)..(33)..(35): Xaa is C or S

SEQ ID NO: 90746 - protein, 37 aa, Artificial Sequence; identical to SEQ ID NO: 36926
  Cyclic GFR-binding peptide
  MOD_RES (3)..(4)..(35)..(37): Xaa is C or S

SEQ ID NO: 90747 - protein, 23 aa, Artificial Sequence
  Cyclic GFR-binding peptide
TSNITMQIMDNGRVLLLGEMSMI

SEQ ID NO: 90748 - protein, 28 aa, Artificial Sequence
  Cyclic GFR-binding peptide
  MOD_RES (26)..(28): Xaa is C or S
SNITMQIMDNGRVLLIGEMSMIVEEXGX

SEQ ID NO: 90749 - protein, 32 aa, Artificial Sequence; identical to SEQ ID NO: 36928
  Cyclic GFR-binding peptide
  MOD_RES (1)..(1): Xaa is C or S

SEQ ID NO: 90750 - protein, 36 aa, Artificial Sequence; identical to SEQ ID NO: 36929
  Cyclic GFR-binding peptide
  MOD_RES (1)..(2)..(33)..(35): Xaa is C or S

SEQ ID NO: 90751 - protein, 34 aa, Artificial Sequence; identical to SEQ ID NO: 36930
  Cyclic GFR-binding peptide
  MOD_RES (1)..(2)..(34): Xaa is C or S

SEQ ID NO: 90752 - protein, 36 aa, Artificial Sequence; identical to SEQ ID NO: 36933
  Cyclic GFR-binding peptide
  MOD_RES (5)..(6): Xaa is C or S

SEQ ID NO: 90753 - protein, 24 aa, Artificial Sequence
  Cyclic GFR-binding peptide
PVKTSNITMQIMDNGRVLLLGEMS

SEQ ID NO: 90754 - protein, 26 aa, Artificial Sequence
  Cyclic GFR-binding peptide
KLSNITVQIMDDSSNVILGEMSNMVV

SEQ ID NO: 90755 - protein, 37 aa, Artificial Sequence; identical to SEQ ID NO: 36937
  Cyclic GFR-binding peptide
  MOD_RES (5)..(6): Xaa is C or S

SEQ ID NO: 90756 - protein, 29 aa, Artificial Sequence
  Cyclic GFR-binding peptide
  MOD_RES (27)..(29): Xaa is C or S
SNITIQIMDSANNVVLGEMSDMVVESXGX

SEQ ID NO: 90757 - protein, 28 aa, Artificial Sequence
  Cyclic GFR-binding peptide
PTKMSNITMQIMNDKQQIIIGEMSGMVV

SEQ ID NO: 90758 - protein, 26 aa, Artificial Sequence
  Cyclic GFR-binding peptide
TSNITMQIMDNGRVLLIGEMSMIVEE

SEQ ID NO: 90759 - protein, 32 aa, Artificial Sequence
  Cyclic GFR-binding peptide
  MOD_RES (3)..(4): Xaa is C or S
STXXAPVKTSNITMQIMDNGRVLLIGEMSMIV

SEQ ID NO: 90760 - protein, 35 aa, Artificial Sequence; identical to SEQ ID NO: 36946
  Cyclic GFR-binding peptide
  MOD_RES (2)..(3)..(35): Xaa is C or S

SEQ ID NO: 90761 - protein, 28 aa, Artificial Sequence
  Cyclic GFR-binding peptide
KMSNITMQIMNDKQQIILGEMSGMVVDR

SEQ ID NO: 90762 - protein, 30 aa, Artificial Sequence
  Cyclic GFR-binding peptide
  MOD_RES (4)..(5): Xaa is C or S
ASPXXVSQDLSNITIQIMIGKTPKILGEMS

SEQ ID NO: 90763 - protein, 29 aa, Artificial Sequence
  Cyclic GFR-binding peptide
  MOD_RES (29)..(29): Xaa is C or S
RLSNITIQIMDSANNVVIGEMSDMVVESX

SEQ ID NO: 90764 - protein, 25 aa, Artificial Sequence
  Cyclic GFR-binding peptide
PTKLSNITVQIMDDSSNVILGEMSN

SEQ ID NO: 90765 - protein, 24 aa, Artificial Sequence
  Cyclic GFR-binding peptide
LSNITIQIMDAANNVVLGEMSDMV

SEQ ID NO: 90766 - protein, 28 aa, Artificial Sequence
  Cyclic GFR-binding peptide
PVKTSNITMQIMDNGRVLLLGEMSMIVE

SEQ ID NO: 90767 - protein, 39 aa, Artificial Sequence; identical to SEQ ID NO: 36958
  Cyclic GFR-binding peptide
  MOD_RES (4)..(5)..(37)..(39): Xaa is C or S

SEQ ID NO: 90768 - protein, 28 aa, Artificial Sequence
  Cyclic GFR-binding peptide
VPTRLSNITIQIMDSANNVVLGEMSDMV

SEQ ID NO: 90769 - protein, 32 aa, Artificial Sequence
  Cyclic GFR-binding peptide
  MOD_RES (29)..(31): Xaa is C or S
VKTSNITMQIMDNGRVLLIGEMSMIVEEXGXL

SEQ ID NO: 90770 - protein, 33 aa, Artificial Sequence
  Cyclic GFR-binding peptide
  MOD_RES (4)..(5): Xaa is C or S
PPTXXVPTRLSNITIQIMDSANNVVLGEMSDMV

SEQ ID NO: 90771 - protein, 25 aa, Artificial Sequence
  Cyclic GFR-binding peptide
SNITIQIMVGRTPKVLGEMSMVVKS

SEQ ID NO: 90772 - protein, 33 aa, Artificial Sequence
  Cyclic GFR-binding peptide
  MOD_RES (4)..(5): Xaa is C or S
PASXXVPARLSNITIQIMDAANNVVIGEMSDMV

SEQ ID NO: 90773 - protein, 26 aa, Artificial Sequence
  Cyclic GFR-binding peptide
  MOD_RES (1)..(1): Xaa is C or S
XAPTKLSNITVQIMDDSSNVILGEMS

SEQ ID NO: 90774 - protein, 28 aa, Artificial Sequence
  Cyclic GFR-binding peptide
  MOD_RES (1)..(1): Xaa is C or S
XVPARLSNITIQIMDAANNVVIGEMSDM

SEQ ID NO: 90775 - protein, 28 aa, Artificial Sequence
  Cyclic GFR-binding peptide
KMSNITMQIMNDKQQIIIGEMSGMVVDR

SEQ ID NO: 90776 - protein, 40 aa, Artificial Sequence; identical to SEQ ID NO: 36968
  Cyclic GFR-binding peptide
  MOD_RES (6)..(7)..(39): Xaa is C or S

SEQ ID NO: 90777 - protein, 27 aa, Artificial Sequence
  Cyclic GFR-binding peptide
LSNITIQIMDSANNVVIGEMSDMVVES

SEQ ID NO: 90778 - protein, 30 aa, Artificial Sequence
  Cyclic GFR-binding peptide
  MOD_RES (29)..(29): Xaa is C or S
QDLSNITIQIMVGRTPKVLGEMSMVVKSXK

SEQ ID NO: 90779 - protein, 32 aa, Artificial Sequence
  Cyclic GFR-binding peptide
  MOD_RES (29)..(31): Xaa is C or S
QALSNITIQIMVGRKPKVLGEMSMIVRSXKXS

SEQ ID NO: 90780 - protein, 34 aa, Artificial Sequence
  Cyclic GFR-binding peptide
  MOD_RES (6)..(7): Xaa is C or S
RVPSTXXAPVKTSNITMQIMDNGRVLLLGEMSMI

SEQ ID NO: 90781 - protein, 37 aa, Artificial Sequence; identical to SEQ ID NO: 36970
  Cyclic GFR-binding peptide
  MOD_RES (2)..(3)..(34)..(36): Xaa is C or S

SEQ ID NO: 90782 - protein, 37 aa, Artificial Sequence; identical to SEQ ID NO: 36971
  Cyclic GFR-binding peptide
  MOD_RES (6)..(7): Xaa is C or S

SEQ ID NO: 90783 - protein, 30 aa, Artificial Sequence
  Cyclic GFR-binding peptide
  MOD_RES (29)..(29): Xaa is C or S
RLSNITIQIMDAANNVVIGEMSDMVVEAXG

SEQ ID NO: 90784 - protein, 23 aa, Artificial Sequence
  Cyclic GFR-binding peptide
RLSNITIQIMDAANNVVIGEMSD

SEQ ID NO: 90785 - protein, 35 aa, Artificial Sequence
  Cyclic GFR-binding peptide
  MOD_RES (5)..(6): Xaa is C or S
SAGPXXTPTKMSNITMQIMNDKQQIILGEMSGMVV

SEQ ID NO: 90786 - protein, 29 aa, Artificial Sequence
  Cyclic GFR-binding peptide
APTKLSNITVQIMDDSSNVILGEMSNMVV

SEQ ID NO: 90787 - protein, 37 aa, Artificial Sequence; identical to SEQ ID NO: 36978
  Cyclic GFR-binding peptide
  MOD_RES (3)..(4)..(36): Xaa is C or S

SEQ ID NO: 90788 - protein, 34 aa, Artificial Sequence; identical to SEQ ID NO: 36980
  Cyclic GFR-binding peptide
  MOD_RES (3)..(4): Xaa is C or S

SEQ ID NO: 90789 - protein, 35 aa, Artificial Sequence; identical to SEQ ID NO: 36981
  Cyclic GFR-binding peptide
  MOD_RES (1)..(2)..(33)..(35): Xaa is C or S

SEQ ID NO: 90790 - protein, 20 aa, Artificial Sequence
  Cyclic GFR-binding peptide
SNITIQIMDAANNVVLGEMS

SEQ ID NO: 90791 - protein, 30 aa, Artificial Sequence
  Cyclic GFR-binding peptide
  MOD_RES (27)..(29): Xaa is C or S
TSNITMQIMDNGRVLLLGEMSMIVEEXGXL

SEQ ID NO: 90792 - protein, 23 aa, Artificial Sequence
  Cyclic GFR-binding peptide
TKMSNITMQIMNDKQQIIIGEMS

SEQ ID NO: 90793 - protein, 38 aa, Artificial Sequence; identical to SEQ ID NO: 36984
  Cyclic GFR-binding peptide
  MOD_RES (3)..(4)..(35)..(37): Xaa is C or S

SEQ ID NO: 90794 - protein, 21 aa, Artificial Sequence
  Cyclic GFR-binding peptide
LSNITIQIMDAANNVVLGEMS

SEQ ID NO: 90795 - protein, 38 aa, Artificial Sequence; identical to SEQ ID NO: 36985
  Cyclic GFR-binding peptide
  MOD_RES (4)..(5)..(37): Xaa is C or S

SEQ ID NO: 90796 - protein, 25 aa, Artificial Sequence
  Cyclic GFR-binding peptide
ARLSNITIQIMDAANNVVLGEMSDM

SEQ ID NO: 90797 - protein, 39 aa, Artificial Sequence; identical to SEQ ID NO: 36986
  Cyclic GFR-binding peptide
  MOD_RES (6)..(7)..(39): Xaa is C or S

SEQ ID NO: 90798 - protein, 35 aa, Artificial Sequence
  Cyclic GFR-binding peptide
  MOD_RES (6)..(7): Xaa is C or S
RVPSTXXAPVKTSNITMQIMDNGRVLLIGEMSMIV

SEQ ID NO: 90799 - protein, 27 aa, Artificial Sequence
  Cyclic GFR-binding peptide
TPTKMSNITMQIMNDKQQIILGEMSGM

SEQ ID NO: 90800 - protein, 32 aa, Artificial Sequence
  Cyclic GFR-binding peptide
  MOD_RES (31)..(31): Xaa is C or S
PARLSNITIQIMDAANNVVIGEMSDMVVEAXG

SEQ ID NO: 90801 - protein, 30 aa, Artificial Sequence
  Cyclic GFR-binding peptide
  MOD_RES (2)..(3): Xaa is C or S
PXXAPTKLSNITVQIMDDSSNVILGEMSNM

SEQ ID NO: 90802 - protein, 34 aa, Artificial Sequence; identical to SEQ ID NO: 36988
  Cyclic GFR-binding peptide
  MOD_RES (2)..(3)..(34): Xaa is C or S

SEQ ID NO: 90803 - protein, 36 aa, Artificial Sequence; identical to SEQ ID NO: 36990
  Cyclic GFR-binding peptide
  MOD_RES (4)..(5)..(36): Xaa is C or S

SEQ ID NO: 90804 - protein, 27 aa, Artificial Sequence
  Cyclic GFR-binding peptide
PVKTSNITMQIMDNGRVLLIGEMSMIV

SEQ ID NO: 90805 - protein, 30 aa, Artificial Sequence
  Cyclic GFR-binding peptide
  MOD_RES (1)..(2): Xaa is C or S
XXTPTKMSNITMQIMNDKQQIILGEMSGMV

SEQ ID NO: 90806 - protein, 29 aa, Artificial Sequence
  Cyclic GFR-binding peptide
PTKLSNITVQIMDDSSNVILGEMSNMVVR

SEQ ID NO: 90807 - protein, 23 aa, Artificial Sequence
  Cyclic GFR-binding peptide
MSNITMQIMNDKQQIIIGEMSGM

SEQ ID NO: 90808 - protein, 40 aa, Artificial Sequence; identical to SEQ ID NO: 36995
  Cyclic GFR-binding peptide
  MOD_RES (4)..(5)..(37)..(39): Xaa is C or S

SEQ ID NO: 90809 - protein, 35 aa, Artificial Sequence
  Cyclic GFR-binding peptide
  MOD_RES (6)..(7): Xaa is C or S
AAPASXXVPARLSNITIQIMDAANNVVLGEMSDMV

SEQ ID NO: 90810 - protein, 36 aa, Artificial Sequence
  Cyclic GFR-binding peptide
  MOD_RES (6)..(7): Xaa is C or S
AAPASXXVPARLSNITIQIMDAANNVVIGEMSDMVV

SEQ ID NO: 90811 - protein, 32 aa, Artificial Sequence; identical to SEQ ID NO: 36997
  Cyclic GFR-binding peptide
  MOD_RES (1)..(2): Xaa is C or S

SEQ ID NO: 90812 - protein, 24 aa, Artificial Sequence
  Cyclic GFR-binding peptide
PVKTSNITMQIMDNGRVLLIGEMS

SEQ ID NO: 90813 - protein, 31 aa, Artificial Sequence
  Cyclic GFR-binding peptide
  MOD_RES (29)..(31): Xaa is C or S
KLSNITVQIMDDSSNVILGEMSNMVVRSXGX

SEQ ID NO: 90814 - protein, 36 aa, Artificial Sequence; identical to SEQ ID NO: 37001
  Cyclic GFR-binding peptide
  MOD_RES (1)..(33)..(35): Xaa is C or S

SEQ ID NO: 90815 - protein, 34 aa, Artificial Sequence; identical to SEQ ID NO: 37003
  Cyclic GFR-binding peptide
  MOD_RES (3)..(4): Xaa is C or S

SEQ ID NO: 90816 - protein, 30 aa, Artificial Sequence; identical to SEQ ID NO: 37006
  Cyclic GFR-binding peptide

SEQ ID NO: 90817 - protein, 26 aa, Artificial Sequence
  Cyclic GFR-binding peptide
  MOD_RES (1)..(1): Xaa is C or S
XAPVKTSNITMQIMDNGRVLLLGEMS

SEQ ID NO: 90818 - protein, 29 aa, Artificial Sequence
  Cyclic GFR-binding peptide
  MOD_RES (29)..(29): Xaa is C or S
RLSNITIQIMDAANNVVLGEMSDMVVEAX

SEQ ID NO: 90819 - protein, 27 aa, Artificial Sequence
  Cyclic GFR-binding peptide
PVKTSNITMQIMDNGRVLLLGEMSMIV

SEQ ID NO: 90820 - protein, 28 aa, Artificial Sequence
  Cyclic GFR-binding peptide
  MOD_RES (27)..(27): Xaa is C or S
LSNITIQIMIGKTPKILGEMSMIVKSXK

SEQ ID NO: 90821 - protein, 29 aa, Artificial Sequence
  Cyclic GFR-binding peptide
  MOD_RES (27)..(29): Xaa is C or S
SNITIQIMDSANNVVIGEMSDMVVESXGX

SEQ ID NO: 90822 - protein, 30 aa, Artificial Sequence
  Cyclic GFR-binding peptide
  MOD_RES (28)..(30): Xaa is C or S
LSNITIQIMDSANNVVIGEMSDMVVESXGX

SEQ ID NO: 90823 - protein, 29 aa, Artificial Sequence
  Cyclic GFR-binding peptide
  MOD_RES (29)..(29): Xaa is C or S
RLSNITIQIMDAANNVVIGEMSDMVVEAX

SEQ ID NO: 90824 - protein, 35 aa, Artificial Sequence; identical to SEQ ID NO: 37010
  Cyclic GFR-binding peptide
  MOD_RES (4)..(5): Xaa is C or S

SEQ ID NO: 90825 - protein, 38 aa, Artificial Sequence; identical to SEQ ID NO: 37011
  Cyclic GFR-binding peptide
  MOD_RES (6)..(7): Xaa is C or S

SEQ ID NO: 90826 - protein, 30 aa, Artificial Sequence; identical to SEQ ID NO: 1106
  Cyclic GFR-binding peptide

SEQ ID NO: 90827 - protein, 29 aa, Artificial Sequence
  Cyclic GFR-binding peptide
  MOD_RES (2)..(3): Xaa is C or S
PXXVSQDLSNITIQIMIGKTPKILGEMSM

SEQ ID NO: 90828 - protein, 26 aa, Artificial Sequence
  Cyclic GFR-binding peptide
LSNITIQIMDAANNVVLGEMSDMVVE

SEQ ID NO: 90829 - protein, 30 aa, Artificial Sequence
  Cyclic GFR-binding peptide
  MOD_RES (30)..(30): Xaa is C or S
TKMSNITMQIMNDKQQIIIGEMSGMVVDRX

SEQ ID NO: 90830 - protein, 32 aa, Artificial Sequence
  Cyclic GFR-binding peptide
  MOD_RES (2)..(3): Xaa is C or S
PXXTPTKMSNITMQIMNDKQQIIIGEMSGMVV

SEQ ID NO: 90831 - protein, 35 aa, Artificial Sequence; identical to SEQ ID NO: 37017
  Cyclic GFR-binding peptide
  MOD_RES (1)..(33)..(35): Xaa is C or S

SEQ ID NO: 90832 - protein, 36 aa, Artificial Sequence; identical to SEQ ID NO: 37022
  Cyclic GFR-binding peptide
  MOD_RES (5)..(6): Xaa is C or S

SEQ ID NO: 90833 - protein, 42 aa, Artificial Sequence; identical to SEQ ID NO: 37023
  Cyclic GFR-binding peptide
  MOD_RES (6)..(7)..(39)..(41): Xaa is C or S

SEQ ID NO: 90834 - protein, 33 aa, Artificial Sequence
  Cyclic GFR-binding peptide
  MOD_RES (5)..(6): Xaa is C or S
APASXXVPARLSNITIQIMDAANNVVIGEMSDM

SEQ ID NO: 90835 - protein, 32 aa, Artificial Sequence
  Cyclic GFR-binding peptide
  MOD_RES (6)..(7): Xaa is C or S
GSAGPXXTPTKMSNITMQIMNDKQQIILGEMS

SEQ ID NO: 90836 - protein, 31 aa, Artificial Sequence
  Cyclic GFR-binding peptide
  MOD_RES (2)..(3): Xaa is C or S
TXXAPVKTSNITMQIMDNGRVLLIGEMSMIV

SEQ ID NO: 90837 - protein, 25 aa, Artificial Sequence
  Cyclic GFR-binding peptide
QDLSNITIQIMIGKTPKILGEMSMI

SEQ ID NO: 90838 - protein, 32 aa, Artificial Sequence
  Cyclic GFR-binding peptide
  MOD_RES (6)..(7): Xaa is C or S
STPPTXXVPTRLSNITIQIMDSANNVVLGEMS

SEQ ID NO: 90839 - protein, 30 aa, Artificial Sequence
  Cyclic GFR-binding peptide
  MOD_RES (3)..(4): Xaa is C or S
PTXXVPTRLSNITIQIMDSANNVVIGEMSD

SEQ ID NO: 90840 - protein, 38 aa, Artificial Sequence; identical to SEQ ID NO: 37034
  Cyclic GFR-binding peptide
  MOD_RES (6)..(7)..(38): Xaa is C or S

SEQ ID NO: 90841 - protein, 27 aa, Artificial Sequence
  Cyclic GFR-binding peptide
PTRLSNITIQIMDSANNVVIGEMSDMV

SEQ ID NO: 90842 - protein, 31 aa, Artificial Sequence; identical to SEQ ID NO: 37037
  Cyclic GFR-binding peptide
  MOD_RES (31)..(31): Xaa is C or S

SEQ ID NO: 90843 - protein, 28 aa, Artificial Sequence
  Cyclic GFR-binding peptide
  MOD_RES (2)..(3): Xaa is C or S
PXXTPTKMSNITMQIMNDKQQIIIGEMS

SEQ ID NO: 90844 - protein, 31 aa, Artificial Sequence
  Cyclic GFR-binding peptide
  MOD_RES (3)..(4): Xaa is C or S
GPXXTPTKMSNITMQIMNDKQQIIIGEMSGM

SEQ ID NO: 90845 - protein, 29 aa, Artificial Sequence
  Cyclic GFR-binding peptide
  MOD_RES (2)..(3): Xaa is C or S
PXXTPTKMSNITMQIMNDKQQIILGEMSG

SEQ ID NO: 90846 - protein, 22 aa, Artificial Sequence
  Cyclic GFR-binding peptide
SNITVQIMDDSSNVILGEMSNM

SEQ ID NO: 90847 - protein, 21 aa, Artificial Sequence
  Cyclic GFR-binding peptide
LSNITIQIMDAANNVVIGEMS

SEQ ID NO: 90848 - protein, 24 aa, Artificial Sequence
  Cyclic GFR-binding peptide
PARLSNITIQIMDAANNVVIGEMS

SEQ ID NO: 90849 - protein, 38 aa, Artificial Sequence; identical to SEQ ID NO: 37046
  Cyclic GFR-binding peptide
  MOD_RES (3)..(4)..(35)..(37): Xaa is C or S

SEQ ID NO: 90850 - protein, 28 aa, Artificial Sequence
  Cyclic GFR-binding peptide
  MOD_RES (1)..(2): Xaa is C or S
XXAPVKTSNITMQIMDNGRVLLIGEMSM

SEQ ID NO: 90851 - protein, 29 aa, Artificial Sequence
  Cyclic GFR-binding peptide
VSQDLSNITIQIMIGKTPKILGEMSMIVK

SEQ ID NO: 90852 - protein, 33 aa, Artificial Sequence
  Cyclic GFR-binding peptide
  MOD_RES (5)..(6): Xaa is C or S
TPPTXXVPTRLSNITIQIMDSANNVVLGEMSDM

SEQ ID NO: 90853 - protein, 23 aa, Artificial Sequence
  Cyclic GFR-binding peptide
SNITMQIMNDKQQIILGEMSGMV

SEQ ID NO: 90854 - protein, 36 aa, Artificial Sequence; identical to SEQ ID NO: 37051
  Cyclic GFR-binding peptide
  MOD_RES (3)..(4)..(35): Xaa is C or S

SEQ ID NO: 90855 - protein, 37 aa, Artificial Sequence; identical to SEQ ID NO: 37052
  Cyclic GFR-binding peptide
  MOD_RES (6)..(7): Xaa is C or S

SEQ ID NO: 90856 - protein, 33 aa, Artificial Sequence; identical to SEQ ID NO: 37053
  Cyclic GFR-binding peptide
  MOD_RES (32)..(32): Xaa is C or S

SEQ ID NO: 90857 - protein, 34 aa, Artificial Sequence; identical to SEQ ID NO: 37056
  Cyclic GFR-binding peptide
  MOD_RES (32)..(34): Xaa is C or S

SEQ ID NO: 90858 - protein, 28 aa, Artificial Sequence
  Cyclic GFR-binding peptide
  MOD_RES (1)..(1): Xaa is C or S
XTPTKMSNITMQIMNDKQQIILGEMSGM

SEQ ID NO: 90859 - protein, 25 aa, Artificial Sequence
  Cyclic GFR-binding peptide
VKTSNITMQIMDNGRVLLIGEMSMI

SEQ ID NO: 90860 - protein, 29 aa, Artificial Sequence
  Cyclic GFR-binding peptide
  MOD_RES (1)..(1): Xaa is C or S
XVPARLSNITIQIMDAANNVVIGEMSDMV

SEQ ID NO: 90861 - protein, 37 aa, Artificial Sequence; identical to SEQ ID NO: 37061
  Cyclic GFR-binding peptide
  MOD_RES (3)..(4)..(35)..(37): Xaa is C or S

SEQ ID NO: 90862 - protein, 33 aa, Artificial Sequence
  Cyclic GFR-binding peptide
  MOD_RES (30)..(32): Xaa is C or S
PQDLSNITIQIMVGRTPKVLGEMSMVVKSXKXS

SEQ ID NO: 90863 - protein, 27 aa, Artificial Sequence
  Cyclic GFR-binding peptide
RLSNITIQIMDSANNVVIGEMSDMVVE

SEQ ID NO: 90864 - protein, 29 aa, Artificial Sequence
  Cyclic GFR-binding peptide
PTRLSNITIQIMDSANNVVIGEMSDMVVE

SEQ ID NO: 90865 - protein, 36 aa, Artificial Sequence; identical to SEQ ID NO: 37064
  Cyclic GFR-binding peptide
  MOD_RES (3)..(4)..(35): Xaa is C or S

SEQ ID NO: 90866 - protein, 31 aa, Artificial Sequence
  Cyclic GFR-binding peptide
  MOD_RES (5)..(6): Xaa is C or S
APASXXVPARLSNITIQIMDAANNVVLGEMS

SEQ ID NO: 90867 - protein, 32 aa, Artificial Sequence
  Cyclic GFR-binding peptide
  MOD_RES (29)..(31): Xaa is C or S
KMSNITMQIMNDKQQIILGEMSGMVVDRXGXS

SEQ ID NO: 90868 - protein, 35 aa, Artificial Sequence; identical to SEQ ID NO: 37066
  Cyclic GFR-binding peptide
  MOD_RES (4)..(5): Xaa is C or S

SEQ ID NO: 90869 - protein, 21 aa, Artificial Sequence
  Cyclic GFR-binding peptide
SNITIQIMDAANNVVLGEMSD

SEQ ID NO: 90870 - protein, 31 aa, Artificial Sequence; identical to SEQ ID NO: 37067
  Cyclic GFR-binding peptide

SEQ ID NO: 90871 - protein, 26 aa, Artificial Sequence
  Cyclic GFR-binding peptide
SNITMQIMNDKQQIILGEMSGMVVDR

SEQ ID NO: 90872 - protein, 23 aa, Artificial Sequence
  Cyclic GFR-binding peptide
VKTSNITMQIMDNGRVLLLGEMS

SEQ ID NO: 90873 - protein, 29 aa, Artificial Sequence
  Cyclic GFR-binding peptide
  MOD_RES (1)..(1): Xaa is C or S
XVPARLSNITIQIMDAANNVVLGEMSDMV

SEQ ID NO: 90874 - protein, 33 aa, Artificial Sequence
  Cyclic GFR-binding peptide
  MOD_RES (3)..(4): Xaa is C or S
GPXXTPTKMSNITMQIMNDKQQIILGEMSGMVV

SEQ ID NO: 90875 - protein, 40 aa, Artificial Sequence; identical to SEQ ID NO: 37077
  Cyclic GFR-binding peptide
  MOD_RES (5)..(6)..(37)..(39): Xaa is C or S

SEQ ID NO: 90876 - protein, 32 aa, Artificial Sequence; identical to SEQ ID NO: 37078
  Cyclic GFR-binding peptide
  MOD_RES (32)..(32): Xaa is C or S

SEQ ID NO: 90877 - protein, 32 aa, Artificial Sequence
  Cyclic GFR-binding peptide
  MOD_RES (4)..(5): Xaa is C or S
AGPXXTPTKMSNITMQIMNDKQQIILGEMSGM

SEQ ID NO: 90878 - protein, 21 aa, Artificial Sequence
  Cyclic GFR-binding peptide
LSNITIQIMIGKTPKILGEMS

SEQ ID NO: 90879 - protein, 27 aa, Artificial Sequence
  Cyclic GFR-binding peptide
KTSNITMQIMDNGRVLLLGEMSMIVEE

SEQ ID NO: 90880 - protein, 33 aa, Artificial Sequence
  Cyclic GFR-binding peptide
  MOD_RES (31)..(33): Xaa is C or S
PTKMSNITMQIMNDKQQIIIGEMSGMVVDRXGX

SEQ ID NO: 90881 - protein, 22 aa, Artificial Sequence
  Cyclic GFR-binding peptide
RLSNITIQIMDAANNVVLGEMS

SEQ ID NO: 90882 - protein, 31 aa, Artificial Sequence
  Cyclic GFR-binding peptide
  MOD_RES (3)..(4): Xaa is C or S
PTXXVPTRLSNITIQIMDSANNVVIGEMSDM

SEQ ID NO: 90883 - protein, 37 aa, Artificial Sequence; identical to SEQ ID NO: 37082
  Cyclic GFR-binding peptide
  MOD_RES (2)..(3)..(35)..(37): Xaa is C or S

SEQ ID NO: 90884 - protein, 33 aa, Artificial Sequence
  Cyclic GFR-binding peptide
  MOD_RES (3)..(4): Xaa is C or S
STXXAPVKTSNITMQIMDNGRVLLLGEMSMIVE

SEQ ID NO: 90885 - protein, 26 aa, Artificial Sequence
  Cyclic GFR-binding peptide
  MOD_RES (26)..(26): Xaa is C or S
SNITMQIMDNGRVLLLGEMSMIVEEX

SEQ ID NO: 90886 - protein, 26 aa, Artificial Sequence
  Cyclic GFR-binding peptide
SNITIQIMDSANNVVIGEMSDMVVES

SEQ ID NO: 90887 - protein, 27 aa, Artificial Sequence
  Cyclic GFR-binding peptide
  MOD_RES (1)..(1): Xaa is C or S
XVPARLSNITIQIMDAANNVVLGEMSD

SEQ ID NO: 90888 - protein, 28 aa, Artificial Sequence
  Cyclic GFR-binding peptide
  MOD_RES (1)..(2): Xaa is C or S
XXVPARLSNITIQIMDAANNVVLGEMSD

SEQ ID NO: 90889 - protein, 32 aa, Artificial Sequence
  Cyclic GFR-binding peptide
  MOD_RES (29)..(31): Xaa is C or S
KLSNITVQIMDDSSNVILGEMSNMVVRSXGXH

SEQ ID NO: 90890 - protein, 33 aa, Artificial Sequence; identical to SEQ ID NO: 37090
  Cyclic GFR-binding peptide
  MOD_RES (1)..(2)..(33): Xaa is C or S

SEQ ID NO: 90891 - protein, 31 aa, Artificial Sequence; identical to SEQ ID NO: 37093
  Cyclic GFR-binding peptide
  MOD_RES (31)..(31): Xaa is C or S

SEQ ID NO: 90892 - protein, 32 aa, Artificial Sequence; identical to SEQ ID NO: 37094
  Cyclic GFR-binding peptide
  MOD_RES (1)..(32): Xaa is C or S

SEQ ID NO: 90893 - protein, 23 aa, Artificial Sequence
  Cyclic GFR-binding peptide
RLSNITIQIMDSANNVVLGEMSD

SEQ ID NO: 90894 - protein, 38 aa, Artificial Sequence; identical to SEQ ID NO: 37096
  Cyclic GFR-binding peptide
  MOD_RES (4)..(5)..(37): Xaa is C or S

SEQ ID NO: 90895 - protein, 37 aa, Artificial Sequence; identical to SEQ ID NO: 37097
  Cyclic GFR-binding peptide
  MOD_RES (2)..(3)..(34)..(36): Xaa is C or S

SEQ ID NO: 90896 - protein, 21 aa, Artificial Sequence
  Cyclic GFR-binding peptide
SNITIQIMVGRKPKVLGEMSM

SEQ ID NO: 90897 - protein, 31 aa, Artificial Sequence
  Cyclic GFR-binding peptide
  MOD_RES (4)..(5): Xaa is C or S
PKPXXAPTKLSNITVQIMDDSSNVILGEMSN

SEQ ID NO: 90898 - protein, 27 aa, Artificial Sequence
  Cyclic GFR-binding peptide
  MOD_RES (1)..(1): Xaa is C or S
XAPVKTSNITMQIMDNGRVLLIGEMSM

SEQ ID NO: 90899 - protein, 31 aa, Artificial Sequence
  Cyclic GFR-binding peptide
  MOD_RES (3)..(4): Xaa is C or S
ASXXVPARLSNITIQIMDAANNVVLGEMSDM

SEQ ID NO: 90900 - protein, 29 aa, Artificial Sequence
  Cyclic GFR-binding peptide
  MOD_RES (1)..(2): Xaa is C or S
XXTPTKMSNITMQIMNDKQQIILGEMSGM

SEQ ID NO: 90901 - protein, 34 aa, Artificial Sequence
  Cyclic GFR-binding peptide
  MOD_RES (6)..(7): Xaa is C or S
GSAGPXXTPTKMSNITMQIMNDKQQIILGEMSGM

SEQ ID NO: 90902 - protein, 42 aa, Artificial Sequence; identical to SEQ ID NO: 37103
  Cyclic GFR-binding peptide
  MOD_RES (6)..(7)..(39)..(41): Xaa is C or S

SEQ ID NO: 90903 - protein, 30 aa, Artificial Sequence
  Cyclic GFR-binding peptide
  MOD_RES (30)..(30): Xaa is C or S
TKMSNITMQIMNDKQQIILGEMSGMVVDRX

SEQ ID NO: 90904 - protein, 32 aa, Artificial Sequence
  Cyclic GFR-binding peptide
  MOD_RES (4)..(5): Xaa is C or S
PPTXXVPTRLSNITIQIMDSANNVVIGEMSDM

SEQ ID NO: 90905 - protein, 32 aa, Artificial Sequence
  Cyclic GFR-binding peptide
  MOD_RES (29)..(31): Xaa is C or S
VKTSNITMQIMDNGRVLLLGEMSMIVEEXGXL

SEQ ID NO: 90906 - protein, 23 aa, Artificial Sequence
  Cyclic GFR-binding peptide
ARLSNITIQIMDAANNVVLGEMS

SEQ ID NO: 90907 - protein, 28 aa, Artificial Sequence
  Cyclic GFR-binding peptide
VPARLSNITIQIMDAANNVVLGEMSDMV

SEQ ID NO: 90908 - protein, 29 aa, Artificial Sequence
  Cyclic GFR-binding peptide
  MOD_RES (1)..(1): Xaa is C or S
XTPTKMSNITMQIMNDKQQIILGEMSGMV

SEQ ID NO: 90909 - protein, 31 aa, Artificial Sequence
  Cyclic GFR-binding peptide
  MOD_RES (28)..(30): Xaa is C or S
LSNITIQIMDSANNVVLGEMSDMVVESXGXR

SEQ ID NO: 90910 - protein, 30 aa, Artificial Sequence
  Cyclic GFR-binding peptide
  MOD_RES (1)..(2): Xaa is C or S
XXTPTKMSNITMQIMNDKQQIIIGEMSGMV

SEQ ID NO: 90911 - protein, 35 aa, Artificial Sequence; identical to SEQ ID NO: 37110
  Cyclic GFR-binding peptide
  MOD_RES (4)..(5): Xaa is C or S

SEQ ID NO: 90912 - protein, 36 aa, Artificial Sequence; identical to SEQ ID NO: 37113
  Cyclic GFR-binding peptide
  MOD_RES (1)..(2)..(34)..(36): Xaa is C or S

SEQ ID NO: 90913 - protein, 30 aa, Artificial Sequence
  Cyclic GFR-binding peptide
  MOD_RES (27)..(29): Xaa is C or S
SNITMQIMNDKQQIILGEMSGMVVDRXGXS

SEQ ID NO: 90914 - protein, 28 aa, Artificial Sequence
  Cyclic GFR-binding peptide
PTKLSNITVQIMDDSSNVILGEMSNMVV

SEQ ID NO: 90915 - protein, 38 aa, Artificial Sequence; identical to SEQ ID NO: 37116
  Cyclic GFR-binding peptide
  MOD_RES (4)..(5)..(36)..(38): Xaa is C or S

SEQ ID NO: 90916 - protein, 30 aa, Artificial Sequence
  Cyclic GFR-binding peptide
  MOD_RES (30)..(30): Xaa is C or S
TKLSNITVQIMDDSSNVILGEMSNMVVRSX

SEQ ID NO: 90917 - protein, 29 aa, Artificial Sequence
  Cyclic GFR-binding peptide
  MOD_RES (28)..(28): Xaa is C or S
DLSNITIQIMVGRTPKVLGEMSMVVKSXK

SEQ ID NO: 90918 - protein, 28 aa, Artificial Sequence
  Cyclic GFR-binding peptide
  MOD_RES (27)..(27): Xaa is C or S
LSNITIQIMVGRTPKVLGEMSMVVKSXK

SEQ ID NO: 90919 - protein, 26 aa, Artificial Sequence
  Cyclic GFR-binding peptide
PTRLSNITIQIMDSANNVVIGEMSDM

SEQ ID NO: 90920 - protein, 38 aa, Artificial Sequence; identical to SEQ ID NO: 37122
  Cyclic GFR-binding peptide
  MOD_RES (5)..(6)..(38): Xaa is C or S

SEQ ID NO: 90921 - protein, 32 aa, Artificial Sequence
  Cyclic GFR-binding peptide
  MOD_RES (2)..(3): Xaa is C or S
TXXVPTRLSNITIQIMDSANNVVIGEMSDMVV

SEQ ID NO: 90922 - protein, 26 aa, Artificial Sequence
  Cyclic GFR-binding peptide
VKTSNITMQIMDNGRVLLIGEMSMIV

SEQ ID NO: 90923 - protein, 35 aa, Artificial Sequence
  Cyclic GFR-binding peptide
  MOD_RES (6)..(7): Xaa is C or S
ASASPXXVPQDLSNITIQIMVGRTPKVLGEMSMVV

SEQ ID NO: 90924 - protein, 32 aa, Artificial Sequence; identical to SEQ ID NO: 37128
  Cyclic GFR-binding peptide
  MOD_RES (32)..(32): Xaa is C or S

SEQ ID NO: 90925 - protein, 32 aa, Artificial Sequence; identical to SEQ ID NO: 37129
  Cyclic GFR-binding peptide
  MOD_RES (1)..(2): Xaa is C or S

SEQ ID NO: 90926 - protein, 20 aa, Artificial Sequence
  Cyclic GFR-binding peptide
SNITIQIMIGKTPKILGEMS

SEQ ID NO: 90927 - protein, 31 aa, Artificial Sequence
  Cyclic GFR-binding peptide
  MOD_RES (30)..(30): Xaa is C or S
PVKTSNITMQIMDNGRVLLIGEMSMIVEEXG

SEQ ID NO: 90928 - protein, 34 aa, Artificial Sequence; identical to SEQ ID NO: 37130
  Cyclic GFR-binding peptide
  MOD_RES (2)..(3): Xaa is C or S

SEQ ID NO: 90929 - protein, 28 aa, Artificial Sequence
  Cyclic GFR-binding peptide
TRLSNITIQIMDSANNVVLGEMSDMVVE

SEQ ID NO: 90930 - protein, 20 aa, Artificial Sequence
  Cyclic GFR-binding peptide
SNITVQIMDDSSNVILGEMS

SEQ ID NO: 90931 - protein, 31 aa, Artificial Sequence
  Cyclic GFR-binding peptide
  MOD_RES (28)..(30): Xaa is C or S
LSNITVQIMDDSSNVILGEMSNMVVRSXGXH

SEQ ID NO: 90932 - protein, 26 aa, Artificial Sequence
  Cyclic GFR-binding peptide
RLSNITIQIMDAANNVVIGEMSDMVV

SEQ ID NO: 90933 - protein, 29 aa, Artificial Sequence
  Cyclic GFR-binding peptide
  MOD_RES (29)..(29): Xaa is C or S
QALSNITIQIMVGRKPKVLGEMSMIVRSX

SEQ ID NO: 90934 - protein, 37 aa, Artificial Sequence; identical to SEQ ID NO: 37138
  Cyclic GFR-binding peptide
  MOD_RES (3)..(4)..(36): Xaa is C or S

SEQ ID NO: 90935 - protein, 32 aa, Artificial Sequence; identical to SEQ ID NO: 37144
  Cyclic GFR-binding peptide
  MOD_RES (1)..(32): Xaa is C or S

SEQ ID NO: 90936 - protein, 31 aa, Artificial Sequence; identical to SEQ ID NO: 37147
  Cyclic GFR-binding peptide
  MOD_RES (31)..(31): Xaa is C or S

SEQ ID NO: 90937 - protein, 40 aa, Artificial Sequence; identical to SEQ ID NO: 37150
  Cyclic GFR-binding peptide
  MOD_RES (5)..(6)..(38)..(40): Xaa is C or S

SEQ ID NO: 90938 - protein, 31 aa, Artificial Sequence
  Cyclic GFR-binding peptide
  MOD_RES (4)..(5): Xaa is C or S
PPTXXVPTRLSNITIQIMDSANNVVLGEMSD

SEQ ID NO: 90939 - protein, 30 aa, Artificial Sequence
  Cyclic GFR-binding peptide
  MOD_RES (4)..(5): Xaa is C or S
PSTXXAPVKTSNITMQIMDNGRVLLLGEMS

SEQ ID NO: 90940 - protein, 34 aa, Artificial Sequence
  Cyclic GFR-binding peptide
  MOD_RES (4)..(5): Xaa is C or S
ASPXXVPQDLSNITIQIMVGRTPKVLGEMSMVVK

SEQ ID NO: 90941 - protein, 31 aa, Artificial Sequence
  Cyclic GFR-binding peptide
  MOD_RES (1)..(2): Xaa is C or S
XXVPTRLSNITIQIMDSANNVVLGEMSDMVV

SEQ ID NO: 90942 - protein, 33 aa, Artificial Sequence; identical to SEQ ID NO: 37159
  Cyclic GFR-binding peptide
  MOD_RES (1)..(33): Xaa is C or S

SEQ ID NO: 90943 - protein, 38 aa, Artificial Sequence; identical to SEQ ID NO: 37161
  Cyclic GFR-binding peptide
  MOD_RES (3)..(4)..(36)..(38): Xaa is C or S

SEQ ID NO: 90944 - protein, 29 aa, Artificial Sequence
  Cyclic GFR-binding peptide
  MOD_RES (26)..(28): Xaa is C or S
SNITMQIMDNGRVLLIGEMSMIVEEXGXL

SEQ ID NO: 90945 - protein, 21 aa, Artificial Sequence
  Cyclic GFR-binding peptide
TSNITMQIMDNGRVLLLGEMS

SEQ ID NO: 90946 - protein, 24 aa, Artificial Sequence
  Cyclic GFR-binding peptide
TRLSNITIQIMDSANNVVIGEMSD

SEQ ID NO: 90947 - protein, 34 aa, Artificial Sequence; identical to SEQ ID NO: 37162
  Cyclic GFR-binding peptide
  MOD_RES (1)..(2)..(34): Xaa is C or S

SEQ ID NO: 90948 - protein, 27 aa, Artificial Sequence
  Cyclic GFR-binding peptide
QDLSNITIQIMVGRTPKVLGEMSMVVK

SEQ ID NO: 90949 - protein, 36 aa, Artificial Sequence; identical to SEQ ID NO: 37163
  Cyclic GFR-binding peptide
  MOD_RES (1)..(33)..(35): Xaa is C or S

SEQ ID NO: 90950 - protein, 29 aa, Artificial Sequence
  Cyclic GFR-binding peptide
  MOD_RES (26)..(28): Xaa is C or S
SNITMQIMDNGRVLLLGEMSMIVEEXGXL

SEQ ID NO: 90951 - protein, 36 aa, Artificial Sequence; identical to SEQ ID NO: 37167
  Cyclic GFR-binding peptide
  MOD_RES (4)..(5)..(36): Xaa is C or S

SEQ ID NO: 90952 - protein, 23 aa, Artificial Sequence
  Cyclic GFR-binding peptide
SNITMQIMNDKQQIIIGEMSGMV

SEQ ID NO: 90953 - protein, 33 aa, Artificial Sequence
  Cyclic GFR-binding peptide
  MOD_RES (4)..(5): Xaa is C or S
ASPXXVSQDLSNITIQIMIGKTPKILGEMSMIV

SEQ ID NO: 90954 - protein, 30 aa, Artificial Sequence
  Cyclic GFR-binding peptide
  MOD_RES (28)..(30): Xaa is C or S
ALSNITIQIMVGRKPKVLGEMSMIVRSXKX

SEQ ID NO: 90955 - protein, 24 aa, Artificial Sequence
  Cyclic GFR-binding peptide
SNITMQIMDNGRVLLIGEMSMIVE

SEQ ID NO: 90956 - protein, 31 aa, Artificial Sequence
  Cyclic GFR-binding peptide
  MOD_RES (28)..(30): Xaa is C or S
LSNITIQIMDAANNVVLGEMSDMVVEAXGXR

SEQ ID NO: 90957 - protein, 30 aa, Artificial Sequence; identical to SEQ ID NO: 1109
  Cyclic GFR-binding peptide

SEQ ID NO: 90958 - protein, 33 aa, Artificial Sequence; identical to SEQ ID NO: 37183
  Cyclic GFR-binding peptide
  MOD_RES (1)..(2): Xaa is C or S

SEQ ID NO: 90959 - protein, 33 aa, Artificial Sequence
  Cyclic GFR-binding peptide
  MOD_RES (31)..(33): Xaa is C or S
PTKMSNITMQIMNDKQQIILGEMSGMVVDRXGX

SEQ ID NO: 90960 - protein, 28 aa, Artificial Sequence
  Cyclic GFR-binding peptide
  MOD_RES (2)..(3): Xaa is C or S
SXXVPARLSNITIQIMDAANNVVIGEMS

SEQ ID NO: 90961 - protein, 38 aa, Artificial Sequence; identical to SEQ ID NO: 37185
  Cyclic GFR-binding peptide
  MOD_RES (5)..(6)..(38): Xaa is C or S

SEQ ID NO: 90962 - protein, 36 aa, Artificial Sequence; identical to SEQ ID NO: 37187
  Cyclic GFR-binding peptide
  MOD_RES (1)..(2)..(33)..(35): Xaa is C or S

SEQ ID NO: 90963 - protein, 26 aa, Artificial Sequence
  Cyclic GFR-binding peptide
PVKTSNITMQIMDNGRVLLLGEMSMI

SEQ ID NO: 90964 - protein, 29 aa, Artificial Sequence
  Cyclic GFR-binding peptide
  MOD_RES (1)..(2): Xaa is C or S
XXAPVKTSNITMQIMDNGRVLLIGEMSMI

SEQ ID NO: 90965 - protein, 35 aa, Artificial Sequence
  Cyclic GFR-binding peptide
  MOD_RES (6)..(7): Xaa is C or S
AAPASXXVPARLSNITIQIMDAANNVVIGEMSDMV

SEQ ID NO: 90966 - protein, 26 aa, Artificial Sequence
  Cyclic GFR-binding peptide
PARLSNITIQIMDAANNVVIGEMSDM

SEQ ID NO: 90967 - protein, 30 aa, Artificial Sequence
  Cyclic GFR-binding peptide
  MOD_RES (4)..(5): Xaa is C or S
PPTXXVPTRLSNITIQIMDSANNVVLGEMS

SEQ ID NO: 90968 - protein, 24 aa, Artificial Sequence
  Cyclic GFR-binding peptide
QDLSNITIQIMVGRTPKVLGEMSM

SEQ ID NO: 90969 - protein, 24 aa, Artificial Sequence
  Cyclic GFR-binding peptide
RLSNITIQIMDSANNVVLGEMSDM

SEQ ID NO: 90970 - protein, 35 aa, Artificial Sequence
  Cyclic GFR-binding peptide
  MOD_RES (6)..(7): Xaa is C or S
ASAAPXXVPQALSNITIQIMVGRKPKVLGEMSMIV

SEQ ID NO: 90971 - protein, 32 aa, Artificial Sequence; identical to SEQ ID NO: 37191
  Cyclic GFR-binding peptide
  MOD_RES (1)..(32): Xaa is C or S

SEQ ID NO: 90972 - protein, 25 aa, Artificial Sequence
  Cyclic GFR-binding peptide
PQDLSNITIQIMVGRTPKVLGEMSM

SEQ ID NO: 90973 - protein, 27 aa, Artificial Sequence
  Cyclic GFR-binding peptide
TKMSNITMQIMNDKQQIILGEMSGMVV

SEQ ID NO: 90974 - protein, 31 aa, Artificial Sequence
  Cyclic GFR-binding peptide
  MOD_RES (3)..(4): Xaa is C or S
APXXVPQALSNITIQIMVGRKPKVLGEMSMI

SEQ ID NO: 90975 - protein, 31 aa, Artificial Sequence
  Cyclic GFR-binding peptide
  MOD_RES (4)..(5): Xaa is C or S
PSTXXAPVKTSNITMQIMDNGRVLLIGEMSM

SEQ ID NO: 90976 - protein, 34 aa, Artificial Sequence; identical to SEQ ID NO: 37197
  Cyclic GFR-binding peptide
  MOD_RES (1)..(2)..(34): Xaa is C or S

SEQ ID NO: 90977 - protein, 34 aa, Artificial Sequence; identical to SEQ ID NO: 37199
  Cyclic GFR-binding peptide
  MOD_RES (1)..(2)..(34): Xaa is C or S

SEQ ID NO: 90978 - protein, 32 aa, Artificial Sequence
  Cyclic GFR-binding peptide
  MOD_RES (2)..(3): Xaa is C or S
SXXVPARLSNITIQIMDAANNVVLGEMSDMVV

SEQ ID NO: 90979 - protein, 33 aa, Artificial Sequence; identical to SEQ ID NO: 37200
  Cyclic GFR-binding peptide
  MOD_RES (1)..(33): Xaa is C or S

SEQ ID NO: 90980 - protein, 22 aa, Artificial Sequence
  Cyclic GFR-binding peptide
SNITIQIMVGRKPKVLGEMSMI

SEQ ID NO: 90981 - protein, 33 aa, Artificial Sequence; identical to SEQ ID NO: 37205
  Cyclic GFR-binding peptide
  MOD_RES (1)..(33): Xaa is C or S

SEQ ID NO: 90982 - protein, 32 aa, Artificial Sequence; identical to SEQ ID NO: 37208
  Cyclic GFR-binding peptide
  MOD_RES (32)..(32): Xaa is C or S

SEQ ID NO: 90983 - protein, 39 aa, Artificial Sequence; identical to SEQ ID NO: 37209
  Cyclic GFR-binding peptide
  MOD_RES (4)..(5)..(37)..(39): Xaa is C or S

SEQ ID NO: 90984 - protein, 39 aa, Artificial Sequence; identical to SEQ ID NO: 37210
  Cyclic GFR-binding peptide
  MOD_RES (3)..(4)..(36)..(38): Xaa is C or S

SEQ ID NO: 90985 - protein, 30 aa, Artificial Sequence
  Cyclic GFR-binding peptide
  MOD_RES (3)..(4): Xaa is C or S
GPXXTPTKMSNITMQIMNDKQQIILGEMSG

SEQ ID NO: 90986 - protein, 25 aa, Artificial Sequence
  Cyclic GFR-binding peptide
TKMSNITMQIMNDKQQIILGEMSGM

SEQ ID NO: 90987 - protein, 33 aa, Artificial Sequence
  Cyclic GFR-binding peptide
  MOD_RES (5)..(6): Xaa is C or S
VPSTXXAPVKTSNITMQIMDNGRVLLIGEMSMI

SEQ ID NO: 90988 - protein, 31 aa, Artificial Sequence
  Cyclic GFR-binding peptide
  MOD_RES (4)..(5): Xaa is C or S
AGPXXTPTKMSNITMQIMNDKQQIIIGEMSG

SEQ ID NO: 90989 - protein, 28 aa, Artificial Sequence
  Cyclic GFR-binding peptide
  MOD_RES (2)..(3): Xaa is C or S
TXXAPVKTSNITMQIMDNGRVLLIGEMS

SEQ ID NO: 90990 - protein, 37 aa, Artificial Sequence; identical to SEQ ID NO: 37215
  Cyclic GFR-binding peptide
  MOD_RES (5)..(6): Xaa is C or S

SEQ ID NO: 90991 - protein, 25 aa, Artificial Sequence
  Cyclic GFR-binding peptide
QDLSNITIQIMVGRTPKVLGEMSMV

SEQ ID NO: 90992 - protein, 38 aa, Artificial Sequence; identical to SEQ ID NO: 37217
  Cyclic GFR-binding peptide
  MOD_RES (6)..(7): Xaa is C or S

SEQ ID NO: 90993 - protein, 36 aa, Artificial Sequence
  Cyclic GFR-binding peptide
  MOD_RES (6)..(7): Xaa is C or S
HVPKPXXAPTKLSNITVQIMDDSSNVIIGEMSNMVV

SEQ ID NO: 90994 - protein, 30 aa, Artificial Sequence
  Cyclic GFR-binding peptide
  MOD_RES (29)..(29): Xaa is C or S
QDLSNITIQIMIGKTPKILGEMSMIVKSXK

SEQ ID NO: 90995 - protein, 38 aa, Artificial Sequence; identical to SEQ ID NO: 37220
  Cyclic GFR-binding peptide
  MOD_RES (2)..(3)..(35)..(37): Xaa is C or S

SEQ ID NO: 90996 - protein, 34 aa, Artificial Sequence; identical to SEQ ID NO: 37223
  Cyclic GFR-binding peptide
  MOD_RES (1)..(2)..(34): Xaa is C or S

SEQ ID NO: 90997 - protein, 29 aa, Artificial Sequence
  Cyclic GFR-binding peptide
VPARLSNITIQIMDAANNVVIGEMSDMVV

SEQ ID NO: 90998 - protein, 33 aa, Artificial Sequence; identical to SEQ ID NO: 37228
  Cyclic GFR-binding peptide
  MOD_RES (1)..(33): Xaa is C or S

SEQ ID NO: 90999 - protein, 30 aa, Artificial Sequence
  Cyclic GFR-binding peptide
  MOD_RES (1)..(2): Xaa is C or S
XXAPVKTSNITMQIMDNGRVLLLGEMSMIV

SEQ ID NO: 91000 - protein, 33 aa, Artificial Sequence
  Cyclic GFR-binding peptide
  MOD_RES (31)..(33): Xaa is C or S
PTRLSNITIQIMDSANNVVLGEMSDMVVESXGX

SEQ ID NO: 91001 - protein, 37 aa, Artificial Sequence; identical to SEQ ID NO: 37229
  Cyclic GFR-binding peptide
  MOD_RES (3)..(4)..(35)..(37): Xaa is C or S

SEQ ID NO: 91002 - protein, 35 aa, Artificial Sequence; identical to SEQ ID NO: 37232
  Cyclic GFR-binding peptide
  MOD_RES (32)..(34): Xaa is C or S

SEQ ID NO: 91003 - protein, 25 aa, Artificial Sequence
  Cyclic GFR-binding peptide
LSNITIQIMVGRTPKVLGEMSMVVK

SEQ ID NO: 91004 - protein, 34 aa, Artificial Sequence
  Cyclic GFR-binding peptide
  MOD_RES (6)..(7): Xaa is C or S
ASASPXXVSQDLSNITIQIMIGKTPKILGEMSMI

SEQ ID NO: 91005 - protein, 27 aa, Artificial Sequence
  Cyclic GFR-binding peptide
SQDLSNITIQIMIGKTPKILGEMSMIV

SEQ ID NO: 91006 - protein, 29 aa, Artificial Sequence
  Cyclic GFR-binding peptide
  MOD_RES (29)..(29): Xaa is C or S
VKTSNITMQIMDNGRVLLLGEMSMIVEEX

SEQ ID NO: 91007 - protein, 24 aa, Artificial Sequence
  Cyclic GFR-binding peptide
SNITIQIMDSANNVVLGEMSDMVV

SEQ ID NO: 91008 - protein, 27 aa, Artificial Sequence
  Cyclic GFR-binding peptide
TRLSNITIQIMDSANNVVLGEMSDMVV

SEQ ID NO: 91009 - protein, 25 aa, Artificial Sequence
  Cyclic GFR-binding peptide
LSNITVQIMDDSSNVILGEMSNMVV

SEQ ID NO: 91010 - protein, 27 aa, Artificial Sequence
  Cyclic GFR-binding peptide
PARLSNITIQIMDAANNVVIGEMSDMV

SEQ ID NO: 91011 - protein, 29 aa, Artificial Sequence
  Cyclic GFR-binding peptide
PVKTSNITMQIMDNGRVLLIGEMSMIVEE

SEQ ID NO: 91012 - protein, 26 aa, Artificial Sequence
  Cyclic GFR-binding peptide
APVKTSNITMQIMDNGRVLLIGEMSM

SEQ ID NO: 91013 - protein, 28 aa, Artificial Sequence
  Cyclic GFR-binding peptide
VSQDLSNITIQIMIGKTPKILGEMSMIV

SEQ ID NO: 91014 - protein, 33 aa, Artificial Sequence
  Cyclic GFR-binding peptide
  MOD_RES (30)..(32): Xaa is C or S
TKMSNITMQIMNDKQQIIIGEMSGMVVDRXGXS

SEQ ID NO: 91015 - protein, 25 aa, Artificial Sequence
  Cyclic GFR-binding peptide
PTRLSNITIQIMDSANNVVIGEMSD

SEQ ID NO: 91016 - protein, 30 aa, Artificial Sequence
  Cyclic GFR-binding peptide
  MOD_RES (28)..(30): Xaa is C or S
LSNITIQIMDSANNVVLGEMSDMVVESXGX

SEQ ID NO: 91017 - protein, 39 aa, Artificial Sequence; identical to SEQ ID NO: 37245
  Cyclic GFR-binding peptide
  MOD_RES (4)..(5)..(37)..(39): Xaa is C or S

SEQ ID NO: 91018 - protein, 34 aa, Artificial Sequence
  Cyclic GFR-binding peptide
  MOD_RES (6)..(7): Xaa is C or S
ASASPXXVPQDLSNITIQIMVGRTPKVLGEMSMV

SEQ ID NO: 91019 - protein, 37 aa, Artificial Sequence; identical to SEQ ID NO: 37250
  Cyclic GFR-binding peptide
  MOD_RES (6)..(7): Xaa is C or S

SEQ ID NO: 91020 - protein, 28 aa, Artificial Sequence
  Cyclic GFR-binding peptide
VPARLSNITIQIMDAANNVVIGEMSDMV

SEQ ID NO: 91021 - protein, 31 aa, Artificial Sequence
  Cyclic GFR-binding peptide
  MOD_RES (30)..(30): Xaa is C or S
PQDLSNITIQIMVGRTPKVLGEMSMVVKSXK

SEQ ID NO: 91022 - protein, 37 aa, Artificial Sequence; identical to SEQ ID NO: 36175
  Cyclic GFR-binding peptide
  MOD_RES (6)..(7): Xaa is C or S

SEQ ID NO: 91023 - protein, 30 aa, Artificial Sequence
  Cyclic GFR-binding peptide
  MOD_RES (2)..(3): Xaa is C or S
TXXVPTRLSNITIQIMDSANNVVIGEMSDM

SEQ ID NO: 91024 - protein, 27 aa, Artificial Sequence
  Cyclic GFR-binding peptide
  MOD_RES (1)..(1): Xaa is C or S
XTPTKMSNITMQIMNDKQQIILGEMSG

SEQ ID NO: 91025 - protein, 29 aa, Artificial Sequence
  Cyclic GFR-binding peptide
  MOD_RES (27)..(29): Xaa is C or S
SNITMQIMNDKQQIILGEMSGMVVDRXGX

SEQ ID NO: 91026 - protein, 29 aa, Artificial Sequence
  Cyclic GFR-binding peptide
  MOD_RES (1)..(1): Xaa is C or S
XVPTRLSNITIQIMDSANNVVIGEMSDMV

SEQ ID NO: 91027 - protein, 29 aa, Artificial Sequence
  Cyclic GFR-binding peptide
TRLSNITIQIMDSANNVVIGEMSDMVVES

SEQ ID NO: 91028 - protein, 31 aa, Artificial Sequence; identical to SEQ ID NO: 36186
  Cyclic GFR-binding peptide
  MOD_RES (1)..(1): Xaa is C or S

SEQ ID NO: 91029 - protein, 23 aa, Artificial Sequence
  Cyclic GFR-binding peptide
LSNITIQIMDAANNVVLGEMSDM

SEQ ID NO: 91030 - protein, 28 aa, Artificial Sequence
  Cyclic GFR-binding peptide
  MOD_RES (2)..(3): Xaa is C or S
PXXAPTKLSNITVQIMDDSSNVILGEMS

SEQ ID NO: 91031 - protein, 29 aa, Artificial Sequence
  Cyclic GFR-binding peptide
  MOD_RES (28)..(28): Xaa is C or S
KTSNITMQIMDNGRVLLLGEMSMIVEEXG

SEQ ID NO: 91032 - protein, 30 aa, Artificial Sequence; identical to SEQ ID NO: 36188
  Cyclic GFR-binding peptide

SEQ ID NO: 91033 - protein, 28 aa, Artificial Sequence
  Cyclic GFR-binding peptide
ARLSNITIQIMDAANNVVLGEMSDMVVE

SEQ ID NO: 91034 - protein, 36 aa, Artificial Sequence; identical to SEQ ID NO: 36189
  Cyclic GFR-binding peptide
  MOD_RES (1)..(2)..(33)..(35): Xaa is C or S

SEQ ID NO: 91035 - protein, 35 aa, Artificial Sequence; identical to SEQ ID NO: 36190
  Cyclic GFR-binding peptide
  MOD_RES (3)..(4)..(35): Xaa is C or S

SEQ ID NO: 91036 - protein, 32 aa, Artificial Sequence; identical to SEQ ID NO: 36194
  Cyclic GFR-binding peptide
  MOD_RES (32)..(32): Xaa is C or S

SEQ ID NO: 91037 - protein, 26 aa, Artificial Sequence
  Cyclic GFR-binding peptide
MSNITMQIMNDKQQIIIGEMSGMVVD

SEQ ID NO: 91038 - protein, 27 aa, Artificial Sequence
  Cyclic GFR-binding peptide
  MOD_RES (1)..(2): Xaa is C or S
XXVPQDLSNITIQIMVGRTPKVLGEMS

SEQ ID NO: 91039 - protein, 29 aa, Artificial Sequence
  Cyclic GFR-binding peptide
  MOD_RES (26)..(28): Xaa is C or S
SNITIQIMVGRKPKVLGEMSMIVRSXKXS

SEQ ID NO: 91040 - protein, 36 aa, Artificial Sequence; identical to SEQ ID NO: 36197
  Cyclic GFR-binding peptide
  MOD_RES (1)..(2)..(34)..(36): Xaa is C or S

SEQ ID NO: 91041 - protein, 25 aa, Artificial Sequence
  Cyclic GFR-binding peptide
TKLSNITVQIMDDSSNVILGEMSNM

SEQ ID NO: 91042 - protein, 29 aa, Artificial Sequence
  Cyclic GFR-binding peptide
  MOD_RES (3)..(4): Xaa is C or S
ASXXVPARLSNITIQIMDAANNVVIGEMS

SEQ ID NO: 91043 - protein, 25 aa, Artificial Sequence
  Cyclic GFR-binding peptide
TRLSNITIQIMDSANNVVLGEMSDM

SEQ ID NO: 91044 - protein, 37 aa, Artificial Sequence; identical to SEQ ID NO: 36200
  Cyclic GFR-binding peptide
  MOD_RES (2)..(3)..(34)..(36): Xaa is C or S

SEQ ID NO: 91045 - protein, 29 aa, Artificial Sequence
  Cyclic GFR-binding peptide
APVKTSNITMQIMDNGRVLLIGEMSMIVE

SEQ ID NO: 91046 - protein, 32 aa, Artificial Sequence
  Cyclic GFR-binding peptide
  MOD_RES (5)..(6): Xaa is C or S
VPKPXXAPTKLSNITVQIMDDSSNVILGEMSN

SEQ ID NO: 91047 - protein, 34 aa, Artificial Sequence; identical to SEQ ID NO: 36208
  Cyclic GFR-binding peptide
  MOD_RES (1)..(32)..(34): Xaa is C or S

SEQ ID NO: 91048 - protein, 41 aa, Artificial Sequence; identical to SEQ ID NO: 36210
  Cyclic GFR-binding peptide
  MOD_RES (5)..(6)..(38)..(40): Xaa is C or S

SEQ ID NO: 91049 - protein, 35 aa, Artificial Sequence; identical to SEQ ID NO: 36211
  Cyclic GFR-binding peptide
  MOD_RES (1)..(2)..(33)..(35): Xaa is C or S

SEQ ID NO: 91050 - protein, 23 aa, Artificial Sequence
  Cyclic GFR-binding peptide
RLSNITIQIMDAANNVVLGEMSD

SEQ ID NO: 91051 - protein, 28 aa, Artificial Sequence
  Cyclic GFR-binding peptide
  MOD_RES (27)..(27): Xaa is C or S
SNITIQIMDSANNVVIGEMSDMVVESXG

SEQ ID NO: 91052 - protein, 35 aa, Artificial Sequence; identical to SEQ ID NO: 36215
  Cyclic GFR-binding peptide
  MOD_RES (1)..(33)..(35): Xaa is C or S

SEQ ID NO: 91053 - protein, 28 aa, Artificial Sequence
  Cyclic GFR-binding peptide
  MOD_RES (28)..(28): Xaa is C or S
LSNITIQIMDSANNVVLGEMSDMVVESX

SEQ ID NO: 91054 - protein, 29 aa, Artificial Sequence
  Cyclic GFR-binding peptide
  MOD_RES (27)..(29): Xaa is C or S
TSNITMQIMDNGRVLLLGEMSMIVEEXGX

SEQ ID NO: 91055 - protein, 29 aa, Artificial Sequence
  Cyclic GFR-binding peptide
  MOD_RES (27)..(29): Xaa is C or S
LSNITIQIMVGRKPKVLGEMSMIVRSXKX

SEQ ID NO: 91056 - protein, 24 aa, Artificial Sequence
  Cyclic GFR-binding peptide
SNITIQIMVGRTPKVLGEMSMVVK

SEQ ID NO: 91057 - protein, 31 aa, Artificial Sequence
  Cyclic GFR-binding peptide
  MOD_RES (3)..(4): Xaa is C or S
PTXXVPTRLSNITIQIMDSANNVVLGEMSDM

SEQ ID NO: 91058 - protein, 39 aa, Artificial Sequence; identical to SEQ ID NO: 36230
  Cyclic GFR-binding peptide
  MOD_RES (5)..(6)..(38): Xaa is C or S

SEQ ID NO: 91059 - protein, 35 aa, Artificial Sequence; identical to SEQ ID NO: 36231
  Cyclic GFR-binding peptide
  MOD_RES (1)..(33)..(35): Xaa is C or S

SEQ ID NO: 91060 - protein, 39 aa, Artificial Sequence; identical to SEQ ID NO: 36232
  Cyclic GFR-binding peptide
  MOD_RES (5)..(6)..(38): Xaa is C or S

SEQ ID NO: 91061 - protein, 30 aa, Artificial Sequence; identical to SEQ ID NO: 36235
  Cyclic GFR-binding peptide

SEQ ID NO: 91062 - protein, 29 aa, Artificial Sequence
  Cyclic GFR-binding peptide
  MOD_RES (2)..(3): Xaa is C or S
TXXAPVKTSNITMQIMDNGRVLLLGEMSM

SEQ ID NO: 91063 - protein, 35 aa, Artificial Sequence; identical to SEQ ID NO: 36237
  Cyclic GFR-binding peptide
  MOD_RES (1)..(2)..(34): Xaa is C or S

SEQ ID NO: 91064 - protein, 23 aa, Artificial Sequence
  Cyclic GFR-binding peptide
TRLSNITIQIMDSANNVVIGEMS

SEQ ID NO: 91065 - protein, 26 aa, Artificial Sequence
  Cyclic GFR-binding peptide
TKMSNITMQIMNDKQQIILGEMSGMV

SEQ ID NO: 91066 - protein, 24 aa, Artificial Sequence
  Cyclic GFR-binding peptide
MSNITMQIMNDKQQIILGEMSGMV

SEQ ID NO: 91067 - protein, 28 aa, Artificial Sequence
  Cyclic GFR-binding peptide
  MOD_RES (2)..(3): Xaa is C or S
TXXVPTRLSNITIQIMDSANNVVLGEMS

SEQ ID NO: 91068 - protein, 38 aa, Artificial Sequence; identical to SEQ ID NO: 36244
  Cyclic GFR-binding peptide
  MOD_RES (2)..(3)..(35)..(37): Xaa is C or S

SEQ ID NO: 91069 - protein, 30 aa, Artificial Sequence
  Cyclic GFR-binding peptide
  MOD_RES (30)..(30): Xaa is C or S
PQDLSNITIQIMVGRTPKVLGEMSMVVKSX

SEQ ID NO: 91070 - protein, 31 aa, Artificial Sequence
  Cyclic GFR-binding peptide
  MOD_RES (29)..(31): Xaa is C or S
RLSNITIQIMDAANNVVIGEMSDMVVEAXGX

SEQ ID NO: 91071 - protein, 24 aa, Artificial Sequence
  Cyclic GFR-binding peptide
DLSNITIQIMVGRTPKVLGEMSMV

SEQ ID NO: 91072 - protein, 34 aa, Artificial Sequence
  Cyclic GFR-binding peptide
  MOD_RES (4)..(5): Xaa is C or S
PSTXXAPVKTSNITMQIMDNGRVLLLGEMSMIVE

SEQ ID NO: 91073 - protein, 28 aa, Artificial Sequence
  Cyclic GFR-binding peptide
KLSNITVQIMDDSSNVILGEMSNMVVRS

SEQ ID NO: 91074 - protein, 29 aa, Artificial Sequence
  Cyclic GFR-binding peptide
  MOD_RES (1)..(1): Xaa is C or S
XVSQDLSNITIQIMIGKTPKILGEMSMIV

SEQ ID NO: 91075 - protein, 25 aa, Artificial Sequence
  Cyclic GFR-binding peptide
SNITIQIMDSANNVVLGEMSDMVVE

SEQ ID NO: 91076 - protein, 28 aa, Artificial Sequence
  Cyclic GFR-binding peptide
VKTSNITMQIMDNGRVLLLGEMSMIVEE

SEQ ID NO: 91077 - protein, 38 aa, Artificial Sequence; identical to SEQ ID NO: 36256
  Cyclic GFR-binding peptide
  MOD_RES (3)..(4)..(36)..(38): Xaa is C or S

SEQ ID NO: 91078 - protein, 28 aa, Artificial Sequence
  Cyclic GFR-binding peptide
  MOD_RES (27)..(27): Xaa is C or S
SNITMQIMNDKQQIILGEMSGMVVDRXG

SEQ ID NO: 91079 - protein, 30 aa, Artificial Sequence
  Cyclic GFR-binding peptide
  MOD_RES (1)..(1): Xaa is C or S
XAPVKTSNITMQIMDNGRVLLIGEMSMIVE

SEQ ID NO: 91080 - protein, 27 aa, Artificial Sequence
  Cyclic GFR-binding peptide
  MOD_RES (26)..(26): Xaa is C or S
SNITMQIMDNGRVLLLGEMSMIVEEXG

SEQ ID NO: 91081 - protein, 32 aa, Artificial Sequence
  Cyclic GFR-binding peptide
  MOD_RES (3)..(4): Xaa is C or S
ASXXVPARLSNITIQIMDAANNVVLGEMSDMV

SEQ ID NO: 91082 - protein, 27 aa, Artificial Sequence
  Cyclic GFR-binding peptide
  MOD_RES (1)..(2): Xaa is C or S
XXVPTRLSNITIQIMDSANNVVIGEMS

SEQ ID NO: 91083 - protein, 40 aa, Artificial Sequence; identical to SEQ ID NO: 36257
  Cyclic GFR-binding peptide
  MOD_RES (5)..(6)..(38)..(40): Xaa is C or S

SEQ ID NO: 91084 - protein, 26 aa, Artificial Sequence
  Cyclic GFR-binding peptide
SNITIQIMDSANNVVLGEMSDMVVES

SEQ ID NO: 91085 - protein, 38 aa, Artificial Sequence; identical to SEQ ID NO: 36258
  Cyclic GFR-binding peptide
  MOD_RES (4)..(5)..(37): Xaa is C or S

SEQ ID NO: 91086 - protein, 35 aa, Artificial Sequence; identical to SEQ ID NO: 36259
  Cyclic GFR-binding peptide
  MOD_RES (1)..(33)..(35): Xaa is C or S

SEQ ID NO: 91087 - protein, 25 aa, Artificial Sequence
  Cyclic GFR-binding peptide
VPTRLSNITIQIMDSANNVVLGEMS

SEQ ID NO: 91088 - protein, 32 aa, Artificial Sequence
  Cyclic GFR-binding peptide
  MOD_RES (31)..(31): Xaa is C or S
PARLSNITIQIMDAANNVVLGEMSDMVVEAXG

SEQ ID NO: 91089 - protein, 31 aa, Artificial Sequence
  Cyclic GFR-binding peptide
  MOD_RES (29)..(31): Xaa is C or S
QDLSNITIQIMIGKTPKILGEMSMIVKSXKX

SEQ ID NO: 91090 - protein, 23 aa, Artificial Sequence
  Cyclic GFR-binding peptide
TKMSNITMQIMNDKQQIILGEMS

SEQ ID NO: 91091 - protein, 33 aa, Artificial Sequence
  Cyclic GFR-binding peptide
  MOD_RES (5)..(6): Xaa is C or S
SAGPXXTPTKMSNITMQIMNDKQQIILGEMSGM

SEQ ID NO: 91092 - protein, 39 aa, Artificial Sequence; identical to SEQ ID NO: 36269
  Cyclic GFR-binding peptide
  MOD_RES (6)..(7)..(39): Xaa is C or S

SEQ ID NO: 91093 - protein, 30 aa, Artificial Sequence
  Cyclic GFR-binding peptide
  MOD_RES (27)..(29): Xaa is C or S
LSNITIQIMVGRTPKVLGEMSMVVKSXKXS

SEQ ID NO: 91094 - protein, 20 aa, Artificial Sequence
  Cyclic GFR-binding peptide
SNITIQIMDAANNVVIGEMS

SEQ ID NO: 91095 - protein, 36 aa, Artificial Sequence; identical to SEQ ID NO: 36271
  Cyclic GFR-binding peptide
  MOD_RES (3)..(4)..(36): Xaa is C or S

SEQ ID NO: 91096 - protein, 26 aa, Artificial Sequence
  Cyclic GFR-binding peptide
  MOD_RES (1)..(1): Xaa is C or S
XVPARLSNITIQIMDAANNVVIGEMS

SEQ ID NO: 91097 - protein, 25 aa, Artificial Sequence
  Cyclic GFR-binding peptide
SNITVQIMDDSSNVILGEMSNMVVR

SEQ ID NO: 91098 - protein, 29 aa, Artificial Sequence
  Cyclic GFR-binding peptide
PARLSNITIQIMDAANNVVLGEMSDMVVE

SEQ ID NO: 91099 - protein, 35 aa, Artificial Sequence; identical to SEQ ID NO: 36275
  Cyclic GFR-binding peptide
  MOD_RES (3)..(4): Xaa is C or S

SEQ ID NO: 91100 - protein, 34 aa, Artificial Sequence
  Cyclic GFR-binding peptide
  MOD_RES (4)..(5): Xaa is C or S
PPTXXVPTRLSNITIQIMDSANNVVIGEMSDMVV

SEQ ID NO: 91101 - protein, 30 aa, Artificial Sequence
  Cyclic GFR-binding peptide
  MOD_RES (28)..(30): Xaa is C or S
MSNITMQIMNDKQQIILGEMSGMVVDRXGX

SEQ ID NO: 91102 - protein, 20 aa, Artificial Sequence
  Cyclic GFR-binding peptide
SNITIQIMDSANNVVLGEMS

SEQ ID NO: 91103 - protein, 39 aa, Artificial Sequence; identical to SEQ ID NO: 36287
  Cyclic GFR-binding peptide
  MOD_RES (6)..(7)..(39): Xaa is C or S

SEQ ID NO: 91104 - protein, 38 aa, Artificial Sequence; identical to SEQ ID NO: 36289
  Cyclic GFR-binding peptide
  MOD_RES (4)..(5)..(36)..(38): Xaa is C or S

SEQ ID NO: 91105 - protein, 36 aa, Artificial Sequence; identical to SEQ ID NO: 36290
  Cyclic GFR-binding peptide
  MOD_RES (1)..(2)..(34)..(36): Xaa is C or S

SEQ ID NO: 91106 - protein, 31 aa, Artificial Sequence
  Cyclic GFR-binding peptide
  MOD_RES (1)..(2): Xaa is C or S
XXAPTKLSNITVQIMDDSSNVILGEMSNMVV

SEQ ID NO: 91107 - protein, 28 aa, Artificial Sequence
  Cyclic GFR-binding peptide
  MOD_RES (1)..(2): Xaa is C or S
XXVPQALSNITIQIMVGRKPKVLGEMSM

SEQ ID NO: 91108 - protein, 36 aa, Artificial Sequence; identical to SEQ ID NO: 36291
  Cyclic GFR-binding peptide
  MOD_RES (3)..(4)..(36): Xaa is C or S

SEQ ID NO: 91109 - protein, 35 aa, Artificial Sequence; identical to SEQ ID NO: 36292
  Cyclic GFR-binding peptide
  MOD_RES (4)..(5): Xaa is C or S

SEQ ID NO: 91110 - protein, 27 aa, Artificial Sequence
  Cyclic GFR-binding peptide
  MOD_RES (27)..(27): Xaa is C or S
LSNITIQIMIGKTPKILGEMSMIVKSX

SEQ ID NO: 91111 - protein, 28 aa, Artificial Sequence
  Cyclic GFR-binding peptide
APTKLSNITVQIMDDSSNVILGEMSNMV

SEQ ID NO: 91112 - protein, 32 aa, Artificial Sequence
  Cyclic GFR-binding peptide
  MOD_RES (2)..(3): Xaa is C or S
TXXVPTRLSNITIQIMDSANNVVLGEMSDMVV

SEQ ID NO: 91113 - protein, 34 aa, Artificial Sequence
  Cyclic GFR-binding peptide
  MOD_RES (6)..(7): Xaa is C or S
HVPKPXXAPTKLSNITVQIMDDSSNVIIGEMSNM

SEQ ID NO: 91114 - protein, 31 aa, Artificial Sequence
  Cyclic GFR-binding peptide
  MOD_RES (31)..(31): Xaa is C or S
PTRLSNITIQIMDSANNVVLGEMSDMVVESX

SEQ ID NO: 91115 - protein, 34 aa, Artificial Sequence
  Cyclic GFR-binding peptide
  MOD_RES (4)..(5): Xaa is C or S
AGPXXTPTKMSNITMQIMNDKQQIILGEMSGMVV

SEQ ID NO: 91116 - protein, 31 aa, Artificial Sequence
  Cyclic GFR-binding peptide
  MOD_RES (29)..(31): Xaa is C or S
KMSNITMQIMNDKQQIIIGEMSGMVVDRXGX

SEQ ID NO: 91117 - protein, 25 aa, Artificial Sequence
  Cyclic GFR-binding peptide
DLSNITIQIMVGRTPKVLGEMSMVV

SEQ ID NO: 91118 - protein, 34 aa, Artificial Sequence; identical to SEQ ID NO: 36302
  Cyclic GFR-binding peptide
  MOD_RES (1)..(32)..(34): Xaa is C or S

SEQ ID NO: 91119 - protein, 24 aa, Artificial Sequence
  Cyclic GFR-binding peptide
SNITIQIMDAANNVVLGEMSDMVV

SEQ ID NO: 91120 - protein, 27 aa, Artificial Sequence
  Cyclic GFR-binding peptide
  MOD_RES (27)..(27): Xaa is C or S
SNITMQIMNDKQQIILGEMSGMVVDRX

SEQ ID NO: 91121 - protein, 42 aa, Artificial Sequence; identical to SEQ ID NO: 36308
  Cyclic GFR-binding peptide
  MOD_RES (6)..(7)..(39)..(41): Xaa is C or S

SEQ ID NO: 91122 - protein, 29 aa, Artificial Sequence
  Cyclic GFR-binding peptide
PQALSNITIQIMVGRKPKVLGEMSMIVRS

SEQ ID NO: 91123 - protein, 27 aa, Artificial Sequence
  Cyclic GFR-binding peptide
QALSNITIQIMVGRKPKVLGEMSMIVR

SEQ ID NO: 91124 - protein, 29 aa, Artificial Sequence
  Cyclic GFR-binding peptide
  MOD_RES (2)..(3): Xaa is C or S
TXXVPTRLSNITIQIMDSANNVVIGEMSD

SEQ ID NO: 91125 - protein, 26 aa, Artificial Sequence
  Cyclic GFR-binding peptide
TPTKMSNITMQIMNDKQQIIIGEMSG

SEQ ID NO: 91126 - protein, 27 aa, Artificial Sequence
  Cyclic GFR-binding peptide
APVKTSNITMQIMDNGRVLLIGEMSMI

SEQ ID NO: 91127 - protein, 30 aa, Artificial Sequence
  Cyclic GFR-binding peptide
  MOD_RES (1)..(1): Xaa is C or S
XVSQDLSNITIQIMIGKTPKILGEMSMIVK

SEQ ID NO: 91128 - protein, 34 aa, Artificial Sequence; identical to SEQ ID NO: 36322
  Cyclic GFR-binding peptide
  MOD_RES (1)..(2)..(34): Xaa is C or S

SEQ ID NO: 91129 - protein, 27 aa, Artificial Sequence
  Cyclic GFR-binding peptide
  MOD_RES (1)..(2): Xaa is C or S
XXAPVKTSNITMQIMDNGRVLLLGEMS

SEQ ID NO: 91130 - protein, 32 aa, Artificial Sequence
  Cyclic GFR-binding peptide
  MOD_RES (5)..(6): Xaa is C or S
TPPTXXVPTRLSNITIQIMDSANNVVLGEMSD

SEQ ID NO: 91131 - protein, 41 aa, Artificial Sequence; identical to SEQ ID NO: 36328
  Cyclic GFR-binding peptide
  MOD_RES (6)..(7)..(38)..(40): Xaa is C or S

SEQ ID NO: 91132 - protein, 22 aa, Artificial Sequence
  Cyclic GFR-binding peptide
LSNITIQIMDSANNVVIGEMSD

SEQ ID NO: 91133 - protein, 31 aa, Artificial Sequence
  Cyclic GFR-binding peptide
  MOD_RES (4)..(5): Xaa is C or S
PASXXVPARLSNITIQIMDAANNVVIGEMSD

SEQ ID NO: 91134 - protein, 36 aa, Artificial Sequence
  Cyclic GFR-binding peptide
  MOD_RES (6)..(7): Xaa is C or S
STPPTXXVPTRLSNITIQIMDSANNVVLGEMSDMVV

SEQ ID NO: 91135 - protein, 25 aa, Artificial Sequence
  Cyclic GFR-binding peptide
PQALSNITIQIMVGRKPKVLGEMSM

SEQ ID NO: 91136 - protein, 31 aa, Artificial Sequence
  Cyclic GFR-binding peptide
  MOD_RES (31)..(31): Xaa is C or S
PTKMSNITMQIMNDKQQIILGEMSGMVVDRX

SEQ ID NO: 91137 - protein, 20 aa, Artificial Sequence
  Cyclic GFR-binding peptide
SNITIQIMVGRTPKVLGEMS

SEQ ID NO: 91138 - protein, 32 aa, Artificial Sequence
  Cyclic GFR-binding peptide
  MOD_RES (2)..(3): Xaa is C or S
TXXAPVKTSNITMQIMDNGRVLLLGEMSMIVE

SEQ ID NO: 91139 - protein, 27 aa, Artificial Sequence
  Cyclic GFR-binding peptide
PQALSNITIQIMVGRKPKVLGEMSMIV

SEQ ID NO: 91140 - protein, 33 aa, Artificial Sequence; identical to SEQ ID NO: 36344
  Cyclic GFR-binding peptide
  MOD_RES (32)..(32): Xaa is C or S

SEQ ID NO: 91141 - protein, 26 aa, Artificial Sequence
  Cyclic GFR-binding peptide
  MOD_RES (1)..(1): Xaa is C or S
XVPTRLSNITIQIMDSANNVVLGEMS

SEQ ID NO: 91142 - protein, 27 aa, Artificial Sequence
  Cyclic GFR-binding peptide
DLSNITIQIMIGKTPKILGEMSMIVKS

SEQ ID NO: 91143 - protein, 32 aa, Artificial Sequence
  Cyclic GFR-binding peptide
  MOD_RES (3)..(4): Xaa is C or S
SPXXVPQDLSNITIQIMVGRTPKVLGEMSMVV

SEQ ID NO: 91144 - protein, 36 aa, Artificial Sequence; identical to SEQ ID NO: 36351
  Cyclic GFR-binding peptide
  MOD_RES (5)..(6): Xaa is C or S

SEQ ID NO: 91145 - protein, 36 aa, Artificial Sequence; identical to SEQ ID NO: 36352
  Cyclic GFR-binding peptide
  MOD_RES (4)..(5)..(36): Xaa is C or S

SEQ ID NO: 91146 - protein, 31 aa, Artificial Sequence
  Cyclic GFR-binding peptide
  MOD_RES (5)..(6): Xaa is C or S
SASPXXVSQDLSNITIQIMIGKTPKILGEMS

SEQ ID NO: 91147 - protein, 28 aa, Artificial Sequence
  Cyclic GFR-binding peptide
QALSNITIQIMVGRKPKVLGEMSMIVRS

SEQ ID NO: 91148 - protein, 23 aa, Artificial Sequence
  Cyclic GFR-binding peptide
SNITIQIMDAANNVVIGEMSDMV

SEQ ID NO: 91149 - protein, 35 aa, Artificial Sequence; identical to SEQ ID NO: 36361
  Cyclic GFR-binding peptide
  MOD_RES (1)..(2)..(34): Xaa is C or S

SEQ ID NO: 91150 - protein, 22 aa, Artificial Sequence
  Cyclic GFR-binding peptide
LSNITIQIMDSANNVVLGEMSD

SEQ ID NO: 91151 - protein, 30 aa, Artificial Sequence
  Cyclic GFR-binding peptide
  MOD_RES (30)..(30): Xaa is C or S
PVKTSNITMQIMDNGRVLLLGEMSMIVEEX

SEQ ID NO: 91152 - protein, 31 aa, Artificial Sequence
  Cyclic GFR-binding peptide
  MOD_RES (28)..(30): Xaa is C or S
LSNITIQIMDAANNVVIGEMSDMVVEAXGXR

SEQ ID NO: 91153 - protein, 29 aa, Artificial Sequence
  Cyclic GFR-binding peptide
  MOD_RES (27)..(29): Xaa is C or S
SNITIQIMDAANNVVLGEMSDMVVEAXGX

SEQ ID NO: 91154 - protein, 23 aa, Artificial Sequence
  Cyclic GFR-binding peptide
SNITIQIMVGRKPKVLGEMSMIV

SEQ ID NO: 91155 - protein, 31 aa, Artificial Sequence; identical to SEQ ID NO: 36367
  Cyclic GFR-binding peptide

SEQ ID NO: 91156 - protein, 24 aa, Artificial Sequence
  Cyclic GFR-binding peptide
KTSNITMQIMDNGRVLLLGEMSMI

SEQ ID NO: 91157 - protein, 37 aa, Artificial Sequence; identical to SEQ ID NO: 36370
  Cyclic GFR-binding peptide
  MOD_RES (5)..(6)..(37): Xaa is C or S

SEQ ID NO: 91158 - protein, 31 aa, Artificial Sequence
  Cyclic GFR-binding peptide
  MOD_RES (30)..(30): Xaa is C or S
SQDLSNITIQIMIGKTPKILGEMSMIVKSXK

SEQ ID NO: 91159 - protein, 38 aa, Artificial Sequence; identical to SEQ ID NO: 36373
  Cyclic GFR-binding peptide
  MOD_RES (3)..(4)..(36)..(38): Xaa is C or S

SEQ ID NO: 91160 - protein, 39 aa, Artificial Sequence; identical to SEQ ID NO: 36377
  Cyclic GFR-binding peptide
  MOD_RES (6)..(7)..(39): Xaa is C or S

SEQ ID NO: 91161 - protein, 25 aa, Artificial Sequence
  Cyclic GFR-binding peptide
MSNITMQIMNDKQQIILGEMSGMVV

SEQ ID NO: 91162 - protein, 32 aa, Artificial Sequence
  Cyclic GFR-binding peptide
  MOD_RES (6)..(7): Xaa is C or S
ASASPXXVPQDLSNITIQIMVGRTPKVLGEMS

SEQ ID NO: 91163 - protein, 27 aa, Artificial Sequence
  Cyclic GFR-binding peptide
KLSNITVQIMDDSSNVILGEMSNMVVR

SEQ ID NO: 91164 - protein, 25 aa, Artificial Sequence
  Cyclic GFR-binding peptide
TSNITMQIMDNGRVLLIGEMSMIVE

SEQ ID NO: 91165 - protein, 30 aa, Artificial Sequence
  Cyclic GFR-binding peptide
PTKMSNITMQIMNDKQQIILGEMSGMVVDR

SEQ ID NO: 91166 - protein, 32 aa, Artificial Sequence; identical to SEQ ID NO: 36385
  Cyclic GFR-binding peptide
  MOD_RES (1)..(1): Xaa is C or S

SEQ ID NO: 91167 - protein, 32 aa, Artificial Sequence; identical to SEQ ID NO: 36388
  Cyclic GFR-binding peptide
  MOD_RES (31)..(31): Xaa is C or S

SEQ ID NO: 91168 - protein, 28 aa, Artificial Sequence
  Cyclic GFR-binding peptide
  MOD_RES (1)..(2): Xaa is C or S
XXAPTKLSNITVQIMDDSSNVILGEMSN

SEQ ID NO: 91169 - protein, 35 aa, Artificial Sequence; identical to SEQ ID NO: 36391
  Cyclic GFR-binding peptide
  MOD_RES (2)..(3)..(34): Xaa is C or S

SEQ ID NO: 91170 - protein, 33 aa, Artificial Sequence; identical to SEQ ID NO: 36392
  Cyclic GFR-binding peptide
  MOD_RES (2)..(3): Xaa is C or S

SEQ ID NO: 91171 - protein, 28 aa, Artificial Sequence
  Cyclic GFR-binding peptide
  MOD_RES (27)..(27): Xaa is C or S
TSNITMQIMDNGRVLLIGEMSMIVEEXG

SEQ ID NO: 91172 - protein, 32 aa, Artificial Sequence
  Cyclic GFR-binding peptide
  MOD_RES (5)..(6): Xaa is C or S
TPPTXXVPTRLSNITIQIMDSANNVVIGEMSD

SEQ ID NO: 91173 - protein, 37 aa, Artificial Sequence; identical to SEQ ID NO: 36397
  Cyclic GFR-binding peptide
  MOD_RES (3)..(4)..(36): Xaa is C or S

SEQ ID NO: 91174 - protein, 32 aa, Artificial Sequence
  Cyclic GFR-binding peptide
  MOD_RES (29)..(31): Xaa is C or S
RLSNITIQIMDAANNVVIGEMSDMVVEAXGXR

SEQ ID NO: 91175 - protein, 33 aa, Artificial Sequence; identical to SEQ ID NO: 36399
  Cyclic GFR-binding peptide
  MOD_RES (1)..(32): Xaa is C or S

SEQ ID NO: 91176 - protein, 23 aa, Artificial Sequence
  Cyclic GFR-binding peptide
LSNITIQIMDSANNVVIGEMSDM

SEQ ID NO: 91177 - protein, 34 aa, Artificial Sequence; identical to SEQ ID NO: 36402
  Cyclic GFR-binding peptide
  MOD_RES (2)..(3)..(34): Xaa is C or S

SEQ ID NO: 91178 - protein, 21 aa, Artificial Sequence
  Cyclic GFR-binding peptide
LSNITIQIMVGRTPKVLGEMS

SEQ ID NO: 91179 - protein, 33 aa, Artificial Sequence; identical to SEQ ID NO: 36403
  Cyclic GFR-binding peptide
  MOD_RES (1)..(2): Xaa is C or S

SEQ ID NO: 91180 - protein, 39 aa, Artificial Sequence; identical to SEQ ID NO: 36404
  Cyclic GFR-binding peptide
  MOD_RES (3)..(4)..(36)..(38): Xaa is C or S

SEQ ID NO: 91181 - protein, 29 aa, Artificial Sequence
  Cyclic GFR-binding peptide
  MOD_RES (1)..(1): Xaa is C or S
XTPTKMSNITMQIMNDKQQIIIGEMSGMV

SEQ ID NO: 91182 - protein, 29 aa, Artificial Sequence
  Cyclic GFR-binding peptide
  MOD_RES (29)..(29): Xaa is C or S
RLSNITIQIMDSANNVVLGEMSDMVVESX

SEQ ID NO: 91183 - protein, 37 aa, Artificial Sequence; identical to SEQ ID NO: 36407
  Cyclic GFR-binding peptide
  MOD_RES (1)..(2)..(34)..(36): Xaa is C or S

SEQ ID NO: 91184 - protein, 31 aa, Artificial Sequence
  Cyclic GFR-binding peptide
  MOD_RES (5)..(6): Xaa is C or S
SAGPXXTPTKMSNITMQIMNDKQQIIIGEMS

SEQ ID NO: 91185 - protein, 31 aa, Artificial Sequence
  Cyclic GFR-binding peptide
  MOD_RES (30)..(30): Xaa is C or S
TKLSNITVQIMDDSSNVILGEMSNMVVRSXG

SEQ ID NO: 91186 - protein, 26 aa, Artificial Sequence
  Cyclic GFR-binding peptide
KTSNITMQIMDNGRVLLLGEMSMIVE

SEQ ID NO: 91187 - protein, 26 aa, Artificial Sequence
  Cyclic GFR-binding peptide
VKTSNITMQIMDNGRVLLLGEMSMIV

SEQ ID NO: 91188 - protein, 27 aa, Artificial Sequence
  Cyclic GFR-binding peptide
  MOD_RES (1)..(2): Xaa is C or S
XXVSQDLSNITIQIMIGKTPKILGEMS

SEQ ID NO: 91189 - protein, 28 aa, Artificial Sequence
  Cyclic GFR-binding peptide
  MOD_RES (26)..(28): Xaa is C or S
SNITIQIMVGRKPKVLGEMSMIVRSXKX

SEQ ID NO: 91190 - protein, 30 aa, Artificial Sequence
  Cyclic GFR-binding peptide
  MOD_RES (2)..(3): Xaa is C or S
TXXAPVKTSNITMQIMDNGRVLLLGEMSMI

SEQ ID NO: 91191 - protein, 41 aa, Artificial Sequence; identical to SEQ ID NO: 36412
  Cyclic GFR-binding peptide
  MOD_RES (5)..(6)..(38)..(40): Xaa is C or S

SEQ ID NO: 91192 - protein, 33 aa, Artificial Sequence; identical to SEQ ID NO: 36413
  Cyclic GFR-binding peptide
  MOD_RES (1)..(33): Xaa is C or S

SEQ ID NO: 91193 - protein, 39 aa, Artificial Sequence; identical to SEQ ID NO: 36414
  Cyclic GFR-binding peptide
  MOD_RES (4)..(5)..(36)..(38): Xaa is C or S

SEQ ID NO: 91194 - protein, 33 aa, Artificial Sequence
  Cyclic GFR-binding peptide
  MOD_RES (4)..(5): Xaa is C or S
PSTXXAPVKTSNITMQIMDNGRVLLIGEMSMIV

SEQ ID NO: 91195 - protein, 32 aa, Artificial Sequence
  Cyclic GFR-binding peptide
  MOD_RES (29)..(31): Xaa is C or S
RLSNITIQIMDSANNVVIGEMSDMVVESXGXR

SEQ ID NO: 91196 - protein, 32 aa, Artificial Sequence
  Cyclic GFR-binding peptide
  MOD_RES (6)..(7): Xaa is C or S
RVPSTXXAPVKTSNITMQIMDNGRVLLLGEMS

SEQ ID NO: 91197 - protein, 35 aa, Artificial Sequence; identical to SEQ ID NO: 36415
  Cyclic GFR-binding peptide
  MOD_RES (2)..(3)..(35): Xaa is C or S

SEQ ID NO: 91198 - protein, 34 aa, Artificial Sequence
  Cyclic GFR-binding peptide
  MOD_RES (4)..(5): Xaa is C or S
PASXXVPARLSNITIQIMDAANNVVIGEMSDMVV

SEQ ID NO: 91199 - protein, 27 aa, Artificial Sequence
  Cyclic GFR-binding peptide
  MOD_RES (26)..(26): Xaa is C or S
SNITIQIMVGRTPKVLGEMSMVVKSXK

SEQ ID NO: 91200 - protein, 26 aa, Artificial Sequence
  Cyclic GFR-binding peptide
QDLSNITIQIMIGKTPKILGEMSMIV

SEQ ID NO: 91201 - protein, 33 aa, Artificial Sequence
  Cyclic GFR-binding peptide
  MOD_RES (5)..(6): Xaa is C or S
SASPXXVSQDLSNITIQIMIGKTPKILGEMSMI

SEQ ID NO: 91202 - protein, 38 aa, Artificial Sequence; identical to SEQ ID NO: 36426
  Cyclic GFR-binding peptide
  MOD_RES (6)..(7): Xaa is C or S

SEQ ID NO: 91203 - protein, 36 aa, Artificial Sequence; identical to SEQ ID NO: 36427
  Cyclic GFR-binding peptide
  MOD_RES (5)..(6): Xaa is C or S

SEQ ID NO: 91204 - protein, 29 aa, Artificial Sequence
  Cyclic GFR-binding peptide
  MOD_RES (2)..(3): Xaa is C or S
PXXTPTKMSNITMQIMNDKQQIIIGEMSG

SEQ ID NO: 91205 - protein, 33 aa, Artificial Sequence; identical to SEQ ID NO: 36431
  Cyclic GFR-binding peptide
  MOD_RES (2)..(3): Xaa is C or S

SEQ ID NO: 91206 - protein, 24 aa, Artificial Sequence
  Cyclic GFR-binding peptide
KMSNITMQIMNDKQQIILGEMSGM

SEQ ID NO: 91207 - protein, 24 aa, Artificial Sequence
  Cyclic GFR-binding peptide
LSNITIQIMDSANNVVIGEMSDMV

SEQ ID NO: 91208 - protein, 39 aa, Artificial Sequence; identical to SEQ ID NO: 36434
  Cyclic GFR-binding peptide
  MOD_RES (4)..(5)..(37)..(39): Xaa is C or S

SEQ ID NO: 91209 - protein, 33 aa, Artificial Sequence
  Cyclic GFR-binding peptide
  MOD_RES (5)..(6): Xaa is C or S
SASPXXVPQDLSNITIQIMVGRTPKVLGEMSMV

SEQ ID NO: 91210 - protein, 26 aa, Artificial Sequence
  Cyclic GFR-binding peptide
VPQDLSNITIQIMVGRTPKVLGEMSM

SEQ ID NO: 91211 - protein, 22 aa, Artificial Sequence
  Cyclic GFR-binding peptide
MSNITMQIMNDKQQIILGEMSG

SEQ ID NO: 91212 - protein, 32 aa, Artificial Sequence; identical to SEQ ID NO: 36440
  Cyclic GFR-binding peptide
  MOD_RES (1)..(2): Xaa is C or S

SEQ ID NO: 91213 - protein, 34 aa, Artificial Sequence; identical to SEQ ID NO: 36441
  Cyclic GFR-binding peptide
  MOD_RES (1)..(2)..(33): Xaa is C or S

SEQ ID NO: 91214 - protein, 36 aa, Artificial Sequence; identical to SEQ ID NO: 36442
  Cyclic GFR-binding peptide
  MOD_RES (1)..(2)..(34)..(36): Xaa is C or S

SEQ ID NO: 91215 - protein, 27 aa, Artificial Sequence
  Cyclic GFR-binding peptide
  MOD_RES (27)..(27): Xaa is C or S
SNITVQIMDDSSNVILGEMSNMVVRSX

SEQ ID NO: 91216 - protein, 34 aa, Artificial Sequence
  Cyclic GFR-binding peptide
  MOD_RES (6)..(7): Xaa is C or S
STPPTXXVPTRLSNITIQIMDSANNVVIGEMSDM

SEQ ID NO: 91217 - protein, 29 aa, Artificial Sequence
  Cyclic GFR-binding peptide
  MOD_RES (29)..(29): Xaa is C or S
KMSNITMQIMNDKQQIILGEMSGMVVDRX

SEQ ID NO: 91218 - protein, 34 aa, Artificial Sequence
  Cyclic GFR-binding peptide
  MOD_RES (31)..(33): Xaa is C or S
PTRLSNITIQIMDSANNVVLGEMSDMVVESXGXR

SEQ ID NO: 91219 - protein, 35 aa, Artificial Sequence; identical to SEQ ID NO: 36444
  Cyclic GFR-binding peptide
  MOD_RES (1)..(32)..(34): Xaa is C or S

SEQ ID NO: 91220 - protein, 41 aa, Artificial Sequence; identical to SEQ ID NO: 36446
  Cyclic GFR-binding peptide
  MOD_RES (6)..(7)..(39)..(41): Xaa is C or S

SEQ ID NO: 91221 - protein, 36 aa, Artificial Sequence; identical to SEQ ID NO: 36450
  Cyclic GFR-binding peptide
  MOD_RES (3)..(4)..(35): Xaa is C or S

SEQ ID NO: 91222 - protein, 30 aa, Artificial Sequence
  Cyclic GFR-binding peptide
  MOD_RES (2)..(3): Xaa is C or S
PXXVSQDLSNITIQIMIGKTPKILGEMSMI

SEQ ID NO: 91223 - protein, 35 aa, Artificial Sequence
  Cyclic GFR-binding peptide
  MOD_RES (5)..(6): Xaa is C or S
SAGPXXTPTKMSNITMQIMNDKQQIIIGEMSGMVV

SEQ ID NO: 91224 - protein, 23 aa, Artificial Sequence
  Cyclic GFR-binding peptide
LSNITIQIMVGRTPKVLGEMSMV

SEQ ID NO: 91225 - protein, 35 aa, Artificial Sequence; identical to SEQ ID NO: 36465
  Cyclic GFR-binding peptide
  MOD_RES (4)..(5): Xaa is C or S

SEQ ID NO: 91226 - protein, 30 aa, Artificial Sequence
  Cyclic GFR-binding peptide
  MOD_RES (1)..(2): Xaa is C or S
XXVPARLSNITIQIMDAANNVVIGEMSDMV

SEQ ID NO: 91227 - protein, 34 aa, Artificial Sequence
  Cyclic GFR-binding peptide
  MOD_RES (31)..(33): Xaa is C or S
PARLSNITIQIMDAANNVVLGEMSDMVVEAXGXR

SEQ ID NO: 91228 - protein, 34 aa, Artificial Sequence
  Cyclic GFR-binding peptide
  MOD_RES (31)..(33): Xaa is C or S
PARLSNITIQIMDAANNVVIGEMSDMVVEAXGXR

SEQ ID NO: 91229 - protein, 27 aa, Artificial Sequence
  Cyclic GFR-binding peptide
ALSNITIQIMVGRKPKVLGEMSMIVRS

SEQ ID NO: 91230 - protein, 27 aa, Artificial Sequence
  Cyclic GFR-binding peptide
LSNITIQIMDAANNVVLGEMSDMVVEA

SEQ ID NO: 91231 - protein, 34 aa, Artificial Sequence; identical to SEQ ID NO: 36473
  Cyclic GFR-binding peptide
  MOD_RES (3)..(4): Xaa is C or S

SEQ ID NO: 91232 - protein, 39 aa, Artificial Sequence; identical to SEQ ID NO: 36475
  Cyclic GFR-binding peptide
  MOD_RES (6)..(7)..(38): Xaa is C or S

SEQ ID NO: 91233 - protein, 20 aa, Artificial Sequence
  Cyclic GFR-binding peptide
SNITIQIMDSANNVVIGEMS

SEQ ID NO: 91234 - protein, 37 aa, Artificial Sequence; identical to SEQ ID NO: 36477
  Cyclic GFR-binding peptide
  MOD_RES (5)..(6): Xaa is C or S

SEQ ID NO: 91235 - protein, 36 aa, Artificial Sequence; identical to SEQ ID NO: 36479
  Cyclic GFR-binding peptide
  MOD_RES (2)..(3)..(35): Xaa is C or S

SEQ ID NO: 91236 - protein, 31 aa, Artificial Sequence; identical to SEQ ID NO: 36483
  Cyclic GFR-binding peptide
  MOD_RES (1)..(1): Xaa is C or S

SEQ ID NO: 91237 - protein, 36 aa, Artificial Sequence; identical to SEQ ID NO: 36488
  Cyclic GFR-binding peptide
  MOD_RES (5)..(6): Xaa is C or S

SEQ ID NO: 91238 - protein, 25 aa, Artificial Sequence
  Cyclic GFR-binding peptide
SNITIQIMDAANNVVLGEMSDMVVE

SEQ ID NO: 91239 - protein, 31 aa, Artificial Sequence
  Cyclic GFR-binding peptide
  MOD_RES (3)..(4): Xaa is C or S
SPXXVSQDLSNITIQIMIGKTPKILGEMSMI

SEQ ID NO: 91240 - protein, 32 aa, Artificial Sequence; identical to SEQ ID NO: 36489
  Cyclic GFR-binding peptide
  MOD_RES (1)..(1): Xaa is C or S

SEQ ID NO: 91241 - protein, 30 aa, Artificial Sequence
  Cyclic GFR-binding peptide
PTKMSNITMQIMNDKQQIIIGEMSGMVVDR

SEQ ID NO: 91242 - protein, 35 aa, Artificial Sequence
  Cyclic GFR-binding peptide
  MOD_RES (6)..(7): Xaa is C or S
STPPTXXVPTRLSNITIQIMDSANNVVIGEMSDMV

SEQ ID NO: 91243 - protein, 34 aa, Artificial Sequence; identical to SEQ ID NO: 36490
  Cyclic GFR-binding peptide
  MOD_RES (32)..(34): Xaa is C or S

SEQ ID NO: 91244 - protein, 37 aa, Artificial Sequence; identical to SEQ ID NO: 36493
  Cyclic GFR-binding peptide
  MOD_RES (2)..(3)..(35)..(37): Xaa is C or S

SEQ ID NO: 91245 - protein, 38 aa, Artificial Sequence; identical to SEQ ID NO: 36494
  Cyclic GFR-binding peptide
  MOD_RES (5)..(6)..(38): Xaa is C or S

SEQ ID NO: 91246 - protein, 34 aa, Artificial Sequence; identical to SEQ ID NO: 36495
  Cyclic GFR-binding peptide
  MOD_RES (3)..(4): Xaa is C or S

SEQ ID NO: 91247 - protein, 27 aa, Artificial Sequence
  Cyclic GFR-binding peptide
PTRLSNITIQIMDSANNVVLGEMSDMV

SEQ ID NO: 91248 - protein, 30 aa, Artificial Sequence
  Cyclic GFR-binding peptide
  MOD_RES (4)..(5): Xaa is C or S
PSTXXAPVKTSNITMQIMDNGRVLLIGEMS

SEQ ID NO: 91249 - protein, 22 aa, Artificial Sequence
  Cyclic GFR-binding peptide
SNITIQIMVGRTPKVLGEMSMV

SEQ ID NO: 91250 - protein, 29 aa, Artificial Sequence
  Cyclic GFR-binding peptide
PTKMSNITMQIMNDKQQIIIGEMSGMVVD

SEQ ID NO: 91251 - protein, 29 aa, Artificial Sequence
  Cyclic GFR-binding peptide
  MOD_RES (1)..(2): Xaa is C or S
XXVPARLSNITIQIMDAANNVVIGEMSDM

SEQ ID NO: 91252 - protein, 34 aa, Artificial Sequence
  Cyclic GFR-binding peptide
  MOD_RES (6)..(7): Xaa is C or S
AAPASXXVPARLSNITIQIMDAANNVVLGEMSDM

SEQ ID NO: 91253 - protein, 24 aa, Artificial Sequence
  Cyclic GFR-binding peptide
ARLSNITIQIMDAANNVVIGEMSD

SEQ ID NO: 91254 - protein, 26 aa, Artificial Sequence
  Cyclic GFR-binding peptide
SNITMQIMNDKQQIIIGEMSGMVVDR

SEQ ID NO: 91255 - protein, 34 aa, Artificial Sequence; identical to SEQ ID NO: 36514
  Cyclic GFR-binding peptide
  MOD_RES (1)..(33): Xaa is C or S

SEQ ID NO: 91256 - protein, 31 aa, Artificial Sequence
  Cyclic GFR-binding peptide
  MOD_RES (2)..(3): Xaa is C or S
PXXAPTKLSNITVQIMDDSSNVILGEMSNMV

SEQ ID NO: 91257 - protein, 36 aa, Artificial Sequence; identical to SEQ ID NO: 36515
  Cyclic GFR-binding peptide
  MOD_RES (2)..(3)..(34)..(36): Xaa is C or S

SEQ ID NO: 91258 - protein, 33 aa, Artificial Sequence
  Cyclic GFR-binding peptide
  MOD_RES (3)..(4): Xaa is C or S
KPXXAPTKLSNITVQIMDDSSNVILGEMSNMVV

SEQ ID NO: 91259 - protein, 29 aa, Artificial Sequence
  Cyclic GFR-binding peptide
  MOD_RES (27)..(29): Xaa is C or S
LSNITIQIMVGRTPKVLGEMSMVVKSXKX

SEQ ID NO: 91260 - protein, 32 aa, Artificial Sequence
  Cyclic GFR-binding peptide
  MOD_RES (4)..(5): Xaa is C or S
PSTXXAPVKTSNITMQIMDNGRVLLIGEMSMI

SEQ ID NO: 91261 - protein, 28 aa, Artificial Sequence
  Cyclic GFR-binding peptide
  MOD_RES (1)..(1): Xaa is C or S
XVPTRLSNITIQIMDSANNVVIGEMSDM

SEQ ID NO: 91262 - protein, 31 aa, Artificial Sequence
  Cyclic GFR-binding peptide
  MOD_RES (5)..(6): Xaa is C or S
SAGPXXTPTKMSNITMQIMNDKQQIILGEMS

SEQ ID NO: 91263 - protein, 35 aa, Artificial Sequence; identical to SEQ ID NO: 36517
  Cyclic GFR-binding peptide
  MOD_RES (32)..(34): Xaa is C or S

SEQ ID NO: 91264 - protein, 24 aa, Artificial Sequence
  Cyclic GFR-binding peptide
TKLSNITVQIMDDSSNVILGEMSN

SEQ ID NO: 91265 - protein, 33 aa, Artificial Sequence
  Cyclic GFR-binding peptide
  MOD_RES (6)..(7): Xaa is C or S
HVPKPXXAPTKLSNITVQIMDDSSNVIIGEMSN

SEQ ID NO: 91266 - protein, 36 aa, Artificial Sequence
  Cyclic GFR-binding peptide
  MOD_RES (6)..(7): Xaa is C or S
ASASPXXVPQDLSNITIQIMVGRTPKVLGEMSMVVK

SEQ ID NO: 91267 - protein, 31 aa, Artificial Sequence; identical to SEQ ID NO: 36521
  Cyclic GFR-binding peptide
  MOD_RES (1)..(1): Xaa is C or S

SEQ ID NO: 91268 - protein, 35 aa, Artificial Sequence; identical to SEQ ID NO: 36522
  Cyclic GFR-binding peptide
  MOD_RES (2)..(3)..(35): Xaa is C or S

SEQ ID NO: 91269 - protein, 35 aa, Artificial Sequence
  Cyclic GFR-binding peptide
  MOD_RES (5)..(6): Xaa is C or S
TPPTXXVPTRLSNITIQIMDSANNVVLGEMSDMVV

SEQ ID NO: 91270 - protein, 34 aa, Artificial Sequence; identical to SEQ ID NO: 36524
  Cyclic GFR-binding peptide
  MOD_RES (2)..(3)..(34): Xaa is C or S

SEQ ID NO: 91271 - protein, 36 aa, Artificial Sequence; identical to SEQ ID NO: 36528
  Cyclic GFR-binding peptide
  MOD_RES (5)..(6): Xaa is C or S

SEQ ID NO: 91272 - protein, 37 aa, Artificial Sequence; identical to SEQ ID NO: 36529
  Cyclic GFR-binding peptide
  MOD_RES (6)..(7): Xaa is C or S

SEQ ID NO: 91273 - protein, 34 aa, Artificial Sequence
  Cyclic GFR-binding peptide
  MOD_RES (4)..(5): Xaa is C or S
AAPXXVPQALSNITIQIMVGRKPKVLGEMSMIVR

SEQ ID NO: 91274 - protein, 32 aa, Artificial Sequence
  Cyclic GFR-binding peptide
  MOD_RES (29)..(31): Xaa is C or S
KMSNITMQIMNDKQQIIIGEMSGMVVDRXGXS

SEQ ID NO: 91275 - protein, 24 aa, Artificial Sequence
  Cyclic GFR-binding peptide
KLSNITVQIMDDSSNVILGEMSNM

SEQ ID NO: 91276 - protein, 33 aa, Artificial Sequence
  Cyclic GFR-binding peptide
  MOD_RES (5)..(6): Xaa is C or S
SAAPXXVPQALSNITIQIMVGRKPKVLGEMSMI

SEQ ID NO: 91277 - protein, 35 aa, Artificial Sequence; identical to SEQ ID NO: 36531
  Cyclic GFR-binding peptide
  MOD_RES (1)..(2)..(34): Xaa is C or S

SEQ ID NO: 91278 - protein, 25 aa, Artificial Sequence
  Cyclic GFR-binding peptide
SNITMQIMNDKQQIILGEMSGMVVD

SEQ ID NO: 91279 - protein, 27 aa, Artificial Sequence
  Cyclic GFR-binding peptide
VKTSNITMQIMDNGRVLLLGEMSMIVE

SEQ ID NO: 91280 - protein, 33 aa, Artificial Sequence
  Cyclic GFR-binding peptide
  MOD_RES (4)..(5): Xaa is C or S
AGPXXTPTKMSNITMQIMNDKQQIILGEMSGMV

SEQ ID NO: 91281 - protein, 26 aa, Artificial Sequence
  Cyclic GFR-binding peptide
TPTKMSNITMQIMNDKQQIILGEMSG

SEQ ID NO: 91282 - protein, 32 aa, Artificial Sequence; identical to SEQ ID NO: 36534
  Cyclic GFR-binding peptide
  MOD_RES (1)..(1): Xaa is C or S

SEQ ID NO: 91283 - protein, 34 aa, Artificial Sequence; identical to SEQ ID NO: 36535
  Cyclic GFR-binding peptide
  MOD_RES (1)..(32)..(34): Xaa is C or S

SEQ ID NO: 91284 - protein, 32 aa, Artificial Sequence
  Cyclic GFR-binding peptide
  MOD_RES (31)..(31): Xaa is C or S
PTRLSNITIQIMDSANNVVLGEMSDMVVESXG

SEQ ID NO: 91285 - protein, 31 aa, Artificial Sequence
  Cyclic GFR-binding peptide
  MOD_RES (2)..(3): Xaa is C or S
TXXAPVKTSNITMQIMDNGRVLLLGEMSMIV

SEQ ID NO: 91286 - protein, 27 aa, Artificial Sequence
  Cyclic GFR-binding peptide
PTKLSNITVQIMDDSSNVILGEMSNMV

SEQ ID NO: 91287 - protein, 27 aa, Artificial Sequence
  Cyclic GFR-binding peptide
  MOD_RES (1)..(1): Xaa is C or S
XAPTKLSNITVQIMDDSSNVILGEMSN

SEQ ID NO: 91288 - protein, 41 aa, Artificial Sequence; identical to SEQ ID NO: 36542
  Cyclic GFR-binding peptide
  MOD_RES (6)..(7)..(38)..(40): Xaa is C or S

SEQ ID NO: 91289 - protein, 26 aa, Artificial Sequence
  Cyclic GFR-binding peptide
VSQDLSNITIQIMIGKTPKILGEMSM

SEQ ID NO: 91290 - protein, 28 aa, Artificial Sequence
  Cyclic GFR-binding peptide
VPQDLSNITIQIMVGRTPKVLGEMSMVV

SEQ ID NO: 91291 - protein, 25 aa, Artificial Sequence
  Cyclic GFR-binding peptide
LSNITIQIMDSANNVVLGEMSDMVV

SEQ ID NO: 91292 - protein, 29 aa, Artificial Sequence
  Cyclic GFR-binding peptide
  MOD_RES (3)..(4): Xaa is C or S
STXXAPVKTSNITMQIMDNGRVLLLGEMS

SEQ ID NO: 91293 - protein, 31 aa, Artificial Sequence
  Cyclic GFR-binding peptide
  MOD_RES (1)..(2): Xaa is C or S
XXTPTKMSNITMQIMNDKQQIILGEMSGMVV

SEQ ID NO: 91294 - protein, 33 aa, Artificial Sequence; identical to SEQ ID NO: 36554
  Cyclic GFR-binding peptide
  MOD_RES (2)..(3): Xaa is C or S

SEQ ID NO: 91295 - protein, 29 aa, Artificial Sequence
  Cyclic GFR-binding peptide
VPTRLSNITIQIMDSANNVVIGEMSDMVV

SEQ ID NO: 91296 - protein, 28 aa, Artificial Sequence
  Cyclic GFR-binding peptide
  MOD_RES (1)..(1): Xaa is C or S
XAPTKLSNITVQIMDDSSNVILGEMSNM

SEQ ID NO: 91297 - protein, 24 aa, Artificial Sequence
  Cyclic GFR-binding peptide
LSNITIQIMVGRKPKVLGEMSMIV

SEQ ID NO: 91298 - protein, 32 aa, Artificial Sequence
  Cyclic GFR-binding peptide
  MOD_RES (2)..(3): Xaa is C or S
PXXVPQDLSNITIQIMVGRTPKVLGEMSMVVK

SEQ ID NO: 91299 - protein, 24 aa, Artificial Sequence
  Cyclic GFR-binding peptide
PTKMSNITMQIMNDKQQIIIGEMS

SEQ ID NO: 91300 - protein, 31 aa, Artificial Sequence
  Cyclic GFR-binding peptide
  MOD_RES (30)..(30): Xaa is C or S
TKMSNITMQIMNDKQQIIIGEMSGMVVDRXG

SEQ ID NO: 91301 - protein, 25 aa, Artificial Sequence
  Cyclic GFR-binding peptide
SNITMQIMDNGRVLLLGEMSMIVEE

SEQ ID NO: 91302 - protein, 33 aa, Artificial Sequence; identical to SEQ ID NO: 36562
  Cyclic GFR-binding peptide
  MOD_RES (31)..(33): Xaa is C or S

SEQ ID NO: 91303 - protein, 33 aa, Artificial Sequence; identical to SEQ ID NO: 36564
  Cyclic GFR-binding peptide
  MOD_RES (31)..(33): Xaa is C or S

SEQ ID NO: 91304 - protein, 31 aa, Artificial Sequence
  Cyclic GFR-binding peptide
  MOD_RES (5)..(6): Xaa is C or S
SASPXXVPQDLSNITIQIMVGRTPKVLGEMS

SEQ ID NO: 91305 - protein, 39 aa, Artificial Sequence; identical to SEQ ID NO: 36566
  Cyclic GFR-binding peptide
  MOD_RES (6)..(7)..(38): Xaa is C or S

SEQ ID NO: 91306 - protein, 38 aa, Artificial Sequence; identical to SEQ ID NO: 36567
  Cyclic GFR-binding peptide
  MOD_RES (5)..(6)..(38): Xaa is C or S

SEQ ID NO: 91307 - protein, 30 aa, Artificial Sequence
  Cyclic GFR-binding peptide
  MOD_RES (30)..(30): Xaa is C or S
ARLSNITIQIMDAANNVVLGEMSDMVVEAX

SEQ ID NO: 91308 - protein, 21 aa, Artificial Sequence
  Cyclic GFR-binding peptide
SNITIQIMIGKTPKILGEMSM

SEQ ID NO: 91309 - protein, 29 aa, Artificial Sequence
  Cyclic GFR-binding peptide
  MOD_RES (1)..(2): Xaa is C or S
XXVPTRLSNITIQIMDSANNVVIGEMSDM

SEQ ID NO: 91310 - protein, 32 aa, Artificial Sequence; identical to SEQ ID NO: 36570
  Cyclic GFR-binding peptide
  MOD_RES (31)..(31): Xaa is C or S

SEQ ID NO: 91311 - protein, 31 aa, Artificial Sequence; identical to SEQ ID NO: 36572
  Cyclic GFR-binding peptide
  MOD_RES (1)..(1): Xaa is C or S

SEQ ID NO: 91312 - protein, 30 aa, Artificial Sequence
  Cyclic GFR-binding peptide
  MOD_RES (1)..(1): Xaa is C or S
XVPTRLSNITIQIMDSANNVVIGEMSDMVV

SEQ ID NO: 91313 - protein, 20 aa, Artificial Sequence
  Cyclic GFR-binding peptide
SNITIQIMDAANNVVLGEMS

SEQ ID NO: 91314 - protein, 24 aa, Artificial Sequence
  Cyclic GFR-binding peptide
SQDLSNITIQIMIGKTPKILGEMS

SEQ ID NO: 91315 - protein, 31 aa, Artificial Sequence; identical to SEQ ID NO: 36576
  Cyclic GFR-binding peptide

SEQ ID NO: 91316 - protein, 37 aa, Artificial Sequence; identical to SEQ ID NO: 36579
  Cyclic GFR-binding peptide
  MOD_RES (4)..(5)..(37): Xaa is C or S

SEQ ID NO: 91317 - protein, 35 aa, Artificial Sequence; identical to SEQ ID NO: 36580
  Cyclic GFR-binding peptide
  MOD_RES (3)..(4): Xaa is C or S

SEQ ID NO: 91318 - protein, 32 aa, Artificial Sequence
  Cyclic GFR-binding peptide
  MOD_RES (2)..(3): Xaa is C or S
SXXVPARLSNITIQIMDAANNVVIGEMSDMVV

SEQ ID NO: 91319 - protein, 28 aa, Artificial Sequence
  Cyclic GFR-binding peptide
  MOD_RES (2)..(3): Xaa is C or S
SXXVPARLSNITIQIMDAANNVVLGEMS

SEQ ID NO: 91320 - protein, 32 aa, Artificial Sequence
  Cyclic GFR-binding peptide
  MOD_RES (6)..(7): Xaa is C or S
ASASPXXVSQDLSNITIQIMIGKTPKILGEMS

SEQ ID NO: 91321 - protein, 38 aa, Artificial Sequence; identical to SEQ ID NO: 36582
  Cyclic GFR-binding peptide
  MOD_RES (6)..(7): Xaa is C or S

SEQ ID NO: 91322 - protein, 31 aa, Artificial Sequence
  Cyclic GFR-binding peptide
  MOD_RES (28)..(30): Xaa is C or S
LSNITIQIMDSANNVVIGEMSDMVVESXGXR

SEQ ID NO: 91323 - protein, 30 aa, Artificial Sequence
  Cyclic GFR-binding peptide
  MOD_RES (2)..(3): Xaa is C or S
PXXVPQDLSNITIQIMVGRTPKVLGEMSMV

SEQ ID NO: 91324 - protein, 30 aa, Artificial Sequence
  Cyclic GFR-binding peptide
  MOD_RES (4)..(5): Xaa is C or S
AGPXXTPTKMSNITMQIMNDKQQIILGEMS

SEQ ID NO: 91325 - protein, 35 aa, Artificial Sequence; identical to SEQ ID NO: 36585
  Cyclic GFR-binding peptide
  MOD_RES (2)..(3)..(35): Xaa is C or S

SEQ ID NO: 91326 - protein, 29 aa, Artificial Sequence
  Cyclic GFR-binding peptide
  MOD_RES (2)..(3): Xaa is C or S
PXXVPQDLSNITIQIMVGRTPKVLGEMSM

SEQ ID NO: 91327 - protein, 21 aa, Artificial Sequence
  Cyclic GFR-binding peptide
TSNITMQIMDNGRVLLIGEMS

SEQ ID NO: 91328 - protein, 36 aa, Artificial Sequence; identical to SEQ ID NO: 36587
  Cyclic GFR-binding peptide
  MOD_RES (4)..(5)..(36): Xaa is C or S

SEQ ID NO: 91329 - protein, 35 aa, Artificial Sequence; identical to SEQ ID NO: 36590
  Cyclic GFR-binding peptide
  MOD_RES (2)..(3)..(35): Xaa is C or S

SEQ ID NO: 91330 - protein, 35 aa, Artificial Sequence; identical to SEQ ID NO: 36592
  Cyclic GFR-binding peptide
  MOD_RES (1)..(2)..(34): Xaa is C or S

SEQ ID NO: 91331 - protein, 36 aa, Artificial Sequence; identical to SEQ ID NO: 36593
  Cyclic GFR-binding peptide
  MOD_RES (2)..(3)..(34)..(36): Xaa is C or S

SEQ ID NO: 91332 - protein, 40 aa, Artificial Sequence; identical to SEQ ID NO: 36594
  Cyclic GFR-binding peptide
  MOD_RES (6)..(7)..(38)..(40): Xaa is C or S

SEQ ID NO: 91333 - protein, 32 aa, Artificial Sequence
  Cyclic GFR-binding peptide
  MOD_RES (30)..(32): Xaa is C or S
ARLSNITIQIMDAANNVVLGEMSDMVVEAXGX

SEQ ID NO: 91334 - protein, 32 aa, Artificial Sequence
  Cyclic GFR-binding peptide
  MOD_RES (4)..(5): Xaa is C or S
PASXXVPARLSNITIQIMDAANNVVLGEMSDM

SEQ ID NO: 91335 - protein, 34 aa, Artificial Sequence; identical to SEQ ID NO: 36596
  Cyclic GFR-binding peptide
  MOD_RES (2)..(3)..(34): Xaa is C or S

SEQ ID NO: 91336 - protein, 33 aa, Artificial Sequence
  Cyclic GFR-binding peptide
  MOD_RES (31)..(33): Xaa is C or S
PARLSNITIQIMDAANNVVLGEMSDMVVEAXGX

SEQ ID NO: 91337 - protein, 28 aa, Artificial Sequence
  Cyclic GFR-binding peptide
RLSNITIQIMDAANNVVLGEMSDMVVEA

SEQ ID NO: 91338 - protein, 25 aa, Artificial Sequence
  Cyclic GFR-binding peptide
QALSNITIQIMVGRKPKVLGEMSMI

SEQ ID NO: 91339 - protein, 30 aa, Artificial Sequence
  Cyclic GFR-binding peptide
  MOD_RES (27)..(29): Xaa is C or S
LSNITIQIMIGKTPKILGEMSMIVKSXKXS

SEQ ID NO: 91340 - protein, 24 aa, Artificial Sequence
  Cyclic GFR-binding peptide
QALSNITIQIMVGRKPKVLGEMSM

SEQ ID NO: 91341 - protein, 32 aa, Artificial Sequence
  Cyclic GFR-binding peptide
  MOD_RES (2)..(3): Xaa is C or S
PXXVPQALSNITIQIMVGRKPKVLGEMSMIVR

SEQ ID NO: 91342 - protein, 25 aa, Artificial Sequence
  Cyclic GFR-binding peptide
PARLSNITIQIMDAANNVVIGEMSD

SEQ ID NO: 91343 - protein, 29 aa, Artificial Sequence
  Cyclic GFR-binding peptide
  MOD_RES (27)..(29): Xaa is C or S
SNITVQIMDDSSNVILGEMSNMVVRSXGX

SEQ ID NO: 91344 - protein, 22 aa, Artificial Sequence
  Cyclic GFR-binding peptide
KTSNITMQIMDNGRVLLLGEMS

SEQ ID NO: 91345 - protein, 34 aa, Artificial Sequence; identical to SEQ ID NO: 36605
  Cyclic GFR-binding peptide
  MOD_RES (32)..(34): Xaa is C or S

SEQ ID NO: 91346 - protein, 21 aa, Artificial Sequence
  Cyclic GFR-binding peptide
LSNITIQIMDSANNVVIGEMS

SEQ ID NO: 91347 - protein, 23 aa, Artificial Sequence
  Cyclic GFR-binding peptide
DLSNITIQIMIGKTPKILGEMSM

SEQ ID NO: 91348 - protein, 26 aa, Artificial Sequence
  Cyclic GFR-binding peptide
  MOD_RES (1)..(1): Xaa is C or S
XVPARLSNITIQIMDAANNVVLGEMS

SEQ ID NO: 91349 - protein, 27 aa, Artificial Sequence
  Cyclic GFR-binding peptide
ARLSNITIQIMDAANNVVLGEMSDMVV

SEQ ID NO: 91350 - protein, 32 aa, Artificial Sequence
  Cyclic GFR-binding peptide
  MOD_RES (5)..(6): Xaa is C or S
SAGPXXTPTKMSNITMQIMNDKQQIILGEMSG

SEQ ID NO: 91351 - protein, 31 aa, Artificial Sequence
  Cyclic GFR-binding peptide
  MOD_RES (1)..(2): Xaa is C or S
XXVPTRLSNITIQIMDSANNVVIGEMSDMVV

SEQ ID NO: 91352 - protein, 35 aa, Artificial Sequence; identical to SEQ ID NO: 36611
  Cyclic GFR-binding peptide
  MOD_RES (2)..(3)..(34): Xaa is C or S

SEQ ID NO: 91353 - protein, 34 aa, Artificial Sequence
  Cyclic GFR-binding peptide
  MOD_RES (4)..(5): Xaa is C or S
PKPXXAPTKLSNITVQIMDDSSNVILGEMSNMVV

SEQ ID NO: 91354 - protein, 31 aa, Artificial Sequence
  Cyclic GFR-binding peptide
  MOD_RES (30)..(30): Xaa is C or S
TKMSNITMQIMNDKQQIILGEMSGMVVDRXG

SEQ ID NO: 91355 - protein, 26 aa, Artificial Sequence
  Cyclic GFR-binding peptide
LSNITIQIMDSANNVVLGEMSDMVVE

SEQ ID NO: 91356 - protein, 31 aa, Artificial Sequence
  Cyclic GFR-binding peptide
  MOD_RES (28)..(30): Xaa is C or S
KTSNITMQIMDNGRVLLLGEMSMIVEEXGXL

SEQ ID NO: 91357 - protein, 23 aa, Artificial Sequence
  Cyclic GFR-binding peptide
KMSNITMQIMNDKQQIILGEMSG

SEQ ID NO: 91358 - protein, 29 aa, Artificial Sequence
  Cyclic GFR-binding peptide
  MOD_RES (29)..(29): Xaa is C or S
VKTSNITMQIMDNGRVLLIGEMSMIVEEX

SEQ ID NO: 91359 - protein, 38 aa, Artificial Sequence; identical to SEQ ID NO: 36616
  Cyclic GFR-binding peptide
  MOD_RES (6)..(7): Xaa is C or S

SEQ ID NO: 91360 - protein, 28 aa, Artificial Sequence
  Cyclic GFR-binding peptide
  MOD_RES (2)..(3): Xaa is C or S
PXXVPQALSNITIQIMVGRKPKVLGEMS

SEQ ID NO: 91361 - protein, 31 aa, Artificial Sequence
  Cyclic GFR-binding peptide
  MOD_RES (29)..(31): Xaa is C or S
RLSNITIQIMDSANNVVLGEMSDMVVESXGX

SEQ ID NO: 91362 - protein, 35 aa, Artificial Sequence; identical to SEQ ID NO: 36619
  Cyclic GFR-binding peptide
  MOD_RES (4)..(5): Xaa is C or S

SEQ ID NO: 91363 - protein, 38 aa, Artificial Sequence; identical to SEQ ID NO: 36621
  Cyclic GFR-binding peptide
  MOD_RES (6)..(7)..(38): Xaa is C or S

SEQ ID NO: 91364 - protein, 37 aa, Artificial Sequence; identical to SEQ ID NO: 36622
  Cyclic GFR-binding peptide
  MOD_RES (2)..(3)..(35)..(37): Xaa is C or S

SEQ ID NO: 91365 - protein, 32 aa, Artificial Sequence
  Cyclic GFR-binding peptide
  MOD_RES (3)..(4): Xaa is C or S
APXXVPQALSNITIQIMVGRKPKVLGEMSMIV

SEQ ID NO: 91366 - protein, 36 aa, Artificial Sequence; identical to SEQ ID NO: 36624
  Cyclic GFR-binding peptide
  MOD_RES (3)..(4)..(36): Xaa is C or S

SEQ ID NO: 91367 - protein, 35 aa, Artificial Sequence
  Cyclic GFR-binding peptide
  MOD_RES (6)..(7): Xaa is C or S
HVPKPXXAPTKLSNITVQIMDDSSNVIIGEMSNMV

SEQ ID NO: 91368 - protein, 26 aa, Artificial Sequence
  Cyclic GFR-binding peptide
TRLSNITIQIMDSANNVVIGEMSDMV

SEQ ID NO: 91369 - protein, 29 aa, Artificial Sequence
  Cyclic GFR-binding peptide
  MOD_RES (1)..(2): Xaa is C or S
XXAPTKLSNITVQIMDDSSNVILGEMSNM

SEQ ID NO: 91370 - protein, 24 aa, Artificial Sequence
  Cyclic GFR-binding peptide
ALSNITIQIMVGRKPKVLGEMSMI

SEQ ID NO: 91371 - protein, 31 aa, Artificial Sequence; identical to SEQ ID NO: 36631
  Cyclic GFR-binding peptide
  MOD_RES (31)..(31): Xaa is C or S

SEQ ID NO: 91372 - protein, 38 aa, Artificial Sequence; identical to SEQ ID NO: 36632
  Cyclic GFR-binding peptide
  MOD_RES (5)..(6)..(37): Xaa is C or S

SEQ ID NO: 91373 - protein, 35 aa, Artificial Sequence
  Cyclic GFR-binding peptide
  MOD_RES (6)..(7): Xaa is C or S
GSAGPXXTPTKMSNITMQIMNDKQQIILGEMSGMV

SEQ ID NO: 91374 - protein, 25 aa, Artificial Sequence
  Cyclic GFR-binding peptide
DLSNITIQIMIGKTPKILGEMSMIV

SEQ ID NO: 91375 - protein, 28 aa, Artificial Sequence
  Cyclic GFR-binding peptide
  MOD_RES (26)..(28): Xaa is C or S
SNITMQIMDNGRVLLLGEMSMIVEEXGX

SEQ ID NO: 91376 - protein, 23 aa, Artificial Sequence
  Cyclic GFR-binding peptide
QDLSNITIQIMVGRTPKVLGEMS

SEQ ID NO: 91377 - protein, 41 aa, Artificial Sequence; identical to SEQ ID NO: 36638
  Cyclic GFR-binding peptide
  MOD_RES (5)..(6)..(38)..(40): Xaa is C or S

SEQ ID NO: 91378 - protein, 20 aa, Artificial Sequence
  Cyclic GFR-binding peptide
SNITMQIMDNGRVLLLGEMS

SEQ ID NO: 91379 - protein, 31 aa, Artificial Sequence
  Cyclic GFR-binding peptide
  MOD_RES (2)..(3): Xaa is C or S
SXXVPARLSNITIQIMDAANNVVLGEMSDMV

SEQ ID NO: 91380 - protein, 26 aa, Artificial Sequence
  Cyclic GFR-binding peptide
PTKLSNITVQIMDDSSNVILGEMSNM

SEQ ID NO: 91381 - protein, 31 aa, Artificial Sequence
  Cyclic GFR-binding peptide
  MOD_RES (29)..(31): Xaa is C or S
RLSNITIQIMDSANNVVIGEMSDMVVESXGX

SEQ ID NO: 91382 - protein, 29 aa, Artificial Sequence
  Cyclic GFR-binding peptide
PTKMSNITMQIMNDKQQIILGEMSGMVVD

SEQ ID NO: 91383 - protein, 29 aa, Artificial Sequence
  Cyclic GFR-binding peptide
  MOD_RES (2)..(3): Xaa is C or S
TXXVPTRLSNITIQIMDSANNVVLGEMSD

SEQ ID NO: 91384 - protein, 41 aa, Artificial Sequence; identical to SEQ ID NO: 36647
  Cyclic GFR-binding peptide
  MOD_RES (6)..(7)..(39)..(41): Xaa is C or S

SEQ ID NO: 91385 - protein, 31 aa, Artificial Sequence
  Cyclic GFR-binding peptide
  MOD_RES (3)..(4): Xaa is C or S
SPXXVPQDLSNITIQIMVGRTPKVLGEMSMV

SEQ ID NO: 91386 - protein, 30 aa, Artificial Sequence
  Cyclic GFR-binding peptide
  MOD_RES (28)..(30): Xaa is C or S
KTSNITMQIMDNGRVLLIGEMSMIVEEXGX

SEQ ID NO: 91387 - protein, 28 aa, Artificial Sequence
  Cyclic GFR-binding peptide
  MOD_RES (27)..(27): Xaa is C or S
SNITIQIMDAANNVVLGEMSDMVVEAXG

SEQ ID NO: 91388 - protein, 33 aa, Artificial Sequence
  Cyclic GFR-binding peptide
  MOD_RES (30)..(32): Xaa is C or S
TKLSNITVQIMDDSSNVILGEMSNMVVRSXGXH

SEQ ID NO: 91389 - protein, 36 aa, Artificial Sequence; identical to SEQ ID NO: 36653
  Cyclic GFR-binding peptide
  MOD_RES (3)..(4)..(35): Xaa is C or S

SEQ ID NO: 91390 - protein, 23 aa, Artificial Sequence
  Cyclic GFR-binding peptide
SNITIQIMDSANNVVLGEMSDMV

SEQ ID NO: 91391 - protein, 28 aa, Artificial Sequence
  Cyclic GFR-binding peptide
APVKTSNITMQIMDNGRVLLIGEMSMIV

SEQ ID NO: 91392 - protein, 35 aa, Artificial Sequence; identical to SEQ ID NO: 36659
  Cyclic GFR-binding peptide
  MOD_RES (1)..(32)..(34): Xaa is C or S

SEQ ID NO: 91393 - protein, 28 aa, Artificial Sequence
  Cyclic GFR-binding peptide
  MOD_RES (1)..(2): Xaa is C or S
XXVPTRLSNITIQIMDSANNVVIGEMSD

SEQ ID NO: 91394 - protein, 28 aa, Artificial Sequence
  Cyclic GFR-binding peptide
  MOD_RES (2)..(3): Xaa is C or S
PXXTPTKMSNITMQIMNDKQQIILGEMS

SEQ ID NO: 91395 - protein, 33 aa, Artificial Sequence
  Cyclic GFR-binding peptide
  MOD_RES (3)..(4): Xaa is C or S
STXXAPVKTSNITMQIMDNGRVLLIGEMSMIVE

SEQ ID NO: 91396 - protein, 40 aa, Artificial Sequence; identical to SEQ ID NO: 36662
  Cyclic GFR-binding peptide
  MOD_RES (5)..(6)..(38)..(40): Xaa is C or S

SEQ ID NO: 91397 - protein, 35 aa, Artificial Sequence; identical to SEQ ID NO: 36663
  Cyclic GFR-binding peptide
  MOD_RES (3)..(4): Xaa is C or S

SEQ ID NO: 91398 - protein, 20 aa, Artificial Sequence
  Cyclic GFR-binding peptide
SNITIQIMDSANNVVIGEMS

SEQ ID NO: 91399 - protein, 34 aa, Artificial Sequence
  Cyclic GFR-binding peptide
  MOD_RES (5)..(6): Xaa is C or S
TPPTXXVPTRLSNITIQIMDSANNVVLGEMSDMV

SEQ ID NO: 91400 - protein, 28 aa, Artificial Sequence
  Cyclic GFR-binding peptide
TKMSNITMQIMNDKQQIIIGEMSGMVVD

SEQ ID NO: 91401 - protein, 32 aa, Artificial Sequence
  Cyclic GFR-binding peptide
  MOD_RES (30)..(32): Xaa is C or S
PVKTSNITMQIMDNGRVLLLGEMSMIVEEXGX

SEQ ID NO: 91402 - protein, 32 aa, Artificial Sequence; identical to SEQ ID NO: 36672
  Cyclic GFR-binding peptide
  MOD_RES (1)..(2): Xaa is C or S

SEQ ID NO: 91403 - protein, 26 aa, Artificial Sequence
  Cyclic GFR-binding peptide
LSNITVQIMDDSSNVILGEMSNMVVR

SEQ ID NO: 91404 - protein, 32 aa, Artificial Sequence
  Cyclic GFR-binding peptide
  MOD_RES (29)..(31): Xaa is C or S
RLSNITIQIMDAANNVVLGEMSDMVVEAXGXR

SEQ ID NO: 91405 - protein, 39 aa, Artificial Sequence; identical to SEQ ID NO: 36677
  Cyclic GFR-binding peptide
  MOD_RES (5)..(6)..(38): Xaa is C or S

SEQ ID NO: 91406 - protein, 28 aa, Artificial Sequence
  Cyclic GFR-binding peptide
  MOD_RES (28)..(28): Xaa is C or S
DLSNITIQIMVGRTPKVLGEMSMVVKSX

SEQ ID NO: 91407 - protein, 28 aa, Artificial Sequence
  Cyclic GFR-binding peptide
SQDLSNITIQIMIGKTPKILGEMSMIVK

SEQ ID NO: 91408 - protein, 29 aa, Artificial Sequence
  Cyclic GFR-binding peptide
  MOD_RES (28)..(28): Xaa is C or S
LSNITIQIMDSANNVVIGEMSDMVVESXG

SEQ ID NO: 91409 - protein, 36 aa, Artificial Sequence
  Cyclic GFR-binding peptide
  MOD_RES (6)..(7): Xaa is C or S
ASAAPXXVPQALSNITIQIMVGRKPKVLGEMSMIVR

SEQ ID NO: 91410 - protein, 30 aa, Artificial Sequence
  Cyclic GFR-binding peptide
  MOD_RES (29)..(29): Xaa is C or S
KLSNITVQIMDDSSNVILGEMSNMVVRSXG

SEQ ID NO: 91411 - protein, 34 aa, Artificial Sequence; identical to SEQ ID NO: 36682
  Cyclic GFR-binding peptide
  MOD_RES (31)..(33): Xaa is C or S

SEQ ID NO: 91412 - protein, 38 aa, Artificial Sequence; identical to SEQ ID NO: 36684
  Cyclic GFR-binding peptide
  MOD_RES (4)..(5)..(36)..(38): Xaa is C or S

SEQ ID NO: 91413 - protein, 23 aa, Artificial Sequence
  Cyclic GFR-binding peptide
KMSNITMQIMNDKQQIIIGEMSG

SEQ ID NO: 91414 - protein, 35 aa, Artificial Sequence; identical to SEQ ID NO: 36686
  Cyclic GFR-binding peptide
  MOD_RES (1)..(2)..(34): Xaa is C or S

SEQ ID NO: 91415 - protein, 20 aa, Artificial Sequence
  Cyclic GFR-binding peptide
SNITMQIMNDKQQIILGEMS

SEQ ID NO: 91416 - protein, 33 aa, Artificial Sequence; identical to SEQ ID NO: 36688
  Cyclic GFR-binding peptide
  MOD_RES (31)..(33): Xaa is C or S

SEQ ID NO: 91417 - protein, 41 aa, Artificial Sequence; identical to SEQ ID NO: 36690
  Cyclic GFR-binding peptide
  MOD_RES (6)..(7)..(38)..(40): Xaa is C or S

SEQ ID NO: 91418 - protein, 31 aa, Artificial Sequence
  Cyclic GFR-binding peptide
  MOD_RES (5)..(6): Xaa is C or S
VPSTXXAPVKTSNITMQIMDNGRVLLIGEMS

SEQ ID NO: 91419 - protein, 42 aa, Artificial Sequence; identical to SEQ ID NO: 36692
  Cyclic GFR-binding peptide
  MOD_RES (6)..(7)..(39)..(41): Xaa is C or S

SEQ ID NO: 91420 - protein, 26 aa, Artificial Sequence
  Cyclic GFR-binding peptide
ARLSNITIQIMDAANNVVLGEMSDMV

SEQ ID NO: 91421 - protein, 37 aa, Artificial Sequence; identical to SEQ ID NO: 36697
  Cyclic GFR-binding peptide
  MOD_RES (5)..(6): Xaa is C or S

SEQ ID NO: 91422 - protein, 31 aa, Artificial Sequence
  Cyclic GFR-binding peptide
  MOD_RES (28)..(30): Xaa is C or S
DLSNITIQIMIGKTPKILGEMSMIVKSXKXS

SEQ ID NO: 91423 - protein, 30 aa, Artificial Sequence
  Cyclic GFR-binding peptide
  MOD_RES (29)..(29): Xaa is C or S
VKTSNITMQIMDNGRVLLLGEMSMIVEEXG

SEQ ID NO: 91424 - protein, 41 aa, Artificial Sequence; identical to SEQ ID NO: 36704
  Cyclic GFR-binding peptide
  MOD_RES (6)..(7)..(39)..(41): Xaa is C or S

SEQ ID NO: 91425 - protein, 26 aa, Artificial Sequence
  Cyclic GFR-binding peptide
RLSNITIQIMDAANNVVLGEMSDMVV

SEQ ID NO: 91426 - protein, 24 aa, Artificial Sequence
  Cyclic GFR-binding peptide
TSNITMQIMDNGRVLLLGEMSMIV

SEQ ID NO: 91427 - protein, 27 aa, Artificial Sequence
  Cyclic GFR-binding peptide
  MOD_RES (1)..(1): Xaa is C or S
XTPTKMSNITMQIMNDKQQIIIGEMSG

SEQ ID NO: 91428 - protein, 28 aa, Artificial Sequence
  Cyclic GFR-binding peptide
TKMSNITMQIMNDKQQIILGEMSGMVVD

SEQ ID NO: 91429 - protein, 27 aa, Artificial Sequence
  Cyclic GFR-binding peptide
  MOD_RES (26)..(26): Xaa is C or S
SNITIQIMIGKTPKILGEMSMIVKSXK

SEQ ID NO: 91430 - protein, 32 aa, Artificial Sequence
  Cyclic GFR-binding peptide
  MOD_RES (5)..(6): Xaa is C or S
SAGPXXTPTKMSNITMQIMNDKQQIIIGEMSG

SEQ ID NO: 91431 - protein, 26 aa, Artificial Sequence
  Cyclic GFR-binding peptide
RLSNITIQIMDSANNVVIGEMSDMVV

SEQ ID NO: 91432 - protein, 25 aa, Artificial Sequence
  Cyclic GFR-binding peptide
VPARLSNITIQIMDAANNVVIGEMS

SEQ ID NO: 91433 - protein, 38 aa, Artificial Sequence; identical to SEQ ID NO: 36707
  Cyclic GFR-binding peptide
  MOD_RES (5)..(6)..(37): Xaa is C or S

SEQ ID NO: 91434 - protein, 23 aa, Artificial Sequence
  Cyclic GFR-binding peptide
SNITMQIMDNGRVLLIGEMSMIV

SEQ ID NO: 91435 - protein, 35 aa, Artificial Sequence; identical to SEQ ID NO: 36709
  Cyclic GFR-binding peptide
  MOD_RES (1)..(2)..(33)..(35): Xaa is C or S

SEQ ID NO: 91436 - protein, 32 aa, Artificial Sequence
  Cyclic GFR-binding peptide
  MOD_RES (31)..(31): Xaa is C or S
PTRLSNITIQIMDSANNVVIGEMSDMVVESXG

SEQ ID NO: 91437 - protein, 36 aa, Artificial Sequence; identical to SEQ ID NO: 36711
  Cyclic GFR-binding peptide
  MOD_RES (3)..(4)..(35): Xaa is C or S

SEQ ID NO: 91438 - protein, 33 aa, Artificial Sequence; identical to SEQ ID NO: 36712
  Cyclic GFR-binding peptide
  MOD_RES (1)..(2): Xaa is C or S

SEQ ID NO: 91439 - protein, 35 aa, Artificial Sequence; identical to SEQ ID NO: 36713
  Cyclic GFR-binding peptide
  MOD_RES (1)..(2)..(33)..(35): Xaa is C or S

SEQ ID NO: 91440 - protein, 31 aa, Artificial Sequence
  Cyclic GFR-binding peptide
  MOD_RES (29)..(31): Xaa is C or S
VKTSNITMQIMDNGRVLLIGEMSMIVEEXGX

SEQ ID NO: 91441 - protein, 36 aa, Artificial Sequence
  Cyclic GFR-binding peptide
  MOD_RES (6)..(7): Xaa is C or S
RVPSTXXAPVKTSNITMQIMDNGRVLLIGEMSMIVE

SEQ ID NO: 91442 - protein, 35 aa, Artificial Sequence; identical to SEQ ID NO: 36714
  Cyclic GFR-binding peptide
  MOD_RES (4)..(5): Xaa is C or S

SEQ ID NO: 91443 - protein, 27 aa, Artificial Sequence
  Cyclic GFR-binding peptide
KMSNITMQIMNDKQQIIIGEMSGMVVD

SEQ ID NO: 91444 - protein, 31 aa, Artificial Sequence
  Cyclic GFR-binding peptide
  MOD_RES (28)..(30): Xaa is C or S
DLSNITIQIMVGRTPKVLGEMSMVVKSXKXS

SEQ ID NO: 91445 - protein, 26 aa, Artificial Sequence
  Cyclic GFR-binding peptide
KMSNITMQIMNDKQQIIIGEMSGMVV

SEQ ID NO: 91446 - protein, 40 aa, Artificial Sequence; identical to SEQ ID NO: 36718
  Cyclic GFR-binding peptide
  MOD_RES (6)..(7)..(39): Xaa is C or S

SEQ ID NO: 91447 - protein, 33 aa, Artificial Sequence
  Cyclic GFR-binding peptide
  MOD_RES (6)..(7): Xaa is C or S
HVPKPXXAPTKLSNITVQIMDDSSNVILGEMSN

SEQ ID NO: 91448 - protein, 26 aa, Artificial Sequence
  Cyclic GFR-binding peptide
  MOD_RES (1)..(1): Xaa is C or S
XTPTKMSNITMQIMNDKQQIIIGEMS

SEQ ID NO: 91449 - protein, 27 aa, Artificial Sequence
  Cyclic GFR-binding peptide
  MOD_RES (27)..(27): Xaa is C or S
SNITIQIMDAANNVVLGEMSDMVVEAX

SEQ ID NO: 91450 - protein, 26 aa, Artificial Sequence
  Cyclic GFR-binding peptide
APTKLSNITVQIMDDSSNVILGEMSN

SEQ ID NO: 91451 - protein, 27 aa, Artificial Sequence
  Cyclic GFR-binding peptide
  MOD_RES (27)..(27): Xaa is C or S
SNITMQIMNDKQQIIIGEMSGMVVDRX

SEQ ID NO: 91452 - protein, 24 aa, Artificial Sequence
  Cyclic GFR-binding peptide
RLSNITIQIMDSANNVVIGEMSDM

SEQ ID NO: 91453 - protein, 28 aa, Artificial Sequence
  Cyclic GFR-binding peptide
  MOD_RES (1)..(2): Xaa is C or S
XXAPVKTSNITMQIMDNGRVLLLGEMSM

SEQ ID NO: 91454 - protein, 24 aa, Artificial Sequence
  Cyclic GFR-binding peptide
RLSNITIQIMDAANNVVIGEMSDM

SEQ ID NO: 91455 - protein, 32 aa, Artificial Sequence
  Cyclic GFR-binding peptide
  MOD_RES (3)..(4): Xaa is C or S
GPXXTPTKMSNITMQIMNDKQQIILGEMSGMV

SEQ ID NO: 91456 - protein, 34 aa, Artificial Sequence
  Cyclic GFR-binding peptide
  MOD_RES (6)..(7): Xaa is C or S
AAPASXXVPARLSNITIQIMDAANNVVIGEMSDM

SEQ ID NO: 91457 - protein, 32 aa, Artificial Sequence; identical to SEQ ID NO: 36726
  Cyclic GFR-binding peptide
  MOD_RES (1)..(2): Xaa is C or S

SEQ ID NO: 91458 - protein, 36 aa, Artificial Sequence; identical to SEQ ID NO: 36729
  Cyclic GFR-binding peptide
  MOD_RES (4)..(5): Xaa is C or S

SEQ ID NO: 91459 - protein, 23 aa, Artificial Sequence
  Cyclic GFR-binding peptide
MSNITMQIMNDKQQIILGEMSGM

SEQ ID NO: 91460 - protein, 35 aa, Artificial Sequence; identical to SEQ ID NO: 36731
  Cyclic GFR-binding peptide
  MOD_RES (1)..(2)..(34): Xaa is C or S

SEQ ID NO: 91461 - protein, 25 aa, Artificial Sequence
  Cyclic GFR-binding peptide
VKTSNITMQIMDNGRVLLLGEMSMI

SEQ ID NO: 91462 - protein, 30 aa, Artificial Sequence; identical to SEQ ID NO: 1128
  Cyclic GFR-binding peptide

SEQ ID NO: 91463 - protein, 30 aa, Artificial Sequence
  Cyclic GFR-binding peptide
  MOD_RES (1)..(2): Xaa is C or S
XXVPTRLSNITIQIMDSANNVVIGEMSDMV

SEQ ID NO: 91464 - protein, 39 aa, Artificial Sequence; identical to SEQ ID NO: 36734
  Cyclic GFR-binding peptide
  MOD_RES (5)..(6)..(38): Xaa is C or S

SEQ ID NO: 91465 - protein, 32 aa, Artificial Sequence; identical to SEQ ID NO: 36735
  Cyclic GFR-binding peptide
  MOD_RES (1)..(32): Xaa is C or S

SEQ ID NO: 91466 - protein, 39 aa, Artificial Sequence; identical to SEQ ID NO: 36736
  Cyclic GFR-binding peptide
  MOD_RES (3)..(4)..(36)..(38): Xaa is C or S

SEQ ID NO: 91467 - protein, 24 aa, Artificial Sequence
  Cyclic GFR-binding peptide
SNITMQIMNDKQQIIIGEMSGMVV

SEQ ID NO: 91468 - protein, 37 aa, Artificial Sequence; identical to SEQ ID NO: 36740
  Cyclic GFR-binding peptide
  MOD_RES (2)..(3)..(35)..(37): Xaa is C or S

SEQ ID NO: 91469 - protein, 29 aa, Artificial Sequence
  Cyclic GFR-binding peptide
  MOD_RES (28)..(28): Xaa is C or S
KTSNITMQIMDNGRVLLIGEMSMIVEEXG

SEQ ID NO: 91470 - protein, 27 aa, Artificial Sequence
  Cyclic GFR-binding peptide
  MOD_RES (1)..(2): Xaa is C or S
XXAPVKTSNITMQIMDNGRVLLIGEMS

SEQ ID NO: 91471 - protein, 23 aa, Artificial Sequence
  Cyclic GFR-binding peptide
TSNITMQIMDNGRVLLIGEMSMI

SEQ ID NO: 91472 - protein, 31 aa, Artificial Sequence
  Cyclic GFR-binding peptide
  MOD_RES (2)..(3): Xaa is C or S
PXXTPTKMSNITMQIMNDKQQIIIGEMSGMV

SEQ ID NO: 91473 - protein, 28 aa, Artificial Sequence
  Cyclic GFR-binding peptide
  MOD_RES (1)..(2): Xaa is C or S
XXVPARLSNITIQIMDAANNVVIGEMSD

SEQ ID NO: 91474 - protein, 39 aa, Artificial Sequence; identical to SEQ ID NO: 36746
  Cyclic GFR-binding peptide
  MOD_RES (5)..(6)..(37)..(39): Xaa is C or S

SEQ ID NO: 91475 - protein, 39 aa, Artificial Sequence; identical to SEQ ID NO: 36747
  Cyclic GFR-binding peptide
  MOD_RES (5)..(6)..(38): Xaa is C or S

SEQ ID NO: 91476 - protein, 28 aa, Artificial Sequence
  Cyclic GFR-binding peptide
  MOD_RES (1)..(1): Xaa is C or S
XVPARLSNITIQIMDAANNVVLGEMSDM

SEQ ID NO: 91477 - protein, 23 aa, Artificial Sequence
  Cyclic GFR-binding peptide
SNITVQIMDDSSNVILGEMSNMV

SEQ ID NO: 91478 - protein, 29 aa, Artificial Sequence
  Cyclic GFR-binding peptide
  MOD_RES (2)..(3): Xaa is C or S
PXXAPTKLSNITVQIMDDSSNVILGEMSN

SEQ ID NO: 91479 - protein, 35 aa, Artificial Sequence
  Cyclic GFR-binding peptide
  MOD_RES (6)..(7): Xaa is C or S
HVPKPXXAPTKLSNITVQIMDDSSNVILGEMSNMV

SEQ ID NO: 91480 - protein, 28 aa, Artificial Sequence
  Cyclic GFR-binding peptide
  MOD_RES (27)..(27): Xaa is C or S
SNITMQIMNDKQQIIIGEMSGMVVDRXG

SEQ ID NO: 91481 - protein, 26 aa, Artificial Sequence
  Cyclic GFR-binding peptide
  MOD_RES (1)..(1): Xaa is C or S
XVPQALSNITIQIMVGRKPKVLGEMS

SEQ ID NO: 91482 - protein, 35 aa, Artificial Sequence
  Cyclic GFR-binding peptide
  MOD_RES (6)..(7): Xaa is C or S
GSAGPXXTPTKMSNITMQIMNDKQQIIIGEMSGMV

SEQ ID NO: 91483 - protein, 31 aa, Artificial Sequence
  Cyclic GFR-binding peptide
  MOD_RES (1)..(2): Xaa is C or S
XXVSQDLSNITIQIMIGKTPKILGEMSMIVK

SEQ ID NO: 91484 - protein, 30 aa, Artificial Sequence
  Cyclic GFR-binding peptide
  MOD_RES (1)..(1): Xaa is C or S
XVPARLSNITIQIMDAANNVVLGEMSDMVV

SEQ ID NO: 91485 - protein, 33 aa, Artificial Sequence; identical to SEQ ID NO: 36757
  Cyclic GFR-binding peptide
  MOD_RES (1)..(2): Xaa is C or S

SEQ ID NO: 91486 - protein, 32 aa, Artificial Sequence
  Cyclic GFR-binding peptide
  MOD_RES (4)..(5): Xaa is C or S
AAPXXVPQALSNITIQIMVGRKPKVLGEMSMI

SEQ ID NO: 91487 - protein, 25 aa, Artificial Sequence
  Cyclic GFR-binding peptide
SNITIQIMVGRKPKVLGEMSMIVRS

SEQ ID NO: 91488 - protein, 31 aa, Artificial Sequence; identical to SEQ ID NO: 36761
  Cyclic GFR-binding peptide
  MOD_RES (1)..(1): Xaa is C or S

SEQ ID NO: 91489 - protein, 32 aa, Artificial Sequence
  Cyclic GFR-binding peptide
  MOD_RES (2)..(3): Xaa is C or S
PXXVSQDLSNITIQIMIGKTPKILGEMSMIVK

SEQ ID NO: 91490 - protein, 40 aa, Artificial Sequence; identical to SEQ ID NO: 36762
  Cyclic GFR-binding peptide
  MOD_RES (6)..(7)..(38)..(40): Xaa is C or S

SEQ ID NO: 91491 - protein, 29 aa, Artificial Sequence
  Cyclic GFR-binding peptide
TPTKMSNITMQIMNDKQQIILGEMSGMVV

SEQ ID NO: 91492 - protein, 31 aa, Artificial Sequence
  Cyclic GFR-binding peptide
  MOD_RES (29)..(31): Xaa is C or S
QDLSNITIQIMVGRTPKVLGEMSMVVKSXKX

SEQ ID NO: 91493 - protein, 41 aa, Artificial Sequence; identical to SEQ ID NO: 36768
  Cyclic GFR-binding peptide
  MOD_RES (5)..(6)..(38)..(40): Xaa is C or S

SEQ ID NO: 91494 - protein, 29 aa, Artificial Sequence
  Cyclic GFR-binding peptide
  MOD_RES (3)..(4): Xaa is C or S
APXXVPQALSNITIQIMVGRKPKVLGEMS

SEQ ID NO: 91495 - protein, 25 aa, Artificial Sequence
  Cyclic GFR-binding peptide
SNITIQIMIGKTPKILGEMSMIVKS

SEQ ID NO: 91496 - protein, 29 aa, Artificial Sequence
  Cyclic GFR-binding peptide
  MOD_RES (1)..(2): Xaa is C or S
XXVPQDLSNITIQIMVGRTPKVLGEMSMV

SEQ ID NO: 91497 - protein, 22 aa, Artificial Sequence
  Cyclic GFR-binding peptide
LSNITIQIMDAANNVVIGEMSD

SEQ ID NO: 91498 - protein, 25 aa, Artificial Sequence
  Cyclic GFR-binding peptide
PTRLSNITIQIMDSANNVVLGEMSD

SEQ ID NO: 91499 - protein, 38 aa, Artificial Sequence; identical to SEQ ID NO: 36774
  Cyclic GFR-binding peptide
  MOD_RES (6)..(7)..(38): Xaa is C or S

SEQ ID NO: 91500 - protein, 31 aa, Artificial Sequence
  Cyclic GFR-binding peptide
  MOD_RES (30)..(30): Xaa is C or S
PQALSNITIQIMVGRKPKVLGEMSMIVRSXK

SEQ ID NO: 91501 - protein, 25 aa, Artificial Sequence
  Cyclic GFR-binding peptide
TPTKMSNITMQIMNDKQQIILGEMS

SEQ ID NO: 91502 - protein, 29 aa, Artificial Sequence
  Cyclic GFR-binding peptide
  MOD_RES (28)..(28): Xaa is C or S
LSNITIQIMDAANNVVIGEMSDMVVEAXG

SEQ ID NO: 91503 - protein, 27 aa, Artificial Sequence
  Cyclic GFR-binding peptide
TKLSNITVQIMDDSSNVILGEMSNMVV

SEQ ID NO: 91504 - protein, 27 aa, Artificial Sequence
  Cyclic GFR-binding peptide
  MOD_RES (27)..(27): Xaa is C or S
TSNITMQIMDNGRVLLIGEMSMIVEEX

SEQ ID NO: 91505 - protein, 29 aa, Artificial Sequence
  Cyclic GFR-binding peptide
TKMSNITMQIMNDKQQIIIGEMSGMVVDR

SEQ ID NO: 91506 - protein, 35 aa, Artificial Sequence
  Cyclic GFR-binding peptide
  MOD_RES (5)..(6): Xaa is C or S
SAAPXXVPQALSNITIQIMVGRKPKVLGEMSMIVR

SEQ ID NO: 91507 - protein, 23 aa, Artificial Sequence
  Cyclic GFR-binding peptide
KTSNITMQIMDNGRVLLLGEMSM

SEQ ID NO: 91508 - protein, 34 aa, Artificial Sequence
  Cyclic GFR-binding peptide
  MOD_RES (5)..(6): Xaa is C or S
SASPXXVPQDLSNITIQIMVGRTPKVLGEMSMVV

SEQ ID NO: 91509 - protein, 21 aa, Artificial Sequence
  Cyclic GFR-binding peptide
LSNITVQIMDDSSNVILGEMS

SEQ ID NO: 91510 - protein, 27 aa, Artificial Sequence
  Cyclic GFR-binding peptide
  MOD_RES (1)..(2): Xaa is C or S
XXTPTKMSNITMQIMNDKQQIIIGEMS

SEQ ID NO: 91511 - protein, 25 aa, Artificial Sequence
  Cyclic GFR-binding peptide
VPARLSNITIQIMDAANNVVLGEMS

SEQ ID NO: 91512 - protein, 27 aa, Artificial Sequence
  Cyclic GFR-binding peptide
VPQALSNITIQIMVGRKPKVLGEMSMI

SEQ ID NO: 91513 - protein, 27 aa, Artificial Sequence
  Cyclic GFR-binding peptide
  MOD_RES (26)..(26): Xaa is C or S
SNITIQIMVGRKPKVLGEMSMIVRSXK

SEQ ID NO: 91514 - protein, 24 aa, Artificial Sequence
  Cyclic GFR-binding peptide
SNITIQIMDSANNVVIGEMSDMVV

SEQ ID NO: 91515 - protein, 25 aa, Artificial Sequence
  Cyclic GFR-binding peptide
KLSNITVQIMDDSSNVILGEMSNMV

SEQ ID NO: 91516 - protein, 21 aa, Artificial Sequence
  Cyclic GFR-binding peptide
SNITMQIMDNGRVLLLGEMSM

SEQ ID NO: 91517 - protein, 27 aa, Artificial Sequence
  Cyclic GFR-binding peptide
  MOD_RES (1)..(1): Xaa is C or S
XVPQALSNITIQIMVGRKPKVLGEMSM

SEQ ID NO: 91518 - protein, 25 aa, Artificial Sequence
  Cyclic GFR-binding peptide
KMSNITMQIMNDKQQIIIGEMSGMV

SEQ ID NO: 91519 - protein, 31 aa, Artificial Sequence
  Cyclic GFR-binding peptide
  MOD_RES (31)..(31): Xaa is C or S
PTRLSNITIQIMDSANNVVIGEMSDMVVESX

SEQ ID NO: 91520 - protein, 37 aa, Artificial Sequence; identical to SEQ ID NO: 36796
  Cyclic GFR-binding peptide
  MOD_RES (6)..(7): Xaa is C or S

SEQ ID NO: 91521 - protein, 37 aa, Artificial Sequence; identical to SEQ ID NO: 36798
  Cyclic GFR-binding peptide
  MOD_RES (4)..(5)..(37): Xaa is C or S

SEQ ID NO: 91522 - protein, 34 aa, Artificial Sequence
  Cyclic GFR-binding peptide
  MOD_RES (6)..(7): Xaa is C or S
ASAAPXXVPQALSNITIQIMVGRKPKVLGEMSMI

SEQ ID NO: 91523 - protein, 36 aa, Artificial Sequence; identical to SEQ ID NO: 36801
  Cyclic GFR-binding peptide
  MOD_RES (4)..(5): Xaa is C or S

SEQ ID NO: 91524 - protein, 27 aa, Artificial Sequence
  Cyclic GFR-binding peptide
APTKLSNITVQIMDDSSNVILGEMSNM

SEQ ID NO: 91525 - protein, 27 aa, Artificial Sequence
  Cyclic GFR-binding peptide
KTSNITMQIMDNGRVLLIGEMSMIVEE

SEQ ID NO: 91526 - protein, 36 aa, Artificial Sequence; identical to SEQ ID NO: 36803
  Cyclic GFR-binding peptide
  MOD_RES (1)..(33)..(35): Xaa is C or S

SEQ ID NO: 91527 - protein, 30 aa, Artificial Sequence
  Cyclic GFR-binding peptide
  MOD_RES (30)..(30): Xaa is C or S
PVKTSNITMQIMDNGRVLLIGEMSMIVEEX

SEQ ID NO: 91528 - protein, 27 aa, Artificial Sequence
  Cyclic GFR-binding peptide
  MOD_RES (26)..(26): Xaa is C or S
SNITMQIMDNGRVLLIGEMSMIVEEXG

SEQ ID NO: 91529 - protein, 26 aa, Artificial Sequence
  Cyclic GFR-binding peptide
LSNITIQIMIGKTPKILGEMSMIVKS

SEQ ID NO: 91530 - protein, 36 aa, Artificial Sequence; identical to SEQ ID NO: 36807
  Cyclic GFR-binding peptide
  MOD_RES (3)..(4)..(36): Xaa is C or S

SEQ ID NO: 91531 - protein, 32 aa, Artificial Sequence
  Cyclic GFR-binding peptide
  MOD_RES (4)..(5): Xaa is C or S
PASXXVPARLSNITIQIMDAANNVVIGEMSDM

SEQ ID NO: 91532 - protein, 35 aa, Artificial Sequence; identical to SEQ ID NO: 36810
  Cyclic GFR-binding peptide
  MOD_RES (32)..(34): Xaa is C or S

SEQ ID NO: 91533 - protein, 36 aa, Artificial Sequence; identical to SEQ ID NO: 36813
  Cyclic GFR-binding peptide
  MOD_RES (2)..(3)..(35): Xaa is C or S

SEQ ID NO: 91534 - protein, 39 aa, Artificial Sequence; identical to SEQ ID NO: 36816
  Cyclic GFR-binding peptide
  MOD_RES (6)..(7)..(39): Xaa is C or S

SEQ ID NO: 91535 - protein, 28 aa, Artificial Sequence
  Cyclic GFR-binding peptide
  MOD_RES (2)..(3): Xaa is C or S
TXXVPTRLSNITIQIMDSANNVVIGEMS

SEQ ID NO: 91536 - protein, 30 aa, Artificial Sequence
  Cyclic GFR-binding peptide
  MOD_RES (29)..(29): Xaa is C or S
RLSNITIQIMDSANNVVLGEMSDMVVESXG

SEQ ID NO: 91537 - protein, 29 aa, Artificial Sequence
  Cyclic GFR-binding peptide
TPTKMSNITMQIMNDKQQIIIGEMSGMVV

SEQ ID NO: 91538 - protein, 30 aa, Artificial Sequence
  Cyclic GFR-binding peptide
  MOD_RES (27)..(29): Xaa is C or S
SNITIQIMDSANNVVLGEMSDMVVESXGXR

SEQ ID NO: 91539 - protein, 33 aa, Artificial Sequence; identical to SEQ ID NO: 36828
  Cyclic GFR-binding peptide
  MOD_RES (1)..(32): Xaa is C or S

SEQ ID NO: 91540 - protein, 26 aa, Artificial Sequence
  Cyclic GFR-binding peptide
  MOD_RES (1)..(1): Xaa is C or S
XVSQDLSNITIQIMIGKTPKILGEMS

SEQ ID NO: 91541 - protein, 34 aa, Artificial Sequence; identical to SEQ ID NO: 36830
  Cyclic GFR-binding peptide
  MOD_RES (2)..(3): Xaa is C or S

SEQ ID NO: 91542 - protein, 22 aa, Artificial Sequence
  Cyclic GFR-binding peptide
DLSNITIQIMVGRTPKVLGEMS

SEQ ID NO: 91543 - protein, 27 aa, Artificial Sequence
  Cyclic GFR-binding peptide
  MOD_RES (1)..(1): Xaa is C or S
XVPQDLSNITIQIMVGRTPKVLGEMSM

SEQ ID NO: 91544 - protein, 32 aa, Artificial Sequence; identical to SEQ ID NO: 36831
  Cyclic GFR-binding peptide
  MOD_RES (31)..(31): Xaa is C or S

SEQ ID NO: 91545 - protein, 31 aa, Artificial Sequence
  Cyclic GFR-binding peptide
  MOD_RES (3)..(4): Xaa is C or S
GPXXTPTKMSNITMQIMNDKQQIILGEMSGM

SEQ ID NO: 91546 - protein, 36 aa, Artificial Sequence; identical to SEQ ID NO: 36837
  Cyclic GFR-binding peptide
  MOD_RES (4)..(5): Xaa is C or S

SEQ ID NO: 91547 - protein, 27 aa, Artificial Sequence
  Cyclic GFR-binding peptide
PQDLSNITIQIMVGRTPKVLGEMSMVV

SEQ ID NO: 91548 - protein, 32 aa, Artificial Sequence
  Cyclic GFR-binding peptide
  MOD_RES (30)..(32): Xaa is C or S
PQDLSNITIQIMVGRTPKVLGEMSMVVKSXKX

SEQ ID NO: 91549 - protein, 33 aa, Artificial Sequence; identical to SEQ ID NO: 36840
  Cyclic GFR-binding peptide
  MOD_RES (1)..(32): Xaa is C or S

SEQ ID NO: 91550 - protein, 31 aa, Artificial Sequence
  Cyclic GFR-binding peptide
  MOD_RES (3)..(4): Xaa is C or S
STXXAPVKTSNITMQIMDNGRVLLLGEMSMI

SEQ ID NO: 91551 - protein, 24 aa, Artificial Sequence
  Cyclic GFR-binding peptide
ARLSNITIQIMDAANNVVLGEMSD

SEQ ID NO: 91552 - protein, 36 aa, Artificial Sequence
  Cyclic GFR-binding peptide
  MOD_RES (6)..(7): Xaa is C or S
GSAGPXXTPTKMSNITMQIMNDKQQIILGEMSGMVV

SEQ ID NO: 91553 - protein, 37 aa, Artificial Sequence; identical to SEQ ID NO: 36845
  Cyclic GFR-binding peptide
  MOD_RES (3)..(4)..(36): Xaa is C or S

SEQ ID NO: 91554 - protein, 36 aa, Artificial Sequence
  Cyclic GFR-binding peptide
  MOD_RES (6)..(7): Xaa is C or S
HVPKPXXAPTKLSNITVQIMDDSSNVILGEMSNMVV

SEQ ID NO: 91555 - protein, 30 aa, Artificial Sequence
  Cyclic GFR-binding peptide
  MOD_RES (30)..(30): Xaa is C or S
SQDLSNITIQIMIGKTPKILGEMSMIVKSX

SEQ ID NO: 91556 - protein, 37 aa, Artificial Sequence; identical to SEQ ID NO: 36847
  Cyclic GFR-binding peptide
  MOD_RES (5)..(6)..(37): Xaa is C or S

SEQ ID NO: 91557 - protein, 29 aa, Artificial Sequence
  Cyclic GFR-binding peptide
VPARLSNITIQIMDAANNVVLGEMSDMVV

SEQ ID NO: 91558 - protein, 34 aa, Artificial Sequence; identical to SEQ ID NO: 36850
  Cyclic GFR-binding peptide
  MOD_RES (1)..(32)..(34): Xaa is C or S

SEQ ID NO: 91559 - protein, 30 aa, Artificial Sequence
  Cyclic GFR-binding peptide
  MOD_RES (3)..(4): Xaa is C or S
PTXXVPTRLSNITIQIMDSANNVVLGEMSD

SEQ ID NO: 91560 - protein, 30 aa, Artificial Sequence
  Cyclic GFR-binding peptide
  MOD_RES (3)..(4): Xaa is C or S
KPXXAPTKLSNITVQIMDDSSNVILGEMSN

SEQ ID NO: 91561 - protein, 26 aa, Artificial Sequence
  Cyclic GFR-binding peptide
PTKMSNITMQIMNDKQQIILGEMSGM

SEQ ID NO: 91562 - protein, 35 aa, Artificial Sequence; identical to SEQ ID NO: 36857
  Cyclic GFR-binding peptide
  MOD_RES (3)..(4)..(35): Xaa is C or S

SEQ ID NO: 91563 - protein, 31 aa, Artificial Sequence
  Cyclic GFR-binding peptide
  MOD_RES (3)..(4): Xaa is C or S
ASXXVPARLSNITIQIMDAANNVVIGEMSDM

SEQ ID NO: 91564 - protein, 25 aa, Artificial Sequence
  Cyclic GFR-binding peptide
VPQDLSNITIQIMVGRTPKVLGEMS

SEQ ID NO: 91565 - protein, 32 aa, Artificial Sequence
  Cyclic GFR-binding peptide
  MOD_RES (3)..(4): Xaa is C or S
GPXXTPTKMSNITMQIMNDKQQIIIGEMSGMV

SEQ ID NO: 91566 - protein, 25 aa, Artificial Sequence
  Cyclic GFR-binding peptide
RLSNITIQIMDSANNVVIGEMSDMV

SEQ ID NO: 91567 - protein, 31 aa, Artificial Sequence
  Cyclic GFR-binding peptide
  MOD_RES (1)..(2): Xaa is C or S
XXVPQALSNITIQIMVGRKPKVLGEMSMIVR

SEQ ID NO: 91568 - protein, 34 aa, Artificial Sequence; identical to SEQ ID NO: 36862
  Cyclic GFR-binding peptide
  MOD_RES (1)..(2)..(33): Xaa is C or S

SEQ ID NO: 91569 - protein, 38 aa, Artificial Sequence; identical to SEQ ID NO: 36865
  Cyclic GFR-binding peptide
  MOD_RES (3)..(4)..(36)..(38): Xaa is C or S

SEQ ID NO: 91570 - protein, 22 aa, Artificial Sequence
  Cyclic GFR-binding peptide
LSNITIQIMIGKTPKILGEMSM

SEQ ID NO: 91571 - protein, 33 aa, Artificial Sequence
  Cyclic GFR-binding peptide
  MOD_RES (30)..(32): Xaa is C or S
ARLSNITIQIMDAANNVVLGEMSDMVVEAXGXR

SEQ ID NO: 91572 - protein, 31 aa, Artificial Sequence
  Cyclic GFR-binding peptide
  MOD_RES (2)..(3): Xaa is C or S
PXXVSQDLSNITIQIMIGKTPKILGEMSMIV

SEQ ID NO: 91573 - protein, 30 aa, Artificial Sequence
  Cyclic GFR-binding peptide
  MOD_RES (2)..(3): Xaa is C or S
PXXTPTKMSNITMQIMNDKQQIIIGEMSGM

SEQ ID NO: 91574 - protein, 33 aa, Artificial Sequence; identical to SEQ ID NO: 36872
  Cyclic GFR-binding peptide
  MOD_RES (2)..(3): Xaa is C or S

SEQ ID NO: 91575 - protein, 37 aa, Artificial Sequence; identical to SEQ ID NO: 36873
  Cyclic GFR-binding peptide
  MOD_RES (4)..(5)..(36): Xaa is C or S

SEQ ID NO: 91576 - protein, 31 aa, Artificial Sequence
  Cyclic GFR-binding peptide
  MOD_RES (1)..(2): Xaa is C or S
XXAPVKTSNITMQIMDNGRVLLIGEMSMIVE

SEQ ID NO: 91577 - protein, 29 aa, Artificial Sequence
  Cyclic GFR-binding peptide
  MOD_RES (3)..(4): Xaa is C or S
ASXXVPARLSNITIQIMDAANNVVLGEMS

SEQ ID NO: 91578 - protein, 27 aa, Artificial Sequence
  Cyclic GFR-binding peptide
LSNITIQIMDAANNVVIGEMSDMVVEA

SEQ ID NO: 91579 - protein, 40 aa, Artificial Sequence; identical to SEQ ID NO: 36877
  Cyclic GFR-binding peptide
  MOD_RES (6)..(7)..(39): Xaa is C or S

SEQ ID NO: 91580 - protein, 38 aa, Artificial Sequence; identical to SEQ ID NO: 36878
  Cyclic GFR-binding peptide
  MOD_RES (4)..(5)..(36)..(38): Xaa is C or S

SEQ ID NO: 91581 - protein, 40 aa, Artificial Sequence; identical to SEQ ID NO: 36879
  Cyclic GFR-binding peptide
  MOD_RES (5)..(6)..(38)..(40): Xaa is C or S

SEQ ID NO: 91582 - protein, 35 aa, Artificial Sequence; identical to SEQ ID NO: 36880
  Cyclic GFR-binding peptide
  MOD_RES (3)..(4)..(35): Xaa is C or S

SEQ ID NO: 91583 - protein, 31 aa, Artificial Sequence; identical to SEQ ID NO: 36882
  Cyclic GFR-binding peptide

SEQ ID NO: 91584 - protein, 20 aa, Artificial Sequence
  Cyclic GFR-binding peptide
SNITMQIMNDKQQIIIGEMS

SEQ ID NO: 91585 - protein, 31 aa, Artificial Sequence; identical to SEQ ID NO: 36883
  Cyclic GFR-binding peptide
  MOD_RES (1)..(1): Xaa is C or S

SEQ ID NO: 91586 - protein, 33 aa, Artificial Sequence
  Cyclic GFR-binding peptide
  MOD_RES (3)..(4): Xaa is C or S
SPXXVPQDLSNITIQIMVGRTPKVLGEMSMVVK

SEQ ID NO: 91587 - protein, 21 aa, Artificial Sequence
  Cyclic GFR-binding peptide
MSNITMQIMNDKQQIILGEMS

SEQ ID NO: 91588 - protein, 34 aa, Artificial Sequence; identical to SEQ ID NO: 36888
  Cyclic GFR-binding peptide
  MOD_RES (1)..(33): Xaa is C or S

SEQ ID NO: 91589 - protein, 33 aa, Artificial Sequence
  Cyclic GFR-binding peptide
  MOD_RES (3)..(4): Xaa is C or S
ASXXVPARLSNITIQIMDAANNVVLGEMSDMVV

SEQ ID NO: 91590 - protein, 34 aa, Artificial Sequence; identical to SEQ ID NO: 36891
  Cyclic GFR-binding peptide
  MOD_RES (31)..(33): Xaa is C or S

SEQ ID NO: 91591 - protein, 28 aa, Artificial Sequence
  Cyclic GFR-binding peptide
VPQALSNITIQIMVGRKPKVLGEMSMIV

SEQ ID NO: 91592 - protein, 29 aa, Artificial Sequence
  Cyclic GFR-binding peptide
  MOD_RES (1)..(2): Xaa is C or S
XXVPARLSNITIQIMDAANNVVLGEMSDM

SEQ ID NO: 91593 - protein, 32 aa, Artificial Sequence
  Cyclic GFR-binding peptide
  MOD_RES (30)..(32): Xaa is C or S
ARLSNITIQIMDAANNVVIGEMSDMVVEAXGX

SEQ ID NO: 91594 - protein, 31 aa, Artificial Sequence; identical to SEQ ID NO: 36895
  Cyclic GFR-binding peptide
  MOD_RES (31)..(31): Xaa is C or S

SEQ ID NO: 91595 - protein, 39 aa, Artificial Sequence; identical to SEQ ID NO: 36896
  Cyclic GFR-binding peptide
  MOD_RES (4)..(5)..(36)..(38): Xaa is C or S

SEQ ID NO: 91596 - protein, 30 aa, Artificial Sequence
  Cyclic GFR-binding peptide
  MOD_RES (4)..(5): Xaa is C or S
PASXXVPARLSNITIQIMDAANNVVIGEMS

SEQ ID NO: 91597 - protein, 30 aa, Artificial Sequence
  Cyclic GFR-binding peptide
  MOD_RES (3)..(4): Xaa is C or S
STXXAPVKTSNITMQIMDNGRVLLIGEMSM

SEQ ID NO: 91598 - protein, 33 aa, Artificial Sequence
  Cyclic GFR-binding peptide
  MOD_RES (6)..(7): Xaa is C or S
GSAGPXXTPTKMSNITMQIMNDKQQIILGEMSG

SEQ ID NO: 91599 - protein, 36 aa, Artificial Sequence
  Cyclic GFR-binding peptide
  MOD_RES (6)..(7): Xaa is C or S
ASASPXXVSQDLSNITIQIMIGKTPKILGEMSMIVK

SEQ ID NO: 91600 - protein, 24 aa, Artificial Sequence
  Cyclic GFR-binding peptide
VKTSNITMQIMDNGRVLLIGEMSM

SEQ ID NO: 91601 - protein, 24 aa, Artificial Sequence
  Cyclic GFR-binding peptide
PTRLSNITIQIMDSANNVVLGEMS

SEQ ID NO: 91602 - protein, 36 aa, Artificial Sequence; identical to SEQ ID NO: 36907
  Cyclic GFR-binding peptide
  MOD_RES (5)..(6): Xaa is C or S

SEQ ID NO: 91603 - protein, 24 aa, Artificial Sequence
  Cyclic GFR-binding peptide
SNITMQIMDNGRVLLLGEMSMIVE

SEQ ID NO: 91604 - protein, 29 aa, Artificial Sequence
  Cyclic GFR-binding peptide
PTRLSNITIQIMDSANNVVLGEMSDMVVE

SEQ ID NO: 91605 - protein, 30 aa, Artificial Sequence
  Cyclic GFR-binding peptide
  MOD_RES (30)..(30): Xaa is C or S
ARLSNITIQIMDAANNVVIGEMSDMVVEAX

SEQ ID NO: 91606 - protein, 30 aa, Artificial Sequence
  Cyclic GFR-binding peptide
  MOD_RES (27)..(29): Xaa is C or S
SNITVQIMDDSSNVILGEMSNMVVRSXGXH

SEQ ID NO: 91607 - protein, 37 aa, Artificial Sequence; identical to SEQ ID NO: 36909
  Cyclic GFR-binding peptide
  MOD_RES (5)..(6)..(37): Xaa is C or S

SEQ ID NO: 91608 - protein, 27 aa, Artificial Sequence
  Cyclic GFR-binding peptide
ARLSNITIQIMDAANNVVIGEMSDMVV

SEQ ID NO: 91609 - protein, 23 aa, Artificial Sequence
  Cyclic GFR-binding peptide
LSNITIQIMIGKTPKILGEMSMI

SEQ ID NO: 91610 - protein, 28 aa, Artificial Sequence
  Cyclic GFR-binding peptide
TKLSNITVQIMDDSSNVILGEMSNMVVR

SEQ ID NO: 91611 - protein, 32 aa, Artificial Sequence
  Cyclic GFR-binding peptide
  MOD_RES (6)..(7): Xaa is C or S
ASAAPXXVPQALSNITIQIMVGRKPKVLGEMS

SEQ ID NO: 91612 - protein, 30 aa, Artificial Sequence
  Cyclic GFR-binding peptide
  MOD_RES (28)..(30): Xaa is C or S
LSNITIQIMDAANNVVIGEMSDMVVEAXGX

SEQ ID NO: 91613 - protein, 28 aa, Artificial Sequence
  Cyclic GFR-binding peptide
  MOD_RES (28)..(28): Xaa is C or S
MSNITMQIMNDKQQIIIGEMSGMVVDRX

SEQ ID NO: 91614 - protein, 29 aa, Artificial Sequence
  Cyclic GFR-binding peptide
  MOD_RES (29)..(29): Xaa is C or S
KMSNITMQIMNDKQQIIIGEMSGMVVDRX

SEQ ID NO: 91615 - protein, 30 aa, Artificial Sequence
  Cyclic GFR-binding peptide
  MOD_RES (30)..(30): Xaa is C or S
TRLSNITIQIMDSANNVVLGEMSDMVVESX

SEQ ID NO: 91616 - protein, 25 aa, Artificial Sequence
  Cyclic GFR-binding peptide
PARLSNITIQIMDAANNVVLGEMSD

SEQ ID NO: 91617 - protein, 23 aa, Artificial Sequence
  Cyclic GFR-binding peptide
TRLSNITIQIMDSANNVVLGEMS

SEQ ID NO: 91618 - protein, 32 aa, Artificial Sequence
  Cyclic GFR-binding peptide
  MOD_RES (29)..(31): Xaa is C or S
QDLSNITIQIMVGRTPKVLGEMSMVVKSXKXS

SEQ ID NO: 91619 - protein, 32 aa, Artificial Sequence
  Cyclic GFR-binding peptide
  MOD_RES (5)..(6): Xaa is C or S
SASPXXVSQDLSNITIQIMIGKTPKILGEMSM

SEQ ID NO: 91620 - protein, 31 aa, Artificial Sequence
  Cyclic GFR-binding peptide
  MOD_RES (1)..(2): Xaa is C or S
XXAPVKTSNITMQIMDNGRVLLLGEMSMIVE

SEQ ID NO: 91621 - protein, 34 aa, Artificial Sequence; identical to SEQ ID NO: 36934
  Cyclic GFR-binding peptide
  MOD_RES (2)..(3)..(34): Xaa is C or S

SEQ ID NO: 91622 - protein, 25 aa, Artificial Sequence
  Cyclic GFR-binding peptide
VPTRLSNITIQIMDSANNVVIGEMS

SEQ ID NO: 91623 - protein, 28 aa, Artificial Sequence
  Cyclic GFR-binding peptide
  MOD_RES (28)..(28): Xaa is C or S
LSNITIQIMDAANNVVIGEMSDMVVEAX

SEQ ID NO: 91624 - protein, 27 aa, Artificial Sequence
  Cyclic GFR-binding peptide
PTKMSNITMQIMNDKQQIIIGEMSGMV

SEQ ID NO: 91625 - protein, 30 aa, Artificial Sequence
  Cyclic GFR-binding peptide
  MOD_RES (27)..(29): Xaa is C or S
SNITIQIMDAANNVVLGEMSDMVVEAXGXR

SEQ ID NO: 91626 - protein, 26 aa, Artificial Sequence
  Cyclic GFR-binding peptide
MSNITMQIMNDKQQIILGEMSGMVVD

SEQ ID NO: 91627 - protein, 23 aa, Artificial Sequence
  Cyclic GFR-binding peptide
ALSNITIQIMVGRKPKVLGEMSM

SEQ ID NO: 91628 - protein, 32 aa, Artificial Sequence
  Cyclic GFR-binding peptide
  MOD_RES (5)..(6): Xaa is C or S
APASXXVPARLSNITIQIMDAANNVVIGEMSD

SEQ ID NO: 91629 - protein, 25 aa, Artificial Sequence
  Cyclic GFR-binding peptide
ARLSNITIQIMDAANNVVIGEMSDM

SEQ ID NO: 91630 - protein, 21 aa, Artificial Sequence
  Cyclic GFR-binding peptide
SNITIQIMDSANNVVLGEMSD

SEQ ID NO: 91631 - protein, 40 aa, Artificial Sequence; identical to SEQ ID NO: 36941
  Cyclic GFR-binding peptide
  MOD_RES (4)..(5)..(37)..(39): Xaa is C or S

SEQ ID NO: 91632 - protein, 38 aa, Artificial Sequence; identical to SEQ ID NO: 36942
  Cyclic GFR-binding peptide
  MOD_RES (3)..(4)..(36)..(38): Xaa is C or S

SEQ ID NO: 91633 - protein, 35 aa, Artificial Sequence; identical to SEQ ID NO: 36945
  Cyclic GFR-binding peptide
  MOD_RES (32)..(34): Xaa is C or S

SEQ ID NO: 91634 - protein, 26 aa, Artificial Sequence
  Cyclic GFR-binding peptide
  MOD_RES (1)..(1): Xaa is C or S
XVPTRLSNITIQIMDSANNVVIGEMS

SEQ ID NO: 91635 - protein, 30 aa, Artificial Sequence
  Cyclic GFR-binding peptide
PARLSNITIQIMDAANNVVIGEMSDMVVEA

SEQ ID NO: 91636 - protein, 33 aa, Artificial Sequence; identical to SEQ ID NO: 36950
  Cyclic GFR-binding peptide
  MOD_RES (1)..(2)..(33): Xaa is C or S

SEQ ID NO: 91637 - protein, 36 aa, Artificial Sequence; identical to SEQ ID NO: 36952
  Cyclic GFR-binding peptide
  MOD_RES (3)..(4)..(36): Xaa is C or S

SEQ ID NO: 91638 - protein, 30 aa, Artificial Sequence
  Cyclic GFR-binding peptide
  MOD_RES (1)..(2): Xaa is C or S
XXVPTRLSNITIQIMDSANNVVLGEMSDMV

SEQ ID NO: 91639 - protein, 33 aa, Artificial Sequence
  Cyclic GFR-binding peptide
  MOD_RES (5)..(6): Xaa is C or S
TPPTXXVPTRLSNITIQIMDSANNVVIGEMSDM

SEQ ID NO: 91640 - protein, 35 aa, Artificial Sequence; identical to SEQ ID NO: 36956
  Cyclic GFR-binding peptide
  MOD_RES (3)..(4): Xaa is C or S

SEQ ID NO: 91641 - protein, 38 aa, Artificial Sequence; identical to SEQ ID NO: 36957
  Cyclic GFR-binding peptide
  MOD_RES (5)..(6)..(38): Xaa is C or S

SEQ ID NO: 91642 - protein, 27 aa, Artificial Sequence
  Cyclic GFR-binding peptide
VPTRLSNITIQIMDSANNVVLGEMSDM

SEQ ID NO: 91643 - protein, 30 aa, Artificial Sequence; identical to SEQ ID NO: 36959
  Cyclic GFR-binding peptide

SEQ ID NO: 91644 - protein, 36 aa, Artificial Sequence; identical to SEQ ID NO: 36961
  Cyclic GFR-binding peptide
  MOD_RES (1)..(2)..(34)..(36): Xaa is C or S

SEQ ID NO: 91645 - protein, 27 aa, Artificial Sequence
  Cyclic GFR-binding peptide
TPTKMSNITMQIMNDKQQIIIGEMSGM

SEQ ID NO: 91646 - protein, 42 aa, Artificial Sequence; identical to SEQ ID NO: 36966
  Cyclic GFR-binding peptide
  MOD_RES (6)..(7)..(39)..(41): Xaa is C or S

SEQ ID NO: 91647 - protein, 32 aa, Artificial Sequence
  Cyclic GFR-binding peptide
  MOD_RES (6)..(7): Xaa is C or S
AAPASXXVPARLSNITIQIMDAANNVVIGEMS

SEQ ID NO: 91648 - protein, 34 aa, Artificial Sequence; identical to SEQ ID NO: 36969
  Cyclic GFR-binding peptide
  MOD_RES (1)..(33): Xaa is C or S

SEQ ID NO: 91649 - protein, 27 aa, Artificial Sequence
  Cyclic GFR-binding peptide
  MOD_RES (1)..(2): Xaa is C or S
XXVPTRLSNITIQIMDSANNVVLGEMS

SEQ ID NO: 91650 - protein, 28 aa, Artificial Sequence
  Cyclic GFR-binding peptide
  MOD_RES (27)..(27): Xaa is C or S
SNITIQIMDSANNVVLGEMSDMVVESXG

SEQ ID NO: 91651 - protein, 38 aa, Artificial Sequence; identical to SEQ ID NO: 36972
  Cyclic GFR-binding peptide
  MOD_RES (2)..(3)..(35)..(37): Xaa is C or S

SEQ ID NO: 91652 - protein, 25 aa, Artificial Sequence
  Cyclic GFR-binding peptide
RLSNITIQIMDSANNVVLGEMSDMV

SEQ ID NO: 91653 - protein, 32 aa, Artificial Sequence
  Cyclic GFR-binding peptide
  MOD_RES (3)..(4): Xaa is C or S
SPXXVSQDLSNITIQIMIGKTPKILGEMSMIV

SEQ ID NO: 91654 - protein, 24 aa, Artificial Sequence
  Cyclic GFR-binding peptide
KMSNITMQIMNDKQQIIIGEMSGM

SEQ ID NO: 91655 - protein, 29 aa, Artificial Sequence
  Cyclic GFR-binding peptide
  MOD_RES (29)..(29): Xaa is C or S
QDLSNITIQIMVGRTPKVLGEMSMVVKSX

SEQ ID NO: 91656 - protein, 32 aa, Artificial Sequence; identical to SEQ ID NO: 36974
  Cyclic GFR-binding peptide
  MOD_RES (1)..(1): Xaa is C or S

SEQ ID NO: 91657 - protein, 36 aa, Artificial Sequence; identical to SEQ ID NO: 36976
  Cyclic GFR-binding peptide
  MOD_RES (2)..(3)..(35): Xaa is C or S

SEQ ID NO: 91658 - protein, 32 aa, Artificial Sequence
  Cyclic GFR-binding peptide
  MOD_RES (31)..(31): Xaa is C or S
PTKMSNITMQIMNDKQQIILGEMSGMVVDRXG

SEQ ID NO: 91659 - protein, 36 aa, Artificial Sequence; identical to SEQ ID NO: 36983
  Cyclic GFR-binding peptide
  MOD_RES (4)..(5)..(36): Xaa is C or S

SEQ ID NO: 91660 - protein, 30 aa, Artificial Sequence
  Cyclic GFR-binding peptide
  MOD_RES (1)..(1): Xaa is C or S
XVPTRLSNITIQIMDSANNVVLGEMSDMVV

SEQ ID NO: 91661 - protein, 28 aa, Artificial Sequence
  Cyclic GFR-binding peptide
  MOD_RES (28)..(28): Xaa is C or S
LSNITIQIMDSANNVVIGEMSDMVVESX

SEQ ID NO: 91662 - protein, 25 aa, Artificial Sequence
  Cyclic GFR-binding peptide
KMSNITMQIMNDKQQIILGEMSGMV

SEQ ID NO: 91663 - protein, 31 aa, Artificial Sequence
  Cyclic GFR-binding peptide
  MOD_RES (30)..(30): Xaa is C or S
TRLSNITIQIMDSANNVVIGEMSDMVVESXG

SEQ ID NO: 91664 - protein, 22 aa, Artificial Sequence
  Cyclic GFR-binding peptide
SNITIQIMDAANNVVIGEMSDM

SEQ ID NO: 91665 - protein, 33 aa, Artificial Sequence; identical to SEQ ID NO: 36989
  Cyclic GFR-binding peptide
  MOD_RES (2)..(3): Xaa is C or S

SEQ ID NO: 91666 - protein, 29 aa, Artificial Sequence
  Cyclic GFR-binding peptide
ARLSNITIQIMDAANNVVLGEMSDMVVEA

SEQ ID NO: 91667 - protein, 26 aa, Artificial Sequence
  Cyclic GFR-binding peptide
  MOD_RES (26)..(26): Xaa is C or S
SNITIQIMVGRKPKVLGEMSMIVRSX

SEQ ID NO: 91668 - protein, 29 aa, Artificial Sequence
  Cyclic GFR-binding peptide
  MOD_RES (3)..(4): Xaa is C or S
STXXAPVKTSNITMQIMDNGRVLLIGEMS

SEQ ID NO: 91669 - protein, 33 aa, Artificial Sequence
  Cyclic GFR-binding peptide
  MOD_RES (3)..(4): Xaa is C or S
GPXXTPTKMSNITMQIMNDKQQIIIGEMSGMVV

SEQ ID NO: 91670 - protein, 36 aa, Artificial Sequence; identical to SEQ ID NO: 36996
  Cyclic GFR-binding peptide
  MOD_RES (2)..(3)..(35): Xaa is C or S

SEQ ID NO: 91671 - protein, 27 aa, Artificial Sequence
  Cyclic GFR-binding peptide
PTKMSNITMQIMNDKQQIILGEMSGMV

SEQ ID NO: 91672 - protein, 30 aa, Artificial Sequence
  Cyclic GFR-binding peptide
  MOD_RES (2)..(3): Xaa is C or S
SXXVPARLSNITIQIMDAANNVVLGEMSDM

SEQ ID NO: 91673 - protein, 32 aa, Artificial Sequence
  Cyclic GFR-binding peptide
  MOD_RES (3)..(4): Xaa is C or S
PTXXVPTRLSNITIQIMDSANNVVLGEMSDMV

SEQ ID NO: 91674 - protein, 22 aa, Artificial Sequence
  Cyclic GFR-binding peptide
DLSNITIQIMIGKTPKILGEMS

SEQ ID NO: 91675 - protein, 38 aa, Artificial Sequence; identical to SEQ ID NO: 37005
  Cyclic GFR-binding peptide
  MOD_RES (6)..(7): Xaa is C or S

SEQ ID NO: 91676 - protein, 26 aa, Artificial Sequence
  Cyclic GFR-binding peptide
DLSNITIQIMVGRTPKVLGEMSMVVK

SEQ ID NO: 91677 - protein, 33 aa, Artificial Sequence
  Cyclic GFR-binding peptide
  MOD_RES (30)..(32): Xaa is C or S
PVKTSNITMQIMDNGRVLLLGEMSMIVEEXGXL

SEQ ID NO: 91678 - protein, 34 aa, Artificial Sequence; identical to SEQ ID NO: 37008
  Cyclic GFR-binding peptide
  MOD_RES (1)..(33): Xaa is C or S

SEQ ID NO: 91679 - protein, 27 aa, Artificial Sequence
  Cyclic GFR-binding peptide
LSNITIQIMDSANNVVLGEMSDMVVES

SEQ ID NO: 91680 - protein, 31 aa, Artificial Sequence
  Cyclic GFR-binding peptide
  MOD_RES (5)..(6): Xaa is C or S
VPSTXXAPVKTSNITMQIMDNGRVLLLGEMS

SEQ ID NO: 91681 - protein, 24 aa, Artificial Sequence
  Cyclic GFR-binding peptide
PTKMSNITMQIMNDKQQIILGEMS

SEQ ID NO: 91682 - protein, 29 aa, Artificial Sequence
  Cyclic GFR-binding peptide
  MOD_RES (2)..(3): Xaa is C or S
TXXAPVKTSNITMQIMDNGRVLLIGEMSM

SEQ ID NO: 91683 - protein, 31 aa, Artificial Sequence
  Cyclic GFR-binding peptide
  MOD_RES (30)..(30): Xaa is C or S
ARLSNITIQIMDAANNVVLGEMSDMVVEAXG

SEQ ID NO: 91684 - protein, 29 aa, Artificial Sequence
  Cyclic GFR-binding peptide
  MOD_RES (3)..(4): Xaa is C or S
PTXXVPTRLSNITIQIMDSANNVVIGEMS

SEQ ID NO: 91685 - protein, 32 aa, Artificial Sequence
  Cyclic GFR-binding peptide
  MOD_RES (29)..(31): Xaa is C or S
QDLSNITIQIMIGKTPKILGEMSMIVKSXKXS

SEQ ID NO: 91686 - protein, 31 aa, Artificial Sequence
  Cyclic GFR-binding peptide
  MOD_RES (31)..(31): Xaa is C or S
PARLSNITIQIMDAANNVVIGEMSDMVVEAX

SEQ ID NO: 91687 - protein, 31 aa, Artificial Sequence
  Cyclic GFR-binding peptide
  MOD_RES (31)..(31): Xaa is C or S
PARLSNITIQIMDAANNVVLGEMSDMVVEAX

SEQ ID NO: 91688 - protein, 24 aa, Artificial Sequence
  Cyclic GFR-binding peptide
PTRLSNITIQIMDSANNVVIGEMS

SEQ ID NO: 91689 - protein, 33 aa, Artificial Sequence
  Cyclic GFR-binding peptide
  MOD_RES (3)..(4): Xaa is C or S
SPXXVSQDLSNITIQIMIGKTPKILGEMSMIVK

SEQ ID NO: 91690 - protein, 21 aa, Artificial Sequence
  Cyclic GFR-binding peptide
MSNITMQIMNDKQQIIIGEMS

SEQ ID NO: 91691 - protein, 26 aa, Artificial Sequence
  Cyclic GFR-binding peptide
  MOD_RES (26)..(26): Xaa is C or S
SNITIQIMVGRTPKVLGEMSMVVKSX

SEQ ID NO: 91692 - protein, 20 aa, Artificial Sequence
  Cyclic GFR-binding peptide
SNITIQIMDAANNVVIGEMS

SEQ ID NO: 91693 - protein, 41 aa, Artificial Sequence; identical to SEQ ID NO: 37025
  Cyclic GFR-binding peptide
  MOD_RES (6)..(7)..(39)..(41): Xaa is C or S

SEQ ID NO: 91694 - protein, 23 aa, Artificial Sequence
  Cyclic GFR-binding peptide
SNITIQIMIGKTPKILGEMSMIV

SEQ ID NO: 91695 - protein, 21 aa, Artificial Sequence
  Cyclic GFR-binding peptide
LSNITIQIMDSANNVVLGEMS

SEQ ID NO: 91696 - protein, 39 aa, Artificial Sequence; identical to SEQ ID NO: 37031
  Cyclic GFR-binding peptide
  MOD_RES (6)..(7)..(38): Xaa is C or S

SEQ ID NO: 91697 - protein, 22 aa, Artificial Sequence
  Cyclic GFR-binding peptide
ALSNITIQIMVGRKPKVLGEMS

SEQ ID NO: 91698 - protein, 30 aa, Artificial Sequence; identical to SEQ ID NO: 37035
  Cyclic GFR-binding peptide

SEQ ID NO: 91699 - protein, 30 aa, Artificial Sequence
  Cyclic GFR-binding peptide
  MOD_RES (29)..(29): Xaa is C or S
KMSNITMQIMNDKQQIILGEMSGMVVDRXG

SEQ ID NO: 91700 - protein, 20 aa, Artificial Sequence
  Cyclic GFR-binding peptide
SNITMQIMNDKQQIILGEMS

SEQ ID NO: 91701 - protein, 25 aa, Artificial Sequence
  Cyclic GFR-binding peptide
KTSNITMQIMDNGRVLLLGEMSMIV

SEQ ID NO: 91702 - protein, 25 aa, Artificial Sequence
  Cyclic GFR-binding peptide
KTSNITMQIMDNGRVLLIGEMSMIV

SEQ ID NO: 91703 - protein, 32 aa, Artificial Sequence; identical to SEQ ID NO: 37041
  Cyclic GFR-binding peptide
  MOD_RES (1)..(2): Xaa is C or S

SEQ ID NO: 91704 - protein, 28 aa, Artificial Sequence
  Cyclic GFR-binding peptide
  MOD_RES (27)..(27): Xaa is C or S
LSNITIQIMVGRKPKVLGEMSMIVRSXK

SEQ ID NO: 91705 - protein, 38 aa, Artificial Sequence; identical to SEQ ID NO: 37043
  Cyclic GFR-binding peptide
  MOD_RES (4)..(5)..(37): Xaa is C or S

SEQ ID NO: 91706 - protein, 26 aa, Artificial Sequence
  Cyclic GFR-binding peptide
VPQALSNITIQIMVGRKPKVLGEMSM

SEQ ID NO: 91707 - protein, 25 aa, Artificial Sequence
  Cyclic GFR-binding peptide
VSQDLSNITIQIMIGKTPKILGEMS

SEQ ID NO: 91708 - protein, 34 aa, Artificial Sequence; identical to SEQ ID NO: 37045
  Cyclic GFR-binding peptide
  MOD_RES (32)..(34): Xaa is C or S

SEQ ID NO: 91709 - protein, 23 aa, Artificial Sequence
  Cyclic GFR-binding peptide
KLSNITVQIMDDSSNVILGEMSN

SEQ ID NO: 91710 - protein, 32 aa, Artificial Sequence
  Cyclic GFR-binding peptide
  MOD_RES (6)..(7): Xaa is C or S
AAPASXXVPARLSNITIQIMDAANNVVLGEMS

SEQ ID NO: 91711 - protein, 25 aa, Artificial Sequence
  Cyclic GFR-binding peptide
PVKTSNITMQIMDNGRVLLIGEMSM

SEQ ID NO: 91712 - protein, 26 aa, Artificial Sequence
  Cyclic GFR-binding peptide
APVKTSNITMQIMDNGRVLLLGEMSM

SEQ ID NO: 91713 - protein, 28 aa, Artificial Sequence
  Cyclic GFR-binding peptide
RLSNITIQIMDAANNVVIGEMSDMVVEA

SEQ ID NO: 91714 - protein, 30 aa, Artificial Sequence; identical to SEQ ID NO: 37054
  Cyclic GFR-binding peptide

SEQ ID NO: 91715 - protein, 39 aa, Artificial Sequence; identical to SEQ ID NO: 37057
  Cyclic GFR-binding peptide
  MOD_RES (6)..(7)..(38): Xaa is C or S

SEQ ID NO: 91716 - protein, 34 aa, Artificial Sequence
  Cyclic GFR-binding peptide
  MOD_RES (5)..(6): Xaa is C or S
VPSTXXAPVKTSNITMQIMDNGRVLLIGEMSMIV

SEQ ID NO: 91717 - protein, 38 aa, Artificial Sequence; identical to SEQ ID NO: 37060
  Cyclic GFR-binding peptide
  MOD_RES (6)..(7)..(38): Xaa is C or S

SEQ ID NO: 91718 - protein, 21 aa, Artificial Sequence
  Cyclic GFR-binding peptide
SNITMQIMNDKQQIIIGEMSG

SEQ ID NO: 91719 - protein, 33 aa, Artificial Sequence
  Cyclic GFR-binding peptide
  MOD_RES (5)..(6): Xaa is C or S
VPSTXXAPVKTSNITMQIMDNGRVLLLGEMSMI

SEQ ID NO: 91720 - protein, 33 aa, Artificial Sequence; identical to SEQ ID NO: 37062
  Cyclic GFR-binding peptide
  MOD_RES (32)..(32): Xaa is C or S

SEQ ID NO: 91721 - protein, 32 aa, Artificial Sequence
  Cyclic GFR-binding peptide
  MOD_RES (6)..(7): Xaa is C or S
HVPKPXXAPTKLSNITVQIMDDSSNVIIGEMS

SEQ ID NO: 91722 - protein, 31 aa, Artificial Sequence
  Cyclic GFR-binding peptide
  MOD_RES (4)..(5): Xaa is C or S
ASPXXVPQDLSNITIQIMVGRTPKVLGEMSM

SEQ ID NO: 91723 - protein, 26 aa, Artificial Sequence
  Cyclic GFR-binding peptide
SQDLSNITIQIMIGKTPKILGEMSMI

SEQ ID NO: 91724 - protein, 28 aa, Artificial Sequence
  Cyclic GFR-binding peptide
  MOD_RES (1)..(1): Xaa is C or S
XAPVKTSNITMQIMDNGRVLLLGEMSMI

SEQ ID NO: 91725 - protein, 27 aa, Artificial Sequence
  Cyclic GFR-binding peptide
  MOD_RES (27)..(27): Xaa is C or S
SNITIQIMDSANNVVLGEMSDMVVESX

SEQ ID NO: 91726 - protein, 38 aa, Artificial Sequence; identical to SEQ ID NO: 37069
  Cyclic GFR-binding peptide
  MOD_RES (4)..(5)..(37): Xaa is C or S

SEQ ID NO: 91727 - protein, 34 aa, Artificial Sequence
  Cyclic GFR-binding peptide
  MOD_RES (5)..(6): Xaa is C or S
SAAPXXVPQALSNITIQIMVGRKPKVLGEMSMIV

SEQ ID NO: 91728 - protein, 26 aa, Artificial Sequence
  Cyclic GFR-binding peptide
  MOD_RES (1)..(1): Xaa is C or S
XTPTKMSNITMQIMNDKQQIILGEMS

SEQ ID NO: 91729 - protein, 31 aa, Artificial Sequence; identical to SEQ ID NO: 37073
  Cyclic GFR-binding peptide
  MOD_RES (1)..(1): Xaa is C or S

SEQ ID NO: 91730 - protein, 29 aa, Artificial Sequence
  Cyclic GFR-binding peptide
TKLSNITVQIMDDSSNVILGEMSNMVVRS

SEQ ID NO: 91731 - protein, 28 aa, Artificial Sequence
  Cyclic GFR-binding peptide
  MOD_RES (27)..(27): Xaa is C or S
TSNITMQIMDNGRVLLLGEMSMIVEEXG

SEQ ID NO: 91732 - protein, 28 aa, Artificial Sequence
  Cyclic GFR-binding peptide
PTKMSNITMQIMNDKQQIILGEMSGMVV

SEQ ID NO: 91733 - protein, 33 aa, Artificial Sequence; identical to SEQ ID NO: 37074
  Cyclic GFR-binding peptide
  MOD_RES (32)..(32): Xaa is C or S

SEQ ID NO: 91734 - protein, 25 aa, Artificial Sequence
  Cyclic GFR-binding peptide
LSNITIQIMVGRKPKVLGEMSMIVR

SEQ ID NO: 91735 - protein, 31 aa, Artificial Sequence
  Cyclic GFR-binding peptide
  MOD_RES (4)..(5): Xaa is C or S
PASXXVPARLSNITIQIMDAANNVVLGEMSD

SEQ ID NO: 91736 - protein, 30 aa, Artificial Sequence
  Cyclic GFR-binding peptide
PTRLSNITIQIMDSANNVVLGEMSDMVVES

SEQ ID NO: 91737 - protein, 26 aa, Artificial Sequence
  Cyclic GFR-binding peptide
PTRLSNITIQIMDSANNVVLGEMSDM

SEQ ID NO: 91738 - protein, 24 aa, Artificial Sequence
  Cyclic GFR-binding peptide
LSNITIQIMDSANNVVLGEMSDMV

SEQ ID NO: 91739 - protein, 33 aa, Artificial Sequence
  Cyclic GFR-binding peptide
  MOD_RES (30)..(32): Xaa is C or S
TRLSNITIQIMDSANNVVLGEMSDMVVESXGXR

SEQ ID NO: 91740 - protein, 32 aa, Artificial Sequence
  Cyclic GFR-binding peptide
  MOD_RES (6)..(7): Xaa is C or S
RVPSTXXAPVKTSNITMQIMDNGRVLLIGEMS

SEQ ID NO: 91741 - protein, 35 aa, Artificial Sequence; identical to SEQ ID NO: 37085
  Cyclic GFR-binding peptide
  MOD_RES (2)..(3)..(34): Xaa is C or S

SEQ ID NO: 91742 - protein, 30 aa, Artificial Sequence
  Cyclic GFR-binding peptide
  MOD_RES (28)..(30): Xaa is C or S
LSNITIQIMDAANNVVLGEMSDMVVEAXGX

SEQ ID NO: 91743 - protein, 34 aa, Artificial Sequence; identical to SEQ ID NO: 37088
  Cyclic GFR-binding peptide
  MOD_RES (2)..(3): Xaa is C or S

SEQ ID NO: 91744 - protein, 34 aa, Artificial Sequence
  Cyclic GFR-binding peptide
  MOD_RES (5)..(6): Xaa is C or S
VPKPXXAPTKLSNITVQIMDDSSNVILGEMSNMV

SEQ ID NO: 91745 - protein, 33 aa, Artificial Sequence; identical to SEQ ID NO: 37089
  Cyclic GFR-binding peptide
  MOD_RES (32)..(32): Xaa is C or S

SEQ ID NO: 91746 - protein, 31 aa, Artificial Sequence
  Cyclic GFR-binding peptide
  MOD_RES (2)..(3): Xaa is C or S
TXXVPTRLSNITIQIMDSANNVVIGEMSDMV

SEQ ID NO: 91747 - protein, 32 aa, Artificial Sequence
  Cyclic GFR-binding peptide
  MOD_RES (30)..(32): Xaa is C or S
TKMSNITMQIMNDKQQIIIGEMSGMVVDRXGX

SEQ ID NO: 91748 - protein, 35 aa, Artificial Sequence; identical to SEQ ID NO: 37091
  Cyclic GFR-binding peptide
  MOD_RES (4)..(5): Xaa is C or S

SEQ ID NO: 91749 - protein, 22 aa, Artificial Sequence
  Cyclic GFR-binding peptide
SNITMQIMNDKQQIIIGEMSGM

SEQ ID NO: 91750 - protein, 28 aa, Artificial Sequence
  Cyclic GFR-binding peptide
  MOD_RES (28)..(28): Xaa is C or S
LSNITIQIMDAANNVVLGEMSDMVVEAX

SEQ ID NO: 91751 - protein, 26 aa, Artificial Sequence
  Cyclic GFR-binding peptide
VPARLSNITIQIMDAANNVVIGEMSD

SEQ ID NO: 91752 - protein, 28 aa, Artificial Sequence
  Cyclic GFR-binding peptide
RLSNITIQIMDSANNVVLGEMSDMVVES

SEQ ID NO: 91753 - protein, 30 aa, Artificial Sequence
  Cyclic GFR-binding peptide
  MOD_RES (4)..(5): Xaa is C or S
PASXXVPARLSNITIQIMDAANNVVLGEMS

SEQ ID NO: 91754 - protein, 25 aa, Artificial Sequence
  Cyclic GFR-binding peptide
SNITIQIMDSANNVVIGEMSDMVVE

SEQ ID NO: 91755 - protein, 27 aa, Artificial Sequence
  Cyclic GFR-binding peptide
RLSNITIQIMDSANNVVLGEMSDMVVE

SEQ ID NO: 91756 - protein, 26 aa, Artificial Sequence
  Cyclic GFR-binding peptide
RLSNITIQIMDSANNVVLGEMSDMVV

SEQ ID NO: 91757 - protein, 28 aa, Artificial Sequence
  Cyclic GFR-binding peptide
TRLSNITIQIMDSANNVVIGEMSDMVVE

SEQ ID NO: 91758 - protein, 31 aa, Artificial Sequence
  Cyclic GFR-binding peptide
  MOD_RES (29)..(31): Xaa is C or S
QALSNITIQIMVGRKPKVLGEMSMIVRSXKX

SEQ ID NO: 91759 - protein, 39 aa, Artificial Sequence; identical to SEQ ID NO: 37105
  Cyclic GFR-binding peptide
  MOD_RES (3)..(4)..(36)..(38): Xaa is C or S

SEQ ID NO: 91760 - protein, 22 aa, Artificial Sequence
  Cyclic GFR-binding peptide
SNITIQIMDSANNVVIGEMSDM

SEQ ID NO: 91761 - protein, 31 aa, Artificial Sequence
  Cyclic GFR-binding peptide
  MOD_RES (4)..(5): Xaa is C or S
PSTXXAPVKTSNITMQIMDNGRVLLLGEMSM

SEQ ID NO: 91762 - protein, 28 aa, Artificial Sequence
  Cyclic GFR-binding peptide
  MOD_RES (28)..(28): Xaa is C or S
DLSNITIQIMIGKTPKILGEMSMIVKSX

SEQ ID NO: 91763 - protein, 30 aa, Artificial Sequence
  Cyclic GFR-binding peptide
  MOD_RES (27)..(29): Xaa is C or S
SNITMQIMNDKQQIIIGEMSGMVVDRXGXS

SEQ ID NO: 91764 - protein, 26 aa, Artificial Sequence
  Cyclic GFR-binding peptide
LSNITIQIMDAANNVVIGEMSDMVVE

SEQ ID NO: 91765 - protein, 30 aa, Artificial Sequence; identical to SEQ ID NO: 1125
  Cyclic GFR-binding peptide

SEQ ID NO: 91766 - protein, 34 aa, Artificial Sequence; identical to SEQ ID NO: 37112
  Cyclic GFR-binding peptide
  MOD_RES (1)..(2)..(33): Xaa is C or S

SEQ ID NO: 91767 - protein, 32 aa, Artificial Sequence
  Cyclic GFR-binding peptide
  MOD_RES (5)..(6): Xaa is C or S
SAAPXXVPQALSNITIQIMVGRKPKVLGEMSM

SEQ ID NO: 91768 - protein, 30 aa, Artificial Sequence
  Cyclic GFR-binding peptide
  MOD_RES (30)..(30): Xaa is C or S
TRLSNITIQIMDSANNVVIGEMSDMVVESX

SEQ ID NO: 91769 - protein, 33 aa, Artificial Sequence
  Cyclic GFR-binding peptide
  MOD_RES (6)..(7): Xaa is C or S
STPPTXXVPTRLSNITIQIMDSANNVVLGEMSD

SEQ ID NO: 91770 - protein, 28 aa, Artificial Sequence
  Cyclic GFR-binding peptide
  MOD_RES (28)..(28): Xaa is C or S
MSNITMQIMNDKQQIILGEMSGMVVDRX

SEQ ID NO: 91771 - protein, 32 aa, Artificial Sequence
  Cyclic GFR-binding peptide
  MOD_RES (4)..(5): Xaa is C or S
AGPXXTPTKMSNITMQIMNDKQQIIIGEMSGM

SEQ ID NO: 91772 - protein, 34 aa, Artificial Sequence
  Cyclic GFR-binding peptide
  MOD_RES (6)..(7): Xaa is C or S
GSAGPXXTPTKMSNITMQIMNDKQQIIIGEMSGM

SEQ ID NO: 91773 - protein, 29 aa, Artificial Sequence
  Cyclic GFR-binding peptide
  MOD_RES (2)..(3): Xaa is C or S
SXXVPARLSNITIQIMDAANNVVLGEMSD

SEQ ID NO: 91774 - protein, 27 aa, Artificial Sequence
  Cyclic GFR-binding peptide
  MOD_RES (27)..(27): Xaa is C or S
SNITIQIMDSANNVVIGEMSDMVVESX

SEQ ID NO: 91775 - protein, 34 aa, Artificial Sequence
  Cyclic GFR-binding peptide
  MOD_RES (5)..(6): Xaa is C or S
APASXXVPARLSNITIQIMDAANNVVLGEMSDMV

SEQ ID NO: 91776 - protein, 37 aa, Artificial Sequence; identical to SEQ ID NO: 37117
  Cyclic GFR-binding peptide
  MOD_RES (2)..(3)..(34)..(36): Xaa is C or S

SEQ ID NO: 91777 - protein, 34 aa, Artificial Sequence; identical to SEQ ID NO: 37118
  Cyclic GFR-binding peptide
  MOD_RES (3)..(4): Xaa is C or S

SEQ ID NO: 91778 - protein, 41 aa, Artificial Sequence; identical to SEQ ID NO: 37119
  Cyclic GFR-binding peptide
  MOD_RES (6)..(7)..(38)..(40): Xaa is C or S

SEQ ID NO: 91779 - protein, 32 aa, Artificial Sequence
  Cyclic GFR-binding peptide
  MOD_RES (30)..(32): Xaa is C or S
PQALSNITIQIMVGRKPKVLGEMSMIVRSXKX

SEQ ID NO: 91780 - protein, 32 aa, Artificial Sequence
  Cyclic GFR-binding peptide
  MOD_RES (30)..(32): Xaa is C or S
SQDLSNITIQIMIGKTPKILGEMSMIVKSXKX

SEQ ID NO: 91781 - protein, 34 aa, Artificial Sequence; identical to SEQ ID NO: 37121
  Cyclic GFR-binding peptide
  MOD_RES (2)..(3): Xaa is C or S

SEQ ID NO: 91782 - protein, 33 aa, Artificial Sequence
  Cyclic GFR-binding peptide
  MOD_RES (5)..(6): Xaa is C or S
SAGPXXTPTKMSNITMQIMNDKQQIIIGEMSGM

SEQ ID NO: 91783 - protein, 25 aa, Artificial Sequence
  Cyclic GFR-binding peptide
TPTKMSNITMQIMNDKQQIIIGEMS

SEQ ID NO: 91784 - protein, 26 aa, Artificial Sequence
  Cyclic GFR-binding peptide
TKMSNITMQIMNDKQQIIIGEMSGMV

SEQ ID NO: 91785 - protein, 22 aa, Artificial Sequence
  Cyclic GFR-binding peptide
LSNITVQIMDDSSNVILGEMSN

SEQ ID NO: 91786 - protein, 25 aa, Artificial Sequence
  Cyclic GFR-binding peptide
LSNITIQIMDAANNVVLGEMSDMVV

SEQ ID NO: 91787 - protein, 34 aa, Artificial Sequence; identical to SEQ ID NO: 37127
  Cyclic GFR-binding peptide
  MOD_RES (1)..(2)..(33): Xaa is C or S

SEQ ID NO: 91788 - protein, 21 aa, Artificial Sequence
  Cyclic GFR-binding peptide
SNITIQIMVGRTPKVLGEMSM

SEQ ID NO: 91789 - protein, 34 aa, Artificial Sequence; identical to SEQ ID NO: 37131
  Cyclic GFR-binding peptide
  MOD_RES (1)..(2)..(33): Xaa is C or S

SEQ ID NO: 91790 - protein, 20 aa, Artificial Sequence
  Cyclic GFR-binding peptide
SNITVQIMDDSSNVILGEMS

SEQ ID NO: 91791 - protein, 26 aa, Artificial Sequence
  Cyclic GFR-binding peptide
KMSNITMQIMNDKQQIILGEMSGMVV

SEQ ID NO: 91792 - protein, 25 aa, Artificial Sequence
  Cyclic GFR-binding peptide
TSNITMQIMDNGRVLLLGEMSMIVE

SEQ ID NO: 91793 - protein, 34 aa, Artificial Sequence
  Cyclic GFR-binding peptide
  MOD_RES (5)..(6): Xaa is C or S
SAGPXXTPTKMSNITMQIMNDKQQIIIGEMSGMV

SEQ ID NO: 91794 - protein, 29 aa, Artificial Sequence
  Cyclic GFR-binding peptide
  MOD_RES (27)..(29): Xaa is C or S
SNITIQIMDAANNVVIGEMSDMVVEAXGX

SEQ ID NO: 91795 - protein, 33 aa, Artificial Sequence; identical to SEQ ID NO: 37139
  Cyclic GFR-binding peptide
  MOD_RES (2)..(3): Xaa is C or S

SEQ ID NO: 91796 - protein, 35 aa, Artificial Sequence
  Cyclic GFR-binding peptide
  MOD_RES (5)..(6): Xaa is C or S
VPSTXXAPVKTSNITMQIMDNGRVLLIGEMSMIVE

SEQ ID NO: 91797 - protein, 37 aa, Artificial Sequence; identical to SEQ ID NO: 37141
  Cyclic GFR-binding peptide
  MOD_RES (3)..(4)..(36): Xaa is C or S

SEQ ID NO: 91798 - protein, 40 aa, Artificial Sequence; identical to SEQ ID NO: 37142
  Cyclic GFR-binding peptide
  MOD_RES (4)..(5)..(37)..(39): Xaa is C or S

SEQ ID NO: 91799 - protein, 29 aa, Artificial Sequence
  Cyclic GFR-binding peptide
  MOD_RES (1)..(2): Xaa is C or S
XXAPVKTSNITMQIMDNGRVLLLGEMSMI

SEQ ID NO: 91800 - protein, 30 aa, Artificial Sequence
  Cyclic GFR-binding peptide
  MOD_RES (1)..(1): Xaa is C or S
XTPTKMSNITMQIMNDKQQIIIGEMSGMVV

SEQ ID NO: 91801 - protein, 31 aa, Artificial Sequence
  Cyclic GFR-binding peptide
  MOD_RES (3)..(4): Xaa is C or S
KPXXAPTKLSNITVQIMDDSSNVILGEMSNM

SEQ ID NO: 91802 - protein, 35 aa, Artificial Sequence
  Cyclic GFR-binding peptide
  MOD_RES (5)..(6): Xaa is C or S
APASXXVPARLSNITIQIMDAANNVVLGEMSDMVV

SEQ ID NO: 91803 - protein, 31 aa, Artificial Sequence
  Cyclic GFR-binding peptide
  MOD_RES (1)..(2): Xaa is C or S
XXVPARLSNITIQIMDAANNVVIGEMSDMVV

SEQ ID NO: 91804 - protein, 26 aa, Artificial Sequence
  Cyclic GFR-binding peptide
DLSNITIQIMIGKTPKILGEMSMIVK

SEQ ID NO: 91805 - protein, 24 aa, Artificial Sequence
  Cyclic GFR-binding peptide
TRLSNITIQIMDSANNVVLGEMSD

SEQ ID NO: 91806 - protein, 37 aa, Artificial Sequence; identical to SEQ ID NO: 37152
  Cyclic GFR-binding peptide
  MOD_RES (3)..(4)..(36): Xaa is C or S

SEQ ID NO: 91807 - protein, 34 aa, Artificial Sequence; identical to SEQ ID NO: 37153
  Cyclic GFR-binding peptide
  MOD_RES (1)..(33): Xaa is C or S

SEQ ID NO: 91808 - protein, 26 aa, Artificial Sequence
  Cyclic GFR-binding peptide
PARLSNITIQIMDAANNVVLGEMSDM

SEQ ID NO: 91809 - protein, 37 aa, Artificial Sequence; identical to SEQ ID NO: 37157
  Cyclic GFR-binding peptide
  MOD_RES (4)..(5)..(36): Xaa is C or S

SEQ ID NO: 91810 - protein, 36 aa, Artificial Sequence
  Cyclic GFR-binding peptide
  MOD_RES (6)..(7): Xaa is C or S
STPPTXXVPTRLSNITIQIMDSANNVVIGEMSDMVV

SEQ ID NO: 91811 - protein, 35 aa, Artificial Sequence; identical to SEQ ID NO: 37158
  Cyclic GFR-binding peptide
  MOD_RES (1)..(32)..(34): Xaa is C or S

SEQ ID NO: 91812 - protein, 32 aa, Artificial Sequence
  Cyclic GFR-binding peptide
  MOD_RES (30)..(32): Xaa is C or S
TKMSNITMQIMNDKQQIILGEMSGMVVDRXGX

SEQ ID NO: 91813 - protein, 26 aa, Artificial Sequence
  Cyclic GFR-binding peptide
PVKTSNITMQIMDNGRVLLIGEMSMI

SEQ ID NO: 91814 - protein, 29 aa, Artificial Sequence
  Cyclic GFR-binding peptide
  MOD_RES (1)..(2): Xaa is C or S
XXVSQDLSNITIQIMIGKTPKILGEMSMI

SEQ ID NO: 91815 - protein, 27 aa, Artificial Sequence
  Cyclic GFR-binding peptide
LSNITVQIMDDSSNVILGEMSNMVVRS

SEQ ID NO: 91816 - protein, 30 aa, Artificial Sequence
  Cyclic GFR-binding peptide
  MOD_RES (29)..(29): Xaa is C or S
RLSNITIQIMDSANNVVIGEMSDMVVESXG

SEQ ID NO: 91817 - protein, 28 aa, Artificial Sequence
  Cyclic GFR-binding peptide
VKTSNITMQIMDNGRVLLIGEMSMIVEE

SEQ ID NO: 91818 - protein, 29 aa, Artificial Sequence
  Cyclic GFR-binding peptide
  MOD_RES (28)..(28): Xaa is C or S
LSNITIQIMDAANNVVLGEMSDMVVEAXG

SEQ ID NO: 91819 - protein, 24 aa, Artificial Sequence
  Cyclic GFR-binding peptide
PQALSNITIQIMVGRKPKVLGEMS

SEQ ID NO: 91820 - protein, 27 aa, Artificial Sequence
  Cyclic GFR-binding peptide
VPQDLSNITIQIMVGRTPKVLGEMSMV

SEQ ID NO: 91821 - protein, 37 aa, Artificial Sequence; identical to SEQ ID NO: 37168
  Cyclic GFR-binding peptide
  MOD_RES (3)..(4)..(36): Xaa is C or S

SEQ ID NO: 91822 - protein, 31 aa, Artificial Sequence; identical to SEQ ID NO: 37176
  Cyclic GFR-binding peptide
  MOD_RES (1)..(1): Xaa is C or S

SEQ ID NO: 91823 - protein, 33 aa, Artificial Sequence; identical to SEQ ID NO: 37179
  Cyclic GFR-binding peptide
  MOD_RES (1)..(32): Xaa is C or S

SEQ ID NO: 91824 - protein, 28 aa, Artificial Sequence
  Cyclic GFR-binding peptide
PTRLSNITIQIMDSANNVVLGEMSDMVV

SEQ ID NO: 91825 - protein, 30 aa, Artificial Sequence
  Cyclic GFR-binding peptide
  MOD_RES (29)..(29): Xaa is C or S
KMSNITMQIMNDKQQIIIGEMSGMVVDRXG

SEQ ID NO: 91826 - protein, 30 aa, Artificial Sequence
  Cyclic GFR-binding peptide
  MOD_RES (3)..(4): Xaa is C or S
ASXXVPARLSNITIQIMDAANNVVIGEMSD

SEQ ID NO: 91827 - protein, 25 aa, Artificial Sequence
  Cyclic GFR-binding peptide
LSNITIQIMDSANNVVIGEMSDMVV

SEQ ID NO: 91828 - protein, 35 aa, Artificial Sequence; identical to SEQ ID NO: 37188
  Cyclic GFR-binding peptide
  MOD_RES (1)..(32)..(34): Xaa is C or S

SEQ ID NO: 91829 - protein, 30 aa, Artificial Sequence
  Cyclic GFR-binding peptide
  MOD_RES (1)..(2): Xaa is C or S
XXVPQDLSNITIQIMVGRTPKVLGEMSMVV

SEQ ID NO: 91830 - protein, 31 aa, Artificial Sequence
  Cyclic GFR-binding peptide
  MOD_RES (30)..(30): Xaa is C or S
ARLSNITIQIMDAANNVVIGEMSDMVVEAXG

SEQ ID NO: 91831 - protein, 28 aa, Artificial Sequence
  Cyclic GFR-binding peptide
PQDLSNITIQIMVGRTPKVLGEMSMVVK

SEQ ID NO: 91832 - protein, 29 aa, Artificial Sequence
  Cyclic GFR-binding peptide
  MOD_RES (29)..(29): Xaa is C or S
KLSNITVQIMDDSSNVILGEMSNMVVRSX

SEQ ID NO: 91833 - protein, 20 aa, Artificial Sequence
  Cyclic GFR-binding peptide
SNITIQIMVGRTPKVLGEMS

SEQ ID NO: 91834 - protein, 34 aa, Artificial Sequence
  Cyclic GFR-binding peptide
  MOD_RES (5)..(6): Xaa is C or S
APASXXVPARLSNITIQIMDAANNVVIGEMSDMV

SEQ ID NO: 91835 - protein, 34 aa, Artificial Sequence
  Cyclic GFR-binding peptide
  MOD_RES (5)..(6): Xaa is C or S
VPSTXXAPVKTSNITMQIMDNGRVLLLGEMSMIV

SEQ ID NO: 91836 - protein, 38 aa, Artificial Sequence; identical to SEQ ID NO: 37193
  Cyclic GFR-binding peptide
  MOD_RES (3)..(4)..(35)..(37): Xaa is C or S

SEQ ID NO: 91837 - protein, 28 aa, Artificial Sequence
  Cyclic GFR-binding peptide
  MOD_RES (26)..(28): Xaa is C or S
SNITIQIMVGRTPKVLGEMSMVVKSXKX

SEQ ID NO: 91838 - protein, 31 aa, Artificial Sequence
  Cyclic GFR-binding peptide
  MOD_RES (2)..(3): Xaa is C or S
PXXTPTKMSNITMQIMNDKQQIILGEMSGMV

SEQ ID NO: 91839 - protein, 39 aa, Artificial Sequence; identical to SEQ ID NO: 37196
  Cyclic GFR-binding peptide
  MOD_RES (5)..(6)..(38): Xaa is C or S

SEQ ID NO: 91840 - protein, 33 aa, Artificial Sequence
  Cyclic GFR-binding peptide
  MOD_RES (6)..(7): Xaa is C or S
AAPASXXVPARLSNITIQIMDAANNVVLGEMSD

SEQ ID NO: 91841 - protein, 28 aa, Artificial Sequence
  Cyclic GFR-binding peptide
  MOD_RES (1)..(1): Xaa is C or S
XVSQDLSNITIQIMIGKTPKILGEMSMI

SEQ ID NO: 91842 - protein, 37 aa, Artificial Sequence; identical to SEQ ID NO: 37201
  Cyclic GFR-binding peptide
  MOD_RES (1)..(2)..(34)..(36): Xaa is C or S

SEQ ID NO: 91843 - protein, 35 aa, Artificial Sequence
  Cyclic GFR-binding peptide
  MOD_RES (5)..(6): Xaa is C or S
SASPXXVPQDLSNITIQIMVGRTPKVLGEMSMVVK

SEQ ID NO: 91844 - protein, 27 aa, Artificial Sequence
  Cyclic GFR-binding peptide
  MOD_RES (1)..(2): Xaa is C or S
XXTPTKMSNITMQIMNDKQQIILGEMS

SEQ ID NO: 91845 - protein, 37 aa, Artificial Sequence; identical to SEQ ID NO: 37206
  Cyclic GFR-binding peptide
  MOD_RES (3)..(4)..(35)..(37): Xaa is C or S

SEQ ID NO: 91846 - protein, 36 aa, Artificial Sequence; identical to SEQ ID NO: 37212
  Cyclic GFR-binding peptide
  MOD_RES (1)..(2)..(33)..(35): Xaa is C or S

SEQ ID NO: 91847 - protein, 27 aa, Artificial Sequence
  Cyclic GFR-binding peptide
  MOD_RES (1)..(1): Xaa is C or S
XVPARLSNITIQIMDAANNVVIGEMSD

SEQ ID NO: 91848 - protein, 26 aa, Artificial Sequence
  Cyclic GFR-binding peptide
QDLSNITIQIMVGRTPKVLGEMSMVV

SEQ ID NO: 91849 - protein, 31 aa, Artificial Sequence
  Cyclic GFR-binding peptide
  MOD_RES (4)..(5): Xaa is C or S
AGPXXTPTKMSNITMQIMNDKQQIILGEMSG

SEQ ID NO: 91850 - protein, 27 aa, Artificial Sequence
  Cyclic GFR-binding peptide
VSQDLSNITIQIMIGKTPKILGEMSMI

SEQ ID NO: 91851 - protein, 24 aa, Artificial Sequence
  Cyclic GFR-binding peptide
PQDLSNITIQIMVGRTPKVLGEMS

SEQ ID NO: 91852 - protein, 33 aa, Artificial Sequence
  Cyclic GFR-binding peptide
  MOD_RES (30)..(32): Xaa is C or S
SQDLSNITIQIMIGKTPKILGEMSMIVKSXKXS

SEQ ID NO: 91853 - protein, 26 aa, Artificial Sequence
  Cyclic GFR-binding peptide
  MOD_RES (1)..(1): Xaa is C or S
XVPQDLSNITIQIMVGRTPKVLGEMS

SEQ ID NO: 91854 - protein, 33 aa, Artificial Sequence
  Cyclic GFR-binding peptide
  MOD_RES (3)..(4): Xaa is C or S
PTXXVPTRLSNITIQIMDSANNVVIGEMSDMVV

SEQ ID NO: 91855 - protein, 35 aa, Artificial Sequence; identical to SEQ ID NO: 37224
  Cyclic GFR-binding peptide
  MOD_RES (1)..(33)..(35): Xaa is C or S

SEQ ID NO: 91856 - protein, 40 aa, Artificial Sequence; identical to SEQ ID NO: 37225
  Cyclic GFR-binding peptide
  MOD_RES (6)..(7)..(39): Xaa is C or S

SEQ ID NO: 91857 - protein, 38 aa, Artificial Sequence; identical to SEQ ID NO: 37226
  Cyclic GFR-binding peptide
  MOD_RES (4)..(5)..(37): Xaa is C or S

SEQ ID NO: 91858 - protein, 32 aa, Artificial Sequence
  Cyclic GFR-binding peptide
  MOD_RES (31)..(31): Xaa is C or S
PTKLSNITVQIMDDSSNVILGEMSNMVVRSXG

SEQ ID NO: 91859 - protein, 22 aa, Artificial Sequence
  Cyclic GFR-binding peptide
KTSNITMQIMDNGRVLLIGEMS

SEQ ID NO: 91860 - protein, 28 aa, Artificial Sequence
  Cyclic GFR-binding peptide
ARLSNITIQIMDAANNVVIGEMSDMVVE

SEQ ID NO: 91861 - protein, 28 aa, Artificial Sequence
  Cyclic GFR-binding peptide
  MOD_RES (1)..(1): Xaa is C or S
XVPQDLSNITIQIMVGRTPKVLGEMSMV

SEQ ID NO: 91862 - protein, 31 aa, Artificial Sequence
  Cyclic GFR-binding peptide
  MOD_RES (2)..(3): Xaa is C or S
TXXVPTRLSNITIQIMDSANNVVLGEMSDMV

SEQ ID NO: 91863 - protein, 24 aa, Artificial Sequence
  Cyclic GFR-binding peptide
DLSNITIQIMIGKTPKILGEMSMI

SEQ ID NO: 91864 - protein, 30 aa, Artificial Sequence
  Cyclic GFR-binding peptide
  MOD_RES (2)..(3): Xaa is C or S
PXXVPQALSNITIQIMVGRKPKVLGEMSMI

SEQ ID NO: 91865 - protein, 29 aa, Artificial Sequence
  Cyclic GFR-binding peptide
PVKTSNITMQIMDNGRVLLLGEMSMIVEE

SEQ ID NO: 91866 - protein, 33 aa, Artificial Sequence; identical to SEQ ID NO: 37238
  Cyclic GFR-binding peptide
  MOD_RES (1)..(32): Xaa is C or S

SEQ ID NO: 91867 - protein, 40 aa, Artificial Sequence; identical to SEQ ID NO: 37239
  Cyclic GFR-binding peptide
  MOD_RES (5)..(6)..(37)..(39): Xaa is C or S

SEQ ID NO: 91868 - protein, 37 aa, Artificial Sequence; identical to SEQ ID NO: 37240
  Cyclic GFR-binding peptide
  MOD_RES (6)..(7): Xaa is C or S

SEQ ID NO: 91869 - protein, 26 aa, Artificial Sequence
  Cyclic GFR-binding peptide
TKLSNITVQIMDDSSNVILGEMSNMV

SEQ ID NO: 91870 - protein, 32 aa, Artificial Sequence
  Cyclic GFR-binding peptide
  MOD_RES (30)..(32): Xaa is C or S
TRLSNITIQIMDSANNVVLGEMSDMVVESXGX

SEQ ID NO: 91871 - protein, 32 aa, Artificial Sequence; identical to SEQ ID NO: 37243
  Cyclic GFR-binding peptide
  MOD_RES (31)..(31): Xaa is C or S

SEQ ID NO: 91872 - protein, 23 aa, Artificial Sequence
  Cyclic GFR-binding peptide
DLSNITIQIMVGRTPKVLGEMSM

SEQ ID NO: 91873 - protein, 20 aa, Artificial Sequence
  Cyclic GFR-binding peptide
SNITMQIMDNGRVLLLGEMS

SEQ ID NO: 91874 - protein, 27 aa, Artificial Sequence
  Cyclic GFR-binding peptide
  MOD_RES (1)..(2): Xaa is C or S
XXVPQALSNITIQIMVGRKPKVLGEMS

SEQ ID NO: 91875 - protein, 25 aa, Artificial Sequence
  Cyclic GFR-binding peptide
TKMSNITMQIMNDKQQIIIGEMSGM

SEQ ID NO: 91876 - protein, 35 aa, Artificial Sequence; identical to SEQ ID NO: 37248
  Cyclic GFR-binding peptide
  MOD_RES (4)..(5): Xaa is C or S

SEQ ID NO: 91877 - protein, 37 aa, Artificial Sequence; identical to SEQ ID NO: 37252
  Cyclic GFR-binding peptide
  MOD_RES (31)..(32): Xaa is C or S

SEQ ID NO: 91878 - protein, 29 aa, Artificial Sequence
  Cyclic GFR-binding peptide
  MOD_RES (1)..(1): Xaa is C or S
XAEVVMDQYNKLVVNNAADLYLISIASLR

SEQ ID NO: 91879 - protein, 32 aa, Artificial Sequence
  Cyclic GFR-binding peptide
  MOD_RES (26)..(27): Xaa is C or S
QYNKLVVNNAADLYLISIASLRAPVXXSAPAA

SEQ ID NO: 91880 - protein, 30 aa, Artificial Sequence
  Cyclic GFR-binding peptide
  MOD_RES (26)..(27): Xaa is C or S
QYNKLIIQQKDNLYLMSIASMKTPTXXPGA

SEQ ID NO: 91881 - protein, 35 aa, Artificial Sequence
  Cyclic GFR-binding peptide
  MOD_RES (29)..(30): Xaa is C or S
VMGQYNKLIIQQKDNLYLMSIASMKTPTXXPGASG

SEQ ID NO: 91882 - protein, 28 aa, Artificial Sequence
  Cyclic GFR-binding peptide
ESVAMGQYNKLYTVVGKDLYLISIASLK

SEQ ID NO: 91883 - protein, 22 aa, Artificial Sequence
  Cyclic GFR-binding peptide
QYNKLYTVVGKDLYLISIASLK

SEQ ID NO: 91884 - protein, 38 aa, Artificial Sequence; identical to SEQ ID NO: 37257
  Cyclic GFR-binding peptide
  MOD_RES (2)..(4)..(36)..(37): Xaa is C or S

SEQ ID NO: 91885 - protein, 29 aa, Artificial Sequence
  Cyclic GFR-binding peptide
  MOD_RES (26)..(27): Xaa is C or S
QYNKLLLVRGNDLYLMSIASTKVPAXXTS

SEQ ID NO: 91886 - protein, 36 aa, Artificial Sequence; identical to SEQ ID NO: 37263
  Cyclic GFR-binding peptide
  MOD_RES (2)..(34)..(35): Xaa is C or S

SEQ ID NO: 91887 - protein, 36 aa, Artificial Sequence; identical to SEQ ID NO: 37266
  Cyclic GFR-binding peptide
  MOD_RES (1)..(33)..(34): Xaa is C or S

SEQ ID NO: 91888 - protein, 35 aa, Artificial Sequence; identical to SEQ ID NO: 37267
  Cyclic GFR-binding peptide
  MOD_RES (32)..(33): Xaa is C or S

SEQ ID NO: 91889 - protein, 34 aa, Artificial Sequence; identical to SEQ ID NO: 37269
  Cyclic GFR-binding peptide
  MOD_RES (1)..(32)..(33): Xaa is C or S

SEQ ID NO: 91890 - protein, 34 aa, Artificial Sequence; identical to SEQ ID NO: 37270
  Cyclic GFR-binding peptide
  MOD_RES (32)..(33): Xaa is C or S

SEQ ID NO: 91891 - protein, 29 aa, Artificial Sequence
  Cyclic GFR-binding peptide
  MOD_RES (1)..(1): Xaa is C or S
XEEVIMQYNKLLLVRGNDLYLMSIASTKV

SEQ ID NO: 91892 - protein, 35 aa, Artificial Sequence
  Cyclic GFR-binding peptide
  MOD_RES (29)..(30): Xaa is C or S
VIMQYNKLLLVRGNDLYLMSIASTKVPAXXTSPVR

SEQ ID NO: 91893 - protein, 20 aa, Artificial Sequence
  Cyclic GFR-binding peptide
QYNKLIIQQKDNLYLMSIAS

SEQ ID NO: 91894 - protein, 28 aa, Artificial Sequence
  Cyclic GFR-binding peptide
  MOD_RES (26)..(27): Xaa is C or S
QYNKLIIQQKDNLYLMSIASMKTPTXXP

SEQ ID NO: 91895 - protein, 26 aa, Artificial Sequence
  Cyclic GFR-binding peptide
  MOD_RES (26)..(26): Xaa is C or S
QYNKLVVNKNEDLYLISIASMKEPVX

SEQ ID NO: 91896 - protein, 35 aa, Artificial Sequence; identical to SEQ ID NO: 37279
  Cyclic GFR-binding peptide
  MOD_RES (1)..(33)..(34): Xaa is C or S

SEQ ID NO: 91897 - protein, 33 aa, Artificial Sequence; identical to SEQ ID NO: 37283
  Cyclic GFR-binding peptide
  MOD_RES (2)..(33): Xaa is C or S

SEQ ID NO: 91898 - protein, 31 aa, Artificial Sequence
  Cyclic GFR-binding peptide
  MOD_RES (30)..(31): Xaa is C or S
VTMNQYNKLVVNKNEDLYLISIASMKEPVXX

SEQ ID NO: 91899 - protein, 28 aa, Artificial Sequence
  Cyclic GFR-binding peptide
  MOD_RES (26)..(27): Xaa is C or S
QYNKLVVNNAADLYLISIASLRAPVXXS

SEQ ID NO: 91900 - protein, 22 aa, Artificial Sequence
  Cyclic GFR-binding peptide
IMQYNKLLLVRGNDLYLMSIAS

SEQ ID NO: 91901 - protein, 22 aa, Artificial Sequence
  Cyclic GFR-binding peptide
QYNKLVVNNAADLYLISIASLR

SEQ ID NO: 91902 - protein, 30 aa, Artificial Sequence
  Cyclic GFR-binding peptide
  MOD_RES (2)..(2): Xaa is C or S
GXAEVVMDQYNKLVVNNAADLYLISIASLR

SEQ ID NO: 91903 - protein, 34 aa, Artificial Sequence; identical to SEQ ID NO: 37291
  Cyclic GFR-binding peptide
  MOD_RES (1)..(33)..(34): Xaa is C or S

SEQ ID NO: 91904 - protein, 29 aa, Artificial Sequence
  Cyclic GFR-binding peptide
  MOD_RES (28)..(29): Xaa is C or S
MGQYNKLYTVVGKDLYLISIASLKTPVXX

SEQ ID NO: 91905 - protein, 36 aa, Artificial Sequence; identical to SEQ ID NO: 37298
  Cyclic GFR-binding peptide
  MOD_RES (32)..(33): Xaa is C or S

SEQ ID NO: 91906 - protein, 29 aa, Artificial Sequence
  Cyclic GFR-binding peptide
  MOD_RES (29)..(29): Xaa is C or S
VIMQYNKLLLVRGNDLYLMSIASTKVPAX

SEQ ID NO: 91907 - protein, 33 aa, Artificial Sequence
  Cyclic GFR-binding peptide
  MOD_RES (30)..(31): Xaa is C or S
VVMDQYNKLVVNNAADLYLISIASLRAPVXXSA

SEQ ID NO: 91908 - protein, 41 aa, Artificial Sequence; identical to SEQ ID NO: 37303
  Cyclic GFR-binding peptide
  MOD_RES (1)..(3)..(35)..(36): Xaa is C or S

SEQ ID NO: 91909 - protein, 34 aa, Artificial Sequence; identical to SEQ ID NO: 37306
  Cyclic GFR-binding peptide
  MOD_RES (1)..(3): Xaa is C or S

SEQ ID NO: 91910 - protein, 37 aa, Artificial Sequence; identical to SEQ ID NO: 37310
  Cyclic GFR-binding peptide
  MOD_RES (2)..(33)..(34): Xaa is C or S

SEQ ID NO: 91911 - protein, 29 aa, Artificial Sequence
  Cyclic GFR-binding peptide
RDVVMGQYNKLIIQQKDNLYLMSIASMKT

SEQ ID NO: 91912 - protein, 29 aa, Artificial Sequence
  Cyclic GFR-binding peptide
VAMGQYNKLYTVVGKDLYLISIASLKTPV

SEQ ID NO: 91913 - protein, 33 aa, Artificial Sequence
  Cyclic GFR-binding peptide
  MOD_RES (1)..(3): Xaa is C or S
XGXAEVVMDQYNKLVVNNAADLYLISIASLRAP

SEQ ID NO: 91914 - protein, 36 aa, Artificial Sequence
  Cyclic GFR-binding peptide
  MOD_RES (30)..(31): Xaa is C or S
VVMGQYNKLIIQQKDNLYLMSIASMKTPTXXPGASG

SEQ ID NO: 91915 - protein, 34 aa, Artificial Sequence; identical to SEQ ID NO: 37314
  Cyclic GFR-binding peptide
  MOD_RES (2)..(33)..(34): Xaa is C or S

SEQ ID NO: 91916 - protein, 39 aa, Artificial Sequence; identical to SEQ ID NO: 37320
  Cyclic GFR-binding peptide
  MOD_RES (1)..(3)..(35)..(36): Xaa is C or S

SEQ ID NO: 91917 - protein, 37 aa, Artificial Sequence; identical to SEQ ID NO: 37322
  Cyclic GFR-binding peptide
  MOD_RES (2)..(34)..(35): Xaa is C or S

SEQ ID NO: 91918 - protein, 31 aa, Artificial Sequence
  Cyclic GFR-binding peptide
  MOD_RES (28)..(29): Xaa is C or S
MDQYNKLVVNNAADLYLISIASLRAPVXXSA

SEQ ID NO: 91919 - protein, 30 aa, Artificial Sequence; identical to SEQ ID NO: 37323
  Cyclic GFR-binding peptide

SEQ ID NO: 91920 - protein, 36 aa, Artificial Sequence
  Cyclic GFR-binding peptide
  MOD_RES (30)..(31): Xaa is C or S
VVMNQYNKLIVNSSDDLYLVSIASLKTPAXXPKPVH

SEQ ID NO: 91921 - protein, 37 aa, Artificial Sequence; identical to SEQ ID NO: 37327
  Cyclic GFR-binding peptide
  MOD_RES (32)..(33): Xaa is C or S

SEQ ID NO: 91922 - protein, 39 aa, Artificial Sequence; identical to SEQ ID NO: 37330
  Cyclic GFR-binding peptide
  MOD_RES (2)..(4)..(35)..(36): Xaa is C or S

SEQ ID NO: 91923 - protein, 32 aa, Artificial Sequence
  Cyclic GFR-binding peptide
  MOD_RES (29)..(30): Xaa is C or S
VMGQYNKLIIQQKDNLYLMSIASMKTPTXXPG

SEQ ID NO: 91924 - protein, 35 aa, Artificial Sequence; identical to SEQ ID NO: 37331
  Cyclic GFR-binding peptide
  MOD_RES (1)..(33)..(34): Xaa is C or S

SEQ ID NO: 91925 - protein, 20 aa, Artificial Sequence
  Cyclic GFR-binding peptide
QYNKLVVNKNEDLYLISIAS

SEQ ID NO: 91926 - protein, 31 aa, Artificial Sequence; identical to SEQ ID NO: 37334
  Cyclic GFR-binding peptide
  MOD_RES (31)..(31): Xaa is C or S

SEQ ID NO: 91927 - protein, 22 aa, Artificial Sequence
  Cyclic GFR-binding peptide
GQYNKLIIQQKDNLYLMSIASM

SEQ ID NO: 91928 - protein, 31 aa, Artificial Sequence
  Cyclic GFR-binding peptide
  MOD_RES (2)..(2): Xaa is C or S
GXESVAMGQYNKLYTVVGKDLYLISIASLKT

SEQ ID NO: 91929 - protein, 28 aa, Artificial Sequence
  Cyclic GFR-binding peptide
  MOD_RES (27)..(28): Xaa is C or S
GQYNKLIIQQKDNLYLMSIASMKTPTXX

SEQ ID NO: 91930 - protein, 25 aa, Artificial Sequence
  Cyclic GFR-binding peptide
MDQYNKLVVNNAADLYLISIASLRA

SEQ ID NO: 91931 - protein, 31 aa, Artificial Sequence
  Cyclic GFR-binding peptide
  MOD_RES (27)..(28): Xaa is C or S
MQYNKLLLVRGNDLYLMSIASTKVPAXXTSP

SEQ ID NO: 91932 - protein, 33 aa, Artificial Sequence
  Cyclic GFR-binding peptide
  MOD_RES (2)..(4): Xaa is C or S
LXGXEEVIMQYNKLLLVRGNDLYLMSIASTKVP

SEQ ID NO: 91933 - protein, 27 aa, Artificial Sequence
  Cyclic GFR-binding peptide
MDQYNKLVVNNAADLYLISIASLRAPV

SEQ ID NO: 91934 - protein, 30 aa, Artificial Sequence
  Cyclic GFR-binding peptide
  MOD_RES (30)..(30): Xaa is C or S
VVMDQYNKLVVNNAADLYLISIASLRAPVX

SEQ ID NO: 91935 - protein, 42 aa, Artificial Sequence; identical to SEQ ID NO: 37344
  Cyclic GFR-binding peptide
  MOD_RES (2)..(4)..(36)..(37): Xaa is C or S

SEQ ID NO: 91936 - protein, 33 aa, Artificial Sequence; identical to SEQ ID NO: 37345
  Cyclic GFR-binding peptide
  MOD_RES (32)..(33): Xaa is C or S

SEQ ID NO: 91937 - protein, 40 aa, Artificial Sequence; identical to SEQ ID NO: 37348
  Cyclic GFR-binding peptide
  MOD_RES (1)..(3)..(35)..(36): Xaa is C or S

SEQ ID NO: 91938 - protein, 33 aa, Artificial Sequence; identical to SEQ ID NO: 37349
  Cyclic GFR-binding peptide
  MOD_RES (1)..(3): Xaa is C or S

SEQ ID NO: 91939 - protein, 26 aa, Artificial Sequence
  Cyclic GFR-binding peptide
EVTMNQYNKLVVNKNEDLYLISIASM

SEQ ID NO: 91940 - protein, 27 aa, Artificial Sequence
  Cyclic GFR-binding peptide
EVVMDQYNKLVVNNAADLYLISIASLR

SEQ ID NO: 91941 - protein, 36 aa, Artificial Sequence; identical to SEQ ID NO: 37357
  Cyclic GFR-binding peptide
  MOD_RES (32)..(33): Xaa is C or S

SEQ ID NO: 91942 - protein, 34 aa, Artificial Sequence
  Cyclic GFR-binding peptide
  MOD_RES (30)..(31): Xaa is C or S
VVMGQYNKLIIQQKDNLYLMSIASMKTPTXXPGA

SEQ ID NO: 91943 - protein, 26 aa, Artificial Sequence
  Cyclic GFR-binding peptide
AMGQYNKLYTVVGKDLYLISIASLKT

SEQ ID NO: 91944 - protein, 31 aa, Artificial Sequence; identical to SEQ ID NO: 37360
  Cyclic GFR-binding peptide

SEQ ID NO: 91945 - protein, 23 aa, Artificial Sequence
  Cyclic GFR-binding peptide
MQYNKLLLVRGNDLYLMSIASTK

SEQ ID NO: 91946 - protein, 30 aa, Artificial Sequence
  Cyclic GFR-binding peptide
  MOD_RES (28)..(29): Xaa is C or S
MGQYNKLIIQQKDNLYLMSIASMKTPTXXP

SEQ ID NO: 91947 - protein, 36 aa, Artificial Sequence; identical to SEQ ID NO: 37362
  Cyclic GFR-binding peptide
  MOD_RES (32)..(33): Xaa is C or S

SEQ ID NO: 91948 - protein, 20 aa, Artificial Sequence
  Cyclic GFR-binding peptide
QYNKLVVNNAADLYLISIAS

SEQ ID NO: 91949 - protein, 32 aa, Artificial Sequence; identical to SEQ ID NO: 37369
  Cyclic GFR-binding peptide
  MOD_RES (32)..(32): Xaa is C or S

SEQ ID NO: 91950 - protein, 31 aa, Artificial Sequence
  Cyclic GFR-binding peptide
  MOD_RES (28)..(29): Xaa is C or S
MGQYNKLIIQQKDNLYLMSIASMKTPTXXPG

SEQ ID NO: 91951 - protein, 34 aa, Artificial Sequence
  Cyclic GFR-binding peptide
  MOD_RES (28)..(29): Xaa is C or S
IMQYNKLLLVRGNDLYLMSIASTKVPAXXTSPVR

SEQ ID NO: 91952 - protein, 35 aa, Artificial Sequence; identical to SEQ ID NO: 37377
  Cyclic GFR-binding peptide
  MOD_RES (31)..(32): Xaa is C or S

SEQ ID NO: 91953 - protein, 32 aa, Artificial Sequence
  Cyclic GFR-binding peptide
  MOD_RES (2)..(4): Xaa is C or S
RXAXSEVTMNQYNKLVVNKNEDLYLISIASMK

SEQ ID NO: 91954 - protein, 35 aa, Artificial Sequence
  Cyclic GFR-binding peptide
  MOD_RES (29)..(30): Xaa is C or S
AMGQYNKLYTVVGKDLYLISIASLKTPVXXAKSAK

SEQ ID NO: 91955 - protein, 30 aa, Artificial Sequence
  Cyclic GFR-binding peptide
  MOD_RES (1)..(1): Xaa is C or S
XESVAMGQYNKLYTVVGKDLYLISIASLKT

SEQ ID NO: 91956 - protein, 29 aa, Artificial Sequence
  Cyclic GFR-binding peptide
VVMDQYNKLVVNNAADLYLISIASLRAPV

SEQ ID NO: 91957 - protein, 26 aa, Artificial Sequence
  Cyclic GFR-binding peptide
VTMNQYNKLVVNKNEDLYLISIASMK

SEQ ID NO: 91958 - protein, 40 aa, Artificial Sequence; identical to SEQ ID NO: 37380
  Cyclic GFR-binding peptide
  MOD_RES (1)..(3)..(35)..(36): Xaa is C or S

SEQ ID NO: 91959 - protein, 25 aa, Artificial Sequence
  Cyclic GFR-binding peptide
EEVIMQYNKLLLVRGNDLYLMSIAS

SEQ ID NO: 91960 - protein, 40 aa, Artificial Sequence; identical to SEQ ID NO: 37381
  Cyclic GFR-binding peptide
  MOD_RES (1)..(3)..(35)..(36): Xaa is C or S

SEQ ID NO: 91961 - protein, 25 aa, Artificial Sequence
  Cyclic GFR-binding peptide
DVVMGQYNKLIIQQKDNLYLMSIAS

SEQ ID NO: 91962 - protein, 40 aa, Artificial Sequence; identical to SEQ ID NO: 37382
  Cyclic GFR-binding peptide
  MOD_RES (2)..(4)..(36)..(37): Xaa is C or S

SEQ ID NO: 91963 - protein, 29 aa, Artificial Sequence
  Cyclic GFR-binding peptide
VTMNQYNKLVVNKNEDLYLISIASMKEPV

SEQ ID NO: 91964 - protein, 30 aa, Artificial Sequence
  Cyclic GFR-binding peptide
  MOD_RES (29)..(30): Xaa is C or S
VMGQYNKLIIQQKDNLYLMSIASMKTPTXX

SEQ ID NO: 91965 - protein, 38 aa, Artificial Sequence; identical to SEQ ID NO: 37383
  Cyclic GFR-binding peptide
  MOD_RES (1)..(3)..(35)..(36): Xaa is C or S

SEQ ID NO: 91966 - protein, 24 aa, Artificial Sequence
  Cyclic GFR-binding peptide
VVMDQYNKLVVNNAADLYLISIAS

SEQ ID NO: 91967 - protein, 21 aa, Artificial Sequence
  Cyclic GFR-binding peptide
QYNKLYTVVGKDLYLISIASL

SEQ ID NO: 91968 - protein, 27 aa, Artificial Sequence
  Cyclic GFR-binding peptide
  MOD_RES (1)..(1): Xaa is C or S
XESVAMGQYNKLYTVVGKDLYLISIAS

SEQ ID NO: 91969 - protein, 26 aa, Artificial Sequence
  Cyclic GFR-binding peptide
MDQYNKLVVNNAADLYLISIASLRAP

SEQ ID NO: 91970 - protein, 33 aa, Artificial Sequence
  Cyclic GFR-binding peptide
  MOD_RES (2)..(4): Xaa is C or S
RXGXESVAMGQYNKLYTVVGKDLYLISIASLKT

SEQ ID NO: 91971 - protein, 32 aa, Artificial Sequence
  Cyclic GFR-binding peptide
  MOD_RES (2)..(4): Xaa is C or S
SXGXRDVVMGQYNKLIIQQKDNLYLMSIASMK

SEQ ID NO: 91972 - protein, 38 aa, Artificial Sequence; identical to SEQ ID NO: 37390
  Cyclic GFR-binding peptide
  MOD_RES (1)..(3)..(35)..(36): Xaa is C or S

SEQ ID NO: 91973 - protein, 36 aa, Artificial Sequence; identical to SEQ ID NO: 37392
  Cyclic GFR-binding peptide
  MOD_RES (1)..(3)..(35)..(36): Xaa is C or S

SEQ ID NO: 91974 - protein, 31 aa, Artificial Sequence
  Cyclic GFR-binding peptide
  MOD_RES (29)..(30): Xaa is C or S
AMGQYNKLYTVVGKDLYLISIASLKTPVXXA

SEQ ID NO: 91975 - protein, 35 aa, Artificial Sequence
  Cyclic GFR-binding peptide
  MOD_RES (29)..(30): Xaa is C or S
TMNQYNKLVVNKNEDLYLISIASMKEPVXXPEPIG

SEQ ID NO: 91976 - protein, 39 aa, Artificial Sequence; identical to SEQ ID NO: 37396
  Cyclic GFR-binding peptide
  MOD_RES (1)..(33)..(34): Xaa is C or S

SEQ ID NO: 91977 - protein, 24 aa, Artificial Sequence
  Cyclic GFR-binding peptide
GQYNKLIIQQKDNLYLMSIASMKT

SEQ ID NO: 91978 - protein, 37 aa, Artificial Sequence; identical to SEQ ID NO: 37398
  Cyclic GFR-binding peptide
  MOD_RES (32)..(33): Xaa is C or S

SEQ ID NO: 91979 - protein, 29 aa, Artificial Sequence
  Cyclic GFR-binding peptide
  MOD_RES (1)..(3): Xaa is C or S
XGXRDVVMGQYNKLIIQQKDNLYLMSIAS

SEQ ID NO: 91980 - protein, 31 aa, Artificial Sequence
  Cyclic GFR-binding peptide
  MOD_RES (2)..(2): Xaa is C or S
AXSEVTMNQYNKLVVNKNEDLYLISIASMKE

SEQ ID NO: 91981 - protein, 33 aa, Artificial Sequence; identical to SEQ ID NO: 37400
  Cyclic GFR-binding peptide
  MOD_RES (32)..(33): Xaa is C or S

SEQ ID NO: 91982 - protein, 23 aa, Artificial Sequence
  Cyclic GFR-binding peptide
QYNKLIIQQKDNLYLMSIASMKT

SEQ ID NO: 91983 - protein, 28 aa, Artificial Sequence
  Cyclic GFR-binding peptide
VMDQYNKLVVNNAADLYLISIASLRAPV

SEQ ID NO: 91984 - protein, 28 aa, Artificial Sequence
  Cyclic GFR-binding peptide
EVIMQYNKLLLVRGNDLYLMSIASTKVP

SEQ ID NO: 91985 - protein, 37 aa, Artificial Sequence; identical to SEQ ID NO: 37405
  Cyclic GFR-binding peptide
  MOD_RES (1)..(33)..(34): Xaa is C or S

SEQ ID NO: 91986 - protein, 38 aa, Artificial Sequence; identical to SEQ ID NO: 37407
  Cyclic GFR-binding peptide
  MOD_RES (1)..(33)..(34): Xaa is C or S

SEQ ID NO: 91987 - protein, 28 aa, Artificial Sequence
  Cyclic GFR-binding peptide
  MOD_RES (26)..(27): Xaa is C or S
QYNKLYTVVGKDLYLISIASLKTPVXXA

SEQ ID NO: 91988 - protein, 32 aa, Artificial Sequence; identical to SEQ ID NO: 37409
  Cyclic GFR-binding peptide
  MOD_RES (31)..(32): Xaa is C or S

SEQ ID NO: 91989 - protein, 33 aa, Artificial Sequence
  Cyclic GFR-binding peptide
  MOD_RES (2)..(4): Xaa is C or S
RXGXAEVVMDQYNKLVVNNAADLYLISIASLRA

SEQ ID NO: 91990 - protein, 33 aa, Artificial Sequence
  Cyclic GFR-binding peptide
  MOD_RES (29)..(30): Xaa is C or S
VMDQYNKLVVNNAADLYLISIASLRAPVXXSAP

SEQ ID NO: 91991 - protein, 26 aa, Artificial Sequence
  Cyclic GFR-binding peptide
VMGQYNKLIIQQKDNLYLMSIASMKT

SEQ ID NO: 91992 - protein, 23 aa, Artificial Sequence
  Cyclic GFR-binding peptide
GQYNKLYTVVGKDLYLISIASLK

SEQ ID NO: 91993 - protein, 24 aa, Artificial Sequence
  Cyclic GFR-binding peptide
VTMNQYNKLVVNKNEDLYLISIAS

SEQ ID NO: 91994 - protein, 23 aa, Artificial Sequence
  Cyclic GFR-binding peptide
AMGQYNKLYTVVGKDLYLISIAS

SEQ ID NO: 91995 - protein, 29 aa, Artificial Sequence
  Cyclic GFR-binding peptide
  MOD_RES (26)..(27): Xaa is C or S
QYNKLIIQQKDNLYLMSIASMKTPTXXPG

SEQ ID NO: 91996 - protein, 32 aa, Artificial Sequence; identical to SEQ ID NO: 37421
  Cyclic GFR-binding peptide
  MOD_RES (32)..(32): Xaa is C or S

SEQ ID NO: 91997 - protein, 32 aa, Artificial Sequence
  Cyclic GFR-binding peptide
  MOD_RES (29)..(30): Xaa is C or S
VMDQYNKLVVNNAADLYLISIASLRAPVXXSA

SEQ ID NO: 91998 - protein, 20 aa, Artificial Sequence
  Cyclic GFR-binding peptide
QYNKLIIQQKDNLYLMSIAS

SEQ ID NO: 91999 - protein, 30 aa, Artificial Sequence
  Cyclic GFR-binding peptide
  MOD_RES (28)..(29): Xaa is C or S
MGQYNKLYTVVGKDLYLISIASLKTPVXXA

SEQ ID NO: 92000 - protein, 26 aa, Artificial Sequence
  Cyclic GFR-binding peptide
VVMDQYNKLVVNNAADLYLISIASLR

SEQ ID NO: 92001 - protein, 34 aa, Artificial Sequence; identical to SEQ ID NO: 37427
  Cyclic GFR-binding peptide
  MOD_RES (2)..(34): Xaa is C or S

SEQ ID NO: 92002 - protein, 28 aa, Artificial Sequence
  Cyclic GFR-binding peptide
  MOD_RES (28)..(28): Xaa is C or S
MGQYNKLYTVVGKDLYLISIASLKTPVX

SEQ ID NO: 92003 - protein, 28 aa, Artificial Sequence
  Cyclic GFR-binding peptide
VVMDQYNKLVVNNAADLYLISIASLRAP

SEQ ID NO: 92004 - protein, 35 aa, Artificial Sequence; identical to SEQ ID NO: 37432
  Cyclic GFR-binding peptide
  MOD_RES (32)..(33): Xaa is C or S

SEQ ID NO: 92005 - protein, 32 aa, Artificial Sequence; identical to SEQ ID NO: 37434
  Cyclic GFR-binding peptide
  MOD_RES (32)..(32): Xaa is C or S

SEQ ID NO: 92006 - protein, 25 aa, Artificial Sequence
  Cyclic GFR-binding peptide
GQYNKLIIQQKDNLYLMSIASMKTP

SEQ ID NO: 92007 - protein, 42 aa, Artificial Sequence; identical to SEQ ID NO: 37437
  Cyclic GFR-binding peptide
  MOD_RES (2)..(4)..(36)..(37): Xaa is C or S

SEQ ID NO: 92008 - protein, 35 aa, Artificial Sequence; identical to SEQ ID NO: 37438
  Cyclic GFR-binding peptide
  MOD_RES (1)..(3)..(34)..(35): Xaa is C or S

SEQ ID NO: 92009 - protein, 37 aa, Artificial Sequence; identical to SEQ ID NO: 37439
  Cyclic GFR-binding peptide
  MOD_RES (1)..(3)..(35)..(36): Xaa is C or S

SEQ ID NO: 92010 - protein, 31 aa, Artificial Sequence
  Cyclic GFR-binding peptide
  MOD_RES (28)..(29): Xaa is C or S
MGQYNKLYTVVGKDLYLISIASLKTPVXXAK

SEQ ID NO: 92011 - protein, 27 aa, Artificial Sequence
  Cyclic GFR-binding peptide
  MOD_RES (26)..(27): Xaa is C or S
QYNKLLLVRGNDLYLMSIASTKVPAXX

SEQ ID NO: 92012 - protein, 33 aa, Artificial Sequence
  Cyclic GFR-binding peptide
  MOD_RES (27)..(28): Xaa is C or S
NQYNKLIVNSSDDLYLVSIASLKTPAXXPKPVH

SEQ ID NO: 92013 - protein, 35 aa, Artificial Sequence
  Cyclic GFR-binding peptide
  MOD_RES (30)..(31): Xaa is C or S
VAMGQYNKLYTVVGKDLYLISIASLKTPVXXAKSA

SEQ ID NO: 92014 - protein, 26 aa, Artificial Sequence
  Cyclic GFR-binding peptide
MGQYNKLIIQQKDNLYLMSIASMKTP

SEQ ID NO: 92015 - protein, 27 aa, Artificial Sequence
  Cyclic GFR-binding peptide
IMQYNKLLLVRGNDLYLMSIASTKVPA

SEQ ID NO: 92016 - protein, 25 aa, Artificial Sequence
  Cyclic GFR-binding peptide
EVVMDQYNKLVVNNAADLYLISIAS

SEQ ID NO: 92017 - protein, 30 aa, Artificial Sequence
  Cyclic GFR-binding peptide
  MOD_RES (1)..(3): Xaa is C or S
XGXRDVVMGQYNKLIIQQKDNLYLMSIASM

SEQ ID NO: 92018 - protein, 26 aa, Artificial Sequence
  Cyclic GFR-binding peptide
VIMQYNKLLLVRGNDLYLMSIASTKV

SEQ ID NO: 92019 - protein, 32 aa, Artificial Sequence; identical to SEQ ID NO: 37461
  Cyclic GFR-binding peptide
  MOD_RES (1)..(32): Xaa is C or S

SEQ ID NO: 92020 - protein, 29 aa, Artificial Sequence
  Cyclic GFR-binding peptide
  MOD_RES (27)..(28): Xaa is C or S
GQYNKLYTVVGKDLYLISIASLKTPVXXA

SEQ ID NO: 92021 - protein, 31 aa, Artificial Sequence
  Cyclic GFR-binding peptide
  MOD_RES (29)..(30): Xaa is C or S
VIMQYNKLLLVRGNDLYLMSIASTKVPAXXT

SEQ ID NO: 92022 - protein, 21 aa, Artificial Sequence
  Cyclic GFR-binding peptide
NQYNKLVVNKNEDLYLISIAS

SEQ ID NO: 92023 - protein, 20 aa, Artificial Sequence
  Cyclic GFR-binding peptide
QYNKLLLVRGNDLYLMSIAS

SEQ ID NO: 92024 - protein, 34 aa, Artificial Sequence; identical to SEQ ID NO: 37468
  Cyclic GFR-binding peptide
  MOD_RES (1)..(3): Xaa is C or S

SEQ ID NO: 92025 - protein, 35 aa, Artificial Sequence; identical to SEQ ID NO: 37470
  Cyclic GFR-binding peptide
  MOD_RES (31)..(32): Xaa is C or S

SEQ ID NO: 92026 - protein, 37 aa, Artificial Sequence; identical to SEQ ID NO: 37471
  Cyclic GFR-binding peptide
  MOD_RES (2)..(34)..(35): Xaa is C or S

SEQ ID NO: 92027 - protein, 36 aa, Artificial Sequence
  Cyclic GFR-binding peptide
  MOD_RES (30)..(31): Xaa is C or S
VTMNQYNKLVVNKNEDLYLISIASMKEPVXXPEPIG

SEQ ID NO: 92028 - protein, 36 aa, Artificial Sequence; identical to SEQ ID NO: 37472
  Cyclic GFR-binding peptide
  MOD_RES (2)..(34)..(35): Xaa is C or S

SEQ ID NO: 92029 - protein, 26 aa, Artificial Sequence
  Cyclic GFR-binding peptide
  MOD_RES (26)..(26): Xaa is C or S
QYNKLLLVRGNDLYLMSIASTKVPAX

SEQ ID NO: 92030 - protein, 30 aa, Artificial Sequence; identical to SEQ ID NO: 37474
  Cyclic GFR-binding peptide

SEQ ID NO: 92031 - protein, 32 aa, Artificial Sequence
  Cyclic GFR-binding peptide
  MOD_RES (26)..(27): Xaa is C or S
QYNKLVVNKNEDLYLISIASMKEPVXXPEPIG

SEQ ID NO: 92032 - protein, 40 aa, Artificial Sequence; identical to SEQ ID NO: 37475
  Cyclic GFR-binding peptide
  MOD_RES (2)..(34)..(35): Xaa is C or S

SEQ ID NO: 92033 - protein, 34 aa, Artificial Sequence
  Cyclic GFR-binding peptide
  MOD_RES (2)..(4): Xaa is C or S
RXGXESVAMGQYNKLYTVVGKDLYLISIASLKTP

SEQ ID NO: 92034 - protein, 27 aa, Artificial Sequence
  Cyclic GFR-binding peptide
ESVAMGQYNKLYTVVGKDLYLISIASL

SEQ ID NO: 92035 - protein, 33 aa, Artificial Sequence; identical to SEQ ID NO: 37477
  Cyclic GFR-binding peptide
  MOD_RES (2)..(2): Xaa is C or S

SEQ ID NO: 92036 - protein, 36 aa, Artificial Sequence; identical to SEQ ID NO: 37479
  Cyclic GFR-binding peptide
  MOD_RES (31)..(32): Xaa is C or S

SEQ ID NO: 92037 - protein, 30 aa, Artificial Sequence
  Cyclic GFR-binding peptide
  MOD_RES (2)..(2): Xaa is C or S
GXESVAMGQYNKLYTVVGKDLYLISIASLK

SEQ ID NO: 92038 - protein, 32 aa, Artificial Sequence
  Cyclic GFR-binding peptide
  MOD_RES (28)..(29): Xaa is C or S
MGQYNKLIIQQKDNLYLMSIASMKTPTXXPGA

SEQ ID NO: 92039 - protein, 31 aa, Artificial Sequence
  Cyclic GFR-binding peptide
  MOD_RES (2)..(4): Xaa is C or S
LXGXEEVIMQYNKLLLVRGNDLYLMSIASTK

SEQ ID NO: 92040 - protein, 32 aa, Artificial Sequence
  Cyclic GFR-binding peptide
  MOD_RES (27)..(28): Xaa is C or S
MQYNKLLLVRGNDLYLMSIASTKVPAXXTSPV

SEQ ID NO: 92041 - protein, 39 aa, Artificial Sequence; identical to SEQ ID NO: 37488
  Cyclic GFR-binding peptide
  MOD_RES (2)..(33)..(34): Xaa is C or S

SEQ ID NO: 92042 - protein, 28 aa, Artificial Sequence
  Cyclic GFR-binding peptide
EEVIMQYNKLLLVRGNDLYLMSIASTKV

SEQ ID NO: 92043 - protein, 24 aa, Artificial Sequence
  Cyclic GFR-binding peptide
VIMQYNKLLLVRGNDLYLMSIAST

SEQ ID NO: 92044 - protein, 27 aa, Artificial Sequence
  Cyclic GFR-binding peptide
MGQYNKLYTVVGKDLYLISIASLKTPV

SEQ ID NO: 92045 - protein, 32 aa, Artificial Sequence
  Cyclic GFR-binding peptide
  MOD_RES (29)..(30): Xaa is C or S
AMGQYNKLYTVVGKDLYLISIASLKTPVXXAK

SEQ ID NO: 92046 - protein, 32 aa, Artificial Sequence
  Cyclic GFR-binding peptide
  MOD_RES (30)..(31): Xaa is C or S
VVMGQYNKLIIQQKDNLYLMSIASMKTPTXXP

SEQ ID NO: 92047 - protein, 31 aa, Artificial Sequence
  Cyclic GFR-binding peptide
  MOD_RES (27)..(28): Xaa is C or S
NQYNKLVVNKNEDLYLISIASMKEPVXXPEP

SEQ ID NO: 92048 - protein, 29 aa, Artificial Sequence
  Cyclic GFR-binding peptide
SEVTMNQYNKLVVNKNEDLYLISIASMKE

SEQ ID NO: 92049 - protein, 24 aa, Artificial Sequence
  Cyclic GFR-binding peptide
QYNKLIIQQKDNLYLMSIASMKTP

SEQ ID NO: 92050 - protein, 36 aa, Artificial Sequence; identical to SEQ ID NO: 37493
  Cyclic GFR-binding peptide
  MOD_RES (32)..(33): Xaa is C or S

SEQ ID NO: 92051 - protein, 40 aa, Artificial Sequence; identical to SEQ ID NO: 37494
  Cyclic GFR-binding peptide
  MOD_RES (2)..(4)..(35)..(36): Xaa is C or S

SEQ ID NO: 92052 - protein, 41 aa, Artificial Sequence; identical to SEQ ID NO: 37495
  Cyclic GFR-binding peptide
  MOD_RES (2)..(4)..(36)..(37): Xaa is C or S

SEQ ID NO: 92053 - protein, 39 aa, Artificial Sequence; identical to SEQ ID NO: 37496
  Cyclic GFR-binding peptide
  MOD_RES (2)..(34)..(35): Xaa is C or S

SEQ ID NO: 92054 - protein, 32 aa, Artificial Sequence
  Cyclic GFR-binding peptide
  MOD_RES (27)..(28): Xaa is C or S
GQYNKLIIQQKDNLYLMSIASMKTPTXXPGAS

SEQ ID NO: 92055 - protein, 33 aa, Artificial Sequence; identical to SEQ ID NO: 37498
  Cyclic GFR-binding peptide
  MOD_RES (31)..(32): Xaa is C or S

SEQ ID NO: 92056 - protein, 27 aa, Artificial Sequence
  Cyclic GFR-binding peptide
EVIMQYNKLLLVRGNDLYLMSIASTKV

SEQ ID NO: 92057 - protein, 37 aa, Artificial Sequence; identical to SEQ ID NO: 37501
  Cyclic GFR-binding peptide
  MOD_RES (32)..(33): Xaa is C or S

SEQ ID NO: 92058 - protein, 29 aa, Artificial Sequence
  Cyclic GFR-binding peptide
  MOD_RES (27)..(28): Xaa is C or S
DQYNKLVVNNAADLYLISIASLRAPVXXS

SEQ ID NO: 92059 - protein, 32 aa, Artificial Sequence
  Cyclic GFR-binding peptide
  MOD_RES (26)..(27): Xaa is C or S
QYNKLYTVVGKDLYLISIASLKTPVXXAKSAK

SEQ ID NO: 92060 - protein, 28 aa, Artificial Sequence
  Cyclic GFR-binding peptide
VIMQYNKLLLVRGNDLYLMSIASTKVPA

SEQ ID NO: 92061 - protein, 30 aa, Artificial Sequence
  Cyclic GFR-binding peptide
  MOD_RES (1)..(3): Xaa is C or S
XGXEEVIMQYNKLLLVRGNDLYLMSIASTK

SEQ ID NO: 92062 - protein, 28 aa, Artificial Sequence
  Cyclic GFR-binding peptide
EVVMDQYNKLVVNNAADLYLISIASLRA

SEQ ID NO: 92063 - protein, 29 aa, Artificial Sequence
  Cyclic GFR-binding peptide
  MOD_RES (28)..(29): Xaa is C or S
MGQYNKLIIQQKDNLYLMSIASMKTPTXX

SEQ ID NO: 92064 - protein, 36 aa, Artificial Sequence; identical to SEQ ID NO: 37513
  Cyclic GFR-binding peptide
  MOD_RES (2)..(4)..(36): Xaa is C or S

SEQ ID NO: 92065 - protein, 27 aa, Artificial Sequence
  Cyclic GFR-binding peptide
TMNQYNKLVVNKNEDLYLISIASMKEP

SEQ ID NO: 92066 - protein, 23 aa, Artificial Sequence
  Cyclic GFR-binding peptide
VMDQYNKLVVNNAADLYLISIAS

SEQ ID NO: 92067 - protein, 26 aa, Artificial Sequence
  Cyclic GFR-binding peptide
EVIMQYNKLLLVRGNDLYLMSIASTK

SEQ ID NO: 92068 - protein, 29 aa, Artificial Sequence
  Cyclic GFR-binding peptide
  MOD_RES (27)..(28): Xaa is C or S
NQYNKLVVNKNEDLYLISIASMKEPVXXP

SEQ ID NO: 92069 - protein, 26 aa, Artificial Sequence
  Cyclic GFR-binding peptide
MQYNKLLLVRGNDLYLMSIASTKVPA

SEQ ID NO: 92070 - protein, 34 aa, Artificial Sequence; identical to SEQ ID NO: 37516
  Cyclic GFR-binding peptide
  MOD_RES (31)..(32): Xaa is C or S

SEQ ID NO: 92071 - protein, 38 aa, Artificial Sequence; identical to SEQ ID NO: 37520
  Cyclic GFR-binding peptide
  MOD_RES (2)..(4)..(36)..(37): Xaa is C or S

SEQ ID NO: 92072 - protein, 27 aa, Artificial Sequence
  Cyclic GFR-binding peptide
VMDQYNKLVVNNAADLYLISIASLRAP

SEQ ID NO: 92073 - protein, 37 aa, Artificial Sequence; identical to SEQ ID NO: 37525
  Cyclic GFR-binding peptide
  MOD_RES (31)..(32): Xaa is C or S

SEQ ID NO: 92074 - protein, 30 aa, Artificial Sequence
  Cyclic GFR-binding peptide
  MOD_RES (2)..(4): Xaa is C or S
RXGXAEVVMDQYNKLVVNNAADLYLISIAS

SEQ ID NO: 92075 - protein, 42 aa, Artificial Sequence; identical to SEQ ID NO: 37527
  Cyclic GFR-binding peptide
  MOD_RES (2)..(4)..(36)..(37): Xaa is C or S

SEQ ID NO: 92076 - protein, 26 aa, Artificial Sequence
  Cyclic GFR-binding peptide
  MOD_RES (26)..(26): Xaa is C or S
QYNKLIIQQKDNLYLMSIASMKTPTX

SEQ ID NO: 92077 - protein, 33 aa, Artificial Sequence; identical to SEQ ID NO: 37532
  Cyclic GFR-binding peptide
  MOD_RES (1)..(33): Xaa is C or S

SEQ ID NO: 92078 - protein, 25 aa, Artificial Sequence
  Cyclic GFR-binding peptide
VVMDQYNKLVVNNAADLYLISIASL

SEQ ID NO: 92079 - protein, 33 aa, Artificial Sequence
  Cyclic GFR-binding peptide
  MOD_RES (28)..(29): Xaa is C or S
IMQYNKLLLVRGNDLYLMSIASTKVPAXXTSPV

SEQ ID NO: 92080 - protein, 28 aa, Artificial Sequence
  Cyclic GFR-binding peptide
  MOD_RES (28)..(28): Xaa is C or S
MGQYNKLIIQQKDNLYLMSIASMKTPTX

SEQ ID NO: 92081 - protein, 34 aa, Artificial Sequence; identical to SEQ ID NO: 37543
  Cyclic GFR-binding peptide
  MOD_RES (1)..(33)..(34): Xaa is C or S

SEQ ID NO: 92082 - protein, 31 aa, Artificial Sequence
  Cyclic GFR-binding peptide
  MOD_RES (26)..(27): Xaa is C or S
QYNKLLLVRGNDLYLMSIASTKVPAXXTSPV

SEQ ID NO: 92083 - protein, 30 aa, Artificial Sequence
  Cyclic GFR-binding peptide
ESVAMGQYNKLYTVVGKDLYLISIASLKTP

SEQ ID NO: 92084 - protein, 41 aa, Artificial Sequence; identical to SEQ ID NO: 37549
  Cyclic GFR-binding peptide
  MOD_RES (2)..(4)..(36)..(37): Xaa is C or S

SEQ ID NO: 92085 - protein, 34 aa, Artificial Sequence; identical to SEQ ID NO: 37550
  Cyclic GFR-binding peptide
  MOD_RES (1)..(3)..(34): Xaa is C or S

SEQ ID NO: 92086 - protein, 34 aa, Artificial Sequence
  Cyclic GFR-binding peptide
  MOD_RES (28)..(29): Xaa is C or S
MNQYNKLVVNKNEDLYLISIASMKEPVXXPEPIG

SEQ ID NO: 92087 - protein, 38 aa, Artificial Sequence; identical to SEQ ID NO: 37554
  Cyclic GFR-binding peptide
  MOD_RES (1)..(33)..(34): Xaa is C or S

SEQ ID NO: 92088 - protein, 27 aa, Artificial Sequence
  Cyclic GFR-binding peptide
  MOD_RES (27)..(27): Xaa is C or S
MQYNKLLLVRGNDLYLMSIASTKVPAX

SEQ ID NO: 92089 - protein, 26 aa, Artificial Sequence
  Cyclic GFR-binding peptide
VVMGQYNKLIIQQKDNLYLMSIASMK

SEQ ID NO: 92090 - protein, 31 aa, Artificial Sequence
  Cyclic GFR-binding peptide
  MOD_RES (1)..(3): Xaa is C or S
XAXSEVTMNQYNKLVVNKNEDLYLISIASMK

SEQ ID NO: 92091 - protein, 23 aa, Artificial Sequence
  Cyclic GFR-binding peptide
TMNQYNKLVVNKNEDLYLISIAS

SEQ ID NO: 92092 - protein, 38 aa, Artificial Sequence; identical to SEQ ID NO: 37561
  Cyclic GFR-binding peptide
  MOD_RES (1)..(33)..(34): Xaa is C or S

SEQ ID NO: 92093 - protein, 33 aa, Artificial Sequence
  Cyclic GFR-binding peptide
  MOD_RES (27)..(28): Xaa is C or S
MQYNKLLLVRGNDLYLMSIASTKVPAXXTSPVR

SEQ ID NO: 92094 - protein, 36 aa, Artificial Sequence; identical to SEQ ID NO: 37564
  Cyclic GFR-binding peptide
  MOD_RES (2)..(4)..(35)..(36): Xaa is C or S

SEQ ID NO: 92095 - protein, 22 aa, Artificial Sequence
  Cyclic GFR-binding peptide
QYNKLVVNKNEDLYLISIASMK

SEQ ID NO: 92096 - protein, 33 aa, Artificial Sequence
  Cyclic GFR-binding peptide
  MOD_RES (27)..(28): Xaa is C or S
GQYNKLYTVVGKDLYLISIASLKTPVXXAKSAK

SEQ ID NO: 92097 - protein, 30 aa, Artificial Sequence
  Cyclic GFR-binding peptide
  MOD_RES (2)..(4): Xaa is C or S
LXGXEEVIMQYNKLLLVRGNDLYLMSIAST

SEQ ID NO: 92098 - protein, 34 aa, Artificial Sequence
  Cyclic GFR-binding peptide
  MOD_RES (2)..(4): Xaa is C or S
SXGXRDVVMGQYNKLIIQQKDNLYLMSIASMKTP

SEQ ID NO: 92099 - protein, 31 aa, Artificial Sequence
  Cyclic GFR-binding peptide
  MOD_RES (2)..(2): Xaa is C or S
GXRDVVMGQYNKLIIQQKDNLYLMSIASMKT

SEQ ID NO: 92100 - protein, 28 aa, Artificial Sequence
  Cyclic GFR-binding peptide
  MOD_RES (1)..(1): Xaa is C or S
XSEVTMNQYNKLVVNKNEDLYLISIASM

SEQ ID NO: 92101 - protein, 34 aa, Artificial Sequence; identical to SEQ ID NO: 37569
  Cyclic GFR-binding peptide
  MOD_RES (32)..(33): Xaa is C or S

SEQ ID NO: 92102 - protein, 34 aa, Artificial Sequence; identical to SEQ ID NO: 37571
  Cyclic GFR-binding peptide
  MOD_RES (32)..(33): Xaa is C or S

SEQ ID NO: 92103 - protein, 37 aa, Artificial Sequence; identical to SEQ ID NO: 37573
  Cyclic GFR-binding peptide
  MOD_RES (1)..(33)..(34): Xaa is C or S

SEQ ID NO: 92104 - protein, 32 aa, Artificial Sequence
  Cyclic GFR-binding peptide
  MOD_RES (2)..(4): Xaa is C or S
LXGXEEVIMQYNKLLLVRGNDLYLMSIASTKV

SEQ ID NO: 92105 - protein, 31 aa, Artificial Sequence
  Cyclic GFR-binding peptide
  MOD_RES (1)..(3): Xaa is C or S
XGXESVAMGQYNKLYTVVGKDLYLISIASLK

SEQ ID NO: 92106 - protein, 39 aa, Artificial Sequence; identical to SEQ ID NO: 37575
  Cyclic GFR-binding peptide
  MOD_RES (1)..(33)..(34): Xaa is C or S

SEQ ID NO: 92107 - protein, 39 aa, Artificial Sequence; identical to SEQ ID NO: 37577
  Cyclic GFR-binding peptide
  MOD_RES (1)..(3)..(35)..(36): Xaa is C or S

SEQ ID NO: 92108 - protein, 24 aa, Artificial Sequence
  Cyclic GFR-binding peptide
EVIMQYNKLLLVRGNDLYLMSIAS

SEQ ID NO: 92109 - protein, 39 aa, Artificial Sequence; identical to SEQ ID NO: 37580
  Cyclic GFR-binding peptide
  MOD_RES (2)..(34)..(35): Xaa is C or S

SEQ ID NO: 92110 - protein, 26 aa, Artificial Sequence
  Cyclic GFR-binding peptide
AEVVMDQYNKLVVNNAADLYLISIAS

SEQ ID NO: 92111 - protein, 30 aa, Artificial Sequence
  Cyclic GFR-binding peptide
  MOD_RES (2)..(4): Xaa is C or S
SXGXRDVVMGQYNKLIIQQKDNLYLMSIAS

SEQ ID NO: 92112 - protein, 34 aa, Artificial Sequence
  Cyclic GFR-binding peptide
  MOD_RES (30)..(31): Xaa is C or S
EVIMQYNKLLLVRGNDLYLMSIASTKVPAXXTSP

SEQ ID NO: 92113 - protein, 38 aa, Artificial Sequence; identical to SEQ ID NO: 37587
  Cyclic GFR-binding peptide
  MOD_RES (32)..(33): Xaa is C or S

SEQ ID NO: 92114 - protein, 33 aa, Artificial Sequence
  Cyclic GFR-binding peptide
  MOD_RES (28)..(29): Xaa is C or S
MNQYNKLVVNKNEDLYLISIASMKEPVXXPEPI

SEQ ID NO: 92115 - protein, 30 aa, Artificial Sequence
  Cyclic GFR-binding peptide
  MOD_RES (28)..(29): Xaa is C or S
MDQYNKLVVNNAADLYLISIASLRAPVXXS

SEQ ID NO: 92116 - protein, 30 aa, Artificial Sequence
  Cyclic GFR-binding peptide
  MOD_RES (1)..(1): Xaa is C or S
XSEVTMNQYNKLVVNKNEDLYLISIASMKE

SEQ ID NO: 92117 - protein, 30 aa, Artificial Sequence
  Cyclic GFR-binding peptide
  MOD_RES (1)..(1): Xaa is C or S
XRDVVMGQYNKLIIQQKDNLYLMSIASMKT

SEQ ID NO: 92118 - protein, 33 aa, Artificial Sequence
  Cyclic GFR-binding peptide
  MOD_RES (2)..(4): Xaa is C or S
RXAXSEVTMNQYNKLVVNKNEDLYLISIASMKE

SEQ ID NO: 92119 - protein, 38 aa, Artificial Sequence; identical to SEQ ID NO: 37594
  Cyclic GFR-binding peptide
  MOD_RES (2)..(4)..(35)..(36): Xaa is C or S

SEQ ID NO: 92120 - protein, 33 aa, Artificial Sequence
  Cyclic GFR-binding peptide
  MOD_RES (28)..(29): Xaa is C or S
MDQYNKLVVNNAADLYLISIASLRAPVXXSAPA

SEQ ID NO: 92121 - protein, 33 aa, Artificial Sequence; identical to SEQ ID NO: 37595
  Cyclic GFR-binding peptide
  MOD_RES (2)..(2): Xaa is C or S

SEQ ID NO: 92122 - protein, 35 aa, Artificial Sequence
  Cyclic GFR-binding peptide
  MOD_RES (29)..(30): Xaa is C or S
VMDQYNKLVVNNAADLYLISIASLRAPVXXSAPAA

SEQ ID NO: 92123 - protein, 20 aa, Artificial Sequence
  Cyclic GFR-binding peptide
QYNKLLLVRGNDLYLMSIAS

SEQ ID NO: 92124 - protein, 30 aa, Artificial Sequence
  Cyclic GFR-binding peptide
  MOD_RES (29)..(30): Xaa is C or S
VIMQYNKLLLVRGNDLYLMSIASTKVPAXX

SEQ ID NO: 92125 - protein, 30 aa, Artificial Sequence
  Cyclic GFR-binding peptide
  MOD_RES (27)..(28): Xaa is C or S
GQYNKLYTVVGKDLYLISIASLKTPVXXAK

SEQ ID NO: 92126 - protein, 35 aa, Artificial Sequence; identical to SEQ ID NO: 37605
  Cyclic GFR-binding peptide
  MOD_RES (2)..(34)..(35): Xaa is C or S

SEQ ID NO: 92127 - protein, 33 aa, Artificial Sequence
  Cyclic GFR-binding peptide
  MOD_RES (29)..(30): Xaa is C or S
AMGQYNKLYTVVGKDLYLISIASLKTPVXXAKS

SEQ ID NO: 92128 - protein, 33 aa, Artificial Sequence; identical to SEQ ID NO: 37607
  Cyclic GFR-binding peptide
  MOD_RES (2)..(2): Xaa is C or S

SEQ ID NO: 92129 - protein, 31 aa, Artificial Sequence
  Cyclic GFR-binding peptide
  MOD_RES (2)..(2): Xaa is C or S
GXAEVVMDQYNKLVVNNAADLYLISIASLRA

SEQ ID NO: 92130 - protein, 31 aa, Artificial Sequence
  Cyclic GFR-binding peptide
  MOD_RES (28)..(29): Xaa is C or S
IMQYNKLLLVRGNDLYLMSIASTKVPAXXTS

SEQ ID NO: 92131 - protein, 27 aa, Artificial Sequence
  Cyclic GFR-binding peptide
  MOD_RES (1)..(1): Xaa is C or S
XSEVTMNQYNKLVVNKNEDLYLISIAS

SEQ ID NO: 92132 - protein, 28 aa, Artificial Sequence
  Cyclic GFR-binding peptide
SEVTMNQYNKLVVNKNEDLYLISIASMK

SEQ ID NO: 92133 - protein, 25 aa, Artificial Sequence
  Cyclic GFR-binding peptide
QYNKLVVNKNEDLYLISIASMKEPV

SEQ ID NO: 92134 - protein, 39 aa, Artificial Sequence; identical to SEQ ID NO: 37612
  Cyclic GFR-binding peptide
  MOD_RES (2)..(4)..(36)..(37): Xaa is C or S

SEQ ID NO: 92135 - protein, 29 aa, Artificial Sequence
  Cyclic GFR-binding peptide
  MOD_RES (29)..(29): Xaa is C or S
VMGQYNKLIIQQKDNLYLMSIASMKTPTX

SEQ ID NO: 92136 - protein, 22 aa, Artificial Sequence
  Cyclic GFR-binding peptide
GQYNKLYTVVGKDLYLISIASL

SEQ ID NO: 92137 - protein, 28 aa, Artificial Sequence
  Cyclic GFR-binding peptide
VMGQYNKLIIQQKDNLYLMSIASMKTPT

SEQ ID NO: 92138 - protein, 29 aa, Artificial Sequence
  Cyclic GFR-binding peptide
  MOD_RES (28)..(29): Xaa is C or S
MDQYNKLVVNNAADLYLISIASLRAPVXX

SEQ ID NO: 92139 - protein, 36 aa, Artificial Sequence; identical to SEQ ID NO: 37620
  Cyclic GFR-binding peptide
  MOD_RES (31)..(32): Xaa is C or S

SEQ ID NO: 92140 - protein, 31 aa, Artificial Sequence; identical to SEQ ID NO: 37619
  Cyclic GFR-binding peptide

SEQ ID NO: 92141 - protein, 31 aa, Artificial Sequence
  Cyclic GFR-binding peptide
  MOD_RES (1)..(1): Xaa is C or S
XSEVTMNQYNKLVVNKNEDLYLISIASMKEP

SEQ ID NO: 92142 - protein, 27 aa, Artificial Sequence
  Cyclic GFR-binding peptide
  MOD_RES (1)..(1): Xaa is C or S
XEEVIMQYNKLLLVRGNDLYLMSIAST

SEQ ID NO: 92143 - protein, 39 aa, Artificial Sequence; identical to SEQ ID NO: 37625
  Cyclic GFR-binding peptide
  MOD_RES (1)..(33)..(34): Xaa is C or S

SEQ ID NO: 92144 - protein, 32 aa, Artificial Sequence
  Cyclic GFR-binding peptide
  MOD_RES (28)..(29): Xaa is C or S
IMQYNKLLLVRGNDLYLMSIASTKVPAXXTSP

SEQ ID NO: 92145 - protein, 36 aa, Artificial Sequence
  Cyclic GFR-binding peptide
  MOD_RES (30)..(31): Xaa is C or S
EVIMQYNKLLLVRGNDLYLMSIASTKVPAXXTSPVR

SEQ ID NO: 92146 - protein, 32 aa, Artificial Sequence; identical to SEQ ID NO: 37628
  Cyclic GFR-binding peptide
  MOD_RES (1)..(1): Xaa is C or S

SEQ ID NO: 92147 - protein, 26 aa, Artificial Sequence
  Cyclic GFR-binding peptide
GQYNKLYTVVGKDLYLISIASLKTPV

SEQ ID NO: 92148 - protein, 34 aa, Artificial Sequence; identical to SEQ ID NO: 37631
  Cyclic GFR-binding peptide
  MOD_RES (31)..(32): Xaa is C or S

SEQ ID NO: 92149 - protein, 27 aa, Artificial Sequence
  Cyclic GFR-binding peptide
EEVIMQYNKLLLVRGNDLYLMSIASTK

SEQ ID NO: 92150 - protein, 29 aa, Artificial Sequence
  Cyclic GFR-binding peptide
  MOD_RES (28)..(29): Xaa is C or S
MNQYNKLVVNKNEDLYLISIASMKEPVXX

SEQ ID NO: 92151 - protein, 25 aa, Artificial Sequence
  Cyclic GFR-binding peptide
QYNKLIIQQKDNLYLMSIASMKTPT

SEQ ID NO: 92152 - protein, 35 aa, Artificial Sequence; identical to SEQ ID NO: 37635
  Cyclic GFR-binding peptide
  MOD_RES (2)..(34)..(35): Xaa is C or S

SEQ ID NO: 92153 - protein, 36 aa, Artificial Sequence; identical to SEQ ID NO: 37638
  Cyclic GFR-binding peptide
  MOD_RES (31)..(32): Xaa is C or S

SEQ ID NO: 92154 - protein, 24 aa, Artificial Sequence
  Cyclic GFR-binding peptide
AMGQYNKLYTVVGKDLYLISIASL

SEQ ID NO: 92155 - protein, 37 aa, Artificial Sequence; identical to SEQ ID NO: 37640
  Cyclic GFR-binding peptide
  MOD_RES (32)..(33): Xaa is C or S

SEQ ID NO: 92156 - protein, 26 aa, Artificial Sequence
  Cyclic GFR-binding peptide
EVVMDQYNKLVVNNAADLYLISIASL

SEQ ID NO: 92157 - protein, 21 aa, Artificial Sequence
  Cyclic GFR-binding peptide
MQYNKLLLVRGNDLYLMSIAS

SEQ ID NO: 92158 - protein, 38 aa, Artificial Sequence; identical to SEQ ID NO: 37642
  Cyclic GFR-binding peptide
  MOD_RES (2)..(34)..(35): Xaa is C or S

SEQ ID NO: 92159 - protein, 30 aa, Artificial Sequence
  Cyclic GFR-binding peptide
  MOD_RES (30)..(30): Xaa is C or S
VAMGQYNKLYTVVGKDLYLISIASLKTPVX

SEQ ID NO: 92160 - protein, 31 aa, Artificial Sequence
  Cyclic GFR-binding peptide
  MOD_RES (28)..(29): Xaa is C or S
MNQYNKLVVNKNEDLYLISIASMKEPVXXPE

SEQ ID NO: 92161 - protein, 33 aa, Artificial Sequence
  Cyclic GFR-binding peptide
  MOD_RES (1)..(3): Xaa is C or S
XGXRDVVMGQYNKLIIQQKDNLYLMSIASMKTP

SEQ ID NO: 92162 - protein, 26 aa, Artificial Sequence
  Cyclic GFR-binding peptide
MNQYNKLVVNKNEDLYLISIASMKEP

SEQ ID NO: 92163 - protein, 37 aa, Artificial Sequence; identical to SEQ ID NO: 37646
  Cyclic GFR-binding peptide
  MOD_RES (1)..(3)..(35)..(36): Xaa is C or S

SEQ ID NO: 92164 - protein, 32 aa, Artificial Sequence
  Cyclic GFR-binding peptide
  MOD_RES (28)..(29): Xaa is C or S
MNQYNKLVVNKNEDLYLISIASMKEPVXXPEP

SEQ ID NO: 92165 - protein, 37 aa, Artificial Sequence; identical to SEQ ID NO: 37648
  Cyclic GFR-binding peptide
  MOD_RES (1)..(33)..(34): Xaa is C or S

SEQ ID NO: 92166 - protein, 41 aa, Artificial Sequence; identical to SEQ ID NO: 37649
  Cyclic GFR-binding peptide
  MOD_RES (1)..(3)..(35)..(36): Xaa is C or S

SEQ ID NO: 92167 - protein, 22 aa, Artificial Sequence
  Cyclic GFR-binding peptide
MQYNKLLLVRGNDLYLMSIAST

SEQ ID NO: 92168 - protein, 27 aa, Artificial Sequence
  Cyclic GFR-binding peptide
VTMNQYNKLVVNKNEDLYLISIASMKE

SEQ ID NO: 92169 - protein, 31 aa, Artificial Sequence
  Cyclic GFR-binding peptide
  MOD_RES (27)..(28): Xaa is C or S
GQYNKLIIQQKDNLYLMSIASMKTPTXXPGA

SEQ ID NO: 92170 - protein, 28 aa, Artificial Sequence
  Cyclic GFR-binding peptide
  MOD_RES (28)..(28): Xaa is C or S
MDQYNKLVVNNAADLYLISIASLRAPVX

SEQ ID NO: 92171 - protein, 32 aa, Artificial Sequence; identical to SEQ ID NO: 37653
  Cyclic GFR-binding peptide
  MOD_RES (31)..(32): Xaa is C or S

SEQ ID NO: 92172 - protein, 31 aa, Artificial Sequence; identical to SEQ ID NO: 37657
  Cyclic GFR-binding peptide

SEQ ID NO: 92173 - protein, 28 aa, Artificial Sequence
  Cyclic GFR-binding peptide
TMNQYNKLVVNKNEDLYLISIASMKEPV

SEQ ID NO: 92174 - protein, 35 aa, Artificial Sequence; identical to SEQ ID NO: 37658
  Cyclic GFR-binding peptide
  MOD_RES (31)..(32): Xaa is C or S

SEQ ID NO: 92175 - protein, 33 aa, Artificial Sequence
  Cyclic GFR-binding peptide
  MOD_RES (27)..(28): Xaa is C or S
DQYNKLVVNNAADLYLISIASLRAPVXXSAPAA

SEQ ID NO: 92176 - protein, 23 aa, Artificial Sequence
  Cyclic GFR-binding peptide
DQYNKLVVNNAADLYLISIASLR

SEQ ID NO: 92177 - protein, 34 aa, Artificial Sequence; identical to SEQ ID NO: 37665
  Cyclic GFR-binding peptide
  MOD_RES (31)..(32): Xaa is C or S

SEQ ID NO: 92178 - protein, 30 aa, Artificial Sequence
  Cyclic GFR-binding peptide
  MOD_RES (28)..(29): Xaa is C or S
IMQYNKLLLVRGNDLYLMSIASTKVPAXXT

SEQ ID NO: 92179 - protein, 41 aa, Artificial Sequence; identical to SEQ ID NO: 37666
  Cyclic GFR-binding peptide
  MOD_RES (2)..(4)..(36)..(37): Xaa is C or S

SEQ ID NO: 92180 - protein, 33 aa, Artificial Sequence; identical to SEQ ID NO: 37667
  Cyclic GFR-binding peptide
  MOD_RES (1)..(33): Xaa is C or S

SEQ ID NO: 92181 - protein, 35 aa, Artificial Sequence; identical to SEQ ID NO: 37668
  Cyclic GFR-binding peptide
  MOD_RES (1)..(3)..(35): Xaa is C or S

SEQ ID NO: 92182 - protein, 31 aa, Artificial Sequence
  Cyclic GFR-binding peptide
  MOD_RES (26)..(27): Xaa is C or S
QYNKLYTVVGKDLYLISIASLKTPVXXAKSA

SEQ ID NO: 92183 - protein, 25 aa, Artificial Sequence
  Cyclic GFR-binding peptide
EVTMNQYNKLVVNKNEDLYLISIAS

SEQ ID NO: 92184 - protein, 30 aa, Artificial Sequence
  Cyclic GFR-binding peptide
  MOD_RES (2)..(2): Xaa is C or S
GXRDVVMGQYNKLIIQQKDNLYLMSIASMK

SEQ ID NO: 92185 - protein, 22 aa, Artificial Sequence
  Cyclic GFR-binding peptide
QYNKLLLVRGNDLYLMSIASTK

SEQ ID NO: 92186 - protein, 34 aa, Artificial Sequence; identical to SEQ ID NO: 37671
  Cyclic GFR-binding peptide
  MOD_RES (1)..(33)..(34): Xaa is C or S

SEQ ID NO: 92187 - protein, 25 aa, Artificial Sequence
  Cyclic GFR-binding peptide
VMDQYNKLVVNNAADLYLISIASLR

SEQ ID NO: 92188 - protein, 26 aa, Artificial Sequence
  Cyclic GFR-binding peptide
SEVTMNQYNKLVVNKNEDLYLISIAS

SEQ ID NO: 92189 - protein, 28 aa, Artificial Sequence
  Cyclic GFR-binding peptide
VAMGQYNKLYTVVGKDLYLISIASLKTP

SEQ ID NO: 92190 - protein, 37 aa, Artificial Sequence; identical to SEQ ID NO: 37676
  Cyclic GFR-binding peptide
  MOD_RES (31)..(32): Xaa is C or S

SEQ ID NO: 92191 - protein, 27 aa, Artificial Sequence
  Cyclic GFR-binding peptide
SVAMGQYNKLYTVVGKDLYLISIASLK

SEQ ID NO: 92192 - protein, 33 aa, Artificial Sequence; identical to SEQ ID NO: 37678
  Cyclic GFR-binding peptide
  MOD_RES (31)..(32): Xaa is C or S

SEQ ID NO: 92193 - protein, 28 aa, Artificial Sequence
  Cyclic GFR-binding peptide
  MOD_RES (28)..(28): Xaa is C or S
MNQYNKLVVNKNEDLYLISIASMKEPVX

SEQ ID NO: 92194 - protein, 32 aa, Artificial Sequence
  Cyclic GFR-binding peptide
  MOD_RES (30)..(31): Xaa is C or S
VAMGQYNKLYTVVGKDLYLISIASLKTPVXXA

SEQ ID NO: 92195 - protein, 24 aa, Artificial Sequence
  Cyclic GFR-binding peptide
NQYNKLVVNKNEDLYLISIASMKE

SEQ ID NO: 92196 - protein, 31 aa, Artificial Sequence
  Cyclic GFR-binding peptide
  MOD_RES (1)..(1): Xaa is C or S
XRDVVMGQYNKLIIQQKDNLYLMSIASMKTP

SEQ ID NO: 92197 - protein, 32 aa, Artificial Sequence
  Cyclic GFR-binding peptide
  MOD_RES (26)..(27): Xaa is C or S
QYNKLLLVRGNDLYLMSIASTKVPAXXTSPVR

SEQ ID NO: 92198 - protein, 27 aa, Artificial Sequence
  Cyclic GFR-binding peptide
  MOD_RES (27)..(27): Xaa is C or S
GQYNKLYTVVGKDLYLISIASLKTPVX

SEQ ID NO: 92199 - protein, 23 aa, Artificial Sequence
  Cyclic GFR-binding peptide
MNQYNKLVVNKNEDLYLISIASM

SEQ ID NO: 92200 - protein, 25 aa, Artificial Sequence
  Cyclic GFR-binding peptide
VVMGQYNKLIIQQKDNLYLMSIASM

SEQ ID NO: 92201 - protein, 33 aa, Artificial Sequence; identical to SEQ ID NO: 37686
  Cyclic GFR-binding peptide
  MOD_RES (2)..(2): Xaa is C or S

SEQ ID NO: 92202 - protein, 28 aa, Artificial Sequence
  Cyclic GFR-binding peptide
  MOD_RES (1)..(1): Xaa is C or S
XESVAMGQYNKLYTVVGKDLYLISIASL

SEQ ID NO: 92203 - protein, 34 aa, Artificial Sequence
  Cyclic GFR-binding peptide
  MOD_RES (28)..(29): Xaa is C or S
MNQYNKLIVNSSDDLYLVSIASLKTPAXXPKPVH

SEQ ID NO: 92204 - protein, 32 aa, Artificial Sequence
  Cyclic GFR-binding peptide
  MOD_RES (29)..(30): Xaa is C or S
VIMQYNKLLLVRGNDLYLMSIASTKVPAXXTS

SEQ ID NO: 92205 - protein, 32 aa, Artificial Sequence
  Cyclic GFR-binding peptide
  MOD_RES (29)..(30): Xaa is C or S
TMNQYNKLVVNKNEDLYLISIASMKEPVXXPE

SEQ ID NO: 92206 - protein, 31 aa, Artificial Sequence
  Cyclic GFR-binding peptide
  MOD_RES (2)..(4): Xaa is C or S
RXGXESVAMGQYNKLYTVVGKDLYLISIASL

SEQ ID NO: 92207 - protein, 21 aa, Artificial Sequence
  Cyclic GFR-binding peptide
QYNKLIIQQKDNLYLMSIASM

SEQ ID NO: 92208 - protein, 27 aa, Artificial Sequence
  Cyclic GFR-binding peptide
VIMQYNKLLLVRGNDLYLMSIASTKVP

SEQ ID NO: 92209 - protein, 34 aa, Artificial Sequence
  Cyclic GFR-binding peptide
  MOD_RES (30)..(31): Xaa is C or S
VTMNQYNKLVVNKNEDLYLISIASMKEPVXXPEP

SEQ ID NO: 92210 - protein, 37 aa, Artificial Sequence; identical to SEQ ID NO: 37695
  Cyclic GFR-binding peptide
  MOD_RES (1)..(3)..(34)..(35): Xaa is C or S

SEQ ID NO: 92211 - protein, 31 aa, Artificial Sequence; identical to SEQ ID NO: 37696
  Cyclic GFR-binding peptide
  MOD_RES (31)..(31): Xaa is C or S

SEQ ID NO: 92212 - protein, 35 aa, Artificial Sequence; identical to SEQ ID NO: 37697
  Cyclic GFR-binding peptide
  MOD_RES (1)..(32)..(33): Xaa is C or S

SEQ ID NO: 92213 - protein, 26 aa, Artificial Sequence
  Cyclic GFR-binding peptide
VAMGQYNKLYTVVGKDLYLISIASLK

SEQ ID NO: 92214 - protein, 36 aa, Artificial Sequence
  Cyclic GFR-binding peptide
  MOD_RES (30)..(31): Xaa is C or S
VAMGQYNKLYTVVGKDLYLISIASLKTPVXXAKSAK

SEQ ID NO: 92215 - protein, 35 aa, Artificial Sequence; identical to SEQ ID NO: 37701
  Cyclic GFR-binding peptide
  MOD_RES (2)..(33)..(34): Xaa is C or S

SEQ ID NO: 92216 - protein, 24 aa, Artificial Sequence
  Cyclic GFR-binding peptide
VMGQYNKLIIQQKDNLYLMSIASM

SEQ ID NO: 92217 - protein, 35 aa, Artificial Sequence
  Cyclic GFR-binding peptide
  MOD_RES (30)..(31): Xaa is C or S
VVMDQYNKLVVNNAADLYLISIASLRAPVXXSAPA

SEQ ID NO: 92218 - protein, 39 aa, Artificial Sequence; identical to SEQ ID NO: 37703
  Cyclic GFR-binding peptide
  MOD_RES (1)..(3)..(34)..(35): Xaa is C or S

SEQ ID NO: 92219 - protein, 27 aa, Artificial Sequence
  Cyclic GFR-binding peptide
MNQYNKLVVNKNEDLYLISIASMKEPV

SEQ ID NO: 92220 - protein, 32 aa, Artificial Sequence
  Cyclic GFR-binding peptide
  MOD_RES (27)..(28): Xaa is C or S
NQYNKLVVNKNEDLYLISIASMKEPVXXPEPI

SEQ ID NO: 92221 - protein, 34 aa, Artificial Sequence
  Cyclic GFR-binding peptide
  MOD_RES (28)..(29): Xaa is C or S
MGQYNKLYTVVGKDLYLISIASLKTPVXXAKSAK

SEQ ID NO: 92222 - protein, 39 aa, Artificial Sequence; identical to SEQ ID NO: 37710
  Cyclic GFR-binding peptide
  MOD_RES (1)..(33)..(34): Xaa is C or S

SEQ ID NO: 92223 - protein, 33 aa, Artificial Sequence; identical to SEQ ID NO: 37711
  Cyclic GFR-binding peptide
  MOD_RES (1)..(33): Xaa is C or S

SEQ ID NO: 92224 - protein, 28 aa, Artificial Sequence
  Cyclic GFR-binding peptide
VVMGQYNKLIIQQKDNLYLMSIASMKTP

SEQ ID NO: 92225 - protein, 29 aa, Artificial Sequence
  Cyclic GFR-binding peptide
  MOD_RES (1)..(1): Xaa is C or S
XSEVTMNQYNKLVVNKNEDLYLISIASMK

SEQ ID NO: 92226 - protein, 29 aa, Artificial Sequence
  Cyclic GFR-binding peptide
  MOD_RES (2)..(4): Xaa is C or S
LXGXEEVIMQYNKLLLVRGNDLYLMSIAS

SEQ ID NO: 92227 - protein, 31 aa, Artificial Sequence
  Cyclic GFR-binding peptide
  MOD_RES (27)..(28): Xaa is C or S
DQYNKLVVNNAADLYLISIASLRAPVXXSAP

SEQ ID NO: 92228 - protein, 28 aa, Artificial Sequence
  Cyclic GFR-binding peptide
  MOD_RES (2)..(2): Xaa is C or S
GXRDVVMGQYNKLIIQQKDNLYLMSIAS

SEQ ID NO: 92229 - protein, 27 aa, Artificial Sequence
  Cyclic GFR-binding peptide
EVTMNQYNKLVVNKNEDLYLISIASMK

SEQ ID NO: 92230 - protein, 25 aa, Artificial Sequence
  Cyclic GFR-binding peptide
EVIMQYNKLLLVRGNDLYLMSIAST

SEQ ID NO: 92231 - protein, 34 aa, Artificial Sequence; identical to SEQ ID NO: 37718
  Cyclic GFR-binding peptide
  MOD_RES (1)..(3): Xaa is C or S

SEQ ID NO: 92232 - protein, 28 aa, Artificial Sequence
  Cyclic GFR-binding peptide
  MOD_RES (27)..(28): Xaa is C or S
GQYNKLYTVVGKDLYLISIASLKTPVXX

SEQ ID NO: 92233 - protein, 35 aa, Artificial Sequence; identical to SEQ ID NO: 37720
  Cyclic GFR-binding peptide
  MOD_RES (2)..(34)..(35): Xaa is C or S

SEQ ID NO: 92234 - protein, 32 aa, Artificial Sequence
  Cyclic GFR-binding peptide
  MOD_RES (28)..(29): Xaa is C or S
MGQYNKLYTVVGKDLYLISIASLKTPVXXAKS

SEQ ID NO: 92235 - protein, 38 aa, Artificial Sequence; identical to SEQ ID NO: 37723
  Cyclic GFR-binding peptide
  MOD_RES (32)..(33): Xaa is C or S

SEQ ID NO: 92236 - protein, 35 aa, Artificial Sequence; identical to SEQ ID NO: 37724
  Cyclic GFR-binding peptide
  MOD_RES (2)..(34)..(35): Xaa is C or S

SEQ ID NO: 92237 - protein, 35 aa, Artificial Sequence; identical to SEQ ID NO: 37725
  Cyclic GFR-binding peptide
  MOD_RES (2)..(4): Xaa is C or S

SEQ ID NO: 92238 - protein, 24 aa, Artificial Sequence
  Cyclic GFR-binding peptide
VMDQYNKLVVNNAADLYLISIASL

SEQ ID NO: 92239 - protein, 25 aa, Artificial Sequence
  Cyclic GFR-binding peptide
NQYNKLVVNKNEDLYLISIASMKEP

SEQ ID NO: 92240 - protein, 31 aa, Artificial Sequence
  Cyclic GFR-binding peptide
  MOD_RES (1)..(1): Xaa is C or S
XAEVVMDQYNKLVVNNAADLYLISIASLRAP

SEQ ID NO: 92241 - protein, 29 aa, Artificial Sequence
  Cyclic GFR-binding peptide
EVTMNQYNKLVVNKNEDLYLISIASMKEP

SEQ ID NO: 92242 - protein, 35 aa, Artificial Sequence
  Cyclic GFR-binding peptide
  MOD_RES (30)..(31): Xaa is C or S
VVMGQYNKLIIQQKDNLYLMSIASMKTPTXXPGAS

SEQ ID NO: 92243 - protein, 36 aa, Artificial Sequence
  Cyclic GFR-binding peptide
  MOD_RES (30)..(31): Xaa is C or S
VVMDQYNKLVVNNAADLYLISIASLRAPVXXSAPAA

SEQ ID NO: 92244 - protein, 23 aa, Artificial Sequence
  Cyclic GFR-binding peptide
IMQYNKLLLVRGNDLYLMSIAST

SEQ ID NO: 92245 - protein, 25 aa, Artificial Sequence
  Cyclic GFR-binding peptide
VMGQYNKLIIQQKDNLYLMSIASMK

SEQ ID NO: 92246 - protein, 34 aa, Artificial Sequence
  Cyclic GFR-binding peptide
  MOD_RES (29)..(30): Xaa is C or S
TMNQYNKLVVNKNEDLYLISIASMKEPVXXPEPI

SEQ ID NO: 92247 - protein, 32 aa, Artificial Sequence
  Cyclic GFR-binding peptide
  MOD_RES (27)..(28): Xaa is C or S
DQYNKLVVNNAADLYLISIASLRAPVXXSAPA

SEQ ID NO: 92248 - protein, 33 aa, Artificial Sequence; identical to SEQ ID NO: 37264
  Cyclic GFR-binding peptide
  MOD_RES (32)..(33): Xaa is C or S

SEQ ID NO: 92249 - protein, 28 aa, Artificial Sequence
  Cyclic GFR-binding peptide
  MOD_RES (1)..(3): Xaa is C or S
XGXEEVIMQYNKLLLVRGNDLYLMSIAS

SEQ ID NO: 92250 - protein, 33 aa, Artificial Sequence
  Cyclic GFR-binding peptide
  MOD_RES (30)..(31): Xaa is C or S
VVMGQYNKLIIQQKDNLYLMSIASMKTPTXXPG

SEQ ID NO: 92251 - protein, 32 aa, Artificial Sequence
  Cyclic GFR-binding peptide
  MOD_RES (26)..(27): Xaa is C or S
QYNKLIVNSSDDLYLVSIASLKTPAXXPKPVH

SEQ ID NO: 92252 - protein, 33 aa, Artificial Sequence
  Cyclic GFR-binding peptide
  MOD_RES (27)..(28): Xaa is C or S
NQYNKLVVNKNEDLYLISIASMKEPVXXPEPIG

SEQ ID NO: 92253 - protein, 38 aa, Artificial Sequence; identical to SEQ ID NO: 37274
  Cyclic GFR-binding peptide
  MOD_RES (1)..(33)..(34): Xaa is C or S

SEQ ID NO: 92254 - protein, 29 aa, Artificial Sequence
  Cyclic GFR-binding peptide
SVAMGQYNKLYTVVGKDLYLISIASLKTP

SEQ ID NO: 92255 - protein, 33 aa, Artificial Sequence
  Cyclic GFR-binding peptide
  MOD_RES (30)..(31): Xaa is C or S
EVIMQYNKLLLVRGNDLYLMSIASTKVPAXXTS

SEQ ID NO: 92256 - protein, 28 aa, Artificial Sequence
  Cyclic GFR-binding peptide
EVTMNQYNKLVVNKNEDLYLISIASMKE

SEQ ID NO: 92257 - protein, 34 aa, Artificial Sequence; identical to SEQ ID NO: 37276
  Cyclic GFR-binding peptide
  MOD_RES (1)..(33)..(34): Xaa is C or S

SEQ ID NO: 92258 - protein, 39 aa, Artificial Sequence; identical to SEQ ID NO: 37280
  Cyclic GFR-binding peptide
  MOD_RES (2)..(34)..(35): Xaa is C or S

SEQ ID NO: 92259 - protein, 23 aa, Artificial Sequence
  Cyclic GFR-binding peptide
QYNKLYTVVGKDLYLISIASLKT

SEQ ID NO: 92260 - protein, 27 aa, Artificial Sequence
  Cyclic GFR-binding peptide
MGQYNKLIIQQKDNLYLMSIASMKTPT

SEQ ID NO: 92261 - protein, 35 aa, Artificial Sequence; identical to SEQ ID NO: 37284
  Cyclic GFR-binding peptide
  MOD_RES (32)..(33): Xaa is C or S

SEQ ID NO: 92262 - protein, 32 aa, Artificial Sequence
  Cyclic GFR-binding peptide
  MOD_RES (2)..(2): Xaa is C or S
GXAEVVMDQYNKLVVNNAADLYLISIASLRAP

SEQ ID NO: 92263 - protein, 24 aa, Artificial Sequence
  Cyclic GFR-binding peptide
VAMGQYNKLYTVVGKDLYLISIAS

SEQ ID NO: 92264 - protein, 39 aa, Artificial Sequence; identical to SEQ ID NO: 37288
  Cyclic GFR-binding peptide
  MOD_RES (2)..(34)..(35): Xaa is C or S

SEQ ID NO: 92265 - protein, 28 aa, Artificial Sequence
  Cyclic GFR-binding peptide
SVAMGQYNKLYTVVGKDLYLISIASLKT

SEQ ID NO: 92266 - protein, 32 aa, Artificial Sequence
  Cyclic GFR-binding peptide
  MOD_RES (30)..(31): Xaa is C or S
VTMNQYNKLVVNKNEDLYLISIASMKEPVXXP

SEQ ID NO: 92267 - protein, 28 aa, Artificial Sequence
  Cyclic GFR-binding peptide
  MOD_RES (2)..(2): Xaa is C or S
GXESVAMGQYNKLYTVVGKDLYLISIAS

SEQ ID NO: 92268 - protein, 29 aa, Artificial Sequence
  Cyclic GFR-binding peptide
  MOD_RES (1)..(3): Xaa is C or S
XAXSEVTMNQYNKLVVNKNEDLYLISIAS

SEQ ID NO: 92269 - protein, 40 aa, Artificial Sequence; identical to SEQ ID NO: 37292
  Cyclic GFR-binding peptide
  MOD_RES (2)..(34)..(35): Xaa is C or S

SEQ ID NO: 92270 - protein, 35 aa, Artificial Sequence; identical to SEQ ID NO: 37294
  Cyclic GFR-binding peptide
  MOD_RES (1)..(3)..(35): Xaa is C or S

SEQ ID NO: 92271 - protein, 27 aa, Artificial Sequence
  Cyclic GFR-binding peptide
AMGQYNKLYTVVGKDLYLISIASLKTP

SEQ ID NO: 92272 - protein, 34 aa, Artificial Sequence; identical to SEQ ID NO: 37296
  Cyclic GFR-binding peptide
  MOD_RES (32)..(33): Xaa is C or S

SEQ ID NO: 92273 - protein, 31 aa, Artificial Sequence
  Cyclic GFR-binding peptide
  MOD_RES (1)..(3): Xaa is C or S
XGXRDVVMGQYNKLIIQQKDNLYLMSIASMK

SEQ ID NO: 92274 - protein, 25 aa, Artificial Sequence
  Cyclic GFR-binding peptide
AMGQYNKLYTVVGKDLYLISIASLK

SEQ ID NO: 92275 - protein, 34 aa, Artificial Sequence
  Cyclic GFR-binding peptide
  MOD_RES (29)..(30): Xaa is C or S
VMDQYNKLVVNNAADLYLISIASLRAPVXXSAPA

SEQ ID NO: 92276 - protein, 27 aa, Artificial Sequence
  Cyclic GFR-binding peptide
AEVVMDQYNKLVVNNAADLYLISIASL

SEQ ID NO: 92277 - protein, 26 aa, Artificial Sequence
  Cyclic GFR-binding peptide
ESVAMGQYNKLYTVVGKDLYLISIAS

SEQ ID NO: 92278 - protein, 33 aa, Artificial Sequence
  Cyclic GFR-binding peptide
  MOD_RES (1)..(3): Xaa is C or S
XGXESVAMGQYNKLYTVVGKDLYLISIASLKTP

SEQ ID NO: 92279 - protein, 29 aa, Artificial Sequence
  Cyclic GFR-binding peptide
  MOD_RES (2)..(2): Xaa is C or S
GXAEVVMDQYNKLVVNNAADLYLISIASL

SEQ ID NO: 92280 - protein, 33 aa, Artificial Sequence
  Cyclic GFR-binding peptide
  MOD_RES (27)..(28): Xaa is C or S
GQYNKLIIQQKDNLYLMSIASMKTPTXXPGASG

SEQ ID NO: 92281 - protein, 30 aa, Artificial Sequence
  Cyclic GFR-binding peptide
  MOD_RES (30)..(30): Xaa is C or S
VVMGQYNKLIIQQKDNLYLMSIASMKTPTX

SEQ ID NO: 92282 - protein, 33 aa, Artificial Sequence
  Cyclic GFR-binding peptide
  MOD_RES (2)..(4): Xaa is C or S
SXGXRDVVMGQYNKLIIQQKDNLYLMSIASMKT

SEQ ID NO: 92283 - protein, 29 aa, Artificial Sequence
  Cyclic GFR-binding peptide
  MOD_RES (1)..(1): Xaa is C or S
XRDVVMGQYNKLIIQQKDNLYLMSIASMK

SEQ ID NO: 92284 - protein, 38 aa, Artificial Sequence; identical to SEQ ID NO: 37301
  Cyclic GFR-binding peptide
  MOD_RES (1)..(32)..(33): Xaa is C or S

SEQ ID NO: 92285 - protein, 30 aa, Artificial Sequence
  Cyclic GFR-binding peptide
  MOD_RES (1)..(3): Xaa is C or S
XAXSEVTMNQYNKLVVNKNEDLYLISIASM

SEQ ID NO: 92286 - protein, 31 aa, Artificial Sequence
  Cyclic GFR-binding peptide
  MOD_RES (1)..(3): Xaa is C or S
XGXAEVVMDQYNKLVVNNAADLYLISIASLR

SEQ ID NO: 92287 - protein, 36 aa, Artificial Sequence; identical to SEQ ID NO: 37302
  Cyclic GFR-binding peptide
  MOD_RES (1)..(3)..(35)..(36): Xaa is C or S

SEQ ID NO: 92288 - protein, 30 aa, Artificial Sequence
  Cyclic GFR-binding peptide
  MOD_RES (26)..(27): Xaa is C or S
QYNKLVVNNAADLYLISIASLRAPVXXSAP

SEQ ID NO: 92289 - protein, 38 aa, Artificial Sequence; identical to SEQ ID NO: 37307
  Cyclic GFR-binding peptide
  MOD_RES (2)..(34)..(35): Xaa is C or S

SEQ ID NO: 92290 - protein, 34 aa, Artificial Sequence; identical to SEQ ID NO: 37308
  Cyclic GFR-binding peptide
  MOD_RES (2)..(34): Xaa is C or S

SEQ ID NO: 92291 - protein, 29 aa, Artificial Sequence
  Cyclic GFR-binding peptide
  MOD_RES (2)..(2): Xaa is C or S
AXSEVTMNQYNKLVVNKNEDLYLISIASM

SEQ ID NO: 92292 - protein, 24 aa, Artificial Sequence
  Cyclic GFR-binding peptide
MGQYNKLYTVVGKDLYLISIASLK

SEQ ID NO: 92293 - protein, 23 aa, Artificial Sequence
  Cyclic GFR-binding peptide
QYNKLVVNNAADLYLISIASLRA

SEQ ID NO: 92294 - protein, 26 aa, Artificial Sequence
  Cyclic GFR-binding peptide
DVVMGQYNKLIIQQKDNLYLMSIASM

SEQ ID NO: 92295 - protein, 28 aa, Artificial Sequence
  Cyclic GFR-binding peptide
RDVVMGQYNKLIIQQKDNLYLMSIASMK

SEQ ID NO: 92296 - protein, 22 aa, Artificial Sequence
  Cyclic GFR-binding peptide
QYNKLIIQQKDNLYLMSIASMK

SEQ ID NO: 92297 - protein, 32 aa, Artificial Sequence; identical to SEQ ID NO: 37315
  Cyclic GFR-binding peptide
  MOD_RES (1)..(1): Xaa is C or S

SEQ ID NO: 92298 - protein, 39 aa, Artificial Sequence; identical to SEQ ID NO: 37319
  Cyclic GFR-binding peptide
  MOD_RES (1)..(33)..(34): Xaa is C or S

SEQ ID NO: 92299 - protein, 30 aa, Artificial Sequence
  Cyclic GFR-binding peptide
  MOD_RES (2)..(4): Xaa is C or S
RXGXESVAMGQYNKLYTVVGKDLYLISIAS

SEQ ID NO: 92300 - protein, 35 aa, Artificial Sequence; identical to SEQ ID NO: 37321
  Cyclic GFR-binding peptide
  MOD_RES (2)..(4): Xaa is C or S

SEQ ID NO: 92301 - protein, 28 aa, Artificial Sequence
  Cyclic GFR-binding peptide
  MOD_RES (27)..(28): Xaa is C or S
MQYNKLLLVRGNDLYLMSIASTKVPAXX

SEQ ID NO: 92302 - protein, 29 aa, Artificial Sequence
  Cyclic GFR-binding peptide
  MOD_RES (29)..(29): Xaa is C or S
TMNQYNKLVVNKNEDLYLISIASMKEPVX

SEQ ID NO: 92303 - protein, 31 aa, Artificial Sequence
  Cyclic GFR-binding peptide
  MOD_RES (2)..(2): Xaa is C or S
GXEEVIMQYNKLLLVRGNDLYLMSIASTKVP

SEQ ID NO: 92304 - protein, 37 aa, Artificial Sequence; identical to SEQ ID NO: 37328
  Cyclic GFR-binding peptide
  MOD_RES (2)..(4)..(35)..(36): Xaa is C or S

SEQ ID NO: 92305 - protein, 33 aa, Artificial Sequence
  Cyclic GFR-binding peptide
  MOD_RES (1)..(3): Xaa is C or S
XAXSEVTMNQYNKLVVNKNEDLYLISIASMKEP

SEQ ID NO: 92306 - protein, 31 aa, Artificial Sequence
  Cyclic GFR-binding peptide
  MOD_RES (27)..(28): Xaa is C or S
GQYNKLYTVVGKDLYLISIASLKTPVXXAKS

SEQ ID NO: 92307 - protein, 36 aa, Artificial Sequence; identical to SEQ ID NO: 37332
  Cyclic GFR-binding peptide
  MOD_RES (1)..(32)..(33): Xaa is C or S

SEQ ID NO: 92308 - protein, 41 aa, Artificial Sequence; identical to SEQ ID NO: 37335
  Cyclic GFR-binding peptide
  MOD_RES (2)..(4)..(35)..(36): Xaa is C or S

SEQ ID NO: 92309 - protein, 36 aa, Artificial Sequence; identical to SEQ ID NO: 37336
  Cyclic GFR-binding peptide
  MOD_RES (31)..(32): Xaa is C or S

SEQ ID NO: 92310 - protein, 33 aa, Artificial Sequence
  Cyclic GFR-binding peptide
  MOD_RES (28)..(29): Xaa is C or S
MGQYNKLYTVVGKDLYLISIASLKTPVXXAKSA

SEQ ID NO: 92311 - protein, 34 aa, Artificial Sequence; identical to SEQ ID NO: 37339
  Cyclic GFR-binding peptide
  MOD_RES (1)..(3): Xaa is C or S

SEQ ID NO: 92312 - protein, 30 aa, Artificial Sequence
  Cyclic GFR-binding peptide
  MOD_RES (29)..(30): Xaa is C or S
AMGQYNKLYTVVGKDLYLISIASLKTPVXX

SEQ ID NO: 92313 - protein, 41 aa, Artificial Sequence; identical to SEQ ID NO: 37341
  Cyclic GFR-binding peptide
  MOD_RES (2)..(4)..(36)..(37): Xaa is C or S

SEQ ID NO: 92314 - protein, 29 aa, Artificial Sequence
  Cyclic GFR-binding peptide
  MOD_RES (2)..(2): Xaa is C or S
GXESVAMGQYNKLYTVVGKDLYLISIASL

SEQ ID NO: 92315 - protein, 29 aa, Artificial Sequence
  Cyclic GFR-binding peptide
AEVVMDQYNKLVVNNAADLYLISIASLRA

SEQ ID NO: 92316 - protein, 28 aa, Artificial Sequence
  Cyclic GFR-binding peptide
  MOD_RES (27)..(28): Xaa is C or S
DQYNKLVVNNAADLYLISIASLRAPVXX

SEQ ID NO: 92317 - protein, 25 aa, Artificial Sequence
  Cyclic GFR-binding peptide
VAMGQYNKLYTVVGKDLYLISIASL

SEQ ID NO: 92318 - protein, 34 aa, Artificial Sequence
  Cyclic GFR-binding peptide
  MOD_RES (29)..(30): Xaa is C or S
VIMQYNKLLLVRGNDLYLMSIASTKVPAXXTSPV

SEQ ID NO: 92319 - protein, 35 aa, Artificial Sequence; identical to SEQ ID NO: 37346
  Cyclic GFR-binding peptide
  MOD_RES (1)..(33)..(34): Xaa is C or S

SEQ ID NO: 92320 - protein, 32 aa, Artificial Sequence; identical to SEQ ID NO: 37347
  Cyclic GFR-binding peptide
  MOD_RES (31)..(32): Xaa is C or S

SEQ ID NO: 92321 - protein, 32 aa, Artificial Sequence
  Cyclic GFR-binding peptide
  MOD_RES (2)..(4): Xaa is C or S
RXGXESVAMGQYNKLYTVVGKDLYLISIASLK

SEQ ID NO: 92322 - protein, 33 aa, Artificial Sequence; identical to SEQ ID NO: 37350
  Cyclic GFR-binding peptide
  MOD_RES (31)..(32): Xaa is C or S

SEQ ID NO: 92323 - protein, 24 aa, Artificial Sequence
  Cyclic GFR-binding peptide
DQYNKLVVNNAADLYLISIASLRA

SEQ ID NO: 92324 - protein, 36 aa, Artificial Sequence; identical to SEQ ID NO: 37355
  Cyclic GFR-binding peptide
  MOD_RES (1)..(3)..(35)..(36): Xaa is C or S

SEQ ID NO: 92325 - protein, 40 aa, Artificial Sequence; identical to SEQ ID NO: 37359
  Cyclic GFR-binding peptide
  MOD_RES (2)..(4)..(36)..(37): Xaa is C or S

SEQ ID NO: 92326 - protein, 28 aa, Artificial Sequence
  Cyclic GFR-binding peptide
  MOD_RES (2)..(2): Xaa is C or S
GXAEVVMDQYNKLVVNNAADLYLISIAS

SEQ ID NO: 92327 - protein, 31 aa, Artificial Sequence
  Cyclic GFR-binding peptide
  MOD_RES (29)..(30): Xaa is C or S
VMGQYNKLIIQQKDNLYLMSIASMKTPTXXP

SEQ ID NO: 92328 - protein, 36 aa, Artificial Sequence; identical to SEQ ID NO: 37363
  Cyclic GFR-binding peptide
  MOD_RES (1)..(33)..(34): Xaa is C or S

SEQ ID NO: 92329 - protein, 29 aa, Artificial Sequence
  Cyclic GFR-binding peptide
  MOD_RES (26)..(27): Xaa is C or S
QYNKLVVNKNEDLYLISIASMKEPVXXPE

SEQ ID NO: 92330 - protein, 30 aa, Artificial Sequence
  Cyclic GFR-binding peptide
  MOD_RES (29)..(30): Xaa is C or S
VMDQYNKLVVNNAADLYLISIASLRAPVXX

SEQ ID NO: 92331 - protein, 32 aa, Artificial Sequence; identical to SEQ ID NO: 37366
  Cyclic GFR-binding peptide
  MOD_RES (1)..(1): Xaa is C or S

SEQ ID NO: 92332 - protein, 35 aa, Artificial Sequence
  Cyclic GFR-binding peptide
  MOD_RES (30)..(31): Xaa is C or S
EVIMQYNKLLLVRGNDLYLMSIASTKVPAXXTSPV

SEQ ID NO: 92333 - protein, 25 aa, Artificial Sequence
  Cyclic GFR-binding peptide
DQYNKLVVNNAADLYLISIASLRAP

SEQ ID NO: 92334 - protein, 39 aa, Artificial Sequence; identical to SEQ ID NO: 37370
  Cyclic GFR-binding peptide
  MOD_RES (2)..(4)..(36)..(37): Xaa is C or S

SEQ ID NO: 92335 - protein, 36 aa, Artificial Sequence; identical to SEQ ID NO: 37374
  Cyclic GFR-binding peptide
  MOD_RES (1)..(33)..(34): Xaa is C or S

SEQ ID NO: 92336 - protein, 23 aa, Artificial Sequence
  Cyclic GFR-binding peptide
GQYNKLIIQQKDNLYLMSIASMK

SEQ ID NO: 92337 - protein, 26 aa, Artificial Sequence
  Cyclic GFR-binding peptide
TMNQYNKLVVNKNEDLYLISIASMKE

SEQ ID NO: 92338 - protein, 27 aa, Artificial Sequence
  Cyclic GFR-binding peptide
DVVMGQYNKLIIQQKDNLYLMSIASMK

SEQ ID NO: 92339 - protein, 35 aa, Artificial Sequence; identical to SEQ ID NO: 37376
  Cyclic GFR-binding peptide
  MOD_RES (1)..(3)..(35): Xaa is C or S

SEQ ID NO: 92340 - protein, 31 aa, Artificial Sequence
  Cyclic GFR-binding peptide
  MOD_RES (29)..(30): Xaa is C or S
VMDQYNKLVVNNAADLYLISIASLRAPVXXS

SEQ ID NO: 92341 - protein, 27 aa, Artificial Sequence
  Cyclic GFR-binding peptide
  MOD_RES (1)..(1): Xaa is C or S
XAEVVMDQYNKLVVNNAADLYLISIAS

SEQ ID NO: 92342 - protein, 27 aa, Artificial Sequence
  Cyclic GFR-binding peptide
  MOD_RES (1)..(1): Xaa is C or S
XRDVVMGQYNKLIIQQKDNLYLMSIAS

SEQ ID NO: 92343 - protein, 37 aa, Artificial Sequence; identical to SEQ ID NO: 37379
  Cyclic GFR-binding peptide
  MOD_RES (1)..(32)..(33): Xaa is C or S

SEQ ID NO: 92344 - protein, 29 aa, Artificial Sequence
  Cyclic GFR-binding peptide
ESVAMGQYNKLYTVVGKDLYLISIASLKT

SEQ ID NO: 92345 - protein, 24 aa, Artificial Sequence
  Cyclic GFR-binding peptide
MGQYNKLIIQQKDNLYLMSIASMK

SEQ ID NO: 92346 - protein, 25 aa, Artificial Sequence
  Cyclic GFR-binding peptide
VTMNQYNKLVVNKNEDLYLISIASM

SEQ ID NO: 92347 - protein, 27 aa, Artificial Sequence
  Cyclic GFR-binding peptide
  MOD_RES (26)..(27): Xaa is C or S
QYNKLIIQQKDNLYLMSIASMKTPTXX

SEQ ID NO: 92348 - protein, 36 aa, Artificial Sequence; identical to SEQ ID NO: 37387
  Cyclic GFR-binding peptide
  MOD_RES (2)..(34)..(35): Xaa is C or S

SEQ ID NO: 92349 - protein, 29 aa, Artificial Sequence
  Cyclic GFR-binding peptide
  MOD_RES (2)..(2): Xaa is C or S
GXEEVIMQYNKLLLVRGNDLYLMSIASTK

SEQ ID NO: 92350 - protein, 30 aa, Artificial Sequence
  Cyclic GFR-binding peptide
  MOD_RES (2)..(2): Xaa is C or S
GXEEVIMQYNKLLLVRGNDLYLMSIASTKV

SEQ ID NO: 92351 - protein, 30 aa, Artificial Sequence
  Cyclic GFR-binding peptide
  MOD_RES (27)..(28): Xaa is C or S
MQYNKLLLVRGNDLYLMSIASTKVPAXXTS

SEQ ID NO: 92352 - protein, 27 aa, Artificial Sequence
  Cyclic GFR-binding peptide
  MOD_RES (26)..(27): Xaa is C or S
QYNKLVVNNAADLYLISIASLRAPVXX

SEQ ID NO: 92353 - protein, 40 aa, Artificial Sequence; identical to SEQ ID NO: 37393
  Cyclic GFR-binding peptide
  MOD_RES (1)..(3)..(35)..(36): Xaa is C or S

SEQ ID NO: 92354 - protein, 25 aa, Artificial Sequence
  Cyclic GFR-binding peptide
SVAMGQYNKLYTVVGKDLYLISIAS

SEQ ID NO: 92355 - protein, 36 aa, Artificial Sequence; identical to SEQ ID NO: 37401
  Cyclic GFR-binding peptide
  MOD_RES (1)..(3)..(34)..(35): Xaa is C or S

SEQ ID NO: 92356 - protein, 30 aa, Artificial Sequence
  Cyclic GFR-binding peptide
  MOD_RES (30)..(30): Xaa is C or S
EVIMQYNKLLLVRGNDLYLMSIASTKVPAX

SEQ ID NO: 92357 - protein, 27 aa, Artificial Sequence
  Cyclic GFR-binding peptide
  MOD_RES (26)..(27): Xaa is C or S
QYNKLYTVVGKDLYLISIASLKTPVXX

SEQ ID NO: 92358 - protein, 31 aa, Artificial Sequence
  Cyclic GFR-binding peptide
  MOD_RES (2)..(4): Xaa is C or S
RXGXAEVVMDQYNKLVVNNAADLYLISIASL

SEQ ID NO: 92359 - protein, 25 aa, Artificial Sequence
  Cyclic GFR-binding peptide
IMQYNKLLLVRGNDLYLMSIASTKV

SEQ ID NO: 92360 - protein, 37 aa, Artificial Sequence; identical to SEQ ID NO: 37403
  Cyclic GFR-binding peptide
  MOD_RES (2)..(4)..(36)..(37): Xaa is C or S

SEQ ID NO: 92361 - protein, 29 aa, Artificial Sequence
  Cyclic GFR-binding peptide
  MOD_RES (29)..(29): Xaa is C or S
VMDQYNKLVVNNAADLYLISIASLRAPVX

SEQ ID NO: 92362 - protein, 23 aa, Artificial Sequence
  Cyclic GFR-binding peptide
MGQYNKLIIQQKDNLYLMSIASM

SEQ ID NO: 92363 - protein, 29 aa, Artificial Sequence
  Cyclic GFR-binding peptide
  MOD_RES (1)..(1): Xaa is C or S
XESVAMGQYNKLYTVVGKDLYLISIASLK

SEQ ID NO: 92364 - protein, 38 aa, Artificial Sequence; identical to SEQ ID NO: 37410
  Cyclic GFR-binding peptide
  MOD_RES (2)..(33)..(34): Xaa is C or S

SEQ ID NO: 92365 - protein, 38 aa, Artificial Sequence; identical to SEQ ID NO: 37414
  Cyclic GFR-binding peptide
  MOD_RES (32)..(33): Xaa is C or S

SEQ ID NO: 92366 - protein, 25 aa, Artificial Sequence
  Cyclic GFR-binding peptide
QYNKLVVNNAADLYLISIASLRAPV

SEQ ID NO: 92367 - protein, 38 aa, Artificial Sequence; identical to SEQ ID NO: 37417
  Cyclic GFR-binding peptide
  MOD_RES (2)..(4)..(36)..(37): Xaa is C or S

SEQ ID NO: 92368 - protein, 34 aa, Artificial Sequence; identical to SEQ ID NO: 37419
  Cyclic GFR-binding peptide
  MOD_RES (2)..(34): Xaa is C or S

SEQ ID NO: 92369 - protein, 24 aa, Artificial Sequence
  Cyclic GFR-binding peptide
GQYNKLYTVVGKDLYLISIASLKT

SEQ ID NO: 92370 - protein, 30 aa, Artificial Sequence
  Cyclic GFR-binding peptide
  MOD_RES (28)..(29): Xaa is C or S
MNQYNKLVVNKNEDLYLISIASMKEPVXXP

SEQ ID NO: 92371 - protein, 23 aa, Artificial Sequence
  Cyclic GFR-binding peptide
VMGQYNKLIIQQKDNLYLMSIAS

SEQ ID NO: 92372 - protein, 32 aa, Artificial Sequence
  Cyclic GFR-binding peptide
  MOD_RES (1)..(3): Xaa is C or S
XGXEEVIMQYNKLLLVRGNDLYLMSIASTKVP

SEQ ID NO: 92373 - protein, 24 aa, Artificial Sequence
  Cyclic GFR-binding peptide
QYNKLVVNKNEDLYLISIASMKEP

SEQ ID NO: 92374 - protein, 27 aa, Artificial Sequence
  Cyclic GFR-binding peptide
  MOD_RES (27)..(27): Xaa is C or S
NQYNKLVVNKNEDLYLISIASMKEPVX

SEQ ID NO: 92375 - protein, 36 aa, Artificial Sequence; identical to SEQ ID NO: 37436
  Cyclic GFR-binding peptide
  MOD_RES (2)..(33)..(34): Xaa is C or S

SEQ ID NO: 92376 - protein, 29 aa, Artificial Sequence
  Cyclic GFR-binding peptide
DVVMGQYNKLIIQQKDNLYLMSIASMKTP

SEQ ID NO: 92377 - protein, 31 aa, Artificial Sequence
  Cyclic GFR-binding peptide
  MOD_RES (30)..(31): Xaa is C or S
EVIMQYNKLLLVRGNDLYLMSIASTKVPAXX

SEQ ID NO: 92378 - protein, 32 aa, Artificial Sequence
  Cyclic GFR-binding peptide
  MOD_RES (2)..(2): Xaa is C or S
GXRDVVMGQYNKLIIQQKDNLYLMSIASMKTP

SEQ ID NO: 92379 - protein, 35 aa, Artificial Sequence; identical to SEQ ID NO: 37443
  Cyclic GFR-binding peptide
  MOD_RES (32)..(33): Xaa is C or S

SEQ ID NO: 92380 - protein, 25 aa, Artificial Sequence
  Cyclic GFR-binding peptide
MGQYNKLYTVVGKDLYLISIASLKT

SEQ ID NO: 92381 - protein, 34 aa, Artificial Sequence; identical to SEQ ID NO: 37444
  Cyclic GFR-binding peptide
  MOD_RES (2)..(34): Xaa is C or S

SEQ ID NO: 92382 - protein, 22 aa, Artificial Sequence
  Cyclic GFR-binding peptide
DQYNKLVVNNAADLYLISIASL

SEQ ID NO: 92383 - protein, 29 aa, Artificial Sequence
  Cyclic GFR-binding peptide
  MOD_RES (26)..(27): Xaa is C or S
QYNKLVVNNAADLYLISIASLRAPVXXSA

SEQ ID NO: 92384 - protein, 42 aa, Artificial Sequence; identical to SEQ ID NO: 37451
  Cyclic GFR-binding peptide
  MOD_RES (2)..(4)..(36)..(37): Xaa is C or S

SEQ ID NO: 92385 - protein, 37 aa, Artificial Sequence; identical to SEQ ID NO: 37452
  Cyclic GFR-binding peptide
  MOD_RES (1)..(3)..(35)..(36): Xaa is C or S

SEQ ID NO: 92386 - protein, 38 aa, Artificial Sequence; identical to SEQ ID NO: 37453
  Cyclic GFR-binding peptide
  MOD_RES (1)..(3)..(35)..(36): Xaa is C or S

SEQ ID NO: 92387 - protein, 34 aa, Artificial Sequence
  Cyclic GFR-binding peptide
  MOD_RES (29)..(30): Xaa is C or S
VMGQYNKLIIQQKDNLYLMSIASMKTPTXXPGAS

SEQ ID NO: 92388 - protein, 28 aa, Artificial Sequence
  Cyclic GFR-binding peptide
AEVVMDQYNKLVVNNAADLYLISIASLR

SEQ ID NO: 92389 - protein, 24 aa, Artificial Sequence
  Cyclic GFR-binding peptide
QYNKLYTVVGKDLYLISIASLKTP

SEQ ID NO: 92390 - protein, 39 aa, Artificial Sequence; identical to SEQ ID NO: 37458
  Cyclic GFR-binding peptide
  MOD_RES (1)..(3)..(35)..(36): Xaa is C or S

SEQ ID NO: 92391 - protein, 26 aa, Artificial Sequence
  Cyclic GFR-binding peptide
IMQYNKLLLVRGNDLYLMSIASTKVP

SEQ ID NO: 92392 - protein, 34 aa, Artificial Sequence; identical to SEQ ID NO: 37460
  Cyclic GFR-binding peptide
  MOD_RES (2)..(4): Xaa is C or S

SEQ ID NO: 92393 - protein, 31 aa, Artificial Sequence
  Cyclic GFR-binding peptide
  MOD_RES (2)..(4): Xaa is C or S
RXAXSEVTMNQYNKLVVNKNEDLYLISIASM

SEQ ID NO: 92394 - protein, 37 aa, Artificial Sequence; identical to SEQ ID NO: 37462
  Cyclic GFR-binding peptide
  MOD_RES (2)..(34)..(35): Xaa is C or S

SEQ ID NO: 92395 - protein, 29 aa, Artificial Sequence
  Cyclic GFR-binding peptide
VVMGQYNKLIIQQKDNLYLMSIASMKTPT

SEQ ID NO: 92396 - protein, 39 aa, Artificial Sequence; identical to SEQ ID NO: 37463
  Cyclic GFR-binding peptide
  MOD_RES (1)..(3)..(35)..(36): Xaa is C or S

SEQ ID NO: 92397 - protein, 36 aa, Artificial Sequence; identical to SEQ ID NO: 37465
  Cyclic GFR-binding peptide
  MOD_RES (2)..(4)..(36): Xaa is C or S

SEQ ID NO: 92398 - protein, 25 aa, Artificial Sequence
  Cyclic GFR-binding peptide
GQYNKLYTVVGKDLYLISIASLKTP

SEQ ID NO: 92399 - protein, 37 aa, Artificial Sequence; identical to SEQ ID NO: 37467
  Cyclic GFR-binding peptide
  MOD_RES (2)..(4)..(36)..(37): Xaa is C or S

SEQ ID NO: 92400 - protein, 29 aa, Artificial Sequence
  Cyclic GFR-binding peptide
  MOD_RES (28)..(29): Xaa is C or S
IMQYNKLLLVRGNDLYLMSIASTKVPAXX

SEQ ID NO: 92401 - protein, 24 aa, Artificial Sequence
  Cyclic GFR-binding peptide
TMNQYNKLVVNKNEDLYLISIASM

SEQ ID NO: 92402 - protein, 28 aa, Artificial Sequence
  Cyclic GFR-binding peptide
  MOD_RES (28)..(28): Xaa is C or S
IMQYNKLLLVRGNDLYLMSIASTKVPAX

SEQ ID NO: 92403 - protein, 28 aa, Artificial Sequence
  Cyclic GFR-binding peptide
  MOD_RES (27)..(28): Xaa is C or S
NQYNKLVVNKNEDLYLISIASMKEPVXX

SEQ ID NO: 92404 - protein, 28 aa, Artificial Sequence
  Cyclic GFR-binding peptide
DVVMGQYNKLIIQQKDNLYLMSIASMKT

SEQ ID NO: 92405 - protein, 29 aa, Artificial Sequence
  Cyclic GFR-binding peptide
  MOD_RES (1)..(3): Xaa is C or S
XGXEEVIMQYNKLLLVRGNDLYLMSIAST

SEQ ID NO: 92406 - protein, 38 aa, Artificial Sequence; identical to SEQ ID NO: 37473
  Cyclic GFR-binding peptide
  MOD_RES (1)..(3)..(34)..(35): Xaa is C or S

SEQ ID NO: 92407 - protein, 27 aa, Artificial Sequence
  Cyclic GFR-binding peptide
VVMDQYNKLVVNNAADLYLISIASLRA

SEQ ID NO: 92408 - protein, 30 aa, Artificial Sequence
  Cyclic GFR-binding peptide
  MOD_RES (1)..(1): Xaa is C or S
XAEVVMDQYNKLVVNNAADLYLISIASLRA

SEQ ID NO: 92409 - protein, 30 aa, Artificial Sequence
  Cyclic GFR-binding peptide
  MOD_RES (29)..(30): Xaa is C or S
TMNQYNKLVVNKNEDLYLISIASMKEPVXX

SEQ ID NO: 92410 - protein, 29 aa, Artificial Sequence
  Cyclic GFR-binding peptide
EVIMQYNKLLLVRGNDLYLMSIASTKVPA

SEQ ID NO: 92411 - protein, 34 aa, Artificial Sequence
  Cyclic GFR-binding peptide
  MOD_RES (30)..(31): Xaa is C or S
VAMGQYNKLYTVVGKDLYLISIASLKTPVXXAKS

SEQ ID NO: 92412 - protein, 27 aa, Artificial Sequence
  Cyclic GFR-binding peptide
  MOD_RES (26)..(27): Xaa is C or S
QYNKLVVNKNEDLYLISIASMKEPVXX

SEQ ID NO: 92413 - protein, 26 aa, Artificial Sequence
  Cyclic GFR-binding peptide
GQYNKLIIQQKDNLYLMSIASMKTPT

SEQ ID NO: 92414 - protein, 31 aa, Artificial Sequence; identical to SEQ ID NO: 37481
  Cyclic GFR-binding peptide
  MOD_RES (1)..(1): Xaa is C or S

SEQ ID NO: 92415 - protein, 27 aa, Artificial Sequence
  Cyclic GFR-binding peptide
  MOD_RES (2)..(2): Xaa is C or S
GXEEVIMQYNKLLLVRGNDLYLMSIAS

SEQ ID NO: 92416 - protein, 36 aa, Artificial Sequence; identical to SEQ ID NO: 37490
  Cyclic GFR-binding peptide
  MOD_RES (2)..(4)..(36): Xaa is C or S

SEQ ID NO: 92417 - protein, 26 aa, Artificial Sequence
  Cyclic GFR-binding peptide
MGQYNKLYTVVGKDLYLISIASLKTP

SEQ ID NO: 92418 - protein, 34 aa, Artificial Sequence; identical to SEQ ID NO: 37492
  Cyclic GFR-binding peptide
  MOD_RES (31)..(32): Xaa is C or S

SEQ ID NO: 92419 - protein, 32 aa, Artificial Sequence
  Cyclic GFR-binding peptide
  MOD_RES (26)..(27): Xaa is C or S
QYNKLIIQQKDNLYLMSIASMKTPTXXPGASG

SEQ ID NO: 92420 - protein, 35 aa, Artificial Sequence; identical to SEQ ID NO: 37500
  Cyclic GFR-binding peptide
  MOD_RES (2)..(4): Xaa is C or S

SEQ ID NO: 92421 - protein, 27 aa, Artificial Sequence
  Cyclic GFR-binding peptide
SEVTMNQYNKLVVNKNEDLYLISIASM

SEQ ID NO: 92422 - protein, 32 aa, Artificial Sequence
  Cyclic GFR-binding peptide
  MOD_RES (2)..(4): Xaa is C or S
RXGXAEVVMDQYNKLVVNNAADLYLISIASLR

SEQ ID NO: 92423 - protein, 37 aa, Artificial Sequence; identical to SEQ ID NO: 37502
  Cyclic GFR-binding peptide
  MOD_RES (31)..(32): Xaa is C or S

SEQ ID NO: 92424 - protein, 26 aa, Artificial Sequence
  Cyclic GFR-binding peptide
NQYNKLVVNKNEDLYLISIASMKEPV

SEQ ID NO: 92425 - protein, 31 aa, Artificial Sequence
  Cyclic GFR-binding peptide
  MOD_RES (26)..(27): Xaa is C or S
QYNKLIIQQKDNLYLMSIASMKTPTXXPGAS

SEQ ID NO: 92426 - protein, 20 aa, Artificial Sequence
  Cyclic GFR-binding peptide
QYNKLVVNKNEDLYLISIAS

SEQ ID NO: 92427 - protein, 31 aa, Artificial Sequence
  Cyclic GFR-binding peptide
  MOD_RES (30)..(31): Xaa is C or S
VVMGQYNKLIIQQKDNLYLMSIASMKTPTXX

SEQ ID NO: 92428 - protein, 40 aa, Artificial Sequence; identical to SEQ ID NO: 37511
  Cyclic GFR-binding peptide
  MOD_RES (2)..(4)..(36)..(37): Xaa is C or S

SEQ ID NO: 92429 - protein, 40 aa, Artificial Sequence; identical to SEQ ID NO: 37512
  Cyclic GFR-binding peptide
  MOD_RES (2)..(34)..(35): Xaa is C or S

SEQ ID NO: 92430 - protein, 32 aa, Artificial Sequence
  Cyclic GFR-binding peptide
  MOD_RES (2)..(2): Xaa is C or S
AXSEVTMNQYNKLVVNKNEDLYLISIASMKEP

SEQ ID NO: 92431 - protein, 21 aa, Artificial Sequence
  Cyclic GFR-binding peptide
GQYNKLIIQQKDNLYLMSIAS

SEQ ID NO: 92432 - protein, 26 aa, Artificial Sequence
  Cyclic GFR-binding peptide
  MOD_RES (26)..(26): Xaa is C or S
QYNKLYTVVGKDLYLISIASLKTPVX

SEQ ID NO: 92433 - protein, 30 aa, Artificial Sequence
  Cyclic GFR-binding peptide
  MOD_RES (2)..(2): Xaa is C or S
AXSEVTMNQYNKLVVNKNEDLYLISIASMK

SEQ ID NO: 92434 - protein, 35 aa, Artificial Sequence; identical to SEQ ID NO: 37519
  Cyclic GFR-binding peptide
  MOD_RES (2)..(4): Xaa is C or S

SEQ ID NO: 92435 - protein, 32 aa, Artificial Sequence; identical to SEQ ID NO: 37522
  Cyclic GFR-binding peptide
  MOD_RES (32)..(32): Xaa is C or S

SEQ ID NO: 92436 - protein, 30 aa, Artificial Sequence; identical to SEQ ID NO: 1782
  Cyclic GFR-binding peptide

SEQ ID NO: 92437 - protein, 23 aa, Artificial Sequence
  Cyclic GFR-binding peptide
VIMQYNKLLLVRGNDLYLMSIAS

SEQ ID NO: 92438 - protein, 32 aa, Artificial Sequence
  Cyclic GFR-binding peptide
  MOD_RES (1)..(3): Xaa is C or S
XAXSEVTMNQYNKLVVNKNEDLYLISIASMKE

SEQ ID NO: 92439 - protein, 37 aa, Artificial Sequence; identical to SEQ ID NO: 37528
  Cyclic GFR-binding peptide
  MOD_RES (31)..(32): Xaa is C or S

SEQ ID NO: 92440 - protein, 33 aa, Artificial Sequence
  Cyclic GFR-binding peptide
  MOD_RES (30)..(31): Xaa is C or S
VTMNQYNKLVVNKNEDLYLISIASMKEPVXXPE

SEQ ID NO: 92441 - protein, 25 aa, Artificial Sequence
  Cyclic GFR-binding peptide
MGQYNKLIIQQKDNLYLMSIASMKT

SEQ ID NO: 92442 - protein, 32 aa, Artificial Sequence; identical to SEQ ID NO: 37533
  Cyclic GFR-binding peptide
  MOD_RES (31)..(32): Xaa is C or S

SEQ ID NO: 92443 - protein, 29 aa, Artificial Sequence
  Cyclic GFR-binding peptide
EVVMDQYNKLVVNNAADLYLISIASLRAP

SEQ ID NO: 92444 - protein, 31 aa, Artificial Sequence
  Cyclic GFR-binding peptide
  MOD_RES (30)..(31): Xaa is C or S
VVMDQYNKLVVNNAADLYLISIASLRAPVXX

SEQ ID NO: 92445 - protein, 35 aa, Artificial Sequence
  Cyclic GFR-binding peptide
  MOD_RES (30)..(31): Xaa is C or S
VTMNQYNKLVVNKNEDLYLISIASMKEPVXXPEPI

SEQ ID NO: 92446 - protein, 22 aa, Artificial Sequence
  Cyclic GFR-binding peptide
MNQYNKLVVNKNEDLYLISIAS

SEQ ID NO: 92447 - protein, 29 aa, Artificial Sequence
  Cyclic GFR-binding peptide
  MOD_RES (27)..(28): Xaa is C or S
GQYNKLIIQQKDNLYLMSIASMKTPTXXP

SEQ ID NO: 92448 - protein, 31 aa, Artificial Sequence
  Cyclic GFR-binding peptide
  MOD_RES (26)..(27): Xaa is C or S
QYNKLVVNNAADLYLISIASLRAPVXXSAPA

SEQ ID NO: 92449 - protein, 37 aa, Artificial Sequence; identical to SEQ ID NO: 37538
  Cyclic GFR-binding peptide
  MOD_RES (2)..(4)..(36)..(37): Xaa is C or S

SEQ ID NO: 92450 - protein, 38 aa, Artificial Sequence; identical to SEQ ID NO: 37541
  Cyclic GFR-binding peptide
  MOD_RES (32)..(33): Xaa is C or S

SEQ ID NO: 92451 - protein, 31 aa, Artificial Sequence
  Cyclic GFR-binding peptide
  MOD_RES (2)..(4): Xaa is C or S
SXGXRDVVMGQYNKLIIQQKDNLYLMSIASM

SEQ ID NO: 92452 - protein, 31 aa, Artificial Sequence; identical to SEQ ID NO: 37542
  Cyclic GFR-binding peptide
  MOD_RES (31)..(31): Xaa is C or S

SEQ ID NO: 92453 - protein, 32 aa, Artificial Sequence
  Cyclic GFR-binding peptide
  MOD_RES (27)..(28): Xaa is C or S
GQYNKLYTVVGKDLYLISIASLKTPVXXAKSA

SEQ ID NO: 92454 - protein, 31 aa, Artificial Sequence; identical to SEQ ID NO: 37547
  Cyclic GFR-binding peptide

SEQ ID NO: 92455 - protein, 27 aa, Artificial Sequence
  Cyclic GFR-binding peptide
  MOD_RES (27)..(27): Xaa is C or S
GQYNKLIIQQKDNLYLMSIASMKTPTX

SEQ ID NO: 92456 - protein, 21 aa, Artificial Sequence
  Cyclic GFR-binding peptide
QYNKLVVNKNEDLYLISIASM

SEQ ID NO: 92457 - protein, 33 aa, Artificial Sequence
  Cyclic GFR-binding peptide
  MOD_RES (28)..(29): Xaa is C or S
MGQYNKLIIQQKDNLYLMSIASMKTPTXXPGAS

SEQ ID NO: 92458 - protein, 32 aa, Artificial Sequence
  Cyclic GFR-binding peptide
  MOD_RES (1)..(3): Xaa is C or S
XGXESVAMGQYNKLYTVVGKDLYLISIASLKT

SEQ ID NO: 92459 - protein, 30 aa, Artificial Sequence
  Cyclic GFR-binding peptide
  MOD_RES (26)..(27): Xaa is C or S
QYNKLLLVRGNDLYLMSIASTKVPAXXTSP

SEQ ID NO: 92460 - protein, 25 aa, Artificial Sequence
  Cyclic GFR-binding peptide
MQYNKLLLVRGNDLYLMSIASTKVP

SEQ ID NO: 92461 - protein, 23 aa, Artificial Sequence
  Cyclic GFR-binding peptide
MDQYNKLVVNNAADLYLISIASL

SEQ ID NO: 92462 - protein, 38 aa, Artificial Sequence; identical to SEQ ID NO: 37558
  Cyclic GFR-binding peptide
  MOD_RES (1)..(3)..(35)..(36): Xaa is C or S

SEQ ID NO: 92463 - protein, 30 aa, Artificial Sequence
  Cyclic GFR-binding peptide
RDVVMGQYNKLIIQQKDNLYLMSIASMKTP

SEQ ID NO: 92464 - protein, 32 aa, Artificial Sequence; identical to SEQ ID NO: 37560
  Cyclic GFR-binding peptide
  MOD_RES (2)..(2): Xaa is C or S

SEQ ID NO: 92465 - protein, 30 aa, Artificial Sequence
  Cyclic GFR-binding peptide
  MOD_RES (1)..(3): Xaa is C or S
XGXAEVVMDQYNKLVVNNAADLYLISIASL

SEQ ID NO: 92466 - protein, 30 aa, Artificial Sequence
  Cyclic GFR-binding peptide
  MOD_RES (30)..(30): Xaa is C or S
VTMNQYNKLVVNKNEDLYLISIASMKEPVX

SEQ ID NO: 92467 - protein, 32 aa, Artificial Sequence
  Cyclic GFR-binding peptide
  MOD_RES (1)..(3): Xaa is C or S
XGXAEVVMDQYNKLVVNNAADLYLISIASLRA

SEQ ID NO: 92468 - protein, 38 aa, Artificial Sequence; identical to SEQ ID NO: 37562
  Cyclic GFR-binding peptide
  MOD_RES (2)..(4)..(36)..(37): Xaa is C or S

SEQ ID NO: 92469 - protein, 23 aa, Artificial Sequence
  Cyclic GFR-binding peptide
QYNKLLLVRGNDLYLMSIASTKV

SEQ ID NO: 92470 - protein, 34 aa, Artificial Sequence
  Cyclic GFR-binding peptide
  MOD_RES (2)..(4): Xaa is C or S
RXGXAEVVMDQYNKLVVNNAADLYLISIASLRAP

SEQ ID NO: 92471 - protein, 26 aa, Artificial Sequence
  Cyclic GFR-binding peptide
RDVVMGQYNKLIIQQKDNLYLMSIAS

SEQ ID NO: 92472 - protein, 29 aa, Artificial Sequence
  Cyclic GFR-binding peptide
  MOD_RES (26)..(27): Xaa is C or S
QYNKLYTVVGKDLYLISIASLKTPVXXAK

SEQ ID NO: 92473 - protein, 35 aa, Artificial Sequence; identical to SEQ ID NO: 37567
  Cyclic GFR-binding peptide
  MOD_RES (1)..(33)..(34): Xaa is C or S

SEQ ID NO: 92474 - protein, 26 aa, Artificial Sequence
  Cyclic GFR-binding peptide
VMDQYNKLVVNNAADLYLISIASLRA

SEQ ID NO: 92475 - protein, 29 aa, Artificial Sequence
  Cyclic GFR-binding peptide
  MOD_RES (2)..(2): Xaa is C or S
GXRDVVMGQYNKLIIQQKDNLYLMSIASM

SEQ ID NO: 92476 - protein, 34 aa, Artificial Sequence; identical to SEQ ID NO: 37576
  Cyclic GFR-binding peptide
  MOD_RES (31)..(32): Xaa is C or S

SEQ ID NO: 92477 - protein, 24 aa, Artificial Sequence
  Cyclic GFR-binding peptide
MQYNKLLLVRGNDLYLMSIASTKV

SEQ ID NO: 92478 - protein, 37 aa, Artificial Sequence; identical to SEQ ID NO: 37578
  Cyclic GFR-binding peptide
  MOD_RES (31)..(32): Xaa is C or S

SEQ ID NO: 92479 - protein, 29 aa, Artificial Sequence
  Cyclic GFR-binding peptide
  MOD_RES (27)..(28): Xaa is C or S
MQYNKLLLVRGNDLYLMSIASTKVPAXXT

SEQ ID NO: 92480 - protein, 23 aa, Artificial Sequence
  Cyclic GFR-binding peptide
MGQYNKLYTVVGKDLYLISIASL

SEQ ID NO: 92481 - protein, 39 aa, Artificial Sequence; identical to SEQ ID NO: 37581
  Cyclic GFR-binding peptide
  MOD_RES (2)..(4)..(36)..(37): Xaa is C or S

SEQ ID NO: 92482 - protein, 31 aa, Artificial Sequence
  Cyclic GFR-binding peptide
  MOD_RES (29)..(30): Xaa is C or S
TMNQYNKLVVNKNEDLYLISIASMKEPVXXP

SEQ ID NO: 92483 - protein, 24 aa, Artificial Sequence
  Cyclic GFR-binding peptide
QYNKLVVNNAADLYLISIASLRAP

SEQ ID NO: 92484 - protein, 21 aa, Artificial Sequence
  Cyclic GFR-binding peptide
QYNKLLLVRGNDLYLMSIAST

SEQ ID NO: 92485 - protein, 20 aa, Artificial Sequence
  Cyclic GFR-binding peptide
QYNKLYTVVGKDLYLISIAS

SEQ ID NO: 92486 - protein, 34 aa, Artificial Sequence
  Cyclic GFR-binding peptide
  MOD_RES (28)..(29): Xaa is C or S
MGQYNKLIIQQKDNLYLMSIASMKTPTXXPGASG

SEQ ID NO: 92487 - protein, 31 aa, Artificial Sequence
  Cyclic GFR-binding peptide
  MOD_RES (1)..(3): Xaa is C or S
XGXEEVIMQYNKLLLVRGNDLYLMSIASTKV

SEQ ID NO: 92488 - protein, 26 aa, Artificial Sequence
  Cyclic GFR-binding peptide
EEVIMQYNKLLLVRGNDLYLMSIAST

SEQ ID NO: 92489 - protein, 20 aa, Artificial Sequence
  Cyclic GFR-binding peptide
QYNKLYTVVGKDLYLISIAS

SEQ ID NO: 92490 - protein, 22 aa, Artificial Sequence
  Cyclic GFR-binding peptide
MGQYNKLIIQQKDNLYLMSIAS

SEQ ID NO: 92491 - protein, 33 aa, Artificial Sequence; identical to SEQ ID NO: 37598
  Cyclic GFR-binding peptide
  MOD_RES (31)..(32): Xaa is C or S

SEQ ID NO: 92492 - protein, 27 aa, Artificial Sequence
  Cyclic GFR-binding peptide
RDVVMGQYNKLIIQQKDNLYLMSIASM

SEQ ID NO: 92493 - protein, 37 aa, Artificial Sequence; identical to SEQ ID NO: 37600
  Cyclic GFR-binding peptide
  MOD_RES (2)..(4)..(36)..(37): Xaa is C or S

SEQ ID NO: 92494 - protein, 41 aa, Artificial Sequence; identical to SEQ ID NO: 37603
  Cyclic GFR-binding peptide
  MOD_RES (1)..(3)..(35)..(36): Xaa is C or S

SEQ ID NO: 92495 - protein, 41 aa, Artificial Sequence; identical to SEQ ID NO: 37606
  Cyclic GFR-binding peptide
  MOD_RES (1)..(3)..(35)..(36): Xaa is C or S

SEQ ID NO: 92496 - protein, 24 aa, Artificial Sequence
  Cyclic GFR-binding peptide
IMQYNKLLLVRGNDLYLMSIASTK

SEQ ID NO: 92497 - protein, 26 aa, Artificial Sequence
  Cyclic GFR-binding peptide
  MOD_RES (26)..(26): Xaa is C or S
QYNKLVVNNAADLYLISIASLRAPVX

SEQ ID NO: 92498 - protein, 30 aa, Artificial Sequence
  Cyclic GFR-binding peptide
SEVTMNQYNKLVVNKNEDLYLISIASMKEP

SEQ ID NO: 92499 - protein, 31 aa, Artificial Sequence; identical to SEQ ID NO: 37609
  Cyclic GFR-binding peptide
  MOD_RES (31)..(31): Xaa is C or S

SEQ ID NO: 92500 - protein, 30 aa, Artificial Sequence; identical to SEQ ID NO: 37610
  Cyclic GFR-binding peptide

SEQ ID NO: 92501 - protein, 30 aa, Artificial Sequence
  Cyclic GFR-binding peptide
  MOD_RES (26)..(27): Xaa is C or S
QYNKLVVNKNEDLYLISIASMKEPVXXPEP

SEQ ID NO: 92502 - protein, 30 aa, Artificial Sequence
  Cyclic GFR-binding peptide
  MOD_RES (1)..(1): Xaa is C or S
XEEVIMQYNKLLLVRGNDLYLMSIASTKVP

SEQ ID NO: 92503 - protein, 30 aa, Artificial Sequence
  Cyclic GFR-binding peptide
  MOD_RES (27)..(28): Xaa is C or S
DQYNKLVVNNAADLYLISIASLRAPVXXSA

SEQ ID NO: 92504 - protein, 25 aa, Artificial Sequence
  Cyclic GFR-binding peptide
QYNKLYTVVGKDLYLISIASLKTPV

SEQ ID NO: 92505 - protein, 34 aa, Artificial Sequence
  Cyclic GFR-binding peptide
  MOD_RES (2)..(4): Xaa is C or S
RXAXSEVTMNQYNKLVVNKNEDLYLISIASMKEP

SEQ ID NO: 92506 - protein, 25 aa, Artificial Sequence
  Cyclic GFR-binding peptide
QYNKLLLVRGNDLYLMSIASTKVPA

SEQ ID NO: 92507 - protein, 30 aa, Artificial Sequence
  Cyclic GFR-binding peptide
  MOD_RES (1)..(3): Xaa is C or S
XGXESVAMGQYNKLYTVVGKDLYLISIASL

SEQ ID NO: 92508 - protein, 24 aa, Artificial Sequence
  Cyclic GFR-binding peptide
VVMGQYNKLIIQQKDNLYLMSIAS

SEQ ID NO: 92509 - protein, 26 aa, Artificial Sequence
  Cyclic GFR-binding peptide
SVAMGQYNKLYTVVGKDLYLISIASL

SEQ ID NO: 92510 - protein, 30 aa, Artificial Sequence
  Cyclic GFR-binding peptide
  MOD_RES (2)..(4): Xaa is C or S
RXAXSEVTMNQYNKLVVNKNEDLYLISIAS

SEQ ID NO: 92511 - protein, 40 aa, Artificial Sequence; identical to SEQ ID NO: 37634
  Cyclic GFR-binding peptide
  MOD_RES (2)..(34)..(35): Xaa is C or S

SEQ ID NO: 92512 - protein, 37 aa, Artificial Sequence; identical to SEQ ID NO: 37636
  Cyclic GFR-binding peptide
  MOD_RES (1)..(33)..(34): Xaa is C or S

SEQ ID NO: 92513 - protein, 39 aa, Artificial Sequence; identical to SEQ ID NO: 37637
  Cyclic GFR-binding peptide
  MOD_RES (2)..(4)..(36)..(37): Xaa is C or S

SEQ ID NO: 92514 - protein, 33 aa, Artificial Sequence; identical to SEQ ID NO: 37639
  Cyclic GFR-binding peptide
  MOD_RES (1)..(33): Xaa is C or S

SEQ ID NO: 92515 - protein, 21 aa, Artificial Sequence
  Cyclic GFR-binding peptide
GQYNKLYTVVGKDLYLISIAS

SEQ ID NO: 92516 - protein, 32 aa, Artificial Sequence
  Cyclic GFR-binding peptide
  MOD_RES (2)..(2): Xaa is C or S
GXESVAMGQYNKLYTVVGKDLYLISIASLKTP

SEQ ID NO: 92517 - protein, 38 aa, Artificial Sequence; identical to SEQ ID NO: 37643
  Cyclic GFR-binding peptide
  MOD_RES (2)..(34)..(35): Xaa is C or S

SEQ ID NO: 92518 - protein, 37 aa, Artificial Sequence; identical to SEQ ID NO: 37644
  Cyclic GFR-binding peptide
  MOD_RES (2)..(34)..(35): Xaa is C or S

SEQ ID NO: 92519 - protein, 26 aa, Artificial Sequence
  Cyclic GFR-binding peptide
  MOD_RES (1)..(1): Xaa is C or S
XEEVIMQYNKLLLVRGNDLYLMSIAS

SEQ ID NO: 92520 - protein, 28 aa, Artificial Sequence
  Cyclic GFR-binding peptide
AMGQYNKLYTVVGKDLYLISIASLKTPV

SEQ ID NO: 92521 - protein, 30 aa, Artificial Sequence
  Cyclic GFR-binding peptide
AEVVMDQYNKLVVNNAADLYLISIASLRAP

SEQ ID NO: 92522 - protein, 33 aa, Artificial Sequence; identical to SEQ ID NO: 37651
  Cyclic GFR-binding peptide
  MOD_RES (31)..(32): Xaa is C or S

SEQ ID NO: 92523 - protein, 36 aa, Artificial Sequence; identical to SEQ ID NO: 37652
  Cyclic GFR-binding peptide
  MOD_RES (1)..(33)..(34): Xaa is C or S

SEQ ID NO: 92524 - protein, 30 aa, Artificial Sequence
  Cyclic GFR-binding peptide
  MOD_RES (26)..(27): Xaa is C or S
QYNKLYTVVGKDLYLISIASLKTPVXXAKS

SEQ ID NO: 92525 - protein, 28 aa, Artificial Sequence
  Cyclic GFR-binding peptide
  MOD_RES (1)..(1): Xaa is C or S
XEEVIMQYNKLLLVRGNDLYLMSIASTK

SEQ ID NO: 92526 - protein, 27 aa, Artificial Sequence
  Cyclic GFR-binding peptide
  MOD_RES (27)..(27): Xaa is C or S
DQYNKLVVNNAADLYLISIASLRAPVX

SEQ ID NO: 92527 - protein, 25 aa, Artificial Sequence
  Cyclic GFR-binding peptide
MNQYNKLVVNKNEDLYLISIASMKE

SEQ ID NO: 92528 - protein, 25 aa, Artificial Sequence
  Cyclic GFR-binding peptide
VIMQYNKLLLVRGNDLYLMSIASTK

SEQ ID NO: 92529 - protein, 22 aa, Artificial Sequence
  Cyclic GFR-binding peptide
MDQYNKLVVNNAADLYLISIAS

SEQ ID NO: 92530 - protein, 33 aa, Artificial Sequence
  Cyclic GFR-binding peptide
  MOD_RES (29)..(30): Xaa is C or S
TMNQYNKLVVNKNEDLYLISIASMKEPVXXPEP

SEQ ID NO: 92531 - protein, 30 aa, Artificial Sequence
  Cyclic GFR-binding peptide
  MOD_RES (27)..(28): Xaa is C or S
NQYNKLVVNKNEDLYLISIASMKEPVXXPE

SEQ ID NO: 92532 - protein, 35 aa, Artificial Sequence; identical to SEQ ID NO: 37660
  Cyclic GFR-binding peptide
  MOD_RES (31)..(32): Xaa is C or S

SEQ ID NO: 92533 - protein, 36 aa, Artificial Sequence; identical to SEQ ID NO: 37661
  Cyclic GFR-binding peptide
  MOD_RES (2)..(4)..(36): Xaa is C or S

SEQ ID NO: 92534 - protein, 31 aa, Artificial Sequence; identical to SEQ ID NO: 37662
  Cyclic GFR-binding peptide
  MOD_RES (31)..(31): Xaa is C or S

SEQ ID NO: 92535 - protein, 33 aa, Artificial Sequence
  Cyclic GFR-binding peptide
  MOD_RES (29)..(30): Xaa is C or S
VMGQYNKLIIQQKDNLYLMSIASMKTPTXXPGA

SEQ ID NO: 92536 - protein, 32 aa, Artificial Sequence
  Cyclic GFR-binding peptide
  MOD_RES (1)..(3): Xaa is C or S
XGXRDVVMGQYNKLIIQQKDNLYLMSIASMKT

SEQ ID NO: 92537 - protein, 29 aa, Artificial Sequence
  Cyclic GFR-binding peptide
  MOD_RES (1)..(3): Xaa is C or S
XGXAEVVMDQYNKLVVNNAADLYLISIAS

SEQ ID NO: 92538 - protein, 30 aa, Artificial Sequence
  Cyclic GFR-binding peptide
  MOD_RES (27)..(28): Xaa is C or S
GQYNKLIIQQKDNLYLMSIASMKTPTXXPG

SEQ ID NO: 92539 - protein, 25 aa, Artificial Sequence
  Cyclic GFR-binding peptide
TMNQYNKLVVNKNEDLYLISIASMK

SEQ ID NO: 92540 - protein, 32 aa, Artificial Sequence; identical to SEQ ID NO: 37675
  Cyclic GFR-binding peptide
  MOD_RES (31)..(32): Xaa is C or S

SEQ ID NO: 92541 - protein, 29 aa, Artificial Sequence
  Cyclic GFR-binding peptide
  MOD_RES (1)..(3): Xaa is C or S
XGXESVAMGQYNKLYTVVGKDLYLISIAS

SEQ ID NO: 92542 - protein, 33 aa, Artificial Sequence; identical to SEQ ID NO: 37677
  Cyclic GFR-binding peptide
  MOD_RES (1)..(32)..(33): Xaa is C or S

SEQ ID NO: 92543 - protein, 33 aa, Artificial Sequence; identical to SEQ ID NO: 37679
  Cyclic GFR-binding peptide
  MOD_RES (32)..(33): Xaa is C or S

SEQ ID NO: 92544 - protein, 23 aa, Artificial Sequence
  Cyclic GFR-binding peptide
NQYNKLVVNKNEDLYLISIASMK

SEQ ID NO: 92545 - protein, 32 aa, Artificial Sequence; identical to SEQ ID NO: 37681
  Cyclic GFR-binding peptide
  MOD_RES (1)..(1): Xaa is C or S

SEQ ID NO: 92546 - protein, 33 aa, Artificial Sequence
  Cyclic GFR-binding peptide
  MOD_RES (30)..(31): Xaa is C or S
VAMGQYNKLYTVVGKDLYLISIASLKTPVXXAK

SEQ ID NO: 92547 - protein, 28 aa, Artificial Sequence
  Cyclic GFR-binding peptide
  MOD_RES (26)..(27): Xaa is C or S
QYNKLLLVRGNDLYLMSIASTKVPAXXT

SEQ ID NO: 92548 - protein, 40 aa, Artificial Sequence; identical to SEQ ID NO: 37683
  Cyclic GFR-binding peptide
  MOD_RES (1)..(3)..(34)..(35): Xaa is C or S

SEQ ID NO: 92549 - protein, 26 aa, Artificial Sequence
  Cyclic GFR-binding peptide
DQYNKLVVNNAADLYLISIASLRAPV

SEQ ID NO: 92550 - protein, 35 aa, Artificial Sequence
  Cyclic GFR-binding peptide
  MOD_RES (29)..(30): Xaa is C or S
VMNQYNKLIVNSSDDLYLVSIASLKTPAXXPKPVH

SEQ ID NO: 92551 - protein, 31 aa, Artificial Sequence
  Cyclic GFR-binding peptide
  MOD_RES (26)..(27): Xaa is C or S
QYNKLVVNKNEDLYLISIASMKEPVXXPEPI

SEQ ID NO: 92552 - protein, 27 aa, Artificial Sequence
  Cyclic GFR-binding peptide
VMGQYNKLIIQQKDNLYLMSIASMKTP

SEQ ID NO: 92553 - protein, 33 aa, Artificial Sequence
  Cyclic GFR-binding peptide
  MOD_RES (29)..(30): Xaa is C or S
VIMQYNKLLLVRGNDLYLMSIASTKVPAXXTSP

SEQ ID NO: 92554 - protein, 42 aa, Artificial Sequence; identical to SEQ ID NO: 37690
  Cyclic GFR-binding peptide
  MOD_RES (2)..(4)..(36)..(37): Xaa is C or S

SEQ ID NO: 92555 - protein, 36 aa, Artificial Sequence; identical to SEQ ID NO: 37691
  Cyclic GFR-binding peptide
  MOD_RES (2)..(34)..(35): Xaa is C or S

SEQ ID NO: 92556 - protein, 32 aa, Artificial Sequence
  Cyclic GFR-binding peptide
  MOD_RES (30)..(31): Xaa is C or S
EVIMQYNKLLLVRGNDLYLMSIASTKVPAXXT

SEQ ID NO: 92557 - protein, 22 aa, Artificial Sequence
  Cyclic GFR-binding peptide
MGQYNKLYTVVGKDLYLISIAS

SEQ ID NO: 92558 - protein, 40 aa, Artificial Sequence; identical to SEQ ID NO: 37694
  Cyclic GFR-binding peptide
  MOD_RES (2)..(34)..(35): Xaa is C or S

SEQ ID NO: 92559 - protein, 24 aa, Artificial Sequence
  Cyclic GFR-binding peptide
QYNKLLLVRGNDLYLMSIASTKVP

SEQ ID NO: 92560 - protein, 32 aa, Artificial Sequence
  Cyclic GFR-binding peptide
  MOD_RES (28)..(29): Xaa is C or S
MDQYNKLVVNNAADLYLISIASLRAPVXXSAP

SEQ ID NO: 92561 - protein, 27 aa, Artificial Sequence
  Cyclic GFR-binding peptide
VVMGQYNKLIIQQKDNLYLMSIASMKT

SEQ ID NO: 92562 - protein, 38 aa, Artificial Sequence; identical to SEQ ID NO: 37700
  Cyclic GFR-binding peptide
  MOD_RES (2)..(34)..(35): Xaa is C or S

SEQ ID NO: 92563 - protein, 32 aa, Artificial Sequence
  Cyclic GFR-binding peptide
  MOD_RES (30)..(31): Xaa is C or S
VVMDQYNKLVVNNAADLYLISIASLRAPVXXS

SEQ ID NO: 92564 - protein, 35 aa, Artificial Sequence; identical to SEQ ID NO: 37702
  Cyclic GFR-binding peptide
  MOD_RES (2)..(4)..(35): Xaa is C or S

SEQ ID NO: 92565 - protein, 24 aa, Artificial Sequence
  Cyclic GFR-binding peptide
MNQYNKLVVNKNEDLYLISIASMK

SEQ ID NO: 92566 - protein, 27 aa, Artificial Sequence
  Cyclic GFR-binding peptide
VAMGQYNKLYTVVGKDLYLISIASLKT

SEQ ID NO: 92567 - protein, 21 aa, Artificial Sequence
  Cyclic GFR-binding peptide
QYNKLVVNNAADLYLISIASL

SEQ ID NO: 92568 - protein, 35 aa, Artificial Sequence; identical to SEQ ID NO: 37704
  Cyclic GFR-binding peptide
  MOD_RES (31)..(32): Xaa is C or S

SEQ ID NO: 92569 - protein, 30 aa, Artificial Sequence; identical to SEQ ID NO: 1784
  Cyclic GFR-binding peptide

SEQ ID NO: 92570 - protein, 41 aa, Artificial Sequence; identical to SEQ ID NO: 37707
  Cyclic GFR-binding peptide
  MOD_RES (1)..(3)..(35)..(36): Xaa is C or S

SEQ ID NO: 92571 - protein, 36 aa, Artificial Sequence; identical to SEQ ID NO: 37709
  Cyclic GFR-binding peptide
  MOD_RES (31)..(32): Xaa is C or S

SEQ ID NO: 92572 - protein, 28 aa, Artificial Sequence
  Cyclic GFR-binding peptide
  MOD_RES (2)..(2): Xaa is C or S
AXSEVTMNQYNKLVVNKNEDLYLISIAS

SEQ ID NO: 92573 - protein, 36 aa, Artificial Sequence; identical to SEQ ID NO: 37712
  Cyclic GFR-binding peptide
  MOD_RES (1)..(3)..(35)..(36): Xaa is C or S

SEQ ID NO: 92574 - protein, 22 aa, Artificial Sequence
  Cyclic GFR-binding peptide
NQYNKLVVNKNEDLYLISIASM

SEQ ID NO: 92575 - protein, 34 aa, Artificial Sequence
  Cyclic GFR-binding peptide
  MOD_RES (30)..(31): Xaa is C or S
VVMDQYNKLVVNNAADLYLISIASLRAPVXXSAP

SEQ ID NO: 92576 - protein, 34 aa, Artificial Sequence
  Cyclic GFR-binding peptide
  MOD_RES (28)..(29): Xaa is C or S
MDQYNKLVVNNAADLYLISIASLRAPVXXSAPAA

SEQ ID NO: 92577 - protein, 29 aa, Artificial Sequence
  Cyclic GFR-binding peptide
  MOD_RES (29)..(29): Xaa is C or S
AMGQYNKLYTVVGKDLYLISIASLKTPVX

SEQ ID NO: 92578 - protein, 24 aa, Artificial Sequence
  Cyclic GFR-binding peptide
MDQYNKLVVNNAADLYLISIASLR

SEQ ID NO: 92579 - protein, 29 aa, Artificial Sequence
  Cyclic GFR-binding peptide
EEVIMQYNKLLLVRGNDLYLMSIASTKVP

SEQ ID NO: 92580 - protein, 40 aa, Artificial Sequence; identical to SEQ ID NO: 37716
  Cyclic GFR-binding peptide
  MOD_RES (2)..(4)..(36)..(37): Xaa is C or S

SEQ ID NO: 92581 - protein, 38 aa, Artificial Sequence; identical to SEQ ID NO: 37717
  Cyclic GFR-binding peptide
  MOD_RES (32)..(33): Xaa is C or S

SEQ ID NO: 92582 - protein, 28 aa, Artificial Sequence
  Cyclic GFR-binding peptide
  MOD_RES (2)..(2): Xaa is C or S
GXEEVIMQYNKLLLVRGNDLYLMSIAST

SEQ ID NO: 92583 - protein, 23 aa, Artificial Sequence
  Cyclic GFR-binding peptide
QYNKLVVNKNEDLYLISIASMKE

SEQ ID NO: 92584 - protein, 31 aa, Artificial Sequence
  Cyclic GFR-binding peptide
  MOD_RES (30)..(31): Xaa is C or S
VAMGQYNKLYTVVGKDLYLISIASLKTPVXX

SEQ ID NO: 92585 - protein, 28 aa, Artificial Sequence
  Cyclic GFR-binding peptide
  MOD_RES (26)..(27): Xaa is C or S
QYNKLVVNKNEDLYLISIASMKEPVXXP

SEQ ID NO: 92586 - protein, 28 aa, Artificial Sequence
  Cyclic GFR-binding peptide
  MOD_RES (1)..(1): Xaa is C or S
XRDVVMGQYNKLIIQQKDNLYLMSIASM

SEQ ID NO: 92587 - protein, 37 aa, Artificial Sequence; identical to SEQ ID NO: 37719
  Cyclic GFR-binding peptide
  MOD_RES (1)..(3)..(35)..(36): Xaa is C or S

SEQ ID NO: 92588 - protein, 28 aa, Artificial Sequence
  Cyclic GFR-binding peptide
  MOD_RES (1)..(1): Xaa is C or S
XAEVVMDQYNKLVVNNAADLYLISIASL

SEQ ID NO: 92589 - protein, 34 aa, Artificial Sequence
  Cyclic GFR-binding peptide
  MOD_RES (29)..(30): Xaa is C or S
AMGQYNKLYTVVGKDLYLISIASLKTPVXXAKSA

SEQ ID NO: 92590 - protein, 21 aa, Artificial Sequence
  Cyclic GFR-binding peptide
DQYNKLVVNNAADLYLISIAS

SEQ ID NO: 92591 - protein, 35 aa, Artificial Sequence; identical to SEQ ID NO: 37721
  Cyclic GFR-binding peptide
  MOD_RES (1)..(3)..(35): Xaa is C or S

SEQ ID NO: 92592 - protein, 28 aa, Artificial Sequence
  Cyclic GFR-binding peptide
VTMNQYNKLVVNKNEDLYLISIASMKEP

SEQ ID NO: 92593 - protein, 31 aa, Artificial Sequence
  Cyclic GFR-binding peptide
  MOD_RES (1)..(1): Xaa is C or S
XESVAMGQYNKLYTVVGKDLYLISIASLKTP

SEQ ID NO: 92594 - protein, 20 aa, Artificial Sequence
  Cyclic GFR-binding peptide
QYNKLVVNNAADLYLISIAS

SEQ ID NO: 92595 - protein, 37 aa, Artificial Sequence; identical to SEQ ID NO: 37726
  Cyclic GFR-binding peptide
  MOD_RES (6)..(7): Xaa is C or S

SEQ ID NO: 92596 - protein, 29 aa, Artificial Sequence
  Cyclic GFR-binding peptide
  MOD_RES (29)..(29): Xaa is C or S
RLSAISILYLDAANNVVLKNYQDMVVEAX

SEQ ID NO: 92597 - protein, 32 aa, Artificial Sequence
  Cyclic GFR-binding peptide
  MOD_RES (6)..(7): Xaa is C or S
AAPASXXVPARLSAISILYLDAANNVVLKNYQ

SEQ ID NO: 92598 - protein, 30 aa, Artificial Sequence
  Cyclic GFR-binding peptide
  MOD_RES (4)..(5): Xaa is C or S
AGPXXTPTKMSAISMLYLNDKQQIILKNYQ

SEQ ID NO: 92599 - protein, 35 aa, Artificial Sequence
  Cyclic GFR-binding peptide
  MOD_RES (6)..(7): Xaa is C or S
GSAGPXXTPTKMSAISMLYLNDKQQIILKNYQGMV

SEQ ID NO: 92600 - protein, 28 aa, Artificial Sequence
  Cyclic GFR-binding peptide
KLSAISILYLDKGVVTYLKNYQGMAVSE

SEQ ID NO: 92601 - protein, 22 aa, Artificial Sequence
  Cyclic GFR-binding peptide
KLSAISILYLDKGVVTYLKNYQ

SEQ ID NO: 92602 - protein, 38 aa, Artificial Sequence; identical to SEQ ID NO: 37731
  Cyclic GFR-binding peptide
  MOD_RES (2)..(3)..(35)..(37): Xaa is C or S

SEQ ID NO: 92603 - protein, 29 aa, Artificial Sequence
  Cyclic GFR-binding peptide
  MOD_RES (3)..(4): Xaa is C or S
STXXAPVKTSAISMLYLDNGRVLLLKNYQ

SEQ ID NO: 92604 - protein, 36 aa, Artificial Sequence; identical to SEQ ID NO: 37737
  Cyclic GFR-binding peptide
  MOD_RES (2)..(3)..(35): Xaa is C or S

SEQ ID NO: 92605 - protein, 36 aa, Artificial Sequence; identical to SEQ ID NO: 37740
  Cyclic GFR-binding peptide
  MOD_RES (3)..(4)..(36): Xaa is C or S

SEQ ID NO: 92606 - protein, 35 aa, Artificial Sequence; identical to SEQ ID NO: 37741
  Cyclic GFR-binding peptide
  MOD_RES (3)..(4): Xaa is C or S

SEQ ID NO: 92607 - protein, 34 aa, Artificial Sequence; identical to SEQ ID NO: 37743
  Cyclic GFR-binding peptide
  MOD_RES (2)..(3)..(34): Xaa is C or S

SEQ ID NO: 92608 - protein, 34 aa, Artificial Sequence; identical to SEQ ID NO: 37744
  Cyclic GFR-binding peptide
  MOD_RES (2)..(3): Xaa is C or S

SEQ ID NO: 92609 - protein, 29 aa, Artificial Sequence
  Cyclic GFR-binding peptide
  MOD_RES (29)..(29): Xaa is C or S
VKTSAISMLYLDNGRVLLLKNYQMIVEEX

SEQ ID NO: 92610 - protein, 35 aa, Artificial Sequence
  Cyclic GFR-binding peptide
  MOD_RES (6)..(7): Xaa is C or S
RVPSTXXAPVKTSAISMLYLDNGRVLLLKNYQMIV

SEQ ID NO: 92611 - protein, 20 aa, Artificial Sequence
  Cyclic GFR-binding peptide
SAISMLYLNDKQQIILKNYQ

SEQ ID NO: 92612 - protein, 28 aa, Artificial Sequence
  Cyclic GFR-binding peptide
  MOD_RES (2)..(3): Xaa is C or S
PXXTPTKMSAISMLYLNDKQQIILKNYQ

SEQ ID NO: 92613 - protein, 26 aa, Artificial Sequence
  Cyclic GFR-binding peptide
  MOD_RES (1)..(1): Xaa is C or S
XVPEKMSAISILYLDENKNVVLKNYQ

SEQ ID NO: 92614 - protein, 35 aa, Artificial Sequence; identical to SEQ ID NO: 37753
  Cyclic GFR-binding peptide
  MOD_RES (2)..(3)..(35): Xaa is C or S

SEQ ID NO: 92615 - protein, 33 aa, Artificial Sequence; identical to SEQ ID NO: 37757
  Cyclic GFR-binding peptide
  MOD_RES (1)..(32): Xaa is C or S

SEQ ID NO: 92616 - protein, 31 aa, Artificial Sequence
  Cyclic GFR-binding peptide
  MOD_RES (1)..(2): Xaa is C or S
XXVPEKMSAISILYLDENKNVVLKNYQNMTV

SEQ ID NO: 92617 - protein, 28 aa, Artificial Sequence
  Cyclic GFR-binding peptide
  MOD_RES (2)..(3): Xaa is C or S
SXXVPARLSAISILYLDAANNVVLKNYQ

SEQ ID NO: 92618 - protein, 22 aa, Artificial Sequence
  Cyclic GFR-binding peptide
SAISMLYLDNGRVLLLKNYQMI

SEQ ID NO: 92619 - protein, 22 aa, Artificial Sequence
  Cyclic GFR-binding peptide
RLSAISILYLDAANNVVLKNYQ

SEQ ID NO: 92620 - protein, 30 aa, Artificial Sequence
  Cyclic GFR-binding peptide
  MOD_RES (29)..(29): Xaa is C or S
RLSAISILYLDAANNVVLKNYQDMVVEAXG

SEQ ID NO: 92621 - protein, 34 aa, Artificial Sequence; identical to SEQ ID NO: 37765
  Cyclic GFR-binding peptide
  MOD_RES (1)..(2)..(34): Xaa is C or S

SEQ ID NO: 92622 - protein, 29 aa, Artificial Sequence
  Cyclic GFR-binding peptide
  MOD_RES (1)..(2): Xaa is C or S
XXVPTKLSAISILYLDKGVVTYLKNYQGM

SEQ ID NO: 92623 - protein, 36 aa, Artificial Sequence; identical to SEQ ID NO: 37772
  Cyclic GFR-binding peptide
  MOD_RES (4)..(5): Xaa is C or S

SEQ ID NO: 92624 - protein, 29 aa, Artificial Sequence
  Cyclic GFR-binding peptide
  MOD_RES (1)..(1): Xaa is C or S
XAPVKTSAISMLYLDNGRVLLLKNYQMIV

SEQ ID NO: 92625 - protein, 33 aa, Artificial Sequence
  Cyclic GFR-binding peptide
  MOD_RES (3)..(4): Xaa is C or S
ASXXVPARLSAISILYLDAANNVVLKNYQDMVV

SEQ ID NO: 92626 - protein, 41 aa, Artificial Sequence; identical to SEQ ID NO: 37777
  Cyclic GFR-binding peptide
  MOD_RES (6)..(7)..(39)..(41): Xaa is C or S

SEQ ID NO: 92627 - protein, 34 aa, Artificial Sequence; identical to SEQ ID NO: 37780
  Cyclic GFR-binding peptide
  MOD_RES (32)..(34): Xaa is C or S

SEQ ID NO: 92628 - protein, 37 aa, Artificial Sequence; identical to SEQ ID NO: 37784
  Cyclic GFR-binding peptide
  MOD_RES (4)..(5)..(36): Xaa is C or S

SEQ ID NO: 92629 - protein, 29 aa, Artificial Sequence
  Cyclic GFR-binding peptide
TKMSAISMLYLNDKQQIILKNYQGMVVDR

SEQ ID NO: 92630 - protein, 29 aa, Artificial Sequence
  Cyclic GFR-binding peptide
VPTKLSAISILYLDKGVVTYLKNYQGMAV

SEQ ID NO: 92631 - protein, 33 aa, Artificial Sequence
  Cyclic GFR-binding peptide
  MOD_RES (31)..(33): Xaa is C or S
PARLSAISILYLDAANNVVLKNYQDMVVEAXGX

SEQ ID NO: 92632 - protein, 36 aa, Artificial Sequence
  Cyclic GFR-binding peptide
  MOD_RES (6)..(7): Xaa is C or S
GSAGPXXTPTKMSAISMLYLNDKQQIILKNYQGMVV

SEQ ID NO: 92633 - protein, 34 aa, Artificial Sequence; identical to SEQ ID NO: 37788
  Cyclic GFR-binding peptide
  MOD_RES (1)..(2)..(33): Xaa is C or S

SEQ ID NO: 92634 - protein, 39 aa, Artificial Sequence; identical to SEQ ID NO: 37794
  Cyclic GFR-binding peptide
  MOD_RES (4)..(5)..(37)..(39): Xaa is C or S

SEQ ID NO: 92635 - protein, 37 aa, Artificial Sequence; identical to SEQ ID NO: 37796
  Cyclic GFR-binding peptide
  MOD_RES (3)..(4)..(36): Xaa is C or S

SEQ ID NO: 92636 - protein, 31 aa, Artificial Sequence
  Cyclic GFR-binding peptide
  MOD_RES (3)..(4): Xaa is C or S
ASXXVPARLSAISILYLDAANNVVLKNYQDM

SEQ ID NO: 92637 - protein, 30 aa, Artificial Sequence; identical to SEQ ID NO: 37797
  Cyclic GFR-binding peptide

SEQ ID NO: 92638 - protein, 36 aa, Artificial Sequence
  Cyclic GFR-binding peptide
  MOD_RES (6)..(7): Xaa is C or S
HVPKPXXAPTKLSAISVLYLDDSSNVILKNYQNMVV

SEQ ID NO: 92639 - protein, 37 aa, Artificial Sequence; identical to SEQ ID NO: 37801
  Cyclic GFR-binding peptide
  MOD_RES (5)..(6): Xaa is C or S

SEQ ID NO: 92640 - protein, 39 aa, Artificial Sequence; identical to SEQ ID NO: 37804
  Cyclic GFR-binding peptide
  MOD_RES (4)..(5)..(36)..(38): Xaa is C or S

SEQ ID NO: 92641 - protein, 32 aa, Artificial Sequence
  Cyclic GFR-binding peptide
  MOD_RES (3)..(4): Xaa is C or S
GPXXTPTKMSAISMLYLNDKQQIILKNYQGMV

SEQ ID NO: 92642 - protein, 35 aa, Artificial Sequence
  Cyclic GFR-binding peptide
  MOD_RES (2)..(3)..(35): Xaa is C or S
AXXVPTKLSAISILYLDKGVVTYLKNYQGMAVSEX

SEQ ID NO: 92643 - protein, 20 aa, Artificial Sequence
  Cyclic GFR-binding peptide
SAISILYLDENKNVVLKNYQ

SEQ ID NO: 92644 - protein, 31 aa, Artificial Sequence; identical to SEQ ID NO: 37807
  Cyclic GFR-binding peptide
  MOD_RES (1)..(1): Xaa is C or S

SEQ ID NO: 92645 - protein, 22 aa, Artificial Sequence
  Cyclic GFR-binding peptide
MSAISMLYLNDKQQIILKNYQG

SEQ ID NO: 92646 - protein, 31 aa, Artificial Sequence
  Cyclic GFR-binding peptide
  MOD_RES (30)..(30): Xaa is C or S
TKLSAISILYLDKGVVTYLKNYQGMAVSEXG

SEQ ID NO: 92647 - protein, 28 aa, Artificial Sequence
  Cyclic GFR-binding peptide
  MOD_RES (1)..(2): Xaa is C or S
XXTPTKMSAISMLYLNDKQQIILKNYQG

SEQ ID NO: 92648 - protein, 25 aa, Artificial Sequence
  Cyclic GFR-binding peptide
ARLSAISILYLDAANNVVLKNYQDM

SEQ ID NO: 92649 - protein, 31 aa, Artificial Sequence
  Cyclic GFR-binding peptide
  MOD_RES (4)..(5): Xaa is C or S
PSTXXAPVKTSAISMLYLDNGRVLLLKNYQM

SEQ ID NO: 92650 - protein, 33 aa, Artificial Sequence
  Cyclic GFR-binding peptide
  MOD_RES (30)..(32): Xaa is C or S
PVKTSAISMLYLDNGRVLLLKNYQMIVEEXGXL

SEQ ID NO: 92651 - protein, 27 aa, Artificial Sequence
  Cyclic GFR-binding peptide
VPARLSAISILYLDAANNVVLKNYQDM

SEQ ID NO: 92652 - protein, 30 aa, Artificial Sequence
  Cyclic GFR-binding peptide
  MOD_RES (1)..(1): Xaa is C or S
XVPARLSAISILYLDAANNVVLKNYQDMVV

SEQ ID NO: 92653 - protein, 42 aa, Artificial Sequence; identical to SEQ ID NO: 37817
  Cyclic GFR-binding peptide
  MOD_RES (6)..(7)..(39)..(41): Xaa is C or S

SEQ ID NO: 92654 - protein, 33 aa, Artificial Sequence; identical to SEQ ID NO: 37818
  Cyclic GFR-binding peptide
  MOD_RES (1)..(2): Xaa is C or S

SEQ ID NO: 92655 - protein, 40 aa, Artificial Sequence; identical to SEQ ID NO: 37821
  Cyclic GFR-binding peptide
  MOD_RES (5)..(6)..(38)..(40): Xaa is C or S

SEQ ID NO: 92656 - protein, 33 aa, Artificial Sequence; identical to SEQ ID NO: 37822
  Cyclic GFR-binding peptide
  MOD_RES (31)..(33): Xaa is C or S

SEQ ID NO: 92657 - protein, 26 aa, Artificial Sequence
  Cyclic GFR-binding peptide
MSAISILYLDENKNVVLKNYQNMTVE

SEQ ID NO: 92658 - protein, 27 aa, Artificial Sequence
  Cyclic GFR-binding peptide
RLSAISILYLDAANNVVLKNYQDMVVE

SEQ ID NO: 92659 - protein, 36 aa, Artificial Sequence; identical to SEQ ID NO: 37830
  Cyclic GFR-binding peptide
  MOD_RES (4)..(5): Xaa is C or S

SEQ ID NO: 92660 - protein, 34 aa, Artificial Sequence
  Cyclic GFR-binding peptide
  MOD_RES (4)..(5): Xaa is C or S
AGPXXTPTKMSAISMLYLNDKQQIILKNYQGMVV

SEQ ID NO: 92661 - protein, 26 aa, Artificial Sequence
  Cyclic GFR-binding peptide
TKLSAISILYLDKGVVTYLKNYQGMA

SEQ ID NO: 92662 - protein, 31 aa, Artificial Sequence; identical to SEQ ID NO: 37833
  Cyclic GFR-binding peptide

SEQ ID NO: 92663 - protein, 23 aa, Artificial Sequence
  Cyclic GFR-binding peptide
KTSAISMLYLDNGRVLLLKNYQM

SEQ ID NO: 92664 - protein, 30 aa, Artificial Sequence
  Cyclic GFR-binding peptide
  MOD_RES (2)..(3): Xaa is C or S
PXXTPTKMSAISMLYLNDKQQIILKNYQGM

SEQ ID NO: 92665 - protein, 36 aa, Artificial Sequence; identical to SEQ ID NO: 37835
  Cyclic GFR-binding peptide
  MOD_RES (4)..(5): Xaa is C or S

SEQ ID NO: 92666 - protein, 20 aa, Artificial Sequence
  Cyclic GFR-binding peptide
SAISILYLDAANNVVLKNYQ

SEQ ID NO: 92667 - protein, 32 aa, Artificial Sequence; identical to SEQ ID NO: 37842
  Cyclic GFR-binding peptide
  MOD_RES (1)..(1): Xaa is C or S

SEQ ID NO: 92668 - protein, 31 aa, Artificial Sequence
  Cyclic GFR-binding peptide
  MOD_RES (3)..(4): Xaa is C or S
GPXXTPTKMSAISMLYLNDKQQIILKNYQGM

SEQ ID NO: 92669 - protein, 34 aa, Artificial Sequence
  Cyclic GFR-binding peptide
  MOD_RES (6)..(7): Xaa is C or S
RVPSTXXAPVKTSAISMLYLDNGRVLLLKNYQMI

SEQ ID NO: 92670 - protein, 35 aa, Artificial Sequence; identical to SEQ ID NO: 37850
  Cyclic GFR-binding peptide
  MOD_RES (4)..(5): Xaa is C or S

SEQ ID NO: 92671 - protein, 32 aa, Artificial Sequence
  Cyclic GFR-binding peptide
  MOD_RES (29)..(31): Xaa is C or S
KMSAISILYLDENKNVVLKNYQNMTVESXAXR

SEQ ID NO: 92672 - protein, 35 aa, Artificial Sequence
  Cyclic GFR-binding peptide
  MOD_RES (6)..(7): Xaa is C or S
KASKAXXVPTKLSAISILYLDKGVVTYLKNYQGMA

SEQ ID NO: 92673 - protein, 30 aa, Artificial Sequence
  Cyclic GFR-binding peptide
  MOD_RES (30)..(30): Xaa is C or S
TKLSAISILYLDKGVVTYLKNYQGMAVSEX

SEQ ID NO: 92674 - protein, 29 aa, Artificial Sequence
  Cyclic GFR-binding peptide
VPARLSAISILYLDAANNVVLKNYQDMVV

SEQ ID NO: 92675 - protein, 26 aa, Artificial Sequence
  Cyclic GFR-binding peptide
KMSAISILYLDENKNVVLKNYQNMTV

SEQ ID NO: 92676 - protein, 40 aa, Artificial Sequence; identical to SEQ ID NO: 37853
  Cyclic GFR-binding peptide
  MOD_RES (5)..(6)..(38)..(40): Xaa is C or S

SEQ ID NO: 92677 - protein, 25 aa, Artificial Sequence
  Cyclic GFR-binding peptide
SAISMLYLDNGRVLLLKNYQMIVEE

SEQ ID NO: 92678 - protein, 40 aa, Artificial Sequence; identical to SEQ ID NO: 37854
  Cyclic GFR-binding peptide
  MOD_RES (5)..(6)..(38)..(40): Xaa is C or S

SEQ ID NO: 92679 - protein, 25 aa, Artificial Sequence
  Cyclic GFR-binding peptide
SAISMLYLNDKQQIILKNYQGMVVD

SEQ ID NO: 92680 - protein, 40 aa, Artificial Sequence; identical to SEQ ID NO: 37855
  Cyclic GFR-binding peptide
  MOD_RES (4)..(5)..(37)..(39): Xaa is C or S

SEQ ID NO: 92681 - protein, 29 aa, Artificial Sequence
  Cyclic GFR-binding peptide
VPEKMSAISILYLDENKNVVLKNYQNMTV

SEQ ID NO: 92682 - protein, 30 aa, Artificial Sequence
  Cyclic GFR-binding peptide
  MOD_RES (1)..(2): Xaa is C or S
XXTPTKMSAISMLYLNDKQQIILKNYQGMV

SEQ ID NO: 92683 - protein, 38 aa, Artificial Sequence; identical to SEQ ID NO: 37856
  Cyclic GFR-binding peptide
  MOD_RES (3)..(4)..(36)..(38): Xaa is C or S

SEQ ID NO: 92684 - protein, 24 aa, Artificial Sequence
  Cyclic GFR-binding peptide
SAISILYLDAANNVVLKNYQDMVV

SEQ ID NO: 92685 - protein, 21 aa, Artificial Sequence
  Cyclic GFR-binding peptide
LSAISILYLDKGVVTYLKNYQ

SEQ ID NO: 92686 - protein, 27 aa, Artificial Sequence
  Cyclic GFR-binding peptide
  MOD_RES (27)..(27): Xaa is C or S
SAISILYLDKGVVTYLKNYQGMAVSEX

SEQ ID NO: 92687 - protein, 26 aa, Artificial Sequence
  Cyclic GFR-binding peptide
PARLSAISILYLDAANNVVLKNYQDM

SEQ ID NO: 92688 - protein, 33 aa, Artificial Sequence
  Cyclic GFR-binding peptide
  MOD_RES (30)..(32): Xaa is C or S
TKLSAISILYLDKGVVTYLKNYQGMAVSEXGXR

SEQ ID NO: 92689 - protein, 32 aa, Artificial Sequence
  Cyclic GFR-binding peptide
  MOD_RES (29)..(31): Xaa is C or S
KMSAISMLYLNDKQQIILKNYQGMVVDRXGXS

SEQ ID NO: 92690 - protein, 38 aa, Artificial Sequence; identical to SEQ ID NO: 37863
  Cyclic GFR-binding peptide
  MOD_RES (3)..(4)..(36)..(38): Xaa is C or S

SEQ ID NO: 92691 - protein, 36 aa, Artificial Sequence; identical to SEQ ID NO: 37865
  Cyclic GFR-binding peptide
  MOD_RES (1)..(2)..(34)..(36): Xaa is C or S

SEQ ID NO: 92692 - protein, 31 aa, Artificial Sequence
  Cyclic GFR-binding peptide
  MOD_RES (2)..(3): Xaa is C or S
AXXVPTKLSAISILYLDKGVVTYLKNYQGMA

SEQ ID NO: 92693 - protein, 35 aa, Artificial Sequence
  Cyclic GFR-binding peptide
  MOD_RES (6)..(7): Xaa is C or S
GIPEPXXVPEKMSAISILYLDENKNVVLKNYQNMT

SEQ ID NO: 92694 - protein, 39 aa, Artificial Sequence; identical to SEQ ID NO: 37869
  Cyclic GFR-binding peptide
  MOD_RES (6)..(7)..(39): Xaa is C or S

SEQ ID NO: 92695 - protein, 24 aa, Artificial Sequence
  Cyclic GFR-binding peptide
TKMSAISMLYLNDKQQIILKNYQG

SEQ ID NO: 92696 - protein, 37 aa, Artificial Sequence
  Cyclic GFR-binding peptide
  MOD_RES (5)..(6): Xaa is C or S
SAGPXXTPTKMSAISMLYLNDKQQIILKNYQGMVVDR

SEQ ID NO: 92697 - protein, 29 aa, Artificial Sequence
  Cyclic GFR-binding peptide
  MOD_RES (27)..(29): Xaa is C or S
SAISMLYLNDKQQIILKNYQGMVVDRXGX

SEQ ID NO: 92698 - protein, 31 aa, Artificial Sequence
  Cyclic GFR-binding peptide
  MOD_RES (30)..(30): Xaa is C or S
EKMSAISILYLDENKNVVLKNYQNMTVESXA

SEQ ID NO: 92699 - protein, 33 aa, Artificial Sequence; identical to SEQ ID NO: 37872
  Cyclic GFR-binding peptide
  MOD_RES (1)..(2): Xaa is C or S

SEQ ID NO: 92700 - protein, 23 aa, Artificial Sequence
  Cyclic GFR-binding peptide
TKMSAISMLYLNDKQQIILKNYQ

SEQ ID NO: 92701 - protein, 28 aa, Artificial Sequence
  Cyclic GFR-binding peptide
VPARLSAISILYLDAANNVVLKNYQDMV

SEQ ID NO: 92702 - protein, 28 aa, Artificial Sequence
  Cyclic GFR-binding peptide
PVKTSAISMLYLDNGRVLLLKNYQMIVE

SEQ ID NO: 92703 - protein, 37 aa, Artificial Sequence; identical to SEQ ID NO: 37877
  Cyclic GFR-binding peptide
  MOD_RES (4)..(5)..(37): Xaa is C or S

SEQ ID NO: 92704 - protein, 38 aa, Artificial Sequence; identical to SEQ ID NO: 37879
  Cyclic GFR-binding peptide
  MOD_RES (5)..(6)..(38): Xaa is C or S

SEQ ID NO: 92705 - protein, 28 aa, Artificial Sequence
  Cyclic GFR-binding peptide
  MOD_RES (2)..(3): Xaa is C or S
AXXVPTKLSAISILYLDKGVVTYLKNYQ

SEQ ID NO: 92706 - protein, 32 aa, Artificial Sequence; identical to SEQ ID NO: 37881
  Cyclic GFR-binding peptide
  MOD_RES (1)..(2): Xaa is C or S

SEQ ID NO: 92707 - protein, 33 aa, Artificial Sequence
  Cyclic GFR-binding peptide
  MOD_RES (30)..(32): Xaa is C or S
ARLSAISILYLDAANNVVLKNYQDMVVEAXGXR

SEQ ID NO: 92708 - protein, 33 aa, Artificial Sequence
  Cyclic GFR-binding peptide
  MOD_RES (4)..(5): Xaa is C or S
PASXXVPARLSAISILYLDAANNVVLKNYQDMV

SEQ ID NO: 92709 - protein, 26 aa, Artificial Sequence
  Cyclic GFR-binding peptide
TKMSAISMLYLNDKQQIILKNYQGMV

SEQ ID NO: 92710 - protein, 23 aa, Artificial Sequence
  Cyclic GFR-binding peptide
KLSAISILYLDKGVVTYLKNYQG

SEQ ID NO: 92711 - protein, 24 aa, Artificial Sequence
  Cyclic GFR-binding peptide
SAISILYLDENKNVVLKNYQNMTV

SEQ ID NO: 92712 - protein, 23 aa, Artificial Sequence
  Cyclic GFR-binding peptide
SAISILYLDKGVVTYLKNYQGMA

SEQ ID NO: 92713 - protein, 29 aa, Artificial Sequence
  Cyclic GFR-binding peptide
  MOD_RES (3)..(4): Xaa is C or S
GPXXTPTKMSAISMLYLNDKQQIILKNYQ

SEQ ID NO: 92714 - protein, 32 aa, Artificial Sequence; identical to SEQ ID NO: 37893
  Cyclic GFR-binding peptide
  MOD_RES (1)..(1): Xaa is C or S

SEQ ID NO: 92715 - protein, 32 aa, Artificial Sequence
  Cyclic GFR-binding peptide
  MOD_RES (3)..(4): Xaa is C or S
ASXXVPARLSAISILYLDAANNVVLKNYQDMV

SEQ ID NO: 92716 - protein, 20 aa, Artificial Sequence
  Cyclic GFR-binding peptide
SAISMLYLNDKQQIILKNYQ

SEQ ID NO: 92717 - protein, 30 aa, Artificial Sequence
  Cyclic GFR-binding peptide
  MOD_RES (2)..(3): Xaa is C or S
AXXVPTKLSAISILYLDKGVVTYLKNYQGM

SEQ ID NO: 92718 - protein, 26 aa, Artificial Sequence
  Cyclic GFR-binding peptide
RLSAISILYLDAANNVVLKNYQDMVV

SEQ ID NO: 92719 - protein, 34 aa, Artificial Sequence; identical to SEQ ID NO: 37899
  Cyclic GFR-binding peptide
  MOD_RES (1)..(33): Xaa is C or S

SEQ ID NO: 92720 - protein, 28 aa, Artificial Sequence
  Cyclic GFR-binding peptide
  MOD_RES (1)..(1): Xaa is C or S
XVPTKLSAISILYLDKGVVTYLKNYQGM

SEQ ID NO: 92721 - protein, 28 aa, Artificial Sequence
  Cyclic GFR-binding peptide
PARLSAISILYLDAANNVVLKNYQDMVV

SEQ ID NO: 92722 - protein, 35 aa, Artificial Sequence; identical to SEQ ID NO: 37905
  Cyclic GFR-binding peptide
  MOD_RES (3)..(4): Xaa is C or S

SEQ ID NO: 92723 - protein, 32 aa, Artificial Sequence; identical to SEQ ID NO: 37907
  Cyclic GFR-binding peptide
  MOD_RES (1)..(1): Xaa is C or S

SEQ ID NO: 92724 - protein, 25 aa, Artificial Sequence
  Cyclic GFR-binding peptide
PTKMSAISMLYLNDKQQIILKNYQG

SEQ ID NO: 92725 - protein, 42 aa, Artificial Sequence; identical to SEQ ID NO: 37910
  Cyclic GFR-binding peptide
  MOD_RES (6)..(7)..(39)..(41): Xaa is C or S

SEQ ID NO: 92726 - protein, 35 aa, Artificial Sequence; identical to SEQ ID NO: 37911
  Cyclic GFR-binding peptide
  MOD_RES (1)..(2)..(33)..(35): Xaa is C or S

SEQ ID NO: 92727 - protein, 37 aa, Artificial Sequence; identical to SEQ ID NO: 37912
  Cyclic GFR-binding peptide
  MOD_RES (2)..(3)..(35)..(37): Xaa is C or S

SEQ ID NO: 92728 - protein, 31 aa, Artificial Sequence
  Cyclic GFR-binding peptide
  MOD_RES (3)..(4): Xaa is C or S
KAXXVPTKLSAISILYLDKGVVTYLKNYQGM

SEQ ID NO: 92729 - protein, 27 aa, Artificial Sequence
  Cyclic GFR-binding peptide
  MOD_RES (1)..(2): Xaa is C or S
XXAPVKTSAISMLYLDNGRVLLLKNYQ

SEQ ID NO: 92730 - protein, 33 aa, Artificial Sequence
  Cyclic GFR-binding peptide
  MOD_RES (6)..(7): Xaa is C or S
HVPKPXXAPTKLSAISVLYLDDSSNVILKNYQN

SEQ ID NO: 92731 - protein, 35 aa, Artificial Sequence
  Cyclic GFR-binding peptide
  MOD_RES (5)..(6): Xaa is C or S
ASKAXXVPTKLSAISILYLDKGVVTYLKNYQGMAV

SEQ ID NO: 92732 - protein, 26 aa, Artificial Sequence
  Cyclic GFR-binding peptide
PTKMSAISMLYLNDKQQIILKNYQGM

SEQ ID NO: 92733 - protein, 27 aa, Artificial Sequence
  Cyclic GFR-binding peptide
APVKTSAISMLYLDNGRVLLLKNYQMI

SEQ ID NO: 92734 - protein, 25 aa, Artificial Sequence
  Cyclic GFR-binding peptide
SAISILYLDAANNVVLKNYQDMVVE

SEQ ID NO: 92735 - protein, 30 aa, Artificial Sequence
  Cyclic GFR-binding peptide
  MOD_RES (28)..(30): Xaa is C or S
MSAISMLYLNDKQQIILKNYQGMVVDRXGX

SEQ ID NO: 92736 - protein, 26 aa, Artificial Sequence
  Cyclic GFR-binding peptide
VKTSAISMLYLDNGRVLLLKNYQMIV

SEQ ID NO: 92737 - protein, 32 aa, Artificial Sequence; identical to SEQ ID NO: 37934
  Cyclic GFR-binding peptide
  MOD_RES (1)..(32): Xaa is C or S

SEQ ID NO: 92738 - protein, 29 aa, Artificial Sequence
  Cyclic GFR-binding peptide
  MOD_RES (2)..(3): Xaa is C or S
AXXVPTKLSAISILYLDKGVVTYLKNYQG

SEQ ID NO: 92739 - protein, 31 aa, Artificial Sequence
  Cyclic GFR-binding peptide
  MOD_RES (2)..(3): Xaa is C or S
TXXAPVKTSAISMLYLDNGRVLLLKNYQMIV

SEQ ID NO: 92740 - protein, 21 aa, Artificial Sequence
  Cyclic GFR-binding peptide
SAISILYLDENKNVVLKNYQN

SEQ ID NO: 92741 - protein, 20 aa, Artificial Sequence
  Cyclic GFR-binding peptide
SAISMLYLDNGRVLLLKNYQ

SEQ ID NO: 92742 - protein, 34 aa, Artificial Sequence; identical to SEQ ID NO: 37941
  Cyclic GFR-binding peptide
  MOD_RES (32)..(34): Xaa is C or S

SEQ ID NO: 92743 - protein, 35 aa, Artificial Sequence; identical to SEQ ID NO: 37943
  Cyclic GFR-binding peptide
  MOD_RES (4)..(5): Xaa is C or S

SEQ ID NO: 92744 - protein, 37 aa, Artificial Sequence; identical to SEQ ID NO: 37944
  Cyclic GFR-binding peptide
  MOD_RES (3)..(4)..(36): Xaa is C or S

SEQ ID NO: 92745 - protein, 36 aa, Artificial Sequence
  Cyclic GFR-binding peptide
  MOD_RES (6)..(7): Xaa is C or S
GIPEPXXVPEKMSAISILYLDENKNVVLKNYQNMTV

SEQ ID NO: 92746 - protein, 36 aa, Artificial Sequence; identical to SEQ ID NO: 37945
  Cyclic GFR-binding peptide
  MOD_RES (2)..(3)..(35): Xaa is C or S

SEQ ID NO: 92747 - protein, 26 aa, Artificial Sequence
  Cyclic GFR-binding peptide
  MOD_RES (1)..(1): Xaa is C or S
XAPVKTSAISMLYLDNGRVLLLKNYQ

SEQ ID NO: 92748 - protein, 30 aa, Artificial Sequence; identical to SEQ ID NO: 37947
  Cyclic GFR-binding peptide

SEQ ID NO: 92749 - protein, 32 aa, Artificial Sequence
  Cyclic GFR-binding peptide
  MOD_RES (6)..(7): Xaa is C or S
GIPEPXXVPEKMSAISILYLDENKNVVLKNYQ

SEQ ID NO: 92750 - protein, 40 aa, Artificial Sequence; identical to SEQ ID NO: 37948
  Cyclic GFR-binding peptide
  MOD_RES (6)..(7)..(39): Xaa is C or S

SEQ ID NO: 92751 - protein, 34 aa, Artificial Sequence
  Cyclic GFR-binding peptide
  MOD_RES (31)..(33): Xaa is C or S
PTKLSAISILYLDKGVVTYLKNYQGMAVSEXGXR

SEQ ID NO: 92752 - protein, 27 aa, Artificial Sequence
  Cyclic GFR-binding peptide
LSAISILYLDKGVVTYLKNYQGMAVSE

SEQ ID NO: 92753 - protein, 33 aa, Artificial Sequence; identical to SEQ ID NO: 37950
  Cyclic GFR-binding peptide
  MOD_RES (32)..(32): Xaa is C or S

SEQ ID NO: 92754 - protein, 36 aa, Artificial Sequence; identical to SEQ ID NO: 37952
  Cyclic GFR-binding peptide
  MOD_RES (5)..(6): Xaa is C or S

SEQ ID NO: 92755 - protein, 30 aa, Artificial Sequence
  Cyclic GFR-binding peptide
  MOD_RES (29)..(29): Xaa is C or S
KLSAISILYLDKGVVTYLKNYQGMAVSEXG

SEQ ID NO: 92756 - protein, 32 aa, Artificial Sequence
  Cyclic GFR-binding peptide
  MOD_RES (4)..(5): Xaa is C or S
AGPXXTPTKMSAISMLYLNDKQQIILKNYQGM

SEQ ID NO: 92757 - protein, 31 aa, Artificial Sequence
  Cyclic GFR-binding peptide
  MOD_RES (28)..(30): Xaa is C or S
KTSAISMLYLDNGRVLLLKNYQMIVEEXGXL

SEQ ID NO: 92758 - protein, 32 aa, Artificial Sequence
  Cyclic GFR-binding peptide
  MOD_RES (5)..(6): Xaa is C or S
VPSTXXAPVKTSAISMLYLDNGRVLLLKNYQM

SEQ ID NO: 92759 - protein, 39 aa, Artificial Sequence; identical to SEQ ID NO: 37961
  Cyclic GFR-binding peptide
  MOD_RES (6)..(7)..(38): Xaa is C or S

SEQ ID NO: 92760 - protein, 28 aa, Artificial Sequence
  Cyclic GFR-binding peptide
VKTSAISMLYLDNGRVLLLKNYQMIVEE

SEQ ID NO: 92761 - protein, 24 aa, Artificial Sequence
  Cyclic GFR-binding peptide
TSAISMLYLDNGRVLLLKNYQMIV

SEQ ID NO: 92762 - protein, 27 aa, Artificial Sequence
  Cyclic GFR-binding peptide
VPTKLSAISILYLDKGVVTYLKNYQGM

SEQ ID NO: 92763 - protein, 32 aa, Artificial Sequence
  Cyclic GFR-binding peptide
  MOD_RES (3)..(4): Xaa is C or S
KAXXVPTKLSAISILYLDKGVVTYLKNYQGMA

SEQ ID NO: 92764 - protein, 32 aa, Artificial Sequence
  Cyclic GFR-binding peptide
  MOD_RES (2)..(3): Xaa is C or S
PXXTPTKMSAISMLYLNDKQQIILKNYQGMVV

SEQ ID NO: 92765 - protein, 31 aa, Artificial Sequence
  Cyclic GFR-binding peptide
  MOD_RES (4)..(5): Xaa is C or S
PEPXXVPEKMSAISILYLDENKNVVLKNYQN

SEQ ID NO: 92766 - protein, 29 aa, Artificial Sequence
  Cyclic GFR-binding peptide
EKMSAISILYLDENKNVVLKNYQNMTVES

SEQ ID NO: 92767 - protein, 24 aa, Artificial Sequence
  Cyclic GFR-binding peptide
PTKMSAISMLYLNDKQQIILKNYQ

SEQ ID NO: 92768 - protein, 36 aa, Artificial Sequence; identical to SEQ ID NO: 37966
  Cyclic GFR-binding peptide
  MOD_RES (4)..(5): Xaa is C or S

SEQ ID NO: 92769 - protein, 40 aa, Artificial Sequence; identical to SEQ ID NO: 37967
  Cyclic GFR-binding peptide
  MOD_RES (5)..(6)..(37)..(39): Xaa is C or S

SEQ ID NO: 92770 - protein, 41 aa, Artificial Sequence; identical to SEQ ID NO: 37968
  Cyclic GFR-binding peptide
  MOD_RES (5)..(6)..(38)..(40): Xaa is C or S

SEQ ID NO: 92771 - protein, 39 aa, Artificial Sequence; identical to SEQ ID NO: 37969
  Cyclic GFR-binding peptide
  MOD_RES (5)..(6)..(38): Xaa is C or S

SEQ ID NO: 92772 - protein, 32 aa, Artificial Sequence
  Cyclic GFR-binding peptide
  MOD_RES (5)..(6): Xaa is C or S
SAGPXXTPTKMSAISMLYLNDKQQIILKNYQG

SEQ ID NO: 92773 - protein, 33 aa, Artificial Sequence; identical to SEQ ID NO: 37971
  Cyclic GFR-binding peptide
  MOD_RES (2)..(3): Xaa is C or S

SEQ ID NO: 92774 - protein, 27 aa, Artificial Sequence
  Cyclic GFR-binding peptide
VKTSAISMLYLDNGRVLLLKNYQMIVE

SEQ ID NO: 92775 - protein, 37 aa, Artificial Sequence; identical to SEQ ID NO: 37974
  Cyclic GFR-binding peptide
  MOD_RES (5)..(6): Xaa is C or S

SEQ ID NO: 92776 - protein, 29 aa, Artificial Sequence
  Cyclic GFR-binding peptide
  MOD_RES (2)..(3): Xaa is C or S
SXXVPARLSAISILYLDAANNVVLKNYQD

SEQ ID NO: 92777 - protein, 32 aa, Artificial Sequence
  Cyclic GFR-binding peptide
  MOD_RES (6)..(7): Xaa is C or S
KASKAXXVPTKLSAISILYLDKGVVTYLKNYQ

SEQ ID NO: 92778 - protein, 28 aa, Artificial Sequence
  Cyclic GFR-binding peptide
APVKTSAISMLYLDNGRVLLLKNYQMIV

SEQ ID NO: 92779 - protein, 30 aa, Artificial Sequence
  Cyclic GFR-binding peptide
  MOD_RES (28)..(30): Xaa is C or S
KTSAISMLYLDNGRVLLLKNYQMIVEEXGX

SEQ ID NO: 92780 - protein, 28 aa, Artificial Sequence
  Cyclic GFR-binding peptide
ARLSAISILYLDAANNVVLKNYQDMVVE

SEQ ID NO: 92781 - protein, 29 aa, Artificial Sequence
  Cyclic GFR-binding peptide
  MOD_RES (1)..(2): Xaa is C or S
XXTPTKMSAISMLYLNDKQQIILKNYQGM

SEQ ID NO: 92782 - protein, 36 aa, Artificial Sequence; identical to SEQ ID NO: 37986
  Cyclic GFR-binding peptide
  MOD_RES (1)..(33)..(35): Xaa is C or S

SEQ ID NO: 92783 - protein, 27 aa, Artificial Sequence
  Cyclic GFR-binding peptide
PEKMSAISILYLDENKNVVLKNYQNMT

SEQ ID NO: 92784 - protein, 23 aa, Artificial Sequence
  Cyclic GFR-binding peptide
SAISILYLDAANNVVLKNYQDMV

SEQ ID NO: 92785 - protein, 26 aa, Artificial Sequence
  Cyclic GFR-binding peptide
KTSAISMLYLDNGRVLLLKNYQMIVE

SEQ ID NO: 92786 - protein, 29 aa, Artificial Sequence
  Cyclic GFR-binding peptide
  MOD_RES (2)..(3): Xaa is C or S
PXXVPEKMSAISILYLDENKNVVLKNYQN

SEQ ID NO: 92787 - protein, 26 aa, Artificial Sequence
  Cyclic GFR-binding peptide
APVKTSAISMLYLDNGRVLLLKNYQM

SEQ ID NO: 92788 - protein, 34 aa, Artificial Sequence; identical to SEQ ID NO: 37989
  Cyclic GFR-binding peptide
  MOD_RES (3)..(4): Xaa is C or S

SEQ ID NO: 92789 - protein, 38 aa, Artificial Sequence; identical to SEQ ID NO: 37993
  Cyclic GFR-binding peptide
  MOD_RES (2)..(3)..(35)..(37): Xaa is C or S

SEQ ID NO: 92790 - protein, 27 aa, Artificial Sequence
  Cyclic GFR-binding peptide
PARLSAISILYLDAANNVVLKNYQDMV

SEQ ID NO: 92791 - protein, 37 aa, Artificial Sequence; identical to SEQ ID NO: 37998
  Cyclic GFR-binding peptide
  MOD_RES (6)..(7): Xaa is C or S

SEQ ID NO: 92792 - protein, 30 aa, Artificial Sequence
  Cyclic GFR-binding peptide
  MOD_RES (27)..(29): Xaa is C or S
SAISILYLDAANNVVLKNYQDMVVEAXGXR

SEQ ID NO: 92793 - protein, 42 aa, Artificial Sequence; identical to SEQ ID NO: 38000
  Cyclic GFR-binding peptide
  MOD_RES (6)..(7)..(39)..(41): Xaa is C or S

SEQ ID NO: 92794 - protein, 26 aa, Artificial Sequence
  Cyclic GFR-binding peptide
  MOD_RES (1)..(1): Xaa is C or S
XTPTKMSAISMLYLNDKQQIILKNYQ

SEQ ID NO: 92795 - protein, 33 aa, Artificial Sequence; identical to SEQ ID NO: 38005
  Cyclic GFR-binding peptide
  MOD_RES (1)..(33): Xaa is C or S

SEQ ID NO: 92796 - protein, 25 aa, Artificial Sequence
  Cyclic GFR-binding peptide
LSAISILYLDAANNVVLKNYQDMVV

SEQ ID NO: 92797 - protein, 33 aa, Artificial Sequence
  Cyclic GFR-binding peptide
  MOD_RES (5)..(6): Xaa is C or S
VPSTXXAPVKTSAISMLYLDNGRVLLLKNYQMI

SEQ ID NO: 92798 - protein, 28 aa, Artificial Sequence
  Cyclic GFR-binding peptide
  MOD_RES (1)..(1): Xaa is C or S
XTPTKMSAISMLYLNDKQQIILKNYQGM

SEQ ID NO: 92799 - protein, 34 aa, Artificial Sequence; identical to SEQ ID NO: 38016
  Cyclic GFR-binding peptide
  MOD_RES (1)..(2)..(34): Xaa is C or S

SEQ ID NO: 92800 - protein, 31 aa, Artificial Sequence
  Cyclic GFR-binding peptide
  MOD_RES (5)..(6): Xaa is C or S
VPSTXXAPVKTSAISMLYLDNGRVLLLKNYQ

SEQ ID NO: 92801 - protein, 30 aa, Artificial Sequence
  Cyclic GFR-binding peptide
PTKLSAISILYLDKGVVTYLKNYQGMAVSE

SEQ ID NO: 92802 - protein, 41 aa, Artificial Sequence; identical to SEQ ID NO: 38022
  Cyclic GFR-binding peptide
  MOD_RES (5)..(6)..(38)..(40): Xaa is C or S

SEQ ID NO: 92803 - protein, 34 aa, Artificial Sequence; identical to SEQ ID NO: 38023
  Cyclic GFR-binding peptide
  MOD_RES (1)..(32)..(34): Xaa is C or S

SEQ ID NO: 92804 - protein, 34 aa, Artificial Sequence
  Cyclic GFR-binding peptide
  MOD_RES (6)..(7): Xaa is C or S
GIPEPXXVPEKMSAISILYLDENKNVVLKNYQNM

SEQ ID NO: 92805 - protein, 38 aa, Artificial Sequence; identical to SEQ ID NO: 38027
  Cyclic GFR-binding peptide
  MOD_RES (5)..(6)..(38): Xaa is C or S

SEQ ID NO: 92806 - protein, 27 aa, Artificial Sequence
  Cyclic GFR-binding peptide
  MOD_RES (1)..(1): Xaa is C or S
XAPVKTSAISMLYLDNGRVLLLKNYQM

SEQ ID NO: 92807 - protein, 26 aa, Artificial Sequence
  Cyclic GFR-binding peptide
KMSAISMLYLNDKQQIILKNYQGMVV

SEQ ID NO: 92808 - protein, 31 aa, Artificial Sequence
  Cyclic GFR-binding peptide
  MOD_RES (29)..(31): Xaa is C or S
KMSAISILYLDENKNVVLKNYQNMTVESXAX

SEQ ID NO: 92809 - protein, 23 aa, Artificial Sequence
  Cyclic GFR-binding peptide
SAISILYLDENKNVVLKNYQNMT

SEQ ID NO: 92810 - protein, 38 aa, Artificial Sequence; identical to SEQ ID NO: 38034
  Cyclic GFR-binding peptide
  MOD_RES (5)..(6)..(38): Xaa is C or S

SEQ ID NO: 92811 - protein, 33 aa, Artificial Sequence
  Cyclic GFR-binding peptide
  MOD_RES (6)..(7): Xaa is C or S
RVPSTXXAPVKTSAISMLYLDNGRVLLLKNYQM

SEQ ID NO: 92812 - protein, 36 aa, Artificial Sequence; identical to SEQ ID NO: 38037
  Cyclic GFR-binding peptide
  MOD_RES (1)..(2)..(33)..(35): Xaa is C or S

SEQ ID NO: 92813 - protein, 22 aa, Artificial Sequence
  Cyclic GFR-binding peptide
KMSAISILYLDENKNVVLKNYQ

SEQ ID NO: 92814 - protein, 33 aa, Artificial Sequence
  Cyclic GFR-binding peptide
  MOD_RES (6)..(7): Xaa is C or S
KASKAXXVPTKLSAISILYLDKGVVTYLKNYQG

SEQ ID NO: 92815 - protein, 30 aa, Artificial Sequence
  Cyclic GFR-binding peptide
  MOD_RES (27)..(29): Xaa is C or S
TSAISMLYLDNGRVLLLKNYQMIVEEXGXL

SEQ ID NO: 92816 - protein, 34 aa, Artificial Sequence
  Cyclic GFR-binding peptide
  MOD_RES (31)..(33): Xaa is C or S
PTKMSAISMLYLNDKQQIILKNYQGMVVDRXGXS

SEQ ID NO: 92817 - protein, 31 aa, Artificial Sequence
  Cyclic GFR-binding peptide
  MOD_RES (30)..(30): Xaa is C or S
TKMSAISMLYLNDKQQIILKNYQGMVVDRXG

SEQ ID NO: 92818 - protein, 28 aa, Artificial Sequence
  Cyclic GFR-binding peptide
  MOD_RES (28)..(28): Xaa is C or S
MSAISILYLDENKNVVLKNYQNMTVESX

SEQ ID NO: 92819 - protein, 34 aa, Artificial Sequence; identical to SEQ ID NO: 38042
  Cyclic GFR-binding peptide
  MOD_RES (2)..(3): Xaa is C or S

SEQ ID NO: 92820 - protein, 34 aa, Artificial Sequence; identical to SEQ ID NO: 38044
  Cyclic GFR-binding peptide
  MOD_RES (2)..(3): Xaa is C or S

SEQ ID NO: 92821 - protein, 37 aa, Artificial Sequence; identical to SEQ ID NO: 38046
  Cyclic GFR-binding peptide
  MOD_RES (4)..(5)..(37): Xaa is C or S

SEQ ID NO: 92822 - protein, 32 aa, Artificial Sequence
  Cyclic GFR-binding peptide
  MOD_RES (29)..(31): Xaa is C or S
VKTSAISMLYLDNGRVLLLKNYQMIVEEXGXL

SEQ ID NO: 92823 - protein, 31 aa, Artificial Sequence
  Cyclic GFR-binding peptide
  MOD_RES (29)..(31): Xaa is C or S
KLSAISILYLDKGVVTYLKNYQGMAVSEXGX

SEQ ID NO: 92824 - protein, 39 aa, Artificial Sequence; identical to SEQ ID NO: 38048
  Cyclic GFR-binding peptide
  MOD_RES (6)..(7)..(39): Xaa is C or S

SEQ ID NO: 92825 - protein, 39 aa, Artificial Sequence; identical to SEQ ID NO: 38050
  Cyclic GFR-binding peptide
  MOD_RES (4)..(5)..(37)..(39): Xaa is C or S

SEQ ID NO: 92826 - protein, 24 aa, Artificial Sequence
  Cyclic GFR-binding peptide
SAISMLYLDNGRVLLLKNYQMIVE

SEQ ID NO: 92827 - protein, 39 aa, Artificial Sequence; identical to SEQ ID NO: 38053
  Cyclic GFR-binding peptide
  MOD_RES (5)..(6)..(38): Xaa is C or S

SEQ ID NO: 92828 - protein, 26 aa, Artificial Sequence
  Cyclic GFR-binding peptide
SAISILYLDAANNVVLKNYQDMVVEA

SEQ ID NO: 92829 - protein, 30 aa, Artificial Sequence
  Cyclic GFR-binding peptide
  MOD_RES (27)..(29): Xaa is C or S
SAISMLYLNDKQQIILKNYQGMVVDRXGXS

SEQ ID NO: 92830 - protein, 34 aa, Artificial Sequence
  Cyclic GFR-binding peptide
  MOD_RES (4)..(5): Xaa is C or S
PSTXXAPVKTSAISMLYLDNGRVLLLKNYQMIVE

SEQ ID NO: 92831 - protein, 38 aa, Artificial Sequence; identical to SEQ ID NO: 38060
  Cyclic GFR-binding peptide
  MOD_RES (6)..(7): Xaa is C or S

SEQ ID NO: 92832 - protein, 33 aa, Artificial Sequence
  Cyclic GFR-binding peptide
  MOD_RES (5)..(6): Xaa is C or S
IPEPXXVPEKMSAISILYLDENKNVVLKNYQNM

SEQ ID NO: 92833 - protein, 30 aa, Artificial Sequence
  Cyclic GFR-binding peptide
  MOD_RES (2)..(3): Xaa is C or S
SXXVPARLSAISILYLDAANNVVLKNYQDM

SEQ ID NO: 92834 - protein, 30 aa, Artificial Sequence
  Cyclic GFR-binding peptide
  MOD_RES (30)..(30): Xaa is C or S
EKMSAISILYLDENKNVVLKNYQNMTVESX

SEQ ID NO: 92835 - protein, 30 aa, Artificial Sequence
  Cyclic GFR-binding peptide
  MOD_RES (30)..(30): Xaa is C or S
TKMSAISMLYLNDKQQIILKNYQGMVVDRX

SEQ ID NO: 92836 - protein, 33 aa, Artificial Sequence
  Cyclic GFR-binding peptide
  MOD_RES (30)..(32): Xaa is C or S
EKMSAISILYLDENKNVVLKNYQNMTVESXAXR

SEQ ID NO: 92837 - protein, 38 aa, Artificial Sequence; identical to SEQ ID NO: 38067
  Cyclic GFR-binding peptide
  MOD_RES (3)..(4)..(35)..(37): Xaa is C or S

SEQ ID NO: 92838 - protein, 33 aa, Artificial Sequence
  Cyclic GFR-binding peptide
  MOD_RES (5)..(6): Xaa is C or S
APASXXVPARLSAISILYLDAANNVVLKNYQDM

SEQ ID NO: 92839 - protein, 33 aa, Artificial Sequence; identical to SEQ ID NO: 38068
  Cyclic GFR-binding peptide
  MOD_RES (32)..(32): Xaa is C or S

SEQ ID NO: 92840 - protein, 35 aa, Artificial Sequence
  Cyclic GFR-binding peptide
  MOD_RES (6)..(7): Xaa is C or S
AAPASXXVPARLSAISILYLDAANNVVLKNYQDMV

SEQ ID NO: 92841 - protein, 20 aa, Artificial Sequence
  Cyclic GFR-binding peptide
SAISMLYLDNGRVLLLKNYQ

SEQ ID NO: 92842 - protein, 30 aa, Artificial Sequence
  Cyclic GFR-binding peptide
  MOD_RES (1)..(2): Xaa is C or S
XXAPVKTSAISMLYLDNGRVLLLKNYQMIV

SEQ ID NO: 92843 - protein, 30 aa, Artificial Sequence
  Cyclic GFR-binding peptide
  MOD_RES (3)..(4): Xaa is C or S
KAXXVPTKLSAISILYLDKGVVTYLKNYQG

SEQ ID NO: 92844 - protein, 35 aa, Artificial Sequence; identical to SEQ ID NO: 38078
  Cyclic GFR-binding peptide
  MOD_RES (1)..(2)..(34): Xaa is C or S

SEQ ID NO: 92845 - protein, 33 aa, Artificial Sequence
  Cyclic GFR-binding peptide
  MOD_RES (4)..(5): Xaa is C or S
SKAXXVPTKLSAISILYLDKGVVTYLKNYQGMA

SEQ ID NO: 92846 - protein, 33 aa, Artificial Sequence; identical to SEQ ID NO: 38080
  Cyclic GFR-binding peptide
  MOD_RES (32)..(32): Xaa is C or S

SEQ ID NO: 92847 - protein, 31 aa, Artificial Sequence
  Cyclic GFR-binding peptide
  MOD_RES (30)..(30): Xaa is C or S
ARLSAISILYLDAANNVVLKNYQDMVVEAXG

SEQ ID NO: 92848 - protein, 31 aa, Artificial Sequence
  Cyclic GFR-binding peptide
  MOD_RES (3)..(4): Xaa is C or S
STXXAPVKTSAISMLYLDNGRVLLLKNYQMI

SEQ ID NO: 92849 - protein, 27 aa, Artificial Sequence
  Cyclic GFR-binding peptide
  MOD_RES (27)..(27): Xaa is C or S
SAISILYLDENKNVVLKNYQNMTVESX

SEQ ID NO: 92850 - protein, 28 aa, Artificial Sequence
  Cyclic GFR-binding peptide
KMSAISILYLDENKNVVLKNYQNMTVES

SEQ ID NO: 92851 - protein, 25 aa, Artificial Sequence
  Cyclic GFR-binding peptide
VPEKMSAISILYLDENKNVVLKNYQ

SEQ ID NO: 92852 - protein, 39 aa, Artificial Sequence; identical to SEQ ID NO: 38085
  Cyclic GFR-binding peptide
  MOD_RES (3)..(4)..(36)..(38): Xaa is C or S

SEQ ID NO: 92853 - protein, 29 aa, Artificial Sequence
  Cyclic GFR-binding peptide
  MOD_RES (1)..(1): Xaa is C or S
XTPTKMSAISMLYLNDKQQIILKNYQGMV

SEQ ID NO: 92854 - protein, 22 aa, Artificial Sequence
  Cyclic GFR-binding peptide
LSAISILYLDKGVVTYLKNYQG

SEQ ID NO: 92855 - protein, 28 aa, Artificial Sequence
  Cyclic GFR-binding peptide
TPTKMSAISMLYLNDKQQIILKNYQGMV

SEQ ID NO: 92856 - protein, 29 aa, Artificial Sequence
  Cyclic GFR-binding peptide
  MOD_RES (1)..(2): Xaa is C or S
XXVPARLSAISILYLDAANNVVLKNYQDM

SEQ ID NO: 92857 - protein, 36 aa, Artificial Sequence; identical to SEQ ID NO: 38093
  Cyclic GFR-binding peptide
  MOD_RES (5)..(6): Xaa is C or S

SEQ ID NO: 92858 - protein, 31 aa, Artificial Sequence; identical to SEQ ID NO: 38092
  Cyclic GFR-binding peptide

SEQ ID NO: 92859 - protein, 31 aa, Artificial Sequence
  Cyclic GFR-binding peptide
  MOD_RES (31)..(31): Xaa is C or S
PEKMSAISILYLDENKNVVLKNYQNMTVESX

SEQ ID NO: 92860 - protein, 27 aa, Artificial Sequence
  Cyclic GFR-binding peptide
  MOD_RES (27)..(27): Xaa is C or S
TSAISMLYLDNGRVLLLKNYQMIVEEX

SEQ ID NO: 92861 - protein, 39 aa, Artificial Sequence; identical to SEQ ID NO: 38098
  Cyclic GFR-binding peptide
  MOD_RES (6)..(7)..(39): Xaa is C or S

SEQ ID NO: 92862 - protein, 32 aa, Artificial Sequence
  Cyclic GFR-binding peptide
  MOD_RES (4)..(5): Xaa is C or S
PSTXXAPVKTSAISMLYLDNGRVLLLKNYQMI

SEQ ID NO: 92863 - protein, 36 aa, Artificial Sequence
  Cyclic GFR-binding peptide
  MOD_RES (6)..(7): Xaa is C or S
RVPSTXXAPVKTSAISMLYLDNGRVLLLKNYQMIVE

SEQ ID NO: 92864 - protein, 32 aa, Artificial Sequence; identical to SEQ ID NO: 38101
  Cyclic GFR-binding peptide
  MOD_RES (32)..(32): Xaa is C or S

SEQ ID NO: 92865 - protein, 26 aa, Artificial Sequence
  Cyclic GFR-binding peptide
VPTKLSAISILYLDKGVVTYLKNYQG

SEQ ID NO: 92866 - protein, 34 aa, Artificial Sequence; identical to SEQ ID NO: 38104
  Cyclic GFR-binding peptide
  MOD_RES (3)..(4): Xaa is C or S

SEQ ID NO: 92867 - protein, 27 aa, Artificial Sequence
  Cyclic GFR-binding peptide
KTSAISMLYLDNGRVLLLKNYQMIVEE

SEQ ID NO: 92868 - protein, 29 aa, Artificial Sequence
  Cyclic GFR-binding peptide
  MOD_RES (1)..(2): Xaa is C or S
XXVPEKMSAISILYLDENKNVVLKNYQNM

SEQ ID NO: 92869 - protein, 25 aa, Artificial Sequence
  Cyclic GFR-binding peptide
TPTKMSAISMLYLNDKQQIILKNYQ

SEQ ID NO: 92870 - protein, 35 aa, Artificial Sequence; identical to SEQ ID NO: 38108
  Cyclic GFR-binding peptide
  MOD_RES (1)..(2)..(34): Xaa is C or S

SEQ ID NO: 92871 - protein, 36 aa, Artificial Sequence; identical to SEQ ID NO: 38111
  Cyclic GFR-binding peptide
  MOD_RES (5)..(6): Xaa is C or S

SEQ ID NO: 92872 - protein, 24 aa, Artificial Sequence
  Cyclic GFR-binding peptide
LSAISILYLDKGVVTYLKNYQGMA

SEQ ID NO: 92873 - protein, 37 aa, Artificial Sequence; identical to SEQ ID NO: 38113
  Cyclic GFR-binding peptide
  MOD_RES (5)..(6): Xaa is C or S

SEQ ID NO: 92874 - protein, 26 aa, Artificial Sequence
  Cyclic GFR-binding peptide
LSAISILYLDAANNVVLKNYQDMVVE

SEQ ID NO: 92875 - protein, 21 aa, Artificial Sequence
  Cyclic GFR-binding peptide
SAISMLYLDNGRVLLLKNYQM

SEQ ID NO: 92876 - protein, 38 aa, Artificial Sequence; identical to SEQ ID NO: 38115
  Cyclic GFR-binding peptide
  MOD_RES (4)..(5)..(37): Xaa is C or S

SEQ ID NO: 92877 - protein, 30 aa, Artificial Sequence
  Cyclic GFR-binding peptide
  MOD_RES (1)..(1): Xaa is C or S
XVPTKLSAISILYLDKGVVTYLKNYQGMAV

SEQ ID NO: 92878 - protein, 31 aa, Artificial Sequence
  Cyclic GFR-binding peptide
  MOD_RES (3)..(4): Xaa is C or S
EPXXVPEKMSAISILYLDENKNVVLKNYQNM

SEQ ID NO: 92879 - protein, 33 aa, Artificial Sequence
  Cyclic GFR-binding peptide
  MOD_RES (31)..(33): Xaa is C or S
PTKMSAISMLYLNDKQQIILKNYQGMVVDRXGX

SEQ ID NO: 92880 - protein, 26 aa, Artificial Sequence
  Cyclic GFR-binding peptide
PEKMSAISILYLDENKNVVLKNYQNM

SEQ ID NO: 92881 - protein, 37 aa, Artificial Sequence; identical to SEQ ID NO: 38119
  Cyclic GFR-binding peptide
  MOD_RES (2)..(3)..(35)..(37): Xaa is C or S

SEQ ID NO: 92882 - protein, 32 aa, Artificial Sequence
  Cyclic GFR-binding peptide
  MOD_RES (4)..(5): Xaa is C or S
PEPXXVPEKMSAISILYLDENKNVVLKNYQNM

SEQ ID NO: 92883 - protein, 37 aa, Artificial Sequence; identical to SEQ ID NO: 38121
  Cyclic GFR-binding peptide
  MOD_RES (4)..(5)..(37): Xaa is C or S

SEQ ID NO: 92884 - protein, 41 aa, Artificial Sequence; identical to SEQ ID NO: 38122
  Cyclic GFR-binding peptide
  MOD_RES (6)..(7)..(39)..(41): Xaa is C or S

SEQ ID NO: 92885 - protein, 22 aa, Artificial Sequence
  Cyclic GFR-binding peptide
TSAISMLYLDNGRVLLLKNYQM

SEQ ID NO: 92886 - protein, 27 aa, Artificial Sequence
  Cyclic GFR-binding peptide
EKMSAISILYLDENKNVVLKNYQNMTV

SEQ ID NO: 92887 - protein, 31 aa, Artificial Sequence
  Cyclic GFR-binding peptide
  MOD_RES (4)..(5): Xaa is C or S
AGPXXTPTKMSAISMLYLNDKQQIILKNYQG

SEQ ID NO: 92888 - protein, 28 aa, Artificial Sequence
  Cyclic GFR-binding peptide
  MOD_RES (1)..(1): Xaa is C or S
XVPARLSAISILYLDAANNVVLKNYQDM

SEQ ID NO: 92889 - protein, 32 aa, Artificial Sequence; identical to SEQ ID NO: 38126
  Cyclic GFR-binding peptide
  MOD_RES (1)..(2): Xaa is C or S

SEQ ID NO: 92890 - protein, 31 aa, Artificial Sequence; identical to SEQ ID NO: 38130
  Cyclic GFR-binding peptide

SEQ ID NO: 92891 - protein, 28 aa, Artificial Sequence
  Cyclic GFR-binding peptide
VPEKMSAISILYLDENKNVVLKNYQNMT

SEQ ID NO: 92892 - protein, 35 aa, Artificial Sequence; identical to SEQ ID NO: 38131
  Cyclic GFR-binding peptide
  MOD_RES (4)..(5): Xaa is C or S

SEQ ID NO: 92893 - protein, 33 aa, Artificial Sequence
  Cyclic GFR-binding peptide
  MOD_RES (6)..(7): Xaa is C or S
AAPASXXVPARLSAISILYLDAANNVVLKNYQD

SEQ ID NO: 92894 - protein, 23 aa, Artificial Sequence
  Cyclic GFR-binding peptide
RLSAISILYLDAANNVVLKNYQD

SEQ ID NO: 92895 - protein, 34 aa, Artificial Sequence; identical to SEQ ID NO: 38138
  Cyclic GFR-binding peptide
  MOD_RES (3)..(4): Xaa is C or S

SEQ ID NO: 92896 - protein, 30 aa, Artificial Sequence
  Cyclic GFR-binding peptide
  MOD_RES (2)..(3): Xaa is C or S
TXXAPVKTSAISMLYLDNGRVLLLKNYQMI

SEQ ID NO: 92897 - protein, 41 aa, Artificial Sequence; identical to SEQ ID NO: 38139
  Cyclic GFR-binding peptide
  MOD_RES (5)..(6)..(38)..(40): Xaa is C or S

SEQ ID NO: 92898 - protein, 33 aa, Artificial Sequence; identical to SEQ ID NO: 38140
  Cyclic GFR-binding peptide
  MOD_RES (1)..(33): Xaa is C or S

SEQ ID NO: 92899 - protein, 35 aa, Artificial Sequence; identical to SEQ ID NO: 38141
  Cyclic GFR-binding peptide
  MOD_RES (1)..(33)..(35): Xaa is C or S

SEQ ID NO: 92900 - protein, 31 aa, Artificial Sequence
  Cyclic GFR-binding peptide
  MOD_RES (5)..(6): Xaa is C or S
ASKAXXVPTKLSAISILYLDKGVVTYLKNYQ

SEQ ID NO: 92901 - protein, 25 aa, Artificial Sequence
  Cyclic GFR-binding peptide
SAISILYLDENKNVVLKNYQNMTVE

SEQ ID NO: 92902 - protein, 30 aa, Artificial Sequence
  Cyclic GFR-binding peptide
  MOD_RES (29)..(29): Xaa is C or S
KMSAISMLYLNDKQQIILKNYQGMVVDRXG

SEQ ID NO: 92903 - protein, 22 aa, Artificial Sequence
  Cyclic GFR-binding peptide
KTSAISMLYLDNGRVLLLKNYQ

SEQ ID NO: 92904 - protein, 34 aa, Artificial Sequence; identical to SEQ ID NO: 38144
  Cyclic GFR-binding peptide
  MOD_RES (1)..(2)..(34): Xaa is C or S

SEQ ID NO: 92905 - protein, 25 aa, Artificial Sequence
  Cyclic GFR-binding peptide
RLSAISILYLDAANNVVLKNYQDMV

SEQ ID NO: 92906 - protein, 26 aa, Artificial Sequence
  Cyclic GFR-binding peptide
SAISILYLDENKNVVLKNYQNMTVES

SEQ ID NO: 92907 - protein, 28 aa, Artificial Sequence
  Cyclic GFR-binding peptide
PTKLSAISILYLDKGVVTYLKNYQGMAV

SEQ ID NO: 92908 - protein, 37 aa, Artificial Sequence; identical to SEQ ID NO: 38149
  Cyclic GFR-binding peptide
  MOD_RES (6)..(7): Xaa is C or S

SEQ ID NO: 92909 - protein, 27 aa, Artificial Sequence
  Cyclic GFR-binding peptide
KLSAISILYLDKGVVTYLKNYQGMAVS

SEQ ID NO: 92910 - protein, 33 aa, Artificial Sequence; identical to SEQ ID NO: 38151
  Cyclic GFR-binding peptide
  MOD_RES (2)..(3): Xaa is C or S

SEQ ID NO: 92911 - protein, 28 aa, Artificial Sequence
  Cyclic GFR-binding peptide
  MOD_RES (1)..(1): Xaa is C or S
XVPEKMSAISILYLDENKNVVLKNYQNM

SEQ ID NO: 92912 - protein, 32 aa, Artificial Sequence
  Cyclic GFR-binding peptide
  MOD_RES (2)..(3): Xaa is C or S
AXXVPTKLSAISILYLDKGVVTYLKNYQGMAV

SEQ ID NO: 92913 - protein, 24 aa, Artificial Sequence
  Cyclic GFR-binding peptide
EKMSAISILYLDENKNVVLKNYQN

SEQ ID NO: 92914 - protein, 31 aa, Artificial Sequence
  Cyclic GFR-binding peptide
  MOD_RES (31)..(31): Xaa is C or S
PTKMSAISMLYLNDKQQIILKNYQGMVVDRX

SEQ ID NO: 92915 - protein, 32 aa, Artificial Sequence
  Cyclic GFR-binding peptide
  MOD_RES (6)..(7): Xaa is C or S
RVPSTXXAPVKTSAISMLYLDNGRVLLLKNYQ

SEQ ID NO: 92916 - protein, 27 aa, Artificial Sequence
  Cyclic GFR-binding peptide
  MOD_RES (1)..(1): Xaa is C or S
XVPTKLSAISILYLDKGVVTYLKNYQG

SEQ ID NO: 92917 - protein, 23 aa, Artificial Sequence
  Cyclic GFR-binding peptide
MSAISILYLDENKNVVLKNYQNM

SEQ ID NO: 92918 - protein, 25 aa, Artificial Sequence
  Cyclic GFR-binding peptide
MSAISMLYLNDKQQIILKNYQGMVV

SEQ ID NO: 92919 - protein, 33 aa, Artificial Sequence; identical to SEQ ID NO: 38159
  Cyclic GFR-binding peptide
  MOD_RES (32)..(32): Xaa is C or S

SEQ ID NO: 92920 - protein, 28 aa, Artificial Sequence
  Cyclic GFR-binding peptide
  MOD_RES (28)..(28): Xaa is C or S
LSAISILYLDKGVVTYLKNYQGMAVSEX

SEQ ID NO: 92921 - protein, 34 aa, Artificial Sequence
  Cyclic GFR-binding peptide
  MOD_RES (6)..(7): Xaa is C or S
HVPKPXXAPTKLSAISVLYLDDSSNVILKNYQNM

SEQ ID NO: 92922 - protein, 32 aa, Artificial Sequence
  Cyclic GFR-binding peptide
  MOD_RES (3)..(4): Xaa is C or S
STXXAPVKTSAISMLYLDNGRVLLLKNYQMIV

SEQ ID NO: 92923 - protein, 32 aa, Artificial Sequence
  Cyclic GFR-binding peptide
  MOD_RES (3)..(4): Xaa is C or S
EPXXVPEKMSAISILYLDENKNVVLKNYQNMT

SEQ ID NO: 92924 - protein, 31 aa, Artificial Sequence
  Cyclic GFR-binding peptide
  MOD_RES (28)..(30): Xaa is C or S
LSAISILYLDKGVVTYLKNYQGMAVSEXGXR

SEQ ID NO: 92925 - protein, 21 aa, Artificial Sequence
  Cyclic GFR-binding peptide
MSAISMLYLNDKQQIILKNYQ

SEQ ID NO: 92926 - protein, 27 aa, Artificial Sequence
  Cyclic GFR-binding peptide
PVKTSAISMLYLDNGRVLLLKNYQMIV

SEQ ID NO: 92927 - protein, 34 aa, Artificial Sequence
  Cyclic GFR-binding peptide
  MOD_RES (4)..(5): Xaa is C or S
PEPXXVPEKMSAISILYLDENKNVVLKNYQNMTV

SEQ ID NO: 92928 - protein, 37 aa, Artificial Sequence; identical to SEQ ID NO: 38168
  Cyclic GFR-binding peptide
  MOD_RES (3)..(4)..(35)..(37): Xaa is C or S

SEQ ID NO: 92929 - protein, 31 aa, Artificial Sequence; identical to SEQ ID NO: 38169
  Cyclic GFR-binding peptide
  MOD_RES (1)..(1): Xaa is C or S

SEQ ID NO: 92930 - protein, 35 aa, Artificial Sequence; identical to SEQ ID NO: 38170
  Cyclic GFR-binding peptide
  MOD_RES (3)..(4)..(35): Xaa is C or S

SEQ ID NO: 92931 - protein, 26 aa, Artificial Sequence
  Cyclic GFR-binding peptide
KLSAISILYLDKGVVTYLKNYQGMAV

SEQ ID NO: 92932 - protein, 36 aa, Artificial Sequence
  Cyclic GFR-binding peptide
  MOD_RES (6)..(7): Xaa is C or S
KASKAXXVPTKLSAISILYLDKGVVTYLKNYQGMAV

SEQ ID NO: 92933 - protein, 35 aa, Artificial Sequence; identical to SEQ ID NO: 38174
  Cyclic GFR-binding peptide
  MOD_RES (2)..(3)..(34): Xaa is C or S

SEQ ID NO: 92934 - protein, 24 aa, Artificial Sequence
  Cyclic GFR-binding peptide
MSAISMLYLNDKQQIILKNYQGMV

SEQ ID NO: 92935 - protein, 35 aa, Artificial Sequence
  Cyclic GFR-binding peptide
  MOD_RES (5)..(6): Xaa is C or S
APASXXVPARLSAISILYLDAANNVVLKNYQDMVV

SEQ ID NO: 92936 - protein, 39 aa, Artificial Sequence; identical to SEQ ID NO: 38176
  Cyclic GFR-binding peptide
  MOD_RES (5)..(6)..(37)..(39): Xaa is C or S

SEQ ID NO: 92937 - protein, 27 aa, Artificial Sequence
  Cyclic GFR-binding peptide
VPEKMSAISILYLDENKNVVLKNYQNM

SEQ ID NO: 92938 - protein, 32 aa, Artificial Sequence
  Cyclic GFR-binding peptide
  MOD_RES (5)..(6): Xaa is C or S
IPEPXXVPEKMSAISILYLDENKNVVLKNYQN

SEQ ID NO: 92939 - protein, 34 aa, Artificial Sequence
  Cyclic GFR-binding peptide
  MOD_RES (6)..(7): Xaa is C or S
KASKAXXVPTKLSAISILYLDKGVVTYLKNYQGM

SEQ ID NO: 92940 - protein, 39 aa, Artificial Sequence; identical to SEQ ID NO: 38184
  Cyclic GFR-binding peptide
  MOD_RES (6)..(7)..(39): Xaa is C or S

SEQ ID NO: 92941 - protein, 33 aa, Artificial Sequence; identical to SEQ ID NO: 38185
  Cyclic GFR-binding peptide
  MOD_RES (1)..(33): Xaa is C or S

SEQ ID NO: 92942 - protein, 28 aa, Artificial Sequence
  Cyclic GFR-binding peptide
PTKMSAISMLYLNDKQQIILKNYQGMVV

SEQ ID NO: 92943 - protein, 29 aa, Artificial Sequence
  Cyclic GFR-binding peptide
  MOD_RES (29)..(29): Xaa is C or S
KMSAISILYLDENKNVVLKNYQNMTVESX

SEQ ID NO: 92944 - protein, 29 aa, Artificial Sequence
  Cyclic GFR-binding peptide
  MOD_RES (26)..(28): Xaa is C or S
SAISMLYLDNGRVLLLKNYQMIVEEXGXL

SEQ ID NO: 92945 - protein, 31 aa, Artificial Sequence
  Cyclic GFR-binding peptide
  MOD_RES (4)..(5): Xaa is C or S
PASXXVPARLSAISILYLDAANNVVLKNYQD

SEQ ID NO: 92946 - protein, 28 aa, Artificial Sequence
  Cyclic GFR-binding peptide
  MOD_RES (27)..(27): Xaa is C or S
SAISMLYLNDKQQIILKNYQGMVVDRXG

SEQ ID NO: 92947 - protein, 27 aa, Artificial Sequence
  Cyclic GFR-binding peptide
KMSAISILYLDENKNVVLKNYQNMTVE

SEQ ID NO: 92948 - protein, 25 aa, Artificial Sequence
  Cyclic GFR-binding peptide
TSAISMLYLDNGRVLLLKNYQMIVE

SEQ ID NO: 92949 - protein, 34 aa, Artificial Sequence; identical to SEQ ID NO: 38192
  Cyclic GFR-binding peptide
  MOD_RES (32)..(34): Xaa is C or S

SEQ ID NO: 92950 - protein, 28 aa, Artificial Sequence
  Cyclic GFR-binding peptide
  MOD_RES (1)..(2): Xaa is C or S
XXVPTKLSAISILYLDKGVVTYLKNYQG

SEQ ID NO: 92951 - protein, 35 aa, Artificial Sequence; identical to SEQ ID NO: 38194
  Cyclic GFR-binding peptide
  MOD_RES (1)..(2)..(34): Xaa is C or S

SEQ ID NO: 92952 - protein, 32 aa, Artificial Sequence
  Cyclic GFR-binding peptide
  MOD_RES (4)..(5): Xaa is C or S
SKAXXVPTKLSAISILYLDKGVVTYLKNYQGM

SEQ ID NO: 92953 - protein, 38 aa, Artificial Sequence; identical to SEQ ID NO: 38197
  Cyclic GFR-binding peptide
  MOD_RES (6)..(7): Xaa is C or S

SEQ ID NO: 92954 - protein, 35 aa, Artificial Sequence; identical to SEQ ID NO: 38198
  Cyclic GFR-binding peptide
  MOD_RES (1)..(2)..(34): Xaa is C or S

SEQ ID NO: 92955 - protein, 35 aa, Artificial Sequence; identical to SEQ ID NO: 38199
  Cyclic GFR-binding peptide
  MOD_RES (32)..(34): Xaa is C or S

SEQ ID NO: 92956 - protein, 24 aa, Artificial Sequence
  Cyclic GFR-binding peptide
LSAISILYLDAANNVVLKNYQDMV

SEQ ID NO: 92957 - protein, 25 aa, Artificial Sequence
  Cyclic GFR-binding peptide
PEKMSAISILYLDENKNVVLKNYQN

SEQ ID NO: 92958 - protein, 31 aa, Artificial Sequence
  Cyclic GFR-binding peptide
  MOD_RES (31)..(31): Xaa is C or S
PARLSAISILYLDAANNVVLKNYQDMVVEAX

SEQ ID NO: 92959 - protein, 29 aa, Artificial Sequence
  Cyclic GFR-binding peptide
PEKMSAISILYLDENKNVVLKNYQNMTVE

SEQ ID NO: 92960 - protein, 35 aa, Artificial Sequence
  Cyclic GFR-binding peptide
  MOD_RES (5)..(6): Xaa is C or S
SAGPXXTPTKMSAISMLYLNDKQQIILKNYQGMVV

SEQ ID NO: 92961 - protein, 36 aa, Artificial Sequence
  Cyclic GFR-binding peptide
  MOD_RES (6)..(7): Xaa is C or S
AAPASXXVPARLSAISILYLDAANNVVLKNYQDMVV

SEQ ID NO: 92962 - protein, 23 aa, Artificial Sequence
  Cyclic GFR-binding peptide
TSAISMLYLDNGRVLLLKNYQMI

SEQ ID NO: 92963 - protein, 25 aa, Artificial Sequence
  Cyclic GFR-binding peptide
KMSAISMLYLNDKQQIILKNYQGMV

SEQ ID NO: 92964 - protein, 34 aa, Artificial Sequence
  Cyclic GFR-binding peptide
  MOD_RES (5)..(6): Xaa is C or S
IPEPXXVPEKMSAISILYLDENKNVVLKNYQNMT

SEQ ID NO: 92965 - protein, 32 aa, Artificial Sequence
  Cyclic GFR-binding peptide
  MOD_RES (5)..(6): Xaa is C or S
APASXXVPARLSAISILYLDAANNVVLKNYQD

SEQ ID NO: 92966 - protein, 33 aa, Artificial Sequence; identical to SEQ ID NO: 37738
  Cyclic GFR-binding peptide
  MOD_RES (1)..(2): Xaa is C or S

SEQ ID NO: 92967 - protein, 28 aa, Artificial Sequence
  Cyclic GFR-binding peptide
  MOD_RES (26)..(28): Xaa is C or S
SAISMLYLDNGRVLLLKNYQMIVEEXGX

SEQ ID NO: 92968 - protein, 33 aa, Artificial Sequence
  Cyclic GFR-binding peptide
  MOD_RES (3)..(4): Xaa is C or S
GPXXTPTKMSAISMLYLNDKQQIILKNYQGMVV

SEQ ID NO: 92969 - protein, 32 aa, Artificial Sequence
  Cyclic GFR-binding peptide
  MOD_RES (6)..(7): Xaa is C or S
HVPKPXXAPTKLSAISVLYLDDSSNVILKNYQ

SEQ ID NO: 92970 - protein, 33 aa, Artificial Sequence
  Cyclic GFR-binding peptide
  MOD_RES (6)..(7): Xaa is C or S
GIPEPXXVPEKMSAISILYLDENKNVVLKNYQN

SEQ ID NO: 92971 - protein, 38 aa, Artificial Sequence; identical to SEQ ID NO: 37748
  Cyclic GFR-binding peptide
  MOD_RES (5)..(6)..(38): Xaa is C or S

SEQ ID NO: 92972 - protein, 29 aa, Artificial Sequence
  Cyclic GFR-binding peptide
PTKLSAISILYLDKGVVTYLKNYQGMAVS

SEQ ID NO: 92973 - protein, 33 aa, Artificial Sequence
  Cyclic GFR-binding peptide
  MOD_RES (3)..(4): Xaa is C or S
STXXAPVKTSAISMLYLDNGRVLLLKNYQMIVE

SEQ ID NO: 92974 - protein, 28 aa, Artificial Sequence
  Cyclic GFR-binding peptide
EKMSAISILYLDENKNVVLKNYQNMTVE

SEQ ID NO: 92975 - protein, 34 aa, Artificial Sequence; identical to SEQ ID NO: 37750
  Cyclic GFR-binding peptide
  MOD_RES (1)..(2)..(34): Xaa is C or S

SEQ ID NO: 92976 - protein, 39 aa, Artificial Sequence; identical to SEQ ID NO: 37754
  Cyclic GFR-binding peptide
  MOD_RES (5)..(6)..(38): Xaa is C or S

SEQ ID NO: 92977 - protein, 23 aa, Artificial Sequence
  Cyclic GFR-binding peptide
TKLSAISILYLDKGVVTYLKNYQ

SEQ ID NO: 92978 - protein, 27 aa, Artificial Sequence
  Cyclic GFR-binding peptide
TPTKMSAISMLYLNDKQQIILKNYQGM

SEQ ID NO: 92979 - protein, 35 aa, Artificial Sequence; identical to SEQ ID NO: 37758
  Cyclic GFR-binding peptide
  MOD_RES (3)..(4): Xaa is C or S

SEQ ID NO: 92980 - protein, 32 aa, Artificial Sequence
  Cyclic GFR-binding peptide
  MOD_RES (31)..(31): Xaa is C or S
PARLSAISILYLDAANNVVLKNYQDMVVEAXG

SEQ ID NO: 92981 - protein, 24 aa, Artificial Sequence
  Cyclic GFR-binding peptide
SAISILYLDKGVVTYLKNYQGMAV

SEQ ID NO: 92982 - protein, 39 aa, Artificial Sequence; identical to SEQ ID NO: 37762
  Cyclic GFR-binding peptide
  MOD_RES (5)..(6)..(38): Xaa is C or S

SEQ ID NO: 92983 - protein, 28 aa, Artificial Sequence
  Cyclic GFR-binding peptide
TKLSAISILYLDKGVVTYLKNYQGMAVS

SEQ ID NO: 92984 - protein, 32 aa, Artificial Sequence
  Cyclic GFR-binding peptide
  MOD_RES (2)..(3): Xaa is C or S
PXXVPEKMSAISILYLDENKNVVLKNYQNMTV

SEQ ID NO: 92985 - protein, 28 aa, Artificial Sequence
  Cyclic GFR-binding peptide
  MOD_RES (27)..(27): Xaa is C or S
SAISILYLDKGVVTYLKNYQGMAVSEXG

SEQ ID NO: 92986 - protein, 29 aa, Artificial Sequence
  Cyclic GFR-binding peptide
  MOD_RES (27)..(29): Xaa is C or S
SAISILYLDENKNVVLKNYQNMTVESXAX

SEQ ID NO: 92987 - protein, 40 aa, Artificial Sequence; identical to SEQ ID NO: 37766
  Cyclic GFR-binding peptide
  MOD_RES (6)..(7)..(39): Xaa is C or S

SEQ ID NO: 92988 - protein, 35 aa, Artificial Sequence; identical to SEQ ID NO: 37768
  Cyclic GFR-binding peptide
  MOD_RES (1)..(33)..(35): Xaa is C or S

SEQ ID NO: 92989 - protein, 27 aa, Artificial Sequence
  Cyclic GFR-binding peptide
PTKLSAISILYLDKGVVTYLKNYQGMA

SEQ ID NO: 92990 - protein, 34 aa, Artificial Sequence; identical to SEQ ID NO: 37770
  Cyclic GFR-binding peptide
  MOD_RES (2)..(3): Xaa is C or S

SEQ ID NO: 92991 - protein, 31 aa, Artificial Sequence
  Cyclic GFR-binding peptide
  MOD_RES (29)..(31): Xaa is C or S
KMSAISMLYLNDKQQIILKNYQGMVVDRXGX

SEQ ID NO: 92992 - protein, 25 aa, Artificial Sequence
  Cyclic GFR-binding peptide
KLSAISILYLDKGVVTYLKNYQGMA

SEQ ID NO: 92993 - protein, 34 aa, Artificial Sequence
  Cyclic GFR-binding peptide
  MOD_RES (5)..(6): Xaa is C or S
APASXXVPARLSAISILYLDAANNVVLKNYQDMV

SEQ ID NO: 92994 - protein, 27 aa, Artificial Sequence
  Cyclic GFR-binding peptide
LSAISILYLDAANNVVLKNYQDMVVEA

SEQ ID NO: 92995 - protein, 26 aa, Artificial Sequence
  Cyclic GFR-binding peptide
SAISILYLDKGVVTYLKNYQGMAVSE

SEQ ID NO: 92996 - protein, 33 aa, Artificial Sequence
  Cyclic GFR-binding peptide
  MOD_RES (31)..(33): Xaa is C or S
PTKLSAISILYLDKGVVTYLKNYQGMAVSEXGX

SEQ ID NO: 92997 - protein, 29 aa, Artificial Sequence
  Cyclic GFR-binding peptide
  MOD_RES (28)..(28): Xaa is C or S
LSAISILYLDAANNVVLKNYQDMVVEAXG

SEQ ID NO: 92998 - protein, 33 aa, Artificial Sequence
  Cyclic GFR-binding peptide
  MOD_RES (6)..(7): Xaa is C or S
GSAGPXXTPTKMSAISMLYLNDKQQIILKNYQG

SEQ ID NO: 92999 - protein, 30 aa, Artificial Sequence
  Cyclic GFR-binding peptide
  MOD_RES (1)..(1): Xaa is C or S
XTPTKMSAISMLYLNDKQQIILKNYQGMVV

SEQ ID NO: 93000 - protein, 33 aa, Artificial Sequence
  Cyclic GFR-binding peptide
  MOD_RES (30)..(32): Xaa is C or S
TKMSAISMLYLNDKQQIILKNYQGMVVDRXGXS

SEQ ID NO: 93001 - protein, 29 aa, Artificial Sequence
  Cyclic GFR-binding peptide
  MOD_RES (29)..(29): Xaa is C or S
KMSAISMLYLNDKQQIILKNYQGMVVDRX

SEQ ID NO: 93002 - protein, 38 aa, Artificial Sequence; identical to SEQ ID NO: 37775
  Cyclic GFR-binding peptide
  MOD_RES (6)..(7)..(38): Xaa is C or S

SEQ ID NO: 93003 - protein, 30 aa, Artificial Sequence
  Cyclic GFR-binding peptide
  MOD_RES (28)..(30): Xaa is C or S
MSAISILYLDENKNVVLKNYQNMTVESXAX

SEQ ID NO: 93004 - protein, 31 aa, Artificial Sequence
  Cyclic GFR-binding peptide
  MOD_RES (29)..(31): Xaa is C or S
RLSAISILYLDAANNVVLKNYQDMVVEAXGX

SEQ ID NO: 93005 - protein, 36 aa, Artificial Sequence; identical to SEQ ID NO: 37776
  Cyclic GFR-binding peptide
  MOD_RES (1)..(2)..(34)..(36): Xaa is C or S

SEQ ID NO: 93006 - protein, 30 aa, Artificial Sequence
  Cyclic GFR-binding peptide
  MOD_RES (4)..(5): Xaa is C or S
PASXXVPARLSAISILYLDAANNVVLKNYQ

SEQ ID NO: 93007 - protein, 38 aa, Artificial Sequence; identical to SEQ ID NO: 37781
  Cyclic GFR-binding peptide
  MOD_RES (4)..(5)..(37): Xaa is C or S

SEQ ID NO: 93008 - protein, 34 aa, Artificial Sequence; identical to SEQ ID NO: 37782
  Cyclic GFR-binding peptide
  MOD_RES (1)..(33): Xaa is C or S

SEQ ID NO: 93009 - protein, 29 aa, Artificial Sequence
  Cyclic GFR-binding peptide
  MOD_RES (28)..(28): Xaa is C or S
MSAISILYLDENKNVVLKNYQNMTVESXA

SEQ ID NO: 93010 - protein, 24 aa, Artificial Sequence
  Cyclic GFR-binding peptide
KLSAISILYLDKGVVTYLKNYQGM

SEQ ID NO: 93011 - protein, 23 aa, Artificial Sequence
  Cyclic GFR-binding peptide
ARLSAISILYLDAANNVVLKNYQ

SEQ ID NO: 93012 - protein, 26 aa, Artificial Sequence
  Cyclic GFR-binding peptide
MSAISMLYLNDKQQIILKNYQGMVVD

SEQ ID NO: 93013 - protein, 28 aa, Artificial Sequence
  Cyclic GFR-binding peptide
KMSAISMLYLNDKQQIILKNYQGMVVDR

SEQ ID NO: 93014 - protein, 22 aa, Artificial Sequence
  Cyclic GFR-binding peptide
KMSAISMLYLNDKQQIILKNYQ

SEQ ID NO: 93015 - protein, 32 aa, Artificial Sequence; identical to SEQ ID NO: 37789
  Cyclic GFR-binding peptide
  MOD_RES (32)..(32): Xaa is C or S

SEQ ID NO: 93016 - protein, 39 aa, Artificial Sequence; identical to SEQ ID NO: 37793
  Cyclic GFR-binding peptide
  MOD_RES (6)..(7)..(39): Xaa is C or S

SEQ ID NO: 93017 - protein, 30 aa, Artificial Sequence
  Cyclic GFR-binding peptide
  MOD_RES (27)..(29): Xaa is C or S
SAISILYLDKGVVTYLKNYQGMAVSEXGXR

SEQ ID NO: 93018 - protein, 35 aa, Artificial Sequence; identical to SEQ ID NO: 37795
  Cyclic GFR-binding peptide
  MOD_RES (32)..(34): Xaa is C or S

SEQ ID NO: 93019 - protein, 28 aa, Artificial Sequence
  Cyclic GFR-binding peptide
  MOD_RES (1)..(2): Xaa is C or S
XXAPVKTSAISMLYLDNGRVLLLKNYQM

SEQ ID NO: 93020 - protein, 29 aa, Artificial Sequence
  Cyclic GFR-binding peptide
  MOD_RES (1)..(1): Xaa is C or S
XVPEKMSAISILYLDENKNVVLKNYQNMT

SEQ ID NO: 93021 - protein, 31 aa, Artificial Sequence
  Cyclic GFR-binding peptide
  MOD_RES (30)..(30): Xaa is C or S
PVKTSAISMLYLDNGRVLLLKNYQMIVEEXG

SEQ ID NO: 93022 - protein, 37 aa, Artificial Sequence; identical to SEQ ID NO: 37802
  Cyclic GFR-binding peptide
  MOD_RES (2)..(3)..(34)..(36): Xaa is C or S

SEQ ID NO: 93023 - protein, 33 aa, Artificial Sequence
  Cyclic GFR-binding peptide
  MOD_RES (31)..(33): Xaa is C or S
PEKMSAISILYLDENKNVVLKNYQNMTVESXAX

SEQ ID NO: 93024 - protein, 31 aa, Artificial Sequence
  Cyclic GFR-binding peptide
  MOD_RES (4)..(5): Xaa is C or S
SKAXXVPTKLSAISILYLDKGVVTYLKNYQG

SEQ ID NO: 93025 - protein, 36 aa, Artificial Sequence; identical to SEQ ID NO: 37805
  Cyclic GFR-binding peptide
  MOD_RES (4)..(5)..(36): Xaa is C or S

SEQ ID NO: 93026 - protein, 41 aa, Artificial Sequence; identical to SEQ ID NO: 37808
  Cyclic GFR-binding peptide
  MOD_RES (6)..(7)..(38)..(40): Xaa is C or S

SEQ ID NO: 93027 - protein, 36 aa, Artificial Sequence; identical to SEQ ID NO: 37809
  Cyclic GFR-binding peptide
  MOD_RES (5)..(6): Xaa is C or S

SEQ ID NO: 93028 - protein, 33 aa, Artificial Sequence
  Cyclic GFR-binding peptide
  MOD_RES (5)..(6): Xaa is C or S
ASKAXXVPTKLSAISILYLDKGVVTYLKNYQGM

SEQ ID NO: 93029 - protein, 34 aa, Artificial Sequence; identical to SEQ ID NO: 37812
  Cyclic GFR-binding peptide
  MOD_RES (32)..(34): Xaa is C or S

SEQ ID NO: 93030 - protein, 30 aa, Artificial Sequence
  Cyclic GFR-binding peptide
  MOD_RES (1)..(2): Xaa is C or S
XXVPTKLSAISILYLDKGVVTYLKNYQGMA

SEQ ID NO: 93031 - protein, 41 aa, Artificial Sequence; identical to SEQ ID NO: 37814
  Cyclic GFR-binding peptide
  MOD_RES (5)..(6)..(38)..(40): Xaa is C or S

SEQ ID NO: 93032 - protein, 29 aa, Artificial Sequence
  Cyclic GFR-binding peptide
  MOD_RES (28)..(28): Xaa is C or S
LSAISILYLDKGVVTYLKNYQGMAVSEXG

SEQ ID NO: 93033 - protein, 29 aa, Artificial Sequence
  Cyclic GFR-binding peptide
ARLSAISILYLDAANNVVLKNYQDMVVEA

SEQ ID NO: 93034 - protein, 28 aa, Artificial Sequence
  Cyclic GFR-binding peptide
  MOD_RES (1)..(2): Xaa is C or S
XXVPARLSAISILYLDAANNVVLKNYQD

SEQ ID NO: 93035 - protein, 25 aa, Artificial Sequence
  Cyclic GFR-binding peptide
LSAISILYLDKGVVTYLKNYQGMAV

SEQ ID NO: 93036 - protein, 34 aa, Artificial Sequence
  Cyclic GFR-binding peptide
  MOD_RES (5)..(6): Xaa is C or S
VPSTXXAPVKTSAISMLYLDNGRVLLLKNYQMIV

SEQ ID NO: 93037 - protein, 35 aa, Artificial Sequence; identical to SEQ ID NO: 37819
  Cyclic GFR-binding peptide
  MOD_RES (2)..(3)..(35): Xaa is C or S

SEQ ID NO: 93038 - protein, 32 aa, Artificial Sequence; identical to SEQ ID NO: 37820
  Cyclic GFR-binding peptide
  MOD_RES (1)..(2): Xaa is C or S

SEQ ID NO: 93039 - protein, 32 aa, Artificial Sequence
  Cyclic GFR-binding peptide
  MOD_RES (29)..(31): Xaa is C or S
KLSAISILYLDKGVVTYLKNYQGMAVSEXGXR

SEQ ID NO: 93040 - protein, 33 aa, Artificial Sequence; identical to SEQ ID NO: 37823
  Cyclic GFR-binding peptide
  MOD_RES (2)..(3): Xaa is C or S

SEQ ID NO: 93041 - protein, 24 aa, Artificial Sequence
  Cyclic GFR-binding peptide
ARLSAISILYLDAANNVVLKNYQD

SEQ ID NO: 93042 - protein, 36 aa, Artificial Sequence; identical to SEQ ID NO: 37828
  Cyclic GFR-binding peptide
  MOD_RES (1)..(2)..(34)..(36): Xaa is C or S

SEQ ID NO: 93043 - protein, 40 aa, Artificial Sequence; identical to SEQ ID NO: 37832
  Cyclic GFR-binding peptide
  MOD_RES (4)..(5)..(37)..(39): Xaa is C or S

SEQ ID NO: 93044 - protein, 28 aa, Artificial Sequence
  Cyclic GFR-binding peptide
  MOD_RES (27)..(27): Xaa is C or S
SAISILYLDAANNVVLKNYQDMVVEAXG

SEQ ID NO: 93045 - protein, 31 aa, Artificial Sequence
  Cyclic GFR-binding peptide
  MOD_RES (2)..(3): Xaa is C or S
PXXTPTKMSAISMLYLNDKQQIILKNYQGMV

SEQ ID NO: 93046 - protein, 36 aa, Artificial Sequence; identical to SEQ ID NO: 37836
  Cyclic GFR-binding peptide
  MOD_RES (3)..(4)..(36): Xaa is C or S

SEQ ID NO: 93047 - protein, 29 aa, Artificial Sequence
  Cyclic GFR-binding peptide
  MOD_RES (3)..(4): Xaa is C or S
EPXXVPEKMSAISILYLDENKNVVLKNYQ

SEQ ID NO: 93048 - protein, 30 aa, Artificial Sequence
  Cyclic GFR-binding peptide
  MOD_RES (1)..(2): Xaa is C or S
XXVPARLSAISILYLDAANNVVLKNYQDMV

SEQ ID NO: 93049 - protein, 32 aa, Artificial Sequence; identical to SEQ ID NO: 37839
  Cyclic GFR-binding peptide
  MOD_RES (32)..(32): Xaa is C or S

SEQ ID NO: 93050 - protein, 35 aa, Artificial Sequence
  Cyclic GFR-binding peptide
  MOD_RES (5)..(6): Xaa is C or S
VPSTXXAPVKTSAISMLYLDNGRVLLLKNYQMIVE

SEQ ID NO: 93051 - protein, 25 aa, Artificial Sequence
  Cyclic GFR-binding peptide
PARLSAISILYLDAANNVVLKNYQD

SEQ ID NO: 93052 - protein, 39 aa, Artificial Sequence; identical to SEQ ID NO: 37843
  Cyclic GFR-binding peptide
  MOD_RES (3)..(4)..(36)..(38): Xaa is C or S

SEQ ID NO: 93053 - protein, 36 aa, Artificial Sequence; identical to SEQ ID NO: 37847
  Cyclic GFR-binding peptide
  MOD_RES (3)..(4)..(36): Xaa is C or S

SEQ ID NO: 93054 - protein, 23 aa, Artificial Sequence
  Cyclic GFR-binding peptide
KMSAISMLYLNDKQQIILKNYQG

SEQ ID NO: 93055 - protein, 26 aa, Artificial Sequence
  Cyclic GFR-binding peptide
EKMSAISILYLDENKNVVLKNYQNMT

SEQ ID NO: 93056 - protein, 27 aa, Artificial Sequence
  Cyclic GFR-binding peptide
KMSAISMLYLNDKQQIILKNYQGMVVD

SEQ ID NO: 93057 - protein, 35 aa, Artificial Sequence; identical to SEQ ID NO: 37849
  Cyclic GFR-binding peptide
  MOD_RES (1)..(33)..(35): Xaa is C or S

SEQ ID NO: 93058 - protein, 31 aa, Artificial Sequence
  Cyclic GFR-binding peptide
  MOD_RES (2)..(3): Xaa is C or S
SXXVPARLSAISILYLDAANNVVLKNYQDMV

SEQ ID NO: 93059 - protein, 27 aa, Artificial Sequence
  Cyclic GFR-binding peptide
  MOD_RES (27)..(27): Xaa is C or S
SAISILYLDAANNVVLKNYQDMVVEAX

SEQ ID NO: 93060 - protein, 27 aa, Artificial Sequence
  Cyclic GFR-binding peptide
  MOD_RES (27)..(27): Xaa is C or S
SAISMLYLNDKQQIILKNYQGMVVDRX

SEQ ID NO: 93061 - protein, 37 aa, Artificial Sequence; identical to SEQ ID NO: 37852
  Cyclic GFR-binding peptide
  MOD_RES (5)..(6)..(37): Xaa is C or S

SEQ ID NO: 93062 - protein, 29 aa, Artificial Sequence
  Cyclic GFR-binding peptide
TKLSAISILYLDKGVVTYLKNYQGMAVSE

SEQ ID NO: 93063 - protein, 24 aa, Artificial Sequence
  Cyclic GFR-binding peptide
KMSAISMLYLNDKQQIILKNYQGM

SEQ ID NO: 93064 - protein, 25 aa, Artificial Sequence
  Cyclic GFR-binding peptide
MSAISILYLDENKNVVLKNYQNMTV

SEQ ID NO: 93065 - protein, 27 aa, Artificial Sequence
  Cyclic GFR-binding peptide
  MOD_RES (1)..(2): Xaa is C or S
XXTPTKMSAISMLYLNDKQQIILKNYQ

SEQ ID NO: 93066 - protein, 36 aa, Artificial Sequence; identical to SEQ ID NO: 37860
  Cyclic GFR-binding peptide
  MOD_RES (2)..(3)..(35): Xaa is C or S

SEQ ID NO: 93067 - protein, 29 aa, Artificial Sequence
  Cyclic GFR-binding peptide
  MOD_RES (28)..(28): Xaa is C or S
KTSAISMLYLDNGRVLLLKNYQMIVEEXG

SEQ ID NO: 93068 - protein, 30 aa, Artificial Sequence
  Cyclic GFR-binding peptide
  MOD_RES (29)..(29): Xaa is C or S
VKTSAISMLYLDNGRVLLLKNYQMIVEEXG

SEQ ID NO: 93069 - protein, 30 aa, Artificial Sequence
  Cyclic GFR-binding peptide
  MOD_RES (3)..(4): Xaa is C or S
STXXAPVKTSAISMLYLDNGRVLLLKNYQM

SEQ ID NO: 93070 - protein, 27 aa, Artificial Sequence
  Cyclic GFR-binding peptide
  MOD_RES (1)..(2): Xaa is C or S
XXVPARLSAISILYLDAANNVVLKNYQ

SEQ ID NO: 93071 - protein, 40 aa, Artificial Sequence; identical to SEQ ID NO: 37866
  Cyclic GFR-binding peptide
  MOD_RES (5)..(6)..(38)..(40): Xaa is C or S

SEQ ID NO: 93072 - protein, 25 aa, Artificial Sequence
  Cyclic GFR-binding peptide
SAISILYLDKGVVTYLKNYQGMAVS

SEQ ID NO: 93073 - protein, 36 aa, Artificial Sequence; identical to SEQ ID NO: 37873
  Cyclic GFR-binding peptide
  MOD_RES (2)..(3)..(34)..(36): Xaa is C or S

SEQ ID NO: 93074 - protein, 30 aa, Artificial Sequence
  Cyclic GFR-binding peptide
  MOD_RES (1)..(1): Xaa is C or S
XAPVKTSAISMLYLDNGRVLLLKNYQMIVE

SEQ ID NO: 93075 - protein, 27 aa, Artificial Sequence
  Cyclic GFR-binding peptide
  MOD_RES (1)..(2): Xaa is C or S
XXVPTKLSAISILYLDKGVVTYLKNYQ

SEQ ID NO: 93076 - protein, 31 aa, Artificial Sequence
  Cyclic GFR-binding peptide
  MOD_RES (28)..(30): Xaa is C or S
LSAISILYLDAANNVVLKNYQDMVVEAXGXR

SEQ ID NO: 93077 - protein, 25 aa, Artificial Sequence
  Cyclic GFR-binding peptide
VKTSAISMLYLDNGRVLLLKNYQMI

SEQ ID NO: 93078 - protein, 37 aa, Artificial Sequence; identical to SEQ ID NO: 37875
  Cyclic GFR-binding peptide
  MOD_RES (1)..(2)..(34)..(36): Xaa is C or S

SEQ ID NO: 93079 - protein, 29 aa, Artificial Sequence
  Cyclic GFR-binding peptide
  MOD_RES (1)..(1): Xaa is C or S
XVPARLSAISILYLDAANNVVLKNYQDMV

SEQ ID NO: 93080 - protein, 23 aa, Artificial Sequence
  Cyclic GFR-binding peptide
MSAISMLYLNDKQQIILKNYQGM

SEQ ID NO: 93081 - protein, 29 aa, Artificial Sequence
  Cyclic GFR-binding peptide
  MOD_RES (29)..(29): Xaa is C or S
KLSAISILYLDKGVVTYLKNYQGMAVSEX

SEQ ID NO: 93082 - protein, 38 aa, Artificial Sequence; identical to SEQ ID NO: 37882
  Cyclic GFR-binding peptide
  MOD_RES (5)..(6)..(37): Xaa is C or S

SEQ ID NO: 93083 - protein, 38 aa, Artificial Sequence; identical to SEQ ID NO: 37886
  Cyclic GFR-binding peptide
  MOD_RES (6)..(7): Xaa is C or S

SEQ ID NO: 93084 - protein, 25 aa, Artificial Sequence
  Cyclic GFR-binding peptide
VPARLSAISILYLDAANNVVLKNYQ

SEQ ID NO: 93085 - protein, 38 aa, Artificial Sequence; identical to SEQ ID NO: 37889
  Cyclic GFR-binding peptide
  MOD_RES (2)..(3)..(35)..(37): Xaa is C or S

SEQ ID NO: 93086 - protein, 34 aa, Artificial Sequence; identical to SEQ ID NO: 37891
  Cyclic GFR-binding peptide
  MOD_RES (1)..(33): Xaa is C or S

SEQ ID NO: 93087 - protein, 24 aa, Artificial Sequence
  Cyclic GFR-binding peptide
TKLSAISILYLDKGVVTYLKNYQG

SEQ ID NO: 93088 - protein, 30 aa, Artificial Sequence
  Cyclic GFR-binding peptide
  MOD_RES (2)..(3): Xaa is C or S
PXXVPEKMSAISILYLDENKNVVLKNYQNM

SEQ ID NO: 93089 - protein, 23 aa, Artificial Sequence
  Cyclic GFR-binding peptide
SAISMLYLNDKQQIILKNYQGMV

SEQ ID NO: 93090 - protein, 32 aa, Artificial Sequence
  Cyclic GFR-binding peptide
  MOD_RES (30)..(32): Xaa is C or S
PVKTSAISMLYLDNGRVLLLKNYQMIVEEXGX

SEQ ID NO: 93091 - protein, 24 aa, Artificial Sequence
  Cyclic GFR-binding peptide
PEKMSAISILYLDENKNVVLKNYQ

SEQ ID NO: 93092 - protein, 27 aa, Artificial Sequence
  Cyclic GFR-binding peptide
  MOD_RES (1)..(1): Xaa is C or S
XVPEKMSAISILYLDENKNVVLKNYQN

SEQ ID NO: 93093 - protein, 36 aa, Artificial Sequence; identical to SEQ ID NO: 37909
  Cyclic GFR-binding peptide
  MOD_RES (3)..(4)..(35): Xaa is C or S

SEQ ID NO: 93094 - protein, 29 aa, Artificial Sequence
  Cyclic GFR-binding peptide
PTKMSAISMLYLNDKQQIILKNYQGMVVD

SEQ ID NO: 93095 - protein, 31 aa, Artificial Sequence
  Cyclic GFR-binding peptide
  MOD_RES (1)..(2): Xaa is C or S
XXAPVKTSAISMLYLDNGRVLLLKNYQMIVE

SEQ ID NO: 93096 - protein, 32 aa, Artificial Sequence
  Cyclic GFR-binding peptide
  MOD_RES (31)..(31): Xaa is C or S
PTKMSAISMLYLNDKQQIILKNYQGMVVDRXG

SEQ ID NO: 93097 - protein, 35 aa, Artificial Sequence; identical to SEQ ID NO: 37916
  Cyclic GFR-binding peptide
  MOD_RES (3)..(4): Xaa is C or S

SEQ ID NO: 93098 - protein, 25 aa, Artificial Sequence
  Cyclic GFR-binding peptide
TKLSAISILYLDKGVVTYLKNYQGM

SEQ ID NO: 93099 - protein, 34 aa, Artificial Sequence; identical to SEQ ID NO: 37917
  Cyclic GFR-binding peptide
  MOD_RES (1)..(33): Xaa is C or S

SEQ ID NO: 93100 - protein, 22 aa, Artificial Sequence
  Cyclic GFR-binding peptide
LSAISILYLDAANNVVLKNYQD

SEQ ID NO: 93101 - protein, 29 aa, Artificial Sequence
  Cyclic GFR-binding peptide
  MOD_RES (3)..(4): Xaa is C or S
ASXXVPARLSAISILYLDAANNVVLKNYQ

SEQ ID NO: 93102 - protein, 42 aa, Artificial Sequence; identical to SEQ ID NO: 37924
  Cyclic GFR-binding peptide
  MOD_RES (6)..(7)..(39)..(41): Xaa is C or S

SEQ ID NO: 93103 - protein, 37 aa, Artificial Sequence; identical to SEQ ID NO: 37925
  Cyclic GFR-binding peptide
  MOD_RES (2)..(3)..(35)..(37): Xaa is C or S

SEQ ID NO: 93104 - protein, 38 aa, Artificial Sequence; identical to SEQ ID NO: 37926
  Cyclic GFR-binding peptide
  MOD_RES (3)..(4)..(36)..(38): Xaa is C or S

SEQ ID NO: 93105 - protein, 34 aa, Artificial Sequence
  Cyclic GFR-binding peptide
  MOD_RES (5)..(6): Xaa is C or S
SAGPXXTPTKMSAISMLYLNDKQQIILKNYQGMV

SEQ ID NO: 93106 - protein, 28 aa, Artificial Sequence
  Cyclic GFR-binding peptide
RLSAISILYLDAANNVVLKNYQDMVVEA

SEQ ID NO: 93107 - protein, 24 aa, Artificial Sequence
  Cyclic GFR-binding peptide
PTKLSAISILYLDKGVVTYLKNYQ

SEQ ID NO: 93108 - protein, 39 aa, Artificial Sequence; identical to SEQ ID NO: 37931
  Cyclic GFR-binding peptide
  MOD_RES (4)..(5)..(37)..(39): Xaa is C or S

SEQ ID NO: 93109 - protein, 26 aa, Artificial Sequence
  Cyclic GFR-binding peptide
PVKTSAISMLYLDNGRVLLLKNYQMI

SEQ ID NO: 93110 - protein, 34 aa, Artificial Sequence; identical to SEQ ID NO: 37933
  Cyclic GFR-binding peptide
  MOD_RES (31)..(33): Xaa is C or S

SEQ ID NO: 93111 - protein, 31 aa, Artificial Sequence
  Cyclic GFR-binding peptide
  MOD_RES (28)..(30): Xaa is C or S
MSAISILYLDENKNVVLKNYQNMTVESXAXR

SEQ ID NO: 93112 - protein, 37 aa, Artificial Sequence; identical to SEQ ID NO: 37935
  Cyclic GFR-binding peptide
  MOD_RES (3)..(4)..(36): Xaa is C or S

SEQ ID NO: 93113 - protein, 29 aa, Artificial Sequence
  Cyclic GFR-binding peptide
TPTKMSAISMLYLNDKQQIILKNYQGMVV

SEQ ID NO: 93114 - protein, 39 aa, Artificial Sequence; identical to SEQ ID NO: 37936
  Cyclic GFR-binding peptide
  MOD_RES (4)..(5)..(37)..(39): Xaa is C or S

SEQ ID NO: 93115 - protein, 36 aa, Artificial Sequence; identical to SEQ ID NO: 37938
  Cyclic GFR-binding peptide
  MOD_RES (1)..(33)..(35): Xaa is C or S

SEQ ID NO: 93116 - protein, 25 aa, Artificial Sequence
  Cyclic GFR-binding peptide
PTKLSAISILYLDKGVVTYLKNYQG

SEQ ID NO: 93117 - protein, 37 aa, Artificial Sequence; identical to SEQ ID NO: 37940
  Cyclic GFR-binding peptide
  MOD_RES (1)..(2)..(34)..(36): Xaa is C or S

SEQ ID NO: 93118 - protein, 29 aa, Artificial Sequence
  Cyclic GFR-binding peptide
  MOD_RES (1)..(2): Xaa is C or S
XXAPVKTSAISMLYLDNGRVLLLKNYQMI

SEQ ID NO: 93119 - protein, 24 aa, Artificial Sequence
  Cyclic GFR-binding peptide
MSAISILYLDENKNVVLKNYQNMT

SEQ ID NO: 93120 - protein, 28 aa, Artificial Sequence
  Cyclic GFR-binding peptide
  MOD_RES (1)..(1): Xaa is C or S
XAPVKTSAISMLYLDNGRVLLLKNYQMI

SEQ ID NO: 93121 - protein, 28 aa, Artificial Sequence
  Cyclic GFR-binding peptide
  MOD_RES (1)..(2): Xaa is C or S
XXVPEKMSAISILYLDENKNVVLKNYQN

SEQ ID NO: 93122 - protein, 28 aa, Artificial Sequence
  Cyclic GFR-binding peptide
TKMSAISMLYLNDKQQIILKNYQGMVVD

SEQ ID NO: 93123 - protein, 29 aa, Artificial Sequence
  Cyclic GFR-binding peptide
  MOD_RES (27)..(29): Xaa is C or S
TSAISMLYLDNGRVLLLKNYQMIVEEXGX

SEQ ID NO: 93124 - protein, 38 aa, Artificial Sequence; identical to SEQ ID NO: 37946
  Cyclic GFR-binding peptide
  MOD_RES (4)..(5)..(36)..(38): Xaa is C or S

SEQ ID NO: 93125 - protein, 27 aa, Artificial Sequence
  Cyclic GFR-binding peptide
ARLSAISILYLDAANNVVLKNYQDMVV

SEQ ID NO: 93126 - protein, 30 aa, Artificial Sequence
  Cyclic GFR-binding peptide
  MOD_RES (30)..(30): Xaa is C or S
ARLSAISILYLDAANNVVLKNYQDMVVEAX

SEQ ID NO: 93127 - protein, 30 aa, Artificial Sequence
  Cyclic GFR-binding peptide
  MOD_RES (1)..(2): Xaa is C or S
XXVPEKMSAISILYLDENKNVVLKNYQNMT

SEQ ID NO: 93128 - protein, 29 aa, Artificial Sequence
  Cyclic GFR-binding peptide
APVKTSAISMLYLDNGRVLLLKNYQMIVE

SEQ ID NO: 93129 - protein, 34 aa, Artificial Sequence
  Cyclic GFR-binding peptide
  MOD_RES (4)..(5): Xaa is C or S
SKAXXVPTKLSAISILYLDKGVVTYLKNYQGMAV

SEQ ID NO: 93130 - protein, 27 aa, Artificial Sequence
  Cyclic GFR-binding peptide
  MOD_RES (1)..(2): Xaa is C or S
XXVPEKMSAISILYLDENKNVVLKNYQ

SEQ ID NO: 93131 - protein, 26 aa, Artificial Sequence
  Cyclic GFR-binding peptide
TPTKMSAISMLYLNDKQQIILKNYQG

SEQ ID NO: 93132 - protein, 31 aa, Artificial Sequence; identical to SEQ ID NO: 37954
  Cyclic GFR-binding peptide
  MOD_RES (31)..(31): Xaa is C or S

SEQ ID NO: 93133 - protein, 27 aa, Artificial Sequence
  Cyclic GFR-binding peptide
  MOD_RES (26)..(26): Xaa is C or S
SAISMLYLDNGRVLLLKNYQMIVEEXG

SEQ ID NO: 93134 - protein, 36 aa, Artificial Sequence; identical to SEQ ID NO: 37963
  Cyclic GFR-binding peptide
  MOD_RES (1)..(33)..(35): Xaa is C or S

SEQ ID NO: 93135 - protein, 26 aa, Artificial Sequence
  Cyclic GFR-binding peptide
PTKLSAISILYLDKGVVTYLKNYQGM

SEQ ID NO: 93136 - protein, 34 aa, Artificial Sequence; identical to SEQ ID NO: 37965
  Cyclic GFR-binding peptide
  MOD_RES (3)..(4): Xaa is C or S

SEQ ID NO: 93137 - protein, 32 aa, Artificial Sequence
  Cyclic GFR-binding peptide
  MOD_RES (6)..(7): Xaa is C or S
GSAGPXXTPTKMSAISMLYLNDKQQIILKNYQ

SEQ ID NO: 93138 - protein, 35 aa, Artificial Sequence; identical to SEQ ID NO: 37973
  Cyclic GFR-binding peptide
  MOD_RES (32)..(34): Xaa is C or S

SEQ ID NO: 93139 - protein, 27 aa, Artificial Sequence
  Cyclic GFR-binding peptide
MSAISILYLDENKNVVLKNYQNMTVES

SEQ ID NO: 93140 - protein, 32 aa, Artificial Sequence
  Cyclic GFR-binding peptide
  MOD_RES (29)..(31): Xaa is C or S
RLSAISILYLDAANNVVLKNYQDMVVEAXGXR

SEQ ID NO: 93141 - protein, 37 aa, Artificial Sequence; identical to SEQ ID NO: 37975
  Cyclic GFR-binding peptide
  MOD_RES (6)..(7): Xaa is C or S

SEQ ID NO: 93142 - protein, 26 aa, Artificial Sequence
  Cyclic GFR-binding peptide
VPEKMSAISILYLDENKNVVLKNYQN

SEQ ID NO: 93143 - protein, 31 aa, Artificial Sequence
  Cyclic GFR-binding peptide
  MOD_RES (5)..(6): Xaa is C or S
SAGPXXTPTKMSAISMLYLNDKQQIILKNYQ

SEQ ID NO: 93144 - protein, 20 aa, Artificial Sequence
  Cyclic GFR-binding peptide
SAISILYLDENKNVVLKNYQ

SEQ ID NO: 93145 - protein, 31 aa, Artificial Sequence
  Cyclic GFR-binding peptide
  MOD_RES (1)..(2): Xaa is C or S
XXTPTKMSAISMLYLNDKQQIILKNYQGMVV

SEQ ID NO: 93146 - protein, 40 aa, Artificial Sequence; identical to SEQ ID NO: 37984
  Cyclic GFR-binding peptide
  MOD_RES (4)..(5)..(37)..(39): Xaa is C or S

SEQ ID NO: 93147 - protein, 40 aa, Artificial Sequence; identical to SEQ ID NO: 37985
  Cyclic GFR-binding peptide
  MOD_RES (6)..(7)..(39): Xaa is C or S

SEQ ID NO: 93148 - protein, 32 aa, Artificial Sequence
  Cyclic GFR-binding peptide
  MOD_RES (31)..(31): Xaa is C or S
PEKMSAISILYLDENKNVVLKNYQNMTVESXA

SEQ ID NO: 93149 - protein, 21 aa, Artificial Sequence
  Cyclic GFR-binding peptide
SAISMLYLNDKQQIILKNYQG

SEQ ID NO: 93150 - protein, 26 aa, Artificial Sequence
  Cyclic GFR-binding peptide
  MOD_RES (1)..(1): Xaa is C or S
XVPTKLSAISILYLDKGVVTYLKNYQ

SEQ ID NO: 93151 - protein, 30 aa, Artificial Sequence
  Cyclic GFR-binding peptide
  MOD_RES (29)..(29): Xaa is C or S
KMSAISILYLDENKNVVLKNYQNMTVESXA

SEQ ID NO: 93152 - protein, 35 aa, Artificial Sequence; identical to SEQ ID NO: 37992
  Cyclic GFR-binding peptide
  MOD_RES (32)..(34): Xaa is C or S

SEQ ID NO: 93153 - protein, 32 aa, Artificial Sequence; identical to SEQ ID NO: 37995
  Cyclic GFR-binding peptide
  MOD_RES (1)..(1): Xaa is C or S

SEQ ID NO: 93154 - protein, 30 aa, Artificial Sequence; identical to SEQ ID NO: 727
  Cyclic GFR-binding peptide

SEQ ID NO: 93155 - protein, 23 aa, Artificial Sequence
  Cyclic GFR-binding peptide
SAISMLYLDNGRVLLLKNYQMIV

SEQ ID NO: 93156 - protein, 32 aa, Artificial Sequence
  Cyclic GFR-binding peptide
  MOD_RES (30)..(32): Xaa is C or S
EKMSAISILYLDENKNVVLKNYQNMTVESXAX

SEQ ID NO: 93157 - protein, 37 aa, Artificial Sequence; identical to SEQ ID NO: 38001
  Cyclic GFR-binding peptide
  MOD_RES (6)..(7): Xaa is C or S

SEQ ID NO: 93158 - protein, 33 aa, Artificial Sequence
  Cyclic GFR-binding peptide
  MOD_RES (3)..(4): Xaa is C or S
EPXXVPEKMSAISILYLDENKNVVLKNYQNMTV

SEQ ID NO: 93159 - protein, 25 aa, Artificial Sequence
  Cyclic GFR-binding peptide
TKMSAISMLYLNDKQQIILKNYQGM

SEQ ID NO: 93160 - protein, 32 aa, Artificial Sequence; identical to SEQ ID NO: 38006
  Cyclic GFR-binding peptide
  MOD_RES (1)..(2): Xaa is C or S

SEQ ID NO: 93161 - protein, 29 aa, Artificial Sequence
  Cyclic GFR-binding peptide
PARLSAISILYLDAANNVVLKNYQDMVVE

SEQ ID NO: 93162 - protein, 31 aa, Artificial Sequence
  Cyclic GFR-binding peptide
  MOD_RES (1)..(2): Xaa is C or S
XXVPARLSAISILYLDAANNVVLKNYQDMVV

SEQ ID NO: 93163 - protein, 35 aa, Artificial Sequence
  Cyclic GFR-binding peptide
  MOD_RES (5)..(6): Xaa is C or S
IPEPXXVPEKMSAISILYLDENKNVVLKNYQNMTV

SEQ ID NO: 93164 - protein, 22 aa, Artificial Sequence
  Cyclic GFR-binding peptide
SAISILYLDENKNVVLKNYQNM

SEQ ID NO: 93165 - protein, 29 aa, Artificial Sequence
  Cyclic GFR-binding peptide
  MOD_RES (2)..(3): Xaa is C or S
PXXTPTKMSAISMLYLNDKQQIILKNYQG

SEQ ID NO: 93166 - protein, 31 aa, Artificial Sequence
  Cyclic GFR-binding peptide
  MOD_RES (5)..(6): Xaa is C or S
APASXXVPARLSAISILYLDAANNVVLKNYQ

SEQ ID NO: 93167 - protein, 37 aa, Artificial Sequence; identical to SEQ ID NO: 38011
  Cyclic GFR-binding peptide
  MOD_RES (1)..(2)..(34)..(36): Xaa is C or S

SEQ ID NO: 93168 - protein, 38 aa, Artificial Sequence; identical to SEQ ID NO: 38014
  Cyclic GFR-binding peptide
  MOD_RES (6)..(7): Xaa is C or S

SEQ ID NO: 93169 - protein, 31 aa, Artificial Sequence
  Cyclic GFR-binding peptide
  MOD_RES (28)..(30): Xaa is C or S
MSAISMLYLNDKQQIILKNYQGMVVDRXGXS

SEQ ID NO: 93170 - protein, 31 aa, Artificial Sequence; identical to SEQ ID NO: 38015
  Cyclic GFR-binding peptide
  MOD_RES (1)..(1): Xaa is C or S

SEQ ID NO: 93171 - protein, 32 aa, Artificial Sequence
  Cyclic GFR-binding peptide
  MOD_RES (5)..(6): Xaa is C or S
ASKAXXVPTKLSAISILYLDKGVVTYLKNYQG

SEQ ID NO: 93172 - protein, 31 aa, Artificial Sequence; identical to SEQ ID NO: 38020
  Cyclic GFR-binding peptide

SEQ ID NO: 93173 - protein, 27 aa, Artificial Sequence
  Cyclic GFR-binding peptide
  MOD_RES (1)..(1): Xaa is C or S
XTPTKMSAISMLYLNDKQQIILKNYQG

SEQ ID NO: 93174 - protein, 21 aa, Artificial Sequence
  Cyclic GFR-binding peptide
MSAISILYLDENKNVVLKNYQ

SEQ ID NO: 93175 - protein, 33 aa, Artificial Sequence
  Cyclic GFR-binding peptide
  MOD_RES (5)..(6): Xaa is C or S
SAGPXXTPTKMSAISMLYLNDKQQIILKNYQGM

SEQ ID NO: 93176 - protein, 32 aa, Artificial Sequence
  Cyclic GFR-binding peptide
  MOD_RES (30)..(32): Xaa is C or S
TKLSAISILYLDKGVVTYLKNYQGMAVSEXGX

SEQ ID NO: 93177 - protein, 30 aa, Artificial Sequence
  Cyclic GFR-binding peptide
  MOD_RES (4)..(5): Xaa is C or S
PSTXXAPVKTSAISMLYLDNGRVLLLKNYQ

SEQ ID NO: 93178 - protein, 25 aa, Artificial Sequence
  Cyclic GFR-binding peptide
PVKTSAISMLYLDNGRVLLLKNYQM

SEQ ID NO: 93179 - protein, 23 aa, Artificial Sequence
  Cyclic GFR-binding peptide
LSAISILYLDAANNVVLKNYQDM

SEQ ID NO: 93180 - protein, 38 aa, Artificial Sequence; identical to SEQ ID NO: 38031
  Cyclic GFR-binding peptide
  MOD_RES (3)..(4)..(36)..(38): Xaa is C or S

SEQ ID NO: 93181 - protein, 30 aa, Artificial Sequence
  Cyclic GFR-binding peptide
PTKMSAISMLYLNDKQQIILKNYQGMVVDR

SEQ ID NO: 93182 - protein, 32 aa, Artificial Sequence; identical to SEQ ID NO: 38033
  Cyclic GFR-binding peptide
  MOD_RES (31)..(31): Xaa is C or S

SEQ ID NO: 93183 - protein, 30 aa, Artificial Sequence
  Cyclic GFR-binding peptide
  MOD_RES (28)..(30): Xaa is C or S
LSAISILYLDAANNVVLKNYQDMVVEAXGX

SEQ ID NO: 93184 - protein, 30 aa, Artificial Sequence
  Cyclic GFR-binding peptide
  MOD_RES (1)..(1): Xaa is C or S
XVPEKMSAISILYLDENKNVVLKNYQNMTV

SEQ ID NO: 93185 - protein, 32 aa, Artificial Sequence
  Cyclic GFR-binding peptide
  MOD_RES (30)..(32): Xaa is C or S
ARLSAISILYLDAANNVVLKNYQDMVVEAXGX

SEQ ID NO: 93186 - protein, 38 aa, Artificial Sequence; identical to SEQ ID NO: 38035
  Cyclic GFR-binding peptide
  MOD_RES (2)..(3)..(35)..(37): Xaa is C or S

SEQ ID NO: 93187 - protein, 23 aa, Artificial Sequence
  Cyclic GFR-binding peptide
VKTSAISMLYLDNGRVLLLKNYQ

SEQ ID NO: 93188 - protein, 34 aa, Artificial Sequence
  Cyclic GFR-binding peptide
  MOD_RES (31)..(33): Xaa is C or S
PARLSAISILYLDAANNVVLKNYQDMVVEAXGXR

SEQ ID NO: 93189 - protein, 26 aa, Artificial Sequence
  Cyclic GFR-binding peptide
SAISMLYLNDKQQIILKNYQGMVVDR

SEQ ID NO: 93190 - protein, 29 aa, Artificial Sequence
  Cyclic GFR-binding peptide
  MOD_RES (3)..(4): Xaa is C or S
KAXXVPTKLSAISILYLDKGVVTYLKNYQ

SEQ ID NO: 93191 - protein, 35 aa, Artificial Sequence; identical to SEQ ID NO: 38040
  Cyclic GFR-binding peptide
  MOD_RES (2)..(3)..(35): Xaa is C or S

SEQ ID NO: 93192 - protein, 26 aa, Artificial Sequence
  Cyclic GFR-binding peptide
ARLSAISILYLDAANNVVLKNYQDMV

SEQ ID NO: 93193 - protein, 29 aa, Artificial Sequence
  Cyclic GFR-binding peptide
  MOD_RES (28)..(28): Xaa is C or S
MSAISMLYLNDKQQIILKNYQGMVVDRXG

SEQ ID NO: 93194 - protein, 34 aa, Artificial Sequence; identical to SEQ ID NO: 38049
  Cyclic GFR-binding peptide
  MOD_RES (3)..(4): Xaa is C or S

SEQ ID NO: 93195 - protein, 24 aa, Artificial Sequence
  Cyclic GFR-binding peptide
VKTSAISMLYLDNGRVLLLKNYQM

SEQ ID NO: 93196 - protein, 37 aa, Artificial Sequence; identical to SEQ ID NO: 38051
  Cyclic GFR-binding peptide
  MOD_RES (6)..(7): Xaa is C or S

SEQ ID NO: 93197 - protein, 29 aa, Artificial Sequence
  Cyclic GFR-binding peptide
  MOD_RES (2)..(3): Xaa is C or S
TXXAPVKTSAISMLYLDNGRVLLLKNYQM

SEQ ID NO: 93198 - protein, 23 aa, Artificial Sequence
  Cyclic GFR-binding peptide
LSAISILYLDKGVVTYLKNYQGM

SEQ ID NO: 93199 - protein, 39 aa, Artificial Sequence; identical to SEQ ID NO: 38054
  Cyclic GFR-binding peptide
  MOD_RES (3)..(4)..(36)..(38): Xaa is C or S

SEQ ID NO: 93200 - protein, 31 aa, Artificial Sequence
  Cyclic GFR-binding peptide
  MOD_RES (2)..(3): Xaa is C or S
PXXVPEKMSAISILYLDENKNVVLKNYQNMT

SEQ ID NO: 93201 - protein, 24 aa, Artificial Sequence
  Cyclic GFR-binding peptide
PARLSAISILYLDAANNVVLKNYQ

SEQ ID NO: 93202 - protein, 21 aa, Artificial Sequence
  Cyclic GFR-binding peptide
TSAISMLYLDNGRVLLLKNYQ

SEQ ID NO: 93203 - protein, 20 aa, Artificial Sequence
  Cyclic GFR-binding peptide
SAISILYLDKGVVTYLKNYQ

SEQ ID NO: 93204 - protein, 34 aa, Artificial Sequence
  Cyclic GFR-binding peptide
  MOD_RES (6)..(7): Xaa is C or S
GSAGPXXTPTKMSAISMLYLNDKQQIILKNYQGM

SEQ ID NO: 93205 - protein, 31 aa, Artificial Sequence
  Cyclic GFR-binding peptide
  MOD_RES (29)..(31): Xaa is C or S
VKTSAISMLYLDNGRVLLLKNYQMIVEEXGX

SEQ ID NO: 93206 - protein, 26 aa, Artificial Sequence
  Cyclic GFR-binding peptide
TSAISMLYLDNGRVLLLKNYQMIVEE

SEQ ID NO: 93207 - protein, 20 aa, Artificial Sequence
  Cyclic GFR-binding peptide
SAISILYLDKGVVTYLKNYQ

SEQ ID NO: 93208 - protein, 22 aa, Artificial Sequence
  Cyclic GFR-binding peptide
SAISMLYLNDKQQIILKNYQGM

SEQ ID NO: 93209 - protein, 33 aa, Artificial Sequence; identical to SEQ ID NO: 38071
  Cyclic GFR-binding peptide
  MOD_RES (2)..(3): Xaa is C or S

SEQ ID NO: 93210 - protein, 27 aa, Artificial Sequence
  Cyclic GFR-binding peptide
MSAISMLYLNDKQQIILKNYQGMVVDR

SEQ ID NO: 93211 - protein, 37 aa, Artificial Sequence; identical to SEQ ID NO: 38073
  Cyclic GFR-binding peptide
  MOD_RES (1)..(2)..(34)..(36): Xaa is C or S

SEQ ID NO: 93212 - protein, 41 aa, Artificial Sequence; identical to SEQ ID NO: 38076
  Cyclic GFR-binding peptide
  MOD_RES (6)..(7)..(39)..(41): Xaa is C or S

SEQ ID NO: 93213 - protein, 41 aa, Artificial Sequence; identical to SEQ ID NO: 38079
  Cyclic GFR-binding peptide
  MOD_RES (6)..(7)..(39)..(41): Xaa is C or S

SEQ ID NO: 93214 - protein, 24 aa, Artificial Sequence
  Cyclic GFR-binding peptide
KTSAISMLYLDNGRVLLLKNYQMI

SEQ ID NO: 93215 - protein, 26 aa, Artificial Sequence
  Cyclic GFR-binding peptide
  MOD_RES (1)..(1): Xaa is C or S
XVPARLSAISILYLDAANNVVLKNYQ

SEQ ID NO: 93216 - protein, 30 aa, Artificial Sequence
  Cyclic GFR-binding peptide
PEKMSAISILYLDENKNVVLKNYQNMTVES

SEQ ID NO: 93217 - protein, 31 aa, Artificial Sequence; identical to SEQ ID NO: 38082
  Cyclic GFR-binding peptide
  MOD_RES (1)..(1): Xaa is C or S

SEQ ID NO: 93218 - protein, 30 aa, Artificial Sequence; identical to SEQ ID NO: 38083
  Cyclic GFR-binding peptide

SEQ ID NO: 93219 - protein, 30 aa, Artificial Sequence
  Cyclic GFR-binding peptide
  MOD_RES (4)..(5): Xaa is C or S
PEPXXVPEKMSAISILYLDENKNVVLKNYQ

SEQ ID NO: 93220 - protein, 30 aa, Artificial Sequence
  Cyclic GFR-binding peptide
  MOD_RES (30)..(30): Xaa is C or S
PVKTSAISMLYLDNGRVLLLKNYQMIVEEX

SEQ ID NO: 93221 - protein, 30 aa, Artificial Sequence
  Cyclic GFR-binding peptide
  MOD_RES (3)..(4): Xaa is C or S
ASXXVPARLSAISILYLDAANNVVLKNYQD

SEQ ID NO: 93222 - protein, 25 aa, Artificial Sequence
  Cyclic GFR-binding peptide
VPTKLSAISILYLDKGVVTYLKNYQ

SEQ ID NO: 93223 - protein, 34 aa, Artificial Sequence
  Cyclic GFR-binding peptide
  MOD_RES (31)..(33): Xaa is C or S
PEKMSAISILYLDENKNVVLKNYQNMTVESXAXR

SEQ ID NO: 93224 - protein, 25 aa, Artificial Sequence
  Cyclic GFR-binding peptide
APVKTSAISMLYLDNGRVLLLKNYQ

SEQ ID NO: 93225 - protein, 30 aa, Artificial Sequence
  Cyclic GFR-binding peptide
  MOD_RES (28)..(30): Xaa is C or S
LSAISILYLDKGVVTYLKNYQGMAVSEXGX

SEQ ID NO: 93226 - protein, 24 aa, Artificial Sequence
  Cyclic GFR-binding peptide
SAISMLYLNDKQQIILKNYQGMVV

SEQ ID NO: 93227 - protein, 26 aa, Artificial Sequence
  Cyclic GFR-binding peptide
LSAISILYLDKGVVTYLKNYQGMAVS

SEQ ID NO: 93228 - protein, 30 aa, Artificial Sequence
  Cyclic GFR-binding peptide
  MOD_RES (27)..(29): Xaa is C or S
SAISILYLDENKNVVLKNYQNMTVESXAXR

SEQ ID NO: 93229 - protein, 40 aa, Artificial Sequence; identical to SEQ ID NO: 38107
  Cyclic GFR-binding peptide
  MOD_RES (6)..(7)..(39): Xaa is C or S

SEQ ID NO: 93230 - protein, 37 aa, Artificial Sequence; identical to SEQ ID NO: 38109
  Cyclic GFR-binding peptide
  MOD_RES (4)..(5)..(37): Xaa is C or S

SEQ ID NO: 93231 - protein, 39 aa, Artificial Sequence; identical to SEQ ID NO: 38110
  Cyclic GFR-binding peptide
  MOD_RES (3)..(4)..(36)..(38): Xaa is C or S

SEQ ID NO: 93232 - protein, 33 aa, Artificial Sequence; identical to SEQ ID NO: 38112
  Cyclic GFR-binding peptide
  MOD_RES (1)..(33): Xaa is C or S

SEQ ID NO: 93233 - protein, 21 aa, Artificial Sequence
  Cyclic GFR-binding peptide
SAISILYLDKGVVTYLKNYQG

SEQ ID NO: 93234 - protein, 32 aa, Artificial Sequence
  Cyclic GFR-binding peptide
  MOD_RES (31)..(31): Xaa is C or S
PTKLSAISILYLDKGVVTYLKNYQGMAVSEXG

SEQ ID NO: 93235 - protein, 38 aa, Artificial Sequence; identical to SEQ ID NO: 38116
  Cyclic GFR-binding peptide
  MOD_RES (4)..(5)..(37): Xaa is C or S

SEQ ID NO: 93236 - protein, 37 aa, Artificial Sequence; identical to SEQ ID NO: 38117
  Cyclic GFR-binding peptide
  MOD_RES (3)..(4)..(36): Xaa is C or S

SEQ ID NO: 93237 - protein, 26 aa, Artificial Sequence
  Cyclic GFR-binding peptide
  MOD_RES (26)..(26): Xaa is C or S
SAISMLYLDNGRVLLLKNYQMIVEEX

SEQ ID NO: 93238 - protein, 28 aa, Artificial Sequence
  Cyclic GFR-binding peptide
VPTKLSAISILYLDKGVVTYLKNYQGMA

SEQ ID NO: 93239 - protein, 30 aa, Artificial Sequence
  Cyclic GFR-binding peptide
PARLSAISILYLDAANNVVLKNYQDMVVEA

SEQ ID NO: 93240 - protein, 33 aa, Artificial Sequence; identical to SEQ ID NO: 38124
  Cyclic GFR-binding peptide
  MOD_RES (2)..(3): Xaa is C or S

SEQ ID NO: 93241 - protein, 36 aa, Artificial Sequence; identical to SEQ ID NO: 38125
  Cyclic GFR-binding peptide
  MOD_RES (3)..(4)..(36): Xaa is C or S

SEQ ID NO: 93242 - protein, 30 aa, Artificial Sequence
  Cyclic GFR-binding peptide
  MOD_RES (4)..(5): Xaa is C or S
SKAXXVPTKLSAISILYLDKGVVTYLKNYQ

SEQ ID NO: 93243 - protein, 28 aa, Artificial Sequence
  Cyclic GFR-binding peptide
  MOD_RES (28)..(28): Xaa is C or S
KTSAISMLYLDNGRVLLLKNYQMIVEEX

SEQ ID NO: 93244 - protein, 27 aa, Artificial Sequence
  Cyclic GFR-binding peptide
  MOD_RES (1)..(1): Xaa is C or S
XVPARLSAISILYLDAANNVVLKNYQD

SEQ ID NO: 93245 - protein, 25 aa, Artificial Sequence
  Cyclic GFR-binding peptide
EKMSAISILYLDENKNVVLKNYQNM

SEQ ID NO: 93246 - protein, 25 aa, Artificial Sequence
  Cyclic GFR-binding peptide
KTSAISMLYLDNGRVLLLKNYQMIV

SEQ ID NO: 93247 - protein, 22 aa, Artificial Sequence
  Cyclic GFR-binding peptide
SAISILYLDAANNVVLKNYQDM

SEQ ID NO: 93248 - protein, 33 aa, Artificial Sequence
  Cyclic GFR-binding peptide
  MOD_RES (4)..(5): Xaa is C or S
PEPXXVPEKMSAISILYLDENKNVVLKNYQNMT

SEQ ID NO: 93249 - protein, 30 aa, Artificial Sequence
  Cyclic GFR-binding peptide
  MOD_RES (3)..(4): Xaa is C or S
EPXXVPEKMSAISILYLDENKNVVLKNYQN

SEQ ID NO: 93250 - protein, 35 aa, Artificial Sequence; identical to SEQ ID NO: 38133
  Cyclic GFR-binding peptide
  MOD_RES (4)..(5): Xaa is C or S

SEQ ID NO: 93251 - protein, 36 aa, Artificial Sequence; identical to SEQ ID NO: 38134
  Cyclic GFR-binding peptide
  MOD_RES (1)..(33)..(35): Xaa is C or S

SEQ ID NO: 93252 - protein, 31 aa, Artificial Sequence; identical to SEQ ID NO: 38135
  Cyclic GFR-binding peptide
  MOD_RES (1)..(1): Xaa is C or S

SEQ ID NO: 93253 - protein, 33 aa, Artificial Sequence
  Cyclic GFR-binding peptide
  MOD_RES (4)..(5): Xaa is C or S
AGPXXTPTKMSAISMLYLNDKQQIILKNYQGMV

SEQ ID NO: 93254 - protein, 32 aa, Artificial Sequence
  Cyclic GFR-binding peptide
  MOD_RES (30)..(32): Xaa is C or S
TKMSAISMLYLNDKQQIILKNYQGMVVDRXGX

SEQ ID NO: 93255 - protein, 29 aa, Artificial Sequence
  Cyclic GFR-binding peptide
  MOD_RES (27)..(29): Xaa is C or S
SAISILYLDAANNVVLKNYQDMVVEAXGX

SEQ ID NO: 93256 - protein, 30 aa, Artificial Sequence
  Cyclic GFR-binding peptide
  MOD_RES (3)..(4): Xaa is C or S
GPXXTPTKMSAISMLYLNDKQQIILKNYQG

SEQ ID NO: 93257 - protein, 25 aa, Artificial Sequence
  Cyclic GFR-binding peptide
KMSAISILYLDENKNVVLKNYQNMT

SEQ ID NO: 93258 - protein, 32 aa, Artificial Sequence; identical to SEQ ID NO: 38148
  Cyclic GFR-binding peptide
  MOD_RES (1)..(2): Xaa is C or S

SEQ ID NO: 93259 - protein, 29 aa, Artificial Sequence
  Cyclic GFR-binding peptide
  MOD_RES (27)..(29): Xaa is C or S
SAISILYLDKGVVTYLKNYQGMAVSEXGX

SEQ ID NO: 93260 - protein, 33 aa, Artificial Sequence; identical to SEQ ID NO: 38150
  Cyclic GFR-binding peptide
  MOD_RES (1)..(2)..(33): Xaa is C or S

SEQ ID NO: 93261 - protein, 33 aa, Artificial Sequence; identical to SEQ ID NO: 38152
  Cyclic GFR-binding peptide
  MOD_RES (1)..(2): Xaa is C or S

SEQ ID NO: 93262 - protein, 23 aa, Artificial Sequence
  Cyclic GFR-binding peptide
KMSAISILYLDENKNVVLKNYQN

SEQ ID NO: 93263 - protein, 32 aa, Artificial Sequence; identical to SEQ ID NO: 38154
  Cyclic GFR-binding peptide
  MOD_RES (32)..(32): Xaa is C or S

SEQ ID NO: 93264 - protein, 33 aa, Artificial Sequence
  Cyclic GFR-binding peptide
  MOD_RES (3)..(4): Xaa is C or S
KAXXVPTKLSAISILYLDKGVVTYLKNYQGMAV

SEQ ID NO: 93265 - protein, 28 aa, Artificial Sequence
  Cyclic GFR-binding peptide
  MOD_RES (2)..(3): Xaa is C or S
TXXAPVKTSAISMLYLDNGRVLLLKNYQ

SEQ ID NO: 93266 - protein, 40 aa, Artificial Sequence; identical to SEQ ID NO: 38156
  Cyclic GFR-binding peptide
  MOD_RES (6)..(7)..(38)..(40): Xaa is C or S

SEQ ID NO: 93267 - protein, 26 aa, Artificial Sequence
  Cyclic GFR-binding peptide
VPARLSAISILYLDAANNVVLKNYQD

SEQ ID NO: 93268 - protein, 35 aa, Artificial Sequence
  Cyclic GFR-binding peptide
  MOD_RES (6)..(7): Xaa is C or S
HVPKPXXAPTKLSAISVLYLDDSSNVILKNYQNMV

SEQ ID NO: 93269 - protein, 31 aa, Artificial Sequence
  Cyclic GFR-binding peptide
  MOD_RES (5)..(6): Xaa is C or S
IPEPXXVPEKMSAISILYLDENKNVVLKNYQ

SEQ ID NO: 93270 - protein, 27 aa, Artificial Sequence
  Cyclic GFR-binding peptide
PTKMSAISMLYLNDKQQIILKNYQGMV

SEQ ID NO: 93271 - protein, 33 aa, Artificial Sequence
  Cyclic GFR-binding peptide
  MOD_RES (4)..(5): Xaa is C or S
PSTXXAPVKTSAISMLYLDNGRVLLLKNYQMIV

SEQ ID NO: 93272 - protein, 42 aa, Artificial Sequence; identical to SEQ ID NO: 38163
  Cyclic GFR-binding peptide
  MOD_RES (6)..(7)..(39)..(41): Xaa is C or S

SEQ ID NO: 93273 - protein, 36 aa, Artificial Sequence; identical to SEQ ID NO: 38164
  Cyclic GFR-binding peptide
  MOD_RES (2)..(3)..(35): Xaa is C or S

SEQ ID NO: 93274 - protein, 32 aa, Artificial Sequence
  Cyclic GFR-binding peptide
  MOD_RES (2)..(3): Xaa is C or S
TXXAPVKTSAISMLYLDNGRVLLLKNYQMIVE

SEQ ID NO: 93275 - protein, 22 aa, Artificial Sequence
  Cyclic GFR-binding peptide
SAISILYLDKGVVTYLKNYQGM

SEQ ID NO: 93276 - protein, 40 aa, Artificial Sequence; identical to SEQ ID NO: 38167
  Cyclic GFR-binding peptide
  MOD_RES (6)..(7)..(39): Xaa is C or S

SEQ ID NO: 93277 - protein, 24 aa, Artificial Sequence
  Cyclic GFR-binding peptide
PVKTSAISMLYLDNGRVLLLKNYQ

SEQ ID NO: 93278 - protein, 32 aa, Artificial Sequence
  Cyclic GFR-binding peptide
  MOD_RES (4)..(5): Xaa is C or S
PASXXVPARLSAISILYLDAANNVVLKNYQDM

SEQ ID NO: 93279 - protein, 27 aa, Artificial Sequence
  Cyclic GFR-binding peptide
TKMSAISMLYLNDKQQIILKNYQGMVV

SEQ ID NO: 93280 - protein, 38 aa, Artificial Sequence; identical to SEQ ID NO: 38173
  Cyclic GFR-binding peptide
  MOD_RES (4)..(5)..(37): Xaa is C or S

SEQ ID NO: 93281 - protein, 32 aa, Artificial Sequence
  Cyclic GFR-binding peptide
  MOD_RES (2)..(3): Xaa is C or S
SXXVPARLSAISILYLDAANNVVLKNYQDMVV

SEQ ID NO: 93282 - protein, 35 aa, Artificial Sequence; identical to SEQ ID NO: 38175
  Cyclic GFR-binding peptide
  MOD_RES (1)..(32)..(34): Xaa is C or S

SEQ ID NO: 93283 - protein, 24 aa, Artificial Sequence
  Cyclic GFR-binding peptide
KMSAISILYLDENKNVVLKNYQNM

SEQ ID NO: 93284 - protein, 27 aa, Artificial Sequence
  Cyclic GFR-binding peptide
TKLSAISILYLDKGVVTYLKNYQGMAV

SEQ ID NO: 93285 - protein, 21 aa, Artificial Sequence
  Cyclic GFR-binding peptide
LSAISILYLDAANNVVLKNYQ

SEQ ID NO: 93286 - protein, 35 aa, Artificial Sequence; identical to SEQ ID NO: 38177
  Cyclic GFR-binding peptide
  MOD_RES (4)..(5): Xaa is C or S

SEQ ID NO: 93287 - protein, 30 aa, Artificial Sequence; identical to SEQ ID NO: 729
  Cyclic GFR-binding peptide

SEQ ID NO: 93288 - protein, 41 aa, Artificial Sequence; identical to SEQ ID NO: 38181
  Cyclic GFR-binding peptide
  MOD_RES (6)..(7)..(39)..(41): Xaa is C or S

SEQ ID NO: 93289 - protein, 36 aa, Artificial Sequence; identical to SEQ ID NO: 38183
  Cyclic GFR-binding peptide
  MOD_RES (5)..(6): Xaa is C or S

SEQ ID NO: 93290 - protein, 28 aa, Artificial Sequence
  Cyclic GFR-binding peptide
  MOD_RES (27)..(27): Xaa is C or S
SAISILYLDENKNVVLKNYQNMTVESXA

SEQ ID NO: 93291 - protein, 36 aa, Artificial Sequence; identical to SEQ ID NO: 38186
  Cyclic GFR-binding peptide
  MOD_RES (1)..(2)..(34)..(36): Xaa is C or S

SEQ ID NO: 93292 - protein, 22 aa, Artificial Sequence
  Cyclic GFR-binding peptide
MSAISILYLDENKNVVLKNYQN

SEQ ID NO: 93293 - protein, 34 aa, Artificial Sequence
  Cyclic GFR-binding peptide
  MOD_RES (4)..(5): Xaa is C or S
PASXXVPARLSAISILYLDAANNVVLKNYQDMVV

SEQ ID NO: 93294 - protein, 34 aa, Artificial Sequence
  Cyclic GFR-binding peptide
  MOD_RES (6)..(7): Xaa is C or S
AAPASXXVPARLSAISILYLDAANNVVLKNYQDM

SEQ ID NO: 93295 - protein, 29 aa, Artificial Sequence
  Cyclic GFR-binding peptide
  MOD_RES (1)..(1): Xaa is C or S
XVPTKLSAISILYLDKGVVTYLKNYQGMA

SEQ ID NO: 93296 - protein, 24 aa, Artificial Sequence
  Cyclic GFR-binding peptide
RLSAISILYLDAANNVVLKNYQDM

SEQ ID NO: 93297 - protein, 29 aa, Artificial Sequence
  Cyclic GFR-binding peptide
PVKTSAISMLYLDNGRVLLLKNYQMIVEE

SEQ ID NO: 93298 - protein, 40 aa, Artificial Sequence; identical to SEQ ID NO: 38190
  Cyclic GFR-binding peptide
  MOD_RES (4)..(5)..(37)..(39): Xaa is C or S

SEQ ID NO: 93299 - protein, 38 aa, Artificial Sequence; identical to SEQ ID NO: 38191
  Cyclic GFR-binding peptide
  MOD_RES (6)..(7): Xaa is C or S

SEQ ID NO: 93300 - protein, 28 aa, Artificial Sequence
  Cyclic GFR-binding peptide
  MOD_RES (27)..(27): Xaa is C or S
TSAISMLYLDNGRVLLLKNYQMIVEEXG

SEQ ID NO: 93301 - protein, 23 aa, Artificial Sequence
  Cyclic GFR-binding peptide
EKMSAISILYLDENKNVVLKNYQ

SEQ ID NO: 93302 - protein, 31 aa, Artificial Sequence
  Cyclic GFR-binding peptide
  MOD_RES (1)..(2): Xaa is C or S
XXVPTKLSAISILYLDKGVVTYLKNYQGMAV

SEQ ID NO: 93303 - protein, 28 aa, Artificial Sequence
  Cyclic GFR-binding peptide
  MOD_RES (2)..(3): Xaa is C or S
PXXVPEKMSAISILYLDENKNVVLKNYQ

SEQ ID NO: 93304 - protein, 28 aa, Artificial Sequence
  Cyclic GFR-binding peptide
  MOD_RES (28)..(28): Xaa is C or S
MSAISMLYLNDKQQIILKNYQGMVVDRX

SEQ ID NO: 93305 - protein, 37 aa, Artificial Sequence; identical to SEQ ID NO: 38193
  Cyclic GFR-binding peptide
  MOD_RES (2)..(3)..(35)..(37): Xaa is C or S

SEQ ID NO: 93306 - protein, 28 aa, Artificial Sequence
  Cyclic GFR-binding peptide
  MOD_RES (28)..(28): Xaa is C or S
LSAISILYLDAANNVVLKNYQDMVVEAX

SEQ ID NO: 93307 - protein, 34 aa, Artificial Sequence
  Cyclic GFR-binding peptide
  MOD_RES (5)..(6): Xaa is C or S
ASKAXXVPTKLSAISILYLDKGVVTYLKNYQGMA

SEQ ID NO: 93308 - protein, 21 aa, Artificial Sequence
  Cyclic GFR-binding peptide
SAISILYLDAANNVVLKNYQD

SEQ ID NO: 93309 - protein, 35 aa, Artificial Sequence; identical to SEQ ID NO: 38195
  Cyclic GFR-binding peptide
  MOD_RES (1)..(33)..(35): Xaa is C or S

SEQ ID NO: 93310 - protein, 28 aa, Artificial Sequence
  Cyclic GFR-binding peptide
PEKMSAISILYLDENKNVVLKNYQNMTV

SEQ ID NO: 93311 - protein, 31 aa, Artificial Sequence
  Cyclic GFR-binding peptide
  MOD_RES (31)..(31): Xaa is C or S
PTKLSAISILYLDKGVVTYLKNYQGMAVSEX

SEQ ID NO: 93312 - protein, 20 aa, Artificial Sequence
  Cyclic GFR-binding peptide
SAISILYLDAANNVVLKNYQ

SEQ ID NO: 93313 - protein, 27 aa, Artificial Sequence
  Cyclic GFR-binding peptide
AAAAAAARYKKLIKPTKGIFYLISIAN

SEQ ID NO: 93314 - protein, 29 aa, Artificial Sequence
  Cyclic GFR-binding peptide
AAAAAAARHKRLFIPKKRVIEYYLVSTAS

SEQ ID NO: 93315 - protein, 27 aa, Artificial Sequence
  Cyclic GFR-binding peptide
AAAAAAAYHYKLVVKDYEDKYLMSIPS

SEQ ID NO: 93316 - protein, 27 aa, Artificial Sequence
  Cyclic GFR-binding peptide
AAAAAAAQYNKLIVNNSSDLYLVSIAS

SEQ ID NO: 93317 - protein, 27 aa, Artificial Sequence
  Cyclic GFR-binding peptide
AAAAAAARYKKLVVKDYEDFYLMSIAN

SEQ ID NO: 93318 - protein, 27 aa, Artificial Sequence
  Cyclic GFR-binding peptide
AAAAAAARYKKLVKPTRGVFYLISIAN

SEQ ID NO: 93319 - protein, 27 aa, Artificial Sequence
  Cyclic GFR-binding peptide
AAAAAAARHKRLVVKENEDYYLMSTAS

SEQ ID NO: 93320 - protein, 27 aa, Artificial Sequence
  Cyclic GFR-binding peptide
AAAAAAAYHYKLIKPTKGIKYLISIPS

SEQ ID NO: 93321 - protein, 29 aa, Artificial Sequence
  Cyclic GFR-binding peptide
AAAAAAARYKKLFIPKKRVIEFYLVSIAN

SEQ ID NO: 93322 - protein, 27 aa, Artificial Sequence
  Cyclic GFR-binding peptide
AAAAAAAYHYKLVVKENEDKYLMSIPS

SEQ ID NO: 93323 - protein, 27 aa, Artificial Sequence
  Cyclic GFR-binding peptide
AAAAAAARHKRLVKPKRGVYYLISTAS

SEQ ID NO: 93324 - protein, 27 aa, Artificial Sequence
  Cyclic GFR-binding peptide
AAAAAAAYHYKLVKPKRGVKYLISIPS

SEQ ID NO: 93325 - protein, 29 aa, Artificial Sequence
  Cyclic GFR-binding peptide
AAAAAAAQYNKLFIPKKRVIELYLVSIAS

SEQ ID NO: 93326 - protein, 27 aa, Artificial Sequence
  Cyclic GFR-binding peptide
AAAAAAAQYNKLVKPTRGVLYLISIAS

SEQ ID NO: 93327 - protein, 27 aa, Artificial Sequence
  Cyclic GFR-binding peptide
AAAAAAARYKKLVVKENEDFYLMSIAN

SEQ ID NO: 93328 - protein, 27 aa, Artificial Sequence
  Cyclic GFR-binding peptide
AAAAAAAQYNKLTPVGMDDLYLVSIAS

SEQ ID NO: 93329 - protein, 27 aa, Artificial Sequence
  Cyclic GFR-binding peptide
AAAAAAARYKKLTPVGMDDFYLVSIAN

SEQ ID NO: 93330 - protein, 27 aa, Artificial Sequence
  Cyclic GFR-binding peptide
AAAAAAARYKKLVKPKRGVFYLISIAN

SEQ ID NO: 93331 - protein, 27 aa, Artificial Sequence
  Cyclic GFR-binding peptide
AAAAAAAQYNKLVVKENEDLYLMSIAS

SEQ ID NO: 93332 - protein, 27 aa, Artificial Sequence
  Cyclic GFR-binding peptide
AAAAAAAYHYKLIVNSSDDKYLVSIPS

SEQ ID NO: 93333 - protein, 27 aa, Artificial Sequence
  Cyclic GFR-binding peptide
AAAAAAAQYNKLVKPKRGVLYLISIAS

SEQ ID NO: 93334 - protein, 27 aa, Artificial Sequence
  Cyclic GFR-binding peptide
AAAAAAARYKKLIVNNSSDFYLVSIAN

SEQ ID NO: 93335 - protein, 27 aa, Artificial Sequence
  Cyclic GFR-binding peptide
AAAAAAARYKKLIVNSSDDFYLVSIAN

SEQ ID NO: 93336 - protein, 27 aa, Artificial Sequence
  Cyclic GFR-binding peptide
AAAAAAARHKRLVKPTRGVYYLISTAS

SEQ ID NO: 93337 - protein, 29 aa, Artificial Sequence
  Cyclic GFR-binding peptide
AAAAAAAYHYKLFIPKKRVIEKYLVSIPS

SEQ ID NO: 93338 - protein, 27 aa, Artificial Sequence
  Cyclic GFR-binding peptide
AAAAAAARHKRLIKPTKGIYYLISTAS

SEQ ID NO: 93339 - protein, 27 aa, Artificial Sequence
  Cyclic GFR-binding peptide
AAAAAAARHKRLTPVGMDDYYLVSTAS

SEQ ID NO: 93340 - protein, 27 aa, Artificial Sequence
  Cyclic GFR-binding peptide
AAAAAAAYHYKLTPVGMDDKYLVSIPS

SEQ ID NO: 93341 - protein, 27 aa, Artificial Sequence
  Cyclic GFR-binding peptide
AAAAAAAYHYKLIVNNSSDKYLVSIPS

SEQ ID NO: 93342 - protein, 27 aa, Artificial Sequence
  Cyclic GFR-binding peptide
AAAAAAARHKRLIVNNSSDYYLVSTAS

SEQ ID NO: 93343 - protein, 27 aa, Artificial Sequence
  Cyclic GFR-binding peptide
AAAAAAAYHYKLVKPTRGVKYLISIPS

SEQ ID NO: 93344 - protein, 27 aa, Artificial Sequence
  Cyclic GFR-binding peptide
AAAAAAARHKRLIVNSSDDYYLVSTAS

SEQ ID NO: 93345 - protein, 27 aa, Artificial Sequence
  Cyclic GFR-binding peptide
AAAAAAARHKRLVVKDYEDYYLMSTAS

SEQ ID NO: 93346 - protein, 27 aa, Artificial Sequence
  Cyclic GFR-binding peptide
AAAAAAAQYNKLIKPTKGILYLISIAS

SEQ ID NO: 93347 - protein, 27 aa, Artificial Sequence
  Cyclic GFR-binding peptide
AAAAAAAQYNKLVVKDYEDLYLMSIAS

SEQ ID NO: 93348 - protein, 27 aa, Artificial Sequence
  Cyclic GFR-binding peptide
AAAAAAAQYNKLIVNSSDDLYLVSIAS

SEQ ID NO: 93349 - protein, 27 aa, Artificial Sequence
  Cyclic GFR-binding peptide
NAISILYFIGKTPKILKKYRAAAAAAA

SEQ ID NO: 93350 - protein, 29 aa, Artificial Sequence
  Cyclic GFR-binding peptide
SATSVLYYEIVRKKPIFLRKHRAAAAAAA

SEQ ID NO: 93351 - protein, 27 aa, Artificial Sequence
  Cyclic GFR-binding peptide
SPISMLYKDEYDKVVLKYHYAAAAAAA

SEQ ID NO: 93352 - protein, 27 aa, Artificial Sequence
  Cyclic GFR-binding peptide
SAISVLYLDSSNNVILKNYQAAAAAAA

SEQ ID NO: 93353 - protein, 27 aa, Artificial Sequence
  Cyclic GFR-binding peptide
NAISMLYFDEYDKVVLKKYRAAAAAAA

SEQ ID NO: 93354 - protein, 27 aa, Artificial Sequence
  Cyclic GFR-binding peptide
NAISILYFVGRTPKVLKKYRAAAAAAA

SEQ ID NO: 93355 - protein, 27 aa, Artificial Sequence
  Cyclic GFR-binding peptide
SATSMLYYDENEKVVLRKHRAAAAAAA

SEQ ID NO: 93356 - protein, 27 aa, Artificial Sequence
  Cyclic GFR-binding peptide
SPISILYKIGKTPKILKYHYAAAAAAA

SEQ ID NO: 93357 - protein, 29 aa, Artificial Sequence
  Cyclic GFR-binding peptide
NAISVLYFEIVRKKPIFLKKYRAAAAAAA

SEQ ID NO: 93358 - protein, 27 aa, Artificial Sequence
  Cyclic GFR-binding peptide
SPISMLYKDENEKVVLKYHYAAAAAAA

SEQ ID NO: 93359 - protein, 27 aa, Artificial Sequence
  Cyclic GFR-binding peptide
SATSILYYVGRKPKVLRKHRAAAAAAA

SEQ ID NO: 93360 - protein, 27 aa, Artificial Sequence
  Cyclic GFR-binding peptide
SPISILYKVGRKPKVLKYHYAAAAAAA

SEQ ID NO: 93361 - protein, 29 aa, Artificial Sequence
  Cyclic GFR-binding peptide
SAISVLYLEIVRKKPIFLKNYQAAAAAAA

SEQ ID NO: 93362 - protein, 27 aa, Artificial Sequence
  Cyclic GFR-binding peptide
SAISILYLVGRTPKVLKNYQAAAAAAA

SEQ ID NO: 93363 - protein, 27 aa, Artificial Sequence
  Cyclic GFR-binding peptide
NAISMLYFDENEKVVLKKYRAAAAAAA

SEQ ID NO: 93364 - protein, 27 aa, Artificial Sequence
  Cyclic GFR-binding peptide
SAISVLYLDDMGVPTLKNYQAAAAAAA

SEQ ID NO: 93365 - protein, 27 aa, Artificial Sequence
  Cyclic GFR-binding peptide
NAISVLYFDDMGVPTLKKYRAAAAAAA

SEQ ID NO: 93366 - protein, 27 aa, Artificial Sequence
  Cyclic GFR-binding peptide
NAISILYFVGRKPKVLKKYRAAAAAAA

SEQ ID NO: 93367 - protein, 27 aa, Artificial Sequence
  Cyclic GFR-binding peptide
SAISMLYLDENEKVVLKNYQAAAAAAA

SEQ ID NO: 93368 - protein, 27 aa, Artificial Sequence
  Cyclic GFR-binding peptide
SPISVLYKDDSSNVILKYHYAAAAAAA

SEQ ID NO: 93369 - protein, 27 aa, Artificial Sequence
  Cyclic GFR-binding peptide
SAISILYLVGRKPKVLKNYQAAAAAAA

SEQ ID NO: 93370 - protein, 27 aa, Artificial Sequence
  Cyclic GFR-binding peptide
NAISVLYFDSSNNVILKKYRAAAAAAA

SEQ ID NO: 93371 - protein, 27 aa, Artificial Sequence
  Cyclic GFR-binding peptide
NAISVLYFDDSSNVILKKYRAAAAAAA

SEQ ID NO: 93372 - protein, 27 aa, Artificial Sequence
  Cyclic GFR-binding peptide
SATSILYYVGRTPKVLRKHRAAAAAAA

SEQ ID NO: 93373 - protein, 29 aa, Artificial Sequence
  Cyclic GFR-binding peptide
SPISVLYKEIVRKKPIFLKYHYAAAAAAA

SEQ ID NO: 93374 - protein, 27 aa, Artificial Sequence
  Cyclic GFR-binding peptide
SATSILYYIGKTPKILRKHRAAAAAAA

SEQ ID NO: 93375 - protein, 27 aa, Artificial Sequence
  Cyclic GFR-binding peptide
SATSVLYYDDMGVPTLRKHRAAAAAAA

SEQ ID NO: 93376 - protein, 27 aa, Artificial Sequence
  Cyclic GFR-binding peptide
SPISVLYKDDMGVPTLKYHYAAAAAAA

SEQ ID NO: 93377 - protein, 27 aa, Artificial Sequence
  Cyclic GFR-binding peptide
SPISVLYKDSSNNVILKYHYAAAAAAA

SEQ ID NO: 93378 - protein, 27 aa, Artificial Sequence
  Cyclic GFR-binding peptide
SATSVLYYDSSNNVILRKHRAAAAAAA

SEQ ID NO: 93379 - protein, 27 aa, Artificial Sequence
  Cyclic GFR-binding peptide
SPISILYKVGRTPKVLKYHYAAAAAAA

SEQ ID NO: 93380 - protein, 27 aa, Artificial Sequence
  Cyclic GFR-binding peptide
SATSVLYYDDSSNVILRKHRAAAAAAA

SEQ ID NO: 93381 - protein, 27 aa, Artificial Sequence
  Cyclic GFR-binding peptide
SATSMLYYDEYDKVVLRKHRAAAAAAA

SEQ ID NO: 93382 - protein, 27 aa, Artificial Sequence
  Cyclic GFR-binding peptide
SAISILYLIGKTPKILKNYQAAAAAAA

SEQ ID NO: 93383 - protein, 27 aa, Artificial Sequence
  Cyclic GFR-binding peptide
SAISMLYLDEYDKVVLKNYQAAAAAAA

SEQ ID NO: 93384 - protein, 27 aa, Artificial Sequence
  Cyclic GFR-binding peptide
SAISVLYLDDSSNVILKNYQAAAAAAA

SEQ ID NO: 93385 - protein, 27 aa, Artificial Sequence
  Cyclic GFR-binding peptide
AAAAAAANSLQEVVKDYEDYYLMTLPE

SEQ ID NO: 93386 - protein, 27 aa, Artificial Sequence
  Cyclic GFR-binding peptide
AAAAAAANSLQEIKPTKGIYYVIPLPE

SEQ ID NO: 93387 - protein, 27 aa, Artificial Sequence
  Cyclic GFR-binding peptide
AAAAAAANSLQEVKPKRGVYYLITLPE

SEQ ID NO: 93388 - protein, 27 aa, Artificial Sequence
  Cyclic GFR-binding peptide
AAAAAAANSLQEVKPTRGVYYVIPLPE

SEQ ID NO: 93389 - protein, 27 aa, Artificial Sequence
  Cyclic GFR-binding peptide
AAAAAAAEYQKYIVNSSDDIFLVSIPS

SEQ ID NO: 93390 - protein, 27 aa, Artificial Sequence
  Cyclic GFR-binding peptide
AAAAAAAEYQKYVKPTRGVIFLISIPS

SEQ ID NO: 93391 - protein, 27 aa, Artificial Sequence
  Cyclic GFR-binding peptide
AAAAAAANSLQEVVKENEDYYLMTLPE

SEQ ID NO: 93392 - protein, 27 aa, Artificial Sequence
  Cyclic GFR-binding peptide
AAAAAAANSLQEVVNNASDYYLITLPE

SEQ ID NO: 93393 - protein, 27 aa, Artificial Sequence
  Cyclic GFR-binding peptide
AAAAAAANSLQEVKPKRGVYYVIPLPE

SEQ ID NO: 93394 - protein, 27 aa, Artificial Sequence
  Cyclic GFR-binding peptide
AAAAAAANSLQEVVNNASDYYVIPLPE

SEQ ID NO: 93395 - protein, 27 aa, Artificial Sequence
  Cyclic GFR-binding peptide
AAAAAAANSLQEVKPTRGVYYLITLPE

SEQ ID NO: 93396 - protein, 27 aa, Artificial Sequence
  Cyclic GFR-binding peptide
AAAAAAAEYQKYIKPTKGIIFLISIPS

SEQ ID NO: 93397 - protein, 27 aa, Artificial Sequence
  Cyclic GFR-binding peptide
AAAAAAAEYQKYVVNNASDIFLISIPS

SEQ ID NO: 93398 - protein, 27 aa, Artificial Sequence
  Cyclic GFR-binding peptide
AAAAAAANSLQEIVNSSDDYYVVPLPE

SEQ ID NO: 93399 - protein, 27 aa, Artificial Sequence
  Cyclic GFR-binding peptide
AAAAAAANSLQEVVKDYEDYYVMPLPE

SEQ ID NO: 93400 - protein, 27 aa, Artificial Sequence
  Cyclic GFR-binding peptide
AAAAAAAEYQKYVVKENEDIFLMSIPS

SEQ ID NO: 93401 - protein, 27 aa, Artificial Sequence
  Cyclic GFR-binding peptide
AAAAAAANSLQEVVKENEDYYVMPLPE

SEQ ID NO: 93402 - protein, 27 aa, Artificial Sequence
  Cyclic GFR-binding peptide
AAAAAAAEYQKYVVKDYEDIFLMSIPS

SEQ ID NO: 93403 - protein, 27 aa, Artificial Sequence
  Cyclic GFR-binding peptide
AAAAAAAQYNKLVVNNASDLYLISIAS

SEQ ID NO: 93404 - protein, 27 aa, Artificial Sequence
  Cyclic GFR-binding peptide
AAAAAAANSLQEIKPTKGIYYLITLPE

SEQ ID NO: 93405 - protein, 27 aa, Artificial Sequence
  Cyclic GFR-binding peptide
AAAAAAAEYQKYVKPKRGVIFLISIPS

SEQ ID NO: 93406 - protein, 27 aa, Artificial Sequence
  Cyclic GFR-binding peptide
AAAAAAARYKKLVVNNASDFYLISIAN

SEQ ID NO: 93407 - protein, 27 aa, Artificial Sequence
  Cyclic GFR-binding peptide
AAAAAAANSLQEIVNSSDDYYLVTLPE

SEQ ID NO: 93408 - protein, 27 aa, Artificial Sequence
  Cyclic GFR-binding peptide
EPLTMLYYDEYDKVVEQLSNAAAAAAA

SEQ ID NO: 93409 - protein, 27 aa, Artificial Sequence
  Cyclic GFR-binding peptide
EPLPIVYYIGKTPKIEQLSNAAAAAAA

SEQ ID NO: 93410 - protein, 27 aa, Artificial Sequence
  Cyclic GFR-binding peptide
EPLTILYYVGRKPKVEQLSNAAAAAAA

SEQ ID NO: 93411 - protein, 27 aa, Artificial Sequence
  Cyclic GFR-binding peptide
EPLPIVYYVGRTPKVEQLSNAAAAAAA

SEQ ID NO: 93412 - protein, 27 aa, Artificial Sequence
  Cyclic GFR-binding peptide
SPISVLFIDDSSNVIYKQYEAAAAAAA

SEQ ID NO: 93413 - protein, 27 aa, Artificial Sequence
  Cyclic GFR-binding peptide
SPISILFIVGRTPKVYKQYEAAAAAAA

SEQ ID NO: 93414 - protein, 27 aa, Artificial Sequence
  Cyclic GFR-binding peptide
EPLTMLYYDENEKVVEQLSNAAAAAAA

SEQ ID NO: 93415 - protein, 27 aa, Artificial Sequence
  Cyclic GFR-binding peptide
EPLTILYYDSANNVVEQLSNAAAAAAA

SEQ ID NO: 93416 - protein, 27 aa, Artificial Sequence
  Cyclic GFR-binding peptide
EPLPIVYYVGRKPKVEQLSNAAAAAAA

SEQ ID NO: 93417 - protein, 27 aa, Artificial Sequence
  Cyclic GFR-binding peptide
EPLPIVYYDSANNVVEQLSNAAAAAAA

SEQ ID NO: 93418 - protein, 27 aa, Artificial Sequence
  Cyclic GFR-binding peptide
EPLTILYYVGRTPKVEQLSNAAAAAAA

SEQ ID NO: 93419 - protein, 27 aa, Artificial Sequence
  Cyclic GFR-binding peptide
SPISILFIIGKTPKIYKQYEAAAAAAA

SEQ ID NO: 93420 - protein, 27 aa, Artificial Sequence
  Cyclic GFR-binding peptide
SPISILFIDSANNVVYKQYEAAAAAAA

SEQ ID NO: 93421 - protein, 27 aa, Artificial Sequence
  Cyclic GFR-binding peptide
EPLPVVYYDDSSNVIEQLSNAAAAAAA

SEQ ID NO: 93422 - protein, 27 aa, Artificial Sequence
  Cyclic GFR-binding peptide
EPLPMVYYDEYDKVVEQLSNAAAAAAA

SEQ ID NO: 93423 - protein, 27 aa, Artificial Sequence
  Cyclic GFR-binding peptide
SPISMLFIDENEKVVYKQYEAAAAAAA

SEQ ID NO: 93424 - protein, 27 aa, Artificial Sequence
  Cyclic GFR-binding peptide
EPLPMVYYDENEKVVEQLSNAAAAAAA

SEQ ID NO: 93425 - protein, 27 aa, Artificial Sequence
  Cyclic GFR-binding peptide
SPISMLFIDEYDKVVYKQYEAAAAAAA

SEQ ID NO: 93426 - protein, 27 aa, Artificial Sequence
  Cyclic GFR-binding peptide
SAISILYLDSANNVVLKNYQAAAAAAA

SEQ ID NO: 93427 - protein, 27 aa, Artificial Sequence
  Cyclic GFR-binding peptide
EPLTILYYIGKTPKIEQLSNAAAAAAA

SEQ ID NO: 93428 - protein, 27 aa, Artificial Sequence
  Cyclic GFR-binding peptide
SPISILFIVGRKPKVYKQYEAAAAAAA

SEQ ID NO: 93429 - protein, 27 aa, Artificial Sequence
  Cyclic GFR-binding peptide
NAISILYFDSANNVVLKKYRAAAAAAA

SEQ ID NO: 93430 - protein, 27 aa, Artificial Sequence
  Cyclic GFR-binding peptide
EPLTVLYYDDSSNVIEQLSNAAAAAAA

SEQ ID NO: 93431 - protein, 29 aa, Artificial Sequence
  Cyclic GFR-binding peptide
AAAAAAAVTAKKLKPKKRVYEIKRVQVPR

SEQ ID NO: 93432 - protein, 29 aa, Artificial Sequence
  Cyclic GFR-binding peptide
AAAAAAAVQVEKLKPKKRVYEVKAVKVSR

SEQ ID NO: 93433 - protein, 29 aa, Artificial Sequence
  Cyclic GFR-binding peptide
AAAAAAAVQVEKFIPKKRVIEVKAVKVSR

SEQ ID NO: 93434 - protein, 29 aa, Artificial Sequence
  Cyclic GFR-binding peptide
AAAAAAAVQVEKHQGQHPKIRVKAMKVSR

SEQ ID NO: 93435 - protein, 29 aa, Artificial Sequence
  Cyclic GFR-binding peptide
AAAAAAAVTAKKHQGQHPKIRIKRMQVPR

SEQ ID NO: 93436 - protein, 29 aa, Artificial Sequence
  Cyclic GFR-binding peptide
AAAAAAASMEGLLKPKKRVYEMIQVTINS

SEQ ID NO: 93437 - protein, 29 aa, Artificial Sequence
  Cyclic GFR-binding peptide
AAAAAAASMEGIFIPKKRVIEMIQVTINS

SEQ ID NO: 93438 - protein, 29 aa, Artificial Sequence
  Cyclic GFR-binding peptide
AAAAAAASMEGLHQGQHPKIRMIQMTINS

SEQ ID NO: 93439 - protein, 29 aa, Artificial Sequence
  Cyclic GFR-binding peptide
AAAAAAASMEGILKPKKRVYEMIQVTINS

SEQ ID NO: 93440 - protein, 29 aa, Artificial Sequence
  Cyclic GFR-binding peptide
AAAAAAASMEGLFIPKKRVIEMIQVTINS

SEQ ID NO: 93441 - protein, 29 aa, Artificial Sequence
  Cyclic GFR-binding peptide
AAAAAAAVTAKKFIPKKRVIEIKRVQVPR

SEQ ID NO: 93442 - protein, 29 aa, Artificial Sequence
  Cyclic GFR-binding peptide
AAAAAAASMEGIHQGQHPKIRMIQMTINS

SEQ ID NO: 93443 - protein, 29 aa, Artificial Sequence
  Cyclic GFR-binding peptide
RPVQVRKIEYVRKKPKLKKATVAAAAAAA

SEQ ID NO: 93444 - protein, 29 aa, Artificial Sequence
  Cyclic GFR-binding peptide
RSVKVAKVEYVRKKPKLKEVQVAAAAAAA

SEQ ID NO: 93445 - protein, 29 aa, Artificial Sequence
  Cyclic GFR-binding peptide
RSVKVAKVEIVRKKPIFKEVQVAAAAAAA

SEQ ID NO: 93446 - protein, 29 aa, Artificial Sequence
  Cyclic GFR-binding peptide
RSVKMAKVRIKPHQGQHKEVQVAAAAAAA

SEQ ID NO: 93447 - protein, 29 aa, Artificial Sequence
  Cyclic GFR-binding peptide
RPVQMRKIRIKPHQGQHKKATVAAAAAAA

SEQ ID NO: 93448 - protein, 29 aa, Artificial Sequence
  Cyclic GFR-binding peptide
SNITVQIMEYVRKKPKLLGEMSAAAAAAA

SEQ ID NO: 93449 - protein, 29 aa, Artificial Sequence
  Cyclic GFR-binding peptide
SNITVQIMEIVRKKPIFIGEMSAAAAAAA

SEQ ID NO: 93450 - protein, 29 aa, Artificial Sequence
  Cyclic GFR-binding peptide
SNITMQIMRIKPHQGQHLGEMSAAAAAAA

SEQ ID NO: 93451 - protein, 29 aa, Artificial Sequence
  Cyclic GFR-binding peptide
SNITVQIMEYVRKKPKLIGEMSAAAAAAA

SEQ ID NO: 93452 - protein, 29 aa, Artificial Sequence
  Cyclic GFR-binding peptide
SNITVQIMEIVRKKPIFLGEMSAAAAAAA

SEQ ID NO: 93453 - protein, 29 aa, Artificial Sequence
  Cyclic GFR-binding peptide
RPVQVRKIEIVRKKPIFKKATVAAAAAAA

SEQ ID NO: 93454 - protein, 29 aa, Artificial Sequence
  Cyclic GFR-binding peptide
SNITMQIMRIKPHQGQHIGEMSAAAAAAA

SEQ ID NO: 93455 - protein, 27 aa, Artificial Sequence
  Cyclic GFR-binding peptide
AAAAAAAEYKFKVKPTRGVLYLISIPE

SEQ ID NO: 93456 - protein, 27 aa, Artificial Sequence
  Cyclic GFR-binding peptide
AAAAAAAEYKFKTPVGMDDLYLVSIPE

SEQ ID NO: 93457 - protein, 27 aa, Artificial Sequence
  Cyclic GFR-binding peptide
AAAAAAAEYQKYVKPKRGVIYLISIPS

SEQ ID NO: 93458 - protein, 27 aa, Artificial Sequence
  Cyclic GFR-binding peptide
AAAAAAAEYQKYVVKDYEDIYLMSIPS

SEQ ID NO: 93459 - protein, 27 aa, Artificial Sequence
  Cyclic GFR-binding peptide
AAAAAAAEYKFKIKPTKGILYLISIPE

SEQ ID NO: 93460 - protein, 27 aa, Artificial Sequence
  Cyclic GFR-binding peptide
AAAAAAAYHYKLYTVVGKDKYLISIPS

SEQ ID NO: 93461 - protein, 27 aa, Artificial Sequence
  Cyclic GFR-binding peptide
AAAAAAARYKKLYTVVGKDFYLISIAN

SEQ ID NO: 93462 - protein, 27 aa, Artificial Sequence
  Cyclic GFR-binding peptide
AAAAAAAEYQKYVVNNAADIYLISIPS

SEQ ID NO: 93463 - protein, 27 aa, Artificial Sequence
  Cyclic GFR-binding peptide
AAAAAAAEYQKYVKPTRGVIYLISIPS

SEQ ID NO: 93464 - protein, 27 aa, Artificial Sequence
  Cyclic GFR-binding peptide
AAAAAAAEYQKYTPVGMDDIYLVSIPS

SEQ ID NO: 93465 - protein, 27 aa, Artificial Sequence
  Cyclic GFR-binding peptide
AAAAAAAEYKFKVVKDYEDLYLMSIPE

SEQ ID NO: 93466 - protein, 27 aa, Artificial Sequence
  Cyclic GFR-binding peptide
AAAAAAAEYKFKVVNNAADLYLISIPE

SEQ ID NO: 93467 - protein, 27 aa, Artificial Sequence
  Cyclic GFR-binding peptide
AAAAAAAEYQKYVVKENEDIYLMSIPS

SEQ ID NO: 93468 - protein, 27 aa, Artificial Sequence
  Cyclic GFR-binding peptide
AAAAAAAEYQKYIKPTKGIIYLISIPS

SEQ ID NO: 93469 - protein, 27 aa, Artificial Sequence
  Cyclic GFR-binding peptide
AAAAAAARYKKLVVNNAADFYLISIAN

SEQ ID NO: 93470 - protein, 27 aa, Artificial Sequence
  Cyclic GFR-binding peptide
AAAAAAAYHYKLVVNNAADKYLISIPS

SEQ ID NO: 93471 - protein, 27 aa, Artificial Sequence
  Cyclic GFR-binding peptide
AAAAAAAEYKFKIVNNSSDLYLVSIPE

SEQ ID NO: 93472 - protein, 27 aa, Artificial Sequence
  Cyclic GFR-binding peptide
AAAAAAAEYQKYIVNSSDDIYLVSIPS

SEQ ID NO: 93473 - protein, 27 aa, Artificial Sequence
  Cyclic GFR-binding peptide
AAAAAAAEYKFKIVNSSDDLYLVSIPE

SEQ ID NO: 93474 - protein, 27 aa, Artificial Sequence
  Cyclic GFR-binding peptide
AAAAAAAEYKFKVKPKRGVLYLISIPE

SEQ ID NO: 93475 - protein, 27 aa, Artificial Sequence
  Cyclic GFR-binding peptide
AAAAAAAEYQKYYTVVGKDIYLISIPS

SEQ ID NO: 93476 - protein, 27 aa, Artificial Sequence
  Cyclic GFR-binding peptide
AAAAAAAEYKFKVVKENEDLYLMSIPE

SEQ ID NO: 93477 - protein, 27 aa, Artificial Sequence
  Cyclic GFR-binding peptide
AAAAAAAEYQKYIVNNSSDIYLVSIPS

SEQ ID NO: 93478 - protein, 27 aa, Artificial Sequence
  Cyclic GFR-binding peptide
AAAAAAAEYKFKYTVVGKDLYLISIPE

SEQ ID NO: 93479 - protein, 27 aa, Artificial Sequence
  Cyclic GFR-binding peptide
EPISILYLVGRTPKVKFKYEAAAAAAA

SEQ ID NO: 93480 - protein, 27 aa, Artificial Sequence
  Cyclic GFR-binding peptide
EPISVLYLDDMGVPTKFKYEAAAAAAA

SEQ ID NO: 93481 - protein, 27 aa, Artificial Sequence
  Cyclic GFR-binding peptide
SPISILYIVGRKPKVYKQYEAAAAAAA

SEQ ID NO: 93482 - protein, 27 aa, Artificial Sequence
  Cyclic GFR-binding peptide
SPISMLYIDEYDKVVYKQYEAAAAAAA

SEQ ID NO: 93483 - protein, 27 aa, Artificial Sequence
  Cyclic GFR-binding peptide
EPISILYLIGKTPKIKFKYEAAAAAAA

SEQ ID NO: 93484 - protein, 27 aa, Artificial Sequence
  Cyclic GFR-binding peptide
SPISILYKDKGVVTYLKYHYAAAAAAA

SEQ ID NO: 93485 - protein, 27 aa, Artificial Sequence
  Cyclic GFR-binding peptide
NAISILYFDKGVVTYLKKYRAAAAAAA

SEQ ID NO: 93486 - protein, 27 aa, Artificial Sequence
  Cyclic GFR-binding peptide
SPISILYIDAANNVVYKQYEAAAAAAA

SEQ ID NO: 93487 - protein, 27 aa, Artificial Sequence
  Cyclic GFR-binding peptide
SPISILYIVGRTPKVYKQYEAAAAAAA

SEQ ID NO: 93488 - protein, 27 aa, Artificial Sequence
  Cyclic GFR-binding peptide
SPISVLYIDDMGVPTYKQYEAAAAAAA

SEQ ID NO: 93489 - protein, 27 aa, Artificial Sequence
  Cyclic GFR-binding peptide
EPISMLYLDEYDKVVKFKYEAAAAAAA

SEQ ID NO: 93490 - protein, 27 aa, Artificial Sequence
  Cyclic GFR-binding peptide
EPISILYLDAANNVVKFKYEAAAAAAA

SEQ ID NO: 93491 - protein, 27 aa, Artificial Sequence
  Cyclic GFR-binding peptide
SPISMLYIDENEKVVYKQYEAAAAAAA

SEQ ID NO: 93492 - protein, 27 aa, Artificial Sequence
  Cyclic GFR-binding peptide
SPISILYIIGKTPKIYKQYEAAAAAAA

SEQ ID NO: 93493 - protein, 27 aa, Artificial Sequence
  Cyclic GFR-binding peptide
NAISILYFDAANNVVLKKYRAAAAAAA

SEQ ID NO: 93494 - protein, 27 aa, Artificial Sequence
  Cyclic GFR-binding peptide
SPISILYKDAANNVVLKYHYAAAAAAA

SEQ ID NO: 93495 - protein, 27 aa, Artificial Sequence
  Cyclic GFR-binding peptide
EPISVLYLDSSNNVIKFKYEAAAAAAA

SEQ ID NO: 93496 - protein, 27 aa, Artificial Sequence
  Cyclic GFR-binding peptide
SPISVLYIDDSSNVIYKQYEAAAAAAA

SEQ ID NO: 93497 - protein, 27 aa, Artificial Sequence
  Cyclic GFR-binding peptide
EPISVLYLDDSSNVIKFKYEAAAAAAA

SEQ ID NO: 93498 - protein, 27 aa, Artificial Sequence
  Cyclic GFR-binding peptide
EPISILYLVGRKPKVKFKYEAAAAAAA

SEQ ID NO: 93499 - protein, 27 aa, Artificial Sequence
  Cyclic GFR-binding peptide
SPISILYIDKGVVTYYKQYEAAAAAAA

SEQ ID NO: 93500 - protein, 27 aa, Artificial Sequence
  Cyclic GFR-binding peptide
EPISMLYLDENEKVVKFKYEAAAAAAA

SEQ ID NO: 93501 - protein, 27 aa, Artificial Sequence
  Cyclic GFR-binding peptide
SPISVLYIDSSNNVIYKQYEAAAAAAA

SEQ ID NO: 93502 - protein, 27 aa, Artificial Sequence
  Cyclic GFR-binding peptide
EPISILYLDKGVVTYKFKYEAAAAAAA

SEQ ID NO: 93503 - protein, 27 aa, Artificial Sequence
  Cyclic GFR-binding peptide
AAAAAAAPIKGYIIQQKDNFYLMNIPS

SEQ ID NO: 93504 - protein, 27 aa, Artificial Sequence
  Cyclic GFR-binding peptide
AAAAAAAPIKGYVVKDYEDFYLMNIPS

SEQ ID NO: 93505 - protein, 27 aa, Artificial Sequence
  Cyclic GFR-binding peptide
AAAAAAAPIKGYIVNSSDDFYLVNIPS

SEQ ID NO: 93506 - protein, 27 aa, Artificial Sequence
  Cyclic GFR-binding peptide
AAAAAAAPIKGYVVNNAADFYLINIPS

SEQ ID NO: 93507 - protein, 27 aa, Artificial Sequence
  Cyclic GFR-binding peptide
AAAAAAAPIKGYYTVVGKDFYLINIPS

SEQ ID NO: 93508 - protein, 27 aa, Artificial Sequence
  Cyclic GFR-binding peptide
AAAAAAAPIKGYLLVRGNDFYLMNIPS

SEQ ID NO: 93509 - protein, 27 aa, Artificial Sequence
  Cyclic GFR-binding peptide
AAAAAAAPIKGYVVKENEDFYLMNIPS

SEQ ID NO: 93510 - protein, 27 aa, Artificial Sequence
  Cyclic GFR-binding peptide
AAAAAAAPIKGYVVNNASDFYLINIPS

SEQ ID NO: 93511 - protein, 27 aa, Artificial Sequence
  Cyclic GFR-binding peptide
AAAAAAAPIKGYTPVGMDDFYLVNIPS

SEQ ID NO: 93512 - protein, 27 aa, Artificial Sequence
  Cyclic GFR-binding peptide
AAAAAAAPIKGYIVNNSSDFYLVNIPS

SEQ ID NO: 93513 - protein, 27 aa, Artificial Sequence
  Cyclic GFR-binding peptide
SPINMLYFNDKQQIIYGKIPAAAAAAA

SEQ ID NO: 93514 - protein, 27 aa, Artificial Sequence
  Cyclic GFR-binding peptide
SPINMLYFDEYDKVVYGKIPAAAAAAA

SEQ ID NO: 93515 - protein, 27 aa, Artificial Sequence
  Cyclic GFR-binding peptide
SPINVLYFDDSSNVIYGKIPAAAAAAA

SEQ ID NO: 93516 - protein, 27 aa, Artificial Sequence
  Cyclic GFR-binding peptide
SPINILYFDAANNVVYGKIPAAAAAAA

SEQ ID NO: 93517 - protein, 27 aa, Artificial Sequence
  Cyclic GFR-binding peptide
SPINILYFDKGVVTYYGKIPAAAAAAA

SEQ ID NO: 93518 - protein, 27 aa, Artificial Sequence
  Cyclic GFR-binding peptide
SPINMLYFDNGRVLLYGKIPAAAAAAA

SEQ ID NO: 93519 - protein, 27 aa, Artificial Sequence
  Cyclic GFR-binding peptide
SPINMLYFDENEKVVYGKIPAAAAAAA

SEQ ID NO: 93520 - protein, 27 aa, Artificial Sequence
  Cyclic GFR-binding peptide
SPINILYFDSANNVVYGKIPAAAAAAA

SEQ ID NO: 93521 - protein, 27 aa, Artificial Sequence
  Cyclic GFR-binding peptide
SPINVLYFDDMGVPTYGKIPAAAAAAA

SEQ ID NO: 93522 - protein, 27 aa, Artificial Sequence
  Cyclic GFR-binding peptide
SPINVLYFDSSNNVIYGKIPAAAAAAA

SEQ ID NO: 93523 - protein, 27 aa, Artificial Sequence
  Cyclic GFR-binding peptide
AAAAAAAEYQKYVVNNASDIYLISIPS

SEQ ID NO: 93524 - protein, 27 aa, Artificial Sequence
  Cyclic GFR-binding peptide
AAAAAAAEYQKYIIQQKDNIYLMSIPS

SEQ ID NO: 93525 - protein, 27 aa, Artificial Sequence
  Cyclic GFR-binding peptide
AAAAAAAEYQKYLLVRGNDIYLMSIPS

SEQ ID NO: 93526 - protein, 27 aa, Artificial Sequence
  Cyclic GFR-binding peptide
SPISILYIDSANNVVYKQYEAAAAAAA

SEQ ID NO: 93527 - protein, 27 aa, Artificial Sequence
  Cyclic GFR-binding peptide
SPISMLYINDKQQIIYKQYEAAAAAAA

SEQ ID NO: 93528 - protein, 27 aa, Artificial Sequence
  Cyclic GFR-binding peptide
SPISMLYIDNGRVLLYKQYEAAAAAAA

SEQ ID NO: 93529 - protein, 27 aa, Artificial Sequence
  Cyclic GFR-binding peptide
AAAAAAAPYVKLYTVVGKDFFLISLSS

SEQ ID NO: 93530 - protein, 27 aa, Artificial Sequence
  Cyclic GFR-binding peptide
AAAAAAAPYVKLIKPTKGIFFLISLSS

SEQ ID NO: 93531 - protein, 27 aa, Artificial Sequence
  Cyclic GFR-binding peptide
AAAAAAAPYVKLIIQQKDNFFLMSLSS

SEQ ID NO: 93532 - protein, 27 aa, Artificial Sequence
  Cyclic GFR-binding peptide
AAAAAAAPYVKLIVNSSDDFFLVSLSS

SEQ ID NO: 93533 - protein, 27 aa, Artificial Sequence
  Cyclic GFR-binding peptide
AAAAAAAPYVKLVKPKRGVFFLISLSS

SEQ ID NO: 93534 - protein, 27 aa, Artificial Sequence
  Cyclic GFR-binding peptide
AAAAAAAPYVKLVKPTRGVFFLISLSS

SEQ ID NO: 93535 - protein, 27 aa, Artificial Sequence
  Cyclic GFR-binding peptide
AAAAAAAPYVKLTPVGMDDFFLVSLSS

SEQ ID NO: 93536 - protein, 29 aa, Artificial Sequence
  Cyclic GFR-binding peptide
AAAAAAAPYVKLHQGQHPKIRFFLMSLSS

SEQ ID NO: 93537 - protein, 27 aa, Artificial Sequence
  Cyclic GFR-binding peptide
AAAAAAAPYVKLVVNKNEDFFLISLSS

SEQ ID NO: 93538 - protein, 27 aa, Artificial Sequence
  Cyclic GFR-binding peptide
AAAAAAAPYVKLVVNNASDFFLISLSS

SEQ ID NO: 93539 - protein, 27 aa, Artificial Sequence
  Cyclic GFR-binding peptide
AAAAAAAPYVKLVVKENEDFFLMSLSS

SEQ ID NO: 93540 - protein, 27 aa, Artificial Sequence
  Cyclic GFR-binding peptide
AAAAAAAPYVKLIVNNSSDFFLVSLSS

SEQ ID NO: 93541 - protein, 29 aa, Artificial Sequence
  Cyclic GFR-binding peptide
AAAAAAAPYVKLLKPKKRVYEFFLVSLSS

SEQ ID NO: 93542 - protein, 27 aa, Artificial Sequence
  Cyclic GFR-binding peptide
AAAAAAAPYVKLLLVRGNDFFLMSLSS

SEQ ID NO: 93543 - protein, 27 aa, Artificial Sequence
  Cyclic GFR-binding peptide
AAAAAAAPYVKLVVKDYEDFFLMSLSS

SEQ ID NO: 93544 - protein, 27 aa, Artificial Sequence
  Cyclic GFR-binding peptide
AAAAAAAPYVKLVVNNAADFFLISLSS

SEQ ID NO: 93545 - protein, 27 aa, Artificial Sequence
  Cyclic GFR-binding peptide
SSLSILFFDKGVVTYLKVYPAAAAAAA

SEQ ID NO: 93546 - protein, 27 aa, Artificial Sequence
  Cyclic GFR-binding peptide
SSLSILFFIGKTPKILKVYPAAAAAAA

SEQ ID NO: 93547 - protein, 27 aa, Artificial Sequence
  Cyclic GFR-binding peptide
SSLSMLFFNDKQQIILKVYPAAAAAAA

SEQ ID NO: 93548 - protein, 27 aa, Artificial Sequence
  Cyclic GFR-binding peptide
SSLSVLFFDDSSNVILKVYPAAAAAAA

SEQ ID NO: 93549 - protein, 27 aa, Artificial Sequence
  Cyclic GFR-binding peptide
SSLSILFFVGRKPKVLKVYPAAAAAAA

SEQ ID NO: 93550 - protein, 27 aa, Artificial Sequence
  Cyclic GFR-binding peptide
SSLSILFFVGRTPKVLKVYPAAAAAAA

SEQ ID NO: 93551 - protein, 27 aa, Artificial Sequence
  Cyclic GFR-binding peptide
SSLSVLFFDDMGVPTLKVYPAAAAAAA

SEQ ID NO: 93552 - protein, 29 aa, Artificial Sequence
  Cyclic GFR-binding peptide
SSLSMLFFRIKPHQGQHLKVYPAAAAAAA

SEQ ID NO: 93553 - protein, 27 aa, Artificial Sequence
  Cyclic GFR-binding peptide
SSLSILFFDENKNVVLKVYPAAAAAAA

SEQ ID NO: 93554 - protein, 27 aa, Artificial Sequence
  Cyclic GFR-binding peptide
SSLSILFFDSANNVVLKVYPAAAAAAA

SEQ ID NO: 93555 - protein, 27 aa, Artificial Sequence
  Cyclic GFR-binding peptide
SSLSMLFFDENEKVVLKVYPAAAAAAA

SEQ ID NO: 93556 - protein, 27 aa, Artificial Sequence
  Cyclic GFR-binding peptide
SSLSVLFFDSSNNVILKVYPAAAAAAA

SEQ ID NO: 93557 - protein, 29 aa, Artificial Sequence
  Cyclic GFR-binding peptide
SSLSVLFFEYVRKKPKLLKVYPAAAAAAA

SEQ ID NO: 93558 - protein, 27 aa, Artificial Sequence
  Cyclic GFR-binding peptide
SSLSMLFFDNGRVLLLKVYPAAAAAAA

SEQ ID NO: 93559 - protein, 27 aa, Artificial Sequence
  Cyclic GFR-binding peptide
SSLSMLFFDEYDKVVLKVYPAAAAAAA

SEQ ID NO: 93560 - protein, 27 aa, Artificial Sequence
  Cyclic GFR-binding peptide
SSLSILFFDAANNVVLKVYPAAAAAAA

SEQ ID NO: 93561 - protein, 27 aa, Artificial Sequence
  Cyclic GFR-binding peptide
AAAAAAASMEGIIVNSSDDMIQVTINS

SEQ ID NO: 93562 - protein, 27 aa, Artificial Sequence
  Cyclic GFR-binding peptide
AAAAAAAVTAKKVVKENEDIKRMQVPR

SEQ ID NO: 93563 - protein, 27 aa, Artificial Sequence
  Cyclic GFR-binding peptide
AAAAAAASMEGIVVKDYEDMIQMTINS

SEQ ID NO: 93564 - protein, 27 aa, Artificial Sequence
  Cyclic GFR-binding peptide
AAAAAAAVTAKKIKPTKGIIKRIQVPR

SEQ ID NO: 93565 - protein, 27 aa, Artificial Sequence
  Cyclic GFR-binding peptide
AAAAAAASMEGIVKPTRGVMIQITINS

SEQ ID NO: 93566 - protein, 29 aa, Artificial Sequence
  Cyclic GFR-binding peptide
AAAAAAANSLQEFIPKKRVIEYYVVPLPE

SEQ ID NO: 93567 - protein, 27 aa, Artificial Sequence
  Cyclic GFR-binding peptide
AAAAAAAVQVEKVKPKRGVVKAIKVSR

SEQ ID NO: 93568 - protein, 27 aa, Artificial Sequence
  Cyclic GFR-binding peptide
AAAAAAAVQVEKVVKENEDVKAMKVSR

SEQ ID NO: 93569 - protein, 27 aa, Artificial Sequence
  Cyclic GFR-binding peptide
AAAAAAAVTAKKIVNSSDDIKRVQVPR

SEQ ID NO: 93570 - protein, 27 aa, Artificial Sequence
  Cyclic GFR-binding peptide
AAAAAAAVQVEKIKPTKGIVKAIKVSR

SEQ ID NO: 93571 - protein, 29 aa, Artificial Sequence
  Cyclic GFR-binding peptide
AAAAAAANSLQEFIPKKRVIEYYLVTLPE

SEQ ID NO: 93572 - protein, 27 aa, Artificial Sequence
  Cyclic GFR-binding peptide
AAAAAAAVQVEKIVNSSDDVKAVKVSR

SEQ ID NO: 93573 - protein, 27 aa, Artificial Sequence
  Cyclic GFR-binding peptide
AAAAAAAVTAKKVKPKRGVIKRIQVPR

SEQ ID NO: 93574 - protein, 27 aa, Artificial Sequence
  Cyclic GFR-binding peptide
AAAAAAAVQVEKVKPTRGVVKAIKVSR

SEQ ID NO: 93575 - protein, 27 aa, Artificial Sequence
  Cyclic GFR-binding peptide
AAAAAAAVTAKKVKPTRGVIKRIQVPR

SEQ ID NO: 93576 - protein, 29 aa, Artificial Sequence
  Cyclic GFR-binding peptide
AAAAAAANSLQELKPKKRVYEYYLVTLPE

SEQ ID NO: 93577 - protein, 27 aa, Artificial Sequence
  Cyclic GFR-binding peptide
AAAAAAASMEGIVKPKRGVMIQITINS

SEQ ID NO: 93578 - protein, 27 aa, Artificial Sequence
  Cyclic GFR-binding peptide
AAAAAAASMEGIVVKENEDMIQMTINS

SEQ ID NO: 93579 - protein, 27 aa, Artificial Sequence
  Cyclic GFR-binding peptide
AAAAAAASMEGIIKPTKGIMIQITINS

SEQ ID NO: 93580 - protein, 29 aa, Artificial Sequence
  Cyclic GFR-binding peptide
AAAAAAANSLQEHQGQHPKIRYYLMTLPE

SEQ ID NO: 93581 - protein, 27 aa, Artificial Sequence
  Cyclic GFR-binding peptide
AAAAAAAVTAKKVVKDYEDIKRMQVPR

SEQ ID NO: 93582 - protein, 29 aa, Artificial Sequence
  Cyclic GFR-binding peptide
AAAAAAANSLQEHQGQHPKIRYYVMPLPE

SEQ ID NO: 93583 - protein, 29 aa, Artificial Sequence
  Cyclic GFR-binding peptide
AAAAAAANSLQELKPKKRVYEYYVVPLPE

SEQ ID NO: 93584 - protein, 27 aa, Artificial Sequence
  Cyclic GFR-binding peptide
AAAAAAAVQVEKVVKDYEDVKAMKVSR

SEQ ID NO: 93585 - protein, 27 aa, Artificial Sequence
  Cyclic GFR-binding peptide
SNITVQIMDDSSNVIIGEMSAAAAAAA

SEQ ID NO: 93586 - protein, 27 aa, Artificial Sequence
  Cyclic GFR-binding peptide
RPVQMRKIDENEKVVKKATVAAAAAAA

SEQ ID NO: 93587 - protein, 27 aa, Artificial Sequence
  Cyclic GFR-binding peptide
SNITMQIMDEYDKVVIGEMSAAAAAAA

SEQ ID NO: 93588 - protein, 27 aa, Artificial Sequence
  Cyclic GFR-binding peptide
RPVQIRKIIGKTPKIKKATVAAAAAAA

SEQ ID NO: 93589 - protein, 27 aa, Artificial Sequence
  Cyclic GFR-binding peptide
SNITIQIMVGRTPKVIGEMSAAAAAAA

SEQ ID NO: 93590 - protein, 29 aa, Artificial Sequence
  Cyclic GFR-binding peptide
EPLPVVYYEIVRKKPIFEQLSNAAAAAAA

SEQ ID NO: 93591 - protein, 27 aa, Artificial Sequence
  Cyclic GFR-binding peptide
RSVKIAKVVGRKPKVKEVQVAAAAAAA

SEQ ID NO: 93592 - protein, 27 aa, Artificial Sequence
  Cyclic GFR-binding peptide
RSVKMAKVDENEKVVKEVQVAAAAAAA

SEQ ID NO: 93593 - protein, 27 aa, Artificial Sequence
  Cyclic GFR-binding peptide
RPVQVRKIDDSSNVIKKATVAAAAAAA

SEQ ID NO: 93594 - protein, 27 aa, Artificial Sequence
  Cyclic GFR-binding peptide
RSVKIAKVIGKTPKIKEVQVAAAAAAA

SEQ ID NO: 93595 - protein, 29 aa, Artificial Sequence
  Cyclic GFR-binding peptide
EPLTVLYYEIVRKKPIFEQLSNAAAAAAA

SEQ ID NO: 93596 - protein, 27 aa, Artificial Sequence
  Cyclic GFR-binding peptide
RSVKVAKVDDSSNVIKEVQVAAAAAAA

SEQ ID NO: 93597 - protein, 27 aa, Artificial Sequence
  Cyclic GFR-binding peptide
RPVQIRKIVGRKPKVKKATVAAAAAAA

SEQ ID NO: 93598 - protein, 27 aa, Artificial Sequence
  Cyclic GFR-binding peptide
RSVKIAKVVGRTPKVKEVQVAAAAAAA

SEQ ID NO: 93599 - protein, 27 aa, Artificial Sequence
  Cyclic GFR-binding peptide
RPVQIRKIVGRTPKVKKATVAAAAAAA

SEQ ID NO: 93600 - protein, 29 aa, Artificial Sequence
  Cyclic GFR-binding peptide
EPLTVLYYEYVRKKPKLEQLSNAAAAAAA

SEQ ID NO: 93601 - protein, 27 aa, Artificial Sequence
  Cyclic GFR-binding peptide
SNITIQIMVGRKPKVIGEMSAAAAAAA

SEQ ID NO: 93602 - protein, 27 aa, Artificial Sequence
  Cyclic GFR-binding peptide
SNITMQIMDENEKVVIGEMSAAAAAAA

SEQ ID NO: 93603 - protein, 27 aa, Artificial Sequence
  Cyclic GFR-binding peptide
SNITIQIMIGKTPKIIGEMSAAAAAAA

SEQ ID NO: 93604 - protein, 29 aa, Artificial Sequence
  Cyclic GFR-binding peptide
EPLTMLYYRIKPHQGQHEQLSNAAAAAAA

SEQ ID NO: 93605 - protein, 27 aa, Artificial Sequence
  Cyclic GFR-binding peptide
RPVQMRKIDEYDKVVKKATVAAAAAAA

SEQ ID NO: 93606 - protein, 29 aa, Artificial Sequence
  Cyclic GFR-binding peptide
EPLPMVYYRIKPHQGQHEQLSNAAAAAAA

SEQ ID NO: 93607 - protein, 29 aa, Artificial Sequence
  Cyclic GFR-binding peptide
EPLPVVYYEYVRKKPKLEQLSNAAAAAAA

SEQ ID NO: 93608 - protein, 27 aa, Artificial Sequence
  Cyclic GFR-binding peptide
RSVKMAKVDEYDKVVKEVQVAAAAAAA

SEQ ID NO: 93609 - protein, 27 aa, Artificial Sequence
  Cyclic GFR-binding peptide
AAAAAAARYKKLIIQQKDNFYLMSIAN

SEQ ID NO: 93610 - protein, 27 aa, Artificial Sequence
  Cyclic GFR-binding peptide
AAAAAAARYKKLLLVRGNDFYLMSIAN

SEQ ID NO: 93611 - protein, 27 aa, Artificial Sequence
  Cyclic GFR-binding peptide
NAISMLYFNDKQQIILKKYRAAAAAAA

SEQ ID NO: 93612 - protein, 27 aa, Artificial Sequence
  Cyclic GFR-binding peptide
NAISMLYFDNGRVLLLKKYRAAAAAAA

SEQ ID NO: 93613 - protein, 27 aa, Artificial Sequence
  Cyclic GFR-binding peptide
AAAAAAAEYKFKVVNKNEDLYLISIPE

SEQ ID NO: 93614 - protein, 27 aa, Artificial Sequence
  Cyclic GFR-binding peptide
AAAAAAAPIKGYVKPTRGVFYLINIPS

SEQ ID NO: 93615 - protein, 27 aa, Artificial Sequence
  Cyclic GFR-binding peptide
AAAAAAAEYKFKLLVRGNDLYLMSIPE

SEQ ID NO: 93616 - protein, 27 aa, Artificial Sequence
  Cyclic GFR-binding peptide
AAAAAAAYHYKLVVNKNEDKYLISIPS

SEQ ID NO: 93617 - protein, 27 aa, Artificial Sequence
  Cyclic GFR-binding peptide
AAAAAAARHKRLLLVRGNDYYLMSTAS

SEQ ID NO: 93618 - protein, 27 aa, Artificial Sequence
  Cyclic GFR-binding peptide
AAAAAAAYHYKLLLVRGNDKYLMSIPS

SEQ ID NO: 93619 - protein, 27 aa, Artificial Sequence
  Cyclic GFR-binding peptide
AAAAAAARHKRLVVNKNEDYYLISTAS

SEQ ID NO: 93620 - protein, 27 aa, Artificial Sequence
  Cyclic GFR-binding peptide
AAAAAAARYKKLVVNKNEDFYLISIAN

SEQ ID NO: 93621 - protein, 27 aa, Artificial Sequence
  Cyclic GFR-binding peptide
AAAAAAAPIKGYVVNKNEDFYLINIPS

SEQ ID NO: 93622 - protein, 27 aa, Artificial Sequence
  Cyclic GFR-binding peptide
AAAAAAAPIKGYIKPTKGIFYLINIPS

SEQ ID NO: 93623 - protein, 27 aa, Artificial Sequence
  Cyclic GFR-binding peptide
AAAAAAARHKRLYTVVGKDYYLISTAS

SEQ ID NO: 93624 - protein, 27 aa, Artificial Sequence
  Cyclic GFR-binding peptide
AAAAAAAEYKFKVVNNASDLYLISIPE

SEQ ID NO: 93625 - protein, 27 aa, Artificial Sequence
  Cyclic GFR-binding peptide
AAAAAAARHKRLIIQQKDNYYLMSTAS

SEQ ID NO: 93626 - protein, 27 aa, Artificial Sequence
  Cyclic GFR-binding peptide
AAAAAAAEYKFKIIQQKDNLYLMSIPE

SEQ ID NO: 93627 - protein, 27 aa, Artificial Sequence
  Cyclic GFR-binding peptide
AAAAAAAPIKGYVKPKRGVFYLINIPS

SEQ ID NO: 93628 - protein, 27 aa, Artificial Sequence
  Cyclic GFR-binding peptide
AAAAAAARHKRLVVNNASDYYLISTAS

SEQ ID NO: 93629 - protein, 27 aa, Artificial Sequence
  Cyclic GFR-binding peptide
AAAAAAAYHYKLVVNNASDKYLISIPS

SEQ ID NO: 93630 - protein, 27 aa, Artificial Sequence
  Cyclic GFR-binding peptide
AAAAAAAYHYKLIIQQKDNKYLMSIPS

SEQ ID NO: 93631 - protein, 27 aa, Artificial Sequence
  Cyclic GFR-binding peptide
AAAAAAARHKRLVVNNAADYYLISTAS

SEQ ID NO: 93632 - protein, 27 aa, Artificial Sequence
  Cyclic GFR-binding peptide
EPISILYLDENKNVVKFKYEAAAAAAA

SEQ ID NO: 93633 - protein, 27 aa, Artificial Sequence
  Cyclic GFR-binding peptide
SPINILYFVGRTPKVYGKIPAAAAAAA

SEQ ID NO: 93634 - protein, 27 aa, Artificial Sequence
  Cyclic GFR-binding peptide
EPISMLYLDNGRVLLKFKYEAAAAAAA

SEQ ID NO: 93635 - protein, 27 aa, Artificial Sequence
  Cyclic GFR-binding peptide
SPISILYKDENKNVVLKYHYAAAAAAA

SEQ ID NO: 93636 - protein, 27 aa, Artificial Sequence
  Cyclic GFR-binding peptide
SATSMLYYDNGRVLLLRKHRAAAAAAA

SEQ ID NO: 93637 - protein, 27 aa, Artificial Sequence
  Cyclic GFR-binding peptide
SPISMLYKDNGRVLLLKYHYAAAAAAA

SEQ ID NO: 93638 - protein, 27 aa, Artificial Sequence
  Cyclic GFR-binding peptide
SATSILYYDENKNVVLRKHRAAAAAAA

SEQ ID NO: 93639 - protein, 27 aa, Artificial Sequence
  Cyclic GFR-binding peptide
NAISILYFDENKNVVLKKYRAAAAAAA

SEQ ID NO: 93640 - protein, 27 aa, Artificial Sequence
  Cyclic GFR-binding peptide
SPINILYFDENKNVVYGKIPAAAAAAA

SEQ ID NO: 93641 - protein, 27 aa, Artificial Sequence
  Cyclic GFR-binding peptide
SPINILYFIGKTPKIYGKIPAAAAAAA

SEQ ID NO: 93642 - protein, 27 aa, Artificial Sequence
  Cyclic GFR-binding peptide
SATSILYYDKGVVTYLRKHRAAAAAAA

SEQ ID NO: 93643 - protein, 27 aa, Artificial Sequence
  Cyclic GFR-binding peptide
EPISILYLDSANNVVKFKYEAAAAAAA

SEQ ID NO: 93644 - protein, 27 aa, Artificial Sequence
  Cyclic GFR-binding peptide
SATSMLYYNDKQQIILRKHRAAAAAAA

SEQ ID NO: 93645 - protein, 27 aa, Artificial Sequence
  Cyclic GFR-binding peptide
EPISMLYLNDKQQIIKFKYEAAAAAAA

SEQ ID NO: 93646 - protein, 27 aa, Artificial Sequence
  Cyclic GFR-binding peptide
SPINILYFVGRKPKVYGKIPAAAAAAA

SEQ ID NO: 93647 - protein, 27 aa, Artificial Sequence
  Cyclic GFR-binding peptide
SATSILYYDSANNVVLRKHRAAAAAAA

SEQ ID NO: 93648 - protein, 27 aa, Artificial Sequence
  Cyclic GFR-binding peptide
SPISILYKDSANNVVLKYHYAAAAAAA

SEQ ID NO: 93649 - protein, 27 aa, Artificial Sequence
  Cyclic GFR-binding peptide
SPISMLYKNDKQQIILKYHYAAAAAAA

SEQ ID NO: 93650 - protein, 27 aa, Artificial Sequence
  Cyclic GFR-binding peptide
SATSILYYDAANNVVLRKHRAAAAAAA

SEQ ID NO: 93651 - protein, 27 aa, Artificial Sequence
  Cyclic GFR-binding peptide
AAAAAAASMEGIIIQQKDNMIQMTINS

SEQ ID NO: 93652 - protein, 27 aa, Artificial Sequence
  Cyclic GFR-binding peptide
AAAAAAASMEGLVKPKRGVMIQITINS

SEQ ID NO: 93653 - protein, 27 aa, Artificial Sequence
  Cyclic GFR-binding peptide
AAAAAAASMEGLVVNNASDMIQITINS

SEQ ID NO: 93654 - protein, 27 aa, Artificial Sequence
  Cyclic GFR-binding peptide
AAAAAAASMEGILLVRGNDMIQMTINS

SEQ ID NO: 93655 - protein, 27 aa, Artificial Sequence
  Cyclic GFR-binding peptide
AAAAAAASMEGLIKPTKGIMIQITINS

SEQ ID NO: 93656 - protein, 27 aa, Artificial Sequence
  Cyclic GFR-binding peptide
AAAAAAASMEGLIVNSSDDMIQVTINS

SEQ ID NO: 93657 - protein, 27 aa, Artificial Sequence
  Cyclic GFR-binding peptide
AAAAAAASMEGIVVNNASDMIQITINS

SEQ ID NO: 93658 - protein, 27 aa, Artificial Sequence
  Cyclic GFR-binding peptide
AAAAAAASMEGLVVNNAADMIQITINS

SEQ ID NO: 93659 - protein, 27 aa, Artificial Sequence
  Cyclic GFR-binding peptide
AAAAAAASMEGLLLVRGNDMIQMTINS

SEQ ID NO: 93660 - protein, 27 aa, Artificial Sequence
  Cyclic GFR-binding peptide
AAAAAAASMEGLIIQQKDNMIQMTINS

SEQ ID NO: 93661 - protein, 27 aa, Artificial Sequence
  Cyclic GFR-binding peptide
AAAAAAASMEGIVVNNAADMIQITINS

SEQ ID NO: 93662 - protein, 27 aa, Artificial Sequence
  Cyclic GFR-binding peptide
AAAAAAASMEGLVKPTRGVMIQITINS

SEQ ID NO: 93663 - protein, 27 aa, Artificial Sequence
  Cyclic GFR-binding peptide
SNITMQIMNDKQQIIIGEMSAAAAAAA

SEQ ID NO: 93664 - protein, 27 aa, Artificial Sequence
  Cyclic GFR-binding peptide
SNITIQIMVGRKPKVLGEMSAAAAAAA

SEQ ID NO: 93665 - protein, 27 aa, Artificial Sequence
  Cyclic GFR-binding peptide
SNITIQIMDSANNVVLGEMSAAAAAAA

SEQ ID NO: 93666 - protein, 27 aa, Artificial Sequence
  Cyclic GFR-binding peptide
SNITMQIMDNGRVLLIGEMSAAAAAAA

SEQ ID NO: 93667 - protein, 27 aa, Artificial Sequence
  Cyclic GFR-binding peptide
SNITIQIMIGKTPKILGEMSAAAAAAA

SEQ ID NO: 93668 - protein, 27 aa, Artificial Sequence
  Cyclic GFR-binding peptide
SNITVQIMDDSSNVILGEMSAAAAAAA

SEQ ID NO: 93669 - protein, 27 aa, Artificial Sequence
  Cyclic GFR-binding peptide
SNITIQIMDSANNVVIGEMSAAAAAAA

SEQ ID NO: 93670 - protein, 27 aa, Artificial Sequence
  Cyclic GFR-binding peptide
SNITIQIMDAANNVVLGEMSAAAAAAA

SEQ ID NO: 93671 - protein, 27 aa, Artificial Sequence
  Cyclic GFR-binding peptide
SNITMQIMDNGRVLLLGEMSAAAAAAA

SEQ ID NO: 93672 - protein, 27 aa, Artificial Sequence
  Cyclic GFR-binding peptide
SNITMQIMNDKQQIILGEMSAAAAAAA

SEQ ID NO: 93673 - protein, 27 aa, Artificial Sequence
  Cyclic GFR-binding peptide
SNITIQIMDAANNVVIGEMSAAAAAAA

SEQ ID NO: 93674 - protein, 27 aa, Artificial Sequence
  Cyclic GFR-binding peptide
SNITIQIMVGRTPKVLGEMSAAAAAAA

SEQ ID NO: 93675 - protein, 27 aa, Artificial Sequence
  Cyclic GFR-binding peptide
AAAAAAAQYNKLVVNKNEDLYLISIAS

SEQ ID NO: 93676 - protein, 27 aa, Artificial Sequence
  Cyclic GFR-binding peptide
AAAAAAAQYNKLVVNNAADLYLISIAS

SEQ ID NO: 93677 - protein, 27 aa, Artificial Sequence
  Cyclic GFR-binding peptide
AAAAAAAQYNKLIIQQKDNLYLMSIAS

SEQ ID NO: 93678 - protein, 27 aa, Artificial Sequence
  Cyclic GFR-binding peptide
AAAAAAAQYNKLLLVRGNDLYLMSIAS

SEQ ID NO: 93679 - protein, 27 aa, Artificial Sequence
  Cyclic GFR-binding peptide
AAAAAAAQYNKLYTVVGKDLYLISIAS

SEQ ID NO: 93680 - protein, 27 aa, Artificial Sequence
  Cyclic GFR-binding peptide
SAISILYLDENKNVVLKNYQAAAAAAA

SEQ ID NO: 93681 - protein, 27 aa, Artificial Sequence
  Cyclic GFR-binding peptide
SAISILYLDAANNVVLKNYQAAAAAAA

SEQ ID NO: 93682 - protein, 27 aa, Artificial Sequence
  Cyclic GFR-binding peptide
SAISMLYLNDKQQIILKNYQAAAAAAA

SEQ ID NO: 93683 - protein, 27 aa, Artificial Sequence
  Cyclic GFR-binding peptide
SAISMLYLDNGRVLLLKNYQAAAAAAA

SEQ ID NO: 93684 - protein, 27 aa, Artificial Sequence
  Cyclic GFR-binding peptide
SAISILYLDKGVVTYLKNYQAAAAAAA

SEQ ID NO: 93685 - protein, 27 aa, Artificial Sequence
  Cyclic GFR-binding peptide
GGGGGGGRYKKLIKPTKGIFYLISIAN

SEQ ID NO: 93686 - protein, 29 aa, Artificial Sequence
  Cyclic GFR-binding peptide
GGGGGGGRHKRLFIPKKRVIEYYLVSTAS

SEQ ID NO: 93687 - protein, 27 aa, Artificial Sequence
  Cyclic GFR-binding peptide
GGGGGGGYHYKLVVKDYEDKYLMSIPS

SEQ ID NO: 93688 - protein, 27 aa, Artificial Sequence
  Cyclic GFR-binding peptide
GGGGGGGQYNKLIVNNSSDLYLVSIAS

SEQ ID NO: 93689 - protein, 27 aa, Artificial Sequence
  Cyclic GFR-binding peptide
GGGGGGGRYKKLVVKDYEDFYLMSIAN

SEQ ID NO: 93690 - protein, 27 aa, Artificial Sequence
  Cyclic GFR-binding peptide
GGGGGGGRYKKLVKPTRGVFYLISIAN

SEQ ID NO: 93691 - protein, 27 aa, Artificial Sequence
  Cyclic GFR-binding peptide
GGGGGGGRHKRLVVKENEDYYLMSTAS

SEQ ID NO: 93692 - protein, 27 aa, Artificial Sequence
  Cyclic GFR-binding peptide
GGGGGGGYHYKLIKPTKGIKYLISIPS

SEQ ID NO: 93693 - protein, 29 aa, Artificial Sequence
  Cyclic GFR-binding peptide
GGGGGGGRYKKLFIPKKRVIEFYLVSIAN

SEQ ID NO: 93694 - protein, 27 aa, Artificial Sequence
  Cyclic GFR-binding peptide
GGGGGGGYHYKLVVKENEDKYLMSIPS

SEQ ID NO: 93695 - protein, 27 aa, Artificial Sequence
  Cyclic GFR-binding peptide
GGGGGGGRHKRLVKPKRGVYYLISTAS

SEQ ID NO: 93696 - protein, 27 aa, Artificial Sequence
  Cyclic GFR-binding peptide
GGGGGGGYHYKLVKPKRGVKYLISIPS

SEQ ID NO: 93697 - protein, 29 aa, Artificial Sequence
  Cyclic GFR-binding peptide
GGGGGGGQYNKLFIPKKRVIELYLVSIAS

SEQ ID NO: 93698 - protein, 27 aa, Artificial Sequence
  Cyclic GFR-binding peptide
GGGGGGGQYNKLVKPTRGVLYLISIAS

SEQ ID NO: 93699 - protein, 27 aa, Artificial Sequence
  Cyclic GFR-binding peptide
GGGGGGGRYKKLVVKENEDFYLMSIAN

SEQ ID NO: 93700 - protein, 27 aa, Artificial Sequence
  Cyclic GFR-binding peptide
GGGGGGGQYNKLTPVGMDDLYLVSIAS

SEQ ID NO: 93701 - protein, 27 aa, Artificial Sequence
  Cyclic GFR-binding peptide
GGGGGGGRYKKLTPVGMDDFYLVSIAN

SEQ ID NO: 93702 - protein, 27 aa, Artificial Sequence
  Cyclic GFR-binding peptide
GGGGGGGRYKKLVKPKRGVFYLISIAN

SEQ ID NO: 93703 - protein, 27 aa, Artificial Sequence
  Cyclic GFR-binding peptide
GGGGGGGQYNKLVVKENEDLYLMSIAS

SEQ ID NO: 93704 - protein, 27 aa, Artificial Sequence
  Cyclic GFR-binding peptide
GGGGGGGYHYKLIVNSSDDKYLVSIPS

SEQ ID NO: 93705 - protein, 27 aa, Artificial Sequence
  Cyclic GFR-binding peptide
GGGGGGGQYNKLVKPKRGVLYLISIAS

SEQ ID NO: 93706 - protein, 27 aa, Artificial Sequence
  Cyclic GFR-binding peptide
GGGGGGGRYKKLIVNNSSDFYLVSIAN

SEQ ID NO: 93707 - protein, 27 aa, Artificial Sequence
  Cyclic GFR-binding peptide
GGGGGGGRYKKLIVNSSDDFYLVSIAN

SEQ ID NO: 93708 - protein, 27 aa, Artificial Sequence
  Cyclic GFR-binding peptide
GGGGGGGRHKRLVKPTRGVYYLISTAS

SEQ ID NO: 93709 - protein, 29 aa, Artificial Sequence
  Cyclic GFR-binding peptide
GGGGGGGYHYKLFIPKKRVIEKYLVSIPS

SEQ ID NO: 93710 - protein, 27 aa, Artificial Sequence
  Cyclic GFR-binding peptide
GGGGGGGRHKRLIKPTKGIYYLISTAS

SEQ ID NO: 93711 - protein, 27 aa, Artificial Sequence
  Cyclic GFR-binding peptide
GGGGGGGRHKRLTPVGMDDYYLVSTAS

SEQ ID NO: 93712 - protein, 27 aa, Artificial Sequence
  Cyclic GFR-binding peptide
GGGGGGGYHYKLTPVGMDDKYLVSIPS

SEQ ID NO: 93713 - protein, 27 aa, Artificial Sequence
  Cyclic GFR-binding peptide
GGGGGGGYHYKLIVNNSSDKYLVSIPS

SEQ ID NO: 93714 - protein, 27 aa, Artificial Sequence
  Cyclic GFR-binding peptide
GGGGGGGRHKRLIVNNSSDYYLVSTAS

SEQ ID NO: 93715 - protein, 27 aa, Artificial Sequence
  Cyclic GFR-binding peptide
GGGGGGGYHYKLVKPTRGVKYLISIPS

SEQ ID NO: 93716 - protein, 27 aa, Artificial Sequence
  Cyclic GFR-binding peptide
GGGGGGGRHKRLIVNSSDDYYLVSTAS

SEQ ID NO: 93717 - protein, 27 aa, Artificial Sequence
  Cyclic GFR-binding peptide
GGGGGGGRHKRLVVKDYEDYYLMSTAS

SEQ ID NO: 93718 - protein, 27 aa, Artificial Sequence
  Cyclic GFR-binding peptide
GGGGGGGQYNKLIKPTKGILYLISIAS

SEQ ID NO: 93719 - protein, 27 aa, Artificial Sequence
  Cyclic GFR-binding peptide
GGGGGGGQYNKLVVKDYEDLYLMSIAS

SEQ ID NO: 93720 - protein, 27 aa, Artificial Sequence
  Cyclic GFR-binding peptide
GGGGGGGQYNKLIVNSSDDLYLVSIAS

SEQ ID NO: 93721 - protein, 27 aa, Artificial Sequence
  Cyclic GFR-binding peptide
NAISILYFIGKTPKILKKYRGGGGGGG

SEQ ID NO: 93722 - protein, 29 aa, Artificial Sequence
  Cyclic GFR-binding peptide
SATSVLYYEIVRKKPIFLRKHRGGGGGGG

SEQ ID NO: 93723 - protein, 27 aa, Artificial Sequence
  Cyclic GFR-binding peptide
SPISMLYKDEYDKVVLKYHYGGGGGGG

SEQ ID NO: 93724 - protein, 27 aa, Artificial Sequence
  Cyclic GFR-binding peptide
SAISVLYLDSSNNVILKNYQGGGGGGG

SEQ ID NO: 93725 - protein, 27 aa, Artificial Sequence
  Cyclic GFR-binding peptide
NAISMLYFDEYDKVVLKKYRGGGGGGG

SEQ ID NO: 93726 - protein, 27 aa, Artificial Sequence
  Cyclic GFR-binding peptide
NAISILYFVGRTPKVLKKYRGGGGGGG

SEQ ID NO: 93727 - protein, 27 aa, Artificial Sequence
  Cyclic GFR-binding peptide
SATSMLYYDENEKVVLRKHRGGGGGGG

SEQ ID NO: 93728 - protein, 27 aa, Artificial Sequence
  Cyclic GFR-binding peptide
SPISILYKIGKTPKILKYHYGGGGGGG

SEQ ID NO: 93729 - protein, 29 aa, Artificial Sequence
  Cyclic GFR-binding peptide
NAISVLYFEIVRKKPIFLKKYRGGGGGGG

SEQ ID NO: 93730 - protein, 27 aa, Artificial Sequence
  Cyclic GFR-binding peptide
SPISMLYKDENEKVVLKYHYGGGGGGG

SEQ ID NO: 93731 - protein, 27 aa, Artificial Sequence
  Cyclic GFR-binding peptide
SATSILYYVGRKPKVLRKHRGGGGGGG

SEQ ID NO: 93732 - protein, 27 aa, Artificial Sequence
  Cyclic GFR-binding peptide
SPISILYKVGRKPKVLKYHYGGGGGGG

SEQ ID NO: 93733 - protein, 29 aa, Artificial Sequence
  Cyclic GFR-binding peptide
SAISVLYLEIVRKKPIFLKNYQGGGGGGG

SEQ ID NO: 93734 - protein, 27 aa, Artificial Sequence
  Cyclic GFR-binding peptide
SAISILYLVGRTPKVLKNYQGGGGGGG

SEQ ID NO: 93735 - protein, 27 aa, Artificial Sequence
  Cyclic GFR-binding peptide
NAISMLYFDENEKVVLKKYRGGGGGGG

SEQ ID NO: 93736 - protein, 27 aa, Artificial Sequence
  Cyclic GFR-binding peptide
SAISVLYLDDMGVPTLKNYQGGGGGGG

SEQ ID NO: 93737 - protein, 27 aa, Artificial Sequence
  Cyclic GFR-binding peptide
NAISVLYFDDMGVPTLKKYRGGGGGGG

SEQ ID NO: 93738 - protein, 27 aa, Artificial Sequence
  Cyclic GFR-binding peptide
NAISILYFVGRKPKVLKKYRGGGGGGG

SEQ ID NO: 93739 - protein, 27 aa, Artificial Sequence
  Cyclic GFR-binding peptide
SAISMLYLDENEKVVLKNYQGGGGGGG

SEQ ID NO: 93740 - protein, 27 aa, Artificial Sequence
  Cyclic GFR-binding peptide
SPISVLYKDDSSNVILKYHYGGGGGGG

SEQ ID NO: 93741 - protein, 27 aa, Artificial Sequence
  Cyclic GFR-binding peptide
SAISILYLVGRKPKVLKNYQGGGGGGG

SEQ ID NO: 93742 - protein, 27 aa, Artificial Sequence
  Cyclic GFR-binding peptide
NAISVLYFDSSNNVILKKYRGGGGGGG

SEQ ID NO: 93743 - protein, 27 aa, Artificial Sequence
  Cyclic GFR-binding peptide
NAISVLYFDDSSNVILKKYRGGGGGGG

SEQ ID NO: 93744 - protein, 27 aa, Artificial Sequence
  Cyclic GFR-binding peptide
SATSILYYVGRTPKVLRKHRGGGGGGG

SEQ ID NO: 93745 - protein, 29 aa, Artificial Sequence
  Cyclic GFR-binding peptide
SPISVLYKEIVRKKPIFLKYHYGGGGGGG

SEQ ID NO: 93746 - protein, 27 aa, Artificial Sequence
  Cyclic GFR-binding peptide
SATSILYYIGKTPKILRKHRGGGGGGG

SEQ ID NO: 93747 - protein, 27 aa, Artificial Sequence
  Cyclic GFR-binding peptide
SATSVLYYDDMGVPTLRKHRGGGGGGG

SEQ ID NO: 93748 - protein, 27 aa, Artificial Sequence
  Cyclic GFR-binding peptide
SPISVLYKDDMGVPTLKYHYGGGGGGG

SEQ ID NO: 93749 - protein, 27 aa, Artificial Sequence
  Cyclic GFR-binding peptide
SPISVLYKDSSNNVILKYHYGGGGGGG

SEQ ID NO: 93750 - protein, 27 aa, Artificial Sequence
  Cyclic GFR-binding peptide
SATSVLYYDSSNNVILRKHRGGGGGGG

SEQ ID NO: 93751 - protein, 27 aa, Artificial Sequence
  Cyclic GFR-binding peptide
SPISILYKVGRTPKVLKYHYGGGGGGG

SEQ ID NO: 93752 - protein, 27 aa, Artificial Sequence
  Cyclic GFR-binding peptide
SATSVLYYDDSSNVILRKHRGGGGGGG

SEQ ID NO: 93753 - protein, 27 aa, Artificial Sequence
  Cyclic GFR-binding peptide
SATSMLYYDEYDKVVLRKHRGGGGGGG

SEQ ID NO: 93754 - protein, 27 aa, Artificial Sequence
  Cyclic GFR-binding peptide
SAISILYLIGKTPKILKNYQGGGGGGG

SEQ ID NO: 93755 - protein, 27 aa, Artificial Sequence
  Cyclic GFR-binding peptide
SAISMLYLDEYDKVVLKNYQGGGGGGG

SEQ ID NO: 93756 - protein, 27 aa, Artificial Sequence
  Cyclic GFR-binding peptide
SAISVLYLDDSSNVILKNYQGGGGGGG

SEQ ID NO: 93757 - protein, 27 aa, Artificial Sequence
  Cyclic GFR-binding peptide
GGGGGGGNSLQEVVKDYEDYYLMTLPE

SEQ ID NO: 93758 - protein, 27 aa, Artificial Sequence
  Cyclic GFR-binding peptide
GGGGGGGNSLQEIKPTKGIYYVIPLPE

SEQ ID NO: 93759 - protein, 27 aa, Artificial Sequence
  Cyclic GFR-binding peptide
GGGGGGGNSLQEVKPKRGVYYLITLPE

SEQ ID NO: 93760 - protein, 27 aa, Artificial Sequence
  Cyclic GFR-binding peptide
GGGGGGGNSLQEVKPTRGVYYVIPLPE

SEQ ID NO: 93761 - protein, 27 aa, Artificial Sequence
  Cyclic GFR-binding peptide
GGGGGGGEYQKYIVNSSDDIFLVSIPS

SEQ ID NO: 93762 - protein, 27 aa, Artificial Sequence
  Cyclic GFR-binding peptide
GGGGGGGEYQKYVKPTRGVIFLISIPS

SEQ ID NO: 93763 - protein, 27 aa, Artificial Sequence
  Cyclic GFR-binding peptide
GGGGGGGNSLQEVVKENEDYYLMTLPE

SEQ ID NO: 93764 - protein, 27 aa, Artificial Sequence
  Cyclic GFR-binding peptide
GGGGGGGNSLQEVVNNASDYYLITLPE

SEQ ID NO: 93765 - protein, 27 aa, Artificial Sequence
  Cyclic GFR-binding peptide
GGGGGGGNSLQEVKPKRGVYYVIPLPE

SEQ ID NO: 93766 - protein, 27 aa, Artificial Sequence
  Cyclic GFR-binding peptide
GGGGGGGNSLQEVVNNASDYYVIPLPE

SEQ ID NO: 93767 - protein, 27 aa, Artificial Sequence
  Cyclic GFR-binding peptide
GGGGGGGNSLQEVKPTRGVYYLITLPE

SEQ ID NO: 93768 - protein, 27 aa, Artificial Sequence
  Cyclic GFR-binding peptide
GGGGGGGEYQKYIKPTKGIIFLISIPS

SEQ ID NO: 93769 - protein, 27 aa, Artificial Sequence
  Cyclic GFR-binding peptide
GGGGGGGEYQKYVVNNASDIFLISIPS

SEQ ID NO: 93770 - protein, 27 aa, Artificial Sequence
  Cyclic GFR-binding peptide
GGGGGGGNSLQEIVNSSDDYYVVPLPE

SEQ ID NO: 93771 - protein, 27 aa, Artificial Sequence
  Cyclic GFR-binding peptide
GGGGGGGNSLQEVVKDYEDYYVMPLPE

SEQ ID NO: 93772 - protein, 27 aa, Artificial Sequence
  Cyclic GFR-binding peptide
GGGGGGGEYQKYVVKENEDIFLMSIPS

SEQ ID NO: 93773 - protein, 27 aa, Artificial Sequence
  Cyclic GFR-binding peptide
GGGGGGGNSLQEVVKENEDYYVMPLPE

SEQ ID NO: 93774 - protein, 27 aa, Artificial Sequence
  Cyclic GFR-binding peptide
GGGGGGGEYQKYVVKDYEDIFLMSIPS

SEQ ID NO: 93775 - protein, 27 aa, Artificial Sequence
  Cyclic GFR-binding peptide
GGGGGGGQYNKLVVNNASDLYLISIAS

SEQ ID NO: 93776 - protein, 27 aa, Artificial Sequence
  Cyclic GFR-binding peptide
GGGGGGGNSLQEIKPTKGIYYLITLPE

SEQ ID NO: 93777 - protein, 27 aa, Artificial Sequence
  Cyclic GFR-binding peptide
GGGGGGGEYQKYVKPKRGVIFLISIPS

SEQ ID NO: 93778 - protein, 27 aa, Artificial Sequence
  Cyclic GFR-binding peptide
GGGGGGGRYKKLVVNNASDFYLISIAN

SEQ ID NO: 93779 - protein, 27 aa, Artificial Sequence
  Cyclic GFR-binding peptide
GGGGGGGNSLQEIVNSSDDYYLVTLPE

SEQ ID NO: 93780 - protein, 27 aa, Artificial Sequence
  Cyclic GFR-binding peptide
EPLTMLYYDEYDKVVEQLSNGGGGGGG

SEQ ID NO: 93781 - protein, 27 aa, Artificial Sequence
  Cyclic GFR-binding peptide
EPLPIVYYIGKTPKIEQLSNGGGGGGG

SEQ ID NO: 93782 - protein, 27 aa, Artificial Sequence
  Cyclic GFR-binding peptide
EPLTILYYVGRKPKVEQLSNGGGGGGG

SEQ ID NO: 93783 - protein, 27 aa, Artificial Sequence
  Cyclic GFR-binding peptide
EPLPIVYYVGRTPKVEQLSNGGGGGGG

SEQ ID NO: 93784 - protein, 27 aa, Artificial Sequence
  Cyclic GFR-binding peptide
SPISVLFIDDSSNVIYKQYEGGGGGGG

SEQ ID NO: 93785 - protein, 27 aa, Artificial Sequence
  Cyclic GFR-binding peptide
SPISILFIVGRTPKVYKQYEGGGGGGG

SEQ ID NO: 93786 - protein, 27 aa, Artificial Sequence
  Cyclic GFR-binding peptide
EPLTMLYYDENEKVVEQLSNGGGGGGG

SEQ ID NO: 93787 - protein, 27 aa, Artificial Sequence
  Cyclic GFR-binding peptide
EPLTILYYDSANNVVEQLSNGGGGGGG

SEQ ID NO: 93788 - protein, 27 aa, Artificial Sequence
  Cyclic GFR-binding peptide
EPLPIVYYVGRKPKVEQLSNGGGGGGG

SEQ ID NO: 93789 - protein, 27 aa, Artificial Sequence
  Cyclic GFR-binding peptide
EPLPIVYYDSANNVVEQLSNGGGGGGG

SEQ ID NO: 93790 - protein, 27 aa, Artificial Sequence
  Cyclic GFR-binding peptide
EPLTILYYVGRTPKVEQLSNGGGGGGG

SEQ ID NO: 93791 - protein, 27 aa, Artificial Sequence
  Cyclic GFR-binding peptide
SPISILFIIGKTPKIYKQYEGGGGGGG

SEQ ID NO: 93792 - protein, 27 aa, Artificial Sequence
  Cyclic GFR-binding peptide
SPISILFIDSANNVVYKQYEGGGGGGG

SEQ ID NO: 93793 - protein, 27 aa, Artificial Sequence
  Cyclic GFR-binding peptide
EPLPVVYYDDSSNVIEQLSNGGGGGGG

SEQ ID NO: 93794 - protein, 27 aa, Artificial Sequence
  Cyclic GFR-binding peptide
EPLPMVYYDEYDKVVEQLSNGGGGGGG

SEQ ID NO: 93795 - protein, 27 aa, Artificial Sequence
  Cyclic GFR-binding peptide
SPISMLFIDENEKVVYKQYEGGGGGGG

SEQ ID NO: 93796 - protein, 27 aa, Artificial Sequence
  Cyclic GFR-binding peptide
EPLPMVYYDENEKVVEQLSNGGGGGGG

SEQ ID NO: 93797 - protein, 27 aa, Artificial Sequence
  Cyclic GFR-binding peptide
SPISMLFIDEYDKVVYKQYEGGGGGGG

SEQ ID NO: 93798 - protein, 27 aa, Artificial Sequence
  Cyclic GFR-binding peptide
SAISILYLDSANNVVLKNYQGGGGGGG

SEQ ID NO: 93799 - protein, 27 aa, Artificial Sequence
  Cyclic GFR-binding peptide
EPLTILYYIGKTPKIEQLSNGGGGGGG

SEQ ID NO: 93800 - protein, 27 aa, Artificial Sequence
  Cyclic GFR-binding peptide
SPISILFIVGRKPKVYKQYEGGGGGGG

SEQ ID NO: 93801 - protein, 27 aa, Artificial Sequence
  Cyclic GFR-binding peptide
NAISILYFDSANNVVLKKYRGGGGGGG

SEQ ID NO: 93802 - protein, 27 aa, Artificial Sequence
  Cyclic GFR-binding peptide
EPLTVLYYDDSSNVIEQLSNGGGGGGG

SEQ ID NO: 93803 - protein, 29 aa, Artificial Sequence
  Cyclic GFR-binding peptide
GGGGGGGVTAKKLKPKKRVYEIKRVQVPR

SEQ ID NO: 93804 - protein, 29 aa, Artificial Sequence
  Cyclic GFR-binding peptide
GGGGGGGVQVEKLKPKKRVYEVKAVKVSR

SEQ ID NO: 93805 - protein, 29 aa, Artificial Sequence
  Cyclic GFR-binding peptide
GGGGGGGVQVEKFIPKKRVIEVKAVKVSR

SEQ ID NO: 93806 - protein, 29 aa, Artificial Sequence
  Cyclic GFR-binding peptide
GGGGGGGVQVEKHQGQHPKIRVKAMKVSR

SEQ ID NO: 93807 - protein, 29 aa, Artificial Sequence
  Cyclic GFR-binding peptide
GGGGGGGVTAKKHQGQHPKIRIKRMQVPR

SEQ ID NO: 93808 - protein, 29 aa, Artificial Sequence
  Cyclic GFR-binding peptide
GGGGGGGSMEGLLKPKKRVYEMIQVTINS

SEQ ID NO: 93809 - protein, 29 aa, Artificial Sequence
  Cyclic GFR-binding peptide
GGGGGGGSMEGIFIPKKRVIEMIQVTINS

SEQ ID NO: 93810 - protein, 29 aa, Artificial Sequence
  Cyclic GFR-binding peptide
GGGGGGGSMEGLHQGQHPKIRMIQMTINS

SEQ ID NO: 93811 - protein, 29 aa, Artificial Sequence
  Cyclic GFR-binding peptide
GGGGGGGSMEGILKPKKRVYEMIQVTINS

SEQ ID NO: 93812 - protein, 29 aa, Artificial Sequence
  Cyclic GFR-binding peptide
GGGGGGGSMEGLFIPKKRVIEMIQVTINS

SEQ ID NO: 93813 - protein, 29 aa, Artificial Sequence
  Cyclic GFR-binding peptide
GGGGGGGVTAKKFIPKKRVIEIKRVQVPR

SEQ ID NO: 93814 - protein, 29 aa, Artificial Sequence
  Cyclic GFR-binding peptide
GGGGGGGSMEGIHQGQHPKIRMIQMTINS

SEQ ID NO: 93815 - protein, 29 aa, Artificial Sequence
  Cyclic GFR-binding peptide
RPVQVRKIEYVRKKPKLKKATVGGGGGGG

SEQ ID NO: 93816 - protein, 29 aa, Artificial Sequence
  Cyclic GFR-binding peptide
RSVKVAKVEYVRKKPKLKEVQVGGGGGGG

SEQ ID NO: 93817 - protein, 29 aa, Artificial Sequence
  Cyclic GFR-binding peptide
RSVKVAKVEIVRKKPIFKEVQVGGGGGGG

SEQ ID NO: 93818 - protein, 29 aa, Artificial Sequence
  Cyclic GFR-binding peptide
RSVKMAKVRIKPHQGQHKEVQVGGGGGGG

SEQ ID NO: 93819 - protein, 29 aa, Artificial Sequence
  Cyclic GFR-binding peptide
RPVQMRKIRIKPHQGQHKKATVGGGGGGG

SEQ ID NO: 93820 - protein, 29 aa, Artificial Sequence
  Cyclic GFR-binding peptide
SNITVQIMEYVRKKPKLLGEMSGGGGGGG

SEQ ID NO: 93821 - protein, 29 aa, Artificial Sequence
  Cyclic GFR-binding peptide
SNITVQIMEIVRKKPIFIGEMSGGGGGGG

SEQ ID NO: 93822 - protein, 29 aa, Artificial Sequence
  Cyclic GFR-binding peptide
SNITMQIMRIKPHQGQHLGEMSGGGGGGG

SEQ ID NO: 93823 - protein, 29 aa, Artificial Sequence
  Cyclic GFR-binding peptide
SNITVQIMEYVRKKPKLIGEMSGGGGGGG

SEQ ID NO: 93824 - protein, 29 aa, Artificial Sequence
  Cyclic GFR-binding peptide
SNITVQIMEIVRKKPIFLGEMSGGGGGGG

SEQ ID NO: 93825 - protein, 29 aa, Artificial Sequence
  Cyclic GFR-binding peptide
RPVQVRKIEIVRKKPIFKKATVGGGGGGG

SEQ ID NO: 93826 - protein, 29 aa, Artificial Sequence
  Cyclic GFR-binding peptide
SNITMQIMRIKPHQGQHIGEMSGGGGGGG

SEQ ID NO: 93827 - protein, 27 aa, Artificial Sequence
  Cyclic GFR-binding peptide
GGGGGGGEYKFKVKPTRGVLYLISIPE

SEQ ID NO: 93828 - protein, 27 aa, Artificial Sequence
  Cyclic GFR-binding peptide
GGGGGGGEYKFKTPVGMDDLYLVSIPE

SEQ ID NO: 93829 - protein, 27 aa, Artificial Sequence
  Cyclic GFR-binding peptide
GGGGGGGEYQKYVKPKRGVIYLISIPS

SEQ ID NO: 93830 - protein, 27 aa, Artificial Sequence
  Cyclic GFR-binding peptide
GGGGGGGEYQKYVVKDYEDIYLMSIPS

SEQ ID NO: 93831 - protein, 27 aa, Artificial Sequence
  Cyclic GFR-binding peptide
GGGGGGGEYKFKIKPTKGILYLISIPE

SEQ ID NO: 93832 - protein, 27 aa, Artificial Sequence
  Cyclic GFR-binding peptide
GGGGGGGYHYKLYTVVGKDKYLISIPS

SEQ ID NO: 93833 - protein, 27 aa, Artificial Sequence
  Cyclic GFR-binding peptide
GGGGGGGRYKKLYTVVGKDFYLISIAN

SEQ ID NO: 93834 - protein, 27 aa, Artificial Sequence
  Cyclic GFR-binding peptide
GGGGGGGEYQKYVVNNAADIYLISIPS

SEQ ID NO: 93835 - protein, 27 aa, Artificial Sequence
  Cyclic GFR-binding peptide
GGGGGGGEYQKYVKPTRGVIYLISIPS

SEQ ID NO: 93836 - protein, 27 aa, Artificial Sequence
  Cyclic GFR-binding peptide
GGGGGGGEYQKYTPVGMDDIYLVSIPS

SEQ ID NO: 93837 - protein, 27 aa, Artificial Sequence
  Cyclic GFR-binding peptide
GGGGGGGEYKFKVVKDYEDLYLMSIPE

SEQ ID NO: 93838 - protein, 27 aa, Artificial Sequence
  Cyclic GFR-binding peptide
GGGGGGGEYKFKVVNNAADLYLISIPE

SEQ ID NO: 93839 - protein, 27 aa, Artificial Sequence
  Cyclic GFR-binding peptide
GGGGGGGEYQKYVVKENEDIYLMSIPS

SEQ ID NO: 93840 - protein, 27 aa, Artificial Sequence
  Cyclic GFR-binding peptide
GGGGGGGEYQKYIKPTKGIIYLISIPS

SEQ ID NO: 93841 - protein, 27 aa, Artificial Sequence
  Cyclic GFR-binding peptide
GGGGGGGRYKKLVVNNAADFYLISIAN

SEQ ID NO: 93842 - protein, 27 aa, Artificial Sequence
  Cyclic GFR-binding peptide
GGGGGGGYHYKLVVNNAADKYLISIPS

SEQ ID NO: 93843 - protein, 27 aa, Artificial Sequence
  Cyclic GFR-binding peptide
GGGGGGGEYKFKIVNNSSDLYLVSIPE

SEQ ID NO: 93844 - protein, 27 aa, Artificial Sequence
  Cyclic GFR-binding peptide
GGGGGGGEYQKYIVNSSDDIYLVSIPS

SEQ ID NO: 93845 - protein, 27 aa, Artificial Sequence
  Cyclic GFR-binding peptide
GGGGGGGEYKFKIVNSSDDLYLVSIPE

SEQ ID NO: 93846 - protein, 27 aa, Artificial Sequence
  Cyclic GFR-binding peptide
GGGGGGGEYKFKVKPKRGVLYLISIPE

SEQ ID NO: 93847 - protein, 27 aa, Artificial Sequence
  Cyclic GFR-binding peptide
GGGGGGGEYQKYYTVVGKDIYLISIPS

SEQ ID NO: 93848 - protein, 27 aa, Artificial Sequence
  Cyclic GFR-binding peptide
GGGGGGGEYKFKVVKENEDLYLMSIPE

SEQ ID NO: 93849 - protein, 27 aa, Artificial Sequence
  Cyclic GFR-binding peptide
GGGGGGGEYQKYIVNNSSDIYLVSIPS

SEQ ID NO: 93850 - protein, 27 aa, Artificial Sequence
  Cyclic GFR-binding peptide
GGGGGGGEYKFKYTVVGKDLYLISIPE

SEQ ID NO: 93851 - protein, 27 aa, Artificial Sequence
  Cyclic GFR-binding peptide
EPISILYLVGRTPKVKFKYEGGGGGGG

SEQ ID NO: 93852 - protein, 27 aa, Artificial Sequence
  Cyclic GFR-binding peptide
EPISVLYLDDMGVPTKFKYEGGGGGGG

SEQ ID NO: 93853 - protein, 27 aa, Artificial Sequence
  Cyclic GFR-binding peptide
SPISILYIVGRKPKVYKQYEGGGGGGG

SEQ ID NO: 93854 - protein, 27 aa, Artificial Sequence
  Cyclic GFR-binding peptide
SPISMLYIDEYDKVVYKQYEGGGGGGG

SEQ ID NO: 93855 - protein, 27 aa, Artificial Sequence
  Cyclic GFR-binding peptide
EPISILYLIGKTPKIKFKYEGGGGGGG

SEQ ID NO: 93856 - protein, 27 aa, Artificial Sequence
  Cyclic GFR-binding peptide
SPISILYKDKGVVTYLKYHYGGGGGGG

SEQ ID NO: 93857 - protein, 27 aa, Artificial Sequence
  Cyclic GFR-binding peptide
NAISILYFDKGVVTYLKKYRGGGGGGG

SEQ ID NO: 93858 - protein, 27 aa, Artificial Sequence
  Cyclic GFR-binding peptide
SPISILYIDAANNVVYKQYEGGGGGGG

SEQ ID NO: 93859 - protein, 27 aa, Artificial Sequence
  Cyclic GFR-binding peptide
SPISILYIVGRTPKVYKQYEGGGGGGG

SEQ ID NO: 93860 - protein, 27 aa, Artificial Sequence
  Cyclic GFR-binding peptide
SPISVLYIDDMGVPTYKQYEGGGGGGG

SEQ ID NO: 93861 - protein, 27 aa, Artificial Sequence
  Cyclic GFR-binding peptide
EPISMLYLDEYDKVVKFKYEGGGGGGG

SEQ ID NO: 93862 - protein, 27 aa, Artificial Sequence
  Cyclic GFR-binding peptide
EPISILYLDAANNVVKFKYEGGGGGGG

SEQ ID NO: 93863 - protein, 27 aa, Artificial Sequence
  Cyclic GFR-binding peptide
SPISMLYIDENEKVVYKQYEGGGGGGG

SEQ ID NO: 93864 - protein, 27 aa, Artificial Sequence
  Cyclic GFR-binding peptide
SPISILYIIGKTPKIYKQYEGGGGGGG

SEQ ID NO: 93865 - protein, 27 aa, Artificial Sequence
  Cyclic GFR-binding peptide
NAISILYFDAANNVVLKKYRGGGGGGG

SEQ ID NO: 93866 - protein, 27 aa, Artificial Sequence
  Cyclic GFR-binding peptide
SPISILYKDAANNVVLKYHYGGGGGGG

SEQ ID NO: 93867 - protein, 27 aa, Artificial Sequence
  Cyclic GFR-binding peptide
EPISVLYLDSSNNVIKFKYEGGGGGGG

SEQ ID NO: 93868 - protein, 27 aa, Artificial Sequence
  Cyclic GFR-binding peptide
SPISVLYIDDSSNVIYKQYEGGGGGGG

SEQ ID NO: 93869 - protein, 27 aa, Artificial Sequence
  Cyclic GFR-binding peptide
EPISVLYLDDSSNVIKFKYEGGGGGGG

SEQ ID NO: 93870 - protein, 27 aa, Artificial Sequence
  Cyclic GFR-binding peptide
EPISILYLVGRKPKVKFKYEGGGGGGG

SEQ ID NO: 93871 - protein, 27 aa, Artificial Sequence
  Cyclic GFR-binding peptide
SPISILYIDKGVVTYYKQYEGGGGGGG

SEQ ID NO: 93872 - protein, 27 aa, Artificial Sequence
  Cyclic GFR-binding peptide
EPISMLYLDENEKVVKFKYEGGGGGGG

SEQ ID NO: 93873 - protein, 27 aa, Artificial Sequence
  Cyclic GFR-binding peptide
SPISVLYIDSSNNVIYKQYEGGGGGGG

SEQ ID NO: 93874 - protein, 27 aa, Artificial Sequence
  Cyclic GFR-binding peptide
EPISILYLDKGVVTYKFKYEGGGGGGG

SEQ ID NO: 93875 - protein, 27 aa, Artificial Sequence
  Cyclic GFR-binding peptide
GGGGGGGPIKGYIIQQKDNFYLMNIPS

SEQ ID NO: 93876 - protein, 27 aa, Artificial Sequence
  Cyclic GFR-binding peptide
GGGGGGGPIKGYVVKDYEDFYLMNIPS

SEQ ID NO: 93877 - protein, 27 aa, Artificial Sequence
  Cyclic GFR-binding peptide
GGGGGGGPIKGYIVNSSDDFYLVNIPS

SEQ ID NO: 93878 - protein, 27 aa, Artificial Sequence
  Cyclic GFR-binding peptide
GGGGGGGPIKGYVVNNAADFYLINIPS

SEQ ID NO: 93879 - protein, 27 aa, Artificial Sequence
  Cyclic GFR-binding peptide
GGGGGGGPIKGYYTVVGKDFYLINIPS

SEQ ID NO: 93880 - protein, 27 aa, Artificial Sequence
  Cyclic GFR-binding peptide
GGGGGGGPIKGYLLVRGNDFYLMNIPS

SEQ ID NO: 93881 - protein, 27 aa, Artificial Sequence
  Cyclic GFR-binding peptide
GGGGGGGPIKGYVVKENEDFYLMNIPS

SEQ ID NO: 93882 - protein, 27 aa, Artificial Sequence
  Cyclic GFR-binding peptide
GGGGGGGPIKGYVVNNASDFYLINIPS

SEQ ID NO: 93883 - protein, 27 aa, Artificial Sequence
  Cyclic GFR-binding peptide
GGGGGGGPIKGYTPVGMDDFYLVNIPS

SEQ ID NO: 93884 - protein, 27 aa, Artificial Sequence
  Cyclic GFR-binding peptide
GGGGGGGPIKGYIVNNSSDFYLVNIPS

SEQ ID NO: 93885 - protein, 27 aa, Artificial Sequence
  Cyclic GFR-binding peptide
SPINMLYFNDKQQIIYGKIPGGGGGGG

SEQ ID NO: 93886 - protein, 27 aa, Artificial Sequence
  Cyclic GFR-binding peptide
SPINMLYFDEYDKVVYGKIPGGGGGGG

SEQ ID NO: 93887 - protein, 27 aa, Artificial Sequence
  Cyclic GFR-binding peptide
SPINVLYFDDSSNVIYGKIPGGGGGGG

SEQ ID NO: 93888 - protein, 27 aa, Artificial Sequence
  Cyclic GFR-binding peptide
SPINILYFDAANNVVYGKIPGGGGGGG

SEQ ID NO: 93889 - protein, 27 aa, Artificial Sequence
  Cyclic GFR-binding peptide
SPINILYFDKGVVTYYGKIPGGGGGGG

SEQ ID NO: 93890 - protein, 27 aa, Artificial Sequence
  Cyclic GFR-binding peptide
SPINMLYFDNGRVLLYGKIPGGGGGGG

SEQ ID NO: 93891 - protein, 27 aa, Artificial Sequence
  Cyclic GFR-binding peptide
SPINMLYFDENEKVVYGKIPGGGGGGG

SEQ ID NO: 93892 - protein, 27 aa, Artificial Sequence
  Cyclic GFR-binding peptide
SPINILYFDSANNVVYGKIPGGGGGGG

SEQ ID NO: 93893 - protein, 27 aa, Artificial Sequence
  Cyclic GFR-binding peptide
SPINVLYFDDMGVPTYGKIPGGGGGGG

SEQ ID NO: 93894 - protein, 27 aa, Artificial Sequence
  Cyclic GFR-binding peptide
SPINVLYFDSSNNVIYGKIPGGGGGGG

SEQ ID NO: 93895 - protein, 27 aa, Artificial Sequence
  Cyclic GFR-binding peptide
GGGGGGGEYQKYVVNNASDIYLISIPS

SEQ ID NO: 93896 - protein, 27 aa, Artificial Sequence
  Cyclic GFR-binding peptide
GGGGGGGEYQKYIIQQKDNIYLMSIPS

SEQ ID NO: 93897 - protein, 27 aa, Artificial Sequence
  Cyclic GFR-binding peptide
GGGGGGGEYQKYLLVRGNDIYLMSIPS

SEQ ID NO: 93898 - protein, 27 aa, Artificial Sequence
  Cyclic GFR-binding peptide
SPISILYIDSANNVVYKQYEGGGGGGG

SEQ ID NO: 93899 - protein, 27 aa, Artificial Sequence
  Cyclic GFR-binding peptide
SPISMLYINDKQQIIYKQYEGGGGGGG

SEQ ID NO: 93900 - protein, 27 aa, Artificial Sequence
  Cyclic GFR-binding peptide
SPISMLYIDNGRVLLYKQYEGGGGGGG

SEQ ID NO: 93901 - protein, 27 aa, Artificial Sequence
  Cyclic GFR-binding peptide
GGGGGGGPYVKLYTVVGKDFFLISLSS

SEQ ID NO: 93902 - protein, 27 aa, Artificial Sequence
  Cyclic GFR-binding peptide
GGGGGGGPYVKLIKPTKGIFFLISLSS

SEQ ID NO: 93903 - protein, 27 aa, Artificial Sequence
  Cyclic GFR-binding peptide
GGGGGGGPYVKLIIQQKDNFFLMSLSS

SEQ ID NO: 93904 - protein, 27 aa, Artificial Sequence
  Cyclic GFR-binding peptide
GGGGGGGPYVKLIVNSSDDFFLVSLSS

SEQ ID NO: 93905 - protein, 27 aa, Artificial Sequence
  Cyclic GFR-binding peptide
GGGGGGGPYVKLVKPKRGVFFLISLSS

SEQ ID NO: 93906 - protein, 27 aa, Artificial Sequence
  Cyclic GFR-binding peptide
GGGGGGGPYVKLVKPTRGVFFLISLSS

SEQ ID NO: 93907 - protein, 27 aa, Artificial Sequence
  Cyclic GFR-binding peptide
GGGGGGGPYVKLTPVGMDDFFLVSLSS

SEQ ID NO: 93908 - protein, 29 aa, Artificial Sequence
  Cyclic GFR-binding peptide
GGGGGGGPYVKLHQGQHPKIRFFLMSLSS

SEQ ID NO: 93909 - protein, 27 aa, Artificial Sequence
  Cyclic GFR-binding peptide
GGGGGGGPYVKLVVNKNEDFFLISLSS

SEQ ID NO: 93910 - protein, 27 aa, Artificial Sequence
  Cyclic GFR-binding peptide
GGGGGGGPYVKLVVNNASDFFLISLSS

SEQ ID NO: 93911 - protein, 27 aa, Artificial Sequence
  Cyclic GFR-binding peptide
GGGGGGGPYVKLVVKENEDFFLMSLSS

SEQ ID NO: 93912 - protein, 27 aa, Artificial Sequence
  Cyclic GFR-binding peptide
GGGGGGGPYVKLIVNNSSDFFLVSLSS

SEQ ID NO: 93913 - protein, 29 aa, Artificial Sequence
  Cyclic GFR-binding peptide
GGGGGGGPYVKLLKPKKRVYEFFLVSLSS

SEQ ID NO: 93914 - protein, 27 aa, Artificial Sequence
  Cyclic GFR-binding peptide
GGGGGGGPYVKLLLVRGNDFFLMSLSS

SEQ ID NO: 93915 - protein, 27 aa, Artificial Sequence
  Cyclic GFR-binding peptide
GGGGGGGPYVKLVVKDYEDFFLMSLSS

SEQ ID NO: 93916 - protein, 27 aa, Artificial Sequence
  Cyclic GFR-binding peptide
GGGGGGGPYVKLVVNNAADFFLISLSS

SEQ ID NO: 93917 - protein, 27 aa, Artificial Sequence
  Cyclic GFR-binding peptide
SSLSILFFDKGVVTYLKVYPGGGGGGG

SEQ ID NO: 93918 - protein, 27 aa, Artificial Sequence
  Cyclic GFR-binding peptide
SSLSILFFIGKTPKILKVYPGGGGGGG

SEQ ID NO: 93919 - protein, 27 aa, Artificial Sequence
  Cyclic GFR-binding peptide
SSLSMLFFNDKQQIILKVYPGGGGGGG

SEQ ID NO: 93920 - protein, 27 aa, Artificial Sequence
  Cyclic GFR-binding peptide
SSLSVLFFDDSSNVILKVYPGGGGGGG

SEQ ID NO: 93921 - protein, 27 aa, Artificial Sequence
  Cyclic GFR-binding peptide
SSLSILFFVGRKPKVLKVYPGGGGGGG

SEQ ID NO: 93922 - protein, 27 aa, Artificial Sequence
  Cyclic GFR-binding peptide
SSLSILFFVGRTPKVLKVYPGGGGGGG

SEQ ID NO: 93923 - protein, 27 aa, Artificial Sequence
  Cyclic GFR-binding peptide
SSLSVLFFDDMGVPTLKVYPGGGGGGG

SEQ ID NO: 93924 - protein, 29 aa, Artificial Sequence
  Cyclic GFR-binding peptide
SSLSMLFFRIKPHQGQHLKVYPGGGGGGG

SEQ ID NO: 93925 - protein, 27 aa, Artificial Sequence
  Cyclic GFR-binding peptide
SSLSILFFDENKNVVLKVYPGGGGGGG

SEQ ID NO: 93926 - protein, 27 aa, Artificial Sequence
  Cyclic GFR-binding peptide
SSLSILFFDSANNVVLKVYPGGGGGGG

SEQ ID NO: 93927 - protein, 27 aa, Artificial Sequence
  Cyclic GFR-binding peptide
SSLSMLFFDENEKVVLKVYPGGGGGGG

SEQ ID NO: 93928 - protein, 27 aa, Artificial Sequence
  Cyclic GFR-binding peptide
SSLSVLFFDSSNNVILKVYPGGGGGGG

SEQ ID NO: 93929 - protein, 29 aa, Artificial Sequence
  Cyclic GFR-binding peptide
SSLSVLFFEYVRKKPKLLKVYPGGGGGGG

SEQ ID NO: 93930 - protein, 27 aa, Artificial Sequence
  Cyclic GFR-binding peptide
SSLSMLFFDNGRVLLLKVYPGGGGGGG

SEQ ID NO: 93931 - protein, 27 aa, Artificial Sequence
  Cyclic GFR-binding peptide
SSLSMLFFDEYDKVVLKVYPGGGGGGG

SEQ ID NO: 93932 - protein, 27 aa, Artificial Sequence
  Cyclic GFR-binding peptide
SSLSILFFDAANNVVLKVYPGGGGGGG

SEQ ID NO: 93933 - protein, 27 aa, Artificial Sequence
  Cyclic GFR-binding peptide
GGGGGGGSMEGIIVNSSDDMIQVTINS

SEQ ID NO: 93934 - protein, 27 aa, Artificial Sequence
  Cyclic GFR-binding peptide
GGGGGGGVTAKKVVKENEDIKRMQVPR

SEQ ID NO: 93935 - protein, 27 aa, Artificial Sequence
  Cyclic GFR-binding peptide
GGGGGGGSMEGIVVKDYEDMIQMTINS

SEQ ID NO: 93936 - protein, 27 aa, Artificial Sequence
  Cyclic GFR-binding peptide
GGGGGGGVTAKKIKPTKGIIKRIQVPR

SEQ ID NO: 93937 - protein, 27 aa, Artificial Sequence
  Cyclic GFR-binding peptide
GGGGGGGSMEGIVKPTRGVMIQITINS

SEQ ID NO: 93938 - protein, 29 aa, Artificial Sequence
  Cyclic GFR-binding peptide
GGGGGGGNSLQEFIPKKRVIEYYVVPLPE

SEQ ID NO: 93939 - protein, 27 aa, Artificial Sequence
  Cyclic GFR-binding peptide
GGGGGGGVQVEKVKPKRGVVKAIKVSR

SEQ ID NO: 93940 - protein, 27 aa, Artificial Sequence
  Cyclic GFR-binding peptide
GGGGGGGVQVEKVVKENEDVKAMKVSR

SEQ ID NO: 93941 - protein, 27 aa, Artificial Sequence
  Cyclic GFR-binding peptide
GGGGGGGVTAKKIVNSSDDIKRVQVPR

SEQ ID NO: 93942 - protein, 27 aa, Artificial Sequence
  Cyclic GFR-binding peptide
GGGGGGGVQVEKIKPTKGIVKAIKVSR

SEQ ID NO: 93943 - protein, 29 aa, Artificial Sequence
  Cyclic GFR-binding peptide
GGGGGGGNSLQEFIPKKRVIEYYLVTLPE

SEQ ID NO: 93944 - protein, 27 aa, Artificial Sequence
  Cyclic GFR-binding peptide
GGGGGGGVQVEKIVNSSDDVKAVKVSR

SEQ ID NO: 93945 - protein, 27 aa, Artificial Sequence
  Cyclic GFR-binding peptide
GGGGGGGVTAKKVKPKRGVIKRIQVPR

SEQ ID NO: 93946 - protein, 27 aa, Artificial Sequence
  Cyclic GFR-binding peptide
GGGGGGGVQVEKVKPTRGVVKAIKVSR

SEQ ID NO: 93947 - protein, 27 aa, Artificial Sequence
  Cyclic GFR-binding peptide
GGGGGGGVTAKKVKPTRGVIKRIQVPR

SEQ ID NO: 93948 - protein, 29 aa, Artificial Sequence
  Cyclic GFR-binding peptide
GGGGGGGNSLQELKPKKRVYEYYLVTLPE

SEQ ID NO: 93949 - protein, 27 aa, Artificial Sequence
  Cyclic GFR-binding peptide
GGGGGGGSMEGIVKPKRGVMIQITINS

SEQ ID NO: 93950 - protein, 27 aa, Artificial Sequence
  Cyclic GFR-binding peptide
GGGGGGGSMEGIVVKENEDMIQMTINS

SEQ ID NO: 93951 - protein, 27 aa, Artificial Sequence
  Cyclic GFR-binding peptide
GGGGGGGSMEGIIKPTKGIMIQITINS

SEQ ID NO: 93952 - protein, 29 aa, Artificial Sequence
  Cyclic GFR-binding peptide
GGGGGGGNSLQEHQGQHPKIRYYLMTLPE

SEQ ID NO: 93953 - protein, 27 aa, Artificial Sequence
  Cyclic GFR-binding peptide
GGGGGGGVTAKKVVKDYEDIKRMQVPR

SEQ ID NO: 93954 - protein, 29 aa, Artificial Sequence
  Cyclic GFR-binding peptide
GGGGGGGNSLQEHQGQHPKIRYYVMPLPE

SEQ ID NO: 93955 - protein, 29 aa, Artificial Sequence
  Cyclic GFR-binding peptide
GGGGGGGNSLQELKPKKRVYEYYVVPLPE

SEQ ID NO: 93956 - protein, 27 aa, Artificial Sequence
  Cyclic GFR-binding peptide
GGGGGGGVQVEKVVKDYEDVKAMKVSR

SEQ ID NO: 93957 - protein, 27 aa, Artificial Sequence
  Cyclic GFR-binding peptide
SNITVQIMDDSSNVIIGEMSGGGGGGG

SEQ ID NO: 93958 - protein, 27 aa, Artificial Sequence
  Cyclic GFR-binding peptide
RPVQMRKIDENEKVVKKATVGGGGGGG

SEQ ID NO: 93959 - protein, 27 aa, Artificial Sequence
  Cyclic GFR-binding peptide
SNITMQIMDEYDKVVIGEMSGGGGGGG

SEQ ID NO: 93960 - protein, 27 aa, Artificial Sequence
  Cyclic GFR-binding peptide
RPVQIRKIIGKTPKIKKATVGGGGGGG

SEQ ID NO: 93961 - protein, 27 aa, Artificial Sequence
  Cyclic GFR-binding peptide
SNITIQIMVGRTPKVIGEMSGGGGGGG

SEQ ID NO: 93962 - protein, 29 aa, Artificial Sequence
  Cyclic GFR-binding peptide
EPLPVVYYEIVRKKPIFEQLSNGGGGGGG

SEQ ID NO: 93963 - protein, 27 aa, Artificial Sequence
  Cyclic GFR-binding peptide
RSVKIAKVVGRKPKVKEVQVGGGGGGG

SEQ ID NO: 93964 - protein, 27 aa, Artificial Sequence
  Cyclic GFR-binding peptide
RSVKMAKVDENEKVVKEVQVGGGGGGG

SEQ ID NO: 93965 - protein, 27 aa, Artificial Sequence
  Cyclic GFR-binding peptide
RPVQVRKIDDSSNVIKKATVGGGGGGG

SEQ ID NO: 93966 - protein, 27 aa, Artificial Sequence
  Cyclic GFR-binding peptide
RSVKIAKVIGKTPKIKEVQVGGGGGGG

SEQ ID NO: 93967 - protein, 29 aa, Artificial Sequence
  Cyclic GFR-binding peptide
EPLTVLYYEIVRKKPIFEQLSNGGGGGGG

SEQ ID NO: 93968 - protein, 27 aa, Artificial Sequence
  Cyclic GFR-binding peptide
RSVKVAKVDDSSNVIKEVQVGGGGGGG

SEQ ID NO: 93969 - protein, 27 aa, Artificial Sequence
  Cyclic GFR-binding peptide
RPVQIRKIVGRKPKVKKATVGGGGGGG

SEQ ID NO: 93970 - protein, 27 aa, Artificial Sequence
  Cyclic GFR-binding peptide
RSVKIAKVVGRTPKVKEVQVGGGGGGG

SEQ ID NO: 93971 - protein, 27 aa, Artificial Sequence
  Cyclic GFR-binding peptide
RPVQIRKIVGRTPKVKKATVGGGGGGG

SEQ ID NO: 93972 - protein, 29 aa, Artificial Sequence
  Cyclic GFR-binding peptide
EPLTVLYYEYVRKKPKLEQLSNGGGGGGG

SEQ ID NO: 93973 - protein, 27 aa, Artificial Sequence
  Cyclic GFR-binding peptide
SNITIQIMVGRKPKVIGEMSGGGGGGG

SEQ ID NO: 93974 - protein, 27 aa, Artificial Sequence
  Cyclic GFR-binding peptide
SNITMQIMDENEKVVIGEMSGGGGGGG

SEQ ID NO: 93975 - protein, 27 aa, Artificial Sequence
  Cyclic GFR-binding peptide
SNITIQIMIGKTPKIIGEMSGGGGGGG

SEQ ID NO: 93976 - protein, 29 aa, Artificial Sequence
  Cyclic GFR-binding peptide
EPLTMLYYRIKPHQGQHEQLSNGGGGGGG

SEQ ID NO: 93977 - protein, 27 aa, Artificial Sequence
  Cyclic GFR-binding peptide
RPVQMRKIDEYDKVVKKATVGGGGGGG

SEQ ID NO: 93978 - protein, 29 aa, Artificial Sequence
  Cyclic GFR-binding peptide
EPLPMVYYRIKPHQGQHEQLSNGGGGGGG

SEQ ID NO: 93979 - protein, 29 aa, Artificial Sequence
  Cyclic GFR-binding peptide
EPLPVVYYEYVRKKPKLEQLSNGGGGGGG

SEQ ID NO: 93980 - protein, 27 aa, Artificial Sequence
  Cyclic GFR-binding peptide
RSVKMAKVDEYDKVVKEVQVGGGGGGG

SEQ ID NO: 93981 - protein, 27 aa, Artificial Sequence
  Cyclic GFR-binding peptide
GGGGGGGRYKKLIIQQKDNFYLMSIAN

SEQ ID NO: 93982 - protein, 27 aa, Artificial Sequence
  Cyclic GFR-binding peptide
GGGGGGGRYKKLLLVRGNDFYLMSIAN

SEQ ID NO: 93983 - protein, 27 aa, Artificial Sequence
  Cyclic GFR-binding peptide
NAISMLYFNDKQQIILKKYRGGGGGGG

SEQ ID NO: 93984 - protein, 27 aa, Artificial Sequence
  Cyclic GFR-binding peptide
NAISMLYFDNGRVLLLKKYRGGGGGGG

SEQ ID NO: 93985 - protein, 27 aa, Artificial Sequence
  Cyclic GFR-binding peptide
GGGGGGGEYKFKVVNKNEDLYLISIPE

SEQ ID NO: 93986 - protein, 27 aa, Artificial Sequence
  Cyclic GFR-binding peptide
GGGGGGGPIKGYVKPTRGVFYLINIPS

SEQ ID NO: 93987 - protein, 27 aa, Artificial Sequence
  Cyclic GFR-binding peptide
GGGGGGGEYKFKLLVRGNDLYLMSIPE

SEQ ID NO: 93988 - protein, 27 aa, Artificial Sequence
  Cyclic GFR-binding peptide
GGGGGGGYHYKLVVNKNEDKYLISIPS

SEQ ID NO: 93989 - protein, 27 aa, Artificial Sequence
  Cyclic GFR-binding peptide
GGGGGGGRHKRLLLVRGNDYYLMSTAS

SEQ ID NO: 93990 - protein, 27 aa, Artificial Sequence
  Cyclic GFR-binding peptide
GGGGGGGYHYKLLLVRGNDKYLMSIPS

SEQ ID NO: 93991 - protein, 27 aa, Artificial Sequence
  Cyclic GFR-binding peptide
GGGGGGGRHKRLVVNKNEDYYLISTAS

SEQ ID NO: 93992 - protein, 27 aa, Artificial Sequence
  Cyclic GFR-binding peptide
GGGGGGGRYKKLVVNKNEDFYLISIAN

SEQ ID NO: 93993 - protein, 27 aa, Artificial Sequence
  Cyclic GFR-binding peptide
GGGGGGGPIKGYVVNKNEDFYLINIPS

SEQ ID NO: 93994 - protein, 27 aa, Artificial Sequence
  Cyclic GFR-binding peptide
GGGGGGGPIKGYIKPTKGIFYLINIPS

SEQ ID NO: 93995 - protein, 27 aa, Artificial Sequence
  Cyclic GFR-binding peptide
GGGGGGGRHKRLYTVVGKDYYLISTAS

SEQ ID NO: 93996 - protein, 27 aa, Artificial Sequence
  Cyclic GFR-binding peptide
GGGGGGGEYKFKVVNNASDLYLISIPE

SEQ ID NO: 93997 - protein, 27 aa, Artificial Sequence
  Cyclic GFR-binding peptide
GGGGGGGRHKRLIIQQKDNYYLMSTAS

SEQ ID NO: 93998 - protein, 27 aa, Artificial Sequence
  Cyclic GFR-binding peptide
GGGGGGGEYKFKIIQQKDNLYLMSIPE

SEQ ID NO: 93999 - protein, 27 aa, Artificial Sequence
  Cyclic GFR-binding peptide
GGGGGGGPIKGYVKPKRGVFYLINIPS

SEQ ID NO: 94000 - protein, 27 aa, Artificial Sequence
  Cyclic GFR-binding peptide
GGGGGGGRHKRLVVNNASDYYLISTAS

SEQ ID NO: 94001 - protein, 27 aa, Artificial Sequence
  Cyclic GFR-binding peptide
GGGGGGGYHYKLVVNNASDKYLISIPS

SEQ ID NO: 94002 - protein, 27 aa, Artificial Sequence
  Cyclic GFR-binding peptide
GGGGGGGYHYKLIIQQKDNKYLMSIPS

SEQ ID NO: 94003 - protein, 27 aa, Artificial Sequence
  Cyclic GFR-binding peptide
GGGGGGGRHKRLVVNNAADYYLISTAS

SEQ ID NO: 94004 - protein, 27 aa, Artificial Sequence
  Cyclic GFR-binding peptide
EPISILYLDENKNVVKFKYEGGGGGGG

SEQ ID NO: 94005 - protein, 27 aa, Artificial Sequence
  Cyclic GFR-binding peptide
SPINILYFVGRTPKVYGKIPGGGGGGG

SEQ ID NO: 94006 - protein, 27 aa, Artificial Sequence
  Cyclic GFR-binding peptide
EPISMLYLDNGRVLLKFKYEGGGGGGG

SEQ ID NO: 94007 - protein, 27 aa, Artificial Sequence
  Cyclic GFR-binding peptide
SPISILYKDENKNVVLKYHYGGGGGGG

SEQ ID NO: 94008 - protein, 27 aa, Artificial Sequence
  Cyclic GFR-binding peptide
SATSMLYYDNGRVLLLRKHRGGGGGGG

SEQ ID NO: 94009 - protein, 27 aa, Artificial Sequence
  Cyclic GFR-binding peptide
SPISMLYKDNGRVLLLKYHYGGGGGGG

SEQ ID NO: 94010 - protein, 27 aa, Artificial Sequence
  Cyclic GFR-binding peptide
SATSILYYDENKNVVLRKHRGGGGGGG

SEQ ID NO: 94011 - protein, 27 aa, Artificial Sequence
  Cyclic GFR-binding peptide
NAISILYFDENKNVVLKKYRGGGGGGG

SEQ ID NO: 94012 - protein, 27 aa, Artificial Sequence
  Cyclic GFR-binding peptide
SPINILYFDENKNVVYGKIPGGGGGGG

SEQ ID NO: 94013 - protein, 27 aa, Artificial Sequence
  Cyclic GFR-binding peptide
SPINILYFIGKTPKIYGKIPGGGGGGG

SEQ ID NO: 94014 - protein, 27 aa, Artificial Sequence
  Cyclic GFR-binding peptide
SATSILYYDKGVVTYLRKHRGGGGGGG

SEQ ID NO: 94015 - protein, 27 aa, Artificial Sequence
  Cyclic GFR-binding peptide
EPISILYLDSANNVVKFKYEGGGGGGG

SEQ ID NO: 94016 - protein, 27 aa, Artificial Sequence
  Cyclic GFR-binding peptide
SATSMLYYNDKQQIILRKHRGGGGGGG

SEQ ID NO: 94017 - protein, 27 aa, Artificial Sequence
  Cyclic GFR-binding peptide
EPISMLYLNDKQQIIKFKYEGGGGGGG

SEQ ID NO: 94018 - protein, 27 aa, Artificial Sequence
  Cyclic GFR-binding peptide
SPINILYFVGRKPKVYGKIPGGGGGGG

SEQ ID NO: 94019 - protein, 27 aa, Artificial Sequence
  Cyclic GFR-binding peptide
SATSILYYDSANNVVLRKHRGGGGGGG

SEQ ID NO: 94020 - protein, 27 aa, Artificial Sequence
  Cyclic GFR-binding peptide
SPISILYKDSANNVVLKYHYGGGGGGG

SEQ ID NO: 94021 - protein, 27 aa, Artificial Sequence
  Cyclic GFR-binding peptide
SPISMLYKNDKQQIILKYHYGGGGGGG

SEQ ID NO: 94022 - protein, 27 aa, Artificial Sequence
  Cyclic GFR-binding peptide
SATSILYYDAANNVVLRKHRGGGGGGG

SEQ ID NO: 94023 - protein, 27 aa, Artificial Sequence
  Cyclic GFR-binding peptide
GGGGGGGSMEGIIIQQKDNMIQMTINS

SEQ ID NO: 94024 - protein, 27 aa, Artificial Sequence
  Cyclic GFR-binding peptide
GGGGGGGSMEGLVKPKRGVMIQITINS

SEQ ID NO: 94025 - protein, 27 aa, Artificial Sequence
  Cyclic GFR-binding peptide
GGGGGGGSMEGLVVNNASDMIQITINS

SEQ ID NO: 94026 - protein, 27 aa, Artificial Sequence
  Cyclic GFR-binding peptide
GGGGGGGSMEGILLVRGNDMIQMTINS

SEQ ID NO: 94027 - protein, 27 aa, Artificial Sequence
  Cyclic GFR-binding peptide
GGGGGGGSMEGLIKPTKGIMIQITINS

SEQ ID NO: 94028 - protein, 27 aa, Artificial Sequence
  Cyclic GFR-binding peptide
GGGGGGGSMEGLIVNSSDDMIQVTINS

SEQ ID NO: 94029 - protein, 27 aa, Artificial Sequence
  Cyclic GFR-binding peptide
GGGGGGGSMEGIVVNNASDMIQITINS

SEQ ID NO: 94030 - protein, 27 aa, Artificial Sequence
  Cyclic GFR-binding peptide
GGGGGGGSMEGLVVNNAADMIQITINS

SEQ ID NO: 94031 - protein, 27 aa, Artificial Sequence
  Cyclic GFR-binding peptide
GGGGGGGSMEGLLLVRGNDMIQMTINS

SEQ ID NO: 94032 - protein, 27 aa, Artificial Sequence
  Cyclic GFR-binding peptide
GGGGGGGSMEGLIIQQKDNMIQMTINS

SEQ ID NO: 94033 - protein, 27 aa, Artificial Sequence
  Cyclic GFR-binding peptide
GGGGGGGSMEGIVVNNAADMIQITINS

SEQ ID NO: 94034 - protein, 27 aa, Artificial Sequence
  Cyclic GFR-binding peptide
GGGGGGGSMEGLVKPTRGVMIQITINS

SEQ ID NO: 94035 - protein, 27 aa, Artificial Sequence
  Cyclic GFR-binding peptide
SNITMQIMNDKQQIIIGEMSGGGGGGG

SEQ ID NO: 94036 - protein, 27 aa, Artificial Sequence
  Cyclic GFR-binding peptide
SNITIQIMVGRKPKVLGEMSGGGGGGG

SEQ ID NO: 94037 - protein, 27 aa, Artificial Sequence
  Cyclic GFR-binding peptide
SNITIQIMDSANNVVLGEMSGGGGGGG

SEQ ID NO: 94038 - protein, 27 aa, Artificial Sequence
  Cyclic GFR-binding peptide
SNITMQIMDNGRVLLIGEMSGGGGGGG

SEQ ID NO: 94039 - protein, 27 aa, Artificial Sequence
  Cyclic GFR-binding peptide
SNITIQIMIGKTPKILGEMSGGGGGGG

SEQ ID NO: 94040 - protein, 27 aa, Artificial Sequence
  Cyclic GFR-binding peptide
SNITVQIMDDSSNVILGEMSGGGGGGG

SEQ ID NO: 94041 - protein, 27 aa, Artificial Sequence
  Cyclic GFR-binding peptide
SNITIQIMDSANNVVIGEMSGGGGGGG

SEQ ID NO: 94042 - protein, 27 aa, Artificial Sequence
  Cyclic GFR-binding peptide
SNITIQIMDAANNVVLGEMSGGGGGGG

SEQ ID NO: 94043 - protein, 27 aa, Artificial Sequence
  Cyclic GFR-binding peptide
SNITMQIMDNGRVLLLGEMSGGGGGGG

SEQ ID NO: 94044 - protein, 27 aa, Artificial Sequence
  Cyclic GFR-binding peptide
SNITMQIMNDKQQIILGEMSGGGGGGG

SEQ ID NO: 94045 - protein, 27 aa, Artificial Sequence
  Cyclic GFR-binding peptide
SNITIQIMDAANNVVIGEMSGGGGGGG

SEQ ID NO: 94046 - protein, 27 aa, Artificial Sequence
  Cyclic GFR-binding peptide
SNITIQIMVGRTPKVLGEMSGGGGGGG

SEQ ID NO: 94047 - protein, 27 aa, Artificial Sequence
  Cyclic GFR-binding peptide
GGGGGGGQYNKLVVNKNEDLYLISIAS

SEQ ID NO: 94048 - protein, 27 aa, Artificial Sequence
  Cyclic GFR-binding peptide
GGGGGGGQYNKLVVNNAADLYLISIAS

SEQ ID NO: 94049 - protein, 27 aa, Artificial Sequence
  Cyclic GFR-binding peptide
GGGGGGGQYNKLIIQQKDNLYLMSIAS

SEQ ID NO: 94050 - protein, 27 aa, Artificial Sequence
  Cyclic GFR-binding peptide
GGGGGGGQYNKLLLVRGNDLYLMSIAS

SEQ ID NO: 94051 - protein, 27 aa, Artificial Sequence
  Cyclic GFR-binding peptide
GGGGGGGQYNKLYTVVGKDLYLISIAS

SEQ ID NO: 94052 - protein, 27 aa, Artificial Sequence
  Cyclic GFR-binding peptide
SAISILYLDENKNVVLKNYQGGGGGGG

SEQ ID NO: 94053 - protein, 27 aa, Artificial Sequence
  Cyclic GFR-binding peptide
SAISILYLDAANNVVLKNYQGGGGGGG

SEQ ID NO: 94054 - protein, 27 aa, Artificial Sequence
  Cyclic GFR-binding peptide
SAISMLYLNDKQQIILKNYQGGGGGGG

SEQ ID NO: 94055 - protein, 27 aa, Artificial Sequence
  Cyclic GFR-binding peptide
SAISMLYLDNGRVLLLKNYQGGGGGGG

SEQ ID NO: 94056 - protein, 27 aa, Artificial Sequence
  Cyclic GFR-binding peptide
SAISILYLDKGVVTYLKNYQGGGGGGG

SEQ ID NO: 94057 - protein, 27 aa, Artificial Sequence
  Cyclic GFR-binding peptide
DENEKVVRYKKLIKPTKGIFYLISIAN

SEQ ID NO: 94058 - protein, 29 aa, Artificial Sequence
  Cyclic GFR-binding peptide
DENEKVVRHKRLFIPKKRVIEYYLVSTAS

SEQ ID NO: 94059 - protein, 27 aa, Artificial Sequence
  Cyclic GFR-binding peptide
DENEKVVYHYKLVVKDYEDKYLMSIPS

SEQ ID NO: 94060 - protein, 27 aa, Artificial Sequence
  Cyclic GFR-binding peptide
DENEKVVQYNKLIVNNSSDLYLVSIAS

SEQ ID NO: 94061 - protein, 27 aa, Artificial Sequence
  Cyclic GFR-binding peptide
DENEKVVRYKKLVVKDYEDFYLMSIAN

SEQ ID NO: 94062 - protein, 27 aa, Artificial Sequence
  Cyclic GFR-binding peptide
DENEKVVRYKKLVKPTRGVFYLISIAN

SEQ ID NO: 94063 - protein, 27 aa, Artificial Sequence
  Cyclic GFR-binding peptide
DENEKVVRHKRLVVKENEDYYLMSTAS

SEQ ID NO: 94064 - protein, 27 aa, Artificial Sequence
  Cyclic GFR-binding peptide
DENEKVVYHYKLIKPTKGIKYLISIPS

SEQ ID NO: 94065 - protein, 29 aa, Artificial Sequence
  Cyclic GFR-binding peptide
DENEKVVRYKKLFIPKKRVIEFYLVSIAN

SEQ ID NO: 94066 - protein, 27 aa, Artificial Sequence
  Cyclic GFR-binding peptide
DENEKVVYHYKLVVKENEDKYLMSIPS

SEQ ID NO: 94067 - protein, 27 aa, Artificial Sequence
  Cyclic GFR-binding peptide
DENEKVVRHKRLVKPKRGVYYLISTAS

SEQ ID NO: 94068 - protein, 27 aa, Artificial Sequence
  Cyclic GFR-binding peptide
DENEKVVYHYKLVKPKRGVKYLISIPS

SEQ ID NO: 94069 - protein, 29 aa, Artificial Sequence
  Cyclic GFR-binding peptide
DENEKVVQYNKLFIPKKRVIELYLVSIAS

SEQ ID NO: 94070 - protein, 27 aa, Artificial Sequence
  Cyclic GFR-binding peptide
DENEKVVQYNKLVKPTRGVLYLISIAS

SEQ ID NO: 94071 - protein, 27 aa, Artificial Sequence
  Cyclic GFR-binding peptide
DENEKVVRYKKLVVKENEDFYLMSIAN

SEQ ID NO: 94072 - protein, 27 aa, Artificial Sequence
  Cyclic GFR-binding peptide
DENEKVVQYNKLTPVGMDDLYLVSIAS

SEQ ID NO: 94073 - protein, 27 aa, Artificial Sequence
  Cyclic GFR-binding peptide
DENEKVVRYKKLTPVGMDDFYLVSIAN

SEQ ID NO: 94074 - protein, 27 aa, Artificial Sequence
  Cyclic GFR-binding peptide
DENEKVVRYKKLVKPKRGVFYLISIAN

SEQ ID NO: 94075 - protein, 27 aa, Artificial Sequence
  Cyclic GFR-binding peptide
DENEKVVQYNKLVVKENEDLYLMSIAS

SEQ ID NO: 94076 - protein, 27 aa, Artificial Sequence
  Cyclic GFR-binding peptide
DENEKVVYHYKLIVNSSDDKYLVSIPS

SEQ ID NO: 94077 - protein, 27 aa, Artificial Sequence
  Cyclic GFR-binding peptide
DENEKVVQYNKLVKPKRGVLYLISIAS

SEQ ID NO: 94078 - protein, 27 aa, Artificial Sequence
  Cyclic GFR-binding peptide
DENEKVVRYKKLIVNNSSDFYLVSIAN

SEQ ID NO: 94079 - protein, 27 aa, Artificial Sequence
  Cyclic GFR-binding peptide
DENEKVVRYKKLIVNSSDDFYLVSIAN

SEQ ID NO: 94080 - protein, 27 aa, Artificial Sequence
  Cyclic GFR-binding peptide
DENEKVVRHKRLVKPTRGVYYLISTAS

SEQ ID NO: 94081 - protein, 29 aa, Artificial Sequence
  Cyclic GFR-binding peptide
DENEKVVYHYKLFIPKKRVIEKYLVSIPS

SEQ ID NO: 94082 - protein, 27 aa, Artificial Sequence
  Cyclic GFR-binding peptide
DENEKVVRHKRLIKPTKGIYYLISTAS

SEQ ID NO: 94083 - protein, 27 aa, Artificial Sequence
  Cyclic GFR-binding peptide
DENEKVVRHKRLTPVGMDDYYLVSTAS

SEQ ID NO: 94084 - protein, 27 aa, Artificial Sequence
  Cyclic GFR-binding peptide
DENEKVVYHYKLTPVGMDDKYLVSIPS

SEQ ID NO: 94085 - protein, 27 aa, Artificial Sequence
  Cyclic GFR-binding peptide
DENEKVVYHYKLIVNNSSDKYLVSIPS

SEQ ID NO: 94086 - protein, 27 aa, Artificial Sequence
  Cyclic GFR-binding peptide
DENEKVVRHKRLIVNNSSDYYLVSTAS

SEQ ID NO: 94087 - protein, 27 aa, Artificial Sequence
  Cyclic GFR-binding peptide
DENEKVVYHYKLVKPTRGVKYLISIPS

SEQ ID NO: 94088 - protein, 27 aa, Artificial Sequence
  Cyclic GFR-binding peptide
DENEKVVRHKRLIVNSSDDYYLVSTAS

SEQ ID NO: 94089 - protein, 27 aa, Artificial Sequence
  Cyclic GFR-binding peptide
DENEKVVRHKRLVVKDYEDYYLMSTAS

SEQ ID NO: 94090 - protein, 27 aa, Artificial Sequence
  Cyclic GFR-binding peptide
DENEKVVQYNKLIKPTKGILYLISIAS

SEQ ID NO: 94091 - protein, 27 aa, Artificial Sequence
  Cyclic GFR-binding peptide
DENEKVVQYNKLVVKDYEDLYLMSIAS

SEQ ID NO: 94092 - protein, 27 aa, Artificial Sequence
  Cyclic GFR-binding peptide
DENEKVVQYNKLIVNSSDDLYLVSIAS

SEQ ID NO: 94093 - protein, 27 aa, Artificial Sequence
  Cyclic GFR-binding peptide
NAISILYFIGKTPKILKKYRDENEKVV

SEQ ID NO: 94094 - protein, 29 aa, Artificial Sequence
  Cyclic GFR-binding peptide
SATSVLYYEIVRKKPIFLRKHRDENEKVV

SEQ ID NO: 94095 - protein, 27 aa, Artificial Sequence
  Cyclic GFR-binding peptide
SPISMLYKDEYDKVVLKYHYDENEKVV

SEQ ID NO: 94096 - protein, 27 aa, Artificial Sequence
  Cyclic GFR-binding peptide
SAISVLYLDSSNNVILKNYQDENEKVV

SEQ ID NO: 94097 - protein, 27 aa, Artificial Sequence
  Cyclic GFR-binding peptide
NAISMLYFDEYDKVVLKKYRDENEKVV

SEQ ID NO: 94098 - protein, 27 aa, Artificial Sequence
  Cyclic GFR-binding peptide
NAISILYFVGRTPKVLKKYRDENEKVV

SEQ ID NO: 94099 - protein, 27 aa, Artificial Sequence
  Cyclic GFR-binding peptide
SATSMLYYDENEKVVLRKHRDENEKVV

SEQ ID NO: 94100 - protein, 27 aa, Artificial Sequence
  Cyclic GFR-binding peptide
SPISILYKIGKTPKILKYHYDENEKVV

SEQ ID NO: 94101 - protein, 29 aa, Artificial Sequence
  Cyclic GFR-binding peptide
NAISVLYFEIVRKKPIFLKKYRDENEKVV

SEQ ID NO: 94102 - protein, 27 aa, Artificial Sequence
  Cyclic GFR-binding peptide
SPISMLYKDENEKVVLKYHYDENEKVV

SEQ ID NO: 94103 - protein, 27 aa, Artificial Sequence
  Cyclic GFR-binding peptide
SATSILYYVGRKPKVLRKHRDENEKVV

SEQ ID NO: 94104 - protein, 27 aa, Artificial Sequence
  Cyclic GFR-binding peptide
SPISILYKVGRKPKVLKYHYDENEKVV

SEQ ID NO: 94105 - protein, 29 aa, Artificial Sequence
  Cyclic GFR-binding peptide
SAISVLYLEIVRKKPIFLKNYQDENEKVV

SEQ ID NO: 94106 - protein, 27 aa, Artificial Sequence
  Cyclic GFR-binding peptide
SAISILYLVGRTPKVLKNYQDENEKVV

SEQ ID NO: 94107 - protein, 27 aa, Artificial Sequence
  Cyclic GFR-binding peptide
NAISMLYFDENEKVVLKKYRDENEKVV

SEQ ID NO: 94108 - protein, 27 aa, Artificial Sequence
  Cyclic GFR-binding peptide
SAISVLYLDDMGVPTLKNYQDENEKVV

SEQ ID NO: 94109 - protein, 27 aa, Artificial Sequence
  Cyclic GFR-binding peptide
NAISVLYFDDMGVPTLKKYRDENEKVV

SEQ ID NO: 94110 - protein, 27 aa, Artificial Sequence
  Cyclic GFR-binding peptide
NAISILYFVGRKPKVLKKYRDENEKVV

SEQ ID NO: 94111 - protein, 27 aa, Artificial Sequence
  Cyclic GFR-binding peptide
SPISVLYKDDSSNVILKYHYDENEKVV

SEQ ID NO: 94112 - protein, 27 aa, Artificial Sequence
  Cyclic GFR-binding peptide
SAISILYLVGRKPKVLKNYQDENEKVV

SEQ ID NO: 94113 - protein, 27 aa, Artificial Sequence
  Cyclic GFR-binding peptide
NAISVLYFDSSNNVILKKYRDENEKVV

SEQ ID NO: 94114 - protein, 27 aa, Artificial Sequence
  Cyclic GFR-binding peptide
NAISVLYFDDSSNVILKKYRDENEKVV

SEQ ID NO: 94115 - protein, 27 aa, Artificial Sequence
  Cyclic GFR-binding peptide
SATSILYYVGRTPKVLRKHRDENEKVV

SEQ ID NO: 94116 - protein, 29 aa, Artificial Sequence
  Cyclic GFR-binding peptide
SPISVLYKEIVRKKPIFLKYHYDENEKVV

SEQ ID NO: 94117 - protein, 27 aa, Artificial Sequence
  Cyclic GFR-binding peptide
SATSILYYIGKTPKILRKHRDENEKVV

SEQ ID NO: 94118 - protein, 27 aa, Artificial Sequence
  Cyclic GFR-binding peptide
SATSVLYYDDMGVPTLRKHRDENEKVV

SEQ ID NO: 94119 - protein, 27 aa, Artificial Sequence
  Cyclic GFR-binding peptide
SPISVLYKDDMGVPTLKYHYDENEKVV

SEQ ID NO: 94120 - protein, 27 aa, Artificial Sequence
  Cyclic GFR-binding peptide
SPISVLYKDSSNNVILKYHYDENEKVV

SEQ ID NO: 94121 - protein, 27 aa, Artificial Sequence
  Cyclic GFR-binding peptide
SATSVLYYDSSNNVILRKHRDENEKVV

SEQ ID NO: 94122 - protein, 27 aa, Artificial Sequence
  Cyclic GFR-binding peptide
SPISILYKVGRTPKVLKYHYDENEKVV

SEQ ID NO: 94123 - protein, 27 aa, Artificial Sequence
  Cyclic GFR-binding peptide
SATSVLYYDDSSNVILRKHRDENEKVV

SEQ ID NO: 94124 - protein, 27 aa, Artificial Sequence
  Cyclic GFR-binding peptide
SATSMLYYDEYDKVVLRKHRDENEKVV

SEQ ID NO: 94125 - protein, 27 aa, Artificial Sequence
  Cyclic GFR-binding peptide
SAISILYLIGKTPKILKNYQDENEKVV

SEQ ID NO: 94126 - protein, 27 aa, Artificial Sequence
  Cyclic GFR-binding peptide
SAISMLYLDEYDKVVLKNYQDENEKVV

SEQ ID NO: 94127 - protein, 27 aa, Artificial Sequence
  Cyclic GFR-binding peptide
SAISVLYLDDSSNVILKNYQDENEKVV

SEQ ID NO: 94128 - protein, 27 aa, Artificial Sequence
  Cyclic GFR-binding peptide
DENEKVVNSLQEVVKDYEDYYLMTLPE

SEQ ID NO: 94129 - protein, 27 aa, Artificial Sequence
  Cyclic GFR-binding peptide
DENEKVVNSLQEIKPTKGIYYVIPLPE

SEQ ID NO: 94130 - protein, 27 aa, Artificial Sequence
  Cyclic GFR-binding peptide
DENEKVVNSLQEVKPKRGVYYLITLPE

SEQ ID NO: 94131 - protein, 27 aa, Artificial Sequence
  Cyclic GFR-binding peptide
DENEKVVNSLQEVKPTRGVYYVIPLPE

SEQ ID NO: 94132 - protein, 27 aa, Artificial Sequence
  Cyclic GFR-binding peptide
DENEKVVEYQKYIVNSSDDIFLVSIPS

SEQ ID NO: 94133 - protein, 27 aa, Artificial Sequence
  Cyclic GFR-binding peptide
DENEKVVEYQKYVKPTRGVIFLISIPS

SEQ ID NO: 94134 - protein, 27 aa, Artificial Sequence
  Cyclic GFR-binding peptide
DENEKVVNSLQEVVKENEDYYLMTLPE

SEQ ID NO: 94135 - protein, 27 aa, Artificial Sequence
  Cyclic GFR-binding peptide
DENEKVVNSLQEVVNNASDYYLITLPE

SEQ ID NO: 94136 - protein, 27 aa, Artificial Sequence
  Cyclic GFR-binding peptide
DENEKVVNSLQEVKPKRGVYYVIPLPE

SEQ ID NO: 94137 - protein, 27 aa, Artificial Sequence
  Cyclic GFR-binding peptide
DENEKVVNSLQEVVNNASDYYVIPLPE

SEQ ID NO: 94138 - protein, 27 aa, Artificial Sequence
  Cyclic GFR-binding peptide
DENEKVVNSLQEVKPTRGVYYLITLPE

SEQ ID NO: 94139 - protein, 27 aa, Artificial Sequence
  Cyclic GFR-binding peptide
DENEKVVEYQKYIKPTKGIIFLISIPS

SEQ ID NO: 94140 - protein, 27 aa, Artificial Sequence
  Cyclic GFR-binding peptide
DENEKVVEYQKYVVNNASDIFLISIPS

SEQ ID NO: 94141 - protein, 27 aa, Artificial Sequence
  Cyclic GFR-binding peptide
DENEKVVNSLQEIVNSSDDYYVVPLPE

SEQ ID NO: 94142 - protein, 27 aa, Artificial Sequence
  Cyclic GFR-binding peptide
DENEKVVNSLQEVVKDYEDYYVMPLPE

SEQ ID NO: 94143 - protein, 27 aa, Artificial Sequence
  Cyclic GFR-binding peptide
DENEKVVEYQKYVVKENEDIFLMSIPS

SEQ ID NO: 94144 - protein, 27 aa, Artificial Sequence
  Cyclic GFR-binding peptide
DENEKVVNSLQEVVKENEDYYVMPLPE

SEQ ID NO: 94145 - protein, 27 aa, Artificial Sequence
  Cyclic GFR-binding peptide
DENEKVVEYQKYVVKDYEDIFLMSIPS

SEQ ID NO: 94146 - protein, 27 aa, Artificial Sequence
  Cyclic GFR-binding peptide
DENEKVVQYNKLVVNNASDLYLISIAS

SEQ ID NO: 94147 - protein, 27 aa, Artificial Sequence
  Cyclic GFR-binding peptide
DENEKVVNSLQEIKPTKGIYYLITLPE

SEQ ID NO: 94148 - protein, 27 aa, Artificial Sequence
  Cyclic GFR-binding peptide
DENEKVVEYQKYVKPKRGVIFLISIPS

SEQ ID NO: 94149 - protein, 27 aa, Artificial Sequence
  Cyclic GFR-binding peptide
DENEKVVRYKKLVVNNASDFYLISIAN

SEQ ID NO: 94150 - protein, 27 aa, Artificial Sequence
  Cyclic GFR-binding peptide
DENEKVVNSLQEIVNSSDDYYLVTLPE

SEQ ID NO: 94151 - protein, 27 aa, Artificial Sequence
  Cyclic GFR-binding peptide
EPLTMLYYDEYDKVVEQLSNDENEKVV

SEQ ID NO: 94152 - protein, 27 aa, Artificial Sequence
  Cyclic GFR-binding peptide
EPLPIVYYIGKTPKIEQLSNDENEKVV

SEQ ID NO: 94153 - protein, 27 aa, Artificial Sequence
  Cyclic GFR-binding peptide
EPLTILYYVGRKPKVEQLSNDENEKVV

SEQ ID NO: 94154 - protein, 27 aa, Artificial Sequence
  Cyclic GFR-binding peptide
EPLPIVYYVGRTPKVEQLSNDENEKVV

SEQ ID NO: 94155 - protein, 27 aa, Artificial Sequence
  Cyclic GFR-binding peptide
SPISVLFIDDSSNVIYKQYEDENEKVV

SEQ ID NO: 94156 - protein, 27 aa, Artificial Sequence
  Cyclic GFR-binding peptide
SPISILFIVGRTPKVYKQYEDENEKVV

SEQ ID NO: 94157 - protein, 27 aa, Artificial Sequence
  Cyclic GFR-binding peptide
EPLTMLYYDENEKVVEQLSNDENEKVV

SEQ ID NO: 94158 - protein, 27 aa, Artificial Sequence
  Cyclic GFR-binding peptide
EPLTILYYDSANNVVEQLSNDENEKVV

SEQ ID NO: 94159 - protein, 27 aa, Artificial Sequence
  Cyclic GFR-binding peptide
EPLPIVYYVGRKPKVEQLSNDENEKVV

SEQ ID NO: 94160 - protein, 27 aa, Artificial Sequence
  Cyclic GFR-binding peptide
EPLPIVYYDSANNVVEQLSNDENEKVV

SEQ ID NO: 94161 - protein, 27 aa, Artificial Sequence
  Cyclic GFR-binding peptide
EPLTILYYVGRTPKVEQLSNDENEKVV

SEQ ID NO: 94162 - protein, 27 aa, Artificial Sequence
  Cyclic GFR-binding peptide
SPISILFIIGKTPKIYKQYEDENEKVV

SEQ ID NO: 94163 - protein, 27 aa, Artificial Sequence
  Cyclic GFR-binding peptide
SPISILFIDSANNVVYKQYEDENEKVV

SEQ ID NO: 94164 - protein, 27 aa, Artificial Sequence
  Cyclic GFR-binding peptide
EPLPVVYYDDSSNVIEQLSNDENEKVV

SEQ ID NO: 94165 - protein, 27 aa, Artificial Sequence
  Cyclic GFR-binding peptide
EPLPMVYYDEYDKVVEQLSNDENEKVV

SEQ ID NO: 94166 - protein, 27 aa, Artificial Sequence
  Cyclic GFR-binding peptide
SPISMLFIDENEKVVYKQYEDENEKVV

SEQ ID NO: 94167 - protein, 27 aa, Artificial Sequence
  Cyclic GFR-binding peptide
EPLPMVYYDENEKVVEQLSNDENEKVV

SEQ ID NO: 94168 - protein, 27 aa, Artificial Sequence
  Cyclic GFR-binding peptide
SPISMLFIDEYDKVVYKQYEDENEKVV

SEQ ID NO: 94169 - protein, 27 aa, Artificial Sequence
  Cyclic GFR-binding peptide
SAISILYLDSANNVVLKNYQDENEKVV

SEQ ID NO: 94170 - protein, 27 aa, Artificial Sequence
  Cyclic GFR-binding peptide
EPLTILYYIGKTPKIEQLSNDENEKVV

SEQ ID NO: 94171 - protein, 27 aa, Artificial Sequence
  Cyclic GFR-binding peptide
SPISILFIVGRKPKVYKQYEDENEKVV

SEQ ID NO: 94172 - protein, 27 aa, Artificial Sequence
  Cyclic GFR-binding peptide
NAISILYFDSANNVVLKKYRDENEKVV

SEQ ID NO: 94173 - protein, 27 aa, Artificial Sequence
  Cyclic GFR-binding peptide
EPLTVLYYDDSSNVIEQLSNDENEKVV

SEQ ID NO: 94174 - protein, 29 aa, Artificial Sequence
  Cyclic GFR-binding peptide
DENEKVVVTAKKLKPKKRVYEIKRVQVPR

SEQ ID NO: 94175 - protein, 29 aa, Artificial Sequence
  Cyclic GFR-binding peptide
DENEKVVVQVEKLKPKKRVYEVKAVKVSR

SEQ ID NO: 94176 - protein, 29 aa, Artificial Sequence
  Cyclic GFR-binding peptide
DENEKVVVQVEKFIPKKRVIEVKAVKVSR

SEQ ID NO: 94177 - protein, 29 aa, Artificial Sequence
  Cyclic GFR-binding peptide
DENEKVVVQVEKHQGQHPKIRVKAMKVSR

SEQ ID NO: 94178 - protein, 29 aa, Artificial Sequence
  Cyclic GFR-binding peptide
DENEKVVVTAKKHQGQHPKIRIKRMQVPR

SEQ ID NO: 94179 - protein, 29 aa, Artificial Sequence
  Cyclic GFR-binding peptide
DENEKVVSMEGLLKPKKRVYEMIQVTINS

SEQ ID NO: 94180 - protein, 29 aa, Artificial Sequence
  Cyclic GFR-binding peptide
DENEKVVSMEGIFIPKKRVIEMIQVTINS

SEQ ID NO: 94181 - protein, 29 aa, Artificial Sequence
  Cyclic GFR-binding peptide
DENEKVVSMEGLHQGQHPKIRMIQMTINS

SEQ ID NO: 94182 - protein, 29 aa, Artificial Sequence
  Cyclic GFR-binding peptide
DENEKVVSMEGILKPKKRVYEMIQVTINS

SEQ ID NO: 94183 - protein, 29 aa, Artificial Sequence
  Cyclic GFR-binding peptide
DENEKVVSMEGLFIPKKRVIEMIQVTINS

SEQ ID NO: 94184 - protein, 29 aa, Artificial Sequence
  Cyclic GFR-binding peptide
DENEKVVVTAKKFIPKKRVIEIKRVQVPR

SEQ ID NO: 94185 - protein, 29 aa, Artificial Sequence
  Cyclic GFR-binding peptide
DENEKVVSMEGIHQGQHPKIRMIQMTINS

SEQ ID NO: 94186 - protein, 29 aa, Artificial Sequence
  Cyclic GFR-binding peptide
RPVQVRKIEYVRKKPKLKKATVDENEKVV

SEQ ID NO: 94187 - protein, 29 aa, Artificial Sequence
  Cyclic GFR-binding peptide
RSVKVAKVEYVRKKPKLKEVQVDENEKVV

SEQ ID NO: 94188 - protein, 29 aa, Artificial Sequence
  Cyclic GFR-binding peptide
RSVKVAKVEIVRKKPIFKEVQVDENEKVV

SEQ ID NO: 94189 - protein, 29 aa, Artificial Sequence
  Cyclic GFR-binding peptide
RSVKMAKVRIKPHQGQHKEVQVDENEKVV

SEQ ID NO: 94190 - protein, 29 aa, Artificial Sequence
  Cyclic GFR-binding peptide
RPVQMRKIRIKPHQGQHKKATVDENEKVV

SEQ ID NO: 94191 - protein, 29 aa, Artificial Sequence
  Cyclic GFR-binding peptide
SNITVQIMEYVRKKPKLLGEMSDENEKVV

SEQ ID NO: 94192 - protein, 29 aa, Artificial Sequence
  Cyclic GFR-binding peptide
SNITVQIMEIVRKKPIFIGEMSDENEKVV

SEQ ID NO: 94193 - protein, 29 aa, Artificial Sequence
  Cyclic GFR-binding peptide
SNITMQIMRIKPHQGQHLGEMSDENEKVV

SEQ ID NO: 94194 - protein, 29 aa, Artificial Sequence
  Cyclic GFR-binding peptide
SNITVQIMEYVRKKPKLIGEMSDENEKVV

SEQ ID NO: 94195 - protein, 29 aa, Artificial Sequence
  Cyclic GFR-binding peptide
SNITVQIMEIVRKKPIFLGEMSDENEKVV

SEQ ID NO: 94196 - protein, 29 aa, Artificial Sequence
  Cyclic GFR-binding peptide
RPVQVRKIEIVRKKPIFKKATVDENEKVV

SEQ ID NO: 94197 - protein, 29 aa, Artificial Sequence
  Cyclic GFR-binding peptide
SNITMQIMRIKPHQGQHIGEMSDENEKVV

SEQ ID NO: 94198 - protein, 27 aa, Artificial Sequence
  Cyclic GFR-binding peptide
DENEKVVEYKFKVKPTRGVLYLISIPE

SEQ ID NO: 94199 - protein, 27 aa, Artificial Sequence
  Cyclic GFR-binding peptide
DENEKVVEYKFKTPVGMDDLYLVSIPE

SEQ ID NO: 94200 - protein, 27 aa, Artificial Sequence
  Cyclic GFR-binding peptide
DENEKVVEYQKYVKPKRGVIYLISIPS

SEQ ID NO: 94201 - protein, 27 aa, Artificial Sequence
  Cyclic GFR-binding peptide
DENEKVVEYQKYVVKDYEDIYLMSIPS

SEQ ID NO: 94202 - protein, 27 aa, Artificial Sequence
  Cyclic GFR-binding peptide
DENEKVVEYKFKIKPTKGILYLISIPE

SEQ ID NO: 94203 - protein, 27 aa, Artificial Sequence
  Cyclic GFR-binding peptide
DENEKVVYHYKLYTVVGKDKYLISIPS

SEQ ID NO: 94204 - protein, 27 aa, Artificial Sequence
  Cyclic GFR-binding peptide
DENEKVVRYKKLYTVVGKDFYLISIAN

SEQ ID NO: 94205 - protein, 27 aa, Artificial Sequence
  Cyclic GFR-binding peptide
DENEKVVEYQKYVVNNAADIYLISIPS

SEQ ID NO: 94206 - protein, 27 aa, Artificial Sequence
  Cyclic GFR-binding peptide
DENEKVVEYQKYVKPTRGVIYLISIPS

SEQ ID NO: 94207 - protein, 27 aa, Artificial Sequence
  Cyclic GFR-binding peptide
DENEKVVEYQKYTPVGMDDIYLVSIPS

SEQ ID NO: 94208 - protein, 27 aa, Artificial Sequence
  Cyclic GFR-binding peptide
DENEKVVEYKFKVVKDYEDLYLMSIPE

SEQ ID NO: 94209 - protein, 27 aa, Artificial Sequence
  Cyclic GFR-binding peptide
DENEKVVEYKFKVVNNAADLYLISIPE

SEQ ID NO: 94210 - protein, 27 aa, Artificial Sequence
  Cyclic GFR-binding peptide
DENEKVVEYQKYVVKENEDIYLMSIPS

SEQ ID NO: 94211 - protein, 27 aa, Artificial Sequence
  Cyclic GFR-binding peptide
DENEKVVEYQKYIKPTKGIIYLISIPS

SEQ ID NO: 94212 - protein, 27 aa, Artificial Sequence
  Cyclic GFR-binding peptide
DENEKVVRYKKLVVNNAADFYLISIAN

SEQ ID NO: 94213 - protein, 27 aa, Artificial Sequence
  Cyclic GFR-binding peptide
DENEKVVYHYKLVVNNAADKYLISIPS

SEQ ID NO: 94214 - protein, 27 aa, Artificial Sequence
  Cyclic GFR-binding peptide
DENEKVVEYKFKIVNNSSDLYLVSIPE

SEQ ID NO: 94215 - protein, 27 aa, Artificial Sequence
  Cyclic GFR-binding peptide
DENEKVVEYQKYIVNSSDDIYLVSIPS

SEQ ID NO: 94216 - protein, 27 aa, Artificial Sequence
  Cyclic GFR-binding peptide
DENEKVVEYKFKIVNSSDDLYLVSIPE

SEQ ID NO: 94217 - protein, 27 aa, Artificial Sequence
  Cyclic GFR-binding peptide
DENEKVVEYKFKVKPKRGVLYLISIPE

SEQ ID NO: 94218 - protein, 27 aa, Artificial Sequence
  Cyclic GFR-binding peptide
DENEKVVEYQKYYTVVGKDIYLISIPS

SEQ ID NO: 94219 - protein, 27 aa, Artificial Sequence
  Cyclic GFR-binding peptide
DENEKVVEYKFKVVKENEDLYLMSIPE

SEQ ID NO: 94220 - protein, 27 aa, Artificial Sequence
  Cyclic GFR-binding peptide
DENEKVVEYQKYIVNNSSDIYLVSIPS

SEQ ID NO: 94221 - protein, 27 aa, Artificial Sequence
  Cyclic GFR-binding peptide
DENEKVVEYKFKYTVVGKDLYLISIPE

SEQ ID NO: 94222 - protein, 27 aa, Artificial Sequence
  Cyclic GFR-binding peptide
EPISILYLVGRTPKVKFKYEDENEKVV

SEQ ID NO: 94223 - protein, 27 aa, Artificial Sequence
  Cyclic GFR-binding peptide
EPISVLYLDDMGVPTKFKYEDENEKVV

SEQ ID NO: 94224 - protein, 27 aa, Artificial Sequence
  Cyclic GFR-binding peptide
SPISILYIVGRKPKVYKQYEDENEKVV

SEQ ID NO: 94225 - protein, 27 aa, Artificial Sequence
  Cyclic GFR-binding peptide
SPISMLYIDEYDKVVYKQYEDENEKVV

SEQ ID NO: 94226 - protein, 27 aa, Artificial Sequence
  Cyclic GFR-binding peptide
EPISILYLIGKTPKIKFKYEDENEKVV

SEQ ID NO: 94227 - protein, 27 aa, Artificial Sequence
  Cyclic GFR-binding peptide
SPISILYKDKGVVTYLKYHYDENEKVV

SEQ ID NO: 94228 - protein, 27 aa, Artificial Sequence
  Cyclic GFR-binding peptide
NAISILYFDKGVVTYLKKYRDENEKVV

SEQ ID NO: 94229 - protein, 27 aa, Artificial Sequence
  Cyclic GFR-binding peptide
SPISILYIDAANNVVYKQYEDENEKVV

SEQ ID NO: 94230 - protein, 27 aa, Artificial Sequence
  Cyclic GFR-binding peptide
SPISILYIVGRTPKVYKQYEDENEKVV

SEQ ID NO: 94231 - protein, 27 aa, Artificial Sequence
  Cyclic GFR-binding peptide
SPISVLYIDDMGVPTYKQYEDENEKVV

SEQ ID NO: 94232 - protein, 27 aa, Artificial Sequence
  Cyclic GFR-binding peptide
EPISMLYLDEYDKVVKFKYEDENEKVV

SEQ ID NO: 94233 - protein, 27 aa, Artificial Sequence
  Cyclic GFR-binding peptide
EPISILYLDAANNVVKFKYEDENEKVV

SEQ ID NO: 94234 - protein, 27 aa, Artificial Sequence
  Cyclic GFR-binding peptide
SPISMLYIDENEKVVYKQYEDENEKVV

SEQ ID NO: 94235 - protein, 27 aa, Artificial Sequence
  Cyclic GFR-binding peptide
SPISILYIIGKTPKIYKQYEDENEKVV

SEQ ID NO: 94236 - protein, 27 aa, Artificial Sequence
  Cyclic GFR-binding peptide
NAISILYFDAANNVVLKKYRDENEKVV

SEQ ID NO: 94237 - protein, 27 aa, Artificial Sequence
  Cyclic GFR-binding peptide
SPISILYKDAANNVVLKYHYDENEKVV

SEQ ID NO: 94238 - protein, 27 aa, Artificial Sequence
  Cyclic GFR-binding peptide
EPISVLYLDSSNNVIKFKYEDENEKVV

SEQ ID NO: 94239 - protein, 27 aa, Artificial Sequence
  Cyclic GFR-binding peptide
SPISVLYIDDSSNVIYKQYEDENEKVV

SEQ ID NO: 94240 - protein, 27 aa, Artificial Sequence
  Cyclic GFR-binding peptide
EPISVLYLDDSSNVIKFKYEDENEKVV

SEQ ID NO: 94241 - protein, 27 aa, Artificial Sequence
  Cyclic GFR-binding peptide
EPISILYLVGRKPKVKFKYEDENEKVV

SEQ ID NO: 94242 - protein, 27 aa, Artificial Sequence
  Cyclic GFR-binding peptide
SPISILYIDKGVVTYYKQYEDENEKVV

SEQ ID NO: 94243 - protein, 27 aa, Artificial Sequence
  Cyclic GFR-binding peptide
EPISMLYLDENEKVVKFKYEDENEKVV

SEQ ID NO: 94244 - protein, 27 aa, Artificial Sequence
  Cyclic GFR-binding peptide
SPISVLYIDSSNNVIYKQYEDENEKVV

SEQ ID NO: 94245 - protein, 27 aa, Artificial Sequence
  Cyclic GFR-binding peptide
EPISILYLDKGVVTYKFKYEDENEKVV

SEQ ID NO: 94246 - protein, 27 aa, Artificial Sequence
  Cyclic GFR-binding peptide
DENEKVVPIKGYIIQQKDNFYLMNIPS

SEQ ID NO: 94247 - protein, 27 aa, Artificial Sequence
  Cyclic GFR-binding peptide
DENEKVVPIKGYVVKDYEDFYLMNIPS

SEQ ID NO: 94248 - protein, 27 aa, Artificial Sequence
  Cyclic GFR-binding peptide
DENEKVVPIKGYIVNSSDDFYLVNIPS

SEQ ID NO: 94249 - protein, 27 aa, Artificial Sequence
  Cyclic GFR-binding peptide
DENEKVVPIKGYVVNNAADFYLINIPS

SEQ ID NO: 94250 - protein, 27 aa, Artificial Sequence
  Cyclic GFR-binding peptide
DENEKVVPIKGYYTVVGKDFYLINIPS

SEQ ID NO: 94251 - protein, 27 aa, Artificial Sequence
  Cyclic GFR-binding peptide
DENEKVVPIKGYLLVRGNDFYLMNIPS

SEQ ID NO: 94252 - protein, 27 aa, Artificial Sequence
  Cyclic GFR-binding peptide
DENEKVVPIKGYVVKENEDFYLMNIPS

SEQ ID NO: 94253 - protein, 27 aa, Artificial Sequence
  Cyclic GFR-binding peptide
DENEKVVPIKGYVVNNASDFYLINIPS

SEQ ID NO: 94254 - protein, 27 aa, Artificial Sequence
  Cyclic GFR-binding peptide
DENEKVVPIKGYTPVGMDDFYLVNIPS

SEQ ID NO: 94255 - protein, 27 aa, Artificial Sequence
  Cyclic GFR-binding peptide
DENEKVVPIKGYIVNNSSDFYLVNIPS

SEQ ID NO: 94256 - protein, 27 aa, Artificial Sequence
  Cyclic GFR-binding peptide
SPINMLYFNDKQQIIYGKIPDENEKVV

SEQ ID NO: 94257 - protein, 27 aa, Artificial Sequence
  Cyclic GFR-binding peptide
SPINMLYFDEYDKVVYGKIPDENEKVV

SEQ ID NO: 94258 - protein, 27 aa, Artificial Sequence
  Cyclic GFR-binding peptide
SPINVLYFDDSSNVIYGKIPDENEKVV

SEQ ID NO: 94259 - protein, 27 aa, Artificial Sequence
  Cyclic GFR-binding peptide
SPINILYFDAANNVVYGKIPDENEKVV

SEQ ID NO: 94260 - protein, 27 aa, Artificial Sequence
  Cyclic GFR-binding peptide
SPINILYFDKGVVTYYGKIPDENEKVV

SEQ ID NO: 94261 - protein, 27 aa, Artificial Sequence
  Cyclic GFR-binding peptide
SPINMLYFDNGRVLLYGKIPDENEKVV

SEQ ID NO: 94262 - protein, 27 aa, Artificial Sequence
  Cyclic GFR-binding peptide
SPINMLYFDENEKVVYGKIPDENEKVV

SEQ ID NO: 94263 - protein, 27 aa, Artificial Sequence
  Cyclic GFR-binding peptide
SPINILYFDSANNVVYGKIPDENEKVV

SEQ ID NO: 94264 - protein, 27 aa, Artificial Sequence
  Cyclic GFR-binding peptide
SPINVLYFDDMGVPTYGKIPDENEKVV

SEQ ID NO: 94265 - protein, 27 aa, Artificial Sequence
  Cyclic GFR-binding peptide
SPINVLYFDSSNNVIYGKIPDENEKVV

SEQ ID NO: 94266 - protein, 27 aa, Artificial Sequence
  Cyclic GFR-binding peptide
DENEKVVEYQKYVVNNASDIYLISIPS

SEQ ID NO: 94267 - protein, 27 aa, Artificial Sequence
  Cyclic GFR-binding peptide
DENEKVVEYQKYIIQQKDNIYLMSIPS

SEQ ID NO: 94268 - protein, 27 aa, Artificial Sequence
  Cyclic GFR-binding peptide
DENEKVVEYQKYLLVRGNDIYLMSIPS

SEQ ID NO: 94269 - protein, 27 aa, Artificial Sequence
  Cyclic GFR-binding peptide
SPISILYIDSANNVVYKQYEDENEKVV

SEQ ID NO: 94270 - protein, 27 aa, Artificial Sequence
  Cyclic GFR-binding peptide
SPISMLYINDKQQIIYKQYEDENEKVV

SEQ ID NO: 94271 - protein, 27 aa, Artificial Sequence
  Cyclic GFR-binding peptide
SPISMLYIDNGRVLLYKQYEDENEKVV

SEQ ID NO: 94272 - protein, 27 aa, Artificial Sequence
  Cyclic GFR-binding peptide
DENEKVVPYVKLYTVVGKDFFLISLSS

SEQ ID NO: 94273 - protein, 27 aa, Artificial Sequence
  Cyclic GFR-binding peptide
DENEKVVPYVKLIKPTKGIFFLISLSS

SEQ ID NO: 94274 - protein, 27 aa, Artificial Sequence
  Cyclic GFR-binding peptide
DENEKVVPYVKLIIQQKDNFFLMSLSS

SEQ ID NO: 94275 - protein, 27 aa, Artificial Sequence
  Cyclic GFR-binding peptide
DENEKVVPYVKLIVNSSDDFFLVSLSS

SEQ ID NO: 94276 - protein, 27 aa, Artificial Sequence
  Cyclic GFR-binding peptide
DENEKVVPYVKLVKPKRGVFFLISLSS

SEQ ID NO: 94277 - protein, 27 aa, Artificial Sequence
  Cyclic GFR-binding peptide
DENEKVVPYVKLVKPTRGVFFLISLSS

SEQ ID NO: 94278 - protein, 27 aa, Artificial Sequence
  Cyclic GFR-binding peptide
DENEKVVPYVKLTPVGMDDFFLVSLSS

SEQ ID NO: 94279 - protein, 29 aa, Artificial Sequence
  Cyclic GFR-binding peptide
DENEKVVPYVKLHQGQHPKIRFFLMSLSS

SEQ ID NO: 94280 - protein, 27 aa, Artificial Sequence
  Cyclic GFR-binding peptide
DENEKVVPYVKLVVNKNEDFFLISLSS

SEQ ID NO: 94281 - protein, 27 aa, Artificial Sequence
  Cyclic GFR-binding peptide
DENEKVVPYVKLVVNNASDFFLISLSS

SEQ ID NO: 94282 - protein, 27 aa, Artificial Sequence
  Cyclic GFR-binding peptide
DENEKVVPYVKLVVKENEDFFLMSLSS

SEQ ID NO: 94283 - protein, 27 aa, Artificial Sequence
  Cyclic GFR-binding peptide
DENEKVVPYVKLIVNNSSDFFLVSLSS

SEQ ID NO: 94284 - protein, 29 aa, Artificial Sequence
  Cyclic GFR-binding peptide
DENEKVVPYVKLLKPKKRVYEFFLVSLSS

SEQ ID NO: 94285 - protein, 27 aa, Artificial Sequence
  Cyclic GFR-binding peptide
DENEKVVPYVKLLLVRGNDFFLMSLSS

SEQ ID NO: 94286 - protein, 27 aa, Artificial Sequence
  Cyclic GFR-binding peptide
DENEKVVPYVKLVVKDYEDFFLMSLSS

SEQ ID NO: 94287 - protein, 27 aa, Artificial Sequence
  Cyclic GFR-binding peptide
DENEKVVPYVKLVVNNAADFFLISLSS

SEQ ID NO: 94288 - protein, 27 aa, Artificial Sequence
  Cyclic GFR-binding peptide
SSLSILFFDKGVVTYLKVYPDENEKVV

SEQ ID NO: 94289 - protein, 27 aa, Artificial Sequence
  Cyclic GFR-binding peptide
SSLSILFFIGKTPKILKVYPDENEKVV

SEQ ID NO: 94290 - protein, 27 aa, Artificial Sequence
  Cyclic GFR-binding peptide
SSLSMLFFNDKQQIILKVYPDENEKVV

SEQ ID NO: 94291 - protein, 27 aa, Artificial Sequence
  Cyclic GFR-binding peptide
SSLSVLFFDDSSNVILKVYPDENEKVV

SEQ ID NO: 94292 - protein, 27 aa, Artificial Sequence
  Cyclic GFR-binding peptide
SSLSILFFVGRKPKVLKVYPDENEKVV

SEQ ID NO: 94293 - protein, 27 aa, Artificial Sequence
  Cyclic GFR-binding peptide
SSLSILFFVGRTPKVLKVYPDENEKVV

SEQ ID NO: 94294 - protein, 27 aa, Artificial Sequence
  Cyclic GFR-binding peptide
SSLSVLFFDDMGVPTLKVYPDENEKVV

SEQ ID NO: 94295 - protein, 29 aa, Artificial Sequence
  Cyclic GFR-binding peptide
SSLSMLFFRIKPHQGQHLKVYPDENEKVV

SEQ ID NO: 94296 - protein, 27 aa, Artificial Sequence
  Cyclic GFR-binding peptide
SSLSILFFDENKNVVLKVYPDENEKVV

SEQ ID NO: 94297 - protein, 27 aa, Artificial Sequence
  Cyclic GFR-binding peptide
SSLSILFFDSANNVVLKVYPDENEKVV

SEQ ID NO: 94298 - protein, 27 aa, Artificial Sequence
  Cyclic GFR-binding peptide
SSLSMLFFDENEKVVLKVYPDENEKVV

SEQ ID NO: 94299 - protein, 27 aa, Artificial Sequence
  Cyclic GFR-binding peptide
SSLSVLFFDSSNNVILKVYPDENEKVV

SEQ ID NO: 94300 - protein, 29 aa, Artificial Sequence
  Cyclic GFR-binding peptide
SSLSVLFFEYVRKKPKLLKVYPDENEKVV

SEQ ID NO: 94301 - protein, 27 aa, Artificial Sequence
  Cyclic GFR-binding peptide
SSLSMLFFDNGRVLLLKVYPDENEKVV

SEQ ID NO: 94302 - protein, 27 aa, Artificial Sequence
  Cyclic GFR-binding peptide
SSLSMLFFDEYDKVVLKVYPDENEKVV

SEQ ID NO: 94303 - protein, 27 aa, Artificial Sequence
  Cyclic GFR-binding peptide
SSLSILFFDAANNVVLKVYPDENEKVV

SEQ ID NO: 94304 - protein, 27 aa, Artificial Sequence
  Cyclic GFR-binding peptide
DENEKVVSMEGIIVNSSDDMIQVTINS

SEQ ID NO: 94305 - protein, 27 aa, Artificial Sequence
  Cyclic GFR-binding peptide
DENEKVVVTAKKVVKENEDIKRMQVPR

SEQ ID NO: 94306 - protein, 27 aa, Artificial Sequence
  Cyclic GFR-binding peptide
DENEKVVSMEGIVVKDYEDMIQMTINS

SEQ ID NO: 94307 - protein, 27 aa, Artificial Sequence
  Cyclic GFR-binding peptide
DENEKVVVTAKKIKPTKGIIKRIQVPR

SEQ ID NO: 94308 - protein, 27 aa, Artificial Sequence
  Cyclic GFR-binding peptide
DENEKVVSMEGIVKPTRGVMIQITINS

SEQ ID NO: 94309 - protein, 29 aa, Artificial Sequence
  Cyclic GFR-binding peptide
DENEKVVNSLQEFIPKKRVIEYYVVPLPE

SEQ ID NO: 94310 - protein, 27 aa, Artificial Sequence
  Cyclic GFR-binding peptide
DENEKVVVQVEKVKPKRGVVKAIKVSR

SEQ ID NO: 94311 - protein, 27 aa, Artificial Sequence
  Cyclic GFR-binding peptide
DENEKVVVQVEKVVKENEDVKAMKVSR

SEQ ID NO: 94312 - protein, 27 aa, Artificial Sequence
  Cyclic GFR-binding peptide
DENEKVVVTAKKIVNSSDDIKRVQVPR

SEQ ID NO: 94313 - protein, 27 aa, Artificial Sequence
  Cyclic GFR-binding peptide
DENEKVVVQVEKIKPTKGIVKAIKVSR

SEQ ID NO: 94314 - protein, 29 aa, Artificial Sequence
  Cyclic GFR-binding peptide
DENEKVVNSLQEFIPKKRVIEYYLVTLPE

SEQ ID NO: 94315 - protein, 27 aa, Artificial Sequence
  Cyclic GFR-binding peptide
DENEKVVVQVEKIVNSSDDVKAVKVSR

SEQ ID NO: 94316 - protein, 27 aa, Artificial Sequence
  Cyclic GFR-binding peptide
DENEKVVVTAKKVKPKRGVIKRIQVPR

SEQ ID NO: 94317 - protein, 27 aa, Artificial Sequence
  Cyclic GFR-binding peptide
DENEKVVVQVEKVKPTRGVVKAIKVSR

SEQ ID NO: 94318 - protein, 27 aa, Artificial Sequence
  Cyclic GFR-binding peptide
DENEKVVVTAKKVKPTRGVIKRIQVPR

SEQ ID NO: 94319 - protein, 29 aa, Artificial Sequence
  Cyclic GFR-binding peptide
DENEKVVNSLQELKPKKRVYEYYLVTLPE

SEQ ID NO: 94320 - protein, 27 aa, Artificial Sequence
  Cyclic GFR-binding peptide
DENEKVVSMEGIVKPKRGVMIQITINS

SEQ ID NO: 94321 - protein, 27 aa, Artificial Sequence
  Cyclic GFR-binding peptide
DENEKVVSMEGIVVKENEDMIQMTINS

SEQ ID NO: 94322 - protein, 27 aa, Artificial Sequence
  Cyclic GFR-binding peptide
DENEKVVSMEGIIKPTKGIMIQITINS

SEQ ID NO: 94323 - protein, 29 aa, Artificial Sequence
  Cyclic GFR-binding peptide
DENEKVVNSLQEHQGQHPKIRYYLMTLPE

SEQ ID NO: 94324 - protein, 27 aa, Artificial Sequence
  Cyclic GFR-binding peptide
DENEKVVVTAKKVVKDYEDIKRMQVPR

SEQ ID NO: 94325 - protein, 29 aa, Artificial Sequence
  Cyclic GFR-binding peptide
DENEKVVNSLQEHQGQHPKIRYYVMPLPE

SEQ ID NO: 94326 - protein, 29 aa, Artificial Sequence
  Cyclic GFR-binding peptide
DENEKVVNSLQELKPKKRVYEYYVVPLPE

SEQ ID NO: 94327 - protein, 27 aa, Artificial Sequence
  Cyclic GFR-binding peptide
DENEKVVVQVEKVVKDYEDVKAMKVSR

SEQ ID NO: 94328 - protein, 27 aa, Artificial Sequence
  Cyclic GFR-binding peptide
SNITVQIMDDSSNVIIGEMSDENEKVV

SEQ ID NO: 94329 - protein, 27 aa, Artificial Sequence
  Cyclic GFR-binding peptide
RPVQMRKIDENEKVVKKATVDENEKVV

SEQ ID NO: 94330 - protein, 27 aa, Artificial Sequence
  Cyclic GFR-binding peptide
SNITMQIMDEYDKVVIGEMSDENEKVV

SEQ ID NO: 94331 - protein, 27 aa, Artificial Sequence
  Cyclic GFR-binding peptide
RPVQIRKIIGKTPKIKKATVDENEKVV

SEQ ID NO: 94332 - protein, 27 aa, Artificial Sequence
  Cyclic GFR-binding peptide
SNITIQIMVGRTPKVIGEMSDENEKVV

SEQ ID NO: 94333 - protein, 29 aa, Artificial Sequence
  Cyclic GFR-binding peptide
EPLPVVYYEIVRKKPIFEQLSNDENEKVV

SEQ ID NO: 94334 - protein, 27 aa, Artificial Sequence
  Cyclic GFR-binding peptide
RSVKIAKVVGRKPKVKEVQVDENEKVV

SEQ ID NO: 94335 - protein, 27 aa, Artificial Sequence
  Cyclic GFR-binding peptide
RSVKMAKVDENEKVVKEVQVDENEKVV

SEQ ID NO: 94336 - protein, 27 aa, Artificial Sequence
  Cyclic GFR-binding peptide
RPVQVRKIDDSSNVIKKATVDENEKVV

SEQ ID NO: 94337 - protein, 27 aa, Artificial Sequence
  Cyclic GFR-binding peptide
RSVKIAKVIGKTPKIKEVQVDENEKVV

SEQ ID NO: 94338 - protein, 29 aa, Artificial Sequence
  Cyclic GFR-binding peptide
EPLTVLYYEIVRKKPIFEQLSNDENEKVV

SEQ ID NO: 94339 - protein, 27 aa, Artificial Sequence
  Cyclic GFR-binding peptide
RSVKVAKVDDSSNVIKEVQVDENEKVV

SEQ ID NO: 94340 - protein, 27 aa, Artificial Sequence
  Cyclic GFR-binding peptide
RPVQIRKIVGRKPKVKKATVDENEKVV

SEQ ID NO: 94341 - protein, 27 aa, Artificial Sequence
  Cyclic GFR-binding peptide
RSVKIAKVVGRTPKVKEVQVDENEKVV

SEQ ID NO: 94342 - protein, 27 aa, Artificial Sequence
  Cyclic GFR-binding peptide
RPVQIRKIVGRTPKVKKATVDENEKVV

SEQ ID NO: 94343 - protein, 29 aa, Artificial Sequence
  Cyclic GFR-binding peptide
EPLTVLYYEYVRKKPKLEQLSNDENEKVV

SEQ ID NO: 94344 - protein, 27 aa, Artificial Sequence
  Cyclic GFR-binding peptide
SNITIQIMVGRKPKVIGEMSDENEKVV

SEQ ID NO: 94345 - protein, 27 aa, Artificial Sequence
  Cyclic GFR-binding peptide
SNITMQIMDENEKVVIGEMSDENEKVV

SEQ ID NO: 94346 - protein, 27 aa, Artificial Sequence
  Cyclic GFR-binding peptide
SNITIQIMIGKTPKIIGEMSDENEKVV

SEQ ID NO: 94347 - protein, 29 aa, Artificial Sequence
  Cyclic GFR-binding peptide
EPLTMLYYRIKPHQGQHEQLSNDENEKVV

SEQ ID NO: 94348 - protein, 27 aa, Artificial Sequence
  Cyclic GFR-binding peptide
RPVQMRKIDEYDKVVKKATVDENEKVV

SEQ ID NO: 94349 - protein, 29 aa, Artificial Sequence
  Cyclic GFR-binding peptide
EPLPMVYYRIKPHQGQHEQLSNDENEKVV

SEQ ID NO: 94350 - protein, 29 aa, Artificial Sequence
  Cyclic GFR-binding peptide
EPLPVVYYEYVRKKPKLEQLSNDENEKVV

SEQ ID NO: 94351 - protein, 27 aa, Artificial Sequence
  Cyclic GFR-binding peptide
RSVKMAKVDEYDKVVKEVQVDENEKVV

SEQ ID NO: 94352 - protein, 27 aa, Artificial Sequence
  Cyclic GFR-binding peptide
DENEKVVRYKKLIIQQKDNFYLMSIAN

SEQ ID NO: 94353 - protein, 27 aa, Artificial Sequence
  Cyclic GFR-binding peptide
DENEKVVRYKKLLLVRGNDFYLMSIAN

SEQ ID NO: 94354 - protein, 27 aa, Artificial Sequence
  Cyclic GFR-binding peptide
NAISMLYFNDKQQIILKKYRDENEKVV

SEQ ID NO: 94355 - protein, 27 aa, Artificial Sequence
  Cyclic GFR-binding peptide
NAISMLYFDNGRVLLLKKYRDENEKVV

SEQ ID NO: 94356 - protein, 27 aa, Artificial Sequence
  Cyclic GFR-binding peptide
DENEKVVEYKFKVVNKNEDLYLISIPE

SEQ ID NO: 94357 - protein, 27 aa, Artificial Sequence
  Cyclic GFR-binding peptide
DENEKVVPIKGYVKPTRGVFYLINIPS

SEQ ID NO: 94358 - protein, 27 aa, Artificial Sequence
  Cyclic GFR-binding peptide
DENEKVVEYKFKLLVRGNDLYLMSIPE

SEQ ID NO: 94359 - protein, 27 aa, Artificial Sequence
  Cyclic GFR-binding peptide
DENEKVVYHYKLVVNKNEDKYLISIPS

SEQ ID NO: 94360 - protein, 27 aa, Artificial Sequence
  Cyclic GFR-binding peptide
DENEKVVRHKRLLLVRGNDYYLMSTAS

SEQ ID NO: 94361 - protein, 27 aa, Artificial Sequence
  Cyclic GFR-binding peptide
DENEKVVYHYKLLLVRGNDKYLMSIPS

SEQ ID NO: 94362 - protein, 27 aa, Artificial Sequence
  Cyclic GFR-binding peptide
DENEKVVRHKRLVVNKNEDYYLISTAS

SEQ ID NO: 94363 - protein, 27 aa, Artificial Sequence
  Cyclic GFR-binding peptide
DENEKVVRYKKLVVNKNEDFYLISIAN

SEQ ID NO: 94364 - protein, 27 aa, Artificial Sequence
  Cyclic GFR-binding peptide
DENEKVVPIKGYVVNKNEDFYLINIPS

SEQ ID NO: 94365 - protein, 27 aa, Artificial Sequence
  Cyclic GFR-binding peptide
DENEKVVPIKGYIKPTKGIFYLINIPS

SEQ ID NO: 94366 - protein, 27 aa, Artificial Sequence
  Cyclic GFR-binding peptide
DENEKVVRHKRLYTVVGKDYYLISTAS

SEQ ID NO: 94367 - protein, 27 aa, Artificial Sequence
  Cyclic GFR-binding peptide
DENEKVVEYKFKVVNNASDLYLISIPE

SEQ ID NO: 94368 - protein, 27 aa, Artificial Sequence
  Cyclic GFR-binding peptide
DENEKVVRHKRLIIQQKDNYYLMSTAS

SEQ ID NO: 94369 - protein, 27 aa, Artificial Sequence
  Cyclic GFR-binding peptide
DENEKVVEYKFKIIQQKDNLYLMSIPE

SEQ ID NO: 94370 - protein, 27 aa, Artificial Sequence
  Cyclic GFR-binding peptide
DENEKVVPIKGYVKPKRGVFYLINIPS

SEQ ID NO: 94371 - protein, 27 aa, Artificial Sequence
  Cyclic GFR-binding peptide
DENEKVVRHKRLVVNNASDYYLISTAS

SEQ ID NO: 94372 - protein, 27 aa, Artificial Sequence
  Cyclic GFR-binding peptide
DENEKVVYHYKLVVNNASDKYLISIPS

SEQ ID NO: 94373 - protein, 27 aa, Artificial Sequence
  Cyclic GFR-binding peptide
DENEKVVYHYKLIIQQKDNKYLMSIPS

SEQ ID NO: 94374 - protein, 27 aa, Artificial Sequence
  Cyclic GFR-binding peptide
DENEKVVRHKRLVVNNAADYYLISTAS

SEQ ID NO: 94375 - protein, 27 aa, Artificial Sequence
  Cyclic GFR-binding peptide
EPISILYLDENKNVVKFKYEDENEKVV

SEQ ID NO: 94376 - protein, 27 aa, Artificial Sequence
  Cyclic GFR-binding peptide
SPINILYFVGRTPKVYGKIPDENEKVV

SEQ ID NO: 94377 - protein, 27 aa, Artificial Sequence
  Cyclic GFR-binding peptide
EPISMLYLDNGRVLLKFKYEDENEKVV

SEQ ID NO: 94378 - protein, 27 aa, Artificial Sequence
  Cyclic GFR-binding peptide
SPISILYKDENKNVVLKYHYDENEKVV

SEQ ID NO: 94379 - protein, 27 aa, Artificial Sequence
  Cyclic GFR-binding peptide
SATSMLYYDNGRVLLLRKHRDENEKVV

SEQ ID NO: 94380 - protein, 27 aa, Artificial Sequence
  Cyclic GFR-binding peptide
SPISMLYKDNGRVLLLKYHYDENEKVV

SEQ ID NO: 94381 - protein, 27 aa, Artificial Sequence
  Cyclic GFR-binding peptide
SATSILYYDENKNVVLRKHRDENEKVV

SEQ ID NO: 94382 - protein, 27 aa, Artificial Sequence
  Cyclic GFR-binding peptide
NAISILYFDENKNVVLKKYRDENEKVV

SEQ ID NO: 94383 - protein, 27 aa, Artificial Sequence
  Cyclic GFR-binding peptide
SPINILYFDENKNVVYGKIPDENEKVV

SEQ ID NO: 94384 - protein, 27 aa, Artificial Sequence
  Cyclic GFR-binding peptide
SPINILYFIGKTPKIYGKIPDENEKVV

SEQ ID NO: 94385 - protein, 27 aa, Artificial Sequence
  Cyclic GFR-binding peptide
SATSILYYDKGVVTYLRKHRDENEKVV

SEQ ID NO: 94386 - protein, 27 aa, Artificial Sequence
  Cyclic GFR-binding peptide
EPISILYLDSANNVVKFKYEDENEKVV

SEQ ID NO: 94387 - protein, 27 aa, Artificial Sequence
  Cyclic GFR-binding peptide
SATSMLYYNDKQQIILRKHRDENEKVV

SEQ ID NO: 94388 - protein, 27 aa, Artificial Sequence
  Cyclic GFR-binding peptide
EPISMLYLNDKQQIIKFKYEDENEKVV

SEQ ID NO: 94389 - protein, 27 aa, Artificial Sequence
  Cyclic GFR-binding peptide
SPINILYFVGRKPKVYGKIPDENEKVV

SEQ ID NO: 94390 - protein, 27 aa, Artificial Sequence
  Cyclic GFR-binding peptide
SATSILYYDSANNVVLRKHRDENEKVV

SEQ ID NO: 94391 - protein, 27 aa, Artificial Sequence
  Cyclic GFR-binding peptide
SPISILYKDSANNVVLKYHYDENEKVV

SEQ ID NO: 94392 - protein, 27 aa, Artificial Sequence
  Cyclic GFR-binding peptide
SPISMLYKNDKQQIILKYHYDENEKVV

SEQ ID NO: 94393 - protein, 27 aa, Artificial Sequence
  Cyclic GFR-binding peptide
SATSILYYDAANNVVLRKHRDENEKVV

SEQ ID NO: 94394 - protein, 27 aa, Artificial Sequence
  Cyclic GFR-binding peptide
DENEKVVSMEGIIIQQKDNMIQMTINS

SEQ ID NO: 94395 - protein, 27 aa, Artificial Sequence
  Cyclic GFR-binding peptide
DENEKVVSMEGLVKPKRGVMIQITINS

SEQ ID NO: 94396 - protein, 27 aa, Artificial Sequence
  Cyclic GFR-binding peptide
DENEKVVSMEGLVVNNASDMIQITINS

SEQ ID NO: 94397 - protein, 27 aa, Artificial Sequence
  Cyclic GFR-binding peptide
DENEKVVSMEGILLVRGNDMIQMTINS

SEQ ID NO: 94398 - protein, 27 aa, Artificial Sequence
  Cyclic GFR-binding peptide
DENEKVVSMEGLIKPTKGIMIQITINS

SEQ ID NO: 94399 - protein, 27 aa, Artificial Sequence
  Cyclic GFR-binding peptide
DENEKVVSMEGLIVNSSDDMIQVTINS

SEQ ID NO: 94400 - protein, 27 aa, Artificial Sequence
  Cyclic GFR-binding peptide
DENEKVVSMEGIVVNNASDMIQITINS

SEQ ID NO: 94401 - protein, 27 aa, Artificial Sequence
  Cyclic GFR-binding peptide
DENEKVVSMEGLVVNNAADMIQITINS

SEQ ID NO: 94402 - protein, 27 aa, Artificial Sequence
  Cyclic GFR-binding peptide
DENEKVVSMEGLLLVRGNDMIQMTINS

SEQ ID NO: 94403 - protein, 27 aa, Artificial Sequence
  Cyclic GFR-binding peptide
DENEKVVSMEGLIIQQKDNMIQMTINS

SEQ ID NO: 94404 - protein, 27 aa, Artificial Sequence
  Cyclic GFR-binding peptide
DENEKVVSMEGIVVNNAADMIQITINS

SEQ ID NO: 94405 - protein, 27 aa, Artificial Sequence
  Cyclic GFR-binding peptide
DENEKVVSMEGLVKPTRGVMIQITINS

SEQ ID NO: 94406 - protein, 27 aa, Artificial Sequence
  Cyclic GFR-binding peptide
SNITMQIMNDKQQIIIGEMSDENEKVV

SEQ ID NO: 94407 - protein, 27 aa, Artificial Sequence
  Cyclic GFR-binding peptide
SNITIQIMVGRKPKVLGEMSDENEKVV

SEQ ID NO: 94408 - protein, 27 aa, Artificial Sequence
  Cyclic GFR-binding peptide
SNITIQIMDSANNVVLGEMSDENEKVV

SEQ ID NO: 94409 - protein, 27 aa, Artificial Sequence
  Cyclic GFR-binding peptide
SNITMQIMDNGRVLLIGEMSDENEKVV

SEQ ID NO: 94410 - protein, 27 aa, Artificial Sequence
  Cyclic GFR-binding peptide
SNITIQIMIGKTPKILGEMSDENEKVV

SEQ ID NO: 94411 - protein, 27 aa, Artificial Sequence
  Cyclic GFR-binding peptide
SNITVQIMDDSSNVILGEMSDENEKVV

SEQ ID NO: 94412 - protein, 27 aa, Artificial Sequence
  Cyclic GFR-binding peptide
SNITIQIMDSANNVVIGEMSDENEKVV

SEQ ID NO: 94413 - protein, 27 aa, Artificial Sequence
  Cyclic GFR-binding peptide
SNITIQIMDAANNVVLGEMSDENEKVV

SEQ ID NO: 94414 - protein, 27 aa, Artificial Sequence
  Cyclic GFR-binding peptide
SNITMQIMDNGRVLLLGEMSDENEKVV

SEQ ID NO: 94415 - protein, 27 aa, Artificial Sequence
  Cyclic GFR-binding peptide
SNITMQIMNDKQQIILGEMSDENEKVV

SEQ ID NO: 94416 - protein, 27 aa, Artificial Sequence
  Cyclic GFR-binding peptide
SNITIQIMDAANNVVIGEMSDENEKVV

SEQ ID NO: 94417 - protein, 27 aa, Artificial Sequence
  Cyclic GFR-binding peptide
SNITIQIMVGRTPKVLGEMSDENEKVV

SEQ ID NO: 94418 - protein, 27 aa, Artificial Sequence
  Cyclic GFR-binding peptide
DENEKVVQYNKLVVNKNEDLYLISIAS

SEQ ID NO: 94419 - protein, 27 aa, Artificial Sequence
  Cyclic GFR-binding peptide
DENEKVVQYNKLVVNNAADLYLISIAS

SEQ ID NO: 94420 - protein, 27 aa, Artificial Sequence
  Cyclic GFR-binding peptide
DENEKVVQYNKLIIQQKDNLYLMSIAS

SEQ ID NO: 94421 - protein, 27 aa, Artificial Sequence
  Cyclic GFR-binding peptide
DENEKVVQYNKLLLVRGNDLYLMSIAS

SEQ ID NO: 94422 - protein, 27 aa, Artificial Sequence
  Cyclic GFR-binding peptide
DENEKVVQYNKLYTVVGKDLYLISIAS

SEQ ID NO: 94423 - protein, 27 aa, Artificial Sequence
  Cyclic GFR-binding peptide
SAISILYLDENKNVVLKNYQDENEKVV

SEQ ID NO: 94424 - protein, 27 aa, Artificial Sequence
  Cyclic GFR-binding peptide
SAISILYLDAANNVVLKNYQDENEKVV

SEQ ID NO: 94425 - protein, 27 aa, Artificial Sequence
  Cyclic GFR-binding peptide
SAISMLYLNDKQQIILKNYQDENEKVV

SEQ ID NO: 94426 - protein, 27 aa, Artificial Sequence
  Cyclic GFR-binding peptide
SAISMLYLDNGRVLLLKNYQDENEKVV

SEQ ID NO: 94427 - protein, 27 aa, Artificial Sequence
  Cyclic GFR-binding peptide
SAISILYLDKGVVTYLKNYQDENEKVV

SEQ ID NO: 94428 - protein, 27 aa, Artificial Sequence
  Cyclic GFR-binding peptide
DENKNVVRYKKLIKPTKGIFYLISIAN

SEQ ID NO: 94429 - protein, 29 aa, Artificial Sequence
  Cyclic GFR-binding peptide
DENKNVVRHKRLFIPKKRVIEYYLVSTAS

SEQ ID NO: 94430 - protein, 27 aa, Artificial Sequence
  Cyclic GFR-binding peptide
DENKNVVYHYKLVVKDYEDKYLMSIPS

SEQ ID NO: 94431 - protein, 27 aa, Artificial Sequence
  Cyclic GFR-binding peptide
DENKNVVQYNKLIVNNSSDLYLVSIAS

SEQ ID NO: 94432 - protein, 27 aa, Artificial Sequence
  Cyclic GFR-binding peptide
DENKNVVRYKKLVVKDYEDFYLMSIAN

SEQ ID NO: 94433 - protein, 27 aa, Artificial Sequence
  Cyclic GFR-binding peptide
DENKNVVRYKKLVKPTRGVFYLISIAN

SEQ ID NO: 94434 - protein, 27 aa, Artificial Sequence
  Cyclic GFR-binding peptide
DENKNVVRHKRLVVKENEDYYLMSTAS

SEQ ID NO: 94435 - protein, 27 aa, Artificial Sequence
  Cyclic GFR-binding peptide
DENKNVVYHYKLIKPTKGIKYLISIPS

SEQ ID NO: 94436 - protein, 29 aa, Artificial Sequence
  Cyclic GFR-binding peptide
DENKNVVRYKKLFIPKKRVIEFYLVSIAN

SEQ ID NO: 94437 - protein, 27 aa, Artificial Sequence
  Cyclic GFR-binding peptide
DENKNVVYHYKLVVKENEDKYLMSIPS

SEQ ID NO: 94438 - protein, 27 aa, Artificial Sequence
  Cyclic GFR-binding peptide
DENKNVVRHKRLVKPKRGVYYLISTAS

SEQ ID NO: 94439 - protein, 27 aa, Artificial Sequence
  Cyclic GFR-binding peptide
DENKNVVYHYKLVKPKRGVKYLISIPS

SEQ ID NO: 94440 - protein, 29 aa, Artificial Sequence
  Cyclic GFR-binding peptide
DENKNVVQYNKLFIPKKRVIELYLVSIAS

SEQ ID NO: 94441 - protein, 27 aa, Artificial Sequence
  Cyclic GFR-binding peptide
DENKNVVQYNKLVKPTRGVLYLISIAS

SEQ ID NO: 94442 - protein, 27 aa, Artificial Sequence
  Cyclic GFR-binding peptide
DENKNVVRYKKLVVKENEDFYLMSIAN

SEQ ID NO: 94443 - protein, 27 aa, Artificial Sequence
  Cyclic GFR-binding peptide
DENKNVVQYNKLTPVGMDDLYLVSIAS

SEQ ID NO: 94444 - protein, 27 aa, Artificial Sequence
  Cyclic GFR-binding peptide
DENKNVVRYKKLTPVGMDDFYLVSIAN

SEQ ID NO: 94445 - protein, 27 aa, Artificial Sequence
  Cyclic GFR-binding peptide
DENKNVVRYKKLVKPKRGVFYLISIAN

SEQ ID NO: 94446 - protein, 27 aa, Artificial Sequence
  Cyclic GFR-binding peptide
DENKNVVQYNKLVVKENEDLYLMSIAS

SEQ ID NO: 94447 - protein, 27 aa, Artificial Sequence
  Cyclic GFR-binding peptide
DENKNVVYHYKLIVNSSDDKYLVSIPS

SEQ ID NO: 94448 - protein, 27 aa, Artificial Sequence
  Cyclic GFR-binding peptide
DENKNVVQYNKLVKPKRGVLYLISIAS

SEQ ID NO: 94449 - protein, 27 aa, Artificial Sequence
  Cyclic GFR-binding peptide
DENKNVVRYKKLIVNNSSDFYLVSIAN

SEQ ID NO: 94450 - protein, 27 aa, Artificial Sequence
  Cyclic GFR-binding peptide
DENKNVVRYKKLIVNSSDDFYLVSIAN

SEQ ID NO: 94451 - protein, 27 aa, Artificial Sequence
  Cyclic GFR-binding peptide
DENKNVVRHKRLVKPTRGVYYLISTAS

SEQ ID NO: 94452 - protein, 29 aa, Artificial Sequence
  Cyclic GFR-binding peptide
DENKNVVYHYKLFIPKKRVIEKYLVSIPS

SEQ ID NO: 94453 - protein, 27 aa, Artificial Sequence
  Cyclic GFR-binding peptide
DENKNVVRHKRLIKPTKGIYYLISTAS

SEQ ID NO: 94454 - protein, 27 aa, Artificial Sequence
  Cyclic GFR-binding peptide
DENKNVVRHKRLTPVGMDDYYLVSTAS

SEQ ID NO: 94455 - protein, 27 aa, Artificial Sequence
  Cyclic GFR-binding peptide
DENKNVVYHYKLTPVGMDDKYLVSIPS

SEQ ID NO: 94456 - protein, 27 aa, Artificial Sequence
  Cyclic GFR-binding peptide
DENKNVVYHYKLIVNNSSDKYLVSIPS

SEQ ID NO: 94457 - protein, 27 aa, Artificial Sequence
  Cyclic GFR-binding peptide
DENKNVVRHKRLIVNNSSDYYLVSTAS

SEQ ID NO: 94458 - protein, 27 aa, Artificial Sequence
  Cyclic GFR-binding peptide
DENKNVVYHYKLVKPTRGVKYLISIPS

SEQ ID NO: 94459 - protein, 27 aa, Artificial Sequence
  Cyclic GFR-binding peptide
DENKNVVRHKRLIVNSSDDYYLVSTAS

SEQ ID NO: 94460 - protein, 27 aa, Artificial Sequence
  Cyclic GFR-binding peptide
DENKNVVRHKRLVVKDYEDYYLMSTAS

SEQ ID NO: 94461 - protein, 27 aa, Artificial Sequence
  Cyclic GFR-binding peptide
DENKNVVQYNKLIKPTKGILYLISIAS

SEQ ID NO: 94462 - protein, 27 aa, Artificial Sequence
  Cyclic GFR-binding peptide
DENKNVVQYNKLVVKDYEDLYLMSIAS

SEQ ID NO: 94463 - protein, 27 aa, Artificial Sequence
  Cyclic GFR-binding peptide
DENKNVVQYNKLIVNSSDDLYLVSIAS

SEQ ID NO: 94464 - protein, 27 aa, Artificial Sequence
  Cyclic GFR-binding peptide
NAISILYFIGKTPKILKKYRDENKNVV

SEQ ID NO: 94465 - protein, 29 aa, Artificial Sequence
  Cyclic GFR-binding peptide
SATSVLYYEIVRKKPIFLRKHRDENKNVV

SEQ ID NO: 94466 - protein, 27 aa, Artificial Sequence
  Cyclic GFR-binding peptide
SPISMLYKDEYDKVVLKYHYDENKNVV

SEQ ID NO: 94467 - protein, 27 aa, Artificial Sequence
  Cyclic GFR-binding peptide
SAISVLYLDSSNNVILKNYQDENKNVV

SEQ ID NO: 94468 - protein, 27 aa, Artificial Sequence
  Cyclic GFR-binding peptide
NAISMLYFDEYDKVVLKKYRDENKNVV

SEQ ID NO: 94469 - protein, 27 aa, Artificial Sequence
  Cyclic GFR-binding peptide
NAISILYFVGRTPKVLKKYRDENKNVV

SEQ ID NO: 94470 - protein, 27 aa, Artificial Sequence
  Cyclic GFR-binding peptide
SATSMLYYDENEKVVLRKHRDENKNVV

SEQ ID NO: 94471 - protein, 27 aa, Artificial Sequence
  Cyclic GFR-binding peptide
SPISILYKIGKTPKILKYHYDENKNVV

SEQ ID NO: 94472 - protein, 29 aa, Artificial Sequence
  Cyclic GFR-binding peptide
NAISVLYFEIVRKKPIFLKKYRDENKNVV

SEQ ID NO: 94473 - protein, 27 aa, Artificial Sequence
  Cyclic GFR-binding peptide
SPISMLYKDENEKVVLKYHYDENKNVV

SEQ ID NO: 94474 - protein, 27 aa, Artificial Sequence
  Cyclic GFR-binding peptide
SATSILYYVGRKPKVLRKHRDENKNVV

SEQ ID NO: 94475 - protein, 27 aa, Artificial Sequence
  Cyclic GFR-binding peptide
SPISILYKVGRKPKVLKYHYDENKNVV

SEQ ID NO: 94476 - protein, 29 aa, Artificial Sequence
  Cyclic GFR-binding peptide
SAISVLYLEIVRKKPIFLKNYQDENKNVV

SEQ ID NO: 94477 - protein, 27 aa, Artificial Sequence
  Cyclic GFR-binding peptide
SAISILYLVGRTPKVLKNYQDENKNVV

SEQ ID NO: 94478 - protein, 27 aa, Artificial Sequence
  Cyclic GFR-binding peptide
NAISMLYFDENEKVVLKKYRDENKNVV

SEQ ID NO: 94479 - protein, 27 aa, Artificial Sequence
  Cyclic GFR-binding peptide
SAISVLYLDDMGVPTLKNYQDENKNVV

SEQ ID NO: 94480 - protein, 27 aa, Artificial Sequence
  Cyclic GFR-binding peptide
NAISVLYFDDMGVPTLKKYRDENKNVV

SEQ ID NO: 94481 - protein, 27 aa, Artificial Sequence
  Cyclic GFR-binding peptide
NAISILYFVGRKPKVLKKYRDENKNVV

SEQ ID NO: 94482 - protein, 27 aa, Artificial Sequence
  Cyclic GFR-binding peptide
SAISMLYLDENEKVVLKNYQDENKNVV

SEQ ID NO: 94483 - protein, 27 aa, Artificial Sequence
  Cyclic GFR-binding peptide
SPISVLYKDDSSNVILKYHYDENKNVV

SEQ ID NO: 94484 - protein, 27 aa, Artificial Sequence
  Cyclic GFR-binding peptide
SAISILYLVGRKPKVLKNYQDENKNVV

SEQ ID NO: 94485 - protein, 27 aa, Artificial Sequence
  Cyclic GFR-binding peptide
NAISVLYFDSSNNVILKKYRDENKNVV

SEQ ID NO: 94486 - protein, 27 aa, Artificial Sequence
  Cyclic GFR-binding peptide
NAISVLYFDDSSNVILKKYRDENKNVV

SEQ ID NO: 94487 - protein, 27 aa, Artificial Sequence
  Cyclic GFR-binding peptide
SATSILYYVGRTPKVLRKHRDENKNVV

SEQ ID NO: 94488 - protein, 29 aa, Artificial Sequence
  Cyclic GFR-binding peptide
SPISVLYKEIVRKKPIFLKYHYDENKNVV

SEQ ID NO: 94489 - protein, 27 aa, Artificial Sequence
  Cyclic GFR-binding peptide
SATSILYYIGKTPKILRKHRDENKNVV

SEQ ID NO: 94490 - protein, 27 aa, Artificial Sequence
  Cyclic GFR-binding peptide
SATSVLYYDDMGVPTLRKHRDENKNVV

SEQ ID NO: 94491 - protein, 27 aa, Artificial Sequence
  Cyclic GFR-binding peptide
SPISVLYKDDMGVPTLKYHYDENKNVV

SEQ ID NO: 94492 - protein, 27 aa, Artificial Sequence
  Cyclic GFR-binding peptide
SPISVLYKDSSNNVILKYHYDENKNVV

SEQ ID NO: 94493 - protein, 27 aa, Artificial Sequence
  Cyclic GFR-binding peptide
SATSVLYYDSSNNVILRKHRDENKNVV

SEQ ID NO: 94494 - protein, 27 aa, Artificial Sequence
  Cyclic GFR-binding peptide
SPISILYKVGRTPKVLKYHYDENKNVV

SEQ ID NO: 94495 - protein, 27 aa, Artificial Sequence
  Cyclic GFR-binding peptide
SATSVLYYDDSSNVILRKHRDENKNVV

SEQ ID NO: 94496 - protein, 27 aa, Artificial Sequence
  Cyclic GFR-binding peptide
SATSMLYYDEYDKVVLRKHRDENKNVV

SEQ ID NO: 94497 - protein, 27 aa, Artificial Sequence
  Cyclic GFR-binding peptide
SAISILYLIGKTPKILKNYQDENKNVV

SEQ ID NO: 94498 - protein, 27 aa, Artificial Sequence
  Cyclic GFR-binding peptide
SAISMLYLDEYDKVVLKNYQDENKNVV

SEQ ID NO: 94499 - protein, 27 aa, Artificial Sequence
  Cyclic GFR-binding peptide
SAISVLYLDDSSNVILKNYQDENKNVV

SEQ ID NO: 94500 - protein, 27 aa, Artificial Sequence
  Cyclic GFR-binding peptide
DENKNVVNSLQEVVKDYEDYYLMTLPE

SEQ ID NO: 94501 - protein, 27 aa, Artificial Sequence
  Cyclic GFR-binding peptide
DENKNVVNSLQEIKPTKGIYYVIPLPE

SEQ ID NO: 94502 - protein, 27 aa, Artificial Sequence
  Cyclic GFR-binding peptide
DENKNVVNSLQEVKPKRGVYYLITLPE

SEQ ID NO: 94503 - protein, 27 aa, Artificial Sequence
  Cyclic GFR-binding peptide
DENKNVVNSLQEVKPTRGVYYVIPLPE

SEQ ID NO: 94504 - protein, 27 aa, Artificial Sequence
  Cyclic GFR-binding peptide
DENKNVVEYQKYIVNSSDDIFLVSIPS

SEQ ID NO: 94505 - protein, 27 aa, Artificial Sequence
  Cyclic GFR-binding peptide
DENKNVVEYQKYVKPTRGVIFLISIPS

SEQ ID NO: 94506 - protein, 27 aa, Artificial Sequence
  Cyclic GFR-binding peptide
DENKNVVNSLQEVVKENEDYYLMTLPE

SEQ ID NO: 94507 - protein, 27 aa, Artificial Sequence
  Cyclic GFR-binding peptide
DENKNVVNSLQEVVNNASDYYLITLPE

SEQ ID NO: 94508 - protein, 27 aa, Artificial Sequence
  Cyclic GFR-binding peptide
DENKNVVNSLQEVKPKRGVYYVIPLPE

SEQ ID NO: 94509 - protein, 27 aa, Artificial Sequence
  Cyclic GFR-binding peptide
DENKNVVNSLQEVVNNASDYYVIPLPE

SEQ ID NO: 94510 - protein, 27 aa, Artificial Sequence
  Cyclic GFR-binding peptide
DENKNVVNSLQEVKPTRGVYYLITLPE

SEQ ID NO: 94511 - protein, 27 aa, Artificial Sequence
  Cyclic GFR-binding peptide
DENKNVVEYQKYIKPTKGIIFLISIPS

SEQ ID NO: 94512 - protein, 27 aa, Artificial Sequence
  Cyclic GFR-binding peptide
DENKNVVEYQKYVVNNASDIFLISIPS

SEQ ID NO: 94513 - protein, 27 aa, Artificial Sequence
  Cyclic GFR-binding peptide
DENKNVVNSLQEIVNSSDDYYVVPLPE

SEQ ID NO: 94514 - protein, 27 aa, Artificial Sequence
  Cyclic GFR-binding peptide
DENKNVVNSLQEVVKDYEDYYVMPLPE

SEQ ID NO: 94515 - protein, 27 aa, Artificial Sequence
  Cyclic GFR-binding peptide
DENKNVVEYQKYVVKENEDIFLMSIPS

SEQ ID NO: 94516 - protein, 27 aa, Artificial Sequence
  Cyclic GFR-binding peptide
DENKNVVNSLQEVVKENEDYYVMPLPE

SEQ ID NO: 94517 - protein, 27 aa, Artificial Sequence
  Cyclic GFR-binding peptide
DENKNVVEYQKYVVKDYEDIFLMSIPS

SEQ ID NO: 94518 - protein, 27 aa, Artificial Sequence
  Cyclic GFR-binding peptide
DENKNVVQYNKLVVNNASDLYLISIAS

SEQ ID NO: 94519 - protein, 27 aa, Artificial Sequence
  Cyclic GFR-binding peptide
DENKNVVNSLQEIKPTKGIYYLITLPE

SEQ ID NO: 94520 - protein, 27 aa, Artificial Sequence
  Cyclic GFR-binding peptide
DENKNVVEYQKYVKPKRGVIFLISIPS

SEQ ID NO: 94521 - protein, 27 aa, Artificial Sequence
  Cyclic GFR-binding peptide
DENKNVVRYKKLVVNNASDFYLISIAN

SEQ ID NO: 94522 - protein, 27 aa, Artificial Sequence
  Cyclic GFR-binding peptide
DENKNVVNSLQEIVNSSDDYYLVTLPE

SEQ ID NO: 94523 - protein, 27 aa, Artificial Sequence
  Cyclic GFR-binding peptide
EPLTMLYYDEYDKVVEQLSNDENKNVV

SEQ ID NO: 94524 - protein, 27 aa, Artificial Sequence
  Cyclic GFR-binding peptide
EPLPIVYYIGKTPKIEQLSNDENKNVV

SEQ ID NO: 94525 - protein, 27 aa, Artificial Sequence
  Cyclic GFR-binding peptide
EPLTILYYVGRKPKVEQLSNDENKNVV

SEQ ID NO: 94526 - protein, 27 aa, Artificial Sequence
  Cyclic GFR-binding peptide
EPLPIVYYVGRTPKVEQLSNDENKNVV

SEQ ID NO: 94527 - protein, 27 aa, Artificial Sequence
  Cyclic GFR-binding peptide
SPISVLFIDDSSNVIYKQYEDENKNVV

SEQ ID NO: 94528 - protein, 27 aa, Artificial Sequence
  Cyclic GFR-binding peptide
SPISILFIVGRTPKVYKQYEDENKNVV

SEQ ID NO: 94529 - protein, 27 aa, Artificial Sequence
  Cyclic GFR-binding peptide
EPLTMLYYDENEKVVEQLSNDENKNVV

SEQ ID NO: 94530 - protein, 27 aa, Artificial Sequence
  Cyclic GFR-binding peptide
EPLTILYYDSANNVVEQLSNDENKNVV

SEQ ID NO: 94531 - protein, 27 aa, Artificial Sequence
  Cyclic GFR-binding peptide
EPLPIVYYVGRKPKVEQLSNDENKNVV

SEQ ID NO: 94532 - protein, 27 aa, Artificial Sequence
  Cyclic GFR-binding peptide
EPLPIVYYDSANNVVEQLSNDENKNVV

SEQ ID NO: 94533 - protein, 27 aa, Artificial Sequence
  Cyclic GFR-binding peptide
EPLTILYYVGRTPKVEQLSNDENKNVV

SEQ ID NO: 94534 - protein, 27 aa, Artificial Sequence
  Cyclic GFR-binding peptide
SPISILFIIGKTPKIYKQYEDENKNVV

SEQ ID NO: 94535 - protein, 27 aa, Artificial Sequence
  Cyclic GFR-binding peptide
SPISILFIDSANNVVYKQYEDENKNVV

SEQ ID NO: 94536 - protein, 27 aa, Artificial Sequence
  Cyclic GFR-binding peptide
EPLPVVYYDDSSNVIEQLSNDENKNVV

SEQ ID NO: 94537 - protein, 27 aa, Artificial Sequence
  Cyclic GFR-binding peptide
EPLPMVYYDEYDKVVEQLSNDENKNVV

SEQ ID NO: 94538 - protein, 27 aa, Artificial Sequence
  Cyclic GFR-binding peptide
SPISMLFIDENEKVVYKQYEDENKNVV

SEQ ID NO: 94539 - protein, 27 aa, Artificial Sequence
  Cyclic GFR-binding peptide
EPLPMVYYDENEKVVEQLSNDENKNVV

SEQ ID NO: 94540 - protein, 27 aa, Artificial Sequence
  Cyclic GFR-binding peptide
SPISMLFIDEYDKVVYKQYEDENKNVV

SEQ ID NO: 94541 - protein, 27 aa, Artificial Sequence
  Cyclic GFR-binding peptide
SAISILYLDSANNVVLKNYQDENKNVV

SEQ ID NO: 94542 - protein, 27 aa, Artificial Sequence
  Cyclic GFR-binding peptide
EPLTILYYIGKTPKIEQLSNDENKNVV

SEQ ID NO: 94543 - protein, 27 aa, Artificial Sequence
  Cyclic GFR-binding peptide
SPISILFIVGRKPKVYKQYEDENKNVV

SEQ ID NO: 94544 - protein, 27 aa, Artificial Sequence
  Cyclic GFR-binding peptide
NAISILYFDSANNVVLKKYRDENKNVV

SEQ ID NO: 94545 - protein, 27 aa, Artificial Sequence
  Cyclic GFR-binding peptide
EPLTVLYYDDSSNVIEQLSNDENKNVV

SEQ ID NO: 94546 - protein, 29 aa, Artificial Sequence
  Cyclic GFR-binding peptide
DENKNVVVTAKKLKPKKRVYEIKRVQVPR

SEQ ID NO: 94547 - protein, 29 aa, Artificial Sequence
  Cyclic GFR-binding peptide
DENKNVVVQVEKLKPKKRVYEVKAVKVSR

SEQ ID NO: 94548 - protein, 29 aa, Artificial Sequence
  Cyclic GFR-binding peptide
DENKNVVVQVEKFIPKKRVIEVKAVKVSR

SEQ ID NO: 94549 - protein, 29 aa, Artificial Sequence
  Cyclic GFR-binding peptide
DENKNVVVQVEKHQGQHPKIRVKAMKVSR

SEQ ID NO: 94550 - protein, 29 aa, Artificial Sequence
  Cyclic GFR-binding peptide
DENKNVVVTAKKHQGQHPKIRIKRMQVPR

SEQ ID NO: 94551 - protein, 29 aa, Artificial Sequence
  Cyclic GFR-binding peptide
DENKNVVSMEGLLKPKKRVYEMIQVTINS

SEQ ID NO: 94552 - protein, 29 aa, Artificial Sequence
  Cyclic GFR-binding peptide
DENKNVVSMEGIFIPKKRVIEMIQVTINS

SEQ ID NO: 94553 - protein, 29 aa, Artificial Sequence
  Cyclic GFR-binding peptide
DENKNVVSMEGLHQGQHPKIRMIQMTINS

SEQ ID NO: 94554 - protein, 29 aa, Artificial Sequence
  Cyclic GFR-binding peptide
DENKNVVSMEGILKPKKRVYEMIQVTINS

SEQ ID NO: 94555 - protein, 29 aa, Artificial Sequence
  Cyclic GFR-binding peptide
DENKNVVSMEGLFIPKKRVIEMIQVTINS

SEQ ID NO: 94556 - protein, 29 aa, Artificial Sequence
  Cyclic GFR-binding peptide
DENKNVVVTAKKFIPKKRVIEIKRVQVPR

SEQ ID NO: 94557 - protein, 29 aa, Artificial Sequence
  Cyclic GFR-binding peptide
DENKNVVSMEGIHQGQHPKIRMIQMTINS

SEQ ID NO: 94558 - protein, 29 aa, Artificial Sequence
  Cyclic GFR-binding peptide
RPVQVRKIEYVRKKPKLKKATVDENKNVV

SEQ ID NO: 94559 - protein, 29 aa, Artificial Sequence
  Cyclic GFR-binding peptide
RSVKVAKVEYVRKKPKLKEVQVDENKNVV

SEQ ID NO: 94560 - protein, 29 aa, Artificial Sequence
  Cyclic GFR-binding peptide
RSVKVAKVEIVRKKPIFKEVQVDENKNVV

SEQ ID NO: 94561 - protein, 29 aa, Artificial Sequence
  Cyclic GFR-binding peptide
RSVKMAKVRIKPHQGQHKEVQVDENKNVV

SEQ ID NO: 94562 - protein, 29 aa, Artificial Sequence
  Cyclic GFR-binding peptide
RPVQMRKIRIKPHQGQHKKATVDENKNVV

SEQ ID NO: 94563 - protein, 29 aa, Artificial Sequence
  Cyclic GFR-binding peptide
SNITVQIMEYVRKKPKLLGEMSDENKNVV

SEQ ID NO: 94564 - protein, 29 aa, Artificial Sequence
  Cyclic GFR-binding peptide
SNITVQIMEIVRKKPIFIGEMSDENKNVV

SEQ ID NO: 94565 - protein, 29 aa, Artificial Sequence
  Cyclic GFR-binding peptide
SNITMQIMRIKPHQGQHLGEMSDENKNVV

SEQ ID NO: 94566 - protein, 29 aa, Artificial Sequence
  Cyclic GFR-binding peptide
SNITVQIMEYVRKKPKLIGEMSDENKNVV

SEQ ID NO: 94567 - protein, 29 aa, Artificial Sequence
  Cyclic GFR-binding peptide
SNITVQIMEIVRKKPIFLGEMSDENKNVV

SEQ ID NO: 94568 - protein, 29 aa, Artificial Sequence
  Cyclic GFR-binding peptide
RPVQVRKIEIVRKKPIFKKATVDENKNVV

SEQ ID NO: 94569 - protein, 29 aa, Artificial Sequence
  Cyclic GFR-binding peptide
SNITMQIMRIKPHQGQHIGEMSDENKNVV

SEQ ID NO: 94570 - protein, 27 aa, Artificial Sequence
  Cyclic GFR-binding peptide
DENKNVVEYKFKVKPTRGVLYLISIPE

SEQ ID NO: 94571 - protein, 27 aa, Artificial Sequence
  Cyclic GFR-binding peptide
DENKNVVEYKFKTPVGMDDLYLVSIPE

SEQ ID NO: 94572 - protein, 27 aa, Artificial Sequence
  Cyclic GFR-binding peptide
DENKNVVEYQKYVKPKRGVIYLISIPS

SEQ ID NO: 94573 - protein, 27 aa, Artificial Sequence
  Cyclic GFR-binding peptide
DENKNVVEYQKYVVKDYEDIYLMSIPS

SEQ ID NO: 94574 - protein, 27 aa, Artificial Sequence
  Cyclic GFR-binding peptide
DENKNVVEYKFKIKPTKGILYLISIPE

SEQ ID NO: 94575 - protein, 27 aa, Artificial Sequence
  Cyclic GFR-binding peptide
DENKNVVYHYKLYTVVGKDKYLISIPS

SEQ ID NO: 94576 - protein, 27 aa, Artificial Sequence
  Cyclic GFR-binding peptide
DENKNVVRYKKLYTVVGKDFYLISIAN

SEQ ID NO: 94577 - protein, 27 aa, Artificial Sequence
  Cyclic GFR-binding peptide
DENKNVVEYQKYVVNNAADIYLISIPS

SEQ ID NO: 94578 - protein, 27 aa, Artificial Sequence
  Cyclic GFR-binding peptide
DENKNVVEYQKYVKPTRGVIYLISIPS

SEQ ID NO: 94579 - protein, 27 aa, Artificial Sequence
  Cyclic GFR-binding peptide
DENKNVVEYQKYTPVGMDDIYLVSIPS

SEQ ID NO: 94580 - protein, 27 aa, Artificial Sequence
  Cyclic GFR-binding peptide
DENKNVVEYKFKVVKDYEDLYLMSIPE

SEQ ID NO: 94581 - protein, 27 aa, Artificial Sequence
  Cyclic GFR-binding peptide
DENKNVVEYKFKVVNNAADLYLISIPE

SEQ ID NO: 94582 - protein, 27 aa, Artificial Sequence
  Cyclic GFR-binding peptide
DENKNVVEYQKYVVKENEDIYLMSIPS

SEQ ID NO: 94583 - protein, 27 aa, Artificial Sequence
  Cyclic GFR-binding peptide
DENKNVVEYQKYIKPTKGIIYLISIPS

SEQ ID NO: 94584 - protein, 27 aa, Artificial Sequence
  Cyclic GFR-binding peptide
DENKNVVRYKKLVVNNAADFYLISIAN

SEQ ID NO: 94585 - protein, 27 aa, Artificial Sequence
  Cyclic GFR-binding peptide
DENKNVVYHYKLVVNNAADKYLISIPS

SEQ ID NO: 94586 - protein, 27 aa, Artificial Sequence
  Cyclic GFR-binding peptide
DENKNVVEYKFKIVNNSSDLYLVSIPE

SEQ ID NO: 94587 - protein, 27 aa, Artificial Sequence
  Cyclic GFR-binding peptide
DENKNVVEYQKYIVNSSDDIYLVSIPS

SEQ ID NO: 94588 - protein, 27 aa, Artificial Sequence
  Cyclic GFR-binding peptide
DENKNVVEYKFKIVNSSDDLYLVSIPE

SEQ ID NO: 94589 - protein, 27 aa, Artificial Sequence
  Cyclic GFR-binding peptide
DENKNVVEYKFKVKPKRGVLYLISIPE

SEQ ID NO: 94590 - protein, 27 aa, Artificial Sequence
  Cyclic GFR-binding peptide
DENKNVVEYQKYYTVVGKDIYLISIPS

SEQ ID NO: 94591 - protein, 27 aa, Artificial Sequence
  Cyclic GFR-binding peptide
DENKNVVEYKFKVVKENEDLYLMSIPE

SEQ ID NO: 94592 - protein, 27 aa, Artificial Sequence
  Cyclic GFR-binding peptide
DENKNVVEYQKYIVNNSSDIYLVSIPS

SEQ ID NO: 94593 - protein, 27 aa, Artificial Sequence
  Cyclic GFR-binding peptide
DENKNVVEYKFKYTVVGKDLYLISIPE

SEQ ID NO: 94594 - protein, 27 aa, Artificial Sequence
  Cyclic GFR-binding peptide
EPISILYLVGRTPKVKFKYEDENKNVV

SEQ ID NO: 94595 - protein, 27 aa, Artificial Sequence
  Cyclic GFR-binding peptide
EPISVLYLDDMGVPTKFKYEDENKNVV

SEQ ID NO: 94596 - protein, 27 aa, Artificial Sequence
  Cyclic GFR-binding peptide
SPISILYIVGRKPKVYKQYEDENKNVV

SEQ ID NO: 94597 - protein, 27 aa, Artificial Sequence
  Cyclic GFR-binding peptide
SPISMLYIDEYDKVVYKQYEDENKNVV

SEQ ID NO: 94598 - protein, 27 aa, Artificial Sequence
  Cyclic GFR-binding peptide
EPISILYLIGKTPKIKFKYEDENKNVV

SEQ ID NO: 94599 - protein, 27 aa, Artificial Sequence
  Cyclic GFR-binding peptide
SPISILYKDKGVVTYLKYHYDENKNVV

SEQ ID NO: 94600 - protein, 27 aa, Artificial Sequence
  Cyclic GFR-binding peptide
NAISILYFDKGVVTYLKKYRDENKNVV

SEQ ID NO: 94601 - protein, 27 aa, Artificial Sequence
  Cyclic GFR-binding peptide
SPISILYIDAANNVVYKQYEDENKNVV

SEQ ID NO: 94602 - protein, 27 aa, Artificial Sequence
  Cyclic GFR-binding peptide
SPISILYIVGRTPKVYKQYEDENKNVV

SEQ ID NO: 94603 - protein, 27 aa, Artificial Sequence
  Cyclic GFR-binding peptide
SPISVLYIDDMGVPTYKQYEDENKNVV

SEQ ID NO: 94604 - protein, 27 aa, Artificial Sequence
  Cyclic GFR-binding peptide
EPISMLYLDEYDKVVKFKYEDENKNVV

SEQ ID NO: 94605 - protein, 27 aa, Artificial Sequence
  Cyclic GFR-binding peptide
EPISILYLDAANNVVKFKYEDENKNVV

SEQ ID NO: 94606 - protein, 27 aa, Artificial Sequence
  Cyclic GFR-binding peptide
SPISMLYIDENEKVVYKQYEDENKNVV

SEQ ID NO: 94607 - protein, 27 aa, Artificial Sequence
  Cyclic GFR-binding peptide
SPISILYIIGKTPKIYKQYEDENKNVV

SEQ ID NO: 94608 - protein, 27 aa, Artificial Sequence
  Cyclic GFR-binding peptide
NAISILYFDAANNVVLKKYRDENKNVV

SEQ ID NO: 94609 - protein, 27 aa, Artificial Sequence
  Cyclic GFR-binding peptide
SPISILYKDAANNVVLKYHYDENKNVV

SEQ ID NO: 94610 - protein, 27 aa, Artificial Sequence
  Cyclic GFR-binding peptide
EPISVLYLDSSNNVIKFKYEDENKNVV

SEQ ID NO: 94611 - protein, 27 aa, Artificial Sequence
  Cyclic GFR-binding peptide
SPISVLYIDDSSNVIYKQYEDENKNVV

SEQ ID NO: 94612 - protein, 27 aa, Artificial Sequence
  Cyclic GFR-binding peptide
EPISVLYLDDSSNVIKFKYEDENKNVV

SEQ ID NO: 94613 - protein, 27 aa, Artificial Sequence
  Cyclic GFR-binding peptide
EPISILYLVGRKPKVKFKYEDENKNVV

SEQ ID NO: 94614 - protein, 27 aa, Artificial Sequence
  Cyclic GFR-binding peptide
SPISILYIDKGVVTYYKQYEDENKNVV

SEQ ID NO: 94615 - protein, 27 aa, Artificial Sequence
  Cyclic GFR-binding peptide
EPISMLYLDENEKVVKFKYEDENKNVV

SEQ ID NO: 94616 - protein, 27 aa, Artificial Sequence
  Cyclic GFR-binding peptide
SPISVLYIDSSNNVIYKQYEDENKNVV

SEQ ID NO: 94617 - protein, 27 aa, Artificial Sequence
  Cyclic GFR-binding peptide
EPISILYLDKGVVTYKFKYEDENKNVV

SEQ ID NO: 94618 - protein, 27 aa, Artificial Sequence
  Cyclic GFR-binding peptide
DENKNVVPIKGYIIQQKDNFYLMNIPS

SEQ ID NO: 94619 - protein, 27 aa, Artificial Sequence
  Cyclic GFR-binding peptide
DENKNVVPIKGYVVKDYEDFYLMNIPS

SEQ ID NO: 94620 - protein, 27 aa, Artificial Sequence
  Cyclic GFR-binding peptide
DENKNVVPIKGYIVNSSDDFYLVNIPS

SEQ ID NO: 94621 - protein, 27 aa, Artificial Sequence
  Cyclic GFR-binding peptide
DENKNVVPIKGYVVNNAADFYLINIPS

SEQ ID NO: 94622 - protein, 27 aa, Artificial Sequence
  Cyclic GFR-binding peptide
DENKNVVPIKGYYTVVGKDFYLINIPS

SEQ ID NO: 94623 - protein, 27 aa, Artificial Sequence
  Cyclic GFR-binding peptide
DENKNVVPIKGYLLVRGNDFYLMNIPS

SEQ ID NO: 94624 - protein, 27 aa, Artificial Sequence
  Cyclic GFR-binding peptide
DENKNVVPIKGYVVKENEDFYLMNIPS

SEQ ID NO: 94625 - protein, 27 aa, Artificial Sequence
  Cyclic GFR-binding peptide
DENKNVVPIKGYVVNNASDFYLINIPS

SEQ ID NO: 94626 - protein, 27 aa, Artificial Sequence
  Cyclic GFR-binding peptide
DENKNVVPIKGYTPVGMDDFYLVNIPS

SEQ ID NO: 94627 - protein, 27 aa, Artificial Sequence
  Cyclic GFR-binding peptide
DENKNVVPIKGYIVNNSSDFYLVNIPS

SEQ ID NO: 94628 - protein, 27 aa, Artificial Sequence
  Cyclic GFR-binding peptide
SPINMLYFNDKQQIIYGKIPDENKNVV

SEQ ID NO: 94629 - protein, 27 aa, Artificial Sequence
  Cyclic GFR-binding peptide
SPINMLYFDEYDKVVYGKIPDENKNVV

SEQ ID NO: 94630 - protein, 27 aa, Artificial Sequence
  Cyclic GFR-binding peptide
SPINVLYFDDSSNVIYGKIPDENKNVV

SEQ ID NO: 94631 - protein, 27 aa, Artificial Sequence
  Cyclic GFR-binding peptide
SPINILYFDAANNVVYGKIPDENKNVV

SEQ ID NO: 94632 - protein, 27 aa, Artificial Sequence
  Cyclic GFR-binding peptide
SPINILYFDKGVVTYYGKIPDENKNVV

SEQ ID NO: 94633 - protein, 27 aa, Artificial Sequence
  Cyclic GFR-binding peptide
SPINMLYFDNGRVLLYGKIPDENKNVV

SEQ ID NO: 94634 - protein, 27 aa, Artificial Sequence
  Cyclic GFR-binding peptide
SPINMLYFDENEKVVYGKIPDENKNVV

SEQ ID NO: 94635 - protein, 27 aa, Artificial Sequence
  Cyclic GFR-binding peptide
SPINILYFDSANNVVYGKIPDENKNVV

SEQ ID NO: 94636 - protein, 27 aa, Artificial Sequence
  Cyclic GFR-binding peptide
SPINVLYFDDMGVPTYGKIPDENKNVV

SEQ ID NO: 94637 - protein, 27 aa, Artificial Sequence
  Cyclic GFR-binding peptide
SPINVLYFDSSNNVIYGKIPDENKNVV

SEQ ID NO: 94638 - protein, 27 aa, Artificial Sequence
  Cyclic GFR-binding peptide
DENKNVVEYQKYVVNNASDIYLISIPS

SEQ ID NO: 94639 - protein, 27 aa, Artificial Sequence
  Cyclic GFR-binding peptide
DENKNVVEYQKYIIQQKDNIYLMSIPS

SEQ ID NO: 94640 - protein, 27 aa, Artificial Sequence
  Cyclic GFR-binding peptide
DENKNVVEYQKYLLVRGNDIYLMSIPS

SEQ ID NO: 94641 - protein, 27 aa, Artificial Sequence
  Cyclic GFR-binding peptide
SPISILYIDSANNVVYKQYEDENKNVV

SEQ ID NO: 94642 - protein, 27 aa, Artificial Sequence
  Cyclic GFR-binding peptide
SPISMLYINDKQQIIYKQYEDENKNVV

SEQ ID NO: 94643 - protein, 27 aa, Artificial Sequence
  Cyclic GFR-binding peptide
SPISMLYIDNGRVLLYKQYEDENKNVV

SEQ ID NO: 94644 - protein, 27 aa, Artificial Sequence
  Cyclic GFR-binding peptide
DENKNVVPYVKLYTVVGKDFFLISLSS

SEQ ID NO: 94645 - protein, 27 aa, Artificial Sequence
  Cyclic GFR-binding peptide
DENKNVVPYVKLIKPTKGIFFLISLSS

SEQ ID NO: 94646 - protein, 27 aa, Artificial Sequence
  Cyclic GFR-binding peptide
DENKNVVPYVKLIIQQKDNFFLMSLSS

SEQ ID NO: 94647 - protein, 27 aa, Artificial Sequence
  Cyclic GFR-binding peptide
DENKNVVPYVKLIVNSSDDFFLVSLSS

SEQ ID NO: 94648 - protein, 27 aa, Artificial Sequence
  Cyclic GFR-binding peptide
DENKNVVPYVKLVKPKRGVFFLISLSS

SEQ ID NO: 94649 - protein, 27 aa, Artificial Sequence
  Cyclic GFR-binding peptide
DENKNVVPYVKLVKPTRGVFFLISLSS

SEQ ID NO: 94650 - protein, 27 aa, Artificial Sequence
  Cyclic GFR-binding peptide
DENKNVVPYVKLTPVGMDDFFLVSLSS

SEQ ID NO: 94651 - protein, 29 aa, Artificial Sequence
  Cyclic GFR-binding peptide
DENKNVVPYVKLHQGQHPKIRFFLMSLSS

SEQ ID NO: 94652 - protein, 27 aa, Artificial Sequence
  Cyclic GFR-binding peptide
DENKNVVPYVKLVVNKNEDFFLISLSS

SEQ ID NO: 94653 - protein, 27 aa, Artificial Sequence
  Cyclic GFR-binding peptide
DENKNVVPYVKLVVNNASDFFLISLSS

SEQ ID NO: 94654 - protein, 27 aa, Artificial Sequence
  Cyclic GFR-binding peptide
DENKNVVPYVKLVVKENEDFFLMSLSS

SEQ ID NO: 94655 - protein, 27 aa, Artificial Sequence
  Cyclic GFR-binding peptide
DENKNVVPYVKLIVNNSSDFFLVSLSS

SEQ ID NO: 94656 - protein, 29 aa, Artificial Sequence
  Cyclic GFR-binding peptide
DENKNVVPYVKLLKPKKRVYEFFLVSLSS

SEQ ID NO: 94657 - protein, 27 aa, Artificial Sequence
  Cyclic GFR-binding peptide
DENKNVVPYVKLLLVRGNDFFLMSLSS

SEQ ID NO: 94658 - protein, 27 aa, Artificial Sequence
  Cyclic GFR-binding peptide
DENKNVVPYVKLVVKDYEDFFLMSLSS

SEQ ID NO: 94659 - protein, 27 aa, Artificial Sequence
  Cyclic GFR-binding peptide
DENKNVVPYVKLVVNNAADFFLISLSS

SEQ ID NO: 94660 - protein, 27 aa, Artificial Sequence
  Cyclic GFR-binding peptide
SSLSILFFDKGVVTYLKVYPDENKNVV

SEQ ID NO: 94661 - protein, 27 aa, Artificial Sequence
  Cyclic GFR-binding peptide
SSLSILFFIGKTPKILKVYPDENKNVV

SEQ ID NO: 94662 - protein, 27 aa, Artificial Sequence
  Cyclic GFR-binding peptide
SSLSMLFFNDKQQIILKVYPDENKNVV

SEQ ID NO: 94663 - protein, 27 aa, Artificial Sequence
  Cyclic GFR-binding peptide
SSLSVLFFDDSSNVILKVYPDENKNVV

SEQ ID NO: 94664 - protein, 27 aa, Artificial Sequence
  Cyclic GFR-binding peptide
SSLSILFFVGRKPKVLKVYPDENKNVV

SEQ ID NO: 94665 - protein, 27 aa, Artificial Sequence
  Cyclic GFR-binding peptide
SSLSILFFVGRTPKVLKVYPDENKNVV

SEQ ID NO: 94666 - protein, 27 aa, Artificial Sequence
  Cyclic GFR-binding peptide
SSLSVLFFDDMGVPTLKVYPDENKNVV

SEQ ID NO: 94667 - protein, 29 aa, Artificial Sequence
  Cyclic GFR-binding peptide
SSLSMLFFRIKPHQGQHLKVYPDENKNVV

SEQ ID NO: 94668 - protein, 27 aa, Artificial Sequence
  Cyclic GFR-binding peptide
SSLSILFFDENKNVVLKVYPDENKNVV

SEQ ID NO: 94669 - protein, 27 aa, Artificial Sequence
  Cyclic GFR-binding peptide
SSLSILFFDSANNVVLKVYPDENKNVV

SEQ ID NO: 94670 - protein, 27 aa, Artificial Sequence
  Cyclic GFR-binding peptide
SSLSMLFFDENEKVVLKVYPDENKNVV

SEQ ID NO: 94671 - protein, 27 aa, Artificial Sequence
  Cyclic GFR-binding peptide
SSLSVLFFDSSNNVILKVYPDENKNVV

SEQ ID NO: 94672 - protein, 29 aa, Artificial Sequence
  Cyclic GFR-binding peptide
SSLSVLFFEYVRKKPKLLKVYPDENKNVV

SEQ ID NO: 94673 - protein, 27 aa, Artificial Sequence
  Cyclic GFR-binding peptide
SSLSMLFFDNGRVLLLKVYPDENKNVV

SEQ ID NO: 94674 - protein, 27 aa, Artificial Sequence
  Cyclic GFR-binding peptide
SSLSMLFFDEYDKVVLKVYPDENKNVV

SEQ ID NO: 94675 - protein, 27 aa, Artificial Sequence
  Cyclic GFR-binding peptide
SSLSILFFDAANNVVLKVYPDENKNVV

SEQ ID NO: 94676 - protein, 27 aa, Artificial Sequence
  Cyclic GFR-binding peptide
DENKNVVSMEGIIVNSSDDMIQVTINS

SEQ ID NO: 94677 - protein, 27 aa, Artificial Sequence
  Cyclic GFR-binding peptide
DENKNVVVTAKKVVKENEDIKRMQVPR

SEQ ID NO: 94678 - protein, 27 aa, Artificial Sequence
  Cyclic GFR-binding peptide
DENKNVVSMEGIVVKDYEDMIQMTINS

SEQ ID NO: 94679 - protein, 27 aa, Artificial Sequence
  Cyclic GFR-binding peptide
DENKNVVVTAKKIKPTKGIIKRIQVPR

SEQ ID NO: 94680 - protein, 27 aa, Artificial Sequence
  Cyclic GFR-binding peptide
DENKNVVSMEGIVKPTRGVMIQITINS

SEQ ID NO: 94681 - protein, 29 aa, Artificial Sequence
  Cyclic GFR-binding peptide
DENKNVVNSLQEFIPKKRVIEYYVVPLPE

SEQ ID NO: 94682 - protein, 27 aa, Artificial Sequence
  Cyclic GFR-binding peptide
DENKNVVVQVEKVKPKRGVVKAIKVSR

SEQ ID NO: 94683 - protein, 27 aa, Artificial Sequence
  Cyclic GFR-binding peptide
DENKNVVVQVEKVVKENEDVKAMKVSR

SEQ ID NO: 94684 - protein, 27 aa, Artificial Sequence
  Cyclic GFR-binding peptide
DENKNVVVTAKKIVNSSDDIKRVQVPR

SEQ ID NO: 94685 - protein, 27 aa, Artificial Sequence
  Cyclic GFR-binding peptide
DENKNVVVQVEKIKPTKGIVKAIKVSR

SEQ ID NO: 94686 - protein, 29 aa, Artificial Sequence
  Cyclic GFR-binding peptide
DENKNVVNSLQEFIPKKRVIEYYLVTLPE

SEQ ID NO: 94687 - protein, 27 aa, Artificial Sequence
  Cyclic GFR-binding peptide
DENKNVVVQVEKIVNSSDDVKAVKVSR

SEQ ID NO: 94688 - protein, 27 aa, Artificial Sequence
  Cyclic GFR-binding peptide
DENKNVVVTAKKVKPKRGVIKRIQVPR

SEQ ID NO: 94689 - protein, 27 aa, Artificial Sequence
  Cyclic GFR-binding peptide
DENKNVVVQVEKVKPTRGVVKAIKVSR

SEQ ID NO: 94690 - protein, 27 aa, Artificial Sequence
  Cyclic GFR-binding peptide
DENKNVVVTAKKVKPTRGVIKRIQVPR

SEQ ID NO: 94691 - protein, 29 aa, Artificial Sequence
  Cyclic GFR-binding peptide
DENKNVVNSLQELKPKKRVYEYYLVTLPE

SEQ ID NO: 94692 - protein, 27 aa, Artificial Sequence
  Cyclic GFR-binding peptide
DENKNVVSMEGIVKPKRGVMIQITINS

SEQ ID NO: 94693 - protein, 27 aa, Artificial Sequence
  Cyclic GFR-binding peptide
DENKNVVSMEGIVVKENEDMIQMTINS

SEQ ID NO: 94694 - protein, 27 aa, Artificial Sequence
  Cyclic GFR-binding peptide
DENKNVVSMEGIIKPTKGIMIQITINS

SEQ ID NO: 94695 - protein, 29 aa, Artificial Sequence
  Cyclic GFR-binding peptide
DENKNVVNSLQEHQGQHPKIRYYLMTLPE

SEQ ID NO: 94696 - protein, 27 aa, Artificial Sequence
  Cyclic GFR-binding peptide
DENKNVVVTAKKVVKDYEDIKRMQVPR

SEQ ID NO: 94697 - protein, 29 aa, Artificial Sequence
  Cyclic GFR-binding peptide
DENKNVVNSLQEHQGQHPKIRYYVMPLPE

SEQ ID NO: 94698 - protein, 29 aa, Artificial Sequence
  Cyclic GFR-binding peptide
DENKNVVNSLQELKPKKRVYEYYVVPLPE

SEQ ID NO: 94699 - protein, 27 aa, Artificial Sequence
  Cyclic GFR-binding peptide
DENKNVVVQVEKVVKDYEDVKAMKVSR

SEQ ID NO: 94700 - protein, 27 aa, Artificial Sequence
  Cyclic GFR-binding peptide
SNITVQIMDDSSNVIIGEMSDENKNVV

SEQ ID NO: 94701 - protein, 27 aa, Artificial Sequence
  Cyclic GFR-binding peptide
RPVQMRKIDENEKVVKKATVDENKNVV

SEQ ID NO: 94702 - protein, 27 aa, Artificial Sequence
  Cyclic GFR-binding peptide
SNITMQIMDEYDKVVIGEMSDENKNVV

SEQ ID NO: 94703 - protein, 27 aa, Artificial Sequence
  Cyclic GFR-binding peptide
RPVQIRKIIGKTPKIKKATVDENKNVV

SEQ ID NO: 94704 - protein, 27 aa, Artificial Sequence
  Cyclic GFR-binding peptide
SNITIQIMVGRTPKVIGEMSDENKNVV

SEQ ID NO: 94705 - protein, 29 aa, Artificial Sequence
  Cyclic GFR-binding peptide
EPLPVVYYEIVRKKPIFEQLSNDENKNVV

SEQ ID NO: 94706 - protein, 27 aa, Artificial Sequence
  Cyclic GFR-binding peptide
RSVKIAKVVGRKPKVKEVQVDENKNVV

SEQ ID NO: 94707 - protein, 27 aa, Artificial Sequence
  Cyclic GFR-binding peptide
RSVKMAKVDENEKVVKEVQVDENKNVV

SEQ ID NO: 94708 - protein, 27 aa, Artificial Sequence
  Cyclic GFR-binding peptide
RPVQVRKIDDSSNVIKKATVDENKNVV

SEQ ID NO: 94709 - protein, 27 aa, Artificial Sequence
  Cyclic GFR-binding peptide
RSVKIAKVIGKTPKIKEVQVDENKNVV

SEQ ID NO: 94710 - protein, 29 aa, Artificial Sequence
  Cyclic GFR-binding peptide
EPLTVLYYEIVRKKPIFEQLSNDENKNVV

SEQ ID NO: 94711 - protein, 27 aa, Artificial Sequence
  Cyclic GFR-binding peptide
RSVKVAKVDDSSNVIKEVQVDENKNVV

SEQ ID NO: 94712 - protein, 27 aa, Artificial Sequence
  Cyclic GFR-binding peptide
RPVQIRKIVGRKPKVKKATVDENKNVV

SEQ ID NO: 94713 - protein, 27 aa, Artificial Sequence
  Cyclic GFR-binding peptide
RSVKIAKVVGRTPKVKEVQVDENKNVV

SEQ ID NO: 94714 - protein, 27 aa, Artificial Sequence
  Cyclic GFR-binding peptide
RPVQIRKIVGRTPKVKKATVDENKNVV

SEQ ID NO: 94715 - protein, 29 aa, Artificial Sequence
  Cyclic GFR-binding peptide
EPLTVLYYEYVRKKPKLEQLSNDENKNVV

SEQ ID NO: 94716 - protein, 27 aa, Artificial Sequence
  Cyclic GFR-binding peptide
SNITIQIMVGRKPKVIGEMSDENKNVV

SEQ ID NO: 94717 - protein, 27 aa, Artificial Sequence
  Cyclic GFR-binding peptide
SNITMQIMDENEKVVIGEMSDENKNVV

SEQ ID NO: 94718 - protein, 27 aa, Artificial Sequence
  Cyclic GFR-binding peptide
SNITIQIMIGKTPKIIGEMSDENKNVV

SEQ ID NO: 94719 - protein, 29 aa, Artificial Sequence
  Cyclic GFR-binding peptide
EPLTMLYYRIKPHQGQHEQLSNDENKNVV

SEQ ID NO: 94720 - protein, 27 aa, Artificial Sequence
  Cyclic GFR-binding peptide
RPVQMRKIDEYDKVVKKATVDENKNVV

SEQ ID NO: 94721 - protein, 29 aa, Artificial Sequence
  Cyclic GFR-binding peptide
EPLPMVYYRIKPHQGQHEQLSNDENKNVV

SEQ ID NO: 94722 - protein, 29 aa, Artificial Sequence
  Cyclic GFR-binding peptide
EPLPVVYYEYVRKKPKLEQLSNDENKNVV

SEQ ID NO: 94723 - protein, 27 aa, Artificial Sequence
  Cyclic GFR-binding peptide
RSVKMAKVDEYDKVVKEVQVDENKNVV

SEQ ID NO: 94724 - protein, 27 aa, Artificial Sequence
  Cyclic GFR-binding peptide
DENKNVVRYKKLIIQQKDNFYLMSIAN

SEQ ID NO: 94725 - protein, 27 aa, Artificial Sequence
  Cyclic GFR-binding peptide
DENKNVVRYKKLLLVRGNDFYLMSIAN

SEQ ID NO: 94726 - protein, 27 aa, Artificial Sequence
  Cyclic GFR-binding peptide
NAISMLYFNDKQQIILKKYRDENKNVV

SEQ ID NO: 94727 - protein, 27 aa, Artificial Sequence
  Cyclic GFR-binding peptide
NAISMLYFDNGRVLLLKKYRDENKNVV

SEQ ID NO: 94728 - protein, 27 aa, Artificial Sequence
  Cyclic GFR-binding peptide
DENKNVVEYKFKVVNKNEDLYLISIPE

SEQ ID NO: 94729 - protein, 27 aa, Artificial Sequence
  Cyclic GFR-binding peptide
DENKNVVPIKGYVKPTRGVFYLINIPS

SEQ ID NO: 94730 - protein, 27 aa, Artificial Sequence
  Cyclic GFR-binding peptide
DENKNVVEYKFKLLVRGNDLYLMSIPE

SEQ ID NO: 94731 - protein, 27 aa, Artificial Sequence
  Cyclic GFR-binding peptide
DENKNVVYHYKLVVNKNEDKYLISIPS

SEQ ID NO: 94732 - protein, 27 aa, Artificial Sequence
  Cyclic GFR-binding peptide
DENKNVVRHKRLLLVRGNDYYLMSTAS

SEQ ID NO: 94733 - protein, 27 aa, Artificial Sequence
  Cyclic GFR-binding peptide
DENKNVVYHYKLLLVRGNDKYLMSIPS

SEQ ID NO: 94734 - protein, 27 aa, Artificial Sequence
  Cyclic GFR-binding peptide
DENKNVVRHKRLVVNKNEDYYLISTAS

SEQ ID NO: 94735 - protein, 27 aa, Artificial Sequence
  Cyclic GFR-binding peptide
DENKNVVRYKKLVVNKNEDFYLISIAN

SEQ ID NO: 94736 - protein, 27 aa, Artificial Sequence
  Cyclic GFR-binding peptide
DENKNVVPIKGYVVNKNEDFYLINIPS

SEQ ID NO: 94737 - protein, 27 aa, Artificial Sequence
  Cyclic GFR-binding peptide
DENKNVVPIKGYIKPTKGIFYLINIPS

SEQ ID NO: 94738 - protein, 27 aa, Artificial Sequence
  Cyclic GFR-binding peptide
DENKNVVRHKRLYTVVGKDYYLISTAS

SEQ ID NO: 94739 - protein, 27 aa, Artificial Sequence
  Cyclic GFR-binding peptide
DENKNVVEYKFKVVNNASDLYLISIPE

SEQ ID NO: 94740 - protein, 27 aa, Artificial Sequence
  Cyclic GFR-binding peptide
DENKNVVRHKRLIIQQKDNYYLMSTAS

SEQ ID NO: 94741 - protein, 27 aa, Artificial Sequence
  Cyclic GFR-binding peptide
DENKNVVEYKFKIIQQKDNLYLMSIPE

SEQ ID NO: 94742 - protein, 27 aa, Artificial Sequence
  Cyclic GFR-binding peptide
DENKNVVPIKGYVKPKRGVFYLINIPS

SEQ ID NO: 94743 - protein, 27 aa, Artificial Sequence
  Cyclic GFR-binding peptide
DENKNVVRHKRLVVNNASDYYLISTAS

SEQ ID NO: 94744 - protein, 27 aa, Artificial Sequence
  Cyclic GFR-binding peptide
DENKNVVYHYKLVVNNASDKYLISIPS

SEQ ID NO: 94745 - protein, 27 aa, Artificial Sequence
  Cyclic GFR-binding peptide
DENKNVVYHYKLIIQQKDNKYLMSIPS

SEQ ID NO: 94746 - protein, 27 aa, Artificial Sequence
  Cyclic GFR-binding peptide
DENKNVVRHKRLVVNNAADYYLISTAS

SEQ ID NO: 94747 - protein, 27 aa, Artificial Sequence
  Cyclic GFR-binding peptide
EPISILYLDENKNVVKFKYEDENKNVV

SEQ ID NO: 94748 - protein, 27 aa, Artificial Sequence
  Cyclic GFR-binding peptide
SPINILYFVGRTPKVYGKIPDENKNVV

SEQ ID NO: 94749 - protein, 27 aa, Artificial Sequence
  Cyclic GFR-binding peptide
EPISMLYLDNGRVLLKFKYEDENKNVV

SEQ ID NO: 94750 - protein, 27 aa, Artificial Sequence
  Cyclic GFR-binding peptide
SPISILYKDENKNVVLKYHYDENKNVV

SEQ ID NO: 94751 - protein, 27 aa, Artificial Sequence
  Cyclic GFR-binding peptide
SATSMLYYDNGRVLLLRKHRDENKNVV

SEQ ID NO: 94752 - protein, 27 aa, Artificial Sequence
  Cyclic GFR-binding peptide
SPISMLYKDNGRVLLLKYHYDENKNVV

SEQ ID NO: 94753 - protein, 27 aa, Artificial Sequence
  Cyclic GFR-binding peptide
SATSILYYDENKNVVLRKHRDENKNVV

SEQ ID NO: 94754 - protein, 27 aa, Artificial Sequence
  Cyclic GFR-binding peptide
NAISILYFDENKNVVLKKYRDENKNVV

SEQ ID NO: 94755 - protein, 27 aa, Artificial Sequence
  Cyclic GFR-binding peptide
SPINILYFDENKNVVYGKIPDENKNVV

SEQ ID NO: 94756 - protein, 27 aa, Artificial Sequence
  Cyclic GFR-binding peptide
SPINILYFIGKTPKIYGKIPDENKNVV

SEQ ID NO: 94757 - protein, 27 aa, Artificial Sequence
  Cyclic GFR-binding peptide
SATSILYYDKGVVTYLRKHRDENKNVV

SEQ ID NO: 94758 - protein, 27 aa, Artificial Sequence
  Cyclic GFR-binding peptide
EPISILYLDSANNVVKFKYEDENKNVV

SEQ ID NO: 94759 - protein, 27 aa, Artificial Sequence
  Cyclic GFR-binding peptide
SATSMLYYNDKQQIILRKHRDENKNVV

SEQ ID NO: 94760 - protein, 27 aa, Artificial Sequence
  Cyclic GFR-binding peptide
EPISMLYLNDKQQIIKFKYEDENKNVV

SEQ ID NO: 94761 - protein, 27 aa, Artificial Sequence
  Cyclic GFR-binding peptide
SPINILYFVGRKPKVYGKIPDENKNVV

SEQ ID NO: 94762 - protein, 27 aa, Artificial Sequence
  Cyclic GFR-binding peptide
SATSILYYDSANNVVLRKHRDENKNVV

SEQ ID NO: 94763 - protein, 27 aa, Artificial Sequence
  Cyclic GFR-binding peptide
SPISILYKDSANNVVLKYHYDENKNVV

SEQ ID NO: 94764 - protein, 27 aa, Artificial Sequence
  Cyclic GFR-binding peptide
SPISMLYKNDKQQIILKYHYDENKNVV

SEQ ID NO: 94765 - protein, 27 aa, Artificial Sequence
  Cyclic GFR-binding peptide
SATSILYYDAANNVVLRKHRDENKNVV

SEQ ID NO: 94766 - protein, 27 aa, Artificial Sequence
  Cyclic GFR-binding peptide
DENKNVVSMEGIIIQQKDNMIQMTINS

SEQ ID NO: 94767 - protein, 27 aa, Artificial Sequence
  Cyclic GFR-binding peptide
DENKNVVSMEGLVKPKRGVMIQITINS

SEQ ID NO: 94768 - protein, 27 aa, Artificial Sequence
  Cyclic GFR-binding peptide
DENKNVVSMEGLVVNNASDMIQITINS

SEQ ID NO: 94769 - protein, 27 aa, Artificial Sequence
  Cyclic GFR-binding peptide
DENKNVVSMEGILLVRGNDMIQMTINS

SEQ ID NO: 94770 - protein, 27 aa, Artificial Sequence
  Cyclic GFR-binding peptide
DENKNVVSMEGLIKPTKGIMIQITINS

SEQ ID NO: 94771 - protein, 27 aa, Artificial Sequence
  Cyclic GFR-binding peptide
DENKNVVSMEGLIVNSSDDMIQVTINS

SEQ ID NO: 94772 - protein, 27 aa, Artificial Sequence
  Cyclic GFR-binding peptide
DENKNVVSMEGIVVNNASDMIQITINS

SEQ ID NO: 94773 - protein, 27 aa, Artificial Sequence
  Cyclic GFR-binding peptide
DENKNVVSMEGLVVNNAADMIQITINS

SEQ ID NO: 94774 - protein, 27 aa, Artificial Sequence
  Cyclic GFR-binding peptide
DENKNVVSMEGLLLVRGNDMIQMTINS

SEQ ID NO: 94775 - protein, 27 aa, Artificial Sequence
  Cyclic GFR-binding peptide
DENKNVVSMEGLIIQQKDNMIQMTINS

SEQ ID NO: 94776 - protein, 27 aa, Artificial Sequence
  Cyclic GFR-binding peptide
DENKNVVSMEGIVVNNAADMIQITINS

SEQ ID NO: 94777 - protein, 27 aa, Artificial Sequence
  Cyclic GFR-binding peptide
DENKNVVSMEGLVKPTRGVMIQITINS

SEQ ID NO: 94778 - protein, 27 aa, Artificial Sequence
  Cyclic GFR-binding peptide
SNITMQIMNDKQQIIIGEMSDENKNVV

SEQ ID NO: 94779 - protein, 27 aa, Artificial Sequence
  Cyclic GFR-binding peptide
SNITIQIMVGRKPKVLGEMSDENKNVV

SEQ ID NO: 94780 - protein, 27 aa, Artificial Sequence
  Cyclic GFR-binding peptide
SNITIQIMDSANNVVLGEMSDENKNVV

SEQ ID NO: 94781 - protein, 27 aa, Artificial Sequence
  Cyclic GFR-binding peptide
SNITMQIMDNGRVLLIGEMSDENKNVV

SEQ ID NO: 94782 - protein, 27 aa, Artificial Sequence
  Cyclic GFR-binding peptide
SNITIQIMIGKTPKILGEMSDENKNVV

SEQ ID NO: 94783 - protein, 27 aa, Artificial Sequence
  Cyclic GFR-binding peptide
SNITVQIMDDSSNVILGEMSDENKNVV

SEQ ID NO: 94784 - protein, 27 aa, Artificial Sequence
  Cyclic GFR-binding peptide
SNITIQIMDSANNVVIGEMSDENKNVV

SEQ ID NO: 94785 - protein, 27 aa, Artificial Sequence
  Cyclic GFR-binding peptide
SNITIQIMDAANNVVLGEMSDENKNVV

SEQ ID NO: 94786 - protein, 27 aa, Artificial Sequence
  Cyclic GFR-binding peptide
SNITMQIMDNGRVLLLGEMSDENKNVV

SEQ ID NO: 94787 - protein, 27 aa, Artificial Sequence
  Cyclic GFR-binding peptide
SNITMQIMNDKQQIILGEMSDENKNVV

SEQ ID NO: 94788 - protein, 27 aa, Artificial Sequence
  Cyclic GFR-binding peptide
SNITIQIMDAANNVVIGEMSDENKNVV

SEQ ID NO: 94789 - protein, 27 aa, Artificial Sequence
  Cyclic GFR-binding peptide
SNITIQIMVGRTPKVLGEMSDENKNVV

SEQ ID NO: 94790 - protein, 27 aa, Artificial Sequence
  Cyclic GFR-binding peptide
DENKNVVQYNKLVVNKNEDLYLISIAS

SEQ ID NO: 94791 - protein, 27 aa, Artificial Sequence
  Cyclic GFR-binding peptide
DENKNVVQYNKLVVNNAADLYLISIAS

SEQ ID NO: 94792 - protein, 27 aa, Artificial Sequence
  Cyclic GFR-binding peptide
DENKNVVQYNKLIIQQKDNLYLMSIAS

SEQ ID NO: 94793 - protein, 27 aa, Artificial Sequence
  Cyclic GFR-binding peptide
DENKNVVQYNKLLLVRGNDLYLMSIAS

SEQ ID NO: 94794 - protein, 27 aa, Artificial Sequence
  Cyclic GFR-binding peptide
DENKNVVQYNKLYTVVGKDLYLISIAS

SEQ ID NO: 94795 - protein, 27 aa, Artificial Sequence
  Cyclic GFR-binding peptide
SAISILYLDENKNVVLKNYQDENKNVV

SEQ ID NO: 94796 - protein, 27 aa, Artificial Sequence
  Cyclic GFR-binding peptide
SAISILYLDAANNVVLKNYQDENKNVV

SEQ ID NO: 94797 - protein, 27 aa, Artificial Sequence
  Cyclic GFR-binding peptide
SAISMLYLNDKQQIILKNYQDENKNVV

SEQ ID NO: 94798 - protein, 27 aa, Artificial Sequence
  Cyclic GFR-binding peptide
SAISMLYLDNGRVLLLKNYQDENKNVV

SEQ ID NO: 94799 - protein, 27 aa, Artificial Sequence
  Cyclic GFR-binding peptide
SAISILYLDKGVVTYLKNYQDENKNVV

SEQ ID NO: 94800 - protein, 27 aa, Artificial Sequence
  Cyclic GFR-binding peptide
DEYDKVVRYKKLIKPTKGIFYLISIAN

SEQ ID NO: 94801 - protein, 29 aa, Artificial Sequence
  Cyclic GFR-binding peptide
DEYDKVVRHKRLFIPKKRVIEYYLVSTAS

SEQ ID NO: 94802 - protein, 27 aa, Artificial Sequence
  Cyclic GFR-binding peptide
DEYDKVVYHYKLVVKDYEDKYLMSIPS

SEQ ID NO: 94803 - protein, 27 aa, Artificial Sequence
  Cyclic GFR-binding peptide
DEYDKVVQYNKLIVNNSSDLYLVSIAS

SEQ ID NO: 94804 - protein, 27 aa, Artificial Sequence
  Cyclic GFR-binding peptide
DEYDKVVRYKKLVVKDYEDFYLMSIAN

SEQ ID NO: 94805 - protein, 27 aa, Artificial Sequence
  Cyclic GFR-binding peptide
DEYDKVVRYKKLVKPTRGVFYLISIAN

SEQ ID NO: 94806 - protein, 27 aa, Artificial Sequence
  Cyclic GFR-binding peptide
DEYDKVVRHKRLVVKENEDYYLMSTAS

SEQ ID NO: 94807 - protein, 27 aa, Artificial Sequence
  Cyclic GFR-binding peptide
DEYDKVVYHYKLIKPTKGIKYLISIPS

SEQ ID NO: 94808 - protein, 29 aa, Artificial Sequence
  Cyclic GFR-binding peptide
DEYDKVVRYKKLFIPKKRVIEFYLVSIAN

SEQ ID NO: 94809 - protein, 27 aa, Artificial Sequence
  Cyclic GFR-binding peptide
DEYDKVVYHYKLVVKENEDKYLMSIPS

SEQ ID NO: 94810 - protein, 27 aa, Artificial Sequence
  Cyclic GFR-binding peptide
DEYDKVVRHKRLVKPKRGVYYLISTAS

SEQ ID NO: 94811 - protein, 27 aa, Artificial Sequence
  Cyclic GFR-binding peptide
DEYDKVVYHYKLVKPKRGVKYLISIPS

SEQ ID NO: 94812 - protein, 29 aa, Artificial Sequence
  Cyclic GFR-binding peptide
DEYDKVVQYNKLFIPKKRVIELYLVSIAS

SEQ ID NO: 94813 - protein, 27 aa, Artificial Sequence
  Cyclic GFR-binding peptide
DEYDKVVQYNKLVKPTRGVLYLISIAS

SEQ ID NO: 94814 - protein, 27 aa, Artificial Sequence
  Cyclic GFR-binding peptide
DEYDKVVRYKKLVVKENEDFYLMSIAN

SEQ ID NO: 94815 - protein, 27 aa, Artificial Sequence
  Cyclic GFR-binding peptide
DEYDKVVQYNKLTPVGMDDLYLVSIAS

SEQ ID NO: 94816 - protein, 27 aa, Artificial Sequence
  Cyclic GFR-binding peptide
DEYDKVVRYKKLTPVGMDDFYLVSIAN

SEQ ID NO: 94817 - protein, 27 aa, Artificial Sequence
  Cyclic GFR-binding peptide
DEYDKVVRYKKLVKPKRGVFYLISIAN

SEQ ID NO: 94818 - protein, 27 aa, Artificial Sequence
  Cyclic GFR-binding peptide
DEYDKVVQYNKLVVKENEDLYLMSIAS

SEQ ID NO: 94819 - protein, 27 aa, Artificial Sequence
  Cyclic GFR-binding peptide
DEYDKVVYHYKLIVNSSDDKYLVSIPS

SEQ ID NO: 94820 - protein, 27 aa, Artificial Sequence
  Cyclic GFR-binding peptide
DEYDKVVQYNKLVKPKRGVLYLISIAS

SEQ ID NO: 94821 - protein, 27 aa, Artificial Sequence
  Cyclic GFR-binding peptide
DEYDKVVRYKKLIVNNSSDFYLVSIAN

SEQ ID NO: 94822 - protein, 27 aa, Artificial Sequence
  Cyclic GFR-binding peptide
DEYDKVVRYKKLIVNSSDDFYLVSIAN

SEQ ID NO: 94823 - protein, 27 aa, Artificial Sequence
  Cyclic GFR-binding peptide
DEYDKVVRHKRLVKPTRGVYYLISTAS

SEQ ID NO: 94824 - protein, 29 aa, Artificial Sequence
  Cyclic GFR-binding peptide
DEYDKVVYHYKLFIPKKRVIEKYLVSIPS

SEQ ID NO: 94825 - protein, 27 aa, Artificial Sequence
  Cyclic GFR-binding peptide
DEYDKVVRHKRLIKPTKGIYYLISTAS

SEQ ID NO: 94826 - protein, 27 aa, Artificial Sequence
  Cyclic GFR-binding peptide
DEYDKVVRHKRLTPVGMDDYYLVSTAS

SEQ ID NO: 94827 - protein, 27 aa, Artificial Sequence
  Cyclic GFR-binding peptide
DEYDKVVYHYKLTPVGMDDKYLVSIPS

SEQ ID NO: 94828 - protein, 27 aa, Artificial Sequence
  Cyclic GFR-binding peptide
DEYDKVVYHYKLIVNNSSDKYLVSIPS

SEQ ID NO: 94829 - protein, 27 aa, Artificial Sequence
  Cyclic GFR-binding peptide
DEYDKVVRHKRLIVNNSSDYYLVSTAS

SEQ ID NO: 94830 - protein, 27 aa, Artificial Sequence
  Cyclic GFR-binding peptide
DEYDKVVYHYKLVKPTRGVKYLISIPS

SEQ ID NO: 94831 - protein, 27 aa, Artificial Sequence
  Cyclic GFR-binding peptide
DEYDKVVRHKRLIVNSSDDYYLVSTAS

SEQ ID NO: 94832 - protein, 27 aa, Artificial Sequence
  Cyclic GFR-binding peptide
DEYDKVVRHKRLVVKDYEDYYLMSTAS

SEQ ID NO: 94833 - protein, 27 aa, Artificial Sequence
  Cyclic GFR-binding peptide
DEYDKVVQYNKLIKPTKGILYLISIAS

SEQ ID NO: 94834 - protein, 27 aa, Artificial Sequence
  Cyclic GFR-binding peptide
DEYDKVVQYNKLVVKDYEDLYLMSIAS

SEQ ID NO: 94835 - protein, 27 aa, Artificial Sequence
  Cyclic GFR-binding peptide
DEYDKVVQYNKLIVNSSDDLYLVSIAS

SEQ ID NO: 94836 - protein, 27 aa, Artificial Sequence
  Cyclic GFR-binding peptide
NAISILYFIGKTPKILKKYRDEYDKVV

SEQ ID NO: 94837 - protein, 29 aa, Artificial Sequence
  Cyclic GFR-binding peptide
SATSVLYYEIVRKKPIFLRKHRDEYDKVV

SEQ ID NO: 94838 - protein, 27 aa, Artificial Sequence
  Cyclic GFR-binding peptide
SPISMLYKDEYDKVVLKYHYDEYDKVV

SEQ ID NO: 94839 - protein, 27 aa, Artificial Sequence
  Cyclic GFR-binding peptide
SAISVLYLDSSNNVILKNYQDEYDKVV

SEQ ID NO: 94840 - protein, 27 aa, Artificial Sequence
  Cyclic GFR-binding peptide
NAISMLYFDEYDKVVLKKYRDEYDKVV

SEQ ID NO: 94841 - protein, 27 aa, Artificial Sequence
  Cyclic GFR-binding peptide
NAISILYFVGRTPKVLKKYRDEYDKVV

SEQ ID NO: 94842 - protein, 27 aa, Artificial Sequence
  Cyclic GFR-binding peptide
SATSMLYYDENEKVVLRKHRDEYDKVV

SEQ ID NO: 94843 - protein, 27 aa, Artificial Sequence
  Cyclic GFR-binding peptide
SPISILYKIGKTPKILKYHYDEYDKVV

SEQ ID NO: 94844 - protein, 29 aa, Artificial Sequence
  Cyclic GFR-binding peptide
NAISVLYFEIVRKKPIFLKKYRDEYDKVV

SEQ ID NO: 94845 - protein, 27 aa, Artificial Sequence
  Cyclic GFR-binding peptide
SPISMLYKDENEKVVLKYHYDEYDKVV

SEQ ID NO: 94846 - protein, 27 aa, Artificial Sequence
  Cyclic GFR-binding peptide
SATSILYYVGRKPKVLRKHRDEYDKVV

SEQ ID NO: 94847 - protein, 27 aa, Artificial Sequence
  Cyclic GFR-binding peptide
SPISILYKVGRKPKVLKYHYDEYDKVV

SEQ ID NO: 94848 - protein, 29 aa, Artificial Sequence
  Cyclic GFR-binding peptide
SAISVLYLEIVRKKPIFLKNYQDEYDKVV

SEQ ID NO: 94849 - protein, 27 aa, Artificial Sequence
  Cyclic GFR-binding peptide
SAISILYLVGRTPKVLKNYQDEYDKVV

SEQ ID NO: 94850 - protein, 27 aa, Artificial Sequence
  Cyclic GFR-binding peptide
NAISMLYFDENEKVVLKKYRDEYDKVV

SEQ ID NO: 94851 - protein, 27 aa, Artificial Sequence
  Cyclic GFR-binding peptide
SAISVLYLDDMGVPTLKNYQDEYDKVV

SEQ ID NO: 94852 - protein, 27 aa, Artificial Sequence
  Cyclic GFR-binding peptide
NAISVLYFDDMGVPTLKKYRDEYDKVV

SEQ ID NO: 94853 - protein, 27 aa, Artificial Sequence
  Cyclic GFR-binding peptide
NAISILYFVGRKPKVLKKYRDEYDKVV

SEQ ID NO: 94854 - protein, 27 aa, Artificial Sequence
  Cyclic GFR-binding peptide
SAISMLYLDENEKVVLKNYQDEYDKVV

SEQ ID NO: 94855 - protein, 27 aa, Artificial Sequence
  Cyclic GFR-binding peptide
SPISVLYKDDSSNVILKYHYDEYDKVV

SEQ ID NO: 94856 - protein, 27 aa, Artificial Sequence
  Cyclic GFR-binding peptide
SAISILYLVGRKPKVLKNYQDEYDKVV

SEQ ID NO: 94857 - protein, 27 aa, Artificial Sequence
  Cyclic GFR-binding peptide
NAISVLYFDSSNNVILKKYRDEYDKVV

SEQ ID NO: 94858 - protein, 27 aa, Artificial Sequence
  Cyclic GFR-binding peptide
NAISVLYFDDSSNVILKKYRDEYDKVV

SEQ ID NO: 94859 - protein, 27 aa, Artificial Sequence
  Cyclic GFR-binding peptide
SATSILYYVGRTPKVLRKHRDEYDKVV

SEQ ID NO: 94860 - protein, 29 aa, Artificial Sequence
  Cyclic GFR-binding peptide
SPISVLYKEIVRKKPIFLKYHYDEYDKVV

SEQ ID NO: 94861 - protein, 27 aa, Artificial Sequence
  Cyclic GFR-binding peptide
SATSILYYIGKTPKILRKHRDEYDKVV

SEQ ID NO: 94862 - protein, 27 aa, Artificial Sequence
  Cyclic GFR-binding peptide
SATSVLYYDDMGVPTLRKHRDEYDKVV

SEQ ID NO: 94863 - protein, 27 aa, Artificial Sequence
  Cyclic GFR-binding peptide
SPISVLYKDDMGVPTLKYHYDEYDKVV

SEQ ID NO: 94864 - protein, 27 aa, Artificial Sequence
  Cyclic GFR-binding peptide
SPISVLYKDSSNNVILKYHYDEYDKVV

SEQ ID NO: 94865 - protein, 27 aa, Artificial Sequence
  Cyclic GFR-binding peptide
SATSVLYYDSSNNVILRKHRDEYDKVV

SEQ ID NO: 94866 - protein, 27 aa, Artificial Sequence
  Cyclic GFR-binding peptide
SPISILYKVGRTPKVLKYHYDEYDKVV

SEQ ID NO: 94867 - protein, 27 aa, Artificial Sequence
  Cyclic GFR-binding peptide
SATSVLYYDDSSNVILRKHRDEYDKVV

SEQ ID NO: 94868 - protein, 27 aa, Artificial Sequence
  Cyclic GFR-binding peptide
SATSMLYYDEYDKVVLRKHRDEYDKVV

SEQ ID NO: 94869 - protein, 27 aa, Artificial Sequence
  Cyclic GFR-binding peptide
SAISILYLIGKTPKILKNYQDEYDKVV

SEQ ID NO: 94870 - protein, 27 aa, Artificial Sequence
  Cyclic GFR-binding peptide
SAISVLYLDDSSNVILKNYQDEYDKVV

SEQ ID NO: 94871 - protein, 27 aa, Artificial Sequence
  Cyclic GFR-binding peptide
DEYDKVVNSLQEVVKDYEDYYLMTLPE

SEQ ID NO: 94872 - protein, 27 aa, Artificial Sequence
  Cyclic GFR-binding peptide
DEYDKVVNSLQEIKPTKGIYYVIPLPE

SEQ ID NO: 94873 - protein, 27 aa, Artificial Sequence
  Cyclic GFR-binding peptide
DEYDKVVNSLQEVKPKRGVYYLITLPE

SEQ ID NO: 94874 - protein, 27 aa, Artificial Sequence
  Cyclic GFR-binding peptide
DEYDKVVNSLQEVKPTRGVYYVIPLPE

SEQ ID NO: 94875 - protein, 27 aa, Artificial Sequence
  Cyclic GFR-binding peptide
DEYDKVVEYQKYIVNSSDDIFLVSIPS

SEQ ID NO: 94876 - protein, 27 aa, Artificial Sequence
  Cyclic GFR-binding peptide
DEYDKVVEYQKYVKPTRGVIFLISIPS

SEQ ID NO: 94877 - protein, 27 aa, Artificial Sequence
  Cyclic GFR-binding peptide
DEYDKVVNSLQEVVKENEDYYLMTLPE

SEQ ID NO: 94878 - protein, 27 aa, Artificial Sequence
  Cyclic GFR-binding peptide
DEYDKVVNSLQEVVNNASDYYLITLPE

SEQ ID NO: 94879 - protein, 27 aa, Artificial Sequence
  Cyclic GFR-binding peptide
DEYDKVVNSLQEVKPKRGVYYVIPLPE

SEQ ID NO: 94880 - protein, 27 aa, Artificial Sequence
  Cyclic GFR-binding peptide
DEYDKVVNSLQEVVNNASDYYVIPLPE

SEQ ID NO: 94881 - protein, 27 aa, Artificial Sequence
  Cyclic GFR-binding peptide
DEYDKVVNSLQEVKPTRGVYYLITLPE

SEQ ID NO: 94882 - protein, 27 aa, Artificial Sequence
  Cyclic GFR-binding peptide
DEYDKVVEYQKYIKPTKGIIFLISIPS

SEQ ID NO: 94883 - protein, 27 aa, Artificial Sequence
  Cyclic GFR-binding peptide
DEYDKVVEYQKYVVNNASDIFLISIPS

SEQ ID NO: 94884 - protein, 27 aa, Artificial Sequence
  Cyclic GFR-binding peptide
DEYDKVVNSLQEIVNSSDDYYVVPLPE

SEQ ID NO: 94885 - protein, 27 aa, Artificial Sequence
  Cyclic GFR-binding peptide
DEYDKVVNSLQEVVKDYEDYYVMPLPE

SEQ ID NO: 94886 - protein, 27 aa, Artificial Sequence
  Cyclic GFR-binding peptide
DEYDKVVEYQKYVVKENEDIFLMSIPS

SEQ ID NO: 94887 - protein, 27 aa, Artificial Sequence
  Cyclic GFR-binding peptide
DEYDKVVNSLQEVVKENEDYYVMPLPE

SEQ ID NO: 94888 - protein, 27 aa, Artificial Sequence
  Cyclic GFR-binding peptide
DEYDKVVEYQKYVVKDYEDIFLMSIPS

SEQ ID NO: 94889 - protein, 27 aa, Artificial Sequence
  Cyclic GFR-binding peptide
DEYDKVVQYNKLVVNNASDLYLISIAS

SEQ ID NO: 94890 - protein, 27 aa, Artificial Sequence
  Cyclic GFR-binding peptide
DEYDKVVNSLQEIKPTKGIYYLITLPE

SEQ ID NO: 94891 - protein, 27 aa, Artificial Sequence
  Cyclic GFR-binding peptide
DEYDKVVEYQKYVKPKRGVIFLISIPS

SEQ ID NO: 94892 - protein, 27 aa, Artificial Sequence
  Cyclic GFR-binding peptide
DEYDKVVRYKKLVVNNASDFYLISIAN

SEQ ID NO: 94893 - protein, 27 aa, Artificial Sequence
  Cyclic GFR-binding peptide
DEYDKVVNSLQEIVNSSDDYYLVTLPE

SEQ ID NO: 94894 - protein, 27 aa, Artificial Sequence
  Cyclic GFR-binding peptide
EPLTMLYYDEYDKVVEQLSNDEYDKVV

SEQ ID NO: 94895 - protein, 27 aa, Artificial Sequence
  Cyclic GFR-binding peptide
EPLPIVYYIGKTPKIEQLSNDEYDKVV

SEQ ID NO: 94896 - protein, 27 aa, Artificial Sequence
  Cyclic GFR-binding peptide
EPLTILYYVGRKPKVEQLSNDEYDKVV

SEQ ID NO: 94897 - protein, 27 aa, Artificial Sequence
  Cyclic GFR-binding peptide
EPLPIVYYVGRTPKVEQLSNDEYDKVV

SEQ ID NO: 94898 - protein, 27 aa, Artificial Sequence
  Cyclic GFR-binding peptide
SPISVLFIDDSSNVIYKQYEDEYDKVV

SEQ ID NO: 94899 - protein, 27 aa, Artificial Sequence
  Cyclic GFR-binding peptide
SPISILFIVGRTPKVYKQYEDEYDKVV

SEQ ID NO: 94900 - protein, 27 aa, Artificial Sequence
  Cyclic GFR-binding peptide
EPLTMLYYDENEKVVEQLSNDEYDKVV

SEQ ID NO: 94901 - protein, 27 aa, Artificial Sequence
  Cyclic GFR-binding peptide
EPLTILYYDSANNVVEQLSNDEYDKVV

SEQ ID NO: 94902 - protein, 27 aa, Artificial Sequence
  Cyclic GFR-binding peptide
EPLPIVYYVGRKPKVEQLSNDEYDKVV

SEQ ID NO: 94903 - protein, 27 aa, Artificial Sequence
  Cyclic GFR-binding peptide
EPLPIVYYDSANNVVEQLSNDEYDKVV

SEQ ID NO: 94904 - protein, 27 aa, Artificial Sequence
  Cyclic GFR-binding peptide
EPLTILYYVGRTPKVEQLSNDEYDKVV

SEQ ID NO: 94905 - protein, 27 aa, Artificial Sequence
  Cyclic GFR-binding peptide
SPISILFIIGKTPKIYKQYEDEYDKVV

SEQ ID NO: 94906 - protein, 27 aa, Artificial Sequence
  Cyclic GFR-binding peptide
SPISILFIDSANNVVYKQYEDEYDKVV

SEQ ID NO: 94907 - protein, 27 aa, Artificial Sequence
  Cyclic GFR-binding peptide
EPLPVVYYDDSSNVIEQLSNDEYDKVV

SEQ ID NO: 94908 - protein, 27 aa, Artificial Sequence
  Cyclic GFR-binding peptide
EPLPMVYYDEYDKVVEQLSNDEYDKVV

SEQ ID NO: 94909 - protein, 27 aa, Artificial Sequence
  Cyclic GFR-binding peptide
SPISMLFIDENEKVVYKQYEDEYDKVV

SEQ ID NO: 94910 - protein, 27 aa, Artificial Sequence
  Cyclic GFR-binding peptide
EPLPMVYYDENEKVVEQLSNDEYDKVV

SEQ ID NO: 94911 - protein, 27 aa, Artificial Sequence
  Cyclic GFR-binding peptide
SPISMLFIDEYDKVVYKQYEDEYDKVV

SEQ ID NO: 94912 - protein, 27 aa, Artificial Sequence
  Cyclic GFR-binding peptide
SAISILYLDSANNVVLKNYQDEYDKVV

SEQ ID NO: 94913 - protein, 27 aa, Artificial Sequence
  Cyclic GFR-binding peptide
EPLTILYYIGKTPKIEQLSNDEYDKVV

SEQ ID NO: 94914 - protein, 27 aa, Artificial Sequence
  Cyclic GFR-binding peptide
SPISILFIVGRKPKVYKQYEDEYDKVV

SEQ ID NO: 94915 - protein, 27 aa, Artificial Sequence
  Cyclic GFR-binding peptide
NAISILYFDSANNVVLKKYRDEYDKVV

SEQ ID NO: 94916 - protein, 27 aa, Artificial Sequence
  Cyclic GFR-binding peptide
EPLTVLYYDDSSNVIEQLSNDEYDKVV

SEQ ID NO: 94917 - protein, 29 aa, Artificial Sequence
  Cyclic GFR-binding peptide
DEYDKVVVTAKKLKPKKRVYEIKRVQVPR

SEQ ID NO: 94918 - protein, 29 aa, Artificial Sequence
  Cyclic GFR-binding peptide
DEYDKVVVQVEKLKPKKRVYEVKAVKVSR

SEQ ID NO: 94919 - protein, 29 aa, Artificial Sequence
  Cyclic GFR-binding peptide
DEYDKVVVQVEKFIPKKRVIEVKAVKVSR

SEQ ID NO: 94920 - protein, 29 aa, Artificial Sequence
  Cyclic GFR-binding peptide
DEYDKVVVQVEKHQGQHPKIRVKAMKVSR

SEQ ID NO: 94921 - protein, 29 aa, Artificial Sequence
  Cyclic GFR-binding peptide
DEYDKVVVTAKKHQGQHPKIRIKRMQVPR

SEQ ID NO: 94922 - protein, 29 aa, Artificial Sequence
  Cyclic GFR-binding peptide
DEYDKVVSMEGLLKPKKRVYEMIQVTINS

SEQ ID NO: 94923 - protein, 29 aa, Artificial Sequence
  Cyclic GFR-binding peptide
DEYDKVVSMEGIFIPKKRVIEMIQVTINS

SEQ ID NO: 94924 - protein, 29 aa, Artificial Sequence
  Cyclic GFR-binding peptide
DEYDKVVSMEGLHQGQHPKIRMIQMTINS

SEQ ID NO: 94925 - protein, 29 aa, Artificial Sequence
  Cyclic GFR-binding peptide
DEYDKVVSMEGILKPKKRVYEMIQVTINS

SEQ ID NO: 94926 - protein, 29 aa, Artificial Sequence
  Cyclic GFR-binding peptide
DEYDKVVSMEGLFIPKKRVIEMIQVTINS

SEQ ID NO: 94927 - protein, 29 aa, Artificial Sequence
  Cyclic GFR-binding peptide
DEYDKVVVTAKKFIPKKRVIEIKRVQVPR

SEQ ID NO: 94928 - protein, 29 aa, Artificial Sequence
  Cyclic GFR-binding peptide
DEYDKVVSMEGIHQGQHPKIRMIQMTINS

SEQ ID NO: 94929 - protein, 29 aa, Artificial Sequence
  Cyclic GFR-binding peptide
RPVQVRKIEYVRKKPKLKKATVDEYDKVV

SEQ ID NO: 94930 - protein, 29 aa, Artificial Sequence
  Cyclic GFR-binding peptide
RSVKVAKVEYVRKKPKLKEVQVDEYDKVV

SEQ ID NO: 94931 - protein, 29 aa, Artificial Sequence
  Cyclic GFR-binding peptide
RSVKVAKVEIVRKKPIFKEVQVDEYDKVV

SEQ ID NO: 94932 - protein, 29 aa, Artificial Sequence
  Cyclic GFR-binding peptide
RSVKMAKVRIKPHQGQHKEVQVDEYDKVV

SEQ ID NO: 94933 - protein, 29 aa, Artificial Sequence
  Cyclic GFR-binding peptide
RPVQMRKIRIKPHQGQHKKATVDEYDKVV

SEQ ID NO: 94934 - protein, 29 aa, Artificial Sequence
  Cyclic GFR-binding peptide
SNITVQIMEYVRKKPKLLGEMSDEYDKVV

SEQ ID NO: 94935 - protein, 29 aa, Artificial Sequence
  Cyclic GFR-binding peptide
SNITVQIMEIVRKKPIFIGEMSDEYDKVV

SEQ ID NO: 94936 - protein, 29 aa, Artificial Sequence
  Cyclic GFR-binding peptide
SNITMQIMRIKPHQGQHLGEMSDEYDKVV

SEQ ID NO: 94937 - protein, 29 aa, Artificial Sequence
  Cyclic GFR-binding peptide
SNITVQIMEYVRKKPKLIGEMSDEYDKVV

SEQ ID NO: 94938 - protein, 29 aa, Artificial Sequence
  Cyclic GFR-binding peptide
SNITVQIMEIVRKKPIFLGEMSDEYDKVV

SEQ ID NO: 94939 - protein, 29 aa, Artificial Sequence
  Cyclic GFR-binding peptide
RPVQVRKIEIVRKKPIFKKATVDEYDKVV

SEQ ID NO: 94940 - protein, 29 aa, Artificial Sequence
  Cyclic GFR-binding peptide
SNITMQIMRIKPHQGQHIGEMSDEYDKVV

SEQ ID NO: 94941 - protein, 27 aa, Artificial Sequence
  Cyclic GFR-binding peptide
DEYDKVVEYKFKVKPTRGVLYLISIPE

SEQ ID NO: 94942 - protein, 27 aa, Artificial Sequence
  Cyclic GFR-binding peptide
DEYDKVVEYKFKTPVGMDDLYLVSIPE

SEQ ID NO: 94943 - protein, 27 aa, Artificial Sequence
  Cyclic GFR-binding peptide
DEYDKVVEYQKYVKPKRGVIYLISIPS

SEQ ID NO: 94944 - protein, 27 aa, Artificial Sequence
  Cyclic GFR-binding peptide
DEYDKVVEYQKYVVKDYEDIYLMSIPS

SEQ ID NO: 94945 - protein, 27 aa, Artificial Sequence
  Cyclic GFR-binding peptide
DEYDKVVEYKFKIKPTKGILYLISIPE

SEQ ID NO: 94946 - protein, 27 aa, Artificial Sequence
  Cyclic GFR-binding peptide
DEYDKVVYHYKLYTVVGKDKYLISIPS

SEQ ID NO: 94947 - protein, 27 aa, Artificial Sequence
  Cyclic GFR-binding peptide
DEYDKVVRYKKLYTVVGKDFYLISIAN

SEQ ID NO: 94948 - protein, 27 aa, Artificial Sequence
  Cyclic GFR-binding peptide
DEYDKVVEYQKYVVNNAADIYLISIPS

SEQ ID NO: 94949 - protein, 27 aa, Artificial Sequence
  Cyclic GFR-binding peptide
DEYDKVVEYQKYVKPTRGVIYLISIPS

SEQ ID NO: 94950 - protein, 27 aa, Artificial Sequence
  Cyclic GFR-binding peptide
DEYDKVVEYQKYTPVGMDDIYLVSIPS

SEQ ID NO: 94951 - protein, 27 aa, Artificial Sequence
  Cyclic GFR-binding peptide
DEYDKVVEYKFKVVKDYEDLYLMSIPE

SEQ ID NO: 94952 - protein, 27 aa, Artificial Sequence
  Cyclic GFR-binding peptide
DEYDKVVEYKFKVVNNAADLYLISIPE

SEQ ID NO: 94953 - protein, 27 aa, Artificial Sequence
  Cyclic GFR-binding peptide
DEYDKVVEYQKYVVKENEDIYLMSIPS

SEQ ID NO: 94954 - protein, 27 aa, Artificial Sequence
  Cyclic GFR-binding peptide
DEYDKVVEYQKYIKPTKGIIYLISIPS

SEQ ID NO: 94955 - protein, 27 aa, Artificial Sequence
  Cyclic GFR-binding peptide
DEYDKVVRYKKLVVNNAADFYLISIAN

SEQ ID NO: 94956 - protein, 27 aa, Artificial Sequence
  Cyclic GFR-binding peptide
DEYDKVVYHYKLVVNNAADKYLISIPS

SEQ ID NO: 94957 - protein, 27 aa, Artificial Sequence
  Cyclic GFR-binding peptide
DEYDKVVEYKFKIVNNSSDLYLVSIPE

SEQ ID NO: 94958 - protein, 27 aa, Artificial Sequence
  Cyclic GFR-binding peptide
DEYDKVVEYQKYIVNSSDDIYLVSIPS

SEQ ID NO: 94959 - protein, 27 aa, Artificial Sequence
  Cyclic GFR-binding peptide
DEYDKVVEYKFKIVNSSDDLYLVSIPE

SEQ ID NO: 94960 - protein, 27 aa, Artificial Sequence
  Cyclic GFR-binding peptide
DEYDKVVEYKFKVKPKRGVLYLISIPE

SEQ ID NO: 94961 - protein, 27 aa, Artificial Sequence
  Cyclic GFR-binding peptide
DEYDKVVEYQKYYTVVGKDIYLISIPS

SEQ ID NO: 94962 - protein, 27 aa, Artificial Sequence
  Cyclic GFR-binding peptide
DEYDKVVEYKFKVVKENEDLYLMSIPE

SEQ ID NO: 94963 - protein, 27 aa, Artificial Sequence
  Cyclic GFR-binding peptide
DEYDKVVEYQKYIVNNSSDIYLVSIPS

SEQ ID NO: 94964 - protein, 27 aa, Artificial Sequence
  Cyclic GFR-binding peptide
DEYDKVVEYKFKYTVVGKDLYLISIPE

SEQ ID NO: 94965 - protein, 27 aa, Artificial Sequence
  Cyclic GFR-binding peptide
EPISILYLVGRTPKVKFKYEDEYDKVV

SEQ ID NO: 94966 - protein, 27 aa, Artificial Sequence
  Cyclic GFR-binding peptide
EPISVLYLDDMGVPTKFKYEDEYDKVV

SEQ ID NO: 94967 - protein, 27 aa, Artificial Sequence
  Cyclic GFR-binding peptide
SPISILYIVGRKPKVYKQYEDEYDKVV

SEQ ID NO: 94968 - protein, 27 aa, Artificial Sequence
  Cyclic GFR-binding peptide
SPISMLYIDEYDKVVYKQYEDEYDKVV

SEQ ID NO: 94969 - protein, 27 aa, Artificial Sequence
  Cyclic GFR-binding peptide
EPISILYLIGKTPKIKFKYEDEYDKVV

SEQ ID NO: 94970 - protein, 27 aa, Artificial Sequence
  Cyclic GFR-binding peptide
SPISILYKDKGVVTYLKYHYDEYDKVV

SEQ ID NO: 94971 - protein, 27 aa, Artificial Sequence
  Cyclic GFR-binding peptide
NAISILYFDKGVVTYLKKYRDEYDKVV

SEQ ID NO: 94972 - protein, 27 aa, Artificial Sequence
  Cyclic GFR-binding peptide
SPISILYIDAANNVVYKQYEDEYDKVV

SEQ ID NO: 94973 - protein, 27 aa, Artificial Sequence
  Cyclic GFR-binding peptide
SPISILYIVGRTPKVYKQYEDEYDKVV

SEQ ID NO: 94974 - protein, 27 aa, Artificial Sequence
  Cyclic GFR-binding peptide
SPISVLYIDDMGVPTYKQYEDEYDKVV

SEQ ID NO: 94975 - protein, 27 aa, Artificial Sequence
  Cyclic GFR-binding peptide
EPISMLYLDEYDKVVKFKYEDEYDKVV

SEQ ID NO: 94976 - protein, 27 aa, Artificial Sequence
  Cyclic GFR-binding peptide
EPISILYLDAANNVVKFKYEDEYDKVV

SEQ ID NO: 94977 - protein, 27 aa, Artificial Sequence
  Cyclic GFR-binding peptide
SPISMLYIDENEKVVYKQYEDEYDKVV

SEQ ID NO: 94978 - protein, 27 aa, Artificial Sequence
  Cyclic GFR-binding peptide
SPISILYIIGKTPKIYKQYEDEYDKVV

SEQ ID NO: 94979 - protein, 27 aa, Artificial Sequence
  Cyclic GFR-binding peptide
NAISILYFDAANNVVLKKYRDEYDKVV

SEQ ID NO: 94980 - protein, 27 aa, Artificial Sequence
  Cyclic GFR-binding peptide
SPISILYKDAANNVVLKYHYDEYDKVV

SEQ ID NO: 94981 - protein, 27 aa, Artificial Sequence
  Cyclic GFR-binding peptide
EPISVLYLDSSNNVIKFKYEDEYDKVV

SEQ ID NO: 94982 - protein, 27 aa, Artificial Sequence
  Cyclic GFR-binding peptide
SPISVLYIDDSSNVIYKQYEDEYDKVV

SEQ ID NO: 94983 - protein, 27 aa, Artificial Sequence
  Cyclic GFR-binding peptide
EPISVLYLDDSSNVIKFKYEDEYDKVV

SEQ ID NO: 94984 - protein, 27 aa, Artificial Sequence
  Cyclic GFR-binding peptide
EPISILYLVGRKPKVKFKYEDEYDKVV

SEQ ID NO: 94985 - protein, 27 aa, Artificial Sequence
  Cyclic GFR-binding peptide
SPISILYIDKGVVTYYKQYEDEYDKVV

SEQ ID NO: 94986 - protein, 27 aa, Artificial Sequence
  Cyclic GFR-binding peptide
EPISMLYLDENEKVVKFKYEDEYDKVV

SEQ ID NO: 94987 - protein, 27 aa, Artificial Sequence
  Cyclic GFR-binding peptide
SPISVLYIDSSNNVIYKQYEDEYDKVV

SEQ ID NO: 94988 - protein, 27 aa, Artificial Sequence
  Cyclic GFR-binding peptide
EPISILYLDKGVVTYKFKYEDEYDKVV

SEQ ID NO: 94989 - protein, 27 aa, Artificial Sequence
  Cyclic GFR-binding peptide
DEYDKVVPIKGYIIQQKDNFYLMNIPS

SEQ ID NO: 94990 - protein, 27 aa, Artificial Sequence
  Cyclic GFR-binding peptide
DEYDKVVPIKGYVVKDYEDFYLMNIPS

SEQ ID NO: 94991 - protein, 27 aa, Artificial Sequence
  Cyclic GFR-binding peptide
DEYDKVVPIKGYIVNSSDDFYLVNIPS

SEQ ID NO: 94992 - protein, 27 aa, Artificial Sequence
  Cyclic GFR-binding peptide
DEYDKVVPIKGYVVNNAADFYLINIPS

SEQ ID NO: 94993 - protein, 27 aa, Artificial Sequence
  Cyclic GFR-binding peptide
DEYDKVVPIKGYYTVVGKDFYLINIPS

SEQ ID NO: 94994 - protein, 27 aa, Artificial Sequence
  Cyclic GFR-binding peptide
DEYDKVVPIKGYLLVRGNDFYLMNIPS

SEQ ID NO: 94995 - protein, 27 aa, Artificial Sequence
  Cyclic GFR-binding peptide
DEYDKVVPIKGYVVKENEDFYLMNIPS

SEQ ID NO: 94996 - protein, 27 aa, Artificial Sequence
  Cyclic GFR-binding peptide
DEYDKVVPIKGYVVNNASDFYLINIPS

SEQ ID NO: 94997 - protein, 27 aa, Artificial Sequence
  Cyclic GFR-binding peptide
DEYDKVVPIKGYTPVGMDDFYLVNIPS

SEQ ID NO: 94998 - protein, 27 aa, Artificial Sequence
  Cyclic GFR-binding peptide
DEYDKVVPIKGYIVNNSSDFYLVNIPS

SEQ ID NO: 94999 - protein, 27 aa, Artificial Sequence
  Cyclic GFR-binding peptide
SPINMLYFNDKQQIIYGKIPDEYDKVV

SEQ ID NO: 95000 - protein, 27 aa, Artificial Sequence
  Cyclic GFR-binding peptide
SPINMLYFDEYDKVVYGKIPDEYDKVV

SEQ ID NO: 95001 - protein, 27 aa, Artificial Sequence
  Cyclic GFR-binding peptide
SPINVLYFDDSSNVIYGKIPDEYDKVV

SEQ ID NO: 95002 - protein, 27 aa, Artificial Sequence
  Cyclic GFR-binding peptide
SPINILYFDAANNVVYGKIPDEYDKVV

SEQ ID NO: 95003 - protein, 27 aa, Artificial Sequence
  Cyclic GFR-binding peptide
SPINILYFDKGVVTYYGKIPDEYDKVV

SEQ ID NO: 95004 - protein, 27 aa, Artificial Sequence
  Cyclic GFR-binding peptide
SPINMLYFDNGRVLLYGKIPDEYDKVV

SEQ ID NO: 95005 - protein, 27 aa, Artificial Sequence
  Cyclic GFR-binding peptide
SPINMLYFDENEKVVYGKIPDEYDKVV

SEQ ID NO: 95006 - protein, 27 aa, Artificial Sequence
  Cyclic GFR-binding peptide
SPINILYFDSANNVVYGKIPDEYDKVV

SEQ ID NO: 95007 - protein, 27 aa, Artificial Sequence
  Cyclic GFR-binding peptide
SPINVLYFDDMGVPTYGKIPDEYDKVV

SEQ ID NO: 95008 - protein, 27 aa, Artificial Sequence
  Cyclic GFR-binding peptide
SPINVLYFDSSNNVIYGKIPDEYDKVV

SEQ ID NO: 95009 - protein, 27 aa, Artificial Sequence
  Cyclic GFR-binding peptide
DEYDKVVEYQKYVVNNASDIYLISIPS

SEQ ID NO: 95010 - protein, 27 aa, Artificial Sequence
  Cyclic GFR-binding peptide
DEYDKVVEYQKYIIQQKDNIYLMSIPS

SEQ ID NO: 95011 - protein, 27 aa, Artificial Sequence
  Cyclic GFR-binding peptide
DEYDKVVEYQKYLLVRGNDIYLMSIPS

SEQ ID NO: 95012 - protein, 27 aa, Artificial Sequence
  Cyclic GFR-binding peptide
SPISILYIDSANNVVYKQYEDEYDKVV

SEQ ID NO: 95013 - protein, 27 aa, Artificial Sequence
  Cyclic GFR-binding peptide
SPISMLYINDKQQIIYKQYEDEYDKVV

SEQ ID NO: 95014 - protein, 27 aa, Artificial Sequence
  Cyclic GFR-binding peptide
SPISMLYIDNGRVLLYKQYEDEYDKVV

SEQ ID NO: 95015 - protein, 27 aa, Artificial Sequence
  Cyclic GFR-binding peptide
DEYDKVVPYVKLYTVVGKDFFLISLSS

SEQ ID NO: 95016 - protein, 27 aa, Artificial Sequence
  Cyclic GFR-binding peptide
DEYDKVVPYVKLIKPTKGIFFLISLSS

SEQ ID NO: 95017 - protein, 27 aa, Artificial Sequence
  Cyclic GFR-binding peptide
DEYDKVVPYVKLIIQQKDNFFLMSLSS

SEQ ID NO: 95018 - protein, 27 aa, Artificial Sequence
  Cyclic GFR-binding peptide
DEYDKVVPYVKLIVNSSDDFFLVSLSS

SEQ ID NO: 95019 - protein, 27 aa, Artificial Sequence
  Cyclic GFR-binding peptide
DEYDKVVPYVKLVKPKRGVFFLISLSS

SEQ ID NO: 95020 - protein, 27 aa, Artificial Sequence
  Cyclic GFR-binding peptide
DEYDKVVPYVKLVKPTRGVFFLISLSS

SEQ ID NO: 95021 - protein, 27 aa, Artificial Sequence
  Cyclic GFR-binding peptide
DEYDKVVPYVKLTPVGMDDFFLVSLSS

SEQ ID NO: 95022 - protein, 29 aa, Artificial Sequence
  Cyclic GFR-binding peptide
DEYDKVVPYVKLHQGQHPKIRFFLMSLSS

SEQ ID NO: 95023 - protein, 27 aa, Artificial Sequence
  Cyclic GFR-binding peptide
DEYDKVVPYVKLVVNKNEDFFLISLSS

SEQ ID NO: 95024 - protein, 27 aa, Artificial Sequence
  Cyclic GFR-binding peptide
DEYDKVVPYVKLVVNNASDFFLISLSS

SEQ ID NO: 95025 - protein, 27 aa, Artificial Sequence
  Cyclic GFR-binding peptide
DEYDKVVPYVKLVVKENEDFFLMSLSS

SEQ ID NO: 95026 - protein, 27 aa, Artificial Sequence
  Cyclic GFR-binding peptide
DEYDKVVPYVKLIVNNSSDFFLVSLSS

SEQ ID NO: 95027 - protein, 29 aa, Artificial Sequence
  Cyclic GFR-binding peptide
DEYDKVVPYVKLLKPKKRVYEFFLVSLSS

SEQ ID NO: 95028 - protein, 27 aa, Artificial Sequence
  Cyclic GFR-binding peptide
DEYDKVVPYVKLLLVRGNDFFLMSLSS

SEQ ID NO: 95029 - protein, 27 aa, Artificial Sequence
  Cyclic GFR-binding peptide
DEYDKVVPYVKLVVKDYEDFFLMSLSS

SEQ ID NO: 95030 - protein, 27 aa, Artificial Sequence
  Cyclic GFR-binding peptide
DEYDKVVPYVKLVVNNAADFFLISLSS

SEQ ID NO: 95031 - protein, 27 aa, Artificial Sequence
  Cyclic GFR-binding peptide
SSLSILFFDKGVVTYLKVYPDEYDKVV

SEQ ID NO: 95032 - protein, 27 aa, Artificial Sequence
  Cyclic GFR-binding peptide
SSLSILFFIGKTPKILKVYPDEYDKVV

SEQ ID NO: 95033 - protein, 27 aa, Artificial Sequence
  Cyclic GFR-binding peptide
SSLSMLFFNDKQQIILKVYPDEYDKVV

SEQ ID NO: 95034 - protein, 27 aa, Artificial Sequence
  Cyclic GFR-binding peptide
SSLSVLFFDDSSNVILKVYPDEYDKVV

SEQ ID NO: 95035 - protein, 27 aa, Artificial Sequence
  Cyclic GFR-binding peptide
SSLSILFFVGRKPKVLKVYPDEYDKVV

SEQ ID NO: 95036 - protein, 27 aa, Artificial Sequence
  Cyclic GFR-binding peptide
SSLSILFFVGRTPKVLKVYPDEYDKVV

SEQ ID NO: 95037 - protein, 27 aa, Artificial Sequence
  Cyclic GFR-binding peptide
SSLSVLFFDDMGVPTLKVYPDEYDKVV

SEQ ID NO: 95038 - protein, 29 aa, Artificial Sequence
  Cyclic GFR-binding peptide
SSLSMLFFRIKPHQGQHLKVYPDEYDKVV

SEQ ID NO: 95039 - protein, 27 aa, Artificial Sequence
  Cyclic GFR-binding peptide
SSLSILFFDENKNVVLKVYPDEYDKVV

SEQ ID NO: 95040 - protein, 27 aa, Artificial Sequence
  Cyclic GFR-binding peptide
SSLSILFFDSANNVVLKVYPDEYDKVV

SEQ ID NO: 95041 - protein, 27 aa, Artificial Sequence
  Cyclic GFR-binding peptide
SSLSMLFFDENEKVVLKVYPDEYDKVV

SEQ ID NO: 95042 - protein, 27 aa, Artificial Sequence
  Cyclic GFR-binding peptide
SSLSVLFFDSSNNVILKVYPDEYDKVV

SEQ ID NO: 95043 - protein, 29 aa, Artificial Sequence
  Cyclic GFR-binding peptide
SSLSVLFFEYVRKKPKLLKVYPDEYDKVV

SEQ ID NO: 95044 - protein, 27 aa, Artificial Sequence
  Cyclic GFR-binding peptide
SSLSMLFFDNGRVLLLKVYPDEYDKVV

SEQ ID NO: 95045 - protein, 27 aa, Artificial Sequence
  Cyclic GFR-binding peptide
SSLSMLFFDEYDKVVLKVYPDEYDKVV

SEQ ID NO: 95046 - protein, 27 aa, Artificial Sequence
  Cyclic GFR-binding peptide
SSLSILFFDAANNVVLKVYPDEYDKVV

SEQ ID NO: 95047 - protein, 27 aa, Artificial Sequence
  Cyclic GFR-binding peptide
DEYDKVVSMEGIIVNSSDDMIQVTINS

SEQ ID NO: 95048 - protein, 27 aa, Artificial Sequence
  Cyclic GFR-binding peptide
DEYDKVVVTAKKVVKENEDIKRMQVPR

SEQ ID NO: 95049 - protein, 27 aa, Artificial Sequence
  Cyclic GFR-binding peptide
DEYDKVVSMEGIVVKDYEDMIQMTINS

SEQ ID NO: 95050 - protein, 27 aa, Artificial Sequence
  Cyclic GFR-binding peptide
DEYDKVVVTAKKIKPTKGIIKRIQVPR

SEQ ID NO: 95051 - protein, 27 aa, Artificial Sequence
  Cyclic GFR-binding peptide
DEYDKVVSMEGIVKPTRGVMIQITINS

SEQ ID NO: 95052 - protein, 29 aa, Artificial Sequence
  Cyclic GFR-binding peptide
DEYDKVVNSLQEFIPKKRVIEYYVVPLPE

SEQ ID NO: 95053 - protein, 27 aa, Artificial Sequence
  Cyclic GFR-binding peptide
DEYDKVVVQVEKVKPKRGVVKAIKVSR

SEQ ID NO: 95054 - protein, 27 aa, Artificial Sequence
  Cyclic GFR-binding peptide
DEYDKVVVQVEKVVKENEDVKAMKVSR

SEQ ID NO: 95055 - protein, 27 aa, Artificial Sequence
  Cyclic GFR-binding peptide
DEYDKVVVTAKKIVNSSDDIKRVQVPR

SEQ ID NO: 95056 - protein, 27 aa, Artificial Sequence
  Cyclic GFR-binding peptide
DEYDKVVVQVEKIKPTKGIVKAIKVSR

SEQ ID NO: 95057 - protein, 29 aa, Artificial Sequence
  Cyclic GFR-binding peptide
DEYDKVVNSLQEFIPKKRVIEYYLVTLPE

SEQ ID NO: 95058 - protein, 27 aa, Artificial Sequence
  Cyclic GFR-binding peptide
DEYDKVVVQVEKIVNSSDDVKAVKVSR

SEQ ID NO: 95059 - protein, 27 aa, Artificial Sequence
  Cyclic GFR-binding peptide
DEYDKVVVTAKKVKPKRGVIKRIQVPR

SEQ ID NO: 95060 - protein, 27 aa, Artificial Sequence
  Cyclic GFR-binding peptide
DEYDKVVVQVEKVKPTRGVVKAIKVSR

SEQ ID NO: 95061 - protein, 27 aa, Artificial Sequence
  Cyclic GFR-binding peptide
DEYDKVVVTAKKVKPTRGVIKRIQVPR

SEQ ID NO: 95062 - protein, 29 aa, Artificial Sequence
  Cyclic GFR-binding peptide
DEYDKVVNSLQELKPKKRVYEYYLVTLPE

SEQ ID NO: 95063 - protein, 27 aa, Artificial Sequence
  Cyclic GFR-binding peptide
DEYDKVVSMEGIVKPKRGVMIQITINS

SEQ ID NO: 95064 - protein, 27 aa, Artificial Sequence
  Cyclic GFR-binding peptide
DEYDKVVSMEGIVVKENEDMIQMTINS

SEQ ID NO: 95065 - protein, 27 aa, Artificial Sequence
  Cyclic GFR-binding peptide
DEYDKVVSMEGIIKPTKGIMIQITINS

SEQ ID NO: 95066 - protein, 29 aa, Artificial Sequence
  Cyclic GFR-binding peptide
DEYDKVVNSLQEHQGQHPKIRYYLMTLPE

SEQ ID NO: 95067 - protein, 27 aa, Artificial Sequence
  Cyclic GFR-binding peptide
DEYDKVVVTAKKVVKDYEDIKRMQVPR

SEQ ID NO: 95068 - protein, 29 aa, Artificial Sequence
  Cyclic GFR-binding peptide
DEYDKVVNSLQEHQGQHPKIRYYVMPLPE

SEQ ID NO: 95069 - protein, 29 aa, Artificial Sequence
  Cyclic GFR-binding peptide
DEYDKVVNSLQELKPKKRVYEYYVVPLPE

SEQ ID NO: 95070 - protein, 27 aa, Artificial Sequence
  Cyclic GFR-binding peptide
DEYDKVVVQVEKVVKDYEDVKAMKVSR

SEQ ID NO: 95071 - protein, 27 aa, Artificial Sequence
  Cyclic GFR-binding peptide
SNITVQIMDDSSNVIIGEMSDEYDKVV

SEQ ID NO: 95072 - protein, 27 aa, Artificial Sequence
  Cyclic GFR-binding peptide
RPVQMRKIDENEKVVKKATVDEYDKVV

SEQ ID NO: 95073 - protein, 27 aa, Artificial Sequence
  Cyclic GFR-binding peptide
SNITMQIMDEYDKVVIGEMSDEYDKVV

SEQ ID NO: 95074 - protein, 27 aa, Artificial Sequence
  Cyclic GFR-binding peptide
RPVQIRKIIGKTPKIKKATVDEYDKVV

SEQ ID NO: 95075 - protein, 27 aa, Artificial Sequence
  Cyclic GFR-binding peptide
SNITIQIMVGRTPKVIGEMSDEYDKVV

SEQ ID NO: 95076 - protein, 29 aa, Artificial Sequence
  Cyclic GFR-binding peptide
EPLPVVYYEIVRKKPIFEQLSNDEYDKVV

SEQ ID NO: 95077 - protein, 27 aa, Artificial Sequence
  Cyclic GFR-binding peptide
RSVKIAKVVGRKPKVKEVQVDEYDKVV

SEQ ID NO: 95078 - protein, 27 aa, Artificial Sequence
  Cyclic GFR-binding peptide
RSVKMAKVDENEKVVKEVQVDEYDKVV

SEQ ID NO: 95079 - protein, 27 aa, Artificial Sequence
  Cyclic GFR-binding peptide
RPVQVRKIDDSSNVIKKATVDEYDKVV

SEQ ID NO: 95080 - protein, 27 aa, Artificial Sequence
  Cyclic GFR-binding peptide
RSVKIAKVIGKTPKIKEVQVDEYDKVV

SEQ ID NO: 95081 - protein, 29 aa, Artificial Sequence
  Cyclic GFR-binding peptide
EPLTVLYYEIVRKKPIFEQLSNDEYDKVV

SEQ ID NO: 95082 - protein, 27 aa, Artificial Sequence
  Cyclic GFR-binding peptide
RSVKVAKVDDSSNVIKEVQVDEYDKVV

SEQ ID NO: 95083 - protein, 27 aa, Artificial Sequence
  Cyclic GFR-binding peptide
RPVQIRKIVGRKPKVKKATVDEYDKVV

SEQ ID NO: 95084 - protein, 27 aa, Artificial Sequence
  Cyclic GFR-binding peptide
RSVKIAKVVGRTPKVKEVQVDEYDKVV

SEQ ID NO: 95085 - protein, 27 aa, Artificial Sequence
  Cyclic GFR-binding peptide
RPVQIRKIVGRTPKVKKATVDEYDKVV

SEQ ID NO: 95086 - protein, 29 aa, Artificial Sequence
  Cyclic GFR-binding peptide
EPLTVLYYEYVRKKPKLEQLSNDEYDKVV

SEQ ID NO: 95087 - protein, 27 aa, Artificial Sequence
  Cyclic GFR-binding peptide
SNITIQIMVGRKPKVIGEMSDEYDKVV

SEQ ID NO: 95088 - protein, 27 aa, Artificial Sequence
  Cyclic GFR-binding peptide
SNITMQIMDENEKVVIGEMSDEYDKVV

SEQ ID NO: 95089 - protein, 27 aa, Artificial Sequence
  Cyclic GFR-binding peptide
SNITIQIMIGKTPKIIGEMSDEYDKVV

SEQ ID NO: 95090 - protein, 29 aa, Artificial Sequence
  Cyclic GFR-binding peptide
EPLTMLYYRIKPHQGQHEQLSNDEYDKVV

SEQ ID NO: 95091 - protein, 27 aa, Artificial Sequence
  Cyclic GFR-binding peptide
RPVQMRKIDEYDKVVKKATVDEYDKVV

SEQ ID NO: 95092 - protein, 29 aa, Artificial Sequence
  Cyclic GFR-binding peptide
EPLPMVYYRIKPHQGQHEQLSNDEYDKVV

SEQ ID NO: 95093 - protein, 29 aa, Artificial Sequence
  Cyclic GFR-binding peptide
EPLPVVYYEYVRKKPKLEQLSNDEYDKVV

SEQ ID NO: 95094 - protein, 27 aa, Artificial Sequence
  Cyclic GFR-binding peptide
RSVKMAKVDEYDKVVKEVQVDEYDKVV

SEQ ID NO: 95095 - protein, 27 aa, Artificial Sequence
  Cyclic GFR-binding peptide
DEYDKVVRYKKLIIQQKDNFYLMSIAN

SEQ ID NO: 95096 - protein, 27 aa, Artificial Sequence
  Cyclic GFR-binding peptide
DEYDKVVRYKKLLLVRGNDFYLMSIAN

SEQ ID NO: 95097 - protein, 27 aa, Artificial Sequence
  Cyclic GFR-binding peptide
NAISMLYFNDKQQIILKKYRDEYDKVV

SEQ ID NO: 95098 - protein, 27 aa, Artificial Sequence
  Cyclic GFR-binding peptide
NAISMLYFDNGRVLLLKKYRDEYDKVV

SEQ ID NO: 95099 - protein, 27 aa, Artificial Sequence
  Cyclic GFR-binding peptide
DEYDKVVEYKFKVVNKNEDLYLISIPE

SEQ ID NO: 95100 - protein, 27 aa, Artificial Sequence
  Cyclic GFR-binding peptide
DEYDKVVPIKGYVKPTRGVFYLINIPS

SEQ ID NO: 95101 - protein, 27 aa, Artificial Sequence
  Cyclic GFR-binding peptide
DEYDKVVEYKFKLLVRGNDLYLMSIPE

SEQ ID NO: 95102 - protein, 27 aa, Artificial Sequence
  Cyclic GFR-binding peptide
DEYDKVVYHYKLVVNKNEDKYLISIPS

SEQ ID NO: 95103 - protein, 27 aa, Artificial Sequence
  Cyclic GFR-binding peptide
DEYDKVVRHKRLLLVRGNDYYLMSTAS

SEQ ID NO: 95104 - protein, 27 aa, Artificial Sequence
  Cyclic GFR-binding peptide
DEYDKVVYHYKLLLVRGNDKYLMSIPS

SEQ ID NO: 95105 - protein, 27 aa, Artificial Sequence
  Cyclic GFR-binding peptide
DEYDKVVRHKRLVVNKNEDYYLISTAS

SEQ ID NO: 95106 - protein, 27 aa, Artificial Sequence
  Cyclic GFR-binding peptide
DEYDKVVRYKKLVVNKNEDFYLISIAN

SEQ ID NO: 95107 - protein, 27 aa, Artificial Sequence
  Cyclic GFR-binding peptide
DEYDKVVPIKGYVVNKNEDFYLINIPS

SEQ ID NO: 95108 - protein, 27 aa, Artificial Sequence
  Cyclic GFR-binding peptide
DEYDKVVPIKGYIKPTKGIFYLINIPS

SEQ ID NO: 95109 - protein, 27 aa, Artificial Sequence
  Cyclic GFR-binding peptide
DEYDKVVRHKRLYTVVGKDYYLISTAS

SEQ ID NO: 95110 - protein, 27 aa, Artificial Sequence
  Cyclic GFR-binding peptide
DEYDKVVEYKFKVVNNASDLYLISIPE

SEQ ID NO: 95111 - protein, 27 aa, Artificial Sequence
  Cyclic GFR-binding peptide
DEYDKVVRHKRLIIQQKDNYYLMSTAS

SEQ ID NO: 95112 - protein, 27 aa, Artificial Sequence
  Cyclic GFR-binding peptide
DEYDKVVEYKFKIIQQKDNLYLMSIPE

SEQ ID NO: 95113 - protein, 27 aa, Artificial Sequence
  Cyclic GFR-binding peptide
DEYDKVVPIKGYVKPKRGVFYLINIPS

SEQ ID NO: 95114 - protein, 27 aa, Artificial Sequence
  Cyclic GFR-binding peptide
DEYDKVVRHKRLVVNNASDYYLISTAS

SEQ ID NO: 95115 - protein, 27 aa, Artificial Sequence
  Cyclic GFR-binding peptide
DEYDKVVYHYKLVVNNASDKYLISIPS

SEQ ID NO: 95116 - protein, 27 aa, Artificial Sequence
  Cyclic GFR-binding peptide
DEYDKVVYHYKLIIQQKDNKYLMSIPS

SEQ ID NO: 95117 - protein, 27 aa, Artificial Sequence
  Cyclic GFR-binding peptide
DEYDKVVRHKRLVVNNAADYYLISTAS

SEQ ID NO: 95118 - protein, 27 aa, Artificial Sequence
  Cyclic GFR-binding peptide
EPISILYLDENKNVVKFKYEDEYDKVV

SEQ ID NO: 95119 - protein, 27 aa, Artificial Sequence
  Cyclic GFR-binding peptide
SPINILYFVGRTPKVYGKIPDEYDKVV

SEQ ID NO: 95120 - protein, 27 aa, Artificial Sequence
  Cyclic GFR-binding peptide
EPISMLYLDNGRVLLKFKYEDEYDKVV

SEQ ID NO: 95121 - protein, 27 aa, Artificial Sequence
  Cyclic GFR-binding peptide
SPISILYKDENKNVVLKYHYDEYDKVV

SEQ ID NO: 95122 - protein, 27 aa, Artificial Sequence
  Cyclic GFR-binding peptide
SATSMLYYDNGRVLLLRKHRDEYDKVV

SEQ ID NO: 95123 - protein, 27 aa, Artificial Sequence
  Cyclic GFR-binding peptide
SPISMLYKDNGRVLLLKYHYDEYDKVV

SEQ ID NO: 95124 - protein, 27 aa, Artificial Sequence
  Cyclic GFR-binding peptide
SATSILYYDENKNVVLRKHRDEYDKVV

SEQ ID NO: 95125 - protein, 27 aa, Artificial Sequence
  Cyclic GFR-binding peptide
NAISILYFDENKNVVLKKYRDEYDKVV

SEQ ID NO: 95126 - protein, 27 aa, Artificial Sequence
  Cyclic GFR-binding peptide
SPINILYFDENKNVVYGKIPDEYDKVV

SEQ ID NO: 95127 - protein, 27 aa, Artificial Sequence
  Cyclic GFR-binding peptide
SPINILYFIGKTPKIYGKIPDEYDKVV

SEQ ID NO: 95128 - protein, 27 aa, Artificial Sequence
  Cyclic GFR-binding peptide
SATSILYYDKGVVTYLRKHRDEYDKVV

SEQ ID NO: 95129 - protein, 27 aa, Artificial Sequence
  Cyclic GFR-binding peptide
EPISILYLDSANNVVKFKYEDEYDKVV

SEQ ID NO: 95130 - protein, 27 aa, Artificial Sequence
  Cyclic GFR-binding peptide
SATSMLYYNDKQQIILRKHRDEYDKVV

SEQ ID NO: 95131 - protein, 27 aa, Artificial Sequence
  Cyclic GFR-binding peptide
EPISMLYLNDKQQIIKFKYEDEYDKVV

SEQ ID NO: 95132 - protein, 27 aa, Artificial Sequence
  Cyclic GFR-binding peptide
SPINILYFVGRKPKVYGKIPDEYDKVV

SEQ ID NO: 95133 - protein, 27 aa, Artificial Sequence
  Cyclic GFR-binding peptide
SATSILYYDSANNVVLRKHRDEYDKVV

SEQ ID NO: 95134 - protein, 27 aa, Artificial Sequence
  Cyclic GFR-binding peptide
SPISILYKDSANNVVLKYHYDEYDKVV

SEQ ID NO: 95135 - protein, 27 aa, Artificial Sequence
  Cyclic GFR-binding peptide
SPISMLYKNDKQQIILKYHYDEYDKVV

SEQ ID NO: 95136 - protein, 27 aa, Artificial Sequence
  Cyclic GFR-binding peptide
SATSILYYDAANNVVLRKHRDEYDKVV

SEQ ID NO: 95137 - protein, 27 aa, Artificial Sequence
  Cyclic GFR-binding peptide
DEYDKVVSMEGIIIQQKDNMIQMTINS

SEQ ID NO: 95138 - protein, 27 aa, Artificial Sequence
  Cyclic GFR-binding peptide
DEYDKVVSMEGLVKPKRGVMIQITINS

SEQ ID NO: 95139 - protein, 27 aa, Artificial Sequence
  Cyclic GFR-binding peptide
DEYDKVVSMEGLVVNNASDMIQITINS

SEQ ID NO: 95140 - protein, 27 aa, Artificial Sequence
  Cyclic GFR-binding peptide
DEYDKVVSMEGILLVRGNDMIQMTINS

SEQ ID NO: 95141 - protein, 27 aa, Artificial Sequence
  Cyclic GFR-binding peptide
DEYDKVVSMEGLIKPTKGIMIQITINS

SEQ ID NO: 95142 - protein, 27 aa, Artificial Sequence
  Cyclic GFR-binding peptide
DEYDKVVSMEGLIVNSSDDMIQVTINS

SEQ ID NO: 95143 - protein, 27 aa, Artificial Sequence
  Cyclic GFR-binding peptide
DEYDKVVSMEGIVVNNASDMIQITINS

SEQ ID NO: 95144 - protein, 27 aa, Artificial Sequence
  Cyclic GFR-binding peptide
DEYDKVVSMEGLVVNNAADMIQITINS

SEQ ID NO: 95145 - protein, 27 aa, Artificial Sequence
  Cyclic GFR-binding peptide
DEYDKVVSMEGLLLVRGNDMIQMTINS

SEQ ID NO: 95146 - protein, 27 aa, Artificial Sequence
  Cyclic GFR-binding peptide
DEYDKVVSMEGLIIQQKDNMIQMTINS

SEQ ID NO: 95147 - protein, 27 aa, Artificial Sequence
  Cyclic GFR-binding peptide
DEYDKVVSMEGIVVNNAADMIQITINS

SEQ ID NO: 95148 - protein, 27 aa, Artificial Sequence
  Cyclic GFR-binding peptide
DEYDKVVSMEGLVKPTRGVMIQITINS

SEQ ID NO: 95149 - protein, 27 aa, Artificial Sequence
  Cyclic GFR-binding peptide
SNITMQIMNDKQQIIIGEMSDEYDKVV

SEQ ID NO: 95150 - protein, 27 aa, Artificial Sequence
  Cyclic GFR-binding peptide
SNITIQIMVGRKPKVLGEMSDEYDKVV

SEQ ID NO: 95151 - protein, 27 aa, Artificial Sequence
  Cyclic GFR-binding peptide
SNITIQIMDSANNVVLGEMSDEYDKVV

SEQ ID NO: 95152 - protein, 27 aa, Artificial Sequence
  Cyclic GFR-binding peptide
SNITMQIMDNGRVLLIGEMSDEYDKVV

SEQ ID NO: 95153 - protein, 27 aa, Artificial Sequence
  Cyclic GFR-binding peptide
SNITIQIMIGKTPKILGEMSDEYDKVV

SEQ ID NO: 95154 - protein, 27 aa, Artificial Sequence
  Cyclic GFR-binding peptide
SNITVQIMDDSSNVILGEMSDEYDKVV

SEQ ID NO: 95155 - protein, 27 aa, Artificial Sequence
  Cyclic GFR-binding peptide
SNITIQIMDSANNVVIGEMSDEYDKVV

SEQ ID NO: 95156 - protein, 27 aa, Artificial Sequence
  Cyclic GFR-binding peptide
SNITIQIMDAANNVVLGEMSDEYDKVV

SEQ ID NO: 95157 - protein, 27 aa, Artificial Sequence
  Cyclic GFR-binding peptide
SNITMQIMDNGRVLLLGEMSDEYDKVV

SEQ ID NO: 95158 - protein, 27 aa, Artificial Sequence
  Cyclic GFR-binding peptide
SNITMQIMNDKQQIILGEMSDEYDKVV

SEQ ID NO: 95159 - protein, 27 aa, Artificial Sequence
  Cyclic GFR-binding peptide
SNITIQIMDAANNVVIGEMSDEYDKVV

SEQ ID NO: 95160 - protein, 27 aa, Artificial Sequence
  Cyclic GFR-binding peptide
SNITIQIMVGRTPKVLGEMSDEYDKVV

SEQ ID NO: 95161 - protein, 27 aa, Artificial Sequence
  Cyclic GFR-binding peptide
DEYDKVVQYNKLVVNKNEDLYLISIAS

SEQ ID NO: 95162 - protein, 27 aa, Artificial Sequence
  Cyclic GFR-binding peptide
DEYDKVVQYNKLVVNNAADLYLISIAS

SEQ ID NO: 95163 - protein, 27 aa, Artificial Sequence
  Cyclic GFR-binding peptide
DEYDKVVQYNKLIIQQKDNLYLMSIAS

SEQ ID NO: 95164 - protein, 27 aa, Artificial Sequence
  Cyclic GFR-binding peptide
DEYDKVVQYNKLLLVRGNDLYLMSIAS

SEQ ID NO: 95165 - protein, 27 aa, Artificial Sequence
  Cyclic GFR-binding peptide
DEYDKVVQYNKLYTVVGKDLYLISIAS

SEQ ID NO: 95166 - protein, 27 aa, Artificial Sequence
  Cyclic GFR-binding peptide
SAISILYLDENKNVVLKNYQDEYDKVV

SEQ ID NO: 95167 - protein, 27 aa, Artificial Sequence
  Cyclic GFR-binding peptide
SAISILYLDAANNVVLKNYQDEYDKVV

SEQ ID NO: 95168 - protein, 27 aa, Artificial Sequence
  Cyclic GFR-binding peptide
SAISMLYLNDKQQIILKNYQDEYDKVV

SEQ ID NO: 95169 - protein, 27 aa, Artificial Sequence
  Cyclic GFR-binding peptide
SAISMLYLDNGRVLLLKNYQDEYDKVV

SEQ ID NO: 95170 - protein, 27 aa, Artificial Sequence
  Cyclic GFR-binding peptide
SAISILYLDKGVVTYLKNYQDEYDKVV

SEQ ID NO: 95171 - protein, 27 aa, Artificial Sequence
  Cyclic GFR-binding peptide
DDSSNVIRYKKLIKPTKGIFYLISIAN

SEQ ID NO: 95172 - protein, 29 aa, Artificial Sequence
  Cyclic GFR-binding peptide
DDSSNVIRHKRLFIPKKRVIEYYLVSTAS

SEQ ID NO: 95173 - protein, 27 aa, Artificial Sequence
  Cyclic GFR-binding peptide
DDSSNVIYHYKLVVKDYEDKYLMSIPS

SEQ ID NO: 95174 - protein, 27 aa, Artificial Sequence
  Cyclic GFR-binding peptide
DDSSNVIQYNKLIVNNSSDLYLVSIAS

SEQ ID NO: 95175 - protein, 27 aa, Artificial Sequence
  Cyclic GFR-binding peptide
DDSSNVIRYKKLVVKDYEDFYLMSIAN

SEQ ID NO: 95176 - protein, 27 aa, Artificial Sequence
  Cyclic GFR-binding peptide
DDSSNVIRYKKLVKPTRGVFYLISIAN

SEQ ID NO: 95177 - protein, 27 aa, Artificial Sequence
  Cyclic GFR-binding peptide
DDSSNVIRHKRLVVKENEDYYLMSTAS

SEQ ID NO: 95178 - protein, 27 aa, Artificial Sequence
  Cyclic GFR-binding peptide
DDSSNVIYHYKLIKPTKGIKYLISIPS

SEQ ID NO: 95179 - protein, 29 aa, Artificial Sequence
  Cyclic GFR-binding peptide
DDSSNVIRYKKLFIPKKRVIEFYLVSIAN

SEQ ID NO: 95180 - protein, 27 aa, Artificial Sequence
  Cyclic GFR-binding peptide
DDSSNVIYHYKLVVKENEDKYLMSIPS

SEQ ID NO: 95181 - protein, 27 aa, Artificial Sequence
  Cyclic GFR-binding peptide
DDSSNVIRHKRLVKPKRGVYYLISTAS

SEQ ID NO: 95182 - protein, 27 aa, Artificial Sequence
  Cyclic GFR-binding peptide
DDSSNVIYHYKLVKPKRGVKYLISIPS

SEQ ID NO: 95183 - protein, 29 aa, Artificial Sequence
  Cyclic GFR-binding peptide
DDSSNVIQYNKLFIPKKRVIELYLVSIAS

SEQ ID NO: 95184 - protein, 27 aa, Artificial Sequence
  Cyclic GFR-binding peptide
DDSSNVIQYNKLVKPTRGVLYLISIAS

SEQ ID NO: 95185 - protein, 27 aa, Artificial Sequence
  Cyclic GFR-binding peptide
DDSSNVIRYKKLVVKENEDFYLMSIAN

SEQ ID NO: 95186 - protein, 27 aa, Artificial Sequence
  Cyclic GFR-binding peptide
DDSSNVIQYNKLTPVGMDDLYLVSIAS

SEQ ID NO: 95187 - protein, 27 aa, Artificial Sequence
  Cyclic GFR-binding peptide
DDSSNVIRYKKLTPVGMDDFYLVSIAN

SEQ ID NO: 95188 - protein, 27 aa, Artificial Sequence
  Cyclic GFR-binding peptide
DDSSNVIRYKKLVKPKRGVFYLISIAN

SEQ ID NO: 95189 - protein, 27 aa, Artificial Sequence
  Cyclic GFR-binding peptide
DDSSNVIQYNKLVVKENEDLYLMSIAS

SEQ ID NO: 95190 - protein, 27 aa, Artificial Sequence
  Cyclic GFR-binding peptide
DDSSNVIYHYKLIVNSSDDKYLVSIPS

SEQ ID NO: 95191 - protein, 27 aa, Artificial Sequence
  Cyclic GFR-binding peptide
DDSSNVIQYNKLVKPKRGVLYLISIAS

SEQ ID NO: 95192 - protein, 27 aa, Artificial Sequence
  Cyclic GFR-binding peptide
DDSSNVIRYKKLIVNNSSDFYLVSIAN

SEQ ID NO: 95193 - protein, 27 aa, Artificial Sequence
  Cyclic GFR-binding peptide
DDSSNVIRYKKLIVNSSDDFYLVSIAN

SEQ ID NO: 95194 - protein, 27 aa, Artificial Sequence
  Cyclic GFR-binding peptide
DDSSNVIRHKRLVKPTRGVYYLISTAS

SEQ ID NO: 95195 - protein, 29 aa, Artificial Sequence
  Cyclic GFR-binding peptide
DDSSNVIYHYKLFIPKKRVIEKYLVSIPS

SEQ ID NO: 95196 - protein, 27 aa, Artificial Sequence
  Cyclic GFR-binding peptide
DDSSNVIRHKRLIKPTKGIYYLISTAS

SEQ ID NO: 95197 - protein, 27 aa, Artificial Sequence
  Cyclic GFR-binding peptide
DDSSNVIRHKRLTPVGMDDYYLVSTAS

SEQ ID NO: 95198 - protein, 27 aa, Artificial Sequence
  Cyclic GFR-binding peptide
DDSSNVIYHYKLTPVGMDDKYLVSIPS

SEQ ID NO: 95199 - protein, 27 aa, Artificial Sequence
  Cyclic GFR-binding peptide
DDSSNVIYHYKLIVNNSSDKYLVSIPS

SEQ ID NO: 95200 - protein, 27 aa, Artificial Sequence
  Cyclic GFR-binding peptide
DDSSNVIRHKRLIVNNSSDYYLVSTAS

SEQ ID NO: 95201 - protein, 27 aa, Artificial Sequence
  Cyclic GFR-binding peptide
DDSSNVIYHYKLVKPTRGVKYLISIPS

SEQ ID NO: 95202 - protein, 27 aa, Artificial Sequence
  Cyclic GFR-binding peptide
DDSSNVIRHKRLIVNSSDDYYLVSTAS

SEQ ID NO: 95203 - protein, 27 aa, Artificial Sequence
  Cyclic GFR-binding peptide
DDSSNVIRHKRLVVKDYEDYYLMSTAS

SEQ ID NO: 95204 - protein, 27 aa, Artificial Sequence
  Cyclic GFR-binding peptide
DDSSNVIQYNKLIKPTKGILYLISIAS

SEQ ID NO: 95205 - protein, 27 aa, Artificial Sequence
  Cyclic GFR-binding peptide
DDSSNVIQYNKLVVKDYEDLYLMSIAS

SEQ ID NO: 95206 - protein, 27 aa, Artificial Sequence
  Cyclic GFR-binding peptide
DDSSNVIQYNKLIVNSSDDLYLVSIAS

SEQ ID NO: 95207 - protein, 27 aa, Artificial Sequence
  Cyclic GFR-binding peptide
NAISILYFIGKTPKILKKYRDDSSNVI

SEQ ID NO: 95208 - protein, 29 aa, Artificial Sequence
  Cyclic GFR-binding peptide
SATSVLYYEIVRKKPIFLRKHRDDSSNVI

SEQ ID NO: 95209 - protein, 27 aa, Artificial Sequence
  Cyclic GFR-binding peptide
SPISMLYKDEYDKVVLKYHYDDSSNVI

SEQ ID NO: 95210 - protein, 27 aa, Artificial Sequence
  Cyclic GFR-binding peptide
SAISVLYLDSSNNVILKNYQDDSSNVI

SEQ ID NO: 95211 - protein, 27 aa, Artificial Sequence
  Cyclic GFR-binding peptide
NAISMLYFDEYDKVVLKKYRDDSSNVI

SEQ ID NO: 95212 - protein, 27 aa, Artificial Sequence
  Cyclic GFR-binding peptide
NAISILYFVGRTPKVLKKYRDDSSNVI

SEQ ID NO: 95213 - protein, 27 aa, Artificial Sequence
  Cyclic GFR-binding peptide
SATSMLYYDENEKVVLRKHRDDSSNVI

SEQ ID NO: 95214 - protein, 27 aa, Artificial Sequence
  Cyclic GFR-binding peptide
SPISILYKIGKTPKILKYHYDDSSNVI

SEQ ID NO: 95215 - protein, 29 aa, Artificial Sequence
  Cyclic GFR-binding peptide
NAISVLYFEIVRKKPIFLKKYRDDSSNVI

SEQ ID NO: 95216 - protein, 27 aa, Artificial Sequence
  Cyclic GFR-binding peptide
SPISMLYKDENEKVVLKYHYDDSSNVI

SEQ ID NO: 95217 - protein, 27 aa, Artificial Sequence
  Cyclic GFR-binding peptide
SATSILYYVGRKPKVLRKHRDDSSNVI

SEQ ID NO: 95218 - protein, 27 aa, Artificial Sequence
  Cyclic GFR-binding peptide
SPISILYKVGRKPKVLKYHYDDSSNVI

SEQ ID NO: 95219 - protein, 29 aa, Artificial Sequence
  Cyclic GFR-binding peptide
SAISVLYLEIVRKKPIFLKNYQDDSSNVI

SEQ ID NO: 95220 - protein, 27 aa, Artificial Sequence
  Cyclic GFR-binding peptide
SAISILYLVGRTPKVLKNYQDDSSNVI

SEQ ID NO: 95221 - protein, 27 aa, Artificial Sequence
  Cyclic GFR-binding peptide
NAISMLYFDENEKVVLKKYRDDSSNVI

SEQ ID NO: 95222 - protein, 27 aa, Artificial Sequence
  Cyclic GFR-binding peptide
SAISVLYLDDMGVPTLKNYQDDSSNVI

SEQ ID NO: 95223 - protein, 27 aa, Artificial Sequence
  Cyclic GFR-binding peptide
NAISVLYFDDMGVPTLKKYRDDSSNVI

SEQ ID NO: 95224 - protein, 27 aa, Artificial Sequence
  Cyclic GFR-binding peptide
NAISILYFVGRKPKVLKKYRDDSSNVI

SEQ ID NO: 95225 - protein, 27 aa, Artificial Sequence
  Cyclic GFR-binding peptide
SAISMLYLDENEKVVLKNYQDDSSNVI

SEQ ID NO: 95226 - protein, 27 aa, Artificial Sequence
  Cyclic GFR-binding peptide
SPISVLYKDDSSNVILKYHYDDSSNVI

SEQ ID NO: 95227 - protein, 27 aa, Artificial Sequence
  Cyclic GFR-binding peptide
SAISILYLVGRKPKVLKNYQDDSSNVI

SEQ ID NO: 95228 - protein, 27 aa, Artificial Sequence
  Cyclic GFR-binding peptide
NAISVLYFDSSNNVILKKYRDDSSNVI

SEQ ID NO: 95229 - protein, 27 aa, Artificial Sequence
  Cyclic GFR-binding peptide
NAISVLYFDDSSNVILKKYRDDSSNVI

SEQ ID NO: 95230 - protein, 27 aa, Artificial Sequence
  Cyclic GFR-binding peptide
SATSILYYVGRTPKVLRKHRDDSSNVI

SEQ ID NO: 95231 - protein, 29 aa, Artificial Sequence
  Cyclic GFR-binding peptide
SPISVLYKEIVRKKPIFLKYHYDDSSNVI

SEQ ID NO: 95232 - protein, 27 aa, Artificial Sequence
  Cyclic GFR-binding peptide
SATSILYYIGKTPKILRKHRDDSSNVI

SEQ ID NO: 95233 - protein, 27 aa, Artificial Sequence
  Cyclic GFR-binding peptide
SATSVLYYDDMGVPTLRKHRDDSSNVI

SEQ ID NO: 95234 - protein, 27 aa, Artificial Sequence
  Cyclic GFR-binding peptide
SPISVLYKDDMGVPTLKYHYDDSSNVI

SEQ ID NO: 95235 - protein, 27 aa, Artificial Sequence
  Cyclic GFR-binding peptide
SPISVLYKDSSNNVILKYHYDDSSNVI

SEQ ID NO: 95236 - protein, 27 aa, Artificial Sequence
  Cyclic GFR-binding peptide
SATSVLYYDSSNNVILRKHRDDSSNVI

SEQ ID NO: 95237 - protein, 27 aa, Artificial Sequence
  Cyclic GFR-binding peptide
SPISILYKVGRTPKVLKYHYDDSSNVI

SEQ ID NO: 95238 - protein, 27 aa, Artificial Sequence
  Cyclic GFR-binding peptide
SATSVLYYDDSSNVILRKHRDDSSNVI

SEQ ID NO: 95239 - protein, 27 aa, Artificial Sequence
  Cyclic GFR-binding peptide
SATSMLYYDEYDKVVLRKHRDDSSNVI

SEQ ID NO: 95240 - protein, 27 aa, Artificial Sequence
  Cyclic GFR-binding peptide
SAISILYLIGKTPKILKNYQDDSSNVI

SEQ ID NO: 95241 - protein, 27 aa, Artificial Sequence
  Cyclic GFR-binding peptide
SAISMLYLDEYDKVVLKNYQDDSSNVI

SEQ ID NO: 95242 - protein, 27 aa, Artificial Sequence
  Cyclic GFR-binding peptide
DDSSNVINSLQEVVKDYEDYYLMTLPE

SEQ ID NO: 95243 - protein, 27 aa, Artificial Sequence
  Cyclic GFR-binding peptide
DDSSNVINSLQEIKPTKGIYYVIPLPE

SEQ ID NO: 95244 - protein, 27 aa, Artificial Sequence
  Cyclic GFR-binding peptide
DDSSNVINSLQEVKPKRGVYYLITLPE

SEQ ID NO: 95245 - protein, 27 aa, Artificial Sequence
  Cyclic GFR-binding peptide
DDSSNVINSLQEVKPTRGVYYVIPLPE

SEQ ID NO: 95246 - protein, 27 aa, Artificial Sequence
  Cyclic GFR-binding peptide
DDSSNVIEYQKYIVNSSDDIFLVSIPS

SEQ ID NO: 95247 - protein, 27 aa, Artificial Sequence
  Cyclic GFR-binding peptide
DDSSNVIEYQKYVKPTRGVIFLISIPS

SEQ ID NO: 95248 - protein, 27 aa, Artificial Sequence
  Cyclic GFR-binding peptide
DDSSNVINSLQEVVKENEDYYLMTLPE

SEQ ID NO: 95249 - protein, 27 aa, Artificial Sequence
  Cyclic GFR-binding peptide
DDSSNVINSLQEVVNNASDYYLITLPE

SEQ ID NO: 95250 - protein, 27 aa, Artificial Sequence
  Cyclic GFR-binding peptide
DDSSNVINSLQEVKPKRGVYYVIPLPE

SEQ ID NO: 95251 - protein, 27 aa, Artificial Sequence
  Cyclic GFR-binding peptide
DDSSNVINSLQEVVNNASDYYVIPLPE

SEQ ID NO: 95252 - protein, 27 aa, Artificial Sequence
  Cyclic GFR-binding peptide
DDSSNVINSLQEVKPTRGVYYLITLPE

SEQ ID NO: 95253 - protein, 27 aa, Artificial Sequence
  Cyclic GFR-binding peptide
DDSSNVIEYQKYIKPTKGIIFLISIPS

SEQ ID NO: 95254 - protein, 27 aa, Artificial Sequence
  Cyclic GFR-binding peptide
DDSSNVIEYQKYVVNNASDIFLISIPS

SEQ ID NO: 95255 - protein, 27 aa, Artificial Sequence
  Cyclic GFR-binding peptide
DDSSNVINSLQEIVNSSDDYYVVPLPE

SEQ ID NO: 95256 - protein, 27 aa, Artificial Sequence
  Cyclic GFR-binding peptide
DDSSNVINSLQEVVKDYEDYYVMPLPE

SEQ ID NO: 95257 - protein, 27 aa, Artificial Sequence
  Cyclic GFR-binding peptide
DDSSNVIEYQKYVVKENEDIFLMSIPS

SEQ ID NO: 95258 - protein, 27 aa, Artificial Sequence
  Cyclic GFR-binding peptide
DDSSNVINSLQEVVKENEDYYVMPLPE

SEQ ID NO: 95259 - protein, 27 aa, Artificial Sequence
  Cyclic GFR-binding peptide
DDSSNVIEYQKYVVKDYEDIFLMSIPS

SEQ ID NO: 95260 - protein, 27 aa, Artificial Sequence
  Cyclic GFR-binding peptide
DDSSNVIQYNKLVVNNASDLYLISIAS

SEQ ID NO: 95261 - protein, 27 aa, Artificial Sequence
  Cyclic GFR-binding peptide
DDSSNVINSLQEIKPTKGIYYLITLPE

SEQ ID NO: 95262 - protein, 27 aa, Artificial Sequence
  Cyclic GFR-binding peptide
DDSSNVIEYQKYVKPKRGVIFLISIPS

SEQ ID NO: 95263 - protein, 27 aa, Artificial Sequence
  Cyclic GFR-binding peptide
DDSSNVIRYKKLVVNNASDFYLISIAN

SEQ ID NO: 95264 - protein, 27 aa, Artificial Sequence
  Cyclic GFR-binding peptide
DDSSNVINSLQEIVNSSDDYYLVTLPE

SEQ ID NO: 95265 - protein, 27 aa, Artificial Sequence
  Cyclic GFR-binding peptide
EPLTMLYYDEYDKVVEQLSNDDSSNVI

SEQ ID NO: 95266 - protein, 27 aa, Artificial Sequence
  Cyclic GFR-binding peptide
EPLPIVYYIGKTPKIEQLSNDDSSNVI

SEQ ID NO: 95267 - protein, 27 aa, Artificial Sequence
  Cyclic GFR-binding peptide
EPLTILYYVGRKPKVEQLSNDDSSNVI

SEQ ID NO: 95268 - protein, 27 aa, Artificial Sequence
  Cyclic GFR-binding peptide
EPLPIVYYVGRTPKVEQLSNDDSSNVI

SEQ ID NO: 95269 - protein, 27 aa, Artificial Sequence
  Cyclic GFR-binding peptide
SPISVLFIDDSSNVIYKQYEDDSSNVI

SEQ ID NO: 95270 - protein, 27 aa, Artificial Sequence
  Cyclic GFR-binding peptide
SPISILFIVGRTPKVYKQYEDDSSNVI

SEQ ID NO: 95271 - protein, 27 aa, Artificial Sequence
  Cyclic GFR-binding peptide
EPLTMLYYDENEKVVEQLSNDDSSNVI

SEQ ID NO: 95272 - protein, 27 aa, Artificial Sequence
  Cyclic GFR-binding peptide
EPLTILYYDSANNVVEQLSNDDSSNVI

SEQ ID NO: 95273 - protein, 27 aa, Artificial Sequence
  Cyclic GFR-binding peptide
EPLPIVYYVGRKPKVEQLSNDDSSNVI

SEQ ID NO: 95274 - protein, 27 aa, Artificial Sequence
  Cyclic GFR-binding peptide
EPLPIVYYDSANNVVEQLSNDDSSNVI

SEQ ID NO: 95275 - protein, 27 aa, Artificial Sequence
  Cyclic GFR-binding peptide
EPLTILYYVGRTPKVEQLSNDDSSNVI

SEQ ID NO: 95276 - protein, 27 aa, Artificial Sequence
  Cyclic GFR-binding peptide
SPISILFIIGKTPKIYKQYEDDSSNVI

SEQ ID NO: 95277 - protein, 27 aa, Artificial Sequence
  Cyclic GFR-binding peptide
SPISILFIDSANNVVYKQYEDDSSNVI

SEQ ID NO: 95278 - protein, 27 aa, Artificial Sequence
  Cyclic GFR-binding peptide
EPLPVVYYDDSSNVIEQLSNDDSSNVI

SEQ ID NO: 95279 - protein, 27 aa, Artificial Sequence
  Cyclic GFR-binding peptide
EPLPMVYYDEYDKVVEQLSNDDSSNVI

SEQ ID NO: 95280 - protein, 27 aa, Artificial Sequence
  Cyclic GFR-binding peptide
SPISMLFIDENEKVVYKQYEDDSSNVI

SEQ ID NO: 95281 - protein, 27 aa, Artificial Sequence
  Cyclic GFR-binding peptide
EPLPMVYYDENEKVVEQLSNDDSSNVI

SEQ ID NO: 95282 - protein, 27 aa, Artificial Sequence
  Cyclic GFR-binding peptide
SPISMLFIDEYDKVVYKQYEDDSSNVI

SEQ ID NO: 95283 - protein, 27 aa, Artificial Sequence
  Cyclic GFR-binding peptide
SAISILYLDSANNVVLKNYQDDSSNVI

SEQ ID NO: 95284 - protein, 27 aa, Artificial Sequence
  Cyclic GFR-binding peptide
EPLTILYYIGKTPKIEQLSNDDSSNVI

SEQ ID NO: 95285 - protein, 27 aa, Artificial Sequence
  Cyclic GFR-binding peptide
SPISILFIVGRKPKVYKQYEDDSSNVI

SEQ ID NO: 95286 - protein, 27 aa, Artificial Sequence
  Cyclic GFR-binding peptide
NAISILYFDSANNVVLKKYRDDSSNVI

SEQ ID NO: 95287 - protein, 27 aa, Artificial Sequence
  Cyclic GFR-binding peptide
EPLTVLYYDDSSNVIEQLSNDDSSNVI

SEQ ID NO: 95288 - protein, 29 aa, Artificial Sequence
  Cyclic GFR-binding peptide
DDSSNVIVTAKKLKPKKRVYEIKRVQVPR

SEQ ID NO: 95289 - protein, 29 aa, Artificial Sequence
  Cyclic GFR-binding peptide
DDSSNVIVQVEKLKPKKRVYEVKAVKVSR

SEQ ID NO: 95290 - protein, 29 aa, Artificial Sequence
  Cyclic GFR-binding peptide
DDSSNVIVQVEKFIPKKRVIEVKAVKVSR

SEQ ID NO: 95291 - protein, 29 aa, Artificial Sequence
  Cyclic GFR-binding peptide
DDSSNVIVQVEKHQGQHPKIRVKAMKVSR

SEQ ID NO: 95292 - protein, 29 aa, Artificial Sequence
  Cyclic GFR-binding peptide
DDSSNVIVTAKKHQGQHPKIRIKRMQVPR

SEQ ID NO: 95293 - protein, 29 aa, Artificial Sequence
  Cyclic GFR-binding peptide
DDSSNVISMEGLLKPKKRVYEMIQVTINS

SEQ ID NO: 95294 - protein, 29 aa, Artificial Sequence
  Cyclic GFR-binding peptide
DDSSNVISMEGIFIPKKRVIEMIQVTINS

SEQ ID NO: 95295 - protein, 29 aa, Artificial Sequence
  Cyclic GFR-binding peptide
DDSSNVISMEGLHQGQHPKIRMIQMTINS

SEQ ID NO: 95296 - protein, 29 aa, Artificial Sequence
  Cyclic GFR-binding peptide
DDSSNVISMEGILKPKKRVYEMIQVTINS

SEQ ID NO: 95297 - protein, 29 aa, Artificial Sequence
  Cyclic GFR-binding peptide
DDSSNVISMEGLFIPKKRVIEMIQVTINS

SEQ ID NO: 95298 - protein, 29 aa, Artificial Sequence
  Cyclic GFR-binding peptide
DDSSNVIVTAKKFIPKKRVIEIKRVQVPR

SEQ ID NO: 95299 - protein, 29 aa, Artificial Sequence
  Cyclic GFR-binding peptide
DDSSNVISMEGIHQGQHPKIRMIQMTINS

SEQ ID NO: 95300 - protein, 29 aa, Artificial Sequence
  Cyclic GFR-binding peptide
RPVQVRKIEYVRKKPKLKKATVDDSSNVI

SEQ ID NO: 95301 - protein, 29 aa, Artificial Sequence
  Cyclic GFR-binding peptide
RSVKVAKVEYVRKKPKLKEVQVDDSSNVI

SEQ ID NO: 95302 - protein, 29 aa, Artificial Sequence
  Cyclic GFR-binding peptide
RSVKVAKVEIVRKKPIFKEVQVDDSSNVI

SEQ ID NO: 95303 - protein, 29 aa, Artificial Sequence
  Cyclic GFR-binding peptide
RSVKMAKVRIKPHQGQHKEVQVDDSSNVI

SEQ ID NO: 95304 - protein, 29 aa, Artificial Sequence
  Cyclic GFR-binding peptide
RPVQMRKIRIKPHQGQHKKATVDDSSNVI

SEQ ID NO: 95305 - protein, 29 aa, Artificial Sequence
  Cyclic GFR-binding peptide
SNITVQIMEYVRKKPKLLGEMSDDSSNVI

SEQ ID NO: 95306 - protein, 29 aa, Artificial Sequence
  Cyclic GFR-binding peptide
SNITVQIMEIVRKKPIFIGEMSDDSSNVI

SEQ ID NO: 95307 - protein, 29 aa, Artificial Sequence
  Cyclic GFR-binding peptide
SNITMQIMRIKPHQGQHLGEMSDDSSNVI

SEQ ID NO: 95308 - protein, 29 aa, Artificial Sequence
  Cyclic GFR-binding peptide
SNITVQIMEYVRKKPKLIGEMSDDSSNVI

SEQ ID NO: 95309 - protein, 29 aa, Artificial Sequence
  Cyclic GFR-binding peptide
SNITVQIMEIVRKKPIFLGEMSDDSSNVI

SEQ ID NO: 95310 - protein, 29 aa, Artificial Sequence
  Cyclic GFR-binding peptide
RPVQVRKIEIVRKKPIFKKATVDDSSNVI

SEQ ID NO: 95311 - protein, 29 aa, Artificial Sequence
  Cyclic GFR-binding peptide
SNITMQIMRIKPHQGQHIGEMSDDSSNVI

SEQ ID NO: 95312 - protein, 27 aa, Artificial Sequence
  Cyclic GFR-binding peptide
DDSSNVIEYKFKVKPTRGVLYLISIPE

SEQ ID NO: 95313 - protein, 27 aa, Artificial Sequence
  Cyclic GFR-binding peptide
DDSSNVIEYKFKTPVGMDDLYLVSIPE

SEQ ID NO: 95314 - protein, 27 aa, Artificial Sequence
  Cyclic GFR-binding peptide
DDSSNVIEYQKYVKPKRGVIYLISIPS

SEQ ID NO: 95315 - protein, 27 aa, Artificial Sequence
  Cyclic GFR-binding peptide
DDSSNVIEYQKYVVKDYEDIYLMSIPS

SEQ ID NO: 95316 - protein, 27 aa, Artificial Sequence
  Cyclic GFR-binding peptide
DDSSNVIEYKFKIKPTKGILYLISIPE

SEQ ID NO: 95317 - protein, 27 aa, Artificial Sequence
  Cyclic GFR-binding peptide
DDSSNVIYHYKLYTVVGKDKYLISIPS

SEQ ID NO: 95318 - protein, 27 aa, Artificial Sequence
  Cyclic GFR-binding peptide
DDSSNVIRYKKLYTVVGKDFYLISIAN

SEQ ID NO: 95319 - protein, 27 aa, Artificial Sequence
  Cyclic GFR-binding peptide
DDSSNVIEYQKYVVNNAADIYLISIPS

SEQ ID NO: 95320 - protein, 27 aa, Artificial Sequence
  Cyclic GFR-binding peptide
DDSSNVIEYQKYVKPTRGVIYLISIPS

SEQ ID NO: 95321 - protein, 27 aa, Artificial Sequence
  Cyclic GFR-binding peptide
DDSSNVIEYQKYTPVGMDDIYLVSIPS

SEQ ID NO: 95322 - protein, 27 aa, Artificial Sequence
  Cyclic GFR-binding peptide
DDSSNVIEYKFKVVKDYEDLYLMSIPE

SEQ ID NO: 95323 - protein, 27 aa, Artificial Sequence
  Cyclic GFR-binding peptide
DDSSNVIEYKFKVVNNAADLYLISIPE

SEQ ID NO: 95324 - protein, 27 aa, Artificial Sequence
  Cyclic GFR-binding peptide
DDSSNVIEYQKYVVKENEDIYLMSIPS

SEQ ID NO: 95325 - protein, 27 aa, Artificial Sequence
  Cyclic GFR-binding peptide
DDSSNVIEYQKYIKPTKGIIYLISIPS

SEQ ID NO: 95326 - protein, 27 aa, Artificial Sequence
  Cyclic GFR-binding peptide
DDSSNVIRYKKLVVNNAADFYLISIAN

SEQ ID NO: 95327 - protein, 27 aa, Artificial Sequence
  Cyclic GFR-binding peptide
DDSSNVIYHYKLVVNNAADKYLISIPS

SEQ ID NO: 95328 - protein, 27 aa, Artificial Sequence
  Cyclic GFR-binding peptide
DDSSNVIEYKFKIVNNSSDLYLVSIPE

SEQ ID NO: 95329 - protein, 27 aa, Artificial Sequence
  Cyclic GFR-binding peptide
DDSSNVIEYQKYIVNSSDDIYLVSIPS

SEQ ID NO: 95330 - protein, 27 aa, Artificial Sequence
  Cyclic GFR-binding peptide
DDSSNVIEYKFKIVNSSDDLYLVSIPE

SEQ ID NO: 95331 - protein, 27 aa, Artificial Sequence
  Cyclic GFR-binding peptide
DDSSNVIEYKFKVKPKRGVLYLISIPE

SEQ ID NO: 95332 - protein, 27 aa, Artificial Sequence
  Cyclic GFR-binding peptide
DDSSNVIEYQKYYTVVGKDIYLISIPS

SEQ ID NO: 95333 - protein, 27 aa, Artificial Sequence
  Cyclic GFR-binding peptide
DDSSNVIEYKFKVVKENEDLYLMSIPE

SEQ ID NO: 95334 - protein, 27 aa, Artificial Sequence
  Cyclic GFR-binding peptide
DDSSNVIEYQKYIVNNSSDIYLVSIPS

SEQ ID NO: 95335 - protein, 27 aa, Artificial Sequence
  Cyclic GFR-binding peptide
DDSSNVIEYKFKYTVVGKDLYLISIPE

SEQ ID NO: 95336 - protein, 27 aa, Artificial Sequence
  Cyclic GFR-binding peptide
EPISILYLVGRTPKVKFKYEDDSSNVI

SEQ ID NO: 95337 - protein, 27 aa, Artificial Sequence
  Cyclic GFR-binding peptide
EPISVLYLDDMGVPTKFKYEDDSSNVI

SEQ ID NO: 95338 - protein, 27 aa, Artificial Sequence
  Cyclic GFR-binding peptide
SPISILYIVGRKPKVYKQYEDDSSNVI

SEQ ID NO: 95339 - protein, 27 aa, Artificial Sequence
  Cyclic GFR-binding peptide
SPISMLYIDEYDKVVYKQYEDDSSNVI

SEQ ID NO: 95340 - protein, 27 aa, Artificial Sequence
  Cyclic GFR-binding peptide
EPISILYLIGKTPKIKFKYEDDSSNVI

SEQ ID NO: 95341 - protein, 27 aa, Artificial Sequence
  Cyclic GFR-binding peptide
SPISILYKDKGVVTYLKYHYDDSSNVI

SEQ ID NO: 95342 - protein, 27 aa, Artificial Sequence
  Cyclic GFR-binding peptide
NAISILYFDKGVVTYLKKYRDDSSNVI

SEQ ID NO: 95343 - protein, 27 aa, Artificial Sequence
  Cyclic GFR-binding peptide
SPISILYIDAANNVVYKQYEDDSSNVI

SEQ ID NO: 95344 - protein, 27 aa, Artificial Sequence
  Cyclic GFR-binding peptide
SPISILYIVGRTPKVYKQYEDDSSNVI

SEQ ID NO: 95345 - protein, 27 aa, Artificial Sequence
  Cyclic GFR-binding peptide
SPISVLYIDDMGVPTYKQYEDDSSNVI

SEQ ID NO: 95346 - protein, 27 aa, Artificial Sequence
  Cyclic GFR-binding peptide
EPISMLYLDEYDKVVKFKYEDDSSNVI

SEQ ID NO: 95347 - protein, 27 aa, Artificial Sequence
  Cyclic GFR-binding peptide
EPISILYLDAANNVVKFKYEDDSSNVI

SEQ ID NO: 95348 - protein, 27 aa, Artificial Sequence
  Cyclic GFR-binding peptide
SPISMLYIDENEKVVYKQYEDDSSNVI

SEQ ID NO: 95349 - protein, 27 aa, Artificial Sequence
  Cyclic GFR-binding peptide
SPISILYIIGKTPKIYKQYEDDSSNVI

SEQ ID NO: 95350 - protein, 27 aa, Artificial Sequence
  Cyclic GFR-binding peptide
NAISILYFDAANNVVLKKYRDDSSNVI

SEQ ID NO: 95351 - protein, 27 aa, Artificial Sequence
  Cyclic GFR-binding peptide
SPISILYKDAANNVVLKYHYDDSSNVI

SEQ ID NO: 95352 - protein, 27 aa, Artificial Sequence
  Cyclic GFR-binding peptide
EPISVLYLDSSNNVIKFKYEDDSSNVI

SEQ ID NO: 95353 - protein, 27 aa, Artificial Sequence
  Cyclic GFR-binding peptide
SPISVLYIDDSSNVIYKQYEDDSSNVI

SEQ ID NO: 95354 - protein, 27 aa, Artificial Sequence
  Cyclic GFR-binding peptide
EPISVLYLDDSSNVIKFKYEDDSSNVI

SEQ ID NO: 95355 - protein, 27 aa, Artificial Sequence
  Cyclic GFR-binding peptide
EPISILYLVGRKPKVKFKYEDDSSNVI

SEQ ID NO: 95356 - protein, 27 aa, Artificial Sequence
  Cyclic GFR-binding peptide
SPISILYIDKGVVTYYKQYEDDSSNVI

SEQ ID NO: 95357 - protein, 27 aa, Artificial Sequence
  Cyclic GFR-binding peptide
EPISMLYLDENEKVVKFKYEDDSSNVI

SEQ ID NO: 95358 - protein, 27 aa, Artificial Sequence
  Cyclic GFR-binding peptide
SPISVLYIDSSNNVIYKQYEDDSSNVI

SEQ ID NO: 95359 - protein, 27 aa, Artificial Sequence
  Cyclic GFR-binding peptide
EPISILYLDKGVVTYKFKYEDDSSNVI

SEQ ID NO: 95360 - protein, 27 aa, Artificial Sequence
  Cyclic GFR-binding peptide
DDSSNVIPIKGYIIQQKDNFYLMNIPS

SEQ ID NO: 95361 - protein, 27 aa, Artificial Sequence
  Cyclic GFR-binding peptide
DDSSNVIPIKGYVVKDYEDFYLMNIPS

SEQ ID NO: 95362 - protein, 27 aa, Artificial Sequence
  Cyclic GFR-binding peptide
DDSSNVIPIKGYIVNSSDDFYLVNIPS

SEQ ID NO: 95363 - protein, 27 aa, Artificial Sequence
  Cyclic GFR-binding peptide
DDSSNVIPIKGYVVNNAADFYLINIPS

SEQ ID NO: 95364 - protein, 27 aa, Artificial Sequence
  Cyclic GFR-binding peptide
DDSSNVIPIKGYYTVVGKDFYLINIPS

SEQ ID NO: 95365 - protein, 27 aa, Artificial Sequence
  Cyclic GFR-binding peptide
DDSSNVIPIKGYLLVRGNDFYLMNIPS

SEQ ID NO: 95366 - protein, 27 aa, Artificial Sequence
  Cyclic GFR-binding peptide
DDSSNVIPIKGYVVKENEDFYLMNIPS

SEQ ID NO: 95367 - protein, 27 aa, Artificial Sequence
  Cyclic GFR-binding peptide
DDSSNVIPIKGYVVNNASDFYLINIPS

SEQ ID NO: 95368 - protein, 27 aa, Artificial Sequence
  Cyclic GFR-binding peptide
DDSSNVIPIKGYTPVGMDDFYLVNIPS

SEQ ID NO: 95369 - protein, 27 aa, Artificial Sequence
  Cyclic GFR-binding peptide
DDSSNVIPIKGYIVNNSSDFYLVNIPS

SEQ ID NO: 95370 - protein, 27 aa, Artificial Sequence
  Cyclic GFR-binding peptide
SPINMLYFNDKQQIIYGKIPDDSSNVI

SEQ ID NO: 95371 - protein, 27 aa, Artificial Sequence
  Cyclic GFR-binding peptide
SPINMLYFDEYDKVVYGKIPDDSSNVI

SEQ ID NO: 95372 - protein, 27 aa, Artificial Sequence
  Cyclic GFR-binding peptide
SPINVLYFDDSSNVIYGKIPDDSSNVI

SEQ ID NO: 95373 - protein, 27 aa, Artificial Sequence
  Cyclic GFR-binding peptide
SPINILYFDAANNVVYGKIPDDSSNVI

SEQ ID NO: 95374 - protein, 27 aa, Artificial Sequence
  Cyclic GFR-binding peptide
SPINILYFDKGVVTYYGKIPDDSSNVI

SEQ ID NO: 95375 - protein, 27 aa, Artificial Sequence
  Cyclic GFR-binding peptide
SPINMLYFDNGRVLLYGKIPDDSSNVI

SEQ ID NO: 95376 - protein, 27 aa, Artificial Sequence
  Cyclic GFR-binding peptide
SPINMLYFDENEKVVYGKIPDDSSNVI

SEQ ID NO: 95377 - protein, 27 aa, Artificial Sequence
  Cyclic GFR-binding peptide
SPINILYFDSANNVVYGKIPDDSSNVI

SEQ ID NO: 95378 - protein, 27 aa, Artificial Sequence
  Cyclic GFR-binding peptide
SPINVLYFDDMGVPTYGKIPDDSSNVI

SEQ ID NO: 95379 - protein, 27 aa, Artificial Sequence
  Cyclic GFR-binding peptide
SPINVLYFDSSNNVIYGKIPDDSSNVI

SEQ ID NO: 95380 - protein, 27 aa, Artificial Sequence
  Cyclic GFR-binding peptide
DDSSNVIEYQKYVVNNASDIYLISIPS

SEQ ID NO: 95381 - protein, 27 aa, Artificial Sequence
  Cyclic GFR-binding peptide
DDSSNVIEYQKYIIQQKDNIYLMSIPS

SEQ ID NO: 95382 - protein, 27 aa, Artificial Sequence
  Cyclic GFR-binding peptide
DDSSNVIEYQKYLLVRGNDIYLMSIPS

SEQ ID NO: 95383 - protein, 27 aa, Artificial Sequence
  Cyclic GFR-binding peptide
SPISILYIDSANNVVYKQYEDDSSNVI

SEQ ID NO: 95384 - protein, 27 aa, Artificial Sequence
  Cyclic GFR-binding peptide
SPISMLYINDKQQIIYKQYEDDSSNVI

SEQ ID NO: 95385 - protein, 27 aa, Artificial Sequence
  Cyclic GFR-binding peptide
SPISMLYIDNGRVLLYKQYEDDSSNVI

SEQ ID NO: 95386 - protein, 27 aa, Artificial Sequence
  Cyclic GFR-binding peptide
DDSSNVIPYVKLYTVVGKDFFLISLSS

SEQ ID NO: 95387 - protein, 27 aa, Artificial Sequence
  Cyclic GFR-binding peptide
DDSSNVIPYVKLIKPTKGIFFLISLSS

SEQ ID NO: 95388 - protein, 27 aa, Artificial Sequence
  Cyclic GFR-binding peptide
DDSSNVIPYVKLIIQQKDNFFLMSLSS

SEQ ID NO: 95389 - protein, 27 aa, Artificial Sequence
  Cyclic GFR-binding peptide
DDSSNVIPYVKLIVNSSDDFFLVSLSS

SEQ ID NO: 95390 - protein, 27 aa, Artificial Sequence
  Cyclic GFR-binding peptide
DDSSNVIPYVKLVKPKRGVFFLISLSS

SEQ ID NO: 95391 - protein, 27 aa, Artificial Sequence
  Cyclic GFR-binding peptide
DDSSNVIPYVKLVKPTRGVFFLISLSS

SEQ ID NO: 95392 - protein, 27 aa, Artificial Sequence
  Cyclic GFR-binding peptide
DDSSNVIPYVKLTPVGMDDFFLVSLSS

SEQ ID NO: 95393 - protein, 29 aa, Artificial Sequence
  Cyclic GFR-binding peptide
DDSSNVIPYVKLHQGQHPKIRFFLMSLSS

SEQ ID NO: 95394 - protein, 27 aa, Artificial Sequence
  Cyclic GFR-binding peptide
DDSSNVIPYVKLVVNKNEDFFLISLSS

SEQ ID NO: 95395 - protein, 27 aa, Artificial Sequence
  Cyclic GFR-binding peptide
DDSSNVIPYVKLVVNNASDFFLISLSS

SEQ ID NO: 95396 - protein, 27 aa, Artificial Sequence
  Cyclic GFR-binding peptide
DDSSNVIPYVKLVVKENEDFFLMSLSS

SEQ ID NO: 95397 - protein, 27 aa, Artificial Sequence
  Cyclic GFR-binding peptide
DDSSNVIPYVKLIVNNSSDFFLVSLSS

SEQ ID NO: 95398 - protein, 29 aa, Artificial Sequence
  Cyclic GFR-binding peptide
DDSSNVIPYVKLLKPKKRVYEFFLVSLSS

SEQ ID NO: 95399 - protein, 27 aa, Artificial Sequence
  Cyclic GFR-binding peptide
DDSSNVIPYVKLLLVRGNDFFLMSLSS

SEQ ID NO: 95400 - protein, 27 aa, Artificial Sequence
  Cyclic GFR-binding peptide
DDSSNVIPYVKLVVKDYEDFFLMSLSS

SEQ ID NO: 95401 - protein, 27 aa, Artificial Sequence
  Cyclic GFR-binding peptide
DDSSNVIPYVKLVVNNAADFFLISLSS

SEQ ID NO: 95402 - protein, 27 aa, Artificial Sequence
  Cyclic GFR-binding peptide
SSLSILFFDKGVVTYLKVYPDDSSNVI

SEQ ID NO: 95403 - protein, 27 aa, Artificial Sequence
  Cyclic GFR-binding peptide
SSLSILFFIGKTPKILKVYPDDSSNVI

SEQ ID NO: 95404 - protein, 27 aa, Artificial Sequence
  Cyclic GFR-binding peptide
SSLSMLFFNDKQQIILKVYPDDSSNVI

SEQ ID NO: 95405 - protein, 27 aa, Artificial Sequence
  Cyclic GFR-binding peptide
SSLSVLFFDDSSNVILKVYPDDSSNVI

SEQ ID NO: 95406 - protein, 27 aa, Artificial Sequence
  Cyclic GFR-binding peptide
SSLSILFFVGRKPKVLKVYPDDSSNVI

SEQ ID NO: 95407 - protein, 27 aa, Artificial Sequence
  Cyclic GFR-binding peptide
SSLSILFFVGRTPKVLKVYPDDSSNVI

SEQ ID NO: 95408 - protein, 27 aa, Artificial Sequence
  Cyclic GFR-binding peptide
SSLSVLFFDDMGVPTLKVYPDDSSNVI

SEQ ID NO: 95409 - protein, 29 aa, Artificial Sequence
  Cyclic GFR-binding peptide
SSLSMLFFRIKPHQGQHLKVYPDDSSNVI

SEQ ID NO: 95410 - protein, 27 aa, Artificial Sequence
  Cyclic GFR-binding peptide
SSLSILFFDENKNVVLKVYPDDSSNVI

SEQ ID NO: 95411 - protein, 27 aa, Artificial Sequence
  Cyclic GFR-binding peptide
SSLSILFFDSANNVVLKVYPDDSSNVI

SEQ ID NO: 95412 - protein, 27 aa, Artificial Sequence
  Cyclic GFR-binding peptide
SSLSMLFFDENEKVVLKVYPDDSSNVI

SEQ ID NO: 95413 - protein, 27 aa, Artificial Sequence
  Cyclic GFR-binding peptide
SSLSVLFFDSSNNVILKVYPDDSSNVI

SEQ ID NO: 95414 - protein, 29 aa, Artificial Sequence
  Cyclic GFR-binding peptide
SSLSVLFFEYVRKKPKLLKVYPDDSSNVI

SEQ ID NO: 95415 - protein, 27 aa, Artificial Sequence
  Cyclic GFR-binding peptide
SSLSMLFFDNGRVLLLKVYPDDSSNVI

SEQ ID NO: 95416 - protein, 27 aa, Artificial Sequence
  Cyclic GFR-binding peptide
SSLSMLFFDEYDKVVLKVYPDDSSNVI

SEQ ID NO: 95417 - protein, 27 aa, Artificial Sequence
  Cyclic GFR-binding peptide
SSLSILFFDAANNVVLKVYPDDSSNVI

SEQ ID NO: 95418 - protein, 27 aa, Artificial Sequence
  Cyclic GFR-binding peptide
DDSSNVISMEGIIVNSSDDMIQVTINS

SEQ ID NO: 95419 - protein, 27 aa, Artificial Sequence
  Cyclic GFR-binding peptide
DDSSNVIVTAKKVVKENEDIKRMQVPR

SEQ ID NO: 95420 - protein, 27 aa, Artificial Sequence
  Cyclic GFR-binding peptide
DDSSNVISMEGIVVKDYEDMIQMTINS

SEQ ID NO: 95421 - protein, 27 aa, Artificial Sequence
  Cyclic GFR-binding peptide
DDSSNVIVTAKKIKPTKGIIKRIQVPR

SEQ ID NO: 95422 - protein, 27 aa, Artificial Sequence
  Cyclic GFR-binding peptide
DDSSNVISMEGIVKPTRGVMIQITINS

SEQ ID NO: 95423 - protein, 29 aa, Artificial Sequence
  Cyclic GFR-binding peptide
DDSSNVINSLQEFIPKKRVIEYYVVPLPE

SEQ ID NO: 95424 - protein, 27 aa, Artificial Sequence
  Cyclic GFR-binding peptide
DDSSNVIVQVEKVKPKRGVVKAIKVSR

SEQ ID NO: 95425 - protein, 27 aa, Artificial Sequence
  Cyclic GFR-binding peptide
DDSSNVIVQVEKVVKENEDVKAMKVSR

SEQ ID NO: 95426 - protein, 27 aa, Artificial Sequence
  Cyclic GFR-binding peptide
DDSSNVIVTAKKIVNSSDDIKRVQVPR

SEQ ID NO: 95427 - protein, 27 aa, Artificial Sequence
  Cyclic GFR-binding peptide
DDSSNVIVQVEKIKPTKGIVKAIKVSR

SEQ ID NO: 95428 - protein, 29 aa, Artificial Sequence
  Cyclic GFR-binding peptide
DDSSNVINSLQEFIPKKRVIEYYLVTLPE

SEQ ID NO: 95429 - protein, 27 aa, Artificial Sequence
  Cyclic GFR-binding peptide
DDSSNVIVQVEKIVNSSDDVKAVKVSR

SEQ ID NO: 95430 - protein, 27 aa, Artificial Sequence
  Cyclic GFR-binding peptide
DDSSNVIVTAKKVKPKRGVIKRIQVPR

SEQ ID NO: 95431 - protein, 27 aa, Artificial Sequence
  Cyclic GFR-binding peptide
DDSSNVIVQVEKVKPTRGVVKAIKVSR

SEQ ID NO: 95432 - protein, 27 aa, Artificial Sequence
  Cyclic GFR-binding peptide
DDSSNVIVTAKKVKPTRGVIKRIQVPR

SEQ ID NO: 95433 - protein, 29 aa, Artificial Sequence
  Cyclic GFR-binding peptide
DDSSNVINSLQELKPKKRVYEYYLVTLPE

SEQ ID NO: 95434 - protein, 27 aa, Artificial Sequence
  Cyclic GFR-binding peptide
DDSSNVISMEGIVKPKRGVMIQITINS

SEQ ID NO: 95435 - protein, 27 aa, Artificial Sequence
  Cyclic GFR-binding peptide
DDSSNVISMEGIVVKENEDMIQMTINS

SEQ ID NO: 95436 - protein, 27 aa, Artificial Sequence
  Cyclic GFR-binding peptide
DDSSNVISMEGIIKPTKGIMIQITINS

SEQ ID NO: 95437 - protein, 29 aa, Artificial Sequence
  Cyclic GFR-binding peptide
DDSSNVINSLQEHQGQHPKIRYYLMTLPE

SEQ ID NO: 95438 - protein, 27 aa, Artificial Sequence
  Cyclic GFR-binding peptide
DDSSNVIVTAKKVVKDYEDIKRMQVPR

SEQ ID NO: 95439 - protein, 29 aa, Artificial Sequence
  Cyclic GFR-binding peptide
DDSSNVINSLQEHQGQHPKIRYYVMPLPE

SEQ ID NO: 95440 - protein, 29 aa, Artificial Sequence
  Cyclic GFR-binding peptide
DDSSNVINSLQELKPKKRVYEYYVVPLPE

SEQ ID NO: 95441 - protein, 27 aa, Artificial Sequence
  Cyclic GFR-binding peptide
DDSSNVIVQVEKVVKDYEDVKAMKVSR

SEQ ID NO: 95442 - protein, 27 aa, Artificial Sequence
  Cyclic GFR-binding peptide
SNITVQIMDDSSNVIIGEMSDDSSNVI

SEQ ID NO: 95443 - protein, 27 aa, Artificial Sequence
  Cyclic GFR-binding peptide
RPVQMRKIDENEKVVKKATVDDSSNVI

SEQ ID NO: 95444 - protein, 27 aa, Artificial Sequence
  Cyclic GFR-binding peptide
SNITMQIMDEYDKVVIGEMSDDSSNVI

SEQ ID NO: 95445 - protein, 27 aa, Artificial Sequence
  Cyclic GFR-binding peptide
RPVQIRKIIGKTPKIKKATVDDSSNVI

SEQ ID NO: 95446 - protein, 27 aa, Artificial Sequence
  Cyclic GFR-binding peptide
SNITIQIMVGRTPKVIGEMSDDSSNVI

SEQ ID NO: 95447 - protein, 29 aa, Artificial Sequence
  Cyclic GFR-binding peptide
EPLPVVYYEIVRKKPIFEQLSNDDSSNVI

SEQ ID NO: 95448 - protein, 27 aa, Artificial Sequence
  Cyclic GFR-binding peptide
RSVKIAKVVGRKPKVKEVQVDDSSNVI

SEQ ID NO: 95449 - protein, 27 aa, Artificial Sequence
  Cyclic GFR-binding peptide
RSVKMAKVDENEKVVKEVQVDDSSNVI

SEQ ID NO: 95450 - protein, 27 aa, Artificial Sequence
  Cyclic GFR-binding peptide
RPVQVRKIDDSSNVIKKATVDDSSNVI

SEQ ID NO: 95451 - protein, 27 aa, Artificial Sequence
  Cyclic GFR-binding peptide
RSVKIAKVIGKTPKIKEVQVDDSSNVI

SEQ ID NO: 95452 - protein, 29 aa, Artificial Sequence
  Cyclic GFR-binding peptide
EPLTVLYYEIVRKKPIFEQLSNDDSSNVI

SEQ ID NO: 95453 - protein, 27 aa, Artificial Sequence
  Cyclic GFR-binding peptide
RSVKVAKVDDSSNVIKEVQVDDSSNVI

SEQ ID NO: 95454 - protein, 27 aa, Artificial Sequence
  Cyclic GFR-binding peptide
RPVQIRKIVGRKPKVKKATVDDSSNVI

SEQ ID NO: 95455 - protein, 27 aa, Artificial Sequence
  Cyclic GFR-binding peptide
RSVKIAKVVGRTPKVKEVQVDDSSNVI

SEQ ID NO: 95456 - protein, 27 aa, Artificial Sequence
  Cyclic GFR-binding peptide
RPVQIRKIVGRTPKVKKATVDDSSNVI

SEQ ID NO: 95457 - protein, 29 aa, Artificial Sequence
  Cyclic GFR-binding peptide
EPLTVLYYEYVRKKPKLEQLSNDDSSNVI

SEQ ID NO: 95458 - protein, 27 aa, Artificial Sequence
  Cyclic GFR-binding peptide
SNITIQIMVGRKPKVIGEMSDDSSNVI

SEQ ID NO: 95459 - protein, 27 aa, Artificial Sequence
  Cyclic GFR-binding peptide
SNITMQIMDENEKVVIGEMSDDSSNVI

SEQ ID NO: 95460 - protein, 27 aa, Artificial Sequence
  Cyclic GFR-binding peptide
SNITIQIMIGKTPKIIGEMSDDSSNVI

SEQ ID NO: 95461 - protein, 29 aa, Artificial Sequence
  Cyclic GFR-binding peptide
EPLTMLYYRIKPHQGQHEQLSNDDSSNVI

SEQ ID NO: 95462 - protein, 27 aa, Artificial Sequence
  Cyclic GFR-binding peptide
RPVQMRKIDEYDKVVKKATVDDSSNVI

SEQ ID NO: 95463 - protein, 29 aa, Artificial Sequence
  Cyclic GFR-binding peptide
EPLPMVYYRIKPHQGQHEQLSNDDSSNVI

SEQ ID NO: 95464 - protein, 29 aa, Artificial Sequence
  Cyclic GFR-binding peptide
EPLPVVYYEYVRKKPKLEQLSNDDSSNVI

SEQ ID NO: 95465 - protein, 27 aa, Artificial Sequence
  Cyclic GFR-binding peptide
RSVKMAKVDEYDKVVKEVQVDDSSNVI

SEQ ID NO: 95466 - protein, 27 aa, Artificial Sequence
  Cyclic GFR-binding peptide
DDSSNVIRYKKLIIQQKDNFYLMSIAN

SEQ ID NO: 95467 - protein, 27 aa, Artificial Sequence
  Cyclic GFR-binding peptide
DDSSNVIRYKKLLLVRGNDFYLMSIAN

SEQ ID NO: 95468 - protein, 27 aa, Artificial Sequence
  Cyclic GFR-binding peptide
NAISMLYFNDKQQIILKKYRDDSSNVI

SEQ ID NO: 95469 - protein, 27 aa, Artificial Sequence
  Cyclic GFR-binding peptide
NAISMLYFDNGRVLLLKKYRDDSSNVI

SEQ ID NO: 95470 - protein, 27 aa, Artificial Sequence
  Cyclic GFR-binding peptide
DDSSNVIEYKFKVVNKNEDLYLISIPE

SEQ ID NO: 95471 - protein, 27 aa, Artificial Sequence
  Cyclic GFR-binding peptide
DDSSNVIPIKGYVKPTRGVFYLINIPS

SEQ ID NO: 95472 - protein, 27 aa, Artificial Sequence
  Cyclic GFR-binding peptide
DDSSNVIEYKFKLLVRGNDLYLMSIPE

SEQ ID NO: 95473 - protein, 27 aa, Artificial Sequence
  Cyclic GFR-binding peptide
DDSSNVIYHYKLVVNKNEDKYLISIPS

SEQ ID NO: 95474 - protein, 27 aa, Artificial Sequence
  Cyclic GFR-binding peptide
DDSSNVIRHKRLLLVRGNDYYLMSTAS

SEQ ID NO: 95475 - protein, 27 aa, Artificial Sequence
  Cyclic GFR-binding peptide
DDSSNVIYHYKLLLVRGNDKYLMSIPS

SEQ ID NO: 95476 - protein, 27 aa, Artificial Sequence
  Cyclic GFR-binding peptide
DDSSNVIRHKRLVVNKNEDYYLISTAS

SEQ ID NO: 95477 - protein, 27 aa, Artificial Sequence
  Cyclic GFR-binding peptide
DDSSNVIRYKKLVVNKNEDFYLISIAN

SEQ ID NO: 95478 - protein, 27 aa, Artificial Sequence
  Cyclic GFR-binding peptide
DDSSNVIPIKGYVVNKNEDFYLINIPS

SEQ ID NO: 95479 - protein, 27 aa, Artificial Sequence
  Cyclic GFR-binding peptide
DDSSNVIPIKGYIKPTKGIFYLINIPS

SEQ ID NO: 95480 - protein, 27 aa, Artificial Sequence
  Cyclic GFR-binding peptide
DDSSNVIRHKRLYTVVGKDYYLISTAS

SEQ ID NO: 95481 - protein, 27 aa, Artificial Sequence
  Cyclic GFR-binding peptide
DDSSNVIEYKFKVVNNASDLYLISIPE

SEQ ID NO: 95482 - protein, 27 aa, Artificial Sequence
  Cyclic GFR-binding peptide
DDSSNVIRHKRLIIQQKDNYYLMSTAS

SEQ ID NO: 95483 - protein, 27 aa, Artificial Sequence
  Cyclic GFR-binding peptide
DDSSNVIEYKFKIIQQKDNLYLMSIPE

SEQ ID NO: 95484 - protein, 27 aa, Artificial Sequence
  Cyclic GFR-binding peptide
DDSSNVIPIKGYVKPKRGVFYLINIPS

SEQ ID NO: 95485 - protein, 27 aa, Artificial Sequence
  Cyclic GFR-binding peptide
DDSSNVIRHKRLVVNNASDYYLISTAS

SEQ ID NO: 95486 - protein, 27 aa, Artificial Sequence
  Cyclic GFR-binding peptide
DDSSNVIYHYKLVVNNASDKYLISIPS

SEQ ID NO: 95487 - protein, 27 aa, Artificial Sequence
  Cyclic GFR-binding peptide
DDSSNVIYHYKLIIQQKDNKYLMSIPS

SEQ ID NO: 95488 - protein, 27 aa, Artificial Sequence
  Cyclic GFR-binding peptide
DDSSNVIRHKRLVVNNAADYYLISTAS

SEQ ID NO: 95489 - protein, 27 aa, Artificial Sequence
  Cyclic GFR-binding peptide
EPISILYLDENKNVVKFKYEDDSSNVI

SEQ ID NO: 95490 - protein, 27 aa, Artificial Sequence
  Cyclic GFR-binding peptide
SPINILYFVGRTPKVYGKIPDDSSNVI

SEQ ID NO: 95491 - protein, 27 aa, Artificial Sequence
  Cyclic GFR-binding peptide
EPISMLYLDNGRVLLKFKYEDDSSNVI

SEQ ID NO: 95492 - protein, 27 aa, Artificial Sequence
  Cyclic GFR-binding peptide
SPISILYKDENKNVVLKYHYDDSSNVI

SEQ ID NO: 95493 - protein, 27 aa, Artificial Sequence
  Cyclic GFR-binding peptide
SATSMLYYDNGRVLLLRKHRDDSSNVI

SEQ ID NO: 95494 - protein, 27 aa, Artificial Sequence
  Cyclic GFR-binding peptide
SPISMLYKDNGRVLLLKYHYDDSSNVI

SEQ ID NO: 95495 - protein, 27 aa, Artificial Sequence
  Cyclic GFR-binding peptide
SATSILYYDENKNVVLRKHRDDSSNVI

SEQ ID NO: 95496 - protein, 27 aa, Artificial Sequence
  Cyclic GFR-binding peptide
NAISILYFDENKNVVLKKYRDDSSNVI

SEQ ID NO: 95497 - protein, 27 aa, Artificial Sequence
  Cyclic GFR-binding peptide
SPINILYFDENKNVVYGKIPDDSSNVI

SEQ ID NO: 95498 - protein, 27 aa, Artificial Sequence
  Cyclic GFR-binding peptide
SPINILYFIGKTPKIYGKIPDDSSNVI

SEQ ID NO: 95499 - protein, 27 aa, Artificial Sequence
  Cyclic GFR-binding peptide
SATSILYYDKGVVTYLRKHRDDSSNVI

SEQ ID NO: 95500 - protein, 27 aa, Artificial Sequence
  Cyclic GFR-binding peptide
EPISILYLDSANNVVKFKYEDDSSNVI

SEQ ID NO: 95501 - protein, 27 aa, Artificial Sequence
  Cyclic GFR-binding peptide
SATSMLYYNDKQQIILRKHRDDSSNVI

SEQ ID NO: 95502 - protein, 27 aa, Artificial Sequence
  Cyclic GFR-binding peptide
EPISMLYLNDKQQIIKFKYEDDSSNVI

SEQ ID NO: 95503 - protein, 27 aa, Artificial Sequence
  Cyclic GFR-binding peptide
SPINILYFVGRKPKVYGKIPDDSSNVI

SEQ ID NO: 95504 - protein, 27 aa, Artificial Sequence
  Cyclic GFR-binding peptide
SATSILYYDSANNVVLRKHRDDSSNVI

SEQ ID NO: 95505 - protein, 27 aa, Artificial Sequence
  Cyclic GFR-binding peptide
SPISILYKDSANNVVLKYHYDDSSNVI

SEQ ID NO: 95506 - protein, 27 aa, Artificial Sequence
  Cyclic GFR-binding peptide
SPISMLYKNDKQQIILKYHYDDSSNVI

SEQ ID NO: 95507 - protein, 27 aa, Artificial Sequence
  Cyclic GFR-binding peptide
SATSILYYDAANNVVLRKHRDDSSNVI

SEQ ID NO: 95508 - protein, 27 aa, Artificial Sequence
  Cyclic GFR-binding peptide
DDSSNVISMEGIIIQQKDNMIQMTINS

SEQ ID NO: 95509 - protein, 27 aa, Artificial Sequence
  Cyclic GFR-binding peptide
DDSSNVISMEGLVKPKRGVMIQITINS

SEQ ID NO: 95510 - protein, 27 aa, Artificial Sequence
  Cyclic GFR-binding peptide
DDSSNVISMEGLVVNNASDMIQITINS

SEQ ID NO: 95511 - protein, 27 aa, Artificial Sequence
  Cyclic GFR-binding peptide
DDSSNVISMEGILLVRGNDMIQMTINS

SEQ ID NO: 95512 - protein, 27 aa, Artificial Sequence
  Cyclic GFR-binding peptide
DDSSNVISMEGLIKPTKGIMIQITINS

SEQ ID NO: 95513 - protein, 27 aa, Artificial Sequence
  Cyclic GFR-binding peptide
DDSSNVISMEGLIVNSSDDMIQVTINS

SEQ ID NO: 95514 - protein, 27 aa, Artificial Sequence
  Cyclic GFR-binding peptide
DDSSNVISMEGIVVNNASDMIQITINS

SEQ ID NO: 95515 - protein, 27 aa, Artificial Sequence
  Cyclic GFR-binding peptide
DDSSNVISMEGLVVNNAADMIQITINS

SEQ ID NO: 95516 - protein, 27 aa, Artificial Sequence
  Cyclic GFR-binding peptide
DDSSNVISMEGLLLVRGNDMIQMTINS

SEQ ID NO: 95517 - protein, 27 aa, Artificial Sequence
  Cyclic GFR-binding peptide
DDSSNVISMEGLIIQQKDNMIQMTINS

SEQ ID NO: 95518 - protein, 27 aa, Artificial Sequence
  Cyclic GFR-binding peptide
DDSSNVISMEGIVVNNAADMIQITINS

SEQ ID NO: 95519 - protein, 27 aa, Artificial Sequence
  Cyclic GFR-binding peptide
DDSSNVISMEGLVKPTRGVMIQITINS

SEQ ID NO: 95520 - protein, 27 aa, Artificial Sequence
  Cyclic GFR-binding peptide
SNITMQIMNDKQQIIIGEMSDDSSNVI

SEQ ID NO: 95521 - protein, 27 aa, Artificial Sequence
  Cyclic GFR-binding peptide
SNITIQIMVGRKPKVLGEMSDDSSNVI

SEQ ID NO: 95522 - protein, 27 aa, Artificial Sequence
  Cyclic GFR-binding peptide
SNITIQIMDSANNVVLGEMSDDSSNVI

SEQ ID NO: 95523 - protein, 27 aa, Artificial Sequence
  Cyclic GFR-binding peptide
SNITMQIMDNGRVLLIGEMSDDSSNVI

SEQ ID NO: 95524 - protein, 27 aa, Artificial Sequence
  Cyclic GFR-binding peptide
SNITIQIMIGKTPKILGEMSDDSSNVI

SEQ ID NO: 95525 - protein, 27 aa, Artificial Sequence
  Cyclic GFR-binding peptide
SNITVQIMDDSSNVILGEMSDDSSNVI

SEQ ID NO: 95526 - protein, 27 aa, Artificial Sequence
  Cyclic GFR-binding peptide
SNITIQIMDSANNVVIGEMSDDSSNVI

SEQ ID NO: 95527 - protein, 27 aa, Artificial Sequence
  Cyclic GFR-binding peptide
SNITIQIMDAANNVVLGEMSDDSSNVI

SEQ ID NO: 95528 - protein, 27 aa, Artificial Sequence
  Cyclic GFR-binding peptide
SNITMQIMDNGRVLLLGEMSDDSSNVI

SEQ ID NO: 95529 - protein, 27 aa, Artificial Sequence
  Cyclic GFR-binding peptide
SNITMQIMNDKQQIILGEMSDDSSNVI

SEQ ID NO: 95530 - protein, 27 aa, Artificial Sequence
  Cyclic GFR-binding peptide
SNITIQIMDAANNVVIGEMSDDSSNVI

SEQ ID NO: 95531 - protein, 27 aa, Artificial Sequence
  Cyclic GFR-binding peptide
SNITIQIMVGRTPKVLGEMSDDSSNVI

SEQ ID NO: 95532 - protein, 27 aa, Artificial Sequence
  Cyclic GFR-binding peptide
DDSSNVIQYNKLVVNKNEDLYLISIAS

SEQ ID NO: 95533 - protein, 27 aa, Artificial Sequence
  Cyclic GFR-binding peptide
DDSSNVIQYNKLVVNNAADLYLISIAS

SEQ ID NO: 95534 - protein, 27 aa, Artificial Sequence
  Cyclic GFR-binding peptide
DDSSNVIQYNKLIIQQKDNLYLMSIAS

SEQ ID NO: 95535 - protein, 27 aa, Artificial Sequence
  Cyclic GFR-binding peptide
DDSSNVIQYNKLLLVRGNDLYLMSIAS

SEQ ID NO: 95536 - protein, 27 aa, Artificial Sequence
  Cyclic GFR-binding peptide
DDSSNVIQYNKLYTVVGKDLYLISIAS

SEQ ID NO: 95537 - protein, 27 aa, Artificial Sequence
  Cyclic GFR-binding peptide
SAISILYLDENKNVVLKNYQDDSSNVI

SEQ ID NO: 95538 - protein, 27 aa, Artificial Sequence
  Cyclic GFR-binding peptide
SAISILYLDAANNVVLKNYQDDSSNVI

SEQ ID NO: 95539 - protein, 27 aa, Artificial Sequence
  Cyclic GFR-binding peptide
SAISMLYLNDKQQIILKNYQDDSSNVI

SEQ ID NO: 95540 - protein, 27 aa, Artificial Sequence
  Cyclic GFR-binding peptide
SAISMLYLDNGRVLLLKNYQDDSSNVI

SEQ ID NO: 95541 - protein, 27 aa, Artificial Sequence
  Cyclic GFR-binding peptide
SAISILYLDKGVVTYLKNYQDDSSNVI

SEQ ID NO: 95542 - protein, 27 aa, Artificial Sequence
  Cyclic GFR-binding peptide
DSSNNVIRYKKLIKPTKGIFYLISIAN

SEQ ID NO: 95543 - protein, 29 aa, Artificial Sequence
  Cyclic GFR-binding peptide
DSSNNVIRHKRLFIPKKRVIEYYLVSTAS

SEQ ID NO: 95544 - protein, 27 aa, Artificial Sequence
  Cyclic GFR-binding peptide
DSSNNVIYHYKLVVKDYEDKYLMSIPS

SEQ ID NO: 95545 - protein, 27 aa, Artificial Sequence
  Cyclic GFR-binding peptide
DSSNNVIQYNKLIVNNSSDLYLVSIAS

SEQ ID NO: 95546 - protein, 27 aa, Artificial Sequence
  Cyclic GFR-binding peptide
DSSNNVIRYKKLVVKDYEDFYLMSIAN

SEQ ID NO: 95547 - protein, 27 aa, Artificial Sequence
  Cyclic GFR-binding peptide
DSSNNVIRYKKLVKPTRGVFYLISIAN

SEQ ID NO: 95548 - protein, 27 aa, Artificial Sequence
  Cyclic GFR-binding peptide
DSSNNVIRHKRLVVKENEDYYLMSTAS

SEQ ID NO: 95549 - protein, 27 aa, Artificial Sequence
  Cyclic GFR-binding peptide
DSSNNVIYHYKLIKPTKGIKYLISIPS

SEQ ID NO: 95550 - protein, 29 aa, Artificial Sequence
  Cyclic GFR-binding peptide
DSSNNVIRYKKLFIPKKRVIEFYLVSIAN

SEQ ID NO: 95551 - protein, 27 aa, Artificial Sequence
  Cyclic GFR-binding peptide
DSSNNVIYHYKLVVKENEDKYLMSIPS

SEQ ID NO: 95552 - protein, 27 aa, Artificial Sequence
  Cyclic GFR-binding peptide
DSSNNVIRHKRLVKPKRGVYYLISTAS

SEQ ID NO: 95553 - protein, 27 aa, Artificial Sequence
  Cyclic GFR-binding peptide
DSSNNVIYHYKLVKPKRGVKYLISIPS

SEQ ID NO: 95554 - protein, 29 aa, Artificial Sequence
  Cyclic GFR-binding peptide
DSSNNVIQYNKLFIPKKRVIELYLVSIAS

SEQ ID NO: 95555 - protein, 27 aa, Artificial Sequence
  Cyclic GFR-binding peptide
DSSNNVIQYNKLVKPTRGVLYLISIAS

SEQ ID NO: 95556 - protein, 27 aa, Artificial Sequence
  Cyclic GFR-binding peptide
DSSNNVIRYKKLVVKENEDFYLMSIAN

SEQ ID NO: 95557 - protein, 27 aa, Artificial Sequence
  Cyclic GFR-binding peptide
DSSNNVIQYNKLTPVGMDDLYLVSIAS

SEQ ID NO: 95558 - protein, 27 aa, Artificial Sequence
  Cyclic GFR-binding peptide
DSSNNVIRYKKLTPVGMDDFYLVSIAN

SEQ ID NO: 95559 - protein, 27 aa, Artificial Sequence
  Cyclic GFR-binding peptide
DSSNNVIRYKKLVKPKRGVFYLISIAN

SEQ ID NO: 95560 - protein, 27 aa, Artificial Sequence
  Cyclic GFR-binding peptide
DSSNNVIQYNKLVVKENEDLYLMSIAS

SEQ ID NO: 95561 - protein, 27 aa, Artificial Sequence
  Cyclic GFR-binding peptide
DSSNNVIYHYKLIVNSSDDKYLVSIPS

SEQ ID NO: 95562 - protein, 27 aa, Artificial Sequence
  Cyclic GFR-binding peptide
DSSNNVIQYNKLVKPKRGVLYLISIAS

SEQ ID NO: 95563 - protein, 27 aa, Artificial Sequence
  Cyclic GFR-binding peptide
DSSNNVIRYKKLIVNNSSDFYLVSIAN

SEQ ID NO: 95564 - protein, 27 aa, Artificial Sequence
  Cyclic GFR-binding peptide
DSSNNVIRYKKLIVNSSDDFYLVSIAN

SEQ ID NO: 95565 - protein, 27 aa, Artificial Sequence
  Cyclic GFR-binding peptide
DSSNNVIRHKRLVKPTRGVYYLISTAS

SEQ ID NO: 95566 - protein, 29 aa, Artificial Sequence
  Cyclic GFR-binding peptide
DSSNNVIYHYKLFIPKKRVIEKYLVSIPS

SEQ ID NO: 95567 - protein, 27 aa, Artificial Sequence
  Cyclic GFR-binding peptide
DSSNNVIRHKRLIKPTKGIYYLISTAS

SEQ ID NO: 95568 - protein, 27 aa, Artificial Sequence
  Cyclic GFR-binding peptide
DSSNNVIRHKRLTPVGMDDYYLVSTAS

SEQ ID NO: 95569 - protein, 27 aa, Artificial Sequence
  Cyclic GFR-binding peptide
DSSNNVIYHYKLTPVGMDDKYLVSIPS

SEQ ID NO: 95570 - protein, 27 aa, Artificial Sequence
  Cyclic GFR-binding peptide
DSSNNVIYHYKLIVNNSSDKYLVSIPS

SEQ ID NO: 95571 - protein, 27 aa, Artificial Sequence
  Cyclic GFR-binding peptide
DSSNNVIRHKRLIVNNSSDYYLVSTAS

SEQ ID NO: 95572 - protein, 27 aa, Artificial Sequence
  Cyclic GFR-binding peptide
DSSNNVIYHYKLVKPTRGVKYLISIPS

SEQ ID NO: 95573 - protein, 27 aa, Artificial Sequence
  Cyclic GFR-binding peptide
DSSNNVIRHKRLIVNSSDDYYLVSTAS

SEQ ID NO: 95574 - protein, 27 aa, Artificial Sequence
  Cyclic GFR-binding peptide
DSSNNVIRHKRLVVKDYEDYYLMSTAS

SEQ ID NO: 95575 - protein, 27 aa, Artificial Sequence
  Cyclic GFR-binding peptide
DSSNNVIQYNKLIKPTKGILYLISIAS

SEQ ID NO: 95576 - protein, 27 aa, Artificial Sequence
  Cyclic GFR-binding peptide
DSSNNVIQYNKLVVKDYEDLYLMSIAS

SEQ ID NO: 95577 - protein, 27 aa, Artificial Sequence
  Cyclic GFR-binding peptide
DSSNNVIQYNKLIVNSSDDLYLVSIAS

SEQ ID NO: 95578 - protein, 27 aa, Artificial Sequence
  Cyclic GFR-binding peptide
NAISILYFIGKTPKILKKYRDSSNNVI

SEQ ID NO: 95579 - protein, 29 aa, Artificial Sequence
  Cyclic GFR-binding peptide
SATSVLYYEIVRKKPIFLRKHRDSSNNVI

SEQ ID NO: 95580 - protein, 27 aa, Artificial Sequence
  Cyclic GFR-binding peptide
SPISMLYKDEYDKVVLKYHYDSSNNVI

SEQ ID NO: 95581 - protein, 27 aa, Artificial Sequence
  Cyclic GFR-binding peptide
NAISMLYFDEYDKVVLKKYRDSSNNVI

SEQ ID NO: 95582 - protein, 27 aa, Artificial Sequence
  Cyclic GFR-binding peptide
NAISILYFVGRTPKVLKKYRDSSNNVI

SEQ ID NO: 95583 - protein, 27 aa, Artificial Sequence
  Cyclic GFR-binding peptide
SATSMLYYDENEKVVLRKHRDSSNNVI

SEQ ID NO: 95584 - protein, 27 aa, Artificial Sequence
  Cyclic GFR-binding peptide
SPISILYKIGKTPKILKYHYDSSNNVI

SEQ ID NO: 95585 - protein, 29 aa, Artificial Sequence
  Cyclic GFR-binding peptide
NAISVLYFEIVRKKPIFLKKYRDSSNNVI

SEQ ID NO: 95586 - protein, 27 aa, Artificial Sequence
  Cyclic GFR-binding peptide
SPISMLYKDENEKVVLKYHYDSSNNVI

SEQ ID NO: 95587 - protein, 27 aa, Artificial Sequence
  Cyclic GFR-binding peptide
SATSILYYVGRKPKVLRKHRDSSNNVI

SEQ ID NO: 95588 - protein, 27 aa, Artificial Sequence
  Cyclic GFR-binding peptide
SPISILYKVGRKPKVLKYHYDSSNNVI

SEQ ID NO: 95589 - protein, 29 aa, Artificial Sequence
  Cyclic GFR-binding peptide
SAISVLYLEIVRKKPIFLKNYQDSSNNVI

SEQ ID NO: 95590 - protein, 27 aa, Artificial Sequence
  Cyclic GFR-binding peptide
SAISILYLVGRTPKVLKNYQDSSNNVI

SEQ ID NO: 95591 - protein, 27 aa, Artificial Sequence
  Cyclic GFR-binding peptide
NAISMLYFDENEKVVLKKYRDSSNNVI

SEQ ID NO: 95592 - protein, 27 aa, Artificial Sequence
  Cyclic GFR-binding peptide
SAISVLYLDDMGVPTLKNYQDSSNNVI

SEQ ID NO: 95593 - protein, 27 aa, Artificial Sequence
  Cyclic GFR-binding peptide
NAISVLYFDDMGVPTLKKYRDSSNNVI

SEQ ID NO: 95594 - protein, 27 aa, Artificial Sequence
  Cyclic GFR-binding peptide
NAISILYFVGRKPKVLKKYRDSSNNVI

SEQ ID NO: 95595 - protein, 27 aa, Artificial Sequence
  Cyclic GFR-binding peptide
SAISMLYLDENEKVVLKNYQDSSNNVI

SEQ ID NO: 95596 - protein, 27 aa, Artificial Sequence
  Cyclic GFR-binding peptide
SPISVLYKDDSSNVILKYHYDSSNNVI

SEQ ID NO: 95597 - protein, 27 aa, Artificial Sequence
  Cyclic GFR-binding peptide
SAISILYLVGRKPKVLKNYQDSSNNVI

SEQ ID NO: 95598 - protein, 27 aa, Artificial Sequence
  Cyclic GFR-binding peptide
NAISVLYFDSSNNVILKKYRDSSNNVI

SEQ ID NO: 95599 - protein, 27 aa, Artificial Sequence
  Cyclic GFR-binding peptide
NAISVLYFDDSSNVILKKYRDSSNNVI

SEQ ID NO: 95600 - protein, 27 aa, Artificial Sequence
  Cyclic GFR-binding peptide
SATSILYYVGRTPKVLRKHRDSSNNVI

SEQ ID NO: 95601 - protein, 29 aa, Artificial Sequence
  Cyclic GFR-binding peptide
SPISVLYKEIVRKKPIFLKYHYDSSNNVI

SEQ ID NO: 95602 - protein, 27 aa, Artificial Sequence
  Cyclic GFR-binding peptide
SATSILYYIGKTPKILRKHRDSSNNVI

SEQ ID NO: 95603 - protein, 27 aa, Artificial Sequence
  Cyclic GFR-binding peptide
SATSVLYYDDMGVPTLRKHRDSSNNVI

SEQ ID NO: 95604 - protein, 27 aa, Artificial Sequence
  Cyclic GFR-binding peptide
SPISVLYKDDMGVPTLKYHYDSSNNVI

SEQ ID NO: 95605 - protein, 27 aa, Artificial Sequence
  Cyclic GFR-binding peptide
SPISVLYKDSSNNVILKYHYDSSNNVI

SEQ ID NO: 95606 - protein, 27 aa, Artificial Sequence
  Cyclic GFR-binding peptide
SATSVLYYDSSNNVILRKHRDSSNNVI

SEQ ID NO: 95607 - protein, 27 aa, Artificial Sequence
  Cyclic GFR-binding peptide
SPISILYKVGRTPKVLKYHYDSSNNVI

SEQ ID NO: 95608 - protein, 27 aa, Artificial Sequence
  Cyclic GFR-binding peptide
SATSVLYYDDSSNVILRKHRDSSNNVI

SEQ ID NO: 95609 - protein, 27 aa, Artificial Sequence
  Cyclic GFR-binding peptide
SATSMLYYDEYDKVVLRKHRDSSNNVI

SEQ ID NO: 95610 - protein, 27 aa, Artificial Sequence
  Cyclic GFR-binding peptide
SAISILYLIGKTPKILKNYQDSSNNVI

SEQ ID NO: 95611 - protein, 27 aa, Artificial Sequence
  Cyclic GFR-binding peptide
SAISMLYLDEYDKVVLKNYQDSSNNVI

SEQ ID NO: 95612 - protein, 27 aa, Artificial Sequence
  Cyclic GFR-binding peptide
SAISVLYLDDSSNVILKNYQDSSNNVI

SEQ ID NO: 95613 - protein, 27 aa, Artificial Sequence
  Cyclic GFR-binding peptide
DSSNNVINSLQEVVKDYEDYYLMTLPE

SEQ ID NO: 95614 - protein, 27 aa, Artificial Sequence
  Cyclic GFR-binding peptide
DSSNNVINSLQEIKPTKGIYYVIPLPE

SEQ ID NO: 95615 - protein, 27 aa, Artificial Sequence
  Cyclic GFR-binding peptide
DSSNNVINSLQEVKPKRGVYYLITLPE

SEQ ID NO: 95616 - protein, 27 aa, Artificial Sequence
  Cyclic GFR-binding peptide
DSSNNVINSLQEVKPTRGVYYVIPLPE

SEQ ID NO: 95617 - protein, 27 aa, Artificial Sequence
  Cyclic GFR-binding peptide
DSSNNVIEYQKYIVNSSDDIFLVSIPS

SEQ ID NO: 95618 - protein, 27 aa, Artificial Sequence
  Cyclic GFR-binding peptide
DSSNNVIEYQKYVKPTRGVIFLISIPS

SEQ ID NO: 95619 - protein, 27 aa, Artificial Sequence
  Cyclic GFR-binding peptide
DSSNNVINSLQEVVKENEDYYLMTLPE

SEQ ID NO: 95620 - protein, 27 aa, Artificial Sequence
  Cyclic GFR-binding peptide
DSSNNVINSLQEVVNNASDYYLITLPE

SEQ ID NO: 95621 - protein, 27 aa, Artificial Sequence
  Cyclic GFR-binding peptide
DSSNNVINSLQEVKPKRGVYYVIPLPE

SEQ ID NO: 95622 - protein, 27 aa, Artificial Sequence
  Cyclic GFR-binding peptide
DSSNNVINSLQEVVNNASDYYVIPLPE

SEQ ID NO: 95623 - protein, 27 aa, Artificial Sequence
  Cyclic GFR-binding peptide
DSSNNVINSLQEVKPTRGVYYLITLPE

SEQ ID NO: 95624 - protein, 27 aa, Artificial Sequence
  Cyclic GFR-binding peptide
DSSNNVIEYQKYIKPTKGIIFLISIPS

SEQ ID NO: 95625 - protein, 27 aa, Artificial Sequence
  Cyclic GFR-binding peptide
DSSNNVIEYQKYVVNNASDIFLISIPS

SEQ ID NO: 95626 - protein, 27 aa, Artificial Sequence
  Cyclic GFR-binding peptide
DSSNNVINSLQEIVNSSDDYYVVPLPE

SEQ ID NO: 95627 - protein, 27 aa, Artificial Sequence
  Cyclic GFR-binding peptide
DSSNNVINSLQEVVKDYEDYYVMPLPE

SEQ ID NO: 95628 - protein, 27 aa, Artificial Sequence
  Cyclic GFR-binding peptide
DSSNNVIEYQKYVVKENEDIFLMSIPS

SEQ ID NO: 95629 - protein, 27 aa, Artificial Sequence
  Cyclic GFR-binding peptide
DSSNNVINSLQEVVKENEDYYVMPLPE

SEQ ID NO: 95630 - protein, 27 aa, Artificial Sequence
  Cyclic GFR-binding peptide
DSSNNVIEYQKYVVKDYEDIFLMSIPS

SEQ ID NO: 95631 - protein, 27 aa, Artificial Sequence
  Cyclic GFR-binding peptide
DSSNNVIQYNKLVVNNASDLYLISIAS

SEQ ID NO: 95632 - protein, 27 aa, Artificial Sequence
  Cyclic GFR-binding peptide
DSSNNVINSLQEIKPTKGIYYLITLPE

SEQ ID NO: 95633 - protein, 27 aa, Artificial Sequence
  Cyclic GFR-binding peptide
DSSNNVIEYQKYVKPKRGVIFLISIPS

SEQ ID NO: 95634 - protein, 27 aa, Artificial Sequence
  Cyclic GFR-binding peptide
DSSNNVIRYKKLVVNNASDFYLISIAN

SEQ ID NO: 95635 - protein, 27 aa, Artificial Sequence
  Cyclic GFR-binding peptide
DSSNNVINSLQEIVNSSDDYYLVTLPE

SEQ ID NO: 95636 - protein, 27 aa, Artificial Sequence
  Cyclic GFR-binding peptide
EPLTMLYYDEYDKVVEQLSNDSSNNVI

SEQ ID NO: 95637 - protein, 27 aa, Artificial Sequence
  Cyclic GFR-binding peptide
EPLPIVYYIGKTPKIEQLSNDSSNNVI

SEQ ID NO: 95638 - protein, 27 aa, Artificial Sequence
  Cyclic GFR-binding peptide
EPLTILYYVGRKPKVEQLSNDSSNNVI

SEQ ID NO: 95639 - protein, 27 aa, Artificial Sequence
  Cyclic GFR-binding peptide
EPLPIVYYVGRTPKVEQLSNDSSNNVI

SEQ ID NO: 95640 - protein, 27 aa, Artificial Sequence
  Cyclic GFR-binding peptide
SPISVLFIDDSSNVIYKQYEDSSNNVI

SEQ ID NO: 95641 - protein, 27 aa, Artificial Sequence
  Cyclic GFR-binding peptide
SPISILFIVGRTPKVYKQYEDSSNNVI

SEQ ID NO: 95642 - protein, 27 aa, Artificial Sequence
  Cyclic GFR-binding peptide
EPLTMLYYDENEKVVEQLSNDSSNNVI

SEQ ID NO: 95643 - protein, 27 aa, Artificial Sequence
  Cyclic GFR-binding peptide
EPLTILYYDSANNVVEQLSNDSSNNVI

SEQ ID NO: 95644 - protein, 27 aa, Artificial Sequence
  Cyclic GFR-binding peptide
EPLPIVYYVGRKPKVEQLSNDSSNNVI

SEQ ID NO: 95645 - protein, 27 aa, Artificial Sequence
  Cyclic GFR-binding peptide
EPLPIVYYDSANNVVEQLSNDSSNNVI

SEQ ID NO: 95646 - protein, 27 aa, Artificial Sequence
  Cyclic GFR-binding peptide
EPLTILYYVGRTPKVEQLSNDSSNNVI

SEQ ID NO: 95647 - protein, 27 aa, Artificial Sequence
  Cyclic GFR-binding peptide
SPISILFIIGKTPKIYKQYEDSSNNVI

SEQ ID NO: 95648 - protein, 27 aa, Artificial Sequence
  Cyclic GFR-binding peptide
SPISILFIDSANNVVYKQYEDSSNNVI

SEQ ID NO: 95649 - protein, 27 aa, Artificial Sequence
  Cyclic GFR-binding peptide
EPLPVVYYDDSSNVIEQLSNDSSNNVI

SEQ ID NO: 95650 - protein, 27 aa, Artificial Sequence
  Cyclic GFR-binding peptide
EPLPMVYYDEYDKVVEQLSNDSSNNVI

SEQ ID NO: 95651 - protein, 27 aa, Artificial Sequence
  Cyclic GFR-binding peptide
SPISMLFIDENEKVVYKQYEDSSNNVI

SEQ ID NO: 95652 - protein, 27 aa, Artificial Sequence
  Cyclic GFR-binding peptide
EPLPMVYYDENEKVVEQLSNDSSNNVI

SEQ ID NO: 95653 - protein, 27 aa, Artificial Sequence
  Cyclic GFR-binding peptide
SPISMLFIDEYDKVVYKQYEDSSNNVI

SEQ ID NO: 95654 - protein, 27 aa, Artificial Sequence
  Cyclic GFR-binding peptide
SAISILYLDSANNVVLKNYQDSSNNVI

SEQ ID NO: 95655 - protein, 27 aa, Artificial Sequence
  Cyclic GFR-binding peptide
EPLTILYYIGKTPKIEQLSNDSSNNVI

SEQ ID NO: 95656 - protein, 27 aa, Artificial Sequence
  Cyclic GFR-binding peptide
SPISILFIVGRKPKVYKQYEDSSNNVI

SEQ ID NO: 95657 - protein, 27 aa, Artificial Sequence
  Cyclic GFR-binding peptide
NAISILYFDSANNVVLKKYRDSSNNVI

SEQ ID NO: 95658 - protein, 27 aa, Artificial Sequence
  Cyclic GFR-binding peptide
EPLTVLYYDDSSNVIEQLSNDSSNNVI

SEQ ID NO: 95659 - protein, 29 aa, Artificial Sequence
  Cyclic GFR-binding peptide
DSSNNVIVTAKKLKPKKRVYEIKRVQVPR

SEQ ID NO: 95660 - protein, 29 aa, Artificial Sequence
  Cyclic GFR-binding peptide
DSSNNVIVQVEKLKPKKRVYEVKAVKVSR

SEQ ID NO: 95661 - protein, 29 aa, Artificial Sequence
  Cyclic GFR-binding peptide
DSSNNVIVQVEKFIPKKRVIEVKAVKVSR

SEQ ID NO: 95662 - protein, 29 aa, Artificial Sequence
  Cyclic GFR-binding peptide
DSSNNVIVQVEKHQGQHPKIRVKAMKVSR

SEQ ID NO: 95663 - protein, 29 aa, Artificial Sequence
  Cyclic GFR-binding peptide
DSSNNVIVTAKKHQGQHPKIRIKRMQVPR

SEQ ID NO: 95664 - protein, 29 aa, Artificial Sequence
  Cyclic GFR-binding peptide
DSSNNVISMEGLLKPKKRVYEMIQVTINS

SEQ ID NO: 95665 - protein, 29 aa, Artificial Sequence
  Cyclic GFR-binding peptide
DSSNNVISMEGIFIPKKRVIEMIQVTINS

SEQ ID NO: 95666 - protein, 29 aa, Artificial Sequence
  Cyclic GFR-binding peptide
DSSNNVISMEGLHQGQHPKIRMIQMTINS

SEQ ID NO: 95667 - protein, 29 aa, Artificial Sequence
  Cyclic GFR-binding peptide
DSSNNVISMEGILKPKKRVYEMIQVTINS

SEQ ID NO: 95668 - protein, 29 aa, Artificial Sequence
  Cyclic GFR-binding peptide
DSSNNVISMEGLFIPKKRVIEMIQVTINS

SEQ ID NO: 95669 - protein, 29 aa, Artificial Sequence
  Cyclic GFR-binding peptide
DSSNNVIVTAKKFIPKKRVIEIKRVQVPR

SEQ ID NO: 95670 - protein, 29 aa, Artificial Sequence
  Cyclic GFR-binding peptide
DSSNNVISMEGIHQGQHPKIRMIQMTINS

SEQ ID NO: 95671 - protein, 29 aa, Artificial Sequence
  Cyclic GFR-binding peptide
RPVQVRKIEYVRKKPKLKKATVDSSNNVI

SEQ ID NO: 95672 - protein, 29 aa, Artificial Sequence
  Cyclic GFR-binding peptide
RSVKVAKVEYVRKKPKLKEVQVDSSNNVI

SEQ ID NO: 95673 - protein, 29 aa, Artificial Sequence
  Cyclic GFR-binding peptide
RSVKVAKVEIVRKKPIFKEVQVDSSNNVI

SEQ ID NO: 95674 - protein, 29 aa, Artificial Sequence
  Cyclic GFR-binding peptide
RSVKMAKVRIKPHQGQHKEVQVDSSNNVI

SEQ ID NO: 95675 - protein, 29 aa, Artificial Sequence
  Cyclic GFR-binding peptide
RPVQMRKIRIKPHQGQHKKATVDSSNNVI

SEQ ID NO: 95676 - protein, 29 aa, Artificial Sequence
  Cyclic GFR-binding peptide
SNITVQIMEYVRKKPKLLGEMSDSSNNVI

SEQ ID NO: 95677 - protein, 29 aa, Artificial Sequence
  Cyclic GFR-binding peptide
SNITVQIMEIVRKKPIFIGEMSDSSNNVI

SEQ ID NO: 95678 - protein, 29 aa, Artificial Sequence
  Cyclic GFR-binding peptide
SNITMQIMRIKPHQGQHLGEMSDSSNNVI

SEQ ID NO: 95679 - protein, 29 aa, Artificial Sequence
  Cyclic GFR-binding peptide
SNITVQIMEYVRKKPKLIGEMSDSSNNVI

SEQ ID NO: 95680 - protein, 29 aa, Artificial Sequence
  Cyclic GFR-binding peptide
SNITVQIMEIVRKKPIFLGEMSDSSNNVI

SEQ ID NO: 95681 - protein, 29 aa, Artificial Sequence
  Cyclic GFR-binding peptide
RPVQVRKIEIVRKKPIFKKATVDSSNNVI

SEQ ID NO: 95682 - protein, 29 aa, Artificial Sequence
  Cyclic GFR-binding peptide
SNITMQIMRIKPHQGQHIGEMSDSSNNVI

SEQ ID NO: 95683 - protein, 27 aa, Artificial Sequence
  Cyclic GFR-binding peptide
DSSNNVIEYKFKVKPTRGVLYLISIPE

SEQ ID NO: 95684 - protein, 27 aa, Artificial Sequence
  Cyclic GFR-binding peptide
DSSNNVIEYKFKTPVGMDDLYLVSIPE

SEQ ID NO: 95685 - protein, 27 aa, Artificial Sequence
  Cyclic GFR-binding peptide
DSSNNVIEYQKYVKPKRGVIYLISIPS

SEQ ID NO: 95686 - protein, 27 aa, Artificial Sequence
  Cyclic GFR-binding peptide
DSSNNVIEYQKYVVKDYEDIYLMSIPS

SEQ ID NO: 95687 - protein, 27 aa, Artificial Sequence
  Cyclic GFR-binding peptide
DSSNNVIEYKFKIKPTKGILYLISIPE

SEQ ID NO: 95688 - protein, 27 aa, Artificial Sequence
  Cyclic GFR-binding peptide
DSSNNVIYHYKLYTVVGKDKYLISIPS

SEQ ID NO: 95689 - protein, 27 aa, Artificial Sequence
  Cyclic GFR-binding peptide
DSSNNVIRYKKLYTVVGKDFYLISIAN

SEQ ID NO: 95690 - protein, 27 aa, Artificial Sequence
  Cyclic GFR-binding peptide
DSSNNVIEYQKYVVNNAADIYLISIPS

SEQ ID NO: 95691 - protein, 27 aa, Artificial Sequence
  Cyclic GFR-binding peptide
DSSNNVIEYQKYVKPTRGVIYLISIPS

SEQ ID NO: 95692 - protein, 27 aa, Artificial Sequence
  Cyclic GFR-binding peptide
DSSNNVIEYQKYTPVGMDDIYLVSIPS

SEQ ID NO: 95693 - protein, 27 aa, Artificial Sequence
  Cyclic GFR-binding peptide
DSSNNVIEYKFKVVKDYEDLYLMSIPE

SEQ ID NO: 95694 - protein, 27 aa, Artificial Sequence
  Cyclic GFR-binding peptide
DSSNNVIEYKFKVVNNAADLYLISIPE

SEQ ID NO: 95695 - protein, 27 aa, Artificial Sequence
  Cyclic GFR-binding peptide
DSSNNVIEYQKYVVKENEDIYLMSIPS

SEQ ID NO: 95696 - protein, 27 aa, Artificial Sequence
  Cyclic GFR-binding peptide
DSSNNVIEYQKYIKPTKGIIYLISIPS

SEQ ID NO: 95697 - protein, 27 aa, Artificial Sequence
  Cyclic GFR-binding peptide
DSSNNVIRYKKLVVNNAADFYLISIAN

SEQ ID NO: 95698 - protein, 27 aa, Artificial Sequence
  Cyclic GFR-binding peptide
DSSNNVIYHYKLVVNNAADKYLISIPS

SEQ ID NO: 95699 - protein, 27 aa, Artificial Sequence
  Cyclic GFR-binding peptide
DSSNNVIEYKFKIVNNSSDLYLVSIPE

SEQ ID NO: 95700 - protein, 27 aa, Artificial Sequence
  Cyclic GFR-binding peptide
DSSNNVIEYQKYIVNSSDDIYLVSIPS

SEQ ID NO: 95701 - protein, 27 aa, Artificial Sequence
  Cyclic GFR-binding peptide
DSSNNVIEYKFKIVNSSDDLYLVSIPE

SEQ ID NO: 95702 - protein, 27 aa, Artificial Sequence
  Cyclic GFR-binding peptide
DSSNNVIEYKFKVKPKRGVLYLISIPE

SEQ ID NO: 95703 - protein, 27 aa, Artificial Sequence
  Cyclic GFR-binding peptide
DSSNNVIEYQKYYTVVGKDIYLISIPS

SEQ ID NO: 95704 - protein, 27 aa, Artificial Sequence
  Cyclic GFR-binding peptide
DSSNNVIEYKFKVVKENEDLYLMSIPE

SEQ ID NO: 95705 - protein, 27 aa, Artificial Sequence
  Cyclic GFR-binding peptide
DSSNNVIEYQKYIVNNSSDIYLVSIPS

SEQ ID NO: 95706 - protein, 27 aa, Artificial Sequence
  Cyclic GFR-binding peptide
DSSNNVIEYKFKYTVVGKDLYLISIPE

SEQ ID NO: 95707 - protein, 27 aa, Artificial Sequence
  Cyclic GFR-binding peptide
EPISILYLVGRTPKVKFKYEDSSNNVI

SEQ ID NO: 95708 - protein, 27 aa, Artificial Sequence
  Cyclic GFR-binding peptide
EPISVLYLDDMGVPTKFKYEDSSNNVI

SEQ ID NO: 95709 - protein, 27 aa, Artificial Sequence
  Cyclic GFR-binding peptide
SPISILYIVGRKPKVYKQYEDSSNNVI

SEQ ID NO: 95710 - protein, 27 aa, Artificial Sequence
  Cyclic GFR-binding peptide
SPISMLYIDEYDKVVYKQYEDSSNNVI

SEQ ID NO: 95711 - protein, 27 aa, Artificial Sequence
  Cyclic GFR-binding peptide
EPISILYLIGKTPKIKFKYEDSSNNVI

SEQ ID NO: 95712 - protein, 27 aa, Artificial Sequence
  Cyclic GFR-binding peptide
SPISILYKDKGVVTYLKYHYDSSNNVI

SEQ ID NO: 95713 - protein, 27 aa, Artificial Sequence
  Cyclic GFR-binding peptide
NAISILYFDKGVVTYLKKYRDSSNNVI

SEQ ID NO: 95714 - protein, 27 aa, Artificial Sequence
  Cyclic GFR-binding peptide
SPISILYIDAANNVVYKQYEDSSNNVI

SEQ ID NO: 95715 - protein, 27 aa, Artificial Sequence
  Cyclic GFR-binding peptide
SPISILYIVGRTPKVYKQYEDSSNNVI

SEQ ID NO: 95716 - protein, 27 aa, Artificial Sequence
  Cyclic GFR-binding peptide
SPISVLYIDDMGVPTYKQYEDSSNNVI

SEQ ID NO: 95717 - protein, 27 aa, Artificial Sequence
  Cyclic GFR-binding peptide
EPISMLYLDEYDKVVKFKYEDSSNNVI

SEQ ID NO: 95718 - protein, 27 aa, Artificial Sequence
  Cyclic GFR-binding peptide
EPISILYLDAANNVVKFKYEDSSNNVI

SEQ ID NO: 95719 - protein, 27 aa, Artificial Sequence
  Cyclic GFR-binding peptide
SPISMLYIDENEKVVYKQYEDSSNNVI

SEQ ID NO: 95720 - protein, 27 aa, Artificial Sequence
  Cyclic GFR-binding peptide
SPISILYIIGKTPKIYKQYEDSSNNVI

SEQ ID NO: 95721 - protein, 27 aa, Artificial Sequence
  Cyclic GFR-binding peptide
NAISILYFDAANNVVLKKYRDSSNNVI

SEQ ID NO: 95722 - protein, 27 aa, Artificial Sequence
  Cyclic GFR-binding peptide
SPISILYKDAANNVVLKYHYDSSNNVI

SEQ ID NO: 95723 - protein, 27 aa, Artificial Sequence
  Cyclic GFR-binding peptide
EPISVLYLDSSNNVIKFKYEDSSNNVI

SEQ ID NO: 95724 - protein, 27 aa, Artificial Sequence
  Cyclic GFR-binding peptide
SPISVLYIDDSSNVIYKQYEDSSNNVI

SEQ ID NO: 95725 - protein, 27 aa, Artificial Sequence
  Cyclic GFR-binding peptide
EPISVLYLDDSSNVIKFKYEDSSNNVI

SEQ ID NO: 95726 - protein, 27 aa, Artificial Sequence
  Cyclic GFR-binding peptide
EPISILYLVGRKPKVKFKYEDSSNNVI

SEQ ID NO: 95727 - protein, 27 aa, Artificial Sequence
  Cyclic GFR-binding peptide
SPISILYIDKGVVTYYKQYEDSSNNVI

SEQ ID NO: 95728 - protein, 27 aa, Artificial Sequence
  Cyclic GFR-binding peptide
EPISMLYLDENEKVVKFKYEDSSNNVI

SEQ ID NO: 95729 - protein, 27 aa, Artificial Sequence
  Cyclic GFR-binding peptide
SPISVLYIDSSNNVIYKQYEDSSNNVI

SEQ ID NO: 95730 - protein, 27 aa, Artificial Sequence
  Cyclic GFR-binding peptide
EPISILYLDKGVVTYKFKYEDSSNNVI

SEQ ID NO: 95731 - protein, 27 aa, Artificial Sequence
  Cyclic GFR-binding peptide
DSSNNVIPIKGYIIQQKDNFYLMNIPS

SEQ ID NO: 95732 - protein, 27 aa, Artificial Sequence
  Cyclic GFR-binding peptide
DSSNNVIPIKGYVVKDYEDFYLMNIPS

SEQ ID NO: 95733 - protein, 27 aa, Artificial Sequence
  Cyclic GFR-binding peptide
DSSNNVIPIKGYIVNSSDDFYLVNIPS

SEQ ID NO: 95734 - protein, 27 aa, Artificial Sequence
  Cyclic GFR-binding peptide
DSSNNVIPIKGYVVNNAADFYLINIPS

SEQ ID NO: 95735 - protein, 27 aa, Artificial Sequence
  Cyclic GFR-binding peptide
DSSNNVIPIKGYYTVVGKDFYLINIPS

SEQ ID NO: 95736 - protein, 27 aa, Artificial Sequence
  Cyclic GFR-binding peptide
DSSNNVIPIKGYLLVRGNDFYLMNIPS

SEQ ID NO: 95737 - protein, 27 aa, Artificial Sequence
  Cyclic GFR-binding peptide
DSSNNVIPIKGYVVKENEDFYLMNIPS

SEQ ID NO: 95738 - protein, 27 aa, Artificial Sequence
  Cyclic GFR-binding peptide
DSSNNVIPIKGYVVNNASDFYLINIPS

SEQ ID NO: 95739 - protein, 27 aa, Artificial Sequence
  Cyclic GFR-binding peptide
DSSNNVIPIKGYTPVGMDDFYLVNIPS

SEQ ID NO: 95740 - protein, 27 aa, Artificial Sequence
  Cyclic GFR-binding peptide
DSSNNVIPIKGYIVNNSSDFYLVNIPS

SEQ ID NO: 95741 - protein, 27 aa, Artificial Sequence
  Cyclic GFR-binding peptide
SPINMLYFNDKQQIIYGKIPDSSNNVI

SEQ ID NO: 95742 - protein, 27 aa, Artificial Sequence
  Cyclic GFR-binding peptide
SPINMLYFDEYDKVVYGKIPDSSNNVI

SEQ ID NO: 95743 - protein, 27 aa, Artificial Sequence
  Cyclic GFR-binding peptide
SPINVLYFDDSSNVIYGKIPDSSNNVI

SEQ ID NO: 95744 - protein, 27 aa, Artificial Sequence
  Cyclic GFR-binding peptide
SPINILYFDAANNVVYGKIPDSSNNVI

SEQ ID NO: 95745 - protein, 27 aa, Artificial Sequence
  Cyclic GFR-binding peptide
SPINILYFDKGVVTYYGKIPDSSNNVI

SEQ ID NO: 95746 - protein, 27 aa, Artificial Sequence
  Cyclic GFR-binding peptide
SPINMLYFDNGRVLLYGKIPDSSNNVI

SEQ ID NO: 95747 - protein, 27 aa, Artificial Sequence
  Cyclic GFR-binding peptide
SPINMLYFDENEKVVYGKIPDSSNNVI

SEQ ID NO: 95748 - protein, 27 aa, Artificial Sequence
  Cyclic GFR-binding peptide
SPINILYFDSANNVVYGKIPDSSNNVI

SEQ ID NO: 95749 - protein, 27 aa, Artificial Sequence
  Cyclic GFR-binding peptide
SPINVLYFDDMGVPTYGKIPDSSNNVI

SEQ ID NO: 95750 - protein, 27 aa, Artificial Sequence
  Cyclic GFR-binding peptide
SPINVLYFDSSNNVIYGKIPDSSNNVI

SEQ ID NO: 95751 - protein, 27 aa, Artificial Sequence
  Cyclic GFR-binding peptide
DSSNNVIEYQKYVVNNASDIYLISIPS

SEQ ID NO: 95752 - protein, 27 aa, Artificial Sequence
  Cyclic GFR-binding peptide
DSSNNVIEYQKYIIQQKDNIYLMSIPS

SEQ ID NO: 95753 - protein, 27 aa, Artificial Sequence
  Cyclic GFR-binding peptide
DSSNNVIEYQKYLLVRGNDIYLMSIPS

SEQ ID NO: 95754 - protein, 27 aa, Artificial Sequence
  Cyclic GFR-binding peptide
SPISILYIDSANNVVYKQYEDSSNNVI

SEQ ID NO: 95755 - protein, 27 aa, Artificial Sequence
  Cyclic GFR-binding peptide
SPISMLYINDKQQIIYKQYEDSSNNVI

SEQ ID NO: 95756 - protein, 27 aa, Artificial Sequence
  Cyclic GFR-binding peptide
SPISMLYIDNGRVLLYKQYEDSSNNVI

SEQ ID NO: 95757 - protein, 27 aa, Artificial Sequence
  Cyclic GFR-binding peptide
DSSNNVIPYVKLYTVVGKDFFLISLSS

SEQ ID NO: 95758 - protein, 27 aa, Artificial Sequence
  Cyclic GFR-binding peptide
DSSNNVIPYVKLIKPTKGIFFLISLSS

SEQ ID NO: 95759 - protein, 27 aa, Artificial Sequence
  Cyclic GFR-binding peptide
DSSNNVIPYVKLIIQQKDNFFLMSLSS

SEQ ID NO: 95760 - protein, 27 aa, Artificial Sequence
  Cyclic GFR-binding peptide
DSSNNVIPYVKLIVNSSDDFFLVSLSS

SEQ ID NO: 95761 - protein, 27 aa, Artificial Sequence
  Cyclic GFR-binding peptide
DSSNNVIPYVKLVKPKRGVFFLISLSS

SEQ ID NO: 95762 - protein, 27 aa, Artificial Sequence
  Cyclic GFR-binding peptide
DSSNNVIPYVKLVKPTRGVFFLISLSS

SEQ ID NO: 95763 - protein, 27 aa, Artificial Sequence
  Cyclic GFR-binding peptide
DSSNNVIPYVKLTPVGMDDFFLVSLSS

SEQ ID NO: 95764 - protein, 29 aa, Artificial Sequence
  Cyclic GFR-binding peptide
DSSNNVIPYVKLHQGQHPKIRFFLMSLSS

SEQ ID NO: 95765 - protein, 27 aa, Artificial Sequence
  Cyclic GFR-binding peptide
DSSNNVIPYVKLVVNKNEDFFLISLSS

SEQ ID NO: 95766 - protein, 27 aa, Artificial Sequence
  Cyclic GFR-binding peptide
DSSNNVIPYVKLVVNNASDFFLISLSS

SEQ ID NO: 95767 - protein, 27 aa, Artificial Sequence
  Cyclic GFR-binding peptide
DSSNNVIPYVKLVVKENEDFFLMSLSS

SEQ ID NO: 95768 - protein, 27 aa, Artificial Sequence
  Cyclic GFR-binding peptide
DSSNNVIPYVKLIVNNSSDFFLVSLSS

SEQ ID NO: 95769 - protein, 29 aa, Artificial Sequence
  Cyclic GFR-binding peptide
DSSNNVIPYVKLLKPKKRVYEFFLVSLSS

SEQ ID NO: 95770 - protein, 27 aa, Artificial Sequence
  Cyclic GFR-binding peptide
DSSNNVIPYVKLLLVRGNDFFLMSLSS

SEQ ID NO: 95771 - protein, 27 aa, Artificial Sequence
  Cyclic GFR-binding peptide
DSSNNVIPYVKLVVKDYEDFFLMSLSS

SEQ ID NO: 95772 - protein, 27 aa, Artificial Sequence
  Cyclic GFR-binding peptide
DSSNNVIPYVKLVVNNAADFFLISLSS

SEQ ID NO: 95773 - protein, 27 aa, Artificial Sequence
  Cyclic GFR-binding peptide
SSLSILFFDKGVVTYLKVYPDSSNNVI

SEQ ID NO: 95774 - protein, 27 aa, Artificial Sequence
  Cyclic GFR-binding peptide
SSLSILFFIGKTPKILKVYPDSSNNVI

SEQ ID NO: 95775 - protein, 27 aa, Artificial Sequence
  Cyclic GFR-binding peptide
SSLSMLFFNDKQQIILKVYPDSSNNVI

SEQ ID NO: 95776 - protein, 27 aa, Artificial Sequence
  Cyclic GFR-binding peptide
SSLSVLFFDDSSNVILKVYPDSSNNVI

SEQ ID NO: 95777 - protein, 27 aa, Artificial Sequence
  Cyclic GFR-binding peptide
SSLSILFFVGRKPKVLKVYPDSSNNVI

SEQ ID NO: 95778 - protein, 27 aa, Artificial Sequence
  Cyclic GFR-binding peptide
SSLSILFFVGRTPKVLKVYPDSSNNVI

SEQ ID NO: 95779 - protein, 27 aa, Artificial Sequence
  Cyclic GFR-binding peptide
SSLSVLFFDDMGVPTLKVYPDSSNNVI

SEQ ID NO: 95780 - protein, 29 aa, Artificial Sequence
  Cyclic GFR-binding peptide
SSLSMLFFRIKPHQGQHLKVYPDSSNNVI

SEQ ID NO: 95781 - protein, 27 aa, Artificial Sequence
  Cyclic GFR-binding peptide
SSLSILFFDENKNVVLKVYPDSSNNVI

SEQ ID NO: 95782 - protein, 27 aa, Artificial Sequence
  Cyclic GFR-binding peptide
SSLSILFFDSANNVVLKVYPDSSNNVI

SEQ ID NO: 95783 - protein, 27 aa, Artificial Sequence
  Cyclic GFR-binding peptide
SSLSMLFFDENEKVVLKVYPDSSNNVI

SEQ ID NO: 95784 - protein, 27 aa, Artificial Sequence
  Cyclic GFR-binding peptide
SSLSVLFFDSSNNVILKVYPDSSNNVI

SEQ ID NO: 95785 - protein, 29 aa, Artificial Sequence
  Cyclic GFR-binding peptide
SSLSVLFFEYVRKKPKLLKVYPDSSNNVI

SEQ ID NO: 95786 - protein, 27 aa, Artificial Sequence
  Cyclic GFR-binding peptide
SSLSMLFFDNGRVLLLKVYPDSSNNVI

SEQ ID NO: 95787 - protein, 27 aa, Artificial Sequence
  Cyclic GFR-binding peptide
SSLSMLFFDEYDKVVLKVYPDSSNNVI

SEQ ID NO: 95788 - protein, 27 aa, Artificial Sequence
  Cyclic GFR-binding peptide
SSLSILFFDAANNVVLKVYPDSSNNVI

SEQ ID NO: 95789 - protein, 27 aa, Artificial Sequence
  Cyclic GFR-binding peptide
DSSNNVISMEGIIVNSSDDMIQVTINS

SEQ ID NO: 95790 - protein, 27 aa, Artificial Sequence
  Cyclic GFR-binding peptide
DSSNNVIVTAKKVVKENEDIKRMQVPR

SEQ ID NO: 95791 - protein, 27 aa, Artificial Sequence
  Cyclic GFR-binding peptide
DSSNNVISMEGIVVKDYEDMIQMTINS

SEQ ID NO: 95792 - protein, 27 aa, Artificial Sequence
  Cyclic GFR-binding peptide
DSSNNVIVTAKKIKPTKGIIKRIQVPR

SEQ ID NO: 95793 - protein, 27 aa, Artificial Sequence
  Cyclic GFR-binding peptide
DSSNNVISMEGIVKPTRGVMIQITINS

SEQ ID NO: 95794 - protein, 29 aa, Artificial Sequence
  Cyclic GFR-binding peptide
DSSNNVINSLQEFIPKKRVIEYYVVPLPE

SEQ ID NO: 95795 - protein, 27 aa, Artificial Sequence
  Cyclic GFR-binding peptide
DSSNNVIVQVEKVKPKRGVVKAIKVSR

SEQ ID NO: 95796 - protein, 27 aa, Artificial Sequence
  Cyclic GFR-binding peptide
DSSNNVIVQVEKVVKENEDVKAMKVSR

SEQ ID NO: 95797 - protein, 27 aa, Artificial Sequence
  Cyclic GFR-binding peptide
DSSNNVIVTAKKIVNSSDDIKRVQVPR

SEQ ID NO: 95798 - protein, 27 aa, Artificial Sequence
  Cyclic GFR-binding peptide
DSSNNVIVQVEKIKPTKGIVKAIKVSR

SEQ ID NO: 95799 - protein, 29 aa, Artificial Sequence
  Cyclic GFR-binding peptide
DSSNNVINSLQEFIPKKRVIEYYLVTLPE

SEQ ID NO: 95800 - protein, 27 aa, Artificial Sequence
  Cyclic GFR-binding peptide
DSSNNVIVQVEKIVNSSDDVKAVKVSR

SEQ ID NO: 95801 - protein, 27 aa, Artificial Sequence
  Cyclic GFR-binding peptide
DSSNNVIVTAKKVKPKRGVIKRIQVPR

SEQ ID NO: 95802 - protein, 27 aa, Artificial Sequence
  Cyclic GFR-binding peptide
DSSNNVIVQVEKVKPTRGVVKAIKVSR

SEQ ID NO: 95803 - protein, 27 aa, Artificial Sequence
  Cyclic GFR-binding peptide
DSSNNVIVTAKKVKPTRGVIKRIQVPR

SEQ ID NO: 95804 - protein, 29 aa, Artificial Sequence
  Cyclic GFR-binding peptide
DSSNNVINSLQELKPKKRVYEYYLVTLPE

SEQ ID NO: 95805 - protein, 27 aa, Artificial Sequence
  Cyclic GFR-binding peptide
DSSNNVISMEGIVKPKRGVMIQITINS

SEQ ID NO: 95806 - protein, 27 aa, Artificial Sequence
  Cyclic GFR-binding peptide
DSSNNVISMEGIVVKENEDMIQMTINS

SEQ ID NO: 95807 - protein, 27 aa, Artificial Sequence
  Cyclic GFR-binding peptide
DSSNNVISMEGIIKPTKGIMIQITINS

SEQ ID NO: 95808 - protein, 29 aa, Artificial Sequence
  Cyclic GFR-binding peptide
DSSNNVINSLQEHQGQHPKIRYYLMTLPE

SEQ ID NO: 95809 - protein, 27 aa, Artificial Sequence
  Cyclic GFR-binding peptide
DSSNNVIVTAKKVVKDYEDIKRMQVPR

SEQ ID NO: 95810 - protein, 29 aa, Artificial Sequence
  Cyclic GFR-binding peptide
DSSNNVINSLQEHQGQHPKIRYYVMPLPE

SEQ ID NO: 95811 - protein, 29 aa, Artificial Sequence
  Cyclic GFR-binding peptide
DSSNNVINSLQELKPKKRVYEYYVVPLPE

SEQ ID NO: 95812 - protein, 27 aa, Artificial Sequence
  Cyclic GFR-binding peptide
DSSNNVIVQVEKVVKDYEDVKAMKVSR

SEQ ID NO: 95813 - protein, 27 aa, Artificial Sequence
  Cyclic GFR-binding peptide
SNITVQIMDDSSNVIIGEMSDSSNNVI

SEQ ID NO: 95814 - protein, 27 aa, Artificial Sequence
  Cyclic GFR-binding peptide
RPVQMRKIDENEKVVKKATVDSSNNVI

SEQ ID NO: 95815 - protein, 27 aa, Artificial Sequence
  Cyclic GFR-binding peptide
SNITMQIMDEYDKVVIGEMSDSSNNVI

SEQ ID NO: 95816 - protein, 27 aa, Artificial Sequence
  Cyclic GFR-binding peptide
RPVQIRKIIGKTPKIKKATVDSSNNVI

SEQ ID NO: 95817 - protein, 27 aa, Artificial Sequence
  Cyclic GFR-binding peptide
SNITIQIMVGRTPKVIGEMSDSSNNVI

SEQ ID NO: 95818 - protein, 29 aa, Artificial Sequence
  Cyclic GFR-binding peptide
EPLPVVYYEIVRKKPIFEQLSNDSSNNVI

SEQ ID NO: 95819 - protein, 27 aa, Artificial Sequence
  Cyclic GFR-binding peptide
RSVKIAKVVGRKPKVKEVQVDSSNNVI

SEQ ID NO: 95820 - protein, 27 aa, Artificial Sequence
  Cyclic GFR-binding peptide
RSVKMAKVDENEKVVKEVQVDSSNNVI

SEQ ID NO: 95821 - protein, 27 aa, Artificial Sequence
  Cyclic GFR-binding peptide
RPVQVRKIDDSSNVIKKATVDSSNNVI

SEQ ID NO: 95822 - protein, 27 aa, Artificial Sequence
  Cyclic GFR-binding peptide
RSVKIAKVIGKTPKIKEVQVDSSNNVI

SEQ ID NO: 95823 - protein, 29 aa, Artificial Sequence
  Cyclic GFR-binding peptide
EPLTVLYYEIVRKKPIFEQLSNDSSNNVI

SEQ ID NO: 95824 - protein, 27 aa, Artificial Sequence
  Cyclic GFR-binding peptide
RSVKVAKVDDSSNVIKEVQVDSSNNVI

SEQ ID NO: 95825 - protein, 27 aa, Artificial Sequence
  Cyclic GFR-binding peptide
RPVQIRKIVGRKPKVKKATVDSSNNVI

SEQ ID NO: 95826 - protein, 27 aa, Artificial Sequence
  Cyclic GFR-binding peptide
RSVKIAKVVGRTPKVKEVQVDSSNNVI

SEQ ID NO: 95827 - protein, 27 aa, Artificial Sequence
  Cyclic GFR-binding peptide
RPVQIRKIVGRTPKVKKATVDSSNNVI

SEQ ID NO: 95828 - protein, 29 aa, Artificial Sequence
  Cyclic GFR-binding peptide
EPLTVLYYEYVRKKPKLEQLSNDSSNNVI

SEQ ID NO: 95829 - protein, 27 aa, Artificial Sequence
  Cyclic GFR-binding peptide
SNITIQIMVGRKPKVIGEMSDSSNNVI

SEQ ID NO: 95830 - protein, 27 aa, Artificial Sequence
  Cyclic GFR-binding peptide
SNITMQIMDENEKVVIGEMSDSSNNVI

SEQ ID NO: 95831 - protein, 27 aa, Artificial Sequence
  Cyclic GFR-binding peptide
SNITIQIMIGKTPKIIGEMSDSSNNVI

SEQ ID NO: 95832 - protein, 29 aa, Artificial Sequence
  Cyclic GFR-binding peptide
EPLTMLYYRIKPHQGQHEQLSNDSSNNVI

SEQ ID NO: 95833 - protein, 27 aa, Artificial Sequence
  Cyclic GFR-binding peptide
RPVQMRKIDEYDKVVKKATVDSSNNVI

SEQ ID NO: 95834 - protein, 29 aa, Artificial Sequence
  Cyclic GFR-binding peptide
EPLPMVYYRIKPHQGQHEQLSNDSSNNVI

SEQ ID NO: 95835 - protein, 29 aa, Artificial Sequence
  Cyclic GFR-binding peptide
EPLPVVYYEYVRKKPKLEQLSNDSSNNVI

SEQ ID NO: 95836 - protein, 27 aa, Artificial Sequence
  Cyclic GFR-binding peptide
RSVKMAKVDEYDKVVKEVQVDSSNNVI

SEQ ID NO: 95837 - protein, 27 aa, Artificial Sequence
  Cyclic GFR-binding peptide
DSSNNVIRYKKLIIQQKDNFYLMSIAN

SEQ ID NO: 95838 - protein, 27 aa, Artificial Sequence
  Cyclic GFR-binding peptide
DSSNNVIRYKKLLLVRGNDFYLMSIAN

SEQ ID NO: 95839 - protein, 27 aa, Artificial Sequence
  Cyclic GFR-binding peptide
NAISMLYFNDKQQIILKKYRDSSNNVI

SEQ ID NO: 95840 - protein, 27 aa, Artificial Sequence
  Cyclic GFR-binding peptide
NAISMLYFDNGRVLLLKKYRDSSNNVI

SEQ ID NO: 95841 - protein, 27 aa, Artificial Sequence
  Cyclic GFR-binding peptide
DSSNNVIEYKFKVVNKNEDLYLISIPE

SEQ ID NO: 95842 - protein, 27 aa, Artificial Sequence
  Cyclic GFR-binding peptide
DSSNNVIPIKGYVKPTRGVFYLINIPS

SEQ ID NO: 95843 - protein, 27 aa, Artificial Sequence
  Cyclic GFR-binding peptide
DSSNNVIEYKFKLLVRGNDLYLMSIPE

SEQ ID NO: 95844 - protein, 27 aa, Artificial Sequence
  Cyclic GFR-binding peptide
DSSNNVIYHYKLVVNKNEDKYLISIPS

SEQ ID NO: 95845 - protein, 27 aa, Artificial Sequence
  Cyclic GFR-binding peptide
DSSNNVIRHKRLLLVRGNDYYLMSTAS

SEQ ID NO: 95846 - protein, 27 aa, Artificial Sequence
  Cyclic GFR-binding peptide
DSSNNVIYHYKLLLVRGNDKYLMSIPS

SEQ ID NO: 95847 - protein, 27 aa, Artificial Sequence
  Cyclic GFR-binding peptide
DSSNNVIRHKRLVVNKNEDYYLISTAS

SEQ ID NO: 95848 - protein, 27 aa, Artificial Sequence
  Cyclic GFR-binding peptide
DSSNNVIRYKKLVVNKNEDFYLISIAN

SEQ ID NO: 95849 - protein, 27 aa, Artificial Sequence
  Cyclic GFR-binding peptide
DSSNNVIPIKGYVVNKNEDFYLINIPS

SEQ ID NO: 95850 - protein, 27 aa, Artificial Sequence
  Cyclic GFR-binding peptide
DSSNNVIPIKGYIKPTKGIFYLINIPS

SEQ ID NO: 95851 - protein, 27 aa, Artificial Sequence
  Cyclic GFR-binding peptide
DSSNNVIRHKRLYTVVGKDYYLISTAS

SEQ ID NO: 95852 - protein, 27 aa, Artificial Sequence
  Cyclic GFR-binding peptide
DSSNNVIEYKFKVVNNASDLYLISIPE

SEQ ID NO: 95853 - protein, 27 aa, Artificial Sequence
  Cyclic GFR-binding peptide
DSSNNVIRHKRLIIQQKDNYYLMSTAS

SEQ ID NO: 95854 - protein, 27 aa, Artificial Sequence
  Cyclic GFR-binding peptide
DSSNNVIEYKFKIIQQKDNLYLMSIPE

SEQ ID NO: 95855 - protein, 27 aa, Artificial Sequence
  Cyclic GFR-binding peptide
DSSNNVIPIKGYVKPKRGVFYLINIPS

SEQ ID NO: 95856 - protein, 27 aa, Artificial Sequence
  Cyclic GFR-binding peptide
DSSNNVIRHKRLVVNNASDYYLISTAS

SEQ ID NO: 95857 - protein, 27 aa, Artificial Sequence
  Cyclic GFR-binding peptide
DSSNNVIYHYKLVVNNASDKYLISIPS

SEQ ID NO: 95858 - protein, 27 aa, Artificial Sequence
  Cyclic GFR-binding peptide
DSSNNVIYHYKLIIQQKDNKYLMSIPS

SEQ ID NO: 95859 - protein, 27 aa, Artificial Sequence
  Cyclic GFR-binding peptide
DSSNNVIRHKRLVVNNAADYYLISTAS

SEQ ID NO: 95860 - protein, 27 aa, Artificial Sequence
  Cyclic GFR-binding peptide
EPISILYLDENKNVVKFKYEDSSNNVI

SEQ ID NO: 95861 - protein, 27 aa, Artificial Sequence
  Cyclic GFR-binding peptide
SPINILYFVGRTPKVYGKIPDSSNNVI

SEQ ID NO: 95862 - protein, 27 aa, Artificial Sequence
  Cyclic GFR-binding peptide
EPISMLYLDNGRVLLKFKYEDSSNNVI

SEQ ID NO: 95863 - protein, 27 aa, Artificial Sequence
  Cyclic GFR-binding peptide
SPISILYKDENKNVVLKYHYDSSNNVI

SEQ ID NO: 95864 - protein, 27 aa, Artificial Sequence
  Cyclic GFR-binding peptide
SATSMLYYDNGRVLLLRKHRDSSNNVI

SEQ ID NO: 95865 - protein, 27 aa, Artificial Sequence
  Cyclic GFR-binding peptide
SPISMLYKDNGRVLLLKYHYDSSNNVI

SEQ ID NO: 95866 - protein, 27 aa, Artificial Sequence
  Cyclic GFR-binding peptide
SATSILYYDENKNVVLRKHRDSSNNVI

SEQ ID NO: 95867 - protein, 27 aa, Artificial Sequence
  Cyclic GFR-binding peptide
NAISILYFDENKNVVLKKYRDSSNNVI

SEQ ID NO: 95868 - protein, 27 aa, Artificial Sequence
  Cyclic GFR-binding peptide
SPINILYFDENKNVVYGKIPDSSNNVI

SEQ ID NO: 95869 - protein, 27 aa, Artificial Sequence
  Cyclic GFR-binding peptide
SPINILYFIGKTPKIYGKIPDSSNNVI

SEQ ID NO: 95870 - protein, 27 aa, Artificial Sequence
  Cyclic GFR-binding peptide
SATSILYYDKGVVTYLRKHRDSSNNVI

SEQ ID NO: 95871 - protein, 27 aa, Artificial Sequence
  Cyclic GFR-binding peptide
EPISILYLDSANNVVKFKYEDSSNNVI

SEQ ID NO: 95872 - protein, 27 aa, Artificial Sequence
  Cyclic GFR-binding peptide
SATSMLYYNDKQQIILRKHRDSSNNVI

SEQ ID NO: 95873 - protein, 27 aa, Artificial Sequence
  Cyclic GFR-binding peptide
EPISMLYLNDKQQIIKFKYEDSSNNVI

SEQ ID NO: 95874 - protein, 27 aa, Artificial Sequence
  Cyclic GFR-binding peptide
SPINILYFVGRKPKVYGKIPDSSNNVI

SEQ ID NO: 95875 - protein, 27 aa, Artificial Sequence
  Cyclic GFR-binding peptide
SATSILYYDSANNVVLRKHRDSSNNVI

SEQ ID NO: 95876 - protein, 27 aa, Artificial Sequence
  Cyclic GFR-binding peptide
SPISILYKDSANNVVLKYHYDSSNNVI

SEQ ID NO: 95877 - protein, 27 aa, Artificial Sequence
  Cyclic GFR-binding peptide
SPISMLYKNDKQQIILKYHYDSSNNVI

SEQ ID NO: 95878 - protein, 27 aa, Artificial Sequence
  Cyclic GFR-binding peptide
SATSILYYDAANNVVLRKHRDSSNNVI

SEQ ID NO: 95879 - protein, 27 aa, Artificial Sequence
  Cyclic GFR-binding peptide
DSSNNVISMEGIIIQQKDNMIQMTINS

SEQ ID NO: 95880 - protein, 27 aa, Artificial Sequence
  Cyclic GFR-binding peptide
DSSNNVISMEGLVKPKRGVMIQITINS

SEQ ID NO: 95881 - protein, 27 aa, Artificial Sequence
  Cyclic GFR-binding peptide
DSSNNVISMEGLVVNNASDMIQITINS

SEQ ID NO: 95882 - protein, 27 aa, Artificial Sequence
  Cyclic GFR-binding peptide
DSSNNVISMEGILLVRGNDMIQMTINS

SEQ ID NO: 95883 - protein, 27 aa, Artificial Sequence
  Cyclic GFR-binding peptide
DSSNNVISMEGLIKPTKGIMIQITINS

SEQ ID NO: 95884 - protein, 27 aa, Artificial Sequence
  Cyclic GFR-binding peptide
DSSNNVISMEGLIVNSSDDMIQVTINS

SEQ ID NO: 95885 - protein, 27 aa, Artificial Sequence
  Cyclic GFR-binding peptide
DSSNNVISMEGIVVNNASDMIQITINS

SEQ ID NO: 95886 - protein, 27 aa, Artificial Sequence
  Cyclic GFR-binding peptide
DSSNNVISMEGLVVNNAADMIQITINS

SEQ ID NO: 95887 - protein, 27 aa, Artificial Sequence
  Cyclic GFR-binding peptide
DSSNNVISMEGLLLVRGNDMIQMTINS

SEQ ID NO: 95888 - protein, 27 aa, Artificial Sequence
  Cyclic GFR-binding peptide
DSSNNVISMEGLIIQQKDNMIQMTINS

SEQ ID NO: 95889 - protein, 27 aa, Artificial Sequence
  Cyclic GFR-binding peptide
DSSNNVISMEGIVVNNAADMIQITINS

SEQ ID NO: 95890 - protein, 27 aa, Artificial Sequence
  Cyclic GFR-binding peptide
DSSNNVISMEGLVKPTRGVMIQITINS

SEQ ID NO: 95891 - protein, 27 aa, Artificial Sequence
  Cyclic GFR-binding peptide
SNITMQIMNDKQQIIIGEMSDSSNNVI

SEQ ID NO: 95892 - protein, 27 aa, Artificial Sequence
  Cyclic GFR-binding peptide
SNITIQIMVGRKPKVLGEMSDSSNNVI

SEQ ID NO: 95893 - protein, 27 aa, Artificial Sequence
  Cyclic GFR-binding peptide
SNITIQIMDSANNVVLGEMSDSSNNVI

SEQ ID NO: 95894 - protein, 27 aa, Artificial Sequence
  Cyclic GFR-binding peptide
SNITMQIMDNGRVLLIGEMSDSSNNVI

SEQ ID NO: 95895 - protein, 27 aa, Artificial Sequence
  Cyclic GFR-binding peptide
SNITIQIMIGKTPKILGEMSDSSNNVI

SEQ ID NO: 95896 - protein, 27 aa, Artificial Sequence
  Cyclic GFR-binding peptide
SNITVQIMDDSSNVILGEMSDSSNNVI

SEQ ID NO: 95897 - protein, 27 aa, Artificial Sequence
  Cyclic GFR-binding peptide
SNITIQIMDSANNVVIGEMSDSSNNVI

SEQ ID NO: 95898 - protein, 27 aa, Artificial Sequence
  Cyclic GFR-binding peptide
SNITIQIMDAANNVVLGEMSDSSNNVI

SEQ ID NO: 95899 - protein, 27 aa, Artificial Sequence
  Cyclic GFR-binding peptide
SNITMQIMDNGRVLLLGEMSDSSNNVI

SEQ ID NO: 95900 - protein, 27 aa, Artificial Sequence
  Cyclic GFR-binding peptide
SNITMQIMNDKQQIILGEMSDSSNNVI

SEQ ID NO: 95901 - protein, 27 aa, Artificial Sequence
  Cyclic GFR-binding peptide
SNITIQIMDAANNVVIGEMSDSSNNVI

SEQ ID NO: 95902 - protein, 27 aa, Artificial Sequence
  Cyclic GFR-binding peptide
SNITIQIMVGRTPKVLGEMSDSSNNVI

SEQ ID NO: 95903 - protein, 27 aa, Artificial Sequence
  Cyclic GFR-binding peptide
DSSNNVIQYNKLVVNKNEDLYLISIAS

SEQ ID NO: 95904 - protein, 27 aa, Artificial Sequence
  Cyclic GFR-binding peptide
DSSNNVIQYNKLVVNNAADLYLISIAS

SEQ ID NO: 95905 - protein, 27 aa, Artificial Sequence
  Cyclic GFR-binding peptide
DSSNNVIQYNKLIIQQKDNLYLMSIAS

SEQ ID NO: 95906 - protein, 27 aa, Artificial Sequence
  Cyclic GFR-binding peptide
DSSNNVIQYNKLLLVRGNDLYLMSIAS

SEQ ID NO: 95907 - protein, 27 aa, Artificial Sequence
  Cyclic GFR-binding peptide
DSSNNVIQYNKLYTVVGKDLYLISIAS

SEQ ID NO: 95908 - protein, 27 aa, Artificial Sequence
  Cyclic GFR-binding peptide
SAISILYLDENKNVVLKNYQDSSNNVI

SEQ ID NO: 95909 - protein, 27 aa, Artificial Sequence
  Cyclic GFR-binding peptide
SAISILYLDAANNVVLKNYQDSSNNVI

SEQ ID NO: 95910 - protein, 27 aa, Artificial Sequence
  Cyclic GFR-binding peptide
SAISMLYLNDKQQIILKNYQDSSNNVI

SEQ ID NO: 95911 - protein, 27 aa, Artificial Sequence
  Cyclic GFR-binding peptide
SAISMLYLDNGRVLLLKNYQDSSNNVI

SEQ ID NO: 95912 - protein, 27 aa, Artificial Sequence
  Cyclic GFR-binding peptide
SAISILYLDKGVVTYLKNYQDSSNNVI

SEQ ID NO: 95913 - protein, 27 aa, Artificial Sequence
  Cyclic GFR-binding peptide
DDMGVPTRYKKLIKPTKGIFYLISIAN

SEQ ID NO: 95914 - protein, 29 aa, Artificial Sequence
  Cyclic GFR-binding peptide
DDMGVPTRHKRLFIPKKRVIEYYLVSTAS

SEQ ID NO: 95915 - protein, 27 aa, Artificial Sequence
  Cyclic GFR-binding peptide
DDMGVPTYHYKLVVKDYEDKYLMSIPS

SEQ ID NO: 95916 - protein, 27 aa, Artificial Sequence
  Cyclic GFR-binding peptide
DDMGVPTQYNKLIVNNSSDLYLVSIAS

SEQ ID NO: 95917 - protein, 27 aa, Artificial Sequence
  Cyclic GFR-binding peptide
DDMGVPTRYKKLVVKDYEDFYLMSIAN

SEQ ID NO: 95918 - protein, 27 aa, Artificial Sequence
  Cyclic GFR-binding peptide
DDMGVPTRYKKLVKPTRGVFYLISIAN

SEQ ID NO: 95919 - protein, 27 aa, Artificial Sequence
  Cyclic GFR-binding peptide
DDMGVPTRHKRLVVKENEDYYLMSTAS

SEQ ID NO: 95920 - protein, 27 aa, Artificial Sequence
  Cyclic GFR-binding peptide
DDMGVPTYHYKLIKPTKGIKYLISIPS

SEQ ID NO: 95921 - protein, 29 aa, Artificial Sequence
  Cyclic GFR-binding peptide
DDMGVPTRYKKLFIPKKRVIEFYLVSIAN

SEQ ID NO: 95922 - protein, 27 aa, Artificial Sequence
  Cyclic GFR-binding peptide
DDMGVPTYHYKLVVKENEDKYLMSIPS

SEQ ID NO: 95923 - protein, 27 aa, Artificial Sequence
  Cyclic GFR-binding peptide
DDMGVPTRHKRLVKPKRGVYYLISTAS

SEQ ID NO: 95924 - protein, 27 aa, Artificial Sequence
  Cyclic GFR-binding peptide
DDMGVPTYHYKLVKPKRGVKYLISIPS

SEQ ID NO: 95925 - protein, 29 aa, Artificial Sequence
  Cyclic GFR-binding peptide
DDMGVPTQYNKLFIPKKRVIELYLVSIAS

SEQ ID NO: 95926 - protein, 27 aa, Artificial Sequence
  Cyclic GFR-binding peptide
DDMGVPTQYNKLVKPTRGVLYLISIAS

SEQ ID NO: 95927 - protein, 27 aa, Artificial Sequence
  Cyclic GFR-binding peptide
DDMGVPTRYKKLVVKENEDFYLMSIAN

SEQ ID NO: 95928 - protein, 27 aa, Artificial Sequence
  Cyclic GFR-binding peptide
DDMGVPTQYNKLTPVGMDDLYLVSIAS

SEQ ID NO: 95929 - protein, 27 aa, Artificial Sequence
  Cyclic GFR-binding peptide
DDMGVPTRYKKLTPVGMDDFYLVSIAN

SEQ ID NO: 95930 - protein, 27 aa, Artificial Sequence
  Cyclic GFR-binding peptide
DDMGVPTRYKKLVKPKRGVFYLISIAN

SEQ ID NO: 95931 - protein, 27 aa, Artificial Sequence
  Cyclic GFR-binding peptide
DDMGVPTQYNKLVVKENEDLYLMSIAS

SEQ ID NO: 95932 - protein, 27 aa, Artificial Sequence
  Cyclic GFR-binding peptide
DDMGVPTYHYKLIVNSSDDKYLVSIPS

SEQ ID NO: 95933 - protein, 27 aa, Artificial Sequence
  Cyclic GFR-binding peptide
DDMGVPTQYNKLVKPKRGVLYLISIAS

SEQ ID NO: 95934 - protein, 27 aa, Artificial Sequence
  Cyclic GFR-binding peptide
DDMGVPTRYKKLIVNNSSDFYLVSIAN

SEQ ID NO: 95935 - protein, 27 aa, Artificial Sequence
  Cyclic GFR-binding peptide
DDMGVPTRYKKLIVNSSDDFYLVSIAN

SEQ ID NO: 95936 - protein, 27 aa, Artificial Sequence
  Cyclic GFR-binding peptide
DDMGVPTRHKRLVKPTRGVYYLISTAS

SEQ ID NO: 95937 - protein, 29 aa, Artificial Sequence
  Cyclic GFR-binding peptide
DDMGVPTYHYKLFIPKKRVIEKYLVSIPS

SEQ ID NO: 95938 - protein, 27 aa, Artificial Sequence
  Cyclic GFR-binding peptide
DDMGVPTRHKRLIKPTKGIYYLISTAS

SEQ ID NO: 95939 - protein, 27 aa, Artificial Sequence
  Cyclic GFR-binding peptide
DDMGVPTRHKRLTPVGMDDYYLVSTAS

SEQ ID NO: 95940 - protein, 27 aa, Artificial Sequence
  Cyclic GFR-binding peptide
DDMGVPTYHYKLTPVGMDDKYLVSIPS

SEQ ID NO: 95941 - protein, 27 aa, Artificial Sequence
  Cyclic GFR-binding peptide
DDMGVPTYHYKLIVNNSSDKYLVSIPS

SEQ ID NO: 95942 - protein, 27 aa, Artificial Sequence
  Cyclic GFR-binding peptide
DDMGVPTRHKRLIVNNSSDYYLVSTAS

SEQ ID NO: 95943 - protein, 27 aa, Artificial Sequence
  Cyclic GFR-binding peptide
DDMGVPTYHYKLVKPTRGVKYLISIPS

SEQ ID NO: 95944 - protein, 27 aa, Artificial Sequence
  Cyclic GFR-binding peptide
DDMGVPTRHKRLIVNSSDDYYLVSTAS

SEQ ID NO: 95945 - protein, 27 aa, Artificial Sequence
  Cyclic GFR-binding peptide
DDMGVPTRHKRLVVKDYEDYYLMSTAS

SEQ ID NO: 95946 - protein, 27 aa, Artificial Sequence
  Cyclic GFR-binding peptide
DDMGVPTQYNKLIKPTKGILYLISIAS

SEQ ID NO: 95947 - protein, 27 aa, Artificial Sequence
  Cyclic GFR-binding peptide
DDMGVPTQYNKLVVKDYEDLYLMSIAS

SEQ ID NO: 95948 - protein, 27 aa, Artificial Sequence
  Cyclic GFR-binding peptide
DDMGVPTQYNKLIVNSSDDLYLVSIAS

SEQ ID NO: 95949 - protein, 27 aa, Artificial Sequence
  Cyclic GFR-binding peptide
NAISILYFIGKTPKILKKYRDDMGVPT

SEQ ID NO: 95950 - protein, 29 aa, Artificial Sequence
  Cyclic GFR-binding peptide
SATSVLYYEIVRKKPIFLRKHRDDMGVPT

SEQ ID NO: 95951 - protein, 27 aa, Artificial Sequence
  Cyclic GFR-binding peptide
SPISMLYKDEYDKVVLKYHYDDMGVPT

SEQ ID NO: 95952 - protein, 27 aa, Artificial Sequence
  Cyclic GFR-binding peptide
SAISVLYLDSSNNVILKNYQDDMGVPT

SEQ ID NO: 95953 - protein, 27 aa, Artificial Sequence
  Cyclic GFR-binding peptide
NAISMLYFDEYDKVVLKKYRDDMGVPT

SEQ ID NO: 95954 - protein, 27 aa, Artificial Sequence
  Cyclic GFR-binding peptide
NAISILYFVGRTPKVLKKYRDDMGVPT

SEQ ID NO: 95955 - protein, 27 aa, Artificial Sequence
  Cyclic GFR-binding peptide
SATSMLYYDENEKVVLRKHRDDMGVPT

SEQ ID NO: 95956 - protein, 27 aa, Artificial Sequence
  Cyclic GFR-binding peptide
SPISILYKIGKTPKILKYHYDDMGVPT

SEQ ID NO: 95957 - protein, 29 aa, Artificial Sequence
  Cyclic GFR-binding peptide
NAISVLYFEIVRKKPIFLKKYRDDMGVPT

SEQ ID NO: 95958 - protein, 27 aa, Artificial Sequence
  Cyclic GFR-binding peptide
SPISMLYKDENEKVVLKYHYDDMGVPT

SEQ ID NO: 95959 - protein, 27 aa, Artificial Sequence
  Cyclic GFR-binding peptide
SATSILYYVGRKPKVLRKHRDDMGVPT

SEQ ID NO: 95960 - protein, 27 aa, Artificial Sequence
  Cyclic GFR-binding peptide
SPISILYKVGRKPKVLKYHYDDMGVPT

SEQ ID NO: 95961 - protein, 29 aa, Artificial Sequence
  Cyclic GFR-binding peptide
SAISVLYLEIVRKKPIFLKNYQDDMGVPT

SEQ ID NO: 95962 - protein, 27 aa, Artificial Sequence
  Cyclic GFR-binding peptide
SAISILYLVGRTPKVLKNYQDDMGVPT

SEQ ID NO: 95963 - protein, 27 aa, Artificial Sequence
  Cyclic GFR-binding peptide
NAISMLYFDENEKVVLKKYRDDMGVPT

SEQ ID NO: 95964 - protein, 27 aa, Artificial Sequence
  Cyclic GFR-binding peptide
NAISVLYFDDMGVPTLKKYRDDMGVPT

SEQ ID NO: 95965 - protein, 27 aa, Artificial Sequence
  Cyclic GFR-binding peptide
NAISILYFVGRKPKVLKKYRDDMGVPT

SEQ ID NO: 95966 - protein, 27 aa, Artificial Sequence
  Cyclic GFR-binding peptide
SAISMLYLDENEKVVLKNYQDDMGVPT

SEQ ID NO: 95967 - protein, 27 aa, Artificial Sequence
  Cyclic GFR-binding peptide
SPISVLYKDDSSNVILKYHYDDMGVPT

SEQ ID NO: 95968 - protein, 27 aa, Artificial Sequence
  Cyclic GFR-binding peptide
SAISILYLVGRKPKVLKNYQDDMGVPT

SEQ ID NO: 95969 - protein, 27 aa, Artificial Sequence
  Cyclic GFR-binding peptide
NAISVLYFDSSNNVILKKYRDDMGVPT

SEQ ID NO: 95970 - protein, 27 aa, Artificial Sequence
  Cyclic GFR-binding peptide
NAISVLYFDDSSNVILKKYRDDMGVPT

SEQ ID NO: 95971 - protein, 27 aa, Artificial Sequence
  Cyclic GFR-binding peptide
SATSILYYVGRTPKVLRKHRDDMGVPT

SEQ ID NO: 95972 - protein, 29 aa, Artificial Sequence
  Cyclic GFR-binding peptide
SPISVLYKEIVRKKPIFLKYHYDDMGVPT

SEQ ID NO: 95973 - protein, 27 aa, Artificial Sequence
  Cyclic GFR-binding peptide
SATSILYYIGKTPKILRKHRDDMGVPT

SEQ ID NO: 95974 - protein, 27 aa, Artificial Sequence
  Cyclic GFR-binding peptide
SATSVLYYDDMGVPTLRKHRDDMGVPT

SEQ ID NO: 95975 - protein, 27 aa, Artificial Sequence
  Cyclic GFR-binding peptide
SPISVLYKDDMGVPTLKYHYDDMGVPT

SEQ ID NO: 95976 - protein, 27 aa, Artificial Sequence
  Cyclic GFR-binding peptide
SPISVLYKDSSNNVILKYHYDDMGVPT

SEQ ID NO: 95977 - protein, 27 aa, Artificial Sequence
  Cyclic GFR-binding peptide
SATSVLYYDSSNNVILRKHRDDMGVPT

SEQ ID NO: 95978 - protein, 27 aa, Artificial Sequence
  Cyclic GFR-binding peptide
SPISILYKVGRTPKVLKYHYDDMGVPT

SEQ ID NO: 95979 - protein, 27 aa, Artificial Sequence
  Cyclic GFR-binding peptide
SATSVLYYDDSSNVILRKHRDDMGVPT

SEQ ID NO: 95980 - protein, 27 aa, Artificial Sequence
  Cyclic GFR-binding peptide
SATSMLYYDEYDKVVLRKHRDDMGVPT

SEQ ID NO: 95981 - protein, 27 aa, Artificial Sequence
  Cyclic GFR-binding peptide
SAISILYLIGKTPKILKNYQDDMGVPT

SEQ ID NO: 95982 - protein, 27 aa, Artificial Sequence
  Cyclic GFR-binding peptide
SAISMLYLDEYDKVVLKNYQDDMGVPT

SEQ ID NO: 95983 - protein, 27 aa, Artificial Sequence
  Cyclic GFR-binding peptide
SAISVLYLDDSSNVILKNYQDDMGVPT

SEQ ID NO: 95984 - protein, 27 aa, Artificial Sequence
  Cyclic GFR-binding peptide
DDMGVPTNSLQEVVKDYEDYYLMTLPE

SEQ ID NO: 95985 - protein, 27 aa, Artificial Sequence
  Cyclic GFR-binding peptide
DDMGVPTNSLQEIKPTKGIYYVIPLPE

SEQ ID NO: 95986 - protein, 27 aa, Artificial Sequence
  Cyclic GFR-binding peptide
DDMGVPTNSLQEVKPKRGVYYLITLPE

SEQ ID NO: 95987 - protein, 27 aa, Artificial Sequence
  Cyclic GFR-binding peptide
DDMGVPTNSLQEVKPTRGVYYVIPLPE

SEQ ID NO: 95988 - protein, 27 aa, Artificial Sequence
  Cyclic GFR-binding peptide
DDMGVPTEYQKYIVNSSDDIFLVSIPS

SEQ ID NO: 95989 - protein, 27 aa, Artificial Sequence
  Cyclic GFR-binding peptide
DDMGVPTEYQKYVKPTRGVIFLISIPS

SEQ ID NO: 95990 - protein, 27 aa, Artificial Sequence
  Cyclic GFR-binding peptide
DDMGVPTNSLQEVVKENEDYYLMTLPE

SEQ ID NO: 95991 - protein, 27 aa, Artificial Sequence
  Cyclic GFR-binding peptide
DDMGVPTNSLQEVVNNASDYYLITLPE

SEQ ID NO: 95992 - protein, 27 aa, Artificial Sequence
  Cyclic GFR-binding peptide
DDMGVPTNSLQEVKPKRGVYYVIPLPE

SEQ ID NO: 95993 - protein, 27 aa, Artificial Sequence
  Cyclic GFR-binding peptide
DDMGVPTNSLQEVVNNASDYYVIPLPE

SEQ ID NO: 95994 - protein, 27 aa, Artificial Sequence
  Cyclic GFR-binding peptide
DDMGVPTNSLQEVKPTRGVYYLITLPE

SEQ ID NO: 95995 - protein, 27 aa, Artificial Sequence
  Cyclic GFR-binding peptide
DDMGVPTEYQKYIKPTKGIIFLISIPS

SEQ ID NO: 95996 - protein, 27 aa, Artificial Sequence
  Cyclic GFR-binding peptide
DDMGVPTEYQKYVVNNASDIFLISIPS

SEQ ID NO: 95997 - protein, 27 aa, Artificial Sequence
  Cyclic GFR-binding peptide
DDMGVPTNSLQEIVNSSDDYYVVPLPE

SEQ ID NO: 95998 - protein, 27 aa, Artificial Sequence
  Cyclic GFR-binding peptide
DDMGVPTNSLQEVVKDYEDYYVMPLPE

SEQ ID NO: 95999 - protein, 27 aa, Artificial Sequence
  Cyclic GFR-binding peptide
DDMGVPTEYQKYVVKENEDIFLMSIPS

SEQ ID NO: 96000 - protein, 27 aa, Artificial Sequence
  Cyclic GFR-binding peptide
DDMGVPTNSLQEVVKENEDYYVMPLPE

SEQ ID NO: 96001 - protein, 27 aa, Artificial Sequence
  Cyclic GFR-binding peptide
DDMGVPTEYQKYVVKDYEDIFLMSIPS

SEQ ID NO: 96002 - protein, 27 aa, Artificial Sequence
  Cyclic GFR-binding peptide
DDMGVPTQYNKLVVNNASDLYLISIAS

SEQ ID NO: 96003 - protein, 27 aa, Artificial Sequence
  Cyclic GFR-binding peptide
DDMGVPTNSLQEIKPTKGIYYLITLPE

SEQ ID NO: 96004 - protein, 27 aa, Artificial Sequence
  Cyclic GFR-binding peptide
DDMGVPTEYQKYVKPKRGVIFLISIPS

SEQ ID NO: 96005 - protein, 27 aa, Artificial Sequence
  Cyclic GFR-binding peptide
DDMGVPTRYKKLVVNNASDFYLISIAN

SEQ ID NO: 96006 - protein, 27 aa, Artificial Sequence
  Cyclic GFR-binding peptide
DDMGVPTNSLQEIVNSSDDYYLVTLPE

SEQ ID NO: 96007 - protein, 27 aa, Artificial Sequence
  Cyclic GFR-binding peptide
EPLTMLYYDEYDKVVEQLSNDDMGVPT

SEQ ID NO: 96008 - protein, 27 aa, Artificial Sequence
  Cyclic GFR-binding peptide
EPLPIVYYIGKTPKIEQLSNDDMGVPT

SEQ ID NO: 96009 - protein, 27 aa, Artificial Sequence
  Cyclic GFR-binding peptide
EPLTILYYVGRKPKVEQLSNDDMGVPT

SEQ ID NO: 96010 - protein, 27 aa, Artificial Sequence
  Cyclic GFR-binding peptide
EPLPIVYYVGRTPKVEQLSNDDMGVPT

SEQ ID NO: 96011 - protein, 27 aa, Artificial Sequence
  Cyclic GFR-binding peptide
SPISVLFIDDSSNVIYKQYEDDMGVPT

SEQ ID NO: 96012 - protein, 27 aa, Artificial Sequence
  Cyclic GFR-binding peptide
SPISILFIVGRTPKVYKQYEDDMGVPT

SEQ ID NO: 96013 - protein, 27 aa, Artificial Sequence
  Cyclic GFR-binding peptide
EPLTMLYYDENEKVVEQLSNDDMGVPT

SEQ ID NO: 96014 - protein, 27 aa, Artificial Sequence
  Cyclic GFR-binding peptide
EPLTILYYDSANNVVEQLSNDDMGVPT

SEQ ID NO: 96015 - protein, 27 aa, Artificial Sequence
  Cyclic GFR-binding peptide
EPLPIVYYVGRKPKVEQLSNDDMGVPT

SEQ ID NO: 96016 - protein, 27 aa, Artificial Sequence
  Cyclic GFR-binding peptide
EPLPIVYYDSANNVVEQLSNDDMGVPT

SEQ ID NO: 96017 - protein, 27 aa, Artificial Sequence
  Cyclic GFR-binding peptide
EPLTILYYVGRTPKVEQLSNDDMGVPT

SEQ ID NO: 96018 - protein, 27 aa, Artificial Sequence
  Cyclic GFR-binding peptide
SPISILFIIGKTPKIYKQYEDDMGVPT

SEQ ID NO: 96019 - protein, 27 aa, Artificial Sequence
  Cyclic GFR-binding peptide
SPISILFIDSANNVVYKQYEDDMGVPT

SEQ ID NO: 96020 - protein, 27 aa, Artificial Sequence
  Cyclic GFR-binding peptide
EPLPVVYYDDSSNVIEQLSNDDMGVPT

SEQ ID NO: 96021 - protein, 27 aa, Artificial Sequence
  Cyclic GFR-binding peptide
EPLPMVYYDEYDKVVEQLSNDDMGVPT

SEQ ID NO: 96022 - protein, 27 aa, Artificial Sequence
  Cyclic GFR-binding peptide
SPISMLFIDENEKVVYKQYEDDMGVPT

SEQ ID NO: 96023 - protein, 27 aa, Artificial Sequence
  Cyclic GFR-binding peptide
EPLPMVYYDENEKVVEQLSNDDMGVPT

SEQ ID NO: 96024 - protein, 27 aa, Artificial Sequence
  Cyclic GFR-binding peptide
SPISMLFIDEYDKVVYKQYEDDMGVPT

SEQ ID NO: 96025 - protein, 27 aa, Artificial Sequence
  Cyclic GFR-binding peptide
SAISILYLDSANNVVLKNYQDDMGVPT

SEQ ID NO: 96026 - protein, 27 aa, Artificial Sequence
  Cyclic GFR-binding peptide
EPLTILYYIGKTPKIEQLSNDDMGVPT

SEQ ID NO: 96027 - protein, 27 aa, Artificial Sequence
  Cyclic GFR-binding peptide
SPISILFIVGRKPKVYKQYEDDMGVPT

SEQ ID NO: 96028 - protein, 27 aa, Artificial Sequence
  Cyclic GFR-binding peptide
NAISILYFDSANNVVLKKYRDDMGVPT

SEQ ID NO: 96029 - protein, 27 aa, Artificial Sequence
  Cyclic GFR-binding peptide
EPLTVLYYDDSSNVIEQLSNDDMGVPT

SEQ ID NO: 96030 - protein, 29 aa, Artificial Sequence
  Cyclic GFR-binding peptide
DDMGVPTVTAKKLKPKKRVYEIKRVQVPR

SEQ ID NO: 96031 - protein, 29 aa, Artificial Sequence
  Cyclic GFR-binding peptide
DDMGVPTVQVEKLKPKKRVYEVKAVKVSR

SEQ ID NO: 96032 - protein, 29 aa, Artificial Sequence
  Cyclic GFR-binding peptide
DDMGVPTVQVEKFIPKKRVIEVKAVKVSR

SEQ ID NO: 96033 - protein, 29 aa, Artificial Sequence
  Cyclic GFR-binding peptide
DDMGVPTVQVEKHQGQHPKIRVKAMKVSR

SEQ ID NO: 96034 - protein, 29 aa, Artificial Sequence
  Cyclic GFR-binding peptide
DDMGVPTVTAKKHQGQHPKIRIKRMQVPR

SEQ ID NO: 96035 - protein, 29 aa, Artificial Sequence
  Cyclic GFR-binding peptide
DDMGVPTSMEGLLKPKKRVYEMIQVTINS

SEQ ID NO: 96036 - protein, 29 aa, Artificial Sequence
  Cyclic GFR-binding peptide
DDMGVPTSMEGIFIPKKRVIEMIQVTINS

SEQ ID NO: 96037 - protein, 29 aa, Artificial Sequence
  Cyclic GFR-binding peptide
DDMGVPTSMEGLHQGQHPKIRMIQMTINS

SEQ ID NO: 96038 - protein, 29 aa, Artificial Sequence
  Cyclic GFR-binding peptide
DDMGVPTSMEGILKPKKRVYEMIQVTINS

SEQ ID NO: 96039 - protein, 29 aa, Artificial Sequence
  Cyclic GFR-binding peptide
DDMGVPTSMEGLFIPKKRVIEMIQVTINS

SEQ ID NO: 96040 - protein, 29 aa, Artificial Sequence
  Cyclic GFR-binding peptide
DDMGVPTVTAKKFIPKKRVIEIKRVQVPR

SEQ ID NO: 96041 - protein, 29 aa, Artificial Sequence
  Cyclic GFR-binding peptide
DDMGVPTSMEGIHQGQHPKIRMIQMTINS

SEQ ID NO: 96042 - protein, 29 aa, Artificial Sequence
  Cyclic GFR-binding peptide
RPVQVRKIEYVRKKPKLKKATVDDMGVPT

SEQ ID NO: 96043 - protein, 29 aa, Artificial Sequence
  Cyclic GFR-binding peptide
RSVKVAKVEYVRKKPKLKEVQVDDMGVPT

SEQ ID NO: 96044 - protein, 29 aa, Artificial Sequence
  Cyclic GFR-binding peptide
RSVKVAKVEIVRKKPIFKEVQVDDMGVPT

SEQ ID NO: 96045 - protein, 29 aa, Artificial Sequence
  Cyclic GFR-binding peptide
RSVKMAKVRIKPHQGQHKEVQVDDMGVPT

SEQ ID NO: 96046 - protein, 29 aa, Artificial Sequence
  Cyclic GFR-binding peptide
RPVQMRKIRIKPHQGQHKKATVDDMGVPT

SEQ ID NO: 96047 - protein, 29 aa, Artificial Sequence
  Cyclic GFR-binding peptide
SNITVQIMEYVRKKPKLLGEMSDDMGVPT

SEQ ID NO: 96048 - protein, 29 aa, Artificial Sequence
  Cyclic GFR-binding peptide
SNITVQIMEIVRKKPIFIGEMSDDMGVPT

SEQ ID NO: 96049 - protein, 29 aa, Artificial Sequence
  Cyclic GFR-binding peptide
SNITMQIMRIKPHQGQHLGEMSDDMGVPT

SEQ ID NO: 96050 - protein, 29 aa, Artificial Sequence
  Cyclic GFR-binding peptide
SNITVQIMEYVRKKPKLIGEMSDDMGVPT

SEQ ID NO: 96051 - protein, 29 aa, Artificial Sequence
  Cyclic GFR-binding peptide
SNITVQIMEIVRKKPIFLGEMSDDMGVPT

SEQ ID NO: 96052 - protein, 29 aa, Artificial Sequence
  Cyclic GFR-binding peptide
RPVQVRKIEIVRKKPIFKKATVDDMGVPT

SEQ ID NO: 96053 - protein, 29 aa, Artificial Sequence
  Cyclic GFR-binding peptide
SNITMQIMRIKPHQGQHIGEMSDDMGVPT

SEQ ID NO: 96054 - protein, 27 aa, Artificial Sequence
  Cyclic GFR-binding peptide
DDMGVPTEYKFKVKPTRGVLYLISIPE

SEQ ID NO: 96055 - protein, 27 aa, Artificial Sequence
  Cyclic GFR-binding peptide
DDMGVPTEYKFKTPVGMDDLYLVSIPE

SEQ ID NO: 96056 - protein, 27 aa, Artificial Sequence
  Cyclic GFR-binding peptide
DDMGVPTEYQKYVKPKRGVIYLISIPS

SEQ ID NO: 96057 - protein, 27 aa, Artificial Sequence
  Cyclic GFR-binding peptide
DDMGVPTEYQKYVVKDYEDIYLMSIPS

SEQ ID NO: 96058 - protein, 27 aa, Artificial Sequence
  Cyclic GFR-binding peptide
DDMGVPTEYKFKIKPTKGILYLISIPE

SEQ ID NO: 96059 - protein, 27 aa, Artificial Sequence
  Cyclic GFR-binding peptide
DDMGVPTYHYKLYTVVGKDKYLISIPS

SEQ ID NO: 96060 - protein, 27 aa, Artificial Sequence
  Cyclic GFR-binding peptide
DDMGVPTRYKKLYTVVGKDFYLISIAN

SEQ ID NO: 96061 - protein, 27 aa, Artificial Sequence
  Cyclic GFR-binding peptide
DDMGVPTEYQKYVVNNAADIYLISIPS

SEQ ID NO: 96062 - protein, 27 aa, Artificial Sequence
  Cyclic GFR-binding peptide
DDMGVPTEYQKYVKPTRGVIYLISIPS

SEQ ID NO: 96063 - protein, 27 aa, Artificial Sequence
  Cyclic GFR-binding peptide
DDMGVPTEYQKYTPVGMDDIYLVSIPS

SEQ ID NO: 96064 - protein, 27 aa, Artificial Sequence
  Cyclic GFR-binding peptide
DDMGVPTEYKFKVVKDYEDLYLMSIPE

SEQ ID NO: 96065 - protein, 27 aa, Artificial Sequence
  Cyclic GFR-binding peptide
DDMGVPTEYKFKVVNNAADLYLISIPE

SEQ ID NO: 96066 - protein, 27 aa, Artificial Sequence
  Cyclic GFR-binding peptide
DDMGVPTEYQKYVVKENEDIYLMSIPS

SEQ ID NO: 96067 - protein, 27 aa, Artificial Sequence
  Cyclic GFR-binding peptide
DDMGVPTEYQKYIKPTKGIIYLISIPS

SEQ ID NO: 96068 - protein, 27 aa, Artificial Sequence
  Cyclic GFR-binding peptide
DDMGVPTRYKKLVVNNAADFYLISIAN

SEQ ID NO: 96069 - protein, 27 aa, Artificial Sequence
  Cyclic GFR-binding peptide
DDMGVPTYHYKLVVNNAADKYLISIPS

SEQ ID NO: 96070 - protein, 27 aa, Artificial Sequence
  Cyclic GFR-binding peptide
DDMGVPTEYKFKIVNNSSDLYLVSIPE

SEQ ID NO: 96071 - protein, 27 aa, Artificial Sequence
  Cyclic GFR-binding peptide
DDMGVPTEYQKYIVNSSDDIYLVSIPS

SEQ ID NO: 96072 - protein, 27 aa, Artificial Sequence
  Cyclic GFR-binding peptide
DDMGVPTEYKFKIVNSSDDLYLVSIPE

SEQ ID NO: 96073 - protein, 27 aa, Artificial Sequence
  Cyclic GFR-binding peptide
DDMGVPTEYKFKVKPKRGVLYLISIPE

SEQ ID NO: 96074 - protein, 27 aa, Artificial Sequence
  Cyclic GFR-binding peptide
DDMGVPTEYQKYYTVVGKDIYLISIPS

SEQ ID NO: 96075 - protein, 27 aa, Artificial Sequence
  Cyclic GFR-binding peptide
DDMGVPTEYKFKVVKENEDLYLMSIPE

SEQ ID NO: 96076 - protein, 27 aa, Artificial Sequence
  Cyclic GFR-binding peptide
DDMGVPTEYQKYIVNNSSDIYLVSIPS

SEQ ID NO: 96077 - protein, 27 aa, Artificial Sequence
  Cyclic GFR-binding peptide
DDMGVPTEYKFKYTVVGKDLYLISIPE

SEQ ID NO: 96078 - protein, 27 aa, Artificial Sequence
  Cyclic GFR-binding peptide
EPISILYLVGRTPKVKFKYEDDMGVPT

SEQ ID NO: 96079 - protein, 27 aa, Artificial Sequence
  Cyclic GFR-binding peptide
EPISVLYLDDMGVPTKFKYEDDMGVPT

SEQ ID NO: 96080 - protein, 27 aa, Artificial Sequence
  Cyclic GFR-binding peptide
SPISILYIVGRKPKVYKQYEDDMGVPT

SEQ ID NO: 96081 - protein, 27 aa, Artificial Sequence
  Cyclic GFR-binding peptide
SPISMLYIDEYDKVVYKQYEDDMGVPT

SEQ ID NO: 96082 - protein, 27 aa, Artificial Sequence
  Cyclic GFR-binding peptide
EPISILYLIGKTPKIKFKYEDDMGVPT

SEQ ID NO: 96083 - protein, 27 aa, Artificial Sequence
  Cyclic GFR-binding peptide
SPISILYKDKGVVTYLKYHYDDMGVPT

SEQ ID NO: 96084 - protein, 27 aa, Artificial Sequence
  Cyclic GFR-binding peptide
NAISILYFDKGVVTYLKKYRDDMGVPT

SEQ ID NO: 96085 - protein, 27 aa, Artificial Sequence
  Cyclic GFR-binding peptide
SPISILYIDAANNVVYKQYEDDMGVPT

SEQ ID NO: 96086 - protein, 27 aa, Artificial Sequence
  Cyclic GFR-binding peptide
SPISILYIVGRTPKVYKQYEDDMGVPT

SEQ ID NO: 96087 - protein, 27 aa, Artificial Sequence
  Cyclic GFR-binding peptide
SPISVLYIDDMGVPTYKQYEDDMGVPT

SEQ ID NO: 96088 - protein, 27 aa, Artificial Sequence
  Cyclic GFR-binding peptide
EPISMLYLDEYDKVVKFKYEDDMGVPT

SEQ ID NO: 96089 - protein, 27 aa, Artificial Sequence
  Cyclic GFR-binding peptide
EPISILYLDAANNVVKFKYEDDMGVPT

SEQ ID NO: 96090 - protein, 27 aa, Artificial Sequence
  Cyclic GFR-binding peptide
SPISMLYIDENEKVVYKQYEDDMGVPT

SEQ ID NO: 96091 - protein, 27 aa, Artificial Sequence
  Cyclic GFR-binding peptide
SPISILYIIGKTPKIYKQYEDDMGVPT

SEQ ID NO: 96092 - protein, 27 aa, Artificial Sequence
  Cyclic GFR-binding peptide
NAISILYFDAANNVVLKKYRDDMGVPT

SEQ ID NO: 96093 - protein, 27 aa, Artificial Sequence
  Cyclic GFR-binding peptide
SPISILYKDAANNVVLKYHYDDMGVPT

SEQ ID NO: 96094 - protein, 27 aa, Artificial Sequence
  Cyclic GFR-binding peptide
EPISVLYLDSSNNVIKFKYEDDMGVPT

SEQ ID NO: 96095 - protein, 27 aa, Artificial Sequence
  Cyclic GFR-binding peptide
SPISVLYIDDSSNVIYKQYEDDMGVPT

SEQ ID NO: 96096 - protein, 27 aa, Artificial Sequence
  Cyclic GFR-binding peptide
EPISVLYLDDSSNVIKFKYEDDMGVPT

SEQ ID NO: 96097 - protein, 27 aa, Artificial Sequence
  Cyclic GFR-binding peptide
EPISILYLVGRKPKVKFKYEDDMGVPT

SEQ ID NO: 96098 - protein, 27 aa, Artificial Sequence
  Cyclic GFR-binding peptide
SPISILYIDKGVVTYYKQYEDDMGVPT

SEQ ID NO: 96099 - protein, 27 aa, Artificial Sequence
  Cyclic GFR-binding peptide
EPISMLYLDENEKVVKFKYEDDMGVPT

SEQ ID NO: 96100 - protein, 27 aa, Artificial Sequence
  Cyclic GFR-binding peptide
SPISVLYIDSSNNVIYKQYEDDMGVPT

SEQ ID NO: 96101 - protein, 27 aa, Artificial Sequence
  Cyclic GFR-binding peptide
EPISILYLDKGVVTYKFKYEDDMGVPT

SEQ ID NO: 96102 - protein, 27 aa, Artificial Sequence
  Cyclic GFR-binding peptide
DDMGVPTPIKGYIIQQKDNFYLMNIPS

SEQ ID NO: 96103 - protein, 27 aa, Artificial Sequence
  Cyclic GFR-binding peptide
DDMGVPTPIKGYVVKDYEDFYLMNIPS

SEQ ID NO: 96104 - protein, 27 aa, Artificial Sequence
  Cyclic GFR-binding peptide
DDMGVPTPIKGYIVNSSDDFYLVNIPS

SEQ ID NO: 96105 - protein, 27 aa, Artificial Sequence
  Cyclic GFR-binding peptide
DDMGVPTPIKGYVVNNAADFYLINIPS

SEQ ID NO: 96106 - protein, 27 aa, Artificial Sequence
  Cyclic GFR-binding peptide
DDMGVPTPIKGYYTVVGKDFYLINIPS

SEQ ID NO: 96107 - protein, 27 aa, Artificial Sequence
  Cyclic GFR-binding peptide
DDMGVPTPIKGYLLVRGNDFYLMNIPS

SEQ ID NO: 96108 - protein, 27 aa, Artificial Sequence
  Cyclic GFR-binding peptide
DDMGVPTPIKGYVVKENEDFYLMNIPS

SEQ ID NO: 96109 - protein, 27 aa, Artificial Sequence
  Cyclic GFR-binding peptide
DDMGVPTPIKGYVVNNASDFYLINIPS

SEQ ID NO: 96110 - protein, 27 aa, Artificial Sequence
  Cyclic GFR-binding peptide
DDMGVPTPIKGYTPVGMDDFYLVNIPS

SEQ ID NO: 96111 - protein, 27 aa, Artificial Sequence
  Cyclic GFR-binding peptide
DDMGVPTPIKGYIVNNSSDFYLVNIPS

SEQ ID NO: 96112 - protein, 27 aa, Artificial Sequence
  Cyclic GFR-binding peptide
SPINMLYFNDKQQIIYGKIPDDMGVPT

SEQ ID NO: 96113 - protein, 27 aa, Artificial Sequence
  Cyclic GFR-binding peptide
SPINMLYFDEYDKVVYGKIPDDMGVPT

SEQ ID NO: 96114 - protein, 27 aa, Artificial Sequence
  Cyclic GFR-binding peptide
SPINVLYFDDSSNVIYGKIPDDMGVPT

SEQ ID NO: 96115 - protein, 27 aa, Artificial Sequence
  Cyclic GFR-binding peptide
SPINILYFDAANNVVYGKIPDDMGVPT

SEQ ID NO: 96116 - protein, 27 aa, Artificial Sequence
  Cyclic GFR-binding peptide
SPINILYFDKGVVTYYGKIPDDMGVPT

SEQ ID NO: 96117 - protein, 27 aa, Artificial Sequence
  Cyclic GFR-binding peptide
SPINMLYFDNGRVLLYGKIPDDMGVPT

SEQ ID NO: 96118 - protein, 27 aa, Artificial Sequence
  Cyclic GFR-binding peptide
SPINMLYFDENEKVVYGKIPDDMGVPT

SEQ ID NO: 96119 - protein, 27 aa, Artificial Sequence
  Cyclic GFR-binding peptide
SPINILYFDSANNVVYGKIPDDMGVPT

SEQ ID NO: 96120 - protein, 27 aa, Artificial Sequence
  Cyclic GFR-binding peptide
SPINVLYFDDMGVPTYGKIPDDMGVPT

SEQ ID NO: 96121 - protein, 27 aa, Artificial Sequence
  Cyclic GFR-binding peptide
SPINVLYFDSSNNVIYGKIPDDMGVPT

SEQ ID NO: 96122 - protein, 27 aa, Artificial Sequence
  Cyclic GFR-binding peptide
DDMGVPTEYQKYVVNNASDIYLISIPS

SEQ ID NO: 96123 - protein, 27 aa, Artificial Sequence
  Cyclic GFR-binding peptide
DDMGVPTEYQKYIIQQKDNIYLMSIPS

SEQ ID NO: 96124 - protein, 27 aa, Artificial Sequence
  Cyclic GFR-binding peptide
DDMGVPTEYQKYLLVRGNDIYLMSIPS

SEQ ID NO: 96125 - protein, 27 aa, Artificial Sequence
  Cyclic GFR-binding peptide
SPISILYIDSANNVVYKQYEDDMGVPT

SEQ ID NO: 96126 - protein, 27 aa, Artificial Sequence
  Cyclic GFR-binding peptide
SPISMLYINDKQQIIYKQYEDDMGVPT

SEQ ID NO: 96127 - protein, 27 aa, Artificial Sequence
  Cyclic GFR-binding peptide
SPISMLYIDNGRVLLYKQYEDDMGVPT

SEQ ID NO: 96128 - protein, 27 aa, Artificial Sequence
  Cyclic GFR-binding peptide
DDMGVPTPYVKLYTVVGKDFFLISLSS

SEQ ID NO: 96129 - protein, 27 aa, Artificial Sequence
  Cyclic GFR-binding peptide
DDMGVPTPYVKLIKPTKGIFFLISLSS

SEQ ID NO: 96130 - protein, 27 aa, Artificial Sequence
  Cyclic GFR-binding peptide
DDMGVPTPYVKLIIQQKDNFFLMSLSS

SEQ ID NO: 96131 - protein, 27 aa, Artificial Sequence
  Cyclic GFR-binding peptide
DDMGVPTPYVKLIVNSSDDFFLVSLSS

SEQ ID NO: 96132 - protein, 27 aa, Artificial Sequence
  Cyclic GFR-binding peptide
DDMGVPTPYVKLVKPKRGVFFLISLSS

SEQ ID NO: 96133 - protein, 27 aa, Artificial Sequence
  Cyclic GFR-binding peptide
DDMGVPTPYVKLVKPTRGVFFLISLSS

SEQ ID NO: 96134 - protein, 27 aa, Artificial Sequence
  Cyclic GFR-binding peptide
DDMGVPTPYVKLTPVGMDDFFLVSLSS

SEQ ID NO: 96135 - protein, 29 aa, Artificial Sequence
  Cyclic GFR-binding peptide
DDMGVPTPYVKLHQGQHPKIRFFLMSLSS

SEQ ID NO: 96136 - protein, 27 aa, Artificial Sequence
  Cyclic GFR-binding peptide
DDMGVPTPYVKLVVNKNEDFFLISLSS

SEQ ID NO: 96137 - protein, 27 aa, Artificial Sequence
  Cyclic GFR-binding peptide
DDMGVPTPYVKLVVNNASDFFLISLSS

SEQ ID NO: 96138 - protein, 27 aa, Artificial Sequence
  Cyclic GFR-binding peptide
DDMGVPTPYVKLVVKENEDFFLMSLSS

SEQ ID NO: 96139 - protein, 27 aa, Artificial Sequence
  Cyclic GFR-binding peptide
DDMGVPTPYVKLIVNNSSDFFLVSLSS

SEQ ID NO: 96140 - protein, 29 aa, Artificial Sequence
  Cyclic GFR-binding peptide
DDMGVPTPYVKLLKPKKRVYEFFLVSLSS

SEQ ID NO: 96141 - protein, 27 aa, Artificial Sequence
  Cyclic GFR-binding peptide
DDMGVPTPYVKLLLVRGNDFFLMSLSS

SEQ ID NO: 96142 - protein, 27 aa, Artificial Sequence
  Cyclic GFR-binding peptide
DDMGVPTPYVKLVVKDYEDFFLMSLSS

SEQ ID NO: 96143 - protein, 27 aa, Artificial Sequence
  Cyclic GFR-binding peptide
DDMGVPTPYVKLVVNNAADFFLISLSS

SEQ ID NO: 96144 - protein, 27 aa, Artificial Sequence
  Cyclic GFR-binding peptide
SSLSILFFDKGVVTYLKVYPDDMGVPT

SEQ ID NO: 96145 - protein, 27 aa, Artificial Sequence
  Cyclic GFR-binding peptide
SSLSILFFIGKTPKILKVYPDDMGVPT

SEQ ID NO: 96146 - protein, 27 aa, Artificial Sequence
  Cyclic GFR-binding peptide
SSLSMLFFNDKQQIILKVYPDDMGVPT

SEQ ID NO: 96147 - protein, 27 aa, Artificial Sequence
  Cyclic GFR-binding peptide
SSLSVLFFDDSSNVILKVYPDDMGVPT

SEQ ID NO: 96148 - protein, 27 aa, Artificial Sequence
  Cyclic GFR-binding peptide
SSLSILFFVGRKPKVLKVYPDDMGVPT

SEQ ID NO: 96149 - protein, 27 aa, Artificial Sequence
  Cyclic GFR-binding peptide
SSLSILFFVGRTPKVLKVYPDDMGVPT

SEQ ID NO: 96150 - protein, 27 aa, Artificial Sequence
  Cyclic GFR-binding peptide
SSLSVLFFDDMGVPTLKVYPDDMGVPT

SEQ ID NO: 96151 - protein, 29 aa, Artificial Sequence
  Cyclic GFR-binding peptide
SSLSMLFFRIKPHQGQHLKVYPDDMGVPT

SEQ ID NO: 96152 - protein, 27 aa, Artificial Sequence
  Cyclic GFR-binding peptide
SSLSILFFDENKNVVLKVYPDDMGVPT

SEQ ID NO: 96153 - protein, 27 aa, Artificial Sequence
  Cyclic GFR-binding peptide
SSLSILFFDSANNVVLKVYPDDMGVPT

SEQ ID NO: 96154 - protein, 27 aa, Artificial Sequence
  Cyclic GFR-binding peptide
SSLSMLFFDENEKVVLKVYPDDMGVPT

SEQ ID NO: 96155 - protein, 27 aa, Artificial Sequence
  Cyclic GFR-binding peptide
SSLSVLFFDSSNNVILKVYPDDMGVPT

SEQ ID NO: 96156 - protein, 29 aa, Artificial Sequence
  Cyclic GFR-binding peptide
SSLSVLFFEYVRKKPKLLKVYPDDMGVPT

SEQ ID NO: 96157 - protein, 27 aa, Artificial Sequence
  Cyclic GFR-binding peptide
SSLSMLFFDNGRVLLLKVYPDDMGVPT

SEQ ID NO: 96158 - protein, 27 aa, Artificial Sequence
  Cyclic GFR-binding peptide
SSLSMLFFDEYDKVVLKVYPDDMGVPT

SEQ ID NO: 96159 - protein, 27 aa, Artificial Sequence
  Cyclic GFR-binding peptide
SSLSILFFDAANNVVLKVYPDDMGVPT

SEQ ID NO: 96160 - protein, 27 aa, Artificial Sequence
  Cyclic GFR-binding peptide
DDMGVPTSMEGIIVNSSDDMIQVTINS

SEQ ID NO: 96161 - protein, 27 aa, Artificial Sequence
  Cyclic GFR-binding peptide
DDMGVPTVTAKKVVKENEDIKRMQVPR

SEQ ID NO: 96162 - protein, 27 aa, Artificial Sequence
  Cyclic GFR-binding peptide
DDMGVPTSMEGIVVKDYEDMIQMTINS

SEQ ID NO: 96163 - protein, 27 aa, Artificial Sequence
  Cyclic GFR-binding peptide
DDMGVPTVTAKKIKPTKGIIKRIQVPR

SEQ ID NO: 96164 - protein, 27 aa, Artificial Sequence
  Cyclic GFR-binding peptide
DDMGVPTSMEGIVKPTRGVMIQITINS

SEQ ID NO: 96165 - protein, 29 aa, Artificial Sequence
  Cyclic GFR-binding peptide
DDMGVPTNSLQEFIPKKRVIEYYVVPLPE

SEQ ID NO: 96166 - protein, 27 aa, Artificial Sequence
  Cyclic GFR-binding peptide
DDMGVPTVQVEKVKPKRGVVKAIKVSR

SEQ ID NO: 96167 - protein, 27 aa, Artificial Sequence
  Cyclic GFR-binding peptide
DDMGVPTVQVEKVVKENEDVKAMKVSR

SEQ ID NO: 96168 - protein, 27 aa, Artificial Sequence
  Cyclic GFR-binding peptide
DDMGVPTVTAKKIVNSSDDIKRVQVPR

SEQ ID NO: 96169 - protein, 27 aa, Artificial Sequence
  Cyclic GFR-binding peptide
DDMGVPTVQVEKIKPTKGIVKAIKVSR

SEQ ID NO: 96170 - protein, 29 aa, Artificial Sequence
  Cyclic GFR-binding peptide
DDMGVPTNSLQEFIPKKRVIEYYLVTLPE

SEQ ID NO: 96171 - protein, 27 aa, Artificial Sequence
  Cyclic GFR-binding peptide
DDMGVPTVQVEKIVNSSDDVKAVKVSR

SEQ ID NO: 96172 - protein, 27 aa, Artificial Sequence
  Cyclic GFR-binding peptide
DDMGVPTVTAKKVKPKRGVIKRIQVPR

SEQ ID NO: 96173 - protein, 27 aa, Artificial Sequence
  Cyclic GFR-binding peptide
DDMGVPTVQVEKVKPTRGVVKAIKVSR

SEQ ID NO: 96174 - protein, 27 aa, Artificial Sequence
  Cyclic GFR-binding peptide
DDMGVPTVTAKKVKPTRGVIKRIQVPR

SEQ ID NO: 96175 - protein, 29 aa, Artificial Sequence
  Cyclic GFR-binding peptide
DDMGVPTNSLQELKPKKRVYEYYLVTLPE

SEQ ID NO: 96176 - protein, 27 aa, Artificial Sequence
  Cyclic GFR-binding peptide
DDMGVPTSMEGIVKPKRGVMIQITINS

SEQ ID NO: 96177 - protein, 27 aa, Artificial Sequence
  Cyclic GFR-binding peptide
DDMGVPTSMEGIVVKENEDMIQMTINS

SEQ ID NO: 96178 - protein, 27 aa, Artificial Sequence
  Cyclic GFR-binding peptide
DDMGVPTSMEGIIKPTKGIMIQITINS

SEQ ID NO: 96179 - protein, 29 aa, Artificial Sequence
  Cyclic GFR-binding peptide
DDMGVPTNSLQEHQGQHPKIRYYLMTLPE

SEQ ID NO: 96180 - protein, 27 aa, Artificial Sequence
  Cyclic GFR-binding peptide
DDMGVPTVTAKKVVKDYEDIKRMQVPR

SEQ ID NO: 96181 - protein, 29 aa, Artificial Sequence
  Cyclic GFR-binding peptide
DDMGVPTNSLQEHQGQHPKIRYYVMPLPE

SEQ ID NO: 96182 - protein, 29 aa, Artificial Sequence
  Cyclic GFR-binding peptide
DDMGVPTNSLQELKPKKRVYEYYVVPLPE

SEQ ID NO: 96183 - protein, 27 aa, Artificial Sequence
  Cyclic GFR-binding peptide
DDMGVPTVQVEKVVKDYEDVKAMKVSR

SEQ ID NO: 96184 - protein, 27 aa, Artificial Sequence
  Cyclic GFR-binding peptide
SNITVQIMDDSSNVIIGEMSDDMGVPT

SEQ ID NO: 96185 - protein, 27 aa, Artificial Sequence
  Cyclic GFR-binding peptide
RPVQMRKIDENEKVVKKATVDDMGVPT

SEQ ID NO: 96186 - protein, 27 aa, Artificial Sequence
  Cyclic GFR-binding peptide
SNITMQIMDEYDKVVIGEMSDDMGVPT

SEQ ID NO: 96187 - protein, 27 aa, Artificial Sequence
  Cyclic GFR-binding peptide
RPVQIRKIIGKTPKIKKATVDDMGVPT

SEQ ID NO: 96188 - protein, 27 aa, Artificial Sequence
  Cyclic GFR-binding peptide
SNITIQIMVGRTPKVIGEMSDDMGVPT

SEQ ID NO: 96189 - protein, 29 aa, Artificial Sequence
  Cyclic GFR-binding peptide
EPLPVVYYEIVRKKPIFEQLSNDDMGVPT

SEQ ID NO: 96190 - protein, 27 aa, Artificial Sequence
  Cyclic GFR-binding peptide
RSVKIAKVVGRKPKVKEVQVDDMGVPT

SEQ ID NO: 96191 - protein, 27 aa, Artificial Sequence
  Cyclic GFR-binding peptide
RSVKMAKVDENEKVVKEVQVDDMGVPT

SEQ ID NO: 96192 - protein, 27 aa, Artificial Sequence
  Cyclic GFR-binding peptide
RPVQVRKIDDSSNVIKKATVDDMGVPT

SEQ ID NO: 96193 - protein, 27 aa, Artificial Sequence
  Cyclic GFR-binding peptide
RSVKIAKVIGKTPKIKEVQVDDMGVPT

SEQ ID NO: 96194 - protein, 29 aa, Artificial Sequence
  Cyclic GFR-binding peptide
EPLTVLYYEIVRKKPIFEQLSNDDMGVPT

SEQ ID NO: 96195 - protein, 27 aa, Artificial Sequence
  Cyclic GFR-binding peptide
RSVKVAKVDDSSNVIKEVQVDDMGVPT

SEQ ID NO: 96196 - protein, 27 aa, Artificial Sequence
  Cyclic GFR-binding peptide
RPVQIRKIVGRKPKVKKATVDDMGVPT

SEQ ID NO: 96197 - protein, 27 aa, Artificial Sequence
  Cyclic GFR-binding peptide
RSVKIAKVVGRTPKVKEVQVDDMGVPT

SEQ ID NO: 96198 - protein, 27 aa, Artificial Sequence
  Cyclic GFR-binding peptide
RPVQIRKIVGRTPKVKKATVDDMGVPT

SEQ ID NO: 96199 - protein, 29 aa, Artificial Sequence
  Cyclic GFR-binding peptide
EPLTVLYYEYVRKKPKLEQLSNDDMGVPT

SEQ ID NO: 96200 - protein, 27 aa, Artificial Sequence
  Cyclic GFR-binding peptide
SNITIQIMVGRKPKVIGEMSDDMGVPT

SEQ ID NO: 96201 - protein, 27 aa, Artificial Sequence
  Cyclic GFR-binding peptide
SNITMQIMDENEKVVIGEMSDDMGVPT

SEQ ID NO: 96202 - protein, 27 aa, Artificial Sequence
  Cyclic GFR-binding peptide
SNITIQIMIGKTPKIIGEMSDDMGVPT

SEQ ID NO: 96203 - protein, 29 aa, Artificial Sequence
  Cyclic GFR-binding peptide
EPLTMLYYRIKPHQGQHEQLSNDDMGVPT

SEQ ID NO: 96204 - protein, 27 aa, Artificial Sequence
  Cyclic GFR-binding peptide
RPVQMRKIDEYDKVVKKATVDDMGVPT

SEQ ID NO: 96205 - protein, 29 aa, Artificial Sequence
  Cyclic GFR-binding peptide
EPLPMVYYRIKPHQGQHEQLSNDDMGVPT

SEQ ID NO: 96206 - protein, 29 aa, Artificial Sequence
  Cyclic GFR-binding peptide
EPLPVVYYEYVRKKPKLEQLSNDDMGVPT

SEQ ID NO: 96207 - protein, 27 aa, Artificial Sequence
  Cyclic GFR-binding peptide
RSVKMAKVDEYDKVVKEVQVDDMGVPT

SEQ ID NO: 96208 - protein, 27 aa, Artificial Sequence
  Cyclic GFR-binding peptide
DDMGVPTRYKKLIIQQKDNFYLMSIAN

SEQ ID NO: 96209 - protein, 27 aa, Artificial Sequence
  Cyclic GFR-binding peptide
DDMGVPTRYKKLLLVRGNDFYLMSIAN

SEQ ID NO: 96210 - protein, 27 aa, Artificial Sequence
  Cyclic GFR-binding peptide
NAISMLYFNDKQQIILKKYRDDMGVPT

SEQ ID NO: 96211 - protein, 27 aa, Artificial Sequence
  Cyclic GFR-binding peptide
NAISMLYFDNGRVLLLKKYRDDMGVPT

SEQ ID NO: 96212 - protein, 27 aa, Artificial Sequence
  Cyclic GFR-binding peptide
DDMGVPTEYKFKVVNKNEDLYLISIPE

SEQ ID NO: 96213 - protein, 27 aa, Artificial Sequence
  Cyclic GFR-binding peptide
DDMGVPTPIKGYVKPTRGVFYLINIPS

SEQ ID NO: 96214 - protein, 27 aa, Artificial Sequence
  Cyclic GFR-binding peptide
DDMGVPTEYKFKLLVRGNDLYLMSIPE

SEQ ID NO: 96215 - protein, 27 aa, Artificial Sequence
  Cyclic GFR-binding peptide
DDMGVPTYHYKLVVNKNEDKYLISIPS

SEQ ID NO: 96216 - protein, 27 aa, Artificial Sequence
  Cyclic GFR-binding peptide
DDMGVPTRHKRLLLVRGNDYYLMSTAS

SEQ ID NO: 96217 - protein, 27 aa, Artificial Sequence
  Cyclic GFR-binding peptide
DDMGVPTYHYKLLLVRGNDKYLMSIPS

SEQ ID NO: 96218 - protein, 27 aa, Artificial Sequence
  Cyclic GFR-binding peptide
DDMGVPTRHKRLVVNKNEDYYLISTAS

SEQ ID NO: 96219 - protein, 27 aa, Artificial Sequence
  Cyclic GFR-binding peptide
DDMGVPTRYKKLVVNKNEDFYLISIAN

SEQ ID NO: 96220 - protein, 27 aa, Artificial Sequence
  Cyclic GFR-binding peptide
DDMGVPTPIKGYVVNKNEDFYLINIPS

SEQ ID NO: 96221 - protein, 27 aa, Artificial Sequence
  Cyclic GFR-binding peptide
DDMGVPTPIKGYIKPTKGIFYLINIPS

SEQ ID NO: 96222 - protein, 27 aa, Artificial Sequence
  Cyclic GFR-binding peptide
DDMGVPTRHKRLYTVVGKDYYLISTAS

SEQ ID NO: 96223 - protein, 27 aa, Artificial Sequence
  Cyclic GFR-binding peptide
DDMGVPTEYKFKVVNNASDLYLISIPE

SEQ ID NO: 96224 - protein, 27 aa, Artificial Sequence
  Cyclic GFR-binding peptide
DDMGVPTRHKRLIIQQKDNYYLMSTAS

SEQ ID NO: 96225 - protein, 27 aa, Artificial Sequence
  Cyclic GFR-binding peptide
DDMGVPTEYKFKIIQQKDNLYLMSIPE

SEQ ID NO: 96226 - protein, 27 aa, Artificial Sequence
  Cyclic GFR-binding peptide
DDMGVPTPIKGYVKPKRGVFYLINIPS

SEQ ID NO: 96227 - protein, 27 aa, Artificial Sequence
  Cyclic GFR-binding peptide
DDMGVPTRHKRLVVNNASDYYLISTAS

SEQ ID NO: 96228 - protein, 27 aa, Artificial Sequence
  Cyclic GFR-binding peptide
DDMGVPTYHYKLVVNNASDKYLISIPS

SEQ ID NO: 96229 - protein, 27 aa, Artificial Sequence
  Cyclic GFR-binding peptide
DDMGVPTYHYKLIIQQKDNKYLMSIPS

SEQ ID NO: 96230 - protein, 27 aa, Artificial Sequence
  Cyclic GFR-binding peptide
DDMGVPTRHKRLVVNNAADYYLISTAS

SEQ ID NO: 96231 - protein, 27 aa, Artificial Sequence
  Cyclic GFR-binding peptide
EPISILYLDENKNVVKFKYEDDMGVPT

SEQ ID NO: 96232 - protein, 27 aa, Artificial Sequence
  Cyclic GFR-binding peptide
SPINILYFVGRTPKVYGKIPDDMGVPT

SEQ ID NO: 96233 - protein, 27 aa, Artificial Sequence
  Cyclic GFR-binding peptide
EPISMLYLDNGRVLLKFKYEDDMGVPT

SEQ ID NO: 96234 - protein, 27 aa, Artificial Sequence
  Cyclic GFR-binding peptide
SPISILYKDENKNVVLKYHYDDMGVPT

SEQ ID NO: 96235 - protein, 27 aa, Artificial Sequence
  Cyclic GFR-binding peptide
SATSMLYYDNGRVLLLRKHRDDMGVPT

SEQ ID NO: 96236 - protein, 27 aa, Artificial Sequence
  Cyclic GFR-binding peptide
SPISMLYKDNGRVLLLKYHYDDMGVPT

SEQ ID NO: 96237 - protein, 27 aa, Artificial Sequence
  Cyclic GFR-binding peptide
SATSILYYDENKNVVLRKHRDDMGVPT

SEQ ID NO: 96238 - protein, 27 aa, Artificial Sequence
  Cyclic GFR-binding peptide
NAISILYFDENKNVVLKKYRDDMGVPT

SEQ ID NO: 96239 - protein, 27 aa, Artificial Sequence
  Cyclic GFR-binding peptide
SPINILYFDENKNVVYGKIPDDMGVPT

SEQ ID NO: 96240 - protein, 27 aa, Artificial Sequence
  Cyclic GFR-binding peptide
SPINILYFIGKTPKIYGKIPDDMGVPT

SEQ ID NO: 96241 - protein, 27 aa, Artificial Sequence
  Cyclic GFR-binding peptide
SATSILYYDKGVVTYLRKHRDDMGVPT

SEQ ID NO: 96242 - protein, 27 aa, Artificial Sequence
  Cyclic GFR-binding peptide
EPISILYLDSANNVVKFKYEDDMGVPT

SEQ ID NO: 96243 - protein, 27 aa, Artificial Sequence
  Cyclic GFR-binding peptide
SATSMLYYNDKQQIILRKHRDDMGVPT

SEQ ID NO: 96244 - protein, 27 aa, Artificial Sequence
  Cyclic GFR-binding peptide
EPISMLYLNDKQQIIKFKYEDDMGVPT

SEQ ID NO: 96245 - protein, 27 aa, Artificial Sequence
  Cyclic GFR-binding peptide
SPINILYFVGRKPKVYGKIPDDMGVPT

SEQ ID NO: 96246 - protein, 27 aa, Artificial Sequence
  Cyclic GFR-binding peptide
SATSILYYDSANNVVLRKHRDDMGVPT

SEQ ID NO: 96247 - protein, 27 aa, Artificial Sequence
  Cyclic GFR-binding peptide
SPISILYKDSANNVVLKYHYDDMGVPT

SEQ ID NO: 96248 - protein, 27 aa, Artificial Sequence
  Cyclic GFR-binding peptide
SPISMLYKNDKQQIILKYHYDDMGVPT

SEQ ID NO: 96249 - protein, 27 aa, Artificial Sequence
  Cyclic GFR-binding peptide
SATSILYYDAANNVVLRKHRDDMGVPT

SEQ ID NO: 96250 - protein, 27 aa, Artificial Sequence
  Cyclic GFR-binding peptide
DDMGVPTSMEGIIIQQKDNMIQMTINS

SEQ ID NO: 96251 - protein, 27 aa, Artificial Sequence
  Cyclic GFR-binding peptide
DDMGVPTSMEGLVKPKRGVMIQITINS

SEQ ID NO: 96252 - protein, 27 aa, Artificial Sequence
  Cyclic GFR-binding peptide
DDMGVPTSMEGLVVNNASDMIQITINS

SEQ ID NO: 96253 - protein, 27 aa, Artificial Sequence
  Cyclic GFR-binding peptide
DDMGVPTSMEGILLVRGNDMIQMTINS

SEQ ID NO: 96254 - protein, 27 aa, Artificial Sequence
  Cyclic GFR-binding peptide
DDMGVPTSMEGLIKPTKGIMIQITINS

SEQ ID NO: 96255 - protein, 27 aa, Artificial Sequence
  Cyclic GFR-binding peptide
DDMGVPTSMEGLIVNSSDDMIQVTINS

SEQ ID NO: 96256 - protein, 27 aa, Artificial Sequence
  Cyclic GFR-binding peptide
DDMGVPTSMEGIVVNNASDMIQITINS

SEQ ID NO: 96257 - protein, 27 aa, Artificial Sequence
  Cyclic GFR-binding peptide
DDMGVPTSMEGLVVNNAADMIQITINS

SEQ ID NO: 96258 - protein, 27 aa, Artificial Sequence
  Cyclic GFR-binding peptide
DDMGVPTSMEGLLLVRGNDMIQMTINS

SEQ ID NO: 96259 - protein, 27 aa, Artificial Sequence
  Cyclic GFR-binding peptide
DDMGVPTSMEGLIIQQKDNMIQMTINS

SEQ ID NO: 96260 - protein, 27 aa, Artificial Sequence
  Cyclic GFR-binding peptide
DDMGVPTSMEGIVVNNAADMIQITINS

SEQ ID NO: 96261 - protein, 27 aa, Artificial Sequence
  Cyclic GFR-binding peptide
DDMGVPTSMEGLVKPTRGVMIQITINS

SEQ ID NO: 96262 - protein, 27 aa, Artificial Sequence
  Cyclic GFR-binding peptide
SNITMQIMNDKQQIIIGEMSDDMGVPT

SEQ ID NO: 96263 - protein, 27 aa, Artificial Sequence
  Cyclic GFR-binding peptide
SNITIQIMVGRKPKVLGEMSDDMGVPT

SEQ ID NO: 96264 - protein, 27 aa, Artificial Sequence
  Cyclic GFR-binding peptide
SNITIQIMDSANNVVLGEMSDDMGVPT

SEQ ID NO: 96265 - protein, 27 aa, Artificial Sequence
  Cyclic GFR-binding peptide
SNITMQIMDNGRVLLIGEMSDDMGVPT

SEQ ID NO: 96266 - protein, 27 aa, Artificial Sequence
  Cyclic GFR-binding peptide
SNITIQIMIGKTPKILGEMSDDMGVPT

SEQ ID NO: 96267 - protein, 27 aa, Artificial Sequence
  Cyclic GFR-binding peptide
SNITVQIMDDSSNVILGEMSDDMGVPT

SEQ ID NO: 96268 - protein, 27 aa, Artificial Sequence
  Cyclic GFR-binding peptide
SNITIQIMDSANNVVIGEMSDDMGVPT

SEQ ID NO: 96269 - protein, 27 aa, Artificial Sequence
  Cyclic GFR-binding peptide
SNITIQIMDAANNVVLGEMSDDMGVPT

SEQ ID NO: 96270 - protein, 27 aa, Artificial Sequence
  Cyclic GFR-binding peptide
SNITMQIMDNGRVLLLGEMSDDMGVPT

SEQ ID NO: 96271 - protein, 27 aa, Artificial Sequence
  Cyclic GFR-binding peptide
SNITMQIMNDKQQIILGEMSDDMGVPT

SEQ ID NO: 96272 - protein, 27 aa, Artificial Sequence
  Cyclic GFR-binding peptide
SNITIQIMDAANNVVIGEMSDDMGVPT

SEQ ID NO: 96273 - protein, 27 aa, Artificial Sequence
  Cyclic GFR-binding peptide
SNITIQIMVGRTPKVLGEMSDDMGVPT

SEQ ID NO: 96274 - protein, 27 aa, Artificial Sequence
  Cyclic GFR-binding peptide
DDMGVPTQYNKLVVNKNEDLYLISIAS

SEQ ID NO: 96275 - protein, 27 aa, Artificial Sequence
  Cyclic GFR-binding peptide
DDMGVPTQYNKLVVNNAADLYLISIAS

SEQ ID NO: 96276 - protein, 27 aa, Artificial Sequence
  Cyclic GFR-binding peptide
DDMGVPTQYNKLIIQQKDNLYLMSIAS

SEQ ID NO: 96277 - protein, 27 aa, Artificial Sequence
  Cyclic GFR-binding peptide
DDMGVPTQYNKLLLVRGNDLYLMSIAS

SEQ ID NO: 96278 - protein, 27 aa, Artificial Sequence
  Cyclic GFR-binding peptide
DDMGVPTQYNKLYTVVGKDLYLISIAS

SEQ ID NO: 96279 - protein, 27 aa, Artificial Sequence
  Cyclic GFR-binding peptide
SAISILYLDENKNVVLKNYQDDMGVPT

SEQ ID NO: 96280 - protein, 27 aa, Artificial Sequence
  Cyclic GFR-binding peptide
SAISILYLDAANNVVLKNYQDDMGVPT

SEQ ID NO: 96281 - protein, 27 aa, Artificial Sequence
  Cyclic GFR-binding peptide
SAISMLYLNDKQQIILKNYQDDMGVPT

SEQ ID NO: 96282 - protein, 27 aa, Artificial Sequence
  Cyclic GFR-binding peptide
SAISMLYLDNGRVLLLKNYQDDMGVPT

SEQ ID NO: 96283 - protein, 27 aa, Artificial Sequence
  Cyclic GFR-binding peptide
SAISILYLDKGVVTYLKNYQDDMGVPT

SEQ ID NO: 96284 - protein, 27 aa, Artificial Sequence
  Cyclic GFR-binding peptide
DKGVVTYRYKKLIKPTKGIFYLISIAN

SEQ ID NO: 96285 - protein, 29 aa, Artificial Sequence
  Cyclic GFR-binding peptide
DKGVVTYRHKRLFIPKKRVIEYYLVSTAS

SEQ ID NO: 96286 - protein, 27 aa, Artificial Sequence
  Cyclic GFR-binding peptide
DKGVVTYYHYKLVVKDYEDKYLMSIPS

SEQ ID NO: 96287 - protein, 27 aa, Artificial Sequence
  Cyclic GFR-binding peptide
DKGVVTYQYNKLIVNNSSDLYLVSIAS

SEQ ID NO: 96288 - protein, 27 aa, Artificial Sequence
  Cyclic GFR-binding peptide
DKGVVTYRYKKLVVKDYEDFYLMSIAN

SEQ ID NO: 96289 - protein, 27 aa, Artificial Sequence
  Cyclic GFR-binding peptide
DKGVVTYRYKKLVKPTRGVFYLISIAN

SEQ ID NO: 96290 - protein, 27 aa, Artificial Sequence
  Cyclic GFR-binding peptide
DKGVVTYRHKRLVVKENEDYYLMSTAS

SEQ ID NO: 96291 - protein, 27 aa, Artificial Sequence
  Cyclic GFR-binding peptide
DKGVVTYYHYKLIKPTKGIKYLISIPS

SEQ ID NO: 96292 - protein, 29 aa, Artificial Sequence
  Cyclic GFR-binding peptide
DKGVVTYRYKKLFIPKKRVIEFYLVSIAN

SEQ ID NO: 96293 - protein, 27 aa, Artificial Sequence
  Cyclic GFR-binding peptide
DKGVVTYYHYKLVVKENEDKYLMSIPS

SEQ ID NO: 96294 - protein, 27 aa, Artificial Sequence
  Cyclic GFR-binding peptide
DKGVVTYRHKRLVKPKRGVYYLISTAS

SEQ ID NO: 96295 - protein, 27 aa, Artificial Sequence
  Cyclic GFR-binding peptide
DKGVVTYYHYKLVKPKRGVKYLISIPS

SEQ ID NO: 96296 - protein, 29 aa, Artificial Sequence
  Cyclic GFR-binding peptide
DKGVVTYQYNKLFIPKKRVIELYLVSIAS

SEQ ID NO: 96297 - protein, 27 aa, Artificial Sequence
  Cyclic GFR-binding peptide
DKGVVTYQYNKLVKPTRGVLYLISIAS

SEQ ID NO: 96298 - protein, 27 aa, Artificial Sequence
  Cyclic GFR-binding peptide
DKGVVTYRYKKLVVKENEDFYLMSIAN

SEQ ID NO: 96299 - protein, 27 aa, Artificial Sequence
  Cyclic GFR-binding peptide
DKGVVTYQYNKLTPVGMDDLYLVSIAS

SEQ ID NO: 96300 - protein, 27 aa, Artificial Sequence
  Cyclic GFR-binding peptide
DKGVVTYRYKKLTPVGMDDFYLVSIAN

SEQ ID NO: 96301 - protein, 27 aa, Artificial Sequence
  Cyclic GFR-binding peptide
DKGVVTYRYKKLVKPKRGVFYLISIAN

SEQ ID NO: 96302 - protein, 27 aa, Artificial Sequence
  Cyclic GFR-binding peptide
DKGVVTYQYNKLVVKENEDLYLMSIAS

SEQ ID NO: 96303 - protein, 27 aa, Artificial Sequence
  Cyclic GFR-binding peptide
DKGVVTYYHYKLIVNSSDDKYLVSIPS

SEQ ID NO: 96304 - protein, 27 aa, Artificial Sequence
  Cyclic GFR-binding peptide
DKGVVTYQYNKLVKPKRGVLYLISIAS

SEQ ID NO: 96305 - protein, 27 aa, Artificial Sequence
  Cyclic GFR-binding peptide
DKGVVTYRYKKLIVNNSSDFYLVSIAN

SEQ ID NO: 96306 - protein, 27 aa, Artificial Sequence
  Cyclic GFR-binding peptide
DKGVVTYRYKKLIVNSSDDFYLVSIAN

SEQ ID NO: 96307 - protein, 27 aa, Artificial Sequence
  Cyclic GFR-binding peptide
DKGVVTYRHKRLVKPTRGVYYLISTAS

SEQ ID NO: 96308 - protein, 29 aa, Artificial Sequence
  Cyclic GFR-binding peptide
DKGVVTYYHYKLFIPKKRVIEKYLVSIPS

SEQ ID NO: 96309 - protein, 27 aa, Artificial Sequence
  Cyclic GFR-binding peptide
DKGVVTYRHKRLIKPTKGIYYLISTAS

SEQ ID NO: 96310 - protein, 27 aa, Artificial Sequence
  Cyclic GFR-binding peptide
DKGVVTYRHKRLTPVGMDDYYLVSTAS

SEQ ID NO: 96311 - protein, 27 aa, Artificial Sequence
  Cyclic GFR-binding peptide
DKGVVTYYHYKLTPVGMDDKYLVSIPS

SEQ ID NO: 96312 - protein, 27 aa, Artificial Sequence
  Cyclic GFR-binding peptide
DKGVVTYYHYKLIVNNSSDKYLVSIPS

SEQ ID NO: 96313 - protein, 27 aa, Artificial Sequence
  Cyclic GFR-binding peptide
DKGVVTYRHKRLIVNNSSDYYLVSTAS

SEQ ID NO: 96314 - protein, 27 aa, Artificial Sequence
  Cyclic GFR-binding peptide
DKGVVTYYHYKLVKPTRGVKYLISIPS

SEQ ID NO: 96315 - protein, 27 aa, Artificial Sequence
  Cyclic GFR-binding peptide
DKGVVTYRHKRLIVNSSDDYYLVSTAS

SEQ ID NO: 96316 - protein, 27 aa, Artificial Sequence
  Cyclic GFR-binding peptide
DKGVVTYRHKRLVVKDYEDYYLMSTAS

SEQ ID NO: 96317 - protein, 27 aa, Artificial Sequence
  Cyclic GFR-binding peptide
DKGVVTYQYNKLIKPTKGILYLISIAS

SEQ ID NO: 96318 - protein, 27 aa, Artificial Sequence
  Cyclic GFR-binding peptide
DKGVVTYQYNKLVVKDYEDLYLMSIAS

SEQ ID NO: 96319 - protein, 27 aa, Artificial Sequence
  Cyclic GFR-binding peptide
DKGVVTYQYNKLIVNSSDDLYLVSIAS

SEQ ID NO: 96320 - protein, 27 aa, Artificial Sequence
  Cyclic GFR-binding peptide
NAISILYFIGKTPKILKKYRDKGVVTY

SEQ ID NO: 96321 - protein, 29 aa, Artificial Sequence
  Cyclic GFR-binding peptide
SATSVLYYEIVRKKPIFLRKHRDKGVVTY

SEQ ID NO: 96322 - protein, 27 aa, Artificial Sequence
  Cyclic GFR-binding peptide
SPISMLYKDEYDKVVLKYHYDKGVVTY

SEQ ID NO: 96323 - protein, 27 aa, Artificial Sequence
  Cyclic GFR-binding peptide
SAISVLYLDSSNNVILKNYQDKGVVTY

SEQ ID NO: 96324 - protein, 27 aa, Artificial Sequence
  Cyclic GFR-binding peptide
NAISMLYFDEYDKVVLKKYRDKGVVTY

SEQ ID NO: 96325 - protein, 27 aa, Artificial Sequence
  Cyclic GFR-binding peptide
NAISILYFVGRTPKVLKKYRDKGVVTY

SEQ ID NO: 96326 - protein, 27 aa, Artificial Sequence
  Cyclic GFR-binding peptide
SATSMLYYDENEKVVLRKHRDKGVVTY

SEQ ID NO: 96327 - protein, 27 aa, Artificial Sequence
  Cyclic GFR-binding peptide
SPISILYKIGKTPKILKYHYDKGVVTY

SEQ ID NO: 96328 - protein, 29 aa, Artificial Sequence
  Cyclic GFR-binding peptide
NAISVLYFEIVRKKPIFLKKYRDKGVVTY

SEQ ID NO: 96329 - protein, 27 aa, Artificial Sequence
  Cyclic GFR-binding peptide
SPISMLYKDENEKVVLKYHYDKGVVTY

SEQ ID NO: 96330 - protein, 27 aa, Artificial Sequence
  Cyclic GFR-binding peptide
SATSILYYVGRKPKVLRKHRDKGVVTY

SEQ ID NO: 96331 - protein, 27 aa, Artificial Sequence
  Cyclic GFR-binding peptide
SPISILYKVGRKPKVLKYHYDKGVVTY

SEQ ID NO: 96332 - protein, 29 aa, Artificial Sequence
  Cyclic GFR-binding peptide
SAISVLYLEIVRKKPIFLKNYQDKGVVTY

SEQ ID NO: 96333 - protein, 27 aa, Artificial Sequence
  Cyclic GFR-binding peptide
SAISILYLVGRTPKVLKNYQDKGVVTY

SEQ ID NO: 96334 - protein, 27 aa, Artificial Sequence
  Cyclic GFR-binding peptide
NAISMLYFDENEKVVLKKYRDKGVVTY

SEQ ID NO: 96335 - protein, 27 aa, Artificial Sequence
  Cyclic GFR-binding peptide
SAISVLYLDDMGVPTLKNYQDKGVVTY

SEQ ID NO: 96336 - protein, 27 aa, Artificial Sequence
  Cyclic GFR-binding peptide
NAISVLYFDDMGVPTLKKYRDKGVVTY

SEQ ID NO: 96337 - protein, 27 aa, Artificial Sequence
  Cyclic GFR-binding peptide
NAISILYFVGRKPKVLKKYRDKGVVTY

SEQ ID NO: 96338 - protein, 27 aa, Artificial Sequence
  Cyclic GFR-binding peptide
SAISMLYLDENEKVVLKNYQDKGVVTY

SEQ ID NO: 96339 - protein, 27 aa, Artificial Sequence
  Cyclic GFR-binding peptide
SPISVLYKDDSSNVILKYHYDKGVVTY

SEQ ID NO: 96340 - protein, 27 aa, Artificial Sequence
  Cyclic GFR-binding peptide
SAISILYLVGRKPKVLKNYQDKGVVTY

SEQ ID NO: 96341 - protein, 27 aa, Artificial Sequence
  Cyclic GFR-binding peptide
NAISVLYFDSSNNVILKKYRDKGVVTY

SEQ ID NO: 96342 - protein, 27 aa, Artificial Sequence
  Cyclic GFR-binding peptide
NAISVLYFDDSSNVILKKYRDKGVVTY

SEQ ID NO: 96343 - protein, 27 aa, Artificial Sequence
  Cyclic GFR-binding peptide
SATSILYYVGRTPKVLRKHRDKGVVTY

SEQ ID NO: 96344 - protein, 29 aa, Artificial Sequence
  Cyclic GFR-binding peptide
SPISVLYKEIVRKKPIFLKYHYDKGVVTY

SEQ ID NO: 96345 - protein, 27 aa, Artificial Sequence
  Cyclic GFR-binding peptide
SATSILYYIGKTPKILRKHRDKGVVTY

SEQ ID NO: 96346 - protein, 27 aa, Artificial Sequence
  Cyclic GFR-binding peptide
SATSVLYYDDMGVPTLRKHRDKGVVTY

SEQ ID NO: 96347 - protein, 27 aa, Artificial Sequence
  Cyclic GFR-binding peptide
SPISVLYKDDMGVPTLKYHYDKGVVTY

SEQ ID NO: 96348 - protein, 27 aa, Artificial Sequence
  Cyclic GFR-binding peptide
SPISVLYKDSSNNVILKYHYDKGVVTY

SEQ ID NO: 96349 - protein, 27 aa, Artificial Sequence
  Cyclic GFR-binding peptide
SATSVLYYDSSNNVILRKHRDKGVVTY

SEQ ID NO: 96350 - protein, 27 aa, Artificial Sequence
  Cyclic GFR-binding peptide
SPISILYKVGRTPKVLKYHYDKGVVTY

SEQ ID NO: 96351 - protein, 27 aa, Artificial Sequence
  Cyclic GFR-binding peptide
SATSVLYYDDSSNVILRKHRDKGVVTY

SEQ ID NO: 96352 - protein, 27 aa, Artificial Sequence
  Cyclic GFR-binding peptide
SATSMLYYDEYDKVVLRKHRDKGVVTY

SEQ ID NO: 96353 - protein, 27 aa, Artificial Sequence
  Cyclic GFR-binding peptide
SAISILYLIGKTPKILKNYQDKGVVTY

SEQ ID NO: 96354 - protein, 27 aa, Artificial Sequence
  Cyclic GFR-binding peptide
SAISMLYLDEYDKVVLKNYQDKGVVTY

SEQ ID NO: 96355 - protein, 27 aa, Artificial Sequence
  Cyclic GFR-binding peptide
SAISVLYLDDSSNVILKNYQDKGVVTY

SEQ ID NO: 96356 - protein, 27 aa, Artificial Sequence
  Cyclic GFR-binding peptide
DKGVVTYNSLQEVVKDYEDYYLMTLPE

SEQ ID NO: 96357 - protein, 27 aa, Artificial Sequence
  Cyclic GFR-binding peptide
DKGVVTYNSLQEIKPTKGIYYVIPLPE

SEQ ID NO: 96358 - protein, 27 aa, Artificial Sequence
  Cyclic GFR-binding peptide
DKGVVTYNSLQEVKPKRGVYYLITLPE

SEQ ID NO: 96359 - protein, 27 aa, Artificial Sequence
  Cyclic GFR-binding peptide
DKGVVTYNSLQEVKPTRGVYYVIPLPE

SEQ ID NO: 96360 - protein, 27 aa, Artificial Sequence
  Cyclic GFR-binding peptide
DKGVVTYEYQKYIVNSSDDIFLVSIPS

SEQ ID NO: 96361 - protein, 27 aa, Artificial Sequence
  Cyclic GFR-binding peptide
DKGVVTYEYQKYVKPTRGVIFLISIPS

SEQ ID NO: 96362 - protein, 27 aa, Artificial Sequence
  Cyclic GFR-binding peptide
DKGVVTYNSLQEVVKENEDYYLMTLPE

SEQ ID NO: 96363 - protein, 27 aa, Artificial Sequence
  Cyclic GFR-binding peptide
DKGVVTYNSLQEVVNNASDYYLITLPE

SEQ ID NO: 96364 - protein, 27 aa, Artificial Sequence
  Cyclic GFR-binding peptide
DKGVVTYNSLQEVKPKRGVYYVIPLPE

SEQ ID NO: 96365 - protein, 27 aa, Artificial Sequence
  Cyclic GFR-binding peptide
DKGVVTYNSLQEVVNNASDYYVIPLPE

SEQ ID NO: 96366 - protein, 27 aa, Artificial Sequence
  Cyclic GFR-binding peptide
DKGVVTYNSLQEVKPTRGVYYLITLPE

SEQ ID NO: 96367 - protein, 27 aa, Artificial Sequence
  Cyclic GFR-binding peptide
DKGVVTYEYQKYIKPTKGIIFLISIPS

SEQ ID NO: 96368 - protein, 27 aa, Artificial Sequence
  Cyclic GFR-binding peptide
DKGVVTYEYQKYVVNNASDIFLISIPS

SEQ ID NO: 96369 - protein, 27 aa, Artificial Sequence
  Cyclic GFR-binding peptide
DKGVVTYNSLQEIVNSSDDYYVVPLPE

SEQ ID NO: 96370 - protein, 27 aa, Artificial Sequence
  Cyclic GFR-binding peptide
DKGVVTYNSLQEVVKDYEDYYVMPLPE

SEQ ID NO: 96371 - protein, 27 aa, Artificial Sequence
  Cyclic GFR-binding peptide
DKGVVTYEYQKYVVKENEDIFLMSIPS

SEQ ID NO: 96372 - protein, 27 aa, Artificial Sequence
  Cyclic GFR-binding peptide
DKGVVTYNSLQEVVKENEDYYVMPLPE

SEQ ID NO: 96373 - protein, 27 aa, Artificial Sequence
  Cyclic GFR-binding peptide
DKGVVTYEYQKYVVKDYEDIFLMSIPS

SEQ ID NO: 96374 - protein, 27 aa, Artificial Sequence
  Cyclic GFR-binding peptide
DKGVVTYQYNKLVVNNASDLYLISIAS

SEQ ID NO: 96375 - protein, 27 aa, Artificial Sequence
  Cyclic GFR-binding peptide
DKGVVTYNSLQEIKPTKGIYYLITLPE

SEQ ID NO: 96376 - protein, 27 aa, Artificial Sequence
  Cyclic GFR-binding peptide
DKGVVTYEYQKYVKPKRGVIFLISIPS

SEQ ID NO: 96377 - protein, 27 aa, Artificial Sequence
  Cyclic GFR-binding peptide
DKGVVTYRYKKLVVNNASDFYLISIAN

SEQ ID NO: 96378 - protein, 27 aa, Artificial Sequence
  Cyclic GFR-binding peptide
DKGVVTYNSLQEIVNSSDDYYLVTLPE

SEQ ID NO: 96379 - protein, 27 aa, Artificial Sequence
  Cyclic GFR-binding peptide
EPLTMLYYDEYDKVVEQLSNDKGVVTY

SEQ ID NO: 96380 - protein, 27 aa, Artificial Sequence
  Cyclic GFR-binding peptide
EPLPIVYYIGKTPKIEQLSNDKGVVTY

SEQ ID NO: 96381 - protein, 27 aa, Artificial Sequence
  Cyclic GFR-binding peptide
EPLTILYYVGRKPKVEQLSNDKGVVTY

SEQ ID NO: 96382 - protein, 27 aa, Artificial Sequence
  Cyclic GFR-binding peptide
EPLPIVYYVGRTPKVEQLSNDKGVVTY

SEQ ID NO: 96383 - protein, 27 aa, Artificial Sequence
  Cyclic GFR-binding peptide
SPISVLFIDDSSNVIYKQYEDKGVVTY

SEQ ID NO: 96384 - protein, 27 aa, Artificial Sequence
  Cyclic GFR-binding peptide
SPISILFIVGRTPKVYKQYEDKGVVTY

SEQ ID NO: 96385 - protein, 27 aa, Artificial Sequence
  Cyclic GFR-binding peptide
EPLTMLYYDENEKVVEQLSNDKGVVTY

SEQ ID NO: 96386 - protein, 27 aa, Artificial Sequence
  Cyclic GFR-binding peptide
EPLTILYYDSANNVVEQLSNDKGVVTY
